(19) United States
(12) Patent Application Publication
(10) Pub. No.: US 2024/0410020 A1
(43) Pub. Date: Dec. 12, 2024

(54) CANCER DRIVER MUTATION DIAGNOSTICS

(71) Applicant: Asaf HELLMAN, Kibbutz Yotvata (IL)

(72) Inventor: Asaf HELLMAN, Kibbutz Yotvata (IL)

(21) Appl. No.: 18/726,588

(22) PCT Filed: Jan. 3, 2022
(86) PCT No.: PCT/IL2022/050008

§ 371 Date: Jul. 3, 2024

(51) Int. Cl. C12Q 1/6886; G16B 40/00

(52) U.S. Cl. CPC C12Q 1/6886; G16B 40/00; C12Q 2600/154; C12Q 2600/156; C12Q 2600/158

(57) ABSTRACT

Methods for determining a driver gene of a pathological condition are provided. Kits and computer program products for doing same are also provided.

### CROSS-REFERENCE TO RELATED APPLICATIONS

[0001] This application claims the benefit of priority of U.S. Provisional Patent Application No. 63/133,393 filed Jan. 3, 2021, the contents of which are incorporated herein by reference in their entirety.

### FIELD OF INVENTION

[0002] The present invention is in the field of cancer diagnostics.

### BACKGROUND OF THE INVENTION

[0003] While malfunction of five to eight cancer-initiating (driver) genes is assumed to stand at the root of all cancers, alterations of protein-coding sequences have not been accountable for most common malignancies, including human glioblastoma multiforme (GBM). Non-coding regulatory mutations have been suggested to drive these “dark matter” tumors, but limited resolution of available cis-regulatory maps has hindered full examination of this theory. Shadowing and redundancy, frequently observed among cis-residing regulatory elements, further confound detection of causative mutation events. Hence, mapping of cis-regulatory circuits of cancer genes and clarifying their structures, components and interactions, are key to understanding cancer development.

[0004] Transcriptional silencers, also referred to as negative-or anti-enhancers, are DNA sequences that, upon binding of repressors or co-repressors, reduce transcription potential of interacting gene promoters. Silencers are well documented in model genomes, as well as in humans. Silencers and enhancers co-exist in mouse and human cancer gene regions and may interact over short or long (tens to millions of base pairs) distances to co-regulate gene expression. Thorough analyses of silencers and their interactions with enhancers in relation to cancer gene regulation have not yet been reported.

[0005] Among chromatin markers, DNA methylation is unique as a quantitative and sensitive indicator of regulatory activity. It also distinctively discriminates activity levels at site-specific resolution. Methylation of gene promoters often limits accessibility to transcriptional activators, denoting a negative effect on expression. Among non-promoter regulatory sites, however, positive and negative associations of methylation with gene expression are mutually common and may reflect various regulatory mechanisms. One of the mechanisms underlying positive associations is methylation-mediated silencing of repressor genes, which promotes expression of controlled genes. Such secondary effects may be efficiently detected by analyzing inter-genic expression interactions. Another mechanism is coupling of methylation with transcription, which is particularly notable along the transcribed regions of genes (gene bodies). Alternatively, positive correlations that are not due to secondary effects or to the gene body methylation pattern, might reflect primary regulatory activities, e.g., methylation-driven binding of activators to enhancers, or elimination of repressors from silencers. An abundance of methyl-attracting and methyl-avoiding activators and repressors has been described in the human genome, allowing a range of such scenarios. Evidence for direct effects of DNA methylation on transcriptional enhancers have been presented, but the effect on silencers remains unknown.

[0006] The spectrum of possible interactions between enhancers, silencers and various methyl-attracting and methyl-avoiding activators and repressors, hinders the elucidation of gene regulatory circuits. There is a great need to resolve this complexity and uncover gene cis-regulatory structures and the rules governing their normal and malignant activities. Such a discovery will help map driver mutations that are outside of the coding region of genes and open new avenues for treatment of these heretofore poorly defined malignancies.

### SUMMARY OF THE INVENTION

[0007] The present invention provides methods for determining a driver gene of a pathological condition by measuring DNA methylation of non-promoter cis-regulatory elements of potential driver genes and selecting at least one gene whose cis-regulatory methylation produces an abhorrent regulatory effect.

[0008] According to a first aspect, there is provided a method for determining a driver gene of a pathological condition in a subject in need thereof, the method comprising:
[0009] a. receiving measurements of DNA methylation within a plurality of non-promoter cis-regulatory sequences from the subject;
[0010] b. determining from the received measurements a total regulatory effect of non-promoter cis-regulatory sequences upon at least one potential driver gene of the pathological condition; and
[0011] c. selecting the at least one potential driver gene as a driver of the pathological condition in the subject when the total regulatory effect is beyond a predetermined threshold;
[0012] thereby determining a driver of a pathological condition in a subject.

[0013] According to another aspect, there is provided a kit, comprising nucleotide probes that hybridize to non-promoter cis-regulatory sequences of a plurality of genes selected from genes provided in Table 3, Table 4 or Table 6.

[0014] According to another aspect, there is provided a computer program product for determining a driver gene for a pathological condition, comprising a non-transitory computer-readable storage medium having program code embodied thereon, the program code executable by at least one hardware processor to:
[0015] a. receive measurements of DNA methylation within a plurality of non-promoter cis-regulatory sequences;
[0016] b. determine from the received measurements a total regulatory effect of non-promoter cis-regulatory sequences upon at least one potential driver gene of the pathological condition; and
[0017] c. select the at least one potential driver gene as a driver of the pathological condition when the total regulatory effect is beyond a predetermined threshold.

[0018] According to some embodiments, the measurements of DNA methylation are obtained by:
[0019] a. obtaining DNA from a biological sample from the subject;
[0020] b. isolating a plurality of cis-regulatory sequences from the obtained DNA; and
[0021] c. measuring DNA methylation within the plurality of isolated cis-regulatory sequences.

[0022] According to some embodiments, the measuring DNA methylation comprises bisulfite sequencing of the plurality of isolated sequences.

[0023] According to some embodiments, the DNA is selected from genomic DNA (gDNA), mitochondrial DNA (mtDNA), cell-free DNA (cfDNA) and cell-free fetal DNA (cffDNA).

[0024] According to some embodiments, the biological sample is selected from: tissue, blood, lymph, cerebral spinal fluid, urine, breast milk, feces, saliva, tumor tissue and tumor fluid.

[0025] According to some embodiments, the tissue is a tumor biopsy.

[0026] According to some embodiments, the isolating comprises binding probes to the cis-regulatory sequences and isolating the hybridized probes.

[0027] According to some embodiments, the probe binds histone 3 lysine 4 monomethylated (H3K4me1) chromatin.

[0028] According to some embodiments, the probe is a nucleic acid probe that hybridizes to the cis-regulatory sequence.

[0029] According to some embodiments, the probe comprises a non-nucleic acid capture moiety and wherein the isolating comprises capturing the capture moiety to a capturing molecule.

[0030] According to some embodiments, the plurality of non-promoter cis-regulatory sequences are located within 1 megabase upstream or downstream of a transcriptional start site of the at least one potential driver gene.

[0031] According to some embodiments, the plurality of non-promoter cis-regulatory sequences are selected from enhancer and repressor elements.

[0032] According to some embodiments, the plurality of non-promoter cis-regulatory sequences comprises at least one repressor element.

[0033] According to some embodiments, the plurality of non-promoter cis-regulatory sequences comprises at least 4 distinct cis-regulatory sequences.

[0034] According to some embodiments, the regulatory effect of each cis-regulatory sequence is determined independently or is determined in combination with at least one other cis-regulatory sequence.

[0035] According to some embodiments, at least one measured cis-regulatory sequence comprises more than one CpG dinucleotide and wherein a measurement from at least one of the more than one CpG dinucleotides within the cis-regulatory sequence is received.

[0036] According to some embodiments, the determining comprises at least one of:
[0037] a. testing each of the plurality of non-promoter cis-regulatory sequences in an expression assay, wherein the assay measures the regulatory effect of a non-promoter cis-regulatory sequence on expression of a coding sequence and wherein the testing comprises testing methylated and unmethylated copies of each of the plurality of non-promoter cis-regulatory sequences;
[0038] b. comparing the received measurements to a database comprising potential driver genes, methylation status of non-promoter cis-regulatory sequences of the database genes, and regulatory effects of the non-promoter cis regulatory sequences on the database genes; and
[0039] c. applying a machine learning algorithm to the received measurements, wherein the machine learning algorithm has been trained on non-promoter cis-regulatory sequences with known methylation status and known regulatory effect on a driver gene.

[0040] According to some embodiments, a regulatory effect of each non-promoter cis-regulatory sequence is determined separately and summed to produce the total regulatory effect, or wherein total regulatory effect for at least two non-promoter cis-regulatory sequences is determined simultaneously.

[0041] According to some embodiments, the machine learning algorithm has been trained on:
[0042] a. single non-promoter cis-regulatory sequences;
[0043] b. genes and at least one of each gene's non-promoter cis-regulatory sequences;
[0044] c. genes and a plurality of each gene's non-promoter cis-regulatory sequences; or
[0045] d. genes and all of each gene's non-promoter cis-regulatory sequences.

[0046] According to some embodiments, the predetermined threshold is derived from a predetermined standard regulatory effect for the non-promoter cis-regulatory sequences of the at least one potential driver gene, and wherein the predetermined standard regulatory effect is determined in any one of:
[0047] a. cells grown in culture;
[0048] b. cells from a healthy subject; and
[0049] c. cells from a subject suffering from a pathological condition.

[0050] According to some embodiments, measurements of DNA methylation within non-promoter cis-regulatory sequences of a panel of potential driver genes are received.

[0051] According to some embodiments, the method further comprises confirming aberrant expression of the selected driver gene in a sample from the subject.

[0052] According to some embodiments, the pathological condition is cancer.

[0053] According to some embodiments, the cancer is glioblastoma.

[0054] According to some embodiments, a potential driver gene is any one of the driver genes provided in Table 3 or any of the genes provided in Table 6.

[0055] According to some embodiments, total regulatory effect on a panel of driver genes is determined, and the panel is selected from the genes provided in Table 6.

[0056] According to some embodiments, the non-promoter cis-regulatory sequences are selected from sequences located between genomic positions provided in Table 4.

[0057] According to some embodiments, the method of the invention is for diagnosing a pathological condition or increased risk of developing a pathological condition.

[0058] According to some embodiments, the method further comprises administering a medicament that targets the driver, DNA methylation, or DNA methylation machinery.

[0059] According to some embodiments, the plurality of genes is selected from the genes provided in Table 6.

[0060] According to some embodiments, the non-promoter cis-regulatory sequences are located between genomic positions provided in Table 4.

[0061] According to some embodiments, the kit of the invention is for diagnosing and/or prognosing a pathological condition.

[0062] Further embodiments and the full scope of applicability of the present invention will become apparent from the detailed description given hereinafter. However, it should be understood that the detailed description and specific examples, while indicating preferred embodiments of the invention, are given by way of illustration only, since various changes and modifications within the spirit and scope of the invention will become apparent to those skilled in the art from this detailed description.

### BRIEF DESCRIPTION OF THE DRAWINGS

[0063] FIGS. 1A-D: Methylation-centered interrogation of functional gene-associated regulatory networks. (1A) Cartoon showing regulatory chromatin blocks were identified among glioblastoma (GBM) tumors in 2-Mb regions surrounding 125 driver and 52 reference cancer genes. H3K4Mel-marked/H3K27ac-variable chromatin segments encompassing methylation and sequence variations were captured from GBM tumor biopsies using biotinylated RNA probes. (1B-C) The obtained target-enriched libraries, representing the spectrum of GBM regulatory variation, were used for functional annotation of the targeted regions (1B) before or after DNA methylation (1C), or subjected to deep bisulfite sequencing providing methylation-site resolution of gene-associated positive and negative regulatory circuits. (1D) The integration of functional and gene-associated data allows disclosing of cis-regulatory structures.

[0064] FIGS. 2A-G. DNA methylation modifies the transcriptional effect of enhancers and silencers. (2A) Method: Putative regulatory DNA segments were captured from GBM tumors and allowed to drive self-transcription in T98G GBM cells, following complete de-methylation or after in-vitro methylation of the expression vector. Local DNA to RNA ratios, relative to the total DNA to RNA ratio, denotes transcriptional activity score (TAS) of the evaluated DNA segments. (2B) Maps of example genomic regions containing enhancers and silencers. Local activity scores are shown as bars which are positive for enhancers and negative for silencers. H3K27ac bars denote the fraction of the analyzed GBM tumors which displayed this marker of active regulatory chromatin. Bound TFs in a variety of different cell types are given as a reference for the general regulatory activity of the regions (2C) Pie chart of frequencies of regulatory elements that were annotated as functional silencers or enhancers along the targeted gene domains. (2D) Bar charts of regulatory chromatin characteristics of enhancer and silencer loci. Level of transcription factors binding (TFB), factor variety (breadth), and DNase I hyper-sensitivity are shown across a variety of different cell types (ENCOD data). (2E) Effect of DNA methylation on 20-quantiles groups of regulatory elements. Average activity levels of the groups before and after methylation (TAS, Methyl.TAS), as well as the average shift in activity upon methylation (ATAS), are shown. (2F) Pie chart of methylation effects on silencers and enhancers. (2G) Graph of the effect of DNA methylation on TAS level of the regulatory groups shown in panel 2F. The arrow heads indicate TAS level post-methylation. Fractions of sites that switched activities are given below. ** p<1E-20.

[0065] FIGS. 3A-E. Methylation-based deciphering of cis-regulatory networks in bona fide tumor chromatin. (3A) Methylation-based association of regulatory sites with controlled genes. (3B) Top: Examples of functional enhancer and silencer elements that were identified along the SMO driver gene domain through the massively parallel assay presented in FIG. 2A-B. Even-sized windows (about ×20 larger than the median size of regulatory units) are shown. Bottom: Correlations between DNA methylation and SMO expression levels across GBM tumors, for representative methylation sites in the functional elements. (3C) Bar charts showing validation of the predicted effects of SMO regulatory units via manipulations of GBM genomes. Left: Effects of deletions the enhancer labelled ‘A’ in FIG. 3B, or of the silencer ‘D’, versus mock genomic targeting by scrambled targeting guides. Right: Effect of enhancer deletion on the background of a silencer deletion. Bars represent standard deviations based on ≥ four biological replications. (3D) Gene-associated sites reveal networks of homogenous, positive or negative regulatory units that cooperatively control SMO expression variation. (3E) A heatmap diagram showing the correlation between the methylation level of each methylation sites in the SMO domain, and the methylation levels of all other sites in the domain, across 24 GBM tumors. In the tumors with the highest expression of the gene, enhancers were unmethylated and silencer were methylated, and vice versa. * p<0.05; ** p<0.005

[0066] FIGS. 4A-E. Networks of epigenetically-tuned transcriptional silencers and enhancers govern disease driver-gene malfunction. (4A) Development of methylation-based models of gene expression variation. (4B) Example models. Left: methylation versus expression of the sites consisting of the best prediction model of the TNFAIP3 gene. Right: predicted versus observed variation of the TNFAIP3 and the SMO genes across the tumors. SMO model was based on the four sites shown in FIG. 3B. (4C) Verified models of gene-expression variation. Models with up to 2-fold difference between predicted and observed expression levels in at least 20 of the 24 leave-one-out rounds considered success. Verified models of driver genes are presented. Verified models of reference genes are given in FIG. 15. (4D) Pie graph of participation of silencers and enhancers in confirmed cis-regulatory networks. (4E) Table of the numbers of driver-gene per tumors that are affected by sequence or methylation mutations in their coding or regulatory components. SNV: Single Nucleotide Variation; CNV: Copy Number Variation. Mis-regulated genes are genes that display >2-fold expression deviation from normal brain in the given tumor sample. Highlighted cell indicates tumors with at least five (orange) or eight (yellow) mutated driver-genes.

[0067] FIGS. 5A-B. Methylation-expression associations in various cancer types. (5A) Bar chart of percentages of negatively and positively-associated sites that carry H3K4me1 marks, out of all gene-associated sites across various types of cancer. The analysis was performed on public TCGA data. (5B) Bar chart of percentages of gene-associated methylation sites in given types of cancers, which displayed the opposite effects on expression of the associated genes in at least one other cancer type.

[0068] FIGS. 6A-B. Overlapping between targeted gene domains (+/−1 Mb of TSS) and Hi-C-based topological associated domains (TAD). (6A) Bar graph of fractions of genes without TADs following Hi-C analysis of three GBM samples (25 kb resolution), and fractions of gene-associated sites that related to genes without TADs, out of all uncovered gene-associated sites. (6B) Bar graph of fractions of genes with Hi-C-based TADs, for which the targeting criteria provide full coverage of the gene TAD, and fractions of gene-associated sites within Hi-C-based TADs, out of all uncovered gene-associated sites.

[0069] FIG. 7. Overall flow and terminology of the study. (1) Domains of the human genome that have been explored, including one million base pairs to each side of the transcription start sites (TSSs) of 177 driver and reference cancer genes. (2) Within these domains, the regions showing marking of regulatory chromatin are located across the analyzed tumors. (3) Biotinylated RNA Probes (120 bp each) were designed to cover all CpG methylation sites within the identified chromatin regions. (4) Randomly sheared DNA segments of tumor genomic DNAs were allowed to attach to (partially or fully) overlapping RNA probes. (5) Pulling-out the attached segments yielded a library of captured DNA segments of various sizes (mean=224 bp). The distribution of the sizes of the captured segments in an exemplary library (sample #100) is shown. (6) The captured segments were then integrated into gene-reporting vectors, forming a library of reporter assays. (7) Enhancer or silencer functionalities were analyzed in 500 bp (50% overlapping) windows across the studied regions, before or after methylation of the vectors, thus allowing location of significant (FDR q value <0.05) methylation-sensitive and insensitive enhancer & silencer elements and uncovering the general rules of enhancers' and silencers' responses to extreme methylation conditions (8). (9) In parallel, the libraries of captured DNA segments were sequenced with or without bisulfite treatment. (10) The correlation between the methylation levels of each methylation site and the expression of the explored genes over the tumors were analyzed, and the data was used to produce domain-wide correlation maps. (11) Finally, the general roles learned from the simplified experimental assay, together with the actual data collected from the tumors, were used to deduce the actual size of enhancer and silencer regulatory units (average size=834 bp, median=333 bp), and their participation in cis-regulatory networks.

[0070] FIGS. 8A-B. Functional annotation of isolated regulatory elements. (8A) Bar chart of the distribution of silencer and enhancer elements in the targeted gene domains. (8B) Chart of fractions of enhancers and silencers that bind activating, repressing, or both activating and repressing transcription factors across ENCODE cell lines. The list of activators includes: RNAP, GATA2, GATA3, EP300, BCL3, NFATC1, HNF4A, HNF4G, ELK4, ELK1 and IRF1. The repressors list includes: REST, YY1, ZBTB33, SUZ12, EZH2, RCOR1, CTCF, SMC3, RAD21, PAX5 and RUNX3.

[0071] FIGS. 9A-G. Characteristics of methylation-sensitive and methylation-insensitive elements. (9A) Assay: Genomic segments (mean size=224 bp) were captured from a GBM tumor, ligated downstream to minimal promoters and allowed to drive transcription in T98G glioblastoma (GBM) cells. Plasmid DNA and RNA were then extracted from the GBM cells and sequenced. The ratio between DNA and RNA copy numbers, normalized to total DNA and RNA levels, denotes the transcriptional activity of the targeted elements. Example enhancer and silencer elements are shown. DNA and RNA copy numbers are indicated to the left of each segment. (9B) The enhancer and silencer shown in 9A are shown following in-vitro DNA methylation. (9C) Pie chart of the fractions of methylation-sensitive and methylation-insensitive elements. (9D) Bar graph of transcription-factor binding (TFB) scores. (9E) Bar graph of transcription factor (TF) variety (breadth). (9F) Bar graph of DNase I hyper-sensitivity (HS). (9G) Bar graph of average number of CpG methylation sites per element (density). For reference, analyses in 500 bp, 50% overlapping windows across the genome are presented.

[0072] FIG. 10. Eliminated associations due to possible secondary effects. Prohibited association between 1) methylation of a promoter site and expression of a possible activator of the indicated gene A; 2) methylation of a promoter site and expression of a possible repressor of the indicated gene A; 3) methylation of a gene-body site and expression of a possible activator of the indicated gene A; and 4) methylation of a gene-body site and expression of a possible repressor of the indicated gene A.

[0073] FIG. 11. Alignment of positive and negative units with silencers and enhancers. A schematic map showing the five regulatory units of the SMO driver gene. Grey: negative methylation-expression associations. White: positive associations. Functional and methylation analyses of SMO enhancer and silencer units. Transcriptional Activity Score (TAS) analyzed through reporter assay analysis is shown, as is DNA methylation levels of the 24 analyzed GBM tumors. Chromatin marks and bound transcription factors are also shown. Genomic coordination of the knockout regions in the genomic editing experiments (Scc FIGS. 3C and 12A-C).

[0074] FIGS. 12A-C. Compliance between assays. (12A) Pie charts of fractions of functional elements located by the gene-reporting assay, adjacent (≤500 bp) to a GBM-related site. TAS was calculated in 500 bp (50% overlapping) windows. (12B) Pic charts of fractions of GBM-related sites adjacent to a functional element. TAS was calculated in 500 bp (50% overlapping) windows. (12C) Pie chart of the impact of DNA methylation on regulatory activity of GBM-related sites. The analysis performed as in FIG. 2F, but for 4,434 negatively-correlating sites with positive TAS (enhancers) and 3,274 positively-correlating sites with negative TAS (silencers). TAS was calculated for the DNA segments overlapping the given sites.

[0075] FIGS. 13A-B. Methylation-methylation coordination maps of genes with multiple regulatory circuits. (13A-B) Coordination between the methylation levels of (13A) SMO-associated sites and (13B) TNFAIP3-associated sites. Genomic locations of the associated sites are given to the left. Red label with rightward slope: positive methylation versus expression associations. Blue label with leftward slope: negative methylation versus expression associations. The sites producing best prediction models (see FIG. 4A-E) are highlighted. Each square in the matrixes show the methylation versus methylation correlation (R) between two of the associated sites. Genomic maps showing the locations of the associated sites (red and blue bars), of the associated genes (purple), and the site order in the matrix are shown above. Two representative genes are provided.

[0076] FIG. 14. Gene-specific networks. Matrix showing the coordination between the methylation levels of sites associated with the GDF15 (purple) or the IF130 (green) genes are shown. Each square in the matrixes show the methylation versus methylation correlation (R) between two of the associated sites. Blue label with leftward slope: negative methylation versus expression associations. Red label with rightward slope: positive associations. White squares denote no correlation (R2<0.1). A representative gene is shown.

[0077] FIG. 15. Log 2 of the differences between predicted and observed gene expression levels for reference (non-driver) genes with developed models. Box plots describe the distributions of prediction accuracy in 24 independent tests.

[0078] FIG. 16. Prediction qualities of gene-expression models developed by lasso-type analysis. Gene-expression models were developed and validated as described in FIG. 4C but using Lasso regression without limiting the number of participating methylation sites. The distribution of (log 2) predicted-versus-observed expression differences over 24 model-developing repeats using the leave-one-out method are presented for the genes shown in FIG. 4C.

[0079] FIG. 17. Cellular functions of mis-regulated driver genes for which a methylation-based model of expression variation was developed and verified.

### DETAILED DESCRIPTION OF THE INVENTION

[0080] The present invention, in some embodiments, provides methods for determining a driver gene of a pathological condition. The present invention further concerns kits and computer program products for performance of the methods of the invention.

[0081] The invention is based on the surprising finding that DNA methylation induces enhancers and silencers to acquire new activity setpoints within wide ranges of potential regulatory effects, varying between strong transcriptional enhancing to strong silencing. Extensive analysis of methylation-expression associations revealed the organization of domain-wide cis-regulatory networks and highlighted key regulatory sites which provide pivotal contributions to the network outputs. Consideration of these effects through mathematical models of gene expression variations identified prime molecular events underlying cancer-genes mis-regulation in hitherto unexplained tumors. Of the observed gene-malfunctioning events, gene mis-regulation due to epigenetic retuning of networked enhancers and silencers dominated driver-genes mutagenesis, compared with other types of mutation including coding and regulatory sequence alterations.

[0082] Silencers and enhancers are known to cooperate in the regulation of gene transcription, but without thorough understanding of the mechanism and the factors that guide the mode of action of regulatory sites and the cooperation between them, it had been impossible to characterize the effect on normal and abnormal gene activities. To deal with this challenge, a method for detection and annotation of the organization, activities and interactions of silencers and enhancers in cancer tumors was developed.

[0083] By a first aspect, there is provided a method for determining a driver gene of a condition in a subject in need thereof, the method comprising:
[0084] a. receiving measurements of DNA methylation within a plurality of cis-regulatory sequence from the subject;
[0085] b. determining from the received measurements a total regulatory effect of cis-regulatory sequences upon at least one potential driver gene of the pathological condition; and
[0086] c. selecting the at least one potential driver gene as a driver of the pathological condition in the subject when the total regulatory effect is beyond a predetermined threshold;
[0087] thereby determining a driver gene of a pathological condition in a subject.

[0088] In some embodiments, the subject is a mammal. In some embodiment, the subject is a human. In some embodiments, the subject suffers from the condition. In some embodiments, the condition is a pathological condition. In some embodiments, the subject suffers from cancer. In some embodiments, the pathological condition is cancer. In some embodiments, the condition is a pathological condition. In some embodiments, the condition is a condition driven by at least one gene. In some embodiments, the condition is a condition driven by a driver gene.

[0089] In some embodiments, the cancer is a neurological cancer. In some embodiments, the cancer is a brain cancer. In some embodiments, the cancer is glioblastoma. In some embodiments, the cancer is glioblastoma multiforme. In some embodiments, the cancer is driven by a driver gene. In some embodiments, the cancer is driven by at least one driver gene. In some embodiments, the cancer is selected from breast cancer, lung cancer, uterine cancer, head and neck cancer, colon cancer, rectal cancer, bladder cancer, urothelial cancer, kidney cancer, renal cancer, ovarian cancer, and leukemia. In some embodiments, the cancer is selected from an adenocarcinoma, carcinoma, endometrial carcinoma, blastoma, glioblastoma, squamous cell carcinoma, clear cell carcinoma, and serous carcinoma. In some embodiments, the cancer is selected from breast adenocarcinoma, lung adenocarcinoma, lung squamous cell carcinoma, uterine corpus endometrial carcinoma, glioblastoma multiforme, head and neck squamous cell carcinoma, colon and rectal carcinoma, bladder urothelial carcinoma, kidney renal clear cell carcinoma, ovarian serous carcinoma, and acute myeloid leukemia.

[0090] In some embodiments, a driver gene is a gene whose misexpression causes the condition. In some embodiments, a driver gene is a gene whole misexpression sustains the condition. In some embodiments, the driver gene is a gene provided herein below. In some embodiments, the driver gene is a gene provided in a Table. In some embodiments, the driver gene is a driver gene provided in a Table. In some embodiments, the Table is Table 3. In some embodiments, the Table is Table 4. In some embodiments, the Table is Table 6. In some embodiments, the driver gene is a gene provided in FIG. 17. In some embodiments, the driver gene is a gene selected from Vogelstein et al. (Vogelstein, B., et al., (2013, “Cancer Genome Landscapes.”, Science 339, 1546-1558), the pan-cancer or GBM-specific genes listed by Kandoth et al. (Kandoth, C., et al., 2013, “Mutational landscape and significance across 12 major cancer types.”, Nature 502, 333-339.), and 840 genes published by Verhaak et al., (Verhaak et al., 2010, “Integrated genomic analysis identifies clinically relevant subtypes of glioblastoma characterized by abnormalities in PDGFRA, IDH1, EGFR, and NF1.”, Cancer cell 17 (1): 98-110) the contents of which are all hereby incorporated by reference in their entirety.

[0091] In some embodiments, the driver gene is selected from ABL1, CASP8, DNMT1, EGFR, FGFR3, ACVR1B, AKT1, ALK, APC, AR, ARID1A, ARID1B, ARID2, ASXL1, ATM, ATRX, AXIN1, B2M, BAP1, BCL2, BCOR, BRAF, BRCA1, BRCA2, CARD11, CBL, CDC73, CDH1, CDKN2A, CDKN2C, CEBPA, CHEK2, CIC, CREBBP, CSFIR, CTNNB1, CYLD, DAXX, DNMT3A, EP300, ERBB2, EZH2, FBXW7, FGFR2, FLT3, FOXL2, FUBP1, GATA1, GATA2, GATA3, GNA11, GNAQ, GNAS, H3F3A, HNFIA, HRAS, IDH1, IDH2, JAK1, JAK2, JAK3, KDM5C, KDM6A, KIT, KLF4, KMT2C, KMT2D, KRAS, MAP2K1, MAP3K1, MED12, MEN1, MET, MLH1, MPL, MSH2, MSH6, MYD88, NCOR1, NF1, NF2, NFE2L2, NOTCH1, NOTCH2, NPM1, NRAS, PAX5, PBRM1, PDGFRA, PHF6, PIK3CA, PIK3R1, PPP2RIA, PRDM1, PTCH1, PTEN, PTPN11, RB1, RET, RNF43, RPL5, RUNX1, SETBP1, SETD2, SF3B1, SMAD2, SMAD4, SMARCA4, SMARCB1, SMO, SOCS1, SOX9, SPOP, SRSF2, STAG2, STK11, TET2, TNFAIP3, TP53, TRAF7, TSC1, TSHR, U2AF1, VHL, and WT1. In some embodiments, the driver gene is selected from ABL1, AKT1, AKT2, ASXL1, AXIN1, BCOR, BRCA2, CA12, CDKN2A, CHEK2, CHI3L1, CIC, CREBBP, DAXX, DLL3, DSCAML1, EGFR, EN1, ERBB2, FGF17, FGFR2, FGFR3, GATA1, GDF15, GNA11, GNAS, H3F3A, HK3, HRAS, KDM5C, KLF4, KMT2D, MBP, MEN1, MLH1, MYD88, NES, OLIG2, PBRM1, PDGFA, PDGFR1, PRDM1, RELB, SGCD, SMAD2, SMARCB1, SMO, SOCS1, SOX10, SOX9, SRSF2, STK11, TNFAIP3, TRAF7, VHL, VIPR2, AND ZIC2. In some embodiments, the driver gene is selected from ABL1, ACVRIB, AKT1, BCOR, BRCA1, CHEK2, CREBBP, CTNNB1, DAXX, DNMT3A, FBXW7, FGFR2, FUBP1, H3F3A, JAK1, KDM5C, KMT2D, MEN1, MLH1, MSH2, PBRM1, PRDM1, RNF43, SMAD2, SMO, SOCS1, SOX9, SRSF2, TNFAIP3, TRAF7, U2AF1, VHL, AR, CARD11, CASP8, CDKN2C, and MSH6.

[0092] In some embodiments, the driver gene is selected from AKT1, VHL, ABL1, AND BRCA1. In some embodiments, the driver gene is selected from SMAD2, RNF43, AKT1, VHL AND BCOR. In some embodiments, the driver gene is TNFAIP3. In some embodiments, the driver gene is selected from SMAD2 and RNF43. In some embodiments, the driver gene is selected from DAXX, CREBBP, ABL1, AKT1, FUBP1, BRCA1, FGFR2, SMAD2, VHL and CDKN2A. In some embodiments, the driver gene is JAK1. In some embodiments, the driver gene is selected from DAXX, ACVRIB, CREBBP, FUBP1, ABL1, AKT1, FGFR2, JAK1 and GNA11. In some embodiments, the driver gene is selected from CHEK2, DAXX, CREBBP, ABL1, AKT1, BRCA1, and FBXW7. In some embodiments, the driver gene is selected from CHEK2, DAXX, CREBBP, ABL1, AKT1, BRCA1, SMAD2, VHL, RNF43, FGFR2, ACVRIB, AXIN1, FUBP1, and JAK1.

[0093] In some embodiments, the measurements of DNA methylation are obtained from DNA from a biological sample from the subject. In some embodiments, the method comprises obtaining DNA from a biological sample from the subject. In some embodiments, the biological sample is selected from: tissue, blood, lymph, serum, cerebral spinal fluid, urine, breast milk, feces, saliva, tumor tissue and tumor fluid. In some embodiments, the tissue is a tumor biopsy. In some embodiments, the biological sample is blood.

[0094] In some embodiments, the DNA is genomic DNA. In some embodiments, the DNA is mitochondrial DNA. In some embodiments, the DNA is cDNA. In some embodiments, the DNA is cell free DNA (cfDNA). In some embodiments, the DNA is cancer cell free DNA (ccfDNA). In some embodiments, the DNA is cell free fetal DNA (cffDNA).

[0095] In some embodiments, the measurements of DNA methylation are obtained by obtaining DNA from a biological sample from the subject, isolating a plurality of cis-regulatory sequences from the obtained DNA and measuring DNA methylation within the plurality of isolated cis-regulatory sequences. In some embodiments, the method further comprises isolating a plurality of cis-regulatory sequences from the obtained DNA. In some embodiments, the method further comprises measuring DNA methylation within the plurality of isolated cis-regulatory sequences. In some embodiments, measurements of DNA methylation within cis-regulatory sequences of more than one potential driver gene are received. In some embodiments, measurements of DNA methylation within cis-regulatory sequences of a panel of potential driver genes are received. In some embodiments, a panel is at least 2, 3, 4, 5, 10, 15, 20, 25, 30, 35, 40, 45, 50, 60, 70, 75, 80, 90 or 100 potential driver genes.

[0096] In some embodiments, isolating comprises binding probes to the cis-regulatory sequences. In some embodiments, the isolating further comprises isolating the hybridized probes. In some embodiments, the probes are nucleic acid probes. In some embodiments, the probes are DNA probes. In some embodiments, the probes are RNA probes. In some embodiments, the probes are provided in Supplemental Table 3 of Edrei et al., 2021, “Methylation-mediated retuning of the enhancer-to-silencer activity scale of networked regulatory elements guides driver-gene misregulation”, doi.org/10.1101/2021.03.02.433521, herein incorporated by reference in its entirety. In some embodiments, a probe binds a protein indicative of the cis-regulatory sequence. In some embodiments, the probe binds chromatin bearing a protein wherein the chromatin is indicative of the cis-regulatory sequence. In some embodiments, the probe binds the cis-regulatory sequence. In some embodiments, the protein is a DNA-binding protein. In some embodiments, the protein is a histone. In some embodiments, the histone is a modified histone. In some embodiments, the modification is selected from methylation, acetylation, phosphorylation, sumoylation, and ubiquitination. In some embodiments, the histone is a histone variant. In some embodiments, the protein is H3. In some embodiments, the protein is H4. In some embodiments, a lysine of a histone is modified. In some embodiments, the lysine is selected from H3K4, H3K9, H3K14, H3K18, H3K23, H3K27, H3K36, H3K56, H3K79, H4K5, H4K8, H4K12, H4K16, and H4K20. In some embodiments, an arginine of a histone is modified. In some embodiments, the arginine is selected from H3R2, H3R17, and H4R3. In some embodiments, a serine of a histone is modified. In some embodiments, the serine is selected from H3S10, H3S28, and H4S1. In some embodiments, the modified histone is histone 3 lysine 4 monomethylation (H3K4me1). In some embodiments, the modified histone is H3K27 acetylation (H3K27ac). In some embodiments, the probes are nucleic acid probes. In some embodiments, the probes are DNA probes. In some embodiments, the probe binds the cis-regulatory sequence. In some embodiments, the probe binds the cis-regulatory sequence. In some embodiments, the probe is specific to the cis-regulatory sequence.

[0097] In some embodiments, the probe comprises a capture moiety. As used herein, a capture moiety is a molecule that can be isolated by binding to a capturing molecule. For example, the oligonucleotide can be conjugated to biotin (capture moiety) and then captured by a streptavidin column (the capturing molecule). Any capturing system may be used so that the polynucleotide can be isolated. In some embodiments, the capture moiety is a non-nucleic acid capture moiety. In some instances, the capture moiety comprises biotin, such that the nucleic acid molecule is biotinylated. In some instances, the capture moiety may comprise a capture sequence (e.g., nucleic acid sequence). In some instances, a sequence of the probe molecule may function as a capture sequence. In other instances, the capture moiety may comprise another nucleic acid molecule comprising a capture sequence. In some instances, the capture moiety may comprise a magnetic particle capable of capture by application of a magnetic field. In some instances, the capture moiety may comprise a charged particle capable of capture by application of an electric field. In some instances, the capture moiety may comprise one or more other mechanisms configured for, or capable of, capture by a capturing molecule. In some embodiments, the capture moiety is non-naturally occurring. In some embodiments, a probe comprising a capture moiety is non-naturally occurring. In some embodiments, the probe is a nucleic acid probe, and the capture moiety is a moiety not associated with nucleic acid molecules in nature. In some embodiments, the isolating comprises capturing the capture moiety to a capturing molecule. In some embodiments, the capturing molecule comprises avidin. In some embodiments, avidin is streptavidin.

[0098] In some embodiments, a plurality of cis-regulatory sequences is at least 2 cis-regulatory sequences. In some embodiments, a plurality of cis-regulatory sequences is at least 2, 3, 4, 5, 6, 7, 8, 9, or 10 cis-regulatory sequences. Each possibility represents a separate embodiment of the invention. In some embodiments, the plurality of cis-regulatory sequences regulates at least one potential driver gene. In some embodiments, the measurements are for at least two regulatory sequences that regulate a single gene. It will be understood by a skilled artisan that in order to determine a total regulatory effect for a gene there must be at least two regulatory sequences whose impact on the gene can be combined to generate the total effect. In some embodiments, the plurality of cis-regulatory sequences comprises at least 3 distinct cis-regulatory sequences. In some embodiments, the plurality of cis-regulatory sequences comprises at least 4 distinct cis-regulatory sequences.

[0099] In some embodiments, the cis-regulatory sequence comprises Histone 3 lysine 4 (H3K4) methylation. In some embodiments, methylation is mono-methylation. In some embodiments, the cis-regulatory sequence is marked by H3K4 methylation. In some embodiments, the cis-regulatory sequence is associated with histones comprising H3K4 methylation. In some embodiments, the cis-regulatory sequence comprises Histone 3 lysine 27 acetylation (H3K27ac). In some embodiments, the cis-regulatory sequence has variable H3K27 acetylation.

[0100] In some embodiments, the cis-regulatory sequence is not a promoter. In some embodiments, the cis-regulatory sequence is not in a promoter region. As used herein, the term “promoter” refers to the DNA sequence which is bound by the core transcriptional machinery to initiate transcription. In some embodiments, a promoter comprises the 100 bases upstream of the transcriptional start site (TSS) of the gene (−100 to −1 relative to the TSS). In some embodiments, a promoter comprises the 200 bases upstream of the transcriptional start site (TSS) of the gene (−200 to −1 relative to the TSS). In some embodiments, a promoter comprises the 300 bases upstream of the transcriptional start site (TSS) of the gene (−300 to −1 relative to the TSS). In some embodiments, a promoter comprises the 400 bases upstream of the transcriptional start site (TSS) of the gene (−400 to −1 relative to the TSS). In some embodiments, a promoter comprises the 500 bases upstream of the transcriptional start site (TSS) of the gene (−500 to −1 relative to the TSS). In some embodiments, a promoter comprises the 1000 bases upstream of the transcriptional start site (TSS) of the gene (−1000 to −1 relative to the TSS). In some embodiments, a promoter comprises the 1000 bases downstream of the transcriptional start site (TSS) of the gene (1000 to 0 relative to the TSS). In some embodiments, a promoter comprises the 500 bases downstream of the transcriptional start site (TSS) of the gene (500 to 0 relative to the TSS). In some embodiments, a promoter comprises the 400 bases downstream of the transcriptional start site (TSS) of the gene (400 to 0 relative to the TSS). In some embodiments, a promoter comprises the 300 bases downstream of the transcriptional start site (TSS) of the gene (300 to 0 relative to the TSS). In some embodiments, a promoter comprises the 200 bases downstream of the transcriptional start site (TSS) of the gene (200 to 0 relative to the TSS). In some embodiments, a promoter comprises the 100 bases downstream of the transcriptional start site (TSS) of the gene (100 to 0 relative to the TSS). In some embodiments, the promoter is the minimal promoter. In some embodiments, the promoter does not comprise enhancer elements. In some embodiments, the promoter does not comprise silencer elements.

[0101] In some embodiments, the cis-regulatory sequence is located within 1 megabase upstream or downstream of a transcriptional start site of a gene regulated by the cis-regulatory sequence. In some embodiments, a gene regulated by the cis-regulatory sequence is a potential driver gene. In some embodiments, the cis-regulatory sequence is not within 2 kb of a transcriptional start site of a gene regulated by the cis-regulatory sequence. In some embodiments, the cis-regulatory sequence is not within 2 kb up stream of a transcriptional start site of a gene regulated by the cis-regulatory sequence. In some embodiments, the cis-regulatory sequence is not within 1 kb up stream of a transcriptional start site of a gene regulated by the cis-regulatory sequence. In some embodiments, the cis-regulatory sequence is not within 50, 100, 150, 200, 250, 300, 400, 500, 600, 700, 750, 800, 900, 1000, 1250, 1500 or 2000 bases up stream of a transcriptional start site of a gene regulated by the cis-regulatory sequence. Each possibility represents a separate embodiment of the invention. In some embodiments, the promoter is defined by the above enumerated distances from the transcriptional start site.

[0102] In some embodiments, the cis-regulatory sequence is an enhancer element. In some embodiments, the cis-regulatory sequence is a repressor element. In some embodiments, the plurality of cis-regulatory sequences is selected from enhancer and repressor elements. In some embodiments, the plurality of cis-regulatory sequences comprises at least one repressor element. In some embodiments, the plurality of cis-regulatory sequences comprises at least one enhancer element. In some embodiments, a cis-regulatory sequence comprises at least one CpG dinucleotide. In some embodiments, a cis-regulatory sequence comprises a plurality of CpG dinucleotides. In some embodiments, a cis-regulatory sequence comprises more than one CpG dinucleotide. In some embodiments, the cis-regulatory sequences are located between genomic positions provided in Table 3. In some embodiments, the cis-regulatory sequences are located in the genomic intervals provided in Table 3. In some embodiments, the cis-regulatory sequences are located between genomic positions provided in Table 4. In some embodiments, the cis-regulatory sequences are located in the genomic intervals provided in Table 4.

[0103] In some embodiments, an activator is selected from RNAP, GATA2, GATA3, EP300, BCL3, NFATC1, HNF4A, HNF4G, ELK4, ELK1 and IRF1. In some embodiments, a repressor is selected from REST, YY1, ZBTB33, SUZ12, EZH2, RCOR1, CTCF, SMC3, RAD21, PAX5 and RUNX3

[0104] In some embodiments, the regulatory effect of a cis-regulatory sequence is determined independently. In some embodiments, the regulatory effects of at least two cis-regulatory sequences are determined separately. In some embodiments, the regulatory effect of a cis-regulatory sequence is determined in combination with at least one other cis-regulatory sequence. In some embodiments, the regulatory effect of each cis-regulatory sequence is determined independently. In some embodiments, the regulatory effect of each cis-regulatory sequence is determined in combination with at least one other cis-regulatory sequence. In some embodiments, the regulatory effect of a plurality of cis-regulatory sequences are determined together. In some embodiments, the measured regulatory effects are summed to produce the total regulatory effect. In some embodiments, the regulatory effects of at least two cis-regulatory sequences are determined separately and summed to produce the total regulatory effect. In some embodiments, the regulatory effect of the plurality of cis-regulatory sequences are each determined separately and summed to produce the total regulatory effect. In some embodiments, the total regulatory effect for at least two cis-regulatory sequences is determined simultaneously. In some embodiments, the total regulatory effect for at least two cis-regulatory sequences is determined in combination.

[0105] In some embodiments, at least one measured cis-regulatory sequence comprises more than one CpG dinucleotide. In some embodiments, a measurement from at least one CpG dinucleotide within the cis-regulatory sequence is received. In some embodiments, a measurement from at least one of the plurality or more than one CpG dinucleotide within the cis-regulatory sequence is received. In some embodiments, the methylation status of the CpG dinucleotide is measured. In some embodiments, methylation of the cystine in the CpG dinucleotide is measured.

[0106] In some embodiments, the determining comprises testing each of the plurality of cis regulatory sequences. In some embodiments, the testing produces a measure of a regulatory effect of the sequences. In some embodiments, the measure is a magnitude. In some embodiments, a positive magnitude is an enhancing effect. In some embodiments, a negative magnitude is a silencing effect. In some embodiments, effect is a transcriptional effect. In some embodiments, the test is an expression assay. In some embodiments, the test measures expression. In some embodiments, expression is expression of a coding sequence. In some embodiments, the assay measures regulatory effect of a cis-regulatory sequence. In some embodiments, effect is effect on expression of a coding sequence. In some embodiments, expression is transcription. In some embodiments, a coding sequence is a control coding sequence. In some embodiments, a coding sequence is an irrelevant coding sequence. In some embodiments, a coding sequence is a detectable coding sequence. In some embodiments, a coding sequence is a test coding sequence. In some embodiments, the coding sequence is not expressed in a cell used for the assay. In some embodiments, the coding sequence is not expressed in a cell used for the testing. In some embodiments, the testing comprises testing methylated and unmethylated copies of the plurality of cis-regulatory sequences. In some embodiments, copies of the plurality are copies of each of the plurality of cis-regulatory sequences. In some embodiments, the tested regulatory effect is used to produce the total regulatory effect. In some embodiments, the tested regulatory effect is summed to produce the total regulatory effect.

[0107] In some embodiments, determining comprises comparing the received measurements to a database. In some embodiments, the database comprises potential driver genes, methylation status of at least one cis-regulatory sequences of a database gene, and regulatory effects of the cis-regulatory sequence on the database gene. In some embodiments, the database comprises potential driver genes, methylation status of a plurality of cis-regulatory sequences of a database gene, and regulatory effects of the plurality of cis-regulatory sequence on the database gene. In some embodiments, the database comprises potential driver genes, methylation status of cis-regulatory sequences of a database gene, and regulatory effects of the cis-regulatory sequences on the database gene. In some embodiments, the database comprises the regulatory effect of individual cis-regulatory sequences. In some embodiments, the database comprises a combined regulatory effect of a plurality or more than one cis-regulatory sequence.

[0108] In some embodiments, determining comprises applying a machine learning algorithm to the received measurements. In some embodiments, the machine learning algorithm is or has been trained on cis-regulatory sequences with known methylation status. In some embodiments, the machine learning algorithm is or has been trained on cis-regulatory sequences with known regulatory effect on a driver gene. In some embodiments, the machine learning algorithm is or has been trained on cis-regulatory sequences with known methylation status and known regulatory effect on a driver gene.

[0109] Machine learning is well known in the art, and by performing the methods of the invention on cis-regulatory sequences with known methylation status and known regulatory effect the machine learning algorithm can learn to recognize total regulatory effect based on methylation status. In some embodiments, at least 1, 2, 3, 4, 5, 6, 7, 8, 9, 10, 15, or 20 cis-regulatory sequences are analyzed before the algorithm can identify the total regulatory effect on a given gene.

[0110] In some embodiments, the machine learning algorithm has been trained on single cis-regulatory sequences. In some embodiments, the machine learning algorithm has been trained on genes and at least one of each gene's cis-regulatory sequences. In some embodiments, the machine learning algorithm has been trained on genes and a plurality of each gene's cis-regulatory sequences. In some embodiments, the machine learning algorithm has been trained on genes and all of each gene's cis-regulatory sequences.

[0111] In some embodiments, the predetermined threshold is derived from a predetermined standard regulatory effect for the cis-regulatory sequences of the at least one potential driver gene. In some embodiments, the predetermined standard regulatory effect is determined in cells grown in culture. In some embodiments, the predetermined standard regulatory effect is determined in cells from a healthy subject. In some embodiments, the predetermined standard regulatory effect is determined in cells from a subject suffering from a pathological condition.

[0112] In some embodiments, the method further comprises confirming aberrant expression of the selected driver gene in a sample. In some embodiments, the sample is from the subject. In some embodiments, the method further comprises measured expression of the selected driver gene in a sample. In some embodiments, the method further comprises administering a therapeutic agent that targets the selected driver gene. In some embodiments, the method further comprises administering a therapeutic agent that treats the selected driver gene. In some embodiments, the method further comprises administering a therapeutic agent that targets DNA methylation. In some embodiments, the method further comprises administering a therapeutic agent that targets DNA methylation machinery. In some embodiments, the targeted DNA methylation is methylation in cis-regulatory sequences. In some embodiments, the targeted DNA methylation is methylation in cis-regulatory sequences of a target driver gene.

[0113] In some embodiments, a potential driver gene is selected from the genes provided in Table 3. In some embodiments, a potential driver gene is a gene selected from the genes provided in Table 3. In some embodiments, a potential driver gene is any one of the genes provided in Table 3. In some embodiments, a potential driver gene is selected from the driver genes provided in Table 3. In some embodiments, a potential driver gene is a gene selected from the driver genes provided in Table 3. In some embodiments, a potential driver gene is any one of the driver genes provided in Table 3. In some embodiments, a potential driver gene is selected from Table 4. In some embodiments, a potential driver gene is a gene selected from Table 4. In some embodiments, a potential driver gene is any one of the genes provided in Table 4. In some embodiments, a potential driver gene is selected from Table 5. In some embodiments, a potential driver gene is a gene selected from Table 5. In some embodiments, a potential driver gene is any one of the genes provided in Table 5. In some embodiments, a potential driver gene is selected from a driver gene in Table 5. In some embodiments, a potential driver gene is a driver gene selected from Table 5. In some embodiments, a potential driver gene is any one of the driver genes provided in Table 5. In some embodiments, the condition is glioblastoma, and a potential driver gene is selected from a gene in Tables 3, 4 and 5. In some embodiments, the condition is glioblastoma, and a potential driver gene is selected from a driver gene in Tables 3 and 5. In some embodiments, the panel comprises at least 2, 3, 4, 5, 6, 7, 8, 9, 10, 15, 20, 25, 30, 35, 40, 45, 50, 55, 60, 65, 70, 75, 80, 85, 90, 95, 100, 105, 110, 115, 120, or 125 driver genes. Each possibility represents a separate embodiment of the invention. In some embodiments, the panel comprises at most, 20, 25, 30, 40, 50, 60, 70, 75, 80, 90, 100, 110, 120, 130, 140, 150, 160, 170, 180, 190, 200, 250, 300, 350, 400, 450, 500, 550, 600, 650, 700, 750, 800, 850, 900, 950, 1000, 2000, 3000, 4000, 5000 or 10000 driver genes. Each possibility represents a separate embodiment of the invention.

[0114] In some embodiments, total regulatory effect on a panel of driver genes are determined. In some embodiments, the total regulatory effect is determined for each driver gene of the panel. In some embodiments, the panel is selected from the genes provided in Table 3. In some embodiments, the panel is selected from the genes provided in Table 4. In some embodiments, the panel is selected from the genes provided in Table 5. In some embodiments, the panel is selected from the driver genes provided in Table 3. In some embodiments, the panel is selected from the driver genes provided in Table 4. In some embodiments, the panel is selected from the driver genes provided in Table 5. In some embodiments, the panel comprises the genes provided in Table 5. In some embodiments, the panel comprises the driver genes provided in Table 3. In some embodiments, the panel comprises the driver genes provided in Table 4. In some embodiments, the panel consists of the driver genes provided in Table 5. In some embodiments, the panel consists of the driver genes provided in Table 4. In some embodiments, the panel consists of the driver genes provided in Table 3.

[0115] In some embodiments, the method of the invention is for use in diagnosing a pathological condition. In some embodiments, the method of the invention is for use in diagnosing increased risk of developing a pathological condition. In some embodiments, the method of the invention is for use in determining increased risk of developing a pathological condition.

[0116] By another aspect, there is provided a kit comprising probes that hybridize to cis-regulatory sequences of a plurality of target genes.

[0117] In some embodiments, the probes are protein probes. In some embodiments, the probes a nucleic acid probes. In some embodiments, the probes are nucleotide probes. In some embodiments, the nucleic acid is DNA. In some embodiments, the nucleic acid is RNA. In some embodiments, the probes are at least 10, 12, 15, 17, 20, 25, or 30 nucleotides in length. Each possibility represents a separate embodiment of the invention. In some embodiments, the probe comprises a capture moiety.

[0118] In some embodiments, the kit comprises at least 2, 3, 4, 5, 6, 7, 8, 9, 10, 15, 20, 25, 30, 35, 40, 45, 50, 55, 60, 65, 70, 75, 80, 85, 90, 95, 100, 105, 110, 115, 120, 125, 150, 200, 250, 300, 350, 375, 400, 450, 500, 600, 700, 750, 800, 900 or 1000 probes. Each possibility represents a separate embodiment of the invention. In some embodiments, the kit comprises at most, 20, 25, 30, 40, 50, 60, 70, 75, 80, 90, 100, 110, 120, 130, 140, 150, 160, 170, 180, 190, 200, 250, 300, 350, 400, 450, 500, 550, 600, 650, 700, 750, 800, 850, 900, 950, 1000, 2000, 3000, 4000, 5000, 10000, 15000, 20000, 25000, 30000, 35000, 38000, 38077, 38100, 39000, 40000, 45000, 50000, 60000, 70000, 80000, 90000, or 100000 probes. Each possibility represents a separate embodiment of the invention.

[0119] In some embodiments, the probes are selected from the probe sequences provided in SEQ ID NO: 28-38077. In some embodiments, the probes comprise sequences from SEQ ID NO: 28-38077. In some embodiments, the probes comprise SEQ ID NO: 28-38077. In some embodiments, the probes consist of SEQ ID NO: 28-38077.

[0120] In some embodiments, the target gene is a potential driver gene. In some embodiments, the target gene is a gene provided hereinabove. In some embodiments, the cis-regulatory sequences are sequences provided hereinabove. In some embodiments, the kit further comprises a capturing molecule.

[0121] In some embodiments, the kit of the invention is for use in diagnosing a pathological condition. In some embodiments, the kit of the invention is for use is prognosing a pathological condition.

[0122] By another aspect, there is provided a computer program product for determining a driver gene for a pathological condition, comprising a non-transitory computer-readable storage medium having program code embodied thereon, the program code executable by at least one hardware processor to:
[0123] a. receive measurements of DNA methylation within a plurality of cis-regulatory sequences;
[0124] b. determine from the received measurements a total regulatory effect of cis-regulatory sequences upon at least one potential driver gene of the pathological condition; and
[0125] c. select the at least one potential driver gene as a driver of the pathological condition when the total regulatory effect is beyond a predetermined threshold.

[0126] In some embodiments, the computer program product is for performing a method of the invention. In some embodiments, the computer program product is for determining a driver gene of a pathological condition.

[0127] The computer readable storage medium can be a tangible device that can retain and store instructions for use by an instruction execution device. The computer readable storage medium may be, for example, but is not limited to, an electronic storage device, a magnetic storage device, an optical storage device, an electromagnetic storage device, a semiconductor storage device, or any suitable combination of the foregoing. A non-exhaustive list of more specific examples of the computer readable storage medium includes the following: a portable computer diskette, a hard disk, a random access memory (RAM), a read-only memory (ROM), an erasable programmable read-only memory (EPROM or Flash memory), a static random access memory (SRAM), a portable compact disc read-only memory (CD-ROM), a digital versatile disk (DVD), a memory stick, a floppy disk, a mechanically encoded device such as punch-cards or raised structures in a groove having instructions recorded thereon, and any suitable combination of the foregoing. A computer readable storage medium, as used herein, is not to be construed as being transitory signals per se, such as radio waves or other freely propagating electromagnetic waves, electromagnetic waves propagating through a waveguide or other transmission media (e.g., light pulses passing through a fiber-optic cable), or electrical signals transmitted through a wire.

[0128] Computer readable program instructions described herein can be downloaded to respective computing/processing devices from a computer readable storage medium or to an external computer or external storage device via a network, for example, the Internet, a local area network, a wide area network and/or a wireless network. The network may comprise copper transmission cables, optical transmission fibers, wireless transmission, routers, firewalls, switches, gateway computers and/or edge servers. A network adapter card or network interface in each computing/processing device receives computer readable program instructions from the network and forwards the computer readable program instructions for storage in a computer readable storage medium within the respective computing/processing device.

[0129] Computer readable program instructions for carrying out operations of the present invention may be assembler instructions, instruction-set-architecture (ISA) instructions, machine instructions, machine dependent instructions, microcode, firmware instructions, state-setting data, or either source code or object code written in any combination of one or more programming languages, including an object oriented programming language such as Java, Smalltalk, C++ or the like, and conventional procedural programming languages, such as the “C” programming language or similar programming languages. The computer readable program instructions may execute entirely on the user's computer, partly on the user's computer, as a stand-alone software package, partly on the user's computer and partly on a remote computer or entirely on the remote computer or server. In the latter scenario, the remote computer may be connected to the user's computer through any type of network, including a local area network (LAN) or a wide area network (WAN), or the connection may be made to an external computer (for example, through the Internet using an Internet Service Provider). In some embodiments, electronic circuitry including, for example, programmable logic circuitry, field-programmable gate arrays (FPGA), or programmable logic arrays (PLA) may execute the computer readable program instructions by utilizing state information of the computer readable program instructions to personalize the electronic circuitry, in order to perform aspects of the present invention.

[0130] These computer readable program instructions may be provided to a processor of a general-purpose computer, special purpose computer, or other programmable data processing apparatus to produce a machine, such that the instructions, which execute via the processor of the computer or other programmable data processing apparatus, create means for implementing the functions/acts specified in the flowchart and/or block diagram block or blocks. These computer readable program instructions may also be stored in a computer readable storage medium that can direct a computer, a programmable data processing apparatus, and/or other devices to function in a particular manner, such that the computer readable storage medium having instructions stored therein comprises an article of manufacture including instructions which implement aspects of the function/act specified in the flowchart and/or block diagram block or blocks.

[0131] As used herein, the term “about” when combined with a value refers to plus and minus 10% of the reference value. For example, a length of about 1000 nanometers (nm) refers to a length of 1000 nm+−100 nm.

[0132] It is noted that as used herein and in the appended claims, the singular forms “a,” “an,” and “the” include plural referents unless the context clearly dictates otherwise. Thus, for example, reference to “a polynucleotide” includes a plurality of such polynucleotides and reference to “the polypeptide” includes reference to one or more polypeptides and equivalents thereof known to those skilled in the art, and so forth. It is further noted that the claims may be drafted to exclude any optional element. As such, this statement is intended to serve as antecedent basis for use of such exclusive terminology as “solely,” “only” and the like in connection with the recitation of claim elements, or use of a “negative” limitation.

[0133] In those instances where a convention analogous to “at least one of A, B, and C, etc.” is used, in general such a construction is intended in the sense one having skill in the art would understand the convention (e.g., “a system having at least one of A, B, and C” would include but not be limited to systems that have A alone, B alone, C alone, A and B together, A and C together, B and C together, and/or A, B, and C together, etc.). It will be further understood by those within the art that virtually any disjunctive word and/or phrase presenting two or more alternative terms, whether in the description, claims, or drawings, should be understood to contemplate the possibilities of including one of the terms, either of the terms, or both terms. For example, the phrase “A or B” will be understood to include the possibilities of “A” or “B” or “A and B.”

[0134] It is appreciated that certain features of the invention, which are, for clarity, described in the context of separate embodiments, may also be provided in combination in a single embodiment. Conversely, various features of the invention, which are, for brevity, described in the context of a single embodiment, may also be provided separately or in any suitable sub-combination. All combinations of the embodiments pertaining to the invention are specifically embraced by the present invention and are disclosed herein just as if each and every combination was individually and explicitly disclosed. In addition, all sub-combinations of the various embodiments and elements thereof are also specifically embraced by the present invention and are disclosed herein just as if each and every such sub-combination was individually and explicitly disclosed herein.

[0135] Additional objects, advantages, and novel features of the present invention will become apparent to one ordinarily skilled in the art upon examination of the following examples, which are not intended to be limiting. Additionally, each of the various embodiments and aspects of the present invention as delineated hereinabove and as claimed in the claims section below finds experimental support in the following examples.

[0136] Various embodiments and aspects of the present invention as delineated hereinabove and as claimed in the claims section below find experimental support in the following examples.

### EXAMPLES

[0137] Generally, the nomenclature used herein and the laboratory procedures utilized in the present invention include molecular, biochemical, microbiological and recombinant DNA techniques. Such techniques are thoroughly explained in the literature. See, for example, “Molecular Cloning: A laboratory Manual” Sambrook et al., (1989); “Current Protocols in Molecular Biology” Volumes I-III Ausubel, R. M., ed. (1994); Ausubel et al., “Current Protocols in Molecular Biology”, John Wiley and Sons, Baltimore, Maryland (1989); Perbal, “A Practical Guide to Molecular Cloning”, John Wiley & Sons, New York (1988); Watson et al., “Recombinant DNA”, Scientific American Books, New York; Birren et al. (eds) “Genome Analysis: A Laboratory Manual Series”, Vols. 1-4, Cold Spring Harbor Laboratory Press, New York (1998); methodologies as set forth in U.S. Pat. Nos. 4,666,828; 4,683,202; 4,801,531; 5,192,659 and 5,272,057; “Cell Biology: A Laboratory Handbook”, Volumes I-III Cellis, J. E., ed. (1994); “Culture of Animal Cells-A Manual of Basic Technique” by Freshney, Wiley-Liss, N. Y. (1994), Third Edition; “Current Protocols in Immunology” Volumes I-III Coligan J. E., ed. (1994); Stites et al. (eds), “Basic and Clinical Immunology” (8th Edition), Appleton & Lange, Norwalk, CT (1994); Mishell and Shiigi (eds), “Strategies for Protein Purification and Characterization-A Laboratory Course Manual” CSHL Press (1996); all of which are incorporated by reference. Other general references are provided throughout this document.

### Materials and Methods

### Overall Research-Flow and Terminology

[0138] Herein, the term “gene domains” refers to 2 MB genomic windows centered at the Transcription Start Sites (TSSs) of the targeted genes. Within these windows, blocks of chromatin were located which showed variable levels of regulatory activity across the studied GBM tumors. RNA probes (120 bp each) were designed to capture the CpG methylation sites within these chromatin blocks. Genomic tumor DNAs were arbitrarily sheared using a sonication device into collections of DNA fragments of various sizes. Throughout, these fragments are referred to as “DNA Segments”. These DNA segments were then allowed to attach the RNA probes, which fully or partially overlapped their span. The resulting collection of Captured DNA Segments (median size=224 bp) was integrated into gene-reporting vectors or underwent regular or methylation sequencing.

[0139] Following, the regulatory outputs of contiguous segments, captured by contiguous probes, were analyzed, and Transcriptional Activity Scores (TASs) were calculated in 500 bp (50% overlapping) windows along the targeted regions. This process revealed functional “regulatory elements” (i.e., methylation-sensitive and methylation-insensitive enhancers and silencers), of them 26,152 showed FDR q value <0.05. The above experiments were used to elucidate the basic roles of methylation effects on enhancers and silencers under simplified genomic arrangements and extreme methylation or unmethylation conditions.

[0140] Based on this understanding, actual tumor chromatins were studied. It was found that clusters of gene-associated methylation sites formed defined “regulatory units” of tens to thousands (average 834, median 333) bp-long spans, containing homogenous (positive or negative), contiguous gene-associated methylation sites. Each of these units mediate positive or negative input to the transcription of a particular gene (Table 5). Note that these regulatory units are learned features of the GBM genome, as no pre-assumptions regarding the size or organization of the units were applied.

### GBM Samples and Data

[0141] Tumor biopsies and associated clinical data were collected and encoded at the DKFZ Institute, Heidelberg, Germany. Whole-genome and whole-exome, H3K4me1 and H3K27ac chromatin immunoprecipitation (GSE121719) and RNA sequencing of the GBM biopsies and the normal brain samples (GSE121720), and the analyses of coding DNA mutation, gene expression and DNA copy number variation, were performed at the DKFZ. Encoded de-personalized DNA samples and data were used as input materials for target enrichment of gene regulatory regions and associated DNA methylation and non-coding DNA mutation analyses, which were performed at the Hebrew University, Jerusalem, Israel (HUJI).

### Genes

[0142] Genes analyzed in the study included the pan-cancer driver genes listed by Vogelstein et al. (Vogelstein, B., et al., 2013b, “Cancer Genome Landscapes.”, Science 339, 1546-1558, herein incorporated by reference in its entirety) and the pan-cancer or GBM-specific driver genes listed by Kandoth et al. (Kandoth, C., et al., (2013)., “Mutational landscape and significance across 12 major cancer types.” Nature 502, 333-339, herein incorporated by reference in its entirety), but excluding the HIST1, H3B and CRLF2 genes due to missing expression data, and the AMERI gene for which probe design failed. Cancer type-specific genes (n=23) were selected from a published list of 840 genes (Verhaak et al., 2010, “Integrated genomic analysis identifies clinically relevant subtypes of glioblastoma characterized by abnormalities in PDGFRA, IDH1, EGFR, and NF1”, Cancer cell 17 (1): 98-110, herein incorporated by reference in its entirety). Non-driver variable genes (n=22) were defined as those showing top expression variation among the 70 analyzed GBM samples for which there was found at least two correlative sites in the TCGA-GBM dataset. The genomic coordinates for gene features from the hg19 refGene table of the UCSC Genome Browser were used.

### Public Databases

[0143] The Cancer Genome Atlas (TCGA): Gene expression (RNAseqV2 normalized RSEM) and DNA methylation data (HumanMethylation450) were download in May 2019 using TCGAbiolinks for the following cancer types: BRCA (778 genomes), CESC, (304), COAD (306), ESCA (161), GBM (50), KICH (65), KIRC (320), KIRP (273), LIHC (371), LUAD (463), PAAD (177), SKCM (103), THYM (119).

[0144] NIH Roadmap Epigenomic Project: H3K4me1 broad peaks of corresponded TCGA tumor types and DNasel cell specific narrow peaks of normal brain (E081 and E082).

[0145] Encyclopedia of DNA Elements (ENCODE): DNasel hypersensitivity peak clusters (wgEncodeRegDnaseClusteredV3.bed.gz) and transcription factor ChIP-seq clusters (wgEncodeRegTfbsClusteredWithCellsV3.bed.gz) and DNase brain tumors data (Gliobla and SK-N-SH). The ENCODE transcription factor binding (TFB) scores presented in FIG. 2 represent the peaks of transcription factor occupancy from uniform processing of ENCODE ChIP-seq data by the ENCODE Analysis Working Group. Scores were assigned to peaks by multiplying the input signal values by a normalization factor calculated as the ratio of the maximum score value (1000) to the signal value at one standard deviation from the mean, with values exceeding 1000 capped at 1000. Peaks for 161 transcription factors in 91 cell types are combined here into clusters to produce a summary display showing occupancy regions for each factor and motif sites within the regions when identified. One-letter code for the different cell lines is given in hgsv.washington.cdu/cgi-bin/hgTrackUi?hgsid=2654998_09Di2gB797ixpn70898j4DsMV3Ro&g=wgEncodeRegTf bsClusteredV3.

[0146] Additional public data: HiC Data for TADs were downloaded from wangftp.wustl.edu/hubs/johnston_gallo/.

### Cell Lines

[0147] Human GBM T98G cells were purchased from the ATCC collection (ATCC® CRL-1690™), and cultured in minimum essential medium-Eagle #01-025-1A (Biological Industries), supplemented with 10% heat-inactivated FBS #04-127-1A (Biological Industries), 1% penicillin/streptomycin P/S #03-031-1B (Biological Industries), 1% L-glutamine #03-020-1C (Biological Industries;), 1% non-essential amino acids, #01-340-1B (Biological Industries) and 1% sodium pyruvate #03-042-1B (Biological Industries), at 37° C. and 5% CO₂.

### Target Enrichment Assays

[0148] Variable regulatory regions were defined as the regions carrying H3K4me1 marks in all tumors, and also H3K27ac in at least 25% of the tumors, but not in at least another 25% of the tumors. RNA probes were designed to target methylation sites within these regions, utilizing the SureDesign tool (earray.chem.agilent.com/suredesign/). Probe duplication was applied in cases (n=8,652) of >5 CpG sites within the 120 bp span of the probes. Repetitive regions were identified by BLAT and excluded from the design. Custom-designed biotinylated RNA probes were ordered from Agilent Technologies (agilent.com). The probe sequences are provided in SEQ ID NO: 28-38077.

[0149] Genomic tumor DNAs were arbitrarily sheared using a sonication device into collections of DNA fragments of various sizes. These DNA segments were then allowed to attach the probes which fully or partially overlapped their span. The resulting collection of captured DNA segments (median size=224 bp) was integrated into gene-reporting vectors or underwent sequencing.

[0150] Enrichment libraries of GBM-targeted regulatory DNA segments were constructed using the SureSelect #G9611A protocol (Agilent) for Illumina multiplexed sequencing, which used 200 nanograms genomic DNA per reaction, or the SureSelect Methyl-Seq #G9651A protocol using 1 microgram genomic DNA per reaction. Quality and size distribution of the captured genomic segments were verified using the TapStation nucleic acids system (Agilent) assessments of regular or bisulfite-converted libraries. Target enrichment efficiency and coverage was evaluated via sequencing.

### Massively Paralleled Reporter Assay

[0151] Massively parallel functional assays were performed as described (Arnold et al., 2013, “Genome-wide quantitative enhancer activity maps identified by STARR-seq”, Science 339 (6123): 1074-1077, herein incroporated by reference in its entirety), with the following modifications:
[0152] 1) Reporter backbone: The pGL3-Promoter #E1761 GenBank accession number U47298 backbone (Promega) was used as a screening vector. The vector was modified as follows: The sequence between the Sacl and the Afel sites in the original pGL3-promoter vector (Promega, GenBank accession number U47298) was replaced with synthetic sequence. The modified vector produced a certain amount of basal transcription when no regulatory elements were presented. To evaluate regulatory functionality, putative silencer or enhancer elements were incorporated between the Agel and the Sall sites.
[0153] 2) Genomic inputs: Plasmid libraries were constructed using a target-enriched library as input materials: One microliter of adaptor-ligated DNA fragments from the AK100 target enrichment library was amplified in eight independent PCR reactions, using KAPA Hifi Hot Start Ready Mix #KK2601 (KAPA Biosystems). Reaction conditions included 45 seconds(s) at 95° C., 10 cycles of 15s at 98° C., 30s at 65° C., 30s at 72° C., and 2 min final extension at 72° C., applying forward Ilumina universal primer: 5′-TAGAGCATGCACCGGTAATGATACGGCGACCACCGAGATCT-3′ (SEQ ID NO: reverse Indexed 1) and Ilumina primer: 5′-GGCCGAATTCGTCGACCAAGCAGAAGACGGCATACGAGAT-3′ (SEQ ID NO: 2), containing Illumina adapter sequences. A specific 15nt extension was added to each adapter as homology arms for directional cloning. PCR reactions were pooled and purified on NucleoSpin Gel and PCR Clean-up #740609 columns (Macherey-Nagel). The screening vector was linearized with Agel-HF and Sall-HF restriction enzymes (NEB) and purified through electrophoresis and gel extraction. Purified PCR products were cloned into the linearized vector by recombination with the adaptor-ligated homology arms in 12 reactions of 10 μl each, applying the In-Fusion HD #639649 kit (Clontech). The reactions were then pooled and purified with 1× Agencourt AMPureXP #A63881 DNA beads (Beckman Coulter) and eluted in 24 μl nuclease-free water.
[0154] 3) Library propagation: Aliquots (n=12, 20 μl each) of MegaX DH10B TI Electrocomp bacteria #C640003 (Invitrogen) were transformed with 2 μl of the plasmid DNA library, according to the manufacturer's protocol, except for the electroporation step, which was performed using the Nucleofactor 2b platform (Lonza) Bacteria program 2. Every three transformation reactions were pooled (total of 4 reactions) for a one-hour recovery at 37° C., in SOC medium, while shaking at 225 rpm, after which, each reaction was transferred to 500 ml LBAMP (Luria Broth Ampicillin) for overnight 37° C. incubation, while shaking at 225 rpm. Propagated plasmid libraries were extracted using NucleoBond Xtra Maxi Plus Kit (#740416) (MAcherey-Nagel). To verify unbiased amplification of the targeted genomic segments, size distribution and coverage of the library were analyzed before and after the propagation step.
[0155] 4) In-vitro methylation assay: Complete de-methylation stages were achieved by propagation of the libraries in bacteria following PCR amplification stages. In-vitro methylation of the de-methylated plasmid DNA was performed using the New England Biolabs CpG Methyltransferase M.Sssl #M0226M according to the manufacturer's instructions. Efficient methylation level was confirmed by using a DNA protection assay against FastDigest Hpall #FD0514 (Thermo Scientific) digestion.
[0156] 5) Transfection to GBM cells: 20 μg of DNA were transfected into 2×10∧6 T98G and U87 cells at 70-80% confluence, using the Lipofectamine 3000 transfection kit #L3000-015 (Invitrogen), according to the manufacturer's protocol. In each experiment, 5×10∧7 T98G cells were transformed and incubated at 37° C., for 24 h.
[0157] 6) Isolation of plasmid DNA and RNA from GBM cells: Plasmid DNA was extracted from 2.5×10∧7 cells, 24 h post-transfection. Cells were rinsed twice with PBS pH 7.4 using the NucleoSpin Plasmid EasyPure kit #740727250 (Macherey-Nagel), according to the manufacturer's protocol. Total RNA was extracted from 2.5×10∧7 cells 24h post-transfection using GENEZOL reagent #GZR200 (Geneaid), according to the manufacturer's protocol. The polyA+RNA fraction was isolated using Dynabeads Oligo-(dT) 25 #61002 (Thermo scientific), scaling up the manufacturer's protocol 5-fold per tube, and treated with 10 U turboDNase #AM2238 (Invitrogen) at 20 ng/μl 37° C., for 1 h. Two reactions of 50 μl each, were pooled and subjected to RNeasy MinElute #74204 reaction clean up (Qiagen) to inactivate turbo DNase and concentrate the polyA+RNA.
[0158] 7) Reverse transcription: First strand cDNA synthesis was performed with 1-1.5 μg polyA+RNA in a total of 4 reactions of 20 μl each, using the Verso cDNA Synthesis Kit #AB1453B (Thermo scientific) at 42° C. for 30 min, 95° C. for 2 min, with a reporter-RNA specific primer (5′-CAAACTCATCAATGTATCTTATCATG-3′, (SEQ ID NO: 3)). cDNA (50 ng) was amplified by PCR, at 98° C. for 3 min, followed by 15 cycles at 98° C. for 20s each, 65° C. for 15s, 72° C. for 30s. Final extension was performed at 72° C. for 2 min, using Hifi Hot Start Ready Mix (KAPA), with reporter-specific primers. Forward primer: 5′-GGGCCAGCTGTTGGGGTG*T*C*C*A*C-3′ (SEQ ID NO: 4) which spans the splice junction of the synthetic intron and reverse primer: 5′-CTTATCATGTCTGCTCGA*A*G*C-3′ (SEQ ID NO: 5), where “*” indicates phosphorothioate bonds. In total, 16-20 reactions were performed. The amplified products were purified with 0.8× AMPureXP DNA beads (Agencourt) and eluted in 20 μl nuclease-free water. The resultant purified products served as a template for a second PCR performed under the following conditions: 98° C. for 3 min, 12 cycles of 98° C. for 15s, 65° C. for 30s, 72° C. for 30s. Final extension was performed at 72° C. for 2 min, with forward Ilumina universal primer: 5′-TAGAGCATGCACCGGTAATGATACGGCGACCACCGAGATCT-3′ (SEQ ID NO: 1) and reverse Indexed Ilumina primer: 5′-GGCCGAATTCGTCGACCAAGCAGAAGACGGCATACGAGAT-3′ (SEQ ID NO: 2). PCR products were purified with 0.8× AMPureXP DNA beads (Agencourt), eluted in 10 μL nuclease-free water, and pooled.

### Transcriptional Activity Analysis

[0159] Quality and size distribution of extracted plasmid DNAs and RNAs were verified using TapStation. DNA and cDNA samples were sequenced using the HiSeq2500 device (Illumina), as per the 125 bp paired-end protocol. Alignment with the hg 19 reference genome was performed on the first 40 bp from both sides of the DNA segments, using Bowtie2. Reads with mapping quality value above 40 aligned with the probe targets were considered for further analyses. Each of the captured genomic segments was given a unique ID according to genomic location and indicated the total number of DNA and RNA reads. Only on-target segments with at least one RNA read (n=623,223 pre-methylation; 304,998 post-methylation) were included. >99% of the targeted regions were presented following the propagation in bacteria and re-extraction from T98 cells. Technical and biological replications performed using illumina MiSeq sequencing.

[0160] Transcriptional activity score (TAS) was calculated as follows:
[0161] TAS=log₂((RNAj/DNAⱼ)/(RNAₜₒₜₐₗ/DNAₜₒₜₐₗ)),
[0162] where j is a genomic element and RNAₜₒₜₐₗ or DNAₜₒₜₐₗ are the sum of all segment reads.

[0163] For the analyses of isolated regulatory elements, TAS was determined in 500 bp, 50% overlapping windows, across the genome, based on DNA and RNA reads of segments overlapping with the given window. TAS significance was tested by Chi-square against total RNA to DNA. Multiple comparisons were corrected by applying False Discovery Rate (FDR). Functional regulatory elements were defined as elements with FDR q value <0.05 and minimum 100 RNA reads, where positive TASs were defined as enhancers, and negative as silencers. The methylation effect was analyzed by calculating TAS difference between treatments, where regulatory elements with a difference of ≥1.5-fold activity were counted.

### Inferring Cis-Regulatory Circuits

[0164] Methylation sequencing: Methyl-seq-captured libraries were sequenced using a Hiseq2500 device (Illumina), by applying paired-end 125 bp reads. Sequence alignment and DNA methylation calling were performed using Bismark VO.15.0 software against the hg19 reference genome. The sequencing yielded 52-149 million reads per sample, at an average mapping efficiency of 78.1%, average bisulfite efficiency of 97.6%, and 99.4% on target average. Overall, a mean coverage of 916 reads per site was obtained, and 86% of the targeted sites were covered by at least 100 reads. Sites that appeared in less than eight of the tumors were excluded from the analyses.

[0165] Circuit annotation: Correlation between the expression level of each targeted gene and the DNA methylation level of targeted CpG sites in a 2Mbp region flanking its transcription start site (TSS), was assessed by applying pairwise Spearman's rank correlation coefficient with Benjamini-Hochberg correction for multiple-hypothesis testing at an FDR <5%. Circuits with R2 >0.3 were included. Sites that correlated (R2 >0.1) with expression of the PTPRC (CD45) pan-blood cells marker, were considered a possible result of blood contamination and were eliminated from later analyses. Potential secondary effects were considered in two cases. (1) The correlated site was included within the prescribed portion (the gene body, excluding the first 5Kbp) of another gene; (2) The correlated site was located within the promoter (from TSS-1500 bp to TSS+2500 bp) of another gene. For these cases, correlation between the expression level of the genes was tested, and circuits with R2>0.1 that fit one of the scenarios described in FIG. 11, were excluded. For model developing, circuits which mismatched the report assay: circuits with methylation sensitive TAS (which were calculated for the DNA segments overlapping the given site and were changed by×1.5 fold by methylation) which mismatched the canonical mode (i.e., gropes I and II in FIG. 2F) were excluded.

[0166] Methylation-based prediction of gene expression: For each gene, two methods were performed (1) multiple linear regression and (2) Lasso regression. (1) Multiple linear regression should reduce the number of variables since there are only 24 samples. Thus, all the possible combinations of one to four associated sites were tested. For each combination with full data in at least 12 tumors, a predictive model of expression level based on multiple linear regression of the sites methylation levels was generated. A significant model (q value <0.05), evaluated by ANOVA for Linear Model Fit, and corrected for the number of possible models per-gene by FDR, was considered. A gene was considered to have a synergic model if the predictive value of the model was better than each of the involved sites alone.

[0167] Validation of methylation-based predictions was performed using the leave-one-out cross validation approach for assessing the generalization to an independent data set. One round of cross-validation involves 23 data sets (called training set) in which performing all the analysis, and one sample for validating the analysis (called testing set). The cross-validation was performed ×24 times. For each training data set, cis-regulatory circuits were generated (as described in Circuit annotation sub-section hereinabove) and possible predictive models were developed for the targeted genes. Prediction quality of each gene was then tested in the 24 rounds, by comparing predicted versus observed expression level. Difference up to 2-fold were considered as success. The ability to accurately predict the expression level of a gene was considered verified if it has good prediction quality in at least 20 of the 24 rounds.

### Analysis of Coding Sequence Variations

[0168] VCF files describing single nucleotide variations (SNV) were provided by the DKFZ. Synonymous SNV, SNVs overlapping with published SNPs (COMMON), or SNVs with a less than 25-read coverage or bcftools-QUAL score >20, were excluded. Copy number variations (CNV) were analyzed by whole-genome sequencing (WGS) data provided by the DKFZ. Association between gene expression and copy number was evaluated by Pearson or Spearman's correlations. p-values were adjusted for multiple-hypothesis testing using the Benjamini-Hochberg method, with FDR <5%.

### Analysis of Regulatory Sequence Variations

[0169] Pre-alignment processing: GBM tumors (n=8) were sequenced using the paired-end 250- or 300 bp read protocol on Illumina MiSeq V2 or V3 devices. FASTQ files were filtered, and sequence edges of Phred score quality >20 and trimmed up to 13 bp of Illumina adapter applying Trim Galore (bioinformatics.babraham.ac.uk/projects/trim_galore/). Reads that were shortened to 20 bp or less were discarded, along with their paired read. Exclusion of both reads was implemented after verifying that retention of unpaired reads did not significantly increase high quality alignment coverage. Quality control of the original and filtered FASTQ files was performed with FastQC (bioinformatics.babraham.ac.uk/projects/fastqc), deployed to verify the reduction in adapter content and the increase in base quality following the filtering stage. Removal of duplicates was performed at the pre-alignment stage with FastUniq. Duplicate pair-ends were removed by comparing sequences rather than post-aligned coordinates, allowing preservation of variant information.

[0170] Sequence alignment: Sequences were aligned to GRCh37/hg19 assembly of the human genome applying paired-reads Bowtie 2. Discordant pairs or constructed fragments larger than 1000 bp were discarded, thus improving mapping quality by allowing both reads to support mapping decisions. Default values (Bowtie 2 sensitive mode) were applied to end-to-end algorithm parameters, seed parameters, and bonus and penalty figures. Outputted SAM and BAM alignment files were examined using Picard CollectInsertSizeMetrics utility to verify correctness of final insert-size distribution (broadinstitute.github.io/picard. Version 1.119).

[0171] Variation calling: A BCF pileup file was generated from each BAM files using samtools mpileup function, set to consider bases of minimal Phred quality of 30 and minimal mapping quality of 30. Variant calling performed using bcftools, was initially set to output SNPs only to create SNP VCF files, according to the recommended setting for cancer. The VCF files were filtered by applying depth of coverage (DP) above 40 and statistical Quality (QUAL) above 10. DP filtering in this context refers to DP/INFO in the VCF file, which is a raw count of bases.

[0172] Variant post-processing: Post-processing of VCF SNPs included additional filtering, variant frequency calculation, mapping variants to probes and mapping variants to public databases, performed with a custom-written Python script. Additional depth coverage filtering of 20 was applied on the high-quality bases, which were selected by bcftools as appropriate for allelic counts. Frequency calculations were based on high-quality allelic depth (ratio of each allelic depth to sum of all allelic depths). SNPs were mapped to the following dbSNP and ClinVar databases: dbSNP/common version 20170710, dbSNP/All version 20170710 and clinvar_20170905.vcf. A match was determined when the position, reference and variant were all in agreement. In the analysis, de-novo variations (not in COMMON and not in ALL) which were detected in at least one sample (of eight) are referred to. For each targeted gene, the number of de-novo variations that were at a distance of +500 bp from its correlated sites were counted.

[0173] Regulatory CNVs: Non-coding CNVs were detected from WGS of 5Kbp sliding blocks in a 2Mbp region flanking gene TSSs, with a 50% overlap. Correlation of the total copy number TCN of each block with the gene expression level was assessed (at least six samples with available TCN data, Pearson and Spearman correlation). Correlation p values were adjusted for multiple-hypothesis testing using the Benjamini-Hochberg method.

### Genome Editing

[0174] Design and cloning of sgRNA: Guides to perturb SMO regulatory units were designed using the ChopChop, E-CRISP and CRISPOR softwares. 20-bp sgRNA sequences followed by the PAM ‘NGG’ for each unit, were identified and synthesized (see Table 1). For the SMO regulatory unit at chr7: 128,507,000-128,513,000 designated unit “A”, 4 guides were cloned into a backbone vector bearing Puromycin resistance (Addgene, 51133), using the Golden Gate assembly kit (NEB® Golden Gate Assembly Kit #E1601). Each guide sequence was cloned with its own U6 promoter and was followed by a sgRNA scaffold. For the regulatory unit at chr7: 129,384,500-129,389,500, designated unit “D”, two guides were cloned into the same backbone plasmid using the same method (FIG. 11).

[0175] Transfection/CRISPR-Cas9-mediated deletion: After validating the sgRNA sequences by Sanger sequencing, T98G or T98GdeltaSMO-D cells were co-transfected with a Cas9-bearing plasmid (Addgene, 48138) and either the plasmid bearing the guides targeting SMO A, the plasmid bearing the guides targeting SMO D, or the same plasmid harboring a non-targeting gRNA sequence (scramble), as a negative control. The molar ratio between the transfected guide plasmid and the Cas9 plasmid was 1:3, in favor of the plasmid not carrying the antibiotic resistance. 1.5-3*10∧5 cells/ml, >90% viable, were plated one day prior to transfection in a 6-well dish. On the transfection day, each well received 3 microliter Lipofectamine® 3000 Reagent, 5 microgram total plasmid DNA and 10 μl of Lipofectamine® 3000 Reagent (2:1 ratio). Puromycin (3 micrograms/microliter) was added to the cells one day after transfection. After 72 h, the antibiotic was washed, and the cells were left to expand. The cells were harvested 8-21d post-transfection and genomic DNA and RNA were immediately collected (Qiagen; DNeasy #69504 and RNeasy #74106, respectively).

[0176] Genotyping of mutant populations: Genomic DNA was subjected to genotyping PCR (primers listed in Table 2). Deletion or partial deletion was confirmed by gel electrophoresis or TapeStation, by Sanger sequencing and by illumina MiSeq sequencing (150 bp paired-end). Sanger sequencing was analyzed using BLAST and the sequence logo was generated using ggseqlogo R package. RNA extracted from populations of cells bearing such mutations were then checked for an effect on SMO transcription level, using qPCR (QuantStudio 3 cycler, Applied Biosystems, Thermo Fisher Scientific).

[0177] Single-cell dilution to obtain CRISPR-targeted cell clones: Puromycin-selected cells were isolated by trypsinization, counted and diluted to a concentration of 20 cells/100 microliters. Diluted cells (200 microliters) were then serially diluted, to ensure single-cell occupancy of rows 6-8 (eight dilution series). By calibrating the number of cells in the first row it was ensured that single cells could be isolated from the sixth to eighth rows onwards. Cells were incubated until the low-density wells were confluent enough to be transferred to 24-, 12- and finally to 6-well plates. Selected clones were tested for a stable DNA profile and for SMO transcription level by genotyping PCR (primers listed in Table 2), followed by gel electrophoresis or TapeStation and qPCR analysis, respectively.

[0178] RT-qPCR: Each isolated mRNA (500 ng) was transcribed to cDNA using the Verso cDNA Synthesis Kit (#AB-1453/A, Thermo Fisher Scientific) according to provided instructions, using the oligo dT primer. qPCR was performed using the Fast SYBR™ Green Master Mix (#AB-4385612, Thermo Fisher Scientific) and qPCR primers for SMO and reference genes HPRT and TBP (see Table 2), on a QuantStudio 3 cycler (Applied Biosystems, Thermo Fisher Scientific). The reaction was conducted in triplicates, and 20 ng of template were placed in each well. For each primer set, a no-template control (NTC) was also run, to check for possible contamination. QuantStudio Design & Analysis Software v1.4.3 (Applied Biosystems, Thermo Fisher Scientific) was used for analysis. All presented data were based on three or more biological replications of the genome editing experiments, each with three technical repeats of the DNA and RNA.

TABLE 1
Guide list

| | |
|---|---|
| A1 | ACCCTGCGCGCCGAGGTATC (SEQ ID NO: 6) |
| A2 | GCGACCTGGGAGCCGCCGCC (SEQ ID NO: 7) |
| A3 | ACCGCCGGTGCCGACCTTTG (SEQ ID NO: 8) |
| A4 | GCGTGGTAGTCCTTCTCCGG (SEQ ID NO: 9) |
| D1 | GTCCTGCTCTATCTTGTCGT (SEQ ID NO: 10) |
| D2 | CACATGTAGGTCTTTCTGAC (SEQ ID NO: 11) |
| N1 | CCGGCTCTGGGACTTACACCAATG (SEQ ID NO: 12) |
| N2 | CCGGACGGTGGATCTTCTTTAGTT (SEQ ID NO: 13) |
| N3 | CCGGTCCACCTTTTTGTTTCCTCT (SEQ ID NO: 14) |
| N4 | CCGGAAGATGGATGTCCCAGCACC (SEQ ID NO: 15) |

TABLE 2
Primer list

| | | |
|---|---|---|
| Genotyping SMO A (F) | 1066F | GCAGTGCGCTCACTTCAAA (SEQ ID NO: 16) |
| Genotyping SMO A (R) | 1066R | CTCCTGGGGCGAGATCAAAG (SEQ ID NO: 17) |
| Genotyping SMO D (F) | 1069F | CATGGTCCCGGTTCCCATTTGG (SEQ ID NO: 18) |
| Genotyping SMO D (R) | 955R | GCCCTCCACAGACCAAACAGC (SEQ ID NO: 19) |
| Genotyping SMO NULL (F) | 1120F | GCTCAGTCTCAGTGTGGGAG (SEQ ID NO: 20) |
| Genotyping SMO NULL (R) | 1120R | GGCGTTTCCACAAGAGATGAGC (SEQ ID NO: 21) |
| qPCR SMO F | 950F | TGCTCATCGTGGGAGGCTACTT (SEQ ID NO: 22) |
| qPCR SMO R | 950R | ATCTTGCTGGCAGCCTTCTCAC (SEQ ID NO: 23) |
| qPCR HPRT F | 442F | TGACACTGGCAAAACAATGCA (SEQ ID NO: 24) |
| qPCR HPRT R | 442R | GGTCCTTTTCACCAGCAAGCT (SEQ ID NO: 25) |
| qPCR TBP F | 850F | TGCACAGGAGCCAAGAGTGAA (SEQ ID NO: 26) |
| qPCR TBP R | 850R | CACATCACAGCTCCCCACCA (SEQ ID NO: 27) |

### Statistics and Data Visualization

[0179] All analyses were performed using both public and custom scripts written in R (R-project.org) and MATLAB (The Mathworks, Inc.). Plots were generated using plotting functionalities in base R and using ggplot2 package (ggplot2.tidyverse.org) and corrplot package (github.com/taiyun/corrplot). Sequence logos were generated using the ggseqlogo package. Heatmaps were produced using the ComplexHeatmap package. Lasso regression was performed using the default parameters of gmlnet package.

### Example 1: Integrative Genetic-Epigenetic Maps of Cis-Regulatory Domains

[0180] A strategy for methylation-centered interrogations of functional gene-associated regulatory elements was developed. While the method is applicable to many genes and diseases, the focus was on 125 pan-cancer and/or glioblastoma (GBM) driver genes, and 52 reference genes (Table 3). To focus on regulatory sites that may alternate their mode of action across tumors, initially the regulatory inputs provided by Histone 3 mono-methylated Lysine 4 (H3K4me1)-marked sites among various types of cancer were evaluated. Clearly, H3K4me1 sites showed similar frequencies of positive and negative associations between methylation and expression levels (FIG. 5A). Moreover, many of these sites switch between positive and negative effects on expression of the given genes, across cancers (FIG. 5B). Based on these observations, loci that carry H3K4me1 marks, and also the activity marker H3K27ac in some (but not all) of subjected glioblastoma tumors were targeted (see Materials and Methods). An analysis of normal and cancerous brains showed relative enrichment of DNase hypersensitivity signals within the targeted chromatin regions, thus confirming their regulatory potential. Many of the target genes were not firmly assigned to particular topologically-associated domains (TADs) (FIG. 6A-B). Therefore, it was chosen that all putative cis-acting regulatory elements were allocate within two million-base pair (Mbp) windows around the target gene promoters, thus ensuring unbiased evaluations of gene-associated sites within equivalent genomic spans. RNA probes (n=38,050, 120 bp each) were designed for all CpG methylation sites (n=140,494) within these chromatin blocks (SEQ ID NO: 28-38077). By targeting the RNA probes to GBM tumors across patients with age, gender and GBM-subtype ranges characteristic of this disease, libraries of captured DNA segments were obtained representing the spectrum of sequence and methylation variations of the tumors. These libraries served as input material for parallel analyses of the regulatory function and the gene-association status of the targeted loci (FIG. 1A-D, and 7).

TABLE 3
Drive and reference genes

| | | | | | | Non- | | |
|---|---|---|---|---|---|---|---|---|
| | | | | | | driver | Non- | Cancer |
| | | | | | | candidate | driver | type- |
| Gene | | | | | Driver | GBM | variable | specific |
| Symbol | Entrez ID | Chrom. | txStart | txEnd | gene | gene | gene | gene |
| ABL1 | 25 | CHR9 | 133589267 | 133763062 | Yes | 0 | 0 | 1 |
| CASP8 | 841 | CHR2 | 202098165 | 202152434 | Yes | 0 | 0 | 1 |
| DNMT1 | 1786 | CHR19 | 10244021 | 10305755 | Yes | 0 | 0 | 1 |
| EGFR | 1956 | CHR7 | 55086724 | 55275031 | Yes | 0 | 0 | 1 |
| FGFR3 | 2261 | CHR4 | 1795038 | 1810599 | Yes | 0 | 0 | 1 |
| ACVR1B | 91 | CHR12 | 52345450 | 52390863 | Yes | 0 | 0 | 0 |
| AKT1 | 207 | CHR14 | 105235686 | 105262080 | Yes | 0 | 0 | 0 |
| ALK | 238 | CHR2 | 29415639 | 30144477 | Yes | 0 | 0 | 0 |
| APC | 324 | CHR5 | 112043201 | 112181936 | Yes | 0 | 0 | 0 |
| AR | 367 | CHRX | 66763873 | 66950461 | Yes | 0 | 0 | 0 |
| ARID1A | 8289 | CHR1 | 27022521 | 27108601 | Yes | 0 | 0 | 0 |
| ARID1B | 57492 | CHR6 | 157099063 | 157531913 | Yes | 0 | 0 | 0 |
| ARID2 | 196528 | CHR12 | 46123619 | 46301819 | Yes | 0 | 0 | 0 |
| ASXL1 | 171023 | CHR20 | 30946146 | 31027122 | Yes | 0 | 0 | 0 |
| ATM | 472 | CHR11 | 108093558 | 108239826 | Yes | 0 | 0 | 0 |
| ATRX | 546 | CHRX | 76760355 | 77041755 | Yes | 0 | 0 | 0 |
| AXIN1 | 8312 | CHR16 | 337439 | 402676 | Yes | 0 | 0 | 0 |
| B2M | 567 | CHR15 | 45003684 | 45010357 | Yes | 0 | 0 | 0 |
| BAP1 | 8314 | CHR3 | 52435019 | 52444121 | Yes | 0 | 0 | 0 |
| BCL2 | 596 | CHR18 | 60790578 | 60986613 | Yes | 0 | 0 | 0 |
| BCOR | 54880 | CHRX | 39910498 | 40036582 | Yes | 0 | 0 | 0 |
| BRAF | 673 | CHR7 | 140433812 | 140624564 | Yes | 0 | 0 | 0 |
| BRCA1 | 672 | CHR17 | 41196311 | 41277500 | Yes | 0 | 0 | 0 |
| BRCA2 | 675 | CHR13 | 32889616 | 32973809 | Yes | 0 | 0 | 0 |
| CARD11 | 84433 | CHR7 | 2945709 | 3083579 | Yes | 0 | 0 | 0 |
| CBL | 867 | CHR11 | 119076985 | 119178859 | Yes | 0 | 0 | 0 |
| CDC73 | 79577 | CHR1 | 193091087 | 193223942 | Yes | 0 | 0 | 0 |
| CDH1 | 999 | CHR16 | 68771194 | 68869444 | Yes | 0 | 0 | 0 |
| CDKN2A | 1029 | CHR9 | 21967750 | 21994490 | Yes | 0 | 0 | 0 |
| CDKN2C | 1031 | CHR1 | 51434366 | 51440309 | Yes | 0 | 0 | 0 |
| CEBPA | 1050 | CHR19 | 33790839 | 33793470 | Yes | 0 | 0 | 0 |
| CHEK2 | 11200 | CHR22 | 29083730 | 29137822 | Yes | 0 | 0 | 0 |
| CIC | 23152 | CHR19 | 42772688 | 42799948 | Yes | 0 | 0 | 0 |
| CREBBP | 1387 | CHR16 | 3775055 | 3930121 | Yes | 0 | 0 | 0 |
| CSF1R | 1436 | CHR5 | 149432853 | 149492935 | Yes | 0 | 0 | 0 |
| CTNNB1 | 1499 | CHR3 | 41240941 | 41281939 | Yes | 0 | 0 | 0 |
| CYLD | 1540 | CHR16 | 50775960 | 50835846 | Yes | 0 | 0 | 0 |
| DAXX | 1616 | CHR6 | 33286334 | 33290793 | Yes | 0 | 0 | 0 |
| DNMT3A | 1788 | CHR2 | 25455829 | 25565459 | Yes | 0 | 0 | 0 |
| EP300 | 2033 | CHR22 | 41488613 | 41576081 | Yes | 0 | 0 | 0 |
| ERBB2 | 2064 | CHR17 | 37844336 | 37884915 | Yes | 0 | 0 | 0 |
| EZH2 | 2146 | CHR7 | 148504463 | 148581441 | Yes | 0 | 0 | 0 |
| FBXW7 | 55294 | CHR4 | 153242409 | 153456393 | Yes | 0 | 0 | 0 |
| FGFR2 | 2263 | CHR10 | 123237843 | 123357972 | Yes | 0 | 0 | 0 |
| FLT3 | 2322 | CHR13 | 28577410 | 28674729 | Yes | 0 | 0 | 0 |
| FOXL2 | 668 | CHR3 | 138663065 | 138665982 | Yes | 0 | 0 | 0 |
| FUBP1 | 8880 | CHR1 | 78412166 | 78444889 | Yes | 0 | 0 | 0 |
| GATA1 | 2623 | CHRX | 48644981 | 48652717 | Yes | 0 | 0 | 0 |
| GATA2 | 2624 | CHR3 | 128198264 | 128212030 | Yes | 0 | 0 | 0 |
| GATA3 | 2625 | CHR10 | 8096666 | 8117164 | Yes | 0 | 0 | 0 |
| GNA11 | 2767 | CHR19 | 3094407 | 3124000 | Yes | 0 | 0 | 0 |
| GNAQ | 2776 | CHR9 | 80331189 | 80646365 | Yes | 0 | 0 | 0 |
| GNAS | 2778 | CHR20 | 57414794 | 57486250 | Yes | 0 | 0 | 0 |
| H3F3A | 3020 | CHR1 | 226250407 | 226259703 | Yes | 0 | 0 | 0 |
| HNF1A | 6927 | CHR12 | 121416548 | 121440314 | Yes | 0 | 0 | 0 |
| HRAS | 3265 | CHR11 | 532241 | 535550 | Yes | 0 | 0 | 0 |
| IDH1 | 3417 | CHR2 | 209100950 | 209119867 | Yes | 0 | 0 | 0 |
| IDH2 | 3418 | CHR15 | 90627210 | 90645786 | Yes | 0 | 0 | 0 |
| JAK1 | 3716 | CHR1 | 65298905 | 65432187 | Yes | 0 | 0 | 0 |
| JAK2 | 3717 | CHR9 | 4985244 | 5128183 | Yes | 0 | 0 | 0 |
| JAK3 | 3718 | CHR19 | 17935592 | 17958841 | Yes | 0 | 0 | 0 |
| KDM5C | 8242 | CHRX | 53220502 | 53254604 | Yes | 0 | 0 | 0 |
| KDM6A | 7403 | CHRX | 44732420 | 44971857 | Yes | 0 | 0 | 0 |
| KIT | 3815 | CHR4 | 55524094 | 55606881 | Yes | 0 | 0 | 0 |
| KLF4 | 9314 | CHR9 | 110247132 | 110252047 | Yes | 0 | 0 | 0 |
| KMT2C | 58508 | CHR7 | 151832009 | 152133090 | Yes | 0 | 0 | 0 |
| KMT2D | 8085 | CHR12 | 49412757 | 49449107 | Yes | 0 | 0 | 0 |
| KRAS | 3845 | CHR12 | 25357722 | 25403865 | Yes | 0 | 0 | 0 |
| MAP2K1 | 5604 | CHR15 | 66679210 | 66783882 | Yes | 0 | 0 | 0 |
| MAP3K1 | 4214 | CHR5 | 56110899 | 56191978 | Yes | 0 | 0 | 0 |
| MED12 | 9968 | CHRX | 70338405 | 70362304 | Yes | 0 | 0 | 0 |
| MEN1 | 4221 | CHR11 | 64570985 | 64578766 | Yes | 0 | 0 | 0 |
| MET | 4233 | CHR7 | 116312458 | 116438440 | Yes | 0 | 0 | 0 |
| MLH1 | 4292 | CHR3 | 37034840 | 37092337 | Yes | 0 | 0 | 0 |
| MPL | 4352 | CHR1 | 43803474 | 43820135 | Yes | 0 | 0 | 0 |
| MSH2 | 4436 | CHR2 | 47630205 | 47710367 | Yes | 0 | 0 | 0 |
| MSH6 | 2956 | CHR2 | 48010220 | 48034092 | Yes | 0 | 0 | 0 |
| MYD88 | 4615 | CHR3 | 38179968 | 38184512 | Yes | 0 | 0 | 0 |
| NCOR1 | 9611 | CHR17 | 15933407 | 16118874 | Yes | 0 | 0 | 0 |
| NF1 | 4763 | CHR17 | 29421944 | 29704695 | Yes | 0 | 0 | 0 |
| NF2 | 4771 | CHR22 | 29999544 | 30094589 | Yes | 0 | 0 | 0 |
| NFE2L2 | 4780 | CHR2 | 178095030 | 178129859 | Yes | 0 | 0 | 0 |
| NOTCH1 | 4851 | CHR9 | 139388895 | 139440238 | Yes | 0 | 0 | 0 |
| NOTCH2 | 4853 | CHR1 | 120454175 | 120612317 | Yes | 0 | 0 | 0 |
| NPM1 | 4869 | CHR5 | 170814707 | 170837888 | Yes | 0 | 0 | 0 |
| NRAS | 4893 | CHR1 | 115247084 | 115259515 | Yes | 0 | 0 | 0 |
| PAX5 | 5079 | CHR9 | 36833271 | 37034476 | Yes | 0 | 0 | 0 |
| PBRM1 | 55193 | CHR3 | 52579367 | 52719866 | Yes | 0 | 0 | 0 |
| PDGFRA | 5156 | CHR4 | 55095263 | 55164412 | Yes | 0 | 0 | 0 |
| PHF6 | 84295 | CHRX | 133507341 | 133562822 | Yes | 0 | 0 | 0 |
| PIK3CA | 5290 | CHR3 | 178866310 | 178952497 | Yes | 0 | 0 | 0 |
| PIK3R1 | 5295 | CHR5 | 67511583 | 67597649 | Yes | 0 | 0 | 0 |
| PPP2R1A | 5518 | CHR19 | 52693054 | 52729678 | Yes | 0 | 0 | 0 |
| PRDM1 | 639 | CHR6 | 106534194 | 106557814 | Yes | 0 | 0 | 0 |
| PTCH1 | 5727 | CHR9 | 98205263 | 98279247 | Yes | 0 | 0 | 0 |
| PTEN | 5728 | CHR10 | 89623194 | 89731687 | Yes | 0 | 0 | 0 |
| PTPN11 | 5781 | CHR12 | 112856535 | 112947717 | Yes | 0 | 0 | 0 |
| RB1 | 5925 | CHR13 | 48877882 | 49056026 | Yes | 0 | 0 | 0 |
| RET | 5979 | CHR10 | 43572516 | 43625797 | Yes | 0 | 0 | 0 |
| RNF43 | 54894 | CHR17 | 56429860 | 56494943 | Yes | 0 | 0 | 0 |
| RPL5 | 6125 | CHR1 | 93297593 | 93307481 | Yes | 0 | 0 | 0 |
| RUNX1 | 861; | CHR21 | 36160097 | 36421595 | Yes | 0 | 0 | 0 |
| | 100506403 | | | | | | | |
| SETBP1 | 26040 | CHR18 | 42260137 | 42648475 | Yes | 0 | 0 | 0 |
| SETD2 | 29072 | CHR3 | 47057897 | 47205467 | Yes | 0 | 0 | 0 |
| SF3B1 | 23451 | CHR2 | 198256697 | 198299771 | Yes | 0 | 0 | 0 |
| SMAD2 | 4087 | CHR18 | 45359465 | 45457517 | Yes | 0 | 0 | 0 |
| SMAD4 | 4089 | CHR18 | 48556582 | 48611411 | Yes | 0 | 0 | 0 |
| SMARCA4 | 6597 | CHR19 | 11071597 | 11172958 | Yes | 0 | 0 | 0 |
| SMARCB1 | 6598 | CHR22 | 24129149 | 24176705 | Yes | 0 | 0 | 0 |
| SMO | 6608 | CHR7 | 128828712 | 128853385 | Yes | 0 | 0 | 0 |
| SOCS1 | 8651 | CHR16 | 11348273 | 11350039 | Yes | 0 | 0 | 0 |
| SOX9 | 6662 | CHR17 | 70117160 | 70122560 | Yes | 0 | 0 | 0 |
| SPOP | 8405 | CHR17 | 47676245 | 47755525 | Yes | 0 | 0 | 0 |
| SRSF2 | 6427 | CHR17 | 74730196 | 74733493 | Yes | 0 | 0 | 0 |
| STAG2 | 10735 | CHRX | 123094409 | 123236505 | Yes | 0 | 0 | 0 |
| STK11 | 6794 | CHR19 | 1205797 | 1228434 | Yes | 0 | 0 | 0 |
| TET2 | 54790 | CHR4 | 106067031 | 106200960 | Yes | 0 | 0 | 0 |
| TNFAIP3 | 7128 | CHR6 | 138188324 | 138204451 | Yes | 0 | 0 | 0 |
| TP53 | 7157 | CHR17 | 7571719 | 7590868 | Yes | 0 | 0 | 0 |
| TRAF7 | 84231 | CHR16 | 2205798 | 2228130 | Yes | 0 | 0 | 0 |
| TSC1 | 7248 | CHR9 | 135766734 | 135820020 | Yes | 0 | 0 | 0 |
| TSHR | 7253 | CHR14 | 81421868 | 81612646 | Yes | 0 | 0 | 0 |
| U2AF1 | 7307; | CHR21 | 44513065 | 44527688 | Yes | 0 | 0 | 0 |
| | 102724594 | | | | | | | |
| VHL | 7428 | CHR3 | 10183318 | 10195354 | Yes | 0 | 0 | 0 |
| WT1 | 7490 | CHR11 | 32409321 | 32457081 | Yes | 0 | 0 | 0 |
| DLL3 | 10683 | CHR19 | 39989556 | 39999121 | No | 1 | 0 | 1 |
| AKT2 | 208 | CHR19 | 40736223 | 40791302 | No | 0 | 0 | 1 |
| CASP5 | 838 | CHR11 | 104864966 | 104893895 | No | 0 | 0 | 1 |
| CHI3L1 | 1116 | CHR1 | 203148058 | 203155922 | No | 0 | 0 | 1 |
| ERBB3 | 2065 | CHR12 | 56473808 | 56497291 | No | 0 | 0 | 1 |
| FBXO3 | 26273 | CHR11 | 33762489 | 33796071 | No | 0 | 0 | 1 |
| GABRB2 | 2561 | CHR5 | 160715435 | 160975130 | No | 0 | 0 | 1 |
| MBP | 4155 | CHR18 | 74690788 | 74844774 | No | 0 | 0 | 1 |
| NES | 10763 | CHR1 | 156638555 | 156647189 | No | 0 | 0 | 1 |
| OLIG2 | 10215 | CHR21 | 34398215 | 34401503 | No | 0 | 0 | 1 |
| PDGFA | 5154 | CHR7 | 536896 | 559481 | No | 0 | 0 | 1 |
| RELB | 5971 | CHR19 | 45504706 | 45541456 | No | 0 | 0 | 1 |
| SNCG | 6623 | CHR10 | 88718287 | 88723017 | No | 0 | 0 | 1 |
| SOX2 | 6657 | CHR3 | 181429711 | 181432223 | No | 0 | 0 | 1 |
| TLR2 | 7097 | CHR4 | 154605440 | 154627242 | No | 0 | 0 | 1 |
| TLR4 | 7099 | CHR9 | 120466452 | 120479769 | No | 0 | 0 | 1 |
| TOP1 | 7150 | CHR20 | 39657461 | 39753126 | No | 0 | 0 | 1 |
| TRADD | 8717 | CHR16 | 67188088 | 67193812 | No | 0 | 0 | 1 |
| IGFBP6 | 3489 | CHR12 | 53491435 | 53496128 | No | 1 | 1 | 0 |
| AQP9 | 366 | CHR15 | 58430407 | 58478110 | No | 0 | 1 | 0 |
| BATF | 10538 | CHR14 | 75988783 | 76013334 | No | 0 | 1 | 0 |
| CD68 | 968 | CHR17 | 7482804 | 7485429 | No | 0 | 1 | 0 |
| DMRTA2 | 63950 | CHR1 | 50883222 | 50889119 | No | 0 | 1 | 0 |
| DSCAML1 | 57453 | CHR11 | 117298487 | 117667976 | No | 0 | 1 | 0 |
| EN1 | 2019 | CHR2 | 119599746 | 119605759 | No | 0 | 1 | 0 |
| FCGR2B | 2213 | CHR1 | 161632904 | 161648444 | No | 0 | 1 | 0 |
| FPR2 | 2358 | CHR19 | 52264452 | 52273779 | No | 0 | 1 | 0 |
| GLYATL2 | 219970 | CHR11 | 58601539 | 58611997 | No | 0 | 1 | 0 |
| HK3 | 3101 | CHR5 | 176307869 | 176326333 | No | 0 | 1 | 0 |
| IFI30 | 10437 | CHR19 | 18284589 | 18288934 | No | 0 | 1 | 0 |
| LGi3 | 203190 | CHR8 | 22004342 | 22014344 | No | 0 | 1 | 0 |
| LILRB2 | 10288 | CHR19 | 54777674 | 54785033 | No | 0 | 1 | 0 |
| LYVE1 | 10894 | CHR11 | 10579412 | 10590365 | No | 0 | 1 | 0 |
| SGCD | 6444 | CHR5 | 155753766 | 156194798 | No | 0 | 1 | 0 |
| SLC17A7 | 57030 | CHR19 | 49932654 | 49944808 | No | 0 | 1 | 0 |
| SOX10 | 6663 | CHR22 | 38368318 | 38380539 | No | 0 | 1 | 0 |
| SPHK1 | 8877 | CHR17 | 74380689 | 74383941 | No | 0 | 1 | 0 |
| VIPR2 | 7434 | CHR7 | 158820865 | 158937649 | No | 0 | 1 | 0 |
| ZIC2 | 7546 | CHR13 | 100634025 | 100639019 | No | 0 | 1 | 0 |
| ZNF676 | 163223 | CHR19 | 22361902 | 22379753 | No | 0 | 1 | 0 |
| ACSS3 | 79611 | CHR12 | 81471808 | 81649582 | No | 1 | 0 | 0 |
| ASXL3 | 80816 | CHR18 | 31158540 | 31327399 | No | 1 | 0 | 0 |
| BCAT1 | 586 | CHR12 | 24962957 | 25102393 | No | 1 | 0 | 0 |
| CA12 | 771 | CHR15 | 63615729 | 63674309 | No | 1 | 0 | 0 |
| CD163 | 9332 | CHR12 | 7623411 | 7656414 | No | 1 | 0 | 0 |
| CD177 | 57126 | CHR19 | 43857810 | 43867324 | No | 1 | 0 | 0 |
| FGF17 | 8822 | CHR8 | 21900263 | 21906319 | No | 1 | 0 | 0 |
| FGF9 | 2254 | CHR13 | 22245214 | 22278640 | No | 1 | 0 | 0 |
| GDF15 | 9518 | CHR19 | 18496967 | 18499986 | No | 1 | 0 | 0 |
| GRIA4 | 2893 | CHR11 | 105480799 | 105852819 | No | 1 | 0 | 0 |
| GRID2 | 2895 | CHR4 | 93225549 | 94695706 | No | 1 | 0 | 0 |
| LIF | 3976 | CHR22 | 30636435 | 30642840 | No | 1 | 0 | 0 |

### Example 2: Enhancers and Silencers are Co-Distributed Along Gene Domains

[0181] Functionality of the captured regulatory elements was examined in GBM cells, using a massively paralleled reporter assay adapted for detection of silencers and enhancers (see Materials and Methods). Transcriptional activity score (TAS) analysis revealed 26,152 significant (q<0.05) regulatory elements along the targeted gene domains, of them 9,204 silencers and 16,948 enhancers (FIG. 2A-C). An additional 16,030 targeted genomic elements showed no significant functions. Analysis of the chromatin around the annotated elements in a variety of other cell types, showed that the loci annotated as silencers or as enhancers in GBM cells shared the characteristics of open, TF-bound regulatory chromatin (FIG. 2D). In most (176 of 177) of the analyzed gene domains multiple (11-693) functional regulatory elements were observed. Of these domains, 175 contained both enhancers and silencers (FIG. 8A). It was concluded that regulatory elements are similarly distributed between enhancer and silencer functionalities across regulatory gene domains of GBM cells.

[0182] Example 3: DNA methylation induces enhancers and silencers to acquire new activity set points Across cell types, the analyzed regulatory elements bind both activators and repressors, regardless of their functional annotation in GBM (FIG. 8B), indicating the potential of these elements to mediate transcriptional enhancing or silencing, at different cellular conditions. It was explored whether DNA methylation directs their specific functioning in GBM. Instructive effects of methylation were examined by comparing the transcriptional outputs of reporter genes, driven by un-methylated or methylated cis-regulatory elements (FIG. 9A-B). Of the 26,152 annotated regulatory elements, 10,998 displayed ≥1.5-fold TAS differences between methylated and un-methylated states (FIG. 9C). The other 15,154 (57.9%) elements may be insensitive to methylation or affected below the detection threshold of the assay. Overall, DNA methylation generally reduced the activity levels of both enhancers and silencers (FIG. 2E). Of the methylation-sensitive silencers and enhancers, the majority (83.7%) reduced their original activities, so enhancers were shifted to lower enhancing activities upon methylation, and silencers were shifted to lower silencing effects, while 16.3% of the methylation-responding elements showed the opposite effect, i.e., increased regulatory activity upon DNA methylation (FIG. 2F). Interestingly, many elements were shifted to the opposing functionality (i.e., enhancers were turned to silencers, and vice versa), upon methylation (FIG. 2G). However, the effect of methylation was not restricted to complete switching between full enhancing and full silencing functionalities. Rather, it allowed silencers and enhancers to adopt new activity set points within ranges of enhancing to silencing effects, possibly by affecting the balance between bound activators and repressors. Interestingly, methylation-sensitive and -insensitive sites shared the characteristics of regulatory chromatin (FIG. 9D-G), suggesting that more specific differences underlie their distinguished responses to methylation (e.g., deferential binding of particular methylation-sensitive or methylation-resistant transcription factors). It was concluded that core regulatory sequences may be retuned on their operative scales, between enhancing and silencing inputs to the transcriptional machinery. DNA methylation is apparently required and sufficient to induce these effects in GBM cells.

### Example 4: Methylation Data Reveals the Cis-Regulatory Circuits of GBM Genes

[0183] The above experiments detect the effect of methylation on core regulatory sequences at simplified genetic structure and under extreme, fully-methylated or fully-unmethylated conditions. These experiments revealed principal rules of methylation effect on enhancers and silencers (FIG. 2A-G). Since the conditions in actual GBM chromatin may be essentially different, next methylation-expression associations in intact GBM genomes was studied. Utilizing the same capturing libraries that were used for the functional assays, the correlation between the methylation levels of the captured sites and expression levels of the targeted genes were analyzed among 24 GBM samples (Table 3), applying the herein described method (FIG. 3A). To avoid possible indirect effects, gene-body and promoter sites (n=232), which may display methylation-expression associations due to secondary interactions, were excluded from the analysis (FIG. 10). The resultant significant correlations between methylation and expression levels across the GBM samples, revealed associations between certain regulatory sites and controlled genes (n=1,154; q<0.05; R2 >0.3, Table 4). These associations between regulatory sites and gene expression were termed the cis-regulatory circuits of the genes.

TABLE 4
Gene-associated regulatory units

| Gene | Unit ID | Chr. | Start | End | Span (bp) | Sites | Association |
|---|---|---|---|---|---|---|---|
| ABL1 | 1 | CHR9 | 132958046 | 132958649 | 603 | 4 | 1 |
| ABL1 | 2 | CHR9 | 132982490 | 132982643 | 153 | 2 | 1 |
| ABL1 | 3 | CHR9 | 133327005 | 133327821 | 816 | 2 | 1 |
| ABL1 | 4 | CHR9 | 133346631 | 133350389 | 3758 | 2 | 1 |
| AKT1 | 6 | CHR14 | 105636925 | 105637327 | 402 | 2 | 1 |
| AKT2 | 1 | CHR19 | 39993313 | 39994770 | 1457 | 13 | 1 |
| ASXL1 | 1 | CHR20 | 30429763 | 30431256 | 1493 | 2 | 1 |
| AXIN1 | 3 | CHR16 | 722369 | 724645 | 2276 | 2 | 1 |
| AXIN1 | 5 | CHR16 | 1088005 | 1088438 | 433 | 2 | 1 |
| AXIN1 | 7 | CHR16 | 1204532 | 1204751 | 219 | 2 | 1 |
| AXIN1 | 8 | CHR16 | 1381813 | 1382207 | 394 | 7 | 1 |
| BCOR | 3 | CHRX | 39343643 | 39344585 | 942 | 2 | −1 |
| BRCA2 | 1 | CHR13 | 33760688 | 33760693 | 5 | 2 | 1 |
| CA12 | 2 | CHR15 | 63254573 | 63255038 | 465 | 6 | 1 |
| CA12 | 4 | CHR15 | 64189128 | 64189197 | 69 | 3 | −1 |
| CDKN2A | 2 | CHR9 | 21576533 | 21576558 | 25 | 2 | −1 |
| CDKN2A | 3 | CHR9 | 21811216 | 21812891 | 1675 | 3 | −1 |
| CDKN2A | 4 | CHR9 | 22052216 | 22053197 | 981 | 4 | −1 |
| CDKN2A | 5 | CHR9 | 22079791 | 22080476 | 685 | 7 | −1 |
| CHEK2 | 1 | CHR22 | 29540086 | 29540489 | 403 | 4 | −1 |
| CHEK2 | 3 | CHR22 | 30091748 | 30091780 | 32 | 2 | −1 |
| CHEK2 | 4 | CHR22 | 30097763 | 30098062 | 299 | 2 | −1 |
| CHI3L1 | 1 | CHR1 | 203016451 | 203016480 | 29 | 3 | −1 |
| CHI3L1 | 2 | CHR1 | 203105193 | 203105354 | 161 | 2 | −1 |
| CHI3L1 | 3 | CHR1 | 203135787 | 203136651 | 864 | 5 | −1 |
| CHI3L1 | 6 | CHR1 | 203632398 | 203632511 | 113 | 2 | −1 |
| CHI3L1 | 7 | CHR1 | 204120492 | 204121836 | 1344 | 5 | −1 |
| CIC | 1 | CHR19 | 42569945 | 42570265 | 320 | 4 | 1 |
| CIC | 2 | CHR19 | 42656665 | 42656734 | 69 | 2 | 1 |
| CREBBP | 2 | CHR16 | 3238942 | 3239089 | 147 | 3 | 1 |
| DAXX | 4 | CHR6 | 33738809 | 33739114 | 305 | 2 | 1 |
| DAXX | 6 | CHR6 | 34032938 | 34033076 | 138 | 2 | −1 |
| DLL3 | 1 | CHR19 | 39360164 | 39361072 | 908 | 6 | 1 |
| DSCAML1 | 4 | CHR11 | 118186164 | 118186176 | 12 | 2 | 1 |
| EGFR | 1 | CHR7 | 54890403 | 54893102 | 2699 | 4 | 1 |
| EGFR | 2 | CHR7 | 54898637 | 54912505 | 13868 | 8 | 1 |
| EGFR | 3 | CHR7 | 55058032 | 55071675 | 13643 | 10 | 1 |
| EN1 | 1 | CHR2 | 119564489 | 119564855 | 366 | 12 | −1 |
| EN1 | 2 | CHR2 | 119599106 | 119599681 | 575 | 26 | −1 |
| ERBB2 | 2 | CHR17 | 37322124 | 37322310 | 186 | 4 | −1 |
| ERBB2 | 3 | CHR17 | 37752917 | 37757721 | 4804 | 3 | −1 |
| FGF17 | 1 | CHR8 | 21881722 | 21882709 | 987 | 7 | 1 |
| FGF17 | 3 | CHR8 | 22573255 | 22573260 | 5 | 2 | 1 |
| FGF17 | 5 | CHR8 | 22722594 | 22722935 | 341 | 3 | 1 |
| FGFR2 | 1 | CHR10 | 123196281 | 123196864 | 583 | 3 | −1 |
| FGFR3 | 1 | CHR4 | 816568 | 816608 | 40 | 3 | 1 |
| GATA1 | 1 | CHRX | 48326644 | 48326691 | 47 | 3 | 1 |
| GDF15 | 3 | CHR19 | 17790731 | 17791448 | 717 | 31 | −1 |
| GDF15 | 6 | CHR19 | 18210253 | 18210267 | 14 | 3 | −1 |
| GDF15 | 8 | CHR19 | 18342128 | 18342151 | 23 | 2 | −1 |
| GDF15 | 9 | CHR19 | 18412001 | 18412084 | 83 | 4 | −1 |
| GDF15 | 11 | CHR19 | 18906490 | 18906551 | 61 | 2 | −1 |
| GDF15 | 12 | CHR19 | 19221495 | 19221717 | 222 | 19 | −1 |
| GNA11 | 2 | CHR19 | 2722050 | 2722284 | 234 | 2 | 1 |
| GNAS | 1 | CHR20 | 56482663 | 56482712 | 49 | 2 | −1 |
| H3F3A | 4 | CHR1 | 226738547 | 226738917 | 370 | 3 | −1 |
| H3F3A | 5 | CHR1 | 227070288 | 227070967 | 679 | 2 | 1 |
| HK3 | 3 | CHR5 | 176829109 | 176829112 | 3 | 2 | 1 |
| HRAS | 1 | CHR11 | 416293 | 416732 | 439 | 2 | 1 |
| KDM5C | 2 | CHRX | 53034306 | 53034308 | 2 | 2 | 1 |
| KDM5C | 3 | CHRX | 53293024 | 53293044 | 20 | 2 | −1 |
| KLF4 | 1 | CHR9 | 109622425 | 109622770 | 345 | 9 | −1 |
| KMT2D | 3 | CHR12 | 49379024 | 49379309 | 285 | 2 | 1 |
| KMT2D | 4 | CHR12 | 49725964 | 49726144 | 180 | 2 | 1 |
| MBP | 1 | CHR18 | 74069561 | 74070447 | 886 | 2 | −1 |
| MBP | 2 | CHR18 | 74109928 | 74111699 | 1771 | 5 | −1 |
| MBP | 3 | CHR18 | 74155624 | 74155669 | 45 | 2 | −1 |
| MBP | 4 | CHR18 | 74170082 | 74171191 | 1109 | 6 | −1 |
| MBP | 6 | CHR18 | 74597515 | 74598613 | 1098 | 2 | −1 |
| MBP | 7 | CHR18 | 74685615 | 74685931 | 316 | 5 | −1 |
| MEN1 | 2 | CHR11 | 63769728 | 63769763 | 35 | 3 | 1 |
| MEN1 | 4 | CHR11 | 63850967 | 63851074 | 107 | 4 | 1 |
| MEN1 | 5 | CHR11 | 63904407 | 63904790 | 383 | 2 | 1 |
| MEN1 | 6 | CHR11 | 63916745 | 63917131 | 386 | 2 | 1 |
| MEN1 | 8 | CHR11 | 64120728 | 64121094 | 366 | 4 | 1 |
| MEN1 | 11 | CHR11 | 64306320 | 64306586 | 266 | 2 | 1 |
| MEN1 | 12 | CHR11 | 64403763 | 64403849 | 86 | 4 | 1 |
| MEN1 | 13 | CHR11 | 64611748 | 64614814 | 3066 | 2 | 1 |
| MLH1 | 2 | CHR3 | 37735694 | 37735713 | 19 | 2 | −1 |
| MYD88 | 3 | CHR3 | 38035569 | 38035661 | 92 | 2 | −1 |
| MYD88 | 4 | CHR3 | 38070605 | 38070746 | 141 | 12 | −1 |
| NES | 2 | CHR1 | 156594421 | 156595764 | 1343 | 12 | −1 |
| OLIG2 | 3 | CHR21 | 34207131 | 34207141 | 10 | 2 | −1 |
| OLIG2 | 4 | CHR21 | 34584855 | 34584896 | 41 | 2 | −1 |
| OLIG2 | 5 | CHR21 | 34610669 | 34610692 | 23 | 2 | 1 |
| PBRM1 | 7 | CHR3 | 53229676 | 53229827 | 151 | 2 | −1 |
| PDGFA | 1 | CHR7 | 204578 | 207549 | 2971 | 3 | −1 |
| PDGFA | 8 | CHR7 | 947378 | 949295 | 1917 | 17 | −1 |
| PDGFA | 9 | CHR7 | 997854 | 997865 | 11 | 2 | −1 |
| PDGFA | 10 | CHR7 | 1004681 | 1004748 | 67 | 2 | −1 |
| PDGFA | 12 | CHR7 | 1363132 | 1363196 | 64 | 3 | −1 |
| PDGFRA | 1 | CHR4 | 54179652 | 54180336 | 684 | 4 | −1 |
| PDGFRA | 4 | CHR4 | 55199007 | 55200197 | 1190 | 2 | −1 |
| PRDM1 | 3 | CHR6 | 107397800 | 107397809 | 9 | 2 | 1 |
| RELB | 2 | CHR19 | 46318566 | 46319244 | 678 | 5 | −1 |
| SGCD | 1 | CHR5 | 155108749 | 155109126 | 377 | 3 | −1 |
| SMAD2 | 2 | CHR18 | 45792196 | 45792274 | 78 | 3 | −1 |
| SMAD2 | 3 | CHR18 | 45837031 | 45837122 | 91 | 2 | −1 |
| SMAD2 | 5 | CHR18 | 46100503 | 46101057 | 554 | 5 | −1 |
| SMAD2 | 9 | CHR18 | 46258911 | 46259158 | 247 | 4 | −1 |
| SMAD2 | 10 | CHR18 | 46363532 | 46363764 | 232 | 2 | −1 |
| SMAD2 | 12 | CHR18 | 46446963 | 46448862 | 1899 | 2 | −1 |
| SMAD4 | 1 | CHR18 | 48179928 | 48181583 | 1655 | 2 | 1 |
| SMARCB1 | 1 | CHR22 | 23744655 | 23744863 | 208 | 5 | 1 |
| SMO | 1 | CHR7 | 128510136 | 128510159 | 23 | 4 | −1 |
| SMO | 2 | CHR7 | 128809090 | 128809500 | 410 | 9 | −1 |
| SMO | 3 | CHR7 | 129257134 | 129257460 | 326 | 2 | −1 |
| SMO | 4 | CHR7 | 129387084 | 129387304 | 220 | 2 | 1 |
| SMO | 5 | CHR7 | 129414098 | 129414746 | 648 | 12 | 1 |
| SOCS1 | 2 | CHR16 | 11327291 | 11327385 | 94 | 5 | −1 |
| SOX10 | 2 | CHR22 | 38846250 | 38849206 | 2956 | 9 | −1 |
| SOX10 | 3 | CHR22 | 39110893 | 39113018 | 2125 | 2 | −1 |
| SOX10 | 4 | CHR22 | 39125019 | 39126882 | 1863 | 8 | −1 |
| SOX10 | 6 | CHR22 | 39171695 | 39172892 | 1197 | 8 | −1 |
| SOX10 | 7 | CHR22 | 39225028 | 39226394 | 1366 | 3 | −1 |
| SOX9 | 2 | CHR17 | 70267379 | 70267410 | 31 | 2 | 1 |
| SOX9 | 3 | CHR17 | 70492916 | 70493349 | 433 | 2 | 1 |
| SOX9 | 5 | CHR17 | 70619853 | 70619923 | 70 | 3 | 1 |
| SRSF2 | 9 | CHR17 | 75653246 | 75653373 | 127 | 2 | −1 |
| STK11 | 1 | CHR19 | 583581 | 584951 | 1370 | 3 | 1 |
| STK11 | 2 | CHR19 | 591261 | 592783 | 1522 | 4 | 1 |
| STK11 | 4 | CHR19 | 676269 | 676739 | 470 | 3 | 1 |
| STK11 | 9 | CHR19 | 1285161 | 1285346 | 185 | 4 | 1 |
| STK11 | 11 | CHR19 | 1377927 | 1378043 | 116 | 5 | 1 |
| STK11 | 12 | CHR19 | 1396211 | 1399839 | 3628 | 5 | 1 |
| STK11 | 14 | CHR19 | 1667339 | 1667551 | 212 | 5 | 1 |
| TNFAIP3 | 2 | CHR6 | 138072762 | 138073229 | 467 | 2 | 1 |
| TNFAIP3 | 3 | CHR6 | 138833429 | 138833586 | 157 | 6 | 1 |
| TNFAIP3 | 4 | CHR6 | 138876257 | 138876305 | 48 | 3 | −1 |
| TNFAIP3 | 5 | CHR6 | 138975000 | 138976656 | 1656 | 5 | −1 |
| TRAF7 | 1 | CHR16 | 1381813 | 1382188 | 375 | 5 | 1 |
| TRAF7 | 2 | CHR16 | 1681574 | 1682480 | 906 | 2 | 1 |
| TRAF7 | 3 | CHR16 | 2075970 | 2077768 | 1798 | 2 | 1 |
| TRAF7 | 4 | CHR16 | 2106729 | 2106989 | 260 | 2 | 1 |
| VHL | 4 | CHR3 | 10545002 | 10545134 | 132 | 3 | −1 |
| VIPR2 | 5 | CHR7 | 158710580 | 158711458 | 878 | 6 | −1 |
| ZIC2 | 1 | CHR13 | 100619840 | 100620283 | 443 | 10 | −1 |
| ZIC2 | 2 | CHR13 | 100640027 | 100640092 | 65 | 9 | −1 |

[0184] Example 5: genomic editing experiments verify regulatory inputs in GBM chromatin The experimentally-identified regulatory elements were compared with the cis-regulatory circuits of GBM tumors. Merging of association and functional data revealed alignment of functional enhancers with negatively-associated sites, and of functional silencers with positive associations (FIG. 3B, 11). Genomic manipulation experiments were performed to verify particular predictions of the functional gene-association annotations. The Smoothened, Frizzled Class Receptor (SMO) driver-gene, for example, was abnormally expressed in 23 of the 24 tumors. Three functional enhancers and two functional silencers, consisting of 29 associated methylation sites, were found in the gene domain (Table 4). Indeed, removing a functional, SMO-associated enhancer from the genome of GBM cells reduced SMO expression relative to mock-treated cells, whereas deletion of a silencer unit increased its expression. Moreover, deletion of the enhancer unit has similar effect on the wild-type and silencer-deletion backgrounds (30-50% reduction relative to the background expression levels), suggesting that the enhancer and the silencer units provide additive inputs to the transcriptional machinery (FIG. 3C).

[0185] Overall, of the 26, 152 uncovered functional elements, 15,304 (58.5%) were matched with a GBM-associated site, located up to 500 bp from the element (FIG. 12A). The non-matching elements may be regulatory elements which are not functional in GBM cells, or due to the technical noise of the assays. To discern between the possibilities, the matching between GBM sites and functional elements was analyzed. Indeed, 95.7% of the 1,154 gene-associated methylation sites matched with a nearby element found by the experimental assay (FIG. 12B), suggesting that actual GBM-related methylation sites were effectively detected by the experimental assay. Moreover, TAS analyses of the actual gene-associated sites reveled patterns of methylation effects (FIG. 12C), similar to the patterns learned from TAS analysis of the experimentally-defined elements (FIG. 2F). It was concluded that the general rules of methylation effect on gene transcription, which were learned in the experimental assay, may be applied to bona fide GBM tumors.

### Example 6: Deep Methylation Analysis Reveals the Size and Organization of Cis-Regulatory Units

[0186] To explore the organization and function of the uncovered GBM circuits, the major groups (groups I and II in FIG. 2F and FIG. 12C) of enhancers and silencers were focused on. Hence, sites that, according to the reporter assays, may not belong to these classes were filtered out. The filter excludes 22% (254 of 1,154) circuits of the targeted genes. Of the remaining 900 regulatory circuits of 109 genes, 42% denoted positive relationships with expression, and 58% negative (Table 4). Most (78%) of the genes had multiple (2-68) circuits, averaging 8.3 (3.5 positive, 4.8 negative) circuits per gene (Table 5). This wide-coverage, high-resolution mapping of gene-associated sites provides a unique opportunity to detect the size and organization of actual regulatory units, embedded within large bodies of regulatory chromatin. It was found that gene-associated sites tend to form defined clusters, spanning tens to thousands (average 834, median 333) bps. Each of these clusters contained up to 31 associated sites, which mediate homogenous (positive or negative) input to the transcription of a particular gene. Since each CpG site was distinctly analyzed, these clusters are true learned features of the genome. Hence, gene regulatory domains contain sets of defined, gene-specific, enhancer and silencer units. They were termed gene-regulatory units.

TABLE 5
Methylation-based tumor profiling models

| | | | | | | | | Signif. | | | | |
|---|---|---|---|---|---|---|---|---|---|---|---|---|
| | | Asso. | Associations | | Best | Best | Possible | multi-site | Best | | Neg. | Pos. |
| Driver | Gene | sites | Neg. | Pos. | Neg. R | Pos. R | Combos | models | R | P-val. | sites | sites |
| Yes | ABL1 | 15 | 1 | 14 | −0.61 | 0.70 | 1925 | 1920 | 0.91 | 0.00038 | 1 | 3 |
| Yes | ACVR1B | 2 | 0 | 2 | 0.60 | 0.79 | 1 | 1 | 0.89 | 6.80E−05 | 0 | 2 |
| Yes | AKT1 | 8 | 0 | 8 | 0.55 | 0.63 | 132 | 12 | 0.76 | 0.00013 | 0 | 3 |
| Yes | BCOR | 5 | 4 | 1 | −0.65 | 0.58 | 25 | 5 | 0.73 | 0.00197 | 2 | 0 |
| Yes | BRCA1 | 3 | 2 | 1 | −0.69 | 0.57 | 2 | 2 | 0.74 | 0.0113 | 1 | 1 |
| Yes | CHEK2 | 9 | 9 | 0 | −0.72 | −0.59 | 246 | 245 | 0.93 | 0.00027 | 3 | 0 |
| Yes | CREBBP | 5 | 0 | 5 | 0.58 | 0.78 | 25 | 25 | 0.85 | 1.72E−05 | 0 | 3 |
| Yes | CTNNB1 | 2 | 2 | 0 | −0.68 | −0.64 | 1 | 1 | 0.71 | 0.00028 | 2 | 0 |
| Yes | DAXX | 12 | 5 | 7 | −0.73 | 0.69 | 781 | 781 | 0.87 | 1.26E−05 | 2 | 2 |
| Yes | DNMT3A | 2 | 2 | 0 | −0.74 | −0.66 | 1 | 1 | 0.74 | 8.05E−05 | 2 | 0 |
| Yes | FBXW7 | 2 | 2 | 0 | −0.62 | −0.59 | 1 | 1 | 0.65 | 0.00127 | 2 | 0 |
| Yes | FGFR2 | 7 | 7 | 0 | −0.81 | −0.57 | 91 | 77 | 0.90 | 0.00041 | 3 | 0 |
| Yes | FUBP1 | 2 | 2 | 0 | −0.70 | −0.58 | 1 | 1 | 0.75 | 5.51E−05 | 2 | 0 |
| Yes | H3F3A | 8 | 5 | 3 | −0.77 | 0.65 | 154 | 154 | 0.91 | 1.57E−07 | 2 | 2 |
| Yes | JAK1 | 2 | 1 | 1 | −0.62 | 0.64 | 1 | 1 | 0.75 | 0.00012 | 1 | 1 |
| Yes | KDM5C | 8 | 4 | 4 | −0.75 | 0.68 | 154 | 154 | 0.79 | 5.02E−05 | 2 | 1 |
| Yes | KMT2D | 10 | 0 | 10 | 0.56 | 0.76 | 246 | 245 | 0.82 | 0.00071 | 0 | 4 |
| Yes | MEN1 | 34 | 1 | 33 | −0.62 | 0.88 | 15092 | 9822 | 0.97 | 5.28E−05 | 0 | 4 |
| Yes | MLH1 | 4 | 4 | 0 | −0.65 | −0.55 | 11 | 11 | 0.69 | 0.0009 | 2 | 0 |
| Yes | MSH2 | 2 | 1 | 1 | −0.69 | 0.61 | 1 | 1 | 0.72 | 0.00018 | 1 | 1 |
| Yes | PBRM1 | 9 | 8 | 1 | −0.67 | 0.64 | 246 | 224 | 0.78 | 5.80E−05 | 2 | 1 |
| Yes | PRDM1 | 6 | 1 | 5 | −0.65 | 0.71 | 50 | 50 | 0.84 | 4.73E−06 | 1 | 2 |
| Yes | RNF43 | 4 | 4 | 0 | −0.83 | −0.58 | 4 | 3 | 0.90 | 8.97E−09 | 2 | 0 |
| Yes | SMAD2 | 24 | 24 | 0 | −0.83 | −0.56 | 10858 | 10858 | 0.98 | 2.10E−06 | 4 | 0 |
| Yes | SMO | 29 | 15 | 14 | −0.75 | 0.75 | 17875 | 17550 | 0.80 | 0.00027 | 2 | 2 |
| Yes | SOCS1 | 10 | 8 | 2 | −0.75 | 0.70 | 375 | 269 | 0.86 | 0.00108 | 4 | 0 |
| Yes | SOX9 | 9 | 0 | 9 | 0.55 | 0.66 | 246 | 246 | 0.73 | 0.00073 | 0 | 4 |
| Yes | SRSF2 | 10 | 9 | 1 | −0.67 | 0.60 | 375 | 291 | 0.90 | 0.00106 | 3 | 1 |
| Yes | TNFAIP3 | 18 | 10 | 8 | −0.72 | 0.71 | 4029 | 4029 | 0.90 | 1.41E−06 | 2 | 2 |
| Yes | TRAF7 | 14 | 0 | 14 | 0.55 | 0.84 | 1012 | 824 | 0.87 | 0.00025 | 0 | 4 |
| Yes | U2AF1 | 2 | 0 | 2 | 0.62 | 0.71 | 1 | 1 | 0.74 | 0.00013 | 0 | 2 |
| Yes | VHL | 8 | 8 | 0 | −0.77 | 0.60 | 154 | 153 | 0.92 | 0.00018 | 4 | 0 |
| Yes | AR | 1 | 1 | 0 | −0.64 | −0.64 | 0 | 0 | 0.00 | 0 | 0 | 0 |
| Yes | CARD11 | 1 | 0 | 1 | 0.63 | 0.63 | 0 | 0 | 0.00 | 0 | 0 | 0 |
| Yes | CASP8 | 1 | 0 | 1 | 0.62 | 0.62 | 0 | 0 | 0.00 | 0 | 0 | 0 |
| Yes | CDKN2C | 1 | 1 | 0 | −0.63 | −0.63 | 0 | 0 | 0.00 | 0 | 0 | 0 |
| Yes | MSH6 | 1 | 0 | 1 | 0.64 | 0.64 | 0 | 0 | 0.00 | 0 | 0 | 0 |
| No | AKT2 | 13 | 0 | 13 | 0.55 | 0.76 | 550 | 548 | 0.95 | 4.28E−08 | 0 | 4 |
| No | CD68 | 2 | 1 | 1 | −0.57 | 0.59 | 1 | 1 | 0.69 | 0.00042 | 1 | 1 |
| No | DSCAML1 | 5 | 1 | 4 | −0.56 | 0.66 | 25 | 25 | 0.84 | 0.0029 | 1 | 2 |
| No | FGF17 | 14 | 0 | 14 | 0.56 | 0.80 | 1079 | 1079 | 0.90 | 3.88E−05 | 0 | 4 |
| No | HK3 | 5 | 1 | 4 | −0.65 | 0.68 | 25 | 25 | 0.92 | 8.97E−05 | 1 | 3 |
| No | IFI30 | 4 | 1 | 3 | −0.55 | 0.68 | 11 | 4 | 0.70 | 0.00031 | 1 | 1 |
| No | RELB | 7 | 5 | 2 | −0.73 | 0.81 | 53 | 38 | 0.92 | 0.0001 | 0 | 2 |
| No | ZIC2 | 19 | 19 | 0 | −0.77 | −0.55 | 5016 | 5011 | 0.86 | 3.34E−05 | 4 | 0 |
| No | TOP1 | 1 | 0 | 1 | 0.58 | 0.58 | 0 | 0 | 0.00 | 0 | 0 | 0 |
| No | TRADD | 1 | 1 | 0 | −0.61 | −0.61 | 0 | 0 | 0.00 | 0 | 0 | 0 |
| Yes | CDKN2A | 17 | 17 | 0 | −0.82 | −0.60 | 3196 | 3196 | 0.89 | 1.00E−06 | 4 | 0 |
| Yes | EGFR | 22 | 0 | 22 | 0.56 | 0.77 | 9086 | 9055 | 0.86 | 1.73E−05 | 0 | 4 |
| Yes | EZH2 | 2 | 2 | 0 | −0.59 | −0.59 | 1 | 1 | 0.59 | 0.0236 | 2 | 0 |
| Yes | G011 | 4 | 1 | 3 | −0.59 | 0.67 | 11 | 11 | 0.81 | 0.01053 | 1 | 3 |
| Yes | GATA1 | 3 | 0 | 3 | 0.78 | 0.81 | 4 | 4 | 0.94 | 0.00027 | 0 | 2 |
| Yes | MYD88 | 16 | 16 | 0 | −0.75 | −0.56 | 2500 | 2391 | 0.85 | 0.00145 | 4 | 0 |
| Yes | RPL5 | 2 | 1 | 1 | −0.60 | 0.66 | 1 | 1 | 0.79 | 0.00287 | 1 | 1 |
| Yes | ALK | 0 | 0 | 0 | 0.00 | 0.00 | 0 | 0 | 0.00 | 0 | 0 | 0 |
| Yes | APC | 0 | 0 | 0 | 0.00 | 0.00 | 0 | 0 | 0.00 | 0 | 0 | 0 |
| Yes | ARID1A | 2 | 0 | 2 | 0.65 | 0.68 | 1 | 1 | 0.64 | 0.00138 | 0 | 2 |
| Yes | ARID1B | 0 | 0 | 0 | 0.00 | 0.00 | 0 | 0 | 0.00 | 0 | 0 | 0 |
| Yes | ARID2 | 0 | 0 | 0 | 0.00 | 0.00 | 0 | 0 | 0.00 | 0 | 0 | 0 |
| Yes | ASXL1 | 4 | 1 | 3 | −0.65 | 0.87 | 4 | 4 | 0.82 | 6.14E−06 | 1 | 1 |
| Yes | ATM | 0 | 0 | 0 | 0.00 | 0.00 | 0 | 0 | 0.00 | 0 | 0 | 0 |
| Yes | ATRX | 0 | 0 | 0 | 0.00 | 0.00 | 0 | 0 | 0.00 | 0 | 0 | 0 |
| Yes | AXIN1 | 18 | 1 | 17 | −0.76 | 0.87 | 2500 | 1818 | 0.79 | 0.00934 | 0 | 4 |
| Yes | B2M | 0 | 0 | 0 | 0.00 | 0.00 | 0 | 0 | 0.00 | 0 | 0 | 0 |
| Yes | BAP1 | 1 | 1 | 0 | −0.57 | −0.57 | 0 | 0 | 0.00 | 0 | 0 | 0 |
| Yes | BCL2 | 1 | 1 | 0 | −0.65 | −0.65 | 0 | 0 | 0.00 | 0 | 0 | 0 |
| Yes | BRAF | 0 | 0 | 0 | 0.00 | 0.00 | 0 | 0 | 0.00 | 0 | 0 | 0 |
| Yes | BRCA2 | 2 | 0 | 2 | 0.57 | 0.60 | 1 | 1 | 0.52 | 0.01977 | 0 | 2 |
| Yes | CBL | 0 | 0 | 0 | 0.00 | 0.00 | 0 | 0 | 0.00 | 0 | 0 | 0 |
| Yes | CDC73 | 0 | 0 | 0 | 0.00 | 0.00 | 0 | 0 | 0.00 | 0 | 0 | 0 |
| Yes | CDH1 | 2 | 1 | 1 | −0.73 | 0.85 | 0 | 0 | 0.00 | 0 | 0 | 0 |
| Yes | CEBPA | 0 | 0 | 0 | 0.00 | 0.00 | 0 | 0 | 0.00 | 0 | 0 | 0 |
| Yes | CIC | 7 | 0 | 7 | 0.55 | 0.85 | 50 | 50 | 0.70 | 0.01021 | 0 | 4 |
| Yes | CSF1R | 1 | 0 | 1 | 0.69 | 0.69 | 0 | 0 | 0.00 | 0 | 0 | 0 |
| Yes | CYLD | 0 | 0 | 0 | 0.00 | 0.00 | 0 | 0 | 0.00 | 0 | 0 | 0 |
| Yes | DNMT1 | 2 | 0 | 2 | 0.61 | 0.79 | 0 | 0 | 0.00 | 0 | 0 | 0 |
| Yes | EP300 | 2 | 1 | 1 | −0.66 | 0.61 | 1 | 1 | 0.64 | 0.0165 | 1 | 1 |
| Yes | ERBB2 | 11 | 10 | 1 | −0.90 | 0.67 | 309 | 207 | 0.87 | 0.00271 | 3 | 1 |
| Yes | FGFR3 | 13 | 5 | 8 | −0.70 | 0.90 | 781 | 751 | 0.89 | 6.74E−05 | 1 | 3 |
| Yes | FLT3 | 0 | 0 | 0 | 0.00 | 0.00 | 0 | 0 | 0.00 | 0 | 0 | 0 |
| Yes | FOXL2 | 0 | 0 | 0 | 0.00 | 0.00 | 0 | 0 | 0.00 | 0 | 0 | 0 |
| Yes | G0Q | 0 | 0 | 0 | 0.00 | 0.00 | 0 | 0 | 0.00 | 0 | 0 | 0 |
| Yes | G0S | 2 | 2 | 0 | −0.68 | −0.58 | 1 | 1 | 0.57 | 0.00591 | 2 | 0 |
| Yes | GATA2 | 0 | 0 | 0 | 0.00 | 0.00 | 0 | 0 | 0.00 | 0 | 0 | 0 |
| Yes | GATA3 | 0 | 0 | 0 | 0.00 | 0.00 | 0 | 0 | 0.00 | 0 | 0 | 0 |
| Yes | HNF1A | 1 | 1 | 0 | −0.57 | −0.57 | 0 | 0 | 0.00 | 0 | 0 | 0 |
| Yes | HRAS | 4 | 0 | 4 | 0.56 | 0.83 | 4 | 4 | 0.68 | 0.01264 | 0 | 2 |
| Yes | IDH1 | 0 | 0 | 0 | 0.00 | 0.00 | 0 | 0 | 0.00 | 0 | 0 | 0 |
| Yes | IDH2 | 2 | 0 | 2 | 0.56 | 0.87 | 0 | 0 | 0.00 | 0 | 0 | 0 |
| Yes | JAK2 | 0 | 0 | 0 | 0.00 | 0.00 | 0 | 0 | 0.00 | 0 | 0 | 0 |
| Yes | JAK3 | 0 | 0 | 0 | 0.00 | 0.00 | 0 | 0 | 0.00 | 0 | 0 | 0 |
| Yes | KDM6A | 0 | 0 | 0 | 0.00 | 0.00 | 0 | 0 | 0.00 | 0 | 0 | 0 |
| Yes | KIT | 0 | 0 | 0 | 0.00 | 0.00 | 0 | 0 | 0.00 | 0 | 0 | 0 |
| Yes | KLF4 | 11 | 10 | 1 | −0.81 | 0.73 | 550 | 550 | 0.78 | 0.00018 | 3 | 1 |
| Yes | KMT2C | 0 | 0 | 0 | 0.00 | 0.00 | 0 | 0 | 0.00 | 0 | 0 | 0 |
| Yes | KRAS | 0 | 0 | 0 | 0.00 | 0.00 | 0 | 0 | 0.00 | 0 | 0 | 0 |
| Yes | MAP2K1 | 0 | 0 | 0 | 0.00 | 0.00 | 0 | 0 | 0.00 | 0 | 0 | 0 |
| Yes | MAP3K1 | 0 | 0 | 0 | 0.00 | 0.00 | 0 | 0 | 0.00 | 0 | 0 | 0 |
| Yes | MED12 | 0 | 0 | 0 | 0.00 | 0.00 | 0 | 0 | 0.00 | 0 | 0 | 0 |
| Yes | MET | 1 | 1 | 0 | 0.74 | −0.74 | 0 | 0 | 0.00 | 0 | 0 | 0 |
| Yes | MPL | 0 | 0 | 0 | 0.00 | 0.00 | 0 | 0 | 0.00 | 0 | 0 | 0 |
| Yes | NCOR1 | 0 | 0 | 0 | 0.00 | 0.00 | 0 | 0 | 0.00 | 0 | 0 | 0 |
| Yes | NF1 | 0 | 0 | 0 | 0.00 | 0.00 | 0 | 0 | 0.00 | 0 | 0 | 0 |
| Yes | NF2 | 1 | 0 | 1 | 0.63 | 0.63 | 0 | 0 | 0.00 | 0 | 0 | 0 |
| Yes | NFE2L2 | 0 | 0 | 0 | 0.00 | 0.00 | 0 | 0 | 0.00 | 0 | 0 | 0 |
| Yes | NOTCH1 | 8 | 1 | 7 | −0.71 | 0.88 | 50 | 50 | 0.86 | 4.03E−05 | 0 | 4 |
| Yes | NOTCH2 | 0 | 0 | 0 | 0.00 | 0.00 | 0 | 0 | 0.00 | 0 | 0 | 0 |
| Yes | NPM1 | 0 | 0 | 0 | 0.00 | 0.00 | 0 | 0 | 0.00 | 0 | 0 | 0 |
| Yes | NRAS | 1 | 1 | 0 | −0.58 | −0.58 | 0 | 0 | 0.00 | 0 | 0 | 0 |
| Yes | PAX5 | 0 | 0 | 0 | 0.00 | 0.00 | 0 | 0 | 0.00 | 0 | 0 | 0 |
| Yes | PDGFRA | 8 | 8 | 0 | −0.82 | −0.58 | 154 | 154 | 0.80 | 0.00022 | 4 | 0 |
| Yes | PHF6 | 0 | 0 | 0 | 0.00 | 0.00 | 0 | 0 | 0.00 | 0 | 0 | 0 |
| Yes | PIK3CA | 1 | 0 | 1 | 0.65 | 0.65 | 0 | 0 | 0.00 | 0 | 0 | 0 |
| Yes | PIK3R1 | 0 | 0 | 0 | 0.00 | 0.00 | 0 | 0 | 0.00 | 0 | 0 | 0 |
| Yes | PPP2R1A | 0 | 0 | 0 | 0.00 | 0.00 | 0 | 0 | 0.00 | 0 | 0 | 0 |
| Yes | PTCH1 | 1 | 1 | 0 | −0.69 | −0.69 | 0 | 0 | 0.00 | 0 | 0 | 0 |
| Yes | PTEN | 2 | 0 | 2 | 0.61 | 0.67 | 1 | 1 | 0.64 | 0.00356 | 0 | 2 |
| Yes | PTPN11 | 0 | 0 | 0 | 0.00 | 0.00 | 0 | 0 | 0.00 | 0 | 0 | 0 |
| Yes | RB1 | 0 | 0 | 0 | 0.00 | 0.00 | 0 | 0 | 0.00 | 0 | 0 | 0 |
| Yes | RET | 1 | 1 | 0 | −0.72 | −0.72 | 0 | 0 | 0.00 | 0 | 0 | 0 |
| Yes | RUNX1 | 0 | 0 | 0 | 0.00 | 0.00 | 0 | 0 | 0.00 | 0 | 0 | 0 |
| Yes | SETBP1 | 0 | 0 | 0 | 0.00 | 0.00 | 0 | 0 | 0.00 | 0 | 0 | 0 |
| Yes | SETD2 | 1 | 0 | 1 | 0.73 | 0.73 | 0 | 0 | 0.00 | 0 | 0 | 0 |
| Yes | SF3B1 | 0 | 0 | 0 | 0.00 | 0.00 | 0 | 0 | 0.00 | 0 | 0 | 0 |
| Yes | SMAD4 | 3 | 0 | 3 | 0.61 | 0.75 | 4 | 4 | 0.63 | 0.00186 | 0 | 2 |
| Yes | SMARCA4 | 2 | 0 | 2 | 0.66 | 0.76 | 0 | 0 | 0.00 | 0 | 0 | 0 |
| Yes | SMARCB1 | 5 | 0 | 5 | 0.57 | 0.83 | 1 | 1 | 0.65 | 0.00666 | 0 | 2 |
| Yes | SPOP | 3 | 3 | 0 | −0.69 | −0.59 | 4 | 4 | 0.66 | 0.00089 | 2 | 0 |
| Yes | STAG2 | 0 | 0 | 0 | 0.00 | 0.00 | 0 | 0 | 0.00 | 0 | 0 | 0 |
| Yes | STK11 | 41 | 2 | 39 | −0.88 | 0.76 | 1925 | 1925 | 0.81 | 4.55E−05 | 0 | 4 |
| Yes | TET2 | 0 | 0 | 0 | 0.00 | 0.00 | 0 | 0 | 0.00 | 0 | 0 | 0 |
| Yes | TP53 | 0 | 0 | 0 | 0.00 | 0.00 | 0 | 0 | 0.00 | 0 | 0 | 0 |
| Yes | TSC1 | 4 | 1 | 3 | −0.67 | 0.95 | 4 | 4 | 0.78 | 0.0085 | 1 | 2 |
| Yes | TSHR | 0 | 0 | 0 | 0.00 | 0.00 | 0 | 0 | 0.00 | 0 | 0 | 0 |
| Yes | WT1 | 0 | 0 | 0 | 0.00 | 0.00 | 0 | 0 | 0.00 | 0 | 0 | 0 |
| No | CHI3L1 | 19 | 18 | 1 | −0.75 | 0.58 | 4983 | 4976 | 0.96 | 0.00017 | 3 | 1 |
| No | DLL3 | 7 | 1 | 6 | −0.65 | 0.76 | 91 | 91 | 0.82 | 3.45E−05 | 1 | 3 |
| No | EN1 | 38 | 38 | 0 | −0.73 | −0.55 | 59500 | 58737 | 0.85 | 6.85E−05 | 4 | 0 |
| No | GDF15 | 68 | 65 | 3 | −0.80 | 0.78 | 92131 | 46116 | 0.90 | 8.11E−06 | 4 | 0 |
| No | IGFBP6 | 6 | 4 | 2 | −0.67 | 0.63 | 50 | 49 | 0.87 | 1.25E−07 | 1 | 1 |
| No | MBP | 23 | 23 | 0 | −0.75 | −0.56 | 10879 | 10879 | 0.85 | 7.89E−06 | 4 | 0 |
| No | NES | 14 | 13 | 1 | −0.76 | 0.62 | 1079 | 1035 | 0.84 | 0.00041 | 4 | 0 |
| No | OLIG2 | 11 | 7 | 4 | −0.77 | 0.82 | 550 | 550 | 0.90 | 1.92E−07 | 2 | 2 |
| No | PDGFA | 35 | 31 | 4 | −0.72 | 0.69 | 41416 | 39485 | 0.91 | 7.58E−07 | 4 | 0 |
| No | SOX10 | 34 | 33 | 1 | −0.76 | 0.61 | 20826 | 20826 | 0.92 | 3.07E−06 | 4 | 0 |
| No | VIPR2 | 23 | 17 | 6 | −0.72 | 0.70 | 10879 | 9544 | 0.85 | 0.00495 | 3 | 1 |
| No | ACSS3 | 1 | 0 | 1 | 0.73 | 0.73 | 0 | 0 | 0.00 | 0 | 0 | 0 |
| No | AQP9 | 1 | 1 | 0 | −0.69 | −0.69 | 0 | 0 | 0.00 | 0 | 0 | 0 |
| No | ASXL3 | 0 | 0 | 0 | 0.00 | 0.00 | 0 | 0 | 0.00 | 0 | 0 | 0 |
| No | BATF | 0 | 0 | 0 | 0.00 | 0.00 | 0 | 0 | 0.00 | 0 | 0 | 0 |
| No | BCAT1 | 0 | 0 | 0 | 0.00 | 0.00 | 0 | 0 | 0.00 | 0 | 0 | 0 |
| No | CA12 | 12 | 5 | 7 | −0.74 | 0.63 | 781 | 779 | 0.72 | 0.00119 | 2 | 2 |
| No | CASP5 | 0 | 0 | 0 | 0.00 | 0.00 | 0 | 0 | 0.00 | 0 | 0 | 0 |
| No | CD163 | 0 | 0 | 0 | 0.00 | 0.00 | 0 | 0 | 0.00 | 0 | 0 | 0 |
| No | CD177 | 0 | 0 | 0 | 0.00 | 0.00 | 0 | 0 | 0.00 | 0 | 0 | 0 |
| No | DMRTA2 | 0 | 0 | 0 | 0.00 | 0.00 | 0 | 0 | 0.00 | 0 | 0 | 0 |
| No | ERBB3 | 2 | 2 | 0 | −0.77 | −0.57 | 1 | 1 | 0.63 | 0.01542 | 2 | 0 |
| No | FBXO3 | 0 | 0 | 0 | 0.00 | 0.00 | 0 | 0 | 0.00 | 0 | 0 | 0 |
| No | FCGR2B | 3 | 2 | 1 | −0.74 | 0.62 | 4 | 4 | 0.68 | 0.00655 | 2 | 0 |
| No | FGF9 | 0 | 0 | 0 | 0.00 | 0.00 | 0 | 0 | 0.00 | 0 | 0 | 0 |
| No | FPR2 | 0 | 0 | 0 | 0.00 | 0.00 | 0 | 0 | 0.00 | 0 | 0 | 0 |
| No | GABRB2 | 0 | 0 | 0 | 0.00 | 0.00 | 0 | 0 | 0.00 | 0 | 0 | 0 |
| No | GLYATL2 | 0 | 0 | 0 | 0.00 | 0.00 | 0 | 0 | 0.00 | 0 | 0 | 0 |
| No | GRIA4 | 0 | 0 | 0 | 0.00 | 0.00 | 0 | 0 | 0.00 | 0 | 0 | 0 |
| No | GRID2 | 0 | 0 | 0 | 0.00 | 0.00 | 0 | 0 | 0.00 | 0 | 0 | 0 |
| No | LGI3 | 0 | 0 | 0 | 0.00 | 0.00 | 0 | 0 | 0.00 | 0 | 0 | 0 |
| No | LIF | 1 | 1 | 0 | −0.62 | −0.62 | 0 | 0 | 0.00 | 0 | 0 | 0 |
| No | LILRB2 | 0 | 0 | 0 | 0.00 | 0.00 | 0 | 0 | 0.00 | 0 | 0 | 0 |
| No | LYVE1 | 0 | 0 | 0 | 0.00 | 0.00 | 0 | 0 | 0.00 | 0 | 0 | 0 |
| No | SGCD | 3 | 3 | 0 | −0.61 | −0.55 | 4 | 4 | 0.58 | 0.00545 | 2 | 0 |
| No | SLC17A7 | 0 | 0 | 0 | 0.00 | 0.00 | 0 | 0 | 0.00 | 0 | 0 | 0 |
| No | SNCG | 1 | 0 | 1 | 0.59 | 0.59 | 0 | 0 | 0.00 | 0 | 0 | 0 |
| No | SOX2 | 0 | 0 | 0 | 0.00 | 0.00 | 0 | 0 | 0.00 | 0 | 0 | 0 |
| No | SPHK1 | 1 | 0 | 1 | 0.59 | 0.59 | 0 | 0 | 0.00 | 0 | 0 | 0 |
| No | TLR2 | 0 | 0 | 0 | 0.00 | 0.00 | 0 | 0 | 0.00 | 0 | 0 | 0 |
| No | TLR4 | 0 | 0 | 0 | 0.00 | 0.00 | 0 | 0 | 0.00 | 0 | 0 | 0 |
| No | ZNF676 | 1 | 0 | 1 | 0.58 | 0.58 | 0 | 0 | 0.00 | 0 | 0 | 0 |

### Example 7: Gene-Regulatory Units Compose Cis-Regulatory Networks

[0187] Next, the relationships between gene-regulatory units of given genes were analyzed. Clearly, silencer and enhancer units of the same gene tend to be reversely coordinated across the tumors, so tumors with unmethylated silencers and methylated enhancers display lower expression of the gene, whereas tumors with higher expression of the gene have the opposite arrangements (FIG. 3D-E, 13A-B). Hence, enhancers and silencers of a given gene may be spread over large portions of the gene domain, and yet maintain coordinated levels of activities. These networks of cooperating enhancers and silencers are termed the cis-regulatory network of genes.

[0188] It was previously unclear how different genes within the same regulatory domain maintained independent regulatory profiles. To gain understanding of the issue the relationships between networks of neighboring genes were analyzed. Interestingly, it was found that units of particular genes, even if intermixed with units of other genes, maintain their own inter-network coordination, whereas units of different genes, even when close together, display independent activities (FIG. 14). These structures of spatially intermixed, gene-specific networks allow independent regulation of genes within shared regulatory domains.

### Example 8: Mathematical Modulation Signifies Key Network Sites

[0189] The interaction between networked silencers and enhancers was further explored by examining multiplexed effects on gene expression: Given a certain effect of an arbitrarily selected regulatory site on expression of a controlled gene, it was asked whether multiplexed models that consider additional associated sites provide improved expression prediction. Therefore, redundant regulatory sites should provide no improvement, whereas antagonists or synergistic sites are expected to improve the prediction provided by each of the sites alone. Using stepwise analyses, the best models of possible combinations of up to four sites were identified (FIG. 4A). For example, the eighteen TNFAIP3-associated sites produced predictive R-values ranging between −0.72 and 0.71 for each individual site (Table 4). The tests of the 4,029 possible combinations of one to four sites out of the 18 cis-regulatory circuits, revealed a model that incorporated the methylation levels of two positive and two negative sites, providing better prediction power than each of the sites alone (R=0.9, p=1.41E-06). Hence, the revealed model signifies the methylation sites that provide the best description of the gene expression-variation. By that, it hints to the particular regulatory sites, out of all associated sites, which are most significant to the regulation of the gene. Similarly, the best model for the SMO gene, incorporating the methylation level of two positive and two negative sites, provided better prediction power (R=0.8, p=0.00027) than each of the 29 associated sites alone. As in the case of TNFAIP3, these sites resided within positive and negative regulatory units (FIG. 4B). Note that the model used no preliminary assumptions regarding the nature of the most predictive sites. Therefore, the fact that both positive and negative sites were used by the produced models, suggests that they are jointly responsible to the determination of gene expression level.

[0190] Overall, out of 105 genes with significant models, the expression of 58 genes were best predicted by synergic combinations of sites, providing better prediction than each of the sites alone (Table 5). The power of mathematically-significant models was further verified by testing their predictions in tumors that were not used during the model development (FIG. 4C, 15). Of the 48 genes with validated synergic or single-site models, silencers were involved in the regulation of 34 genes (FIG. 4D).

[0191] To eliminate possible bias due to the limit of up to four associated sites in the gene-expression models, the models were rebuilt using a different approach in which no limitation on the number of participating sites was applied. This independent analysis yielded very similar results (FIG. 16), with an average of 3.8 contributing sites per gene-model across all genes, thus indicating the robustness of the model-development method.

[0192] It was concluded that mathematical modulation of methylation effects provides an efficient way to identify contributing regulatory sites and to explore the organization and function of gene-specific networks. Out of the many gene-associated sites presented in gene regulatory domains, and numerus possible combinations of the associated sites, this approach efficiently identified guiding cis-regulatory sites and networks.

### Example 9: Epigenetically-Retuned Cis-Regulatory Networks Guide Gene Transformation

[0193] Finally, the contributions of mutations in silencers, enhancers, or coding sequences to driver gene malfunction were compared. In the majority (68.4%) of the tumors, fewer than five driver genes were affected by nonsynonymous or copy number mutations (FIG. 4E), in line with previous analyses of this cancer. To reveal the effect of regulatory sequence mutations, the uncovered silencers and enhancers in eight of the patients were deep-sequenced, and the effect of sequence variations on expression of the associated genes was analyzed. Notably, only one possible event was revealed, aside from common sequence polymorphisms. As current models of cancer predict a minimum number of five to eight mutated driver genes, regulatory and coding sequence mutations alone cannot explain the appearance of a majority of the GBM tumors. In contrast, all tumors included more than eight abnormally expressed driver genes that associated with methylation-tuned regulatory units and were explained by confirmed methylation-based models of expression variations (FIG. 4E). Silencers were involved, alone or in cooperation with enhancers, in almost two-thirds of these mis-regulation events (Table 6) and were implicated in the malfunction of genes driving a wide range of cancer initiation and progression processes (FIG. 17). It was concluded that epigenetic retuning of networked regulatory elements plays a prime role in the malfunction of cancer driver-genes.

TABLE 6
Genes affected by regulatory or coding mutation.

| | | Fraction of | Fraction of | | |
|---|---|---|---|---|---|
| | | tumors with | tumors with | | |
| Mu- | | coding | abnormal | Expression | |
| tation | Driver | mutations | expression ^{(a)} | variation | Silencer |
| type | gene | (%) | (%) | explained ^{(b)} | involved |
| Reg- | SMO | 0 | 95.8 | Yes | Yes |
| ulatory | SOX9 | 0 | 79.2 | Yes | Yes |
| | CASP8 | 0 | 70.8 | Yes | Yes |
| | TNFAIP3 | 0 | 70.8 | Yes | Yes |
| | H3F3A | 0 | 54.2 | Yes | Yes |
| | ABL1 | 0 | 45.8 | Yes | Yes |
| | DAXX | 0 | 29.2 | Yes | Yes |
| | MSH6 | 0 | 29.2 | Yes | Yes |
| | JAK1 | 0 | 8.3 | Yes | Yes |
| | U2AF1 | 0 | 8.3 | Yes | Yes |
| | SOCS1 | 0 | 4.2 | Yes | Yes |
| | SRSF2 | 0 | 4.2 | Yes | Yes |
| | FBXW7 | 0 | 100 | Yes | No |
| | FGFR2 | 0 | 79.2 | Yes | No |
| | AR | 0 | 70.8 | Yes | No |
| | ZIC2 | 0 | 12.5 | Yes | No |
| | CHEK2 | 0 | 66.7 | Yes | No |
| | CTNNB1 | 0 | 8.3 | Yes | No |
| | MLH1 | 0 | 8.3 | Yes | No |
| | SMAD2 | 0 | 4.2 | Yes | No |
| | VHL | 0 | 4.2 | Yes | No |
| Reg- | BRCA1 | 21.1 | 83.3 | Yes | Yes |
| ulatory | TRAF7 | 5.3 | 41.7 | Yes | Yes |
| and | AKT1 | 5.3 | 20.8 | Yes | Yes |
| coding | PRDM1 | 10.5 | 0.8 | Yes | Yes |
| | PBRM1 | 5.3 | 12.5 | Yes | Yes |
| | MSH2 | 10.5 | 8.3 | Yes | Yes |
| | MEN1 | 5.3 | 4.2 | Yes | Yes |
| | CREBBP | 10.5 | 4.2 | Yes | Yes |
| | CDKN2C | 5.3 | 100 | Yes | No |
| | FUBP1 | 5.3 | 8.3 | Yes | No |
| Coding | TP53 | 47 | 100 | No | — |

^{(a)} Two-fold or more expression differences from normal brain samples.
^{(b)} By verified methylation-based models of expression variation.

[0194] Although the invention has been described in conjunction with specific embodiments thereof, it is evident that many alternatives, modifications and variations will be apparent to those skilled in the art. Accordingly, it is intended to embrace all such alternatives, modifications and variations that fall within the spirit and broad scope of the appended claims.

The application's sequence listing, which the Patent Office published only in electronic form, follows.

SEQUENCE LISTING (38077 sequences)

SEQ ID NO: 1 - DNA, 41 bp, Artificial
  Synthetic
tagagcatgcaccggtaatgatacggcgaccaccgagatct

SEQ ID NO: 2 - DNA, 40 bp, Artificial
  Synthetic
ggccgaattcgtcgaccaagcagaagacggcatacgagat

SEQ ID NO: 3 - DNA, 26 bp, Artificial
  Synthetic
caaactcatcaatgtatcttatcatg

SEQ ID NO: 4 - DNA, 23 bp, Artificial
  Synthetic
  Phosphorothioate backbone (18)..(23)
gggccagctgttggggtgtccac

SEQ ID NO: 5 - DNA, 21 bp, Artificial
  Synthetic
  Phosphorothioate backbone (18)..(21)
cttatcatgtctgctcgaagc

SEQ ID NO: 6 - DNA, 20 bp, Homo sapiens
accctgcgcgccgaggtatc

SEQ ID NO: 7 - DNA, 20 bp, Homo sapiens
gcgacctgggagccgccgcc

SEQ ID NO: 8 - DNA, 20 bp, Homo sapiens
accgccggtgccgacctttg

SEQ ID NO: 9 - DNA, 20 bp, Homo sapiens
gcgtggtagtccttctccgg

SEQ ID NO: 10 - DNA, 20 bp, Homo sapiens
gtcctgctctatcttgtcgt

SEQ ID NO: 11 - DNA, 20 bp, Homo sapiens
cacatgtaggtctttctgac

SEQ ID NO: 12 - DNA, 24 bp, Homo sapiens
ccggctctgggacttacaccaatg

SEQ ID NO: 13 - DNA, 24 bp, Homo sapiens
ccggacggtggatcttctttagtt

SEQ ID NO: 14 - DNA, 24 bp, Homo sapiens
ccggtccacctttttgtttcctct

SEQ ID NO: 15 - DNA, 24 bp, Homo sapiens
ccggaagatggatgtcccagcacc

SEQ ID NO: 16 - DNA, 19 bp, Homo sapiens
gcagtgcgctcacttcaaa

SEQ ID NO: 17 - DNA, 20 bp, Homo sapiens
ctcctggggcgagatcaaag

SEQ ID NO: 18 - DNA, 22 bp, Homo sapiens
catggtcccggttcccatttgg

SEQ ID NO: 19 - DNA, 21 bp, Homo sapiens
gccctccacagaccaaacagc

SEQ ID NO: 20 - DNA, 20 bp, Homo sapiens
gctcagtctcagtgtgggag

SEQ ID NO: 21 - DNA, 22 bp, Homo sapiens
ggcgtttccacaagagatgagc

SEQ ID NO: 22 - DNA, 22 bp, Homo sapiens
tgctcatcgtgggaggctactt

SEQ ID NO: 23 - DNA, 22 bp, Homo sapiens
atcttgctggcagccttctcac

SEQ ID NO: 24 - DNA, 21 bp, Homo sapiens
tgacactggcaaaacaatgca

SEQ ID NO: 25 - DNA, 21 bp, Homo sapiens
ggtccttttcaccagcaagct

SEQ ID NO: 26 - DNA, 21 bp, Homo sapiens
tgcacaggagccaagagtgaa

SEQ ID NO: 27 - DNA, 20 bp, Homo sapiens
cacatcacagctccccacca

SEQ ID NO: 28 - DNA, 120 bp, Homo sapiens
atacgatcttctgccccaccagtttttgacaggactccctggagcagctagaatctgtgagaataaactgagcatcaccagactacatttttactgcagtcacactaggtctggctatat

SEQ ID NO: 29 - DNA, 120 bp, Homo sapiens
atacgtcccaccatacatttagcatcttttcttggaacttgatttgttaagttccaaatttcaggtgctcaacctgtgcccattgaaaatcacgtggtaaatttaaaacagcttattttc

SEQ ID NO: 30 - DNA, 120 bp, Homo sapiens
tctcgtgggtgacaagcctcaaatcaaacctatcacttagtctgatgaaggcaggacaaagcagtggggaagagaacacattaaaacaggcattcagtgatgagcttgtaaaggtcaaga

SEQ ID NO: 31 - DNA, 120 bp, Homo sapiens
tttcgcctattagaggcaattgaattaatgtttccatttggggtaggacaaaggagagagaatgagaaacaatcagatagaacctatttgacttttttcataaaattgtttctattttgc

SEQ ID NO: 32 - DNA, 120 bp, Homo sapiens
caacgtgcttcggtgtatactaagaaacaagcaaaaggtttttatgtttttcaagaaagtacactggcgtttctgcacaggcagtttatatttgtgtgtttgtttcctgaacacagaact

SEQ ID NO: 33 - DNA, 120 bp, Homo sapiens
ttccgggagatgaggctaatggatttaacaagtaaaatctggccagcagaccctttatgttgccttcatagtgaataaactggtggctcctatcatcactctccaatgggtgcaaaaata

SEQ ID NO: 34 - DNA, 120 bp, Homo sapiens
gcccgttcctggccttctggccccaaaggtcattattcagccacagcacaccctctggttggcttcatcactggctttctctgcatattagagtgatccagacctgctatgccttactgg

SEQ ID NO: 35 - DNA, 120 bp, Homo sapiens
gtgcgtttcttaaaatgtttctgtgtttgtgcacagcacaagggttccaagctgagttggaatataggatgcgagggaagtggtgcattgcattgtcacaaaacagaggaaatgattcaa

SEQ ID NO: 36 - DNA, 120 bp, Homo sapiens
actcgcctattcgttcaacaaatgctcatgggcttcttgtgtcaggcactgtgcaaggtgtgaagatagattaatgagcagcacttggttcctgcactcaggactcccactctggagcga

SEQ ID NO: 37 - DNA, 120 bp, Homo sapiens
attcgagggtggagattttagttgctgttgtaattgacataaacatccttctgcctacctattagatgactaaaatccaatcaagtgattagcatttactgtgaacctgctacgtgtcct

SEQ ID NO: 38 - DNA, 120 bp, Homo sapiens
gcacgttgttctgacccactagccacgtgcccagccagtagccccaggctgaggatgagctagcactcaattagaacaagcccagagcatcacctccctttctatcccaactcaatcctc

SEQ ID NO: 39 - DNA, 120 bp, Homo sapiens
agtcgattctacctcggacagtgatggtacctggaatagcacccaaaatcagggagtgagaaacgcttacctttagcatttgaaagaatgagctggtggtgatgagctcaagatttagag

SEQ ID NO: 40 - DNA, 120 bp, Homo sapiens
taccgtcattattatatgcaacatcatctcttctcagatttctataattagccttggttattatttcggttatttacttcctcatcagagtctttctttagttgtcagcaatttttgaac

SEQ ID NO: 41 - DNA, 120 bp, Homo sapiens
catcgtggccaggcttgcttctatgtctaaattccagacattcttgatcttaaagggcttctattaccagaattcagaagcactgaatcaaaattcagaagagaatgttctagattagga

SEQ ID NO: 42 - DNA, 120 bp, Homo sapiens
tatcggtgctgctgagctcaaggcccaggcaatgaggtgggtgtggtaagggtctcctcaggccgatttagagcctagactgaaggtggcttctagttacctggactcaggtatctgtct

SEQ ID NO: 43 - DNA, 120 bp, Homo sapiens
atgcggattcctgcgcatagtgggctgtgagaattaaatgggatgacaaatgtgaagccctgagcacagcacctggcttatgggagtgtcccttacccctcctcctttctaacataggag

SEQ ID NO: 44 - DNA, 120 bp, Homo sapiens
tcacgggattcataagaaattgagaagtacatttctttcgaggacaaacacactcaattttttttactgtatttctagtatatatagagaaaagcaaaaaatacaactccaagagacctc

SEQ ID NO: 45 - DNA, 120 bp, Homo sapiens
cctcggtagtagtctctcctctccctgtaatgtgttgtgtgaccattgatattcccttgatcagtctgattcctggttacctggacaaggtgatcttcacagtgaattctagctgtgatg

SEQ ID NO: 46 - DNA, 120 bp, Homo sapiens
gttcgttctctgtcccctgcaaccaaaaattctgatttggagcatctttttatgtgatctaagcatccctatactcatctaagatggcatggtttttaatattttattaaacctactgtt

SEQ ID NO: 47 - DNA, 120 bp, Homo sapiens
tatcgcaagggaaaacagggagttcctccatggtatataatcctgtcctctccaggtcccacagatatcctctctgtgagggcccaaaaaagaggaacatgccacagagtaagccaacac

SEQ ID NO: 48 - DNA, 120 bp, Homo sapiens
agtcggtgactgcggccctgccctgcctgttgggatagcaatggagaaatcaagaacagagtgaggtcctaagaaaagcagtggagcaactcaaggctgagtgtccagactatagctggg

SEQ ID NO: 49 - DNA, 120 bp, Homo sapiens
gggcggctgcaatgctggtcaaaaacagggcctgccaagctctgatgctgcaggaacacatgggagcttgccttcacaggcaatgcctcctgacttcgcaggagctggatgcttcctgct

SEQ ID NO: 50 - DNA, 120 bp, Homo sapiens
gcccgatgcatcctgataggaggcagatgtgccttttgcatctgatgccatccactgacaaggagtgtggactgttcactggctcttattaaagaatgcctcagacactgcttataccaa

SEQ ID NO: 51 - DNA, 120 bp, Homo sapiens
gaccgaggttctttccaggactctcctctgctatccagcctcaactgcatcctaaagcatcctcttggtcatagagtggcttctagcagcaaccaggcctattcccttgttcacatccaa

SEQ ID NO: 52 - DNA, 120 bp, Homo sapiens
agccgaatccttgaggtgactggtcaccagaaggaatccagccttctccatgcataatcactctacagcagccttccagacccatccatgggaatccttttcttgaggtctgggcaaaac

SEQ ID NO: 53 - DNA, 120 bp, Homo sapiens
ccccgtatttgtctgacccctcagttcagcagtgatgatgaccagggcaagtcaaatctatgtctgagcctgtggcctgaccccattgtttgtacttatccgatgtgaaatgctagtact

SEQ ID NO: 54 - DNA, 120 bp, Homo sapiens
tcccgatagacaagctgctccttgtgaaccactcagaagctggctcttgctcagcggctgtggatgagccatgagagccacatctgtttttaaatcttcaagatgaatggagttgaattt

SEQ ID NO: 55 - DNA, 120 bp, Homo sapiens
aaacgaaaggaatgaaaatgcttcagtgtttcaggagatttgaagatgtttcaggagatttcagtgtttcaggagattgaagctgcagtgaggatgagcctccctgatccccttctcctc

SEQ ID NO: 56 - DNA, 120 bp, Homo sapiens
aatcggggagctcagggtgtgtgcaaaacgatgatgataaaaaaaggcaaggaacagcagaatatgctggattcagcaggagctgggcccctgagagctggggaactaacagattgcagc

SEQ ID NO: 57 - DNA, 120 bp, Homo sapiens
tcacgttttctgacttgagagataatgaagcaataaaagcagcagaggcagccagtaagggctctgctccacagggttgtctgtgtgagagcagctgcttgtgggtgcctgctcagagtc

SEQ ID NO: 58 - DNA, 120 bp, Homo sapiens
cctcggtggcccagggctaattccctccttcagagacaccagaaccttggctccccagcctgtcactgagcctgtcccagggtggggcagcccatatggttgagctgttgcatcgccaga

SEQ ID NO: 59 - DNA, 120 bp, Homo sapiens
tcacggggggcagtccgtgtggaaaccctgggaggcaccttagcgattttccaggccaacaacttcatttgtcagatgagaaaatccccctccccctcctaggggttaagggacttgcca

SEQ ID NO: 60 - DNA, 120 bp, Homo sapiens
aatcgcaatgcaataaaaagtggtggctgagaccacagctgggcttgagctccagctctattgctctggagcttgggcaagttacatagttctcagtctcttcatcatataatgagcgta

SEQ ID NO: 61 - DNA, 120 bp, Homo sapiens
tatcgtcatgactttgagtcattggaagtagatctcagagtctccttctgcccaggtcggggatatagtgtgatggataaaatcttgggaaactgagtttggatttcgcttcacctctag

SEQ ID NO: 62 - DNA, 120 bp, Homo sapiens
actcggcctctcccttccataaccacagactatgcttggagcctaggtcagccacctacacagtggactttccaagaagaaagatcacgtttttttcccctgtcatccaatgcccaaaca

SEQ ID NO: 63 - DNA, 120 bp, Homo sapiens
caccgagtgaacactttcagcatcaatctctgacttcagccagaggagctgggcataaagagccctcactgtaagccccaaggcaggcaaatgggccaacacttgttggccatggcctga

SEQ ID NO: 64 - DNA, 120 bp, Homo sapiens
ctccgatgtacacacgaaacaatcaaacatctctgattcacgtttgttgaatattcttaagccctgagagaaaggagtcaaaaatagctaagagttttgaaaccctttaggaaaaggcac

SEQ ID NO: 65 - DNA, 120 bp, Homo sapiens
tttcgaccaccaagagaacagccaagtttttagaaacgcagtcacacttttggctgacataaggagattttccaactgggctttcatctgcacacgtatgggtggtctcttccacctacc

SEQ ID NO: 66 - DNA, 120 bp, Homo sapiens
ccacggacttttccgtgccaacaattttgtttgtaaatctaagtgtaataacaaagcttgtgtactcatggaactctagatgttcagcacgaggaaatacaaaggtgcatttaggtgcct

SEQ ID NO: 67 - DNA, 120 bp, Homo sapiens
ttacgtctttaaggagaagtgtagctgactcgcaattccttctacagaaactcaagattgaattatttccactgggcagattaaaatacacaatgttttcatgaggatgactggacttca

SEQ ID NO: 68 - DNA, 120 bp, Homo sapiens
ctacgtgcagcctttgatcccttccattgggccttattttgagcaaaaagcatttagctgctgggtgacacatgtctctgcatccatccctcctgcatgttgtacttggctgtcctcatc

SEQ ID NO: 69 - DNA, 120 bp, Homo sapiens
cagcggccctagtttaaaggtgtaggccatctggccagcacgtctgtcttctctttatccattagggttgattccgctggttggcctgatagggtcattattccccttctctcatcccaa

SEQ ID NO: 70 - DNA, 120 bp, Homo sapiens
gcccgccaccacagatgctgcagaccgttcaggtgttcatcactcagaagcccacacttctagggatattttctctccaatagggatccagaaggaaagtacattcttcaatatctcttt

SEQ ID NO: 71 - DNA, 120 bp, Homo sapiens
gttcgttctgctcccccaaaagtaaaattctaaatacataaagctcaggcctggaagaagacaacttgccttaaataagtcaggacatatcttcccaatggcagatatgccactcgctgg

SEQ ID NO: 72 - DNA, 120 bp, Homo sapiens
tatcgcttctgtgccctagttttgccacttgggaaagctcctaagatgtgactgtgacaatgtaaagagtttggatttggctgtattttcatcttatgaactctgacacgctccattttc

SEQ ID NO: 73 - DNA, 120 bp, Homo sapiens
actcgtggtgtgataagggaggtcctgcagcaaatctcctacttctgagctttggaggagccagtgcgatcaaaccccgagtaaaggggaccatgctgggagaactgctgatatatgctc

SEQ ID NO: 74 - DNA, 120 bp, Homo sapiens
ccccgattccctgtaaatcatccctttgcagcttgtgtcccaaataacttataaacaatgtctcctttactcagctctccaaaaacaatccctttgtttaaccacaatttgcaaaaacaa

SEQ ID NO: 75 - DNA, 120 bp, Homo sapiens
gcacgcttctggtgtgaagataaaggcagcccagaagtgagatgccctggggaaggtaaagtggagaagagaactcagaaccatttgctccatctgttcagtccatcacccaagggtctc

SEQ ID NO: 76 - DNA, 120 bp, Homo sapiens
gagcgtgacttgcagcgctggggccaaatagaaaagggcctgccggagatagctcgagctggttggacagaagcctaaccatcctggagatcaggaagacatagctcagctgtaatagcc

SEQ ID NO: 77 - DNA, 120 bp, Homo sapiens
ctccggcaggccagggctgccatggcaggtgggcaggcttcctgagtcagggtctgaggggtgctgctccctggtgcacccacaaccctgtagtgaagggcaaggctgcctgtataatca

SEQ ID NO: 78 - DNA, 120 bp, Homo sapiens
cagcgggggagccttagctgcttgcaatagcaatctatgagcatagaaagcaatgaggagagctggggtactatagccagggccctgacagtatctactctggtctgaactgcacacagg

SEQ ID NO: 79 - DNA, 120 bp, Homo sapiens
aatcgtaaggtcttctccacataagcacacatctctccggtgaggatatccctgtctaacttcctgcagaaggcctgcaggaggaatgaaggtggtgtccacagtgagtctggagcaggg

SEQ ID NO: 80 - DNA, 120 bp, Homo sapiens
tcacggggccatgcctctcagagtctctttctcagatgccaaagtgctcagttgggaaaactgcaaaacagtagtaaaaagattttcgagttggaaatatgcagccctggaattaattga

SEQ ID NO: 81 - DNA, 120 bp, Homo sapiens
atccgggtaagcaaagagtggattaaggcagtaattttcagtagctaaaaaaaaaactacaaaggcacaagtgctaccaattatatctcaacacaaaccagtacctccttaagtttcaac

SEQ ID NO: 82 - DNA, 120 bp, Homo sapiens
tctcgtagaaagccttggaacatgctgggcgcattaaaggggagctatctcgcatgtgcaattactcaacacatctttaaaactgtaaacacttgttcacatgtggagaagtttagagcc

SEQ ID NO: 83 - DNA, 120 bp, Homo sapiens
agccgtacaggcttggaaaacccacctggcaggcgggttccctccgcttctctccagttgagtaaccatcctcggcgcccactcctcctctgagagccaaacaccatcagcagagaaatc

SEQ ID NO: 84 - DNA, 120 bp, Homo sapiens
ggacgagagttcatacatgagctatttttatccagagcactcccttttctcctgtctgggttgatctcctccataaaccttgcctccatctttctccccgccacctggtgcagggagaaa

SEQ ID NO: 85 - DNA, 120 bp, Homo sapiens
cttcgtgatctctaaatacagctcacattttgagaaccttggtctccattatgtcaaatccagacacggctgggtgctgttttgggcctggcatttcttggaaattgcaccttccagttc

SEQ ID NO: 86 - DNA, 120 bp, Homo sapiens
tgccgttgtttaaactcccaggtatcaatatatttgcatgttgtttgaggaaaaatgcaacagaaaccgccacaggggaatcagatttggaaagaataagggcaactccagaacaacacc

SEQ ID NO: 87 - DNA, 120 bp, Homo sapiens
gagcgaatacattagcctcagctccttctaatctggagaggtcacattacctgctggaaagcagaggaaaccctaaatcacttgacgccagaaaaaatagccaggaaaactcgagtgagc

SEQ ID NO: 88 - DNA, 120 bp, Homo sapiens
aaccggtcagcttcggaagggctttaactaggagatcctccagcaggaaaaacaaagggcttggtgctttgctaaaacaaaaacacacaaacacaactccctcacctttcaacataacac

SEQ ID NO: 89 - DNA, 120 bp, Homo sapiens
aaacgctgctgccaaagctcagaattgaaaagtatgcagtgggcattgtttcagaaacacaatgatttattttgctggttcattttcaaacaagggctttctccttattccctgaaatgt

SEQ ID NO: 90 - DNA, 120 bp, Homo sapiens
agccgggtccgattcaagataaacaagcattatattataaatatgacagtggcatatccctggcctccaaagagcctcgtctgtttgcccagactgcaggcattttctccatccaaaaaa

SEQ ID NO: 91 - DNA, 120 bp, Homo sapiens
ggccggagagaggcctggtcattgagcccctcaaagccagagcttgtatacacaggctgggtcaaaatcaggagtacaagacatgtggcttctttgttttcctggtcccatcccacaaag

SEQ ID NO: 92 - DNA, 120 bp, Homo sapiens
ccccgttaattcccactctgtttcctccaagattgcatggaagttcctggaggctcactcgggcctggctgtgggaggtaggccagagaaggggaaggatctgatcctcaagggggccat

SEQ ID NO: 93 - DNA, 120 bp, Homo sapiens
ccacgccactcttagccatactggactgcagagtttgcaccgtgaagtgggcaaagctttgctgcaggccctctcaggttgggccccttctagaacccttacttgatttttttaacaata

SEQ ID NO: 94 - DNA, 120 bp, Homo sapiens
gtccgaaggccatgtagctgttcagtaagtgcttgccatcaggccttgtttatgcagagtgcaaaagcagttaggctgcccccattcaccccagctcatactgggccaagtgcaggcagc

SEQ ID NO: 95 - DNA, 120 bp, Homo sapiens
tcacgtcctctggcacagccacctcctttgtgccctgtcataacaagctgagcagggggcccagggaagctgatcagtatggagtcctattatgtccattttccccacaaccaaagctga

SEQ ID NO: 96 - DNA, 120 bp, Homo sapiens
tgtcgtttaagacactcaatctatggtatcttgttatagcagcccaaactgaccaagaagagagataacaaaaagattctcagctctacctgcccagcacaggcatggagtcagcttgaa

SEQ ID NO: 97 - DNA, 120 bp, Homo sapiens
cctcgttatcacaactggcccgtcactcaaagccacctttcagaatgaccagtcagtctacaacagagcaatgtcttcaggtctgctgcaattacaaatgcatctctggttcttagatgt

SEQ ID NO: 98 - DNA, 120 bp, Homo sapiens
acccggtatcatgcacatttcaggctttctggccactcaacacaacacccattctcctccctctttctgttagtaacaacatcctgatttcttcctggggaatggcctctttcccacttt

SEQ ID NO: 99 - DNA, 120 bp, Homo sapiens
gatcgtcattcaagacacctgccctcccaaagacaggagatgggcgccagaccccagcagagcccactgcacctgctctccctggaatcgggatcgtgagcagagagacaacagcagggg

SEQ ID NO: 100 - DNA, 120 bp, Homo sapiens
ccccgctcctctcctgctttctctctgattctcaagctgccccctcattttcaacttcctatcctgttacccacaacaaaaagccctgactgattcatcttccaaatcccagggtgtggt

SEQ ID NO: 101 - DNA, 120 bp, Homo sapiens
ccccgtgcctcttcccaagaaccaggcccaccacggggcatagccacgggcaggacccaagctcccatctcactcacttctcagccgctcagccttaggctcgggatgtctccgaatctc

SEQ ID NO: 102 - DNA, 120 bp, Homo sapiens
ctgcggtgtgctcaagaatggcaggagggtgttgctgttgcccttctgattcgaaatcctccttgcttctcatccattaaccccaggatatattgagaaatgcaatcggcttcttcctga

SEQ ID NO: 103 - DNA, 120 bp, Homo sapiens
ccacgttgcttttgggttgcccaaaacactgtgtcgccaagaaaagcctttcaaagcccctttcgggaagggatttttttcgaacttgaaacaagaaggagtcatttgccaaagtgaaat

SEQ ID NO: 104 - DNA, 120 bp, Homo sapiens
agacgacttaggtatgcctggactttcagactggagccacggctctggccaggaaccagctgtgtccccccacacacctccccccccaaaaaaaaacaaacctaccctcacatatgcatg

SEQ ID NO: 105 - DNA, 120 bp, Homo sapiens
cctcggggtggcaacccaaactgagtgttcagatccatcagcaggaaccagctgagagactagcagcttgcccccaggaatgatagcaaccagccttctcctggtatgccctggttcttg

SEQ ID NO: 106 - DNA, 120 bp, Homo sapiens
cctcgctgactccaaattctcctaaatgcagcctccgtggagcctgtgatacggcacatgagcctgggagtaagagggaggcttcgcccggtgtaacctcagagcacgtgtcgtttattt

SEQ ID NO: 107 - DNA, 120 bp, Homo sapiens
gagcggaacggtggttgccaggggctgggacagggaaggaaatggtgagttgcaatcaagaggcataaagtttcagtaaagcaagatgagcaaactctagagacctgctgcacagcatcg

SEQ ID NO: 108 - DNA, 120 bp, Homo sapiens
tgtcgtacaaacttactggaaccttcctacacagatctgtcaaaagccacacaaaacacaatcatgtgtccatacatgaatacaactccatcccaacaggcctgcacttaccagcctcct

SEQ ID NO: 109 - DNA, 120 bp, Homo sapiens
agacggaatggaaagcagtccaaagggtgcggccactgctgccgggacagttggctgcactgctggaatgaggttccaccaaataaacgcgtagtaaacacaggctgaagtgctttaaaa

SEQ ID NO: 110 - DNA, 120 bp, Homo sapiens
cagcgttctctctctctcactctcggtctcgccccctttcttcaagtgtccactctactaaagcagaaagcccagctgctaagaattgaaatatcaggatgggctctgtcaagccctgct

SEQ ID NO: 111 - DNA, 120 bp, Homo sapiens
tcacgtaaaaaacaaatacaggcagagcatctgcaagcacatgagtgatataagaaactagagaataaagaaaatcatctcgtaaccactccactataaaaacaggagggcagagcagct

SEQ ID NO: 112 - DNA, 120 bp, Homo sapiens
cagcgccagtgattagcctgccaacagagttaagagatgcgaagagcacactggagtgccacggttttcatgtcagccactcagttctatgcaagccatgactgcagggtggaggtactg

SEQ ID NO: 113 - DNA, 120 bp, Homo sapiens
aaacgaggtcgctgctcatcactgacagtcttagaaaggatcactggatgaaggttggcctccttcctccttaacagagtacaagcagtgagttaagatagttctggtcagccactttgc

SEQ ID NO: 114 - DNA, 120 bp, Homo sapiens
catcgacaactacgaaggtagtttcagagtctaacagcctggagctggtgatgggaaactgatcctcactgtcgcaggtaaaatgtctggcagaaaaatgaatctacgggcatctgatcg

SEQ ID NO: 115 - DNA, 120 bp, Homo sapiens
actcgctttctgctcttggttgagccgtagacttgtaacaggacccagacaacatgctagcgcgtctccccttaagagagataagcaccttccatgcagaatgtgtcttctgaaggagga

SEQ ID NO: 116 - DNA, 120 bp, Homo sapiens
cagcgcaatgagaattccctacctaaatcctggatccctgggtgctacaacggcatcgttatgctaagagcatgggacacataggtataagctccttgattttacttgaggtccacagac

SEQ ID NO: 117 - DNA, 120 bp, Homo sapiens
ctacggggaaccagtcatgtggcaggtaacttagggatgtagccacgggtccccacgtcaccaagccatgtaatccagcatttatccctgctgtaaatattcagttctttgagcccccgc

SEQ ID NO: 118 - DNA, 120 bp, Homo sapiens
tcacggctagtgcctgtctctggaccccattcaaactgtcaatgtctttcttgtgcctggatccagatttggcacatggagtattccaaatggagctgaacctgaactgcacagggaggg

SEQ ID NO: 119 - DNA, 120 bp, Homo sapiens
ctgcggcaaaggaccttctctcatcagctctgccttgccgggagccaagagaccacgatctggtgctcttagaagccccatttacaatgcaagggtagctgattctaaaacaggccttaa

SEQ ID NO: 120 - DNA, 120 bp, Homo sapiens
ggccgggccagggacaaggttgccatggtgaccacgaccaggcagatgaaacgaccccagctgaccatggttacggtaccaatccccggtcctcttccatatctccatgtggacgttaat

SEQ ID NO: 121 - DNA, 120 bp, Homo sapiens
ctacgggcatggactacgcgcaatgccttcagcctgcggtgggctcaggaaccgaggcgctgccgctgctgctgcagtcactaaaggaaagagattggcgagtcagggaatcttccccaa

SEQ ID NO: 122 - DNA, 120 bp, Homo sapiens
gtgcgcaaacagagttctttttcattatctgctaaatccttccatcctcacctcagagtcccaggtgataccaccagaccggtccacagaaatgtgtgaggctaatctttttaaaagcat

SEQ ID NO: 123 - DNA, 120 bp, Homo sapiens
atacgtgcagccacttcagtgaggcaatgtgtgctctcttctactatccactatcgcctccaccgccctcaatgagcagaagcaacgtgaccttagtttcaagggcaactacaaaagcaa

SEQ ID NO: 124 - DNA, 120 bp, Homo sapiens
gctcgggttggcataaccaacctcgttcccttctcttagtccaactgggctttagaaagctaaactgttggaggagtctgctcacagctccgtatttctgctgggctggaggtgagcagt

SEQ ID NO: 125 - DNA, 120 bp, Homo sapiens
tgtcgctcttgggaagaaaggagaccagcaaaatcaaaagaatcccaggaaggctacagaaaattcccaccagtttacacttgtcaggattcattttcaaatggagaagtgtctttcagt

SEQ ID NO: 126 - DNA, 120 bp, Homo sapiens
ttccgccaagcagccacttacgaagagtgaacacaactgcagcgcattcaacgcagctgatccaaaaaggacttcgaagcctgaattcccttcccctgtgactaaatggcagtccagggc

SEQ ID NO: 127 - DNA, 120 bp, Homo sapiens
actcgatgtttcaagttatgtcataggatttcaacactgctggagcctccccaaatctcatcataaaaactgctccttttagctttgactgaggacaaaaatggaggagggaaaagaata

SEQ ID NO: 128 - DNA, 120 bp, Homo sapiens
gtgcgtgcacggtgtgtgcatgtgctttcagatagcttgaaagatttttcctcttaacttttctttcctcttagtcaagagcctcagaagataatttcggatctatttctacatacatgt

SEQ ID NO: 129 - DNA, 120 bp, Homo sapiens
atgcgcaagtcaagtctctgatgctgtctgggtccctgtgggtatggactgggacagcaagtgaatgtgtgatgacagcttgagaaagcaggcctcctcccagcctccttcctgactgcc

SEQ ID NO: 130 - DNA, 120 bp, Homo sapiens
gcccgttcccttttcccagccaatccaaatctgcatcctggccatccttcaagtcccacctgctctgggagaggccgccctcacgtgctgcacccatcggcaaggtaggtgattaaagat

SEQ ID NO: 131 - DNA, 120 bp, Homo sapiens
gttcggaagaagagcaattttcaggcaaaaaattgcaccccctgcctatcttggtccaataacaatccttcttgtaaacatgaactgctcttcctagaaagaacaacaataacatccaag

SEQ ID NO: 132 - DNA, 120 bp, Homo sapiens
ctgcgtgacatacaagcccctaggtactggcagcttaccacccttgcgcatttactatgtgggggcctgccttataatgaggaggaggagagatttgatagattccatcagcagtccaga

SEQ ID NO: 133 - DNA, 120 bp, Homo sapiens
atgcgaacacgtgcagacacagagcagtccccagccgcaagcagagttcagtggagagtgagggcctcagccgtcattccgtcggatgccttccaaacacttcagcatgctgacctctcc

SEQ ID NO: 134 - DNA, 120 bp, Homo sapiens
cctcgtttccggaaaaatccttaagctcacttccccaggccagatgggaacagagctgggaggatgagggacagctgttgctgcagggggaatggaagagacaggcaggctcgttttggg

SEQ ID NO: 135 - DNA, 120 bp, Homo sapiens
ctccgtcgcaggacactgccccccccgaggctctcaccctggtggggagggtctcccagaggctggtctgattatcctggcatcatcagagtgtaacccaaggcctggaaaagaccaata

SEQ ID NO: 136 - DNA, 120 bp, Homo sapiens
tgacgtctttaaaagttactgttgttactggtaaaggcacagaggtttctccaggcttcccatcctggagaagggattggcaacgcataagacactctgctttagaagaaagatcaagta

SEQ ID NO: 137 - DNA, 120 bp, Homo sapiens
actcgtcctctgactgttgttcaagtcaaacaaaccaggccagacagcgaacagtcagctttattcactcaagccctccttcactggagcacacattacttttctatacgatgacttgcc

SEQ ID NO: 138 - DNA, 120 bp, Homo sapiens
aaccgggttttgaacacagcctgacatctgcacgtatagacccgtgccagggtacagggcaagcagagctcatgtgcgggaagagaaacagtccaggtttattttcaacagctgtctttc

SEQ ID NO: 139 - DNA, 120 bp, Homo sapiens
caccgtgcacagatgcccccactaggcagggatgggggcagaaagagcattggcttggcctctgggctcactcactgtgtgaccttgggcaagacagttagcgtccccaagcctgagctt

SEQ ID NO: 140 - DNA, 120 bp, Homo sapiens
ccccgtgataggatgggggcaatggggttagtcctgtctccatcacaggtaattgtgaggaacaaatggagcagggcctatgacagccatccaaatactacttggaattatgaaagtgga

SEQ ID NO: 141 - DNA, 120 bp, Homo sapiens
acacgaggtggatcccaggcactgtggtggatccccagaagccactcagtccagcttccatccttccatcctcctgggaggagcagccaggctatgtctggccgacacagtcactcattc

SEQ ID NO: 142 - DNA, 120 bp, Homo sapiens
ctgcggaaacagaacaaaatggacaaaaatccctgccctcatgatcccagggacaagcagttgatgtgcaggtgtaaacatgtgaccttggcatttattttattcttttgctcatgggtt

SEQ ID NO: 143 - DNA, 120 bp, Homo sapiens
gtccgctgtgggcagcacagaggatttaggatgtggagggacatggaggctcatctgagcaagagggatacaaatgccccctttgcagaaatgtcactcttttgtgaccagcattgtccc

SEQ ID NO: 144 - DNA, 120 bp, Homo sapiens
tcacgtaaaatgctagatgctttagccttggtgtgaaccaggtcatcagagccctggtctcccccagaaagaggagtaaggtggtttggtaggtaaggagcagatgcaccccaggtggcc

SEQ ID NO: 145 - DNA, 120 bp, Homo sapiens
ccccgagggcccctgggctcaaggaagcagaacacgtgcttctgaagtgcagagaagcagctgtgctgctcacagcccaggagcagcctgtgccagcccagggctgccaggctgcgtcct

SEQ ID NO: 146 - DNA, 120 bp, Homo sapiens
cctcgcctcccagcctgccccacagcccttcaatccctcttttgtgattgaggtgcaagtacccatccctcctctgcagtcactggtgccctgagaggcctcacatcatctggtgcccca

SEQ ID NO: 147 - DNA, 120 bp, Homo sapiens
aagcggcaaacaaccaacttatcactgcccctttgtgtgggaacaatggagcccagagagtccgacctccagagagaggaagtctcaggacaacgaccttcctgcctcctactacctagt

SEQ ID NO: 148 - DNA, 120 bp, Homo sapiens
tagcgctttgaagacttagtggctctggtgactccagcaagcccaagtttctacctgcatgttggtcgcctcttgatccacacctgccaggtgctcatcttccctcccatctacccagca

SEQ ID NO: 149 - DNA, 120 bp, Homo sapiens
ctgcggcaggtctctggtccccacgccctccacaggagcccagctggcctgggcatggcctcacatctggactcttgccacctcctcccactgcacgccgtgctccctcacgcgctctct

SEQ ID NO: 150 - DNA, 120 bp, Homo sapiens
ctgcgtgagtctgctggggctaccaatcagggcacctcacaacagacctttaccttctcattgttctgaaggctggaagtccaagatcaaggtgtcagcaaggttgatctctcctgatgt

SEQ ID NO: 151 - DNA, 120 bp, Homo sapiens
ggtcgcaaaagaatggcattttaacaaagaaggcaggtggatttgtagccctcttgctcagatgagtctccacgtccctccacatcagaaatcccctgtgctgcccacagcgggccctgg

SEQ ID NO: 152 - DNA, 120 bp, Homo sapiens
aggcgtgagcgagagaatgaaatgaatgccaaggtcatgtgtgtgcctgcacatcaactggttgtccctgggatcattaaggcagaagagatttctgtccattttgttctgtttctgcag

SEQ ID NO: 153 - DNA, 120 bp, Homo sapiens
tcccgggaggacggaagcaggatggaaggatggaagctggactgaacagcttctggggttcccctacagtgccggggatccacagtgattgtttcttctacaatcactgagagaatcact

SEQ ID NO: 154 - DNA, 120 bp, Homo sapiens
catcgtaaagcccaatactccattctccacgtgtacggagcctcctgctggagttgccggtgccttccctggccactgtgtctatgacatcctacctttttgttcagctcaagcacctgc

SEQ ID NO: 155 - DNA, 120 bp, Homo sapiens
tagcgtatacaccctgggcacctttatgcttgctatctacctacacgctgtgtcttatttccacaaccagatagggactgcattatccttccctgtagcacctcccccaggacctctctg

SEQ ID NO: 156 - DNA, 120 bp, Homo sapiens
gcacgctatgaagctgtgaaattgagtcatctacaatgtatctctccaagttttcaagtgaaacctcttgctacatgcctaagaattgtagcacttaaaaaaaaatctcattagccatcc

SEQ ID NO: 157 - DNA, 120 bp, Homo sapiens
acccgtctaccacatgctccaaaacaattcacatatttagtacagcaacaaagaccaggaactggccacatgcaataagaaaaagaaaagacaaagaagattaattgcttttggaaacaa

SEQ ID NO: 158 - DNA, 120 bp, Homo sapiens
ggccgagtcatgtggccggtaactgggccggtgggggaaggtctaataatagtcccgttcttgctggctttgcacattttggcatcaaaatgtccccaccaggggttgcccctggggagg

SEQ ID NO: 159 - DNA, 120 bp, Homo sapiens
ggtcggtggcctagcatgctgacccagaaagagagagcaagagaaagcaaaggagagagagaacacactccaaactctcccagctccctcccaggtctctgggccaggtttccccacccc

SEQ ID NO: 160 - DNA, 120 bp, Homo sapiens
tggcggccagctctccaaagagaaccaggacaggaagcagcagcaggtctgcagctgggtgctggaaagccgggtcacaggaggctgagcaggggaggaaatttactttggatgtgggac

SEQ ID NO: 161 - DNA, 120 bp, Homo sapiens
gggcgggtatggggaaggagtgaagaggaaagcgaggcaagataagaagatgctctgatttaactagaagggaggggggcgttcagggctaagagtgttaaatctgtctcatagcagctg

SEQ ID NO: 162 - DNA, 120 bp, Homo sapiens
tgccgaagccacctctcttgcctctgcaagcctgctcgcacaatacacatgtgctctccaggcataaaaacaccacaattcagctggtctgtggtctataactgccctaatatggcagcc

SEQ ID NO: 163 - DNA, 120 bp, Homo sapiens
agccgcaagaagctactgagcccttgaaccgtggttcatccaaattgagatgtatcctaagtgtaaaatacacacaggatttccaagaactagtatgaacaaaagaatgcgcaatatctc

SEQ ID NO: 164 - DNA, 120 bp, Homo sapiens
ttacgcagaaaaacttatcttccttgttttgcaaatgagcttgcaaaacagagtttaaaacagcagaggcggttgcatctacaccatacttggctggactactgggtttgtccctgttct

SEQ ID NO: 165 - DNA, 120 bp, Homo sapiens
tctcgaaaagaaaagaaaacgcagcacactgagataagaaatagtagaaaatccgtttcaccagagatttttcagtatatttccaaatccaaaaagtaaccagcagaggctcttctttat

SEQ ID NO: 166 - DNA, 120 bp, Homo sapiens
ccccgagtttctgttaattttaagcccggttctcctttggatgtcccttcatctacaacccagtcctgggctgctgtttccttcctgggaatcctccctgccctgtttggcctgctgtct

SEQ ID NO: 167 - DNA, 120 bp, Homo sapiens
cttcgtgccccagggaaaaccatactccatcaccccctccgccctggacccaaaagggatgaggaacaactgaactatgtgttaattgcgttacggggctttctctaatgcaatagtggc

SEQ ID NO: 168 - DNA, 120 bp, Homo sapiens
aaccgtgattaaaagatgcagaatggcgggtcctccagggcctgtctgtctgggaagtgattgccactttacagaacaattcagtccagatagaagtttattgtgcacatttcgcctaag

SEQ ID NO: 169 - DNA, 120 bp, Homo sapiens
gagcgctattttcaggctgatttgggggagggagccacgggaaatttgccacccgggttgggggtggtagatgggagctgtgtggagttgcaggtgggggtggggagagagagaagagag

SEQ ID NO: 170 - DNA, 120 bp, Homo sapiens
catcgccaaagaagccccatgcttcattaagcatctttaaaaatgcccactgagatgcccagagggggtaaggtaaattctctttccatttttgtgcctctttctaaagcacacagcatt

SEQ ID NO: 171 - DNA, 120 bp, Homo sapiens
ggacggggtgagataattgtcctggcagattgcttgatctccaagggaggggcggggggcatctgtgagtccccacttctttatcttccttctcccatgcccccattccttttctcctct

SEQ ID NO: 172 - DNA, 120 bp, Homo sapiens
cctcgggcttgatgagcctgtcacccctggagtgtgtgatccccatggaatccatcccagtgcccgccttggggctcttcctgtggcatggatcctatgtacagaactgaagatgtgggc

SEQ ID NO: 173 - DNA, 120 bp, Homo sapiens
gaacgtcttcctttttggacagagtccattccaccagtctctgaaaggggtgactcatggccctttgcagaagcacttgttgatagtacaggcttccctccctgacattccagtggcaaa

SEQ ID NO: 174 - DNA, 120 bp, Homo sapiens
tgccgattatgagtacatgtcagcctccaaagtgcaaaatagctctcttaaggagcttaaatgcctctggtagtttgcattattcattttgagtcattcttttacaaaatgattaatttt

SEQ ID NO: 175 - DNA, 120 bp, Homo sapiens
gagcgcaggaagcggttgtgttgaatgtacagcatgaggggatggtggggttcccaggtgtgccccaaacctcctgtacctatacagagatgaactctttctgcagcagcctccagtgag

SEQ ID NO: 176 - DNA, 120 bp, Homo sapiens
tcacggacattcctacaggcccagcccgtgtttagaatcacagagctgagccgatgcatgtcacggagaactgcctttgccctgtacacgcatgctgcattaggggcctgccttgggcgg

SEQ ID NO: 177 - DNA, 120 bp, Homo sapiens
ggccgcgcctctgcttgtttagggtgagcctttgcacagggcttggctttgtggagctcatttggtggccaaagatggtgttgcagccccagcccgctcgcaggcccagtaccttttgct

SEQ ID NO: 178 - DNA, 120 bp, Homo sapiens
gtgcggtgcaaaggtccttggaggctagccccgggctggctgtgaggggagagccaggtgccgcagctctccctggtacagacttcagctgcctccaggacccggggcctgaaggaggca

SEQ ID NO: 179 - DNA, 120 bp, Homo sapiens
agccggcggtggaaaagggcgcacgtctctcccagcgtcgctcccgctgcccgctgcccactgcagcctatttacctgttcctccagccatccccttagtcctgggccgggagagaccat

SEQ ID NO: 180 - DNA, 120 bp, Homo sapiens
tctcggtggtcagcccgcccgaccaccacgcccctcctttctagggccccagctcccgggccgcggctcgtttgcatttcaaagctacacaatgcgggcggtcccggcgaggcgggaggg

SEQ ID NO: 181 - DNA, 120 bp, Homo sapiens
ggccggggcagagggagggtcttcgcctccccacccccagccccgtttccggagcccgcgatggagctttgtgaagatgcaggcgttggggctgctcggcgatgatgacatcatcgtgtc

SEQ ID NO: 182 - DNA, 120 bp, Homo sapiens
cctcgtgattgtactgctttattgcactgcttgcagactgcagtagaaaataagcttttaagactttctagattttcaggctttctactaagctgttgtagcttctccatcccacatctg

SEQ ID NO: 183 - DNA, 120 bp, Homo sapiens
actcgttgagacacacagtagaccacaggttgccatatttagcagagcagggaaagaactctggagagtttgcctttttgattagggagaaacgctgtgggaggtatttgttgagcagct

SEQ ID NO: 184 - DNA, 120 bp, Homo sapiens
atgcgtgaaatagaccaaacatgaaacctgctctggacgcaggttctctctgaatcaggcaaagcttcaggcctctgaaggcctcattcaggagcatgttatccatggcagggagggtgt

SEQ ID NO: 185 - DNA, 120 bp, Homo sapiens
ccacgatttctgagttgcttgggatttagccaactggtttgcaaactgcatgtaaggtgtgtctgtgtttgttaaaaacaatgacttctcagcaggactcagtaatgggtttccacggag

SEQ ID NO: 186 - DNA, 120 bp, Homo sapiens
gggcgtgattgtcctgtgcactaagagccttcaaatcctttccccatatttgcaaggtgttgaagtaccgcttttaaggcaaaactaaatgacgagttataaagtcaaaacacgtgagct

SEQ ID NO: 187 - DNA, 120 bp, Homo sapiens
aagcgggattctcatcagcagggcagcttccagatgtgcttttcttcattttgactagatagggagaagagtgagggggcatggcgtggagaaagaaaggtagatatacaagaggcggag

SEQ ID NO: 188 - DNA, 120 bp, Homo sapiens
aggcgcaggtagagtcagaggcaggttcaaagacacacagagacacataggtgaagatacattcgatgtaaacagcttaggagccaggtcgggcctggtggcttctaagctcatatctgt

SEQ ID NO: 189 - DNA, 120 bp, Homo sapiens
tcccgttggctctatgatggtgttgccctttgcccaggatgtgagtaatgagagtaacagaattcagggttgacctgactttcctgcagaggtctgggaagacctccatgtgacagcctt

SEQ ID NO: 190 - DNA, 120 bp, Homo sapiens
ctgcgggttccaagaatctcaggcctttgcagctgggatggcatggcatagacatgtgagacaccccctccttgtttgtatgagcgaaagggccaaaagaatagggtggaggtcctggct

SEQ ID NO: 191 - DNA, 120 bp, Homo sapiens
ccccgtgggctgctatggatctagatgcagaaactctgctgattcgttcccctggaggagaggttgctctgggaaactgcagctgccaaacctactggagactgatttgcaaataaggac

SEQ ID NO: 192 - DNA, 120 bp, Homo sapiens
ctccgtgagtggggagggcagttgggtcaggctgaggctcagaagacacgtatgcctgtcttggctctgcccttgcccctgagtggttctgagctctcaggcaagatgctgaaccgcttg

SEQ ID NO: 193 - DNA, 120 bp, Homo sapiens
gcccgcaggtgatggggaataaataggtccttctgaaaccgtgaatagtcagggaatgatacccatgtgcctctcctgttgtaaggatcagtcatgaggaagctctgagggacggtaaca

SEQ ID NO: 194 - DNA, 120 bp, Homo sapiens
gagcggccgtggggttattcccattcctgacacttcgcagcccctggctgaggcacccccatcctggtccttgggtacctgcctgagaaaccacacttggaatcggaaggacacttggtg

SEQ ID NO: 195 - DNA, 120 bp, Homo sapiens
ctccgatgcagaatggatgtgtcttgctggctgggggagcacttggagggggtccccgaggcacccctgataatacagcctgggggtgggggggtgccctggtgggtgtgtcttccctgg

SEQ ID NO: 196 - DNA, 120 bp, Homo sapiens
tagcgatggtcaggacggcgatggccagcgccccgggaaccccagtaacatcacaacatagccacgaagtgatagctacttgattctgaaaataggacctgctgggaatctcggggtaaa

SEQ ID NO: 197 - DNA, 120 bp, Homo sapiens
tttcgcgaggcagccgtaggtgtcagcctggaaaattctagcagcctggcttgccagagctagcttggtgtttgttcatggaaggcagtacctggctggctgcttctcagtcacctgacc

SEQ ID NO: 198 - DNA, 120 bp, Homo sapiens
gaccgtccaagatgggtcttggcatttgcttgtgttgaaatcatgttcttatttagctaaatattgatacaacagagcaattccttttgtatatgcaggatggatgaattgaagtgaaag

SEQ ID NO: 199 - DNA, 120 bp, Homo sapiens
gaccggtctgatcatactgttttatgccagcgaggtgtgtgtgtgtgcagagattggggaggggaaagcttttattggcaagactatctgaaggtctcattcagcggaatattttgttga

SEQ ID NO: 200 - DNA, 120 bp, Homo sapiens
atgcgcagtttcaaaaatatccatttactcacagagtcctcaaacccttacacaagatgaagagatgaatgagactgtctgatctgtcgccgagggctcagttttgtttctggaaggtct

SEQ ID NO: 201 - DNA, 120 bp, Homo sapiens
ccccgaccagggcttttgtccagagctgttgcttttacctgggcttggtcttcaagggaaaaagaggtgggaggaggaggggagctcagaagaaggaagcccctgtctttggcctgcact

SEQ ID NO: 202 - DNA, 120 bp, Homo sapiens
attcgaatatggaagtatcctcttccccttaagcaatgctcaagaaggaattgtttcttgataatcaggtaacattcaaatgttatataaactttagatttccaggatgagtgttgtatt

SEQ ID NO: 203 - DNA, 120 bp, Homo sapiens
gggcgagccactttagctctctgggctttagctgggataagtgtgttggaataggatatgatctctaaattttcttccaacttccaagattttatggcctttgcaatttattatttcaag

SEQ ID NO: 204 - DNA, 120 bp, Homo sapiens
tgtcgtagttcatagaagtaaaaacctgaaaatatttaaaccagatcacaaatacagggaaataggctcttagggtctgcattttccagctacctgactcttgctttggggccaatttcc

SEQ ID NO: 205 - DNA, 120 bp, Homo sapiens
ccacgcccttctttcacacggtgtgtcagctgtggaggtgtttaattcagcattgtgtggagcagagcttttccgactgtgctctgtgggactctagagaccaagaaagtacttgaaaaa

SEQ ID NO: 206 - DNA, 120 bp, Homo sapiens
aaacgtttttaagccgaactagtacacagtcgaggagctcggcagggtcctgttttcgtggccagcacagtctgtccccacctggggttacgttgttccctctttcctgcttggttgtac

SEQ ID NO: 207 - DNA, 120 bp, Homo sapiens
caccgcactgtgtgctattggataccattagcacattgattgcctggtacggatagattaattcggttggtacagctggttgaccctcctgccctgtctgccttattaaaaattattgca

SEQ ID NO: 208 - DNA, 120 bp, Homo sapiens
ggccgttaaaaatcaggggctgtttgtgatgactcatgggtgcatctcaggactcttcccagtgatgtgcagcggggggagaaaccaacgggcatccggctacctcatgtctccagcccc

SEQ ID NO: 209 - DNA, 120 bp, Homo sapiens
tctcgatgatggaccttatacaagcatattgtaaattgctattacattacatatcgtaaaatgctattacaagcatattgtaaattgagcttgctgaaaatgtttggaagccacagatgt

SEQ ID NO: 210 - DNA, 120 bp, Homo sapiens
tagcgaaaagggcacagattttagagacaggcagttctggatttgagacttagcttccatcatttagtaaccatacggcctctggcaaaggaatttgcacctctaatgcctaattgtctc

SEQ ID NO: 211 - DNA, 120 bp, Homo sapiens
agtcgaggtctcgctctgtcattcagtctggagtatagttgtgcgatcatagcttgctgcagtctcaaactcctggacgaagcgatcctcctgagtctgcctccacgtagctgggattac

SEQ ID NO: 212 - DNA, 120 bp, Homo sapiens
ccacgatacctggctaggcaggacgtttctgaagaccttagatgtgtgtacagtgggcctactcctgtgcccgacacataacagtatattcaacaaatgctggtaattatcatgcttttc

SEQ ID NO: 213 - DNA, 120 bp, Homo sapiens
ggccggggtgtcaggctgcagtctcaccattactttccttccacatccttctggtcaaacggaatttggttgtgtcctcctgggagtgaacctgaccaaggtcactggaaatgtggtaca

SEQ ID NO: 214 - DNA, 120 bp, Homo sapiens
ccacgtcagatagaacctgaatgttgtgtctgggtggctctccaagaggcacaggctgtgggcctttctggattgggggacccaatataaagacggaaggatgtgtctgggttccttagg

SEQ ID NO: 215 - DNA, 120 bp, Homo sapiens
gcacggttgagtggtgtggcccctcagtcctggcttagaagaggccgatgcctggagcttacatgagcaagagaaggagttggggccacctgtgttgtcgttgagcagcctggcagcatg

SEQ ID NO: 216 - DNA, 120 bp, Homo sapiens
agccgaggttcaaaaggagggagacgtgatgcccaaaagccacaagtacagcctgagaggagtgacaaggaccagctcgcgagcgcctgtgtatttggccgtttggagcctctgtggtca

SEQ ID NO: 217 - DNA, 120 bp, Homo sapiens
actcggtgggcaggagcggctggctgttgccagtggtgccacctgtgggagtggcataaggcctgatgctgagtgcctccccatgatcaccgctcctgctgggcttggggactgcctgtg

SEQ ID NO: 218 - DNA, 120 bp, Homo sapiens
cagcggaggccactctcctgcgcgggtggcggcacatgacctggacaccctctgagcaccaggcctgtgtccatgcaccgtggccttggtccaggtggctgtcatctccctagctcatcc

SEQ ID NO: 219 - DNA, 120 bp, Homo sapiens
ctccgtggcccctctggcatggctctcccagcctcggatggcaggtgctctccccagaattggcctctctctgctccaggggacagggatcctgccacagtgctagcccctcccctccat

SEQ ID NO: 220 - DNA, 120 bp, Homo sapiens
tgtcgacaagggggctacgatgccacccccagctgccagcaggaaggaccccaggcacagcctgcaggtctgaagtgggtgacagtggccagaggttctcacaggtcgcaggacttcagt

SEQ ID NO: 221 - DNA, 120 bp, Homo sapiens
ctgcgtcacagccatttcacatttcaatttgtgattctagtggctttttttggcccctctaaagtagcaagtgggggttatgtgagagaaacaaagcttaatctaaaaatgtctgatctt

SEQ ID NO: 222 - DNA, 120 bp, Homo sapiens
gtccgttccccgatccccatcctcattcacccattgaccgtcctctgtcattccaaggcttttttcatcaggtgacaggcctgtggttgtcattccttcagccactgttgcaggtcattg

SEQ ID NO: 223 - DNA, 120 bp, Homo sapiens
caccgtagatttcaaggtccttgtgtccttgtggaagacagcagggggctgaggcatggctgggactcactgtggctcttggcaggacgtgccttctttctggcacggttcaggtcaggg

SEQ ID NO: 224 - DNA, 120 bp, Homo sapiens
tcacgtaaccagcatcccttgtgaaagaggaaactcaggcccagagagattggcagttcaggaccaccgtgactgtagtcgtattttgaagtcaaaccagctccagcccacatgtctagc

SEQ ID NO: 225 - DNA, 120 bp, Homo sapiens
tgccgttgttattcatttgcatcaaatgttactggagagatatgttttgttaagctcacatagtgactatttagaattcagaagagagagagacttctgtgctttctgcattccaggttg

SEQ ID NO: 226 - DNA, 120 bp, Homo sapiens
aaacgcttttccccctaatttgacacctgcccattgcaaccctttgtttgtttgtttttctatttttgttatttttgctttgtgtattgctgcattccccccacatgatttcatgatgtt

SEQ ID NO: 227 - DNA, 120 bp, Homo sapiens
ggcgtgagctccagcctaacagcacgttcccagcatccccgcaccaagcattgcaatgggaccactgagtcccaaacagtgagacaactcacagatgccatgtgttccgttcacttttcc

SEQ ID NO: 228 - DNA, 120 bp, Homo sapiens
tgacgaatggtatatcttgacaagcagccctcacacccaggagaaggcagtgtgctcacctctgtttcccggcatcccttggctcagccgatgacactgatgtttgtgagagtagttgag

SEQ ID NO: 229 - DNA, 120 bp, Homo sapiens
ttgcgccatattttccaaagtctgtggctccattttgggatcacggtctgaactcttgactctggccagctctttccagacgtgtcacccaagccacgagggggatcgagggaggaagcg

SEQ ID NO: 230 - DNA, 120 bp, Homo sapiens
gcacgtagttggcaatattctggacacgggctcccacccatgcttcctgcatgcaccctgacccatggggtctcctgggattgttggagacagcgtggtgaagttgacactgcatgacac

SEQ ID NO: 231 - DNA, 120 bp, Homo sapiens
ctgcgaatatgtgactcaaattttgtttcacttcctggcttaacacgatgagtccatggtgtttatctatgtggtcatggattcattaatgaatattgctgagcacctgcatgatggctt

SEQ ID NO: 232 - DNA, 120 bp, Homo sapiens
tgccgtatctgtcttgcagaggatacacaagtaaacaggcagccacaagacactccagaaggagttttaaggggaaaatcccaggacgggcaggggtaaagccactggcccagcatcccc

SEQ ID NO: 233 - DNA, 120 bp, Homo sapiens
aagcggcaatgaagtttattctgaagaatgagtaggagcttagcaaggggaaaggcgaggaggagagcatttgggagagggagcagtgcatgcaagagatgaaagcagcagttggcaggt

SEQ ID NO: 234 - DNA, 120 bp, Homo sapiens
gaccgttgagggaccaggctgcagaaatatgcaggagctggttagccgtgctaaggagtttgggctttcccccaagagcaatggggaaacactggaggattctcagcaggagagagacaa

SEQ ID NO: 235 - DNA, 120 bp, Homo sapiens
ctccgagcagagcagggccggaggctgggagactttggcagtgactggagggagatcacaggggcttagacgaaggctatagcaagaacagcaaagagagatggacaaattcgaaagatc

SEQ ID NO: 236 - DNA, 120 bp, Homo sapiens
aaccggaaggttagcggtgggataagcctgacaaacgtatgctgggcagaaaaagaggtcaagagcattacgtgtcaagtgtctagactcatcagcttggcagacatgactgatgtggaa

SEQ ID NO: 237 - DNA, 120 bp, Homo sapiens
ctccggcccctccccaggagctgtctgcacagacagtccagggctatcactgaagggaaaagagccctgtgtggcttcaggcatgtcatcagccatgtgcccacgctgaccactccccag

SEQ ID NO: 238 - DNA, 120 bp, Homo sapiens
aaacggttcaggaagaggggggcttgttagaagtttcactggctagggcttctcatattagggtgcttgtgagtttcaggctgctggccggtggatttggcaccatgacccacagctgtt

SEQ ID NO: 239 - DNA, 120 bp, Homo sapiens
ccacgtggtggtcacagttattatccctgatataagagggctaacgatgggcagggcagggcctccactggctccaaagtccacgtcttgccctgtgtgctgcacccctcgtcgttggtc

SEQ ID NO: 240 - DNA, 120 bp, Homo sapiens
aaccgagtggtcccaaggagtcacgtggccccggagtgggatgtgtggaaatgcagactccaaggtcaggggtggagtggcccttggcttgacttatcagcccctccagctgtggggcca

SEQ ID NO: 241 - DNA, 120 bp, Homo sapiens
tgtcgtctaagccaccatctgcttccatgtacctgacccctccagagggaccgaggccccatctccccctggctagtgaagccactagtctctacaacatggctttccctagcccgagct

SEQ ID NO: 242 - DNA, 120 bp, Homo sapiens
gaccgggacataggacggagcttgaggccgctcttcctctgcttgcgtctgcacggcatcaccaaaggtaagccccagtccaggcgagcgcatccacgggaaagctgctgggcacctgcc

SEQ ID NO: 243 - DNA, 120 bp, Homo sapiens
tgccgggggagccccacctgatgtttccaagggaatcacctgaatcgtggcattgtcacttccaagctgtgtgacttcgggaaagtcatgtagcctcttggtcttactttccctgtctgt

SEQ ID NO: 244 - DNA, 120 bp, Homo sapiens
aaacgagggtaatctgagctctgatgaaatatagtgatggctagaatgggcttatatattgtgaagcagtgtacggctgccaagggctgttttattggcatctaattgtatgtcctacct

SEQ ID NO: 245 - DNA, 120 bp, Homo sapiens
ggccgtgaatgttggggtgaggcgtggttgtaggggaacactaactcttccccagggacctgggaagagagatctagagaaaagtttggggaaaaaaataaaaatagaaattttaaattg

SEQ ID NO: 246 - DNA, 120 bp, Homo sapiens
cttcgagggccactgatggcatttcctttaacaatagttctcaaggtaccttccagggttcactgggcagcaatatcttcttgcaggattgttaagagtatatttcattcaaaataatat

SEQ ID NO: 247 - DNA, 120 bp, Homo sapiens
ccacgtggccccagggctggcacttactggtcaccgtggttacagacgcctcttctaggctgtgaactgtcacaggagtgggtccacttcggccgacacttcctcaggggtattaagtag

SEQ ID NO: 248 - DNA, 120 bp, Homo sapiens
agacggggcctctgccctagggaggaggtgatgagggcaggaatagcagcacagagggtgagaggcagagacaatggcactgagtgggggcacgaggatggaagaggagcatgctagatg

SEQ ID NO: 249 - DNA, 120 bp, Homo sapiens
ggacgatgggacccagcactgaccaaatagaagcttgtgggtggcacatcagtcactccagggacatatgtggtcactgccattttcctaatgaaactcctccagttattaaacaaaggc

SEQ ID NO: 250 - DNA, 120 bp, Homo sapiens
tcccgtcctcattgccttctgctgcctcagttctggcttaacagaacagtgtggggaggaggcatggtccttacctactagggcgttacttggccttcttcaggttggttgcttcgtcag

SEQ ID NO: 251 - DNA, 120 bp, Homo sapiens
acacgtgaaggccagaaaaaacagcctgccacacagcttccctggatcataccttcgcagtgacatgacgacgtcgttaggaggcgccgaggtggctgagtgggtctccagacacctccc

SEQ ID NO: 252 - DNA, 120 bp, Homo sapiens
tgccgtggcttgatcaagcatttcatatacagtagatcatgaaatcagcatagaaaacacattgaggtaggtggtgttaccacattttatggatgagaggctaacacttggaggagtcag

SEQ ID NO: 253 - DNA, 120 bp, Homo sapiens
agacgaggaaacagaaagaaggagcagtggacgcccccaccctctgtcccctgaaccccttggagagtaggcagtggcagagccagcctgggcccatctatgggaattctccatcgggat

SEQ ID NO: 254 - DNA, 120 bp, Homo sapiens
aggcgctgatgtatggaggagacgcaagttagacttgaccaagacaatattattcctcctctggatgccccgaatatatacagtcattagctgtcgggcccccatgtggcactgttgaca

SEQ ID NO: 255 - DNA, 120 bp, Homo sapiens
caccgaggaggaaagtcttttcatttttttcatttgtgtgctctctctttctctgtttttgcacactgtcctctgttctccttctccttctctttttccttttttctcccttcatctccc

SEQ ID NO: 256 - DNA, 120 bp, Homo sapiens
caccgttcttctcagtctgtatatgtcggtgatctcagtgcccatctggcagatccttcctgccctggctcttctgctcactgcgaccacccttgactttgtgatcactgataaccttca

SEQ ID NO: 257 - DNA, 120 bp, Homo sapiens
gtccgttctgaaccctgaacggaagctgaatggaaccctgaacggaagggttctgaagctgttcagaaccctgaatggaagctgaaatatcaatgggccattgcttttcacagtcctctg

SEQ ID NO: 258 - DNA, 120 bp, Homo sapiens
acccgtgtactcacaggccctgtgccctgagctcgctgttttaattttatctttgaatttgtatttttgtgaataaagccctatgagctaatggagcatgctcagggaacttggggcttt

SEQ ID NO: 259 - DNA, 120 bp, Homo sapiens
acacgaaacattgccattgtgtttccctttgtgttgcagtggtggtctcaaggaaaacgacgtcataatcagcatcaatggacagtccgtggtctccgccaatgatgtcagcgacgtcat

SEQ ID NO: 260 - DNA, 120 bp, Homo sapiens
gtccgcaggggtaatgaagatatcatgatcacagtgattcccgaagaaattgacccataggcagaggcatgagctggacttcatgtttccctcaaagactctcccgtggatgacggatga

SEQ ID NO: 261 - DNA, 120 bp, Homo sapiens
atccgcaggcagaagctctgcccttctgtatcctatgtatgcagtgtgctttttcttgccagcttgggccattcttgcttagacagtcagcatttgtctcctcctttaactgagtcatca

SEQ ID NO: 262 - DNA, 120 bp, Homo sapiens
agtcgatacaatgcgtagatagaagaagccccacgggagccaggatgggactggtcgtgtttgtgcttttctccaagtcagcacccaaaggtcaatgcacagagaccccgggtgggtgag

SEQ ID NO: 263 - DNA, 120 bp, Homo sapiens
gagcgctggcttctcaaacggccgaagttgcctcttttaggaatctctttggaattgggagcacgatgactctgagtttgagctattaaagtacttcttacacattgctttctgtagtgc

SEQ ID NO: 264 - DNA, 120 bp, Homo sapiens
ccacgcaggtttgagctcttagtcttatgagttatttcaaaatcatcccatgggatttaccagggttatgaacaactctgcttggacaccctggctttatgaagcaggacttgaggacag

SEQ ID NO: 265 - DNA, 120 bp, Homo sapiens
actcgcatccggagcttgtcaaatgaaagagagtctgttgacctcatacagcatgcaattagtcaacaaagattttctgggtctctgctctgtgccaggcattgtaagtgcgtggtcagt

SEQ ID NO: 266 - DNA, 120 bp, Homo sapiens
agacgcaggctctccctctgtagagcttcagttcagaagccaagtctctttctgaaagggagacagctcaggagaccaggatgcaaccccagaatgggcccagaatgcacacggctgcag

SEQ ID NO: 267 - DNA, 120 bp, Homo sapiens
cccgcgggcgtcgacaccgccagcgccgtggtggagttcaagcggaaggaggtgcttgtccgcgcgtgctgtggtctacccagtgtctgtctccggccacagttcgtttctcggtcggtt

SEQ ID NO: 268 - DNA, 120 bp, Homo sapiens
gtccgtgtagccacccaaccgtgtggccgaccattcgcgctttcatttgtccttcgcctccgtctgcgccgtctgtcctagggggaggggaagggggagtcctgccagcacccagctggg

SEQ ID NO: 269 - DNA, 120 bp, Homo sapiens
ttccgcttctctgggcacaccacgtgcaggtttggcagggaaagggggtctggtcgaaagcacaatttgtgagtaaaggctatgtgggcctccctggggtgacagcagaggcctggtggg

SEQ ID NO: 270 - DNA, 120 bp, Homo sapiens
cagcggctttcctcacaaccccctccagcctggggtaggaggatgcttggaacagagcgctctgatgtacacctggcctcggagctcggctctgccggctgttcctgtgtgaccttgacc

SEQ ID NO: 271 - DNA, 120 bp, Homo sapiens
gatcgtcattctttgcaaaaaggaatgaactgctttacaagtgaggcttctcccgcacaggggccttggacactgggctgggtgagtttagaggcataggaaccccctggacaggatcca

SEQ ID NO: 272 - DNA, 120 bp, Homo sapiens
aaacgcagcccagctttgtccaagtctatgaaacaggcagtgggcacccttggggacacctggttccctaccatggtcctagtcccgggacaactgccttggccctcttagtttttctgc

SEQ ID NO: 273 - DNA, 120 bp, Homo sapiens
tgccgcccagacgttcagagcagaccctgctcaaaaaagaagaagaagaaaaaaaaaaaccacaaaaggcgacttcctatgattcagctttgctctgaggggtctggagaagccatttgt

SEQ ID NO: 274 - DNA, 120 bp, Homo sapiens
ttccgtttcttctggggtttcccttgtgacagcagatctcagaactgctgtggggggaagtggtaggggctggcccctgccctgtggagggtgtggacagagccttcctgttgatgcact

SEQ ID NO: 275 - DNA, 120 bp, Homo sapiens
agacgtgcaggctacactgtcacacactgctgccaagacagccacactgcactaaggacataaatccctcatgtgtttaagtaaaagaagtgacagtaagattgtgttccaacccaaggc

SEQ ID NO: 276 - DNA, 120 bp, Homo sapiens
tcccgccagcatctcagcaatccacaggaggttcaggctggagctccagccccttcaaagatgtgtgtggccagttctgtgcccaggagtgtctacagcactcctctggttactgaaagc

SEQ ID NO: 277 - DNA, 120 bp, Homo sapiens
ggtcggattccagttaaatggatggcaattgaatccctttttgatcatatctacaccacgcaaagtgatgtgtaagtgtgggtgttgctctcttggggtggaggttacagaaacaccctt

SEQ ID NO: 278 - DNA, 120 bp, Homo sapiens
aatcgagctacatgatggtaatatgcataaattgataacattaaaagcaagcaaaactctaataataaaaggataaattgaattatggtacattctctggtgaatattgcatatcaagga

SEQ ID NO: 279 - DNA, 120 bp, Homo sapiens
agccgtgtaaatgaagaggaaaatgtaaagctaaaaagcgggaaatagcgtatctatattttaggtaacatttaaatgatgataatagctaatatttttatgaaccccttactatgtgca

SEQ ID NO: 280 - DNA, 120 bp, Homo sapiens
agtcgagtgcctgtccaagtacacactggcctgagtaggcccaggaggctgggtgatgtggctccgcagcctccactcctgtccactgtgcacactgcctctgttatattaattcatcaa

SEQ ID NO: 281 - DNA, 120 bp, Homo sapiens
ccacgcactatccaccactggcaccctgacacttagaccctaacagatatggctgttgctcgtgaggatctttatttattaggaggtgacagaaagtaaaatcagataatgcatgccacg

SEQ ID NO: 282 - DNA, 120 bp, Homo sapiens
ctccgtggtttctgtggcttgtttggtcagaaaggtgtttctgagatgaagctgagcagagctgtccaaagaacaggaaagaaccagctaggctgtgattgggggatagtggtttcaggc

SEQ ID NO: 283 - DNA, 120 bp, Homo sapiens
agccggtgaggggcacatagctgggccagggcatgtagagcttgttcagcctctggaaggcattgggattttatgctaagtatgttggaaagcctttggagggagaatggattgtgtgtg

SEQ ID NO: 284 - DNA, 120 bp, Homo sapiens
ttacggagaaaggtttggatatgattcagagatagggctgacagagcttgctgttggattagatgtaggaaattagcaaaggaaaggaatgggagagcagagattgggattcaactggag

SEQ ID NO: 285 - DNA, 120 bp, Homo sapiens
gctcgctgcgccaggatgcaagccagctgctgtttcagatcctcgtgggccgagctggaggtcagcggtggggagggtgggggatgcagggaggttggcacaggagcggggcctgtcggg

SEQ ID NO: 286 - DNA, 120 bp, Homo sapiens
gggcggggcctcatcagcaggggcggggccccatcagcaggggcggggccccatcagcaggggcggggcctcaggggcaatgctggtgggggcccctgcactctctgaccagctctgggc

SEQ ID NO: 287 - DNA, 120 bp, Homo sapiens
ccacgtgccttccatcgagatcctcgtgggctgggttcttgggccttttgtctaatgagggtcaatgtctgtgggaacttcactctagctcctgcttgtggacagggtagacttgcaggt

SEQ ID NO: 288 - DNA, 120 bp, Homo sapiens
ccacgtggctgctgcaggctgggctgcccagaagcctctgcctccactcccagcccatataacccggtttttcttgccccagccagaagcaagccaggttgtgcttgctgggagtacagg

SEQ ID NO: 289 - DNA, 120 bp, Homo sapiens
caccgcagccctccctggagcatcagggactcctctaacatcctgcaaacttcccacaccctgccccaggctatgcagcatggcgaattgaggggtcagaaccagcacatctctcagggt

SEQ ID NO: 290 - DNA, 120 bp, Homo sapiens
agacgtggaggaaaggcccaccatggagctcttggccaagggcagggcacccaaggggagagcctgtgcatctccaaggaggagcatggagaccatgtgtgcatgtttgtgtgcatgtgt

SEQ ID NO: 291 - DNA, 120 bp, Homo sapiens
taccggtgcacatggggaagggtggggtggcgggggaggggtaggtgctcggcagaggagccaatgcccaactggagtctcgtgggaagctggtcagatctcagggcacagggaccacac

SEQ ID NO: 292 - DNA, 120 bp, Homo sapiens
gaccgccaaggtggctcctctggggtaggcctctgagaagggtggcttctccagctgtggcatgaggcctctgccccacagacggccctgccctggactacctcagggccttgggcccct

SEQ ID NO: 293 - DNA, 120 bp, Homo sapiens
ttacgggacagacagaaggacagatggaggaggaggaggagtgggcaacagaaaggcaaggccccctcacccaaagcccaggaaggcagtggaggtctggcaggtggtgaagccaggctg

SEQ ID NO: 294 - DNA, 120 bp, Homo sapiens
ccccgttcagtggaagctagagggcagcatccctcccgcccacctccctgcaagctgtctgactcccaggctgacaagcagggcagggagggagaggggatagcatgatgcgggcaggac

SEQ ID NO: 295 - DNA, 120 bp, Homo sapiens
ccccgagtcagcctgaacagtgctctgctgacagggcagggcaggccgggccatctcctcttcattctggaccaccagggtttatgtacaaaccagcttcccagctcagccctgggctcc

SEQ ID NO: 296 - DNA, 120 bp, Homo sapiens
cctcggctgggcgtgccctcgccaggaccccaagtgctggctttgccctttaaaactcctcttcctccttggaggccctgctcagaactcagggccctgctcggcccttgtgtgtttctg

SEQ ID NO: 297 - DNA, 120 bp, Homo sapiens
tcccgtgtccctaggatcatctcctcctacctggggcagcagcagggaagtcacagcaggttcccccaggccacctgctagctggtggtgtatgcagagcagaaggcagagaaggcccta

SEQ ID NO: 298 - DNA, 120 bp, Homo sapiens
acccgacatctcctggagcccaggtcaccccattagtctcactccacaaggccccacgtactcacatcggggtaatagtccaccgtgggaacaaggtgctccatcagggcctccagggac

SEQ ID NO: 299 - DNA, 120 bp, Homo sapiens
ccccggagccgccaccggccccgcctccacgctcccccatgccaggctgcacctgtccgctacagctgggcccaaggatgctggagaagacaacggacgtctggggcatagtttcctggg

SEQ ID NO: 300 - DNA, 120 bp, Homo sapiens
aggcgcctccacagctccacagaccctcctcccaggcagcctgcagcgtgcatgcatgtgtgcaggggtgcgtggcaggggcgcagcggcactggcagagggcacccccattccagggca

SEQ ID NO: 301 - DNA, 120 bp, Homo sapiens
aggcgggctccttggtggtcccccagccgctgcacatctgatcactgtgtcttcagctccctgtgggccagacctcattccagggccctggacactcaaagccggcagagaagagaaact

SEQ ID NO: 302 - DNA, 120 bp, Homo sapiens
tgacgaatacctattggaaatatgggccagtttcagacttagtaaaacatgaaaagcctcctcattaaaatgaagatcaagccaaagacaactgctattatttaatgttactttgcacct

SEQ ID NO: 303 - DNA, 120 bp, Homo sapiens
ccacggatctctcagctctctaagctccactaccatcccccaggaacacgatgtccacagtgggcctgctctgccaaccagctcagctaccctgaagccacttttcctggtcacccaccc

SEQ ID NO: 304 - DNA, 120 bp, Homo sapiens
ccacggggagggggagagagaggagggcggcgctctgacgcatacttaccggcccaaggctgggcaggggtggctggcggcagtcacagtgacatttgggaaatgccaggggctgggtcc

SEQ ID NO: 305 - DNA, 120 bp, Homo sapiens
gcccggaaggcgggtgtgggcggtgacaggggtgggggctgggttattccccgaggctgagaccacaagacaccagctttgccaacaaaactccacttggccagtggtgccaggggccgc

SEQ ID NO: 306 - DNA, 120 bp, Homo sapiens
ctccgagatccacgccatccatgggctcccacctgactgtccccgggttccctcaggagcccccacgcctcgtgtcccatctgcctctgaactcccattgtcctggaacccacagggacc

SEQ ID NO: 307 - DNA, 120 bp, Homo sapiens
ttgcgtttggcttctctcacttagcatgaccttttaaaggggtgtccatgctgtggcatatttttttaattgcaactgatttcttcctctcagagaaggcagctgcacccattcctgaac

SEQ ID NO: 308 - DNA, 120 bp, Homo sapiens
gatcgtcatactcttcagatctgattctggagaggaaaggaaatatcagctctgtgtcactattttcaatggaaagaccatgagacatctgctccccagcccagtcccttgtcctgcact

SEQ ID NO: 309 - DNA, 120 bp, Homo sapiens
ctgcgtgtttaaaatgcccatggtggacagagttgacaatggaaactctgctttctgcttaactcttacattccctcttattttttcaattgagaactaatctttgatttagaaattatg

SEQ ID NO: 310 - DNA, 120 bp, Homo sapiens
tttcgtatttatgtgtcacatgtggcttatttaataattctttggcaattgtacatctcagtctcacaattggcctgatggattaacattttgtttactcaaataattgtgcttggatga

SEQ ID NO: 311 - DNA, 120 bp, Homo sapiens
tcccgacccaagcagcgcacgtggtttcccagtaatctctgtgacgcaaaacctgagagagggaacggcccacaacatgcagtgtcctgagtggacacttttccaattctgttttgccct

SEQ ID NO: 312 - DNA, 120 bp, Homo sapiens
ttgcgcatgcatagaaagagggagaatgtgtgatacacacacgtatgctatttaggtactgacaccaagggtattaaacacatattaactatagaaaagctgatgtttggagctcatctt

SEQ ID NO: 313 - DNA, 120 bp, Homo sapiens
gtacggaggtggaaacaaacactttcctgctgtgggaacaaccacggtgttgagtctgtcccacctcctttcctaaagccagcctgggcatgcccacaggggcaggggtccccgatgaag

SEQ ID NO: 314 - DNA, 120 bp, Homo sapiens
aaacgcaggagacagctgtttcatttggtaggtgttctccatacatgattacaacacctgcaaactgcggctaactatggcacagtgatgtgcacatctgatcccgtgcttgattttaaa

SEQ ID NO: 315 - DNA, 120 bp, Homo sapiens
aaacggaatgctcctaaagtcttaaatgtggcagttgcaggtcttggtagataacctttaacaagaaaaggaagttcccttataaatgtagtttgcaaagaggttttgtctctttgtttt

SEQ ID NO: 316 - DNA, 120 bp, Homo sapiens
agtcggctgcctccctccccagggccctccaagggagtgggctccacatccatgggcccgaggaatctgcggagagacgggaagagcaggggacactcacagggcgggggtccaggcggg

SEQ ID NO: 317 - DNA, 120 bp, Homo sapiens
cctcgtggagacagctgggaaaggcctcggggcaagggacctcggatttcctcctctgcctcaaaacagacagtctaagctgggtgcggtagcttgcgcctgtaatcccagcactttggg

SEQ ID NO: 318 - DNA, 120 bp, Homo sapiens
tgtcgcatggattttaacaacgccttctacagcacttactctgtgcaggcacagttttgagctcttagcttgtgcttactcaatccacacaactcccccaggccaccaccatctctagat

SEQ ID NO: 319 - DNA, 120 bp, Homo sapiens
ccccgcccctgcctcctctcgctgaccaattgagctgtgagcctggagcagatccgtgggctgcagacccccgccccagtgcctctccccctgcagccctgcccctcgaactgtgacatg

SEQ ID NO: 320 - DNA, 120 bp, Homo sapiens
ctgcggatttatttattaataaagaccttattggtctgggatttgctgtaaaataagccagggcggtcttggctgagctcagttctccctctgcccaccctgttgccctccacaagaacc

SEQ ID NO: 321 - DNA, 120 bp, Homo sapiens
aaccgtagctcagggcaactaagacagggcaagggccctggcaggggaggggtgtcccggtccaacttgggacccagttgggactgggtcccaagtcccaattgtgtccctggacacatg

SEQ ID NO: 322 - DNA, 120 bp, Homo sapiens
tcccgaagagcagagaaccagagctcagtgggggagagggaattagagaagtcacctccaaggaaagggcctgtcacatttctgcagcccctgcaggcatctacccccaccgggctctca

SEQ ID NO: 323 - DNA, 120 bp, Homo sapiens
ccacgtgggagaagtaactttctatttactcagtcttttcccttaaataaattccattttttacctgaataaagctttataacgctacccttaacagaaaacttggcagtttacaaaaaa

SEQ ID NO: 324 - DNA, 120 bp, Homo sapiens
agtcgactggtgattttaaagggggaatgagggagtatggaggggtatgagttggggctcagtagagttggggatgtgaaaaattacaagggaccagtgtaaatgtgatgaggccagcgg

SEQ ID NO: 325 - DNA, 120 bp, Homo sapiens
gggcggtcaggagcctatggtcagatattggcaagaatagtaagttatcctggcagcactgagatttctcaggcaggcattttaatggtggggacaggggtcatcctgggaacacaggct

SEQ ID NO: 326 - DNA, 120 bp, Homo sapiens
agccgaataacaaacttacagtgagcagtcaccaacagacagaagtgatgtgattggttactgatcatgacatgcatttgttattaatgtgatgatgtgtagactgaagagctagcagcc

SEQ ID NO: 327 - DNA, 120 bp, Homo sapiens
gtgcggggggtggttagggggtgagggcgtgcgacacagcgtcagaaagcggacggaagctgggggtgagcaggactcgggtgccgtgagtgtcttggtgaccactgtgagccggcgagg

SEQ ID NO: 328 - DNA, 120 bp, Homo sapiens
gcccgaggtggccccggagctgtgagcgggaggaagagggaagggcggagtctggagccctcacgccttccgccttgtgcgcggtgcaggctgccgagagcccggccgggcaagcctttc

SEQ ID NO: 329 - DNA, 120 bp, Homo sapiens
ttccgccgtggtcagtgactcgtttgcacaaggactttttagggaagagagaagccaggccttcgctgtgggcctagcccctcaaaccgcaagctctcccccttggggtcctcgtcgtga

SEQ ID NO: 330 - DNA, 120 bp, Homo sapiens
gctcgacgctgcgtcctcatccaacactggcaccgcgcgctccttccagggtcggaggcccacagacccctcacgttcgcttctgtcaggagtagcggcagaatttcgataatttatgtc

SEQ ID NO: 331 - DNA, 120 bp, Homo sapiens
ggccgctgcgcaggagagctgcgcggggtccaggaggggagcgcggagtgggagcagtcgactcgggctgcgcagtgcgtgtcggctgtcacgggacaccggtgaggaccctgcacccag

SEQ ID NO: 332 - DNA, 120 bp, Homo sapiens
agtcgggggtccaggctgttgctggaacaggaggcagctcggtgtccacggttccgcagggggccgctgtctgcttggatctttcatcaggtcccaggcagagggtgcgctctctactca

SEQ ID NO: 333 - DNA, 120 bp, Homo sapiens
aggcgcgactccatctggttcccatcaatgacagagggagcatcatgtttggacagaggggctgcatctgtgtctatgcagggaaagctgcatggattatccagcaaatcatggtgtaga

SEQ ID NO: 334 - DNA, 120 bp, Homo sapiens
agccgggtgactctgtcttgctatttattcacttctgcattcgacaagtactgtggacacctgctgtgtgccaggcactgctcgaggtgctagggggagatcaggaagcaagaaaaagtt

SEQ ID NO: 335 - DNA, 120 bp, Homo sapiens
atgcgtattccaactgagaagtgggggtgtagccaacaaacaatgaacataatccccaaatcatagagcaagacatgggtgatacaaatcatggcaaagaaagcattgtgcagactgagg

SEQ ID NO: 336 - DNA, 120 bp, Homo sapiens
ggacgtggattgcaatttaaggtgggatgggggttggtccgatatgtgagcctggctaacaagatcgggcaggaagtaatgtctccttcagaccccgcctgcccagtagaccacccgctt

SEQ ID NO: 337 - DNA, 120 bp, Homo sapiens
cttcgtgtaaccgccgagcacaggagggccattgctgcttggcatcactgccctggatgccgggatcacagtgctgcccatccctctgctgcctcctctctgtgtcctgtcagtggtcct

SEQ ID NO: 338 - DNA, 120 bp, Homo sapiens
gatcgagactaaaaggcctcctgatcccattgctttgccaggacaatattgcttcccagggaagactctgctggcacattttaggcatttctggaagaacaccatatcaccatcatcacc

SEQ ID NO: 339 - DNA, 120 bp, Homo sapiens
tcccgtaagtgttcttaggaaatgacaatggacagaaaattgtcattgtttttgctgaaaaaaaaaaaaagtttgaatagtttccttggcccaggctggttggtggcaaccccggcccca

SEQ ID NO: 340 - DNA, 120 bp, Homo sapiens
cctcgcacaccctgccgcatcttcagggcttggaggcctctgtgtctgactctggctcaaatgtaattgcagctctagaggaagcgacccacaccacagggaagtgaggagggtgggggt

SEQ ID NO: 341 - DNA, 120 bp, Homo sapiens
cagcgacagagccagggaaaaatgccatcctatgatacgcagtctttaacccaaatgatgtttctgcagaaactttttgcatttgctactttgacagatggacaatgtttcagttcttaa

SEQ ID NO: 342 - DNA, 120 bp, Homo sapiens
aggcgtcagaggtaggcgtccggcagagggaagaggcagtgggccaagggggtggctcagagcagacagggcaggctggcaagtgtggttggtgtggtctggtgtccttgtcccagagtc

SEQ ID NO: 343 - DNA, 120 bp, Homo sapiens
ccccggcaaggcggcaccttagggccctgtctggccagagttgacctgtccacacctgcccccacccggtctcctccatggcttcaggctagaaggaagcagagttacatctcaggccct

SEQ ID NO: 344 - DNA, 120 bp, Homo sapiens
cctcgcatcacgacactccttagagtgaggctgactcagcttggactatgcagaagttaggacacatggagaaatctggctgtggtgggttcacccgtctgcgttttggtaggcccttcc

SEQ ID NO: 345 - DNA, 120 bp, Homo sapiens
gcccggggccatgtgttccttcaagttgcacatgcccacctgcaacatttagtggcatttctgataactcactgtgtaaggctgttttgtgcttgcggcaggatttctcctccggtttct

SEQ ID NO: 346 - DNA, 120 bp, Homo sapiens
catcgcctggtgcaggagcaggaacggagagacgagaggccagggtgggtctgaggctgttctccagtcacttcaggcttggctcacagcccgacttcctgccccgcagcctcctgcccc

SEQ ID NO: 347 - DNA, 120 bp, Homo sapiens
tgtcgccagaatggctgagcctgttgatgacaaagccacagctcacaggctgacaattttgtctggatttctatcaaggccgggagtgcagtcaatagcacatgcaggaaattttaaaag

SEQ ID NO: 348 - DNA, 120 bp, Homo sapiens
ttccgggggtgaggaccaaaatggagcaggactggcggccagcatcacctcttccatcttccgtctgtcctgaaccacgaaggacggcctaaaaatagcgcctggaccttacaccatggg

SEQ ID NO: 349 - DNA, 120 bp, Homo sapiens
tatcggagctgagagtctcccatcatttatgcttatagagtccttttttctgaagtcgtgaacgtgcctgttctcatttctgggaagtcagtgacaggacttctgtgaggggaaagtggc

SEQ ID NO: 350 - DNA, 120 bp, Homo sapiens
agccgggttacggagggaggtggtcgaagagtgaggtgagagaaccagggcttctggggacagagcatgtgctggctcagtggctctctgattcttcctaagaaagaacagtaccctctt

SEQ ID NO: 351 - DNA, 120 bp, Homo sapiens
tctcgcccctccttcaagttatactcccaggtgcctgcctctggcacatctcaggagggcaggggccaagcctctgctccattttgaatgcccgcagaccctggttgacagtgattcctt

SEQ ID NO: 352 - DNA, 120 bp, Homo sapiens
aaacgagacggccgcctagggcagctgacctgcagcccctgcagactgcagtctgccgctttcaaggccggctttccctttctcagcttccccatgggctctggccagtcttgtcatttt

SEQ ID NO: 353 - DNA, 120 bp, Homo sapiens
ccacgctttagttaactcatctgaattgcagtaagatattgcacagagaattgtgagtggtgacaaagagacccagagaattcgtctcccaaaactggaagttccatggacatgggataa

SEQ ID NO: 354 - DNA, 120 bp, Homo sapiens
ccacgctgtgcccatcttcctcgtaggagcagctgactgaaaagccacggctgagtgggatcaccactgagtgggattggtccaccactggtactggcttcagaacgctgaccacagcca

SEQ ID NO: 355 - DNA, 120 bp, Homo sapiens
gcccgggaggccacacactgcagctttccttcaggaaaagcccgtggtcccgtgggtataaatcaaatgtaagttgggtggattacttgaagcagaggatccagtctcactcccgcccca

SEQ ID NO: 356 - DNA, 120 bp, Homo sapiens
gcacgaggctctgattccatcctgcacaaaaacaatggcagattcacaccacatgggtggatcaggaggacatcatgctcagtgaaataagccagtcactgaaggacaagtgctgcatga

SEQ ID NO: 357 - DNA, 120 bp, Homo sapiens
ttccggcctggccaggtggcaactgggcaccccatcccaccactgacctggcatctgaaagggccagccagggaactgggactctcacccctgcctggtggtaaagagcccccactgtag

SEQ ID NO: 358 - DNA, 120 bp, Homo sapiens
agtcggtggagatggcagggggagcgtggactcgcacccctcacctggcagcaacaggcacctcccacccctgctgggtggtgtcactagagcctggaagagtcacccctccgcccccca

SEQ ID NO: 359 - DNA, 120 bp, Homo sapiens
tctcgtccctgccaggcagctctcagcaggggccttggagggagaagggtctcgcacacctgccgagcagcgccgaagaaccccctcgcaggtgtcacgaggaagccggctaggacacga

SEQ ID NO: 360 - DNA, 120 bp, Homo sapiens
aatcgacacgcggcaaccaccgtacctgctcctgaaatatcttggccaagggggcacagtctgtcagcttaatgaacctcaccacgtcggtgaccgtccactccaacgggttgctctcca

SEQ ID NO: 361 - DNA, 120 bp, Homo sapiens
tttcgtgtcctgcagagaaagggcaggaggagctcagctgcggcacagtcagctggctgggtcctctccagcactctccaggcctcggccgttcctggccggaagccactgcctcccttt

SEQ ID NO: 362 - DNA, 120 bp, Homo sapiens
agtcgctcttgcatccctagttcaggaaaccttgggcctgcttatgaacgaagcatctctgattagagaaaagaggagaaatacaaggggcacgtccaagcagacacgagacagtgtccc

SEQ ID NO: 363 - DNA, 120 bp, Homo sapiens
caacgctgtatggcaaaaatgccaagaaatttacgtgtcgcccatagaactgcagaacgaacgtccttcagtttgttccatttctcagggctgtgtcacaaagagaagtggcaaggttca

SEQ ID NO: 364 - DNA, 120 bp, Homo sapiens
cagcgtctcttcctggaaattccagtggggatcttctaccagctgtaattctcttaatacccttccaggcttgtaggctgcgttgattatcatgctaagaaccttttggggaaaaaaata

SEQ ID NO: 365 - DNA, 120 bp, Homo sapiens
gctcgccactacacccacatgaagtgaagaaacgtgattaagtctgatagaacacttgccaggctaacactgagttgtttcaccatccatggacaaaaagcgtggtaaaatacaatctct

SEQ ID NO: 366 - DNA, 120 bp, Homo sapiens
aaacggagacaatctactcatgccaacacttctggagaggcttcacatgcttgcaaggagggtaacaaattgtgtgaaactctcctcttgcaggctcaattcatggacatttaatactag

SEQ ID NO: 367 - DNA, 120 bp, Homo sapiens
cagcgccatccagtatcatatttcccccatccacccctcactcccaagtccaagaaaacaagcatgtgtctaccatggggctcagaaagagcaggcatttctaagagttccagctgctga

SEQ ID NO: 368 - DNA, 120 bp, Homo sapiens
atacgatgttcctgttaacctcaatgagtttctctaatgaaagggacaaggacctcagacccctaaggtgctcacctttcaaaaagcaaatcatcattaatgattaacattgatgagttc

SEQ ID NO: 369 - DNA, 120 bp, Homo sapiens
gaacgtgagagtgcaaagcagaggcctatggtgtggagtttcatgaaatgatcctctgtgaagctccactgagtgacagtagcaggaacaagacgggggagcacgcagtgcccatgcctc

SEQ ID NO: 370 - DNA, 120 bp, Homo sapiens
ggccgtccgggtgcggaagttggaaggagcacgccaggcatggagctcacattttggatttcagagcaaaataccgttgggagagcaagagatacacctgagtgagatgggagtctggca

SEQ ID NO: 371 - DNA, 120 bp, Homo sapiens
catcggagcaggattggctgaaagagagaacaagcatccccctttcctaagaacagctctggggttaagggaatgtatcggagcttggggtgggacctcagggcccacatctaagccttc

SEQ ID NO: 372 - DNA, 120 bp, Homo sapiens
aaacggaaccagtcaaactcaaaaacaaggtttatgagcagtgtacgtggacaaggcccttctctaggaaacctgacaacttatcagtttggagttactttgttttgaactcagtttgtg

SEQ ID NO: 373 - DNA, 120 bp, Homo sapiens
tatcgtaagagaagcccgcgtcttccttacccctttggctgtaccagacggaatgagaaagaaaagcttctctctcttggccacatttaatcttctctcctcagcctttaatctaggtct

SEQ ID NO: 374 - DNA, 120 bp, Homo sapiens
ctccgatgctaaaatgtaggagagattccctcctaagggttaaatctataatcacactgacaggtacatcattgaaagctaagaaaacactgaaaaaaagcactggatgtggaatcttca

SEQ ID NO: 375 - DNA, 120 bp, Homo sapiens
gtccgtgtcccttcctttattaaacatcgagaaatagagaaagcaagatacttaaagaaaccatttcaggtacagtttcagacccaaccaaaccagactcaatgcagtgcactgccgtga

SEQ ID NO: 376 - DNA, 120 bp, Homo sapiens
ttacggatttccagggtgccttttatcccttatcagtgatgtgtgtataatctcgatacttatgtcaaagacgacagagactgtgctgcagaaggacaccaagacactgggtattttacg

SEQ ID NO: 377 - DNA, 120 bp, Homo sapiens
aaacggaaataagcaggaagcactagggagtcactgcccagccgcacctcacccgtcagctacatacactcctgagaagcatgacatgaaacagcgatcaattcagcagaaaagaattag

SEQ ID NO: 378 - DNA, 120 bp, Homo sapiens
aaccgtatccccagaccacagtgctctcttgggcttattcctcaagttccttatatctttattctctatttgtttagttagaaaacagtatacagtagcaggttagtgcctggatcaaac

SEQ ID NO: 379 - DNA, 120 bp, Homo sapiens
ctgcggaaggcactgaggataaagcagtcatggaaatacaaacttggctctcgcagagcctgcattctagctaggggaaggaggccaaatgcaaaaaactatttaaattaaatttaaaaa

SEQ ID NO: 380 - DNA, 120 bp, Homo sapiens
agtcgggggaatcagtgctgagatcagtgctgaaccaggatagcagggagagtgcgcagaaggggagatagtggaacagagtgcggttttctttcctttttttttttctttgagacagag

SEQ ID NO: 381 - DNA, 120 bp, Homo sapiens
tcgtcttcaagaaaaaaaaagtcattatttatttttcaataaaatgaggcttttaatgtcctttgagtttttttaaacctatttcatcaactatttatccttcaactgaatgtacatttt

SEQ ID NO: 382 - DNA, 120 bp, Homo sapiens
caccgacaaccacacagacgtgtgaacacatccccccaacgtgagcaaccgcagcataatgggactcatcccatccaaatacccatttcatctaaagtgtaaaaataataaaaagaactt

SEQ ID NO: 383 - DNA, 120 bp, Homo sapiens
taccgctcatctccggccattaaatgtgcttagctttgacttctgtctcgtaacagctgaacgctatggcaattttccataacaacacgcatctcagatgactcactgctgaattcaaac

SEQ ID NO: 384 - DNA, 120 bp, Homo sapiens
taccgtaatgaaagaaactagaaaaaagtctgcctgctgagaaacagtgatgatcaacagtgataacagagaaaaaaagcaagtaagtgtgtgcgtgtgtgtgtgtgtgtgtgtgtgtgt

SEQ ID NO: 385 - DNA, 120 bp, Homo sapiens
cttcgtgtaagcagaggaagtcagtagagagtgccactgtgttatttctaagatttctgtacatacatgaaatgcgatcagattgggttgaagagtgtctccctgcaaattcatactcac

SEQ ID NO: 386 - DNA, 120 bp, Homo sapiens
tgacggttgtcttgtaagcagagagaaatttgaacagatgtggagaaggccatgtgaacctggaggcagggaaccgagggaggtggccacagaccaagcaaagcccaggacacaggcgac

SEQ ID NO: 387 - DNA, 120 bp, Homo sapiens
ggccgccctctgcttccacccagagccttcaggggagtgtggtcctgccgacaccctgatttcacacactagtctccagaagcatgagagaacaaatttctgtcattctaagtcatccag

SEQ ID NO: 388 - DNA, 120 bp, Homo sapiens
tctcgagcttggaggccttcagacaagaactattccaccagttccagttctcaggcctcaggctaggactggaaattacaccatcttccaccatcagctctcctggatctccagcctgcc

SEQ ID NO: 389 - DNA, 120 bp, Homo sapiens
cctcggtttccacagggacaagaacagtccccacctcacaggcttgctagaagtcttaatgtaaaacctgtacaacagcacctgagacatagtcagccctcttaatatttgctgttatta

SEQ ID NO: 390 - DNA, 120 bp, Homo sapiens
aaacgcatgacctccctcaacaggactcatgtttatgcaatgttctaattagtgaatgggttgtgttggatttttatcagaatggcaagaaaaacagcaatgtttacagctgggctaggg

SEQ ID NO: 391 - DNA, 120 bp, Homo sapiens
ctacggccaagggatccagccagctgggctagaaaaggcagtgagcgtaccccaaagccatatgagcaggcaggtgaggggctgggtggaggctggtgggcccagcacacccaggaaagg

SEQ ID NO: 392 - DNA, 120 bp, Homo sapiens
aagcgccaatgggtcagtgatgggccccgccaggctggaaagcagcacaaggaacactcagatgagagcaaggttggaatgaactatgcaggggacgacaggccagccacggggtcccca

SEQ ID NO: 393 - DNA, 120 bp, Homo sapiens
ctgcgacctggaggacattcttctcccatgcaactgagtttaaaacctggatccaccatgcacaggacaagtcactcaagccctctgttcagctctctttcattccacacaaaatatgaa

SEQ ID NO: 394 - DNA, 120 bp, Homo sapiens
catcgtgcctgtaaatgaagaggttcccctttctggcctgccaagatggtctagcatgcctgctcacttcgaggatttctccaggatcaactcctctgaaaaagatcccctattggactc

SEQ ID NO: 395 - DNA, 120 bp, Homo sapiens
ggtcgtgtccccctcatcagttgcagtctttgcagggcttggaaagcactgctccttcaggagagggctttgtcctcgtgccccctcccccagggtcatgtcctgagtgtgtgagcctac

SEQ ID NO: 396 - DNA, 120 bp, Homo sapiens
aaacgtatggatatctgttcaaagccgctgctattaggcccaaagatagaaaacgtaggctgctcccctgcatgaggacagggtttctttgcaagagcatcatttcattctattccaagg

SEQ ID NO: 397 - DNA, 120 bp, Homo sapiens
agacgaaaatggcagattcagtctataacacttggaccacaatgagtcatgtttccagttcaattcaaattaatcttcaaatactttctggagcaccaatccttgccagcctggccccca

SEQ ID NO: 398 - DNA, 120 bp, Homo sapiens
cagcgtgaagagtgaggcctgaatttttctaagaaaaatgttgattcctttccttcccaaatagaagagcctgtggttctccagttaataccaaatgccaagaagaagaatcaagctcac

SEQ ID NO: 399 - DNA, 120 bp, Homo sapiens
caccgctttatctatagacttcatcaggaaatttcacgtcgcaagcctgtaaaaagaatgtcaaggaatctactgaacactgtgtcagcatattgttctgcttgcttttatcacagcaac

SEQ ID NO: 400 - DNA, 120 bp, Homo sapiens
caacgcctggaatcccagcattggaatttccgcacacttccttcttggtgtcccctgggatgatgctgtctatggtgtctgctggggaggccacagatcctgagctatttcctctccctg

SEQ ID NO: 401 - DNA, 120 bp, Homo sapiens
cttcgccttttccagagcacagatgaaaacacgaccccatgtggagcttacctcacttaacaatagcactttactctgcagcagggacccacagctcagctgctgccttcacaagcacgg

SEQ ID NO: 402 - DNA, 120 bp, Homo sapiens
agccgacaggcgcttgccctggtgccagcgcagggcttcccgggggcttggggtaggggtaggggtgcgggggggaaggggagaacgtaatttccttctgcaggagtcgtggagacgtga

SEQ ID NO: 403 - DNA, 120 bp, Homo sapiens
caccgcgctctctccaggcttgtttaccagttttaggtcatcattgtgcacgaaacattctttcatccaaataaaagcaaatgcagaagaacacctgatcccaaacagtgtatgactgcg

SEQ ID NO: 404 - DNA, 120 bp, Homo sapiens
ctccgaaggagttgaatttttttaatgttttgggtacgtagaccccgtataattttgctcctgggtccacaaaatggtgattttgggggagggttacctatcgtgattaagaaatataat

SEQ ID NO: 405 - DNA, 120 bp, Homo sapiens
ctccgttaaactggaactcataatagccaccactaattgcaatcacattctcatcagctacttctgttggcacctaccatggccctaagcctagaggaagagttggaggaggaaaccttc

SEQ ID NO: 406 - DNA, 120 bp, Homo sapiens
cttcggttagaattaccatgggaggattcaactagtatatgttttctgtgctctgtgggatataattttaaaagcatgagttttggaatcagaaaggcttttatttatatgttaattagc

SEQ ID NO: 407 - DNA, 120 bp, Homo sapiens
atccgaacacatgaattcaagatttgcattctggctccaaaactagctatgtggccttggcaactttctttctttctttctttctttttttttttcatttttgcctctgagtttcacttt

SEQ ID NO: 408 - DNA, 120 bp, Homo sapiens
tgtcgtggggctcacagccggggagagttgggaagtcttgtttcctttcttgtgattattccccagtgtctcatttccacttttagttcccctctctccaccaaaccccccacgccattg

SEQ ID NO: 409 - DNA, 120 bp, Homo sapiens
agtcgaggccaagagaaaaagaaggggaagtatagagaaaaggagagtagagacgatcgcaaaaggaaagttggtaaaagagaattgaggaaaagggcaactcagagaagggaggagagg

SEQ ID NO: 410 - DNA, 120 bp, Homo sapiens
ggacgagctcctccttggctctcaccctctgggattagggaaatctagattttcagagcgctgagttgtgctcgatggaatttttattcttgggccctgaggtacctttatctttatgct

SEQ ID NO: 411 - DNA, 120 bp, Homo sapiens
aagcggtcatattgatgtctacggtccagcaacaacaggaaatcttaaggttttgctcagctagacttcttcagaatgcatgtgatacattgctctttctatccagaaatacatttctat

SEQ ID NO: 412 - DNA, 120 bp, Homo sapiens
aaacgaacagaaaatccttgaaacttctgaatgtgtactcaagtactctctgtgacttcctgatcttgatgtcagagatgtttctttgcctgtttctttgtctttgtatctaaaagtata

SEQ ID NO: 413 - DNA, 120 bp, Homo sapiens
caccgagacgatgaccgaagctggtgctatttaaaaaggcaaagtgctatcaaaatcacatgtgatctctacaaaaaggaaaaggggaaagtgtctgcatcctccttcatgggagacaga

SEQ ID NO: 414 - DNA, 120 bp, Homo sapiens
tgtcggggggatggtgcaacaccaaaggtttctagcacattcccatctaatccaccaggcagacctctgcaaaagccagatggataaagagagaggtcagtgggctatccctacaaactt

SEQ ID NO: 415 - DNA, 120 bp, Homo sapiens
gcacgtggtacacagctattaacatgaccaacgtacttcttttcatacccatcaataaagggaatccaaagaagttcacattcacctgggatggatagtagcacacattcgcagtcttgc

SEQ ID NO: 416 - DNA, 120 bp, Homo sapiens
cagcgtccgggcagacacggctaaaatccaaagaatgtgctccatgcaaagggaattcatgagggagtggagacagcatgagtaggccaagtgagattatctaaaaagagaagcagaaaa

SEQ ID NO: 417 - DNA, 120 bp, Homo sapiens
ccacgccccacgtgcactggctgaacttctcatcctcatgagtttgcttgttttgacttttgagtaatttgcgtttttacttactttactcattcaagtcgatttcacctgaagagcact

SEQ ID NO: 418 - DNA, 120 bp, Homo sapiens
gctcggggcctttatttactctggaaaatagaaatcaagacagtcacccaagagcagggaggctgtggcctggctggagccctgtggcgggaaggagaggcccaggatgtggctggaggc

SEQ ID NO: 419 - DNA, 120 bp, Homo sapiens
gcccggggcatggctgggggcctgtggagggaaagaaggggcccagggtgtggctggagccctgtggaggggaagagggggccgaggcctggctggaggcctgtggagggagagagaggc

SEQ ID NO: 420 - DNA, 120 bp, Homo sapiens
gcccggggcatggctggagccctgtggagggagagagaggcttggggcatggctggaggcctgtggagggagagcaagctgagcgtggatgcaggcactgaggaggaagcctccaccaga

SEQ ID NO: 421 - DNA, 120 bp, Homo sapiens
cagcgcccttagccctccaggcaggagcaggtagaaagaaggctccatcacggggtcctgtgtgacagggaaacaaagggccagggagaggtgcagagggtagtggaagtggctgatgat

SEQ ID NO: 422 - DNA, 120 bp, Homo sapiens
tggcgagagtgcagccaataagatctgagggaagagacaaagatcagaaaaatgcatgtgagagtggagggagggagtaaaggaaagtgagtgcccagaggtgcagactgtcacgtcatg

SEQ ID NO: 423 - DNA, 120 bp, Homo sapiens
ccacgactgtaaccacaggtatggctcttaggacctgtggagtcattcactgtccaaaggccacgtaggctcattccttgttagaataaggttgcctgtgcagacggctggtcctgtgtg

SEQ ID NO: 424 - DNA, 120 bp, Homo sapiens
tcacgtctcccaggaggggaggatggggctgccgttgctgttgccatggccccgtgcagtgtttccataacacagccggcccacatcccaagcaggcctgcttggacagtttgccctgca

SEQ ID NO: 425 - DNA, 120 bp, Homo sapiens
atgcgagacaggctggagagggatcaaggaccctttgggattggaattctgggttttgcgtgtgagagtttaactggctaagaccaggccagtacatgagcgcaggcccaagatccgaaa

SEQ ID NO: 426 - DNA, 120 bp, Homo sapiens
gaacgcccccttccccctgtcttttcggcggggctttgggagtttgcagggtgttctgagtgtttgggcctcagggattctcacctccgggagattccaggagctgtagggggtggaatg

SEQ ID NO: 427 - DNA, 120 bp, Homo sapiens
atgcgagtaggaggagaggtgagtaatgactggtggacccgcatgggctaactcttacggttcaagggttcaggaagagatttgcaaacgtctctactctactttgtctacaaaagaaca

SEQ ID NO: 428 - DNA, 120 bp, Homo sapiens
gtgcggtaggcgtggcctggaatccctgggtggcctgacagcccattttaatcagcaattctactggagttccagtgacccagggaacaaagttcaccactgctccttactcagaactgg

SEQ ID NO: 429 - DNA, 120 bp, Homo sapiens
taacgttgacagggctgatgggaatcctcctgctggctgcaaactccacctgcagcagagacggggcttctagggagacagggtcagtgtgagtgagtgctgctgggtttgccaggctgc

SEQ ID NO: 430 - DNA, 120 bp, Homo sapiens
aaccgaccccatctcatcttcccttgctgattcctcctggctgcttccatgatccgtcctacttcccaaaacagagaggatatctaaatatcatttttcaacttccccagctggtaaatg

SEQ ID NO: 431 - DNA, 120 bp, Homo sapiens
acacgggtacacacatctctctccaaggccctgctttcagcatccttcatatataatttattagatgagaagcacattcacgtggttttatgtggatcccaaggactgagattaaccaca

SEQ ID NO: 432 - DNA, 120 bp, Homo sapiens
acacgtttcagtgacaccaataagggctgtcaccccaatctccaggcctagaaagggaaatatggggcatttgtgaggctggctgcgatctcccaagaggatgtttctcaccagcttgtc

SEQ ID NO: 433 - DNA, 120 bp, Homo sapiens
ggtcggcagccagcaatgtcccagcacaggggccaatcccagggctctgctcatggccacagcggttcaatgagtggcatcctggacctgggccctccctgctgccaggcccactccttc

SEQ ID NO: 434 - DNA, 120 bp, Homo sapiens
ctgcggcctccccctgcagaccccccaagtccccagagccagaagctgagccgcccaacctcgggggtcctgagcaaattgggcctccctcttctcctgcctctccagcaacacagcccg

SEQ ID NO: 435 - DNA, 120 bp, Homo sapiens
ccccgcacgcccttccctctccacagggtgctatagtttccaggctggaccgtggtgtggaaaaggtgcctccgggtttatcagagttcatcggactgtctcacagcaggcgccaggctg

SEQ ID NO: 436 - DNA, 120 bp, Homo sapiens
catcgcctcgacttgaatttcaaccgttttctctgcttaacacctccctgggccatccctccaccccctacataatgagctccattctttcccagctctcagtggcgacagcagccaagc

SEQ ID NO: 437 - DNA, 120 bp, Homo sapiens
taccgcatggggacaggaattggctgtacttaacctgctgggtttctctctccctttcttacccgtctgttcagctgtaaccctagcaggccccgccaaagaggggcgccaaggtgtttg

SEQ ID NO: 438 - DNA, 120 bp, Homo sapiens
gaccgtgtggtcagcggcgggtcactgggtgtgagcttccctgtgaccccctaagcaagaaagaataggctcgcctctccctgacctcacagggaggtcttgagaactgctttgacctaa

SEQ ID NO: 439 - DNA, 120 bp, Homo sapiens
aaacgttaaagtcctgcagagggaagtaattgaagagttgtggccacaggaggtcagaaaccaaaaaacaatcctggatattgtgcccaaaactctgctcactgcaaggggtgggccgtt

SEQ ID NO: 440 - DNA, 120 bp, Homo sapiens
acccgggagtgcgggtcattccaggcccccagctggatgaattaggcctaagtcatagcctgagggctggaggcttggaaggacagcctggctgccccaggacacagcagcaaagcaccc

SEQ ID NO: 441 - DNA, 120 bp, Homo sapiens
cttcgcctcctgctccctggtgatctgtaacttgccactccttccttccatcgccctttgccctgcactctgccctccagtaccaggtgccctggtcgacatgagccagcaggccagagg

SEQ ID NO: 442 - DNA, 120 bp, Homo sapiens
taacgtcctcatttctgcagtgtcgagacttacacctggaacaacagatcactgctccaagtgctccacaggggacagggccacctggctccagggctgtctgtccagctgggatttaca

SEQ ID NO: 443 - DNA, 120 bp, Homo sapiens
ccccggggagcctggccagctccctggctacctctagctgccgctccctttctctgagctctacagtctgaaagcatctgtcagcagcactggctggcagcctttgcacctctggcatga

SEQ ID NO: 444 - DNA, 120 bp, Homo sapiens
agacggaaggcaaataaatagcacagcagacaggccctggtgtggtgggttcacgaagcagagagagacgagcccagatagtcccccagcgctaacttgttcccgaagccgctgcgtccg

SEQ ID NO: 445 - DNA, 120 bp, Homo sapiens
acacgtggatgtcattttactgcctgaatgtttccccagggaaggcaaacatgataaagaattttcttaactcagcttttcctcccagtgctaagcatgccttctcatttcacgcggggg

SEQ ID NO: 446 - DNA, 120 bp, Homo sapiens
ccccgtggaagaagcctcttgtgaggccagccccagagccttgaactctggcctgcatcgaagcattccacttccccgaccacagtctttctttctctgctgtttcgcccaagcgctccc

SEQ ID NO: 447 - DNA, 120 bp, Homo sapiens
tcccggtatccgtccgctgaagggtgacgttcattgactctggaagtcccctctcatcttaaccttttccttaaggcatcaggtttgtccaagttttggaaccaaagcccctgtccacga

SEQ ID NO: 448 - DNA, 120 bp, Homo sapiens
caccgacacgcttcctgctataggtgggctggtggacctgctctgagccggctctgcctcccgtcctagcactgtgcacatgtaattgatcacctcctggatgaccacaaggaaaaaagg

SEQ ID NO: 449 - DNA, 120 bp, Homo sapiens
ttccgcttacattcttgttacttgtgtagtgacaaacagttctttgctattcacatgttggtcagaatggcagttctccccaggctgcagcattcaacttgtcagatattgtgttgttaa

SEQ ID NO: 450 - DNA, 120 bp, Homo sapiens
ctgcgcttccagtgactgtgtccttctctgtgctagctttctgctctcttagggacagtctccttgctggctggtggtctgtaatcagctctcaagaatgctttctgtagtttgtccttc

SEQ ID NO: 451 - DNA, 120 bp, Homo sapiens
ttccgacgtggctggggtaggcagggtctgcagcgcctctgcacgctcagctgccttgctaaccagccttttctttggactacgacaccctccactttttagtctgatcttaaatctcat

SEQ ID NO: 452 - DNA, 120 bp, Homo sapiens
gttcgggtttggtgttctaatctagtgtctaacacaccatccacatagatatgttcttaagaaaagccattttgcagtcttcactatttcagcacaaattttaatctttcaataatctgt

SEQ ID NO: 453 - DNA, 120 bp, Homo sapiens
agacgttcgcatacctccttgtttttattataattcctcaccctcaacaatggggtaccacagttgagaaatcgtgttttgggtctttctagataatagacttggaatcttctgttaggg

SEQ ID NO: 454 - DNA, 120 bp, Homo sapiens
atgcgaaagtcatatgattattcagagtaggagatggggtcgagaggagagctccacatctgaggtagccatcatcccaaatggcccccagtgattctcactgcctggggttcctcccct

SEQ ID NO: 455 - DNA, 120 bp, Homo sapiens
ctacgttataaacagctttgcagctttcaccatggtctctgggatcactcactctgggggaagccaggcatcatgctatgtggacactcaactctgagagaggcccacacagggaggaac

SEQ ID NO: 456 - DNA, 120 bp, Homo sapiens
tgtcggccttggaagtgagccaccttggaagtgactgcaagctcctgtcaagctttcacatgagtgcagtctcagctgacatctgaccctgagctacccaatcaagtcactcctgaatgc

SEQ ID NO: 457 - DNA, 120 bp, Homo sapiens
gtccgactttctgaaaattgactttcaagcagtcttcttggtgttattgtcaccctcaactttacttccagacataaccacaatggccagttccgaagttcttgggggaactccatagta

SEQ ID NO: 458 - DNA, 120 bp, Homo sapiens
gagcgatgggatgcatttacctggccttaagatgctcctgctgcaatgggaagtgaagccttggatagctttcctcctcctgtgcaatactttcttgtcattttcccacctgcactgagt

SEQ ID NO: 459 - DNA, 120 bp, Homo sapiens
caccgccagtcagggctgttttcaggtgtatgtgaattcatcccagcagtgtgccttctgctgccttttcctagggaactgaacatgttaaatcacagacgcgatgtggcactgattatt

SEQ ID NO: 460 - DNA, 120 bp, Homo sapiens
atgcgtgtctgaagatagcctcttacagattcctcacgggagtctctgttcagtgtcattgtaagtttctcagaataatcgcaggcgctctgatgcagcctggtaaagaagactcagtga

SEQ ID NO: 461 - DNA, 120 bp, Homo sapiens
gcacgctcctacacagccttggctcagcgcttggagcatacagtcttgactgggtggacataaaccgctgaaagtggccagcagtgagcagaggccacctactatcagcggcactgctgc

SEQ ID NO: 462 - DNA, 120 bp, Homo sapiens
tgccgcccacccttcctgcccaggaactttctccgctgacctgcccagaccctgggcttcagcactgctattctctctgcccatgctccccaccctgggcaggccctcccttggcacagt

SEQ ID NO: 463 - DNA, 120 bp, Homo sapiens
ccccggcccaacttgctgaagtgcccatttttccctctgcccctccgtctcaggctggcttcatctttgtgccctcccttggggagtcctgctgggtgccctcatctcccagtggccaac

SEQ ID NO: 464 - DNA, 120 bp, Homo sapiens
gtacgtggactcctttggagctttaaatggaagctgggcggcctgcgttctcctctcctcctcctccctgaacccacagtgaccttgggcaaggcccttcccccatcatcgaaatgcgaa

SEQ ID NO: 465 - DNA, 120 bp, Homo sapiens
ctgcggcacacagatcagagctggtgtggggggaagggagagggagcctgtgggagggggagggcgcatccattatgcagattgtgtggagtgccttcccttccccagccaggaaacgcc

SEQ ID NO: 466 - DNA, 120 bp, Homo sapiens
aggcgtgttctcagcagccttgttttctgaggccctgaagccagccattaacttgaccattccaggggagaaactcacaggattttgtccttgagtcagaaaagggccttggcagagaag

SEQ ID NO: 467 - DNA, 120 bp, Homo sapiens
tgccgctagggccacgtggagctctctctaccaccatctgctgggggctggctgtctcttcccacagaggctgctcccttcctgtccagctcacagctcattgcccatggggcctggagc

SEQ ID NO: 468 - DNA, 120 bp, Homo sapiens
actcgaaggcctgcctggctattgggcactaccggtgggatttcaggagggctggcagggctgtggccagccaggcagggcatggctgagatgggctccccagagtccccaaggcatcca

SEQ ID NO: 469 - DNA, 120 bp, Homo sapiens
ggccgctcccagggcaaggcctcgctctgggagaggaggggcggggggctgggaggactgttgctgccgctttgttttgcctgagacctgctccctcccccttcctccacctaatctcat

SEQ ID NO: 470 - DNA, 120 bp, Homo sapiens
cagcgctccagaataggggagacaccagcagaggtgcaagaaacagccccggacaggaagcggtagagagacccagaaaggcagggtgggtgtgcactggcctccaggtcctgaaggcct

SEQ ID NO: 471 - DNA, 120 bp, Homo sapiens
tagcgccttgcctgccccatctcaggaaaggtgacctgagaggcccaagcttattcctgccctccctgagccatgcttcctgcccaacttcctaaggcttcggtgacagacggcaatctc

SEQ ID NO: 472 - DNA, 120 bp, Homo sapiens
tctcgccctctcaggggaaagatttaccaggccctctccggctgcatccactgggtctctggctacaggcagagagccagtcagcagtgcccctgcagctgtttggggctgggggctccg

SEQ ID NO: 473 - DNA, 120 bp, Homo sapiens
attcgaggatccaagtccctgccacatgcgtttgggtgagaccgacctcactgcctcagtttcctcctatacactgatgctatcaacaaaaatacccacttcaggaggtggttgtaaaga

SEQ ID NO: 474 - DNA, 120 bp, Homo sapiens
gagcgttaggcagcacctggcacaagacaaatgctcagtaaaagaccactgctgtcattaaggtcaacaccagccctgagctcctgccctggagctgacccagcgctcacgcccaggatc

SEQ ID NO: 475 - DNA, 120 bp, Homo sapiens
gtgcgcccttctcctgcctccagctcctctctggacccctgtcctggcacctcttcggtccctggttcggtctgcccctttcccaccgcggcccgtcttaggccaggatgtgctccctgc

SEQ ID NO: 476 - DNA, 120 bp, Homo sapiens
ctgcggactctggagcagggcccggccactccccggagcctgtatgacgggaaccgccccgcgccctctcccctacgcggggcaggccagccctggggcgccttaaaaaccggagctggc

SEQ ID NO: 477 - DNA, 120 bp, Homo sapiens
tggcgcttggcatcgccactctgggcaggatccaacgtcgctccagctgctcttgacgactccacagataccccgaagccatggcaagcaagggcttgcaggacctgaagcaacaggtgg

SEQ ID NO: 478 - DNA, 120 bp, Homo sapiens
gaccgcccaggaagccggtgaggatagcgcgcgacctagggctcaggcaggggcacctgcgtggatgcgcaggcagaagcagcgggtcggcgcggtccgcaagttcctggaccggcagct

SEQ ID NO: 479 - DNA, 120 bp, Homo sapiens
gctcggaaggctcggtcctccactgagacgcagggggcaggcagaacgcccaccccggcgagcagacagatggtgcccgcagggaggcagcggaacagaggctccggaggagccggagct

SEQ ID NO: 480 - DNA, 120 bp, Homo sapiens
ctgcgctgcgggcactgcgggagcccctccaaggaggccatgctggcgctgggcggcccgcccaggccctcaggagagggtgaaggtccaggacagggatcgggcgcggcccgccaccac

SEQ ID NO: 481 - DNA, 120 bp, Homo sapiens
acccgcgcgcgccaccagaggctgccccagacctcaaagggctttgtttccatcccacccccatcgccgaaaagtaatcgtcgccttacctttaagtccccacctggcaaagaaggtcct

SEQ ID NO: 482 - DNA, 120 bp, Homo sapiens
ctccgtattctggaggtgacccagctgcggtgggggcgtgggagatgtcaggagaccactgggttggttcttcctgcacctagcccaggcttcgttaggactccagctccctgtcagtcc

SEQ ID NO: 483 - DNA, 120 bp, Homo sapiens
ctccgtgtcaggtcccttccttctgggcttcacttttccatctgagagctgggtgcaaaggatgggctgctttctgatgggttaatcgagacgaggttcccaggggcctctcagcacact

SEQ ID NO: 484 - DNA, 120 bp, Homo sapiens
ttccggaggatgggatctgggtaaggcaggccctttcctgttcagcagcagggatgagttacagctctgtaggcgggagccacctgtcagcccccccggggctggtgactccattcccag

SEQ ID NO: 485 - DNA, 120 bp, Homo sapiens
ggccgaaactctggtccagaggagatagtccggccttggaagttttgcctccttccttcatttgtctcctaatgtcttaagctgcctgtccacagaggcactggctttgcttgtgtgccc

SEQ ID NO: 486 - DNA, 120 bp, Homo sapiens
ctccgggcaggccacaggagggaggaggcagtaaggacctggcaaaactgcaagccccagggctaagtgcatgaaaggtgggaattcaggcatctgggccaggcttctaggggagaagct

SEQ ID NO: 487 - DNA, 120 bp, Homo sapiens
ctgcgccatcaccagcattagccaacagtccagatgctagctgcagcctggccctgccctgccttccttcctctgtccaacattttctcagtagccctggagatggaaagggaagctcct

SEQ ID NO: 488 - DNA, 120 bp, Homo sapiens
cctcgggctggggggccctgggccagggactttatctccatggcatccatcccttggacctgtaccaccgaatactctggaggacacagaggcatggcaatggtggggcacctgtagtcg

SEQ ID NO: 489 - DNA, 120 bp, Homo sapiens
cagcggccggagcggcagctcagcaagtggtggaccaggccacagaggcggggcagaaaggtctggtggggctggagggaggcgggcaaccccagcacacctcccactccccgccccatc

SEQ ID NO: 490 - DNA, 120 bp, Homo sapiens
tcccggctggggcccaggcacatcctctcctctgcagagccctctgtccacaatgccccaagcaggtcccccgggagacccaggccaggctaagcctacaggcactgtggttcccgggcc

SEQ ID NO: 491 - DNA, 120 bp, Homo sapiens
tcccgcccttccccagccatggaccagctggccaagaccacccaggaaaccatcgacaagactgctaaccaggcctctgacaccttctctgggattgggaaaaaattcggcctcctgaaa

SEQ ID NO: 492 - DNA, 120 bp, Homo sapiens
ggtcggcctcctgaaatgacagcagggagacttgggtgaccccccttccaggcgccatctagcacagcctggccctgatctccgggcagccaccacctcctcggtctgccccctcattaa

SEQ ID NO: 493 - DNA, 120 bp, Homo sapiens
tcacgttcccaccctgtgtccacttcatgattcctcgcaagctgggcccagtcctctcatcccaagagcagagccaccgtagccggagtcctagcctcccaaattcggaaatccaatcca

SEQ ID NO: 494 - DNA, 120 bp, Homo sapiens
caacggtctcaggaatgttttccatcccgccacgcgcctcccgaagctcccagaccggaggctcagcccccatctcggttagtgcccctctcccgcccgactttagagccagcccctgcc

SEQ ID NO: 495 - DNA, 120 bp, Homo sapiens
tcccggcccctcctgggagctgggctggactcggtcctcagatcctcggaaggctcagctctgggcggggcaagggaccttgcaagtcgggggggcctcgggaacttctctccgccagct

SEQ ID NO: 496 - DNA, 120 bp, Homo sapiens
ctgcgactggaggctgggaacaggggagacgacccagggccacggcccctcaggacttcaggcggccggaggttgtggggacgaagcggagtcgggagccgggcttccggccctcactac

SEQ ID NO: 497 - DNA, 120 bp, Homo sapiens
ccccgtctcggcccgcgggttgcctgcgtgcccgccccacccagcggtgagtcatggggcagggcccgcgggaagctttgttgagtggggcgctgccgcccggcggggtcccgccccgcc

SEQ ID NO: 498 - DNA, 120 bp, Homo sapiens
ccccggggaggggcttcggggcacggggccgtgcacgtgagaacgaagcacggttgtggggggggcatgcacgtgcgcgctcgcgtgcgggagacccctcccttccacaccacttccttt

SEQ ID NO: 499 - DNA, 120 bp, Homo sapiens
tttcgggacaaaccggtaacctccggccctggaaggttttgtctagtgggttccggatggactggtgttcccagcacccccccggcacgtgtccacgcgtgtggccccggtacggtgtat

SEQ ID NO: 500 - DNA, 120 bp, Homo sapiens
caacgtggcactggttgagcgccggatgaggcctggccctggcgcggggcgtgggctgctgcggccctttcctccccgcgcccctcacgccccagcgggcccctagcggttcccgtccac

SEQ ID NO: 501 - DNA, 120 bp, Homo sapiens
acccgctccatgtctttaccccggtactacctccacctgcagtcgcctcctcctgcgcgccagtggcctctgcgtttctgttgaaaggtaccgactacgcggtgcttcccagttctgagg

SEQ ID NO: 502 - DNA, 120 bp, Homo sapiens
aggcgatttagtcagcggactcaaggcgcgctccctgccttccccggcctcccagcaggggacgaagtccccaacctggctgccagtccagatgctgcagtacaggtctgcctaggaggc

SEQ ID NO: 503 - DNA, 120 bp, Homo sapiens
taacgaaagtatttaatgaagtatttttaaaaaggtatgtgtgggtaagagtcctgtgcttctgtgtgagcagagtatctttggtagcagtggttagctctgcaaagtggagatgggggt

SEQ ID NO: 504 - DNA, 120 bp, Homo sapiens
gcacggccacgagaacactgcagagtaaactcatcggtggagcaggagaaactagagacagtcttattttgtataggcaatcaatataaaatgaaaattcatataaaattttaagtcagt

SEQ ID NO: 505 - DNA, 120 bp, Homo sapiens
aaccgagtgccaaatgcttttaaacagtgagaatgcaaatgctggagctgaaggaaatactgtctggggtcaggcctggcgccaactgccaggctccccagcatacgtaatggtcctgaa

SEQ ID NO: 506 - DNA, 120 bp, Homo sapiens
aggcgtgagccactatgcccagctggtctcttgttctttttaagcaagacactatattgaatagtgcaaaccaatgggcagtatgttatttgtagctcattctcagtgctaacagcaaga

SEQ ID NO: 507 - DNA, 120 bp, Homo sapiens
tatcgttcctgttttatttcagggggttgtataatttacctgatgtaatacctacagatatttattttctgatacttactaagggctatgtacagttctaggtgcattagattattattc

SEQ ID NO: 508 - DNA, 120 bp, Homo sapiens
tcccggaaaggatcatttctcacccagctagaaagctcagaagaatttgacaggggctggctttcctgacaaagatgtggtttctttattgatcaggcctacaaaagagttctgcctgtg

SEQ ID NO: 509 - DNA, 120 bp, Homo sapiens
aaccgttccttcctgtagtataatatcactcaacgcaatggatctaaccatgtgttaccactggggcctcctgctgaggagagcaagaagtcagcaaaacagagaataaagggcattgtt

SEQ ID NO: 510 - DNA, 120 bp, Homo sapiens
gagcgtggcatttggcatgagattactgtgcttttgaggagagaaggatagtaactaagaaatatctacatttgaattttaatacaggagagtctgagaagaagggcttttttggaagga

SEQ ID NO: 511 - DNA, 120 bp, Homo sapiens
aagcgcaggagaaggcaaatggacaaaacttgagtccctgaaaaattgaagatagaaagaatgagccccctgagttctaaatgggctgatacatcagctgatgtccctgaagcaggaata

SEQ ID NO: 512 - DNA, 120 bp, Homo sapiens
gaccgggccagtcacatagtgaatgaaatcattttgggcccttcccccatcagacacttttccaggaaatagctttttgctgccatgacctcttttgctgctgtttgatatccttgatat

SEQ ID NO: 513 - DNA, 120 bp, Homo sapiens
agacgagcaccccattaaccagcagctcttaggcagcattgcttgttggaggtatcttttcacagaggtgagccggcagcgccctgggcattatgggagcatcctgaaggtacggggcct

SEQ ID NO: 514 - DNA, 120 bp, Homo sapiens
cctcgtgctgcagccattggagtggctggcaagagtgatcacagaaactgtaaagccctaagcccctggaaatggagcgccctgcggctctgattaaggcttgtggagagggagctgtat

SEQ ID NO: 515 - DNA, 120 bp, Homo sapiens
cctcgagcagaatcctgtaaggcagcttgggattttctctccccaatgtgctgttgaaacatccgtgaattccagttggtggttgttttcatctgcttcaagcctagcccttgggtacag

SEQ ID NO: 516 - DNA, 120 bp, Homo sapiens
agccgtgtttctgggtaatgtttcattcttggtaggaagggctgtttccttctcatgaagtgattcgatatctttggagttacgaaatgaagtgctggtgagacctgttgttacttgttg

SEQ ID NO: 517 - DNA, 120 bp, Homo sapiens
gagcgtttctgaggagccctgttcttgaaagcagcactgaattgacgccttgcgagcttgggagttttcttcttggttaacagtcttttgaaacatgtacttgggattcaggaacttgca

SEQ ID NO: 518 - DNA, 120 bp, Homo sapiens
gcacgggttcagaaatgtgtctgtcccgcatgacctccgttacttggaagcagctgggtatcttgtgcctttatcctcatgtattcaacaaatatgtatcaggtgcctactatgtgccag

SEQ ID NO: 519 - DNA, 120 bp, Homo sapiens
tttcgggtagaagaaacagcaagtgggcaaaggccctgaggtgagagagctacacctgcctgaggagcctaatagcacctgtgaagctggagcacagaggaaagatgagaaacccctgag

SEQ ID NO: 520 - DNA, 120 bp, Homo sapiens
tgtcggagggcctctggagggcttgaagcagaggcgtgacatgatcttcctacagtttggaaagaacagtcgctgctgtgtggagactggatggggttggaggcaagagtggatgcttta

SEQ ID NO: 521 - DNA, 120 bp, Homo sapiens
gtccgatctctgactgcctggggaaagatggttttagagttattggtgcaggacacactctgaggagcagattcactgtttctctaatcagtctggcaccagtgccttcatggggcagtg

SEQ ID NO: 522 - DNA, 120 bp, Homo sapiens
aatcggttaccctgctcccaagtaaatgccagccctgaaattcctaccttcagggtactaacaagttagacaattagacagtggagatattgattttggaatgtctgtttaatatgtggt

SEQ ID NO: 523 - DNA, 120 bp, Homo sapiens
atccgatcattggctttaaggtggccagtctgccagcctgctgcaagactgaatggggcagggcccctagtgacagcagtggagccatctttcaaccaagccatcctttcctgtctacaa

SEQ ID NO: 524 - DNA, 120 bp, Homo sapiens
acccgtgagcatcctcattttactgatgcagaaacggaggcccagagaggttaagcaacctgcctgatgtttcgcaggaggaagtggaagaactggagttccaaatcaggtctgcctgcg

SEQ ID NO: 525 - DNA, 120 bp, Homo sapiens
caccgcctccacagttggcaggccggactggactgcagtctgcaagcaattagcgaaagcagctctccagcaaatccaagaaacaatccaatctgtaaaaggggagggggaagccatctt

SEQ ID NO: 526 - DNA, 120 bp, Homo sapiens
tgtcgtccaaagccattcagctagggctttaaaaggagcttttgttggtggaaatctctttactgacctgactttccctgggcttgggtttgcctgacaaaataaaagatgaccagttaa

SEQ ID NO: 527 - DNA, 120 bp, Homo sapiens
caacgcgtaatcatctgggataagtacgtcccatgcaatatatgggatatacctatcctagaagattatgcgttatttatctgaaattcaaattcaaatgggtgtcctgtatttttactt

SEQ ID NO: 528 - DNA, 120 bp, Homo sapiens
aaccggtcagtacaatttgtatttaataaagagcagccaacagtgctgccacagcatcttgtgagcgcatcccacagaggaagtgggcgatggccctgacccccctgcagcagaggcccc

SEQ ID NO: 529 - DNA, 120 bp, Homo sapiens
agccgtgaattccaagctctgcaggaccaagtgacaatgggagattgggagcagggagggagaaggaagggaccagacggaaaagaggaagagagagagaggaggctttagtgcaaattc

SEQ ID NO: 530 - DNA, 120 bp, Homo sapiens
catcgcaatgctccctgcttccctctcatttataagtctggagcacattcttggcattgagactctcatgcttggacccttctcttctcttggttcctggcacggtgaatttggccattt

SEQ ID NO: 531 - DNA, 120 bp, Homo sapiens
gtgcgcacagcagtgaatacaaggacctattgtgtcctgtactctaaagctggctgagggcctggtagccagggtgggtcacgattcactgcaactcaacacatttttattgagctccta

SEQ ID NO: 532 - DNA, 120 bp, Homo sapiens
gtccgtcctgagtttcaagagtcttaaattctaataggggataaggcaaagagacagtaacaaagcaggcagaacaaagtcggtattgtcagaggggtaaaagtcaaagcttttaagatg

SEQ ID NO: 533 - DNA, 120 bp, Homo sapiens
tgacgtttcattgccagaaaactcaatgccagtttatgctctagtccatctgaataaaaagtgatctgtacacccaaaacacataaacagaactaaattttatgtagccaagggacatta

SEQ ID NO: 534 - DNA, 120 bp, Homo sapiens
tcacgcctggatgtgaggtttatctttacatgagagcaagggacgtttatgtaatcctcattagtgcggatggctgttctgactccaacagccagtgcatcattgcaagaacagttgctt

SEQ ID NO: 535 - DNA, 120 bp, Homo sapiens
ttccgtcaatgcatattgtccaagtgacaaaggatttcagacagctacgtaattagcctctaatagcaatatacatgagaatgcaatttacttttcatcattcttgttcgggtcatgaat

SEQ ID NO: 536 - DNA, 120 bp, Homo sapiens
ctgcggtccagactgtattgttgttttaagtggtataaagaaaatgtctgggtgttttttccagtttgtgctaaagatctgaaaataatgaaacatttgtccattaaaacaataaactct

SEQ ID NO: 537 - DNA, 120 bp, Homo sapiens
tgtcgtgggctcctccagggaggccacccgggagcaattaaactgggccacaccagccacctcccacagcagcggggtccgcagatttaaccctttccccccagattccggcactgggtg

SEQ ID NO: 538 - DNA, 120 bp, Homo sapiens
tgccgcgctctctcccccagcaccgcgcccgcgcccccggctcccggactgggcatgctcagtagccgcccgcttcgtgctcccagggaagcctctgcacgccctcccccgctgctctcg

SEQ ID NO: 539 - DNA, 120 bp, Homo sapiens
gtccgagatcctctgggagctggatcacgtacatcccagctctcccgccccttggctttccctcagcttttcagggccaactctttggccacttcactgtttgttaagctcttcccgcag

SEQ ID NO: 540 - DNA, 120 bp, Homo sapiens
acccgaaagccacgggcactcaataaatgttagtttgaatttcattcatttactcattggaattttcacttttgtactgaagtgaggaaagcacgctgattttccaggctgttctgtctg

SEQ ID NO: 541 - DNA, 120 bp, Homo sapiens
gaacgtactgtctctctctcctctgcctctccaacaccctgggtgttttgcttttatagaattgtcacactgtttttcaactttctgtttttactgtccttttccttgctagactacaag

SEQ ID NO: 542 - DNA, 120 bp, Homo sapiens
gcacggtcagtcttattttgtatttggctctatgaaggaataaataaaataaattgaaatacctttcaattgtcatttttcatttccccccaacttatttcaaatctctttctttcagct

SEQ ID NO: 543 - DNA, 120 bp, Homo sapiens
aatcgtctttaagaagatagttttaatcaggtgtagtatattatatgagattaccataatttattttgctgtctgtcttctttaggatatttgaatagtttccatgtcattgccattatt

SEQ ID NO: 544 - DNA, 120 bp, Homo sapiens
cttcggattttttttctgtcatatatttggaaatagaaaggtcaaagtatatgaactaccaattctcgtgatactcattactgaaattttctgctaaattacaaaagtcaaggttttgat

SEQ ID NO: 545 - DNA, 120 bp, Homo sapiens
ggacggaagggtgacctgccactctgataatttaatagtaagttaaatatcagattacccattattgaaatgcctttttttttttttttgtaaagtgaaagcacgtttactaagaaagca

SEQ ID NO: 546 - DNA, 120 bp, Homo sapiens
atacgcttccaagagaatcctagcccagatgagcaagtatgcaataggattacatatttccgaaggccctcatcaggttttggaagcagcagcaatccccctatggattgtggtgtatgt

SEQ ID NO: 547 - DNA, 120 bp, Homo sapiens
gcacgtctcctgtgtaatattcttgcaattacctgtgtccttgcatatgtctctgctctctactaaccaaatgcagtgaagcaaaaccaagacattcaagcagcaacaaatatgctgcag

SEQ ID NO: 548 - DNA, 120 bp, Homo sapiens
tgacgttacagtattattcggtgaacactgagctgccaaggtactatgttacaaaaattgcattcagtctaaagctccactgaacacacagccccattgaaatggagtgaggttaggtgt

SEQ ID NO: 549 - DNA, 120 bp, Homo sapiens
caccgtggtgagaagggatatgtaagtgggatgatgacttttcctttctgtaaagaggtttctatttttactttaaagaaaacatgttcaaagaaagttgctctgaataacttaaattac

SEQ ID NO: 550 - DNA, 120 bp, Homo sapiens
cagcgctccatagacactggcactatgcctggttcttttttattgagtaccagacattgtctatgaaaaatagtaaagataagttgatgcctaggattatgctatctttctcctaaggga

SEQ ID NO: 551 - DNA, 120 bp, Homo sapiens
tttcgtttgctttggcaggctgctgtggcactagcaatcttgtatcaccattatcgactcagggatttagatgattcatggctggatgtcagagacttctgatgttagttaaaatgagta

SEQ ID NO: 552 - DNA, 120 bp, Homo sapiens
aatcgttttctttcttttttctctctgcattctgctcctgaggcagaccccattttgagaagtacacaacaacatggagaggctgaaaccccagctttttagccggaagaccatgaaaag

SEQ ID NO: 553 - DNA, 120 bp, Homo sapiens
caccgcaaaggttttgagaaccaaaccatagtgtagaccactgcccatgtgccaaactagcctttgggtgggacataaataaagtgaaccaaaatagcactgcaaaggttttcaaaacaa

SEQ ID NO: 554 - DNA, 120 bp, Homo sapiens
caccggtcagtgtttaggacttggtggggggcaataaactctcaaaagcttatcttatacagaagttggggttccatagtattagcccaatgtaacctaaaaattatgtttaaatgttat

SEQ ID NO: 555 - DNA, 120 bp, Homo sapiens
atacgtgtcactaggaagattttctagccaagatcttggtgcctgtgatgactcatgtttagatcatgttccttgagagtagggaaagataggaaagatatctgtaagcagctggtttta

SEQ ID NO: 556 - DNA, 120 bp, Homo sapiens
acccgagagctgtgaagacagattccataaagaaatccaatttaatagagttgccacttggaaacacattggtctaaacatcaggggatctggcttgtcaccccagcattgccacgaaca

SEQ ID NO: 557 - DNA, 120 bp, Homo sapiens
ccacgctttctataagacaaaaagttctaccacattaaaagaggcagcgatagacctcactctttctcttcttttcccctcgatttcttcatcaacctcaataacacaaatatggctaca

SEQ ID NO: 558 - DNA, 120 bp, Homo sapiens
tgtcgcagacctcagcatatccacggaaccagtggtgtaatgtccttcaatagaagtgtcacggagcctggcagaagcagcaagactgtccaataatcacttacctgccgtttatattaa

SEQ ID NO: 559 - DNA, 120 bp, Homo sapiens
gaccgtatgtgatacctgacagtacttgttcatgagcacacgtgagccacccccaaagttgctggaaataatcaggaggaacatcatagtggtatgcagtcttgcataacaggtgggaaa

SEQ ID NO: 560 - DNA, 120 bp, Homo sapiens
agacgtttctcccataattaccatggggcaagtcttcctctgttgcaacggaagtggtgcaggattcagagttgcttttcaggctggggaggcagaaaaagtatcagtccatctgctgtg

SEQ ID NO: 561 - DNA, 120 bp, Homo sapiens
aagcggtttattcatagagggcaagttttcagtttcacagatggatgataaaacaaatctgaatgcagtcttacaaatcttaaagagtcttaagagctgatgtttgcagcccaagctggg

SEQ ID NO: 562 - DNA, 120 bp, Homo sapiens
aatcgggttataacaaaataaactgtaaaaattatataggatgtcagaatgtattaattgctacagaggaaaatagagtgtaaatgctgagcagaagagagtcctagggatggtaagaaa

SEQ ID NO: 563 - DNA, 120 bp, Homo sapiens
gtgcgtatccaacaaaattcatgataataacacataagatctatataatcttgccattttcagatttttttttttttttttttttggagacacggtctcaatctgtcaccaacgctgaaa

SEQ ID NO: 564 - DNA, 120 bp, Homo sapiens
agacgcctctagatgatagtggtgtgatatgatcaatgaatcccatggcatcattccatttccctatctccaccactgttaagtgaattacttgatctgtggcaatgtgtaggataccat

SEQ ID NO: 565 - DNA, 120 bp, Homo sapiens
tgtcggtagctactggaaaactggtagtaagcaataacagttcaggccaacctaggtaagattaagtctattgagcccaggtacagcttccatctccctaccatgagttcaaagtgggat

SEQ ID NO: 566 - DNA, 120 bp, Homo sapiens
tcccgcttctgctgggatcctgaccccttggctttggtaaccttgcttcttccctttgacctaacagcctgtatgctacttccttcctgttgctaatttctttctttcttttttattttt

SEQ ID NO: 567 - DNA, 120 bp, Homo sapiens
ccccgcagccagagtggtctttttataacataaaagctttcagtggcttgtcattgcccataggccagaatctagacccttatgatctgctgggccctacttagttctgtggcctcagct

SEQ ID NO: 568 - DNA, 120 bp, Homo sapiens
tgccgtgctcactctgcttttgccacaggacccttctttctatacttagtatgtgtgccaattttgttccgaattcgtggccttagtcctacgtgttcctgatgcctcaaatgttctttt

SEQ ID NO: 569 - DNA, 120 bp, Homo sapiens
ctgcggggcttaatgcagagctgcagtgggcatggaatccgggccagaagcagtctgctgggtcaagtgggcagagagggcccagcaatgagcctagaggcgagcgaggcccaggcaggc

SEQ ID NO: 570 - DNA, 120 bp, Homo sapiens
aggcgcgccacaggccacagagatgctggacagcatagcggcactgaatggatcctgtgtcatttctggaggcttgtctgggatctgtgcaagggtaagagtggacctcttacactttca

SEQ ID NO: 571 - DNA, 120 bp, Homo sapiens
aaacggatgaagcactgggcctctgtcagccagttaagagcgaatggcacagctgcaaaggacaggcttgctggggaagattttgtcaagcctctgccatcaccctcgggtactgggaat

SEQ ID NO: 572 - DNA, 120 bp, Homo sapiens
gatcggaataaggtcctcgggcaactgaaggcatctggctgaggctacacctcagtgttacctgaaggctcctggactggccccaatccccaacagcccgttcgggtgtcagtcaagacc

SEQ ID NO: 573 - DNA, 120 bp, Homo sapiens
caacgttaagggtgttgctgcaaaccacagtgataatattattgagtggaatgagcattttgcttagtcatcagcagtgtaattcagaacaacttggtttttgtctgttcttagaagcaa

SEQ ID NO: 574 - DNA, 120 bp, Homo sapiens
ctgcgtttaagttgtttccgcccccgcaatcatgtcaggagtcagcacagtcctatgactacagggagctttgctatgtaagagactgatttttttccctcttgggaggcaacttattag

SEQ ID NO: 575 - DNA, 120 bp, Homo sapiens
gtacgggacccatcatccttatggctccaggacagactctttgtctcaccctagtgcagaccaatattaattaacccagaagtctgggcaactgaaaggaaaattggtgcagccacaact

SEQ ID NO: 576 - DNA, 120 bp, Homo sapiens
gaacgggtgtcctactgtaatctagtgaatagaagccaggaatgctgctaaacatcctacaatgtttgagcacaggatagctccccacaataaagaattatgaggcccaaaatgttaaca

SEQ ID NO: 577 - DNA, 120 bp, Homo sapiens
aagcgctagcactggagtctgtacttaggcccctctgacttgcctcggtatgattgtgcttgctttgattcccgtcatttctacatttagtggtggcttttagtgttccattttcacttc

SEQ ID NO: 578 - DNA, 120 bp, Homo sapiens
gctcggggggataagcttcataattggttctcgttgttcttctgagtcatcttcctgtgaaccttggtcaaattagtattttttttcaagtggtttaccttccatgctacccttaagttc

SEQ ID NO: 579 - DNA, 120 bp, Homo sapiens
ctgcgagaccattcttcccagtttccacttaaacagtgaaggattccttcctggattattttcttcccactccagcatttcacatctttcaagatgcagtgcttatcttgtctcttcttt

SEQ ID NO: 580 - DNA, 120 bp, Homo sapiens
ctccgaatttttgctaccatgaagtgaaacaatggtagcatgatctcagatgttgccagctgaaatagtttggtatatatgctcatttgtcttataggtgtcttttctgttttttggcat

SEQ ID NO: 581 - DNA, 120 bp, Homo sapiens
catcggactaagaacagaaagaagagctgacatggctttgcagctcagccaggagctttaaatagacagaggctgtgttttattattgctctgaatagtttagctacctccatttcacag

SEQ ID NO: 582 - DNA, 120 bp, Homo sapiens
tctcgttgatcctcttatgtaaacctaatcattgtgttacttaggatattgccttctgaatcactttagtcagattccaggtagagcttccctttgatccctgaacctacaagctatcca

SEQ ID NO: 583 - DNA, 120 bp, Homo sapiens
tcacgtagctgtctttctaccttgttttgtgtttcatgcagcaaacatcattttattatacaaggaaggatataaaggacacagtattttttttttaattttggggaaagtgcttgaatg

SEQ ID NO: 584 - DNA, 120 bp, Homo sapiens
catcgtgccacccaaatgtaatcgttcagaggaagtgactcagaactttaagatgcaaattaattgaaagtgactttagtaggagatccactttgccgtgactgtattatccatcttaga

SEQ ID NO: 585 - DNA, 120 bp, Homo sapiens
aggcgtaagaattgttacttacatacatctactatgaattgttatagagcaattcttgttagttatttatatattctaaagagtactgacaatggacaccgatacatttaaaagcaaaac

SEQ ID NO: 586 - DNA, 120 bp, Homo sapiens
caacgtggcagatctctgtagccccttaatggtatttagaactggtgatttttttaaagcattagtccttcacatatttttttttttcttcctgccaatgcgtgttttaactgtactctc

SEQ ID NO: 587 - DNA, 120 bp, Homo sapiens
aggcggaaagcaggccttacaagatccaggaccacccccaaagacagttcaaagaaagcaaagtttgactagctgcaagcaggggacaacccatgtttttgcttggcaatattctctagg

SEQ ID NO: 588 - DNA, 120 bp, Homo sapiens
ttacgtctccaagggactagttccttggcagggaatcaaacttctaggccgccaaggtgagagtgtggaattttaactgctagactacaagatggagtggcgttctttgcaaatcccgca

SEQ ID NO: 589 - DNA, 120 bp, Homo sapiens
ctccggagtctttttcaaatacagaagtctttttaattcaaaggaaccatcttccagccactgacaattaggatttccaatggtgtattattctagtatcaactcaatccaataagcctc

SEQ ID NO: 590 - DNA, 120 bp, Homo sapiens
aagcgaagaaagcaaagaaagcacgagggaggaagggagggaggggaagagaaggagaaagaaagaagctattagttccaacctaaactagcatgagcgagtttctttgaaaatttcctc

SEQ ID NO: 591 - DNA, 120 bp, Homo sapiens
cttcgaccctctaaaattatcagaattgttatctccagcactgagatttcaaaagggttctgatgtggattcaacccagtttagttagcatgactaaaagagaacttgcttataatatgg

SEQ ID NO: 592 - DNA, 120 bp, Homo sapiens
acccgcagtacagaagtagttggggccagatgtccaaactccatttaaggatctaggctttcatgtgctatttttgatgacaggtgtagaagggagagcttgatgttctctggctttttt

SEQ ID NO: 593 - DNA, 120 bp, Homo sapiens
agacggacctgtgccacttacatttgttctttggagcccactgatgcttcccaaagacttctggagcctgcagtttttcaaagggccagatgcaaaatgaggtaggctgagattccaggg

SEQ ID NO: 594 - DNA, 120 bp, Homo sapiens
aaacggagaagcagaatggtcattaagcacctcagaggggaatttgccataaattctcagccttttcaatagcttggctttattagggcatgagccagtgatatttttcttcatttccta

SEQ ID NO: 595 - DNA, 120 bp, Homo sapiens
tggcgaacgtaagaactgacccacatgctgtgggccttcatagaaccaggacaggccttgcagaaatgaagaaaaatatcatttaaagtgtttcttaaattggattgctccttttttttt

SEQ ID NO: 596 - DNA, 120 bp, Homo sapiens
gtgcgttaatttcatcacactcccaattccaatttatctgcatctctgagactaactggcagctggagctgtgagtgctgggaccaggtggggctagaggctctgtagaatttagacagg

SEQ ID NO: 597 - DNA, 120 bp, Homo sapiens
tgccgggcactttcctcctgcagccttggcaggacctgcaacctgcctgcttttgtattaccagcccttggagaaagagactctgtcctgtttgccatcaaccagacctgatcccactga

SEQ ID NO: 598 - DNA, 120 bp, Homo sapiens
tctcggtagcctgtacattcccagagagaagagatggactctgaattcagaatagttggtgcaaggtaggtgttccagtgaaagtctgttgattgaaagagctgctctttaggaaagagt

SEQ ID NO: 599 - DNA, 120 bp, Homo sapiens
cacgttttcataatccttgtaaagattaatgaatgataattacttcattcaatggcaaaagccttggtttggagcatgcgtcatagtaacaatctctgctattcatattctaaaatgaat

SEQ ID NO: 600 - DNA, 120 bp, Homo sapiens
tgacgttttgggaacaccgaagaacagttctgatattacacagttgatgcttttaattgcaatgtagggcctggagaccatcactgagttgcaaattaataaaatctttctgaagtgaaa

SEQ ID NO: 601 - DNA, 120 bp, Homo sapiens
tgccgtagtgttttctcttagctgacactctttctctatctctggtctatctcctttgttagattcaaggggtcctagagcagggtcccattttcattccatctttgtatctttgttttc

SEQ ID NO: 602 - DNA, 120 bp, Homo sapiens
agccggggagggaagtgcaagagaggggagtcaaaatatttacagatacgttttagatccagaagatattctcacatttctggttatttacattgttctaccgaaatctctctctagcag

SEQ ID NO: 603 - DNA, 120 bp, Homo sapiens
ctccgtattttagctgatctgtcaggcattgccagcagctgcaaatcaatacgatccccctcaccctaccatactcgttggccaggatttactggctgcggctgttctgtgttaacgcag

SEQ ID NO: 604 - DNA, 120 bp, Homo sapiens
atgcgttttgacaggatgagactgtgtgattcagcttgatctcgttaagagccctatagccaaatcctccaaagcacagcaggcgaggaaagcttgcaaattgtggatggcttgtctctc

SEQ ID NO: 605 - DNA, 120 bp, Homo sapiens
ttgcgcgccgtcctgaaaatatccattctaccttggtcacgtgtttcacttctgtgctctggaaaacacatcccatctgaatcaatccacccacatggaccatgagctctgaggataaaa

SEQ ID NO: 606 - DNA, 120 bp, Homo sapiens
aatcgctgtcaccaccaaacactgtacgtattccctctgtacgaattccctctgtgggtgatccagatgattccacgtgggcaaagtactcagagcctcctccctcagaccagcacagca

SEQ ID NO: 607 - DNA, 120 bp, Homo sapiens
aaccggtaagtatacgccctatactaactcacagctgaaagtgtacatggagcaaaaaacaaagaatacatatcccaagcgaatattttgtctggtgacacatcaggaagccacaagctc

SEQ ID NO: 608 - DNA, 120 bp, Homo sapiens
ccacggagcttcacaggacctcaatataattggtgtctattgggctaatttctgctttgaagccctagtggtttcctttcccttggtgaatattttttagaacctcaacacacaagaaaa

SEQ ID NO: 609 - DNA, 120 bp, Homo sapiens
ttacgtggggccctgcgtgaccaaatgaatgtcatataggataaaagttcatctatctctattaaagtagaagcccatcttctactctaagatgagatggcctcaggcatgcctatgatt

SEQ ID NO: 610 - DNA, 120 bp, Homo sapiens
ttccgaaaaagtacacacttactgatactgtgtggctgctgctgggagggcgatatgtccagtctatagtaagtttgtcagtgacatctgaagttgacttgaaagtgcatttcaacttga

SEQ ID NO: 611 - DNA, 120 bp, Homo sapiens
cctcggacatgggcatctgcacgaatctccaaggaaaagacgatataaacacctaatcaaagcaaacccaaacacttaaaatgcattcatgtgggtggaatatacagatgtgagtgaaca

SEQ ID NO: 612 - DNA, 120 bp, Homo sapiens
cagcgttttcccgaatacaggcttgtggttcaattaagtacaaacaatgggtctgcccatggctggctaaaaggcaacatcacccatccccttccatcccccgcagacacacacacacac

SEQ ID NO: 613 - DNA, 120 bp, Homo sapiens
tcacggaaggaggtgaccagctcaagtctcctaccgtccatgccaaattagaattccagcctgcctcctgacttcaagtccaaagttcttcccacgcactaaagctagctcttcagtgtc

SEQ ID NO: 614 - DNA, 120 bp, Homo sapiens
tcccgcaccactgaccgccccctctctatttcacccccagcccatccggaaaggccagcgggacctgtattctggcctgaatcagagacgcatctgaccctctggagaacactgcctccc

SEQ ID NO: 615 - DNA, 120 bp, Homo sapiens
tcccgctggcccaggtctcctctccagtccccctgcgactccctgtttcctgggctagtcttggaccccacgagagagaatcgttcctcagcctcatggtgaactcgcgccctccagcct

SEQ ID NO: 616 - DNA, 120 bp, Homo sapiens
ccccgctccctcctccctgccttctctgctggtacccagtcctaaaatattgctgcttcctcttcctttgaagcatcatcagtagtcacaccctcacagctggcctgccctcttgccagg

SEQ ID NO: 617 - DNA, 120 bp, Homo sapiens
ctccgttcagttccctccttttcttgcatgtaagttgtcccccatcccaaagtattccatctacttttctatcgccgtccccttttgcagccctctctggggatggactgggtaaatgtt

SEQ ID NO: 618 - DNA, 120 bp, Homo sapiens
ccccgttcacagatcctggccctgagccagccctgtgctcctccctcccccaacactccctaccaaccccctaatcccctactccctccaccccccctccactgtaggccactggatggt

SEQ ID NO: 619 - DNA, 120 bp, Homo sapiens
ctccgtaaatgtgctctgctcctcagctgagagagaaaaaaataaactgtatttggctgcaagagttgctgtccctgttttctgagagaccctcagaggctgccttaactcccaagacca

SEQ ID NO: 620 - DNA, 120 bp, Homo sapiens
ttccgtggggcagctgtgcagactctataccaattgcctcccttaccctgtggctagagggggtggcaacagtgctttgcttgctcagaggcataacagactgcagtgcctctctctttt

SEQ ID NO: 621 - DNA, 120 bp, Homo sapiens
actcgctgtgttttaattgtaggtctcctaattaagatctctttgtgcctgcccacattccactagtgttggcacagagcttcagcttccttctagcacttaactgaaggccttcaatcg

SEQ ID NO: 622 - DNA, 120 bp, Homo sapiens
attcgaggattgctgggatgggaccttcctttgtttgcatatgttattttcagggattaagaaaggttaaattactaatgagtctggcatgatgtacctacattttaatcagattcttaa

SEQ ID NO: 623 - DNA, 120 bp, Homo sapiens
tgacgtaggggtgctaaagtggagactacaaaccacagaggaatcttttattccactgacaagtaagtgcctctggccagtcccactaagctagtttgcattgagaactagaaatagccc

SEQ ID NO: 624 - DNA, 120 bp, Homo sapiens
aagcgggcgctgtgcaggctgggggaggtgctgctgtgggaaagggtgggtggggggaccttgggctccagccccacaagggcgtcttctttggctggccaggcggacgggacgggggac

SEQ ID NO: 625 - DNA, 120 bp, Homo sapiens
ggacgggggcggggactggcgggaggggggcgggacaggctcgctctcctcctacttagcgagctcccggggaaaagcaacggtgtcctcctaagcctgaggccaccgcgaccgagccga

SEQ ID NO: 626 - DNA, 120 bp, Homo sapiens
acccgggttctgagtagcatagggcaagaaagcacagaagtatagattgggccctatgggactgtttgtgcttacagtggcagggggcaggactggtatccatgctgtggctggctggag

SEQ ID NO: 627 - DNA, 120 bp, Homo sapiens
ggccggaaggggtggaggggacccttaaagactagatttaatagggagaaattgataaacaggagatattggaggctggggcctgcttccctagtgcaagtcagccttcctgcccccagc

SEQ ID NO: 628 - DNA, 120 bp, Homo sapiens
tgccgctgttttgctgagaggaaactctggtcctcactggaaaagcctttgtgtttgatcctcttgatactcacttttgaacctggggcgccaaggaccagtgccccccttgtcagggta

SEQ ID NO: 629 - DNA, 120 bp, Homo sapiens
gcccgaacccagccctcaccttctgcgtaaagacccatgaccggctgtactacatggtggccccatctgcagaggccatgcgtatctggatggatgtcattgtcacaggggctgagggct

SEQ ID NO: 630 - DNA, 120 bp, Homo sapiens
tgccgtgggcctcctggcagagcacaactggggcttttgtataagaagactttaatattctgtaaggagcttggtcctgtgagtttctgggctctggcctcctgaagaaccagccagaag

SEQ ID NO: 631 - DNA, 120 bp, Homo sapiens
aggcggcccgcttcccatttctcaaaccccgctctgccccattgttctcctttcccttatactttttattaccttgctcaagggccagagatctcaagtgtcaaccttgaggtcccagct

SEQ ID NO: 632 - DNA, 120 bp, Homo sapiens
tgccgggatttgcccaaggctggtgggttggtcatgagggcaggcccgaactcatctctattttcttgcattccggctctcctgatgttccaggcccatctctgagtcatccttggacag

SEQ ID NO: 633 - DNA, 120 bp, Homo sapiens
cagcgggcagaccaccaaggggcaggcttgctgtttcgcagcctgacccccagcctgtgtgcctcattgccgcctcctcctcccagagcagggcctacgcctcaaccagagcttggagca

SEQ ID NO: 634 - DNA, 120 bp, Homo sapiens
caccgagggctgcctgcacacaccagggagggctcctgagcacccactctcaggctttgcacgtttccgaaattctgcacacgacagcaatttttgcagcaagggtgtggagggtgcctg

SEQ ID NO: 635 - DNA, 120 bp, Homo sapiens
gtccgtggttgcctctgtctgccagggctgcacgacctctggttttcacctcaaccactgcggcttcctctctccccgtgggaacagggcatggggtgagggagctaccatgcccagaca

SEQ ID NO: 636 - DNA, 120 bp, Homo sapiens
caccgtgccaagccagaaacactacgaacttttatacagtgaagacggtgggaaaattgatgaaatcatctgttttactgggactcgagagataatattcaacagcagaagcctacttct

SEQ ID NO: 637 - DNA, 120 bp, Homo sapiens
cagcgaagagaaataaaaacatctccacacaaaaacctgcacctgaattttcatagcagcattatccttaatagccagttccttctatgtttttttttataatagtacaaactttattca

SEQ ID NO: 638 - DNA, 120 bp, Homo sapiens
gaccgaccagagagatagaggtgcaacctgtcagagcccgggaggcaccacagaaatctcaacggtgccagggtggggcccagggaggccggtgttctgggaaaaccaactgttgtgtgc

SEQ ID NO: 639 - DNA, 120 bp, Homo sapiens
tgccggttgtatgaggtgctgtgttcttcctgttgtgtgttgtgtgctggttgtatgaggtgctgtgttgttgttgtaggttgtgtgccggttgtatgaggtgctgtgtcgttgctgtgg

SEQ ID NO: 640 - DNA, 120 bp, Homo sapiens
agacgtcaactatggcaccctttgtgtggagggactgaaggccctgctgggtggttgggagctccaggttggaaaacaagctgtgtggggacgagtttaccaattggtatatggctgtgt

SEQ ID NO: 641 - DNA, 120 bp, Homo sapiens
ctacgtggcctagagcggtggttctaggagtgtagttctcaggccagcagcatagcgtcacctggacactcttagaaatgcacattatcaggtcccaccccagacctcccgaatcagaca

SEQ ID NO: 642 - DNA, 120 bp, Homo sapiens
tctcgtggtggggcctggcaacctggaggtaacaagccctcctggtgactctgaggcataaagtgtgaggagcactcccctggggatgcctgtttggcattctgtgtttggcgtgtcttt

SEQ ID NO: 643 - DNA, 120 bp, Homo sapiens
ttgcgcaagcaggcagggtctggtctcagagcggccttgctgggaagcagacatgctgggcctccagtgcagcgtttcttctgtcacccactcagccttacagcctacccagcgcatgcg

SEQ ID NO: 644 - DNA, 120 bp, Homo sapiens
gtgcgaaggaatgctgcacgtttcccccattccctgtgccttccacactgctgactccacccacactaccttagcaacacggtagagttttgcatattctttgaaaatgtgcccagttgc

SEQ ID NO: 645 - DNA, 120 bp, Homo sapiens
tctcgcctctggctgccgcagtactcagtatacaaacacctgatccaagcaccagactcactctaaccctggccacacaacctgccccaggccgacgttcccaagctcatttgtggcccc

SEQ ID NO: 646 - DNA, 120 bp, Homo sapiens
taacgagaggggagctgtgcgtgggtgcaggctgccggcaatgacagcctttaccaccccacttcctgtgttgacttgtaatggggtgttgggtccctgctgtctgagtgagctgtgaac

SEQ ID NO: 647 - DNA, 120 bp, Homo sapiens
tggcgcctctgagagacgggccgtgtggtcttgtggagggagccctggatttggtgcctacagggctgacttcaggctctgactctgcaacgaaccctccctgcaatcacgagcaagaaa

SEQ ID NO: 648 - DNA, 120 bp, Homo sapiens
cgtccacgtggaccatctcatttcatcatgtaggtgtgaagaagaggaaccaaaaccagctcaggctgtttctgggcttcatctaggggaaagggaggttctccacccgccccccgcaac

SEQ ID NO: 649 - DNA, 120 bp, Homo sapiens
gttcgggcatacaaactgcagagtctccgtcaggaactcttgctttccccagggacgcaggctgcagctgatcccactcctctagcagaacggcagaaacagtggccgcatatgtggacc

SEQ ID NO: 650 - DNA, 120 bp, Homo sapiens
agacgctggggtgccaggtggggctcccttaagcctaaagacttgctgcagaggcttggagtagcttaaactctccccctaacaccacatccagcacagtacctgcttctgatggccaaa

SEQ ID NO: 651 - DNA, 120 bp, Homo sapiens
acccgtgggtagagatgaaagaggagtctcacagacttgtccctgaaggctgtgggtgcggcaagggagatgtgacaaatggcaagccagagtctcagatggtctttaggggctgtgggc

SEQ ID NO: 652 - DNA, 120 bp, Homo sapiens
agacggggtaaggggtacagacctacaccctcacccacagcccagtctcatttctccagacccctgcaccccttaagccactgaaggctggaatgacagataccctggccagccccactc

SEQ ID NO: 653 - DNA, 120 bp, Homo sapiens
tctcggctgggaatatccacacagggacataaaaggatatggagcttgtgtgctcccccctggccagagcaatgactggcgtctgtgtgcagacacctcccgcggccagcatgactcagg

SEQ ID NO: 654 - DNA, 120 bp, Homo sapiens
gttcggcctgagtaagccacgcatgcaggcagccctgccccctccttggggctgagaagcaaggtcaggctggggcattcactggcggcagaatggactagaaataccaagtctccggct

SEQ ID NO: 655 - DNA, 120 bp, Homo sapiens
agacggagatcatgctgagaaccagctcagccccaggcagggcaggacagacagagaatctgggagtgggagcgaggggcatttgaaggcagagtccagcctccttcttcccagggcagg

SEQ ID NO: 656 - DNA, 120 bp, Homo sapiens
aaacgttcctctccttcctaaaggtaccatctcattgctggacagttctgtctgttagaaagttctccctcctttgactgaaacgctaccccctcagcttctgcccagtccttctagact

SEQ ID NO: 657 - DNA, 120 bp, Homo sapiens
cttcggctggccacgtcactcccgtgactcatcttaagcttgtaggtgacaaactcccaagtctttctgacgaactgttgttacctggtcctccctaacttatccctggacgggtaatgt

SEQ ID NO: 658 - DNA, 120 bp, Homo sapiens
agacggacctgggttctgatcccagctctcctggttgaagaactgccatagttcaagtgaaaaaaaaaaaaaaaaaaaaaaggtgccacagtccagaaagaagtttgttttaggagatag

SEQ ID NO: 659 - DNA, 120 bp, Homo sapiens
gtacgcaataggagtgcttgaataggagatttggaagagaggaggcaggggagggaactcaagagagtttagaatcaagaatccaaggaggagacagcctagaaagagtgggtccaagac

SEQ ID NO: 660 - DNA, 120 bp, Homo sapiens
tctcggctgctgtgatgggataattagatgcgagagctcagcacagatgatgctccagttgcttagcaactaatggtttccatggagaccgcaaagcacagcctccagagcagccagtga

SEQ ID NO: 661 - DNA, 120 bp, Homo sapiens
gctcggcagggcagggagaagacgcaactccccgctcctccagaaacctggggagggctggggtggggaaggtgggggggggggattggagggagaagggagagcttaaaggcacagggc

SEQ ID NO: 662 - DNA, 120 bp, Homo sapiens
gttcgggcagattgggaaggaacacctgccctgatccctgatgtccgtggaagaggatccagctgggggtggggatgctgtttaccaatacagagcagctggcaacttcaagtgtgggcc

SEQ ID NO: 663 - DNA, 120 bp, Homo sapiens
gtccgtcctcaaccaagattcctcttacaggagctgcttggcctgattctgctttgttcatgctgtggtccaagccctgggccctcagagggagggagggttcaggtgagccacgcacca

SEQ ID NO: 664 - DNA, 120 bp, Homo sapiens
ccacgtggatgctttgccacgtgctcagttagcaaagagcaactccaggccaacttgctactatccccctggagagaagggctaaagcccctggcccctgggtagaacatgccccagaga

SEQ ID NO: 665 - DNA, 120 bp, Homo sapiens
tcccggagctaagcacgtttctttttaacattgttctgagtgatgctgtaaatgtacaggcagaagtaaacaaaaggcagccatttttgccactgcaggatttggaatgcaaaataaagt

SEQ ID NO: 666 - DNA, 120 bp, Homo sapiens
atacggttagtaattcctatttcaaagcattatgagaattaaatgcactttatttagcttagtaaagcatctaatccctagtaaactcttagtgttaactgctagagatggagagaagca

SEQ ID NO: 667 - DNA, 120 bp, Homo sapiens
aagcgtagatagagtgtttggtggaacattgactggtattagaaaggtgaattaggactacattgtgagtgctttcatgtatcaggtcagcagtttgaactttttaagtggtaattgaga

SEQ ID NO: 668 - DNA, 120 bp, Homo sapiens
tttcgttttgttttgttttgttttgttttgttttttaacagcttaagtcgatgataagagttaaacagtacttcattgacttcctgtgaggctttgtggaaaacagttccgttgtatcta

SEQ ID NO: 669 - DNA, 120 bp, Homo sapiens
ccacggggcacaagccgggcccagctgtgtgggtgaacagctttactctccaggacagcacagagttttatccaactatgtagggcaaaattgagcccacaggaaagaaccatacaactg

SEQ ID NO: 670 - DNA, 120 bp, Homo sapiens
cagcgctaagaagagctgaggggtggcctgggcatccctgagaaactcggtccaaagggcctattgtctaggaggctctgagaagggggcgggggcaggaaggccagggggaaagggatg

SEQ ID NO: 671 - DNA, 120 bp, Homo sapiens
ggacgaggggcttgtgctatccttcaaacagctggggagcagaccaggggtgggctagaggacgtgggcgggaagaacttgatgccctgtcggaaggaatctacctgctttcttctttgc

SEQ ID NO: 672 - DNA, 120 bp, Homo sapiens
caacgagccagggctaagggcaggatccctttcccaggcgggtttgaacagagcactggggaaaagggaagaggctgagggatatttcaggaggggcagttaccccctggtccccaaatg

SEQ ID NO: 673 - DNA, 120 bp, Homo sapiens
caacgcccacctagcaccacggagggctagcattagaaagttgtacttggaaaagcaataaaaggaccagtgcaacgtcccagctatgaagaggcctgaaggagagcactccagtctgaa

SEQ ID NO: 674 - DNA, 120 bp, Homo sapiens
cagcgttttccaaagatgtcccttcgtctgtcccctggagttagcagcgtgaagagggctcttggctcatggctctggaccggcgagccgtgcgggtggagatgggcgccggctcctccg

SEQ ID NO: 675 - DNA, 120 bp, Homo sapiens
ccgcggcgcgggcgtccaggcggtgatgctcccagcgagctccagagggcgctgtcccctcggaggcgcgggcgctgcggcgggaagcggcgcagcgagggtcttcccccccaagacaca

SEQ ID NO: 676 - DNA, 120 bp, Homo sapiens
gagcgagactccatctccaaaaaaacaaaacaaaacaaacttatttccctaagtgaattgtgaaggcactgaaggcagggactgttgctcgcacacatctcttgcctgccaaagcaccag

SEQ ID NO: 677 - DNA, 120 bp, Homo sapiens
ctccgtgtgcagggctgtgatgattaggctctgtgcccacactgccccacacctagtgggacagactgtgccccggccccactggttgtcttgttgtcgcattcgtccttgcattgtgcc

SEQ ID NO: 678 - DNA, 120 bp, Homo sapiens
catcgctccctttccttcagggctctgcctggtggaatccacaagttcctaggctcagctcacatgcctggtccaccgtagaagattccttggtgcattctgttctgggcgctactttgc

SEQ ID NO: 679 - DNA, 120 bp, Homo sapiens
gtccgcatcgctcttcctcctgtgctacattgtctgttccagagctatagcctgaggactgggcttcattgctgaatgcagtcctgtatccagacatttggttctgttaatgcagcccaa

SEQ ID NO: 680 - DNA, 120 bp, Homo sapiens
gcacgccttgcacccaagaacccatgagaccctcgtcatggaccaggccccatggcaggagctaagggcaattctcagacctagaatcctcacttgcctttttcaggcaaagacagggaa

SEQ ID NO: 681 - DNA, 120 bp, Homo sapiens
ctccgtccttcagtgctctgggagcccaggcagctgtcaggaaagggacaaggccagggactgggaatgtggagggaaggggcaggtttgaggagatcctgggtgatgagagagggactc

SEQ ID NO: 682 - DNA, 120 bp, Homo sapiens
gtccgctgcccatgacagggagtctggctgtaaccatcttttggaagctggatgccgggctagtggcagtggttggagcaatgctacctcctagtggtctgatctgcaagtgcagtcaat

SEQ ID NO: 683 - DNA, 120 bp, Homo sapiens
ttccgttctggctcatgttagccgtcgctctgtggcatatctctcttactctgtctgccctgctggcttgggctgtccgttcctccatgtctcattccatcagttttcacctcaccctct

SEQ ID NO: 684 - DNA, 120 bp, Homo sapiens
ccccgagctggggtcatgcctggggtcatgtctgccctcttcttaacattgaagctggttcttgagaaatacagaggcttttctgctttttccaggatgagtcaggaactcctggagtga

SEQ ID NO: 685 - DNA, 120 bp, Homo sapiens
ctgcgcagcttcttggaggtcctggagtgtggttcttgggtaggaatgcagtccatttaaaacaaggccaggccagcagccttcagtagcttggatccactttcttggaattagaggagg

SEQ ID NO: 686 - DNA, 120 bp, Homo sapiens
gggcgggtcagttttccagctcctgccacttcatggagactgaagtctgttccagggagtgggaaacgcaaggagctctctggtgatgtttgagcatcactaggcaagaccttcaccagt

SEQ ID NO: 687 - DNA, 120 bp, Homo sapiens
ccacgctgacccactcacaagcctgtctggctgcaaccttctctataccaagccagtggcaactccatccttgcagctcctcagggctgtcaaaagtctaaagatcttaaatggctttta

SEQ ID NO: 688 - DNA, 120 bp, Homo sapiens
ttccgaagagctaaccagaggaggtgggttttatggacaggaaaaggctgagcagaaacagggaacgaaaagtgaacttgtcatttcaaagttcctttttcttgtaaaggttaaagcaga

SEQ ID NO: 689 - DNA, 120 bp, Homo sapiens
tggcgtggaacttcggcatgaatgactccactttggtttggtctgttgggcccagtgcaggagcttagaccaagccattggcctcctataaattgtatttaacagggcaaacaacttagg

SEQ ID NO: 690 - DNA, 120 bp, Homo sapiens
caccgctcccaccacctctgtggctccagctgggcccaagcccacatcttctctcgtttggttgcaacagaagccatctgcttacctcctgaccctcgcctgtctattcacacagtggcc

SEQ ID NO: 691 - DNA, 120 bp, Homo sapiens
ctccgtggcctagaaggctctttgcagctggcctctccatttgtctccctgtctcgcctttttctcttgcacacccctgcagccacactgggctccttgagcaagccaggactgctgcca

SEQ ID NO: 692 - DNA, 120 bp, Homo sapiens
gcacggcgctcccttcctccctcccgagcacttgcctagatgtgccttctcagtgaggtcttctctgagcacctgatttaaaattgtcatcctgttccctggctctctctcaccctgctc

SEQ ID NO: 693 - DNA, 120 bp, Homo sapiens
gaacggaaagctcaagagatctgcagtcagaagacctgagatctcttcatttgctagctgttacctaattttgtttagccttatttttcccatctgtaaaactgggatattggttagggt

SEQ ID NO: 694 - DNA, 120 bp, Homo sapiens
ccacgtgggttcctcccaatccaacaaaagttagacttgggcctctaggactcattccagtgaggaccctctgagcactcatgaaagctttcatgggagtctgcaggagggaaggagggt

SEQ ID NO: 695 - DNA, 120 bp, Homo sapiens
tgccgagcatcacagcaggctccctttctgccttcccacaccagtcccctgacaccgactggatgtcactcaattcaattcaattcaattcaattcaattcaattcaattcaattcaatt

SEQ ID NO: 696 - DNA, 120 bp, Homo sapiens
tggcgttagcacaaatcccacaggttaaggggcttagtcccgcaagactgcccacttcaggtaccaactacaagtcctgggtgtcctcaagccactcacacttctgcctgcccagctata

SEQ ID NO: 697 - DNA, 120 bp, Homo sapiens
attcgggggttcctctacaccctcattttgggttgataaagaatgactcagagaactcactggaagcattatatttacaattaccattttattgtaaaagatacaaataaacagcctgat

SEQ ID NO: 698 - DNA, 120 bp, Homo sapiens
tttcgtgacttcattgtgggaggaggcgccggaactgtatgagtggttgaaggaaagtatgaagaaaacagaatcacagatcatctttacttaactggaggtctatcctacagaagaggg

SEQ ID NO: 699 - DNA, 120 bp, Homo sapiens
gagcgaaagtaatgggaaaccagttttcagcaggagctgatagggtgggctgccttgagaagtaataagctcctagagaatattttaacagagctgaatgcaagttccatgtgagcatca

SEQ ID NO: 700 - DNA, 120 bp, Homo sapiens
agtcggacttgacttctgctgtgtgcctggggcctgaatattacctgacaaacagtagatgcttactaaatatttggtaaatatttgttgaatgcacatttgtggaggagaagggaaggt

SEQ ID NO: 701 - DNA, 120 bp, Homo sapiens
agccgttgtgctggcttttgaggcaaaaaacaaaaaaacaaaaaattcttcttaagaagctcaccacagtaagtgctgtaagtggggagatagacatttatgtctagagcaaagtttaat

SEQ ID NO: 702 - DNA, 120 bp, Homo sapiens
ccacgtggcctcccgggctgagccccaattttggggtttgccctgtgccagaaataatgggagagaagacaacagcagcccaagtttggaaactgtaaagcaatgaatgagtaaactgag

SEQ ID NO: 703 - DNA, 120 bp, Homo sapiens
ctccgtgttcctattgcctggtagccctgcacccactgagtcaatgacatcgatgcctctggggagggcggctacagcctagaacaaagaagtcaattgagttgctgaatggattttttt

SEQ ID NO: 704 - DNA, 120 bp, Homo sapiens
actcgaggcagatgcagatacaatagtctatgggcaaagcgattttgatttgcaagagctagagcttaagagagaaacagtttagctttaaattccaagaaggcttagtttaaactcagg

SEQ ID NO: 705 - DNA, 120 bp, Homo sapiens
ccacgtgcaaaaatccatctatgtgactaaacttttattctcatgcaatgctttaatgagtagtagtggttaacattgtgattaccttgtgctacgtactgtgctaagggttagataact

SEQ ID NO: 706 - DNA, 120 bp, Homo sapiens
gcacgattattcctacgctcagatgagctcatgtcgattgcctgctacccagctataacaatgcctctctttcaatcagttctctcacttctgtttccattgctccttctccatccaggt

SEQ ID NO: 707 - DNA, 120 bp, Homo sapiens
gtgcgtgcgcttctctctgctgggaagatccattgacaccttgtctctttggagaaatcagacccccttgttctgaggcttccagagacaagtaatcatatccttttccatgccccagct

SEQ ID NO: 708 - DNA, 120 bp, Homo sapiens
ctccgtatctttagaatctagcaaatgctcggcacgtagtagggaccaatgattattaaataagtgactaaatgatggatgaatggaggaaaatagttaaccacagagcagagacctgag

SEQ ID NO: 709 - DNA, 120 bp, Homo sapiens
ccacgcaggaaaggcttcctgggaaattggggagcccaaggagacaggcagaaccattgtttggaaggagctgttgggtctggtctccacctctgcctccttttcttttcacttagaggt

SEQ ID NO: 710 - DNA, 120 bp, Homo sapiens
gtgcgtctgctcagccccaggcagtttatgccctgcttccttctggaactctcataatatcctgcaccagcagggaacagacaagcggagcagaaggtgcctttaggcagtgcgatgccc

SEQ ID NO: 711 - DNA, 120 bp, Homo sapiens
ggccgcgaagcctgcctctccatcccagggtccttcccatgggcatgcctgtctagagtgccaggggatctgggagcagatggaggaactgaggcactttgagctgggggactgagaggg

SEQ ID NO: 712 - DNA, 120 bp, Homo sapiens
tagcggccccacccccctcactttctgccaggcccgaggctttgacaatggcctttgtgtgtgaggcattgtatggactcctcagtccctcggactgtgtttgcagagcttctgccatgt

SEQ ID NO: 713 - DNA, 120 bp, Homo sapiens
ctccgtgtggatgcttctttacctctgactcctgcaggtggatccccctgggatcccagccctgactagccaaaagaaccaagtgttgctagataagggagaaatcagagaaacctccac

SEQ ID NO: 714 - DNA, 120 bp, Homo sapiens
ccacgctgtaagaagcagtttggggcaggcctgagatcctagggtggaggcaccggggacccagtctcagctgtctctggaagcttctataggcagaccccattctcagcttaaaggggg

SEQ ID NO: 715 - DNA, 120 bp, Homo sapiens
agacgggtgggccttgggcagtgtctggatggggcagggcatgggactccaggggaaagcaggcagagaggagcagtgtgtgcatgtgtgtgtgtgtgcacgtgtcagcagaggcagaga

SEQ ID NO: 716 - DNA, 120 bp, Homo sapiens
ggacgcgtcagagctaggccaactccactctctgtgggccaatgaggaaaaaaaatgtaaaaccaccctcagcaggaaaacactgcccaaggccccgcttaacaaacaagactccctggg

SEQ ID NO: 717 - DNA, 120 bp, Homo sapiens
agccgcacccctccccctacctcttgggcgcaccagctgtctagacccaaggtccaaactcccagctgcatcagatttcactggtgggtgttgggttccctctagccgggaggaggagca

SEQ ID NO: 718 - DNA, 120 bp, Homo sapiens
gggcgggggaggctggctccccaaaccctggagggatgcccaggtacacaagacgagaacagggctccctacacagagggcaggcaggtggggcccgtaaagggaagatacagtaacact

SEQ ID NO: 719 - DNA, 120 bp, Homo sapiens
agtcgaacacaacaccatggggaagggcggaggagagggaggaaataaaacacaaagccaagtcgtggctgccctgggctcccctggccccccaggagttcggggctggctttgggcagc

SEQ ID NO: 720 - DNA, 120 bp, Homo sapiens
gggcgtgcggggaggggctggggaggagcggtcacagacagaggctctggaaggggggctacacgtaccactccttcttggaaatgaaagacccgtcgttctgagaaaccatgttctcag

SEQ ID NO: 721 - DNA, 120 bp, Homo sapiens
ggtcgtactggtagcccagagtccggtccccgtagccgtcctgacgggcctcggcctcatccacggtgaagtagggccgcttggcgtcctcgtcatatttggggtgggggccgcccacct

SEQ ID NO: 722 - DNA, 120 bp, Homo sapiens
ttgcgctcgccccctccaccgccctcctcctcctcctcctcctcctcatagctgcttccacccagtgggccggccttcttctcgtcgtctgagtcgtcggggtactgcaggttctgtgcc

SEQ ID NO: 723 - DNA, 120 bp, Homo sapiens
agccgttgccatacacgtgcttcttggtgctgtagtcacccttgaaggtgtgccggcgccgacgcagggcgaccacgatcccgccgaccacaatcaacaccagcaggatgctccccgcca

SEQ ID NO: 724 - DNA, 120 bp, Homo sapiens
ccacgcccccaatgatggccgtgggcaccggcccggcgcgccgcccatgttcgggaggagacggggtgtaggggaattctgggtgaggaaaagagatggaggggacagcatcagcgtgtg

SEQ ID NO: 725 - DNA, 120 bp, Homo sapiens
gttcgaggccccgcagcactccacccatcctggagccctaacatgccgcagcgttggtagctggagtgagagacaggcaagaggagaggcagagggcagtacccacagcaccagggtctt

SEQ ID NO: 726 - DNA, 120 bp, Homo sapiens
acacgtgtgccagttccagctgcagcacactgcccactccatgccattcacagccacaaccctgaggaggtatgccattcattctcattggatatctgaggagctgaggcttgcagaggt

SEQ ID NO: 727 - DNA, 120 bp, Homo sapiens
catcgttgcttctcctgcacatagaacgtgtgcaaatgtcactgatacccctctgccagacacctggcagtcactctgccccaacactatcaacttggcttccaagacccagaaccagga

SEQ ID NO: 728 - DNA, 120 bp, Homo sapiens
ccccgtgagtgccaatcagctgccaaggtgccagaaactagggctgtggttcttggctgtggtctgggcctgcagggcaaggtgggggcctggcagtgctgccagcctgggttataagtg

SEQ ID NO: 729 - DNA, 120 bp, Homo sapiens
ggacggcagaaatgggggtgaaagcatgtgcgtgtgtgcgtgcgtggcaatgtcgagtacacacaagtgggcacatgcacaggcatacacgcttgccgtcatagcaagcctgccacccag

SEQ ID NO: 730 - DNA, 120 bp, Homo sapiens
tgccgacatgatgaacatgagtgtgcaaatctgtatgccccgtggacacagccaaaatgaggaggcaggaaaggtgaaaagaagagaaaggaagcaggtgggacaggagagaaggctggg

SEQ ID NO: 731 - DNA, 120 bp, Homo sapiens
ggccgggccacagtactgttctttggccaacactgccccttcccttgccttacagggcctgggaaggtggctgaaaccagggccatgccacgggccaaagaggccctaaggtgaggctaa

SEQ ID NO: 732 - DNA, 120 bp, Homo sapiens
cctcggtcagagccactaggctgcgggtctagggcaagcccagaaggctgacctcagccgctcaggccctccttgctccaggcccacgtaaagggccagtttgcccgtatactgtttgcc

SEQ ID NO: 733 - DNA, 120 bp, Homo sapiens
gggcgtgtgtggggtgctatcccactcggcaggctgcagcagggtggagattctaggaaagaggaaaggccttccaggaatttgggcgggaagggctgacgaaaacacagggcccaagga

SEQ ID NO: 734 - DNA, 120 bp, Homo sapiens
tcacgcggctgagccaggaccccccaggggctcctatacacgtgggcactggcagaggagcactgccatggaggaccccgctccccacctgccaccaccatcctcggtgcaggtcagcca

SEQ ID NO: 735 - DNA, 120 bp, Homo sapiens
gaccgcctgtctccgcagcagcctccctggaacctcaagcatctcccggctcaccaggtcccatctgtttaccgccctcaaaagggccccgcaactgctccccacgagatgggagcagcc

SEQ ID NO: 736 - DNA, 120 bp, Homo sapiens
cctcggttctcacccagatctgaatgatctctcctgtctacacctgccttcctctcttcatccatccctcccatcagcaaacatactgagcatctatcctgctagtcacgggatatgaga

SEQ ID NO: 737 - DNA, 120 bp, Homo sapiens
ggacgtaatgtatatgtgtgtgttgggggtgggggttgttctctcatggccccgcttcttactgagcccagaccctaatttcttccctgcctaaaggctcctggaggtaggatggttgcc

SEQ ID NO: 738 - DNA, 120 bp, Homo sapiens
acccgtggtccagtcagctgtcttccaaggtgactggtcagccctgcagcacttacgtggtccagtggtactcagtggctggggggttagcatcagctttgcaggtgagcttcacgtcca

SEQ ID NO: 739 - DNA, 120 bp, Homo sapiens
atccgctgcaggtaccagttgccatcaaacccctcaatggttacctcaggctcatctgtggggcaagggatgtttgaagagggtgaggtcaggagagcgggacttagaacaagggaactt

SEQ ID NO: 740 - DNA, 120 bp, Homo sapiens
ccccgggtaagaccactggcctagaggaagggagtaaagctcaggcagggatggtggagctcacgagggacatgcagggctggctgtggcaagctggtgcagagaggagtgggaaacata

SEQ ID NO: 741 - DNA, 120 bp, Homo sapiens
aggcggtgccaggaaagggagctgtgatgctggaggagacagccggagctcctttcctcgcagcccctccttggtgaaacgtcaccctgcagtgtctcaggtggcacaaccatggactga

SEQ ID NO: 742 - DNA, 120 bp, Homo sapiens
ctccgagctggggggtggcagtctttatccgatgtgcttcaatgaccaggggctggggccagaaaaaaaaggggatgggaaacggaactagcaaaggcttaaagttgagttttctcttga

SEQ ID NO: 743 - DNA, 120 bp, Homo sapiens
cagcgctgccggaggtaggccaggagggcaggtcccccaggcaccagcagatcagggcctcaggactgctggggtaagaggcaaaaccccggccctgtgttcccttggctgatgagagaa

SEQ ID NO: 744 - DNA, 120 bp, Homo sapiens
gcccgtgcccagatgttcaggcttatgtctgagtagcatctgggtggggcctggggtggggagggtcccacatcacaggatgccacagaggtgggggaactcggggacaggggcagggac

SEQ ID NO: 745 - DNA, 120 bp, Homo sapiens
tcacgccgccccccacctcaacctaccttccggctcaactaccaccccaaccccgattctctcccctggccaatggtcctgtgaaaatgggcagttatcctccaaacataagcaatggcc

SEQ ID NO: 746 - DNA, 120 bp, Homo sapiens
ccccgcccaggtctcaacatcagtgccaacctagaccacaacacaaacccgggtcatgaccccaactctagtgttaacctcttcctggtttaaccacagaacgaagcaaactccacgcat

SEQ ID NO: 747 - DNA, 120 bp, Homo sapiens
gggcggggaaagtgggatcttcaaaaggttgtgacatggggttttggggagaggccagctgagctgaaggctgctctgcgggtggtctgcctgcagggggcacggtgctgcccactctct

SEQ ID NO: 748 - DNA, 120 bp, Homo sapiens
ccccgctacagcagggcctgtggacacatccaggtccctgggctttccctttccccagtgcccagaaggctgaaaggggcggtgggaaggcagaggcttccttgtttttcctggtgctaa

SEQ ID NO: 749 - DNA, 120 bp, Homo sapiens
tcccgaaacccagccttttcacctgtaaatgggccggagcacatccacctcatttggttggagggagagctcctgtataaaatgacctccccagtcccaggagttttctgggagccctcc

SEQ ID NO: 750 - DNA, 120 bp, Homo sapiens
tcccggctgtcatcctcccttcctccctctttctcagcagcactgaaatcatcacttggcaaaatgctgaggggagcacatccctcctctgccgcggcctgtcttcttcctgccccgccg

SEQ ID NO: 751 - DNA, 120 bp, Homo sapiens
ggccgcatgtccccagccccacctgctccctcccagcatccccagtggtgtcagagtttcgagagtggggtctttcccatgcttccccgcccgaccatccctctgcccaacacgaatcta

SEQ ID NO: 752 - DNA, 120 bp, Homo sapiens
cctcgcccagccccgcttccagctcagacttgtcggggtttcaggagtcactgggtaggggttggcgtgccagggcctgctccgcacactgcctcacggaggaaccagcacgtaggctcg

SEQ ID NO: 753 - DNA, 120 bp, Homo sapiens
gctcgcgcccagctgcggatgcagctcagcctcggtggccacctgcttcccttcccttccctccttccattcccatgctctcttggctctgtgcagaggggcccctgaaagccgagaagt

SEQ ID NO: 754 - DNA, 120 bp, Homo sapiens
tggcgggggtgggaagtggaccccatgtttgccacctgcctcctttcggccaccccaaggttgggcccatgcccttagcagcagcagaagctggggctcaagtgctcccctccttccctc

SEQ ID NO: 755 - DNA, 120 bp, Homo sapiens
gagcgagattgtccccatcttagagatgaggaaactcagggaggtcaagtcacctgcccacggtcacacagtctgcaagactgattctgatcagggcagtctgtctccacaggtgacgtt

SEQ ID NO: 756 - DNA, 120 bp, Homo sapiens
ccacggcctccctctctccccttcctggggaaaagagcggccagcaccctctgaaccagacctgggtgagcagcccctgcctgctggcagtgctggcctgaggctgacgatggggctgct

SEQ ID NO: 757 - DNA, 120 bp, Homo sapiens
cttcgttctgcgggaggctgagctgacacctccacctcccccaggactacaggggctagcaaccccggcagcccagcacaaggatatgactgaagactccagacatgaaaagcccccatt

SEQ ID NO: 758 - DNA, 120 bp, Homo sapiens
cctcgtcccagagctcagagacttgacttccagtccaaaccctgccactctcggggtgtgtgtctctctctctctgcccctcagctcctccacctgtgaaacctggaggtggcacctgca

SEQ ID NO: 759 - DNA, 120 bp, Homo sapiens
gcacgcatcaagcacctgtgatgtcatccatttacatgtaaaatctcatttaatcttcacaactaccccgagtggggagtcccctcagcctcgggccaagagaggagagtgactgccaag

SEQ ID NO: 760 - DNA, 120 bp, Homo sapiens
cctcgtttttcactcagcccctcccactctgggccatgaccaccatgaagcccaggaagtggcagcaggtgctcatgaagagtcagcagaggctcctcacacccctccctgagttggggc

SEQ ID NO: 761 - DNA, 120 bp, Homo sapiens
acacgcagggggctccaacacacctctaatgttggacggtgaagccgggcttccccagcagaggctactgggatagcacaccaaattagcttaatgagtgaggcccagctttagtagggg

SEQ ID NO: 762 - DNA, 120 bp, Homo sapiens
cagcgctgactcctgctttcatttttaatgctgggaaagggtgggttttctttttctctctcccccgtgcattttcaccctagctaatgactcctcactcagaaaggcccctaccactgc

SEQ ID NO: 763 - DNA, 120 bp, Homo sapiens
ggtcggacccagggagaagaggggtgggaaggagtgatctgagcctggatggcttggctccgtggctcggctggctcagcagtgtgatcatggcccaggagcacctgggcaagaatcatc

SEQ ID NO: 764 - DNA, 120 bp, Homo sapiens
tggcgagaaggagcagttggtggtaggcaggcagttgggaggcctgggtcccctggaagctcactacctctcattgcagaaggttcctgaccttctatctatttcctgcttggctcacag

SEQ ID NO: 765 - DNA, 120 bp, Homo sapiens
agccgcctgccttggcctgaagtgatgtgggctgaagagggcagtgtgggcaacacgtttgctctttgaacttgatggtgacacaccagttttgtattactctggggaggggaaccctgg

SEQ ID NO: 766 - DNA, 120 bp, Homo sapiens
cctcggtgtcctgcccagcctgagtcttctcccagctccttaccagggacagggaaggggaaaagaaagagcaaaaaccggggttttggcatggcagagctctcaatgtggatccaacta

SEQ ID NO: 767 - DNA, 120 bp, Homo sapiens
ccccgacactggcaaggttttactccacaaaaccccacccaggtgattaaattgtctcttccccttctttcacggtcttcagcatatgagattctaccatttccccctgggaaactgcta

SEQ ID NO: 768 - DNA, 120 bp, Homo sapiens
gttcgcatggtggacagacctggggctgggctcttccactcattggcaagttgccttaccctgtgagcctcagtttcctcatctgtaacatgaaaccccagtttctaatactttatcaca

SEQ ID NO: 769 - DNA, 120 bp, Homo sapiens
taacgtatgtacatggttagccaagtgcctgacacagaataattgctctggaggtggcgaaactgatatgtgggtaccctaggatcatggacagggctgcaagctgagaccattcctcag

SEQ ID NO: 770 - DNA, 120 bp, Homo sapiens
cctcgaaaatcagcatcctcactctggcctgtggtgcctgccctggtcctggagtcctatgtttttcaggtaggggcccaggagagctctgcaaagagctaggatcatcatctctgcaga

SEQ ID NO: 771 - DNA, 120 bp, Homo sapiens
agccggccccctggtaggtaccagcacaggcctgtgtttatactgtggcatgtgatgagccctaaggatgcaggaaaacaaggaccagtgctggagctttgacctgagctgaggggactt

SEQ ID NO: 772 - DNA, 120 bp, Homo sapiens
ttccgactgtcctcaagggaactctgggactctttcccacggcccccggccagcagacgccaactagcccagctcctccctctctctgcgtccttctccccaggccggccacacccagct

SEQ ID NO: 773 - DNA, 120 bp, Homo sapiens
ccccgagtcctggagagcagaggcccctgtccccagcggcccgccccacccctgcaactctggcccctctggcgggcaggcacggctgggcctcgaggcctggctggagtcacaggatga

SEQ ID NO: 774 - DNA, 120 bp, Homo sapiens
gcccgttccatctatgcctgctccctcatcacacacaaacatgcaagggagagtggcaggagtctggggtagggccttttgaaagacgctcaggtgcattccctggagtgctcatgaagt

SEQ ID NO: 775 - DNA, 120 bp, Homo sapiens
catcgagactaagtggcattcggggttgccaaggtcacggttagtggcagagccaggattcaaagccaggtctcctgactccaagtgtagtgtgtaccccaccagctcaccctttctctc

SEQ ID NO: 776 - DNA, 120 bp, Homo sapiens
agccggaactgtgttactggagaaaaggcactgtagcgacaaccgtgttcatgattcgaggccctgaaacaggactctatgtctcctgctggggtgagggcccgcctgagggttttgcca

SEQ ID NO: 777 - DNA, 120 bp, Homo sapiens
gcccgttcttggctctgagagtccctaatgggacaaattcatttagttacaatgtcatttgtcaagtgcggacacctagttcgtgaaaggggcctggcttgggagtcaggagatccaggt

SEQ ID NO: 778 - DNA, 120 bp, Homo sapiens
gctcggttgatccttccttcaggttccatctggcttggccagtctgggggtctctgctctgcagccaccctccaacaggctgccggtgtggaaggcaacaagctctcaggcctgggggtg

SEQ ID NO: 779 - DNA, 120 bp, Homo sapiens
gaacgggaccacagaccccctttgagtgacacctcttctgtccttctctgctctggggttggtattgtggggagaggccagggctgggattccaaagcccaaacctggcctctcccagac

SEQ ID NO: 780 - DNA, 120 bp, Homo sapiens
tcccggtgctttattttcctgcccaacaagctgctgctagggaaatggaggggaaaggtggtggggggtggtcattctcaagacaggggcagcccaaatccacctgcctccgcctcactg

SEQ ID NO: 781 - DNA, 120 bp, Homo sapiens
tcccgccccgtccctgtccctccactgctccaggaagccagccccagacattaagctgtcaaaccactcccaattatctccctctatgcccgccggctccaggggcgacagttgtagcaa

SEQ ID NO: 782 - DNA, 120 bp, Homo sapiens
tgacgttgactcattctgtcaccggcctgccctgctctgggaaaatgcaatttaatgaagtccgatggcagggctggggcagacagggtcccaggaagagggtggcaccagcctggggac

SEQ ID NO: 783 - DNA, 120 bp, Homo sapiens
cctcggctgcctgttttaatagcgtatggtcatgacagctgggaaattcgtcctgtggtttcatctcaatcccttctgctgaagagcaagtccatttccctaagccttttgatacagagc

SEQ ID NO: 784 - DNA, 120 bp, Homo sapiens
caccgccagatgccatcaaggcgagtccagggctgtggctgaggccatctgtgtactgctaggctaactctgctgctgggaagaagcagattgttccttctgcttctggttgggcctagc

SEQ ID NO: 785 - DNA, 120 bp, Homo sapiens
ccccgttctctcagttatacagcagagaagcctctgactccaggctcctgggttcaaatcccagctctgccacttgcaagctctgtgacttttttttctcgtctataaaaatggagagag

SEQ ID NO: 786 - DNA, 120 bp, Homo sapiens
tggcgctgtggcccccacacctttggcagatgcagggccttcccagggtctcttcctctttttttcctctttctccatggcccattcattcttcgtgccttgagtaacatctcttaccct

SEQ ID NO: 787 - DNA, 120 bp, Homo sapiens
acacggcatgaccaggagaccaaggtgcctcaaagcttccccagctccagtgggaggggttgggacccacgtgggtttgagaaatgctcctggcagaggatctgaccacgagtttcttct

SEQ ID NO: 788 - DNA, 120 bp, Homo sapiens
ccacgtgctggaggcccaagtagtcaggaagggccttcatgctggcaccaacgggacagataaatgtctttcagcaaggggcagtcaggcatctccagagctcagaggctggctggccct

SEQ ID NO: 789 - DNA, 120 bp, Homo sapiens
ccacgctgtcttgtacccttcttggtgtttgccttggacttgtccaagtggtaggattatagtagctggtcccacacagatcccctgtgtacccaggatgggccaggagactccaagagc

SEQ ID NO: 790 - DNA, 120 bp, Homo sapiens
gtccgactgtccaatttagtgggcatggacaaatgcacgaatgaatgagactgcgggaatgctgcccccacctcctctccgcctccccacctcgcctccaggtaccctgggcgcctggga

SEQ ID NO: 791 - DNA, 120 bp, Homo sapiens
ctgcggggcctcctggaggcgggacgggcacggcgccacctagcggtcgtgggccgcggagagagcgtccctgtccttccccgtgtgggacctgcaaccgccccatagcgcagagtccgg

SEQ ID NO: 792 - DNA, 120 bp, Homo sapiens
caccgcctctgtcggccccattctctaggtccacagagggtagagacactcgggggaacgtacttttactggggtacggggagccctgccccacggctgtcagctcgggtcgggcgcgcc

SEQ ID NO: 793 - DNA, 120 bp, Homo sapiens
cgccgggtgcccaggaggcagcctcccaccctcccccgcacacgtcgttccagtccctccgccacaaagagaccattgattgggaagagcggccgggttgtggtaggaaggctggtgggg

SEQ ID NO: 794 - DNA, 120 bp, Homo sapiens
gcacgcgcacacgcacatgcacacacagaggcacacacaggtacaccccgcctcctgccgcgcctgacactccgcagggcccgggggtgggtgggcaggggtgcgagggggcgtggggct

SEQ ID NO: 795 - DNA, 120 bp, Homo sapiens
gggcgcgccggcctggggggaaagccccgcctcccggatgtcgtctcttcgccccctactagctcttgtctcctccccaacccctcgccccaccccctgcctaatttttgccagtggatc

SEQ ID NO: 796 - DNA, 120 bp, Homo sapiens
catcggcctttggatgaatccgcagcaaatggctcattcggggcgggcccgcctccccatccccccagtgtgcggtctcctctccccagcaaagatgttcggtggcacttacggcccctt

SEQ ID NO: 797 - DNA, 120 bp, Homo sapiens
aggcgaagccaatattgttaggaaggaagaactgctgtggcagctgctgcaaagacaaatcatatgcagtaatgcatcacgggctgagggagggtctgagtgtgcggcagggcagcgcgg

SEQ ID NO: 798 - DNA, 120 bp, Homo sapiens
cagcgcggaatggctaatgggggcgcggctcccagcggaaggagggctggaaactgtgcgcggtgcggcgaggagaggagaaggccagggcaggagagtttaggcagcaaggattttcgc

SEQ ID NO: 799 - DNA, 120 bp, Homo sapiens
gcccggcccttctacaaacgcctgcttgattccctccgtgatgggcaaaggccttccctcccacaacacctgaattctgggcaccctgatctttggaggccaggactttcctaggttccc

SEQ ID NO: 800 - DNA, 120 bp, Homo sapiens
ccacgcacatcagaagtagaacgaacaccctactatctaacccgttcctggctcctgcccccagccctgcctcgtagctggcctgtggtgggtggggtgtggctggcagttggtacccgt

SEQ ID NO: 801 - DNA, 120 bp, Homo sapiens
tcccgctcgccacctggatgcctgtatgcacacaggaattggctgggggccggggagagcatgggtgggggtgctggtttgcttggtttataacacttcttcttgctcctcaatgccagg

SEQ ID NO: 802 - DNA, 120 bp, Homo sapiens
ctccgtccatgcaggtgcctggagatgtgggtttactcacacattcccaggctctcagggttggaagggactttggaagaggccttccccctcctccctcacctgttctgccatatccat

SEQ ID NO: 803 - DNA, 120 bp, Homo sapiens
aaacgggaccaggacaagatgccaaaaacacagcaccctaagatagttacagctcatgcttacagaatacctccttagccaggcactgtactaagtgctttacgtatcttgactctcata

SEQ ID NO: 804 - DNA, 120 bp, Homo sapiens
caccgggctcactcttacagcccttcaccgcctggtgctccccttggctcttctgttcccagccttatccacatccagtctctgtgtgtgtgtgtgtgtgtgtgtatttgtgtgtgtgtg

SEQ ID NO: 805 - DNA, 120 bp, Homo sapiens
gtgcgtgtgtgtctcttcttcctaagcctgcataattttctactgtctgttggcctctcttaggtttgcacaaacacatgtacatagtctgataactctgttgtgtgtcacacacacacg

SEQ ID NO: 806 - DNA, 120 bp, Homo sapiens
agccgtaggagcagctggccagggaatggctacgtgggtggggacaagcagggctggaaagggattagtttgccttggattcttttctgtgaaaatttttgtccatttgccatgatccat

SEQ ID NO: 807 - DNA, 120 bp, Homo sapiens
gtacgtgggagaggctttgacatccatctagatcagggggccagagcctgcacccaggagtcagaaaccctggttcttgctccagaggaacctcagtttcttcatcagatgtatcagttt

SEQ ID NO: 808 - DNA, 120 bp, Homo sapiens
atgcggacacacacatgcacatgcagatgcagctttagctactctgggttttccaggaacttccccaactcaggtgggacctcgcctccttctcaggatgggggctgcctgcagtgtgtg

SEQ ID NO: 809 - DNA, 120 bp, Homo sapiens
atccgtccccacaccccctcccctaagattaaagacccgaatcctgagtcttgctcttgctgcacccccttcttggctgtgagaaagaaaagggaagtaggaacagcccaggaggggtgt

SEQ ID NO: 810 - DNA, 120 bp, Homo sapiens
cagcgctcgaagggaccaccctgactcctagcctagtcagcaggtttccaaacatttcacttcatgtgtggaacgtcggctctgaccatgcttacctggacatgcaaacaaacaaaactg

SEQ ID NO: 811 - DNA, 120 bp, Homo sapiens
ctgcgttaaggtgggtgggagctctgcccagcaccctcacccccatgaccacttctgcatgcccctgagtgagcaagcatcctgcagccctttttaactctgacaaatgaggcttaaaat

SEQ ID NO: 812 - DNA, 120 bp, Homo sapiens
ccccgagaccagaagcatcagcatcacctgaagacatcttcaaaatgcagattcttaggttttgccgagtcaataatctgggggtaggcccagtgactcatgttcaagaggctctctggg

SEQ ID NO: 813 - DNA, 120 bp, Homo sapiens
agacgcacaccccagtttgagaactgttggtctagtacaacccccttgccttacagatgaggagttgaagcccagagagaggtgtgccttacccaaggtcacagaaagtacgtcactgtc

SEQ ID NO: 814 - DNA, 120 bp, Homo sapiens
tcacgtagaggagaagccttcagaggggaccgggctgaggtgaggctggcgtgaggtggggcgagcaggaatggaggcacccagctcaccggccctgctaccagttccccagaagcctgg

SEQ ID NO: 815 - DNA, 120 bp, Homo sapiens
ccccggaagctttgcagcagcccttgcccccaggctaggtgagagggtgcccctggccaacagggatgggcagtgagggatacagtccaggaactgctggccttaagcttggtgaggaca

SEQ ID NO: 816 - DNA, 120 bp, Homo sapiens
gaccgaacagatgagggagcgaaaggatgaatgagtgggccgatcacttgccggtggctccagatctgtctcctgttccctgccctgcctggtgttgctgggagctgcatttcccaggct

SEQ ID NO: 817 - DNA, 120 bp, Homo sapiens
gatcgtgggaggaggggaaaagccaggatatatttcttccctctgtctgtttcaggccatgtccctgcagtatctgtgtctcctctggcttctgctgatcagccctgtcctgctgtgcag

SEQ ID NO: 818 - DNA, 120 bp, Homo sapiens
catcgaggctcctagagacgttgcctccttccagccccaggaaggggacaacttcctgctgttgctaatctgggttgctctacctcttctgttacctgtacaaccaaatccctcgtttaa

SEQ ID NO: 819 - DNA, 120 bp, Homo sapiens
ctgcgtgatgcaaaaaatataagacgtggcccacctcacacccatgaggatgactactggcaaaaaaaccccaaaatgacaagtgttggtgaggatgtagagaacttggaacccctgtgc

SEQ ID NO: 820 - DNA, 120 bp, Homo sapiens
ctgcgaatgcccacaatgaccctgttgtgcagatcgtcttatcttcattttatagaggcagagactgagactctgagagcttaaatgacctctttcctctctcacagccaaatggtcact

SEQ ID NO: 821 - DNA, 120 bp, Homo sapiens
cctcgcctgcctgctgtcctcactgctctgcccactggatgcacctgagtccctcaccagcctccggattggtgtgcttgtccccaagctcaccttctcccaacccaacctccacactcg

SEQ ID NO: 822 - DNA, 120 bp, Homo sapiens
actcgattgctcagcatccttcagtaacccccgttgcctaaggaataaggtccaatctccctggcatggcagtcagggcccctgggatctggaaccagcccccagctccagctgtgtctc

SEQ ID NO: 823 - DNA, 120 bp, Homo sapiens
ccacgaagccatgtggagtttctccatgcacccacatgctagaaatatgtctcctagctttgggatggggtgtcctgtccagggcagggctgccacatttgtaagattcccaggcccagg

SEQ ID NO: 824 - DNA, 120 bp, Homo sapiens
gtgcgtgcgtgcgtgcgtgcatgtgtgtgtgtatccaactgagattaagccctgaaagcaggactcaaccttgcctccccctcccccatgcaatcacatcctgcctgtgactgtgtcacc

SEQ ID NO: 825 - DNA, 120 bp, Homo sapiens
ttgcgatggaaggtgattaatgatggcagctatagtccctcttactctcccagcctccctgaccttgttcttcccctcctctttccacttcccctgtccccatcatcccataagaaaaga

SEQ ID NO: 826 - DNA, 120 bp, Homo sapiens
tcccgtgtctccatagagggcagtggcaggctgatttccagcagacaggtttggcatcctttggcacacatgttgttcatgttgtttctgatgtgtatgttgtcagcgtgccaggtttca

SEQ ID NO: 827 - DNA, 120 bp, Homo sapiens
caacgtgcacatcagaaccaacatgaatggcatgtgccaaagaatgaagctgtcaggaaccctagcaatcattcactttactagcagggtgagatggaggcccacaggaaacttgacttg

SEQ ID NO: 828 - DNA, 120 bp, Homo sapiens
ttgcgggtgataagggcacaagtctttagcgaaggagatttaagccacaaggacagcctctcccaataccatctctgagcagctttgcccagttttctgtctaagtgatgggccttgttg

SEQ ID NO: 829 - DNA, 120 bp, Homo sapiens
tgccgacaggacagcagaatgatggcatcagactgaagctggaacatgaaggcagaggcccagcaccgtgtgtgcatgtggtggggggtgtgcacacttgcatacacacacacacacgca

SEQ ID NO: 830 - DNA, 120 bp, Homo sapiens
ttgcgtttgcatatgtgtgtattgtgtgtgtgcaaatctcacttgaatactaaagaaaatgttaatacccaattctacaaccatatatggtactgcagctatgcccccttaagaggaggg

SEQ ID NO: 831 - DNA, 120 bp, Homo sapiens
gggcgtcaggaattggtgaggatcagggctgcagctaagagtctttttgtgcacgacagaaagcgcgtccagcaaagcccagctcagggcccttctggctttcatttcaagcttgggctt

SEQ ID NO: 832 - DNA, 120 bp, Homo sapiens
aggcgtgcttccaagttgaatggaggttcctcccttggggtgctgcagtggttgaggctccctgcctggtcctgtccagaccctcctgtcctctgacagccagagagtctgcacatccct

SEQ ID NO: 833 - DNA, 120 bp, Homo sapiens
ggacggctggggcaggagggatgcacggagctccaggagtgcaggctactgccctgacacttgccccactcactgtctgggcacccttaaccagcttcctgctgtgaggaccctgctgct

SEQ ID NO: 834 - DNA, 120 bp, Homo sapiens
aaacggaaatagcttgagggcatcttggtgtggggaccctggatgcgagaagtggctgacatggaagctggacggtggccccctgccctttccatccctttctctggtctggactgagtg

SEQ ID NO: 835 - DNA, 120 bp, Homo sapiens
gagcgttgtgtggggccccccttgcttggttgtacctccagaggcagcctggacccaagaaggcagctcatgcaaccccagccacaaagcaggagggccctttaaccagcctcccgtgtc

SEQ ID NO: 836 - DNA, 120 bp, Homo sapiens
ctgcgtacagcaaaccgaggggacaggaggcctcccgtggagctgaactaaatcccacatgccacagcccaggaaggcttttcctcggaaggcaccgaggccccaggactaggagcaaga

SEQ ID NO: 837 - DNA, 120 bp, Homo sapiens
tgtcggctcctcagtgggtggtgacaagggagctcaggcctacccctttcttcatagagagattccctcacttctgccctgtttccagttccctaaggaaaggttggggctggcggggtg

SEQ ID NO: 838 - DNA, 120 bp, Homo sapiens
ggccggtgaccagctatgaggataagcagaatatttgaagccacacagacaggcatccctgcccaccttggttcatacaacccatgggaccctggaaagggcccccggcatctctgagct

SEQ ID NO: 839 - DNA, 120 bp, Homo sapiens
cagcgtgagcattgccgcgcgcattcagtgctggatggtgtgagtcaccggctgtgaggctgggaatgtctgagtgtgtttggcaggtcaggtggggtgtatgttggaacgtgggtgtgg

SEQ ID NO: 840 - DNA, 120 bp, Homo sapiens
ctgcggacggatctgagagtgtgcggctggtatctgagtgtgaccgcaggctggtgtgcacgtgtgtaccagtgagggtgtgaggatgggtgcctgactttgcaatgggcatggcgagat

SEQ ID NO: 841 - DNA, 120 bp, Homo sapiens
cagcgctgtctccaggccaagaggcttcaacggagttccacaaaattatattttcctctttgaaagcagcctttgcaaacagagcattgcttaattgagaagatatttagatctgtgtat

SEQ ID NO: 842 - DNA, 120 bp, Homo sapiens
tgccgcagcctgggaattctcctcgtttgtcagatatgattagctgttacccttctggtcttccattgttattcaggtccctgcttgtcacagttacacccctttggaagctcacgcctc

SEQ ID NO: 843 - DNA, 120 bp, Homo sapiens
cctcgctttctctccagctctctctccctctggtggcaccctgactggctagtaatttatgtatgacaatatgagactaattcggttattatgtcaaagggaaattgaatctagggtttt

SEQ ID NO: 844 - DNA, 120 bp, Homo sapiens
tgccgcatctgggagaaatcttcaaatgaatctggagtgcagaaaaaagcctcagagttcgattcatccgcttgtcaccctgtcggcaagattaagtcattatagagggctaagccaggt

SEQ ID NO: 845 - DNA, 120 bp, Homo sapiens
gggcggggggtctggcagccaggagggctggctgcctctccagggactcccttgtttacccacaaggcggccccagcagtgtgaaagccaggggacatatgggcagggaggaagttcagt

SEQ ID NO: 846 - DNA, 120 bp, Homo sapiens
attcgcttgtctctgctcctgggcgtcttaaatattgtctgagttaaaatctggcttccctgccttccacgggattagagcactttgctcggtgccaagtgagacggtggcatttctgct

SEQ ID NO: 847 - DNA, 120 bp, Homo sapiens
taccgggactgacatctgtgagtgagaatgcctgacgaggtaaatgacataatgcatcagaaactccaggggccccagacagtttttcccaggtttcgtccagagcaggggagagggcag

SEQ ID NO: 848 - DNA, 120 bp, Homo sapiens
aatcgttccaagcccctcagagctgtggcagacagatgtggagtctggccagaggtccctcctgctgtcttctctgagccctgtctatctagatacctctgatggctggggtcagggagg

SEQ ID NO: 849 - DNA, 120 bp, Homo sapiens
aaacgggacaacagcagctctacctttcatctctgatccgcttgcctccttccccatgggggaagatggccccagcatttgttcttccctgaaatgcttgttgagatcaatatacaggca

SEQ ID NO: 850 - DNA, 120 bp, Homo sapiens
ttccgagctgtctcccaggactccagaaggccggctgtggctatgtgcccagtgagagtcccacacagatttctgcagtattgttagggttttcatcattagtatcgacttgctcctcat

SEQ ID NO: 851 - DNA, 120 bp, Homo sapiens
tcccgggtggtggtgggaaggctgcaggcttactccaggcagcctggtttgttttgaattgtagattgcctggtttgattggaaagtcagaagtctagccaggccccctgcagacctatt

SEQ ID NO: 852 - DNA, 120 bp, Homo sapiens
aagcgtcagagactgccctgcctgcctgacacagcccttggtgttgtcaaagcaggtgccaacctcaagctaaggctgaacatttcaggagcgctggaaccctgaacaactacccatcgc

SEQ ID NO: 853 - DNA, 120 bp, Homo sapiens
ccccgccacctgccctgtgtgctctctgaatttccttttcctgcttcctgtctgcattgagccacatgaaacttttagcatctgcctcctcctcagctcctgtgaagtcccgttcattct

SEQ ID NO: 854 - DNA, 120 bp, Homo sapiens
tggcgagggagctcagttggaagcggtgaaacaagcatcattctattgttgagctgcctcgccagctgctgacaagggaggctttgcagacagactgaacctatggagagatgaaagtcg

SEQ ID NO: 855 - DNA, 120 bp, Homo sapiens
atacgcacctcgagcaaagagaaaggaggcgagcgggaatgactgctggaagttgagcatgtttccccaacgctggcgctgctctgtaattctcctccttcactaaggaagctttctttc

SEQ ID NO: 856 - DNA, 120 bp, Homo sapiens
ccccgaggaacaagaagttaatgggcttgctgtagggtgactaggggaatttgcccctcggtggggatcttcccagaccccccggggactgccgcgtgctagctaatgtgggccagcacc

SEQ ID NO: 857 - DNA, 120 bp, Homo sapiens
aaccgtaggctttcagagtgggcacaggccaaatgtcctccccatggtggagattaaccgggctgggatcccattacaggagagtctgtgatgctagttaactcatgctggttcatctgc

SEQ ID NO: 858 - DNA, 120 bp, Homo sapiens
gctcggtacagttttgcaccttgacaatagtcccagaactaatatcacagacccggaacaaaccccaatcttcctaacgcggaggcgcatcagactgcctccagcaaccgtccgcagctg

SEQ ID NO: 859 - DNA, 120 bp, Homo sapiens
gaacgggtgtcctctgaggggacaaagggcttggcctcctggacatgagggtaggtggagctctgcccaatgcccccaaatcctgactcggcaggtgtggctgggcctgggaatatctgt

SEQ ID NO: 860 - DNA, 120 bp, Homo sapiens
aggcgcccatgcaccgtctggtggtggggacgctgcactgcaccaacttccatgtagggccagaaagtcctcccttagggccaccctaactcacaggcctttcactgcagcccctcccct

SEQ ID NO: 861 - DNA, 120 bp, Homo sapiens
ctccgcggagtccccctgcaggagcttcctgcccggggctgtgccggctgccaagttgtgctgctgccggtgctcggatggaccccggggagcagcagccactgctcagagcagtctgtt

SEQ ID NO: 862 - DNA, 120 bp, Homo sapiens
tgccggaggctggggggtgcaggagcagccctggaggggcttggcactatcagtggcggaggggtctgtgtagactcagagacagatgtggcaggcaaagatgggggactttgtcagcag

SEQ ID NO: 863 - DNA, 120 bp, Homo sapiens
ctgcgtccccaggccccaccccccggctcctgcctttactcctacaccccctttccaccagcatcaccactgaggggggcagcccagccggcttcggcaccagacaggcaacggcaggaa

SEQ ID NO: 864 - DNA, 120 bp, Homo sapiens
agccggagtgggcctcgcacacccccacaagcagagtccctgcagcagcagagccgtcggtggcatcagggcggccagctgtgccccaggtttccagagtggagaggaagggaccccaca

SEQ ID NO: 865 - DNA, 120 bp, Homo sapiens
actcgggatgggctccagggtgctgcgagcagcgggtggccccgcttggagccaatctgcctacctggagcaacctgcctaccaaagaccagagtcccacccaggaaatcaggccccaga

SEQ ID NO: 866 - DNA, 120 bp, Homo sapiens
acccgcaccctgccagctgctgccacactcatcacctctctcttgtgacttaagtcttcaggccgcagttctcagcgcccttcctgccccacaggctgcctccagcccaaactacacagc

SEQ ID NO: 867 - DNA, 120 bp, Homo sapiens
aagcgttctcctgcccagacccctgcccctttgaacacaggacaacccctcacctggcatccccgggcacccatgatctggcccagatctcctggagggttcaccactgatcctccaaca

SEQ ID NO: 868 - DNA, 120 bp, Homo sapiens
tcccgcctacctcccctgcctcttggttctgctcttcatctgcccacatctgacatatcttcaggatccatttcaaatcctgcctctcctcctcttccttctcttatcccctaaaccttt

SEQ ID NO: 869 - DNA, 120 bp, Homo sapiens
agccgccatagtggcctcttcatcccacctttcattgaacaaatggggtcagagagaagtgacttgccataggccacatggtacagaaggttggcctagaggctagtccttctggcttcc

SEQ ID NO: 870 - DNA, 120 bp, Homo sapiens
cctcgctggccctcagaggagaggtaaaagagcccagctagtgcctggacccttcaacccctctgcagcctgcctccttctctctccccatccatgctctccccacctggcctcagcatc

SEQ ID NO: 871 - DNA, 120 bp, Homo sapiens
tatcgcactgcattgtaattgcttgtttacctgctggctcaccgcagactgcaacgccaggaaaggagctctgtcccactctctgtgtccccagagcccagcactgggcctggctgagca

SEQ ID NO: 872 - DNA, 120 bp, Homo sapiens
tgacgcctaactcaagaggtatagcatgcgactgatggaactgtaggctttgtggtcagaggagtctttctgacacctctgaaatccccaatgtttagggttccacatgctccaagagag

SEQ ID NO: 873 - DNA, 120 bp, Homo sapiens
tcccgccctctgggccacaccattcagaggtgccctgagaccttttgacttcccaaagagggatcaccaggcctctccatttctttcgctgatggttccaagtggctctccttgactgag

SEQ ID NO: 874 - DNA, 120 bp, Homo sapiens
agtcggctcaccttggctcagctcctcatccctccccctgtcagctgaaaacaaagccccggactccatttgtgattctgcagcttgtgaatttctagattacgagcaaagccagggaat

SEQ ID NO: 875 - DNA, 120 bp, Homo sapiens
tctcgccggctccttccttctgcagataatcctgcaggccatcgagcttcccatcacaagagaggggctttgttcaggatacagtggcgggcaggtggctggcattggaagccttttgag

SEQ ID NO: 876 - DNA, 120 bp, Homo sapiens
tggcgcctgctaattgaatatccctccttcctggctccttctgtgtccctggggggtgggagttactgcccaccctacttcctcctctgcttctcagggaacccccagagtctttctgcc

SEQ ID NO: 877 - DNA, 120 bp, Homo sapiens
actcgtggatctcatggacagaccagccagcattccaagagccgcagttgcatagagcttccccacatcatggcttccagtctccctcaccctgaggcagattactctcctcttggatac

SEQ ID NO: 878 - DNA, 120 bp, Homo sapiens
acccgttattcacctccgcataaccagagacccaaacaccggccagccctgggagaaaactgggaagccagctccctcctcttcctcctctaggctcctgatgcccccaggaaggtggta

SEQ ID NO: 879 - DNA, 120 bp, Homo sapiens
gtccgaggaaccaagagagagcaagagagactgagagagagcattctgtgccttaaacaaatggttgacttctagattggtttggtcacagcagagagagggaaggaagcagtaatccca

SEQ ID NO: 880 - DNA, 120 bp, Homo sapiens
gaccgaattcagagagtttatgagatgtccgggggttcaagggaggctgaggtccccaggacttggtgagtgattggttatggaggtgaagagaggaaggagtggagaatggcttgtggg

SEQ ID NO: 881 - DNA, 120 bp, Homo sapiens
atgcgttctctctttctttcatgggagagaaagtccccatagatctgagccacaaacagctgtgactcccaccccagccaggaactggcaccttgacaacccttgggggagagaaagaaa

SEQ ID NO: 882 - DNA, 120 bp, Homo sapiens
tgccgaagggagcggaccaccctttgcactgatgggaaatcttcagagcaggctccagcctccagcatggactcagagggccgggctgggccacaaagaggggtgtgagacagagcccat

SEQ ID NO: 883 - DNA, 120 bp, Homo sapiens
ccacgggctctccggcctcattttcctcgttggtaaaactagtgctttgaacctgattctctgcacggcttcttccagcctgagcctgtgaggactggctggagcaccagatgaagcaga

SEQ ID NO: 884 - DNA, 120 bp, Homo sapiens
acacgttaaggcacgtgttgcgcttacaccatgttgtgtgtgcagaacgttcgtgtcttcccttggatgatccgagtgtgaaacaggcaggttcccatctactgcccctcttgatctcag

SEQ ID NO: 885 - DNA, 120 bp, Homo sapiens
atacggcctgcaaaactgctgaggagagagagcaaatcccagccgagcaatgttcccaattgctctgcgccaaattcagttgaaatgagacacttttcaaaaacaatttctgggtaagtg

SEQ ID NO: 886 - DNA, 120 bp, Homo sapiens
cttcgtccgtcaagcagagcgagctgggacgaaacgcgttcctcacacaccctcacacagaggcatcagccgggacaatgacttgtgtgggttgtcatgacaatgaaattgaaactggga

SEQ ID NO: 887 - DNA, 120 bp, Homo sapiens
ctgcgcttgctcagggactagctttggagaagacctagagcttcagggtggagaaaaatctatggatcaggcagataggccaggaggcagtggaggttccctcgggatgaacatcttgca

SEQ ID NO: 888 - DNA, 120 bp, Homo sapiens
tggcgggagggttgtgtggagagcataatgtaaccccttgcatgtgtttgaagttcatcgatttacagtttgcttccacctgtagtatttcatttactcctcaccactttaggtagggca

SEQ ID NO: 889 - DNA, 120 bp, Homo sapiens
tctcgggctgtctgcatgtggaaggaaaggtgcttgggtatgcagcctgtctcctggcccagggaagcagagcccttatggactccatcaagggcttggggtgacagtgggagatgatgc

SEQ ID NO: 890 - DNA, 120 bp, Homo sapiens
ctacgtgggcctgggactcaaatgggagccaaggcctgcgtctttccaggcaggccaggtcgggtaagggagcagcaaggtgagcttgggggctgctcaccttgatgcggtccttctcct

SEQ ID NO: 891 - DNA, 120 bp, Homo sapiens
ctccgtctgcagagaaagagccaggattggagaagtcagggggaggagatggaagagaaccagagaaccagggagcggctccactcagggggcacactcgcagccagggctcatcactca

SEQ ID NO: 892 - DNA, 120 bp, Homo sapiens
cctcggatatgccaggcaccatgccagtcgccaaggatctagcagtaagttaaataccatcttgctgtattctcaggccactagggctggatatcctagccatgtctttttaagggctaa

SEQ ID NO: 893 - DNA, 120 bp, Homo sapiens
tctcgtggcagtaacagtgtgcagcgtttctatggcatgacgtagggctgtgttgcaagcagcagccagggttgccgccggcgtggactccgtctgggcaggcacagctataaaacctgt

SEQ ID NO: 894 - DNA, 120 bp, Homo sapiens
agacggagacttttacccaggggctctggggaaggagaaggctggagaggaaggcagtgtagagtggaagaagaggttgtagggacccctgctcaggaagaggacacagactgttggggt

SEQ ID NO: 895 - DNA, 120 bp, Homo sapiens
gcacggagctgatgctctaaccatgtttgtaaatacacggacctgagtattccagccagggccaggtgtcaggctttctgaggccagtaaaggcagtgcctgggggaaacaagcctgtga

SEQ ID NO: 896 - DNA, 120 bp, Homo sapiens
ggccgggagaggatgggggctccggagagctatcactgatatctactctacaaatgactgaggaggagaggtgtttcctaggccgccagccagaactctggctatgagatatgccgaaaa

SEQ ID NO: 897 - DNA, 120 bp, Homo sapiens
tgtcgtcactatctccatctgtcttcagaaccgtcctgcttctccctctctgtccccacttcttaccctttggctcctgtctgtttctcctttcgctcttgtaacctcccttcccagccc

SEQ ID NO: 898 - DNA, 120 bp, Homo sapiens
aatcgtggcctcattcacatgactggaagggctaacagggcattttcccacgtgtccgggtggggaggaggacagggtcggggtggtaagttggatgaaggagggtggagacaggcagct

SEQ ID NO: 899 - DNA, 120 bp, Homo sapiens
tagcgatgcgggaaagattcgggttagaaatcagaatgaccatgcaaaccatgaggacagccaccatgtggaatgtttggtccccatggcacaaagatttgggcttcttcctgggatgag

SEQ ID NO: 900 - DNA, 120 bp, Homo sapiens
ctccgtgattcctgggagaccctctggatgtgagcacctctgagattctggagggagcccagggctccctgtgctctgtcctcccaccccacaccccaccctatgctctctgctctctgg

SEQ ID NO: 901 - DNA, 120 bp, Homo sapiens
gtccgcgggagcactgacctagagtgtggaagctcctccccttgaaagctgggctgaccttgcttcagctgagtccaggagaaaacacacatctgacacaccccagggctgggggaaggg

SEQ ID NO: 902 - DNA, 120 bp, Homo sapiens
gagcgggtgccggacctccaaatggctctccctctgcactgtggaatcactcccgcaggaggcaggtggtgggagaaggccttggcctcagcattcccctgcccttgtgtcctcctgttc

SEQ ID NO: 903 - DNA, 120 bp, Homo sapiens
agtcgggagtgtttatgagttaatcaaaaactcctgtactttgctcttgaattgaggccatcattcctttgtcccagggcaatggggtcagtttgatctctcctggcttaaatagtgtgt

SEQ ID NO: 904 - DNA, 120 bp, Homo sapiens
tcacgccctgggctgggtgctctgcagagaccaagctcacagccgtgctagtagctgggtgtttccatgttacattgaggaaaccaagttgcaaagacttaaagaaacctgcctcagatc

SEQ ID NO: 905 - DNA, 120 bp, Homo sapiens
tcccggtctggcctgagaagatcaggagtttgggataaattgctagagaggccttgtcctcatgtgggccaagtaagcccttaaaatgggtgcccagcaaagcaagggggtctgaggtgg

SEQ ID NO: 906 - DNA, 120 bp, Homo sapiens
cctcgcctgaggttaggtggcgggccccgactggctgggagtgggtttctgtacgtggctggaggtgaatcacaccttctgtgtgggttgcatgtttatatgtgggtgtgccgagtcagc

SEQ ID NO: 907 - DNA, 120 bp, Homo sapiens
atgcgttgtcctgcgtgtctgctggtgtatgtaggtgttactggtgggtgacaggtcaagggtgtgccctggtgaagcgggagggtgcctgtgtgtgtctgtgggcctctagacctgagg

SEQ ID NO: 908 - DNA, 120 bp, Homo sapiens
ccacgtgtccctttctctgtctctgtgtgtcctactgaaatcggctgtgtgcaggagtgtgtctgcgtatgtgggtgtgtttgtgcaggggccagggaagggttattcatagaagcaaga

SEQ ID NO: 909 - DNA, 120 bp, Homo sapiens
actcgtgcagagatggggaggcacgttgggtgggtaggtggggggcaggcactgtgtacaccaacgtgctccgaattccagcaaactccagtgcctgagtttccagctgtcccagctcaa

SEQ ID NO: 910 - DNA, 120 bp, Homo sapiens
tgccgctttgctacagccataaacagacctcccaggatttttccagaggaaacgcagaaatattttggtgtctgctcttggtagtaggaaagagagtggggatgaggcttgaggctaggg

SEQ ID NO: 911 - DNA, 120 bp, Homo sapiens
cttcgaaacagagggaccacagtcagaggggagctgaagaggcaacagcatcccccacaggccagcagggtgggggaagagctgtgatggcttccagttgtggggtcctctctaaggccc

SEQ ID NO: 912 - DNA, 120 bp, Homo sapiens
aaacggatgttatttaacatgcatagcacaggggtatggcgggagaatgattacccgataacccagagaggtccaggtgcttgtaaacccttctttatagtggaaagagacaaggtgtta

SEQ ID NO: 913 - DNA, 120 bp, Homo sapiens
ccacgcacaccctgtaaggggccagctgtgctgtggccacatcaaggggctctggaggctcctgtgagggggccgcctgagctgctgtaaacccaccccttggggctgtgcacctgctcc

SEQ ID NO: 914 - DNA, 120 bp, Homo sapiens
cctcgggactctgccagcactggttgatgtgcccaggtcctgtggtccccactgagaggactgaggctctgcgggcagaggaaggttcagtcctgctccccctccccgtggagcctgtga

SEQ ID NO: 915 - DNA, 120 bp, Homo sapiens
ctccgagctcactctctcggctgggaccagctgcatccctggagcctgtgcccacacacactctctctgagctctctctctcagctggtaccagctgcatccccctggctccatttcctc

SEQ ID NO: 916 - DNA, 120 bp, Homo sapiens
catcgctacatgcccggcctggtgggccaagtgcattctgtcagggctcctccagccctgctgacgcctggacgcagccgtcggggtgaacccgtctccacggccaggctcaacagaggg

SEQ ID NO: 917 - DNA, 120 bp, Homo sapiens
tgtcgccattcactgagggtggagggatggggcagcctgggtgggtcctcacctgttccagaactcaggacctggccttctggcccaggttctctgcactcagcaacttgtgcgaaactt

SEQ ID NO: 918 - DNA, 120 bp, Homo sapiens
aagcgagcagctctctggccacaactttccctcggttctgggtgaccctggggacctccctcctcatttcccccgaatctgctccctagctgaatggaggccatcgaggtcttcaggacc

SEQ ID NO: 919 - DNA, 120 bp, Homo sapiens
gcccgtgcctgtcaccgatgcctgctcacattggatcctgcctgcttctgccacactcagcgtcatcctctcattcccatctcctcccactgccctctgcactgtggctagaaaactcta

SEQ ID NO: 920 - DNA, 120 bp, Homo sapiens
gagcgtcctgtgacatcaactgctctgctgaagtgacctcctcgatgtttatggaagcatctgcccattcactatgactgcacacaaccacatgctgttctggtgcaggagacactgtgg

SEQ ID NO: 921 - DNA, 120 bp, Homo sapiens
caccgtggggacacacgggcaccgctgcctcccccacaacgggcaagagacgcacgtcagacagcagacaccgtggggacacacgggcaccgctgctttccccacaatgggcaagagatg

SEQ ID NO: 922 - DNA, 120 bp, Homo sapiens
atgcgcggcagacacacagcgcagcagacggcgttaccactgcagggagtgaccagctaggaggaccgggtatgcgggctgcaggatctggaggaagagctgcaggaagcgggaggagaa

SEQ ID NO: 923 - DNA, 120 bp, Homo sapiens
gaacggccagggaagaggaaggtcaggagtgactagggtgaggaaaacatgggcccagctggagcaggctcggcaggacagtgcccacgagaaaggcccacgcgggaacggacctactct

SEQ ID NO: 924 - DNA, 120 bp, Homo sapiens
ccacgctgcaggggctgagcgggggcagtgggtgggtgcggggggctccaggcctggacgggctgaaggtggcgcctgtgctgagggtcaggcctgaagggcaagaggtggacatgaacc

SEQ ID NO: 925 - DNA, 120 bp, Homo sapiens
gcacgagggctttgggcctcagcttccagagtgtggggcagccacctgcggacacgggggagaagccgggagggtggcccgagagctccaccttgggcacacggagtccggagtgcccac

SEQ ID NO: 926 - DNA, 120 bp, Homo sapiens
ccacggaacacctggggaggccatgtggccatggtccgtacctagggatctggggtggagctgagtggtcggctcaggctggggccagcacatgggtgtttagacccacagggatgcaga

SEQ ID NO: 927 - DNA, 120 bp, Homo sapiens
caccgggatgtgtgggcagagaggggaggagggctgaggaccagaccccttggcatcccactggggccccaggagacaacaaggggaagcagcgaggggacgcaagcagggaaccacctg

SEQ ID NO: 928 - DNA, 120 bp, Homo sapiens
ggccgcccagaagccaagagaagcaggaaacaggggctgagctacctggcccagtgaggaggcaggaatgtttcccaccactggagctgcgccacagaaggctgggtgagctcacgtgga

SEQ ID NO: 929 - DNA, 120 bp, Homo sapiens
gtgcgggagaggaccaaggggggccagaggcgtgggcaacgccagggccacctccaaggcccagccagctctggagcttgaactgtgtgaggtggagtgccctgcggtcaccaggccctg

SEQ ID NO: 930 - DNA, 120 bp, Homo sapiens
tggcggctgaggacgggtgatggcactggctggcctggtggcagctggcacaggaatgcatgggcttacgggagttcactgggtgggcagagggatcggccacaccagcacagtaacagc

SEQ ID NO: 931 - DNA, 120 bp, Homo sapiens
acacgccgcgaggaaggggtgacggtgtagctgtgctcaccacaccatgaagcccctgaaagcaagtcttatttgtgaggtccacggcgattcttctgcctgctgtatttgtgcatttct

SEQ ID NO: 932 - DNA, 120 bp, Homo sapiens
ggccgtccaggacctctgccgacccgtaggctccacacctgagtctcataagtgtcaggaggtttccttcaaagtcctcagaaaaagcagctatgcccaaaacctggggcttcattctaa

SEQ ID NO: 933 - DNA, 120 bp, Homo sapiens
cctcgggagaaacaccaggacttgtggatacagtgttaagggtggggagccctggtgacccctccaccacgtccagtactgggctgcgcgagggcagggaccttggagcatcgtgaaaaa

SEQ ID NO: 934 - DNA, 120 bp, Homo sapiens
ccacggcatgttcagagccactgttgataaaaactgtaccgctcacgacagcctgccccagcccagcctcagtgagtgacacggtttgaatctgtgtccccgccaaatctcacgctgaat

SEQ ID NO: 935 - DNA, 120 bp, Homo sapiens
gcccgctggaaggaagggcagtcatcctgttgatccccacaaagatggcagcagggagggcgcggcgtgctatggagaaggcgttgagtctggggttttgtgcagcaccttcaagagggg

SEQ ID NO: 936 - DNA, 120 bp, Homo sapiens
gggcgatttgaggataggcactcaagaggctgaaggctgactagcctcttgcgcccggaggacaggcagggagccagaagagaggccccagactgagccccagaggccaccaatggcata

SEQ ID NO: 937 - DNA, 120 bp, Homo sapiens
agccggatgcaaacggtcaatagggcaaaatgctgctgaggatgtcacaaaggtgcgtctgactctgctgcagcctgggaggccaggtgaccatggcagcagagagagggcatctcaggt

SEQ ID NO: 938 - DNA, 120 bp, Homo sapiens
tgacgccctctcctggtctcctgcacaccctcggcctctgttggcacctggaccagaccactcccagtcagcctccagccagacctcactgcttgacagtttctccagctggaggtccca

SEQ ID NO: 939 - DNA, 120 bp, Homo sapiens
cagcgggggaaaggggagtgccctctgcctctgtcccatgctctcagcccccctcccctgcccccactggtggggccctgattgctcatgctcagaggccccagaattgggtagggagga

SEQ ID NO: 940 - DNA, 120 bp, Homo sapiens
gggcgggcgggtgcaggccgagagtggacaggtgctttggggcccactcccctccccagctggaaatacagacagcccaaagagcaggagggcgcactgggaagaccccgcagtttcctg

SEQ ID NO: 941 - DNA, 120 bp, Homo sapiens
atacgggcttaccagcgtggggagcggaccacggtcagcagcagtgtgtggcagagcccgcaggggaaacgttgcccgcagaccatacacgggcaagatctgggacccccacttctgcag

SEQ ID NO: 942 - DNA, 120 bp, Homo sapiens
cagcgttccgggtctccctcacctctcccctcccaccaccttctgcagcacgggcttaaggaaataccagtgtttttctgcaaagaaacagagggtccgtccaggtctggctgcctcttc

SEQ ID NO: 943 - DNA, 120 bp, Homo sapiens
cagcgcctggcagagagatccagtgcggggcgtagctggggagagtcccatgctgaatttgggaggtgcctgtgagccccgactaaaggagggcctggggatgcgggaaaggggaggtgt

SEQ ID NO: 944 - DNA, 120 bp, Homo sapiens
aggcgctgtgcacagatgtccgcctgggagggaaggacttggggacaggctggccaactcgccagggctgggaccccatcacaagactggccctagctccaaagcctggtccacgctggc

SEQ ID NO: 945 - DNA, 120 bp, Homo sapiens
ggccgtggcctcactggccccaccactgacacggccacttctttgtgctgggcggagcaccagctgcccgtggccaggcttgcatgtctgagggagggggccctgcccttacctcggagc

SEQ ID NO: 946 - DNA, 120 bp, Homo sapiens
gcacgtgccctgcccacggcctgcacacctactgtatgtcccacacacaacaggatgcctgcccccacctcatggggcccacagaggcctgtcccggcccctcctcctgtgaggcctcca

SEQ ID NO: 947 - DNA, 120 bp, Homo sapiens
caccgtaaggaagggcggagcccaggcacagcctgcctggaagggccctgcatccgactggctgggagcctgggaggccttatctccaacagctccaggccccattcctgaggctgggct

SEQ ID NO: 948 - DNA, 120 bp, Homo sapiens
gcccggcggcctgggctccctccactgaggcccctgccctctgccctctccaccagccagggccccagctgagcagcccacgtccctgcatcccccacagctggcaccaaaggcccctgc

SEQ ID NO: 949 - DNA, 120 bp, Homo sapiens
ctgcgtcccccacagctggcaccaaaggcccctgcgtcccccacagctggcaccaaaggcccctgcgtcccccacagctggcaccaaaggcccctgcgtcccccacagctggcaccaaag

SEQ ID NO: 950 - DNA, 120 bp, Homo sapiens
ctgcgacccccacagctggcaccaaaggcccctgcgacccccacagctggcaccaaaggcagtgtctgtggggagcgatgcgtgccccagccctgtgagcgtgatgttctctggcctctc

SEQ ID NO: 951 - DNA, 120 bp, Homo sapiens
gagcgggagatcgcgatcctgaagctcattgagcacccccacgtcctaaagctgcacgacgtttatgaaaacaaaaaatatttgtaggtattgctgggtctgaagagctggggtggcgga

SEQ ID NO: 952 - DNA, 120 bp, Homo sapiens
tgtcgctgcaggggtgggtgtctggggcttggggagcacaggggctggaggccaggggcgcctgctgcatcccagcagccctggccctgctagcatgaacacctgcctgggtagggtctc

SEQ ID NO: 953 - DNA, 120 bp, Homo sapiens
aaccggagacctggtctgtggaggctcgcagagccaccagcctgaggctggcaagggggaacaggaccttctggaggggagataggagtttcagggcaaggggcaggagcacctggccct

SEQ ID NO: 954 - DNA, 120 bp, Homo sapiens
ccacgctgagcctcctggcctctgcccaggacgtccccagccctgggcagtgagccatgtctctatccctgaggctccctcacacgaggcacagccaccaggatcccgccctggctggac

SEQ ID NO: 955 - DNA, 120 bp, Homo sapiens
gaccgtggctgagtgtggctgaaagtgtcacctccgcagccgctgaggccagcagaaatccctaccctgtcccaggcatgcctggctgtgaaccccatccccccagacccagcctcaggg

SEQ ID NO: 956 - DNA, 120 bp, Homo sapiens
tcacggcagtctcctctgtgtgctctgatggggctttctgacagatgaggcgctgctgcccaagggctgtctggccttgagcctcatctgaccctcgctggtcccagggcggcggcgtga

SEQ ID NO: 957 - DNA, 120 bp, Homo sapiens
agccgggcatctctgaggcatcaggctctgagggagcagggaacatacagggctgggctgggggctgccctcagggtgagctggctgagggcctggctgaacccagcagctccccttccc

SEQ ID NO: 958 - DNA, 120 bp, Homo sapiens
gtccggtgggcctcggtggccctgctgcccctggggccggccagagttgaagccgagcagccgtcctgtgcccacctgcaggagctgaggagggcaggaggcgccgccgtcaagaggggc

SEQ ID NO: 959 - DNA, 120 bp, Homo sapiens
ttgcgagcctgggcgggtggcgccgcccccaaggctgcagtgtgctggctgccggtcggggtccttctctttgagccctggccccgtgcctacctgggaccctcacctgtgtgccctcac

SEQ ID NO: 960 - DNA, 120 bp, Homo sapiens
tggcgccgtctctcctgcccctgccccagcaactgtagctcagtgttcccagcagctgcctggccggataggaccagggctcggcccctccaccccggggtttccagcgcctcttctgtc

SEQ ID NO: 961 - DNA, 120 bp, Homo sapiens
cctcgtgcccagtcacgagctctgggcgggctcgacaggaaccacaggtccagggcctcactggtggctgctgcccccatgagggctgtccgcgctcccagctcagccctgaaagctctg

SEQ ID NO: 962 - DNA, 120 bp, Homo sapiens
ccccgtcgcctccctgccccttggctgtgtctggtgagggagttggagggtcgtcaccgtggggaccagcccccgggtgtccgggagccaggtgtgtggccagcgtggcactctccacgg

SEQ ID NO: 963 - DNA, 120 bp, Homo sapiens
gtccggggcctgggccgtggtgtggactagcgaggcccctcgtggccggctggcggtgggcaggcctggtgggtagtgcaggccgggcttttactcttctctgtcctcttctcttcggcg

SEQ ID NO: 964 - DNA, 120 bp, Homo sapiens
cctcggcccctccctgcatttccttcctccaaggatggcagctgccactgtctgggcacgtgggcgccggctcgtccgtgcagtgtggtggaacgacgcacagccgtcctggtccctgca

SEQ ID NO: 965 - DNA, 120 bp, Homo sapiens
gcacgggggtggcggccacacaccggagtctcagccgggcacgccgggccagggcctccctcctgctgtgtgcaggtctcaggctgagtagggcagtggtgggacaaggccccaccgtcc

SEQ ID NO: 966 - DNA, 120 bp, Homo sapiens
ggccggccgctgacccaggcatccctcacgggcatctagggacatggaggaccaggctgcaggccctgtgagagctcagccagggggggcttggcaggtgggaggctggagccagcacga

SEQ ID NO: 967 - DNA, 120 bp, Homo sapiens
tcccgtctgtcccctcgtccttccgtccacccccacgctggatggtcctttgccgcggctgtctgatgccgtatcctgtgctgtgcctgggctgctggcatggggtggcccccacacgtg

SEQ ID NO: 968 - DNA, 120 bp, Homo sapiens
aggcgccctgggccctcctgaattgacagggtgtgcagcaggacccagggcctcgaggctcttggcccgggctccaggcctcctggagggtttacctggggggagcagagcccagcacct

SEQ ID NO: 969 - DNA, 120 bp, Homo sapiens
caccggccggcactcttgtgtctacttgtggagccctccctgttgaatgcacaggtgatcgggagatagggaaggagcctatgaagagaaagatggagccgggtgcccagggacaggcag

SEQ ID NO: 970 - DNA, 120 bp, Homo sapiens
gcacggagatgcacacgggtgccgcagcccccggcccttggagggcacgtccagcaggccacgctcgcctcacacccccaccaggcaaccccacccgggaggacacactcactgctgcag

SEQ ID NO: 971 - DNA, 120 bp, Homo sapiens
ccccggcccctcatgcccacacacgggtgcacactcccacacacacgggtgcacgctcccacacacttgggcgcacactcccacacacgcccctgcacacaccgagctgagtggtgtggg

SEQ ID NO: 972 - DNA, 120 bp, Homo sapiens
ccccgcagcaggtcagagaaagtacaggtgagaaaaatgtcaaaaatggattttccggcaacatccctatggcagccagcacaaaaataggcacccgggaaccccatgccacttctctgg

SEQ ID NO: 973 - DNA, 120 bp, Homo sapiens
ctccgggtcacctctgcctgggtggctgaagcccctgcccagggcacaaacagccgcacgctgggacaaagacaggcacacctgctggcggctgaggaaccacaccctgtgggttgcggg

SEQ ID NO: 974 - DNA, 120 bp, Homo sapiens
tgccggcaaggtggggtcaaccccgaaggtcgaggacaccaagacccgctcctctcccacagagcaacaggaagtgcaggcggctaaggaaagccccactgggcagggctccagagcaaa

SEQ ID NO: 975 - DNA, 120 bp, Homo sapiens
acccgccaggctggcccgggactgcacagccgcctctgccctggacagcttgcgtgtggcccagcacagctcgctgcacagccgccggccacactgggagggcagccacggacacagtcc

SEQ ID NO: 976 - DNA, 120 bp, Homo sapiens
gtccgccgcctccccaccctgacctccttcctgggggcaagaacagggcagacagatgtgctacacacccctcccccagccaggctggcaggtgttacctgagcactttgctgacagcct

SEQ ID NO: 977 - DNA, 120 bp, Homo sapiens
ggccgggccgggcttggtcttcagggagactgcagtggtctcccagcatgagtgggcgacgggaaggtggggaggagaagcggggcggggtgccggctggccagcactcgcaaatgcctg

SEQ ID NO: 978 - DNA, 120 bp, Homo sapiens
tgccgggccctccagcctcactccctggccaatgggacgcctggcagagacaaacagctgccccctttccagaggcaagggctggccaaggctggtgaaacgagggagcgtctgaattgg

SEQ ID NO: 979 - DNA, 120 bp, Homo sapiens
aggcggtgggggtgggaccagaagggaggggacagggccgtccttggcctgcaagaagggtccatcagaaaggtcctgggctccacctcaggctgccagaagaggcggtgggggtgggac

SEQ ID NO: 980 - DNA, 120 bp, Homo sapiens
ggccgtccttggcctgcaagaaggatccatcagaaaggtcctgggctccacctcaggctgccagaagaggcggtgggggtgggaccagaagggaggggacagggccgtccttggcctgca

SEQ ID NO: 981 - DNA, 120 bp, Homo sapiens
tgacgagctccaggtcgatggcactcccctctcccttgtccggcccagcctagcccagtcagtgctcgggccagggacggacagacggacagacagatgggccgccctgccctgcagtgt

SEQ ID NO: 982 - DNA, 120 bp, Homo sapiens
gtacgcagctggaggcactcaaagtggctttcctgctggatggccctggagagagaaggggccgaccagcttctgcggtgcctggacggtgctgggctgaggctgctgccagccaggacc

SEQ ID NO: 983 - DNA, 120 bp, Homo sapiens
gggcgcacagagcggcacggccccggccttccttctggctggtctgcacacaggagaccaccacatcctgaaaatgcaaacacctgagagggcaatgctctctcctcatcctgagtcagc

SEQ ID NO: 984 - DNA, 120 bp, Homo sapiens
cagcgtggaccccactggcagtgacagccccctgacaacacggggtcatcaggagcatcccccacccgcatgggagccatacttcctgtgcttcctgccaatcaagagaccccagcatct

SEQ ID NO: 985 - DNA, 120 bp, Homo sapiens
tgtcggtgtgaagccctgtaggagtcaggacacagcctgaggtaccagctgctgcggggagcacagagccatcaggaaagcagccagggtaggctcacccccatcaataccagcccccat

SEQ ID NO: 986 - DNA, 120 bp, Homo sapiens
gcacgcacacacacagcctgggcgcacggggagacagcacaccaacccagcacagacacactctccaggagccacagcagaggatggccccaggccggcccccgcctccctaagcagcag

SEQ ID NO: 987 - DNA, 120 bp, Homo sapiens
gtgcgtaactggtctctacagaacaaacagcccggtgaggctcaggacgtccatgcgcccacaggccttcctctgccttggcaaggccatcccacagccctgtggtgccacacgcaccta

SEQ ID NO: 988 - DNA, 120 bp, Homo sapiens
caccgtgctcacggctgccggtctgccctcgggggctccaccaacagcagggacacaggtgctggcaggtcacccaagtggcaaagggagccacaggaagagcgggctccaggcctgggg

SEQ ID NO: 989 - DNA, 120 bp, Homo sapiens
caccgcgcccggccaactcacttattccctaagtggtgatgctatcaggatccccatctgcgtttcaggaacttgggcagggaagggtaacacagcaggaagtgggtgagtgtggggcaa

SEQ ID NO: 990 - DNA, 120 bp, Homo sapiens
ccacggggtgaatgagggaagggacagggtttacagcaccagtgctcatggccagcctgtggaccagggtgagctccaaacaaaattccctcaaatcccaaggaaatgaggacgacagag

SEQ ID NO: 991 - DNA, 120 bp, Homo sapiens
ctccgagatgcagcctaacttcctagtttgcatcagcaagatgagcaggcaccaccatggaaagagcacctggggtgtagctggttaccacagctcagccacattccccagaaacggagg

SEQ ID NO: 992 - DNA, 120 bp, Homo sapiens
tgccggaggaacgacaggggcctgcaaagggacatccgaggagggggaagcaagctgggagcaagaccagcccagctaggtttcagggcaacagcaaagccccagagacatggaggcaga

SEQ ID NO: 993 - DNA, 120 bp, Homo sapiens
ttgcgccgggtggagcttgcgtgaggagcgcttttggatcgtcctccgtgagttgggcgccatggctgccttctgggcagagtgcagggcctgccttaaatgttgtgggggttctgttct

SEQ ID NO: 994 - DNA, 120 bp, Homo sapiens
aggcgtaagttgggagcgactgagccactccaggaggaggtgtgggcccacggcgtgttggaggtggagccacaggacctgtccataggttggatgctgtgtgggtgacagagagaaacc

SEQ ID NO: 995 - DNA, 120 bp, Homo sapiens
aaccggggctcacggcctgggcagcgggacgggcggagtcgtcctcacctgtgctggggaccctgtgggagcagcaggcttccgagcacgtgctggaccccggcgtctccggctgcaccg

SEQ ID NO: 996 - DNA, 120 bp, Homo sapiens
ggccgggtcagggagcgtgagataccgggacgagcgggcccagggctgagcccagcggcgtccgggtgggcggtggcgttgagatgggaattgggaattgcaccggtggtctcaggagga

SEQ ID NO: 997 - DNA, 120 bp, Homo sapiens
gaccgaggcaaagggaccgcagtttaacagaaaacccaaaacgagagcgagaaaacggccaaacacccgtgcgagtgagacgtccatgagccttcccggcaaaacgcccaataagggaga

SEQ ID NO: 998 - DNA, 120 bp, Homo sapiens
aggcgcggcgggggccggggttccctgaagtccccttcgtttccagaatccctaaagatcattccgccccccagggaggaaacccaagctccgccgagcgcggcgggtctgtgccttcgc

SEQ ID NO: 999 - DNA, 120 bp, Homo sapiens
cttcgcttccagcctctcgcttccttctgacccgaccccgagttctttctccggacggtgtcgagaacccgggcgccggctggggctggagtctcgctggcctcggagcgcccccgagcc

SEQ ID NO: 1000 - DNA, 120 bp, Homo sapiens
cctcgggcgacagcgaggcgaggacccaggtggaggcggccgggggcgcgggcggagggaggaggcgcgggagggaacccccggcccgcgggccccacccacagccgccccgggacgcag

SEQ ID NO: 1001 - DNA, 120 bp, Homo sapiens
cgctgatgcaggcatgcacttcagcacccttgtgctatagtaaggccaaaaaaaaaatagattaaaggaattaaagtctctttcagtgcttagcaaaggagtagttggtaaggcatagta

SEQ ID NO: 1002 - DNA, 120 bp, Homo sapiens
acacgttaactgagaggagtactaagtaatcaattgaggttattccaaccaaacatttaaaatatccttattaagtgtccaccagtgagtggtactaagtgtgacatactgtgcacaatc

SEQ ID NO: 1003 - DNA, 120 bp, Homo sapiens
attcgcactgcaagataaagcaaaaagaagataagtgccaagtaccagatggaatgaaatcatgttccttttgctctcttgcccagcctaagaagacaggccaggggagtttgtgatcat

SEQ ID NO: 1004 - DNA, 120 bp, Homo sapiens
catcggtcaaaattgctattcaaaatgtgccttactccctattttgtatttagagtcttggattcttatttgaaacttggcagctttggaagctgtcttatattttgttctgctttaaga

SEQ ID NO: 1005 - DNA, 120 bp, Homo sapiens
acccgagcatcttggtgtgcgatacaatattgcgataatgtctattttatacctaggtggacaaacacaattaaaggctggttacttattgtcctgacaccgtttgaaatagtctcagag

SEQ ID NO: 1006 - DNA, 120 bp, Homo sapiens
catcgtttgtgccaaactagctgtgtgtgcttgaagacaacctttgaaagtctctgccgaccagtataatctaatgatttcacttacacctcccttatttaacactgtcatggaaagtaa

SEQ ID NO: 1007 - DNA, 120 bp, Homo sapiens
aatcgtagccagtgctcatttgtctcagggagcactcacaataaggcattgatgtgagtccagcattcacccagagtccgccttttatcaaatcaccttctggtgcggccatcaaggccg

SEQ ID NO: 1008 - DNA, 120 bp, Homo sapiens
tgtcggttttattattttttcaacaaacacttctggtagaggggaacccctgatccacagctacaaattactaatcatgtgtattattcaacgttttagtccatttctgaaacttttcct

SEQ ID NO: 1009 - DNA, 120 bp, Homo sapiens
gcacgtagaaagagggctctcgctttgcccagtctgttcaccaagatccttttcaaattggtgaggagggaggtttgtggaagggggaactagatgtatcaagcaactctgtgaagccag

SEQ ID NO: 1010 - DNA, 120 bp, Homo sapiens
tgtcgtgtttcagtcatgtaaatatgtttcagcataaagtaaccaagatttcctgttatagaagcagccctatctgggggtgtgggggtagggagggacgaaagaggactaaataacaca

SEQ ID NO: 1011 - DNA, 120 bp, Homo sapiens
cttcggttctgaatgcccagaaatacttcgcagacactctaggctgcctagcaatggggattttctaattctggctagcttgacaaagtaaatacaactattgaacataaggcagctcct

SEQ ID NO: 1012 - DNA, 120 bp, Homo sapiens
taccgaggaactagcagacccttaaatgtgggggtctcaaagtaactagagagtagttgggagatttaatgctgccaggatgttttacattgccatttccaccgagcacttcatacccca

SEQ ID NO: 1013 - DNA, 120 bp, Homo sapiens
acacgttcatgtatgtgttagacacaaatatatatgattgccacatttccaagaggagtgttcatcgaaagctgccaaatttgaaagttattaatatttaggggactgacattaacctgg

SEQ ID NO: 1014 - DNA, 120 bp, Homo sapiens
ttccgtaagctgtgtatcagtcagacctctgccaatccttaaattggatagtggatctgctgcagttcttaaaatctctggatcaacctcaaatgtgcacacacatttatctgctaacag

SEQ ID NO: 1015 - DNA, 120 bp, Homo sapiens
aaacgaggataaaaaggaattctcatttaattagtagtttgaatatatttctgaaagactttttcaaacttaacattcagatctaaaaacattgtgtgttcctaaaatatattagtattc

SEQ ID NO: 1016 - DNA, 120 bp, Homo sapiens
ttacggcaatagcagcagcaggcactagatctgaagcatctctcagcttggccttgctaaagcttcattcaaattctacacactctggagcttatatgctccggcctgtattgtgtgttc

SEQ ID NO: 1017 - DNA, 120 bp, Homo sapiens
aaccgatttagacaatgtggcacaatcagaggatcacaggaatagtgaccatgtgtgacttatccatcccattcctttatcccagacatgatgctgctggagagagggggctggtcaggg

SEQ ID NO: 1018 - DNA, 120 bp, Homo sapiens
ccacgctgtgcacaatcacaacagaatgctcccatcctggcttgtaacttcttgataccatttttttttaaattcagtagctgagcacaaagaggcctcgttgattagttttcgaagcag

SEQ ID NO: 1019 - DNA, 120 bp, Homo sapiens
tctcgctaagaagctatctaattacttaagtaaacgtgaacactaagtgcagaagcaacccgggaagtggggcacatcgacacccggaagcagtcctgtgcaccggagaggtcagacccc

SEQ ID NO: 1020 - DNA, 120 bp, Homo sapiens
gcccgaggctctgtacggcctcgctggggccatagaaccacatcctgaacgaaggagtctccagacattttggagtcgccccagccttggaccacaagagagtggtcactgcccccacct

SEQ ID NO: 1021 - DNA, 120 bp, Homo sapiens
tctcggtcctcccgcccccagccaaaagagtaattagcaattatgatgacaaagttttactctctagggccaaataagataacaactaatcaaactgccttcacgcttttgcaaaggtca

SEQ ID NO: 1022 - DNA, 120 bp, Homo sapiens
aaccgcaacaactattatttctcttcagtaaactcgccaggctcaagctctttgcctttcatttcattttctgctcccagccccttctaaaaccttcccaagttcgagttaaacgtccag

SEQ ID NO: 1023 - DNA, 120 bp, Homo sapiens
ccacgttcactttgtttttaaactttctagaaatcgctcatgaatgaagagccaggttttagcactcgaaaaagaaagcatttccacttgaaattcaactccatttcccccaattacact

SEQ ID NO: 1024 - DNA, 120 bp, Homo sapiens
tggcgcagggagactgagaaaatctgcacaaggaaagaggcaacaactttatgaactttgaaaagacacttttcctcctgggatcttagaatcgaaagctctcaaattactccgactaat

SEQ ID NO: 1025 - DNA, 120 bp, Homo sapiens
agccgcaagggaaatggagaaatgtagtgttattctgagtggccacggtgcgcagctcaacgttttattactatggaggaagagtaggctctgccactgcaggactagaaaaggacccta

SEQ ID NO: 1026 - DNA, 120 bp, Homo sapiens
ctccgagaaaactatgcttctgcttaaagggaaatactgtacatcttttgccacccgaggaatgcaaaattcccttgggaatttttaagaaagctggaagttaaaactcaagtgtgaagc

SEQ ID NO: 1027 - DNA, 120 bp, Homo sapiens
agccggggctggggagaggcagagcactggccccaggcaaacttggtttgaggccaaattccaggactcttggggctgactggcagccactctgtctgagcaacctgggggatcctgaga

SEQ ID NO: 1028 - DNA, 120 bp, Homo sapiens
atccgaatcccagaacaaaatcagcaatgatgatgctcctgcagcccgggtctggctgggaggccacacagtggggaggatgaggtcatggtgacaaatgagagaagggggagggctcta

SEQ ID NO: 1029 - DNA, 120 bp, Homo sapiens
agccgggtgctcagagcaaagccagcccctctcttgtctgccactgctctcctgtgtgatcgtaggagagtcacaatgtttttggacttcagtctatccagtgagaagataggaaacaca

SEQ ID NO: 1030 - DNA, 120 bp, Homo sapiens
cagcggctaggttcaggaatgtccagaaagtgaatagaattattaaagaaaaaggggcttggttgctaggggtttgggtggagcacagaggatttttaggtcagggaagcttttgtgtga

SEQ ID NO: 1031 - DNA, 120 bp, Homo sapiens
tgacgtgccaatgtaggtttatctattgcaacaaatggactactctggtggggcatgttgatgatgggggaggatgtcggagagtgagaggagtatgttgaaactccgtgtattttctgc

SEQ ID NO: 1032 - DNA, 120 bp, Homo sapiens
ccccggaggactgtggctccctgcgtttctgttgctgtcttttcgatatcaaagcaaggctgataaacacattcaagtcacaattaaaaaacattttcgctgaccagttgccaccgatga

SEQ ID NO: 1033 - DNA, 120 bp, Homo sapiens
catcggacagcttcggtcactgttgtaacaacgcatttcatggtgttgatgtgcaggcaagatgaagtttccctttatttggtccttaacctagctctgcaattctttaacgacatttcc

SEQ ID NO: 1034 - DNA, 120 bp, Homo sapiens
ctgcgttgtcactaaattcaacctagaatgaaaaacagaatgctatacatttttctggatatgaaaaaatcagattatccagctgtgacgcctagaagctttatagaaaagtcatagaca

SEQ ID NO: 1035 - DNA, 120 bp, Homo sapiens
cgataaaattttggcagggtgatcttcagcaggccatttgaccccctgagccagttcccttttctgaagaacagaggcaatgaacctctgttctcagagttttggggaggctcaaatgag

SEQ ID NO: 1036 - DNA, 120 bp, Homo sapiens
ctccgagctgtttgtcatcgagccccaaggagcccttggcacctagtaggcgtcagtaaatatttgttgcatctgaactctttccatctgggaagccctccaatggcctggaatctccag

SEQ ID NO: 1037 - DNA, 120 bp, Homo sapiens
tcccgctaagcaggtcagaaaagcaacttaaaggatccattttagtgtccattttctcacttttccccctgaaaaaccacttacaaagctgccagcttcctcatttggctttttctggcc

SEQ ID NO: 1038 - DNA, 120 bp, Homo sapiens
taacggtcacttcattcatcagcataaggaagactccactctgtcaacaggagggcagggcttggcctccagtcacagggcaatggcgggggtggaggagcctggaaacagccatagcgt

SEQ ID NO: 1039 - DNA, 120 bp, Homo sapiens
ttgcggttgagaaggcccaggattcccaaacagccttccctccacccccaaacagctgatcattggatagtgaggaagcaggtgctccttcagaaaactctgttcattcattcattcatt

SEQ ID NO: 1040 - DNA, 120 bp, Homo sapiens
tctcgagtgcttattatgcacggggaatagaatgctgaacagaaaagcacacccactccctgccctcatggaacttacagtttggggggaggatcactcacattaatcaaatgatcctcg

SEQ ID NO: 1041 - DNA, 120 bp, Homo sapiens
aaacgggctgtggggattggggagatggttcaaagaacatcatatgcaaaggccctacagaaggaagaacgtttttgggacacagacaagcaagatcgagaaagttcacttgcttttgat

SEQ ID NO: 1042 - DNA, 120 bp, Homo sapiens
aaacggcagctggtgttggagctatctggaggctccacgggtgggactgtgaaaatggcttcttccctcacacctggcacctccatgcccctctacgtagtttctgtcttcatcaggagc

SEQ ID NO: 1043 - DNA, 120 bp, Homo sapiens
acccgccacggcctctgcaggggtctctctccagtggagtagctggacttcttacacagtagatggcttgcgagagtgtacaagtggaatctgctatgccttcttaaagcctggaagcag

SEQ ID NO: 1044 - DNA, 120 bp, Homo sapiens
caacggaaacccagctggagtctcagttgttccaccagtaagcaggtggccttggcgaggcctgtcgggatgccagtttccatctctggacggtgtcccagaggggacaaagctcccgcc

SEQ ID NO: 1045 - DNA, 120 bp, Homo sapiens
ctccgccttttcccctgctctcccccaagacttctcaggacagtttcttcctcagcactattttccttgtggtggagttggaaggatagaaactctaaccagcagtcagagagggattgg

SEQ ID NO: 1046 - DNA, 120 bp, Homo sapiens
acccgacgtctcattatgttgaacatcattgtgccaacctaagggaaacggtgcgggttgtttgttatcgatggcaaatcttcttccaagagtggcgggcccttccgtcaacaacacaaa

SEQ ID NO: 1047 - DNA, 120 bp, Homo sapiens
cctcgctcccggccccctttccagccctgtgactcatcaggcctctaacctctttttcccccacagtgagaaatatccaagttgataacagcaaaaacttgataatgactagtgttggga

SEQ ID NO: 1048 - DNA, 120 bp, Homo sapiens
aagcggcaaaaagaaacaacttcagaacacaaatttaagacacgaattttgctcagttcctagttttgactctgagcaatggaggtatttctaacaaaagaaaatctccacgtccgtcct

SEQ ID NO: 1049 - DNA, 120 bp, Homo sapiens
gatcgagtgttcaatccagcaacaaacaggaagctgggggctgggaggagatcaaataaagaaaaggaagttgtcatcaacacagcaatggaagcgggccctcctctaagaactttccag

SEQ ID NO: 1050 - DNA, 120 bp, Homo sapiens
ccacgctgggccaagaaatgcttttaagaataatgtctaatgtttccttttaagtttttttgctgagctgtgaggtcattgtctcaaactttcgggaagcacttactgcctccagagcct

SEQ ID NO: 1051 - DNA, 120 bp, Homo sapiens
atgcgggagaccagcataccctaagctgatcagtttacccatttgaaactcgcttttccttttcactgaatcaaccctctgctaaatgttacttatcttgttcttgttcctctgcttcat

SEQ ID NO: 1052 - DNA, 120 bp, Homo sapiens
ttccggattcacagcagtgctagaattctctggtaattcccacaggagccaagactacctctgaaacaatctaactgttggaaaccaccagtgtctggcaggaagccaactataacaagg

SEQ ID NO: 1053 - DNA, 120 bp, Homo sapiens
actcgctttcccgttcccttcctagtccccttctttttctagccccaatctttttctccctgttcctcctcccactcctccttctcctccctcactcactcaacaattcatatcctgctt

SEQ ID NO: 1054 - DNA, 120 bp, Homo sapiens
aaccgcctaccttaggacacttgcatttcagcagggagctcttacacccccaaggtaatgctcctctattgctagaaattcagatctctaggctggctgggggaagcatgtctggtctca

SEQ ID NO: 1055 - DNA, 120 bp, Homo sapiens
aagcggggatccaaggactggcttcccagctctcactgccagccagtggggtcacaaagacattgcctcaaatgtggagctgtcctctgctagctcgtacaggatcttatccttctctca

SEQ ID NO: 1056 - DNA, 120 bp, Homo sapiens
gatcggttcagtacccccagaccactacatgcctttctctgtgagcacttgtcatgctgacttgtgatccatggatctcagttagccagaatccagcacagcctgacacttagcaggtgc

SEQ ID NO: 1057 - DNA, 120 bp, Homo sapiens
gaacgaacgaacgaatgaacatctgttcatatacactatagctctgcagacaccatgattatcttgttctccattgtaccctcagcacccagtccagtgcttaggctgtagtagtaagac

SEQ ID NO: 1058 - DNA, 120 bp, Homo sapiens
attcgaggagctctcaatctccctggcctgtttgaagtcaggaatgtgatgctaggggaatggtttagagcgccgtcggcagtgctgaggaaagccaagtaggctggcacattctgggtg

SEQ ID NO: 1059 - DNA, 120 bp, Homo sapiens
tggcggcgtgccgttctctaggacacaaagggacatgaaaggttttccgcagacccgaaagagaaaggaaacaaaaatcagaagtgctcccttggtgagaattgttggcagggctcctct

SEQ ID NO: 1060 - DNA, 120 bp, Homo sapiens
atccgtgggagattctggaaaggaggctgcccagaggggctgtccctaaacacacggggctgatgggccacagttgttcccatttcactcccataacgtcaatcgtttccccagaaagcc

SEQ ID NO: 1061 - DNA, 120 bp, Homo sapiens
ggccggcaatcaggacgctggaggctccgatggtttcttccctttctggggcactgctgcctcctgctgtcctgcctattaaatctcaggtttctccctccacccggctaatcaatcacc

SEQ ID NO: 1062 - DNA, 120 bp, Homo sapiens
aaccggagtctgcttaccaggaacacaacccactgctgaggaaggaagcccatttcaaccatttcaaggtgcatccttactgctgggaaatagatggttagaaagagattcatatttttt

SEQ ID NO: 1063 - DNA, 120 bp, Homo sapiens
agacgaaatagaaccaacagtggcttgaaaacatggaaggaacagcaactggaggctggccagccctgtgctctgattctggaagacaatggctccaagctctgaactggatttagaggg

SEQ ID NO: 1064 - DNA, 120 bp, Homo sapiens
attcggcttgggctggaaccagaaagggctcaaccaataaagaatttcctgagcctcacaatgaagcattcctgccctaggaagaaccaggcagaaccaggcaggagaagtgaattctca

SEQ ID NO: 1065 - DNA, 120 bp, Homo sapiens
tggcgagctcacaccagcagggagacagccctcccagcccaggcgcaggaaatggctgccacgacaggcggccatgccaagtgggaagtgtggcttccagcagcagcacctggcctcctg

SEQ ID NO: 1066 - DNA, 120 bp, Homo sapiens
aaacggcttccctcttcttgttacaaaagctatctctgactcttcagttaaccacaggctaaaatctagccttcttgaaactgcaagtttcatttgtgaaaagaaaatgaaatctccttt

SEQ ID NO: 1067 - DNA, 120 bp, Homo sapiens
taacgaggctgcttttgttaaggctgtgtgtttgggggcagctatccggccccacaatggacatcgggcaggaccgtcatccgtcttcccagtgaccactctgagacatcagcatcctga

SEQ ID NO: 1068 - DNA, 120 bp, Homo sapiens
ccccgacatctgcagtcaccaagctctgcaaactccgtgtctgcaatagctgctttgccgcctcttctgtgtacctggcgctagaatgccagccctcaacatctctggtctgtgttacta

SEQ ID NO: 1069 - DNA, 120 bp, Homo sapiens
aatcgcctatgaattcaaaatgcagtcttccccccaaccccagcagattttcacttccgacaaattagagaaataaattggcagttcacctacgatttgctgataaacaaacatttttca

SEQ ID NO: 1070 - DNA, 120 bp, Homo sapiens
tctcggcagggctctaatgaaaaacaaaaatctactcctaattccaaccatttgccataacaacaaaagcctttatattattaatattagtgtggcccgagggagagctagaacctcaga

SEQ ID NO: 1071 - DNA, 120 bp, Homo sapiens
ccccggatggacacaggcttgcggctaagatttccttgtgcttcaataaatgaatccatttgttggttcttcttacaaactggactaaagctctgacctccacatttccataaaattcaa

SEQ ID NO: 1072 - DNA, 120 bp, Homo sapiens
gcccgaggtggtatctatttagtccaaaactttgccatcaatagagtgcacaatctgcctagcagggttgtgtggctccccttgggaaaggcatcagtctctagtgaggatacgtagcca

SEQ ID NO: 1073 - DNA, 120 bp, Homo sapiens
aaacgctgagaagcaataatcacctgaaagcaaagtggtccgtcattaccaaaagatttcaaattcaccaccttttggggtagaagtgggttgggaggtggggaaccgggtttctaaaag

SEQ ID NO: 1074 - DNA, 120 bp, Homo sapiens
caacgaatcacaaatatgctgatcaaacatcatcaatgacgtcttatccctgaaggcaagtgaaggatacactgggatttaaggtacctagacacttgccaacagaatgtgaagatgtta

SEQ ID NO: 1075 - DNA, 120 bp, Homo sapiens
agccgggacttgcctctctaacaaatcactcagatttaaacattgctcacataaacaaaggggggtggggtggggggagacagacacaaggctgggaaaagacagaaaagggcttcttca

SEQ ID NO: 1076 - DNA, 120 bp, Homo sapiens
gaccgccaccaaatctcccccactggagacaagagcccatctgctgagctcggcaacttcgctttaactaccattcagctcgcgtctctgcagagatctgtctgcagagctggcagatgg

SEQ ID NO: 1077 - DNA, 120 bp, Homo sapiens
ccccgagtcgctgtgttatttgtttaataaatttaattaatatccatactgcattggattgctcccagaaaaggggctgaagtgctccctttccccaacagctacatgatgagtgatttc

SEQ ID NO: 1078 - DNA, 120 bp, Homo sapiens
ttacgttactttgcatgtattaattttttgcagtgcactaatgtacctctgacaggtattttagccttatgaagacatgcaattcacaaaaaaggcagagatctcttctttcagatcact

SEQ ID NO: 1079 - DNA, 120 bp, Homo sapiens
taacgaactgaaaatattccttgtcatattaaactcgtattatttcccaagctggaaaaatgtgactattgcaaacatacaggatggaaagtgtcttggacaaaaccaaggcggtaacat

SEQ ID NO: 1080 - DNA, 120 bp, Homo sapiens
tgtcgttctgtccttctaggcagcacatttcatcttaacctagattttccatagtatatttttttaaaaaatcccttgaggatgtaaaaggtgtctcatgataaaagcattctgtcctca

SEQ ID NO: 1081 - DNA, 120 bp, Homo sapiens
aaacgagctgcatcaacagctccagtcttaggtaatgacctataacattccaaatttttgcttaggagacttgaaagagccttagtgacaaaagactgaattggacttgctaaactgtgc

SEQ ID NO: 1082 - DNA, 120 bp, Homo sapiens
acccgtaaattccaccttccaaatatactgagctgcttacaatgcatagaacatgctgtactctctctagcctccaggcctctgcacatgctccctctgcctggaatgtccttcccctcc

SEQ ID NO: 1083 - DNA, 120 bp, Homo sapiens
gagcgtgttcacatgcacatgcacatacacacactattccctttgtctgcctagctcctagcacaaacatctcattctcattcactcagctcaaaggccatttcttccatgaagccctct

SEQ ID NO: 1084 - DNA, 120 bp, Homo sapiens
atgcgttttcctaggctttatcactgtgtgatgggacctgtttacatgtgtctctcttccagtaagctctggagcttaggaactgtggcattgagaagcacttctttttagtgattacac

SEQ ID NO: 1085 - DNA, 120 bp, Homo sapiens
catcgctacttagtggttgtgtgagactcaaactcagatcttcctgactctgaagtctgtgcttaaccagaatgatgcgctgcctaaatacagtctcgtggcagtgcagggatgggctca

SEQ ID NO: 1086 - DNA, 120 bp, Homo sapiens
gctcggagacactgggtgcattctggttgccattttaccttgcctccaacccagcctaaaatgcaaaccgtgttgtcaatgaaaataggtatatcttttctgctgttttctgttttagtt

SEQ ID NO: 1087 - DNA, 120 bp, Homo sapiens
acacggtgccagaacagtgacctcagaccacagcttggacgctgattacaagtaatccagctccagaggtgatagagtgtcctttctttaaaaaggagataaaaatagcgaagaaacaac

SEQ ID NO: 1088 - DNA, 120 bp, Homo sapiens
taacgatccctggtatgtagcggttcccgtgaccttgattcttgttgaattcacagagataatttttacagagtctctacttttctcactgcggtatatttatccaaggagtaccttgca

SEQ ID NO: 1089 - DNA, 120 bp, Homo sapiens
tttcgggagcttaagggggtttttagactgtatgactagagcagggttgaggggagctggggaaaggagcccaagagaaaatgtagatttaatggatctataaaatgaccctgctgtaga

SEQ ID NO: 1090 - DNA, 120 bp, Homo sapiens
aaacgtttgttccaaagaagtttaaacagcctgacccaaaccagggtctgtgacagccagtccaacatgaggtgtctgtagcattgcacatttctcctcgggttttcaggtttccatatg

SEQ ID NO: 1091 - DNA, 120 bp, Homo sapiens
ctccgccttttctctaactcccttgaagttgaattctgaattttaagcctaggatcttggaaggcagatcgtgagagtgagagcctgctctttataccaggaattttgaacaacaatggg

SEQ ID NO: 1092 - DNA, 120 bp, Homo sapiens
gcacgtacacactactgaacctttccccgaaaaccttctaggcttttcatcccatgagtgacattcatctttcttgcagctgccttgcaagttcttctgaggatgaattttaggctttca

SEQ ID NO: 1093 - DNA, 120 bp, Homo sapiens
gggcgggactctgtctcaaataaaaataaaaataaaaaacattttgctgaatgaaagaagtcaaatattgaagagtaacaccctgtgattctatgtatatgaaattctactttatcgcaa

SEQ ID NO: 1094 - DNA, 120 bp, Homo sapiens
gttcgtgttcatgtgttgtaaaggtgttctgaagagactgagtgtcagagtcgccacatcctataataacccacatccttctgggaaagatcagatgggtctgtttggaagtcagtgctg

SEQ ID NO: 1095 - DNA, 120 bp, Homo sapiens
ctgcggaatgccgcccccaaagttcattatctcagcacttaatgttttgtttttgttttttcaaaatacagaaaagtaattagaagacatgatgagcaataacctctgtgccaaattacc

SEQ ID NO: 1096 - DNA, 120 bp, Homo sapiens
gtgcgtgccaagaatcataaggaatgtttttcacagtaaaatcttaacctcctaagacacacaatgaccaccagaccactgatctgcttcaaatatttgaaagataataagccacaagtt

SEQ ID NO: 1097 - DNA, 120 bp, Homo sapiens
tgacgatttctttagtgacatttataaaagcgcattgttttaatcagaccataagaagactgaatcaggtttcagattcactcggggttgataattgagctcattcctgaaaggcctcag

SEQ ID NO: 1098 - DNA, 120 bp, Homo sapiens
aatcgtgaactttggtaaagaaaacattccccatggagagtgctgatggaacaaactttgccaaaacctattaataagattaatgaagataaaattagggaaaacaccatgaatcttgtt

SEQ ID NO: 1099 - DNA, 120 bp, Homo sapiens
gcccgacaccatcttcctttttgcagagagaatgcaatgtccagttctttcttctgctgctgctaggatttgcctttggcatagttggcctgtctaaatgaaaccggaacaaagttccag

SEQ ID NO: 1100 - DNA, 120 bp, Homo sapiens
agccgagcttagaaaagaggagccaggcctgtccttgaactcgcagagctgagcagagcagcacacacatggtccaccctggcttggagccccgaagtggagcccagcccaaaacttctc

SEQ ID NO: 1101 - DNA, 120 bp, Homo sapiens
attcgaagcacaggcctcacatctacctctaagtcttggccattattggtaaaggcaagtagggggcaagcctttttaaatcatgtttttactgatacaaccttagaggatggcctcaca

SEQ ID NO: 1102 - DNA, 120 bp, Homo sapiens
aaccggcctggcttttgttgtgtatgtttgtttcctttttttttacgtttaatgcaagtgttgaagataaatgaatgtacccactctattatataacacaatgacagcctttgttcctcc

SEQ ID NO: 1103 - DNA, 120 bp, Homo sapiens
tcccgtaaattcatctccagacaacagctgccccctctcccttataacccttttttcaggcaggctgtttaggcctgcctggttacaatcaggtttccagccccagggatcttctttcca

SEQ ID NO: 1104 - DNA, 120 bp, Homo sapiens
ttccgttcatctaataatctacttccattagaagaaagtaagtaatccacaaaatttttaaaatattggtttttaaatttatctatttaggccaggcatgatggctcccgcctgtaatcc

SEQ ID NO: 1105 - DNA, 120 bp, Homo sapiens
gggcgaagagcaggggaccaactcaggtgacgcctgggccttttgtccctctgagcaggagctgcctgactctcctgtttgggggtgtagacttttttggaaaaacttcccccagtcttc

SEQ ID NO: 1106 - DNA, 120 bp, Homo sapiens
gtgcgcagtgtaatgctttgcacgtagtgtggctgcaacaaatatttataatgtgttttaatccagcgtgttattgcaactagcccacagccgcttgagctcctcaggggtaaactggca

SEQ ID NO: 1107 - DNA, 120 bp, Homo sapiens
gtccgttgaaccctcggagaagtagtgaacaaacagcacaaagcgcgcccgcccttctacaaagagcttttccaaaatccaggcggaagagctttcctgccgcttgggcacgttgaccat

SEQ ID NO: 1108 - DNA, 120 bp, Homo sapiens
gcgataacaggtcctaaggcatacattttggagccatcagcatggaagcgaataagaaacctagaaagtgagtatggagaagagagagggagatctgagcaaggagcctgggattactgc

SEQ ID NO: 1109 - DNA, 120 bp, Homo sapiens
gggcgtgattggcttggacagatgctgctgagagtggagttagataggcactagcaatgcacgttgagtttggaggtgtgaaggtggttagtggctctgagagtgatggggataaaactc

SEQ ID NO: 1110 - DNA, 120 bp, Homo sapiens
cctcgggggactgaagggctctgaggggctgggatactgcagcatttgggggttcagggagaagggggacaagcaagagacagagaaaataaaataaggaggtaggaaaagaagaaagtg

SEQ ID NO: 1111 - DNA, 120 bp, Homo sapiens
ttccgtcaaactgaccaccaccatggaaacttcaggatcctgaaattctgatgacgaccagagaatctctcagaagcttacttagctcaagtctcaaattactggaatatgatctgagaa

SEQ ID NO: 1112 - DNA, 120 bp, Homo sapiens
tttcgttgcttgacaacatattagaggggatttctaaacacacagagggacacattattctgggtcacgggatggcagccatggatggtgactctctttggggacttcaggaccaaagga

SEQ ID NO: 1113 - DNA, 120 bp, Homo sapiens
gcccgtggtccaggacaagaaactctcactcgggcaggtgtggtggcaggtgggtaaagtacttccatgaattgggtcaggttgggggatgtggcaggacagcaagtgcctgcgttgctc

SEQ ID NO: 1114 - DNA, 120 bp, Homo sapiens
gaccgaggctcagggtgccatagttctgacttctcaagaaaaggcagatctttatttagaatctttttgttttcaaatatcaccaattagttcagatttctaaaatgtcatgcagtacaa

SEQ ID NO: 1115 - DNA, 120 bp, Homo sapiens
tagcgatggagtggtggagaggaggcaggaggccagtgctttgctgtgtggcagagctgggctaccaccgtccctctccacaggcacatccagggggcagtaccacaccctgcaggctgg

SEQ ID NO: 1116 - DNA, 120 bp, Homo sapiens
tctcgctctcagggcctgagtggggacaagacctcggtgagcgatgggcccagcccgagggggacgatctgagctctgcagtctggagagtgggaggctctgcagcgggcccggacacag

SEQ ID NO: 1117 - DNA, 120 bp, Homo sapiens
gcacgccctcaccgccccctctcgacccacagggcttccggcccatcgccaagccggcctacagcccagcctcctggtcctcccgctccgccgtggatctgagctgcagtcggaggctga

SEQ ID NO: 1118 - DNA, 120 bp, Homo sapiens
caacgggggcagcgcctttggggccgctgggtacgggggtgcccagcccacccctcccatgcccaccaggcccgtgtccttccatgagcgcggtggggttgggagccgggccgactatga

SEQ ID NO: 1119 - DNA, 120 bp, Homo sapiens
ctgcgctcgctgcggctggggcccgggggcctggacgaccgctacagcctggtgtctgagcagctggagcccgcggccacctccacctacagggcctttgcgtacgagcgccaggccagc

SEQ ID NO: 1120 - DNA, 120 bp, Homo sapiens
agccgggcaggggggctggactggcccgaggccactgaggtttccccgagccggaccatccgtgcccctgccgtgcggaccctgcagcgattccagagcagccaccggagccgcggggta

SEQ ID NO: 1121 - DNA, 120 bp, Homo sapiens
aggcggggcagtgccgggggccgtcctggagccagtggctcgagcgccatctgtgcgcagcctcagcctcagcctggctgactcgggccacctgccggacgtgcatgggttcaacagcta

SEQ ID NO: 1122 - DNA, 120 bp, Homo sapiens
gagcgacgccgctgccctggcccccgctgtccctatgatcctgcactctggggtgggagctacatatcatccttggacaccaggcagtagaagtctgtgcgggcactgtagtttcgcgag

SEQ ID NO: 1123 - DNA, 120 bp, Homo sapiens
agccgagatccgagacgtccacttcgctgctccggctctctcccagcgagaccccactggtgtgcggtggagctgatggctctccaaagacaggcccccggacacctggggtggggagac

SEQ ID NO: 1124 - DNA, 120 bp, Homo sapiens
gaccgagacgcctgaggtggccacccacagccttggcccagacccactgccaggggctgcccctgctcaccccctgctgtgatggcctgtgaggcccaggaagttcccaggcagaccgag

SEQ ID NO: 1125 - DNA, 120 bp, Homo sapiens
ggccgagcacctccagggcagaggccgtgcaggggctcccggtgccgggaagagtcctcaacacctggagcccctccaggccctgtgccctgtgcctgcccccactccgccctgtgctga

SEQ ID NO: 1126 - DNA, 120 bp, Homo sapiens
gggcgggcatacccaggtcgccctcagggtccgggtccacctctgagtccagggcccggccctcagggactcggcctcgaagaatcagcatggggtccttgtcgtcctgcagctgcgtct

SEQ ID NO: 1127 - DNA, 120 bp, Homo sapiens
ttccgcggcagcgccagctgcacttctttccaaaaatcggaggaaggagtctgggggccaggtcggggcggtttgcaggtgtgaacacctcggaagcccctggcgtcctggcccccaaga

SEQ ID NO: 1128 - DNA, 120 bp, Homo sapiens
ctgcggctgcccacgggttccacgccctgcgacagctattccgtggctccgggggcctcaagggcggctccccgcatcggggccccaggcagcggaacctccccccagggcccattcaca

SEQ ID NO: 1129 - DNA, 120 bp, Homo sapiens
aagcgtggtgccgcagagctccccacggaggggtcccagcctggagcccgggcaccgcccatctctaacccgccgctagccccggaccctcccgcgcctgctccgcaccacggagccggg

SEQ ID NO: 1130 - DNA, 120 bp, Homo sapiens
tggcggtgctggcgcagcaggcggagcgccgggtgcgcggggtcgcgcctctggccctcgaaggtgatgaagatgggtctgcgggtgagctccagcagccggcacaggccctccctgcgg

SEQ ID NO: 1131 - DNA, 120 bp, Homo sapiens
caacgcttgtcacagagcctaggaccacaggcaccccacagcacacacactgcacctgacacccacccttggccgctgatgcgacacagcctcctgctgcccctcgctctgtctcacaca

SEQ ID NO: 1132 - DNA, 120 bp, Homo sapiens
gggcgccgtgggcctcctctcagccaggccctgacacaggctcactcagagcagcggggaaggcagtcacctggttccagttctttcctccggggggcaaatgttggtcattggtgcgcc

SEQ ID NO: 1133 - DNA, 120 bp, Homo sapiens
cttcgctgggccccagggagtgtccacagcaccaaggctgctatggatgcatcgccaagcgcggtggggacctggcttgtgtctttgtgtattttgatcagaactttccctgtagcttcc

SEQ ID NO: 1134 - DNA, 120 bp, Homo sapiens
aggcgggcgggaggacgggcagttggtggttctcaccccgcctgccccggctcttcctgtagctctgagtcaagcggctccttcctctggagcccgccccaacccacccaggcacggcac

SEQ ID NO: 1135 - DNA, 120 bp, Homo sapiens
ccccgccagggccaccctgcacacatacaaggaggaccggggaccgcgcggcatgccttccagacgctactagagctcacactcaggagccaaggggccggtttgctcccccatgtgtct

SEQ ID NO: 1136 - DNA, 120 bp, Homo sapiens
ccccggggaacagggccttcagaaactcccggtcaacaatggggctccagcagaactcttccgccctctccccgtccctctcccagacatagctcccccgatgggtgagcagttacaagg

SEQ ID NO: 1137 - DNA, 120 bp, Homo sapiens
cagcgcccccttttccaaataaggagcaaacacaggtggccgaggctcctggctcagagcagatgaggggcagatggcatctcctgttgtcaccaaactgacactccccaggttgacctg

SEQ ID NO: 1138 - DNA, 120 bp, Homo sapiens
gaccggtggctggtattgcccacagaatcagacaagggtctcctttggaccctggccctgccctcagccacatgggggcagggcttcattgtggagggctgccatccagcctcccggccc

SEQ ID NO: 1139 - DNA, 120 bp, Homo sapiens
tcccggtactcagccttgggtgatggtgggccttgggctcagggtcccaaagacagcaccccttcccccacagagcctggtaccagcccctccttgaagtgggtccttggaagcccctca

SEQ ID NO: 1140 - DNA, 120 bp, Homo sapiens
ccccgcaggaagcaggagcagggcctccagcacaggccctggggtcagccgccaactgtgaagccccggctcggcggctgctctgtgcacccggtctcagcgtcaccatctctcagggct

SEQ ID NO: 1141 - DNA, 120 bp, Homo sapiens
taacgtcctgcacccccgagcccccaggtccaccgtccagggtgagcatgaacacccacaaagtctccgaccctcgcccgcacagctcttccgaggcgcccagaatctcagtccaagcct

SEQ ID NO: 1142 - DNA, 120 bp, Homo sapiens
ggtcgcctcgcactgcccaccgcactctgctgggcaccttgaggttcttagaaagcgccagctcctcccgccctcagacccagccagcgtcctcggtccgcggccgcccctgcccggtgg

SEQ ID NO: 1143 - DNA, 120 bp, Homo sapiens
gttcgacgctcagcacccagcaccctgcgggcgactcccgctcagctcggacgcgccgcccctccgctccccgtgcgcgctgggcccccagcgcctgtcctgaagcaggaacgtgggtaa

SEQ ID NO: 1144 - DNA, 120 bp, Homo sapiens
ctgcggccccgcaggccgaggggctctggttcgctcccctaccccgcgcccacctgcgccctgggcgccctccaagtgaggagggcggagaacgaggacgcgcgcgggaggcgggcacgg

SEQ ID NO: 1145 - DNA, 120 bp, Homo sapiens
gtgcggctcggggcgctcggccggggcagaggcgcgcggatggcggaagctccacccggcgccgggcgagctcgggccccagcctgactcttggtccgccctcggcgcctcaggaagcct

SEQ ID NO: 1146 - DNA, 120 bp, Homo sapiens
cctcgagctgggatccaggcttgggcgaccgaggtgggatccctgcgcgcctcggcgctcctagccccgctctgttctgcgcgagggtcaccaaaaagccgctgaccacgtcgggcagag

SEQ ID NO: 1147 - DNA, 120 bp, Homo sapiens
ccccgcccccttcgcccactttcctcccttcccccagccctggaaagggccaggacgcgggcgagctcgggcttccgggcgacgcgggaacctccccggccccgagccatttcctgagag

SEQ ID NO: 1148 - DNA, 120 bp, Homo sapiens
ggccgcgcactgtgatttcagctcgatgaccttctggaagaggcaatatgatgtggtagtgaaaacatcagttgtttcccggggaaaggggagagtggatagtagaatgcagcattcgta

SEQ ID NO: 1149 - DNA, 120 bp, Homo sapiens
ctgcgtttgtccgaacctgtagaactggacaacacgagcagaccgtgtgcagattttaaacattcattgaggagatgggggtcccggcggggaaggccgactgacaagaatcttaactac

SEQ ID NO: 1150 - DNA, 120 bp, Homo sapiens
ttccgtgaccttcctgaagggtgttcagaggaaggtgctgagtaactttggaaatgagcagtgtctataaggccagaggcaaaaggaatggcacagacgctgctctagtcgataaagttt

SEQ ID NO: 1151 - DNA, 120 bp, Homo sapiens
catcggacctttgaaagctggtgagcgtccccctcttggcttggcagggcagggcaccccgggctggcccaccttggtcagctgtccacccgtgggcaagatgggctgccccatcatccc

SEQ ID NO: 1152 - DNA, 120 bp, Homo sapiens
gggcgagcactgggctccgggcaggaacccgggccgcgctgggccgcgctgggctgggctgggctgggctgggctgggctgggctgggctggggggcagtcagggcagtgctgggggctc

SEQ ID NO: 1153 - DNA, 120 bp, Homo sapiens
ctccggggtggaagctgcgggagcagctgggcctgcaggcagctcccagcaggcgtcaccctgcacgggcaacagagccaaggggcatccctccaccctgggcagggcctgccctgtgct

SEQ ID NO: 1154 - DNA, 120 bp, Homo sapiens
gtgcggggtcccttaggcagggagagaagccaagtggggtggtgtcgtctccaatgccagcgcctcgcaaggaccccaggaaggacaagagcctctcctgccaagaaagtgctttaatga

SEQ ID NO: 1155 - DNA, 120 bp, Homo sapiens
aagcggatctgagcgtttctcttcaaacctaggatatgcagggtgagagcatggcaggggctggtgggccccagggttgcctcgaggccggtcgtccagggagagcagcagcaggaagag

SEQ ID NO: 1156 - DNA, 120 bp, Homo sapiens
agccggtcctccatctcctcagaccagtaaatgtcgtacaggctgcacacaggccagaagggaggcatgggcccgtgtcctcccccacccccgccttcctccctgggcagccctggccgc

SEQ ID NO: 1157 - DNA, 120 bp, Homo sapiens
actcggcctgcagggctcactgtccagggctcccgggcctcactctgcacctggtgcccagcccaggatgaccagccacccacggaaagcccctggcgagaggcacacgggaaacagcaa

SEQ ID NO: 1158 - DNA, 120 bp, Homo sapiens
catcgaaaagaaaatttggagaacataattagagggtcactccacaagacatcaggacaggctcatgggcacaccaaaaaagaaacataagaaaggagagagaaaaaaatcaccaaaggt

SEQ ID NO: 1159 - DNA, 120 bp, Homo sapiens
acacggaccctcgtgctcactcacgtgctcacacggacacgtgctcactctcacatgctcacggacacccatgctcacactcatatgctcacacacgtgctcacactcgcctcacccatg

SEQ ID NO: 1160 - DNA, 120 bp, Homo sapiens
acacggacactcgtgctcacacagatactcgtgcactctcgcccttgtgtgcacacacgggcatatgatctcccaaatgtgcatactcgtgtccctcacacactcaccagagcacccgca

SEQ ID NO: 1161 - DNA, 120 bp, Homo sapiens
tcccgcacgcccgcatcctccagcctgttgttgcttatctgtagctccaggagaaacctgttctgggccagcactgagctgaagtgggagcagcaggcggctgtgaagctgcaggacttc

SEQ ID NO: 1162 - DNA, 120 bp, Homo sapiens
tgacgcctggcaggggcccaggctggcccacagctgcgactggcccttcccctgaaggccccacgtggacctgagcaaaaacatctgacagcctcccagcaagtgggcacctacacctgg

SEQ ID NO: 1163 - DNA, 120 bp, Homo sapiens
ggtcggagctgagcccagcagcttccctggagtcgctcactcctcccctggtctcctcggtcaccctggccctctcttgggcgacagggccctgccccgacagccacactcaccacagcg

SEQ ID NO: 1164 - DNA, 120 bp, Homo sapiens
agtcgggcaccctcatcccccagctcgttgccggccaggctgagctccttcaggctctccttggccctgaggacacggcacagatccccgcagcccttggcagtgatgccacactcccag

SEQ ID NO: 1165 - DNA, 120 bp, Homo sapiens
caccgtctcatggcctgagatgagcccaggggcgggggagagctctgaggacggcccgccgcccgaccctccgggaaggaggcctcgcggagatgactcaccacagggtcctgagcctgg

SEQ ID NO: 1166 - DNA, 120 bp, Homo sapiens
ctccgccatgcccacatcacccagcttgttgctgcccagggccagctcccgcagcgaggccttggaggccacaatgccgcacaggtcccggcagttgtctgatgtcacaccgcagctctc

SEQ ID NO: 1167 - DNA, 120 bp, Homo sapiens
acacgggtcacacgtgaggcagcacgggaccccccctagcccacaccccgcacccccccaaggcccagtgcctacttgagcgcctccagctggcagggggagtccttcaggccctggcac

SEQ ID NO: 1168 - DNA, 120 bp, Homo sapiens
acacggacgccagcctcattgatgtcgttgttgctaaccgtgagctccttgaagtccggcttggccctgagcacggaggccaggggctcgcagctggcagccgagaggctgcaatactcc

SEQ ID NO: 1169 - DNA, 120 bp, Homo sapiens
gcacggggtgtgctggtgtctcatctcccctcagtcttctgcctgggcatcaggtgtcagtgctgagggacccccacagactcatccagaggcccgggcctctgtggacaccggcattcc

SEQ ID NO: 1170 - DNA, 120 bp, Homo sapiens
tcccggacctcagactttggggcccaaccaggcccgggagaaagaaaccagcctctggagggcagggccacctgcacgtcccaggctgtggtcaactcacaatggccgggtcccccacac

SEQ ID NO: 1171 - DNA, 120 bp, Homo sapiens
aggcggtgagtggaacctgactcacggccaggcatctgttcccaccgtcgggtcctggggcagctgtgccttgcaaaggacaactggatggggagggagggtgatgacagatccccccag

SEQ ID NO: 1172 - DNA, 120 bp, Homo sapiens
tcacggctcctggcaggcgatgttctatgtagggggctggctgggggacaggcagcggccagcatgggccctggggcaggacacaaactcactgcagcttttccaggcggcactgggggt

SEQ ID NO: 1173 - DNA, 120 bp, Homo sapiens
cttcgcagagcagctgcaggcccgcatcccccaagaggttgtcgctgaggtgcagctcctgcagggtgggcagggtgcgtagtgtgctggacaggaccccgcagccggcccccgtcaggc

SEQ ID NO: 1174 - DNA, 120 bp, Homo sapiens
ccacgcccttcgcctgccagagcccagagcccggagcagcactcttcaggcggcaggtctatacctgctccttccctggacggggctctggggtctggggtctccaggccgagtgaagga

SEQ ID NO: 1175 - DNA, 120 bp, Homo sapiens
gcacgcatgtggctcgacccagggaaaccttgtctgcagacacacctttcagtgggggtctgtggtgatgctggaaggctagggatggcgggcagggccagatcttgggtgcgggggctg

SEQ ID NO: 1176 - DNA, 120 bp, Homo sapiens
ccccgctgtgagaccgccaggcctgtgtgcctctggctgatgttggaaatgtctgctgccactgcctgtccacctgcagctgcccacgcgcccctggcggctctgtcccctgctgccggg

SEQ ID NO: 1177 - DNA, 120 bp, Homo sapiens
ccccgcctcacctcagcttctggatcttgcaggagggggtctgcaggccctggagcacgcaatgcacgccgacatcgcccagctcgttgctgcgcaggttgagctctgccagtgcagggt

SEQ ID NO: 1178 - DNA, 120 bp, Homo sapiens
actcgaagtgcagagctgatgtccttgcaccgtgcttccgtgaggccacagtcgtccagcctgtgagcagaccccagggtcatgtggaccacgcagacagcactggcctcagcctccacc

SEQ ID NO: 1179 - DNA, 120 bp, Homo sapiens
ccacgtgcaggttacaacctatcagtgggcccagaagacagcaaggcaagtcacacaagacatttcagaaatgaaacaaaaaggaggaactgttccatgaaagttttgtttaagatgctc

SEQ ID NO: 1180 - DNA, 120 bp, Homo sapiens
tctcgaaggcactgatcagtcacaggaggaaaggcagtggcgtcacagtggagagggtggcagacggcgcctgtgacaggacgctcctggcaggccccacggcatctccctgcattcctg

SEQ ID NO: 1181 - DNA, 120 bp, Homo sapiens
ggacgtcctgcaggagcctggccagaccctcagaccaccaagaacccagagagacgaggggacagtcacagacgggagagggctaaggagacagagggctgagggccacgcaatcctgga

SEQ ID NO: 1182 - DNA, 120 bp, Homo sapiens
agacgaaaagggcagggcggaaaagcagaccctgcctggaggtgctgggccagagctagcgtccgcaggtacacaggaccacctcaccagggagccccgtccggtcctcgtaactcctcc

SEQ ID NO: 1183 - DNA, 120 bp, Homo sapiens
ctccgcaaacctgacactacttgaaatcaccaggtaaaaagagaaaagatgcggcccacccaggcactcgtgtcctgcttgtgaagctgctgggtttgtgaggacctcgagggccgagga

SEQ ID NO: 1184 - DNA, 120 bp, Homo sapiens
cagcgccccatggaggctcacggaggggacccaagctgtgtcctgccctcgtgtctccaagggagggagaggagctgagacaccggagccagagacccactggccagtggccgcccacct

SEQ ID NO: 1185 - DNA, 120 bp, Homo sapiens
caccggccgcggtcactcatattcgattcagaataaatcccttcaaatattttacattttaactattcttatcgacagtacattttttaaaataagaatggccctgaaagatgtccacct

SEQ ID NO: 1186 - DNA, 120 bp, Homo sapiens
gggcggccggcatataatcatgagagttcttatgcagagacagtaggttttgaagatggaagaaggtggcctctagaagttggaagaggaaaagaagcagattctccttgggaaactcca

SEQ ID NO: 1187 - DNA, 120 bp, Homo sapiens
cttcgggcttctgagctccaggcctataaaacagcctgtgacaaattcgttatagcagggatgagaaaatagctcactgcagcctcctcttccagggctcaagtgctcctcctccctcag

SEQ ID NO: 1188 - DNA, 120 bp, Homo sapiens
gggcgcgcgaggcgccgcacgggggaggcttctccgaaagccgcgagggcagctcccgtgtgtccgctgtgcaaaccggtccttccgccaaaaacctgctgtctggcttttctcaggtaa

SEQ ID NO: 1189 - DNA, 120 bp, Homo sapiens
agacgacattttcagaacatacaagtacaaataagaagagggaaaatcacccgcagttcacccctgagccgcgcgcattccttagatctccgtgtttcttcctaaaggaacgtggcctga

SEQ ID NO: 1190 - DNA, 120 bp, Homo sapiens
cctcggcatcagaccaggggggccacacagggacccagatctatggggcccagccccgggaagaccagatgggctcagtggagaagctgaccacatctgctttcctttcagccaaaccgg

SEQ ID NO: 1191 - DNA, 120 bp, Homo sapiens
gagcgtcccggcacccaggcctctgcgggtaaccccaggcatcaagaccctccctcaaggggaggagctggctctcccctgcccatcagcacagctccagaatcccaaggggtcagctcc

SEQ ID NO: 1192 - DNA, 120 bp, Homo sapiens
ccccgaggccaaggcctagcggcatgagggggcttccgtggagcccagggcagtgggctgctctctggagtccctaggactcggggtgtggctggcctgtccccagatcaggacacaccc

SEQ ID NO: 1193 - DNA, 120 bp, Homo sapiens
tcccgtgctggaactcctgttgaagccacccagggacctggatgcttcccacagttcagcatggagcaggggtgctgggccctgacccctccacgtctgtcctggacaccccaggaccac

SEQ ID NO: 1194 - DNA, 120 bp, Homo sapiens
cagcggggccctgataccaggccctgcccagccccgtaatgaccaagaggcaggtccagagatacctcctgcacagggtcacctgcatctgacgcccccagcaggcagtgaccagcacgg

SEQ ID NO: 1195 - DNA, 120 bp, Homo sapiens
acccggcagccctagagggctcctggcctcgggaagtctatcgatggggaagctggtcactcggaggctgctggggagaagggggagtgtggcattccctggacagaagggcaagtgtgg

SEQ ID NO: 1196 - DNA, 120 bp, Homo sapiens
gcccgaagctcccgactccaccagccacttccccaggcccaccacacacacgggaagctggactctggccatctcgaagtgcccagggccacccgcatcatgctacagcagcccctcaaa

SEQ ID NO: 1197 - DNA, 120 bp, Homo sapiens
gcccggggccctcctgaactccaggtctggccagggtttgaccaccctgcacccagctctcgactcagctacggcccgtgtccccagtagccccactaagactcagaaccaacaggtgcc

SEQ ID NO: 1198 - DNA, 120 bp, Homo sapiens
gcccgtgggacactctggggacaagaggggccgggccccagggtcaccgctccggcctggctcagggcagctctccccaaggacctccgccttccccggagctgtgtcggcccaggactg

SEQ ID NO: 1199 - DNA, 120 bp, Homo sapiens
gggcgtgagcccagaccccggccctcgcctccctcactgccctgccgtcccgggagacttacagcgcgaggggccgctgggtcacatgggtcccggggggtcccagagggtcccggagct

SEQ ID NO: 1200 - DNA, 120 bp, Homo sapiens
gagcggctgccctgtgtcaagggagagggtcagtgagtgctgctccctggctggggcggggcggggcgggtccctggctagctgtggggtggagagctgcctcacctgccgggtcttggc

SEQ ID NO: 1201 - DNA, 120 bp, Homo sapiens
ggccgaggtctcgatgtaggggatgccgtagcttcgggcgaggtcctgagcctgccgagattccacagtgcgtgcagccaggtcacacttgttccccaccagcaccatgggcacgtcatc

SEQ ID NO: 1202 - DNA, 120 bp, Homo sapiens
atccgagtccttcacccgtttgatctgctccctgagaggtggaaagcgagagctggctacgggggctgcaggcgcagcggcatccaggacatgcgcagagaggacaggaggcccctgcct

SEQ ID NO: 1203 - DNA, 120 bp, Homo sapiens
ggacgcagccggcctggccccacctgtgcggcgtgggctcccgggccagcctcacggggttcacctgtactggtggatgtcctcaaaagacttggtgttgttgatggcaaacacacacag

SEQ ID NO: 1204 - DNA, 120 bp, Homo sapiens
ccccggtgcgcatgtactggtcccgcatggcgctgtactcctcctggccggcggtatccaggatgtccaacaggcacgtctccccatcaatgaccacctgcttccggtaggaatcctgca

SEQ ID NO: 1205 - DNA, 120 bp, Homo sapiens
ttccgtggggggagttcacacagccagcctctccctggtacctctcatgcccctcatgccccctcctctcctggggtgctgagacgagggactcccctcctctagaggaagcaggagaca

SEQ ID NO: 1206 - DNA, 120 bp, Homo sapiens
gctcgcccgcagcagctgctggcacctggacggcggcgccaggctcacctctatagtggggtcgtattcgtccacaaaatggttctggatcagctggatggtcagcgcactcttgcccac

SEQ ID NO: 1207 - DNA, 120 bp, Homo sapiens
caccgccggcgcccaccaccaccagcttatattccgtcatcgctcctcaggggcctgcggcccggggtcctcctacagggtctcctgccccacctgccaaggagggccctgctcagccag

SEQ ID NO: 1208 - DNA, 120 bp, Homo sapiens
cagcggtccctgggccccaacgccaggcagcaaggactgcagcgtgcctacctgtgcagctgcaacccagcgtgcgggagggctgtcgcctcgcccccacttgctcttaatgacccagtg

SEQ ID NO: 1209 - DNA, 120 bp, Homo sapiens
gggcgagtttgggatggactcagctttctgttggttggccctggatctggatctggtgctgccccctttctctggagcacacaaagggaacaagaaggcctggacttgggcaaggaagcc

SEQ ID NO: 1210 - DNA, 120 bp, Homo sapiens
actcggcttggttatttcttgcctgaggcagggaacagggaatgcagggaagccaggcagcagcaggaggctccaaacgctggtgtcagcaagccagaacccccacctgacttcactcct

SEQ ID NO: 1211 - DNA, 120 bp, Homo sapiens
agtcgcctgtcactgggaggtccttggggcctggacctgcctgacctgtggccccagaaggggctaagcccagagtcacatgggatggagcctggaatgcataggccaagtgggttgtgc

SEQ ID NO: 1212 - DNA, 120 bp, Homo sapiens
ccccgacccacattctggagggatggtcgtacctctgtgaccagccctccacaccgtcacataggccagcagggggcaatgccaggtgccatccagagcccacccccatgtcctcccgga

SEQ ID NO: 1213 - DNA, 120 bp, Homo sapiens
ctacgtaccccagccccacaatgggaaggaggcatggagctggcagagcatgcgccacgccgtccctgtgtgtgtttctgaggaactcctgttcactctgaggccactgcctaggtgccc

SEQ ID NO: 1214 - DNA, 120 bp, Homo sapiens
gcccgtccctggtctgctgctgctggctctgatgaagctaaccagccttcttccccaccaagagggtgtcccagcagcagctatggctatgttccggcggggggaaggcggggagccttc

SEQ ID NO: 1215 - DNA, 120 bp, Homo sapiens
gggcgggcccaagcccagccaatccccaggcaatgcagggcagggatcccacctggtgtaagtacgggcagagggcagagccaggctgtatcgaggggcggcgctgggaccctcctcgcc

SEQ ID NO: 1216 - DNA, 120 bp, Homo sapiens
ccccggttcactgagggtggcccacagtaagtcgccgtctggcagtaagttagctctgcaggtgtggaccccaagaccacacacagcctttctcaggtgcaggtcctgccaagcctcact

SEQ ID NO: 1217 - DNA, 120 bp, Homo sapiens
ccccgtagggctggaccctacagaaaaccacacccctctcttgccctgctccttagttacctccacctttaccttcccctttgcagcaaattgacctgaaagagaagttggtgttcacag

SEQ ID NO: 1218 - DNA, 120 bp, Homo sapiens
ctgcgtgctctctgctcactctccaaactccagcccctggccccagcgccgctggccctcggtgagtcgcagtggcccaccctgctgcacccaggctccctcccccgcctgtgtgtgcac

SEQ ID NO: 1219 - DNA, 120 bp, Homo sapiens
gcacgccctctctggcttccagaagcccctctcctggtttgtcctccggcccccacccctagcaccccctgtgccccttcctagtctcctttgcagattccaaacctcttcaagttggag

SEQ ID NO: 1220 - DNA, 120 bp, Homo sapiens
atgcgattcccacatagttctcttcatccagtgcagcctctgcccactgcatctcctctgacacgtcccattcccccaagggcgctagataaaggggcacctgcggacacacacgctgag

SEQ ID NO: 1221 - DNA, 120 bp, Homo sapiens
caccgcgcctggccaggactgttttttaaacatgaagaagtagccagtgggtccctaactggtgggaaacatgttgaggagggagttattccacgagcaacacccacgttgctggggctt

SEQ ID NO: 1222 - DNA, 120 bp, Homo sapiens
cctcgcagctctcacttctcccagcctctttaacagtgtaaatatttctgttctgggtgtgtctttccctttgccagataacagagggtcctggcagtgatgccccagtgctggcagggt

SEQ ID NO: 1223 - DNA, 120 bp, Homo sapiens
atgcgtggaaccgggagggtttggagggtttcgggcctaggaggaacctgccacccacaccgagtctgctcctcttcccatgtgaacttgtgttctgtttactttagcgttgtttcattg

SEQ ID NO: 1224 - DNA, 120 bp, Homo sapiens
gcacgtatgggctctgccgtgttgaactcggagcatctccctgctccctgctggtcaaggtgtagcctcagaaccactccgaattggccagaacggttgtggttagtggcccagttagga

SEQ ID NO: 1225 - DNA, 120 bp, Homo sapiens
ctacgacgtgatggtgacactgcaatgcccgagagcctctggtagcctgcaggagcttcacggccgatgtgtgcggcattgttcctgcttgtcggtcatcatgcctgagaagcccattga

SEQ ID NO: 1226 - DNA, 120 bp, Homo sapiens
ttccggctctagtgttcactgttgctgatgaaggcttcacgtggcatttacagagccctcgtagatgccatccccgtctctctgttcatctttttctttgttactggattcagagtgaag

SEQ ID NO: 1227 - DNA, 120 bp, Homo sapiens
actcgctctcgaatcgcgcggacgctgggcctgcgcaggcctgttcacagcagctgcatcccgtcagtgttgaagccagtggagccctctttggggctgctgagagcggatattggagct

SEQ ID NO: 1228 - DNA, 120 bp, Homo sapiens
cttcgacaggtgagtgaactggtgatggtcctgcctgggcacccgctcctctccctgggggctgtgggcacggggccccgaggtgcatgcggaggcgttaggttttgtgtttgagagtga

SEQ ID NO: 1229 - DNA, 120 bp, Homo sapiens
caccgccatacggtgcaggtgggtggcgtggaactcagaggtctggttcggggcccgaatcacacgtgccgccacatggccagtgctcggccatcctcctccgtgccgtctccctgggct

SEQ ID NO: 1230 - DNA, 120 bp, Homo sapiens
agacgggctctgtcccggtcagccctgcagtcccaccagcccgtggccaggcccgtctccgtggggctttccaggtgtgtgagggcagaggcttctggggaggtgggggcagcagttggg

SEQ ID NO: 1231 - DNA, 120 bp, Homo sapiens
catcggatgggagttctagggtggggccgtgatagcctggctctctgtggccctgggtggcgtcagcacctcccctcagctgtcatgctcatcagtcggcccttggcgtgaggcagtgct

SEQ ID NO: 1232 - DNA, 120 bp, Homo sapiens
ccacggcctgcctgtgagcgtggactgggagttgctgcagctccacgaggtggcccctctgccccccaccccggcctgagagccaccagcacagggacaccgcctcgggcaggagcagtg

SEQ ID NO: 1233 - DNA, 120 bp, Homo sapiens
tttcgccacaagaacaaaaaattaaccaaaaccaacaaaacaggtaaaggtgcttgtctgccccctcccacctgttggtggagttgggggtggcaaaggcaccagaggtgacttctccca

SEQ ID NO: 1234 - DNA, 120 bp, Homo sapiens
aaacgcctggtttccctggggccagagctgcgaggtggggctccctccctccctccctctgggaggccccggtgagcacctcttagaacagcagccggagccagggctgtgggggaggcg

SEQ ID NO: 1235 - DNA, 120 bp, Homo sapiens
gcccggcccagccccactctccctggctcccgcctgctgcggggctctgcctgggtgcgggccctcaggccgtgggaggcagtgacggcagggccttgggtctgtgcccacaggaggcgc

SEQ ID NO: 1236 - DNA, 120 bp, Homo sapiens
tgccgcggtgccagagccagacttggaggaggagccagtgcctgacctgctgggcagcatcctgtcgggccagagcctcctgatgctgggcagcagtgatgtcatcatccaccgcgacgg

SEQ ID NO: 1237 - DNA, 120 bp, Homo sapiens
cagcgccaagagggcgggtgagtgccttccctgccacggccccttcctctgtgggctgctggtcctcaggctgttcgcaagcactcagcccatgtctcagtcacggaagatgtagctgaa

SEQ ID NO: 1238 - DNA, 120 bp, Homo sapiens
ctccgagttcttacccagccccacagcttcatgttcataagaacatgtcctgatggggtactgcccccgcccctggttaatatcgtgtcctgatggcctcaggcactgtactttgtcatc

SEQ ID NO: 1239 - DNA, 120 bp, Homo sapiens
ctccgggtgtggaaaggcgaggtgtccacctcaacaggcagacaggagtttaaagcgcacgacctcacagaaaaccagttgtgataaaaattaaaccactgacatttaagaagagtgggt

SEQ ID NO: 1240 - DNA, 120 bp, Homo sapiens
ccccgtgaaggtggccaacctggtgaaggcgtacgtggacaagtacaggcacatgcgcaggcacaagaaaccagaggccggggaggagccgcccacgcagggggccgagggctgaggcca

SEQ ID NO: 1241 - DNA, 120 bp, Homo sapiens
tcacgggctatgcccggggagctgtcgggagtggcgggaatcggggccatgcccggggagctgtcgggagtggcgggaatcggggccatgcccggggagctgtcgggagtggcgggaaat

SEQ ID NO: 1242 - DNA, 120 bp, Homo sapiens
tgccgtcgggttcctgcgctgacacctggtctgtgcacctgtgttgctcacagttgaaaactggacacttttgtatgtatattatagagacactgtttccattctaatttatcaaaaatg

SEQ ID NO: 1243 - DNA, 120 bp, Homo sapiens
tggcgcgtccttgataaatctctaggtggcctcccgccaacagctgctgtgtacctttggctctgaattaggaatatctttactttctcttttccaattatgttgtgctcttgtaaataa

SEQ ID NO: 1244 - DNA, 120 bp, Homo sapiens
gctcgagtttgcactcaacaccgttgcctcctggaggcagggtgcagcagtggcagcctgagggctggcgacaggtgtcctgcatggggaaatgctgtccctgcccttggcacagctggt

SEQ ID NO: 1245 - DNA, 120 bp, Homo sapiens
tggcggccactggcctgtcaagggtcttgttctttgagtcaaagcttggctgtgatgtgtgtggtgaagacagaagtgagttggtgtgcagggaggccgtggaggtcccctccctccctg

SEQ ID NO: 1246 - DNA, 120 bp, Homo sapiens
acccgtgttcagcctggacccaattccccaccagccaagatgccagtacgtgttctggagttctttttattagactgggcggccgcggccagctctaggtgggctgctccagctttctgg

SEQ ID NO: 1247 - DNA, 120 bp, Homo sapiens
aggcgggctgctccagctccataaggaagcactcgatgtcgtcatagaggctgttggcgctggacaggcagaggctgaggctgctgctatccagggaagacacaccctcacgctgcgtgc

SEQ ID NO: 1248 - DNA, 120 bp, Homo sapiens
actcggcacagccagggttccagctgccaggagggatcgggcgtctgtcagtgacccggcgtgtgtcctcccctccccctccccaggctctgagggcgtcgggcgtctgtcagtgacccg

SEQ ID NO: 1249 - DNA, 120 bp, Homo sapiens
ctccgaggctctgagggcatcaggcgtctgtcagtgggcctgagcacatggcctcccctccttgaggctctggtctcaccttcaccaggaccaggctcttctccttgggcctcccagctg

SEQ ID NO: 1250 - DNA, 120 bp, Homo sapiens
gtacggtattgaccctttggccacaggagaacgtgcccagtttttcttaaagaccacgtgggaactcagcagcccatgattgtaggttcctttttccctcatagagtggccttcaagggc

SEQ ID NO: 1251 - DNA, 120 bp, Homo sapiens
ctgcgtttcagagacccaaagggacacaggcatttctgctcctgggaatttgcggactttgaatcttgagctcagattttggtctctgttggttgcttgtttatcttcatctcttgtcat

SEQ ID NO: 1252 - DNA, 120 bp, Homo sapiens
tcccgtccatcttaggtttttcatttccttgttccactctccctaacctgtttctgtgccctgtttatggcatggctcaggatatgaattttgatctccgtctgagatctccttcaggta

SEQ ID NO: 1253 - DNA, 120 bp, Homo sapiens
gcacgaagtcaaaattctgttcatagtaacgttaacacagtgttgctttttcactctcattccctcaccagtatacagtggcattttccagaggctaaatgatgtgtggtaacatcacat

SEQ ID NO: 1254 - DNA, 120 bp, Homo sapiens
cagcggaatttagagtcacaaatggcctcctctgcctccagttgtttcttttgtccttggtggccattggtaaatgtggccgaaatggtgtggatggagtgggagcagctttctgggctc

SEQ ID NO: 1255 - DNA, 120 bp, Homo sapiens
ctacgcaagagctatgggagacctttttaagaaaccctctttaaccccagcttctgattcacatctttatcttttcccatcttccggaatttcaagaacccctttagaaaaaccaaagcc

SEQ ID NO: 1256 - DNA, 120 bp, Homo sapiens
ccccgagtcctaaaattgataaccagcaattaagtaccttaaagtgtagggcatgatggatttctaggtttgactatcctgctttgtggcacccatgaaatgttgggattctagaactct

SEQ ID NO: 1257 - DNA, 120 bp, Homo sapiens
aaccgtctgtgtgccacttgcacacacacaggcacagagctacttgcttgtagccttgactgccagcagccctgaacaccgtagctggtggtgccaggccttgtgtgtgtttaggacttg

SEQ ID NO: 1258 - DNA, 120 bp, Homo sapiens
catcgctggtgtaatttatgccactacttcctgtttgcatttgctcagtctctcctttggtttgcttctctctgctgaagccggtccccatagctgtgcacatggctagctatggggact

SEQ ID NO: 1259 - DNA, 120 bp, Homo sapiens
cttcgcctcccagagtgctgggattacaggcagtcgccattgtatccagcccagttatgtagttatgtgccatttctaaactactttagaacccatctctttggtgtttgtttgtttgag

SEQ ID NO: 1260 - DNA, 120 bp, Homo sapiens
tcccgtaccccatctccaacacatttttatctctcaacagaggtagctgctattcactcaggtgttctttaatgctgtggccacggcttccttggagagtgtggcagtgctttccttgct

SEQ ID NO: 1261 - DNA, 120 bp, Homo sapiens
taccgacatctcatgctggcagagaggtgtggttgctaattgattagatgacagtccttttcattgatgtggcactgttggggtggttttgttgtgctttttcaagtaaacagatagatt

SEQ ID NO: 1262 - DNA, 120 bp, Homo sapiens
gtgcgttcctgttctgtttggtagcaccacattcctctatttcgtttggttttcattccctctttctctcttgtaatggttggaccctattctgaaatatatattttaagatagtgttac

SEQ ID NO: 1263 - DNA, 120 bp, Homo sapiens
agccgatagggcaggctgccaaatacagactgttaaaaccaatctcttaatgacaaaatgtcaaacactgatgttaaaccttcattatgactgtggtgtgaggatttttctcaataagaa

SEQ ID NO: 1264 - DNA, 120 bp, Homo sapiens
ttccgagaggcttgtgtagctaatccactatctactgtacaggaaagattttaaataaacctattcccattcatcctcatctgtgtttttttgttttttgttttaatttcaagaagtaat

SEQ ID NO: 1265 - DNA, 120 bp, Homo sapiens
aaccgtctcactagcttttcccatttaagataggagaactagattcagaattgtgtctttttcctaacagaagactggggccttaatctttaccccccaggctctgattaactgactttt

SEQ ID NO: 1266 - DNA, 120 bp, Homo sapiens
atccgcctgcctcagcctcctgaagtgctgggataccaggtgtgagctaccacagttggccaaggtatagttttatgagctgagctatagaactggttgaatgggaattagggaaaacag

SEQ ID NO: 1267 - DNA, 120 bp, Homo sapiens
aagcgcttctcatgtcacctttgtttgtgtactgggcctgtctcaagtttccagagggagatgaaagacaagaaaagctaaatgactggttcttcagtgagtttcccagagtggcttctt

SEQ ID NO: 1268 - DNA, 120 bp, Homo sapiens
tgacgccgtgggcaggcatccgcattcatggaaagccaggtcctagctggaagtgacacagggatcttcagatctctcttagcccactgttcctctgaaaaaaaaacaaaagccatagac

SEQ ID NO: 1269 - DNA, 120 bp, Homo sapiens
gttcgtggatttgggtcccacactggattgtgtgatttgtgcttatctcctactagattgttaccttctttgaaggctggactgtatcttatccttctctgtatcacttcggacacccag

SEQ ID NO: 1270 - DNA, 120 bp, Homo sapiens
actcggagaggaaaccacagggaggatgcactgctgaggaaatcgtctggcttcctggagtggggaccagagccagagagccaagccctcctggctttgctgagttctgtccttgcccct

SEQ ID NO: 1271 - DNA, 120 bp, Homo sapiens
caacgtgtctgcctgcgttgttgctcctggttacagtgggctcagtcttgcctcttttttgatgggtgggcagaggaacactagtgttgggaatattgtccagcgttggagagatcatgt

SEQ ID NO: 1272 - DNA, 120 bp, Homo sapiens
gcacgggaagaactgatttcacaccagctcagcgcctgatgatggtgaggacccagattttcctttgagcatctcagagcagatcagtcgcttttcctgattgacccatgaactgtgaga

SEQ ID NO: 1273 - DNA, 120 bp, Homo sapiens
ttccgaggccactgtgagtgagggaagagtgagaaggatgaccattttcttcttccttgattctggtctttgtgatgtgtggtatgaaagtgtcatctgacttttgaatctccttttatt

SEQ ID NO: 1274 - DNA, 120 bp, Homo sapiens
gctcgcggcaggcaggcaggcagctccccacctggaagcctgcagactcgccgagctgagagaatcatgctgcaggtgggggcaagtgctaggaactaggtgtgccacttaccttaacag

SEQ ID NO: 1275 - DNA, 120 bp, Homo sapiens
gtccgggctgctcaaactaaggctgcagagccctggggcctgttggaaatagactgtgcctttccctgcgccttgtggccacatttttatggtatgtggagagtctgggaggggccggga

SEQ ID NO: 1276 - DNA, 120 bp, Homo sapiens
ccacgcccggccagattttctcatttaatcttcactctaattctgtgaaatgggtacagctagtatctttatgtcccaaatgaggaaacagatttggagaagttatgtcactttgctcat

SEQ ID NO: 1277 - DNA, 120 bp, Homo sapiens
tcccgccctcactcacccctaacacgggcctctccgctgcttttgtttcctagcctaaccatgccagggtcccgggcctccacggcttctgcttctgccgcagtctctgcggcccggccc

SEQ ID NO: 1278 - DNA, 120 bp, Homo sapiens
ccccgccagcaccagaaatccatgtcggcctccgtgcaccccaacaaggcctctgggctgccccccacggagagtaactgtgaggtgccgcggcccaggcaagtgtgctggggcagctgg

SEQ ID NO: 1279 - DNA, 120 bp, Homo sapiens
ctgcggccaggaagtggagggaacaaaaaagagcattaatgcccctcttttccagttctccctctcagaacaggtatgcaggaagctgtcctaaggctccaaagggaaacctttttgttc

SEQ ID NO: 1280 - DNA, 120 bp, Homo sapiens
ccccggggatagtcggcatcacagggactcaatcctcaagggttggtccccattgccgccttgagggtccagtctgcccggctcccagggagcccgctgtctccagcctaaaccacactc

SEQ ID NO: 1281 - DNA, 120 bp, Homo sapiens
ccacgagacttccttctcaccactgtcctcagtagtcacacccttccttctgtgtcctcgtgatggctgcctctgccctagcatccccctccctgtccccaccacagggtgtccaggtgc

SEQ ID NO: 1282 - DNA, 120 bp, Homo sapiens
attcgtccccctcaaccccacttctcttcccacagcacagccccccagcgtgtccctgttgcctccccatccgcccacaacatcagcagcagtggtggagccccagaccgaactaacttc

SEQ ID NO: 1283 - DNA, 120 bp, Homo sapiens
ccccggggtgtgtccagccgaagcaccttccatgctgggcagctccgacaggtgcgggaccagcagaatttgccctacggtgtgaccccagcctctccctctggccacagccagggccgg

SEQ ID NO: 1284 - DNA, 120 bp, Homo sapiens
cggcggggggcctctgggagcatcttcagcaagttcacctccaagtttgtacgcaggtaagcaaggagctttgggtggcagagaggctcaggccaggccttcctgctttactcggggtgg

SEQ ID NO: 1285 - DNA, 120 bp, Homo sapiens
taccggtattgggtcctggggttagaagaggcttcaggaagcacaagaaattaggtctttgtcaacaccttatgtgcccaggcccacccctcttaggcctctccccaactcctcacaggc

SEQ ID NO: 1286 - DNA, 120 bp, Homo sapiens
ggccgatgccgcctcctctctaggagagtgtgaactcagatgctaaaataaaagcccccccttctctcctgggttcccatggaaacttatatttggtgacgcagctgcaaagtcatgagg

SEQ ID NO: 1287 - DNA, 120 bp, Homo sapiens
aggcgcagccatgcccttctgcccgggggttttagggtgaaacctataaatgaaatcactggcgagggcctacagtggcctcttccctaacctaactccgatgtgccaaaggtttcctgt

SEQ ID NO: 1288 - DNA, 120 bp, Homo sapiens
tcacggggtttctcacacctgagcccccagccaccacagaggtgcagcttgaagtgcatccagccaactggctggcctcctgggatgctccgcatccccatcctgccattcctctccctg

SEQ ID NO: 1289 - DNA, 120 bp, Homo sapiens
gctcgcctgcccttcctctacgtttcactccactctgctggaggagccaaagccactgccccatccgagccccagaatgcaagtgtgaggcctgcagagagtgtgggcaggtctgaaagc

SEQ ID NO: 1290 - DNA, 120 bp, Homo sapiens
tctcgctgagcggctcttccgaaaatgggatgacccttgaacctgtaaagccacctcccccacctgcttatccacataccgtcttgttggttttttttttatttctttttttattttgtc

SEQ ID NO: 1291 - DNA, 120 bp, Homo sapiens
aggcgttgagcccgctgtgtgtgtgtgtgtgtgtgtgtgtctgtgtcctgtgtcctgcctccatcactaactccccttttctggctcttactctcctccatctgcttaaccaagtctgtg

SEQ ID NO: 1292 - DNA, 120 bp, Homo sapiens
ctccgtgcccccagtacaaacaggcagggctaagaggccacattggcccactcagggcaaatggctttaaaaatgagggccttccttgggcccacagttaacgcctgtcctcaagtaagg

SEQ ID NO: 1293 - DNA, 120 bp, Homo sapiens
atccgccggcctcagtcccccggaatgcctggattacaggcgtgagccagcgcacccagcctgcagaccagtttttaagagaaggcccaaaaagaacaccacattactcagagtcccaga

SEQ ID NO: 1294 - DNA, 120 bp, Homo sapiens
gctcggcccctgaaccatctcgcttacacctcagctccccctagacttcagttcccaggtgccgaatgccacctttgcatagcccgttcatttcccagggccccacctggcgcttgaggg

SEQ ID NO: 1295 - DNA, 120 bp, Homo sapiens
cctcggagcgtgaggttggcaaggtccgggcttcctgacactgccgtgaggccttcagggctcaggtacatgcccttgggtgggcgacgccgggttcgcaagggatggtggcggtactga

SEQ ID NO: 1296 - DNA, 120 bp, Homo sapiens
gggcgtgcattcaggggccgagagggtagaggctgccagtgaaaggagaggcaggtaggtggtgcagagccagagagaggcaagaggacaggcaggcagggcccagaggctctgggagct

SEQ ID NO: 1297 - DNA, 120 bp, Homo sapiens
gatcgggctctccctcactcacgcctcctcgaccctcttcgagctcatcactgctgacacaggggccagggagggaatgaggcagctgccaggagctctacctacccccatgcccagtgc

SEQ ID NO: 1298 - DNA, 120 bp, Homo sapiens
caacgccagaagctggggaccactcaagactctgggccccaggtaagctcttcagaaaggaggggcagaggagcgccggggagtgggggtggaagggctttaccatctgctggatccgct

SEQ ID NO: 1299 - DNA, 120 bp, Homo sapiens
ccccggcaccgttccaccccattcccaagtccctgggggccaaggctcacctgctcaatgttgtagccatgcttctccttggccatcgcaatgtacttgtcaactgcaggggcagcaggg

SEQ ID NO: 1300 - DNA, 120 bp, Homo sapiens
caacggccaggtccctgaacacgagccccagggcaagggttggacccacgaacacctcagcttccagcccccttctgagaagagctagcttggagctgggatgaacccaagcccccacct

SEQ ID NO: 1301 - DNA, 120 bp, Homo sapiens
tggcgggcgggggaggtggccggcctggagttctccttcctgaccacccagggcccccaccttccaggaggctcacttttccctcattgtaccccagttacctgcagccacagaagggac

SEQ ID NO: 1302 - DNA, 120 bp, Homo sapiens
ttccgggggaggggagcggggttggagggcagcccctagacctggaccacagccctgcaaggaacccaaggctccttcccaccacaggagcctcacagctctgtgtggaggtgtctctcc

SEQ ID NO: 1303 - DNA, 120 bp, Homo sapiens
ccacgtcccggctgggccccagaccccagcttcctgccctccaccgggagtctgcatggttgggagtcctgggtggaggggcctttgtgaggctggacccggctcagggcaggtggagga

SEQ ID NO: 1304 - DNA, 120 bp, Homo sapiens
gcccgggcagtgccatcctggtgggggagggcagccttcaaacgtgtggggtctacagtcctcaggtctaggcagggctgccggttctccacctccccatccgccccaggccccctgcct

SEQ ID NO: 1305 - DNA, 120 bp, Homo sapiens
ccacggtgtctctgcattgcctgcctttttgccttcacctcttttcttccccgccccctgcacattcggggtctcagcccccaggctgtgagctccttgggggcaggccctcaataaatg

SEQ ID NO: 1306 - DNA, 120 bp, Homo sapiens
tgccgcctctgccgtccgcctgtgcctctgcccgcctggctcaccgagagctcttgccagcccctttcagtgaaagcatctggccaggggctccatccaacacctgggccgccttccttc

SEQ ID NO: 1307 - DNA, 120 bp, Homo sapiens
caacgagatctttattaggctcctcgggggcggggcgcggagggaaagaaggggtggccaggcccaggccaggctgcaggctttggcgacctctcagagctgggagcggggtcccgaagg

SEQ ID NO: 1308 - DNA, 120 bp, Homo sapiens
aggcgggtctgagggcagagcagagtcagaggtgtctatgggcgtccccgacctcccaggctgccccgtggtttcccgccctgcttgggggtgagcgggggttagtgggcgggttagtct

SEQ ID NO: 1309 - DNA, 120 bp, Homo sapiens
ggccggggccgccgcacggggcgaggccctgcttaccagtcccggtcagggtgggctgcgggagcctcaggctggaaggcagaggacagtgagagcccgcccccagggtggaccggggca

SEQ ID NO: 1310 - DNA, 120 bp, Homo sapiens
gggcgggccgtggggcggcgcggggcacgtacccacggggaagtagtgggggagccggctccggtagatgtcctcgtccttctcgaggaacacgcagatgatcagccggtccacctgcgc

SEQ ID NO: 1311 - DNA, 120 bp, Homo sapiens
ggccgagctgccacgcctggccccaggatcctgtgactgcctgccctggtgcaggctttcacctgcctggccctgcgcccttcacggaggctcacggctgtgtgccatcacccccatctc

SEQ ID NO: 1312 - DNA, 120 bp, Homo sapiens
ggccgcacccctgatgtcccagtgacacacgggcgccctgtctgcgccccacagctgggggcgcgtcggggactcacacttggccgggagccgatagccgccggtgatcttggccttgcc

SEQ ID NO: 1313 - DNA, 120 bp, Homo sapiens
gtccggcactcgtcggtaagcagggggccggcggcccgatgaatgcagccgtccactgcgggaagggcgggcgcgactgagctggcctggcaaggctgcggccccggggtgagcaccctc

SEQ ID NO: 1314 - DNA, 120 bp, Homo sapiens
tcccgagaagcccctcggcgatgcgaggacccatgcggagccgcgccccaaccccgtggcctccggccgcggccgctgcccccacccccgcccggaatgtttcacatctggggaaaccga

SEQ ID NO: 1315 - DNA, 120 bp, Homo sapiens
aggcgcagagcgggacggccctgggcctggcgggaagtcgcgcaaggaggccggcagggggcgcacccggcccaccctgtcccttccaggccgcgccgccagggcccaggcagggcggct

SEQ ID NO: 1316 - DNA, 120 bp, Homo sapiens
ctccgggaggcgggggccgccgggacaggaaccgccgcccgagccggggtgacggggaagcttcctccccgacgcccctccctagccctgtcccgggcgcgctgcagggcccgcgaccag

SEQ ID NO: 1317 - DNA, 120 bp, Homo sapiens
agtcgctgcctccgcccgggcctcagcgtcggtgcgatcccaaggcccacctccccaggcggcgccccatcacggggcggcggcaaaccctaggacccattttgcggatgaggaaaccga

SEQ ID NO: 1318 - DNA, 120 bp, Homo sapiens
agccgcgcggggaggtgagcccgacgcccgggcccgagtctcctggcgcgcaaaccccagctggttaatgaaccgcctcgttagcgcatccagcttaattacggccccgcatgggcttgt

SEQ ID NO: 1319 - DNA, 120 bp, Homo sapiens
atccgagggcggctgcagggcctcgcgagcgaccctggggacccgggcgcagataaacaaccggggcgcagcgggaggcatggaggaaacgctccagcagcccaacctcgccagggcacc

SEQ ID NO: 1320 - DNA, 120 bp, Homo sapiens
caccgcgcaggagaggcgcggcctcaggcaggcctgggtccagcccgggctcacccctcatcggctgtgagatcctgccccttcccctctctggcgtccaccctcttatctggaataccg

SEQ ID NO: 1321 - DNA, 120 bp, Homo sapiens
cagcgaccctcccacagaggaaaacgccgcgtgctggccgggaggacagggcccatctttggcagctctgatcgcccacgccaggagctcctcaggcaccagctgcctggtgctcacagg

SEQ ID NO: 1322 - DNA, 120 bp, Homo sapiens
aggcgggcatcaagagaggaccatcattccccattttacagatggacaaaccaaggccaccttctccttcatcacctcagtctcggcacagttccagggatgccaggtagctcacacccc

SEQ ID NO: 1323 - DNA, 120 bp, Homo sapiens
tctcgtgccctgggggcacaattaaacctcattctgcaactttactcagagctggcaccaggcaatttcccagagcgtcccagggatgggtgggcagagaggttaggggaacgctgagaa

SEQ ID NO: 1324 - DNA, 120 bp, Homo sapiens
gaacggctcaggcctggatcccttccacctgctcctctcctctgcagggagaaaggcagctgtagcccagggcgaggctgagatggagcaagaaggcagggcccagagcgggcgtccagg

SEQ ID NO: 1325 - DNA, 120 bp, Homo sapiens
ttccgaatggggtgccgtggctgggctgtggagctgggcaacgtgagttcacatcctggctctgccagccacagatgtgtgacccctcacatatcatttaacctctctgggtctcagttg

SEQ ID NO: 1326 - DNA, 120 bp, Homo sapiens
gttcgggtatgtgtacatcagtgtgatgggaggtgggtgcacacagggtgttcacagtgtgtgggggtgagcccagggatctgtctgagctggctctcctaggagcctcccgggtcgagc

SEQ ID NO: 1327 - DNA, 120 bp, Homo sapiens
caccggctgctcgaagtctctgggggctcaccgccctgcaggcgacctcggccagctgtgggggcccgtgcggggaagtggagctcagtgtttcaggaatttaatgtttcctgcggaagt

SEQ ID NO: 1328 - DNA, 120 bp, Homo sapiens
gggcgcaagggaggtggagggagctggaatcaatgctggcagagggctcaggccagatgccccctcctcacccccagcagttccagaacagggcctgggccaggtgatggctctgcaggg

SEQ ID NO: 1329 - DNA, 120 bp, Homo sapiens
ctgcgtgtccctccctgtccacacaccagccttctcgctctctcccctgagagtgcagaggggaacccccccaccctgctctccttagccataggcccaaaggacccctcccacacacac

SEQ ID NO: 1330 - DNA, 120 bp, Homo sapiens
tggcgggacccccctgagatgtttctccatcaggtcaaagatgaagccttcctccacctgtggccagaagatggcccctaaggcccctctgcctcctccctgcagccccttcttccctcc

SEQ ID NO: 1331 - DNA, 120 bp, Homo sapiens
ctgcgtggtgatttacagccgctgtcttattatttttcctgtttatagaagaagaaactgaggcacagagagcaaaacttgcccacacggctggaaggttgggctcccaacctcagtggc

SEQ ID NO: 1332 - DNA, 120 bp, Homo sapiens
cctcgccctgaaccactctggctgactggtttgaatggccccctgtccacgctcttggggaggcagtgtctccccacatcagcacgtccccttccagcaggggggctgccctggtggcct

SEQ ID NO: 1333 - DNA, 120 bp, Homo sapiens
ggacggtttggctgcccccagcgctgacggctccctccatccagcgggacttcccgtctccttcgtgggctctcgttcctcaggccgctcctcaaatgccactggggctctgcctgccct

SEQ ID NO: 1334 - DNA, 120 bp, Homo sapiens
cctcgcctgagcccggaggaacctctttctgccccaagccctggcctctgagcggcccttgaccctccgccccatcttaggcatctccctgctttgctgtggtaaagccctgccttccag

SEQ ID NO: 1335 - DNA, 120 bp, Homo sapiens
ccacggccagcattcagcccagcatctgtgcgcctcccatggaaggatgttgtggaaggaaggagggctgggctgagtgattgcccatggccctgggcattcctggggcagtggagggca

SEQ ID NO: 1336 - DNA, 120 bp, Homo sapiens
aggcggaaggcaggcaggctccggtggggccatccgccaaggcgcttaggatgagttggccgctatttagggtgctgtaatatgcatgaagggaagattagatatttaaatttattcagc

SEQ ID NO: 1337 - DNA, 120 bp, Homo sapiens
taccgagggcagggcaccccaacccgcaggcctggacctgctcctggtctctctctgctcccccattccccctaccatcccgtggggctggcccacgctgtgccctctttgggatttctc

SEQ ID NO: 1338 - DNA, 120 bp, Homo sapiens
gttcgagaccagcctggacaacatagtaagaccccatctcaaagaaaagaaaaaagagtggtggggagcactgagatatgctggaaggtgtcaagggggatgggagactgagggccaggg

SEQ ID NO: 1339 - DNA, 120 bp, Homo sapiens
cttcgtgcctcattttccccatgtgggagaatagccccacctcaccagctggtgtgaaggtcaatggagaggggtcctcaactctgagccccgctgcaggaagacctgggtccccgcccc

SEQ ID NO: 1340 - DNA, 120 bp, Homo sapiens
tgacggctttgtggctgccaccttcctgcgcacagccctgtctgtctcagtctgtccgatcggctgcccctcgccaccatgcagctgacacgggggcaaagtgaggctggcagcccctct

SEQ ID NO: 1341 - DNA, 120 bp, Homo sapiens
ccccgatccgcagcctgcgtccgtggtaactgccagagctcatcagggaaagcagcgggtgaggccaggcaggtgccgcccaggcccagatgctgcccaggtgggaggccagctgcgccc

SEQ ID NO: 1342 - DNA, 120 bp, Homo sapiens
gcccgcccctctgccgaggagtcctggctcccagacagggccttcagctctgcacacagctttgctacccaccccatctgcccagaccattgcagccctttctgtagaaaggatgagggg

SEQ ID NO: 1343 - DNA, 120 bp, Homo sapiens
tgccgtgaggacggcatggacgctgctaagtggtgtcgggcggctccgagtggctggtctcccagagctgacagctcttcgcttggggaataattaattccaccgcccaaaaacccaggg

SEQ ID NO: 1344 - DNA, 120 bp, Homo sapiens
ttgcgagattaatacaagcagctaattaagatggagaggcgaggagcggctgggcgctcccaaagcaggggtgggggccgcgggaagtgagggggaggtgagctgagtggtgccagcgag

SEQ ID NO: 1345 - DNA, 120 bp, Homo sapiens
agccgaagccggagctggagctggagggagagcaggacacggaccacaatggggtgcccaggctggcccaggacaggctgcagaggggcgggccccccagtgactctgggtggggcctgt

SEQ ID NO: 1346 - DNA, 120 bp, Homo sapiens
agacggggtgctgggcacagatgggcccatttattatcataacaaagccacaagggaggtgcgatggttcccattttacagagaaggagactgaggcttagggagcttcagtcatggggt

SEQ ID NO: 1347 - DNA, 120 bp, Homo sapiens
ccacgaagccagctgaccccagggacactgtctgagggtcggtcagagggactgcctttccctggccaggggtggggcttgccttctcgaaaccaggcagagtaccccgcaagccccaga

SEQ ID NO: 1348 - DNA, 120 bp, Homo sapiens
aggcgagggctgggcatctgggcagtgccaccccagagccagcgagggaggagggggcatctcaggtctcggtccagctccaggccccttggcctgggcagtcctggcagcggtcggcag

SEQ ID NO: 1349 - DNA, 120 bp, Homo sapiens
cctcgggacccccccacctccccccatcacctctctctcttaattaacaccggccacaaatgagctggctcctgctcaaagagggcactgtgccaaataggttggcagcgagcctcgaag

SEQ ID NO: 1350 - DNA, 120 bp, Homo sapiens
tggcgcccccaaactccactgtgtgtggcctgcactgcacccggcaaggtgagtggggtgaactgacctgacgccaacccggccagagcctgaggagggggtgagctgggggcagaggga

SEQ ID NO: 1351 - DNA, 120 bp, Homo sapiens
ggccggcagagggggtcccagccagactgtgggcggtctgagggtggatcaggagcactggggccctggtgggggctctgggcaggcttgggactcagagcagccactgacaaggtgatg

SEQ ID NO: 1352 - DNA, 120 bp, Homo sapiens
cagcgaatgccaagagcacggggactttcaggctaagaggaggctgtctggtctaaacactccctcaccccacccggatgccacccacaggcatgaacatcttcccagtctctaataggt

SEQ ID NO: 1353 - DNA, 120 bp, Homo sapiens
taacggtcccatttcacaatccaggacactgaggctgggagaggttcagcaacttggccaaggtcacagtcagctggggatgggagggggcgctggcatgggaccctggcactgccccct

SEQ ID NO: 1354 - DNA, 120 bp, Homo sapiens
gagcgcccgggtgtttacagcacgcggcggatgagagggtctgcccagggaaggggcgccaggcaggaaggaaggggttactttggcatgcagagtaggcggtgggtacctgtttgtgaa

SEQ ID NO: 1355 - DNA, 120 bp, Homo sapiens
gcacgggtggacggatgaatgaatgaatgaatgaatggatggctggagggatggttgaatgagtgggtgcggagaggagggtgctggggaggcggcgcgtgagctagaacccctttctcc

SEQ ID NO: 1356 - DNA, 120 bp, Homo sapiens
ccccgcctccacggtggaggttggctttgggagcctccctcccccaactccccagaggggtcggctcccccacccgcccttcccccagccagtttagccgagggcgggggaggggggcgc

SEQ ID NO: 1357 - DNA, 120 bp, Homo sapiens
gggcgcacgctcagagaaatgtggagtggaggtaaggagggagaagaaggcacttccatctggaggtacagctgggtctggggaccacttggaccccaggaaggagccacagggagccag

SEQ ID NO: 1358 - DNA, 120 bp, Homo sapiens
agtcgtaaatgagggaggcagggttgtatcacaggaagggacaaactgacctgagatcaggcctcagctgtgttattcacttgagaccttgaacaagttgctttccctctctgagcctgg

SEQ ID NO: 1359 - DNA, 120 bp, Homo sapiens
ggacgttacaacagcactgtggtcctgggacctgtcccagctgtgaccctcatacagggattggcagagtgccagcaagggctcaggacaagccctgcctggtacgtggggttcagtgaa

SEQ ID NO: 1360 - DNA, 120 bp, Homo sapiens
ccccgaccccatcgcaaaccacacatatcatgggtattatcagagcggctgaaggcacaggccaaagacagggagcaaggtgaggaaggggaccactctgggtgtagactctggtattca

SEQ ID NO: 1361 - DNA, 120 bp, Homo sapiens
agtcggcgccccatacatgcttttctgcttgaaccatgcaggtgagggcgtgtggctgaagcctgttcctgcttgggggttggccacacagcatcccaactccaggtccagagccgagcc

SEQ ID NO: 1362 - DNA, 120 bp, Homo sapiens
tgccggagagaggtccgggtccgttctccccaattcacagacatgaagactgaggccgtggttccagtggctgctcggtggtggggctggagcttggcagcatcctgcagccctctggac

SEQ ID NO: 1363 - DNA, 120 bp, Homo sapiens
tcccggctctcgagtgccgcgttctacctgctgtgttctaaatggacatgccatccccacagctgtgtcaataaagcagccatttacagagcgggcgccggatcccgtgacaggttgaaa

SEQ ID NO: 1364 - DNA, 120 bp, Homo sapiens
cagcgtcctgggctggggcagaggggccgtggcgagaacagatggggctgtgcccatctccccaggccctcctgtggctgcgcctggagcctcccgggagggaggccagagccaggagca

SEQ ID NO: 1365 - DNA, 120 bp, Homo sapiens
aggcgcgaaacatcccttaaatattggtgctctcggcagcactgggcccctgcttagcagaggatggctgagcctggggggtggagaaaatcttgcctcctgctctgagcagccagcaga

SEQ ID NO: 1366 - DNA, 120 bp, Homo sapiens
agacgctgggtggaggatgatccggggggaccgtggaaggcaggacgggggccaggagcatggctggagtgattgatggctgggagggagcctgaagtgggggcgtcctaaggtgagggg

SEQ ID NO: 1367 - DNA, 120 bp, Homo sapiens
gctcggtgcctaacggtggtggccgtgggagtcagagctccaggcggaagtagggttcagattcaggtgaagcttaggggtccctgggctgaagacggaacctctgagtgcaggcaccag

SEQ ID NO: 1368 - DNA, 120 bp, Homo sapiens
ccacgacccacagggcaccagacaccgaggtaggcagggctgtgcctgctccagcccagggccccctgcctctctgccctcatctgtccctgccctgacctctctctgccttccttcctc

SEQ ID NO: 1369 - DNA, 120 bp, Homo sapiens
cctcgtcacagcagctgccgtgtgccattggcacctcctgtgtgccaagtgctggcttagtctcccctggcgttttctcatatcccattaacaacccacccagtgggtatcatcatcccc

SEQ ID NO: 1370 - DNA, 120 bp, Homo sapiens
gtccgcttcgggtgcctggcttttttccatcccgtctccctccctcctcttgatcctctcgtattatgttgtatttctgtaagctgccacaaatcctttcgagaacgagccgggaataaa

SEQ ID NO: 1371 - DNA, 120 bp, Homo sapiens
ggccgcagtgagatgccaacgccgggtcagagctaggacctggttatcaaaataggaatgggactcgccagactggctccaggtcttctgctagtgtgtggaatgggggttcggtgactc

SEQ ID NO: 1372 - DNA, 120 bp, Homo sapiens
gaccgacggatctgccagggccggtgaggggcgctgacctggggggtgctgggcgagtgtgagcagcgtgcaggcgggcgtgcggccggccccgtgggcaggggcacatatgcggcagcc

SEQ ID NO: 1373 - DNA, 120 bp, Homo sapiens
gcccggcgctgctgtgggctgacatgaagagtgtcatttacacaactggaacacgtgctgggttccggcctttcactggtccctcaggaggcagagctggtggtgaggcagagactgagg

SEQ ID NO: 1374 - DNA, 120 bp, Homo sapiens
acacgggcctgtgtgtgcatctatgagcgtgtgcgtgtaggtatacctgtacatgagtgcatggcacgcgcgccttctgcagtcctggaggatgctgcctccccctcctctcagccccct

SEQ ID NO: 1375 - DNA, 120 bp, Homo sapiens
acacggctatttccatgcctggatcctggccagaggcagcaggaacacatgtgtgagagtgggggatgcctgtcccccagcctcgaggagcccctgccacgtgctctgcccacgtgcatt

SEQ ID NO: 1376 - DNA, 120 bp, Homo sapiens
ccccgctgcctgagctgcctacctttcccgcgaagccccctccctgcactgtgggcaggcgctgtggaggcagcagcaaagaggcagcgagggtgggaggacagtgagccttggggtcac

SEQ ID NO: 1377 - DNA, 120 bp, Homo sapiens
tcacggggcctgggcttgggtcatcgctgctgcaggcctgaggcagtttctttgcctctctgagcctcactttccttctctgtaaaatgggtggacagtacccacttaggacagcgccta

SEQ ID NO: 1378 - DNA, 120 bp, Homo sapiens
cagcgcatggcagtggggtcaaagagtgatgggcaggttgggcagggccagtcaggagggagcagggctgtccacgtgcccgtgctgcttcggctcagccctaggccacacctcgtgcct

SEQ ID NO: 1379 - DNA, 120 bp, Homo sapiens
acccgccagcccagactgggcaaccaagaaccgtagccccaaggtccaaagaggtaatgccccggcccgggaggggcgcaagaccacaggactcacagggagagctgcgtgtgtgggggc

SEQ ID NO: 1380 - DNA, 120 bp, Homo sapiens
ttccgtctatggggaggccacatgcagacacagttctaactctgccttactataacaatgggtcctattatccccattttacagataaagaaactgaggctcagagaggttcagtcattg

SEQ ID NO: 1381 - DNA, 120 bp, Homo sapiens
gcacgcccgagtggacaggtggggagctggaaggcttagcggggctccttggagagcagcgctgtccctgggcaccacggaggtggttcctggccagagctgattctgtcctgttcaatt

SEQ ID NO: 1382 - DNA, 120 bp, Homo sapiens
cagcgcccgctgctcccaccccaaatcgaattcgtgctaatatttctctgggggcggcgggctgcctgccttccggggacggagggcgggggagactggcagggaggccaggcccaacca

SEQ ID NO: 1383 - DNA, 120 bp, Homo sapiens
ccacggggctgccgggaccaggccatgtgtctggggcggccggcttagctggctgggattgtccacccaaattaaattttaacccagctcataaatcttccactaagtacgtcccctgcc

SEQ ID NO: 1384 - DNA, 120 bp, Homo sapiens
tgccgcccgcccgggtccaccccaggccgcagcgtgggccagcacagcgacagccttgttcctctgccccacatggctgtggggaggctgggcctacctgccttgggaagtgggacggtc

SEQ ID NO: 1385 - DNA, 120 bp, Homo sapiens
agtcggggaataacagcatccccagcagggatgcaggaggaataagagatgatgcagataaagtcctggggggtgaggaaagggggcccttctcaggggccaccccacccccacagaagg

SEQ ID NO: 1386 - DNA, 120 bp, Homo sapiens
aggcgacgtgtgaatagtgtctgcctcggacacaacacagggcggccactactgttgttagtattattattattatccacatcaacatctcagctctgtgtgcctgggccatctagaact

SEQ ID NO: 1387 - DNA, 120 bp, Homo sapiens
actcgatcgagtcagctgctggtgttgtcactgctgcggacacagtccttacccgtaagagctcacggcccattgggaaaagacaattatactccccggtggagagggcaagggctgagt

SEQ ID NO: 1388 - DNA, 120 bp, Homo sapiens
tcccgcattcctggcccccagggatggagccaggtgctgagctggttggcacttcttgcagggaggcccaggttcttggcaggacctttggacccaggcagcaaagtgcccccaggtcca

SEQ ID NO: 1389 - DNA, 120 bp, Homo sapiens
aaccgtacagggtggggcctgttccccaaaccacccccacaacaatcccaggtccacggcctgctgaagaggatgacaggctggctgcagccttaggcttcaggattgggggtgggtgtg

SEQ ID NO: 1390 - DNA, 120 bp, Homo sapiens
atacgcgccccaggggagttggaggctcagccaggtttgggccgcacaggagggaattgccaggacctgcatttcaggaatgaaaggaaaaccctccaaacataacctgttctgaagagg

SEQ ID NO: 1391 - DNA, 120 bp, Homo sapiens
gaccgggtggttggggggccgtgagcctcccgttcttacaggaaagcaagcaggactggccagtgcctcaaaggcactgcaggggacctgctggccccaaagagccctgacaccatgtct

SEQ ID NO: 1392 - DNA, 120 bp, Homo sapiens
ccccgagaaacctaccccacaccactgctgcagccccccaccgtgccaccctccagccaagccactttgggccctttccttccccacaaatctctcaggacttgcattatcactgagatt

SEQ ID NO: 1393 - DNA, 120 bp, Homo sapiens
gcacgtgtgggtaagacccccgaatggctgccctgcggccaagaggcaccttaagtcccggggctccggctttgtgtatctgactccgtctgttttgtcagactcaggactaaaaagctc

SEQ ID NO: 1394 - DNA, 120 bp, Homo sapiens
caccgagcaacctgaagaagaggcgtcggaacctgggaggggtctaacaccccaggccacacccccacacccaagttctgtggctgagtcttatcacccagcctaggagggtcccggacg

SEQ ID NO: 1395 - DNA, 120 bp, Homo sapiens
ctccgtgggtctgacattggctcatccactttcaggcaccccaaataaggcatgcttccaggacccccccacacatgccgctgcctccccgccgccgcacccacgtcaccttccagtgct

SEQ ID NO: 1396 - DNA, 120 bp, Homo sapiens
acccgccaccctgtccagcacctccagaggaccttctcctcctgcggcaaagtaaacaggctctctggagtgctaactgacagcacaaatgaaatcctgcactccctccctctaagattt

SEQ ID NO: 1397 - DNA, 120 bp, Homo sapiens
ggacgagatgaaattatgcctcaagaagagaactggccggcccggcgaggaagcactgcatcggagatgggcttattaaaaccacagtggccacatttcaacctgtttcaggtgttaagt

SEQ ID NO: 1398 - DNA, 120 bp, Homo sapiens
aggcgagtgccccaggaggtccctgtgcagggagctgcgggtctaaatgctccctgtcacccccgccccaggcactgcagagggaaatgggggccagctgcctgaagcgggtgaggacac

SEQ ID NO: 1399 - DNA, 120 bp, Homo sapiens
agccgcctctcaggccatgactgtgatggttattctgggctgggagagctgctggatgagggtgggatgcgttggcagctgcaaggctgggcccagtatgagggcaaggtccagagggga

SEQ ID NO: 1400 - DNA, 120 bp, Homo sapiens
caccggagagggtcagagggaccccccgccaccgacctgtgagggacccgggtggcttccaggagccccaggcccggaagtcactcatcctccttttcctcagggattagaacacatcgt

SEQ ID NO: 1401 - DNA, 120 bp, Homo sapiens
tgacgtggaattagccacgggctcagcctctgaaaagaggtggagagaatcgggagatggggatcttccaaccagggagcccctccctgcacaggggcctccccaagtctctgcagggat

SEQ ID NO: 1402 - DNA, 120 bp, Homo sapiens
ccccgggagcagcggggagggctggtgcggggctggagtgggcatctcagcatttgcatggagagctctctctggtgctgaattcatgcagccgcctgtgtgattcctaaggcgagacga

SEQ ID NO: 1403 - DNA, 120 bp, Homo sapiens
ggccgcttttctcagcaggaacaaggcttttcttcaaatcgatggtgacacatttttaaactccgatattaaggagggaaagattttgccagccccccaggggcaacccttattagtcac

SEQ ID NO: 1404 - DNA, 120 bp, Homo sapiens
tgccgtgagcacgacacaggggagtcgacagtgacaaataggagggcagcggcgggggggtctcctgagctggggcacagccatgtgaggggcgagcactttgggatgggctctggagca

SEQ ID NO: 1405 - DNA, 120 bp, Homo sapiens
ggccgggtcaggagaggataccaggagccaagatacccccaagtagccatcgagagtgtaaactacaagggcagatatgagccgtagttcctcggaaggccacacaccagcatcgagtag

SEQ ID NO: 1406 - DNA, 120 bp, Homo sapiens
ggccgtgaccaggaaccaggcaagaggctggtggcctggaaagcacgtgctgagggcatccaggccgcagagttccaggtgggaccaggagcacagttcttaggagatacccagctcagc

SEQ ID NO: 1407 - DNA, 120 bp, Homo sapiens
agccgtgcccaccagggcagcctgcttccccataagactccttagccatgagccatcatgagttcctgtatgtccttccaggggcaggcatgctcgggctgcccccaccgcagaggagcc

SEQ ID NO: 1408 - DNA, 120 bp, Homo sapiens
ggacggagacccagagtccatggagctgcccctgccctcgaggggctcggagtcctgtgggtggtgaagtgagatccctcactgctaataacagtcactaccgtttatgagcccctccag

SEQ ID NO: 1409 - DNA, 120 bp, Homo sapiens
tcacgccccactgcacaggccgtttccatgtgaccacacatctttcccaatggaaggcagagcaggcatggaccgccttgctggcagtggggagtgaggggcccaggctgcctgccctgt

SEQ ID NO: 1410 - DNA, 120 bp, Homo sapiens
ggccgtcccctcggccatgccaggtccagcaggtgactcgattccctaccacgaatatgggaaggaggtgccttcagcctgttcaggatagagggaccattcccccgttcccagccccac

SEQ ID NO: 1411 - DNA, 120 bp, Homo sapiens
gcccggttcagcgggtctcagcagccctcccagagcagcagctatggcaacaagaactagagctggcatctcctgggcgctcactctgtgccagacactgtactgagcatcctacacaag

SEQ ID NO: 1412 - DNA, 120 bp, Homo sapiens
attcgtggtgggggaggtgaggagacggggcctgggtccttgactgttaatcctgctatgtcctggaggccacgccaagctggcaccaggcccggccaggactcatccaggaagccccag

SEQ ID NO: 1413 - DNA, 120 bp, Homo sapiens
caacgcacccacagacattgccatctgcacagagccggggagcgggggcactgtggccaccacgtgctgctgcagccagaccccttcatatcctaggcacacagagtacccatccgttaa

SEQ ID NO: 1414 - DNA, 120 bp, Homo sapiens
aaacgggcaggcaagccacggcctcctggggagccctgaaaccagctcggctgtgccttgccaaggaactggcggatcattccaggagagcgagccaagggctgcagatccagccctttt

SEQ ID NO: 1415 - DNA, 120 bp, Homo sapiens
ctccggcctcctcggctcagtgctcgggtggacagcacaccggggacgcaagcaggggcacaggtgcaggcgctgaggcctcaaggacaggaaggagccacagaggatgtgctcgggaca

SEQ ID NO: 1416 - DNA, 120 bp, Homo sapiens
ctacgagtctgccgcgagggggagaaaaggcccttgggtttgtagttctgctttgccaccttcctgctgtgtgaccctgaacaggtcactgtccccctctgggctttagatcctcccctg

SEQ ID NO: 1417 - DNA, 120 bp, Homo sapiens
ggacgccaaatgccaggagggcaggcactgggttacactgggccttgtacctccagcacctcaaaaggagccaggaacctcataaggacctagaaatgcccaccaccatcctaatctgta

SEQ ID NO: 1418 - DNA, 120 bp, Homo sapiens
attcgtgcagcccctcccaccatctgaccaactctcaagggcatggagtcacttattcattcaacaaacatcaggtcagacatggtggctcacacctgtaatccgaccatgctgggaagc

SEQ ID NO: 1419 - DNA, 120 bp, Homo sapiens
caccggaaagtggcccggccccacctgctcttggcttccccgaggaggagggagcccggccccacctgcgcttggcttccccgaggaggagggagcccagggccaggcccatgttgctaa

SEQ ID NO: 1420 - DNA, 120 bp, Homo sapiens
actcgtcgctggcccggccatctcccctgcccactgcggagaggtttctgctgtcgtggtggccggcaagcctcagcaaacacattaaaatctgaagtgacagataaagcgatttacggc

SEQ ID NO: 1421 - DNA, 120 bp, Homo sapiens
cggcgacagttcagcgtcagatcacttcccacaaggcagtccgcatccctgcggggcccctgcttggtagtccatcaaggcggtctctaaatcactgactccaagcagtgcccagggaca

SEQ ID NO: 1422 - DNA, 120 bp, Homo sapiens
agccggacgcaggggcgggtggccgctcaggtggccactcaggttctggcctgctccttctcaccaggccaggctctgctgggccctccaggcggcaggagaggatgaggcaggggctgc

SEQ ID NO: 1423 - DNA, 120 bp, Homo sapiens
tgccggtgcttgggaggagggcggtgataagcggccagcagattctcacaaatcaaagccccaagacttaaggagatagagcgccacttcatgacttattttaaataaataagcggctta

SEQ ID NO: 1424 - DNA, 120 bp, Homo sapiens
ctgcgaggtcggcttgtcgctgtgaaacatggcttcccacccgtccccgccgcacacctgggcccctcaaaggctagctgacccgcctcgcctcccgccacctccttgcagaattaattg

SEQ ID NO: 1425 - DNA, 120 bp, Homo sapiens
ctgcggcgttgcgtggcactttgttcagaccttgctcctagcactttgtcacattatactctgcttagtagctctcgctcctgacttcccagtaatcatttcctggggactctccgtgtg

SEQ ID NO: 1426 - DNA, 120 bp, Homo sapiens
cttcggtggaactgatgctgatgccatttctcagatgaggaagtagaggccacggagtggccagcaggggtgctgggaccctgacctgctcctggccacggtgcgcacagcccatgctca

SEQ ID NO: 1427 - DNA, 120 bp, Homo sapiens
ccccgtggtaaaaaggagacataaacaccctggcagccacagcaccccctagtggataccctgagaccggcgctctccccagacacaggactgaggtcataggcaaggctggagaggcag

SEQ ID NO: 1428 - DNA, 120 bp, Homo sapiens
caccggctctgagaacctcctcctccagaagagggggcctgcgggggctccctggcttatctcctgcacatggcagcccaatttcattaagacggatgcgccatgctcctgtgggcagga

SEQ ID NO: 1429 - DNA, 120 bp, Homo sapiens
agccgtggccgacacagatggcaggaacctgagactctcccgggtgctacccaagcaagtggcctcagctggcagcccacggggacagggcccagggaggcctgcactgtgcctgagggt

SEQ ID NO: 1430 - DNA, 120 bp, Homo sapiens
ttccgtccctgcaacttcaagccctgccacccgccagccaggcatccccacttctatgcttctgcccaacctcccacctcactcccaccacatcccatacaaacacacatcacaccacac

SEQ ID NO: 1431 - DNA, 120 bp, Homo sapiens
tcacgcacacacacgcatcacacacatcatacaaatgcatacgcacaccccacacacataggccaaactcctgacctcacacacacactctatcacacacaccccacgcatcacacaagc

SEQ ID NO: 1432 - DNA, 120 bp, Homo sapiens
acacgcaccgcacacatcacacacacaggccaaactcctgacctcacacacacaccatcacacacatcccaatcacatctcatagcccaataatgtaagagtggaaaccagtcctgaatt

SEQ ID NO: 1433 - DNA, 120 bp, Homo sapiens
tcccgagctcaagtgatcctctcgtctcggcctcccacggtgctgggattacaggagtgagctactacgtcccgcccagggtccgattctcaatggcctgacggaggtcacaggcagatg

SEQ ID NO: 1434 - DNA, 120 bp, Homo sapiens
gggcgggcagggggacacctggcaactgccctctccaaggatccccagggccctgctgagtggcaagagagatgcccacagcctggctggagaccccttcaaccccacagcttttcagga

SEQ ID NO: 1435 - DNA, 120 bp, Homo sapiens
cctcggcaccgctgggacaggggtgatgcccagaacggcgctgatgacaccagtttcagcaccagtgcgaggtgctgagccccgattcccgccaggtgctgagtgaccgtcatttgcacg

SEQ ID NO: 1436 - DNA, 120 bp, Homo sapiens
tcacgtgcatcagctccgagtgcccccagtaacctgacgggtggtttcttcaccaccctcattttgcagaggaggaaacagaggcctaggcaaggacacagagaaggggagtccacagag

SEQ ID NO: 1437 - DNA, 120 bp, Homo sapiens
aaccgcttctgatggagctgctgcatccaaaacctggcgactcccaagggcacttaggaagcagtgttaatcacgcccacagcccgggtgcagcctccggagcgcccccattccatctga

SEQ ID NO: 1438 - DNA, 120 bp, Homo sapiens
cagcgaaccaccaacccaagggggacagagctcacaagatgcctcattttccctccggccactttgcagctcagcaagaaggtaccgctgcagtacctctcacacgcttgccagtgactg

SEQ ID NO: 1439 - DNA, 120 bp, Homo sapiens
gaacgcccttctcccctaggccgctgtaatgtctgccaacccagatgtggctttgtcttagctgtgtgtcctcagatggactagcagttctcatcctagtggccctagagaaacacacca

SEQ ID NO: 1440 - DNA, 120 bp, Homo sapiens
ctacgtgtaacctgtcacctgtgtgcctagacagggaatgtgcgggcaaggcacccccatatgactatccagctttgcagtcaacagtgggaagacgcatagagcaaggttgcttcagga

SEQ ID NO: 1441 - DNA, 120 bp, Homo sapiens
ccacggaccaggcccggggcggccgagtgaactcccctctccggatcctagagcctgtcactcacagagattaacggaaatgctcacagcatcagcaccaccatgccccagagtcactgg

SEQ ID NO: 1442 - DNA, 120 bp, Homo sapiens
cagcgctggggccaggcacgaccgctacaagcgcaaagtggggacgaaggagactcgagaagctcctgggggtgccctgggcctgcacaggttagggaggggctggcacagcagggtttt

SEQ ID NO: 1443 - DNA, 120 bp, Homo sapiens
agacgagaggacctgccccccatattcagggtctgagaaagaggccccccttcctccaatgcttggtgcagatgccaggtaagcaaaggagcaagcgagcaggcgggcgagggccggggt

SEQ ID NO: 1444 - DNA, 120 bp, Homo sapiens
agccgccactcaacctgttccacaagccacctgctcgacttaaccagcccttggcaccccatgccaaagtcctttcctggcgcctttgaccttgccagacaaccactagctgtgtggagt

SEQ ID NO: 1445 - DNA, 120 bp, Homo sapiens
agccggctcccatactcatcacaataaactgccaagccagcaagaggcgagcgcaggaagctgagcagctcctgtttctaggctctggaaagctgccagggcatggcaggggacctctct

SEQ ID NO: 1446 - DNA, 120 bp, Homo sapiens
cctcgacaagctccctcacccgcccaggtctgaagcgggggcaggccaggccaaaggcagaggaaggcaggtgctggttggggcttctgtggccccccaaggtcagacctccccgctgtg

SEQ ID NO: 1447 - DNA, 120 bp, Homo sapiens
ccccggccactaatgggtctcagtggagcaaggcgcccccgacacagcaggtcagggtttcaagggaagaggagcccgagtggccgacacgttgggctgccatggcgccagcaggctgtc

SEQ ID NO: 1448 - DNA, 120 bp, Homo sapiens
acccgagcctcactggagccaggtggcgtccacccaggcctggcacagcagagcagagcaaaggcaacagggcggccaccaggtctctggttcaggccagccactcaccggcgttgacga

SEQ ID NO: 1449 - DNA, 120 bp, Homo sapiens
tggcgtccacctccagcttggtgatgtcgctgcggagcagggagattttctcattgagctgcttgtcctttttatacctgggctcctccaccttcacagccacccctggaacaagtaggg

SEQ ID NO: 1450 - DNA, 120 bp, Homo sapiens
gggcgttcaataaaagtttgctgcatgattggaaatcccacctcgaagcaaaagggagaccccagtgacaacacagcagcccaggaaccccagccccatcacaaggtccggttgctttcc

SEQ ID NO: 1451 - DNA, 120 bp, Homo sapiens
cagcggcagccctcgagcaggtgcctgggcaccttgtctccgtagctctttcccaccctcctgggttgttgtcctctgagagagtgctcaggggagcaggggtctctgtggggacagtgg

SEQ ID NO: 1452 - DNA, 120 bp, Homo sapiens
tcacgggctaaagtcggtgctttctgccgtcacttttagatcctggcgcaggccacacaattcatgtcaggagtaaatcattttgatttccacctctggtcccgagaaagccatcttctc

SEQ ID NO: 1453 - DNA, 120 bp, Homo sapiens
caccgcaggacccccccatcctgcctgcccagcccagaggccacacctactccaccacggaggcccagccaattagccacttccctgcacttttgaaaggggatccagccgggaagagtc

SEQ ID NO: 1454 - DNA, 120 bp, Homo sapiens
gcccggcagggctatttggggctcagtagcggcagcttgggttctctctctccccaggccccagactcatgccccctccaggagcaagaggaagtggtgtgattcttgaagggtgtcatc

SEQ ID NO: 1455 - DNA, 120 bp, Homo sapiens
cagcgagaaggggaaaagggcgccagaccacgtgcccaggaaggcatcagagtgcgggcttggggtggggtggaggcaggacaggccagcccaggaaggtcactctgtgaggttacgtgc

SEQ ID NO: 1456 - DNA, 120 bp, Homo sapiens
ggacgccagccccggagctgttccctcagccccattcccgaacacttaagaaccacactgtgcaaagtttggagagtccgggatcataacctccactttgccaccagctccgagtgacct

SEQ ID NO: 1457 - DNA, 120 bp, Homo sapiens
actcggcctcagtttccctcctgcacagggaaggaagttggtaggtcctgcacaatctctggggtgccctgtgacccattccaatggggtaaggaaggccgccttcctcacgctgccccc

SEQ ID NO: 1458 - DNA, 120 bp, Homo sapiens
ctgcgtggacacttggacctggtctggagtgaattgttctgtggggctgggaacacgcgcgggggcggggggggctgtcaatggggaggaggggtccgttccagggcagatggggcctca

SEQ ID NO: 1459 - DNA, 120 bp, Homo sapiens
tctcgggtggaaggggctgctcgctcgttgggggccgcccagccgggaagctccacgtgaggccgccctctccctcgcgccccctcgtgcttacacttacatttcgcctccttccagtcg

SEQ ID NO: 1460 - DNA, 120 bp, Homo sapiens
cttcgccgccatggccaggggggcccaagtgcgcaccccggctgtccgccccaccgccgccgccccccacgccccaactcccgccgaggtccgcgcacggcggccgaacacgcccaggaa

SEQ ID NO: 1461 - DNA, 120 bp, Homo sapiens
gaacgccgggggaccgcacgtgctgctgcgggtcctcgtggcacccgccaagtgtccgggccgggggcgcggggggacgagcagctgccccgccgcgcgcagctgtgccaggcggccgga

SEQ ID NO: 1462 - DNA, 120 bp, Homo sapiens
caccgcctccacaccccagcctgccctcctagggacaggtgcgacgaacgggtaaatccggtttggggacttctccccagagcctctgccttctaacagccccggggccaaggctcagct

SEQ ID NO: 1463 - DNA, 120 bp, Homo sapiens
agtcgagggtggaaatagtggaatttggaggcaggaaacttaggcttcaagtggcgttcaagggtggaaggattggggtgatgtttttgtgtgtgtctgtgtgtttttttttttttttct

SEQ ID NO: 1464 - DNA, 120 bp, Homo sapiens
aggcgctagacctggactccagctgtaaggtggggctgcttctggcctccaggggccccccctgcctctttctctgttggggcttttccatgttcagtccctgatttcttccctgtcacc

SEQ ID NO: 1465 - DNA, 120 bp, Homo sapiens
gcacgcggctggggggtggtatgctcagtctgcgaggaagaggaattctgtcattcttcctaaacttaaggagattggcagtgggtggcgagctggaagggctttgttagtcgtgatagc

SEQ ID NO: 1466 - DNA, 120 bp, Homo sapiens
tgtcgtgggctcaagagtaggactggcaagttctgcgaagtggagcaggcctctgcagctcggcgccccgggcctcgccaggacccctccctgccggggccttctgtagagggggttgaa

SEQ ID NO: 1467 - DNA, 120 bp, Homo sapiens
aggcgcaagccaccgccccggcctgtcctttgtccttttgggtttatcttcctaaacctttgctatcaattttgggtgagtttcagcgggattgttggtcttctgtgggtaactgggatc

SEQ ID NO: 1468 - DNA, 120 bp, Homo sapiens
tcacgcttcccttgagtggcccactgtcatccttcctatctctactcagcttgtcacctcctcagggaagccttccctgactgcttccccatgttccattctgtcatctccattgaactt

SEQ ID NO: 1469 - DNA, 120 bp, Homo sapiens
actcggtctctcctgcacccagggcagcatgccagcacacagtaaacatcagcacaaccaagccaaggtttagacgtgcaggcctgggcagcagggggctagcaggctattaaggatggg

SEQ ID NO: 1470 - DNA, 120 bp, Homo sapiens
gggcgtccagggcagctggcatctgaccagcccagcctccagcctcctctccccccgctccagacagaccccgtgcggctgacacagctgtatgagcaggcccggtgggacctgctgctg

SEQ ID NO: 1471 - DNA, 120 bp, Homo sapiens
caccgaggaggagatgatggtgtttgccgccctgcaggtaccaggcgggcctgggggcaccagggcaggtgggaggtgagccagtcccagggcaggaagggccttcctgagtgggggcta

SEQ ID NO: 1472 - DNA, 120 bp, Homo sapiens
gcccggcctgggggtactgctaggggaccaggctgctggactcagccctccctggcttcatgaccacctagtaccacatcaacaagctgtcccagagcggggaggtgggggagccggctg

SEQ ID NO: 1473 - DNA, 120 bp, Homo sapiens
ggacgacctggatgtggccctgagcaacctggaggtgaagctggaggggtcggcgcccacagatgtgctggtgaggaggggctcagggcaggggctgggcagggagaactgtgaggtacc

SEQ ID NO: 1474 - DNA, 120 bp, Homo sapiens
taccgggtgcccctctgactctggtcctcccataggacagcctcaccaccatcccagagctcaaggaccatctccgaatctttcggtgagttgggggccagagtaggcagccctgctgga

SEQ ID NO: 1475 - DNA, 120 bp, Homo sapiens
ggtcggtgggcatggagagatggcaagagctgctccttgacccccagggaggagggttcagtgcaaggatggaggaggctttccacaccaggcgtccctgtgtcccccagggagtgacat

SEQ ID NO: 1476 - DNA, 120 bp, Homo sapiens
catcgcttgccaggatgtgcccccctacacaccctccccatcccagtccatgtgacgggcccaggcatcacccagaggggttctcctcgcagaggtggggccgctgatgtggaggacacg

SEQ ID NO: 1477 - DNA, 120 bp, Homo sapiens
ggacgaggcaaagcggtatcaggagttccagaacagacaggtgcagagcctgctggagctgcgggaggcccaggtggacgcagaggcccagcggaggctggaacacctgagacaggtagg

SEQ ID NO: 1478 - DNA, 120 bp, Homo sapiens
acccgtcgtcagcccggcatcacctgtcagctccctgtgtccacaggctctgcagcggctcagggaggtcgtccttgatgcaaacacaactcagttcaagaggctgaaagagatgaacga

SEQ ID NO: 1479 - DNA, 120 bp, Homo sapiens
agccgaggattgtctatgggaagggctggggacttctagtaccagaaggagggcagagtctgtgcttctgccgctgacccctcctcttcccctgccggcttctccagggagaagaaggag

SEQ ID NO: 1480 - DNA, 120 bp, Homo sapiens
aagcgccataacagcatctcggaggccaagatgagggacaagcataagaaggaggcgtaagggcaccgggaccgggggccatctgggtactggggaggcagggcaggtgtctgggccccg

SEQ ID NO: 1481 - DNA, 120 bp, Homo sapiens
ctgcgttgctcccgtgcagggaactgacggagattaaccgtcggcacatcactgagtcagtcaactccatccgtcgggtgagtcaggctcccgggccaccctaccccacctcccttcctt

SEQ ID NO: 1482 - DNA, 120 bp, Homo sapiens
ctgcgtcaactgttacctcctttaggaagccttctgtctcctggtcaagggacatggcccctctgctgggccccacagctccacattactgattatgtggccattgaggttctttgtttt

SEQ ID NO: 1483 - DNA, 120 bp, Homo sapiens
tggcgcagtgactgagcagcccccatcttcctaccagggcgtgggtttgcccagatgtacaggtggtcccctagctatgccctcccgttagccctcttctccactgtccttagtagcata

SEQ ID NO: 1484 - DNA, 120 bp, Homo sapiens
taacgtttgtggggcactttattgtgtgtgccaggctctgttttgaggatttctaaacactggcctccttaatgcccagaacagcaccccgaagtgatgattaatcatcccttttctgta

SEQ ID NO: 1485 - DNA, 120 bp, Homo sapiens
tagcgggtggtcagcctcaaagcccaggctgaaagccatccagcatgagggctgaggaccccagcaggcaccagagggtctttggagaggtcacaggttgtcaagtgggtgagaacaggg

SEQ ID NO: 1486 - DNA, 120 bp, Homo sapiens
gggcggggcaagttcaggaccagccagggcctgggtgttcaggcagtgggagagtggatgctggcaccagtgccatgctgggatctgcaggcagcttcagccacagccttccggggctga

SEQ ID NO: 1487 - DNA, 120 bp, Homo sapiens
agccggggagcaggtagagggccaaaacctggagtgggggcaggaggtgctccagcagcaactcccccagaggtgggtcccaacctccacgtcggccaattccaggtggccccaccgggt

SEQ ID NO: 1488 - DNA, 120 bp, Homo sapiens
tcccgcggagcccctccctcatgagtgctgagcccaagggccaggctgtccccaggggcggagagttgcggacccttcccgatccggtaatgggcctgggagatgccagattagcgtggt

SEQ ID NO: 1489 - DNA, 120 bp, Homo sapiens
gtccggagagacgggccagctgatgcccaggtcggggccctgccgctggccacactgggctccggtccaaggctagaaggctggcccctgctgcaacccctctccggctcctctgccacc

SEQ ID NO: 1490 - DNA, 120 bp, Homo sapiens
tcccggggctggccggctgtggggagccaggcggccgcaggtaaacggcttggggcggcgccggcggcgagggcgctgcacggagggaagcgcggcgccggaggggttaaccgcgggagg

SEQ ID NO: 1491 - DNA, 120 bp, Homo sapiens
tgccggcgggaggggggtcccagccccggcggccgcccgctccgcccctgccgcctccgcggcccagtcggcaccggcgaggccgtgctggaacccgggcctcagccgcagccgcagcgg

SEQ ID NO: 1492 - DNA, 120 bp, Homo sapiens
ggccgacagtaagtgcggtgcgggctccggtgcgcgggcaggactcaggggcagggacgccccaggggcgactggccgggcggggtgcccacctctcgcgcgtgggcgcctccgggagtg

SEQ ID NO: 1493 - DNA, 120 bp, Homo sapiens
ggccgccggtcccgccgcccgccacgctccgaggcgtcgctgtgcggacgcgggggaggcggtgggagcgagctgcgggcgctgcgcggtggccctgctgtctggcgtgtgcacgctagt

SEQ ID NO: 1494 - DNA, 120 bp, Homo sapiens
acacgtgtgcgtgggctctgggtgccctggcgcggccggcacgcccatgggggccggggatgccggggcgtctgcggagagtgcaggtggggtgcgtgcgtgcagcggggcggcgcggcg

SEQ ID NO: 1495 - DNA, 120 bp, Homo sapiens
cctcgggatggagcgtgggcgcgcgggtctttgtgcccgcgcttggcggcgcgtgccggggcgtgtgtgcgcgtgggcgccgccgcccgctgtctcggactgacagctgtctcgggggct

SEQ ID NO: 1496 - DNA, 120 bp, Homo sapiens
tgtcgccccggtgtggcctttgcggacccccgccccgctttttccgggaactgggcgtccccagcacccctcctcgcctgggtgcggcggccgggacccgcccctgggttcctcgaaagc

SEQ ID NO: 1497 - DNA, 120 bp, Homo sapiens
gcccggcggggcgcgggggcaccctggagggccagccaggaagcagggcgaggcgagaggggacggagaagccgcggagatgctgtcacagccgcagcgggcgagcagggacccaccatt

SEQ ID NO: 1498 - DNA, 120 bp, Homo sapiens
ccccgccttgcgctgtccggcctctcctccgggtttcccttcggacgcctccgagccccctcagcctcctcctcgagggccagctccccgcacccccaccaagctccacacatttcctcg

SEQ ID NO: 1499 - DNA, 120 bp, Homo sapiens
gctcgccccgcttccccctaggcaggcttaggctctctttcggcctcccactcgccttcctttcccttctcggtgccctcctctctttcctcacccggtagtcccagacaggggctgagg

SEQ ID NO: 1500 - DNA, 120 bp, Homo sapiens
ggccgggcagcggaggtaaggggaaggctggagataggagggggactgggtgtgtccagccagagggatgtctgtggacagtgcagctgggggctttatggatctttgggtgtgtagggg

SEQ ID NO: 1501 - DNA, 120 bp, Homo sapiens
gcccgcagtgacgacagctccccaggagccccccgcccggcccctccaggcgggcagtggagctggcccggcgcctgggcgcgccatgcgcagcaccacgctcctggccctgctggcgct

SEQ ID NO: 1502 - DNA, 120 bp, Homo sapiens
ttccgggccctggagcagccccacgagcagcaggcccagagggagctgggggaggtccgagagaagttcctgagggcccatccgtgtgtgagcgaccaggagctgggcctcctcatcaag

SEQ ID NO: 1503 - DNA, 120 bp, Homo sapiens
gtgcgtgggtgggccgcagccccttcagctgtcacccatcacccctggcgctagctgtgtgccagtgaggccctgtgccagtgctgctttcagatcagtatccctgaggacgggtgcagt

SEQ ID NO: 1504 - DNA, 120 bp, Homo sapiens
tagcgcatgggctatgttacatttgcacaggtctcactcaccggtctagattgccacacaaaatccaagactctcatttaaacatgaattacagttaaactgcaaatgcctttttttttg

SEQ ID NO: 1505 - DNA, 120 bp, Homo sapiens
caccggttcccatacttttcttggagtcatgtgccttagaaaagcccaagaacatggtgaacacaccccctccccctggaaaagtgtgcatatgaacatgtgcaggtgatttgggagggt

SEQ ID NO: 1506 - DNA, 120 bp, Homo sapiens
gatcggtctcaaaaaaaaaaaaaaaaaaaaagaaagtgttgggctgcagccttctgggatacagtcaggcaggcacgtctgttactttttctgatttcggagtcactgtcatacaaaaaa

SEQ ID NO: 1507 - DNA, 120 bp, Homo sapiens
gcacggaggcctcagtgttccagcagattctcaaggcagcaggactcagggcagagatgagtgtggggtggggttgggacacagaccacccgacagcatctctgacacttacagaatgcc

SEQ ID NO: 1508 - DNA, 120 bp, Homo sapiens
aggcgtgggaagaatgtatctggccagaccacagggcagagagagggagggagggagggagggaatctgacctagtttgtcttcacaatggaattgcttttttcctggataagaaaaagg

SEQ ID NO: 1509 - DNA, 120 bp, Homo sapiens
agccgctttatttctcttccacagtaggattcactccctgaattagttgtgcagcaactgtgcacctactgtgtgctaggtgctgtagtgttatatgccaaggggatattggagtggatc

SEQ ID NO: 1510 - DNA, 120 bp, Homo sapiens
aggcgagaggggtagagagtagagacgaggggcaagagatgcccatgtggagagacagcatgggcaaaggcgtggaagctggaaagttccggagcattttgcagaacctggagttagcag

SEQ ID NO: 1511 - DNA, 120 bp, Homo sapiens
agtcgtgaatttattggaaaagtgttgcaaaatacacattaaatcacttttaattagctatttcgcttcttgcttttattaacagttattacaggaaatggaatcatctcagaaaatctg

SEQ ID NO: 1512 - DNA, 120 bp, Homo sapiens
aggcgatttgtattttgccaccctgctgggagcacccagtggaggagcccttccatccttggggctggctgaggctggaggaccaggcagaaaagagggttggggtttgatccctgctgg

SEQ ID NO: 1513 - DNA, 120 bp, Homo sapiens
tcccggggggtcgcggagggggtctagacctctagtcgagggctgctttccctctccgtgcagatgggcggcctcacggctcaggctgccagctggactggcacggtgacagcgcgcgtg

SEQ ID NO: 1514 - DNA, 120 bp, Homo sapiens
aagcgcaaatagggggtaggagaaaatgcaccgcgaggagaaatgtgctgcgggcctgctgtctagctgtgtcatttggtcgttgcggggccctgtgaggccgggagggctgccagcacc

SEQ ID NO: 1515 - DNA, 120 bp, Homo sapiens
cctcgttgctagtgctggggccagttcctgccccggtggagctgccactgaagggggaggcgtaataaacaagataggtgagtgcatatgcagcgtggtctgttgtgctgagggctgaag

SEQ ID NO: 1516 - DNA, 120 bp, Homo sapiens
aggcgagagcaaggagtagaggtcaaaaggaggcaagaagcaggggcgtaggcctaggaggacataggttcgctttggcttggactcagagaagggaaatccccagagggttttgagaag

SEQ ID NO: 1517 - DNA, 120 bp, Homo sapiens
agtcgagaacagactggagcaagcagggacagccaagcgaggggcgaggtgacagtgactatcaggtcaagggtggaagtagttgccaggggcaggaggcggattctggaccttggagga

SEQ ID NO: 1518 - DNA, 120 bp, Homo sapiens
cagcgagttgtgatcttgcaactgcactccagactaggtcacagattcagactctgtctcttaaaaacaaaacaaaacaaaaagtgaaacgtgaacattaagcatcttggaatagataaa

SEQ ID NO: 1519 - DNA, 120 bp, Homo sapiens
atgcgtactccaggatgccttccctgatcatcctgccgaggtcaaatcccctccccttcatagcacctagtatggctacaacagtctcgagtgtatagaggatggggtggggtgaggtca

SEQ ID NO: 1520 - DNA, 120 bp, Homo sapiens
gaacgctgtagtgagtgaagcctggcatttgggaagatgggtgtgtgggtgaccaaactcaccacgcaaggcccagagcccttttgaggccctcgaaggtcccaggctggggtcatcctc

SEQ ID NO: 1521 - DNA, 120 bp, Homo sapiens
gcacgagcagctgcaggcccagcgggccagcgtggaggcacaggaggtggccctgctggcagagcgtgaacgcctgatgcaagatgggcatcggcagcggggcctggaggaggagctgcg

SEQ ID NO: 1522 - DNA, 120 bp, Homo sapiens
gagcgagcacgacaggtgccgcccctgccacagcctctagcagctctcagtggccccatcctgaaagtgggttgggggtgtggggtcctgtctggcctcccctccccggcataacttctc

SEQ ID NO: 1523 - DNA, 120 bp, Homo sapiens
actcggactggggacccaggtcccttggagagcagctctccttgcctcccaagggctcagatgctgctggcagagttgtctcgggagcggggtgagctgcagggtgaacgcggggagcta

SEQ ID NO: 1524 - DNA, 120 bp, Homo sapiens
ctacggggccggctggcgcggctggagctggagcgggcacagctggagatgcagagccagcagctgcgcgagtccaaccagcagctggacctgagcgcctgccggctgaccacgcagtgt

SEQ ID NO: 1525 - DNA, 120 bp, Homo sapiens
ggccggtgggggtatgggcgtgtggtggggcagaaagcctagacccaggtggtcctgagctgggtcccaccctccgagccatggtgcccccctgccagctattgacacagctgcgaagtg

SEQ ID NO: 1526 - DNA, 120 bp, Homo sapiens
aaccggcagctgctggctgaagttcaggccctgagccgggagaacagggagctcctggagcgcagcctggagagtcgggaccacctgcaccgcgaacagcgggagtacctgtgagtgggc

SEQ ID NO: 1527 - DNA, 120 bp, Homo sapiens
ggccgcctgggagcggggtggggcctgcatcccctttgggcgttcctggggagagcccttagtgagggcctagggacagggttggagctgaccttccaggtcagtccaatctgcggcacg

SEQ ID NO: 1528 - DNA, 120 bp, Homo sapiens
gtgcgtcctcgctgcagcttgtgccttgctactgcctcggcctccctgggcctcacacccacctctcccttctcactcctgccagggaccagcttaatgccctgcgccgcgagaagcaga

SEQ ID NO: 1529 - DNA, 120 bp, Homo sapiens
gctcgtggagaagatcatggaccaataccgcgtgctggagcctgtgcccctgccccggaccaagtgagcagccctgtcacctccctcaggctggacatcctgctaacctctgcccctgcc

SEQ ID NO: 1530 - DNA, 120 bp, Homo sapiens
atgcggccccggcgggaggggggcccccctggggggctgcgcctgggggccgatggggctggcagcaccgagagcctggggggccccccggagacggagcttcctgagggcagggaggca

SEQ ID NO: 1531 - DNA, 120 bp, Homo sapiens
atgcgtgaccccattggccttccctgaggcctgccccccctgccctgatgccaccaggggctcttttccctgggtcctacagggtcacccttggcccacacctccctcctgcctgtgctg

SEQ ID NO: 1532 - DNA, 120 bp, Homo sapiens
ccccgacccagcctgccccatccgcagcggagcccaggatctgggaggtgcagtggactctagggagaggtcattgttcctagactgcagatgaggagactgaggccccgggaggggaag

SEQ ID NO: 1533 - DNA, 120 bp, Homo sapiens
ctccgccccccccctctgacccctcccctgcatgaacctcagccccctcttctgaccccctccctgcatgagactcagtccccgttcccttcctctgaccccctccctgcataagcctca

SEQ ID NO: 1534 - DNA, 120 bp, Homo sapiens
cgtccaccaaagacccgtgttgggggtactgaaggagaggccctgggggaccctctgaagcatttctgcctcactttatgtcatctgcttctcccctgttggggctaaggaaggagatag

SEQ ID NO: 1535 - DNA, 120 bp, Homo sapiens
ctgcgtgtcctcgttcgtgttgtgggtgtctagagcagagattctgggcagacaggctgctagcccgtggagtttggaacctcagtggggagggacaggcagactcttctgggcaagaag

SEQ ID NO: 1536 - DNA, 120 bp, Homo sapiens
gggcgcaactctcatcctgggtgtatatccggacagctctgctgggtatcatttaggatattcttggttgtaaatacagctgctgcttgacttagggtggacctacatcccgataaaccc

SEQ ID NO: 1537 - DNA, 120 bp, Homo sapiens
agccgaaaatacatttaatgtctgcaacacagcagacggtgcctgacttaggattgtttgatttaccggctttcagctttaccatggtgccaaagcgataggctttcagtagaaaacata

SEQ ID NO: 1538 - DNA, 120 bp, Homo sapiens
ttacgatgggattacccatcgtaggtcggaaaattcgtgtcaagcataagtcagtcggggactgtctgtaagagaaaacccaacccaaacttgcttaagcaaaacacagggttttggggg

SEQ ID NO: 1539 - DNA, 120 bp, Homo sapiens
tctcgatagcttcaggcaagacctaatccagactgaagcacatgatcaggactcagctgccgagtctgccgagtctgccgagctttttattgttttcttggcggtggtccagtctggagg

SEQ ID NO: 1540 - DNA, 120 bp, Homo sapiens
agacgggtgccaggcgctccagggactccagatggaaatatggagatggaaatggtttcacggttcccaagggaagtcctgagatgtgctctgactggagccactgaggtcatgtgccca

SEQ ID NO: 1541 - DNA, 120 bp, Homo sapiens
tgacggaggttacttgaacccggctgggtggtcagtgaaggtgggagtgagtggatcagccccattcattagggccctcactgggatcagagcttggttcccctcagggagtgtctgaga

SEQ ID NO: 1542 - DNA, 120 bp, Homo sapiens
ctgcggggtgtgtgtgtgtgtggccatagggcggttgtggcctgagcacttttgccagcaccgcaggtaggttcttttgtccacacatggggatgtcctgacagctcccgccccagggtc

SEQ ID NO: 1543 - DNA, 120 bp, Homo sapiens
ggccgcctccccatcgtttctctccctgtggctaccctgtgagaccatctcatgtggaccttcccctcctgtccccgggaggcctggggatctgggctgggacccagaggtgcccaggtg

SEQ ID NO: 1544 - DNA, 120 bp, Homo sapiens
aggcgaatcaggcagtccttgtgggcaggtggggctccgggggagtggaaagggtatgcgggcgccagctgtgtcccatcctggtggtctgaaagaacaggaaggggcccaggacaaggg

SEQ ID NO: 1545 - DNA, 120 bp, Homo sapiens
caacgcatggtccagagtccagtccagagcccactgcggtgggcagccagaggcctagaggagctggcttagctggagcaaagatgcaggcacaacgcaccggcgacaagaggaatgatg

SEQ ID NO: 1546 - DNA, 120 bp, Homo sapiens
agacgagagtccacgacccaggaattgaaactccactggtggaaattgcccaatgagaggcaaactgtgtcccctgccgtccgtatccacccaggctcacagcttcctctgagagcagcg

SEQ ID NO: 1547 - DNA, 120 bp, Homo sapiens
ccccgcccctcccccaccttgtgctcatcctgcttattcaaaggctcttaattttgatgagtttcccactcctccggcaggcccttctcagagctgcatgcttgattctctgcagttccg

SEQ ID NO: 1548 - DNA, 120 bp, Homo sapiens
cagcgagatctgcaggaggcttacagctctgggccgtgaagtctcagcagctgctcaggaattcccggggccctccaaggggcctcagacccgaggtgtctccgctgcagagtcaccgtg

SEQ ID NO: 1549 - DNA, 120 bp, Homo sapiens
agacgcctgtgcccccagagggccaggggcagctgtgtgtcttttcccaggggcttttgaatttcctaggacttatttttagagctgcaacagaagccctcctttctgccactccgtctc

SEQ ID NO: 1550 - DNA, 120 bp, Homo sapiens
ttccggtgtttatttccatccatgattcctccccaactgaggttcccaaccgcagcagctcattggaatcgcgagtctaccgatgctcagaccccactccagggatcctgatgaattgat

SEQ ID NO: 1551 - DNA, 120 bp, Homo sapiens
aaccgaggcttttccaggggtgcagctaggttgtttttctttttctttttcttggagtcagggtcttactctgttgcccaggatggagttcagtgatgcagtctccgccttactgcaacg

SEQ ID NO: 1552 - DNA, 120 bp, Homo sapiens
catcgcaaaatgcatataatagattaccctatctcagaggcagggtgtgaggatttgatgggctaacccacagaacgctgagaaatgtccccgtcacaaagcaagcacccactgagtatt

SEQ ID NO: 1553 - DNA, 120 bp, Homo sapiens
ccccggaagggagttgaatcaaatacacatttagcttttgcagattgtattaaatgtagctggtggaaaaaggagaaagaatcatttacatattgctgagctcctgttggaggcaggtcc

SEQ ID NO: 1554 - DNA, 120 bp, Homo sapiens
cagcgtgtcacagctgactgccagtggaggatttgcagaccacgttttccacatagtgcagcctcagtgcgagccagctgcagccctggagggaagcccagctgtgccggacttcctgag

SEQ ID NO: 1555 - DNA, 120 bp, Homo sapiens
tttcgagggtcactgattccacgtgatttttgcctcctgctttggaatctaactctgtgtaatgccatgtatacagcaggggccctgtggagtaaggggttaactcaacaggcctgggct

SEQ ID NO: 1556 - DNA, 120 bp, Homo sapiens
ctgcgcccttggaatatcctgcctaacaggagtgtttttttcacctggggccttgggccacctgagacagtttatgccagcaatgtgatttatggcgaatgcctgttttttttcgcctgg

SEQ ID NO: 1557 - DNA, 120 bp, Homo sapiens
tcacgtgggtgccacatgcctctatgactgacccctaataagacttgggacattagggcttggctgagcatctctggttgcaatatttcgtatgtgttgtcacacctctatggactgaat

SEQ ID NO: 1558 - DNA, 120 bp, Homo sapiens
aggcgtgagccaccatgcccccggccacctttgttgttttctgaggatattttaacaacttctggaacacaaatctggctctgcacagtagctggattgggcaatatgagtccactgatg

SEQ ID NO: 1559 - DNA, 120 bp, Homo sapiens
ccccgctgccccagggactctggtatctggggcagaggtgggactggatgggtctgagcaggattttggccaattcccctgggactttcccagaaaagaactgatggacccaggtagcca

SEQ ID NO: 1560 - DNA, 120 bp, Homo sapiens
gggcgaccattccacagctagagaaaccaaagcgctttgaatttttttttccttgggacatctcccaaccctattcataagctttggtctcttttgtacagaagaatgtggagtgaagca

SEQ ID NO: 1561 - DNA, 120 bp, Homo sapiens
gggcgcacaccatcagcggccttggaccaggctgggaaacgtgtccaatcagcggagccctcaggggcttgtactagtctttgaagaaagccctttggagccagcttctcgcccggttgt

SEQ ID NO: 1562 - DNA, 120 bp, Homo sapiens
tcacgtcgccctctcgctgcccagcgctggggggaggctcctcttctgctccctcggcagcatctggaaacggcctcttcatggcctctgagacgttttctctctctcctgggggctggg

SEQ ID NO: 1563 - DNA, 120 bp, Homo sapiens
ccccgtaggttctgtccttggctcttttgcctccaggggcttcctcggcaatttcacctgttccatggtttcagtgatcctgtctctctggaatgtgggtggacagccttgggaagctgt

SEQ ID NO: 1564 - DNA, 120 bp, Homo sapiens
aaccgtcctccctgaaagggacagacagccactccccgcagagctggggagactcggggaccctgaagagcaggggtctcaaactgcagtgctggaaagggccaggcaggtgtgcagagg

SEQ ID NO: 1565 - DNA, 120 bp, Homo sapiens
ggacggagagtgcctgggtactgggcgaggacggctgagctccagctgccgtgtagggataaggagcctcagtggggccagtgcagtggcacttaaccacagggatgctgatgcaaataa

SEQ ID NO: 1566 - DNA, 120 bp, Homo sapiens
cctcgaattctctcttactaatccaagttaactatgaaaactacccaaccccctaaggtttcacttggccgctctgcctacactacctcaaaagagaagcctagaacttttacttccctt

SEQ ID NO: 1567 - DNA, 120 bp, Homo sapiens
tctcgggcatattgtcatccattgaaatgtaatcaaacacactttggcgctggctgctatttcctgtgttctgtcttccactcttttgagacttttgttccaatttgattttcaacttgt

SEQ ID NO: 1568 - DNA, 120 bp, Homo sapiens
ttccgggtaagcaaccacaagcagctgccatattagtgaggctgaacagctttttatatattattggctaattccacacttgttttgtcaattgcctcttcatgtcctttgcctgtttgt

SEQ ID NO: 1569 - DNA, 120 bp, Homo sapiens
agacgccaggggcccactttcccagcctcccttgcaggctgcaggcttatgattgaggatctgtcattcagaggctcttgcctcaggaatgggattaaaagctaatggccagaggtagca

SEQ ID NO: 1570 - DNA, 120 bp, Homo sapiens
agccgtgcagacttgattccagagagagtgaaagcaatggcagctgatccgtggcagtgcgcaggacccagtaaaaaggtagccatggtgtctttacttgaccagctggagcacagtttc

SEQ ID NO: 1571 - DNA, 120 bp, Homo sapiens
aagcgtcgtattctttattctttgagcgtgtctcaattgccctgtgttttcatgagactggagttgctgggtaggggattgagctgggctcggaggctgctctacgtgcttcatatgctt

SEQ ID NO: 1572 - DNA, 120 bp, Homo sapiens
tctcggctccctgcaaggttctctcaatcccccccatatatctgtgggtgtcccacctgtgctcaggcccaggcagctgccagctggcatctgatgggcaccaacactgctgatgcttgg

SEQ ID NO: 1573 - DNA, 120 bp, Homo sapiens
cagcgctggtctttgctggacaaagccgtcccttcccttggcccagtccctggcatctgtctccgagtgccctgggtggcaggtggggagaaggctcatctctatggtttgctgaagggc

SEQ ID NO: 1574 - DNA, 120 bp, Homo sapiens
tcacggtctttctaggacccggatgtggccaggctaggcaggggcctgggctgagcacagaggctgatgtcggttatggtctcggggtcctgctccctgcagtgcaacctgcacttgtta

SEQ ID NO: 1575 - DNA, 120 bp, Homo sapiens
gcccgctcctgccccctgttcctccaggaaacagggttctaggcctgccccatcatttgctagaaactcgcatcccagcttgagctcacactgtactcggaatacacagtttcctcacag

SEQ ID NO: 1576 - DNA, 120 bp, Homo sapiens
caccgcgcctggccggctttctttagttgatcctaaattaaaaactgtgaccaaaattaaggaaactggcagttgctggccaagtcctggccatctgggacgttgctgtggaggctgtgg

SEQ ID NO: 1577 - DNA, 120 bp, Homo sapiens
ttccgttttcttgtgtgatctgccctttgtcccttcactgtcactatcctcactgccctgggcttgccttgggacacagtcctggggcacccggccgtcctcagcatgcccccagcacag

SEQ ID NO: 1578 - DNA, 120 bp, Homo sapiens
cctcgctgggccctgcaggctgtgtggcgaaatggccacctgctgcgggtgaagcgggacctggcatgcctgccctatgtcactgcggcagcctctacctgcacctggtggagctggtgt

SEQ ID NO: 1579 - DNA, 120 bp, Homo sapiens
ccacgtaaggtgtgcagggagggcggggcggccagtgccccaggggtcctcagtctcacccaccttttcgagttgctttccagatcactggaccctggattcctactatctgggttcaag

SEQ ID NO: 1580 - DNA, 120 bp, Homo sapiens
gatcgtgaagccacgctggcggagccagaggggggcggggggctatgcagaggtggagagaagcctcaggatgtcgtgggggtctgggcgtctgggggtctgccctatcctgacagagga

SEQ ID NO: 1581 - DNA, 120 bp, Homo sapiens
aggcgacaggaggagcagggtggggcagagcctggcactgcccttcgccctgggagacatcatacccttcagtgcccagaactacagggcagggacccagctctattttaccaagtccag

SEQ ID NO: 1582 - DNA, 120 bp, Homo sapiens
ccccggcctctcctctgggtaaaagccctgccctcatcaggtgaggtgtggcctgacccagggcctggctgcagtgggctcagcaaacgttctttactgacagactgggttccccacata

SEQ ID NO: 1583 - DNA, 120 bp, Homo sapiens
aggcgaaggtacccagccagaactgtcacatttgtttcatttgcacaggatatttttacagttttcttctatttgtggcgagtgatcctggttttccagttgtggtcgttgctgtagaca

SEQ ID NO: 1584 - DNA, 120 bp, Homo sapiens
gttcgccgagagaaaaccatgaattagataatagtacatgtgatctgaagatatggcaggagtcacaaaggtatgtaaatgacacaggtttggaaaatgctgctctgaggcaagacaagg

SEQ ID NO: 1585 - DNA, 120 bp, Homo sapiens
ggccgggtactcccctaagtgcttttctgatgtggcctcacttcatcctcacaactatgccatcagtccaatgttcccatcttacagattaggaaactgaggcacagtaagcttagcaag

SEQ ID NO: 1586 - DNA, 120 bp, Homo sapiens
agccggtgagtggcagagccagggtttgaacgtggctgcctggcccagggtctgtgctatgagctcccaccggggtcccagcgtctcagcccttacgccctgcagggcaattgtcggtgc

SEQ ID NO: 1587 - DNA, 120 bp, Homo sapiens
ctgcgcatcctgcctcctcctgaactctctctccgccctcacttgtccctctccccctcattcaacacaaagctgaactctgcacagggcaggctggggctgaggggtggtttccaccac

SEQ ID NO: 1588 - DNA, 120 bp, Homo sapiens
tgtcggggagggaggaacagtgggcaggagggcttagagagtagggacatgacaggcagccatgtagggattgctacatgggtgagaggtcttgggaggggacggccacgggagggggct

SEQ ID NO: 1589 - DNA, 120 bp, Homo sapiens
ccacgggaggcgagacatcgaaagtgggaggtgaggtggcccatgaggaagagtgggcagggaggagttggataccactggagcagggtcctgtcccgtaggactctgggaggggtggag

SEQ ID NO: 1590 - DNA, 120 bp, Homo sapiens
ggccgccaggacctggccagggcttgactgcctctggccctcttattatagttaaaacaataacaaaacaacggaaagaagaagaaagcaaaaaaagaaaagaaaatacatacacagcca

SEQ ID NO: 1591 - DNA, 120 bp, Homo sapiens
gcacgctaacacacagatgcatgcacacagtcatacatgcatgcagcctctctcctcagatgcagtaaagcagggaaactgaggctgggcttgcctaacaaagagtattagcaagcccca

SEQ ID NO: 1592 - DNA, 120 bp, Homo sapiens
agacgggctgatcatctgctccccacacacgggaaggaacagtcgatcctcctcggtactattgttagtaataataccacccagaatagtatcagctccctggattcctctgaggatttc

SEQ ID NO: 1593 - DNA, 120 bp, Homo sapiens
tgccggccagggagctgggaggcaggacacctgggtttcctaggaggcagtcaagctcagggccctgcactccgggggagaggcagctccccagagcctctcccagtgtgaagtcagttg

SEQ ID NO: 1594 - DNA, 120 bp, Homo sapiens
aggcggcggtggggagaacgaagccgctcctacagcaaataattatgggagtcaaaattaatttggcaaagtggagcgacgctttattagaaacgtcaaattgcttttctcttattttgc

SEQ ID NO: 1595 - DNA, 120 bp, Homo sapiens
tgccgcctccccactctctgagagctgctactgacgctgtggtgggagctgatgtgtcaccaggggaggaaggggtttgggggctgcccccagggggcctcagcccatctggtgcccacc

SEQ ID NO: 1596 - DNA, 120 bp, Homo sapiens
ccccgtcttccctgccctctgccgtacccggcaccagtacttgttcctccatagccttgcacctttaaggcctgttcacaactgttgggagagaaaaggaggaaatcccttctcctcgca

SEQ ID NO: 1597 - DNA, 120 bp, Homo sapiens
ctacgccctaacctaacaggcacagaggcccacagtcctgcctaggtagctgatcagagatggtcgggatactagctaacacagcatgctccctacgttcttcacataagtgatctcctt

SEQ ID NO: 1598 - DNA, 120 bp, Homo sapiens
ctgcggtgacttgcacaaagacagcaaggaagtggcaaagttgggattcaaacccagaccatctactgcaagccatgcagagcttcgcatgagggagaagagagagaaggagcagccctc

SEQ ID NO: 1599 - DNA, 120 bp, Homo sapiens
ccccgccacccagaaaggcaattgaaacaactgcaaacaccactacatggggaaatacacatctatagatacactccatcagaaatcatgagatccagtctctgtcttcatcccccactg

SEQ ID NO: 1600 - DNA, 120 bp, Homo sapiens
agccgtcactcctgacacacatcaccatgcatccagtcccacactgtcgtctacagccacactgtctttcgcttgccagctgcctctcaccattctagataactgcctgtcccgctgaca

SEQ ID NO: 1601 - DNA, 120 bp, Homo sapiens
atccgctgccacttccaccccagctctgctctgcccacaggaagtctcccctcatgctccttccttcacaccctggtgttggggtggggtgcagacctgggatgcttaaaagctactgtg

SEQ ID NO: 1602 - DNA, 120 bp, Homo sapiens
ctgcgttcccaagcagatggggagagatcagagcccaaacaagcctctcccctggcttcctctctccccttccaactaactatgccctcctgaaagccaggggcccctcacccagagctt

SEQ ID NO: 1603 - DNA, 120 bp, Homo sapiens
gctcgggattgaggactgtggggaggggtcaggggagaggttgagaccagaaatgaaatggagcaataccagaggtcgtagggaagggtgtagggcagagccagagatgggggaaagggc

SEQ ID NO: 1604 - DNA, 120 bp, Homo sapiens
aaacggtgagtcaaggagctgcagatatggtaggaggcccagagggagaccctgggaaggaaccaaggtcaaggtgggtagcaggcacagggaggggctagggcttctccctgtggagct

SEQ ID NO: 1605 - DNA, 120 bp, Homo sapiens
tcacggaagcagaagtcaagggcagcatagaggcaggggcagaatccagaggcaagatgaagctgcaagggtgggctgccctggggcaggtaggtatgaaggaggggcaggaataggtgc

SEQ ID NO: 1606 - DNA, 120 bp, Homo sapiens
ctccgaaggctacaggagaatggcctggaagtcccaaagaggcccttgactacttttaggaaggtcagaaaacacaggtggtctcagggagtggggagctggagaaattcgaatcagatg

SEQ ID NO: 1607 - DNA, 120 bp, Homo sapiens
ttacgatgtgcagctgcaggtagtctccaaggccggaggcgctgtccacccgcaccagcacagcgctccgctggtgggtgctgaagcccacggccaggcgatccatcctcgtgctgggcc

SEQ ID NO: 1608 - DNA, 120 bp, Homo sapiens
ccacgtgtaggtgatgagcgctccccccttcccaaagatgtatgtggtcccggctgcagagagaaggaaagggagacaagaagaaatgacatcaggaggacgaggtcagcaggtcctcag

SEQ ID NO: 1609 - DNA, 120 bp, Homo sapiens
aggcgggtgcctgggtgagagcctgtgcacgcgcacagacagatgtagctgcctcatcaagaatgctagctttaattacagcaaaatagagaggtaatagagtgacacagagagagagcc

SEQ ID NO: 1610 - DNA, 120 bp, Homo sapiens
tcacggccagagctggcgccctccaacatctcccatcccaacccctctcctggcttgcccaggactccctgcttccgccctcacccagggggctgcctgggtcccaaagcaggaaggtcc

SEQ ID NO: 1611 - DNA, 120 bp, Homo sapiens
agccggagatgaaggctccctctcccagccctcccctaccccaccctctctccccttctccttctcttcttcgccagccggctgctgggggcgggtgtgaggtccctaacgatctcagcc

SEQ ID NO: 1612 - DNA, 120 bp, Homo sapiens
agtcgccatgttccctcctgcggctgactgagctctctgggggtgggggtgggggtggggggctggtcacccagtttcccggaaaggagccttgtctgggaggcctggaggactagtact

SEQ ID NO: 1613 - DNA, 120 bp, Homo sapiens
ggccgggttccctcaggtacctcggggtctctcgcctcagggacttgaacccccttgtagttggggcaatcaggggtgaggaggctccatcccagggagctcctaggaccccaaagggga

SEQ ID NO: 1614 - DNA, 120 bp, Homo sapiens
gagcgtggcgagtgccaggtagctgctgcgactcttgaaggtgacgggatcggccacgatggcacgcaggccaaagcgagcattgagctcacagtaggtgatgtcaccatccttgcactg

SEQ ID NO: 1615 - DNA, 120 bp, Homo sapiens
acacgagcccactcagatgcccgatgaagttggagggcaccacggagataaaccgccgctccgtcatgatgcccgtctcaatgttgtggaactccagccgcatatgggctcctgccatct

SEQ ID NO: 1616 - DNA, 120 bp, Homo sapiens
cctcggctaggcactagcagccagcacagctccaagaggagtggcaggactcgccagtcaagagccaacaggctgccaggggaatgctgcctacagggagttgaaatcgttcctggggtc

SEQ ID NO: 1617 - DNA, 120 bp, Homo sapiens
tcacgttgtccacagacagctgcaggctcttgccacgccggaccaccctcaccgtgtgccactcattgtcattgagcttgtgccccgcaaacagcgtttcggggcctttacctgcggcac

SEQ ID NO: 1618 - DNA, 120 bp, Homo sapiens
ccccgcacatgccacacatgaacacatacatgaccagtggctcatatttggccacgcaacacacccatgaatacaagtacacacacttatagcctcccatcacacctggagtccatgcac

SEQ ID NO: 1619 - DNA, 120 bp, Homo sapiens
acacgcagagcttttataccccagtcatacatccactctcaggactgccctttgtgtgactttaggaggtgccatgcacatagaatattaagtgaatggtgcctctggagttgtaccctg

SEQ ID NO: 1620 - DNA, 120 bp, Homo sapiens
atgcgagcccacagcttcggcctctgttacacagacaccagctcctccatctacaatgggacccgatgggacctttctacatacacatgcctggttaacgtcacacaccaagtcacgcca

SEQ ID NO: 1621 - DNA, 120 bp, Homo sapiens
acacgagtcatcaaaatcagccagagagaagggagaaaaaagcttttgctgccacaatttaaaaaccttttttaacttgtgacagacatcggggggagccccagcccaggagctgaggag

SEQ ID NO: 1622 - DNA, 120 bp, Homo sapiens
gcccgatgccgaaacagcgggtggagggcacaacaggggaagagagaaagagagattaggggcgtcagagagggtgagaggggtacaggcagaactggaggaaggagggggcggggggca

SEQ ID NO: 1623 - DNA, 120 bp, Homo sapiens
cagcggggagaggagattttggtttctttttttcttcttgccggaaaaaaaaaaaggaaaaggaggagaagcattaggctaggagggttgctttttcctttttctttttttctttttttt

SEQ ID NO: 1624 - DNA, 120 bp, Homo sapiens
ttccgggaggcggagagaaaaaaaaacagtcaacgagaaaaacgattcagatggaggagaaaataaaacacgacacaaaaatcaaagccacctggagagagagagagtgtcctgttagca

SEQ ID NO: 1625 - DNA, 120 bp, Homo sapiens
aagcgggcaagggggcctccaaccccccaacacccctaatcccagttacccctaggatgctggtagaaaagggggaaagatggggggatataaagaacctgggcctaaaagcatccccca

SEQ ID NO: 1626 - DNA, 120 bp, Homo sapiens
aagcggggtttggaaggacacctgttgggttctaatcctcccagctacccttcccaataacctctgtaggggtagtagggaccctgcacacctgggttctaagaggaaactggggttcaa

SEQ ID NO: 1627 - DNA, 120 bp, Homo sapiens
agccgagccctatgggaggaagcccagctctctgaaaggtccaagtacatcattcataaattacagaccccctttctctgaccaggacctctctcaaatgacccaaaagctggattttga

SEQ ID NO: 1628 - DNA, 120 bp, Homo sapiens
agtcgggagccctcagcagggagaactctctaatgagttctgggaccaggagagattgggagaaatcgcatccctctctctcctgcatcatcctgctggaaagacagctgtaaatccagg

SEQ ID NO: 1629 - DNA, 120 bp, Homo sapiens
ttccgcagaagccctttttcacctatgaatacattttagggaaagaatgagcacgtgttctagacacagacctcagttcaaatcgcagctctacttccctgcctcttgacctgtagcgga

SEQ ID NO: 1630 - DNA, 120 bp, Homo sapiens
ctccgtttccttatctataaatgggtgtaatgatcattcctacatttcataggattttggtgaggattaaattagatgatgcatgtgaagttttacaacagtgtctgcacagataggagg

SEQ ID NO: 1631 - DNA, 120 bp, Homo sapiens
catcgggactggccctcgcttgagactcccacctgcttatgagggggctcataatgtgtgatccaggtggtccatcaaatcaagggagcattaggataactggctatctgaaaaaaatat

SEQ ID NO: 1632 - DNA, 120 bp, Homo sapiens
tggcgaggaagttgggaagcaggcacttgtacgctgctgatgggggtgcaaactggtacaaccttgtctgaggtcagtttggcagtctctctcctaatttagaatgtgcatatcttttga

SEQ ID NO: 1633 - DNA, 120 bp, Homo sapiens
ggacgttcatggcagcctggcatagaatcatactgaaaaactggaacagtctaactgtccatcagcaggaggatggttagggaaatgatggactaaccgcacagtggaatactctgcagc

SEQ ID NO: 1634 - DNA, 120 bp, Homo sapiens
taacgaatgaggtagttctacatgaatccacatggaaagatgtctgtgatcaagggttaagtggaaaacaagcacaaagatgaaaaaaaacaaaaagcaaggcgtgaagttctgtcaaga

SEQ ID NO: 1635 - DNA, 120 bp, Homo sapiens
aaccgggcggggcaggcattaaaaagaaaataaagaagcagacccagaaaaccacactgctcttttattcaatggaacatccccgctttagcgcagtgttgaatctaacaccgaaaaaag

SEQ ID NO: 1636 - DNA, 120 bp, Homo sapiens
gaacgcgcagtatacattattgtcaacagaatcacttcatggagagggaagcgggaggaaaaaggaaggagaatgaacaaggggctcaaacccctacacactgcaaaacattcagacatt

SEQ ID NO: 1637 - DNA, 120 bp, Homo sapiens
aggcgagcccgagggagctcaggctgcccacccactgctggcaggatcgccaggacggatgggaatcccgaaacctggagatgaacctaccctcggcaactttacaagactcccttgaca

SEQ ID NO: 1638 - DNA, 120 bp, Homo sapiens
ccacgctttaaacaaacatctttgggggtggctatggcaccttgaaaaacccacaaccagcttgacatgaatggccaaagcccttgcccaaaaccatttgctcccctctccttggtaagg

SEQ ID NO: 1639 - DNA, 120 bp, Homo sapiens
tggcgccctgcctcagtttccccctgccaggaggtaaactccctgccagctgggcgggtctgtgggtgggacagagagctgttccacaggtttatcaggcagaagcccgcagcgggggcg

SEQ ID NO: 1640 - DNA, 120 bp, Homo sapiens
ccccgggcctccccgtgggagttgaagccagcaccatagggacccacccgccagaagagggccgaagcccaggcccacaggcaggaggatccaggcccctggacaggctgcctaatcctc

SEQ ID NO: 1641 - DNA, 120 bp, Homo sapiens
ctccgggcaggagcagggacaagtagagacaagcaggagaggaatgagtcacagccctttgagttaccttgggagattgtcaacagagggcccccatgccggggtcccaggcagaggtgc

SEQ ID NO: 1642 - DNA, 120 bp, Homo sapiens
acacgtgtgtgggtgtcatggggggggtgacaacaacacaggcagacaggcatagcacggaggcataccagggagacaggcacagaggcaggggcctctgactgcctcgccctggatgga

SEQ ID NO: 1643 - DNA, 120 bp, Homo sapiens
gaacgctagttgcccactgggcaaacacctgcctcaccccgccctggccaggcccccgtgccttttccccatggcccggcagggtgtgaccagggaaccctccagctggcgccagtgccc

SEQ ID NO: 1644 - DNA, 120 bp, Homo sapiens
ccccgggccagccactcccaatgactcagatgagtctaccaggaaaggtacagacccatctccagctaggcccccctccccggccccggcgccacagcccccaaggagcttggccagcag

SEQ ID NO: 1645 - DNA, 120 bp, Homo sapiens
gatcggttcctgagtccaggctgcagtggtcttgtacccagggagctgggggtgtgtgtgttggtggggggaaggtctgcaagtgtgcgatacctacagatctgtgtgttttgcagtgcc

SEQ ID NO: 1646 - DNA, 120 bp, Homo sapiens
atgcggtcggggtggtctgcagcgctccctgggtctctccatgagttgtgtgtctcaatgcatccgagaggaaggagaaacagagcccgtgtatcagtgggtgacatgcatgagggtctg

SEQ ID NO: 1647 - DNA, 120 bp, Homo sapiens
ctgcgtcaggtgtggcctgtaagcaaggaaatctgtaagggactctaggcggtgcactgggtacatgcgtctgcggtcgatacctgagcacaagttggtatgtgtgtgcatgtgtcgggg

SEQ ID NO: 1648 - DNA, 120 bp, Homo sapiens
gagcgtgtgtgagaattggagtgagggtgaggtgtgcaggcgagtgtgcgggccgcgggggtccggtggtacgcgtcagggccactgcagggagtctgcgagggaagcccgtgggggtgc

SEQ ID NO: 1649 - DNA, 120 bp, Homo sapiens
gtgcgggtccctgcgggaaagtctgcgggtgcgggggtctcggcgcgatatccctaggcccgcccccgctccgtgccgccccgccactcaccccagctcaggaactgcgccacgctgcgc

SEQ ID NO: 1650 - DNA, 120 bp, Homo sapiens
gggcggggcaggggtggagcccacaggaggtaggaaggggcttgctcactgaggccacacgggggcgccagagaccagaggagggacaggcgctccagccagcattagggaaccggagat

SEQ ID NO: 1651 - DNA, 120 bp, Homo sapiens
ctccgctgcccctcgtggacacccctggtgaggcctctgggccctgcctcactccctgtgtgacctcaggcaagtcccttaacctctctggtaagttctcagaaaggttcatccccagcc

SEQ ID NO: 1652 - DNA, 120 bp, Homo sapiens
gcacggggcagggctgggactggcattcggcacctcccgcctctcacacgtgattctttctggtcctttattagtttttgtcacatctgtcttgtaagcctcaatttccttgtctgtaaa

SEQ ID NO: 1653 - DNA, 120 bp, Homo sapiens
acacgctccccacagagccctgagcatggcacagcccaaggcccagctcacagggatgggtgagtcttgacaggagacacccccgagagcctcagtcacaccctgtccaggcagtcaggc

SEQ ID NO: 1654 - DNA, 120 bp, Homo sapiens
ggtcgactactccccaggtgcaggagggctcagctaccccccgcagcctctcactcatcccgcaagccccttggtactgagggacatcactagctctctcacccagctctgtggggagca

SEQ ID NO: 1655 - DNA, 120 bp, Homo sapiens
actcgccctgcagagggcaggtgtgttggggcagggagaggacctgagaacccagcatgaggaagtggcagggaaccctgtgtctgcccccaagggcatagccctctgtggctgggagcc

SEQ ID NO: 1656 - DNA, 120 bp, Homo sapiens
gagcgcccccttcctcaaagtcctgagaatcagccttcaggggaaggcctaggatgagagtctccagccgtggcctcgggaagcagctcccaccagatggttcttcagggctggcaggaa

SEQ ID NO: 1657 - DNA, 120 bp, Homo sapiens
tggcggccgccccctgcccttagccactctggaaacgtgcacatggcatagtggcccgctcctacccaggaggtcaggacatgagaggctggccttgggtcctgcagccctgcccgctgc

SEQ ID NO: 1658 - DNA, 120 bp, Homo sapiens
aggcgtggggccttgggtagatctcttcctcactctctggacgctgtctttttgtgtataatggagaactgcacctgttcaggtgtgagagacaaatgagcttcccagtatggccaccaa

SEQ ID NO: 1659 - DNA, 120 bp, Homo sapiens
ggccgtcccaacctttctctgaaggagcacgggcggcaatgtgattggagccggggagctccctaagcccacccttgagcctcagatgcctggctcttatttgaaggtgcgtctgttggg

SEQ ID NO: 1660 - DNA, 120 bp, Homo sapiens
gggcgtgtcctatgaaaagtccaaagctccaaatgggtggacatatggtggtttcatcatcctggtttttcttccaaaaaccttccctgcagtgttccaacaagccataggggctcccac

SEQ ID NO: 1661 - DNA, 120 bp, Homo sapiens
ccacgctctgcagcggctgcagccccatgtggttttacaattatcagtccctctgggtgcacaggaagccaggcccgagcccacttggccaccacctcactagcctacaggcgccactga

SEQ ID NO: 1662 - DNA, 120 bp, Homo sapiens
acccgactaacctccttggggtgcttggcaaaggccgctcaaggtgggtgtcctcgggctctgcctctgtgggccacatctgttcctgaattaaggcttgaggaaatggcctcagtgggg

SEQ ID NO: 1663 - DNA, 120 bp, Homo sapiens
gggcggtctccccaaggctgccctccacgtgctgccagacctggtgcgcttttaacacaggagtggtggccggatgttctcacctcccaactctcaccaccttgctggccgtggccgggc

SEQ ID NO: 1664 - DNA, 120 bp, Homo sapiens
caccgtacccggccattatttattttttactggtctattcttctagaacacccatttgagataagaacagggcactgactggatttgtggttaacttcttttctaaggagaagaaatgtt

SEQ ID NO: 1665 - DNA, 120 bp, Homo sapiens
gggcgggccctttgcctcttgggtcctgggctgtgaggtgctgcgtgggcgacagattgccctgaaggcctcagtccacgggctctggtagctgggtggcaatgcccctcctttgcccca

SEQ ID NO: 1666 - DNA, 120 bp, Homo sapiens
aggcgagggctgggactagccctctaggtgggcggccacatctctgaccacatcctctggtcctccctgaaccccggtcggagcccaaagatgatccccaacctgtagaaccgaaaccag

SEQ ID NO: 1667 - DNA, 120 bp, Homo sapiens
aggcgcttcctggggcagccccagggggttcacagcccctctgtggccacacagagccctgcaggtggagtgctccgggaaggagagcgggcggccaggcagcacttcccttcctcctag

SEQ ID NO: 1668 - DNA, 120 bp, Homo sapiens
taccgttttttcctcttagtgtgtgctttggattagtaacctgatggaaagcacgctggagttggacggcctggtttgcatctgcttctaccacctttgttatttcggcagtcctcagtc

SEQ ID NO: 1669 - DNA, 120 bp, Homo sapiens
tctcggactctccctctgtgaaatgggggaacatgaacttcctcagatcgtgacagcgcagctccacctggcacagggtgaatgcccacaggtggcagctgagtgacgcagggagggccg

SEQ ID NO: 1670 - DNA, 120 bp, Homo sapiens
gctcggagcacacaactgggtccctgaaaccctcaggaacttgtttctgtcctgccttctgccagaggggctggagcagcctctacccatggcacctcaagtctgcacccttttatgaag

SEQ ID NO: 1671 - DNA, 120 bp, Homo sapiens
gcccggcttccctgtacttaaaccgtccttggggctagcaaggagccagtctggctccaaagcccagaaacccttgtttacttgatgccacccagtgccgagggcctgcaggtgcccact

SEQ ID NO: 1672 - DNA, 120 bp, Homo sapiens
atccgtctgtggctgaggggtgccagcctaggcctcagctatcaacatcctcccaactgtttcccccctccccaccccaagtgaactgctcagctcccaccttgctcagggaagggggca

SEQ ID NO: 1673 - DNA, 120 bp, Homo sapiens
ccccggctgccttgccactctgtccctgctggcatcaccccctcagacaccaggggaggatggcccaggactgctgcccctggaaaagacaaggaagcacccgaagctttcgcacagttc

SEQ ID NO: 1674 - DNA, 120 bp, Homo sapiens
tcccggcaaggacagcgcccgcatccatcctcacctaatactgtatggagtgacgggctaaggagaacaaggccagttcctgcagactccgagcagcgctggggagaagctccctgagac

SEQ ID NO: 1675 - DNA, 120 bp, Homo sapiens
ccccgcgggaaagcctggtgggaagcccagctgtgtggtacctggtgctccacctgccttggtgccatcacagcccggacagtggccactggcctgcaaacgcgcccgggccctggaggc

SEQ ID NO: 1676 - DNA, 120 bp, Homo sapiens
aggcggcctgaactggcccgggccactgggccgcaaggttctggtttcttattgctcaacctgggggccaggggcgttgtaaggacatccaagtgagctgccctcctttgctaaacagag

SEQ ID NO: 1677 - DNA, 120 bp, Homo sapiens
ccccgctgtctggacatgagagcctagccagaaccacgggcttcctcttaccagcaccaagctgtcgtgaggccccgccaccgccacccaccaccacctcccactgtggagggtgcgtcc

SEQ ID NO: 1678 - DNA, 120 bp, Homo sapiens
gaacggggtgctccccgggtacccacacctaatgccccctgggcagggctgctccttggctggagggtgggaaggggagacaaaaatcacagcttttgaacagtggttgggaagttattg

SEQ ID NO: 1679 - DNA, 120 bp, Homo sapiens
gagcggggttgcgcgtcggagccggtggggcgcgggaggaaagggcagggcccgcgcacggggagcctgggcccgggaggggaaggcacaagaacccacttcgcccgagagcacggggga

SEQ ID NO: 1680 - DNA, 120 bp, Homo sapiens
ccacggtcccgtgaagcaacctcagctcagaagcacacggagggtgcctggtgttcctgtccatgcagcctcagcctagcagctgccaaaagggcgacctggctcccccacggtcgcagt

SEQ ID NO: 1681 - DNA, 120 bp, Homo sapiens
agtcgctgcactgtccagctccagccacagcaaaggccggggggcagaggccgtgcacacagggctggcacacaggggaggcggcgacaaagaacgcagcctctaacgttatatattaaa

SEQ ID NO: 1682 - DNA, 120 bp, Homo sapiens
cttcggctccatcaactgcatgagactcagccagacacggcaccgtgattccatttacattaataacaagaaagccagacaaaatgctcgcagactgtttgggaaagtgtacggggtagt

SEQ ID NO: 1683 - DNA, 120 bp, Homo sapiens
gggcgggggggacctggaagggcatatttgggggctctgcaggttgttacatggggactcattgtgaattctatgaatatacattatacagtgatgttttatacacaccacagcgggaag

SEQ ID NO: 1684 - DNA, 120 bp, Homo sapiens
gtgcgcgcctgggacccgcaactgtgtgtaggacgctggcacctgggctgtgccctaggcccaggacagtgtcctggccaggccaggcgcagttctaggcggcccggggaaggcgaaccc

SEQ ID NO: 1685 - DNA, 120 bp, Homo sapiens
agccgcgcggtggggagggttggccccgccccgcttgggaggggtgcccggggcgccccctagtggtggccaccgggagtaagccttgcagaagaggaagctgtccccgcccgccccgcg

SEQ ID NO: 1686 - DNA, 120 bp, Homo sapiens
ctccgtccggtttctgcatctttgcccctggcattccttcctcctccagtgatcacgacctgtttctggggttcacctcagcaaacgccgacctcacactcacctctcccagggaggctt

SEQ ID NO: 1687 - DNA, 120 bp, Homo sapiens
ccccgcctgggccttctctctctgaggctggcgtacggtcaatctgcacaacctctcagggcctctgtcagcgtagcgtttcacacacgtgtggtgtggacgatgggacaaagacaatac

SEQ ID NO: 1688 - DNA, 120 bp, Homo sapiens
caccgccagctctgtgctgaccgccccactgtgtctaggctccctccctaagcaactttgctcatgcacaaggtcagtccttctgtgtgcatttattaagtgcctcctttgagtctgagg

SEQ ID NO: 1689 - DNA, 120 bp, Homo sapiens
ggccgccactcctgggggctttcaggctggtgggggaaatagcccggtgtgggtgatggggcatgatgggggcgctaacatcccagccacagagcatccagggagccagtgagtggggta

SEQ ID NO: 1690 - DNA, 120 bp, Homo sapiens
gggcggggcggggggccaggcaggtgtccgcgagggagtgacccttgggcaggtcttgaggagttctgagaggggttggaggtgagacccaggccagggaaatgtgcatgggcccagggc

SEQ ID NO: 1691 - DNA, 120 bp, Homo sapiens
tccgtgggcagccaggaccccagggtccctcgggacaaagcttctgctctgttcccagtacccagatctcccccactcagaaggggccacagagcagggctgggggacctttgctaaccc

SEQ ID NO: 1692 - DNA, 120 bp, Homo sapiens
ctgcggaacctagcaaggtgagggttccctgattcccaacccgagccttggtttccccatggacccacccacctctgtgcagcgccactgggaagcagggcagggaggagcgcgatggga

SEQ ID NO: 1693 - DNA, 120 bp, Homo sapiens
gggcgctccctggtcctgtgtaaagctttgtgcagtgagggttgggattccggctgcagcgctgctccagcacccctcccccctccaagtgctggagctgggaccccagatcagagtgga

SEQ ID NO: 1694 - DNA, 120 bp, Homo sapiens
ccccgagtggcctcaagtgacaaccaggcagggtcagctgggctccaaggaccatccctccctcccctggcagccccacgtagctcctgccacatcaggagtggggctggagtggcagcc

SEQ ID NO: 1695 - DNA, 120 bp, Homo sapiens
aggcgtgcagggctgggtgcctctgggtccccctgtgccctgatctgctgggcaaggccaggaggcatggcgacccctggtggtgacatgggaggtgctgggtgcagaggtgggatctgg

SEQ ID NO: 1696 - DNA, 120 bp, Homo sapiens
gggcggggccaaggtcaaggctgaggccagggttcacagggacagaggatctgagaggggggctggcggtgggcagtttattccacttcatgcagacactgacccacgcactcacggagc

SEQ ID NO: 1697 - DNA, 120 bp, Homo sapiens
ctccggtctcctctctctcgccttctttcttgctcccctcccttcctgaccctcacatgaactctgcttcccggccacatttcctgtttcctctgcctggacacccttccgccgcccttc

SEQ ID NO: 1698 - DNA, 120 bp, Homo sapiens
ctccgcctcccagagtgctgagattacgggcgtgagccaaaatgccctgcctctttcacttttcttgttctgcctcctcccgttcctgctcctgcctctccagggttggggagtgggaag

SEQ ID NO: 1699 - DNA, 120 bp, Homo sapiens
tctcgaggcaaggagtgggcacctgtgtctcccttcttcacagcaaactccttaactcgagtgtgcaggtgtcccaggtactcttctgctctctgctccctgagcaatacatggagggct

SEQ ID NO: 1700 - DNA, 120 bp, Homo sapiens
gcccggacttctcagggctctcatggaactcacagggatggggttagagaggcacccactttttccctctccaggatgatagggtatcatgatgcttcctgcccccgcaccttcccctca

SEQ ID NO: 1701 - DNA, 120 bp, Homo sapiens
ctgcgaattgtaaaggacccgaccaggggttctgaccaggccagtggtgcccaggtgcctcagctgagcattctctctccacaggtgacccgttgcctgcccgccaggaaggtgtgaaga

SEQ ID NO: 1702 - DNA, 120 bp, Homo sapiens
aagcgggcagaggagatcctgcgcctgcacctgtctcaactcccaccctaacagggagtgggccattccctgggactctcgctcctgcactgccagccccttctcctctccccagggcct

SEQ ID NO: 1703 - DNA, 120 bp, Homo sapiens
gtccgaaaacttggactggggtcaggctcaactacatacccgccctaggacactctcaggcgaatcattcaattatctgggccagcttcccaaatccgtaaaccctgcccacttcagtgt

SEQ ID NO: 1704 - DNA, 120 bp, Homo sapiens
gggcgtggtcgaggagagaggaaggacagggtgttgggaggggagatgagcctgatcctgtaaggaccaggcgtcctcattctggcttcccgctctcacaggctcggtggaagccctgca

SEQ ID NO: 1705 - DNA, 120 bp, Homo sapiens
ctgcgcgcctgcccgcccctccgcaaggccttggcggtagatgctgccttccgagagggcaatgctgcccgcctgttccgtctgctccagaccctgccctacctgccaagttgcgctgtg

SEQ ID NO: 1706 - DNA, 120 bp, Homo sapiens
gcccgccgggaagccctggcccgcttcgctcgtgcctttagcacccccaagggccagaccttgcctctgggcttcatggtcaacctcttggccctggatggactcagggaagcacgggac

SEQ ID NO: 1707 - DNA, 120 bp, Homo sapiens
ccacgggctgcccttggacggagaggagagagttgtgttcctgaggggtcgctacgtggaggaagggctaccgcctgccagtacgtgcaaggtgttagtggagagcaaacttcgaggacg

SEQ ID NO: 1708 - DNA, 120 bp, Homo sapiens
gcacggacagacctgggtccccagcctgaggagggagcgtgagcctcccagagccccaggactgggccagagcacttaggtttctttttccatggtttccaggtaataaaaggaacttgt

SEQ ID NO: 1709 - DNA, 120 bp, Homo sapiens
atgcgtgcacagggacgtgctgaggaggcttgggggccaattggctctgccccgccctgcctctgatccccgcctcctcacctgcccgcagccaccttctgggtgaaccctcagttcaag

SEQ ID NO: 1710 - DNA, 120 bp, Homo sapiens
atccggctggatgagacggatgacccggacgactacggggaccgcgagtcaggctgcagcttcgtgctcgcccttatgcagaagcaccgtcgccgcgagcgccgcttcggccgcgacatg

SEQ ID NO: 1711 - DNA, 120 bp, Homo sapiens
cttcgcggtctacgaggtcaggagggtggatcaccggtggatctcactgagcaggcagaggacctggcgcccccgacccgcagtgcaggcgggcttccaccagggggcgccagggaccat

SEQ ID NO: 1712 - DNA, 120 bp, Homo sapiens
ggccgaaagagaggaagggggttggctcagggaagggagattctgggattcacctcacgcttagagggcggcctgctgctcttggaggagggagctggctcagctgatgcctgggagtac

SEQ ID NO: 1713 - DNA, 120 bp, Homo sapiens
ctccgtcttggaagctgtgagcagaagctggcaggggaaagataggggatagggagggcctgtcggccaaggtgaggctgtgccagtcgctctgggattagaactccttgctcttgccct

SEQ ID NO: 1714 - DNA, 120 bp, Homo sapiens
ggtcgcagtcttggcccacacccaaaccccctggcagcagcctgcggtggccctttcctgtccctgggctttggaacattgcagttggccaccccgggggctggcctggagcctctgact

SEQ ID NO: 1715 - DNA, 120 bp, Homo sapiens
tcccgtctaagaactcaagacctctgcccagcatgcactgtgaccccgccctgggacaaacacacatctctgacttcccctgtctctctattgcaggtccctccggaggtaggtgtggca

SEQ ID NO: 1716 - DNA, 120 bp, Homo sapiens
acacgggcaatactatcagtgattgccccaagtcacttcactttgctaaaacgcacataaccattcccagcagcaaaaacttgaacgatgtaaaggaattcaacttaaagatattcatgg

SEQ ID NO: 1717 - DNA, 120 bp, Homo sapiens
cttcgttagaagccttcttcaggttggccttgacttgcctaaaacctcagtgaggacttgagtaaagggcagacttggagatggggtggggttcatgctgattccctggaattgtgctat

SEQ ID NO: 1718 - DNA, 120 bp, Homo sapiens
tatcggaaaattggcaaaggttttagaaggtttaaactggccagatgtccaggcacccttcctgcttctgtaaaatgactgactttaatattttacaatgtgctgtattttctcttcttg

SEQ ID NO: 1719 - DNA, 120 bp, Homo sapiens
cagcgaactcaaggaacattacaagattgaagctttcactcctttgctagccccagcacaggtaagagttgttctaatagttctcactaattaatattacgtttttaaatcgatgaccaa

SEQ ID NO: 1720 - DNA, 120 bp, Homo sapiens
ccccggggatttcccacaaatagaagcattcacgtatcgagataaaaggacagcagcgacggtggggttttcagaatcttgttctctggacaatgactcacagtctctcccctggtttgg

SEQ ID NO: 1721 - DNA, 120 bp, Homo sapiens
acccgatggttgttgcaaggattaaatgagttaatacatataaaatgcctaagaatacattttagaacagtgcatggtatttagtaagctcaagaaatgttagctattattaagtagtta

SEQ ID NO: 1722 - DNA, 120 bp, Homo sapiens
tgacgcggtagtcacctcagggtcaaagcaatgccctgccaagaaatgtatttgttgtttgcagtttgttttgctattcaccctatcgacttcagattttgagctcctgctccaaagact

SEQ ID NO: 1723 - DNA, 120 bp, Homo sapiens
acacgaatggtccttcctgggacatctccatggctgaggtctgggacctccaatccttcgtctcacgatactttaccttccatggaaaatatttcaaagtactctttcttttagtctctc

SEQ ID NO: 1724 - DNA, 120 bp, Homo sapiens
cttcgactagacttagctccttaagacaaagaccatgtctttttcatctttgcgtctccttcagctcctagcccaacagctgacttctatgggtcacctaacaatgttaaacaagtgaat

SEQ ID NO: 1725 - DNA, 120 bp, Homo sapiens
tgccgtctaaatctgtctcctttcctttcttgcagaattgtctactgacaagtccatttgaagacattttcaagcagtgtctacgaacaattattgaaggcacaagaaggtcagatttca

SEQ ID NO: 1726 - DNA, 120 bp, Homo sapiens
cagcgcttggcctgagtgtcttgggtcaaaatgcaggccacgcttccccgtggctcaggctattccagcctccctacccacaccccaggcccctacatatagcctgagaacttgcacaaa

SEQ ID NO: 1727 - DNA, 120 bp, Homo sapiens
tggcgatgctgggtgtgcacacaaagatcctgtccattcagcagaacctcctcagggatcccctgggccccagccaagtgacaaccacatctgtgaatggggagaaggaagcgccctccc

SEQ ID NO: 1728 - DNA, 120 bp, Homo sapiens
cagcgcagaacccagggccaggcgccgatcactcctgcgatgtggacttggtcgggccccctgctctgaatgacagcaggagtggattgagcggcaaggggactggcactgggcggaaca

SEQ ID NO: 1729 - DNA, 120 bp, Homo sapiens
acacgtcacatccaggtgggttgaaaacagtccccagagtgcagatagcatttctagtcctggttggaaggctcagggaggaaagcaggagcttggaccaggtttgcgggctctgctgct

SEQ ID NO: 1730 - DNA, 120 bp, Homo sapiens
acccgagggacccctaatcacccaccccccacagaacttcttcaaagagctccggggttggtccccagctgtgtgtggccttgggtgagaggctttgtttctccatcttccatccctgta

SEQ ID NO: 1731 - DNA, 120 bp, Homo sapiens
gaccgctaccccccaatggaggactctcagcagatgggcaggggatgagggcttggcctgagcctcattcccgcaggcttaggtggcttcatcattacagccattccgatcaagcagcac

SEQ ID NO: 1732 - DNA, 120 bp, Homo sapiens
gtccgtgaaacaatgccacctgaggggctgcgtattcccatgaacaaaatacatgcatgtccatcccttatctggtttgggacttgcctgacctgatgctactaccccatattataggca

SEQ ID NO: 1733 - DNA, 120 bp, Homo sapiens
ggccggggctcaaggcactcagctgcccctcctctctgagagctgtgtcctggggatgggcaggaatgatgcctgtggggttagaagcctgagagaaggaggggccagagcccacatgcc

SEQ ID NO: 1734 - DNA, 120 bp, Homo sapiens
tgtcggtgccctgagctttagttcccatctgtaaaatggggatcgtgattcaggctctggccacgtcactaggcacccccaggaggatgtaaagaattcaggaacatgaagcaatgggta

SEQ ID NO: 1735 - DNA, 120 bp, Homo sapiens
gggcggcctggcaaagtcccatggcaagaatggggagaggcacaccctttactcacccctaccacagcttggcccagggccatcattgccacttactcaatggtccaggcctgttttcct

SEQ ID NO: 1736 - DNA, 120 bp, Homo sapiens
ccccggagtcaggggccgaggagcccttcctgtccaatgccagctccctgctgtccctgcacgtggacctggggccttccatcctggatgatgtcctgcagatcatggatcaggacctgg

SEQ ID NO: 1737 - DNA, 120 bp, Homo sapiens
acacgaggctgcctaggctggggtcccaggtggggcccagccaggaggtggggtgtggacccggccctggcggcggagtcagggtcccaagatcccacctgtatggtcgctggccagtga

SEQ ID NO: 1738 - DNA, 120 bp, Homo sapiens
agccgtgtttcccctctccctccctctccacgtgggcagggcaggccccatcgctttcctctgataaccacatggacacatcctgaagtcagcccaggcgccctgagcatcttggggcac

SEQ ID NO: 1739 - DNA, 120 bp, Homo sapiens
aaccgaccccccttttcacgtcccttctgcctctgccccgttggatgccctgactgggggcaggggaagagacagggcacagctggccacagggctcagccactgagcaggctgttccgg

SEQ ID NO: 1740 - DNA, 120 bp, Homo sapiens
ggacggggagtgtcctgtcagggaccagatgtgtcctgcctcatccctagctccaatcccttccccacgtgaccggggattctggttgcaataaaacatgctgctgctggtggcggagct

SEQ ID NO: 1741 - DNA, 120 bp, Homo sapiens
tcccggaggcagacagtctcccagagctgagggcttgcctctggagaccccagccccagagggctttgtggaggacaggccttgccctcaagaacgtcgtacctgacgctgagcctgtca

SEQ ID NO: 1742 - DNA, 120 bp, Homo sapiens
caccgagggagcatgcaggagggatgcttggagctgggagggtctaacagtgctgcttcaagattcattccatccacggctgtttactgagcatctccagtatacaaggcacggctccgg

SEQ ID NO: 1743 - DNA, 120 bp, Homo sapiens
agacgccatccctgctctctaagagtttaaattctagttggaagggggatattaaattggtaaacaaataagagatgatttccagcagtggtaaaggctacgaagaaaacaacgtgatca

SEQ ID NO: 1744 - DNA, 120 bp, Homo sapiens
cctcgcacaagaaggggcagaagaaaagccggggcctccgggggtctcattaatcattaattcatttgaaggagcagcctgactttgtcctttgtccttgctctctgccccatgaagtgt

SEQ ID NO: 1745 - DNA, 120 bp, Homo sapiens
gggcgaccctggcttgcggctggggtgtcagtgggtgccgggcgcaccctctccctgcttatgctcacaggacccattcagcaccggttcccactggcggcagctggtccctcttccctc

SEQ ID NO: 1746 - DNA, 120 bp, Homo sapiens
tgacggcagtgcctgaatggttaatgccctgctgggctgggcctcaggtgaggctcccaggtcatgggcacccaagcactgcaggcaaagtgtagagccaggcagggccaggggagtgtc

SEQ ID NO: 1747 - DNA, 120 bp, Homo sapiens
gtccgtgacagtccaagagttgattacaggctgcatgtttggttttcatgaaacgtacgtcaaggtgtgcagccctcaggccagccaggttgatgcccacggagcacccgagtgaagctg

SEQ ID NO: 1748 - DNA, 120 bp, Homo sapiens
tggcggcttgtactcccagccccacgttgcccaggaggggctctggggttcctgtggggaccaaggtgggtaactgcagatgctcatgcccttcctgagggcacctcatgctccaggcct

SEQ ID NO: 1749 - DNA, 120 bp, Homo sapiens
ggccgtttgtttcccacagatcctgctgtcaacacctacctgggagggaagggacagtagcagacccctggaggactctgagccctgcagcagccacccaggacctgggcctgcaggatg

SEQ ID NO: 1750 - DNA, 120 bp, Homo sapiens
gagcgccactgggggattggggttcacaatgtttccagagatgggaggagtaagccacctgtccctgtggcagcgtagtcctgggaacagggccgtctccttgggtgtccatgacagtga

SEQ ID NO: 1751 - DNA, 120 bp, Homo sapiens
ggccgtgctccctctgcaacccataggagaggccttccttgcctgctcctagcttctggtgccttgctggccgttcaggcattcattggcttgcggctgcacagccagtctctgcctatg

SEQ ID NO: 1752 - DNA, 120 bp, Homo sapiens
tgacgacaacaacgttggcactaccaatcccccaccctccagaggggtaaccagtgttaccagtttgctgtgtttcctgctacacctcgccttattcacttccatttgtatctgaaaaac

SEQ ID NO: 1753 - DNA, 120 bp, Homo sapiens
aaacgtgttgcatggtttcttttctatagaagtggtaaaatgctattgtgtcctgtacattattgattactttttttcatttaacagtagggagatgcctgggagtacacagagaactgc

SEQ ID NO: 1754 - DNA, 120 bp, Homo sapiens
gtgcgatcatcgtcatacacaaccccttgtgcacaatgcatgagtgtttctcagggtaggtaccaagaagtgaaattcctgggtcatagggcgtgagtccgacatttttctccattctgc

SEQ ID NO: 1755 - DNA, 120 bp, Homo sapiens
ctacgacgctccatatatgaaacttaagtttctgctagttgccatctttgatctatcatgtatgcagtgacctactaagactgtaattggtacagtagattcttgtcatctgtgtgtgaa

SEQ ID NO: 1756 - DNA, 120 bp, Homo sapiens
tcccggacccctaagataactactaatgacaacttcatttatattccttcagacattttctggctgtggatgtactaaaatgtatcctattattctctgccctaaaatggaatcatacaa

SEQ ID NO: 1757 - DNA, 120 bp, Homo sapiens
gtacgtgttggtatggtcattttaaccatttttctagtgatggctttgaggttatttgcagtttcctagccatctcaaagtgtgctgcggggatctcttttgcatccctctgggtgcaga

SEQ ID NO: 1758 - DNA, 120 bp, Homo sapiens
gcacgtgctgccaaaatagaataatgttggtcctctcctcatgtgccgtggaactggggtaaaactgcgtagtggctgcagctgcctgtccataccggaatcgagtataacacggtgcct

SEQ ID NO: 1759 - DNA, 120 bp, Homo sapiens
aagcgtctgtgacatttgtaaaaagtggtatttaatgatcttttattcacttgtctgtttagtttgttgaaatcttaagtggcatcctggtctgggaaggagtgctgtctgcgcctgccc

SEQ ID NO: 1760 - DNA, 120 bp, Homo sapiens
ctccgctgggcacagcgtggctgcttcaggggctaagcacacactttctgtcttctaaagggccgccacatgccaggagctcaggtgtgagcccggctctggctcttacctcatagggtc

SEQ ID NO: 1761 - DNA, 120 bp, Homo sapiens
cagcgaggcaccacccggcttggcatctgcctcggtggacttactacctctagaaggaaatacctgagttcctctggcctcagctcctagagtgactggtgtgctgtccctgttactctt

SEQ ID NO: 1762 - DNA, 120 bp, Homo sapiens
caccgtcatggccagttgctgcagtttctttccagagaacctgtgtatgtgtaaagctgtacaggcgtgggtacaccacacagcctgtcttgcactgtggactgttgagttactagtaca

SEQ ID NO: 1763 - DNA, 120 bp, Homo sapiens
caccgcatatctgtattcatgtctgccttggtcttttcaacatctgtgtggtagccgtgtttgaattacccattccctttttggggaaccattaagttgtttcagcaatttttactgtag

SEQ ID NO: 1764 - DNA, 120 bp, Homo sapiens
tagcgaagggaagccctacctcattattctacttttccagaattctcctggctattccaggctgcatgtttaccttaaccttccctgtgatgtcttcatgccgttgtcttcttatgcaag

SEQ ID NO: 1765 - DNA, 120 bp, Homo sapiens
gtacgtctttccatccactcacgtctatttaatttgactttgcattacacagaaagctggtcttggtctgtctacctcggcatctagttgtcctcactgccccctagccgaccccacccc

SEQ ID NO: 1766 - DNA, 120 bp, Homo sapiens
ttacgttttgctctgcctaatggttacttgatactgtcacgccgacagtgtccagttcagtggtctttgcagttgaaatgctcccgtacacactgtcttgttaaaaatgccagtaagttc

SEQ ID NO: 1767 - DNA, 120 bp, Homo sapiens
gagcgtagggctgggatgggttgttttccaagcttctgccactgtgtggctagctcttcccactgggaagttctgtgtacccggaatgtcggagtggagtcctgttctagtgtccagcac

SEQ ID NO: 1768 - DNA, 120 bp, Homo sapiens
ccacgtccatgcaccatttcacattcccaccagtaagtaagagggttccaatttctgcgcattcttgccaacactagttattatctgactttctggttataatcattctaatgagtgtga

SEQ ID NO: 1769 - DNA, 120 bp, Homo sapiens
ctgcgtcttttgagatgagtatcaggtttttttttttccttttatcatctgatgatgaacttaatgtttccatttgtattaatggaatactaagtccctctgtgatttctgaaccaagct

SEQ ID NO: 1770 - DNA, 120 bp, Homo sapiens
agacgctgtctcaaaaaaaaacaaaaacgacaaaaaaaaaacaaaacagaaaaaataaactaaggcaatgacagtccctggcaaatgctgggagggaggcagcagtggtcagggaaggta

SEQ ID NO: 1771 - DNA, 120 bp, Homo sapiens
agtcggggtcagtggtcatgagtgtggctttgagcccaaaaacttggtttctgttccctactttgccactcagtagtgcatgactttggccaaatttcttaaattcatgaagcaagtttc

SEQ ID NO: 1772 - DNA, 120 bp, Homo sapiens
ttccgggtgaatgaaatggggataaaaatagtgttcaaacctatccgttggtttgtgtgaaactgaaatgaatagtatcgtgcaggtacttgtgagcaaggggagctgctgtttcctgtc

SEQ ID NO: 1773 - DNA, 120 bp, Homo sapiens
gcacggagggtcttgtaacaccagctggggctggccttcttttaggagcttcagtggttctgaaaacttttatttgtttgtttgttttagtagatgtggggtctttctgtgttgcccgga

SEQ ID NO: 1774 - DNA, 120 bp, Homo sapiens
tttcgtttttaataagactttcaagaaatttattttattggccttttgaaaaaagcagctttagataaagtaagcagttctgctttcattttataatttatttctacttttgtttcatta

SEQ ID NO: 1775 - DNA, 120 bp, Homo sapiens
ctccgtctcaaaaaaaccaaaagactttatcttatttcctatatgtttgtggtttcagtcctgatgtataatttgaccctagttagaatggttatctgaggaagtggcctgtacgatttc

SEQ ID NO: 1776 - DNA, 120 bp, Homo sapiens
taacgtatgattatttttataaatgttccatggcagtgggaagggattctctgtcacattccacatctggatcagttcctccccattttgttggtcaaatccgatctgccatatcctgtg

SEQ ID NO: 1777 - DNA, 120 bp, Homo sapiens
gctcgtgaaggcagagggagggagagctgaagggccagcaccttctcacctgtgggccccctcagtgctcggtcccagagcatgcaggactgtgcctcgtgttcagtttgctggtctgac

SEQ ID NO: 1778 - DNA, 120 bp, Homo sapiens
aggcgcggagccgccgcaggtgtttcttttactgagtgcagcccatggccgcactcaggttttgcttttcaccttcccatctgtgaaagagtgagcaggaaaaagcaaaaggcgctggtg

SEQ ID NO: 1779 - DNA, 120 bp, Homo sapiens
gagcgagactccttctcaaaaaaagaaaaaaaagaaaataaaaatagttatggtttgtttcaaaatactccaggtaatgggggttacaaagaaagaagaaacactttcttccaccctctt

SEQ ID NO: 1780 - DNA, 120 bp, Homo sapiens
ggccgagtacttctgacttcaggaaatggatgaaattaccagacttaggggaagggaacagtgtggggaagagatctgggagggttctcattcatgggttgttgatttggaagaccagaa

SEQ ID NO: 1781 - DNA, 120 bp, Homo sapiens
ttacgcctctgttttcctatctttaattggggacagtgctctgtcagtttactgtgacaagcaagagtagccacagtagacccacctggaagcaactagaaatgacttggctcttgctgc

SEQ ID NO: 1782 - DNA, 120 bp, Homo sapiens
gcccgccacagcccacagttcccactcatttctgccccacagtccatgctgctcctggccccaaagctgaacgaggccaacctcaatgtggagctgatgaagcactttgcacggctacag

SEQ ID NO: 1783 - DNA, 120 bp, Homo sapiens
atccgctgcaacaccacagtctgcctgggcaaaatcggctcctacctcagtgctagcgtgagtgtcctgcacaactgctggagcccggtccctgtcgcaggaccacagcctcctccaggg

SEQ ID NO: 1784 - DNA, 120 bp, Homo sapiens
gcacgctgttggccccatatctgggttcccagaggaggagtgagttggccgaagtcacacagtcaggagggatctgggatctgaatccaggcgtgcttggccccatggcctgtgtgcatc

SEQ ID NO: 1785 - DNA, 120 bp, Homo sapiens
tgccgtgcccagacagttaacaggaatgaacggtcagctgggcagggaggaagggagcctgtgtccgagccctggggacagctgctgttgtggtcccatgccctgaggcagtgtggaacc

SEQ ID NO: 1786 - DNA, 120 bp, Homo sapiens
catcgtagaccagacacagggtccttacctctgccttcagccgagccactagggacccgtttgcaccgtcccgggttgcgggtgtcctgggctttgctgccacccacaacctctactcaa

SEQ ID NO: 1787 - DNA, 120 bp, Homo sapiens
gaacgactgtgcccagaagatcctgcctgtgctctgcggtctcactgtagatcctgagaaatccgtgcgagaccaggtgaggcacagctgggcctgggccctgggctggggctgtagggg

SEQ ID NO: 1788 - DNA, 120 bp, Homo sapiens
cctcgttaccccacaggccttcaaggccattcggagcttcctgtccaaattggagtctgtgtcggaggacccgacccagctggaggaagtgggtgagtggcttacactcgtgttccctct

SEQ ID NO: 1789 - DNA, 120 bp, Homo sapiens
gcacgtaggcctcatggagtggccattgtaggccagagccagcagcaggccccattcaaccccagcggccccagggagcaggctaggcagatggtgcctggggcattccctgaacttcct

SEQ ID NO: 1790 - DNA, 120 bp, Homo sapiens
caccgtccccctttcccctcctccagtgcccacccagccatgggggtcagcaaggagaggccactcctgggtctagaaccagaccagttctgcttgggggatgggctcaggttgggctga

SEQ ID NO: 1791 - DNA, 120 bp, Homo sapiens
cagcgtccatttaatagatgggaaacagggcctgaggagcaaatgaggaggaaggcaaaagacagtggtggggcccgtggctgggatgatgctggggcgggctcacttgccctttagcat

SEQ ID NO: 1792 - DNA, 120 bp, Homo sapiens
ggccgagtctgtgctggcccagcaggacgactggagcaccgggggccaagtgagccgtgctagtcaggtgagctgggtctggtggggaggtgtgtgtatggggctctttcctccttgggc

SEQ ID NO: 1793 - DNA, 120 bp, Homo sapiens
tcccgctcttctacaggtcagcaactccgaccacaaatcctccaaatccccagagtccgactggagcagctgggaagctgagggctcctgggaacagggctggcaggagccaagctccca

SEQ ID NO: 1794 - DNA, 120 bp, Homo sapiens
tgacggtacacggctggccagcgagtataactggggtggcccagagtccagcgacaagggcgaccccttcgctaccctgtctgcacgtcccagcacccaggtacccagcacaggtctggc

SEQ ID NO: 1795 - DNA, 120 bp, Homo sapiens
tggcgagagggtagagatggtggacctcagccagaagtgggccccactgcagcccacacttctctttacagccgaggccagactcttggggtgaggacaactgggagggcctcgagactg

SEQ ID NO: 1796 - DNA, 120 bp, Homo sapiens
agtcgtaagtgcttcccctgggtgggctgaagactagggctccccgactagcccgcccctacaggcccccggcaggcactggctggagagctgagaccggggctccccttcctgacgcca

SEQ ID NO: 1797 - DNA, 120 bp, Homo sapiens
gcccggaagaagcgcgaggagcggcggcgggagatggaggccaaacgcgccgagaggaaggtggccaagggccccatgaagctgggagcccggaagctggactgaaccgtggcggtggcc

SEQ ID NO: 1798 - DNA, 120 bp, Homo sapiens
tcccggctgcggagagcccgccccacagatgtatttattgtacaaaccatgtgagcccggccggcccagccaggccatctcacgtgtacataatcagagccacaataaattctatttcac

SEQ ID NO: 1799 - DNA, 120 bp, Homo sapiens
tgccgggctcagtctagcccctgggaggcggctggggtctggcgccgccctgcgcagcccgcgcccacgtcagacgtgaacatcaatttgcttcgaaagccaagggtaaagaggcacgat

SEQ ID NO: 1800 - DNA, 120 bp, Homo sapiens
cagcgcccgccggagaccttacaaccgcccgctaaccggggaggggggccggtaggggcgcctcgggtctcaaggcgccgggagggtctgcgggccctgaaggtccctgggtccgagcca

SEQ ID NO: 1801 - DNA, 120 bp, Homo sapiens
tctcgtgccttgcctttcccatgcctagggaactcctacttacgtttcagtccagttcaacattcacctccccattgcaattaatcattagtctatacctttcttggcacccaggaccct

SEQ ID NO: 1802 - DNA, 120 bp, Homo sapiens
ggtcgttatcaccctcgctttcacttgacatccagttaaaaaacccaggaggtctaatatttctccaatatcatcgtctcatggccatcctgagcccaccactcatcctgtccaccactg

SEQ ID NO: 1803 - DNA, 120 bp, Homo sapiens
ctccgccctaagtctctgcaacagacctccctccacaatcagcagcagggaacgttctaaaacaaatggcaaatcttgtcactcttacacttaaaatgctgcaggtgccctctaacacct

SEQ ID NO: 1804 - DNA, 120 bp, Homo sapiens
ccccggccagcctcagcccccatagcctgatcattccttacagttccccaacaccccaccctctgtctcacctctgatctgccagtgccaacccctgtgcctgccatgctgttcctctcc

SEQ ID NO: 1805 - DNA, 120 bp, Homo sapiens
tcccgctgtgtctccaggaagcagcccagctccatccaggcccagcactgcatgctacagtctgtctttccttctccagttttcaatgagtcccagcccccagccccgcctcttggcgta

SEQ ID NO: 1806 - DNA, 120 bp, Homo sapiens
tatcgtctgccctcattctttgatatcttttttccttcaaatttaagtaacatgctttgcaaacgcagcttcgagctctaccccgagacccttcctacgtggaaattctagtggtgcctt

SEQ ID NO: 1807 - DNA, 120 bp, Homo sapiens
gttcgttgagaaaatgagtgagcagagtcacctggggatgaatgagccaccttccacccactgtttacagacagcgtgacccgctccccggcttcagcgcgtagggggcggcggaggccc

SEQ ID NO: 1808 - DNA, 120 bp, Homo sapiens
gcccggggcgggggtgctggcgctcacccaagcaactgcggccgtcgggcgcgggcgcgtagccctgggcacaggtgcagcggaaggagcccgggaggttctcgcaccagccaggcgagc

SEQ ID NO: 1809 - DNA, 120 bp, Homo sapiens
gcacgggagggagaaggaagaggacccatctggggacaacgcgggtggcccggctcccagcgtccacagcagggacttcctcccacacagatcaacgaggctcccggaccccaacctctg

SEQ ID NO: 1810 - DNA, 120 bp, Homo sapiens
ccacgcagtagcggtgctggggatgtgaccggtagccggggttgcagtggcaggagtagtcaggggggcccggcacgcactctccgtggccacagatgttctggttcagtcggcactcat

SEQ ID NO: 1811 - DNA, 120 bp, Homo sapiens
ctgcgggcatggccaggtcaagcggcagagcagggagcgctcaccttctgccatatccccagggcagacctcaacaccccagtcacaccatgacctcaggttcctgtacgcccatactcc

SEQ ID NO: 1812 - DNA, 120 bp, Homo sapiens
agccgtatcaccccacacccaggcccggatacttccattcccggttcactccaagaccctgaccccactcacctcaaaccaaaccacatcccctcagggcccctcagtcgtcccagtact

SEQ ID NO: 1813 - DNA, 120 bp, Homo sapiens
gtccgtggtcacccctaaaagggaagaagatggggccatgaagtgttggggcgggagaagggagtcagatctgggatcagcagctgagtatttgcagttagggtctctgggagttcaaca

SEQ ID NO: 1814 - DNA, 120 bp, Homo sapiens
tcacgggtcaaggggtcaggcctaggggcttggcatgggtcagggatcagaaggggtcaggctagacctctctcttcctctgtgtcctcaggtggtggagcctggctagggctctccgga

SEQ ID NO: 1815 - DNA, 120 bp, Homo sapiens
gcccgtcagggtgcaggaaaagggaaaagtcactctcgccctgaatggtgagcgtctggtgggaggtgagaatgtggtatcccttcccagctgggcagatctccttgaacgcagctgcag

SEQ ID NO: 1816 - DNA, 120 bp, Homo sapiens
ccccgggtaaccctgactcaccggtgccatctgttgggcagcgctgacaccgcgcgccccaggccttgccgacactgcagcagcagagctggcgggtcaggcgggtggtcagtgggtgct

SEQ ID NO: 1817 - DNA, 120 bp, Homo sapiens
aggcggaaacacaggctcttctcctccggtttgtctgctgcaggggccagtggggggcatgggcatctgagcctgcacattgcccacgtccctctgcccagctgctgcagaccttgcctc

SEQ ID NO: 1818 - DNA, 120 bp, Homo sapiens
ctccggcccagacaacccttgatcccccatgtggtctctgaccccatatgaccctgaactcatgtgacccctgaaacttatgtgaccactgaccccattgactcccgattctagctatcc

SEQ ID NO: 1819 - DNA, 120 bp, Homo sapiens
ccccggaccctgctgatccctgatcctattggctctgggccttgttcctcctgcagtcaacccttaaccccactctgatctcttgcgatctctgatccttgctcccacccatgccttgtg

SEQ ID NO: 1820 - DNA, 120 bp, Homo sapiens
gtacgggaggggcctaaactatggccaggtgggcagacacagcgataggagccagggttgttgaggcagtcaccatggcgacacacgcccggcattgcgcactcgttgatgtctgtggta

SEQ ID NO: 1821 - DNA, 120 bp, Homo sapiens
tctcgcccaccttgggaccctccccacccccagtgatggctggcctgcccctccagcccacagaatctcctagctggccataccctggcagtgggtgctgttaagcctcttgtagccctg

SEQ ID NO: 1822 - DNA, 120 bp, Homo sapiens
ccccgccccggtgccgcctgttagggttgggccttttcctcttcccccgcccctcagttttctgctatccgagtgagttggggcagagcaaccctgagagaaggaaaggcagatcccgac

SEQ ID NO: 1823 - DNA, 120 bp, Homo sapiens
caccggctgcttgggcagagtgtcctgaaagcagcggcccaggggcttctgggtgggcggccgggggtgcgagggcttggggtgcggcagcaggtgctgggagggggctgcgctctcggc

SEQ ID NO: 1824 - DNA, 120 bp, Homo sapiens
cggcgttcgagctctcaatgcggtgcacctggactgaggcctcgggcgggtgatggacgcgcacattcaccacggggggcggggcctgcactgggggcgggcgcggtggcctcagggctg

SEQ ID NO: 1825 - DNA, 120 bp, Homo sapiens
gcccgcaccgcgccgcgggtcaccgcgctgagctcctccagggctgaacctgccctgccctggccaccctagtgcccacccactggcgaccttcccgggtttgccagttgcctggtacct

SEQ ID NO: 1826 - DNA, 120 bp, Homo sapiens
tcccgggcctaggggcaccaggaaggctgcgtgctgggcaggaggcccctccccgggcccaggagggtcagcgatcacctggacggcgtagatggcgtgcttgctggccacagagtcgcc

SEQ ID NO: 1827 - DNA, 120 bp, Homo sapiens
ctccggagccaggggcggcagcgcccctgtggacagggcccctgtcctgctcaggccggggcctgagccgccggtacccccaccggctcctcctgcgggcacctggcagaagcgcccagt

SEQ ID NO: 1828 - DNA, 120 bp, Homo sapiens
gtccgggggacacaggcactggtttcgcgaggagcactggccgccattcatgcaggggagagggcacaccactggggagaagagtggggtcaggccctcacccacatcctgtctctttcc

SEQ ID NO: 1829 - DNA, 120 bp, Homo sapiens
aaacgatggacactgagagttgggattggaaatgagatgaaactaccttcacgcttgataaatcagggggcccttctgccctgccactcttccccgccttttgagcacgggagaaatcta

SEQ ID NO: 1830 - DNA, 120 bp, Homo sapiens
agccgggagccccagccctgccactcccaactgggtgactgtggatacatctctcactactccaggcctcagcctcctcatttgcaaattgggaatgatgataagacctagctgccagtg

SEQ ID NO: 1831 - DNA, 120 bp, Homo sapiens
aagcgaaatacttcataaagagctcttaacacagtgcctggcccaaagaaaacacacacaccaagttgagtgtgattatttttattgttgtatcatccagccacttcctgtttcacagaa

SEQ ID NO: 1832 - DNA, 120 bp, Homo sapiens
ttacgtttttcagaggccaggcaacatggcataggccacttgttgccatgtgaaccatccccaccaaatcagccagcccagggggagctgtaattgagctgtgcatgactgagctgctgt

SEQ ID NO: 1833 - DNA, 120 bp, Homo sapiens
ctgcgaataggttttaccaccaacacctgtgagcaccttctatgtcaaggactgtgaagcatctgagatcttacccacttgcaagctaccaaggtagcccgtcaggttcaagaatgctgg

SEQ ID NO: 1834 - DNA, 120 bp, Homo sapiens
gatcgctgtgcagcaaacagcatgagcaccagcatatttccgttagttccttttgaccctaagtcccatgggggtgatgctgatgggctcaggcaagtgtgggcacacagagcgaattac

SEQ ID NO: 1835 - DNA, 120 bp, Homo sapiens
cccgccatgcagggcccgtgcctgtccaagtcccagtgaggctgcggctgaagccaaagtcagtgaaggtggtgcaggctgagctgagcctcactctttccggggtgctgctgcgggagg

SEQ ID NO: 1836 - DNA, 120 bp, Homo sapiens
ggccgtgccacgtgagtgcctacctgccctccttgatcctggcctgtgacctctgactccaccctcacctttaacctctgcctcccagggacgatgacatgcagagtctcgcaagcctca

SEQ ID NO: 1837 - DNA, 120 bp, Homo sapiens
tgccgggcagccaggtagggatgggggccgccgagggcccagtctgctgcttcccactaacctggggctgagcgaacggcggctctgcatggacccacctggtggaatgggatcgggtgg

SEQ ID NO: 1838 - DNA, 120 bp, Homo sapiens
ggccgcatggagctggacacctctaagctgattttctgggctgactttgaggtgtggctgctggtgacctctgatcttgtctgggggccactgaccttttaggtgaccttggcagataac

SEQ ID NO: 1839 - DNA, 120 bp, Homo sapiens
taccgtggcgtccgcatcaccaacttcaccacatcctggcgcaacggcttggccttctgtgccatcctgcaccgattctacccagacaagatgtgagctgccagaggggtgggaacgaat

SEQ ID NO: 1840 - DNA, 120 bp, Homo sapiens
cctcgctagacccactcaacatcaagcagaacaacaagcaggtgagatggggtgggggactgcctggagggaaggagggtctggagagccaggctctcagtgtcagatttggagaaagtg

SEQ ID NO: 1841 - DNA, 120 bp, Homo sapiens
tgccgggcccagcagtggcttctggaagttctgccactttttacccctttggtcattaaattgtttgttttccttattttcgtttgtttgttttaaagcgtttttcctcccttagatggt

SEQ ID NO: 1842 - DNA, 120 bp, Homo sapiens
taacggggtggacggtgtgccgttgctaagcaacgcgagggcgggccttgttgctggatttccctcgctaggagggggcggtgttgctaggcaaaacccggggtgccaatcccggggacc

SEQ ID NO: 1843 - DNA, 120 bp, Homo sapiens
ctccgtggggcggcactgcagcgttgccgggtggcgcgggccaccgccgccgctgaccccgagtgcacccttcccctaggccttcgatggcttcgcggctctgggcgtgtcgcggctgct

SEQ ID NO: 1844 - DNA, 120 bp, Homo sapiens
gggcggggaggaagaggggatagtgagtgggctccgcctccaagaataaggtctgacagagaataaggagctggggggcggagaggggcatgagaggtgaagtttcttacactggatggc

SEQ ID NO: 1845 - DNA, 120 bp, Homo sapiens
gctcggaaccggggaaaggtgggcgaatccccaggcccgacctcgaagacgtttctcctccggtcaaggccgggtgaggcctgcacggtgatgcggtgcttgaagtctgggatttgggtt

SEQ ID NO: 1846 - DNA, 120 bp, Homo sapiens
gagcggcacgatggctgtgagactgtgaccagcctcactgctttcttgagcccctgggtctggataaggaaagctactcgtctgagtcggagatgccctggcgccggccggccccgccca

SEQ ID NO: 1847 - DNA, 120 bp, Homo sapiens
tttcgtgaaccccaccccttcccactcccagaccgacatgcaaatacttccgccagaacccgcccacagacagaaaaaaaacactcctggctccacccctcccagccttcatctcacggg

SEQ ID NO: 1848 - DNA, 120 bp, Homo sapiens
cagcgcggtgagcacacaggcctggctccacccccacccccgcagccaatggcgggggacgccccggggcccggccctcaccgagtggcatgctgatacgctcgccgccgtcgcgcgccc

SEQ ID NO: 1849 - DNA, 120 bp, Homo sapiens
gcccggagcttgctgcgcttgaatgtcccgcggcggcggcgcacgtgcggtcgctcgcggtccacctgctgcagcagcagcgtcagctcgcgctcgaacacctctagctcccactgggcc

SEQ ID NO: 1850 - DNA, 120 bp, Homo sapiens
gtacgcactggctggggccgtgggcttcttcacacattacctgctgccacaactccgcaaacagctgccctggttctgcctgtcacagcccgtgctgaagccgctggagtacagccagta

SEQ ID NO: 1851 - DNA, 120 bp, Homo sapiens
gtgcgcggtgagtgcccacccctgatggccaggcctgggcagtggctcgggctgcagcctggctggtgggagctgtggtcctctcggctcaggagtgccagcagggggcactcgctgccc

SEQ ID NO: 1852 - DNA, 120 bp, Homo sapiens
gtccgtgttgcccggctgcgctctccaccgactcttctcctcgtgccctgctgtgcccttcccttgcctgtgttgccctggtcctgccctccttcctgtctgtgagaagacggaagaatt

SEQ ID NO: 1853 - DNA, 120 bp, Homo sapiens
tctcgatttgagatatgaagatccatgtttcttgagtttttcttaaacgacagaagattttgcttcccagactagcatccctctgtggctacaaccagcctgaaccgaggggtctgccct

SEQ ID NO: 1854 - DNA, 120 bp, Homo sapiens
tcacgggctcactgtgcactcaggccctagccagcctgctgtacgtaggtgtttgcgatttcatcattggccttgttttaacagacagcagagcagagcacctgccataaagcaagcctc

SEQ ID NO: 1855 - DNA, 120 bp, Homo sapiens
cctcgatgtgctaagtgccatgtggagcccttgccctgctggggctcgctgctcccatttgagctgccacagatcagcccctccccccagggtctccgaggagtcaggaccgcacagcct

SEQ ID NO: 1856 - DNA, 120 bp, Homo sapiens
tggcgcagcgccatcctcagcaacacgccctccctgctggcgctgcgccatgtcctggatgatgcctccgacgagtacaagatcatcatgctcaaccggcgccacctcagcttccgagtc

SEQ ID NO: 1857 - DNA, 120 bp, Homo sapiens
ggccggccccacctgccctaagccctgccccaaacccccttgggccggccccctgaccctggcgtgtggctctcaggtgaaccgggagtgcgtgcgcggcctgtgggccgggcagcagca

SEQ ID NO: 1858 - DNA, 120 bp, Homo sapiens
ctgcgcaaccgcaaccccgagcgtggcagcatccagaacgccaagcaggcgcttcgcaacatgatcaactcctcctgtgaccagccgctgggctaccccatctacgtgtcgcctctcacc

SEQ ID NO: 1859 - DNA, 120 bp, Homo sapiens
cctcgctggctggcagccacccccagctacgggcactgtggggtggccccatcagcctgggtgccattgcccactggctcctgcgcacctgggagaggtgaggcctcgggaaggggtgac

SEQ ID NO: 1860 - DNA, 120 bp, Homo sapiens
tgacgtgtggcgcgggaggaagctgaggtgcagtacgtccctcctgggtctcagagggaggacgtgctggagccagggcttgaatcccgagagatgaccccctcccagagctgacctgcc

SEQ ID NO: 1861 - DNA, 120 bp, Homo sapiens
caacgcaccctcaaaagactctgcaaagtaggtggcagcttcttagaggggaggatcctggggctcagaggtgttagatgacttgtcctggggctgaggactcatgcttgtgaggcctct

SEQ ID NO: 1862 - DNA, 120 bp, Homo sapiens
agccgtgtccctcctgatcccttttctacctctccacccccaggcttcacaagggctgtggcgccggctgcaatagtggcgggaacgtggatgattcagactgtagtgggggcggtggcc

SEQ ID NO: 1863 - DNA, 120 bp, Homo sapiens
ccccgtggcacaccccacacctgagaacacggcaggtgagcaggcgaggctgggctgaacccgtgggtgaggagtgcagcccagctgaggcctctgctgtcttatctgtctcctacaggc

SEQ ID NO: 1864 - DNA, 120 bp, Homo sapiens
ggccgcggtcctccctgagtggctctggtgatgggcggcccccacctctgctgcagtggcctccccctcggctccctggaccaccccctgcatcgcctatccccacagagggtccccgga

SEQ ID NO: 1865 - DNA, 120 bp, Homo sapiens
tcacggccccctggcccgggtctcctcagttctgagggccccagtggaaagtggagcctggggggccggaaggggctgggaggatctgacggggagccagcctcagggagccccaaagga

SEQ ID NO: 1866 - DNA, 120 bp, Homo sapiens
caacgctgactctgctagactctgctacttactagccacgtgaacccaggcaagttggacactatctcctacttcaaaagggtcatgagattaaaatcaggtaatccagtgaagtgcctg

SEQ ID NO: 1867 - DNA, 120 bp, Homo sapiens
tcacggcacagagcccagctgccctgatgctgccaccccagctgtgtacctgtatctggcaggtactggaattccatgggctcactgagctcccggtcggaaggccgccgcagctgcatg

SEQ ID NO: 1868 - DNA, 120 bp, Homo sapiens
acacgcacaggagcctgcaggctggggtctgcgtagggaggggtccggaacacaatggccacttgtcggtgcacatcagcttgcgaaaaggagcctcgggcctcccagcctggtcccgtg

SEQ ID NO: 1869 - DNA, 120 bp, Homo sapiens
atgcggtggcagtgtgggtcagtgtgtctaaccctccatggtctccccctcaacttctgatgcttgtcttctgatacatcacccttcggcccacctgaggcccccgaggcacaggaggaa

SEQ ID NO: 1870 - DNA, 120 bp, Homo sapiens
agtcgggctggagacgcaggatggggtaggccttgtgctctgagcaaccccagctctgcctcacaggcaggcaggcccggtgcaagagtggactctgggttcctaaagcaataaatgcaa

SEQ ID NO: 1871 - DNA, 120 bp, Homo sapiens
cttcggaggagaggtcagggctaaggccggggatgagactgcaggagagagagcagcggagggccacattcggagcctccgtccactccagttttatcagcttttgccttttgcacggag

SEQ ID NO: 1872 - DNA, 120 bp, Homo sapiens
caccgcattttgtaaataaagagatgtgtatgcctccctgaattctcctaattatggccacctcccccaccccatctccagttctcctgccctgcaagagagcacaccccacttgccagc

SEQ ID NO: 1873 - DNA, 120 bp, Homo sapiens
cctcgccctcgggccctggctgccgggcgccttccgctcggtggactcctgagggcaggaggctgcgggactgtcctgggcctccactggggctccctcggctggggtggctgtggctgt

SEQ ID NO: 1874 - DNA, 120 bp, Homo sapiens
cttcgtggaagcggtgggagcacccagttgtcctgggccgacttcctttgacctgtctgtggcccccagtggccacggtgagctgcaggacagccctgaggacccacttcacacaccagc

SEQ ID NO: 1875 - DNA, 120 bp, Homo sapiens
cagcgcctgagcgcctcgggccacctccctcaccagcgcctgcactcgcagaagaccagctgggcacacctgccatctggaggacccagcccacaaaccatgcagaccagggaaggaccc

SEQ ID NO: 1876 - DNA, 120 bp, Homo sapiens
cagcgagcacacaaaggcagtggtcacctgttccacagggaacgccatggctccaggtgacccggagtggatggggcccgagaggccagcctggactgtctcctgagggcaggctccgca

SEQ ID NO: 1877 - DNA, 120 bp, Homo sapiens
aatcgtgttgacaggcacccgtttaggagtggagagggaccccaccccccagctgtcctctccagcgcctgtttcccacttggccactcccagctctgcctccaggaagggtgagggcac

SEQ ID NO: 1878 - DNA, 120 bp, Homo sapiens
gcacgggtgcaccgaggggttggcgtgtgtgaccctgagctctgggtcagggcaagctcatgcatggagcaggatcacggcaggttcctggagatcaaacggcaaaggctgtaaaccagg

SEQ ID NO: 1879 - DNA, 120 bp, Homo sapiens
gcccgaaggaggagggccacttcctgccagccctccaccgagctcacctatggcgcctccccaggaagtgctccggccagcccagggtaaacacgctagccctgcccctctgggaccata

SEQ ID NO: 1880 - DNA, 120 bp, Homo sapiens
gcccggggacccagactcttggccacgctcattcccacccctacccaggaccggcagccggagccttgggtccctgcatgggcctggggcgccctgtgccccttcacctcgtcctcgtcc

SEQ ID NO: 1881 - DNA, 120 bp, Homo sapiens
agccggtgctacccgctgtgtccactgcaccctggccctgttctgagcggtcacagcagctggggagaagggccatcctggaagccgggcagatgaggacggaaccagacagtcccactg

SEQ ID NO: 1882 - DNA, 120 bp, Homo sapiens
ccacggggcagtgcaaggagagaggcatcctgagagggcctgaggtgtccccacctcccctgacaccccatccctcagtgcccaggctgggcagaaaggggggcctggaggagcagctgc

SEQ ID NO: 1883 - DNA, 120 bp, Homo sapiens
caccgaagcctctgcccctgggcctgcggtgggcccggtaagggaagtgactctgccccatgcctggggcacctgaggggtgcacctggcccggcggaggctctgacctccccagggctg

SEQ ID NO: 1884 - DNA, 120 bp, Homo sapiens
atgcgccagcgctgcccccgaagtcccattggcagcgttcccccgtcccccggcctgctggggcgcagctaggccctgcccaaggaagagctcgaggcctcgccctgctcatcccgcgga

SEQ ID NO: 1885 - DNA, 120 bp, Homo sapiens
aggcggccctgcgccccgcctgtccccagcgccccagctctaggggctaggcccgcggaggggcacaccaggcgggtgttggggaggacgcagagggctggggctggagcccaggcgggg

SEQ ID NO: 1886 - DNA, 120 bp, Homo sapiens
gggcggggcggagctgggtccgaggccggcgggggcgcctccatcccacgccctcctcccccgcgcgcccgcccgctctcgggtgactccgcaacctgtcgctcaggttcctcctctccc

SEQ ID NO: 1887 - DNA, 120 bp, Homo sapiens
tcccggccccgccccggcccggccccgccgagcgtcccacccgcccgcgggagacctggcgccccggccgaggcgcgaacagacggacgcaccggcgagcgccgaggggacaggccgagc

SEQ ID NO: 1888 - DNA, 120 bp, Homo sapiens
gagcgcggggcgccggaggcaggtgagcgctgcggacacgggggagcgcgcccgcccgggcctcagtttacccggtggcgatgggacgcggggcttctggttcaggacaccgggacgaac

SEQ ID NO: 1889 - DNA, 120 bp, Homo sapiens
gaacgcggcgtcgcagggcgcggggcacttggagggcggccgggccgagggcgcggggcaaggggctgggggcctggtcgagtccccacctctcctggacgggtcctgctgcagcccggc

SEQ ID NO: 1890 - DNA, 120 bp, Homo sapiens
ccccgtcggtcctgggcggcggccggcgagcaaggatatttttaagccagcgatgggtgactcacctgccccgtcctgcccactcccagctctggggcttggtgggggcaatccctgcgt

SEQ ID NO: 1891 - DNA, 120 bp, Homo sapiens
gtccggagagcgctggtggtagggaggcttctcccggttctgtgagcagcaggaccctcccgagggcctgaccgtggaggtagcactgcacacccactccctgtgggccggagccaggag

SEQ ID NO: 1892 - DNA, 120 bp, Homo sapiens
tgtcggagcccagaaggaaaccagtggccgggaagcaccagctgggtcagtctccaggtcagggttgggggtgggagtttcagggaggaggggaggctgggacaggggctgcagaggccc

SEQ ID NO: 1893 - DNA, 120 bp, Homo sapiens
gcacgcgaacttcagccatcctagattcctggtccctgcgtccagctgcctggcgttgccccttgctgcggggtgtccctggtggcaggggagggggaggcagggccgggcatgcccgga

SEQ ID NO: 1894 - DNA, 120 bp, Homo sapiens
ccccgtgctcagtcctgggtcggctgtgctgggaggcaggcccagctggcggcggcccctcccctcgcggcccctcctcccctcgcggcccctcctgggtcccagcctctcccgggcctg

SEQ ID NO: 1895 - DNA, 120 bp, Homo sapiens
caccgggccttctccgcctgcctcggtctcctttcccaccctcagcttccccagcttatcccttcctccctcaagccatagcttccaaacaaggacagggccagggcctgaggggcctcc

SEQ ID NO: 1896 - DNA, 120 bp, Homo sapiens
cagcgcctatgagggcagcctggagcccctgtgactcagctgacccctccccaaggtcactcagcatgtggagctggaacttgaacttggagcccgtccctctaccctcctgccctgctg

SEQ ID NO: 1897 - DNA, 120 bp, Homo sapiens
gcccgactgaccgggcaccccgctctgcctcacttcacaccgggaaaatgaccacagtacaaagtgcagcctgggcctccagggcttcgtccccaccaccagtgggccaaagaagcctcc

SEQ ID NO: 1898 - DNA, 120 bp, Homo sapiens
gggcggggctcccacagggcaggaggcagccccatacccatgtgcttcagacccagacaccacacctggacccaccccactgctgcccggccctgcctgggcctgaggtccccgatgccc

SEQ ID NO: 1899 - DNA, 120 bp, Homo sapiens
aaccgaaggccaggaacctggccttccccaggggggtcgcgtgtcacagccctccatgtttgcgtgcccccaggcctgagtctgcaagggtgcgttggtgtctcgcccaggtgtgtgcct

SEQ ID NO: 1900 - DNA, 120 bp, Homo sapiens
acacgtgcctggcgcccttggtggagcccgccaggaatcccattaagcaaacactcaggctcgccactgagcccgtgaacattccagacattctccacggatagatggatggaggaagtg

SEQ ID NO: 1901 - DNA, 120 bp, Homo sapiens
cagcggcagtgcccccgggcctcccagaccctcccactaggccagacctggtcaaaccagaaagtcccgggtgctccgagccactcccttgaccctccataccaacagcagtggctggtg

SEQ ID NO: 1902 - DNA, 120 bp, Homo sapiens
caccgtggcagacccaaactctgaagccacaggggacagccctgcagccctggcaggaggcagatggtgtggacctgtggggagctgatcacagagccacagaacagccaggtccccaca

SEQ ID NO: 1903 - DNA, 120 bp, Homo sapiens
ccccgggaagcccctagggtccagcccaaatcagacccacctgtctgccctggcggctgggccttagtttccccaaaatgctcggggaagaggtcagcactaggagcccagagacaggct

SEQ ID NO: 1904 - DNA, 120 bp, Homo sapiens
cctcgttggaggggcagtgatactgtgtgttggggccactggactggctcccagtctcagcccccaccacacctgccctccagtccctcccctaggcttggctgctgccaggggttctgc

SEQ ID NO: 1905 - DNA, 120 bp, Homo sapiens
tcgggcaggggctctgccccccaagggacccccacccaggccaggccagtcagggatctggcccagggaaggaggggaggaaccagccaggccggaggaagtgtcagcgcagcccttctg

SEQ ID NO: 1906 - DNA, 120 bp, Homo sapiens
gaccggggccacactgaggtctgcccttctcccgctggccgccacccaagacaccatgagccagtccggggccgtgagctgctgcccgggtgccaccaagtgagccctcccacccatccc

SEQ ID NO: 1907 - DNA, 120 bp, Homo sapiens
tcccgaataccccaccctcaccctctgaacagtccccagggaggggtgcagtttggccctgccctgacagcccctcccctgcagtggcagcctgggccggtccgacggtgtggccaagat

SEQ ID NO: 1908 - DNA, 120 bp, Homo sapiens
gaacgggctggacgtcacaggggagaaatgggcactgcatccaggtgggggacagctgctcctgccccacagctgtgcctggtctggcccaggggatctccgggtgcccagggaggcctc

SEQ ID NO: 1909 - DNA, 120 bp, Homo sapiens
ttccgaaagctcctggccactggatcccctcccccacacccgtaaggggagaggcctttactaataattcagggagcatcaatattgattccgctgcactcattgctgtaacctgatcac

SEQ ID NO: 1910 - DNA, 120 bp, Homo sapiens
gcccgcccccaggatcgtggagaacctgggcatcctgaccgggccgcagctcttctccctcaacaaggaggagctgaagaaagtgtgcggcgaggagggcgtccgcgtgtacagccagct

SEQ ID NO: 1911 - DNA, 120 bp, Homo sapiens
gcccgcctgcgctccggcgccacgcccctcctgcccctgcgccctcctctcccccgcccgttcctggggtcgcagagcaagggggaggccggcacccagacacgtgggacccccggctga

SEQ ID NO: 1912 - DNA, 120 bp, Homo sapiens
ggtcggagctggaagaactcatgaacaagtttcattccatgaatcagaggaggggggaggacagctaggcccagctgccttgggctggggcctgcggaggggaagcccacccacaatgca

SEQ ID NO: 1913 - DNA, 120 bp, Homo sapiens
acacggagggggtgtggtgctggctagaggtccctgcccctgtctggaggcacaacgcccatccttaggccaaacagtacccaaggcctcagcccacaccaagactaatctcagccaaac

SEQ ID NO: 1914 - DNA, 120 bp, Homo sapiens
cctcgcacacacgcagagttctgctccctgaggggggcccgggaggggctccagcaggaggccgtgggtgccattcgggggaaagtgggggaacgacacacacttcacctgcaagggccg

SEQ ID NO: 1915 - DNA, 120 bp, Homo sapiens
caacgcaggggacaccgtgccggcttcagacactcccagcgcccactcttacaggcccaggactggagctttctctggccaagtttcaggccaatgatccccgcatggtgttgggggtgc

SEQ ID NO: 1916 - DNA, 120 bp, Homo sapiens
agccgtgtgtctcagttctctgggagtcggagtgggtcctggagcccccggaaactgcaccttttctaagcagtgccgggcagagggctggccgtccgccaggctgctctgcccctgagc

SEQ ID NO: 1917 - DNA, 120 bp, Homo sapiens
ggtcggggcagcagggattgtctggtgccctctgagccacgacccgggcttgatggccaccaccactcctccaggcccccggaagaggcccccccaccctgtcagatggaccctgcagtg

SEQ ID NO: 1918 - DNA, 120 bp, Homo sapiens
caccggccctcctccctgcaacctgcagctcccgctgcctgctgagccaccacctcaggacggggataggcaccggggctatatctgctccaaaaggggcctctgtgggccccaggatgc

SEQ ID NO: 1919 - DNA, 120 bp, Homo sapiens
gggcgcctccttccgcaacacgggcgagatcaaagcactggccggctgtgacttcctcaccatctcacccaagctcctgggagagctgctgcaggacaacgccaagctggtgcctgtgct

SEQ ID NO: 1920 - DNA, 120 bp, Homo sapiens
aggcgggtgaggccccactgcccagctgtggctcctgctcgggcaaggccagcactgccgtgccacgctgccctgtgggtgatccctcccacctgtggggcgagctcatcttgggagaca

SEQ ID NO: 1921 - DNA, 120 bp, Homo sapiens
ggccgtggcccccacacagagtgcagaccccacaagggcctccctccttccacatggtgccttgtgaggcttcaaggtgcagaaggtagggtggggagacacagctcgtgctctgtttgt

SEQ ID NO: 1922 - DNA, 120 bp, Homo sapiens
ctccgtcccctttgtcccctaagcatcacctgccccagctgtgatgggctgtaacctaggttaggactcagagatggggtcggggtcagggtaccccagacacaacccaccgcctgggcc

SEQ ID NO: 1923 - DNA, 120 bp, Homo sapiens
cctcgacgtggcccagacagggccctttcccagcggggtctcagccaggttcccctttcaccaaggctgggctgggtggagtctggatagttagaccccagcacctgtgagtcacgcaga

SEQ ID NO: 1924 - DNA, 120 bp, Homo sapiens
agccgctaagacgcagggaggctgggccagggctggggcacgagggtaccttcacctgggcgtcagaagcacttgagaggacaggggctgctggctctatgtctgcccccctaggctggc

SEQ ID NO: 1925 - DNA, 120 bp, Homo sapiens
agacgtcagacgtggtacatgccggcctctgtggcctggaggggcttgcaacaaggaggcaggccctgtcccaagctggcctagcctagtgtccaggacatggaggacagggtgcagcag

SEQ ID NO: 1926 - DNA, 120 bp, Homo sapiens
ccccggggaggggtggggccgttccctcccaagcacacttctggagctgctgcagtcgggggtgaccctaacctaccttgtgccttccttcccatgtgccggggcgggtcccacacacct

SEQ ID NO: 1927 - DNA, 120 bp, Homo sapiens
ccccgactggctcccacctggggcacgcagttgggcaacccaggccctgctctgcccgtcgagcctccagggcaagtgcaagctcagcctgggcctggagacggcggatcggagcgtgtc

SEQ ID NO: 1928 - DNA, 120 bp, Homo sapiens
caccgaaaggcaaggagccctccctgggacgagggagacacccaagagtcaggccgggacctgcagcggaccggggtgggagtctgcagcagaaagtgcccccatgggccttgctcactg

SEQ ID NO: 1929 - DNA, 120 bp, Homo sapiens
ttccgcctgggaccctgcccgtgtccaggggagggcccggaggtgatcagcagcctcaccaagaatgcactagggtgggagtcccgggagaggagtcgcaccctctcagcagtggggagg

SEQ ID NO: 1930 - DNA, 120 bp, Homo sapiens
ccccgttctgcactgggtgataaatactacgtgcaccctaggaagccacgtgtgtcactggctgctaacacgaggatgggggacttgagatgctggtgcaggttcccagcaaggctcaga

SEQ ID NO: 1931 - DNA, 120 bp, Homo sapiens
ctgcgggtctccagggagttcccgcagagcctggggggcacagcctgcctcagacagtccccggaccccagacccgtggacacctctgtccccagagatgatgctgcgcgttggagcttt

SEQ ID NO: 1932 - DNA, 120 bp, Homo sapiens
cggcctccgcagtgccaggtcgacccccagcgcctacacccacgcgggttcagacctgccgagcgcccgccgccgcgggaggggcttgaggccggggcggggccggggcggggcggggcg

SEQ ID NO: 1933 - DNA, 120 bp, Homo sapiens
gggcgtccccctcgtaggctccgggccgcgcattctcagcgctgggagccgccgcccccgcagctgctgccgccgccgccagggcccggactcggacgcgtggtaggtgagtgcgcggcc

SEQ ID NO: 1934 - DNA, 120 bp, Homo sapiens
cagcgacactcttcccctaatggaagtggaggtcccggggcggaggggagaggacggggcctgctcttcccgcctgtcagggatggaggcagccgagctatttagcaaggtgccaccacg

SEQ ID NO: 1935 - DNA, 120 bp, Homo sapiens
tcccgccctcctggcctcggctccttccagacgctgctccccagggtgggtgctgctcccctttctcttcacccgcagcaccaggagcttggtggaagctccggccgtctccgcactgta

SEQ ID NO: 1936 - DNA, 120 bp, Homo sapiens
gaccgggtgggggttggagtcccacctgccagtgcgggacgccgggcaggttctgccctccttgaggcctcattttcccatctgcaccatgtggggcggtagagggtgaggtccccatat

SEQ ID NO: 1937 - DNA, 120 bp, Homo sapiens
gctcgggggttgaatggaaatgtgggaggcctctcagttccccaccacctgcgctgatccccggggagaccccccaggtgggcagtgtgagtctcggagccaggtggtccagggccccag

SEQ ID NO: 1938 - DNA, 120 bp, Homo sapiens
gcacgggggctgtcctggctctgcgctgcctgggctgtcaaccctggaggtgtgggggcccctcagcctcactgcccactctctgttgttccaaaggaaagtcctggctgcgcttgaggc

SEQ ID NO: 1939 - DNA, 120 bp, Homo sapiens
agacgatgtctggcagatggcatggccggcctgcctggcgctggcctctgggcagcacagtgtccccaagggtggcagagggctctgccttcagctcccaggcctctctttgaggagttt

SEQ ID NO: 1940 - DNA, 120 bp, Homo sapiens
gttcggaaacaatccgtttctgaacaaaggccctgacgctggcaaccacagcgtgtctgagccttggggagtgtgtggctccctgtgggtggggagcagcagcggtcggtcgggggacac

SEQ ID NO: 1941 - DNA, 120 bp, Homo sapiens
ccacggggcctctgcaggttccaggtcccagctggcggcagggcaggcaggccgggcctctgtgtggagagggctgtctctgggggcagagatgtggcattggcagcccagggctgcagg

SEQ ID NO: 1942 - DNA, 120 bp, Homo sapiens
ccacgcagggggacgggagtgagcgtgggggacctgggcttccagccgcgcttgtgcgatgtgagccgtggtcctggcctgatgacggcaggccacctccttgctgttcccacgcagccc

SEQ ID NO: 1943 - DNA, 120 bp, Homo sapiens
ccccgctgggtcacagtctcctcctggattcctgtgcctccagcaaactcctacccaccctgcaggagccagcattggcaccctgggcaggtgcccactgacgagggctgttctgctctc

SEQ ID NO: 1944 - DNA, 120 bp, Homo sapiens
gaacggaggacagatggggatgtggaaacaggacgtcgctcagggcccacagctttaaggaaacaaatcacagcgagccacacagattgtaagtggacagacttgtcatccctggaaacc

SEQ ID NO: 1945 - DNA, 120 bp, Homo sapiens
tgacggggacgttcccgccagcccagagggtcctgaggctgtgctggctgctagcatccctgtgtctggacagagccctggcccctgcagggacccagccccccatcctattccaaggac

SEQ ID NO: 1946 - DNA, 120 bp, Homo sapiens
ggacgtggctggcagcccagccatctgccacaaagccgcatggccagaggggcagtgggctgagggctgagagctggccagcgtggcccccgtgggcccggagggagcatactcgatgga

SEQ ID NO: 1947 - DNA, 120 bp, Homo sapiens
ggccgtcccgcagcacctgcccaagaggctcaggtgggctgtccagactggaaaagaagggcagagcagagaatgcatgggcctcagcagcacctgcacacgcccagcgctgggggacgg

SEQ ID NO: 1948 - DNA, 120 bp, Homo sapiens
ccccgagcctcttgggtgggtgctgagggacggccctccaagccttttgggctcctaatcttgggcagagccatcagttgctgctgaagatcagggtgagcgagtgtctgatggactgag

SEQ ID NO: 1949 - DNA, 120 bp, Homo sapiens
ggacggacattggccagagatggtctcacgcaggtcctggggacaggttctgggcagtggacagtgtgagctgatgtctgggagaaggacaggccccaggcaccgctgactggaggtgaa

SEQ ID NO: 1950 - DNA, 120 bp, Homo sapiens
ggacggagcccctctcctgggctgttcccccagctgccatcattcctagggttcctctccccagctgtcatggggcggggtcaacctcccacctgagcttgtgtctggcctgcggcgggg

SEQ ID NO: 1951 - DNA, 120 bp, Homo sapiens
gagcgtgtggggagggagctcctctggtttccgggtccaggcccagatgctgggtgggaccctgggagggtgcgcaggctgccagccacacccctagctgctccccatctggctgcattt

SEQ ID NO: 1952 - DNA, 120 bp, Homo sapiens
ttgcgctttgaggctataattttcctgccaaaatgttttaaaagctgcatatgcagaaacactttcaaaattgcaggtaattttattaaccacgtgcacgcattttatctgtgtgggtct

SEQ ID NO: 1953 - DNA, 120 bp, Homo sapiens
gcacgctggggcctcggggcccgggggacgccaggttgcagggcggtaacgcgcgcgtgtggccacgtgtgatggtgtgaggcgtctgtggcaacgtgggctgttgtctgtcacagtgtg

SEQ ID NO: 1954 - DNA, 120 bp, Homo sapiens
gaccgagcccgtctggtgacagtgggtgtctctttcctgccgtctccggtggaggtgaggatgtttcgtggagtgttaattagggaaatcagttcccaccagggctggggcagttgtggg

SEQ ID NO: 1955 - DNA, 120 bp, Homo sapiens
gaacggggtttcccacacctggcatggcaccagtcactctgcacatgtcctccctgtgtccttcgacacatccccatggggcgaggggagcttggaacagctcattttcctgatgacagg

SEQ ID NO: 1956 - DNA, 120 bp, Homo sapiens
ccccgggtgtggagaagacctggctcctcgtcactggctatcggagagcgctggggtgttaggagaacacggtgagcatgaggccggggatcggggctggggttgctgaaactcttagcg

SEQ ID NO: 1957 - DNA, 120 bp, Homo sapiens
ggccgagggagtcaagtcctggggtggccatgaggggctcgccacaccattctatgcacttctatgcttgaagattctcacagtaaaagattcacaagacagaggaggaaaacgcctagg

SEQ ID NO: 1958 - DNA, 120 bp, Homo sapiens
caccgagtcgtggcagcaaaagacgccacggcagtgatgaggaccacgtgcctaagattcaatccctgctgctgccggcctcccagacgtcccctggcgggtgacagacaggatgaagga

SEQ ID NO: 1959 - DNA, 120 bp, Homo sapiens
gaacgatgggctccactctgcagaggacacagtataggctggaggagcgaggaggctgggactggatgactggctggtgtgggtggcaggcgccgcattgcttggcggtgcacgtggtgt

SEQ ID NO: 1960 - DNA, 120 bp, Homo sapiens
gggcggtcgcagctaataagtgagatttcagctagaaaagcagacatctggtgccaacacaaggcgagaacagagggtgaggagaggcgtctgagctgatgtcgccagagctcagcagga

SEQ ID NO: 1961 - DNA, 120 bp, Homo sapiens
agccggcacaggtgcaaggacagataagcctcgagaaagggccagggagaagagccccagcttctagaacagatagggaggacccacaggacaccccacaacgggtggcccatctcaccc

SEQ ID NO: 1962 - DNA, 120 bp, Homo sapiens
gcacgttgcaggcagtgagcccttgggctggatttggtgtccagagtggatgacacctgtccagggcaggaccacagggtgcagatgaacagtgcagctgagagggaggtcggggctcag

SEQ ID NO: 1963 - DNA, 120 bp, Homo sapiens
ctgcgaacacggcccctccaccgtgcagacattcaggcggaggcaggagtgccgtccactcgtagacgggactctggcacagttgagagccaggaacctacccagggaagacactggtgg

SEQ ID NO: 1964 - DNA, 120 bp, Homo sapiens
gggcgtgccctccctgctgtacccttgaggcaggagccatggctgtgcagcgtcagcactctctcggccggctcggcagctgtgaggatgcacgtgtgagcgagtcttggcagccgttta

SEQ ID NO: 1965 - DNA, 120 bp, Homo sapiens
ttgcgggaggtggccctgctgagctggcatctgtgccgctgccctggccaaggtctctaggcagggacagacagggcaagagctactggccacccaggatgggacgtggggacgggcact

SEQ ID NO: 1966 - DNA, 120 bp, Homo sapiens
cttcgggtgggcgaggagggcagatgaggggacttctcagctgggagtgaggacccagaagcagtgcctttctttcctgactgggtgcacacagaccccaacttgtgcaaagctgggggg

SEQ ID NO: 1967 - DNA, 120 bp, Homo sapiens
acacgctcacatacacacctttgtaatcagaattccttggccccaaaccccctagccaattctcagaacaatcatgggtgggtgcaactgcccacgggaagctgctgaaggctttggttg

SEQ ID NO: 1968 - DNA, 120 bp, Homo sapiens
catcgtccacctggcgagaggctggtcttctcgctcctttgtggtgtcttctgatgcacccacatcctggtccgagttgtctgtgtctgtcactccttcctctcacgtgctccacggttc

SEQ ID NO: 1969 - DNA, 120 bp, Homo sapiens
agccgcagcttctactctgcaggggcctgtcccacagtccaacccctcccctgtgcccatgatgcccttccaagcaccccgtcccgcttcacacgctgctatcagacatgtggggtcctg

SEQ ID NO: 1970 - DNA, 120 bp, Homo sapiens
tgccgtgagccgggctcgtgtgcctcccccacatccacggtgctgcaacgcccctgtccctctcgtgggcgccatgccctccaccacctcatggccttggccacaccaggcactcctggc

SEQ ID NO: 1971 - DNA, 120 bp, Homo sapiens
ccacgtgtccaggatctggttcccaccagctacagaatgtggcacagaaaccacgaatgctccccatgcgtccaccagaaatgcagctccacgacatccccaagcaggaaggggcagtcc

SEQ ID NO: 1972 - DNA, 120 bp, Homo sapiens
ccacgcccctcagtgcagcatgctgacatgtgacatgcctgtggcacagcttgcattttcccttcggggctcacgcagccacccactgacccaacaactttgctacagctgggcaccaac

SEQ ID NO: 1973 - DNA, 120 bp, Homo sapiens
ccacggccgcaggctaagaacggtcctcacgctttcaagggtggtaacacaacacgagggaacaaagcaggccccattcagaggcggaagcagctcacggtggtgatcagtgggagaaag

SEQ ID NO: 1974 - DNA, 120 bp, Homo sapiens
ccccggtcctgccaacccccacctggtgctggccctgaggaccacccgggaatgtggacctcctcctacttgcaagaaacactgcaaaagggccactgccaggtgtcctccccagcctgt

SEQ ID NO: 1975 - DNA, 120 bp, Homo sapiens
atgcgagagccggcagcagagccatctgtctccgtgccccgtggcacctggacaagaggggatcaccacggctgagcaatgaggtaacagcttgtcacggattagacgcagcgtgacttc

SEQ ID NO: 1976 - DNA, 120 bp, Homo sapiens
ttccgatgaacaggaattactgctcacaccgaaaacaccatgttctgcattcatttctgaggaacgaaagccccgggaggaaggaaagaaggaaaaggagctcatcacagccagctgccg

SEQ ID NO: 1977 - DNA, 120 bp, Homo sapiens
catcgccatgtcgtgggtgggccccatgcaggcagcggcatgcaagttgagtgcccactcggcctcgactggaccccgggcccacaccaacgccagtgcctgcccactcggcctcgactg

SEQ ID NO: 1978 - DNA, 120 bp, Homo sapiens
ccccgggcccacaccaatgccagtgcctgcccactcggcctcgactggactccgggcccacaccaacgccagtgcctgcccacttggcctcgattggaccccggggcccacagcaacgcc

SEQ ID NO: 1979 - DNA, 120 bp, Homo sapiens
agacggctggacgcgctctgctcttcccgggctgcccctgctcaggctttgtgctgagacaggccgctctgtgccccagggccctgggggtgcactgcccagctggctgcctcacactga

SEQ ID NO: 1980 - DNA, 120 bp, Homo sapiens
ccacgtggaccccacagctgccagaggccggggcggctgcggcctccagaacagcgtcctcccagatccgaggggagacggtgacacgagtgagcccacagtctcctgccatgtacccac

SEQ ID NO: 1981 - DNA, 120 bp, Homo sapiens
caccgtccctccagcacagcacgactctcacgttctacctgcgaactccctgaaacccccacccacccaccttggtcctgacactgggcccacgtggcagatgccccctcttccctcggc

SEQ ID NO: 1982 - DNA, 120 bp, Homo sapiens
ggccgaccagctgccatctctgggtgacatctgcatcactgtagttgacgccaggcaaaaggaacgtcggctccacgtcaacccctcccgccgccatctgctggggtgggcccatctctt

SEQ ID NO: 1983 - DNA, 120 bp, Homo sapiens
aggcgtgggcttggcctatggtccctagtccctgccagccacaccgcctggccctatagttgccacctgcagagccaggccccacagcagccctgagggaatgccagtccccaaccctaa

SEQ ID NO: 1984 - DNA, 120 bp, Homo sapiens
cagcggccacagctgttcctccacccacagctcccctccccctctgcccacctgtcagagatttctgaacccgctccccatggccttgggtcgcctggcccctgtctgctgctgctggca

SEQ ID NO: 1985 - DNA, 120 bp, Homo sapiens
cctcgccccctcacgatggctgctctactgttctcagcctgcaggcctagcccgctccccatggccttgggtcccctggcccctgtctgctgctgctggcgtcctcgccccctcacgatg

SEQ ID NO: 1986 - DNA, 120 bp, Homo sapiens
gcccgctccctgactggccggttagcaccctttggccctttggggcctgacctcagcctggacctcggcccgtccacaccgcacggggtgcctacggtcccccacagaggcctcaacaca

SEQ ID NO: 1987 - DNA, 120 bp, Homo sapiens
gcacgcggcctgccccatcccctgaggctgcgggcaagaggcaggtgggcgacgggagcaggggcctctgtgcaaacgtgcttgctggggatacggtgacggcgcccccatgcgtcacct

SEQ ID NO: 1988 - DNA, 120 bp, Homo sapiens
acacgaggctgtctcagcacctccagcctccaccccagacaagaggctatctcctgaggagcctctggtgccatctcactgcctacctaatgctctgaaacggaaatgagtgtggcaaat

SEQ ID NO: 1989 - DNA, 120 bp, Homo sapiens
aggcgggctctgtctcctgctgagacacccctctcctcagagggtaatggaaggtcagccccggcagggtccactgcccacggctcagcaagaaccccccaaggcagggcctgggattgt

SEQ ID NO: 1990 - DNA, 120 bp, Homo sapiens
gaacgcaggcacctgatcctccggcaaagctggggcccctcagaggctgtgcagacgacaggctccccatagccttgcggacatccttacccccactgcagtgcgcctcccagcctccct

SEQ ID NO: 1991 - DNA, 120 bp, Homo sapiens
atccggtggggggcacactgaggggtgctggctgagggagtggggtctgggcaccaggatccagtgggcaaccacattgaggggtgctggcggagggtgtggggatctgggcaccaggat

SEQ ID NO: 1992 - DNA, 120 bp, Homo sapiens
tggcggagggtgtgggggtctggacaccaggaaacaggactccagggctcttctggagccggggcctgggagcagttccgggaagagccttggactgctgcctcccagccagtgagtccc

SEQ ID NO: 1993 - DNA, 120 bp, Homo sapiens
gagcggcagggctgcagaggctggagccactcacaggggcagggcctgtaccggctccaggctgagggtcctctgagcccctgggcaggaatcctgccctacccctcatgggctctgcct

SEQ ID NO: 1994 - DNA, 120 bp, Homo sapiens
ggacgctgccccaggtgggcagagcctggacctgcagctcctttgcccacagcagcaatgggatgaaagtgccatggctgctgcaggggacaccatgcagcctgagctcaggcccgggct

SEQ ID NO: 1995 - DNA, 120 bp, Homo sapiens
gggcgggggagccgattccagaacccacggctcacacagaaggctgaagggctggacagctgccatagggctctgctgtccaggcacccgcggtggagaccgcaccatcctcgctcgttg

SEQ ID NO: 1996 - DNA, 120 bp, Homo sapiens
tgtcgaggacgccccctaccaacatcctggggagcagtactgtccccctgctatcttttgcggggcagtcgcccactttggcagaacagggaaggtagctgtttcggtgagttggcaggg

SEQ ID NO: 1997 - DNA, 120 bp, Homo sapiens
ctccgttcctggtcatgtggcccacagggagtgggaacccgcgagggtcatgggtgggctgggctctgatgtggcaaaaggaggcgtgagggagtgctgtggccgcctcccggtggagtg

SEQ ID NO: 1998 - DNA, 120 bp, Homo sapiens
ggccgccatggcggtccacaccacgggtcctggccgtgctcagggacacccccaggaaggctccccgaagctcagtgaggagtttctgcttgtgtccaagctcaacctgctgtcaccatc

SEQ ID NO: 1999 - DNA, 120 bp, Homo sapiens
cctcgagttcctctgaccgcccaagggaggcatcaggcctggcgcagcaatgcgctcggagccggctgcctgccacaggctgcttccacttttctgttcggagccggctgcctgccacag

SEQ ID NO: 2000 - DNA, 120 bp, Homo sapiens
gtacgtctgcaagttgctcttcatctttctccttggtcatgacattgactttggacacatggaggctgtgaacctgctgagttcaaacagatacacggaaaagcagatcgtgagtatcgc

SEQ ID NO: 2001 - DNA, 120 bp, Homo sapiens
agacggcagaggatggcgtgggcctggcaggactgaggcccggtgcccgtgtagggccgctgcttccttctctgcccacagctgacgtgagccacgtgggtctgctgcagatggagacgc

SEQ ID NO: 2002 - DNA, 120 bp, Homo sapiens
acgcgtgcccagtccttgttagcacctgctgccaacaccctgcgggcccccttcccgcccaagctgggtgttcttcaggaagccctgatgccctcacagggttcctcctcctgcatgcgg

SEQ ID NO: 2003 - DNA, 120 bp, Homo sapiens
ttacggcgagtttcaggactgcccggttggtctggagagtgccgcacgcggcccagcgtttgatgtggttggtgctctgtgcccatgaggtcggcctccagaggaggggaggatgtctcc

SEQ ID NO: 2004 - DNA, 120 bp, Homo sapiens
tgacgcactgtcccaagtagacccgtcccgtggtcccttggacagctttgtttctgcagtaggcgctggaggcacatggctgggtcttggtgcggagggtgctcaccccaccatctcccc

SEQ ID NO: 2005 - DNA, 120 bp, Homo sapiens
cctcggtctccctcgtgtgagctgacaccggagagtagtggtggggcccccgtccccttggtgtgagctgatgatttagactgtgttcttctgcctaaaagaggaggcggatcctcctcc

SEQ ID NO: 2006 - DNA, 120 bp, Homo sapiens
gggcgccctcgtgtgtcggcatttgtagccacaagcatggaacctggttggctcttctatgttgaaggactgctgggggcccagtcatggggtcctgaagccgcctggcaaggacagccc

SEQ ID NO: 2007 - DNA, 120 bp, Homo sapiens
tggcgcctggaacacacccctgacgtggcctcgaccacacatccacatggacgcatggcagggtgtgtgtgcggttgctgctctgggctgatctggtgaggatggggtgggccggaagag

SEQ ID NO: 2008 - DNA, 120 bp, Homo sapiens
gggcgttggcacccagaaggggaattttttattcaaagtaattttttggaatagtatagggggagatttaggaataaaaaagccaaaaggtaaatggtacaggtagtccctatacccttt

SEQ ID NO: 2009 - DNA, 120 bp, Homo sapiens
aagcgcttggagaagagactggccctttttcagctgtgcctccacagcgtccaccccagggtccctgttgccttcccagctgcttagcagaatctggtggcaggagggcgaagggggata

SEQ ID NO: 2010 - DNA, 120 bp, Homo sapiens
aagcggagcatggaacacgtctgtgccctggacaagcatgttggcagcagagcaggagagccatggccggctcccttcccaccgtgtctgtagggacccgaagccctttgctccaggggc

SEQ ID NO: 2011 - DNA, 120 bp, Homo sapiens
gggcgtggtggggtgagggtgggcgtggggcaggggaagatcatcaagcagatgtggagctccatggcggtgcagggccctccaagcatttctgttgtgattgtggattattaagttgta

SEQ ID NO: 2012 - DNA, 120 bp, Homo sapiens
ggtcggctggtggttttggtggtgagaaggttggcagggagacctttggagcagggcccatgtatgctgagaacactgctgctgccccctaggcggcctcggcaggcggccctgagtgct

SEQ ID NO: 2013 - DNA, 120 bp, Homo sapiens
ctgcgccagccccacccccgcgtctcctgctggctctgggggggtgctccgtgcagctctgcgctgtcttcagcctgttgcgagtgactcttgacgtctgtctttcagagacactatgga

SEQ ID NO: 2014 - DNA, 120 bp, Homo sapiens
cagcgtgaagcagagcgcggccctgtgcttgctgcgcctgtacaggacgtcccccgatcttgtccccatgggcgactggacatcccgagtggtgcacctgctcaatgaccagcacttggt

SEQ ID NO: 2015 - DNA, 120 bp, Homo sapiens
ccccgctcccccaggtgacctttgggatggccgttgtgaagacaccatggtgcgccttctcgggatgcccaggagaggctgtcacaggggctgctgtggctgcgtgctgaggccacgggg

SEQ ID NO: 2016 - DNA, 120 bp, Homo sapiens
ctccgcctctgctcatcctgtggccaggcattggctgaagccctcgggtagcacagaggctctgcagacacccccagctgagacacgtgtctcctggaaacacctatctagtatgcggag

SEQ ID NO: 2017 - DNA, 120 bp, Homo sapiens
tcccggctgcctgtgccctcatctaggctctaacgtgcagtcttactaatcctcgtgcctactccacgggccaggcccccatggtataggcatacaccaagggtggaggtttccagcgat

SEQ ID NO: 2018 - DNA, 120 bp, Homo sapiens
gcacgtgtgggggaggggctgtgctagtgtgtgagcctcaggggcttgagggtcacagagccgtccaccgcatccagcaggggtggatgtgggcagaatgtgcttgtcctgcctgaactc

SEQ ID NO: 2019 - DNA, 120 bp, Homo sapiens
ctgcgtggagaggcatgtgggccggtcacgcgttcacaaggatccaggatagagggccgagaatgccactttcccatgttgccgtgagccccatcctggcgggggagcctttcagacggt

SEQ ID NO: 2020 - DNA, 120 bp, Homo sapiens
tgtcgtccaccatcccgtggaccgtgggaggtcatgggattttcccgctttgcagtcaaggaggccgaagctgggaaagaggaaatgccctctgacagccccaggcctgtacccagagtt

SEQ ID NO: 2021 - DNA, 120 bp, Homo sapiens
gaccgtcgtcttgtccagctcagctcacacatcctctgtggtgccttgttttaggggaagtggccgtcccctctcctacaggactgcctcacccaggcagctgtcctcacatgctttgtt

SEQ ID NO: 2022 - DNA, 120 bp, Homo sapiens
cttcgaggttttatgtagtgagttgggttaggtctggttttccttgtatgtgtgatgcgatgagaataatcctgtaacagaatgtgtcctgtggtatttgtcaggtgagaagtgtcgttt

SEQ ID NO: 2023 - DNA, 120 bp, Homo sapiens
ttgcgtttttgcttggctctgcttgccagctgttcccctctgcactgtcagggagggctcctgtcggggtcaggcgggctttctgtttgtccagttagaggacctgtctctccaggacgc

SEQ ID NO: 2024 - DNA, 120 bp, Homo sapiens
tatcggcagggctttgtggggtgagctcctgtggtggtgcctgccctggcagtgtgctggttgggagggtgctcatgtcggagtcctggcactccttggcggggacctgcttatgtgccc

SEQ ID NO: 2025 - DNA, 120 bp, Homo sapiens
ccccggctgaccatgtgtcctgcccctctggccgacagtgcagggcctgccatggggctggtatccaggctgagcctgacatctcaatgagcagtcttccctccccctcttcctccctct

SEQ ID NO: 2026 - DNA, 120 bp, Homo sapiens
ccccgtgccctctctctgtgttgtttgtggcacgctgctgtgcccgccatctggaggcttgaattgcctgtgagctcatcctggagtgaatgaaatgaatgaaagatgtgactctttctc

SEQ ID NO: 2027 - DNA, 120 bp, Homo sapiens
gggcgtcttcccttcacgcctgagcaccttcatgcttatgtttctcatgtgctctgtagagctggtgacctgcttttgaccctgtctcctcccgtgggacgtcactagccaggcgcctag

SEQ ID NO: 2028 - DNA, 120 bp, Homo sapiens
tgccggagcaggggccttcccgtgggtgctgggccggcagcggctccgccctgcagagaggaggacgcggccccagttgggtgaggaggcgagggcaggatgacgtgatccaggggaggc

SEQ ID NO: 2029 - DNA, 120 bp, Homo sapiens
ggccggctttcagcaagggcactgtgaagtcttccacggaaacctgggattgcctgttggaagctgggaaggcaccaggtgctctcgctcccctccagctgctttgacgttaagaggaac

SEQ ID NO: 2030 - DNA, 120 bp, Homo sapiens
actcgctgagggagcatggaaaggggctgtaggattgtcttcagtctctctttggttcttatttgatgtttctttttaatgtgggtcctgagaagtgaggtgtgcccataccccaggcct

SEQ ID NO: 2031 - DNA, 120 bp, Homo sapiens
gtccggctaggctcagggtggactttggagggcctggccttgactgtgtggcttagggatcagatggaagcttctggaccctgggagtgagagcagtgtgctgccctctgaaaaggagga

SEQ ID NO: 2032 - DNA, 120 bp, Homo sapiens
tggcgggtgggttccttagggaggtgtctgtggccgaggcacgcagctctgttctgagctgagagctgtggtgtgtgggcacctccgtcctgactgagagctgtggtgtgtgggcgcctc

SEQ ID NO: 2033 - DNA, 120 bp, Homo sapiens
ctccgtcctgaccgagagctgtggtgtgtgggcccctctgttctgaccgagagctatggtgtgtgggtgtcattgctatcctgtgctttccaatctgttcccattgctcacgggagcccc

SEQ ID NO: 2034 - DNA, 120 bp, Homo sapiens
tggcgaagggcttaagctttggatctgcacttgcggtctgtcacttaaagggtgccctgcaggagagggagcagatgtaatcccagtgccagcctggtggaggccctgctgcccagggct

SEQ ID NO: 2035 - DNA, 120 bp, Homo sapiens
ccccgacctgctgtgtgaccgcgggcctgtggagcagggtgatggtgtagcacctccaggggcactatgagggctgcgctgggagagagcactctgtgactgggggtgtgcaaggggagg

SEQ ID NO: 2036 - DNA, 120 bp, Homo sapiens
cagcgtgggcccttgggaggtgggagggggctgccttccctggggttggtcagcaaaggcctcttggcaggaggtgccggtcctgatagatctgggtgaaggagtcccaggctgaggaat

SEQ ID NO: 2037 - DNA, 120 bp, Homo sapiens
gagcgtgaaccaggcaagtctgtggaatagccaggcagcctggggttcgagggaacagggaaaggtgagactacaaaggtagtggagctggattgcagaggcccttgtgggccacagtgg

SEQ ID NO: 2038 - DNA, 120 bp, Homo sapiens
ctgcgggtgggagtgggtgcaagggaccctccaggctacctgtggtctcccagctcaggcccgcgatgggagagtatgacatgatttcctctagagacctccttcccctgggcaccgctg

SEQ ID NO: 2039 - DNA, 120 bp, Homo sapiens
ctgcgtaaaaatgggattgggatgaaagggtgtgatctactgagctagacggaggcggggtcccagcaaggcctgcttgctcccattcctcttggcctctgcatggtgttccttcctccc

SEQ ID NO: 2040 - DNA, 120 bp, Homo sapiens
gtacgtagcatgccacagcacctttctttggggtgttgttttctgagccccaacattcatggccctgaatgtgtgcctctgtgtgccaggtgttgccctaaattcttggaccttcccatg

SEQ ID NO: 2041 - DNA, 120 bp, Homo sapiens
gtgcgtctcacctggcagttacaagaaaaggaaattgcactggttgccacatttacaacctaaagtggagagatttcacagaatccagacttctggtttctcttatggaatccggggatc

SEQ ID NO: 2042 - DNA, 120 bp, Homo sapiens
tggcggtgccaggccggcattggagggggtcccagcctggcctgtgctgccactggttcagcagtagagcctgacggggaggcgacagcagtgggggccctggggaaggagaaagattcc

SEQ ID NO: 2043 - DNA, 120 bp, Homo sapiens
tcccggggaggtggggctcccatttcaaatggagcatgcccagcctgccgggcctcagtttccacatatgcccaggcatggattagctgagatggtcttgaagtcctgccagccctggtg

SEQ ID NO: 2044 - DNA, 120 bp, Homo sapiens
tccgtccttgccgtgattcttccaggtggcaccgccctcacacctcctttacagaggaggaaactgagacccggggaggccacaggagtcgggctctgggcccagagcctgggcggggat

SEQ ID NO: 2045 - DNA, 120 bp, Homo sapiens
ctccgggtgtgggaaaggggaagcagaaagaaagggacgtccgccggaggcctggcggtttcctctcggggcaggagtgcgaggaggaggaggaggaggaggaggaggaggaagaggagg

SEQ ID NO: 2046 - DNA, 120 bp, Homo sapiens
ggacggcaggaagccgcctcgggctctgacaggcgcggccctggcctgcccctgcccttctgagcctgtgacccgggggaaggcactttgccctccctgtgcctcagtttactcaagtaa

SEQ ID NO: 2047 - DNA, 120 bp, Homo sapiens
ggccgtgcctcccctcctgcacatcttctgtggctccctggcatctggggggaagatgggggacagaggcctccctgcccagctctcttgacctccctcagaccccagccagctcagacg

SEQ ID NO: 2048 - DNA, 120 bp, Homo sapiens
gggcgctctcccctgttcaggggctggggctaacgctacactcaaagccagtccatccacagcgctttctcagcagtatcttctccagagctacaatcaaactctgccatggtaataacc

SEQ ID NO: 2049 - DNA, 120 bp, Homo sapiens
actcggctcccggaagcctcaggccctgatgctgaactgatcgtcacagtccctcctgtgcacactcctggacgggtcttgctagttctcaaatgcggggcttgaagcactggccctgcc

SEQ ID NO: 2050 - DNA, 120 bp, Homo sapiens
gtgcgagcagaatgctttggggtgccccggcggcccctgcacacacacgcctcacctgaagggtgcgtcatataggggaaatgcgctgttgtcgagactggaatgggctgtagtgcactt

SEQ ID NO: 2051 - DNA, 120 bp, Homo sapiens
gagcgagggcggcctggggaccgccgggtggctgtgtcgtcattagcatcattggcgcatgggcagttggatgagaaggaaccattcctgactgtacatgagcctgaaacagagagctct

SEQ ID NO: 2052 - DNA, 120 bp, Homo sapiens
ttacgcatacaggcaacatctccggcttcaacaacatgtcaactgtgttcctttcactgggctgggactctcaggaaagggcaacggtgggcctcagggcccagttctgttctctgggga

SEQ ID NO: 2053 - DNA, 120 bp, Homo sapiens
ccccgtgactctctcagagatatgctgatggagcaggaggaggaggaggagttggagtttttaatggctccagtgagatggaaaggagtaacctgaagtcatctgggccagcccagcgtc

SEQ ID NO: 2054 - DNA, 120 bp, Homo sapiens
ctacgataagccttggatgaaatgccgtttttactctcacatattcaaacgggcacatggcaaatttgagcttccctgtgttaacctttttgccctttcagcacaaaaacagagtgaggt

SEQ ID NO: 2055 - DNA, 120 bp, Homo sapiens
ccacgctggcccacacggaccaaaccggcttccctccccactatcaaaaagcaaatcaactgcagtgcgctacaccacagaacctaaactttgcagggtgaggacgcccaaacttcccag

SEQ ID NO: 2056 - DNA, 120 bp, Homo sapiens
agtcgcatctctagcccacaccttgccagagcctcactggcgcactatttaacaggaaatggaattcattgtggcaggtctcacttagacccgcctcagagagttctgttatgaaagtag

SEQ ID NO: 2057 - DNA, 120 bp, Homo sapiens
acacgttcacgttctgggatcttgcatgtaatttcactcttggacttcccctcctggacaaacctccctgcatttgtttcaaggccatcttgagctggatcggaaaggagtcttgggtca

SEQ ID NO: 2058 - DNA, 120 bp, Homo sapiens
ctccgtgccaagtaccaaaaccacattttccagatgattccagtgagtttttcactcgaagcaattcaacattaggccctaaagacggcaatcatcttgtacaaaacaagattgttcatt

SEQ ID NO: 2059 - DNA, 120 bp, Homo sapiens
gagcgagctttgtaaactacttctaattctcttcattagtatgctatgatccaccccagcttctgcaaggtcagacatgcaagacaagtacttggccaaaacagcaggattctaactagt

SEQ ID NO: 2060 - DNA, 120 bp, Homo sapiens
acacgtaaagttttttgggaaatgctgcagcacatcccacaaaaacagatggtgattagtgatacagttgatgtgctaacaagtaacatgtaagacatttaggtcaaaggggatgaggcc

SEQ ID NO: 2061 - DNA, 120 bp, Homo sapiens
aagcgttatatgactgttctaaagggggctctgttgaaattctaattttaggatttagaaacagcttttggttatatcttgaaagcgtaattgaaaatctgcccaagctccctctagctg

SEQ ID NO: 2062 - DNA, 120 bp, Homo sapiens
acacggatgagaaatctccccactcagtcttgctagatgctaggatacccactctgagatttgagtttgggaacagccattaagcctcctccttaattgcggttcataatgatgtacgaa

SEQ ID NO: 2063 - DNA, 120 bp, Homo sapiens
ccccgggttgtttgtttttcctggctggccccagagcaagaagagatgactgctggtaaagagccagggcctggtttactaccaggcctcttttcagataacattcaagcaattcttcca

SEQ ID NO: 2064 - DNA, 120 bp, Homo sapiens
tttcgaacgcagcgcctttctatcagctctccagtcagcaccctttacattcactacatcacacactagcaaatgaaagagccaaacaactgtggcttgatcctcacttgtacttattag

SEQ ID NO: 2065 - DNA, 120 bp, Homo sapiens
acccggcttaactcctaattaccctcctggagatgccacttctcaggtggtcctggcttcattagggccccagttctcagtcccaatgctgcacactgctcttctgtaacactggttatg

SEQ ID NO: 2066 - DNA, 120 bp, Homo sapiens
gcacgagagcctcaaactaagctttgcttttttttttcactctctggctcttggaaggaaagaacaactcatgctgctttggggaattccacaagggttcagaatcagcatactaaaaaa

SEQ ID NO: 2067 - DNA, 120 bp, Homo sapiens
tgccgattccctgaacttaggaaagggaaggagaaaaaggacctcttgaataaagtcaaatacttggaatggttcatttctgctggtggctctttttaattctggaagggttgcaatggg

SEQ ID NO: 2068 - DNA, 120 bp, Homo sapiens
gttcggcccctgcactcacgtggtatcgtcccagcgctgtagacactggctgtggaagctgtggttacataacgttgtgaggatgccattcacagactcgtccatgcgctccagacacac

SEQ ID NO: 2069 - DNA, 120 bp, Homo sapiens
caccgtgcacttggggagttcagtcaggtccatcactgggaggctggcgccctacaggaaacacctcacataagcctcactcttcatctaccagcaatactttatttttccttctttttt

SEQ ID NO: 2070 - DNA, 120 bp, Homo sapiens
ggacgtgcttgctctggcagctgcagggttcctgtctggcctccctggtgagcagaggggcggccacggcgggcggtggcctagagacccaggacctgggcgcctgggaaaatggaatgc

SEQ ID NO: 2071 - DNA, 120 bp, Homo sapiens
tctcggaggctttgtggactttctgtgtcatacaaagagaatcgagtggagaggttcccttcagcgccttcatgcctcctcctgcctgtgtttcctcgaggtccaggccatcatctcagc

SEQ ID NO: 2072 - DNA, 120 bp, Homo sapiens
ttacggattttaattaacaattatgtatcatgttggctcagcaatggtaacaaacgtatatgaatccaagttgttaataataagggaaaccatggggatggggagagggagtatttggga

SEQ ID NO: 2073 - DNA, 120 bp, Homo sapiens
gaccgggagcaagttctaaagcaggaagatgaacacataaagctccctgtgtgtctcacgtgtttgggcaattggcccagccacctctatgtggagggaggcctgctggggctgcctctg

SEQ ID NO: 2074 - DNA, 120 bp, Homo sapiens
gctcgaggctggagggcagggctggccacaggcttgtctgtggaggcgctctgctgaaagcacgagcgctctgtgtggccgaggtcattgtacccccggcttcctgctgggtggttctgt

SEQ ID NO: 2075 - DNA, 120 bp, Homo sapiens
tcacgaaacgtacaaagacaaaaggttaagtcttccaggaggccctggaatgtggacgaaagtttggaaaagcaaaatgttgccaactcctcacgcagggccctggagggacgggccgca

SEQ ID NO: 2076 - DNA, 120 bp, Homo sapiens
tcacggtagtgaatggcacaacgaagtttctccagcatgatttccagagaggagtactggggaagcttgatcatgaacatgcaggtctccacgcggatgtagcgagagtctggggaacct

SEQ ID NO: 2077 - DNA, 120 bp, Homo sapiens
aaccgagccagcatcagagggttgggcccacatctgtgaggctcccagggaagctgggctggcctctgcttccaggtttgcctccttgggtagccccaagccaatcctggggcccagcag

SEQ ID NO: 2078 - DNA, 120 bp, Homo sapiens
ctgcgagatgttcttggagggaaaaggggagagagctgctggacagcgcatgtgccaaactgctgatgggtttgtctgcccagcaaattgtttctttttttttttttttaaccatttttc

SEQ ID NO: 2079 - DNA, 120 bp, Homo sapiens
tgccgggccctaatcctcaatgatgtctgagttttggcacgtggggctcctgttcattgttctcccttcacatggggcctggcagccccagttccaaacagagaaaggctagtgtgtccc

SEQ ID NO: 2080 - DNA, 120 bp, Homo sapiens
gggcggtacctgctgtgccatctgggggggcgatcttcatggggtacgggggcacatgggcagtgtcgggacccccatctttgcaggggcaggtgaacgggatgcgctcctggttgcagg

SEQ ID NO: 2081 - DNA, 120 bp, Homo sapiens
actcgatgtgctggtccgtctccatcagccccacttggtacatggtgtgggcctggggaggagaggtccaggtgtcaggagccctggagccccacctacccagtgcctccccagccctgg

SEQ ID NO: 2082 - DNA, 120 bp, Homo sapiens
caacgtgtgggctgtgagcacagggagatgacaatgatgacaatgatacaggtctgtggcaaggacagagctgagacaggccactgccgatgcctgctgctggagttgagggtgacaggg

SEQ ID NO: 2083 - DNA, 120 bp, Homo sapiens
gcacgcctggggctcaccacctccccgcccagcctggccctgggatgtctaccttgaggaactcgaggttgatgtaggggaggccgcaggtgcgcagctccatctccagtgggctgagca

SEQ ID NO: 2084 - DNA, 120 bp, Homo sapiens
aaacgatggaggcttcaaaaaaatgcccaggagatgagagcaatcgagcttccagttagttgaggagcagactctcacagtggccagtgccctggggagccatgttgagaatttggttaa

SEQ ID NO: 2085 - DNA, 120 bp, Homo sapiens
cagcggtggggggaggtgcaagcccagtgttggctggggacgcgtcccgcgggtaacaggcggcctcgatgaggttcagctggccatttcgcttcactttgtggccgaggccatatacga

SEQ ID NO: 2086 - DNA, 120 bp, Homo sapiens
acccgtgcccacggtgccttgtacagagaggagctgagaaggagggatgggtgggtgttaatacagggtctagccatgcacatggggacaggcagctttgccttctcaccaggggacgtt

SEQ ID NO: 2087 - DNA, 120 bp, Homo sapiens
acacggtgaaacgatttgaaaacttttattgtgaattacagggtcctatgaaccctctgtccgtgcctttatgaatatcaacatagacatgtttttttttttttttttgcattaacaccg

SEQ ID NO: 2088 - DNA, 120 bp, Homo sapiens
ttacgtgagttgttatatcctatttttagtggaggagaagttgctcttgtgtttggaattggacctgagagacttgaaactgacgtccttttttaattcggccattgattgacacggagc

SEQ ID NO: 2089 - DNA, 120 bp, Homo sapiens
cttcgaaacagaagagcattgtgttctgagggaagggagttggcagtgagtagtcaatggatgtgctagccgctccatttggctcttttggtttggactggtggcaaaatctcagagaaa

SEQ ID NO: 2090 - DNA, 120 bp, Homo sapiens
cttcgaaagatttccagcatgcactggggtctttagaaacaatctatagccttagtgcagcaaatgagtatgagtaaaagagaaacaccttgtggtggcttttttttttttttttttgag

SEQ ID NO: 2091 - DNA, 120 bp, Homo sapiens
atccgcctgctcttgaagccagcagctattgcagacttggcattcccaggcacccagttaagggaaagtgacgtgtagaggaggtatcagatgggtctggatatagaaaaagcagctggt

SEQ ID NO: 2092 - DNA, 120 bp, Homo sapiens
gtgcggaaatgaaacagacagtctggctcgttgggcagcctagcctcctccagaatctgtgcttgccttccctatggagtgactggtagatcttagaattcagacctcagtggttgctag

SEQ ID NO: 2093 - DNA, 120 bp, Homo sapiens
caccgactctcctttgacatgtgcttggaacagacacctgcacgagctgcctttctcctcccacttctgcctggtcttccaaacacctgcttttcttgtttgaactcttccttttttttt

SEQ ID NO: 2094 - DNA, 120 bp, Homo sapiens
ctgcgccccagctgattctttacagataaacaaacattgactctgctttgacatgtgcttggatcaggtaactgcaccagctgcctttctcctcccacttctgcctggtcctccgaatgc

SEQ ID NO: 2095 - DNA, 120 bp, Homo sapiens
atgcgaaacaggccattttccatgttggtggttattaagcaagacttgaacatttgtttgttgcttgtttaggcttttatttcagagttcacagaattaactttctttttttctgatctc

SEQ ID NO: 2096 - DNA, 120 bp, Homo sapiens
tgccgttactcatgtttgcatacatgcatgcattcgctcactcattgattcagtagccatttattagcttccttctatgtgccaggtacagtttaagcagtactggtacattgtgaacaa

SEQ ID NO: 2097 - DNA, 120 bp, Homo sapiens
gttcgagaccagccctgggtgggagactgggatagggtgacctgagtggctacaaggtctgttaggaggcctccgcaggggcctatgttgatggcctcctctccaagtatccacagactt

SEQ ID NO: 2098 - DNA, 120 bp, Homo sapiens
tgccggggggtgaagtctgcaggatgtggggattgtttggcttttggaggaggaaggagggattcaagacacattgtagaggtttgagtctgagcggacagtggtgctgtggcagacacc

SEQ ID NO: 2099 - DNA, 120 bp, Homo sapiens
gcacgttgtactggagaagctgaactccaagagcaggtttgggctgactccaaagccctatgctttttgccaacatattttcaaacataaatagacaattttataaatagctccaaagag

SEQ ID NO: 2100 - DNA, 120 bp, Homo sapiens
tcacgaaaacagtctggggaagagaggttgaatgggaaaattctttcacaaaaatctgggctgaagacttcagtgtgtctgcctgagaacagaagtgacactatttgagcttttggcata

SEQ ID NO: 2101 - DNA, 120 bp, Homo sapiens
cttcgttatttatgtagtcttctgggatcattggtattggtcagaagttcaacactgtagccattgcaacatgctcagttaaaacagcaaagactaaattagcattgtctctgagtccac

SEQ ID NO: 2102 - DNA, 120 bp, Homo sapiens
cagcgcaggattgaagaagagcaggtaccagcctgagggctggcatgcggattctcattctcttgctaggcctcttggatacgctctccttttgagcaggaggacaggctctgatagaca

SEQ ID NO: 2103 - DNA, 120 bp, Homo sapiens
tttcggaatgggaaacaaactcccaactaaaagggcctctggaaactgtcaattattctccacttctcagctctgatttttcactgcagaggagcttagggaagggcaccatcctatcag

SEQ ID NO: 2104 - DNA, 120 bp, Homo sapiens
aagcgtaaaactcaaagccttgaagtttctagcctgttccagccttgatccaggccatgtttatcctgattccatcctttaaaacgaatgcctcactcttaatagcgcacggcagtttga

SEQ ID NO: 2105 - DNA, 120 bp, Homo sapiens
tagcgtctctacacttcagtatacagagatctgaacagtgttctctctgagtgaatcatattgcaggacagaaattacttttaaaaattctgtaatgggtcaggcctataatcctagcac

SEQ ID NO: 2106 - DNA, 120 bp, Homo sapiens
agacgcttattcttttttgtttggtgtcattcctttgagaaatatttgagtgccttttctgttgcagacattgattagatgctgaggttgtaacaatgaagaagatagccatcgctgttg

SEQ ID NO: 2107 - DNA, 120 bp, Homo sapiens
ggccgtgcccctatgtgccctattgtttcttcacacagctcccttcatctccttggtccaatgaaaaggttttttcatacttgttcattcattcctgcattaattaaagtaggttgtact

SEQ ID NO: 2108 - DNA, 120 bp, Homo sapiens
tgccgcagtgctgcacgtgagaacccgtcatggtttggtcagggtgggcaggactgacagtgagcacagagcgaagtaaaaccagcaaaatttcatgattggatagtggaaggaatcatg

SEQ ID NO: 2109 - DNA, 120 bp, Homo sapiens
gaccgacctcttccgtgggccgttcccagcctccagtatcctccacccactctagtgtctcataatctctcttcctccctcccaatctctcttcctccctcccaatctctcttcctccct

SEQ ID NO: 2110 - DNA, 120 bp, Homo sapiens
ccccgcagagaatggtcggctcccagctggagcaagttcatccagttgagaggatgatgtttgcataatttgaataataattttgcataatagaggctctctttgaaatgatgtaaatca

SEQ ID NO: 2111 - DNA, 120 bp, Homo sapiens
atgcgaaatttgccctgggtcagtgggggtaggggaaagaggggtagaggatggggataagaagtaggtctaagggtagggaggaaggagtgggaccaactcagtctctggacacctcct

SEQ ID NO: 2112 - DNA, 120 bp, Homo sapiens
aggcgtgagccaccacgtccagcccctccttttctaatggaaagaaaaatgggctttggggctgagcagacctgttagtgttctttggttgcaagcaacggaaacctgttcacttttggt

SEQ ID NO: 2113 - DNA, 120 bp, Homo sapiens
tagcggaacaacaagacagaaggagtctggtccctgagcctctgctttttttttttttttttttgtaaaagagaaacttccatcttgttaaagttcctgttatgttgggtctctactgtt

SEQ ID NO: 2114 - DNA, 120 bp, Homo sapiens
catcgccaaactttattctaaaataaaaggacaacaagtgaaccctggattaggaattagaagacctgggcctagccccatttctccaactcatattccatgtgaatttggggatggaaa

SEQ ID NO: 2115 - DNA, 120 bp, Homo sapiens
gcccgagtttatcttaggtcttaccctgttgagtaggcgatcgaggcacaagtggtacccagaggtgtgagagcattctgtgttagagggatagcagtctttgctaactgctaaatagca

SEQ ID NO: 2116 - DNA, 120 bp, Homo sapiens
gcacgtatccataaaagagcaaatagcccctttctctcttcccctcataacatcctcagcagctgcacgattgttatgtattttaaataaagcatttaaagccactcagaatgtagcaac

SEQ ID NO: 2117 - DNA, 120 bp, Homo sapiens
tgccgtggcaacagtccacccttccccgccttcccccaccacccatcttgcctgtttaccctgaaactgacatgttggttatggtgaatgataggaaaaaatttcagaggaacttccaag

SEQ ID NO: 2118 - DNA, 120 bp, Homo sapiens
tggcgtgattcttcgaagctttgacaaatgacaggtaggacatggctgtacatttgctagttcagaggaataatgtgaaaagaatcaagcaaggtgtaattgatcccaacaactacaggt

SEQ ID NO: 2119 - DNA, 120 bp, Homo sapiens
ggtcggtgatctttttgagaatctgagaatgccttagactatctccccaggaaaattcctagacatgcaacattttgcatataattgtaggagattcatggctcccctgatgcccattca

SEQ ID NO: 2120 - DNA, 120 bp, Homo sapiens
agccgtggctctgtcttcctcattcttgtattcccacatgtcacacatactgcatttcacataatgatattcaggaagtactgaatcaaatgtaattaactcaagtaaagtagagattca

SEQ ID NO: 2121 - DNA, 120 bp, Homo sapiens
aagcggctaagaaaatgggcccagcatgagacagtttcaaacagtgcagctttttattatgcaaaggtaacagggtttctcgcagcatgaccccagcaatagtggctgtctgtgactgtt

SEQ ID NO: 2122 - DNA, 120 bp, Homo sapiens
cctcgcaaaactacagacctgttgtgtgaagatgggctggcttcctgcccccagccatctggtgaaccctggcaccacctccttggggcctccagtgattgttccccacacgcactgcca

SEQ ID NO: 2123 - DNA, 120 bp, Homo sapiens
ctccgctagagatctcggctgcagaaaggcaggtccaggagcaggtggagaggtgctggtgcttgtcttttggcgacttctttttgtaccttgccttctctttttgccctcttctgcact

SEQ ID NO: 2124 - DNA, 120 bp, Homo sapiens
tgacgaccgtgtccaaggatctcagtgctttcaaagaaccatagttatccactgctgccaactgaaggctctggaaattcaagttggctgtcccatttactggtggggtgagctgtggag

SEQ ID NO: 2125 - DNA, 120 bp, Homo sapiens
tgacgcctggcagctagtaagtgctcaataaggttttatctatattgtctgttgtttgagatgggggcactgaggtctggatcttgtccctaggaccctctgtggcatcaaccctcatca

SEQ ID NO: 2126 - DNA, 120 bp, Homo sapiens
tatcgagagcatcccttcctccctgggaaggtttgagaggcatttgtaatgcagattttgactctgggcaaggacccagctccccatcctcacctctggctgagccatttaaaaaaatac

SEQ ID NO: 2127 - DNA, 120 bp, Homo sapiens
tcccggtttgtcccctgctttccttagggagctggaggtgtcaggaagagaaaggggtgtaaagaataacaccggagactctggggtcagagatggcgagtgagcattcctgctggtccc

SEQ ID NO: 2128 - DNA, 120 bp, Homo sapiens
ccacgctgctgaggtgttggtggcagtataattaatcccaggctccttggggtggctcagcatccccaaatggccacccttgtcatttagccagcctcagtaggatgagcttggacaaag

SEQ ID NO: 2129 - DNA, 120 bp, Homo sapiens
taacggaaggaacaaagtttaattgcaatgcagaggaggagtttttatttctgcctcggagacttcctggaggaagtggcacttgagttgtcttttttctttcttcttttgagacaggtt

SEQ ID NO: 2130 - DNA, 120 bp, Homo sapiens
tgtcgttaagattctgtcccaatgtgtctatcccgtgggttcagaaggctggagagggcacgagcagcctcctagatattgcagacccctgggaacagccatcctttaggagggtgcctg

SEQ ID NO: 2131 - DNA, 120 bp, Homo sapiens
aggcgaggagctgatgcacacaggaagatgtcagaagacatacaggttactgtgaaggactcagggtgcgtgcaggagccaggcctcgctctaatcaagcagaaccagcttgcacagtca

SEQ ID NO: 2132 - DNA, 120 bp, Homo sapiens
tgccgctgcacatatacaaattgtgcaggaggtagtgggtagcatttgttgctgtagctattactaccttcatcatttcccatcctctttggggtgatggaaagtcttactgggctgcct

SEQ ID NO: 2133 - DNA, 120 bp, Homo sapiens
ttgcggcctgaggaatcttcgcaatgttctatcattgaatgaagcctcgagagagtcagaccctggccgggctcagccttgagaagtctgggttttgaggtgtctccctgctgcagtgcc

SEQ ID NO: 2134 - DNA, 120 bp, Homo sapiens
acccgggacagaagaggggtttggcagtggtgaccagggaggtgggcaggatggggcaaggtcccctgacaagacaaggctagttcctagatggcatggtgaccagagagggtggagagc

SEQ ID NO: 2135 - DNA, 120 bp, Homo sapiens
atgcgtgacacatggcaagtgtctaggtatgcagcaggtggtagctattgtcattccctaagggagagctgaattcatgagaggccctcccagaatacatgcctaatggctggggaagct

SEQ ID NO: 2136 - DNA, 120 bp, Homo sapiens
tcgtggggctggctagtctagcatggagggactctgggtactctgacttagcaagtgagtgcttatccctggaggggagggggtcacctgagactggaagggtaacttttgcctgggcac

SEQ ID NO: 2137 - DNA, 120 bp, Homo sapiens
ttgcgaggttggctgttcacgctttcctgagatggaagacctgggagccaggaaagggccacactatgcctgggatgagtggtcaggctggccagaagggagcagccactgcctgcagag

SEQ ID NO: 2138 - DNA, 120 bp, Homo sapiens
tggcgtaacctgtaagtgattgtatgggggagcgtcctggcactagcttgggagattctatccttgagttcatctcagaaggaaggaggggaacaaagcttgttcaaattctggggaaag

SEQ ID NO: 2139 - DNA, 120 bp, Homo sapiens
gaccgtccccctgcactagtttctttttccaagatcctgatggggaaaggctgcaccaacctgttagtgagtgggaagtggaagtaccttgaaattgaatccaaaagctcacatttaatt

SEQ ID NO: 2140 - DNA, 120 bp, Homo sapiens
tgtcggggagaggccctgtttggggtgattggggataggggagtctcttgtgagaactttgctaggtttctagaatcctgagctcagctggaaaggggtctgctttatttatggcctcag

SEQ ID NO: 2141 - DNA, 120 bp, Homo sapiens
gcccgtgctggtaatcaggaagcttagccatggagacaaatgtggacatttcctttcttgttggcaggagagaggcagcagacagagattctgtgattccacaggggtagcctggaaagt

SEQ ID NO: 2142 - DNA, 120 bp, Homo sapiens
ctccgtacacagactggctgctttgtctgaagatgtgcatttggttggggtggctgctcttgggctttctttgtaggctgtgacattatgctttaactctttccctctctgtgaatgggt

SEQ ID NO: 2143 - DNA, 120 bp, Homo sapiens
gggcggtcagatcttagttctaattttgactctggcatttccttgctgtgtgacttcagacaaggcccttaatctctctgagcctcagtttcttcaattaggtgtattagggtagcatga

SEQ ID NO: 2144 - DNA, 120 bp, Homo sapiens
gttcgcaatcggggcgatgttggtgatggtaacagtgaaatcacccctgaccaaaacaaaagtagggtgaggtagaggaaggtgagttctttgggctagttgtgtagctgtatgactcac

SEQ ID NO: 2145 - DNA, 120 bp, Homo sapiens
agccgtgtattttctctaggaaacctgagccttccttcccttccctgggaaatgcctatggcacttctttgtaggagtcctcaggtgctacagggtgagatccttaagggccaaggctgt

SEQ ID NO: 2146 - DNA, 120 bp, Homo sapiens
gtccgggtcagcacccagcaggtgctcagcaatgacttactgagtgaatgaatgaatgaagctcaactgatttactagcgaacatgtcagtttggggcctgtggtccagccagaggcctg

SEQ ID NO: 2147 - DNA, 120 bp, Homo sapiens
agtcgttggtgaaaggtttgaaaggacttggctcctgcctcagatttgctacaggcaaaggacaggcctctctctcttcctgccattgctatttatcatgcattgcacatttattgacta

SEQ ID NO: 2148 - DNA, 120 bp, Homo sapiens
ccccgagtcacccaaagatattcagttcactgatacctgaaatttccatcattcaagtttcattctttttcttaaggctctgctcttggttaaagagcagatgctttggagcgagttaat

SEQ ID NO: 2149 - DNA, 120 bp, Homo sapiens
gaacgaacactgatggacgatgatggagatattgataatagtgacaataattaatgtttactgagcacatactatgttccaagtaccacgttttctttcttgccttcattttcaaacccc

SEQ ID NO: 2150 - DNA, 120 bp, Homo sapiens
tgccggtcgctggctgggtgggtaagtcacttagtcttctaagcctcggtatctccatctgcaaaatggagataatacttgtaccttccttaatgggtgtttgggagagttcaatgaagc

SEQ ID NO: 2151 - DNA, 120 bp, Homo sapiens
tgtcgtttcagccttagtcggcttcagggaaggctgagaatgtcccagctggctctaggaacaaggaaaagccaacagcagcctgtaccgtctggacgggactggatgtgtaagggctgc

SEQ ID NO: 2152 - DNA, 120 bp, Homo sapiens
aggcgggcaggcaagtgaaggggcactcggctccatcaagcacagtagacaaagcaggaggtcgccgtctttctctttggtgtcccaagtgtccttgtcatagtaagggtttgtagaaat

SEQ ID NO: 2153 - DNA, 120 bp, Homo sapiens
actcgtgcttcccccaatgtgaggcccttttgttaaagtacattttccaccccatcaaatagtcagagtgattttttccagatacctagttgagcagtgatatactgcactcaggggaag

SEQ ID NO: 2154 - DNA, 120 bp, Homo sapiens
aagcgtctggtttaattccaagactgttgggatagggaggccaactgtggcattgaactccacgcagacagctgcagctcctgccggttccctgcagtgccctgaagtgctgcataaaat

SEQ ID NO: 2155 - DNA, 120 bp, Homo sapiens
ccccgctgggtcacgttcagacacctgccacagcaactcagaaactaaataggctttgcgttgttttttccattcaactacaactagcagaaaaccctggagattttgggggatggaacc

SEQ ID NO: 2156 - DNA, 120 bp, Homo sapiens
aagcgatgctaaggagagccaggggagaagcaggcagaaccaatggcaaaggaggagaagggaggaccctggaatctgggttacctggggttaggacagagtctttgtagcagtctgaga

SEQ ID NO: 2157 - DNA, 120 bp, Homo sapiens
agacgtttagattgtttgaaggaatttaagcagaaccttggaaagttcacttaaactttcctcaactcagttatcccatctgtaaaatgggacaagaagagcacatacctcataaggctg

SEQ ID NO: 2158 - DNA, 120 bp, Homo sapiens
ctccggcttcggtctttaacaagatcccaaaactggacacagagctgccatcctgtatccagaagcccttggcaagggtcttatcccaaggaccgattcttgaggccctcgtgcccacat

SEQ ID NO: 2159 - DNA, 120 bp, Homo sapiens
catcgctcctcgactcaggaagacctaaacaagccattctgtcccctgagagcaaaagctttggtctgaaaaactgatcttgtttctgtctgtttgcttctggaattaaaacatgaaaat

SEQ ID NO: 2160 - DNA, 120 bp, Homo sapiens
aatcggcgacattttcaaacacgatgagctgtttgtcaactatgtgttctggagcagaggatgggggaagggtttggaaaggtgccagcagcctccagcagggctgctcatctgcagtct

SEQ ID NO: 2161 - DNA, 120 bp, Homo sapiens
aggcggggcctctcggagacccccagctatgcttatgtctctggagccatgtgcgttcagatgcttgcatttcctgtgcacagtaacaccggcaatggtgtggtggtggggtgtgagcca

SEQ ID NO: 2162 - DNA, 120 bp, Homo sapiens
agacgtggcggcaaataagggagaattaggggcaggtgaagtgtccatttccatgaaaactggtgagactcgggagtggctgaattccattatgactggggctcttcgggaagggtaggt

SEQ ID NO: 2163 - DNA, 120 bp, Homo sapiens
tggcggctaatggggggcaggctcctgaggattcagagttcctgatttttctccctcatagggacaagaatttctagtggtgtttacccctgccttccactccagtgatgcatctcagag

SEQ ID NO: 2164 - DNA, 120 bp, Homo sapiens
tgccggggccacagatcccattctttccgtctcatggagggtaactgtgcaggctccctgggtctgaatcctgcccctgccacttgccagccatgcatccttgagcaagtgctctaattt

SEQ ID NO: 2165 - DNA, 120 bp, Homo sapiens
aggcgggcacacagtgggcatgtgtgagagataattaggtaatgtgggcaccaatagatgttatgtcagtgttcgcttaaaaagaaaaggcaaaaagaacacaagatagaacccaaaatg

SEQ ID NO: 2166 - DNA, 120 bp, Homo sapiens
cttcgaggctggaattctagacatttatgtgaattcaagagatttttggagacctagttggcaaccagtttaaacttattttaaaaagctatgtggcccccaaaagccatctctctgcca

SEQ ID NO: 2167 - DNA, 120 bp, Homo sapiens
tcccggcaggaatttgaactactattttctgcccaccctcacaccttcccaaatttcctttcaggctccaggcaggctggtccgtccaccccggtggtcagcctgacaggcagaggaagc

SEQ ID NO: 2168 - DNA, 120 bp, Homo sapiens
gctcgagctgagaaaatggaagagatggagcaggagcgaatcgggtgaggcttaacgcttcccattcaccccagagctgctgtggcaggagggtgtgctgggctggagcagggctttggc

SEQ ID NO: 2169 - DNA, 120 bp, Homo sapiens
aaacggggtgtgctgggctgcctctgggctttgccatttgtgacttacggggccacctccccgccccacccccttccccactggcagacgtgggatctttgttgcatgagttgggagagc

SEQ ID NO: 2170 - DNA, 120 bp, Homo sapiens
ctgcgagtgaggaggttcttggctgggggtgcattgaagaaggggcagggggaggggtcttgtgatagggaaagaggagatgtcattggaggctgcaagaagcggggtgggtgtgagcat

SEQ ID NO: 2171 - DNA, 120 bp, Homo sapiens
aatcggagaaaccagtcctataacagtcaggcagcatgtgagtgaggaagcagaggttaacctgatgggtccagactccaagaacccggggtcccatgccagctccccacttgcctgctg

SEQ ID NO: 2172 - DNA, 120 bp, Homo sapiens
ctgcgtttttctgaatggtgaaatcgtggtcagccactgcttctaaaggcagctgctctggctgcatcccatcggttggtggaaccccagcttttggccatttcctctgctgattcagag

SEQ ID NO: 2173 - DNA, 120 bp, Homo sapiens
cctcgacacgcatcaagatgttgcagcagtacgggaaaggtcaaaagtagttacttgaatgtttctgaggtcagtttgggctttttgtgggaggctgagcatcagaaataagcagaggtc

SEQ ID NO: 2174 - DNA, 120 bp, Homo sapiens
ggtcggtcctccactgagcttatgaccttactcgaagaaggcaactgattggatctgatctctctgtaagagcccagtgtgtacagacatgcatgtaaaagtgtattcttgcatgtaggt

SEQ ID NO: 2175 - DNA, 120 bp, Homo sapiens
ctgcggtttgttcagccgtgccccctcacctttcccctgctgggctgttttcactgctccctgcagggggtgaggttccctttgaagccctccaggtccagagcccagagtctggactgg

SEQ ID NO: 2176 - DNA, 120 bp, Homo sapiens
ccacggggaggcctaatgctgtgaccctgagctggatgatgttagatcaatcacggtggtgtcccaggcagagggttggagggagagtcagagctgggcgagggatgggtcgcttgctcg

SEQ ID NO: 2177 - DNA, 120 bp, Homo sapiens
cttcgcagtactgagccaagtgcccggtttccctcaaagctttctttcttcatttccctctgtctccaaccgtccctcccacagacaaagattgccacatatgggaagcccaaggccgaa

SEQ ID NO: 2178 - DNA, 120 bp, Homo sapiens
agtcggggaaaggtttgagaatggctttctgctcccagagaagaagccacatcttccctggggggtcatttacatcccctgccactgggacagccgcctccgagggcctcacccagaccc

SEQ ID NO: 2179 - DNA, 120 bp, Homo sapiens
ttccgcagaagctcccagctcgctccctggcctcatatgactggagctggggaggggcacctatctgcctggtatctcccatgtcgctctccatgtgctgctggaggggtgcatggcagc

SEQ ID NO: 2180 - DNA, 120 bp, Homo sapiens
ggccgagggatgccagctggggaccatccaaagatgccatacccgaggctgcaagcctggccttttctggtgcccccaagctggccaacaggctggagtggcaggtggtggctggttctg

SEQ ID NO: 2181 - DNA, 120 bp, Homo sapiens
cgggggtgggagccaagcagggcgcagcctgatatccccctgcgagactcactgacaccccaaacatcctcacaccttcacatgtgtccacaccggtgcctttgtgaccaaatcagctgg

SEQ ID NO: 2182 - DNA, 120 bp, Homo sapiens
gcacgtgcatgtacatgcaccctacactggtacacacacgtgagcctgtgccctgcacagccacgaggacatacacacgtggtcacaggcactcacactagccccgcaacatcccccacc

SEQ ID NO: 2183 - DNA, 120 bp, Homo sapiens
gggcgggtgcacacacagacacacatgcacatgcccacgcgcacagacatccccagtgcccgcagcacccggcaggcccggaaccaaccagtccagccaagcgtgagatgcccgccccca

SEQ ID NO: 2184 - DNA, 120 bp, Homo sapiens
cagcgctgagtcagccccagggagccagcagggacagcattaggtccagagggggaaggcagggctggtcggggagaggagctggcagtcccagctggacacaaatcacccacctgcagg

SEQ ID NO: 2185 - DNA, 120 bp, Homo sapiens
gcccgcgagtccccctcagggtaagcactcctttaaatgtgaattcttggtcccagattccccaggtctagaaagagacccctcccttcctcctctcccccgtgtcgccacccctcacct

SEQ ID NO: 2186 - DNA, 120 bp, Homo sapiens
cctcgtcgtccactttcactaggcagtaggggtcgctgctcccagacctgcagaaggagggagttcagggaggaagcaggttgagagggcagccatgagtggagggtcccagtcatgaca

SEQ ID NO: 2187 - DNA, 120 bp, Homo sapiens
agtcggaggcacagacagagaaggggacttgcccagggtcacacagcaagtccagctcagaagtagaaccttaggggaccagcaggagatgtcacagctgcccaggccaccacatctgtg

SEQ ID NO: 2188 - DNA, 120 bp, Homo sapiens
aggcgcccccctcccaccgggacagccatgggcatgcggcctctcgcccctttaaagcggaactgccccaagaccagtcttggacaagaacccctcgccctcctgccaacccgccctggc

SEQ ID NO: 2189 - DNA, 120 bp, Homo sapiens
gcacgcggaaagggcgacgtcggccccaccccaggccttgcgcgcccctcacccagaagcgcccgaggagtactcacacgtccttggcaggcagcgcgcggccctccaccacgcgaacat

SEQ ID NO: 2190 - DNA, 120 bp, Homo sapiens
tggcgcctagccacaaactttccaggcagaagggcgctcaggttccgaggctggaccaggggacgtctacatgtcacctgcttcaagcctggctccctgcctcgtggtcccagtgccgcc

SEQ ID NO: 2191 - DNA, 120 bp, Homo sapiens
gtccgagacccgggtagctggatgggagatttccgaaagaggagaaggtgtaggtgcccggggagggagcgcccgtccggactctacaggtaggagccgtgctccgagcaggaggagcgc

SEQ ID NO: 2192 - DNA, 120 bp, Homo sapiens
aaacggcgggaaacacacacgcactgcctgaagcaaccgattaaaaaaaaaaaaagcgggcgggggagttgggtgaagagccagcttccgagccaggcctgctggccgcccctggttttg

SEQ ID NO: 2193 - DNA, 120 bp, Homo sapiens
ttgcgagcgaatgtcagggcaggatggaggtgccgaactccccgccagctcctgagtcctgaaggtcgtcttctccccaccgtactccccaggactccgaggcccggcgcaatcgcgcgc

SEQ ID NO: 2194 - DNA, 120 bp, Homo sapiens
ctgcggagggcggcggaggagaggcaccaggcgggccgtcgggaggtggaggcgctgcgtctgtggacccagctccaggagctacggcgggaacacgcgcggctgcagcgccggcttaag

SEQ ID NO: 2195 - DNA, 120 bp, Homo sapiens
aagcgcctggagccctgcgcgcgcctgctggagcaagcgctggagctgctgcccggggtgagtccggggcaggaggctgggagctcggcgccaccgcgtggcgctgagtggctcagggac

SEQ ID NO: 2196 - DNA, 120 bp, Homo sapiens
ggacggcttcggaccggcgaactactggttcgctgaactactggagatcttggcatgcatgccgagaactatcacttatggagcgctcactgtaagcaagggatacgctttggtttttgt

SEQ ID NO: 2197 - DNA, 120 bp, Homo sapiens
acccgtcctgctctcaggcactaatgtataatgttccttttgtcagaaaccaaccccccaggaataatttctccctagattaacaatttctcattctttaggtcttagctcaatggctac

SEQ ID NO: 2198 - DNA, 120 bp, Homo sapiens
gaccgtccatcgggaccactgctggggttgtgtgggacctgagcggggctcacttagccttgaacccttgactcgtgcccagcagaggcagctctccagcctgcctgccgccatatgtcc

SEQ ID NO: 2199 - DNA, 120 bp, Homo sapiens
gagcggcgaccgtggtgaactggcaaggatgtccctgtccaaaggagacagtctcctcccagctccaggatgtgcctgtccaaaggggacacagcctcctcccagccccagcgagtgctg

SEQ ID NO: 2200 - DNA, 120 bp, Homo sapiens
caccgtgtgggctggcatttggcacggtgccttccagaccatgggccaccagcccatgagccctgcagagtcttctcaaccacctcagggttgccagggctccggggagcctctcccaca

SEQ ID NO: 2201 - DNA, 120 bp, Homo sapiens
aagcggggggtgctgtccccaaagcagcttacacattctccgggaacacaagagactcaggcagtgttctttgggctgatgtgtagtggctcactgaacttggtgtcacagaaacatgga

SEQ ID NO: 2202 - DNA, 120 bp, Homo sapiens
aagcgtttgaccttgggcagtcactccatgcctccctgtctgtgcaaggggatgactgtgcagcagcacccattcaggtgtggttggaaggaggtgtgctgcccttggcctctgcccttc

SEQ ID NO: 2203 - DNA, 120 bp, Homo sapiens
agccgtacctcgccactgctctccagcctgtgccacacagtgaatctctgtctcctaaaaaaaaaaaaaaaaaaaaggaaatgtggggtatacttaattccttaattacctgaatacctc

SEQ ID NO: 2204 - DNA, 120 bp, Homo sapiens
gtgcggccaccaggtctgagctcttcctactgtggaaggctccagaaggcccttcacaaggagacccctcacctggatccagtcgactgcggggcttgcccctcatgtgggctggcctcc

SEQ ID NO: 2205 - DNA, 120 bp, Homo sapiens
catcggccacgtccaaagctgtcactgctactgcttcaggctcacatccccccgacctgatggcgtgcccgccccctctccctgcggcccatgccacaggtttctgtgttttgctttagg

SEQ ID NO: 2206 - DNA, 120 bp, Homo sapiens
tcccggtctccagggtggtatttcagtgtctgtgataatgtcacgcaacacctcttcggggaccagtgcccaggatctaatggaagcggaattggggcaactgggcccatgtggccagag

SEQ ID NO: 2207 - DNA, 120 bp, Homo sapiens
tgccgggcggccacagattacactgaccaatctcctcccttggctctgcaagcctcccacccagccttctctggcttaacccttgttggcgaaaactcttccacagtggcctccttgggg

SEQ ID NO: 2208 - DNA, 120 bp, Homo sapiens
acccggaggaaggggcatgaggcaggaagtggggccgatgtctgcaacccagaccacttcgtggaatgggctcttgaccaaatccctttttttgcgatttacccgttcaagcaaaacaac

SEQ ID NO: 2209 - DNA, 120 bp, Homo sapiens
caacgttttggttaactaaggattgtgctaaagccgataccaggtccttcacacgtgtgcactaggaacaggagcgaacagcacagagagacgctccctgtgggacgcagcagccccgtg

SEQ ID NO: 2210 - DNA, 120 bp, Homo sapiens
ccccggcccagttcccagccaccctccctggctctgctcacaccagagatttccatagcaggagcggttggtgcagaagtaggttcagatgaacctcagttaacgtcgccacccctcctc

SEQ ID NO: 2211 - DNA, 120 bp, Homo sapiens
gagcgtggtggaggtaggagggttgccagctgcagtgaccctgccacagaggcagggtcagtgcagaggtcgctttggttccgcttccctgggccacagaacggaacacagcataggttc

SEQ ID NO: 2212 - DNA, 120 bp, Homo sapiens
agccgcagtggcaggatggagggtgcgaagggcaaggagtgcactgctgggcattcctggccagccccggccctctggtgcctgcttcctgtgacttcagaaggcaggtggacagagcct

SEQ ID NO: 2213 - DNA, 120 bp, Homo sapiens
gaacgggcagggtggcacccgaccccaggggagcagtacctggtcccccaccccctcctcccaaccacctccaaggccaagctgggtcccatagccagcacggcatggttctccccttcc

SEQ ID NO: 2214 - DNA, 120 bp, Homo sapiens
ccccgggagtcagactggctttgtcctcttcctctctggagggccatgggccatcagcaggagctccacatcgagccccaggccagaaccccctccctttcacagagagggaactttatt

SEQ ID NO: 2215 - DNA, 120 bp, Homo sapiens
gggcgttttggaagcaagggtcaggggacagcttctaaaggtgtgagtctctgacctgagcatctgggcctcgcctgggcccttcttcctccccaggggtggaaacgtggaggggccagc

SEQ ID NO: 2216 - DNA, 120 bp, Homo sapiens
atccgctagtattgggcagcagtgctgtgtgataaaccagccccaatccagcagcttaaaccaacaacattgattctcatggatccgtggggctgctggggcagctctacttcatgctgc

SEQ ID NO: 2217 - DNA, 120 bp, Homo sapiens
ggccggggcttgttcttcccatggtgatggcagaggcacaaaggggcaagtgaggcttcctgaaggctaatcttataactagcatgctgtcacttccacccatatcccattggccaaagc

SEQ ID NO: 2218 - DNA, 120 bp, Homo sapiens
tcacgtgacacaaccaagcccaaatgaaggagcagggaaggatacttggccattggtggaggactgtagtctcgtggcaaagggcatggacatgggggtggggatggcatgtgacataag

SEQ ID NO: 2219 - DNA, 120 bp, Homo sapiens
ggacgtgcccaccttgtaggattataggggactcaatgagttaatagacatgaaagtgactagaacatggcgtggcacagagctaacatgtcatcctcaatggatgttgttagctggtgt

SEQ ID NO: 2220 - DNA, 120 bp, Homo sapiens
atacgtgtaccctttgagccagtagttcctcttggagggatttaatccggcaagctcacaaagatggacagacagacattcacgtgcacgtctactgaccactgtgttgttttcatagtt

SEQ ID NO: 2221 - DNA, 120 bp, Homo sapiens
agccggtgtggtggaggctgctgtgtcggaggaggtaagggccaaggtggggacatggggctcccaccctgccccagccccacaagcatgttccccagtgtgcttttgagatgtgtgcag

SEQ ID NO: 2222 - DNA, 120 bp, Homo sapiens
ggccggccactgcacctggctctcacccacttctgatattgtctgacttcttataaagctcaataacaagtaaagcaaaatagtatgttgttcagggactcatcacatgcagtaaaacta

SEQ ID NO: 2223 - DNA, 120 bp, Homo sapiens
actcgaatgcccagctgctgatgaatggatacatacaacgtgatctatcatacaatgcaacattattcagctataaacgggaataaaggactgacgcacaccagaacatgaaagaacctt

SEQ ID NO: 2224 - DNA, 120 bp, Homo sapiens
aaacgaaaaaaaccagtcacaaaagggcacatactgtatgattctgtttatataaaatgttcagaataagcaaatctacagagacagaaagccaactagtggtgccagggacttgggggg

SEQ ID NO: 2225 - DNA, 120 bp, Homo sapiens
gaccgttaggaaaatggaataaggattgtgtgagataatgcacttaaagttgctagcatgtgcttggcacgtagtaggtgcccaagaaacaataacagtaataaagctagaatgtctaac

SEQ ID NO: 2226 - DNA, 120 bp, Homo sapiens
cacgtagcaccaccaacgaggtcaacaccaaggaatgactgcaagtcacccagtaggctctccaaaccttcctttaatcattgaggaaatgttccttccatatccacccaatccatcttg

SEQ ID NO: 2227 - DNA, 120 bp, Homo sapiens
tcacgtgatccctggcgtcggcctggctagatctcaatcctgactctaccagttgtaatgacctgggcagacgatgccatctctcaggctttaatttccttctctgttaaaatgacaagc

SEQ ID NO: 2228 - DNA, 120 bp, Homo sapiens
aagcggcagtactgattttataaagttcttgtgaggattatctaaaataatgactatcaagcacttaatacaggacatggcacacactgagtgccgaataaacggtagttattattaggg

SEQ ID NO: 2229 - DNA, 120 bp, Homo sapiens
cttcgtattcccatctgtgagcagttttttccgttatttctccgcagaaaccctttctctccgggctgctgatctgcgaagcatctggtccttcatatccctgagtcatcagcatgaaga

SEQ ID NO: 2230 - DNA, 120 bp, Homo sapiens
ttccgaagtcctccctcctcctactgctctctagggctccctctcctgactgcttagttctcctgggggcccagacctaaatttcgtgagggtatgtctttctcggggccgggtcaccag

SEQ ID NO: 2231 - DNA, 120 bp, Homo sapiens
atgcggcaacagaactctgaggcgcgccccggcttccaagtagctgggggcggggccgcgcctggaggtgagcagcaggcggtgggcggggccgcgctccgtccgaggtgagagcgaggc

SEQ ID NO: 2232 - DNA, 120 bp, Homo sapiens
ggccgggtgcgaggccacaccccgaggtacgagagctgagggcgtggccacaccccagctctgagcgaggctgagggcggaaccgcaccccgaagtgggtgcaaggctgggggcgtggcc

SEQ ID NO: 2233 - DNA, 120 bp, Homo sapiens
ggccgcgcggtgaggcagccaggaccgtgagggatgcgccagccgcctccgcaggcggcgcgcgcagccgcccgcagggcgtgaggcagagcaggggttaaggccgccggcgccacctgg

SEQ ID NO: 2234 - DNA, 120 bp, Homo sapiens
taccgtgacattgggcagaatactgaaagatacttgccttcatgttttggggctagtccctagttcctacttgtcagcccgggtgtaactccacaccacccctgtggctctccacccttt

SEQ ID NO: 2235 - DNA, 120 bp, Homo sapiens
gatcggaaacgggagctggagcatcgtctcagcgctactttagaggaaaatgacctgctccaagggaccgtggaggagctacaggaccgggtgctaatcctggagaggcagggccatgac

SEQ ID NO: 2236 - DNA, 120 bp, Homo sapiens
tctcgctgtggggcctggggcattcactaacttggctcttccgactctgcctaaaggaagtgcactgctacccacagatcatttctacaatgtgttctgagccactggcccacggagcag

SEQ ID NO: 2237 - DNA, 120 bp, Homo sapiens
ttgcgaaatctgctagaaggtttcagagggagcctgtgactctctaactcagctcataatgctctctgctgctgtcttcccaagctcatggatttagttggctggcatggagcagaaacc

SEQ ID NO: 2238 - DNA, 120 bp, Homo sapiens
taccgggcctcagctgaatccccaagctcacacttgacaggaaacaactcccaaaacaaaaagatatcatcactccagtcttcccagaaatagagtacagcatctgctaccaagatgctt

SEQ ID NO: 2239 - DNA, 120 bp, Homo sapiens
gcccgaaggctaggccacagaaggtcccactgggctcataggtaggctgtttgaaagccttggggtatgggataaggaaatataatgtcttggactaagattacttgtccctggcaccat

SEQ ID NO: 2240 - DNA, 120 bp, Homo sapiens
aaccgctttgagggaaaatgaatggcttttatctctgcatgtttttagtaccttcagctagtaactttccatatattaatagtagtacctcagtcaatgttgagtagaaaatggtgctgg

SEQ ID NO: 2241 - DNA, 120 bp, Homo sapiens
aggcggtgcaggcaaggcctcccctgcagcttgcacctcagcagctgccctgcccctcatgctagggccccatgggtccgggagggcctgctccctttcgtcggtggggatggagaccta

SEQ ID NO: 2242 - DNA, 120 bp, Homo sapiens
caccgcctggccaagcccacgcctgggcttctccaggaccacgtgcttgagcagggttaggccacctcccagaggggccccttggtgttgggctttgcagctcacacccaacagatcgca

SEQ ID NO: 2243 - DNA, 120 bp, Homo sapiens
ggccgcagggtctaagagccggggcttacccaagctcagctgaggccacccgagccccagggaggaagaaggccctgtccccctgtcgccactgctctccctcccagccttcagtctctg

SEQ ID NO: 2244 - DNA, 120 bp, Homo sapiens
ctccgcggcccggccagccctcagctgctcacaaccgattcagtctccctccctccctcacgtggggaaagcacagcagggatgcgcggcaagaatgtacctgtagatgtgtacatacca

SEQ ID NO: 2245 - DNA, 120 bp, Homo sapiens
ttgcggggggcgggtttggtctgaatgcagctgacatgtcagactcaccactggctgctgctggagaggtagcaatagtggttcccctgcacccgggccacctcagatgctggtacttac

SEQ ID NO: 2246 - DNA, 120 bp, Homo sapiens
tcccgcctggcactgccccctgccagtgctgcagcgtgccatccgcaaggcaggcctgccaacgctgcttcccaggccagcagggccctaaagcttggcagaaacttcaagccagaaaga

SEQ ID NO: 2247 - DNA, 120 bp, Homo sapiens
ccacgccaggcaaaggcttccactgcatccttccaggcatgtggaggataaacacggagcttcccctggcatcttaccacatgtgctcccagtccaactagggggagactcaaccctggc

SEQ ID NO: 2248 - DNA, 120 bp, Homo sapiens
cctcgacaggctcctgtgcaagacttaggccaagaacagggaagagcaggacacggtgggtgggaagaagccacggccactcagcacatctctggagggagagcaaacagaccctggaag

SEQ ID NO: 2249 - DNA, 120 bp, Homo sapiens
caccgcaacctccacctcttaaaaggcttttgatggcaaaatgtgagtctcaatgcaggccctagaataacagccccagcactgtacatccattaattcattaaatcctttggccaggcg

SEQ ID NO: 2250 - DNA, 120 bp, Homo sapiens
cagcgtggcttcgctggctcccactttgtctccagtcttgatcagctgcacatcactctgaaccagataatagtggggcagtaaacacctgttggacaaccagcagatccatggccacta

SEQ ID NO: 2251 - DNA, 120 bp, Homo sapiens
ctacggaagacagccccaggcacaaatggagggagagccagccccaggggctgctgaacccgcctcggacactggcccaactcggccatgtccctccggacaatcccagctttcctacac

SEQ ID NO: 2252 - DNA, 120 bp, Homo sapiens
ctacgtcttccacatccttgctccagggatctgactaaaaccactgctgcttctcctggcatcaggacacaggctgtctgagaaaacggcagccttaaaagcaccggggcacagctccct

SEQ ID NO: 2253 - DNA, 120 bp, Homo sapiens
gcacgcaagggtcacagggccaggctcaaccctccaccccagccacactcctgtctcccaccatgaaacctcagctgaagggaggctaggagacaccatcagggccaagggtgcagggac

SEQ ID NO: 2254 - DNA, 120 bp, Homo sapiens
gaccgttcactcccctctcatattccctaggtcatgccccaaaggtctccagctgacccacgtggaagtatgaagtcagcagctgctggtgagttctgtcaatatcaatccccaaggaaa

SEQ ID NO: 2255 - DNA, 120 bp, Homo sapiens
cctcgtgcaagcctggccccatggtttcccacagacacgctcgtgggaactcagaggccctggagggcgagagggaaggatgggagaagagtagcaagggaggcttgtggattcaggatc

SEQ ID NO: 2256 - DNA, 120 bp, Homo sapiens
tagcgtgggagatggggctccagggcaaatgacctcccaggcacaggctcccaagtcccacatggcccagcagagaatgccctcccccacccagagcagccatcaacacaaggttctttg

SEQ ID NO: 2257 - DNA, 120 bp, Homo sapiens
cagcgtcccagcctcctgatcccctcgacctgagaggctgggagcacccagggaggaaggaatgtcccagctgagcacttctccagcttgtctgccttcactggctactgcaatcctcag

SEQ ID NO: 2258 - DNA, 120 bp, Homo sapiens
acccggccctccctccccatctcctggcatcacagcaaggccagggcatgacagtgtccctggctcaggggcaaggcacccaaacactgagatgccaagatccagctacccacactgagg

SEQ ID NO: 2259 - DNA, 120 bp, Homo sapiens
gggcggcagggcagggaagatggagggttcacagggcaccttgaaatccgacagcgaagccatcagctcgtccagctccctggtggcagaggaggccgagatgcgtgtctgctgttgggt

SEQ ID NO: 2260 - DNA, 120 bp, Homo sapiens
tgacgcgctgcgggctgctcatctcgccctggttcacagtgatggcagggctgcagggtgggcacagcatcagtggggagcccacagtcagccccacacttcccggggatcagatcgacc

SEQ ID NO: 2261 - DNA, 120 bp, Homo sapiens
cctcggacactggggtctcaccatccccaaccccagggaggtccaccagctccctgtctctcctggggacccatcactgggtcagaagaaagggcagttcaatggcaccaggaagtgcca

SEQ ID NO: 2262 - DNA, 120 bp, Homo sapiens
ctgcgaaacaagcccaagcgccctgtgtttcctccacaacactggacatggaggtgaggctactgcagtaacacgacggcactggtaagagctcgcgtgttgggcactcaccatgtgtgc

SEQ ID NO: 2263 - DNA, 120 bp, Homo sapiens
ccacgcactacacaccagaaaccattccaagcgctttacatggattactggttctcacccttactgaggtaggtggtcttatcccagtgatcccataagttcttgtcccattttacagat

SEQ ID NO: 2264 - DNA, 120 bp, Homo sapiens
tgtcgctgaactacgtggtttcaggtccagctctgccacttgctagcatgacacctctttgagctcagttccctcatctatagaataggtataataactgccccttatataatggggact

SEQ ID NO: 2265 - DNA, 120 bp, Homo sapiens
attcgtggtgtgggaagctcagtgcacaagccaacaggaagaagggcactgctgatcctcccaggagtccagtccaaaagctggcatcgcagccccacagtgctcccaatgacgcaagtg

SEQ ID NO: 2266 - DNA, 120 bp, Homo sapiens
attcgccattggaacatcgacactaacccacccaggactgactccagaggccctgagtgtcaggcataacagtgcccacccactcagggtggcctgcacctggccccacaatccaccctc

SEQ ID NO: 2267 - DNA, 120 bp, Homo sapiens
cctcgcttgggtatccaaggcagagccacctgcacctgtctcacgtgcctcctccaagaccctccctccgatgctctcactgggacagcctcacctttactagtgatggctccaatcgcg

SEQ ID NO: 2268 - DNA, 120 bp, Homo sapiens
gcacgggcactatgctgggcatgggaggggcaaatatacaatgcctgtctccggggagcactgactagtgggagactgtcataaacgaggggcagaaggccctgaaagcggcagtgggcc

SEQ ID NO: 2269 - DNA, 120 bp, Homo sapiens
ggccgagggcccactggggagtctggacttacaagggcaagccacagaaggaaggcggtcagcagcggaacagcaggaccaggcttgcactttacatcactcaggcaggggagatcagag

SEQ ID NO: 2270 - DNA, 120 bp, Homo sapiens
ctgcggcaggggtcaggtaatgacggtaacaaggatcaggagttacaccaagaacaggcagagccacagtgttccctgagccagggcccaaggacgtttttctctggccaaggcacctat

SEQ ID NO: 2271 - DNA, 120 bp, Homo sapiens
gcccgcacccatctgcacgagtctgcctctgaaattcaaatagaaagccagccccatctctgacagccgtcctccaggaaaaagaggggtcagcctaagcaggttatcagaggaaccaga

SEQ ID NO: 2272 - DNA, 120 bp, Homo sapiens
atgcggctcaccactggggccagagggcccaggacacaatctcaggcctcaaaccctcatggaaatgcccttcagaactgacccacggccccagccccagctgaccacagagagactttg

SEQ ID NO: 2273 - DNA, 120 bp, Homo sapiens
tcacgtcttccacacatggccaggttgaggggagagtctgggggtggggtgggggagaagcagcttggacagagaaaccccctgcagcccaccccacgtgcttgcagtctcctcggctca

SEQ ID NO: 2274 - DNA, 120 bp, Homo sapiens
ctccgcagctgagctggctggcccgagtgaaggtgccagccaggaaaccggccccctgtcaccttcaccccacttgtccagaagtcaccaaagggctggattcggcccttggcaatattt

SEQ ID NO: 2275 - DNA, 120 bp, Homo sapiens
atacgaaagcaaaagccaggtttctggcatctctggaaaaacatgagatctgagcatagtgagtctgtgtcccctcccggcaagagtcagctggcaccgagggcaggtatgcccacgctg

SEQ ID NO: 2276 - DNA, 120 bp, Homo sapiens
agacgtccccacccagcccactttgcaatgagtttgagaccctggcttgttcactgcgggatcccagagcctccatggagcctggcacacgagaggtgctagataaatatttgccaaatg

SEQ ID NO: 2277 - DNA, 120 bp, Homo sapiens
agccgcccagactggccagtgcccaggcacagtctgctgtgtccccacagccggagggctggcgggcaggagaaaaggatcccgctagctttccccaggaaactccctgggccccttctg

SEQ ID NO: 2278 - DNA, 120 bp, Homo sapiens
atccgagcgactgacctgtaagctcggggaggactggggcgctcgggagaggggtccgctctacacggaattctaaaatgaaacgtaaaacagcttaggaagaagcaggggaggcccctt

SEQ ID NO: 2279 - DNA, 120 bp, Homo sapiens
ctccggctacagatcttttcctctaattgaggtttccttttgctagaggctgtaattaaagcaagtagagttcagtgcctgggctgctttgcctcccactgactgggggaagggaaggag

SEQ ID NO: 2280 - DNA, 120 bp, Homo sapiens
atacggtcaccaaaggccttggtgccaccttccatttgcctgcatctggtgcctcctccttgccctctttcttagttaaggtctgagtcacctttggtataaatcaggggctgcctctga

SEQ ID NO: 2281 - DNA, 120 bp, Homo sapiens
caacgccatcctgcctcggacttgtcagtgactttgacctcaatcgttgctccttcacgtggcattgtcaggagtctctaatatccagcaggtgcctggccccatgggctttataaaaat

SEQ ID NO: 2282 - DNA, 120 bp, Homo sapiens
gcccgagggtgtagactccctgtcttaccagccgtatgacctcaggcaagtgccctaacctctctgagcctcagtttcctccgttgcattgaggctattcacagtcccgtacaatgatgc

SEQ ID NO: 2283 - DNA, 120 bp, Homo sapiens
cagcgctgagcccagggcccagctcggagccagtcggcatcacgtgatctttcgggaagaaaaggtgggcagagccctgggtcggtggccacctgcttttgggtagggcactaatacagg

SEQ ID NO: 2284 - DNA, 120 bp, Homo sapiens
aagcgggaaggtgaggccgagctgggcggccctgggaacccgggaaggaggcgaggctggagtggaaacgattagaatgagagcaaactggctcctgaatagaagcttttattcctgccg

SEQ ID NO: 2285 - DNA, 120 bp, Homo sapiens
acacgtgacacacaaaagcctctacttgaattcgggaaccctaattggttctcaggtgggggaggagaggggtgtccggatttagggattccttaaagggacaatactgtggggagctga

SEQ ID NO: 2286 - DNA, 120 bp, Homo sapiens
tggcgtggaggggaggggatggggtagaggggaggggaagagctggaccagtgggggtggggcggctgttagaagaggagggggaggggagaggaagggagaagggaagagggagagaag

SEQ ID NO: 2287 - DNA, 120 bp, Homo sapiens
acccgaggacgccggatcggggattgttatgctaatcgcctgagatcagcagttcccgtgcccttcagatggcaggtagcgaggccgggctctgcccagcggctgtggctacaggaggcc

SEQ ID NO: 2288 - DNA, 120 bp, Homo sapiens
ttccggcttcctctgttcccctccttaccccgtcagacttgccctgcctgtcctcccacctgcccgttggctggaaggcttggcgtctcctagaaatgtccaggccagctcctcccaccc

SEQ ID NO: 2289 - DNA, 120 bp, Homo sapiens
gggcgctaattggggatgcagaggcaggaaggagaaggtacccagctcctcctcctgtataacccattctcatctccaggcatgagagcctcattggtccctcctgcccccttgggctct

SEQ ID NO: 2290 - DNA, 120 bp, Homo sapiens
tgccgcttactaactataccattttgggcaagtgactgcctctcagagcctcagtttcctaatctgtaaaataggttgataataacagtagctacctcaaagggttgaaatgagaataga

SEQ ID NO: 2291 - DNA, 120 bp, Homo sapiens
ccccgtctcgcagcccggtgcccaccgcaggcgggtacaccctgcgcggtgcagtcactccgggcgcagcctggcaacgcggccacaaagggagcccgggaggcggaatctttccacatg

SEQ ID NO: 2292 - DNA, 120 bp, Homo sapiens
gggcgcggagacggcggcgcaaacaggcctgagacagccgcacaaagaggaggcccctcggtcgctcccgccttccattgatcctggtcctttgtggctcggacaacgggggcgcgggag

SEQ ID NO: 2293 - DNA, 120 bp, Homo sapiens
aggcgccttgcggggacttggccgtttctcattagagggagaaggcctgtgagcacccccgtcccgccagccctccccaccgttcctcctcccgtgggctccaggcctcaggtctggggc

SEQ ID NO: 2294 - DNA, 120 bp, Homo sapiens
ggtcggaccaggctaggaaggtctggagcctgcctgtgggggccagccacccagcccccgcctcctgaggaccccccagtctcctctggcgggccctctctgtccccttggttacaggca

SEQ ID NO: 2295 - DNA, 120 bp, Homo sapiens
gagcgtttgttccaagctgttcccactccctcctgcccccatggccacttaaactagccaattcctcctccaagcatcacctctctgggaaagcacctctcagtcctctctcacctcagg

SEQ ID NO: 2296 - DNA, 120 bp, Homo sapiens
ccccgtgtgcctctccccacctccctgctcttcattcatgataaaaatgactaacaattatgaagtacttactatgcctgccatgctaaacattttattgctgtctcctttaattctcat

SEQ ID NO: 2297 - DNA, 120 bp, Homo sapiens
aagcggtagagtggagatttgaatgcaggtgatgaattgcagtttgagatcttcacatcccaagttccagactctatgcaggattcattgctgtggcccagtaatgaactgtttactcca

SEQ ID NO: 2298 - DNA, 120 bp, Homo sapiens
gaacgctagatcttattctttctcaatgtattttcgaaggacagcttccttttgaagcccggctttgtcatgctttccacgggactcgagcaaatctcctcccctgacagcttgtgtatt

SEQ ID NO: 2299 - DNA, 120 bp, Homo sapiens
ggacgtccccagagccccttctttgacctgacatttttttctgggcgcttctctctgacccctcggcagggttttctcttcctcttctaagtttctttccccagtcccttcctgggcctt

SEQ ID NO: 2300 - DNA, 120 bp, Homo sapiens
gaccgaacccctcccctccatggtctcttcccataaatgccccctgtgtgcagcgcccaggggccccggggagcctggccggctgatctgtaattagaaacttttctgccttcacgacag

SEQ ID NO: 2301 - DNA, 120 bp, Homo sapiens
gttcgtcatgaattattcaggagatgggaagtggcgtgaagccggcccctctgctgaccaaagccatgcccaaggcagcccgacctactcagctctgcctctttcaccgtttcagatcca

SEQ ID NO: 2302 - DNA, 120 bp, Homo sapiens
gcacgtttatggagggcgttttcatcagactcgatgagggagcatgttcttcagctgagaggggtgacagggacttatccaaggtcacaagcctaggaagaggacggctgagctgggagt

SEQ ID NO: 2303 - DNA, 120 bp, Homo sapiens
atgcgaggttccgtgctcatttggtgctattacagatgctgggcagaggaggaggggaggagaccccaccaggccggctaggagaagataaaagatgctttcctttctccgcttgccttg

SEQ ID NO: 2304 - DNA, 120 bp, Homo sapiens
ctccgtctcaaaaataaataaacaaacaaacttacccctcgaaataaacaatgttaacggcctggataggaatcttttcaaacatttttctataatagagtgtgtgatttttacatcaga

SEQ ID NO: 2305 - DNA, 120 bp, Homo sapiens
ctgcgcctctgccttggctcaggttcagcagaaatcaaggccagacccaggaagtgttggccccagctctagcctgatcccggccctggagagccagcgctccccagcctggggagcgag

SEQ ID NO: 2306 - DNA, 120 bp, Homo sapiens
gcccggcgccaggcgaggccctgggctcccagagaggcctccttcccgcccgctttctctaggagtaattaagagtgaaatcctcctcctggtgaccccgtgctccaggcccgggctgat

SEQ ID NO: 2307 - DNA, 120 bp, Homo sapiens
ctacggagggcctgggctttctccttttcacattcacaatgaggcacagcctataaataaaacctctctgggaaacaagaggcttcaaaatgtgtgtgtgtgtgtgtgtgtgtgtctgtc

SEQ ID NO: 2308 - DNA, 120 bp, Homo sapiens
gagcgcttactgtgtgccaggcaaccatcctcacagcaatcctgtaagggtggttttatggttcccattttaaagatgaagaaactgaggttcaaagagggcaagagttgcccaagataa

SEQ ID NO: 2309 - DNA, 120 bp, Homo sapiens
ttccgactcaaaaaaaaaaaaaaagattcaaatgatgacctgtgtctttgtgtcttgattgtgatgatgattacaggactatgcatttgccacatatgtactaaaaagggagaattttac

SEQ ID NO: 2310 - DNA, 120 bp, Homo sapiens
tctcgagtctaagtgtgcagccttataggagcttacatatcctataggcatccgaaagtccagatgccttctcattttgggtggtgtgcttaggtgtattaataccattctctgagtcct

SEQ ID NO: 2311 - DNA, 120 bp, Homo sapiens
attcggtcatgtagagtacagttgtgataaggataagctgcttgagactacatcggagggtcacctaccacagtcttagagattctaaggaaggcttctgggaggagatgtttagagtct

SEQ ID NO: 2312 - DNA, 120 bp, Homo sapiens
tttcgggaagctaaatagttcagcacagttagagcatggggtggaggtgagggctgttcttccttgcactagtgccacaagctacttacagtgagatgccctaatgtaaatcagagcctg

SEQ ID NO: 2313 - DNA, 120 bp, Homo sapiens
gagcggaattcaaaatgtgaggatgtttattaaaacctatggttcccccaaaattagaggggacctcaatctgcatccagagggggctggttaagcaggaaatgtacagttctagttctg

SEQ ID NO: 2314 - DNA, 120 bp, Homo sapiens
tcccgagtctttgcctggccaaggcctcctcagccttcaggtccttgacttagtaaggggcccaggcctgtgtgacccaatctagaactttcctttgagtttatacctctgaaaggcctt

SEQ ID NO: 2315 - DNA, 120 bp, Homo sapiens
tcccgcctcttagtctacaccggagctagccgcttgatctgtaattgttgctctttccgttccttcatctgcaagtaggcctgcctgccttgtggcctttacatggagctgtgagcttgg

SEQ ID NO: 2316 - DNA, 120 bp, Homo sapiens
aggcggtgcttgactattagccagaagggaggttttctttccctgagttgtctcagcctttctggcctcactctccctgcactgcagtacagtccttggctccaaagctcagctccactg

SEQ ID NO: 2317 - DNA, 120 bp, Homo sapiens
ttccggattcagacctaggccttgcaatctctcccacagggtgccttctttctggatggggtcttcaatcaactctgggacctgcaaggtcacctcacacttcctttcagataagggagg

SEQ ID NO: 2318 - DNA, 120 bp, Homo sapiens
ccacggtcctacttgtggatgaggtgaggagagctgcagaccccgtaaggaatccctcagcctgcctgtgagtaacaactctgaagggctttctgagggccctgggaaagtctgatgacc

SEQ ID NO: 2319 - DNA, 120 bp, Homo sapiens
gaccggagctgaaaggtgattctgtccaaggaagatcacgatggccaagaaccaatgtagggtcaagtttcaggtgtctgttgcggaggaatcaaggctgaagtactctgaactatccat

SEQ ID NO: 2320 - DNA, 120 bp, Homo sapiens
ggccgacgatgcttagtgtctccagcgacattactctgttcggaggcatcaactccttttgtttaggtgttgctcggaggttccatctaccatgtgggactgtagagtcagaccaggatt

SEQ ID NO: 2321 - DNA, 120 bp, Homo sapiens
ctgcgcccgaccacacattaacttttatatttattaaataatttctagggtcctcctacttagtttctacttttcatgatgtttttgcaaaggtatgattattggagattgataaaacaa

SEQ ID NO: 2322 - DNA, 120 bp, Homo sapiens
gctcgacgggcaggctatgcaatggaagagatgattccagaaatggaacactgcttatcatttcaatatctttgttttccgttctttatggctgagtaccagagagaagggaaacatgtt

SEQ ID NO: 2323 - DNA, 120 bp, Homo sapiens
tagcgactgtccgccttctgaccagtattgatggttaacaaaggagcccttcagcttgggggccaagtgggctgcagctcgtctaggcagctccttctgggggtgggaggaggaagagga

SEQ ID NO: 2324 - DNA, 120 bp, Homo sapiens
ggacgttctttgttatataccactgcccctcacagtggccatctgtggtccctggccagcatggaagagggcagaatagcggctctgaaaagctgggctgggcgcagtggctcacaccta

SEQ ID NO: 2325 - DNA, 120 bp, Homo sapiens
gttcgtatttaccacagtggggaagtgtgaggagtactgttcacgagtgtttctttgagtgtatcagatgggtcctctgagaaacatgctgagatggaccaaggagtataataatttttt

SEQ ID NO: 2326 - DNA, 120 bp, Homo sapiens
ctacgagctgccacaaaagagcctggcctcccttggaaactgaggcagaggctgatgtgctaataggtggaggctgctagctaactgcactccttgtggctgaagggcaagttatttctt

SEQ ID NO: 2327 - DNA, 120 bp, Homo sapiens
ggccgagaacagtcttttcaactgccttgaagactagccattttctggggttctaaggggtgagagaggaaatctggcttactgctgtttgatggagtcacggtctaggttaattttagt

SEQ ID NO: 2328 - DNA, 120 bp, Homo sapiens
tgacgcagcagctgttggctgtgtgcactgcttgatacccttttctgcctggcctttctatagatgtttcccagaggtcagttcctggttcttcctggagtccattttgtgactaattgg

SEQ ID NO: 2329 - DNA, 120 bp, Homo sapiens
aggcgctcaatggatattagctactggtggccctctgaccaaggccctaggaagaacttgctttcatgttggcaccgttttccaggacaaactccatcttttgtttattttcttcccctc

SEQ ID NO: 2330 - DNA, 120 bp, Homo sapiens
tttcggattattcccaccttgattagttccagtttctcctgcagaagcaggagttattttggggccttgatggctccctctggctgcctgtgacctccaccccgttgcagacacctctcc

SEQ ID NO: 2331 - DNA, 120 bp, Homo sapiens
gcacggctcattagccgcattctgctgctcggctgctgctttccgtgcccgcagttccccgccctacctcgagggccagcacctgctcccctcctcccggaccccacagccactcctgcc

SEQ ID NO: 2332 - DNA, 120 bp, Homo sapiens
caccgctaatgttaattttgtcacctgtgtcctaatcctcagaccccaactttgcctcagagcaatgaccctccctccagttccaggattttcccagacttgagcaaaagctcacacacc

SEQ ID NO: 2333 - DNA, 120 bp, Homo sapiens
gggcgggagcagtaaaaactcccaaggatgcattttatgtgatgtatattttaccacaattaaaataaaattcccaaggggtcacaggacgcctccccgcctctgccaccatgttatgtc

SEQ ID NO: 2334 - DNA, 120 bp, Homo sapiens
tgtcgccgtgcgtggggcccacgtcacaggcgtggggcgtgggttctgtggtagctgtctgttctctctctgctcctggctcttctttccagctctgcgttctgcctctgccagggccgc

SEQ ID NO: 2335 - DNA, 120 bp, Homo sapiens
tcccgggctgtgtgttaatccttccaatgcaaaacttcctgaagcttaagactctgggctgggcgagggaactggtcaccagtgtcgggctgaagtagctcagatactgacctgctgttc

SEQ ID NO: 2336 - DNA, 120 bp, Homo sapiens
gcccggggaccagaatagaatgtgtgagtgtgactctggaaagtggacttgctcttatgaatggagtggattgtggtctcacattttctgaatctgtgaaatcattccactctttaatga

SEQ ID NO: 2337 - DNA, 120 bp, Homo sapiens
cctcgagcgttacataatctaatcttcatgcctcactggtttgttctgtcctcctgaggaattggcagatggtgccaatgcggagacccgcacacacgcctcgcaagcctcatggtaaca

SEQ ID NO: 2338 - DNA, 120 bp, Homo sapiens
cctcgctggcatttgtttccctggatcggttggctctttagcatccctcaggcaccgctggcttcttgccctcggctctcattccaagattaattggaaatgctgaaagcagataaaaag

SEQ ID NO: 2339 - DNA, 120 bp, Homo sapiens
ctccgttaaaggccgagcatctttggagatttttagcttcagaatggtgactccctccttcagcctggtccctgtgtacatctttgttgctgggttacacacagcatagggacagggctg

SEQ ID NO: 2340 - DNA, 120 bp, Homo sapiens
cagcgagtcacatatcttcagaaatgattgttccccagatagggcagttacctggagtccaccttcaggtcggtgatgtcacttacgaagggaaaattatctcagaactctgtaaggtga

SEQ ID NO: 2341 - DNA, 120 bp, Homo sapiens
tcccgtccctctgctaatacttaaagtctgttgagagggtcttattttattcaatttcatgaggagctctacctgtccatgcagcaatgggagcttcctttgctgaacccagtttgcttt

SEQ ID NO: 2342 - DNA, 120 bp, Homo sapiens
agtcgtctagtccaaattcccgctcagcgcatcagtcccctccccgctcaccaggcactccctcattcggcttctccttgaagacattcattcggcaagagggagctttgatgtgcatac

SEQ ID NO: 2343 - DNA, 120 bp, Homo sapiens
agacgttgccttggtgccaggagaaattgtcggtccatgggttgctgcccacttggcttcctgagcggtatctggggaactggaaatggtgagaggcagcctgcaccaggctcagagctg

SEQ ID NO: 2344 - DNA, 120 bp, Homo sapiens
cctcgctctagtcttgcctcgctctagtctaggtcccagaagtctgagtgagtgaagccgaggctctgaatcacaactctttgggatatcaaaccaggaggggctcttggcctgtctgac

SEQ ID NO: 2345 - DNA, 120 bp, Homo sapiens
aaccggaatactgcaccaccctctctaggcctggaaggggcttaggaagttggaagggagtctcggtctgtagtcccacagggctttggggagaggaagcaggagaggacacggtgggca

SEQ ID NO: 2346 - DNA, 120 bp, Homo sapiens
gtgcgcagacctgcacttctcagacaaagagccctcagggtttcagctcctgtcgctccttgggaaggtcctactctagctaaatccccccacattgaaggaaggtatgtaagctccagg

SEQ ID NO: 2347 - DNA, 120 bp, Homo sapiens
ggccgaaggcagagtgcaggccgaaggcagagtgcaggccgaaggcagagtgcaggccgaaggcagagtgcaggagctggattctgtagaggcactgggcatcccgggaggctggggaga

SEQ ID NO: 2348 - DNA, 120 bp, Homo sapiens
gtgcggactttttatagccgcatgggaaccttcagggcggaggatcggctggtcagggcctgggagcacagctatattaggtaagcagagaagggccctgccttagcctctagaggtccg

SEQ ID NO: 2349 - DNA, 120 bp, Homo sapiens
aggcgggagggaggaaaaggagaactggtggatggcagagagtgtctagtcttgaaatcacaaactgggtggaatcctacctacagatgtgccttgtgtggcccacccggtgctttaaat

SEQ ID NO: 2350 - DNA, 120 bp, Homo sapiens
ggccgagatcatgccactgggtgacggagcgagactccgtctaaaaaaagaaagaaatagctgccatcctctctgctgagtgggaggaagatgtgtagccaataggcccagggtttgctt

SEQ ID NO: 2351 - DNA, 120 bp, Homo sapiens
agtcgcgtcccctttctgaagctcagtttcttcctgtgtaatgtggggatgataaaggatggggtcagtgcatagcaagtgccctcagggcattgcaccacacggcacaccccagggact

SEQ ID NO: 2352 - DNA, 120 bp, Homo sapiens
attcgtttctataagtgaagtcttaaagcagcccaaaggagaaatctgtgggtagaagttgtcgagtcttagacaggcttggagcgtacttgggcaggtgtgtggggtggccggtgtacc

SEQ ID NO: 2353 - DNA, 120 bp, Homo sapiens
ccccgcagtgattctgatcccatgtctggggcgcagtccatgaatttgcatctcttacaagttcccagaggatgctgatgctgccagtccatggacaacaacctgaatagcactgctgta

SEQ ID NO: 2354 - DNA, 120 bp, Homo sapiens
ctgcggggttgatggctgggggtgggaggtgggcagagcatccgctgcccgctgtgctgccgcagagggaggatccttattctcagacctggcagggaatgtgcaggatcgtgggcccca

SEQ ID NO: 2355 - DNA, 120 bp, Homo sapiens
gcccgggtaatcctcacgttcccgaggtcagtggggctgggagctccaaattcactctaataatccaattctgagactaagcccttggctctgtgccctgctaggcaagcctgcagccct

SEQ ID NO: 2356 - DNA, 120 bp, Homo sapiens
ctccgcccagagactccagagtttcactgtttcagaaacacagtggccttggagggcaacctgcgggaagagggcttctgtagacatctctatcggctggcagggtgagcccccaggaac

SEQ ID NO: 2357 - DNA, 120 bp, Homo sapiens
aatcgcttaatgatgcatttttcagaacgcatccctgtcattaagtgactcatgactgtatctctatttcacaactgaggaaactgaaactcagcgaagtacatcacttgcccaaggcca

SEQ ID NO: 2358 - DNA, 120 bp, Homo sapiens
ccacgctcggatcccataccctgcctccagggtctcagactttacgttttactgaaaagacagcctaattcatgagcagctggatctcagaaagggagccaagctccttggtacacagat

SEQ ID NO: 2359 - DNA, 120 bp, Homo sapiens
ccacgaatggtatctgaagggctcaataacaggagccagccgggtatcttcttcaccctctggggtgaccaaagacacgaaggactgagagaaagcctttagaggcctcccccaaaattt

SEQ ID NO: 2360 - DNA, 120 bp, Homo sapiens
atccgtttttgtgattgtttctcctggactagactgccttgaggataaaataaacatgagcgcctggtggcagtgcaatacctgagtggtacgtgggctctgcaggccaactgcctggag

SEQ ID NO: 2361 - DNA, 120 bp, Homo sapiens
gaccgggagggaacacttccaaaagttacccccatggggtctgaatttggggcctgggaaggaatttgggtgcatttagatccaccactgatagtctctattttggcaccctgttttgtt

SEQ ID NO: 2362 - DNA, 120 bp, Homo sapiens
tcccgtatagcacttaccactgttctaactaaacaattaatttcattatgggttgtgcaaagtctatgattctcatgcgggaccccaggtgtgttttttgttcatgtagcacaaagctca

SEQ ID NO: 2363 - DNA, 120 bp, Homo sapiens
atccgtgggttcgctgtctcagcccattcagaacaattctttaggtactggcctcactggagaaagaagtgatccagaagaacagtctagtgaccaggagatctgagggtagggtgggag

SEQ ID NO: 2364 - DNA, 120 bp, Homo sapiens
tgacgctagagcaccaaggggggctttacagctgtgttctcatggaggacaggcttctgctcattctggctttcccactcttgtggttcccagttgcagttttccagttagttttattac

SEQ ID NO: 2365 - DNA, 120 bp, Homo sapiens
tatcgtgtgcatatccttgcctggctagcatacccatgtttctgtgtctctctccgtgtgaggcattgtattgagctatttatacagattgttttatccttaccacaatgctgtgggata

SEQ ID NO: 2366 - DNA, 120 bp, Homo sapiens
cttcgtgtatgtcttttcctgaaccctgtgctgaattttccaaggagcctagttactacattgtctaaaactaagaaagagcagacataatgtaggcccttcggcccccttcctttttgg

SEQ ID NO: 2367 - DNA, 120 bp, Homo sapiens
tttcgctgtgaatgcataaaggctaaggagggaggaacaacccttgtttgctgctgcatctcttgggacttgggcaaattcaactttgcacgtggcagatctcttgggaaagccacttgg

SEQ ID NO: 2368 - DNA, 120 bp, Homo sapiens
agtcgatgttccagatttgtaatgatcacagtcctcatggaagaaggaaattcttagagctcagttggaagagaaacagcagtctttcagtcttcataggtttgtatcccggggcaatgg

SEQ ID NO: 2369 - DNA, 120 bp, Homo sapiens
tctcgtggctaatgtcacttacaggaactgttaacagttatgtttatttttttgaggtcttgacctcaaccactgggtctttttgttaatcttttaccttttgccatgtcttctcccttg

SEQ ID NO: 2370 - DNA, 120 bp, Homo sapiens
ccacgtgagattggaaggcagtcttgaaatcttaatttcatgcgggaggagagactacatgacggctacatctgtagttggaacagtatatttatggagcactggaaagccttactgtgt

SEQ ID NO: 2371 - DNA, 120 bp, Homo sapiens
gcccgaggctgcagtcagaggtatacttcccatagtgcttcacacagctcccctgcttctaaaggataaggtactgtagccttggtcctggggaccacctgcctggggcagtggacatcc

SEQ ID NO: 2372 - DNA, 120 bp, Homo sapiens
catcgaaattccccaaagccctgggccactgccattgggttagtcaagatgaaggaggaggactggctgcctccattttgccttgtttgttagtttgcctgggtctgtctgaggaaggag

SEQ ID NO: 2373 - DNA, 120 bp, Homo sapiens
tcccgccttccacctcaacacatcccttcagtgactcagagtctcagaaggaaaccctgactcctggggccatttcctaatggtactgtaagccaagcagctttgcttctgcctctgttt

SEQ ID NO: 2374 - DNA, 120 bp, Homo sapiens
gggcgctttcctctctggttgtgaacgaaaggaaggaacatctttctatggctaacaaaaactaaaggggaagtgaggaaacaggaagaagtatggtgggggctggggtagactcccctg

SEQ ID NO: 2375 - DNA, 120 bp, Homo sapiens
gtgcgtggaggagaggcctgggctcctctactggatctacactctgtcccaggtttttagatcccactgagcccagctgactgaaaacaaggacagtcagggtgaaacttcttttgccag

SEQ ID NO: 2376 - DNA, 120 bp, Homo sapiens
tgacgcagatgtctgctgcagagctgggctgagagttctgcagtctagctctgacttaggtcaggggcctgttggtctctcattggacgtttttgggtctcactcatgcttactgaaaca

SEQ ID NO: 2377 - DNA, 120 bp, Homo sapiens
aatcgacaccccgagttctcatgactgggaagatagttttcttcaggtgtcaatggcgttagactcccaggaagactagccctgcccacagggccacctgttggtttgagagcgtgttcg

SEQ ID NO: 2378 - DNA, 120 bp, Homo sapiens
tcacgttagcgggcatttaggctttgatgagagggcacagtttgagttaggtttacctccccctttctgtgcctgggaactgtttggtccagctttagaactgtggttttgacttcctta

SEQ ID NO: 2379 - DNA, 120 bp, Homo sapiens
ccccggtcagcacagtgccttttcctctcctgctctgagccagggtggggcattccctctagattcaggtttgggcaggggtcctatagtccctgccatggggctgcttccctgtccctt

SEQ ID NO: 2380 - DNA, 120 bp, Homo sapiens
gttcgtttattcaacccatgggaaattcttccctagggtctttttaaaaaatgtggccagccttaaggctaatttacaaactcttcattttccctctgctagactgctttatcccatatt

SEQ ID NO: 2381 - DNA, 120 bp, Homo sapiens
gagcggtttcaaaaatgtctaaaggttttcactgctggtaacgacagggaggaaaagggcccctcctgtatcatcctctattctgttctttgcccacacaaagaaagcaagcgttcatca

SEQ ID NO: 2382 - DNA, 120 bp, Homo sapiens
ctacgatcaatggagcagacagggaagaaaaggtattccaaggaaaaagggtgggtaagtctggccaataataggaaatcaaagcccagcaatcttatttcacagtctctccctatccta

SEQ ID NO: 2383 - DNA, 120 bp, Homo sapiens
gggcggacatgaaagacaggaactactctattctgagataaaggaattcttactgaaacacagaaagaaactaaatacatgcatttgagacacaccaaaatcaggttagccaaatgtatt

SEQ ID NO: 2384 - DNA, 120 bp, Homo sapiens
taacgtgttctatgtgtcagccttccagctatacaatgaaagcattcttgtccaccccaaaaccaagcaactactattctaacactgcacagacattgccttagaccagcacttctctaa

SEQ ID NO: 2385 - DNA, 120 bp, Homo sapiens
aagcgagacaaggaacattcttcacatgtttgcaaacctctttaatgtctagcttaaatggaagatagctggattctcatatcggcttctgcattccatctactgtcatatgttgtttga

SEQ ID NO: 2386 - DNA, 120 bp, Homo sapiens
tgccgctcttccagatgttgtctcttttcattatacaatatctgaaaaatcatattgttagtaccattcttggggcttatggtagcaaatacaaattttcaaaaattctattttcacttg

SEQ ID NO: 2387 - DNA, 120 bp, Homo sapiens
tgccgggggcggggagagggattgaaacagaaagaagaccccacattaaaggcttcgatggcaatatgcttcaactttttcctatgaattatcctctaagacaggtcctcacatcatagt

SEQ ID NO: 2388 - DNA, 120 bp, Homo sapiens
atgcgcttttgattgtgacttgcgcacacaaccagcaacacactgtggttcctgtgttcaacactgcagccggaaacagccctgggctggctgcagcaaacataaggcaagggaaagaaa

SEQ ID NO: 2389 - DNA, 120 bp, Homo sapiens
cctcggacaaagccaataggtacaagctggataaagcagttttgcatttttatttggccaagggacttatttacagaaaaaaaaaattataatacagcttttgaaggtatctttgtatca

SEQ ID NO: 2390 - DNA, 120 bp, Homo sapiens
ggccgtgaataatgggttgggttgggtggaagtaacccaagtgtctatcggtgaatgaatggataaataaattgtggtacagccatccaatcaaatattattcatccttaaaaaagaaga

SEQ ID NO: 2391 - DNA, 120 bp, Homo sapiens
ctacgtggttatacattatttctgtttgctgcctatttctgtgtgtgagagtgtttctggaggggatcagcactgaagtgggaactgagttcagcagatgatcctccccagtgtgggagg

SEQ ID NO: 2392 - DNA, 120 bp, Homo sapiens
aggcggaggaagggcaaattctctctctctctctctctccttgaggtgaaacattcaacttcggtccttagacattcccactcttgattcctggaccttcagactcagatcaggagttac

SEQ ID NO: 2393 - DNA, 120 bp, Homo sapiens
catcggctctcctggctctcaggcctttggacttggactcagtttcaccactggctttcctggttctttagcttgcagatggtggtgcttcacagcctccatctctgcccgagccaattc

SEQ ID NO: 2394 - DNA, 120 bp, Homo sapiens
ctacgaattcccactgaaagccttttgttctaaagggagagccagtcctgtgcctactgcagtactgtcacctagaaaccaaaattctcagctgacataacatttcaggactaatctaat

SEQ ID NO: 2395 - DNA, 120 bp, Homo sapiens
tatcgagcttttcctatgtgtggggtactgtgctaaataagtgctttaactgaatcagctcatttaatactcaaaataaccctgtgacaacattttcattattattactcataaaaacag

SEQ ID NO: 2396 - DNA, 120 bp, Homo sapiens
tttcgttatctctccttcaagaaatctaggcaagcttgttcgttagtcatagatgttatacatacagttatagatgatcaagaattctgacgatgaagtctaagatctatcctctgaccc

SEQ ID NO: 2397 - DNA, 120 bp, Homo sapiens
aaacgaaggaagcttaacattttatagtcagaaaaatcttgagaaaatgttttactggtttcatttccttgattgaaaaactcttctccctcttaaaagatctcttctatgttgatagta

SEQ ID NO: 2398 - DNA, 120 bp, Homo sapiens
agtcggtattacagaattctggcactacatatacaagcccctgctattttaggatcacaagaaacagctagcctgggaaaatgagagagaggtgaaccattcctaacatcttaacagcca

SEQ ID NO: 2399 - DNA, 120 bp, Homo sapiens
agacggctacagaaagcaggctgtgccagttttaggcctagattgaaaagagatctagcaggctccacttttgctttcttggcacctgaagctggcatgcaaggaagtccaggctctcct

SEQ ID NO: 2400 - DNA, 120 bp, Homo sapiens
gtccggcagacaccacacgggacaaagacaaaaccatcccaactgagcccctgcccaaatgcagatctgaagaatcatgagcaaatatagcatttctggaaggacaaaactttaaaatgg

SEQ ID NO: 2401 - DNA, 120 bp, Homo sapiens
gaccggagtgagaatggagggttagcaccgggaaggtgtgggatatgcttacaaaagggcaacccaagggatactttcagtgttagttccattcactatcctgactgtggtggtgcatac

SEQ ID NO: 2402 - DNA, 120 bp, Homo sapiens
aaacgtattaattggccaagtcccagtctgtgctttatacaattagcccaatgttacaaaaacaagtatcccttgttatccaaatctattcagtttctgagtttggaaagtgaaaggtca

SEQ ID NO: 2403 - DNA, 120 bp, Homo sapiens
gcccgagtcacaggattattggcttgtatatttaagtgtgcacctgtactattaggcatttaaggcaaaatttgacactaaataaactattacatctaaaacttccatcatgccccaata

SEQ ID NO: 2404 - DNA, 120 bp, Homo sapiens
caacgagcaccacaaagttaaagacatctacagacaattattagaaacttgttccttgacctaagataagggcagaacattacactatacactaagaggctacagaaaatggaggagaag

SEQ ID NO: 2405 - DNA, 120 bp, Homo sapiens
gaacggatcacagtagggctacatgtctgggttcacaggtaggaggtatacatatacaagttataacatagagtgacatttctatagattcacattagataaaaagtacgtttgctatcc

SEQ ID NO: 2406 - DNA, 120 bp, Homo sapiens
caccgtctccttcacttctattctctccttgacccattcatatctactctactgagaatgtgcgtgtcaagattatgactgatgctcaaagccaatattcctgctgttattcaacttaac

SEQ ID NO: 2407 - DNA, 120 bp, Homo sapiens
gagcgagattcctcccaaaaataaatataacataacataacataaaacaaaacaaaacaaaacatttgttctctgctgcttaatcataaacctacacctgtagccctgtcttcttcctgg

SEQ ID NO: 2408 - DNA, 120 bp, Homo sapiens
tctcgatttttctcaaaaacctgctttccccccagttttcactgtttctgtaaaggcaccatccaccctagcattaatggcaaaatctacagcacaagtaaatgaaccatacctccaaaa

SEQ ID NO: 2409 - DNA, 120 bp, Homo sapiens
ccccgttattagcaccctaattcaagtcactaccaactacactactgcaatagtctcctaactagtcttactcccattctccttcgctcaacccacacacaaccaattctttatgcctga

SEQ ID NO: 2410 - DNA, 120 bp, Homo sapiens
taccgtgcctgtttaaaatcctctaacagcctcccatcgtgctgataaaacccaagctcctgtctacctatctgatctcaatcttacccttctttcccgactgcctgccccccacacccc

SEQ ID NO: 2411 - DNA, 120 bp, Homo sapiens
caccgtaggactattccctctgcttagaatgtgcttcctatgatctttttatggctggcttttgttttttttttaagcaaaagacaaaaaccaaccaccaaaatggatctcaacagagct

SEQ ID NO: 2412 - DNA, 120 bp, Homo sapiens
cagcgactcccggaggccaagggcccacgggcctacatcccctctcagcactgaacagaaagttgactttcctttttacaattaaaaaaaaaaaaagctgactaatattgcacaggagta

SEQ ID NO: 2413 - DNA, 120 bp, Homo sapiens
tcacggcattggagaggtcctgcttgttggcaaaccccaggaggacagtatcccagagctcgtcctcggccagcatcctcatgaactcctcgcaggcctcaatcatacgccctctgtcag

SEQ ID NO: 2414 - DNA, 120 bp, Homo sapiens
agacgttggcaaagatgttatgttccccatgcttgtggacaggtggaaggacgctgggaagggtacctcagtggctgctgctccgagccaggtactgttttgctcccaccagggctggct

SEQ ID NO: 2415 - DNA, 120 bp, Homo sapiens
aatcgtgattaatgtaagccagcactgttcaacagaactctgtgatcatgaaaacattctagtaatattacagcactgtccaatcaggtagccactagccacatgggactactgagcact

SEQ ID NO: 2416 - DNA, 120 bp, Homo sapiens
caacgtactcaagcttctctgcagcttgcccaactttaggccagaatttagctctgctccagtttcccagggcctgcccaggcttacagggaacaccacaccctgaatctatctccaaat

SEQ ID NO: 2417 - DNA, 120 bp, Homo sapiens
tgccgcttgcctgttccccaagggaaaccctttaaagagaaagccaagtacactttcccttcagaagcaaagctctccttccttattcccccactgccaggtgccaggaccagttaggtt

SEQ ID NO: 2418 - DNA, 120 bp, Homo sapiens
cctcgagttaattcagctttgtcccctgagcatgggggaaaggcaggctgggggctggaactttctgcttgtgtacctatctctttagactctggaggctcctccccaatctctgtcatt

SEQ ID NO: 2419 - DNA, 120 bp, Homo sapiens
tgccgtcccagactcaaatgctcagccacctaactgcctgaggacccagcagttaatgagtttacatgctgggggcaggagtcagggccaacactccttggttcctctggctccctggaa

SEQ ID NO: 2420 - DNA, 120 bp, Homo sapiens
agtcgggtgagcttcccctccccttacccagggctctgtaggcaggcacaatggtgaccgtgatgggctccgcagtccccctggtctggatggtgaagacgagagcatcggggactctct

SEQ ID NO: 2421 - DNA, 120 bp, Homo sapiens
cctcgagcccgaggtccagcaggtcctggctttgccacatggttttccatatcagcctcagaacatctttgtgatgcttggctgcctcctggaagctgtggaaacagctcagaaacgcca

SEQ ID NO: 2422 - DNA, 120 bp, Homo sapiens
aaccgtgccattcccgaaggagcccacctgcagaacacagagccccgtcaccctgaggcccactgccatgagccaggcaacccctgcggcacttcacatgcactgtctcactgaatgctc

SEQ ID NO: 2423 - DNA, 120 bp, Homo sapiens
acccgctgagggatgggttgtgggtagtactaatacccacactttacaggtgagaaaactgagatgtctggaggatctcgagacatgggatggagaaatggggcagcctgaaaaagatct

SEQ ID NO: 2424 - DNA, 120 bp, Homo sapiens
aagcgtttggtggggtgcctggcacacaggaagtcagcaatacatttctctttcttctcattatccagctgacttagacaatctcttctgctgccggggggtcagttttcctgttagtaa

SEQ ID NO: 2425 - DNA, 120 bp, Homo sapiens
ggtcgagaagggatttttcgatgttttgagattctagatgagctctccaggccctggtgcctctggtatgcaaagcgccacaactctctggcctcctctccttctcattctgtgttggga

SEQ ID NO: 2426 - DNA, 120 bp, Homo sapiens
tgccggatgatataacatgccctgtgtgacatgagcacggatgctggatgacatgagcacgccctgtgtctggcacccataagagccctgtatacatattattccttttaatctttactt

SEQ ID NO: 2427 - DNA, 120 bp, Homo sapiens
tatcgtgcatgaatcattcagcctgcattgcaccactggcttggtgagggagagatgatgatgatgccccaatcacagatgaaaagaatgtgggtttgagaaagaagagtgggaaggtca

SEQ ID NO: 2428 - DNA, 120 bp, Homo sapiens
aagcgaagagtctgtctaatatcaaaatttgtggtttctcacttataaattgtatggcctcaggcttcatatgctggggataggtgcaaagaacggataggggcccagggcttctagatc

SEQ ID NO: 2429 - DNA, 120 bp, Homo sapiens
actcgctgtgtgaccttggggtatctctcaccctctctgtgcctcggtttacttaattttttaagtgagtcattggtgagactgtctgattctccaaagtctttctagctccgaccctct

SEQ ID NO: 2430 - DNA, 120 bp, Homo sapiens
aggcggtggcatgaaacagctggaggaagggcttgggggaaaatctcagtgaggggggcttgggtcccttgagtcaagttcaaatcccagcttcaacactgtgtgaccttgggcaagtca

SEQ ID NO: 2431 - DNA, 120 bp, Homo sapiens
cgaatactactacaggaagaagtgcgagtccattgtggagccaaagccggtgaggccgctgtgttcacaggacaccaagacatggagagattccatgaaatcactcagaaatgcacgaaa

SEQ ID NO: 2432 - DNA, 120 bp, Homo sapiens
atacgtcgctgggttctaccccgatcaaccaactctcagataaattttttggtcttagagaagaatggaaacaaaaatggaggggcaagatagagggaaggcaaatttttatgtctagga

SEQ ID NO: 2433 - DNA, 120 bp, Homo sapiens
tcacgtggacagtgcctgaccagccccagctttcaagccatccaagcccagtcaccaaacatgagagagaagaagccttcaggtgattctggactccactaacatatgactgataccgca

SEQ ID NO: 2434 - DNA, 120 bp, Homo sapiens
gagcggcaggtgtgagtctcctgccaacccacggagttgtccaaatgagccagtcacatcctccggggaaccagggcctcctcaccctcttggtgctacaaagcctgccccgcactggcc

SEQ ID NO: 2435 - DNA, 120 bp, Homo sapiens
gcacggcaagtggggtcttcctccccgagctgtgagtgtgtgtgaccaaaaactgctgccaatctcatttgcccagtgttgggtgtcatgtgttcagctaccgccataaccctggggtgg

SEQ ID NO: 2436 - DNA, 120 bp, Homo sapiens
gagcgaaacgctgtctcaaaaaaaaaaaacaccctaattccaggccaaccagcagccctaaaaaattaatcttcgtttggcttctaccaaaagtcatggtctacacaaagccctgcctac

SEQ ID NO: 2437 - DNA, 120 bp, Homo sapiens
caccgagtggggtttcaccctctgctgcttgtatgtttctcaacccatgttctaatcccatgcagtcatcattcaggaatccctgaggatcccctgattcaacttctcttttttgaatag

SEQ ID NO: 2438 - DNA, 120 bp, Homo sapiens
aatcggaggaagtggctgacactgacttaccattttaaccaaacaatcactgcacttaagcttggataagggtcaaataaaactaacagggctcttatgcaagcccttccagtctggtaa

SEQ ID NO: 2439 - DNA, 120 bp, Homo sapiens
aggcgggcataggtttcatcggctctaactgatcacatgcctgaagctgtgaaatatatcctggaagctctaaatagtttctgaactactgtgctctagagttcactctagttagagact

SEQ ID NO: 2440 - DNA, 120 bp, Homo sapiens
tttcgtaatttgacaaagagatttaccagagctcggtcagctatctcagaaacctgctttgagcagctgtcatgaagaaacacgttcagtctttcaggagaaatgtttccccaccacagc

SEQ ID NO: 2441 - DNA, 120 bp, Homo sapiens
ccacggctctggaaggtgccatggtttccggtttgcactaggagccacatctagccccctactccctctcaaatgcagcaaccacctccatggcctcagaccgccggagttttctgctcg

SEQ ID NO: 2442 - DNA, 120 bp, Homo sapiens
tgacgtggttctgaaaatcacaatgaaggatttttggcataaaaacgttttaaaaagcaattgtcccaaaatgcacgtgggtttgggtctgcaactcctcacacccgcctgtccagccag

SEQ ID NO: 2443 - DNA, 120 bp, Homo sapiens
aggcgctacctcgtggtcagggaggcccgtctgaggaaagttgagctgtgatctgaaaggtgaaagggagcacatgaggtgaaaagccagggaagagcattctaggcaacctgaggtaga

SEQ ID NO: 2444 - DNA, 120 bp, Homo sapiens
caccgaaccccctgaaggagtgcagaaagagcgacctgacagaagctgtgaccctacagccagccccccaggacccccaagaaagggagccaatgaatccacactccacgtcattctccc

SEQ ID NO: 2445 - DNA, 120 bp, Homo sapiens
gcacgtgaattctaaatgaacaaggacttattgcacttgaaattatactatttcacaggaaaaggatccctgtcagaaaagccaaattaccttacagatacatcaagttcttctttttcc

SEQ ID NO: 2446 - DNA, 120 bp, Homo sapiens
tgacgcagaaacaaacctacaaaataagacgagagacaaggggaaagcattaactgacatccaggctacgcaatggcaactccacaatggcaatgactgtctgctggaattcttccttca

SEQ ID NO: 2447 - DNA, 120 bp, Homo sapiens
tctcggcagcacagatataaggaaggctgggtgccctcaccagctcagccccctaagggttacaccttacacgcccgtcccctccgaaagtccagggcaggttttcgaagagaaagatcc

SEQ ID NO: 2448 - DNA, 120 bp, Homo sapiens
aaccgtgggaccctttctgcgggaaactgccccgtactggacctgacgagataaccacagacaagggatggctgggcctgggcggccctttatgccaacttctctcaaagagataattag

SEQ ID NO: 2449 - DNA, 120 bp, Homo sapiens
attcgggtcccactgcttcctaggctggggctttaataatcagaaactccctccatgccatgactaaaaatatcccactgtgaaaacaaggcaggcatcagggaagaatcgccatccaca

SEQ ID NO: 2450 - DNA, 120 bp, Homo sapiens
ggccggcaaagggaggcgcagcttggggaactcctgctctggggaaccagcaccctccggggtgcccccttctatggggaaagagacccaccaggcatcaacgcacctggggtctctcaa

SEQ ID NO: 2451 - DNA, 120 bp, Homo sapiens
gaccgatggttccctctgtcccacctcctgcatttggtttccaggcaaagccatgttttaggactcttaaaacactttttttgaggggggggatggagtttcgctcttgttgcccaggct

SEQ ID NO: 2452 - DNA, 120 bp, Homo sapiens
cctcgtagccaagtccctctctcaagaccagaaatcaaggcagattaaacaacctgccgctgctcccagcccagtctgcccccaagcccccgctgccagcctgcttcggtgaaaccagat

SEQ ID NO: 2453 - DNA, 120 bp, Homo sapiens
ccccggtgggggaggggacctgccattctcaacgaggacgtgatattccacgtaagctcagtgtgatgctcaggggtccggccagcaccctgccagtcgtcatgggtgggggaagggacc

SEQ ID NO: 2454 - DNA, 120 bp, Homo sapiens
atccgctgagtttacaattgaattcccagggggacggggtggttgtccagcaagtagccacagcctttagaaatcccagcctgactccggctttcaggaattgcctggaaagtcgtgggc

SEQ ID NO: 2455 - DNA, 120 bp, Homo sapiens
ccacgcccacacccctgctgccagggcttctcaagacctcccccagcttgcttaagtcaccaacatcaacacccacaccatcccacacaggggaaaagtgatgagccacctcccagctct

SEQ ID NO: 2456 - DNA, 120 bp, Homo sapiens
taacgtcacagagtcagcagcaaggccaagagccttccagtcatcctttgaatccagggccaatccagcaacacctgcagagtggattgagcacagcttagaaggaggatgccacctcct

SEQ ID NO: 2457 - DNA, 120 bp, Homo sapiens
tcccgagtctccactactccacatctgccagggtgtcccctataaacgctgaccaccaagtgcagttcccttccatcccaagcaggggtcggtcccttccctgagccaagcaggtctgag

SEQ ID NO: 2458 - DNA, 120 bp, Homo sapiens
ccccgcactaaaccctgctacttccaaatgccaaatctccctaatagggaagtctccagtttctgcccaactttctagaagcacccaggtgttggaggccccatccccatagcaggaact

SEQ ID NO: 2459 - DNA, 120 bp, Homo sapiens
attcgagtctcccctgagagggcccaaggccttctccaagggagagagaattccagcccgtaggtggtagatacaggtgggatgtgaggggaaaactgcacggcttttccctccagccca

SEQ ID NO: 2460 - DNA, 120 bp, Homo sapiens
ccacggctggctcccctcggggactgccaatggcctgtcaaacccaccaggcccagagcaaccctcagggggcctaaaaccctggctcaggccgcaggagactcgaggagcccagagagt

SEQ ID NO: 2461 - DNA, 120 bp, Homo sapiens
taccggaagggatgaaaaatgtgtagccctgcttcagctcaattctttggcatcgttccacacggtctcccagaaagatgtcactctgtttgcctgacagcacccactcctcgtacagcg

SEQ ID NO: 2462 - DNA, 120 bp, Homo sapiens
cagcgttggaggaatcagccaaaaaatcttgggagaaaacacaggcagtcagctggagacccaggcccagacaagacccagagagagggccccacctgcctggcggaaggggagggggcg

SEQ ID NO: 2463 - DNA, 120 bp, Homo sapiens
tcccgaaccacaggcttgtctaggaggtgggggaaggagaggaagggaatttcctaagttgtaagataaaatagcccagtaaataaacccagcttgtgcatactttggaggaggaggaaa

SEQ ID NO: 2464 - DNA, 120 bp, Homo sapiens
acacgttcagttaaaacaaacgcacatgcagacccagccaagcagggtggcacaggcttattttcaagaagcacccacctccatcagggacacccacatccccacgtggacacgcaacaa

SEQ ID NO: 2465 - DNA, 120 bp, Homo sapiens
ggacgttctcgagccaaacccaagcttcaaatctggcccaaggagctttgaacaccagactgggtgagtggagcaggcctgcatgggtgactagatgcgatgtaaaagggctgaacttga

SEQ ID NO: 2466 - DNA, 120 bp, Homo sapiens
ccccgagttgtgtcctgaacacctggtagtgcacaaatccctttctcaaacggccacgtcccgtggtgcagtgcccagggcaaggtaagacactggaagacagaggctgcaagacacagg

SEQ ID NO: 2467 - DNA, 120 bp, Homo sapiens
ctgcgaccccgcaatgactgggagggctggcccaaccttccccacacactgccctccaaagcagactctcacgtctgttagggctgtgtttatgtcacccagcaaccctggagaatcact

SEQ ID NO: 2468 - DNA, 120 bp, Homo sapiens
ccacgtggttctgctgggctgaccccagccagcaactccagtctggctgaaggctgtgctaagactgtcagagccaatccagaggcatctaagggaatgactgaggttttgggaaggacc

SEQ ID NO: 2469 - DNA, 120 bp, Homo sapiens
agacgcctgaagctgctgtgggccccttcttcacccaccctccctaccctcccatggggagaagcctgccaagaatgaagcagaaagagggagtcgaagtgggaagcagaaaggagaaac

SEQ ID NO: 2470 - DNA, 120 bp, Homo sapiens
ccccggaggttacatgctgaacttacgacctaagtctatgaatttccttttgcttaggacagctagagttacatttgtcacttaggtcacttataacaaatgtgccctatcaccactctc

SEQ ID NO: 2471 - DNA, 120 bp, Homo sapiens
gaccgaaatgggcataataattccccaggccaactgcagtcagcggcctccctcagagttcagagcagctgtccctctgcaaagcacttgaacattcatcgctccatttgatcatcacag

SEQ ID NO: 2472 - DNA, 120 bp, Homo sapiens
cctcgggggtggctggggcacaggcgaggcaccaagtagggagcagaatgggactgcagacctgtatacaggccccccatacacaccccagcggccagctcagggcctgagccacctaaa

SEQ ID NO: 2473 - DNA, 120 bp, Homo sapiens
agacgtttccagtgagtggatcagtagcagtggacctggggcagctcagcaacagccgctgctgcttgtcctgtcttgggtttcaggttccggggtggcaggccagagcaggaagaggaa

SEQ ID NO: 2474 - DNA, 120 bp, Homo sapiens
tgccgtgccctggtgacctaccccacgtcttgtgtccagcacccacatgtgctgagataccctcacccgcatggactcagaattctcagggctggctttcggccaccaaagatcttaaac

SEQ ID NO: 2475 - DNA, 120 bp, Homo sapiens
ctccgtctcaaaaaaaaaaaaaaagattagcaaatgttaaaagaggtgttaatgccatgtaatcaccagactgactcctcttggcttactcagaattgcaagagaacccagactctaata

SEQ ID NO: 2476 - DNA, 120 bp, Homo sapiens
aaacgaccctcccgcctgggcctctcaaagtgctgggattactttgagagggcatgagcccctgcacctggccttattgcatcatctatatttaattcattgggtgcacctttctctctc

SEQ ID NO: 2477 - DNA, 120 bp, Homo sapiens
tttcgtggagtctaataacaggaaattcagctggagtttacaaggaactggactccagcgttggacacctgtctacagcaaagcctcctctctctctctctctctctctctctctccccc

SEQ ID NO: 2478 - DNA, 120 bp, Homo sapiens
ccccgcctcagtctttctggttctgtgaatcagctttctcatggtgggaagcagctgccccttttatcacctcagttccaatccctcaaacaaacttactggctgtttctgaattccaat

SEQ ID NO: 2479 - DNA, 120 bp, Homo sapiens
agtcggcccctggccagtcatgctgctgccactgtggttctttttatgaaattttcctctcctccttaggtacctagccagcagcccaggcccatcttcaacccggtacaaactgtctct

SEQ ID NO: 2480 - DNA, 120 bp, Homo sapiens
actcgttgaggggtgcctcatgacttggaaccttctcttccttgaccagcctaagacacagccccaagcctcagtcccagcatggcaaagagctcattcgcagcccctaatcagaccctg

SEQ ID NO: 2481 - DNA, 120 bp, Homo sapiens
gaccgccccatcgagaagaatctgggccaaattagggctcatctgcatctgcaggccagccggaagggcaggttacacaaatctatgagattattctccctatggggtcagagttgggta

SEQ ID NO: 2482 - DNA, 120 bp, Homo sapiens
cttcgggtaatcacttccagatctgagtggcaaggatatggctgagcgccatattcaaggatcttgtttacagctttgggtgagaggagttgccctgtatagtctggggcaagagggact

SEQ ID NO: 2483 - DNA, 120 bp, Homo sapiens
gggcgtgggagagggttgtaaccagggcaccctttctgcttctgcccagtaaagacccatcagcctgtgcttggggcagagaggtgtggccctgtcttccggggacaccaggccctgagc

SEQ ID NO: 2484 - DNA, 120 bp, Homo sapiens
ctgcgtccagttcctgcaatattattaccagaggggctgcctctaccggctgcgggccctgggggagaggaaccacctggatctcacagtgggtgagtagctgggcctgggttggagccg

SEQ ID NO: 2485 - DNA, 120 bp, Homo sapiens
caccgggagtgcagccctgcgagcacctcccatacagcggagccaggccgctgccctttatccgaagcgccttccagaattcatcctggattctgtttcagctgccaagtgccaggccag

SEQ ID NO: 2486 - DNA, 120 bp, Homo sapiens
aagcgcctcaaggatggaggcctgtctgcaggctgtggctccggctcctcctctgtcacccccaatagcggtgggacacccttctcccaggacacagcttattccagctgccgcctggac

SEQ ID NO: 2487 - DNA, 120 bp, Homo sapiens
ccccgctcacaccgcgcctgggcacccctttctcacaggactccagctactccagccgccagcccacaccctcatacctcttcagccaggaccctgcagtgaccttcaaggcccggcgcc

SEQ ID NO: 2488 - DNA, 120 bp, Homo sapiens
ccacgagagcaagttcacggacgcctacaaccgccgccacgaacatcattatgtacacaattctcccgcggtcactgcggtggccggggccacagccgctttccggggttcctcggacct

SEQ ID NO: 2489 - DNA, 120 bp, Homo sapiens
tcccgttcggagcagtcggcggcactgggggcagcagcggtcccccgttcaaggctcaaccacaggattcagccacatttgcccacactccaccacccgcccaagcaacccctgctcctg

SEQ ID NO: 2490 - DNA, 120 bp, Homo sapiens
ctccgtatcagaccccagtggcccacttccctccacccccggaagagcccaccgccacagccgcttttggggcccgcgacagtggggagttccggagggcaccggcgcccccacccctgc

SEQ ID NO: 2491 - DNA, 120 bp, Homo sapiens
gcacgccacccggcccgccgccccccgacaccaacagcatggagctgggcggccggcccaccttcggctggagtcctgagccctgtgacagccctggcacgcccacgctggagtcgtccc

SEQ ID NO: 2492 - DNA, 120 bp, Homo sapiens
ccacgacagcctggactcgcgcatcgagatgctgctgaaggagcagcgcaccaagctgctcttcctgagggagccggactcggacaccgagctgcagatggagggcagccccatctcctc

SEQ ID NO: 2493 - DNA, 120 bp, Homo sapiens
tgcgcagtggacagtaggtttgggtgtaacccggaggcttccagagagaaagggagcaaaatgaatggaatccctcttctcagtgcctgtgtacactggcagcttgtccctggactgact

SEQ ID NO: 2494 - DNA, 120 bp, Homo sapiens
tggcggtccttggcctacagctgtgtcacttgaacctctgcctgcatcttcatgtggccttcctcctgtgtctgtcccacacctacctctgcctttcttttatgaggacaccagccacca

SEQ ID NO: 2495 - DNA, 120 bp, Homo sapiens
tctcgagatccttaacataattacatctacaaagactctttttcaaataaagtcatatttacaggttctgggggttagctcgtggttatctgtttttgggggccgctcttcaacccacta

SEQ ID NO: 2496 - DNA, 120 bp, Homo sapiens
atgcgcgtggcatgtgctaagtactctgcaggtcagctcgttagttcttgcagcaggtagggagggaggcgagtgctcctattcccattttataattgaggaagctgaggcttagagagg

SEQ ID NO: 2497 - DNA, 120 bp, Homo sapiens
ccccggaggcagctggtgctatcagtttccttcttcagatctttttattttcagaagaatcaaagccctgccacagctgggtgctgtctgggcttttcactcccctctagcttccagggc

SEQ ID NO: 2498 - DNA, 120 bp, Homo sapiens
tatcggcactgttttaacttcaaaaaagaatggattcatgcattacttgcgtcgttaaaaataaaaaatgaaaaacacagtgcccaccccagggtagttgtgagggcatgagtagagccc

SEQ ID NO: 2499 - DNA, 120 bp, Homo sapiens
ccacgtttctttcctccagcaaaaaggcattgggatgaacgagccgctggtggactgtgagggctacccccggtcagacgtggacctgtaccaagtccgcaccgccaggcacaacatcat

SEQ ID NO: 2500 - DNA, 120 bp, Homo sapiens
atacggaaatggttaagtactgtgcttcctcagcagctgggctgtcagggccatagtagctccctttggagaacagggaaagcctggaggcttcccaggtggcccagcgtggtgtcctgt

SEQ ID NO: 2501 - DNA, 120 bp, Homo sapiens
cagcgctattttgtaaaccgctgaggtatggataggaacgagtagatcagacctcttgaaaatgcttattcttcctcccttttattttttgtctcttttaagatggtaaaatggttctca

SEQ ID NO: 2502 - DNA, 120 bp, Homo sapiens
caccgctttctgttttggcagttctgccaggcaagccctgtgttccttgggactggttttgctgtggttggatacagataccagcttgccttgatgggattggtattgctgtgtgcttcc

SEQ ID NO: 2503 - DNA, 120 bp, Homo sapiens
gggcgaattccctcaaactctatttgacctgacagccatacgtattcccctctggtagccacagacatgctgtgtttaccaatgtttgctgtttaaattgcatgttctaattccacgtat

SEQ ID NO: 2504 - DNA, 120 bp, Homo sapiens
gggcggggagaattattcacattctcctaaaatgacagcagcagagagccttctgcctcagtggctctggctggtttcctgcaggggtcccagtggaaacccgtgtggccacctgttgcc

SEQ ID NO: 2505 - DNA, 120 bp, Homo sapiens
tgccgtcttccatgagatgttagtggagagccactttgacgtggaatgatcctaatagatatagccagaccggttttgcggaaacgctttgtgctgagaaccgcaagctggtgcaccctg

SEQ ID NO: 2506 - DNA, 120 bp, Homo sapiens
gtccggggcggaggccacgcggccctggcgagggggcccccgacctggcggggtctggtgccccttggggggcgctcacccgacctggcccttgtggggcctggggcggccccagggaga

SEQ ID NO: 2507 - DNA, 120 bp, Homo sapiens
ggccgcacctgggctttaatcccctcgcagagccacgcacctggcacccctgccccaaacccctgcggctcgaacccggctgtccagacgcgccggcgaagttgggctcagtcaaaagag

SEQ ID NO: 2508 - DNA, 120 bp, Homo sapiens
aaccgaccggatgccccaagatgaactgggacaagaaagaagggacttggagccagaaaacagagaggagggacaagaaaggagagtatccgacatccagtccaaagcagggatctcccg

SEQ ID NO: 2509 - DNA, 120 bp, Homo sapiens
ccccggtgtatcccttggtaagtgtaatgcttttaaatctcccccagtgcttttgagagtgttgcgcaataggggaattttatgcatgttgggggaaaaagaataccaccagaaggatac

SEQ ID NO: 2510 - DNA, 120 bp, Homo sapiens
acacgtgtgactgaacatgaacttgagagcggcatctgcgttcaatggtgttgctcagcaggcaggaaattccagacatagtttgtctgttgcatagggtgctatttcacgtgggagatc

SEQ ID NO: 2511 - DNA, 120 bp, Homo sapiens
ttccgcccctttccccagcttcctcctccccctttccttcccgcttcctctccctcttcttcccttccctcttcttcccctcccctctcctttcccttttctctcttccctcctgtctcc

SEQ ID NO: 2512 - DNA, 120 bp, Homo sapiens
agccgcagtgaaaagccccaggcagtccagaggaatctgcctttgccactgctgaaaatattccagggaggcaccatctgcgaggagtaaaaatattatcatttaccaggagaaggaaaa

SEQ ID NO: 2513 - DNA, 120 bp, Homo sapiens
aagcgattgaatggatatcaaatacttaatgtagttcctaagacatagtgagtactcagtaagtgtccgcaactgtgtgtcatgacgatgacggtggcaagacgtctggagggaaatgca

SEQ ID NO: 2514 - DNA, 120 bp, Homo sapiens
ccccggtggcattgctcacattactctgcagacaggagttgctgtcctgtcccatggaccaatggtgtttgcagttcaggcgatgtgacagcaccttgggctcacccctgctccctaaaa

SEQ ID NO: 2515 - DNA, 120 bp, Homo sapiens
ggccgaccctccaaagcatatactacggaaatagtaagaggatcatttcaagtggtattttcggctcctcttctcaccctccctgccctgaatggagaacctctgcctgaggcgaggctg

SEQ ID NO: 2516 - DNA, 120 bp, Homo sapiens
taacgtccctgatctttagattccttgcatgcaaaatgagggtgatagcatgtgaaatgggggtgataataggaacttctgtaggatccctgtaaagatcaggtagtttaataggggaaa

SEQ ID NO: 2517 - DNA, 120 bp, Homo sapiens
actcggcaagtgaatgatttcctttcgtctcttcttcctgtaagggcatttgcttatgagctcagaatcttccctaataaagaggggacaagcacccacactgtcctctcatctacccaa

SEQ ID NO: 2518 - DNA, 120 bp, Homo sapiens
atccggcatgctgccgcagggcagagtcaaccatgtggcagccggttcctgttcctgaccacttctccaagcccctgcgctgcctgtggctcggctgggcctctctcggtagtgtgacgt

SEQ ID NO: 2519 - DNA, 120 bp, Homo sapiens
cctcggaaaacaaacctgattcctggctgccagcacagtgtaccccctgccatctgccaaatgcacatctttctttttatggcagatattgaagcttctactcttaacctgaatatgagc

SEQ ID NO: 2520 - DNA, 120 bp, Homo sapiens
agccggttaaatctgctttggaaccacggtggtttgagattgcacttgcagctctgacttccaccccaccttcacctgagagagcagatcttgggaacttgaggatttaggagctggagg

SEQ ID NO: 2521 - DNA, 120 bp, Homo sapiens
gcccgagatgtgtggcagataaatgtaagcagacattatatctttcataatcagtgcagaaggaaaatgtgaacggaataaatggttgagaaatatcatagattccattagatgcaaaga

SEQ ID NO: 2522 - DNA, 120 bp, Homo sapiens
ccacgaagatgaaattggggtactttaattaccattcagagccaaaggcttgccctttgatatggaaatcccacttctgcgaccgccttttcccgggcccttctccttctagttgcccaa

SEQ ID NO: 2523 - DNA, 120 bp, Homo sapiens
aaccgacgaaaactgccatgtacagttaccccgttattgtcatctgcctgctgcatgactcccggctttgctataattattaattgcacttgtcaactgtcattaattcctctttagcat

SEQ ID NO: 2524 - DNA, 120 bp, Homo sapiens
ctacggaaagggtcattggccttccatttaatgatattgccagccccaatctgcattttcccagcaatgtccctcaacacagaataaatggctgatctcttcacaataacagctgatttc

SEQ ID NO: 2525 - DNA, 120 bp, Homo sapiens
ctacggctgggccgccctgcactattgataattttatgcataaacaaatggcaaatttgtgccacataaatatgcattagcaattactttttccttgggcaacgctcaccgcatgcaaat

SEQ ID NO: 2526 - DNA, 120 bp, Homo sapiens
cctcgcagggcctggtagcttttgttttagctcttgaacagtgaaacaaaagagcacaataaacaattttaaaattgccaatcaataagcaatgcaaatgcaaaggtaaatggcaagaaa

SEQ ID NO: 2527 - DNA, 120 bp, Homo sapiens
cctcgatgcgatttccggggcatcacctactcaaatttctgatggtcaatttcagagatttgtaagaatattcaatttcagagattcaaagaattttaaaactaggaggagctacagaga

SEQ ID NO: 2528 - DNA, 120 bp, Homo sapiens
attcgaatttcttatcctagaacccacagattgctaggaaatccgaaggcttctagaatgacatgcaaattttcatgtatatgtccccattgtgatttttctggcaacaatccattcttt

SEQ ID NO: 2529 - DNA, 120 bp, Homo sapiens
ccccgccaccatcttgctaccaaatgaagtcagagactgaagctgtattagtggaaactgagagatggagagaaattgaattctgtttacattattttaattcagaagttagatctgtgc

SEQ ID NO: 2530 - DNA, 120 bp, Homo sapiens
tgccgtatgatgttcattaatttggtacagaggaattttgtcagttttccagtccttttcaattaaatttacacaatgcaggattattttctagtggagaaaaagacagagagaaagcaa

SEQ ID NO: 2531 - DNA, 120 bp, Homo sapiens
aatcgcatatgaggtattccagacttttcatgtaaaaactccattccttactcgcctaagcacaccatggaaacaacagaggtaaataaattgttgtggggactagagatgcagaaatcc

SEQ ID NO: 2532 - DNA, 120 bp, Homo sapiens
tttcgtctttgtgtctcagtttccttcttagagcttccctatccagggatacttttcaaagtttctcaaatttcattaataaccggggtctaaaaggagattccatatattaattttaaa

SEQ ID NO: 2533 - DNA, 120 bp, Homo sapiens
atccgatttcctgccattattaactcggttctgattatagaaaaacatacataatttgcaattcaaacagtctttaatcttaaaagggtttccattgtggaagagagaacaagttcccct

SEQ ID NO: 2534 - DNA, 120 bp, Homo sapiens
ttccgcttgactcctattttgagctgtgatattttaatctccattcttgctgcaacttagcagatgaatgtgcagtgtgacagagctcagaggaaatagtataaataaagcaaagtggag

SEQ ID NO: 2535 - DNA, 120 bp, Homo sapiens
agccgaagcataaacagagcacagctgtgttatacttaccgctgtgagcactccctcaatccgcaccccctgttgcttttaaaaagacagtgctcttattcaaaaagctttggctgtggg

SEQ ID NO: 2536 - DNA, 120 bp, Homo sapiens
acacggctccacaatcaaaagtttaaattttgctcctttccaacatacactgcacccaaataatttatgcaccctctcttactaggagacaggaaattagctgaaagtattcaaaacagt

SEQ ID NO: 2537 - DNA, 120 bp, Homo sapiens
ctacgtgctaatgcaatcatcaggttttagaatgtttcaggctggttacgtatttcaatcattctgaagaagacagtatgacggatagcatgcaccctctatcccctagcaattgagatt

SEQ ID NO: 2538 - DNA, 120 bp, Homo sapiens
agccgacattcaaagtgacacagagacaagagaaagggatcaagccctgacaaagtgtgactcccgggttccaactgttcctgaggcccaactacattcctgtcctttcccctccttggt

SEQ ID NO: 2539 - DNA, 120 bp, Homo sapiens
aatcggatttttaccactttaaaaaaaaaaaagagtcctaattattacaccttccagaagattcttttttttttcttcagatgggtttagatttattcttcctttttcaaataccaccac

SEQ ID NO: 2540 - DNA, 120 bp, Homo sapiens
acacgtaattgtttcgaaacaacagactcaactgggctaacataggggcaaagttggtatcccaagcttctcagctatctatccgcccaaagttgctcttctgccaagctcattgtttac

SEQ ID NO: 2541 - DNA, 120 bp, Homo sapiens
tgtcggattatcaaactgcatctttaaagaggtgtgacctcatccagattcataagcctgctcccttgagaatgacttgaattttactccacttgcgcaacatataatttcataaaggag

SEQ ID NO: 2542 - DNA, 120 bp, Homo sapiens
ttacgggaccaatgtgaaacccctcaggcctaaagtgacctttttatgccaacacacacgtccaaatctcttaaagaggcaagcagtgatgtttgcactcagattttcagttacttcaac

SEQ ID NO: 2543 - DNA, 120 bp, Homo sapiens
gcacgtggtgaaatctgtttgggagtgggagcttgcttcctttccctgggggtctaagtggacttgcgggaggctgttcagttatcccacagctgtgcctggaagaaacccaaggcccag

SEQ ID NO: 2544 - DNA, 120 bp, Homo sapiens
tggcgatttcacttgacaaaaatcttcatgcttccaaatagccaggaactttaggaattcttgccccagatcacttaataaaaagaattgttgagcagtggaaaagttgccatcttcagt

SEQ ID NO: 2545 - DNA, 120 bp, Homo sapiens
acccgttttcaggtggcaagttggccatattcctgccatcccaaggcagggcagcagcacatcccttatcagcaaacaaggctctgatggctacaaaggggtgtatgctttaactttctc

SEQ ID NO: 2546 - DNA, 120 bp, Homo sapiens
acacgttgggattcctgcctgagaaacgtagtccagaactgcacccaaaacattgtctaacttttaatgtggtgtttaaagacacctactttctagttcactcactactgcccacagata

SEQ ID NO: 2547 - DNA, 120 bp, Homo sapiens
cagcgtagaagccctcacagcaaacctctcttgggttcacaagtcttactgcagtggatggcagacttcatacattcagcgcactgctttgccacatttgggtgataaaacaatgacaca

SEQ ID NO: 2548 - DNA, 120 bp, Homo sapiens
gtacggagttcttaatcaaagaaaagaattgtgtcttggaattttgccttgtgatttcccaagattgttctcaagatgggcattgaacagtcaggggtaaaaaaggaaatagattgcttt

SEQ ID NO: 2549 - DNA, 120 bp, Homo sapiens
gaccgttagtaccatgcaagcacattttgaaacaggtatgaaaccagtgtgcccaactgtggctgaaacccaaacagcaatttttttccacttacacaggaaaattcaggaaaaaaaaaa

SEQ ID NO: 2550 - DNA, 120 bp, Homo sapiens
tgccgtttacctcttctcctagattttccacagttggctccttctttgcattcaagtgatggtgtaatactgccttctcaaagaagcccaccctaactcactcaatctacatgggctcat

SEQ ID NO: 2551 - DNA, 120 bp, Homo sapiens
catcgccatcagaaattaagtgtttttaaattgtatttgcttgctcatcgtctgttcccttatcctcagtcagagggcatggcccgtgaaaccagatgttcatttttgtgtccatcccca

SEQ ID NO: 2552 - DNA, 120 bp, Homo sapiens
catcgtcccccctgcctggcgctaagaatatttccaggcacacaggagatatgaaatacatatttcttgggtgaaatagggctgtagggcttaagaggaatgtcttgcatctcctggaca

SEQ ID NO: 2553 - DNA, 120 bp, Homo sapiens
atgcgcaccgcaaggaaaggggataatatgagcaaatacaaaagggaaggaacctggagcatgctcaggaaggatggaataattcagtctgaatggtacacatccaatgtgggacaagta

SEQ ID NO: 2554 - DNA, 120 bp, Homo sapiens
aggcgaaggatgctaataacactttaaagtcactctgataaaacactaaaaatctgcctttttttttttttttttaaatagaaaactcccaaaagagaacaggaagagaagaactatgaa

SEQ ID NO: 2555 - DNA, 120 bp, Homo sapiens
caccgacttgctgcctgacatagagctttgtgtcatttttgtatttataaaccatctttatgtggtgagtgttttacaaagtaacgaatctctgactaggaagtcatataaattttcaaa

SEQ ID NO: 2556 - DNA, 120 bp, Homo sapiens
gcccgttcttgtttatttctcaatcaggcagagaaaaatagaaatattcagaagaatacatatatgtgtgagtgtgtgtgtctcagaaaccatggctgtgtccttaaaaattcccagata

SEQ ID NO: 2557 - DNA, 120 bp, Homo sapiens
aaacgacatgatgatgtaaacactaggaagtttaaaataacacttgtataaactgtttgaattgaagagaaaaaaacacaccccaaaagagttttgtcagaataaaaagaaaataaatcc

SEQ ID NO: 2558 - DNA, 120 bp, Homo sapiens
aaacgggcattctgagaacacatccccagagtccagaggggatgcgagggctggccacttggggaagcagcaagccaagaaaaaccctgcactctcagaaaacatgcaagagcaaaatgt

SEQ ID NO: 2559 - DNA, 120 bp, Homo sapiens
tgtcgaagtgagaactggagttaaaattctgggatggagttcttgtcaatttgcccagctccatgaggttttcccatccctttaccaggtacaacaaccagacccagccaaggcaaaggc

SEQ ID NO: 2560 - DNA, 120 bp, Homo sapiens
aatcggctcttggcttagctttactgggaatttagcctatgtgctgtgaatagagggctcactggaagaccccttctgcaaaataatactgtcatagttttcccgtctctcctcacccac

SEQ ID NO: 2561 - DNA, 120 bp, Homo sapiens
aagcgatctgaaaagagggtaaaaggttagagaagacaggacacactgacagattaactttgcttgcttttccaattgcagtagcccagccaaggattttgtgatgaggaattaagagtt

SEQ ID NO: 2562 - DNA, 120 bp, Homo sapiens
aagcgcagtcactgttgctagagcatgaagtatgaaaatcatacagaaaaataaggtatctgttgaaactgcttctgctgttttcctcgttctaaaatttgcctcatatcaagtgcaata

SEQ ID NO: 2563 - DNA, 120 bp, Homo sapiens
ccacggctggtcccagctccactataagcggctgacaattgcttcccccgccccaccaccctgtgttccttcaccccctcccagatgccaccaaaagaatcacagaaagtctctcagtag

SEQ ID NO: 2564 - DNA, 120 bp, Homo sapiens
ctccgtagctccccactgaggtgactatttgtcatgaaatcataggccctacctcaaaagatgtttcaggtgagcttgcaataaggcaaactgtctagttgacctataggattctgaaag

SEQ ID NO: 2565 - DNA, 120 bp, Homo sapiens
cctcgtcttatctcaccaggactccttttcagcctactctttctccccttctctagccatagtaatcataatcaaactcttctagtctgttttctacatgctgctctctccttctgtgtg

SEQ ID NO: 2566 - DNA, 120 bp, Homo sapiens
caacgtcagctcttagtagtcctgaattacaccggtacatctaggcagacatcggattttgccatagttcctaaaccagaatggggatgagccagcaactatggaaggtataaacctgcc

SEQ ID NO: 2567 - DNA, 120 bp, Homo sapiens
aaacgtaagtttgtcagtctttttaagtagagacattgaagcaacccgtgctcactcttcaggaaaaaattatgccaaaagcttcacagtaagcagtccttatcctgggcacagattccc

SEQ ID NO: 2568 - DNA, 120 bp, Homo sapiens
gggcgtcttcttgtatccaaaaagaaagcttccttgcatacacaaaagtattgctctcaatcacaatcctgattaccagtctgactgagtctaaatgacgtggtcttcatcctccaccac

SEQ ID NO: 2569 - DNA, 120 bp, Homo sapiens
aaccgcctccccgccgactctggcccaaaaaaatagcaacaactcaattctcagtccaataacgtcttttctcagatgttgttctcccagtgggtagaagaatgaactactgcaatgcca

SEQ ID NO: 2570 - DNA, 120 bp, Homo sapiens
aatcgaaggactgctcatggcagtgatcaaatctaaggcaacaaagtgctggtggctctgcgactcatcacagcaggagctcgcgctgagggccacttgagttcagtgctttgtggtgct

SEQ ID NO: 2571 - DNA, 120 bp, Homo sapiens
gtgcgttgctactcaactgaatagaaagcctagagaggtaaggaaatgaagagagttctgcctcatgctttagggccaattacctaaagatggtcaaggtcagttggtatagctggtgta

SEQ ID NO: 2572 - DNA, 120 bp, Homo sapiens
gctcgtggtagtgaggtttaccagaactcaagttgcaactgctggggtgggtgattttcctatggctaaacctggtctaaatgctccctccattggcgttggctgagttctacccagtgt

SEQ ID NO: 2573 - DNA, 120 bp, Homo sapiens
ctccgttctctgtggtggaacacattagtctctatgacctcaagactcaccctagtcacccttcgcaccaactcaaaggcatcagattctgtaaatgatattgtaacaaagagctcagca

SEQ ID NO: 2574 - DNA, 120 bp, Homo sapiens
atgcgcaggaaggctccagttcacatgcctgaacccgttaccctgctttgtcacacattaaaagcctggagattaccagaagtatttggtttgggttgttctttgaaagatatgactgta

SEQ ID NO: 2575 - DNA, 120 bp, Homo sapiens
cctcgtcttgccacaatctttgatggtgatgaagaatgtgtttactcaagttcacaaaagagaacttggtttgctctgttttagcaacagattaggattttcaaaagaaaaactggcaat

SEQ ID NO: 2576 - DNA, 120 bp, Homo sapiens
tgccgcctcctttgttgagtatgtgtgaacagaaaagtagcatacactcagctcaaggcaccagaaaccactgtaagccatttctatctccttatggccgattgggcaggcaaattcaaa

SEQ ID NO: 2577 - DNA, 120 bp, Homo sapiens
aggcgagcaaatctcaacactgcaaccatttaatgccacagacatgattgtaaagagagcacaacaaaatgaaggtattgtattttcatcattcatcaacagaagacttatttgtaatat

SEQ ID NO: 2578 - DNA, 120 bp, Homo sapiens
aggcgggtctggtgtgtatattcatttattaggatcacacatcacattacctcacgtacataaccatttaagtcatgtcaaaagtcagccagcaagtaagctgtgatgaaaagatcctcc

SEQ ID NO: 2579 - DNA, 120 bp, Homo sapiens
gttcgtagagtatgctatcatattttaacctcagagccttctttgagccaaacgggattcctcctaacctctctacctgtatctaaacaaacttcagatgagcacagtctgcagattgct

SEQ ID NO: 2580 - DNA, 120 bp, Homo sapiens
actcggacagcaggactggtggaccgtgaactcaagttgcacctctgatctaacttaatgcttacatatattttcaagaggaaaaactttgagcacacatagtataaaagttacttcctg

SEQ ID NO: 2581 - DNA, 120 bp, Homo sapiens
gcacgcaccgaatatagttccaatcgtctatatgaattgtacatctgtcaagagaagccaatgttgaaattgtggtcacttaatatgagatgaataatttaataatatgatgactgatca

SEQ ID NO: 2582 - DNA, 120 bp, Homo sapiens
agacggcactgcgcaaagcaagttaaacagaaacagtcttgccttctaatcccagtccatcttgctgcacaccagaggctgcccacacacaaagttaggatatcactgttactggtggga

SEQ ID NO: 2583 - DNA, 120 bp, Homo sapiens
ggacgttattctgaaagtgcatgcacatgtttatcagttgggcagaaacattttcttccatttcctccacaggtcctctgtgctttattaagatcataataattctctgtgaaagaatag

SEQ ID NO: 2584 - DNA, 120 bp, Homo sapiens
actcgcagtaaaactttcattggtatctagtatgtggtaggcactgtgttggctgaatgaaccaaggctatcatctctgaagaaaaactcaagcaaaggttttcaaactctgtcctgctc

SEQ ID NO: 2585 - DNA, 120 bp, Homo sapiens
catcgtttgtcatataacatcaacttttttgttatcctaaagacttgaactctcctcgtctaccacagagaggctgataaattaggaaggtgctgatttagctgacgaatctggtcagag

SEQ ID NO: 2586 - DNA, 120 bp, Homo sapiens
acccggtagacaaccctccccctactccgcagccgctgctgaaaacatagctgctcctaacttgtttctatattggaaactatatcgggttttggaaaaaaagtgttcagctgccacaaa

SEQ ID NO: 2587 - DNA, 120 bp, Homo sapiens
gctcgcccactccactggggttacatcagacatgcccaacaatcaagctctatctggaataccaaactctatcttcatccttctatcctcaaaactgggcattgtgcctagcccagagtg

SEQ ID NO: 2588 - DNA, 120 bp, Homo sapiens
aaacgaataagttatctttgctaggatacagcagtatggcttttttgaattttgtttctgaaaatcatctgctgaaaattgctttctggaaaggagaaaatttgttcttggcaatgttct

SEQ ID NO: 2589 - DNA, 120 bp, Homo sapiens
aaccggacctttcctaaagcttgctgagccctgagactacatgaagttaaatgaaaacagcagccccgcatgtgcaagtgctgttttgtgaaacatgtttaacacccagaactgtaacca

SEQ ID NO: 2590 - DNA, 120 bp, Homo sapiens
taccgttttaagctctatgaatacagcagtgaacaaaactgacatatctccctgcttactttctaatagacacaggtaaacatttattgtgttgatagtatgttagactacacaggggga

SEQ ID NO: 2591 - DNA, 120 bp, Homo sapiens
aagcggtacagacatctgaggaagagtgctccaagtcgagtccgtatacacgcctgacgtgtccgagaagactcatgatgtggcctgagcaataccgagattcactgctgtggttgtttt

SEQ ID NO: 2592 - DNA, 120 bp, Homo sapiens
aagcgtatgggttaaattactcatcaacagagtgatgatgtgtgatcttgccaccatgggtgctgttactgaaatcaaaactcccatgagttacaagctgagtgccacacatagtgactg

SEQ ID NO: 2593 - DNA, 120 bp, Homo sapiens
ctgcggcactccagcctgaacaacacagtgagattctgtcaaaaaaaagaaaagaaaaaagaatgatagcatcatatagaaagtagaggatagctggcacaattatgtctatcatggaag

SEQ ID NO: 2594 - DNA, 120 bp, Homo sapiens
ctacggacaaaactgagacaaaatttatataagtagagagtatattgaggtcaaatttgaggactgcaaccaacgaaacaccaaatcaagttgccctgaatatatacagcagttacaagt

SEQ ID NO: 2595 - DNA, 120 bp, Homo sapiens
ctgcgcatgcgtacggggggacgtgactgaagtctcacactcctatctctctgggcctgataaattgtgtagccttcacaaagctcagatcgctctgcgctatttttcttttttcaggga

SEQ ID NO: 2596 - DNA, 120 bp, Homo sapiens
gatcgaatgttttcaacttcctttcataataaggttttaaactcatttcaaataattagatctggttctaatgagctgaaaagcaagagaaattcttgcgtaaaaaaggaaaaatatttt

SEQ ID NO: 2597 - DNA, 120 bp, Homo sapiens
tcccgtcttccctccacacacacacacacacacacacacacacacacacacacacacacggacttcccttgcctccaatcccatttacatgtgtatcatttttaaatccccatctaaatt

SEQ ID NO: 2598 - DNA, 120 bp, Homo sapiens
gcccggagaatttgctgaggacaaaggcaatcaagatgccatgtgcaaataacatttttttaaaaaatcaagcttgtgatagcaatacatatttaagagataagtggaaagatgtttgaa

SEQ ID NO: 2599 - DNA, 120 bp, Homo sapiens
cttcgatcatacctagaatacaatcatttctttcttaatcttaggaaatatcaggaaacagaaaagagactacttgtagatatcttacctagttccccatgttataaaagtatcttgtgg

SEQ ID NO: 2600 - DNA, 120 bp, Homo sapiens
aaacgcgtaattaaccacaactgcacatggacaggaaaaagctggaaaagcaagactgttcattcttagttttctccttttacttactaaagctataatcaactaaagtgtgtttttcat

SEQ ID NO: 2601 - DNA, 120 bp, Homo sapiens
aaacgcatagtttccactcggttactgtttaattgtagtgaaagtttttgtttggcaacaaaggcgctatttacatattatttcttctaagtgaaactatggtctgggatgggttgtaga

SEQ ID NO: 2602 - DNA, 120 bp, Homo sapiens
ccacgcttcatctccctccttagaaactctgaaacgaggctttattcctaccagaagttcagattgcattatggtcatctcaattccaaaatgttagatggcaagaatatctgcccatcc

SEQ ID NO: 2603 - DNA, 120 bp, Homo sapiens
aatcgagcctccagtcacatgctcctgtaagttccctgaagattttcttgtgtcttctgtagtttgcaacagcccaggaattagtctgttggctgcaccttctgactgatcccaccaatt

SEQ ID NO: 2604 - DNA, 120 bp, Homo sapiens
taccggtatttgccttgtcttgaccatgtggtgatgaaattcctgctctcttctgtgctgtgctgactggaccaactgaggacactcatttttacccttctttttcaacctattcctgaa

SEQ ID NO: 2605 - DNA, 120 bp, Homo sapiens
gggcgttggtgagcttaaagcagaaaatagccttcctccttcccatttttgctatgtattggccagaaatcaggtatcaattctacactttgatctttccacatgcttcagttgtgagga

SEQ ID NO: 2606 - DNA, 120 bp, Homo sapiens
actcgcatttcccattgtgctatgctttcttcccttgcaggtaagtcacgcctgctctcagggtcacagtgtcctcctagtagatccatctaatgactttaatcctcagtctccttctgc

SEQ ID NO: 2607 - DNA, 120 bp, Homo sapiens
tatcgctctttcttgtttttctcctctaaattctcgtccaactccccgacctcctgtctttctccaaattcagagaatccatctggtcagtccttggccttttctctgtttgttttcctt

SEQ ID NO: 2608 - DNA, 120 bp, Homo sapiens
atacgtgtctcctaagctctagtctaacaattccaattgcctactacaagttccagatttttccaacccttctcagctgtctctaattattaggtacctcactagaggcagcagagccca

SEQ ID NO: 2609 - DNA, 120 bp, Homo sapiens
aaacggacagagccctaagttggccacatatggtcacaacataacatgccagggaaagatgaaaaaactgcaaaatcatgcccagaagggtgttcagctggtccttttgcccaggtccgt

SEQ ID NO: 2610 - DNA, 120 bp, Homo sapiens
cctcgcggcttgattttgatctttcacttttttcatcaggctctgaaaatcttccctgatgagttaatcttcacctaccacatgagtctccctgtctcatgctatgaggatcactttcgg

SEQ ID NO: 2611 - DNA, 120 bp, Homo sapiens
catcgtgggacctgcctaactggacttgagtttgcctcaccctgccctagatatccctctagggagactctatccttgatgttcagaacttttataaacctaccactgttgattattact

SEQ ID NO: 2612 - DNA, 120 bp, Homo sapiens
aggcgaaggagaggccagagcctcagggtcttatcagtacagggggaggactttggctttcctctgagagagaaggaaaatcacaagccagggaaccttgagccaatgagtgtcatgatc

SEQ ID NO: 2613 - DNA, 120 bp, Homo sapiens
gttcggactctggatatagtttgaaagcaaagctggcagaatttgctggcagattagataggaagtgtaagaggaaaagagaagacaagatgactccagggatttagacctgagcaatga

SEQ ID NO: 2614 - DNA, 120 bp, Homo sapiens
tttcgagaattgacttctaatgcacggattttatatgcctgaggacattttatagacctaatcaggtatgcagaatccaggttgccagctctagtccagaactccagaactccaggtctc

SEQ ID NO: 2615 - DNA, 120 bp, Homo sapiens
aaacgcattttaacatctggtttgacatctgcaaagaatgattccttttaaaatacaactaacagggttaaaacttatttggagacttaaggaacataaaatcatagcttcaaagtcgat

SEQ ID NO: 2616 - DNA, 120 bp, Homo sapiens
ccacgtggaaaattttcatcatagactggggtctaatacttattcagtaaggagtgtttttccatggctgaaaaatacaaatttggtcctagaggtcgtagatgtgagttctaaaatatt

SEQ ID NO: 2617 - DNA, 120 bp, Homo sapiens
aaacggattatacttgctgaaagcattactggtttttatttaagttgctgattttttaataaagggtctgaccttgaggacagctgccagttggcagaaagcacagaggagatgagaaga

SEQ ID NO: 2618 - DNA, 120 bp, Homo sapiens
acccgagtctgacagttgtgtcccatggactctttcatgtgtctgtaagacattcagggtcttggatttgaacattccttcataaaggctcaccctcagcaaactctctgctcttccagt

SEQ ID NO: 2619 - DNA, 120 bp, Homo sapiens
ctgcgattaccttactctgtgatgaaacaggtcattttaatcctttgtagtaggtggaacattatgtacttaaccaaccaaaaggaaaaaacttcttaactcaagggagatattttcagc

SEQ ID NO: 2620 - DNA, 120 bp, Homo sapiens
acacgaaactaggtttccaacagccaactgaagagatgtgatgtctaattaggaaattgtgttttacctgacctttaagtttttgcctcaattatcttttctcattggtgagttatgcat

SEQ ID NO: 2621 - DNA, 120 bp, Homo sapiens
tagcgtgggtgattgctatgattagtgaatccaagaattctatagctgaatgagatcacaaacattagctagttcaactttcatattttacagatgaagaaactaagtcgcaaaggatga

SEQ ID NO: 2622 - DNA, 120 bp, Homo sapiens
cctcggtcattggtcccgttggtgacagttaggtctggaattcagttttcccatctcactgtcttgagtagaaggaaaaggcccagtgttctatgtcatttggatgttggtgtcttccct

SEQ ID NO: 2623 - DNA, 120 bp, Homo sapiens
ttccgtttgttttatgttgaaaattccccatgatgatacctctacctactcagctactcaagccaaaaaccaaaagccatcaccccatccactagatcaccaactcttaaccactctgct

SEQ ID NO: 2624 - DNA, 120 bp, Homo sapiens
caacgggaggtaggttgaaaagtcatgcggcactttctgaggatcttctcagaaagaccattggcaggcacagtttgccctcatttgctttgtccttgcttaagcttgctgcatggactg

SEQ ID NO: 2625 - DNA, 120 bp, Homo sapiens
aaccgtcccccacttcctggcagcagcagtgtggtgaggagagtgtttcagtgtgcgtgggagaaggagatcacagcaattgtgaggcactgaactcactgctgccttattataacagaa

SEQ ID NO: 2626 - DNA, 120 bp, Homo sapiens
cagcgaggtgtctaagggggtgctagcatcaacccttccttagccccaggctgcatagcttgtggcttaaaaacagaccccttgcctcagcttgaggagaggagagggaagagtatggag

SEQ ID NO: 2627 - DNA, 120 bp, Homo sapiens
gaacgtcagccacagcaggatagagctgtgataggcagctcagcccacaacaggatagagcaccagtaagagttgtgaggccccctttccaggacttagctccaggaaagggaggaccct

SEQ ID NO: 2628 - DNA, 120 bp, Homo sapiens
ggacgtcaaccgataaatacaggggggcacaatccagcctgtaatagtggccaaacaaaatgaggctcagctaaaagggagaaatttaggtagcagaacaagcttcttgctcacgagatg

SEQ ID NO: 2629 - DNA, 120 bp, Homo sapiens
caacgttcagaagagagccatatagcagaaccatatcctttttttaattttttaatttttttttttgagacatggtctcactctttactcttgtcgcccaggttgcagtagagtggcatg

SEQ ID NO: 2630 - DNA, 120 bp, Homo sapiens
caccgatgtctcctgctctcactggctgttgcatgtagtgtccttaagcttcttctgttatgctcagccccggagatctggcacacagagccatagtaacaatgcgttcagccaggtttc

SEQ ID NO: 2631 - DNA, 120 bp, Homo sapiens
ggacgctgccctaaagtgcctgccgctgactcagggaggaggcttggaacacacagcgggaggtgggaatggcttctgcctcacccagaggggctgtcaccttaaaaggaagtcactcca

SEQ ID NO: 2632 - DNA, 120 bp, Homo sapiens
caacgatacgtgtgtgtgcctgggggtttttgtcttcctatatatatgctgcatttcctgatttctcatttcatctggctaatatgtatcaggcactgtgctcagtgctaggggatctta

SEQ ID NO: 2633 - DNA, 120 bp, Homo sapiens
taacgttgagtgctcacagtaactccgtaattcccattttgtagttgaaaaaactgagttcacaccttaaggaagtagtagagcggagtttccaactcagctttctctgcccccaaacct

SEQ ID NO: 2634 - DNA, 120 bp, Homo sapiens
ggacgtgaatcatccctttgtccagtgtatccctgctgtagacactgcccacccgttagtcattagtcgctgtctcggttatcaggtccaccgtcacagtaaagcagtgcttgtgttcaa

SEQ ID NO: 2635 - DNA, 120 bp, Homo sapiens
tgacgctggtaatttagatatgccaaagacaaagtataaactgcactttctctacactggtgtaaaatttctcttctagagattgtagtaaatatccatatagcaattaacatttcctat

SEQ ID NO: 2636 - DNA, 120 bp, Homo sapiens
gttcggtgatgttatattaatatgactttgatgcactacataaatacagatgcatatacagtagtccatatacttcaagtgaaaaagtgaaagttctccaatgctgaggttgctgtgatc

SEQ ID NO: 2637 - DNA, 120 bp, Homo sapiens
tagcgcctttgtcctggattttcatgaggattttatgatgaagcacttatcacagcacctggtgcactgttaccaaaggggaatgtccacatcacactgacattttaaatcagtggatct

SEQ ID NO: 2638 - DNA, 120 bp, Homo sapiens
gcccgatgtaggctctgcagtagatgatcattgtctagtccatcatttattgattcctttctccatgataacagaatccttgtttttagtaggccacattgtcacctggcataaaagatg

SEQ ID NO: 2639 - DNA, 120 bp, Homo sapiens
gaccgcttgcaggtgggagataaagttccagcttatttaatcacagggtttttactttgagttgtctcattattattgttgttttgttttgttcatgcagtcaactaagccctttagatc

SEQ ID NO: 2640 - DNA, 120 bp, Homo sapiens
atacggacctacagaaccaagtagagggacatagaaaccaagtggaggaacaaaggcacacagttttgggaggatcacaagaatcaatacatggctatgaatcatcattaatatattgca

SEQ ID NO: 2641 - DNA, 120 bp, Homo sapiens
gcacgagcaatgatttatgttctaagaaactgtcggttgtcgtctttcgtaatagcaaatgcaaatccaatgaaatcagcactaaaaatccagtcatgctggctgacctggaattgtctg

SEQ ID NO: 2642 - DNA, 120 bp, Homo sapiens
cagcgccagttacatttcaaagctagaaagaaccttcacattcatctaccacagcccctgggttcaggtagacaccagataaaaaatagtcaggactggtaattatatacaaagcttaag

SEQ ID NO: 2643 - DNA, 120 bp, Homo sapiens
tcccgaggtgatcccattaagtcttctggttctatcttctttctgctggtgactcctaaattcctgtctttcaggaattccagcattccagactcaaatatcccactgcccattctcgtc

SEQ ID NO: 2644 - DNA, 120 bp, Homo sapiens
tgacggcagtttataaagaggttatttacagggtgtagagaaaccacagaggatagtgcagagccccagtgctaacaaaggcggttattgtcccaccaatcttggaagggaaagaagtga

SEQ ID NO: 2645 - DNA, 120 bp, Homo sapiens
agcggcgggccatctggagcggccactgccattacgccggctgcagcagagagccgtgggaagtggcagcaggagcggctgcaggagcagcagtggcagaggtcggccccctgtgcccca

SEQ ID NO: 2646 - DNA, 120 bp, Homo sapiens
ccccgaggcagccgactgcaccactgcaccacccctgcccttgtgcacggaggggcaggacccgtccccaagcccagagcctccccaattctggagtccgggccctggaacgctgctctg

SEQ ID NO: 2647 - DNA, 120 bp, Homo sapiens
gcccgctgctgcggggaaggcatggggaggaggtggagctaggcctggggcagtgaagcactccatggagccagtgggagccagggacaagcaggagcacccccagagcttgcctccctg

SEQ ID NO: 2648 - DNA, 120 bp, Homo sapiens
gcccggcctagccgcctgctggagggggagcaacgctgtcaggcacagaggggtgggcaaagagaggcccagtgaggacctggttcccgcaccctaggctgcgaggaggcgcgttgcctg

SEQ ID NO: 2649 - DNA, 120 bp, Homo sapiens
tgccggggctgcctgcacactccacaagaagcaggctcgtgcaggactcagacatctctacagtctgcaccctcggggcctgggaaggcccccaatgcctctgcagggttgcgggtgtct

SEQ ID NO: 2650 - DNA, 120 bp, Homo sapiens
ggacgagcctgggcactgcaaaaacctggccgggtgtgcacacactcagggcagcactgagacgcgagccccatccggactttgggtgccgacgagcacggggttaggggaagccaagga

SEQ ID NO: 2651 - DNA, 120 bp, Homo sapiens
gggcggctcattgctggcctgcaggtgccccttggcacaggcagcctgggcactatgggtgacggcaggacgcagacaggctcctggatggaagggcatgggtccccaccttcaggccag

SEQ ID NO: 2652 - DNA, 120 bp, Homo sapiens
gtgcgggagagctagtatgcttatgtcatgaagaccaggaaattagctgctttctggaataagtgaattttttccttcccatctttgccatatctctgaaataaatatttaaagacagta

SEQ ID NO: 2653 - DNA, 120 bp, Homo sapiens
catcgcctgtctgttctctatttgtcttccacctgcaggaccttgggaggatccctggaagcttcctgaggagcaatagcctcccagggtcaagcagacattcccggagtggcatcttcc

SEQ ID NO: 2654 - DNA, 120 bp, Homo sapiens
ttccgattacttctgagatccacagaacccaccagaatggccagccttgtaccttatgatcaatactctaagattttaaatttggtggtcgtgatgatgatcctttctgatttcatcttc

SEQ ID NO: 2655 - DNA, 120 bp, Homo sapiens
caccgcgcccggccaaaaggcagaaagttctaagaaggagaggtcaacattggcaaatgccacaaagggcacaagatgggaattaaatttttccattagatttggcaattaagcaatggc

SEQ ID NO: 2656 - DNA, 120 bp, Homo sapiens
tctcgggatcagtgtgtcacctaacttcctccttaatttcctgccgggatttgtgggaccattatccatcttactcttaatattgtctttcctatgccacctcaccttgagtaattcatc

SEQ ID NO: 2657 - DNA, 120 bp, Homo sapiens
ccccgcctgaaacccatcctccatgttgccggatgagctcttggacacagaaatctcactgtgtcactgacctgctaaaagcccaaccctcagtgcccacaggattgagttcagactgtt

SEQ ID NO: 2658 - DNA, 120 bp, Homo sapiens
ttacgatacacaggacctcggacatctggctctggtctcacaccctgggctggtcagatggctgtcctgccttactgcttgtctgccctcccatcccttgactgttctcaggcactgggc

SEQ ID NO: 2659 - DNA, 120 bp, Homo sapiens
tgacggtattaaaaccagcctggctgtccctttctcttgaaggaggatctcactcccttaggaggtgatcgtgccttccttctatatcatatgcatacatagttcttattcctttgctgt

SEQ ID NO: 2660 - DNA, 120 bp, Homo sapiens
tcacgagtttcaagtgactaagaggtctttaagcttgtagccctcgatgcagttcaaggaatgcaagttggttctttgaagcattataactgattatgtccttgctgctggatgttctag

SEQ ID NO: 2661 - DNA, 120 bp, Homo sapiens
tttcgtggggccctggggagcccctcagtagcccttgatctccaagttcactccttacctcttgaattgtaaggagccttggttatgcacagcctttctgttgtggaacaattttttggc

SEQ ID NO: 2662 - DNA, 120 bp, Homo sapiens
ggtcggtcattaatgcttgtacttcatcctttgccctccaggagtcttcctagttttcatttcatatggaaaaaaaagaaaaaaaaagaagaagaaaagtattttttcaccactctcaac

SEQ ID NO: 2663 - DNA, 120 bp, Homo sapiens
tagcgcttaaaaaatgtactgtgcttttgcattggcagatgcaatggcattagtaatgtttgtaaaacacttaaaaatgtattgtagatacagcagacacattcatccacagactaacaa

SEQ ID NO: 2664 - DNA, 120 bp, Homo sapiens
tcacgagagtgagaagtccagattggtttagtattgctttccctgctagactttgggtctcctggaaagcaggatccatatttagttatccactgactctttaatggcaggcacttgtct

SEQ ID NO: 2665 - DNA, 120 bp, Homo sapiens
agtcgttgagtgaatttataccctaaaacaggaccatgccaaactgccggtagacactaagtgtgaagaccaaacgaataatttgaaatataactgacttaatcattcatattacatgga

SEQ ID NO: 2666 - DNA, 120 bp, Homo sapiens
gctcggagactcctgcctgctgaggtgagtggtgctgaggtgtactccttacatgcattatatcctagaagagtagcactttcaatgacttttaaaaaaacctttcaaagttttgggaga

SEQ ID NO: 2667 - DNA, 120 bp, Homo sapiens
ggtcgacactaaaagcatcataaaatatgccttaggtttcaagtttggagtctgaagcaaaatatttcaaagctgtgtgtcaccactcttgggctttctgagcactattctactaatgct

SEQ ID NO: 2668 - DNA, 120 bp, Homo sapiens
ccacgtgccatggcccaggaatggctaaccaatgcctaatccattctgaggccttgggaccagaaggcttccttactgtccaacatttgttcctctttcatttaggagagttagtcaggc

SEQ ID NO: 2669 - DNA, 120 bp, Homo sapiens
agtcgaaattaaattagaaattagaaattagaagggaaggtagaaccaatggctttttctccgtaggcaatgacttgagagcagctgaagtttttccttcttgtcccctgggggaccatc

SEQ ID NO: 2670 - DNA, 120 bp, Homo sapiens
gcacgaagtagaaggaggcattgcccagggtcatgcaggcccagtgccagcacatgagaacggaactcccatatatttgtgccccagctgcctaacctgcccctcctgattaccccggcc

SEQ ID NO: 2671 - DNA, 120 bp, Homo sapiens
gctcggggaaggcctttctaaagaacggtatttgaaaagagacttacaaaacatggagagaaaaggtgacggaattggctttccagatatctggggacccagtcttgcaggcagaagaag

SEQ ID NO: 2672 - DNA, 120 bp, Homo sapiens
gaccgtgagtaggaattgataggattagagatccagccctttcacctgacattcttcctaagggccaactgaaaaaatttcatgctgagggagaggatgactaattgtcgtaaataatca

SEQ ID NO: 2673 - DNA, 120 bp, Homo sapiens
agtcgtaaacatcacgagcggtgatgaacttgcctgtatgatcgctgctgtatctccaacgcctggcacatatagaagctcaatatatatttgagtgaatgtttgaagtttatctttgct

SEQ ID NO: 2674 - DNA, 120 bp, Homo sapiens
tctcgtgcaaacggtctaacgtggtggggggccgcggggaggaagtgcaattgaaactcaacctataggacattatgcatacatatcattaacagacaaacaacaaacaaaggatgcctt

SEQ ID NO: 2675 - DNA, 120 bp, Homo sapiens
ttccggtgagggttatacatttgcacagcaacctcagtgactcttaagctcgttttacagcttattattgaaagccctacggctttcttggaacagctagaagtctgagtgtttccgagg

SEQ ID NO: 2676 - DNA, 120 bp, Homo sapiens
gcccgtaatctgacacacggaggtacgatggggtggcgcggctccgtgctcatgccagtagtgagacatatggaggaagctgttttcattgcatttacagattgcttcttttgtcaaatt

SEQ ID NO: 2677 - DNA, 120 bp, Homo sapiens
ccacgctgtaaattcctgcatttctttatgctccagggagtatcctgatgtcaagatgtagctcaaggatactttggcttctgatgcaaaggtggctggctgagtggtaccattggggaa

SEQ ID NO: 2678 - DNA, 120 bp, Homo sapiens
acccgccctttgagccttatgaggtaatagcctttagtaggtgccttcactctttggtagatcttcattttgacacacatttaagggcttctcattggattctgttccctcacttaagaa

SEQ ID NO: 2679 - DNA, 120 bp, Homo sapiens
aaacgaaaagggatggccacgatgggatactgtaagctctccagtttgatttttgagcatatttaaagttgatgctctctgagctaatgttgctagagccacggtccctaattgtgaatt

SEQ ID NO: 2680 - DNA, 120 bp, Homo sapiens
tgacgggacgttggaaagcagacagtttgttcacaaatgagcattctcagattctgctgaagaagttctgttggacctgcttctaatctttgcagaaatgagcaactctcccctggctgg

SEQ ID NO: 2681 - DNA, 120 bp, Homo sapiens
tgccgtggtactgagagaggtggtgagaaacctggaggaagcgcttttaagtggcattctactcagttgtttttaaagcgttagattcagcattcactgtaaggagcaattaaaaacccc

SEQ ID NO: 2682 - DNA, 120 bp, Homo sapiens
tgacgagcgagagaattttagctttattactaagtgggggaaaaaacacttccttggctggcttccttctaaagtatcaggtgtggcatgcatatcaggccattagcctgatctcacagg

SEQ ID NO: 2683 - DNA, 120 bp, Homo sapiens
actcggactccctaaggcaaatgtatgatcataaatgagaagggatttcttcatgaccgcatacagaattctgtgtacagagtttgaatcttttagtttatgagttacatgttcaataag

SEQ ID NO: 2684 - DNA, 120 bp, Homo sapiens
cttcggtgtgcattaagggcttgagaccaactaggaatttttaaatgcacatagggtgaccgtaactattgtgttatagaaccctcaagaaagaattcttcttcagtcaccaaatcgtgt

SEQ ID NO: 2685 - DNA, 120 bp, Homo sapiens
gtgcgtcacaaatttttccacctcaagacctccctgaagctttgctccccttctctctgtcctcacacacacatcacaaaaagctcagtgtctggctaacccgtgttgccatgggaggcg

SEQ ID NO: 2686 - DNA, 120 bp, Homo sapiens
caccggagtaggctcaatccacatcagcaagattcctttccctcttctgagggcttgaaaatccccaagtgaaacaaataaactataggttgtttatttcttcccacaaatactgtttgt

SEQ ID NO: 2687 - DNA, 120 bp, Homo sapiens
agccgctcagggccaacacacgcattcttactctggtcaatctacaactcataaatgtggctgtgttctaaaacatcactggttgatctatttttaggatcttgtcctaatgtttacaca

SEQ ID NO: 2688 - DNA, 120 bp, Homo sapiens
atgcggaagccaagatgagacagagggatgcaagctgtaagctagatactgacaaaggaagccagacattcagtgtctaacagtgaaagaagtaaatgtgaactcagacctgctcaagct

SEQ ID NO: 2689 - DNA, 120 bp, Homo sapiens
caacgaagtatggcatattcatcaacctaccagtattttatacactgctagggcataaggtatgtgggagaaagggagaggggggtggaaggagtctagacaggtggttaggaacagatc

SEQ ID NO: 2690 - DNA, 120 bp, Homo sapiens
gcacggggcttttcttaggaacaccaggaaccagtcattagcacagtgaattccaattctattcccacactaggcgggtgagatcccaatctattctctgtccttgtcagaactggctcc

SEQ ID NO: 2691 - DNA, 120 bp, Homo sapiens
ctccggaactgggaattgttggcacacagttacccaagcctagaactgctgacataggccaccatttatagcttggcctccaggtgaaaccacactcaaacttcccacgtagaaccccaa

SEQ ID NO: 2692 - DNA, 120 bp, Homo sapiens
tgccgaagtttagatgagtgttttgggaaatatgggattaattatgttcttttgaaatataactatagattcttctaggtctagaagagagatttttaaaaagagatgaagaaggagcat

SEQ ID NO: 2693 - DNA, 120 bp, Homo sapiens
aggcgggcatagagagcatgaggtagccctaacagtgatagatgctgctgtccctaggaagcagacgtcacctcacagcgaccactaccgtcataaacagcaagatcctcaaggttaggg

SEQ ID NO: 2694 - DNA, 120 bp, Homo sapiens
tctcgttgtccactggatttcaggctgtactctatttggaagattgccagaccatctcatattttctgcctccatttaaatttaaatagtacttagtgaccactgggtacatgcttctat

SEQ ID NO: 2695 - DNA, 120 bp, Homo sapiens
taacgggcatatcacagcctacaaatcatagaggagacatgaacatttccaaacaggccttttatctgctccaagggtaagcaaacacagcaaaaggcttttgagccatgggtaatcatg

SEQ ID NO: 2696 - DNA, 120 bp, Homo sapiens
gtgcggtatatttaaggtgtagagataaggaagcagataggatcccatcttcaatagagcttatattctaataagtgataaaataaaaactaaaaatgtacacagaaatgcattcattta

SEQ ID NO: 2697 - DNA, 120 bp, Homo sapiens
taacgggcatagactatttttagctaaggaaaacaatttttcttgtaagaattgctatttccgtgctcagggcagcacatgcatcctttctggctgcttccacccattggcaaggggcca

SEQ ID NO: 2698 - DNA, 120 bp, Homo sapiens
ggacgcctggccgctcattggatttgcagaccctccaagctaacagcggcagccttgagattaagtgcaatgcagaggctctggtgctgttcccaggccctcccttcttctctggggcca

SEQ ID NO: 2699 - DNA, 120 bp, Homo sapiens
cctcgggggtagggaatgtaatgttcatattacagtcaaccatgcaaatcaatttctaactaagtattgcagagaacacaccgtggagccattttatagaagtattccattgaatcttaa

SEQ ID NO: 2700 - DNA, 120 bp, Homo sapiens
ttacgcctccccattagagccatttctatttcacaggcacagggatctcttctgttgcttcctgggagaatcctgaaggaggcttgccatggggtgaggcttccttggaaacagaggcat

SEQ ID NO: 2701 - DNA, 120 bp, Homo sapiens
gcacggggcacaactgaccactccctgcttcctgaaattctttttttacttggcttcatgatgctactttatcttgattctgctcactgctcacttgttctttcccaatctctcctgctg

SEQ ID NO: 2702 - DNA, 120 bp, Homo sapiens
tgtcggctttacttcttcacttagttgtttagtagatgagttgaacttaacatttccaaaaccaaattcttgatttgtttcgtgagtctatacttcctccattgttttaacctatgcagt

SEQ ID NO: 2703 - DNA, 120 bp, Homo sapiens
cctcgtattctcaaattcaagcacccaacatcccctgcgcccacacctaaatcggagcccaggccactactaagttttgcaaggactcctgtagtcgcttcctgccaccattcatgcacc

SEQ ID NO: 2704 - DNA, 120 bp, Homo sapiens
ctgcgtgtctcttaactgtgctctagccacacctgtcccttgacatgtcactccttgcctggccactatcctcatcatcctctccaccctctgtcacctcccaactcctttctcatctag

SEQ ID NO: 2705 - DNA, 120 bp, Homo sapiens
tcacgcttacagaattattgagagtcatattgttagactgcattgatggcattgaaaactgttaatcacaatatccctgtatgtgtggttgataacagatttctgtatcctggctattat

SEQ ID NO: 2706 - DNA, 120 bp, Homo sapiens
gttcgggagagaatctgggattttcttgtgcttcgtagattttcacacatctgatgctcattaaggtcacttctttgtgtaacatgtaaatagctgctgtgttttctccttagcatcagc

SEQ ID NO: 2707 - DNA, 120 bp, Homo sapiens
cagcgtcagtgaaaatgggtggctcccattgtataggcaggcaaatgccaggacaaaatcaggtaagttgattcaagccacattttaaaatcagaaatgagtgtcacagtacaaacctga

SEQ ID NO: 2708 - DNA, 120 bp, Homo sapiens
aaccgaaataaagcaaagcctagttcatgtttactcgggccttatcctcaaatagttcagattttagaaggatcaagagcctagtgtttttatacaatggggtgtatttatagagtttgg

SEQ ID NO: 2709 - DNA, 120 bp, Homo sapiens
aaacgagacctaagagaacattgccagttgaatagtcttggccgctggcatcataagcacattcaagttttccttcacagctgaggtgtctctaatgtgactagttaggtaaagccagca

SEQ ID NO: 2710 - DNA, 120 bp, Homo sapiens
tcccgtctataagtggagggattggccatagctgtagggactgttccttcttagaagtaagagggaagccagcatattgggacacagatgaaattagttcagtagatttgataggagatt

SEQ ID NO: 2711 - DNA, 120 bp, Homo sapiens
ttgcggaagctttttcttgattggttttcattcaccagtgaaatggaaagcaaggcattagctaagattgaagagggaaatgggatccgaagtgaggagaaaggggtgagacactcatct

SEQ ID NO: 2712 - DNA, 120 bp, Homo sapiens
agtcgaggggcccctggggtcttgtgaaatgagtaggtaatgtagttgtggtcagaaagagggattcttaaataagttctttttgaatatttcttaaataaatgcttcttgaatttttca

SEQ ID NO: 2713 - DNA, 120 bp, Homo sapiens
aaacgtagttaacatgacaggcactcaaaaattttagtttcttccctggcgttgcaacttttagatcgtcaacctctttgagctttagttttctcatctcaaaaatgagagtactctctg

SEQ ID NO: 2714 - DNA, 120 bp, Homo sapiens
aaccgaaagcacaaggtcaaagattcatcacagcagctgctgtggttggactgcagcctgttgatggcacaggtgcagggtggtgctgccagcagcagcagtgccagtgcccgcgactgt

SEQ ID NO: 2715 - DNA, 120 bp, Homo sapiens
acacgcttcttctttcttcttttggccacagctgtgtttttaccagttctgtgaaagagggacttggccctaaagaaagtagtctccatctctcagaagcctcagccagctatgaacatt

SEQ ID NO: 2716 - DNA, 120 bp, Homo sapiens
ctccggaacaaccatttacaactttgttttatttcattcactgatttaccaaacacacaatctacaaaggttccctatatcatgttcccttttataatattctgttcttgcccttcatag

SEQ ID NO: 2717 - DNA, 120 bp, Homo sapiens
ttacgtgcttactcttttaacatctctttatcttagtagattataagcttcgcgagagcagagatcacattattttgctcatcattagagaatacagtgttggctcttagtgggcactca

SEQ ID NO: 2718 - DNA, 120 bp, Homo sapiens
tagcggtattatttatctttgtaacccggcacctcccataacacatggtgtatagtgtggctctatagatttgttggctatatcctaggcaccagggatgtaaagatgagtagagtgctt

SEQ ID NO: 2719 - DNA, 120 bp, Homo sapiens
gtccgcaagatttgttcttgttttctccattaccaaatttataactcccttctcaccaggagaactctgactcattatcattacttactaaatttgatcaaccccctgcatgtggccagt

SEQ ID NO: 2720 - DNA, 120 bp, Homo sapiens
gcacgtagatctttcttttgtattacatgtgtgtaactaagaagccagtactcagataaatggctacaatcttaatagctcgctcctggaaagccaaaactgcatttctcttttgtcagg

SEQ ID NO: 2721 - DNA, 120 bp, Homo sapiens
caccgagtattattggacggctgccaaagacagttaaaaaataaaataaaataaagctgctcaagcgtcttatgccatgaagaacaagattcttcatgttggggctcgcagttttagtta

SEQ ID NO: 2722 - DNA, 120 bp, Homo sapiens
ttccgtagcaatgtgattttgcacgcttcttggggcctggcattcttaaacttccaccagcgttaattcttactggtgagttttcgctctactgggcctgcttatgcaactcagtggccc

SEQ ID NO: 2723 - DNA, 120 bp, Homo sapiens
ctgcgtgtcctctgccaagagtcttttctgtgggcacacatttctgatgagaatctaccctgttttgactcttgactgcatcagtctctggcaattacccttgtgaaaataactcctttt

SEQ ID NO: 2724 - DNA, 120 bp, Homo sapiens
gggcgcttattgtgggcttactatgtgacagatactgtgctagaaaatttacaatatgctatccagtctaattattccttacaaccattctatgggatgactattattattcccactttc

SEQ ID NO: 2725 - DNA, 120 bp, Homo sapiens
ttgcggacactgagactgaaggagattaaggaaacctgcccaatgtcacttagcttttaagtagcagaggcaggattccaaccaaggtcagtctgagtccagagccatgttcctacctcc

SEQ ID NO: 2726 - DNA, 120 bp, Homo sapiens
acacgtcctcagcttacctgtttcttttgaacagatcaataggaggtttattgaatatatagacagcaatgtcactgaagtcaaaagtaccctaaagcaaagaaaataaatcttattgta

SEQ ID NO: 2727 - DNA, 120 bp, Homo sapiens
attcgaagcccaaatagctctctgggagcatttcggttgagatgactttaaaacaacattatgaaagaaggcttttgtagtctatgttgcactctctgttacatccgggtgagaaagtgt

SEQ ID NO: 2728 - DNA, 120 bp, Homo sapiens
gggcggagggaaaggctggcagtgaccttaggagaatgaccacctgactttgggcaacttgcttaacattcccatctctggattccttgcccataatataaagatacaagccaaatgatg

SEQ ID NO: 2729 - DNA, 120 bp, Homo sapiens
aaccgctcacttcctgatgtgggaaaatatatccctagaacaatacataactgcaattgactctatgtttgagtcatgaaaggcaattatttttccaccaagtgctgttgagaggcactt

SEQ ID NO: 2730 - DNA, 120 bp, Homo sapiens
tgccgttcgctctgcgtgggctgcttcctcctggcccttccccctcccagcacacctgttgaaggctgctctaggccccagctcagatgccaactcctcagttgccttccctggccccag

SEQ ID NO: 2731 - DNA, 120 bp, Homo sapiens
atacggggcaaccatgaggagataaaccaggagtacagaatggtcaacagcagaacagatgaactgccagaaactggccagcaaacaaaagaggggcagagctcagcagaggcaaaacaa

SEQ ID NO: 2732 - DNA, 120 bp, Homo sapiens
atccgccactaaacccagcccacaaggttcttgggaaattcaactgagacacgttcaggaaaggttttaagaccacatggaccgtatacacaaaaacaggaatgacaggccaggtgcagt

SEQ ID NO: 2733 - DNA, 120 bp, Homo sapiens
ttccgtatgaacaaactgcacgcagtaccatgtaaggtgctgacaaagaaactgatgtctattagttaaacagaggaagtggctttacactaccattctaaatgccagaagttttacagg

SEQ ID NO: 2734 - DNA, 120 bp, Homo sapiens
gatcgcagtttttgctttcaatgttttactgaggaaatccgtacaactgcctatttccgccgcacgtgaggcttcgggtgccctcgcctgcaccagtgtttatgattgacaagcgaggtc

SEQ ID NO: 2735 - DNA, 120 bp, Homo sapiens
tcccgatttcccccatcacactcctgtgttccctaccccaaaccttctactctgttcaggccagtcttccctaccgcaaaccttctactctgttcaggccagtcttaaataatagccatt

SEQ ID NO: 2736 - DNA, 120 bp, Homo sapiens
gctcgcatgattgagaaactaaaatactcagtaatgttggtaaaggacaaatgccagatagttttggacagaccaaatatatatttaatgacatcacacatgcaatacagacagttctca

SEQ ID NO: 2737 - DNA, 120 bp, Homo sapiens
ttccgaaggctagagtttctactttacattctaattcatctgacatagcgtgtttttaaaaaacttagcattgcttgctttgattttccagttgacttttgctgatggagcctctctgaa

SEQ ID NO: 2738 - DNA, 120 bp, Homo sapiens
gtgcgaacttgtggctgtggttatgaaggagcctcgtcagctatgcctttagcccctggtgaagcagtgccagtcacactttgccagtcaaacggagaggcagcagtagtaagaccagac

SEQ ID NO: 2739 - DNA, 120 bp, Homo sapiens
ccacggggaatggaggtaggtgaatagcgccaaagagaatgatggctcacaacacttctaagcatggtgcatatatcagttcatttaagccttatgatgaccctatggggtcagtactat

SEQ ID NO: 2740 - DNA, 120 bp, Homo sapiens
tggcggggtgggggctggggtggaggcttaaggcaaaagctagaattagtcatatgaattatgggcttgtttggagactgggccgctcctgttcccaatcagtgccagtaaatcctgcag

SEQ ID NO: 2741 - DNA, 120 bp, Homo sapiens
caccgaatttcagttccagaggaagacaaaattgctatgttggaagaataggataaaagaagaaatactgagaaaagcataaatgtcaacagcagcactttcatgctcgggagaagccca

SEQ ID NO: 2742 - DNA, 120 bp, Homo sapiens
agacgtttgtgaatatacacacataacacattgcaggaagaacttggtgcctttttccaaatattttattatgtacacatttcagattagaaacactttcagtgttcatagtctgagcaa

SEQ ID NO: 2743 - DNA, 120 bp, Homo sapiens
gaacgcccaggcaagaaccaagaaccaacaataccatgcaataattattctggtgtctcctatgttacagaatgtgttccaatgaactttgagaatctaatgaaagtaatgggcccagaa

SEQ ID NO: 2744 - DNA, 120 bp, Homo sapiens
ctccgagcacgctgactgtctacattcattggtcagaaggaacaatattcactcctctttggttttcacacaagtcactactttcttgactcaaccacacatcccttcctttgttatgct

SEQ ID NO: 2745 - DNA, 120 bp, Homo sapiens
atacgtctcacacttcagggctaaaatgtacttctcttcctcttctaaaatcctggatacaaatccttggtcttaagttctcttttccattccaggacactttctagccaaaagtggagg

SEQ ID NO: 2746 - DNA, 120 bp, Homo sapiens
ttgcgttgatcaggaagggttaggcaacctttgttgttgaaggacaattttgatggaaggatcctgtcccagtccctcccctcccctcttcttcctcttcctcccccttatgatttgctg

SEQ ID NO: 2747 - DNA, 120 bp, Homo sapiens
cctcgcctctgggatggagcgctccattgtggcacccttataccttgcaagtgccttcagcagtgcttccgtcagccttggagggtataatctggagctggaggtttctaagcagtcagg

SEQ ID NO: 2748 - DNA, 120 bp, Homo sapiens
tatcgggcagggaacagtacaggatgacactgtttggaagaaaaggtcatgaatttgatttgggcaggttgaagttgaggagccttgaaggtatccacgtgttttctagtaggtagtttt

SEQ ID NO: 2749 - DNA, 120 bp, Homo sapiens
aggcggtaattgtgcccataggcatgggtgacagggtctagggagagaatctttgtattttcactgccccttcctatgctttcttctttctaatttgcttctgaggagtatgtgtccttt

SEQ ID NO: 2750 - DNA, 120 bp, Homo sapiens
atgcgtctctggcttcttcttagcatttgattgttgcttctctcatttaagcatccccctctctgcttccctggcattcttttctcagttctcctttctctttacatacttctctttcta

SEQ ID NO: 2751 - DNA, 120 bp, Homo sapiens
ttacggcattaggatgttggcccctcccaggagggcctgtggagcctatagccacattcctgcaggttgcagctgcaatgcttaatcctgccagtctgactgtacaaaggacaacatcct

SEQ ID NO: 2752 - DNA, 120 bp, Homo sapiens
tcccgccccgtcttgaccaaattcctctgcttactcaccttgcgtatgactccagtggccttcccgacagcactgatagcaactggcttgtgtgtgtcttgatacacaatttgtgagggt

SEQ ID NO: 2753 - DNA, 120 bp, Homo sapiens
taacggattgagttctctttggtcagttgttcatcatgatccagtcatggcccatgcagttaagatcatatgggaggatagagctgcctctttcagaccagtgggcagagcaggttttct

SEQ ID NO: 2754 - DNA, 120 bp, Homo sapiens
aggcgtgggaagtcctttaggctcagggaagtggctgacccaagagggggaatacattctaaattcctctggcacagagccccaggggcctggtgtttctctctgttctgacaagggagg

SEQ ID NO: 2755 - DNA, 120 bp, Homo sapiens
ctacgttcctatttcctggaataggagttgctacaatggcagcagcaggcatctttagtttagtttttcagacatgaaaggtacctacacatatttgtatcttagaaaggtcactctgat

SEQ ID NO: 2756 - DNA, 120 bp, Homo sapiens
ctgcggtatcttgggaagctggactgtggttgtttgaaatacaagtgtctgtgactaaagccaaaggttttactttacaattttgatgccaatataagtaaagaatagaagaggaaaagt

SEQ ID NO: 2757 - DNA, 120 bp, Homo sapiens
aaacggtagttgattcatgcatttggcacacaggaaaaaacacaaatgcaacaggctttctattcagtctctttctttctctgcggcgcaaggaaataatgaggggcaggaacacagcaa

SEQ ID NO: 2758 - DNA, 120 bp, Homo sapiens
ttccgctctcaagaagtgctcattagatgatgttgatcaacagtatgacgaatgttcctattttcagaccttggcataaacttgatctggaaatttgataatgatgttttgcctgtaatg

SEQ ID NO: 2759 - DNA, 120 bp, Homo sapiens
ctgcgggtacggggtatcccagtttacagacctgggtgtcttgccctttgagtcttgccagtactgaatggccacaggcttttgagcaactcctaattggagtaaaaaacctttattcac

SEQ ID NO: 2760 - DNA, 120 bp, Homo sapiens
caacgtttccctgacacccttcctagaaaaaagcaagttaagtaaaaagggacccctttcaaataagttctccatcaacaaagaaaaagaaacaaaccaaaagggagtttgagataccct

SEQ ID NO: 2761 - DNA, 120 bp, Homo sapiens
tggcgcctttaaaagagcagagatttagatttctatactcatctcttttgtcattgcacagttctaaacacacaatagttatttaataaatacaatggaattgaactaaaatgaacagat

SEQ ID NO: 2762 - DNA, 120 bp, Homo sapiens
tgacgtagaaaaattgaaaaggaagctttggaactagagcaaagaaaaagaaagttcagaggaaacataatgtaagtctcatgaaacctttcatatgcttaaaccttgtactagagaaag

SEQ ID NO: 2763 - DNA, 120 bp, Homo sapiens
ccccgtgcctgccagatttctagctagtgggcagtcatagtggctgtgtttctcttttcccttttctcaattcccttacctccttccctttttggtgatggaaaagaccagactccaagt

SEQ ID NO: 2764 - DNA, 120 bp, Homo sapiens
aagcgagagtgaacacaagaaaataaggaaacttatgaggcccaagggcaacaaaacaatctggctggggtaaggaaagctgcaaggcatctgaagatcatcccctaagcaataggcttg

SEQ ID NO: 2765 - DNA, 120 bp, Homo sapiens
ccacgcctttgactttcactcaacacaggcccttcctgtccaagaggggaggctttgtcactgagttaatggacagtggcttccgaccctacctccacacctgcttttccatgttttctc

SEQ ID NO: 2766 - DNA, 120 bp, Homo sapiens
taccgccaccacttggtggctccactcaacagatcttcactcaacagttcagcactcaacagatcttcaagagcagggtcagcccttgtagggccttgaaactgagggcctccttaaact

SEQ ID NO: 2767 - DNA, 120 bp, Homo sapiens
actcgtgctgggtgatctccctagtcctggccctgctcagcagtctgccgctgaagtgctccctgggagcagaccaccagcccaatcctccagcctctccaggttggattgagtgtctgg

SEQ ID NO: 2768 - DNA, 120 bp, Homo sapiens
tggcgaggcccaacctgttgcttctggaggcttatgtttcaggcagtgagacgagttcgttctcagaagattctgcgacttatcttctcccgttctgtggtagtcttttttgtcaggagc

SEQ ID NO: 2769 - DNA, 120 bp, Homo sapiens
aagcgacaaactgttcaacttcctaaaatatcttattccagctctgttcatgacctacttttgtgaatttggcaggcgctttctgcttcctttttctgagccagttctctgtgctgtgca

SEQ ID NO: 2770 - DNA, 120 bp, Homo sapiens
tcacgcagttctccggaaaatctggttttcttttccaaccagttgacaactgtatggtagtgcatttaaacaatattcaacatgtgtttagttttggataaaggctagtgtgttggtatg

SEQ ID NO: 2771 - DNA, 120 bp, Homo sapiens
cagcgtggggcctcctcaggtttggcaggacctgatcttcactatacacctgcatgcacacatactcacacccacgttctctcacacaaatgcaaacagctaagccttccttctagaatc

SEQ ID NO: 2772 - DNA, 120 bp, Homo sapiens
aaacgctttaagaaaatacaacccaagtaagattacttacaacataaatgagtaaaccatgccctctcaaacagaaaaatcaacttaaaattactgtttcctgaaattacctaacaaagc

SEQ ID NO: 2773 - DNA, 120 bp, Homo sapiens
attcggctggcttcactgcgactactttctggagtctgagaccccagctctgtcttagcatatgagctcagctggcacaggagtgtttcacccacaggccctgggttggtcttcttcatt

SEQ ID NO: 2774 - DNA, 120 bp, Homo sapiens
ctacggacatgttcagcacagaaggacaccctgaagagacaaaacattaatattttataagttccttcttgaaagcgttcaataatgttcacagtccctaatctttaaatcatttttagg

SEQ ID NO: 2775 - DNA, 120 bp, Homo sapiens
tcacggtggagggaaggggaagggggacgagactgaaataactctgtacacacacatccctatctgactatgagaaaaaatggatgccaggggaccggaggagactccaagctgggcctg

SEQ ID NO: 2776 - DNA, 120 bp, Homo sapiens
ggtcggtaggggacaaagtctccttcctgtgattgtgagtaggggtggatctgggaaggggctgcccaagtagacgaggaaggaggccacaaaccccacctgtctagaaacccacatacc

SEQ ID NO: 2777 - DNA, 120 bp, Homo sapiens
tttcgccactgccccaagaatgtgcctatcgagatccactacatgaagctgtagccagacactcctggggagacgggcacagtcctggcctccctgggactgcacctccccagtcaggca

SEQ ID NO: 2778 - DNA, 120 bp, Homo sapiens
agtcgagagcagggaacagatgcccacccagcccatgcctggccagagaggaagggggaaaggagacaccacctctaagctccttccccaggagggcagtccagccataaagccctggtt

SEQ ID NO: 2779 - DNA, 120 bp, Homo sapiens
ccacgacatgcacttgcatgcgcacacacctgctcataggagatgggcgcctgcttctggtgggacagctccatcagagtactcaggtctgttcgcaggtctgtcttgcagccaatgagc

SEQ ID NO: 2780 - DNA, 120 bp, Homo sapiens
aaacgcgggtgctgggacaataatctaggatttctgtcctccactgaggggtggagcaggaagaagggtaggagaaggaggaaggaaggagagttagtggcagacagataccaggagaag

SEQ ID NO: 2781 - DNA, 120 bp, Homo sapiens
caacgtcacacacatcacctcactcatcaccagcccagtcctccctctgagtcacagcatcaccgttgcactaattacatcattttcctgcccatgaggcctttggggcccccagagtgc

SEQ ID NO: 2782 - DNA, 120 bp, Homo sapiens
taccgtatcacctaaaggttctctgactctccgtcctctgcttcctgagtcttcaataccaccctcccttgcggggcctctggcaaggcagcatgggataacaaaaagggcgggaggcag

SEQ ID NO: 2783 - DNA, 120 bp, Homo sapiens
tcccgattccttcttggtcctcatgctgagttagagattagagagttgatctagtcttaccttcttgagtgcgctgtccactgtctctggacggctgatgtcaaaacatagtaatactgc

SEQ ID NO: 2784 - DNA, 120 bp, Homo sapiens
atccgagtcgctgtagcagagtggacggacattatcgtagtagggagatcctggtgtaggccagaaagagctgatggtgagccatggtgttttccttccccaataggcctaagccctaaa

SEQ ID NO: 2785 - DNA, 120 bp, Homo sapiens
ctgcggctggaagcttgggacctgactgtctgccagaaggtcatgaaagaatatcatcccccttagtccagaaaaagggaaagaagacaaaataaagtgggtggagtataatttggccct

SEQ ID NO: 2786 - DNA, 120 bp, Homo sapiens
gagcggaagcactgcagcactggggaagggggaggggaggaggcctccattttggctccaagcaatccccctcccctaagactagcaagtaaataatgggaacagggtcaaccctgagcc

SEQ ID NO: 2787 - DNA, 120 bp, Homo sapiens
tttcggaaattgggggtgggggtgtgacacagggaacagagactacacttgctgattttccatgatctggtttgggatttgagggctgcattctgactgtcaaaggagggaggaggtggg

SEQ ID NO: 2788 - DNA, 120 bp, Homo sapiens
gggcgtttgggcggtggtagtgaaaagagatgagctgcagtaagattctgggaagattggaaggtgggagggtacagcagatgaaaaaccaaaaattatacatcatgccatcaagctgca

SEQ ID NO: 2789 - DNA, 120 bp, Homo sapiens
gaacgctgcctcccaagccctgaaactgcaacagggaaaagcataccagattggggaatttttgtttggggaggaaaggctcattgtctgtctaaccattccctagccccaatcttttca

SEQ ID NO: 2790 - DNA, 120 bp, Homo sapiens
ttacggtccctttttaaactcagcctgaatatgcatttttggggaggggtggattttattttctttctcttattcccggcttttactccttaattatgactctgagccagtctattgaaa

SEQ ID NO: 2791 - DNA, 120 bp, Homo sapiens
tgccggccactattcacaactgactatgccctatattaagccatctcccccaacttccaaaacatcgatgatgcattgcttcatccccgagctgcagcggtgtgacgagtggggctgagc

SEQ ID NO: 2792 - DNA, 120 bp, Homo sapiens
ctgcggcaggaggacagcagtggcccaagatggaatgcaggagacaaaactgagtctgagcaacctttccccaaagcagacttgtctctccgccccaaccacgctgcctccagcagcact

SEQ ID NO: 2793 - DNA, 120 bp, Homo sapiens
gtgcgcgcgcgcgcgtgtgtgtgcatgtgtgtacgcgtgcatgttgggtggtagggaatggaaatggagaagtcctgttttactgcccacccccaggactattcatgggtcccttcacct

SEQ ID NO: 2794 - DNA, 120 bp, Homo sapiens
tttcgaacacggtgggcacataggtctgtgaaaagagaggaaacattcaccccatgcacccctaccctcagatcccctggttagtgctggctacacacgcactcaccagagagacagtaa

SEQ ID NO: 2795 - DNA, 120 bp, Homo sapiens
aggcgatcagggacacacacacacacagattcctcccatccccagatttgtgtttcccaatttgagagagccacaggccaaagccaatcctagctcatctcctctcaaacccctcccggc

SEQ ID NO: 2796 - DNA, 120 bp, Homo sapiens
gagcggataggcagggattacgtcaagaagaaaccccagactttcaaatgcctccagtgccctcacctgagagcagactccagggacgcaggaaggtggaggggatctgatgggtcctct

SEQ ID NO: 2797 - DNA, 120 bp, Homo sapiens
ccccgctttctgggccttggtcctgatccccatggctgaattcagtgctcatccacctactcccataccaccaaatgctcattcccaatgtggaacttaacacttctgcatcataaccac

SEQ ID NO: 2798 - DNA, 120 bp, Homo sapiens
caccggctttcttgttggtgtccttgaggggagcagctgtctgcctattctctgttgcatcccagggcctacatatggcacttaccactctagcctcatttctcaccagtcctgctcctg

SEQ ID NO: 2799 - DNA, 120 bp, Homo sapiens
ccacgagggcctgctgtcagcttctcaggtctgctgagagggaatctcagggcctttccaggtgcttccctcctgcccaaagtgctcctcctcaggtcctcgcctggccagctcctactt

SEQ ID NO: 2800 - DNA, 120 bp, Homo sapiens
gcccgtggatgagctgccaggggttcctgatgctcccaaaatcacatgaaaatgtttgtaggcttatagtgcattctttttgggagataatctgtatttttttatatcatactctcaaag

SEQ ID NO: 2801 - DNA, 120 bp, Homo sapiens
actcgtttttgattggatgcatccatcgtgacaataataggtgatactcaataaacattattgaatgaatgaatgagcctcctcttcacaattacagtgttttaaatgttttcaatggat

SEQ ID NO: 2802 - DNA, 120 bp, Homo sapiens
gcccgttgcttcagcccctgactctgtggtcctaaatacgcggctcctcagtggggcccacagcttaagaccaacgcttcacaggctcacagcccctgtcagaacccatctcctgccctg

SEQ ID NO: 2803 - DNA, 120 bp, Homo sapiens
ctgcgcctttgcagcctgtcagctgaaaataatcccagtgaaagcaggggcgaggtggaagcagaggaagcaggcccacacacgcctttaatgcgggggattctgccccctgctggctgc

SEQ ID NO: 2804 - DNA, 120 bp, Homo sapiens
gcccggctccccttcagcgcccggccgagagcccggtggctgcgactgaggtcagagccgggagaggagagggagggagcgaggcggaggcgcctcgggagggggccatcgcccaccggg

SEQ ID NO: 2805 - DNA, 120 bp, Homo sapiens
caccgacgattaggctttgtcttcaaaacaagttagaggtggtggcttctgctttggagccccctcgcttcttttcccggctctcccgtcttcgacttccaaattaggagcttagggagg

SEQ ID NO: 2806 - DNA, 120 bp, Homo sapiens
gggcgtggtgggggtggaggtccttctggagctcaagggaggtccagtcatccagacttggctttctcatcgatcccttttcccagagcctggttactgccggcacctttggatcctcgg

SEQ ID NO: 2807 - DNA, 120 bp, Homo sapiens
cttcgcctacacttggcgtgcggtgtaccagcctccccgcgtcaccatggaaacaggagcctctgcatccatcccagagctgatctgtgaagctatgagaagaatctggaggtgtgtgtg

SEQ ID NO: 2808 - DNA, 120 bp, Homo sapiens
gggcggggcgggtagagagataaaggaagggcaaaaggggaaaggttcagagaaaatatggagagagaaagaaatctgggcgaaggggcgggattgctttataagggttattgaataact

SEQ ID NO: 2809 - DNA, 120 bp, Homo sapiens
ctccgtgccaggtaggaactggcagaaaagcaaggagggaaaagaggcacggaagagcaacgtctctcccctcgccacgtgctcgacgaccccagagccccgagtttcttctcccgaacc

SEQ ID NO: 2810 - DNA, 120 bp, Homo sapiens
aaccgcttgccacgtgtccaagccaaagctgacgtgtttcagcagggcgccgccccctcccaggccccgccccggccccccagacccctcaccgtgtagtgtatgtgaagcgtgtctcca

SEQ ID NO: 2811 - DNA, 120 bp, Homo sapiens
cagcgggctcggcacatggttctgggggctccacctacgatcggactacaggggtcacggatgctcttccaaagatcccgttctcgcccctagacccggcaccacccccaactcagttcc

SEQ ID NO: 2812 - DNA, 120 bp, Homo sapiens
tcccgcacttcctctcctcccggctcccaggttcgctgagaccccagtattaccacccaacaaggctcggcccacgggggctgagggtcgggactatctcctcaccagggtctccacttg

SEQ ID NO: 2813 - DNA, 120 bp, Homo sapiens
gtccggacgggactttcggtttcgagcccagcctcagcccggcacaccgccgcactgagcagcagcagcagcagcagatggagcgggaggagtgaggggcgcagggtcatgactgggcgc

SEQ ID NO: 2814 - DNA, 120 bp, Homo sapiens
gcgcggggcagggagccggggcaccaggacaggctgttcgggtggcggcagccaggacagcgttcccgcggcgcccaggccagactggacgggacggggcgggtcgcgatgctagagctc

SEQ ID NO: 2815 - DNA, 120 bp, Homo sapiens
ctccgaaagggaggaggccgaggggcgccctctgtaccctccaagatccggagggcgcaggttctgacgcatccgttagacgttctgtcctataacgtgggtcgggccaaacaatagcac

SEQ ID NO: 2816 - DNA, 120 bp, Homo sapiens
ttacgattacctactgtgtgtcaggagctagtctctaatcctcaaaaccaccctgaaaggtcggcatgattgtttccattttacagataaggcacagggtgctcaggatgtgcccaaggt

SEQ ID NO: 2817 - DNA, 120 bp, Homo sapiens
caacgtggttgctgtctgttcttccaagtcgtctccttgtggctatcctggcagtgtctggctggcagaccccacccaggcagttctcattcctctccgacctccagctacttcagcttg

SEQ ID NO: 2818 - DNA, 120 bp, Homo sapiens
cttcgtacagcccgtccccgctggtggcacaggtggcctgaatgtaccagttacggtgacgaagggaatgcaggcccagcttgtctgtgatctcagcagcgttcatagcattaggcagat

SEQ ID NO: 2819 - DNA, 120 bp, Homo sapiens
gcacgtgggagacacataaaaagaagcctcaggattttttaaaggcttctagaacacccatctaccaaagaaatgtgtaccagcaccttcccctcctcctttattttaggaaacccagaa

SEQ ID NO: 2820 - DNA, 120 bp, Homo sapiens
atacgaggatggtggggaagcaagagacgtgattcagactgaccaaagaatcaggtctgtctgacagcaggagtgaggccaattctcctaaagtagataacaggcaagatgaaagaaaga

SEQ ID NO: 2821 - DNA, 120 bp, Homo sapiens
ccacgcttctaacattgagagcatactaaaagggttaaccatataataggcccaagagccaacaatttccacagccagtttgctgtctcccaaattcaggggtgggaagaagtctcacct

SEQ ID NO: 2822 - DNA, 120 bp, Homo sapiens
tcccggagctcgtcctccgccagcattctcatcagctcttcccgggcctcatttactcgctcccgatcattgctgtcgaccacaaatatcaaccctaggaaggcagagcatgggctgcac

SEQ ID NO: 2823 - DNA, 120 bp, Homo sapiens
ccacgctaggcctgagcataccttgggtgttctggaagtagtgtctccagaggggtcgaatcttgtcctggccacccacatcccacactgtaaagctgatgttcttatactccactgtct

SEQ ID NO: 2824 - DNA, 120 bp, Homo sapiens
ccccgcaaacaccaccacaatgagtttggttctgctttcccccagtggtggccataacaccaacaatggaacaaaagctaaggcttcctcagacctgataatcgttaagctagcagcctg

SEQ ID NO: 2825 - DNA, 120 bp, Homo sapiens
taacgtgggccaactttcctgacttttccactcagtctttggtgctccctcctacaaaatgactcagccctgctctggtactttggctaccagagtcggcctcagctaagatgtggggcc

SEQ ID NO: 2826 - DNA, 120 bp, Homo sapiens
ctccgtgcctgagggcagctgttgagtgccaggccatggaagttcccgcatcagggagagccaggttaggtgggcaaacagcagcctcagcacctggtagtaagctaaacaacaccaccc

SEQ ID NO: 2827 - DNA, 120 bp, Homo sapiens
tgccggcgtgaaagcccacatccaagctgtgctcttaccaatggtagggatggtggtgacgatctccccgagtttcagcttgtataggatggtggtctttcctgcggcatccaggcccac

SEQ ID NO: 2828 - DNA, 120 bp, Homo sapiens
atgcgcatctccttcttcccaatcaggctcttgagaaggtttccaaagatattgcccatgatcacagcagctgctttctggggacagtggggcccaagtaggggcagtggcagtctggtt

SEQ ID NO: 2829 - DNA, 120 bp, Homo sapiens
atgcgccacctctcaccacctctgatcttcaggtgccagggcgctggatacacgttggcctgagcaagtgagggaaagactagtcctgaaatatcctggggggagtggaaaagctgagaa

SEQ ID NO: 2830 - DNA, 120 bp, Homo sapiens
acacgcaccctggaaaaaccctgtcagtggggctgcaaataccctagggtccagcctcccccaaagcctcccccctcgccccaggctggctcagtcctcctctccagcgcagagggagaa

SEQ ID NO: 2831 - DNA, 120 bp, Homo sapiens
aaacgaggagaaaataagctgtttggctgtggtgtgagcaggaatatccatgcagggctgcccaccactcacccttactcactctttccacacccagccggggcgcccagcatgagacag

SEQ ID NO: 2832 - DNA, 120 bp, Homo sapiens
ccccgtctggtctaaaagcagacgctggtgagcgagcagcaggttataaatatgcccagggaactgccgccaactcgctcccttgtcatcccctgggaggggcagggtggggtggctccc

SEQ ID NO: 2833 - DNA, 120 bp, Homo sapiens
gctcggaatgaaagggcccaaagtactctgtgtcatggcacagcccgctgctacttctcttcttcacatgcatttgctctcagcaaaacagaagttcattcattcattcaacaagcatta

SEQ ID NO: 2834 - DNA, 120 bp, Homo sapiens
ggccggaccgaggcctaatcctcccgccgcctggcccggctgggggagccccactcacctccccactctctgggggctgcccggctctgctgtggcggagacacacaatcgggacaaagg

SEQ ID NO: 2835 - DNA, 120 bp, Homo sapiens
tcacgcccaggttgtgcggcatttggggagtttaatgaattgtccatcacgcctttcagggcccgcccgtcagcctggattaatcttcggagccctggtggggtaggagacactaagcct

SEQ ID NO: 2836 - DNA, 120 bp, Homo sapiens
ctgcgaagagctcacccttgtgccctgaacataacagacattaattaaatctgctcattctcacctctcctgaaacaaaatcattaatgggcatatgcttcccttcctttcatttatatt

SEQ ID NO: 2837 - DNA, 120 bp, Homo sapiens
atgcgttggggacacaaatacaagaaggggcctctcactgcctcttcctatttccctgttgggtccctctgatgtccctcaccccgaagaggacctcctcggtttggcttatgacatcta

SEQ ID NO: 2838 - DNA, 120 bp, Homo sapiens
ccccgacactgtcgctcagttccgctgtcttcccatcttcctctggcgaactgtttccaacctcgggcagggtcctctcattccgccaggaggcgcccggggcttctgtgtcgcttccat

SEQ ID NO: 2839 - DNA, 120 bp, Homo sapiens
agccgctatggacgctgagctcctcagcttcgtccgtgtccgagtcaggggctgtgtggcggcggatacgggacacggcttctcgcagggccccggcgtagggccctggggtccgcgccc

SEQ ID NO: 2840 - DNA, 120 bp, Homo sapiens
ccccggccggcgcgccgctggaccaccgccacttccgacccctcggctctgccctgggctcccgaagctgctgggcctaaggcttggtgctctgggctacctggctgcgtgggggcgtcc

SEQ ID NO: 2841 - DNA, 120 bp, Homo sapiens
tcccgcaggtttacttcgggggccgggagccccaagatgcggaaagtgcgctcctccagtgtggagtcccccggcctcccgccctcagcttcgcccccgcggcccccgccgggctggtgt

SEQ ID NO: 2842 - DNA, 120 bp, Homo sapiens
aggcgactgctcgacagccgcttttgacaaggggaaggaaagaccgtggccccttcaccctcctccttgccgggcttcgattggctgggggaatcccccaccacgcgtgtcaccccagag

SEQ ID NO: 2843 - DNA, 120 bp, Homo sapiens
gttcggggggttggaacatattgggatcgtatcactacgcacgtggcgtcaatgacaaagacgccttccccacgggacaggccctgggaactgcggggcaaggtgtgggcacggcgggtc

SEQ ID NO: 2844 - DNA, 120 bp, Homo sapiens
ggtcgccttccaaccctccagggtctccggtcctgccccctctccaagacccagagattctctccatccggtgcctccgggagcccagggtctggggagtgtctggctatggcggggcgg

SEQ ID NO: 2845 - DNA, 120 bp, Homo sapiens
cctcgagcccttgaggtggtgcctggatctgggagcgggatgcggggcacagggagccgcagttgcagaccccgcaggagctatctcggtgcctgcgctccctgtagctttggcttgggg

SEQ ID NO: 2846 - DNA, 120 bp, Homo sapiens
tgtcgctaccactgttcaggtcagcagcagccagccccaggcttttctccacgacccccttgccgggctctggccttgctctggccgctccacagcctggggatccccccaagagacctt

SEQ ID NO: 2847 - DNA, 120 bp, Homo sapiens
tgtcggagaccccaagccccgaggacgtcccggtagatccgaggatccagcctcttctttgtgcgccctccgtctgtcctggctggagtcgcagctggggctgatgaagtgggcacctga

SEQ ID NO: 2848 - DNA, 120 bp, Homo sapiens
tcccggggcctctcttagtccccaaggtcctatgggggccttcgtaagaaggtggagccacgtagggtggcggccggtcccagcggcgtcgtggggcggtcccggcagaacctctcagca

SEQ ID NO: 2849 - DNA, 120 bp, Homo sapiens
cctcgtagcttgggggcccgggccgccgacctccccagggccccgcccacgccgaccctgggtcgctctgcggctgcgcggatggacggggcgctcgccccacaggcgccaggcgctccg

SEQ ID NO: 2850 - DNA, 120 bp, Homo sapiens
ggccgcaagggagcagggagccctgccagctgggccacccgaggggcgttgcggggctccgggcggggtcgacccggggggctccgtcgggccccaccagccttgcgcctttttcgctcg

SEQ ID NO: 2851 - DNA, 120 bp, Homo sapiens
tcccgctcctgcgacgccgctttccttttctcttgctcccgagctcggacctcggccaggggccccgcccgccagttggtcgcctcctgcagcaccctggaggcccagggccggcggggc

SEQ ID NO: 2852 - DNA, 120 bp, Homo sapiens
gggcggcggctgtggggatcccgggcgcggcccacacctgggacaatgagcaggaacccaggtgagcagtttgtgggggaagggagccgaggtccggggagctgggagcactggagacca

SEQ ID NO: 2853 - DNA, 120 bp, Homo sapiens
gtgcgcgtgtgcacgtgcgtatatgttaggactgaagtcgaagcgggactcctcgccatctctccatgcacactttaacagcgtctgccccatctcacctcctgccctttctcacaccca

SEQ ID NO: 2854 - DNA, 120 bp, Homo sapiens
caacgggatgagtcaggccccagccctcgggagcgggcagaggtggaaggcgtgggaaagagaagggggaccagcagtgctcgctggtgcctgcggggaggtccggaccccactccccgc

SEQ ID NO: 2855 - DNA, 120 bp, Homo sapiens
tcacgtgcggttctggaacccgcgagcccagtggctggcctggaagtccatgggctgtcgagaaggggcgcggcgactataatgacaggaaatagtcttcacttctatcaccaatagctt

SEQ ID NO: 2856 - DNA, 120 bp, Homo sapiens
tcccgggggctgtcaggcccctcggagaacagtgggccatccagcatcctgccccaccccaccccggccccccaccctcccacccgccccaggagccccctcccagcccagggagccggc

SEQ ID NO: 2857 - DNA, 120 bp, Homo sapiens
cggcgcccactgcagagccgcgggcccggggactgggaactatatatacccgggcacacgtgtgtgtgcctgtctctgtgtgtgcgcgcgcatgtgacaccgcgcggactgctccgcgct

SEQ ID NO: 2858 - DNA, 120 bp, Homo sapiens
ctgcggcttcatgcacatggaaggtggcatggtgcccatgggcttctgtgatagcactggctgtgagctctgctggggtaccaagcctgcctgccctccatgctgcccacttagcatatg

SEQ ID NO: 2859 - DNA, 120 bp, Homo sapiens
aggcgttgctggagggcatgagctggtggctgggtgggcatcagtggctggggcaaacctggctgtcgggcacctgcaagacccagggaaagctgctgttgggacccagccaaactggga

SEQ ID NO: 2860 - DNA, 120 bp, Homo sapiens
actcgctggctaccagtgagctctccatcttgtctagctcatccccagatgctgcaggtccaccaggcaaggtcaaagccccactctcgagctcaaacttttccagcagggaggatcctc

SEQ ID NO: 2861 - DNA, 120 bp, Homo sapiens
tcccgtggccccaaaggaggccttctcagctgtgtgcccactgctagaaaatggccctgtgcccatccgggtatcccggctgcccatcatgctctgtcctggctttagccccaggccaag

SEQ ID NO: 2862 - DNA, 120 bp, Homo sapiens
gtgcgggctctaccttgggggtagcaatggtgaattggcaaggagaagggtggcgtccaccctcctccaccttgggcttcacctcagggagcacagatgccaggcggggttcagaggcat

SEQ ID NO: 2863 - DNA, 120 bp, Homo sapiens
gggcgctcctcagggcccaagggtcctggctccaccccccgcagcagggcctcccgttcagccttctcattagccgattctaccagcctcaggtgctcattgaagatatccttcttgtcc

SEQ ID NO: 2864 - DNA, 120 bp, Homo sapiens
ctacgtattagtattttctccttaataactggaataaaggatctccaagtctaggattcacaaagcaaggtgggaaagtatcagtgacacaggactgtacctctgacagtgggctaactc

SEQ ID NO: 2865 - DNA, 120 bp, Homo sapiens
tcccgcagctagatagcccctcacctgtttgatgcgggaacgggctggggagctgcgccgccgccccttctccccctcagctttgcctccgctgatagctgtcccagcatcgcacaatag

SEQ ID NO: 2866 - DNA, 120 bp, Homo sapiens
agccgtagggagccctcatctcgggctggactaacatccgtagagacccccaactccatggacagggagccacccccctccgggtctggagagcccaggaggggctctgagccaggaaaa

SEQ ID NO: 2867 - DNA, 120 bp, Homo sapiens
tctcgttaacgatgtcggatttgatgagagtgggtggtgtgggggccaccggtgcacgtggctcttcctgttcttcacatggtgagccctgccctgctgtctgcttgcattcggggtaga

SEQ ID NO: 2868 - DNA, 120 bp, Homo sapiens
cctcggggtccaggagcacaggggagcctttaagttcactagccaaactgccaggggtctgtccaggctctggctgtgaacccggagcatcaatcccatccagaggggctgtgtcttccc

SEQ ID NO: 2869 - DNA, 120 bp, Homo sapiens
gggcggggcaggaaaggtcccccattggggaagggagaggactggtggcactgggttccaaggctgggcattcaggttctgaaactttctcagtctccatctcgtgcagctcagcctcat

SEQ ID NO: 2870 - DNA, 120 bp, Homo sapiens
tgccggttctgaatctttatcctcaccagccagcttctggctgtccatccctctctccgactgggcagggccctctcggggagacctgttggtgccaagaaagagatctatatgcctact

SEQ ID NO: 2871 - DNA, 120 bp, Homo sapiens
atacgctcttctcacactctggagagattctcaggggatccatttgactttcccacttccaggctcctctgtaagagttcctggggccatagcatccaactagaagcatatccatttgta

SEQ ID NO: 2872 - DNA, 120 bp, Homo sapiens
caccgccacttgtttctacgaggacatcaccattacaaaagaagaaactccctaatttccacccacttccaacccaaatccagctcagaccaacccccggcccatgccctaactgagctc

SEQ ID NO: 2873 - DNA, 120 bp, Homo sapiens
cagcggagtagcttccttcctcttccctcaagcagggtttccacacacatacatgggggtggggaataacggtcccttgtcccttcttctaagaaatgcgtgcctgtatcagagccaaat

SEQ ID NO: 2874 - DNA, 120 bp, Homo sapiens
acacgaagaataggaaagggattctatagaaggagggagaaagtggtaagtgttagcagcttgtagtgggaaatgtagaccctttctcttaatcagagaaggtatacagtgttcctagag

SEQ ID NO: 2875 - DNA, 120 bp, Homo sapiens
gaacgacttgcccaaggagaagcaggtggactccttgacagctcctgatatgtgtgactcagcgctggcagcttaacaaggcccacccatcatctctccctcctgggagcgggctccttt

SEQ ID NO: 2876 - DNA, 120 bp, Homo sapiens
ttgcgcaggtccagtacacccttccatgtctgagaccgcttgccttccgtttcagagaaccatatgcataggcctagaattctcttgaaggccaccagagggcggtgtatagcagggacc

SEQ ID NO: 2877 - DNA, 120 bp, Homo sapiens
gtgcgatgggagcgcacagcggctactggcaagggcgagctccgggtggtaccaacaacccccgactatttcctcctccccgcctcacctccacccaagacacttcccttctggagcagc

SEQ ID NO: 2878 - DNA, 120 bp, Homo sapiens
ctgcgttggaacctaaaggttccaaaaacacccaggctagggaagtagagctggtgataatgggagagggaggaggaggcgctgaagaccaagccagtagaaacaacaatcagggccagc

SEQ ID NO: 2879 - DNA, 120 bp, Homo sapiens
cagcgatcaggaggggagctcgggttgtaatgctgatatgcccttgtttagggaatctacttcccccacatacacccaggctgaatccattctctctctctgagcagcccttcagtaagg

SEQ ID NO: 2880 - DNA, 120 bp, Homo sapiens
atgcgacgattgcaaattattacccaggtttcccatggatcatcagttggcccagtggcatatcagaaaaaacatccaccccatccaggccctgccaccaaggtaggatggggaccagga

SEQ ID NO: 2881 - DNA, 120 bp, Homo sapiens
agccgcaggagcgaaatgctggtcctctctggatgggagacggaaacagcagcctggaaaagggtacgactcttgtgggctctgttgcttatgggttgggatgccccttctgaagggagg

SEQ ID NO: 2882 - DNA, 120 bp, Homo sapiens
agccggaagtaagctgttaactcaggttggccacctttatccccctctctggaggtgaatcaccctctgaatggaagtgttttccagtaagctcctgaaagccttccctttattagccca

SEQ ID NO: 2883 - DNA, 120 bp, Homo sapiens
aaacgtcagatgtcagactggctggctgtgtcagacagtgttaatgccatgccccagcccctcaccttggcaagctgggcaagggaatcattatattacaatttataaataagaaataaa

SEQ ID NO: 2884 - DNA, 120 bp, Homo sapiens
tatcgggtggggctgaagcactgggggagaggctaaatagtcctctttaaggagtgcgcaccatcagccctacctacctaggacccggtatcacctcctctcagtacgaggttgccccta

SEQ ID NO: 2885 - DNA, 120 bp, Homo sapiens
agtcggcatcgtctgctgcccacagccccatatctcagccagcaggccctcgtttcctcgggcgcttcgaggtttctatgcctgggacgctcagcccagtagctcctccgctaagcggta

SEQ ID NO: 2886 - DNA, 120 bp, Homo sapiens
agccgagagtaccaatgcatgccagtcggctggacggccccgccggggagcagcgcccctagcgcgtgcagcagtctcaagggggcaaaagcgcggtgcgcccactggtgactctccaga

SEQ ID NO: 2887 - DNA, 120 bp, Homo sapiens
aaccgcgtagcaagaggccaggacatcgttcaccagcagcgtcccgtgcgcggtgagcggcgcgaacacgcccacggcttcctcccgcgccacacgggccacgcgcgctggccgaagcgc

SEQ ID NO: 2888 - DNA, 120 bp, Homo sapiens
ccccgccgggcgccagcaccgagtccccagcgcgtagccggcgcgcgaacaccggtgcaaagtcgcctggcgcgggcgccggccctcgagcggcaaacaccaggtgccagggcgtgagca

SEQ ID NO: 2889 - DNA, 120 bp, Homo sapiens
ttgcgtggaggccactcggtctccacagccacaaatgaagcccggcgctgcaagtcccggtccaggaagagcagcaccggcgtgggcaccacccggcctgacgcatcggccgccaaaacc

SEQ ID NO: 2890 - DNA, 120 bp, Homo sapiens
ctccgcggtgcagttcccgcagccctttccgctcgccgctccacaggcgcacagttgcatttcccggaaagcagccgcccgcccggaccgccagtgagttatctgcagggaacaaccaca

SEQ ID NO: 2891 - DNA, 120 bp, Homo sapiens
cagcggttccagaacgattctcaaggccagcgcagatatcgccagtcatggacaacacaattttccgttaatctgactggccccaacctgggcagaaaaggaagggcggtttttctttct

SEQ ID NO: 2892 - DNA, 120 bp, Homo sapiens
gcccgcttggtctcccctagggtggcaacagtactactgcagactcagtttcccggagggagccccctttgggcggattttaccaccctcctcctactgtaccagctttgaccgacacgt

SEQ ID NO: 2893 - DNA, 120 bp, Homo sapiens
ggacgtggttgcgggactcgtagtagacccagtcgaagccggcttccactgcgaggcgcgccagcaacccatacttgttgcggtcgcggtcagacgtagtgatgtccaaagcacggcctt

SEQ ID NO: 2894 - DNA, 120 bp, Homo sapiens
cttcgtagtggagtgaatcctgagcgtggtggccgtcctcgtcccagccctcagtcactcgtaggcgcactccgggccacatgttcatcacggcaatggccaaagcgttcacccgctcct

SEQ ID NO: 2895 - DNA, 120 bp, Homo sapiens
caacgctggcggggaataaaggagtcagtctccccaccaccacccttggggcaaaagggacctggataggagggttgattctttgttattccggccctactcttacccctcccagctttt

SEQ ID NO: 2896 - DNA, 120 bp, Homo sapiens
agtcgatggtagtcaccaatctgcactctgttcccaggacgtcgttggagaactgtgggctcacctctgaggttgagagggggtgcccatacctagctccttccccatttttaatgcccg

SEQ ID NO: 2897 - DNA, 120 bp, Homo sapiens
cagcggctcaacctgggagaaggacagagttaggagggcgaatggaagcgtggtcagggagggcctggttgctcccggagagcccctgtttgagcctggcccccgccccaggcaccggct

SEQ ID NO: 2898 - DNA, 120 bp, Homo sapiens
ctccgcctgattcatcttttgtttcattgccttccctggcaccgggcatcgcttccttccttccttcctcctcctcctttgggcccttagcattaaccccttcgtgctctgggtgccccc

SEQ ID NO: 2899 - DNA, 120 bp, Homo sapiens
gtgcgggatcaaggctgctggaaaaaggattggggtggcgggggttgcgcgaagtacaatggccattatccgggatgacttaaccgagcgagaatcctgagcccaggccgggaacgcgct

SEQ ID NO: 2900 - DNA, 120 bp, Homo sapiens
aagcggactcagcagctccggccacaaaggcgcttttcagccgccccggctcagggagaggaaagggcagaaagccgcgcccccaatccctgctccgtccgggtaggtcccctccccccg

SEQ ID NO: 2901 - DNA, 120 bp, Homo sapiens
ccgcgcgtccagtcttcccagttccagctaaggctctgccagtccggagagcccctatctctcccatctctgctctagatgcagcccagaagggcgtgggagtagcacctgagaataacg

SEQ ID NO: 2902 - DNA, 120 bp, Homo sapiens
gtgcggatctggggagccccctgcagggtgagagcggagaagaggaaaagaagctgcggctggaagcctgcacctgggggagtgagaccacagttatcttggccgctccagcctgggagc

SEQ ID NO: 2903 - DNA, 120 bp, Homo sapiens
gagcgggagaccttggcgcgcaccatagcagggacaccgcgggaggaggcgcagagggacagcttcctttttttctttcccctccgacctctcacctcggacttggttttctcctaacag

SEQ ID NO: 2904 - DNA, 120 bp, Homo sapiens
ccccgcagagttggggttgggtggggggaaaacaggaaaagtggtagctccttccaactttgtcgtttcgtcccctaaggaggccccgaggccctgacctgcgggggcagcagcccagtg

SEQ ID NO: 2905 - DNA, 120 bp, Homo sapiens
tgccggagcccctcctgagcctgtcccttgttctgcccactctgctgcaggtggcaaccagaggaaagggccacaatgttccacggccaaggaggaaagaaggaatgccccttttcccat

SEQ ID NO: 2906 - DNA, 120 bp, Homo sapiens
acacgtttcccatgccaaaagcaatgtctgcccagcccctcctcaggtagatggtctggtgacctgacccttggccacccctgtcccagcccttttcagtctcttcttttcggcccacag

SEQ ID NO: 2907 - DNA, 120 bp, Homo sapiens
ccccggtccacgcctcagccatttcccgtctcgcctgccgccatcctcctttccccgccctcgctgcctctaccagcttcactctcactagtcagtccctcctcccctccccatcccaga

SEQ ID NO: 2908 - DNA, 120 bp, Homo sapiens
agtcgggagccgtcctaattactctgtccagactgcaaggatttttcccccccctggggctggtgacaagggaaatctctaaggctaaactctctgtaggtgaagctggactcacccacc

SEQ ID NO: 2909 - DNA, 120 bp, Homo sapiens
aaacggaggagctggcagtgccccggcgcaggtagggagaggccctccttacctcggtcatcaggcggtcggctccactgttctcctcatccttgaagatgatgtcggggttgtagttgg

SEQ ID NO: 2910 - DNA, 120 bp, Homo sapiens
gcacgaggtcccggaagcgctcggagccccttgccaccctcccctccgctggcccactggcgcccagggtccgctctggcacgccgggcacaaattgcttgtagagtagcggcacgagct

SEQ ID NO: 2911 - DNA, 120 bp, Homo sapiens
ttgcgcgcatagcggcgccggccaaccggcccccggcccggcccgcagctctgggctggcagcgccagaagtgccaagcagcacaggggcagtagattggtcaggagagccatggataca

SEQ ID NO: 2912 - DNA, 120 bp, Homo sapiens
cagcggacctcggccaaaagggagcgttcttgtcctcactaactctcctgtcagttaggcatctccacaggcaccagagagggcagcaggcacagctgcccccagagtgccctagagctc

SEQ ID NO: 2913 - DNA, 120 bp, Homo sapiens
ctccgtgcacctggctgctgctagctctgcccacgtgccccgggagcgggcggggggtgtctaggacctgctactgacaaaccatcatagcagggaaggggggtcgtgggtgagtgccag

SEQ ID NO: 2914 - DNA, 120 bp, Homo sapiens
gcccgtctctgctgcaggactctggtgctgccagaacgcccggactccggactccgccttaagtggcccctggccccgccctccgcccttctcccaagaccgtcccaccccctcccaccc

SEQ ID NO: 2915 - DNA, 120 bp, Homo sapiens
acccgggcgggggatctagccggtcactgctggtccattttgcgactgaagtgtgtcccatcctggaaaccaggcagacacctgcctaggaaatacttgtagctttacagtccttggctg

SEQ ID NO: 2916 - DNA, 120 bp, Homo sapiens
ctccgctgtcatccaggaagtatgggttccaatttctgcccaagaccagccaagccctttgggcatacaaccagagcctcccttctctgtagtcctccccagatctccccgacttccatc

SEQ ID NO: 2917 - DNA, 120 bp, Homo sapiens
aaccgtccatctaggcacctctccagctttctccctctctggactcccggggctccattttcagccactcagatctcatctcagaggcaccacgtccaatttcttttgtttagaagtcat

SEQ ID NO: 2918 - DNA, 120 bp, Homo sapiens
aaacgtcacttcctaggatatgtataaaccacaggcaacacttattttttattctcaatgcactaaatacatgaaaaacttcagacacccagatagaaaacacaggactgaattcattta

SEQ ID NO: 2919 - DNA, 120 bp, Homo sapiens
atacgcattgaaaagaaccattactgcaattgaaagtgacacactgatcatatttttcagatcatgaattcataatgagatttttaaagacagaaaacaaaaaacattcatttgtcacta

SEQ ID NO: 2920 - DNA, 120 bp, Homo sapiens
attcgaaaattgccacttcgcaccccttaatagcaaataattgactcaggtaaaggtcatcaaaggatgataccattacaagcaagttgaggcattttacaatgaaggcaccagtccgtc

SEQ ID NO: 2921 - DNA, 120 bp, Homo sapiens
tctcggcatctctaacagctggagaaccggaaactgtgtgcctcctcgtgtgatgcagtgtgaagcgcacggcacggcctgtgagatagacccttgaatccggatctgatgaaggcttcg

SEQ ID NO: 2922 - DNA, 120 bp, Homo sapiens
cgcaggggtggggcatccccctccccatacaacccccctccagcgggccatcaggccagtgggaggagctgcccgtgccccccctgagaccgcagggctataaagccgcctcgcagcggt

SEQ ID NO: 2923 - DNA, 120 bp, Homo sapiens
ctgcggctccttcccagcccccggcctagctctgcgaacggtgactgcccatccttggccgcaatgagccaccacccgtcgggcctccgggccggcttcagctccacctcataccgccgt

SEQ ID NO: 2924 - DNA, 120 bp, Homo sapiens
agccgtcctgaatcctgaaagggaaggaggaaacccactcctgcctagcccacccccttgcaagctctgagcctcccactcctgccaagcccactccctcgcaagctctgtaaatatgtt

SEQ ID NO: 2925 - DNA, 120 bp, Homo sapiens
tggcgggcaattggaacccctgttccccttgctttttgagatcagtctcacttagcttgcaggagccctagacgactccttcaccccctagagctcctcttctagaactctctgcgtgca

SEQ ID NO: 2926 - DNA, 120 bp, Homo sapiens
cagcgtgaggccccaaagctctcctgaaacagaccatccttcttcctccccatagcagagtagaagcacacacacaccccttttctgccagaggcaggccttgcctggaattaactaaaa

SEQ ID NO: 2927 - DNA, 120 bp, Homo sapiens
gcacggtaggagctctttagaggaatgagggaaagggtccgccactttccccccagtctatgcaccaagttaagcagccacacacaatcccccaacctcactttattagaagaggcagca

SEQ ID NO: 2928 - DNA, 120 bp, Homo sapiens
atccgcggcttctcggacggctggtttcttagggatctgagatgcctgctctccagactgctgctctctcagggatggcgcggtgcctgggtcccagactgcccagatagaccactccct

SEQ ID NO: 2929 - DNA, 120 bp, Homo sapiens
ccccgcgctccggacgtcccgggctctgagctgcgggtgctgctcaccgggcgcgatctcctagtaggttttgcgctctgcctcttggcaagcaccgactcaccttgctacccctgccgc

SEQ ID NO: 2930 - DNA, 120 bp, Homo sapiens
ccgcggccccagtccctgctagagccctggcccgcgcctctctcctgcgggcgcggtccctctccgcctccctaaccttcctcccctccctcccgggcgcgggtggtatgaggcgccgcg

SEQ ID NO: 2931 - DNA, 120 bp, Homo sapiens
gcgcggcgggagccactataagcggccagaggcggagcgacccctggtgcccagagtgggaagtgcgggggcggggcaggcagcggcccccacccacgtcctccccgcctcccctccact

SEQ ID NO: 2932 - DNA, 120 bp, Homo sapiens
tcccggctctgagcgggttcttcagggtttcgcggcccccgctgtatctttacttttaccctttacccggagtttggcattctcagaggccagaggaaacccaaaacagcgatgggataa

SEQ ID NO: 2933 - DNA, 120 bp, Homo sapiens
acacgcagagaagacaggggtagattcccgagctaaaatgagggggagggacctcacaaacaaacagaaaacaaaataagaagggctagaaaagatagaaattcaccaccccacgcacct

SEQ ID NO: 2934 - DNA, 120 bp, Homo sapiens
cagcgcccgtgaccgaataacatggtaaaggattcaactgatactagttggcctgaactggaaaaggcaaatctctagccaaccctacccccacccctcagtattggggcgcggagcgga

SEQ ID NO: 2935 - DNA, 120 bp, Homo sapiens
gcccgggggagcaagcaagaaaccgacaagaaagcagagaaggagcgacagaaatcaaagagaaggaaagctagatagagatgcagagacagagacaaagcttcgaaaagagacggactg

SEQ ID NO: 2936 - DNA, 120 bp, Homo sapiens
tggcgcgctgcagagagacacccaggtccgtgtttggactccaatgtgacatatcaactgtggggaagatgcgggggcagggcggctctgccagcagtgctaggctctgggcctgtgcat

SEQ ID NO: 2937 - DNA, 120 bp, Homo sapiens
gtgcgattgtggattgtgtgttgtctttgtgtatgtatatgtgagggctgtttgaagggaggtatttgtatttgtcttcctcctagtccctcaatttggagcccacaaatgccatttttc

SEQ ID NO: 2938 - DNA, 120 bp, Homo sapiens
ttccgagcggccaagacattgctagacacaggcattgctagatcagagtccagagaaaaagctactggctgcatcctctcttagggcctgggccttctggggaaaatgtcttgctcacag

SEQ ID NO: 2939 - DNA, 120 bp, Homo sapiens
ccccgacccccgcctcataatgatgctgggagagagaggttcctaaggctgggcctgtgttgggggttgggggaggcccctacatgtctgcaaggagtgggagagaaaggattggcagtc

SEQ ID NO: 2940 - DNA, 120 bp, Homo sapiens
tgtcgccatttgtcttcctcggggggctgagggccgtgtcagccctctgcatgtctaattccggatctgctcccccaggctggatgatggatggatcagagagcaggcccaggctcacac

SEQ ID NO: 2941 - DNA, 120 bp, Homo sapiens
cagcggatctgtgtggtcgggggagccggcttggctcacggggagctgaggggccagctccatgaatttattcatgttctgttgctcttttcccacactctggaatgaagctgccagctc

SEQ ID NO: 2942 - DNA, 120 bp, Homo sapiens
gctcgaggcaatgctggggcccaggccagggtctgggacaattttcccagaactcctctggcagccaaactgggaagccccagggaggtggtatggttgggaatgggaagtaggtagaga

SEQ ID NO: 2943 - DNA, 120 bp, Homo sapiens
gagcggagaggagaggaagcctttaacagtttcctaggctcccccacttaaaggttaatgcagccttcagacagaccagtctgtccttgactctgcattagccttgaccctaacccctat

SEQ ID NO: 2944 - DNA, 120 bp, Homo sapiens
actcgactcctcttcaatcctaaaatgaattttaactccataaactgaccctaaatggaatgcctccctcacctgtcctggaacccagggggatccccagaatcccccccagggctatag

SEQ ID NO: 2945 - DNA, 120 bp, Homo sapiens
gaacgtgcctcagtttcctcatcagtaagagaagagaaacctcctcgctgcctgacattttatcaagatctaaggaaacacttttttttttttccttgcactctctccttcctccccttc

SEQ ID NO: 2946 - DNA, 120 bp, Homo sapiens
gcccgtcacagtgtggttctccctactcattcccacactctggctttcaactcccacattgaagatcacatggatctggaagcagcctgggttgcctggtagcagtcctctagtatgaag

SEQ ID NO: 2947 - DNA, 120 bp, Homo sapiens
ccacgtgagaggacaggggacggcatggaaagggaaacaacattattgagtccttattgtattttagggctttaacatgcaacttctcgttgcatcctcacagcaccctttagagttaga

SEQ ID NO: 2948 - DNA, 120 bp, Homo sapiens
ttccgggagccttttgtatgtgaggccaaaagggttgggtcttggctccgtgtatcccccaacccccaccctgacactgttaagcatgatgcccaacaggtgctcaactgttggctaaag

SEQ ID NO: 2949 - DNA, 120 bp, Homo sapiens
aaccgtccagatggaggaagagagggcagagaaaaaggaaggcaaaggaaaacgaagcgagtcaaggaaaatttgcttaagggacaaaagggaagcctgaagccggctgttctccgactg

SEQ ID NO: 2950 - DNA, 120 bp, Homo sapiens
aaccgtcccagcccaagaacctgctcatggtttgcctccttgcagagactaccctcctgcctctgccatcacggccaggcccagggctcccactcatcagccagtgcctctggcaccaaa

SEQ ID NO: 2951 - DNA, 120 bp, Homo sapiens
tatcgcaccagggtccacagggctgaagacaagctcctggcttctcagagagtgggtaaagactgcttccaaggtgtctgccaggtcagagctgttgctgacttacttcggcagccctcc

SEQ ID NO: 2952 - DNA, 120 bp, Homo sapiens
caccgcttgccagctccagcctccagttaatgaaatgtggggatcggctgcacagagagctgtcagacccctcatttctcctctgggatattgactccgggtctgggagacccacaggtg

SEQ ID NO: 2953 - DNA, 120 bp, Homo sapiens
aggcgggtggggtgcgggaagttgaggtaggggcgcatactgatgagagccccgagaccaggaggtagtgctaagctccaagtctcgagggctcggctaagcgaggaaggccctaggatg

SEQ ID NO: 2954 - DNA, 120 bp, Homo sapiens
tgacgagcaggacacttaacgagccccaacccaccgcacccggacctggaccccgaactagcaccccaggcgggctggacttcagtgagcgccgcgcgcagcgcctcggagccagagacc

SEQ ID NO: 2955 - DNA, 120 bp, Homo sapiens
gaccgctgcccggtgcttcctcccatcttcttccatcccttccctcttgctccccctccctcctgcactccctccccggcggccgcggcctttattagggattccgcggctgtcggtccc

SEQ ID NO: 2956 - DNA, 120 bp, Homo sapiens
tcccgccatccatcctgtccgccggcaattaggcggccagacaaagagcagcttcggatggatgagggtcccagcggatcggaaatgtgaagggtcagcgctgccgcccgcggcgcaccc

SEQ ID NO: 2957 - DNA, 120 bp, Homo sapiens
ccccgctcccccttccgcataatcaccggccgcccgtcactcagccggccgcccagggagctcctgggcccggcccgggagagggcggggtgcggctgcagcctaggcgcccaggacagg

SEQ ID NO: 2958 - DNA, 120 bp, Homo sapiens
gggcgagggcggacctgcggcaggagcgcctcctgcggggcagtggaggactgtggcctgaggcattggccgaagggtgggggattatggccccgggcactccccgaagggaaactgggg

SEQ ID NO: 2959 - DNA, 120 bp, Homo sapiens
ccgggcggtaccggagggcgacggaatgagaacgacaggccttagagaaccagagagaagcccgcccagggcctccccctcccccgctcagccctgccaactcccccagcaggctccagt

SEQ ID NO: 2960 - DNA, 120 bp, Homo sapiens
tctcgcttcagcggccgccacccttcgttgcccctggagccgccggggaggccagtgtcggagccagccatgcggcggctcctctctggccgctcccgcggggccggggcttcggcggct

SEQ ID NO: 2961 - DNA, 120 bp, Homo sapiens
tcacggagccgacaggccgggccggccgggaaggggcgggtggcgggggggagaggcggcggggtgaggctggctcagcgctggcactcagtgggcgcgcaacgtatgtttgccgaattg

SEQ ID NO: 2962 - DNA, 120 bp, Homo sapiens
caccgagcggcgcagggcagagggtcggagggcacaggcggggtaggagatggcccagaccgggtgagggcagaagcctcactcacgggggaagaaggcactcgaggtcgctctgaggac

SEQ ID NO: 2963 - DNA, 120 bp, Homo sapiens
gaccgctgggctgggatagaccacccatcccccgccggggagacccgggtagtaaagaacaagacagaatgggacaggcaggacggtttggaccccacctacaagcgcctccaccacccc

SEQ ID NO: 2964 - DNA, 120 bp, Homo sapiens
ctccgatccttgtcacgctctgctggggaaaccgaggcagccgatgctgagaatagccaaaaagttaaaagcggggtcagcgacgaagctggggcagcaaccagaattcctgcgtgggtt

SEQ ID NO: 2965 - DNA, 120 bp, Homo sapiens
ctccgcccacgcggggccagtttgcgggtaaatgcaccaccgcgccccgcaccacagctcagaccctttcctctcgctgcagtttgtcagatccccccacctcccactctgcaccagttt

SEQ ID NO: 2966 - DNA, 120 bp, Homo sapiens
atccgggcggagtgacggccccgtaattgtgacaaagtgagtgcgggcggctggagagagcgctaggccgggagcgctgcagggcgaggcggaggcaggggcgcctccccccgccctgcc

SEQ ID NO: 2967 - DNA, 120 bp, Homo sapiens
tgccgccccctcgttcttattccggtcacctcccatccctctccttgactcttcaattcctcttctcccggccccttgcgccttccttcgcttgttcctccatcgctcttccctttcctc

SEQ ID NO: 2968 - DNA, 120 bp, Homo sapiens
tcccggtaacagctcttctcccgctcccccgaccccgtcgcccctcccccggtgcgctttttcctcgctcacttctcccctctcctctgccctccactcgtttcttcagcttttcctcgc

SEQ ID NO: 2969 - DNA, 120 bp, Homo sapiens
tcgcgcttacattgcccttgggcccctggctctccccgcacaatccgcttctctccctccccactcctcccttcctgagatcgaaccctgagccccttcccgacccccactctctgggcc

SEQ ID NO: 2970 - DNA, 120 bp, Homo sapiens
ggccgccagcgcagccccgcatttctgggttcctcgggaagtaaacctgggggcgcgctgcggccccgggtgccccggcggccagccccttccctctcccttgtatggctgccgcccccg

SEQ ID NO: 2971 - DNA, 120 bp, Homo sapiens
agccgggagatagtttgtttgtccagcggcggccgccgccgcccacgctgtttgcaaagcttagcgcgccgtcgcgcagtgcgggcccaattaagtctcattcattattcagcgctcctg

SEQ ID NO: 2972 - DNA, 120 bp, Homo sapiens
gtccgcccccgccccccagcagtctgaggcgtcgctttggggcccctcccagcctaggcccctcagtgagccctaagaggtcatatagagagcagcatttcctctccaggccgagatgag

SEQ ID NO: 2973 - DNA, 120 bp, Homo sapiens
gggcgtttggagggaagcgctctgcctactgccgggaggtgacacccgcgaggccgaccgtcccccgaagcccccgcaagtccagactgggggacctcggagatccacgagattgccaga

SEQ ID NO: 2974 - DNA, 120 bp, Homo sapiens
tcacggagtagaacccgggattggagcccgggacattgaaatgaaggcgtcttgcattgcagctccgttgcagcgcagaggcgcaggaaggcagactaccacgagcctcgggctgcggcc

SEQ ID NO: 2975 - DNA, 120 bp, Homo sapiens
cctcgccctcctggtcgagcctcctgccctccaaccctctgctcccgtttctccctctggttcatagcccgcgggacagagcagccctggattgggaggctcctcaggtctcaggctcag

SEQ ID NO: 2976 - DNA, 120 bp, Homo sapiens
gctcggaggtgggccggtgaggcaagcaagccctgtggggggttgaggacagcttgggttggatgtccctcactgcagcctgtccgtggatgtctctgccttaagggaattggaggtgga

SEQ ID NO: 2977 - DNA, 120 bp, Homo sapiens
caacggagcgtgaagagaggagcgtgcagcttgaggtgagggaggagtcacctttcaatttgtgggggtgggaggaggtaatcaaggacgtattcttgcatttacaggagtttatccttt

SEQ ID NO: 2978 - DNA, 120 bp, Homo sapiens
gagcgtcccttgctcctgccaggcagcccctccataggggcagtcctgtgctgctgtgcctcggtacccgcacaaggtgtctggggaccgcccggacccccccttccatcggcggcagcg

SEQ ID NO: 2979 - DNA, 120 bp, Homo sapiens
tggcggccatggtgcggtggtgtgggaggagctgggcccgggctgggcactgagcccaccggagctgcaggcgtctgcagagccttgcaccgagtttccccgcgagggcgggcgggagga

SEQ ID NO: 2980 - DNA, 120 bp, Homo sapiens
aggcgggaatgtgatccccagggggccggggagggccctggggaggagcctggcctggggaagccggacttccgtgacacaacagacacaaaagacaaagtccatttggatggaagtggg

SEQ ID NO: 2981 - DNA, 120 bp, Homo sapiens
gggcgagacgggccattttcactctgtggtcaaaggaaatgactggtctgactcggtctgggagcggggcacccaggtatggccacttgatttggaagtagcgggtgctggctggtggtc

SEQ ID NO: 2982 - DNA, 120 bp, Homo sapiens
ggtcgctccagatagaggggacactggcaggcacgcttggcgtccagtttgatattgtgaggatttgtccagctgctgtggagtggctttccaagccggcctccgaaagaggtggttgaa

SEQ ID NO: 2983 - DNA, 120 bp, Homo sapiens
gaccggagttttatatgtgtgtgtaagggggtggtaataaaattatcagtattgtttaaatccgttatgaagagtaatacagctgaggataatttagctcagttgggtttgggttagagc

SEQ ID NO: 2984 - DNA, 120 bp, Homo sapiens
gtgcgaggaggagggcgcagacagctctaactactgagctagcagtaaaataggaggagacaaacatgtattccagctctgctccttttgagctccctctactcccacatctacagctgc

SEQ ID NO: 2985 - DNA, 120 bp, Homo sapiens
gagcgcgagtgaacaaggaaggaactggagggcatgagtgctggaaccggctggctgcttcagtaccagcaggggtgaactctgtgtgggccccgtggcagcatccaggctgtggggtgc

SEQ ID NO: 2986 - DNA, 120 bp, Homo sapiens
tggcgttttaaccggtgacccacccttttctgcctagaatttctctgcctcctgtccccatcagttgcttttttctaattactataaaatgaatttaaatattaactataaaagaattta

SEQ ID NO: 2987 - DNA, 120 bp, Homo sapiens
ttccggattctaatatcgttagtttggctgtggcaagtgactcaaatgtgtgggtttgaatttccttatctaatacgtagaagaatggcaggcttagtcaacccttcagatttataacat

SEQ ID NO: 2988 - DNA, 120 bp, Homo sapiens
ttgcgtctttgaatagcaacatgaggttaggtctccctgtttttattttcctgaatctgccaacataggatgcacaagtttgaatgttgtaaagtttttctttatcttcatctttttaaa

SEQ ID NO: 2989 - DNA, 120 bp, Homo sapiens
cctcgagagagtttaaaactctttttttcttaacatggaggcttgcagaagttggtgatactgactttctttgattccttgtgccagacttacatagaaactaccaagctacaaagaagc

SEQ ID NO: 2990 - DNA, 120 bp, Homo sapiens
ttccggacgccacttaagactaagcccgaagctgccgatagccatacccagctgattctgatctttgttctattgtttcagttgattttgtttacagtcttttaagaggcatggttttgc

SEQ ID NO: 2991 - DNA, 120 bp, Homo sapiens
cctcgccaccagtaaaaagctaagtaagtcagaggcccacctgtgagagaaaatgaaaaatctgtgtttttggctaaagagggcaaattatctctgttgccataaataaggtttcagaag

SEQ ID NO: 2992 - DNA, 120 bp, Homo sapiens
ttacgacggcacgttttgtgaattaaagtcaaactctactgccagaatgatttacctgctaacattaacctgtttctttatttgctttattgcaacgttttggtgctatttctttcattt

SEQ ID NO: 2993 - DNA, 120 bp, Homo sapiens
tcccgactccttagggtcactcctcagggtcactcctcgtcctggggaccagattccaggcttcacaggaccggagaaggaggagcgcgtcctcccttcccaaagcgccagctcatttag

SEQ ID NO: 2994 - DNA, 120 bp, Homo sapiens
tctcgtcgctgatgaggggtagcatctttctgatgctggtgactgtgagtgcgtctcgagggatgggggtgctgagcctaccgcttcgctcgttagggaacaaattgctgttttggcccc

SEQ ID NO: 2995 - DNA, 120 bp, Homo sapiens
ccccggcggctcctctgggcgcgggcggcagccgcgctcgctggcaaatcgtgggagggaggaggagcggcgctggcaggcaagtccgggggaccgtcgcagcgcgggaggccaagaaaa

SEQ ID NO: 2996 - DNA, 120 bp, Homo sapiens
agacggccgccccgggcccggctccgccccgccgggaaggggctccctgcagccgccccagggcagcaccccgcgcggcgccgcgcggagctctccaggacgagctgcgtgaggcgcggg

SEQ ID NO: 2997 - DNA, 120 bp, Homo sapiens
gctcggccttcctcgctctcctggtgccaggacccgcacgcacaaggttcggaagttttttcgcagtgtctgacccctgccggtcccctgtatttaccacctgaccctctagcgcgctta

SEQ ID NO: 2998 - DNA, 120 bp, Homo sapiens
tggcgctcccctccccaccacacaccctttccgcccacggggtcacacggaggacgtctgacccttactcctagggctacccaccctctggtttccaggcagctcctgcttgcggagaca

SEQ ID NO: 2999 - DNA, 120 bp, Homo sapiens
gagcgtcaagttgaggatgagaaagtctcgagggccgggcagctgtgcgcgcagaacccccgccccatctgcttttagatttcccgggtgcggctggagcccctctagagcgccggcctc

SEQ ID NO: 3000 - DNA, 120 bp, Homo sapiens
ctccgctggccgcagggccttcacctgcgcctgtcgccctgtccccttgcccactgcattttcctcggggagagcatcttccacagcatgcgtcccctgccccccacgccccgagccccc

SEQ ID NO: 3001 - DNA, 120 bp, Homo sapiens
atccgccctctctcccttgcaccccatggcccccagctctgccaggacctctgtggatcttgggatcccccatccaacaccctagagctcctgcaaccctccagctaggctcaagagtga

SEQ ID NO: 3002 - DNA, 120 bp, Homo sapiens
cagcgcacaaccctactccatgccaaggccaggtggagaacttcgggctgaggggcaatccagcctctgctccgtggcccggtctagcctgtgactacgtgtgtgtgtgtgtgtgtgtgt

SEQ ID NO: 3003 - DNA, 120 bp, Homo sapiens
gtgcgcgcgcacctgtgtgaatgtattcgcctgtgtgctcttgtccacgaaagtgtgtcttcaccctctgcctgagtgacagtgtgtaggtaccagtgtacctttgtccctctcccaagt

SEQ ID NO: 3004 - DNA, 120 bp, Homo sapiens
aggcgcctgtaaggggcatacatgtgtccttgtcttcttgactgtgtggggcacacacatagccttaacagtgtgtgtgcatgtccatgcaggcgtgcttggcacctgtgtgtgaggctg

SEQ ID NO: 3005 - DNA, 120 bp, Homo sapiens
tcccgttggacaggtggaggtgagggcggaggtggcctcaccatccatcttttggggttgaggctgtggttgaatgcagtgagcaccccagtccttttgcccacgccagccaggccctcc

SEQ ID NO: 3006 - DNA, 120 bp, Homo sapiens
ctccgactgggcccgttacctgggatgggtgccagccatgggggaaggggtgtgatttcccttgtgtcatcctcagtgccaataggagctggctggggaaatggcagactcttctgaggg

SEQ ID NO: 3007 - DNA, 120 bp, Homo sapiens
aagcggcgggaagccatggggctgggtctgtgtctgcgtgtccccacccccagggcccggcatcctcgcccacagtcttcctgcctgctcaggccctgctgttcccccctcaggctggct

SEQ ID NO: 3008 - DNA, 120 bp, Homo sapiens
gcccgccgactggagactccctactacctggtgggccggaggccagctggagggaacagctccggccagagtgacaactgcagcagcagcagcgaggccaacgggacggggctggagctg

SEQ ID NO: 3009 - DNA, 120 bp, Homo sapiens
gggcggcccgtcgctgcgcagcgcctacatcacctccctctacttcgcactcagcagcctcaccagcgtgggcttcggcaacgtgtccgccaacacggacaccgagaagatcttctccat

SEQ ID NO: 3010 - DNA, 120 bp, Homo sapiens
catcggcggtgagcccggccgcgcgcgtcttcccggggccactcccagacttctgcccgcaggcggcgccgtcccactccccggagggcctgaggccgggggctcttccgctttaggtgg

SEQ ID NO: 3011 - DNA, 120 bp, Homo sapiens
ggccgcggaacccgaggccgggggtgggggagacttcgcccgcacagcggccttcaggccttgcctaggagcgtgcgggccgaggacagatgagcccagcgtggtgtcaggccgggccag

SEQ ID NO: 3012 - DNA, 120 bp, Homo sapiens
atccgcatccaccgtatccccaagcccctcaagcagcgcatgctggagtacttccaggccacctgggcggtgaacaatggcatcgacaccaccgaggtgcggcctccggggctgggcctg

SEQ ID NO: 3013 - DNA, 120 bp, Homo sapiens
cagcggcatgggacagagggcagctaagaaggcttggagggccctctgaaccgcagttaggtctgggggcttggtactcactgaggtgggaagctgggctgctctgggcgctaaagtgat

SEQ ID NO: 3014 - DNA, 120 bp, Homo sapiens
cctcgctgccaccctgtgtggagcttggagttgtgagagaggcctcaggtccctcccatgcctcccctgttcctgaggcctgccagggtggagaggggctggctggaggccacctcctct

SEQ ID NO: 3015 - DNA, 120 bp, Homo sapiens
gcccgccttctgcacgccgggcgagtacctcatccaccaaggcgatgccctgcaggccctctactttgtctgctctggctccatggaggtgctcaagggtggcaccgtgctcgccatcct

SEQ ID NO: 3016 - DNA, 120 bp, Homo sapiens
gggcgtgggggcacgtgtgtgtgagaccatggccctgatctgtggaaaacctggagaggggacctccacaaggccactgagagagaaacagccagggtggagtcaggagtagttatggag

SEQ ID NO: 3017 - DNA, 120 bp, Homo sapiens
cagcgtaagtaggtggacacgatctcgcaggtgtccctggggccgagcgagtggagggccagcctttgaaaggagccagtctatgggggacagaggggagctgcccttccttcaggagga

SEQ ID NO: 3018 - DNA, 120 bp, Homo sapiens
gagcgatgagaaagaacaagaacaggacaaggacagggagctccaacaggcagagctccctaaccgttccccaggctttggaatcaagaaggagaaggtgaggggcaggggccctaggcc

SEQ ID NO: 3019 - DNA, 120 bp, Homo sapiens
gcacgctggtcaagcttccacggcccttagtgcaggctaagggtgaactgtgcctttgctccaacagacaggctgggacacgtcagaaagtgagctgagtgagggtgagctggagaggcg

SEQ ID NO: 3020 - DNA, 120 bp, Homo sapiens
cggcggcggacactcctacagcagctggatgatcaccagtgacccaatgagctgttctctgcctcgggtctgtgtgaggccatggctcctgggccaccctcaccgtctgcctcagacttc

SEQ ID NO: 3021 - DNA, 120 bp, Homo sapiens
actcgtgactcatgatcttcaaatgcatgcaagggaaagagccaggtcatatgtgttagaagactctcaactctgagcaaagtaatgatttctattctcttccagctctcaacactgttc

SEQ ID NO: 3022 - DNA, 120 bp, Homo sapiens
taccgggcatagccctgaacctgcacagccaatcctatacccctgatctacacaaatccccttatactattgcccattggaagaaatcaagacagctctttgtgggagctagaggggaac

SEQ ID NO: 3023 - DNA, 120 bp, Homo sapiens
ccacgagtctctgccttacactttacacttcaacggcactgagcagctctgagagggttctctgaacacatcatgctgtctcaatttaatgcctctgctcatgctgtcctctctacctgg

SEQ ID NO: 3024 - DNA, 120 bp, Homo sapiens
tcccgatgcttcctgcatctctacagaactgcacttagacagctttatgttataattacatgtttaatgtgtttgtctccccctctagactgaactcctgggggcaggatgactgtctta

SEQ ID NO: 3025 - DNA, 120 bp, Homo sapiens
agccgccctgccacaaaataaggctctctctgccctcttgcctccaagacaatcagaagcagctggtagtgcttttgtactgttatgacaccaacttgacatttccctggatctgtgggc

SEQ ID NO: 3026 - DNA, 120 bp, Homo sapiens
ggacgccaccgcgacctgttgccccataaatgcacaagagattcttaattctttagtcagccaccatgccagcaataattaaacaagcccaaagggagcaattcatagctgctattggac

SEQ ID NO: 3027 - DNA, 120 bp, Homo sapiens
agacgtgagcacttcatgagggagcagattcaccaagtgtcctgcctgccaagggcctgaggataatgagtgcttatatgaggttgattctgctgagtggcaagtaaaaacaaaataacc

SEQ ID NO: 3028 - DNA, 120 bp, Homo sapiens
aaacgagaagtctgtccaaagtaaggggcccaagcatactctggacacagaaggggtccaaacaaagatgctctttcctggtcagatatctctggcccatccattctagaacattgtctg

SEQ ID NO: 3029 - DNA, 120 bp, Homo sapiens
ctacgaaatgagcccatataacagcaactctaccaccccagagttcaataaaatcccaggagcacaggtctcaacctcagctggtgtatgatggttttacccttggtaaacgcccccagt

SEQ ID NO: 3030 - DNA, 120 bp, Homo sapiens
tctcgtttcctctgacctctaaagaatggagtatgctaggggtcaggacccagacttttcctcttctcacttctttggtgatctcatccagtcctctggctttaaataacatccacatgc

SEQ ID NO: 3031 - DNA, 120 bp, Homo sapiens
ccccgccgacatctgctctagccagtcttccccatatcagtgaatggcacccttccatttgctccaaaactcttagagttatccttgactcttctttcctcacatcaattacgttagcaa

SEQ ID NO: 3032 - DNA, 120 bp, Homo sapiens
ctccgcttggtccaggtcaccagcatctctcaatgaggttcctgaagaggcctccttactggctcctgcttctgtgccagccctctactgtctcttctcatcactctccactgcttcccc

SEQ ID NO: 3033 - DNA, 120 bp, Homo sapiens
tcccgacactgacgcaaaaccccacatgatctcttctaccaaattggctaacaagaagtttgatacaatcaatgatatggaagaagtggggagacagttcaacttgtatgttgcttgtgg

SEQ ID NO: 3034 - DNA, 120 bp, Homo sapiens
tttcgctcaactttccctggagccttcgcccgcagtctcctcaaggccctgccagctttcacgcacggtctcactgagggtgtcaggcgcctcccacacacgttaggttctgctacggca

SEQ ID NO: 3035 - DNA, 120 bp, Homo sapiens
tcacggattctgtggattaggaatttggatagggcatggaggagatggatttttaatgctccatgaggtcttggacctcaaccaggaagactgggtgcacaggagctggaacagctgaag

SEQ ID NO: 3036 - DNA, 120 bp, Homo sapiens
aggcgtggctgggaggctggctcagctgggtctcttggctggagcaccacacgtggcctctctggcatggcagcctcgggaaatttgacttcttacatagtggctcaggagaaaaagaag

SEQ ID NO: 3037 - DNA, 120 bp, Homo sapiens
atgcgggacaggcgagactcactccttttggcagggtttccccagataaagcaagcagagagtgtggaggggagtggaggatgagaagctgggaagaaagcatcttagccatccgtggtg

SEQ ID NO: 3038 - DNA, 120 bp, Homo sapiens
gtgcgcacacacgcatgtgcatgtgtgtgtgtgcaggcacacacacaaaatctgtgagggcaaacaggtttgctgggagtagccagacttgagtaaagacagatggtataagtgagctgg

SEQ ID NO: 3039 - DNA, 120 bp, Homo sapiens
atgcgtacagaggccaccacggggcagtagcagccagaagagaatgaatggtgtaaagggttgaataggggccccctcaagagagatatgtccaagttctaaacccctgtacctgtgaat

SEQ ID NO: 3040 - DNA, 120 bp, Homo sapiens
ggacggagagggagcttcaagacacagagacacagaggagaaggccatatgaagatggaggcagagactggaggcgccattgccaagcaacactgcggatcacctgcagctgccagaggc

SEQ ID NO: 3041 - DNA, 120 bp, Homo sapiens
cagcgtgtaccccaacctagaccattcatcccttccatcacaccagcccctgcccctcaacattttgcacactttgagccctgatccagggatcttccctttccccggcgacacggctca

SEQ ID NO: 3042 - DNA, 120 bp, Homo sapiens
cctcggtgactctcccaaaccaggccctgcgtttcctcaagcagccactggagggcagcaaagtgcttatgcaaaaatcccaccccgcccaggagagcagccaggacacctgggacttgg

SEQ ID NO: 3043 - DNA, 120 bp, Homo sapiens
cctcggaaggaagagtagggaatggaagaactaagattccggggcttccccaggtgataccgaaggagccataggtgtgcccgggaatgagtcccagactcgtgtgtgcctcccgggccc

SEQ ID NO: 3044 - DNA, 120 bp, Homo sapiens
ttccggacagtcagattcctggctgcctccagctttacaaaatccagcccaccccttcctgggcccagccccacccaggccaaaaatgtgaagggcctgcagactcccttcctcctttac

SEQ ID NO: 3045 - DNA, 120 bp, Homo sapiens
ctgcggtttccttaatcttgcattcctgttcccctgcccttcctacttctgacgcctctcctggtgtttcaggattcctcactgcctggattggagatggaacgcatagactttggccct

SEQ ID NO: 3046 - DNA, 120 bp, Homo sapiens
ctgcggcatcttctgcccggcttccccagctctgcaaagaagccatttctcaaatggctgtgatgcgtgtgtgacactgtttattgccgaggacctgtccctcctcccccaagcttttgg

SEQ ID NO: 3047 - DNA, 120 bp, Homo sapiens
gcccggaggagaggaggtggaggagggtgggaaccgggtgagaaagtcagtggagagaaatgttctggtgcctctcccgccctatcctggctatgaacttccatgtggcagatggaaaaa

SEQ ID NO: 3048 - DNA, 120 bp, Homo sapiens
gcccgctggcagtgaggctaggaaccagaaaccagaaatcttgcctcccagctcttgtctggaagatagaaacctcagagtgcaaaatctggcgaggggtttcaggaaagacgggaggcc

SEQ ID NO: 3049 - DNA, 120 bp, Homo sapiens
gcgcttccaaagctcaggttggtgggagttgaggggagggtccccctgggggtctggggcctcctcctacacttctcttcaccccactcttgcacagtctccttgaggcgacacacgtgc

SEQ ID NO: 3050 - DNA, 120 bp, Homo sapiens
ctacggtgggagagggcaggatgggcagacgagagaccagggggtgctgggtgctagttatgggataggctggagctaggggaccacagagtccgcaggcctgagggtcaggacgaggtc

SEQ ID NO: 3051 - DNA, 120 bp, Homo sapiens
ctccgagggccttcgtctacctgaaactgagaggaggtaagggaatgagtcccaaagcccctctcatcaacattcccctgccccatgggccccaggggagctgcagatgaacacggcagg

SEQ ID NO: 3052 - DNA, 120 bp, Homo sapiens
tcccgaccagggccttttggagtgttgatctcctaatgagataattggcactgcagttccccctcccctgtgactcacagaagactgatgggcagtgctgaattcaaccacatagcctgt

SEQ ID NO: 3053 - DNA, 120 bp, Homo sapiens
gtgcgtcctctgccttgctctgattgtacctccgtgggcctggccctgccccctgccacacctcttggggatctgttcatgccacaaacatctcctgggtacctactatgtaccaggccc

SEQ ID NO: 3054 - DNA, 120 bp, Homo sapiens
atgcgctacagagagagggaaatagggtagggaggaagagggagggacagagctgcacacacttgaaggatgggagagagggctgtgagcagatcctaagaacagacagaggtaggtgca

SEQ ID NO: 3055 - DNA, 120 bp, Homo sapiens
gcacgagtccagtgtggctacagcagaggggagtggggaggtcagagagcttgcaggctgtgggaagcgattgcgggatgctcaacggaggaacgaggggacctaacaactccagctgct

SEQ ID NO: 3056 - DNA, 120 bp, Homo sapiens
aggcgacgggggctgggacagggagtagccatgagggcagagataagttttcagattctggataggagtgggggccacagcattgatgtggggcgtgatgtagggggtgaggagagggga

SEQ ID NO: 3057 - DNA, 120 bp, Homo sapiens
gcacggtgccctccatacagaaaaagagctgtctgcttctcaatgctcctattgttattccaaaaggaagagacccggatggagtcctcagggagcacatgatgtgttgcaggaggtgag

SEQ ID NO: 3058 - DNA, 120 bp, Homo sapiens
acacgaggccaacttagggggcaggacggagagagctgaggggtgtggagcgggcagggcagggcaggcaggaccccaggcaggttttctggaggaaaagggcagcatcccagcagtgaa

SEQ ID NO: 3059 - DNA, 120 bp, Homo sapiens
aagcgcccagtccacgcccacctcccacttctgccagcacccaccctggtagaagccagagagagcatctctgttttctgcccagagatgttgaagaggagggactccagatctcaccat

SEQ ID NO: 3060 - DNA, 120 bp, Homo sapiens
tcccgggcctactcactcctgggctgtctccctgccaccacctgctcagagcatagagtcccacagaccctcctccagaaggctcagagaggggcctaagaatcccttcccaagttctca

SEQ ID NO: 3061 - DNA, 120 bp, Homo sapiens
taccgtacagtgcctcccagttccccaagacacatgcctccctgcctgcctgcagacaggccctctgtcctctgctctaggaaagactttggaacccccagaggccaggctagggtcctt

SEQ ID NO: 3062 - DNA, 120 bp, Homo sapiens
gctcgacgtggtccagggggctctgggctgagcccacctccccaccagagccctatccaggaacagacttgggacagccgcagtgtgtaagctccttggccaggcagtcagaaccttgac

SEQ ID NO: 3063 - DNA, 120 bp, Homo sapiens
tgccgtactgcttcaggaacttggggtctcagcctgccagtgaggttaggtgaggttaatggcagctccttcactgagccaggaggctccctgcacggtgtgaggtgtgacacgtccagg

SEQ ID NO: 3064 - DNA, 120 bp, Homo sapiens
aagcgccacatccctaccctttctccccagccaaagctgtttcacaagccagcagcctcgtaaatatttcagcagtgtctgtgtagtcgaggctgtgaagcctgtcctctggagcacttg

SEQ ID NO: 3065 - DNA, 120 bp, Homo sapiens
cagcgagatctgggagatgtctcagggcctgttgcaagcgtttgatcagctgcattttcaaaaagacctttccctgagcagctgacagtctctggggtgaaagagatttgcagacttttt

SEQ ID NO: 3066 - DNA, 120 bp, Homo sapiens
agccgacccaggggcccagttggagccttttggctgtagctggcctcagtcattcagtccacaatgcagagagaacccctactgggtggctgacactgtgccaggccccaccctcaagat

SEQ ID NO: 3067 - DNA, 120 bp, Homo sapiens
gaccgaggtctcagaaaccctcagggaagttggcattttaactggtctttgaagaccaggtaaggcttttaaaaatgtatattaaacaaattaatttttcccattatatatgtagttaag

SEQ ID NO: 3068 - DNA, 120 bp, Homo sapiens
caacgatccaacgccctccatccttcagaggctgtctgagtccggggacacaactcccaccctcctctcctgccagccgcggcccgtggctgctctcttcacttcgtcccgcttcgcccc

SEQ ID NO: 3069 - DNA, 120 bp, Homo sapiens
ccccgactgtggatctacccgctcccttctccctcagtccccaaagcaccagactcacaggcctgctgtgtgacccacttttaccgacctttcggggagagtagagggcatttgtgactc

SEQ ID NO: 3070 - DNA, 120 bp, Homo sapiens
tcacgtcaactgtcagacagcgctgctccgaatcccatcacagtgctccagcagggggcgtcctcaccggccgcggccacagccacggctcaacccggcctagctcccagacaccctcct

SEQ ID NO: 3071 - DNA, 120 bp, Homo sapiens
caccgcctgttttccaccgtccccgcctgctctttcaagccagcagcaaacaacaccctaatccgtgtctttattattcaaagaccttaagcactctttcccacctcgttcccatcttga

SEQ ID NO: 3072 - DNA, 120 bp, Homo sapiens
aggcggggggtcatgcagtgaacagctccgcatagcccagcttcgcagtgagcccagcctggagtcagtaactaccctcattccaatctggccgtgaaacttggggcaacataagctctc

SEQ ID NO: 3073 - DNA, 120 bp, Homo sapiens
tcccgacctcatgtgctatgtgctgtcgtgaggagaaaatgagaccacgcctggaggtaaaacgcttgtacaaatggtcaggcgccttggagtgagtgctcagtatagtcgtgttaatag

SEQ ID NO: 3074 - DNA, 120 bp, Homo sapiens
acacgtgcctgcctagtctgaggccccagccacatgcttctgccctcctgggggtgtctggacctgagcgcctgtccagcggggccaggagacggactgagaaggggtaggggaagctgt

SEQ ID NO: 3075 - DNA, 120 bp, Homo sapiens
cagcgagaggcagtcccaggggctggggtgaggagtggcagaccccccagccttctccacacttagagtctaagcatctacaagtgagaggtcagccactcatgtccgccccataggctt

SEQ ID NO: 3076 - DNA, 120 bp, Homo sapiens
ccacgtggcattgcgtgtgagaaccccgggagcccagggaaggagcagccccccacccaccgtgtcccttcccacttcttccaacctgccccgggctgggggagccgggctgcaagtgcc

SEQ ID NO: 3077 - DNA, 120 bp, Homo sapiens
gggcgacgtcgtccaccgaatccacagcgtggcgcctcgtcgtccacaagtcctgggtctgggctctagccagatgggggtggagtggaggacacagggagtccctcatgcttgagtccc

SEQ ID NO: 3078 - DNA, 120 bp, Homo sapiens
tgtcgtcctaggttagtggcagacttgcttttgctcccaaatctacaataaaaagagaatgaactggaaaaatattctataaaaaatggttgaataaacaactataatattacttgatat

SEQ ID NO: 3079 - DNA, 120 bp, Homo sapiens
caacgttagacatggtagactgtggaatgtaaaattcaccaacattcagaacaagtcctactggtcaggtaacatcagttaatttcatagcaaaatcttcactatagagacaattacaat

SEQ ID NO: 3080 - DNA, 120 bp, Homo sapiens
gcacggttctgattatgtcacacccccttactcctatttccctcaagtcccacaccctcttgctctgctcaggctgtcgcctgatctaaaataccccctttcatctctgcctcttgggat

SEQ ID NO: 3081 - DNA, 120 bp, Homo sapiens
caacgtcaattgaaaatagttgtaattttcctgctgggtcacattttcaccctcatgaatacttgtttatttccccccatgtattatttagtccatagctaggagatacactaatgtgaa

SEQ ID NO: 3082 - DNA, 120 bp, Homo sapiens
tttcgggaaagctgaaacgatccctgcgtgcagcaagaaactcagtttgtggagcactttaaaccaaaaggtgctagagaatctcagctgttattgatggggaaccccagaggtggagaa

SEQ ID NO: 3083 - DNA, 120 bp, Homo sapiens
tatcgaaagtctctaatacaactggcggacagaaggattatcttgaaaccaaatgttctttataagcaaatcacttgcagagagtaaacaaaatgttctcaatccaacatgaagactaaa

SEQ ID NO: 3084 - DNA, 120 bp, Homo sapiens
ggccgcaagctcgtaaatgtgaggatgggtatgagagcaaagggaagctggaaaagaaagaagatcagatgggattactatgggtccttgtatcaccctagagaacagcacaattaatga

SEQ ID NO: 3085 - DNA, 120 bp, Homo sapiens
gagcgagtcagaaccactcgggcaaagcgtgaccactttaggttcaggaatccctggaagaaaacataggagcagatgactgtctgcaacaggaaacaaaaaaaagttttggggaggttc

SEQ ID NO: 3086 - DNA, 120 bp, Homo sapiens
gcacgtacctccatgacaaactggccagaataggttcctgtcatggtggagctctgtcctgcagccaggatccccactgcccaaatgtagagtgcagcaggcccaaagtaacatcccagc

SEQ ID NO: 3087 - DNA, 120 bp, Homo sapiens
ctgcgcactgtgccagaagctaggctcaagtctggacctcattccagaagctttcagtctaaactttactggatgctccttcgtttctctgcctagtcctttctcttctccaagctccta

SEQ ID NO: 3088 - DNA, 120 bp, Homo sapiens
agccgctggagcagcagccccacaagggtggccaacagaaggatccagagcaactaagaagaacaaaatctcctgtaacactcattgaacaactgagtttttgtctgtttgtttgtttag

SEQ ID NO: 3089 - DNA, 120 bp, Homo sapiens
aatcggattcaatatttcctggatccaggtaggcaatgctcataagaaaacctggtccggtgaaagcccagagtttacgaaagctaaaacaagagtactgtacaagagaggaaaagagat

SEQ ID NO: 3090 - DNA, 120 bp, Homo sapiens
aaacgagaaaaaaaaagaattaagaaatctggatttgccccagttgtccaagcagcaagcatttatatcctgctacagctacaatttcctggaactctctgggactctggtgggggcagg

SEQ ID NO: 3091 - DNA, 120 bp, Homo sapiens
ctacggtatgagagaaatgaggtcctccaaagagcaaggaaagatgatgattaagggcaaatccccaagccacacagacgctgtctcgagctgccatgggttctgctgcttggggaatgt

SEQ ID NO: 3092 - DNA, 120 bp, Homo sapiens
ggacggagcagcttactcacgtgtgaagctggcagtggtaggaggattgaggctgtcgcagctgtcagcactatcactgctggagatctcatcatctgagttggaaactgatgagcccac

SEQ ID NO: 3093 - DNA, 120 bp, Homo sapiens
acccgagcccgtgaatgcatccattggtttcaaaggggtttccttggggagcccaccaagttggccccaaagcccctactcaccaccagctagccaggtacattaggattctgcccaggg

SEQ ID NO: 3094 - DNA, 120 bp, Homo sapiens
ttacgttctttctctactagctctggccaacattctcctactttcgtttcccttcagcccctctattctcaatcactcttagaataatgagatgggtagcagcagcacctttcccagtga

SEQ ID NO: 3095 - DNA, 120 bp, Homo sapiens
acccggctagacccacttatttttcctagtgataatacagcccggcatttcccaaagtgcgtgtcttatggtattaatagcttttacatagaaatacgactgctgtgtcaaaagggtttt

SEQ ID NO: 3096 - DNA, 120 bp, Homo sapiens
aaacgtgattaaggaacccactgtttccaaggtattttagagtgcaaataatgcttggaatacactttgggaaatactgctccaggcactcaattttgaaggacattagcagtcaggaaa

SEQ ID NO: 3097 - DNA, 120 bp, Homo sapiens
acacgaatctgctcagcagaaatgctgtcaaagcgggagccatgtgtgatgagacacgaaccctcccttgcctcagtaatgccagaatctccccagactatgatctcactagttgctaat

SEQ ID NO: 3098 - DNA, 120 bp, Homo sapiens
gaacgacagggctgcattactgcagagcagctacccagaatatactgtggtgtcaagagatgcctgctacagagctgcttttctggactgtgtctgttggaagcaatttgcctgctcttg

SEQ ID NO: 3099 - DNA, 120 bp, Homo sapiens
agacgtaataagtaccttagagaaggtatttcctaatctatccagattgcatcaaattctgcattcaagtcacaagatgtacctaagaaacctcagccatcagaagtctcagacaagcac

SEQ ID NO: 3100 - DNA, 120 bp, Homo sapiens
ggacgaatgacagggccatgtattttctctttcacctgatctcctccaagcacccagcatataagggatgctctgttcacagtaagagtcttcctgggcactgtacctagaaaggttctg

SEQ ID NO: 3101 - DNA, 120 bp, Homo sapiens
gggcgagttttcataaaacaacaaagcagatgtcagttgcggctggtcatattgaaggcatgtgaagagatcgggctgcggaggagaagatccctgatgctgttaacaatgcaaggatat

SEQ ID NO: 3102 - DNA, 120 bp, Homo sapiens
atgcgtttattttattctacttactttaattttagcaatgatgtaaaactgtattgctgggctgctgtcactgtctctgacagatcaccctaccacctgaaagggtaaatatgggttttt

SEQ ID NO: 3103 - DNA, 120 bp, Homo sapiens
ggccgtgtgcatattcatcaggctatcatccattattcataagaagttcacttcaactgttagaagaaaatgaggttgttgattgaaatgctgaagaaatgtgggcttttgtactccccc

SEQ ID NO: 3104 - DNA, 120 bp, Homo sapiens
tgtcgagtcctgcttgctgcttttccagttcattgtggtacactgaactggtctagtaatgctccttattcattccataagcatttaccatttacttaatatttgccatcagcatggtgt

SEQ ID NO: 3105 - DNA, 120 bp, Homo sapiens
gtgcgtgggatttagagctcaaatgactgctcagtaactacatgctagagatgaagtgaatgtgtcattagcgagccttcagttttccagtagttcattcaaaaactgtgtaagggcgaa

SEQ ID NO: 3106 - DNA, 120 bp, Homo sapiens
ccgcgggctaactgggatccgtcccatttccctgggcttgacgttctctgaatttttagctaatgtggaaagttacatttatttgcatttgtttatcgcttgctcacataggtctgtgtc

SEQ ID NO: 3107 - DNA, 120 bp, Homo sapiens
gagcgaacttagccagcacacccccggccgtgaagcagggaggtgaagcggggagagcaacgagccccacccgggtcttgccagctggacgttcttgtggggcagcgttgagcagcggtt

SEQ ID NO: 3108 - DNA, 120 bp, Homo sapiens
tgccgtggactttggattcaaacagccccagctcttctgcttgctagctgggtgactttgggcaaattaacatctcgaaaatctgtttcctcattcctaaaatgcgggtctgaaagtgat

SEQ ID NO: 3109 - DNA, 120 bp, Homo sapiens
actcgtttgtggcaggaaatgttcccaaattaatcagaagaattcagtgactaagaggatgtaatagtatatagcgcaggcactggaatcagctctgctgtgtgatcttggacaagctgc

SEQ ID NO: 3110 - DNA, 120 bp, Homo sapiens
ttccgtttctcttatctggggcaatacctgtctgaatagagtgactgttgggacgaaataggttagtaaatatgtactgtaaggcattagaaccttgcctggcacatagtaagtgctcaa

SEQ ID NO: 3111 - DNA, 120 bp, Homo sapiens
aaacgctaggtcttgttaccttggcttcccgtttaggattggaacccttgtgattattctttccctcccagtgatagacttctgtgcttacttcgcactcctaggcgttctgtaggtttg

SEQ ID NO: 3112 - DNA, 120 bp, Homo sapiens
cttcgaagagggactgggctaagcgttagggtatcgaagcggacccggggaagtataagcaagatggaatgctggggtgggggccggtgagacatggcaggagcacaatcatcagctgct

SEQ ID NO: 3113 - DNA, 120 bp, Homo sapiens
attcgcatgatccatcaaggtgcctacccaggaatgtgaccctggtgttaccctgtggttgctcttgtctacctgaagttggctcctgcagccactttctggaaggaatttcagtcgtgc

SEQ ID NO: 3114 - DNA, 120 bp, Homo sapiens
aaccggcacaagtagcaccctgagaggctcagagagtgctggaactgcagaggagcacttggaagccaacctgcttcctcccccacaggccctgagtcttgtctttgagaagtctcccag

SEQ ID NO: 3115 - DNA, 120 bp, Homo sapiens
gaccgagaagtcactgatggattagccatgaggacaaaccctgcatgggaagcttcactgtaaattcacaaccacaggcaacctctagtaaacaccctttatgtcctggcctacccctag

SEQ ID NO: 3116 - DNA, 120 bp, Homo sapiens
ggccgggaggggactgtcagcagtcctcctggggtgggggcgctacatgaagagcctcggcaagccatgcatgctaccggggcatgtgggccaaggagcacattcattcctcaaacactg

SEQ ID NO: 3117 - DNA, 120 bp, Homo sapiens
ctgcgacgtcagtgatgggtgggggccaggtgccctctttctgactgtgctgctgtgtgcctggtcactggcatgggggtgggggtggggatctgttgcagtgcacaccaaacaaaaggc

SEQ ID NO: 3118 - DNA, 120 bp, Homo sapiens
gcacgtggagaggaagaagcaccaatcctttcctcctttcaaaccttccctcttatctctggctactgtatctccaacctctgcatccctccgtcctggatgtatattcagttgagcctt

SEQ ID NO: 3119 - DNA, 120 bp, Homo sapiens
agacgggtgtcttctgggggtgcttgtcacttatcctgttcttcacagcgttatcccatggccagatgctatgggagaggcatgtctcagtatgggactgggggtccctgatagaatccc

SEQ ID NO: 3120 - DNA, 120 bp, Homo sapiens
cctcgctaccgccggggagacccaggatacctaaactttactgagttggggccactcaagcctgaacagaaggatcagtggagccaacatgtgagtttcttgatatgtgcctgttactcc

SEQ ID NO: 3121 - DNA, 120 bp, Homo sapiens
aagcgttacttactcatttccagagtttgggcaggagccatgacagcctgttgatgagcttggctgaatcatgaaatttggcctgggtttgagggtgggcaagaatggccgcttggatcc

SEQ ID NO: 3122 - DNA, 120 bp, Homo sapiens
tttcgttttaggtttactcccaaagcagctgaaagcagtgcacaggatagaaatgaaacaagggtacatttaggtgggtggctgctgcttcccatggcctcttgtgtcaactcccaaaga

SEQ ID NO: 3123 - DNA, 120 bp, Homo sapiens
tgccgatgttaccattcagtgggggagaaagatgtttgccagactggagcagcagataacggcaggttcactgcctttataccccagccacatggcacccagaaggaataagaacaccta

SEQ ID NO: 3124 - DNA, 120 bp, Homo sapiens
acccggcaataattctgttaatcaagccatgtcacccaggtctaaagtctaagcattgagattcttcccatgtcagccttggggcaatcattccttatctgtacttttgccgtaggcagg

SEQ ID NO: 3125 - DNA, 120 bp, Homo sapiens
gggcggttgctagcattgctaaaaggcatcctttctgttgggcagatgcaaagctatacattaggatgcttgcttgacaagctaagtgtgtgcaaggcacaaaagttgcacaaccacagg

SEQ ID NO: 3126 - DNA, 120 bp, Homo sapiens
ttccgtgtggccactgttgctgcttgctgcaacacaaaagcagacgcaaataggacatcgggagctacatgaaggggttagatggctttggaaccctgggctgcctggtgagcataaaat

SEQ ID NO: 3127 - DNA, 120 bp, Homo sapiens
tagcgccagccaggtgaatcttaaatcttgtagccacagtgattggtttagggttaggcatgttacccaagccaggccactcagagctttctctgagacatttcttagggcaagcaaaaa

SEQ ID NO: 3128 - DNA, 120 bp, Homo sapiens
ccccgtcttttctcctccatccccacatgaccactgatggaatcattagatgggaagttatgtatgtttagggtggctagtgatcatctttgctattacatgaggcaggagagtcaactt

SEQ ID NO: 3129 - DNA, 120 bp, Homo sapiens
ttgcggatgacaaccgttttttttacagccagcttttctgttttgttctgctccctctagaggtcccttcccctacctctgcctctgtccaaatatcttaatagtgatatcaaagaaggc

SEQ ID NO: 3130 - DNA, 120 bp, Homo sapiens
taacgaagttctgtggatgatgttgatgatgacgaatagtggggagcgattttcacagccaggagcttggctctcagcttttgtggcgcctcagactcttccctgggatgtgtagtgttc

SEQ ID NO: 3131 - DNA, 120 bp, Homo sapiens
tctcgcccctcccttccacaggaaatgctcccagacgacagcacgaacaagccctaattaagtctttcctcagatcccgacgtcttttcctccaaccacatcttgggtttagatgtgtaa

SEQ ID NO: 3132 - DNA, 120 bp, Homo sapiens
ccccggccctggtggctctttggacagttcacatagaacaagagacagagtaaactgatggaggagttaagatgcttttgatgaaaaaactggttgcaaattatttaagaacattttctc

SEQ ID NO: 3133 - DNA, 120 bp, Homo sapiens
ttgcgtttcttatatttgtgtctgtctctgaatagaagaatctcaatgtctttcaggatatttaaggatcatatacgtaaggtgcctcatgcttccttgagaagtctatgaacacatcct

SEQ ID NO: 3134 - DNA, 120 bp, Homo sapiens
caccgctttccccaaagtttaagaaccactggtattatagaagagaaagaataggtctaaaacaaaatctggaaggatggccacgtcaggaagccacaaagaaagagtggagcctatgaa

SEQ ID NO: 3135 - DNA, 120 bp, Homo sapiens
cctcgtgcttagagccaagtgaaccagctttttctgggaaggagagaccaaatcatccctgggaggatagagcctgtcttctgcagtgccccagatagcagcagccttagctgctgcctc

SEQ ID NO: 3136 - DNA, 120 bp, Homo sapiens
cctcggctcctgaattaccacgttgctagagtcagtctttctgacgccctgcctcaggtttccccctctaatccattctcccctaagggcagattttggagatggtacaatttttatagg

SEQ ID NO: 3137 - DNA, 120 bp, Homo sapiens
ccacgcaggtccagagaggagcctcaggggaagtgtgttaagagagagagcttgaggtgggctctgctccccaccttccctgttccctgtagcctctgtggctgcttccaggagctgggg

SEQ ID NO: 3138 - DNA, 120 bp, Homo sapiens
gcccgtgccttttaatttccatttactgtaagtgagaatctggtctgctactcagttataattcattcatttttcaaggctcatgacaatgctttctttctcaagccttgccttgcaatt

SEQ ID NO: 3139 - DNA, 120 bp, Homo sapiens
ttacgtagtgggtcattatcagtgaactaagaggaagttcagaaaagaggatactcagaaatagggctttttccttcctttcttccttccttcctttcctttttcttaagcttatataat

SEQ ID NO: 3140 - DNA, 120 bp, Homo sapiens
gcccggccaagacattttattactaagagaattgcagtgtgctatgagggtatataaatggtggacctagcttagtttggaagtcggagtgggtaatcaggaaaggcttccaagtaagtg

SEQ ID NO: 3141 - DNA, 120 bp, Homo sapiens
cagcgtgtggtaaacaggcccaaatgctgcaaagaggccaaggagaccaatctacaccaaatgggacaacttgcttcacagcacttgcaaaatgccaaaatgttatacagaggtatagat

SEQ ID NO: 3142 - DNA, 120 bp, Homo sapiens
ctccgccttttatgacatttgtgaccctgggccatcattacttaatgttctctgagtgtcagtctgctcatttataaaatgagaaagataatggctaccatatttgcatctaaaaggtat

SEQ ID NO: 3143 - DNA, 120 bp, Homo sapiens
ggccgaggcctccaatgtcctggttggagaggtggatattttggaccgtcccattgttgcctttgtgaggctgtctccagctgttcttctctcaggcctaacagaagtgccaatcccaac

SEQ ID NO: 3144 - DNA, 120 bp, Homo sapiens
gaacgtctctgaataaaggtatttgtttccctttgcacaattctggcatggtttgtatggtttgcagatatgcaaacatttgttcaaaaggctattcatgcgctctgaaggtggtgatgc

SEQ ID NO: 3145 - DNA, 120 bp, Homo sapiens
tgccgcacaatagcttccaatgcccatagtggagctattattaggtcaaggcaactcaaagtgctccttcattactgtcttcttttttttttttgaaggtacagtgatgatttatgtacg

SEQ ID NO: 3146 - DNA, 120 bp, Homo sapiens
ttccgtttatcttattcctaggacttcatacatcttactgttcgtagaacagatttctgtttcttctcagcttaggtatcacttttatagaaaactaccccttccctctctacaacacac

SEQ ID NO: 3147 - DNA, 120 bp, Homo sapiens
gaacgaaaggtcacaactgaaggggacattctggaaatggagccatttgatgggaaactttaaactaggtttttttcactcatagatacaagaatggtaattaggctgagtaataagatg

SEQ ID NO: 3148 - DNA, 120 bp, Homo sapiens
atacgtatagaaaaatgcaatgactgtatagcttcataaattttcagtgcacagcaacccagaagcccacccaacttctcctaatcactgcctttccccaaagataactactacacccag

SEQ ID NO: 3149 - DNA, 120 bp, Homo sapiens
atgcgtgaaccacagcgcctggccgagtatttgttttttaataatacaatctttatagaatgcctcaactcattatgtcgctgtttgtatctggagtaagtcagcctgttggcccatcac

SEQ ID NO: 3150 - DNA, 120 bp, Homo sapiens
aaccgtctggtcctgggctcttctttgtggaggttcattttttaatgcaaggtacagaagagtatttatggaacaatcccatgtgagagagagactttttaaggacatagatgtatgctt

SEQ ID NO: 3151 - DNA, 120 bp, Homo sapiens
catcgaaggttatcattaggtaatgagatggaacttggtcttatgttccttttttcttttaaaaaaattatgatcatgcattgctccaaaatttaaaaataaaaaactacttaaaatgac

SEQ ID NO: 3152 - DNA, 120 bp, Homo sapiens
caacgttatgaattatgagaacctgttccgaggacatgagctagtttggctagatgggaacattcatactgggaaatatgatttaattattttggcaaggctgatattgggggctcttga

SEQ ID NO: 3153 - DNA, 120 bp, Homo sapiens
cttcgggccaagactatcttgttcactgaccattcccaagcacctagaacactgtctgacacatagtaggtgtccagtcaatatttgttgagtgaatgaatcctaaattaatgaacttca

SEQ ID NO: 3154 - DNA, 120 bp, Homo sapiens
tatcgtgtacagagctggcatagaagcttaggtatgattcaaatggcctgtttctgaaagaaacaagtttattctgtaaaactgccaagattgcatcagctatttgtattataatctggg

SEQ ID NO: 3155 - DNA, 120 bp, Homo sapiens
ccccgggggcgcgcgccgctctttaggaaggagcagctttgtttcccaccagccctgcactgtggcgagcgggccggggctgccgggcgacgcccggtcgccgtcgccgccagtgatcca

SEQ ID NO: 3156 - DNA, 120 bp, Homo sapiens
tagcgtgagcaggacgaccagcgccccggtgcccagcgcccccacgaagccggtgaggaggccgagcgccagcggccccgcccaacccatggggctccgctcgtacaggggctgcggcag

SEQ ID NO: 3157 - DNA, 120 bp, Homo sapiens
cctcggccgcctctcgccgccgccgccggctcggagaccccgacgtggtgttgagcggctcaggccgcgccagccggtcttcagaaagccgggacaactcggcctccacgtcgggctcgg

SEQ ID NO: 3158 - DNA, 120 bp, Homo sapiens
gggcgcctccaggagcgaccggaaatggccgcactcctccggggtcagcagctcggccagacggacggctgcgtgagggcccatagcgtccacggcccccgccggagccagcgcccaaac

SEQ ID NO: 3159 - DNA, 120 bp, Homo sapiens
gagcgtgaggaccaaggcgctcgccagagtccgcgccgccatccctggcgggaaccagggaccgaggactgtgcggggacggggacgtggacgggctccgcgccggtgatgggggagggg

SEQ ID NO: 3160 - DNA, 120 bp, Homo sapiens
ttccgaacgcccgcggattgtgggagggaggaggctccgaacagtcgggaagcctagtggaggaggggactggggacaagggggctgccaacacccagcgacggagacggggactccgac

SEQ ID NO: 3161 - DNA, 120 bp, Homo sapiens
tcacgaaactcaggaactggggtaagagggcttgcaacacccaggaagggggttctcagccccccaggaggctaggattctgggcttttacattgtagctcctgccctaggcctcctaat

SEQ ID NO: 3162 - DNA, 120 bp, Homo sapiens
aaccgttcccctttacgaaaagccctagaccccttgctctccattaacttcgatattcaatcaattcctacattctctttttttattttcttttgtgcagataggggtcttgctgtgttg

SEQ ID NO: 3163 - DNA, 120 bp, Homo sapiens
cgggactgagcagcccagcccgtcgagcgtgtccgctggatgtgggcggcttcctgggtcgaagggcaaaggggaaggcagccggcctgggcccgccccgtccgcgggccgccccagacc

SEQ ID NO: 3164 - DNA, 120 bp, Homo sapiens
ctccgcccccaggtgagctgagaacccactgcgcgcgggactctgctgcgcctgccctcccgggctgcagagggcaggacgcaccgccaggcaaggccgcggctctgcgctgatgccact

SEQ ID NO: 3165 - DNA, 120 bp, Homo sapiens
ctccgggagcgggtggctgcgggggaggagggcgagcactggacgggggcagcggagtgtagggtgtgagatctaaacagagggctccactggagggcttgcccagaaggcggcagtcac

SEQ ID NO: 3166 - DNA, 120 bp, Homo sapiens
atccgttcaatagatacatactgagtgttaactttgtgccaaacattggactgtgcaccagggatacccaagagagtccaagaggcacagccctgtcttcctggagctcccagtcgaagg

SEQ ID NO: 3167 - DNA, 120 bp, Homo sapiens
gcccgacacacacacactcaaggcttcatcagggataaaggccaggaaccggctttgccccaggagaaggtaggaggagggctgtgctgatgatggagggtccagagaaccttcctgctg

SEQ ID NO: 3168 - DNA, 120 bp, Homo sapiens
aaccggcacccacgcaggttctggaacttgccaaggtcagtgtcttttccacctccagaattatctcttccttgccactccccacccccagggctctgccctggcacaggaggagggacg

SEQ ID NO: 3169 - DNA, 120 bp, Homo sapiens
atgcgacagattatttgagactctgatagcctgggggtgatccataaacattcccgaactcctccaatgccccccagcactgtcatcagacatcttcaccctctgaagcccatgctgctg

SEQ ID NO: 3170 - DNA, 120 bp, Homo sapiens
acccgcaggtgttgcttcccagactgtggaatcaaatcctctggatgcacccaagaagcaggtactgggtccccatttaacagatgaggacacggctctgagcgctgcccgaggttcccc

SEQ ID NO: 3171 - DNA, 120 bp, Homo sapiens
agccgacgataactccagcccgccgggcccgaagagcagagtcctgcctcctccccaccggcttcagcctcgggcctcggctctgctcctccctcctacacacaccccggacgcgtctgt

SEQ ID NO: 3172 - DNA, 120 bp, Homo sapiens
gtccgaaatccagatccacacgtccgtatcccgaggcgggcgtgaactatccacccgtgtgcacgccagccgagcgagtggccgagggacacccccgtgcttcccaaggcctggctccac

SEQ ID NO: 3173 - DNA, 120 bp, Homo sapiens
ccacgaggagcagaaccccagcggtgggattctgtcgcgcaatgctgtgtggctccgactagggcccgccctccagcaaagagatgctggtgggtgctctcggttcacccccgcactcgc

SEQ ID NO: 3174 - DNA, 120 bp, Homo sapiens
gctcgcgggccacctggagctcccgcccctcggtggccagggctgcgcgtgaaagggggacgttcggacgcgggggcgcggagccagcgcgcgagcctcggagcctcccccaggctgtgg

SEQ ID NO: 3175 - DNA, 120 bp, Homo sapiens
taccgctcggaccctcccccgccgtagcctggggccggaagatcggctcggcagctcgctcctgcgggaggggcggcggcctccccggccgggaaccggcggggagggggtccgggaggg

SEQ ID NO: 3176 - DNA, 120 bp, Homo sapiens
gggcggctctggccgccggggcgcgggcatcccagcttctaggggagagtgatgtgagggcccggtggagacacctccttctcccgggacgagggctgagagattccctttggaaaggcc

SEQ ID NO: 3177 - DNA, 120 bp, Homo sapiens
ggccgagtctccggccgcccccacccccagagttgtttcaggccagggccggccgcaaccagctccgggcctttaggtcctcaaagttccgaagattttcaggtcgagccagtggcccag

SEQ ID NO: 3178 - DNA, 120 bp, Homo sapiens
gtacggttgtgcaggttgtgacctatacaaggtgggaggcgtggttgtgggtgagtgggattccaagctcggccttggcaggtgctgactcgttctgaaggagggcagggggcaccgttt

SEQ ID NO: 3179 - DNA, 120 bp, Homo sapiens
tctcggatgagccagcctggcctgcccttgatttagggctgctgagggtagacacagtgggagagcaaatggctagggttggcccctgtgggtcagggccagggctaaagaggacagggg

SEQ ID NO: 3180 - DNA, 120 bp, Homo sapiens
aatcgaaaagactcctgtccgctctcccagggtccccaacaatcagttcacactgcaggcaaagagacctttaaaaatacaaatcaggaaaacaccagggcatgtgattcctcgcttaac

SEQ ID NO: 3181 - DNA, 120 bp, Homo sapiens
aaacggatgtcccatgctacgtagctctgttccaaatttatatcttgcacaagagcaggacgcaaaccacagagtcatagctcaagggaatctgggaagggttgttttagctttccaact

SEQ ID NO: 3182 - DNA, 120 bp, Homo sapiens
cagcgcagaagaaacactgaaagcagttttagattaatgttgaggagcccgtctattatggacaacataccattcagctttttggttactaaaaaccaaatgcacatccaactgatacac

SEQ ID NO: 3183 - DNA, 120 bp, Homo sapiens
tcacgaacgctggtccagatagtcttccatcccccactgactgttagaagtgactctcagcttttgtccatctcgaagtttctgtgctcagtgtgcctctcagactaaaggcttcctttg

SEQ ID NO: 3184 - DNA, 120 bp, Homo sapiens
ccccgactctcgcttctcaggacagagatccaggggttgggggaggaaaaggttgaccagaagccatagcggagcagggagagagagtgtgaaagacagacccgcggccaggctcccagt

SEQ ID NO: 3185 - DNA, 120 bp, Homo sapiens
gctcgtagagggcccaagtggccgctataatctgaaagagcagatatcgtaatcccatagtacttcctattggctgcaggacacagttctgtcctgacactgaaatttgggtgtgtcagg

SEQ ID NO: 3186 - DNA, 120 bp, Homo sapiens
caacgctcacaacttgtgaagcagctgtggggtgggggatggggagggtttcagcagaggaagtgaggtcagtcaataattgatgcctgtctgagcttttagccattatctcccccagcc

SEQ ID NO: 3187 - DNA, 120 bp, Homo sapiens
gggcggggcaggaggaggggtccctggctcatcttgtagaatccccatattagagtaagacaccttagaggtctactcctgcttctaatacccacgtctttccaagtgtctctgaggcca

SEQ ID NO: 3188 - DNA, 120 bp, Homo sapiens
taacgaacgccttcattgagggcctcctctgagtcaggctcagccagccagcatctttgctatgagctgagataagcatcatttccgtctattctcacaaccaccctatgaggctggcac

SEQ ID NO: 3189 - DNA, 120 bp, Homo sapiens
gcacggtttactatgcctatttagcagatgggggactgaagcatggagaggtgtcactagcctacggtaacacaaccagcctgcattcctagtaggtagtttgacttcagagtctctgtg

SEQ ID NO: 3190 - DNA, 120 bp, Homo sapiens
tgccggtatgaagccattctgcttccctccccagctgccttgtgtcagcagagttccagggaggctccattccccacctctatctaaagctccatttgctggggtgggggccctgcctgg

SEQ ID NO: 3191 - DNA, 120 bp, Homo sapiens
cagcgtgtccctccatcctgactgtccctggcggggcgggggtgtctttgtcacccagctgcacaacggccaggaagggctcaaaccatcctcagggctaacccaaggccgtcctctggg

SEQ ID NO: 3192 - DNA, 120 bp, Homo sapiens
gtgcggatcgggagaggctgctgaagacaggaggggacaaatgggggacgaaggggcccgagggaggggactgaaggatttgggccaagtcgggagttcccgagggcggagtcaaaacgc

SEQ ID NO: 3193 - DNA, 120 bp, Homo sapiens
gaccgaggacccccgggctgagggtggggtaaggataggtagtgtccctccccgtcccacccccgcctgtcccttcctcggtggccccttcccggcgccccgattccaggcggcccctcc

SEQ ID NO: 3194 - DNA, 120 bp, Homo sapiens
ctccgctgctgccagccgatccccctctacccccacccactactccggccgccagacgttgcctacagtctcggctctgtctcccacggctgtgggtccggaccccacgggacccctatg

SEQ ID NO: 3195 - DNA, 120 bp, Homo sapiens
ccacggcctgagtccaaggcccgccccctcggggaggcggatgtgggaggcccggcccgggtgcgggccagcgacccgggagctgcgggcggctgggaggggaggccgccctgaggggct

SEQ ID NO: 3196 - DNA, 120 bp, Homo sapiens
gagcggcgcgggggtgggtcccggtcctgcagccccagcgaggggcgagcggcggccagtcggcgagctgggcaataaggaaacggtttattaggagggagtggtggagctgggccaggc

SEQ ID NO: 3197 - DNA, 120 bp, Homo sapiens
agacgctggaataagaaacatttttgctccagcccccatcccagtcccgggaggctgccgcgccagctgcgccgagcgagcccctccccggctccagcccggtccggggccgcgcccgga

SEQ ID NO: 3198 - DNA, 120 bp, Homo sapiens
gcccgccgtccagcgctggcggtgcaactgcggccgcgcggtggaggggaggtggccccggtccgccgaaggctagcgccccgccacccgcagagcgggcccagaggtgagtcgaggtcc

SEQ ID NO: 3199 - DNA, 120 bp, Homo sapiens
gtccgcggacgggaccgggtggcgggcggcctgacccccgcttcagtgggcccttccttcgggcggaccccagagtcaccgcagagtggtcgcgggaggctcagtcccagctcattagaa

SEQ ID NO: 3200 - DNA, 120 bp, Homo sapiens
ccacgcacagctcccatgaccctacctgagacttggaggggaatggacgagactggactggaaatcagaaacttggttctagtcgggtgacctggggtcagtgacttcacttctctgttc

SEQ ID NO: 3201 - DNA, 120 bp, Homo sapiens
acacgtcctccaggccgctgggtggacctggagtgaatgcctacttccacagctgttgagcctcccagcagagctcacctttcccagatcagtccttccagctgttgcttgaggaatctg

SEQ ID NO: 3202 - DNA, 120 bp, Homo sapiens
aggcgcgcatggtcagtcacctccttgccacgaccttccttcaggatccaggccaaaggggatcccagtctccccccaggctgggaccccagatttttccatggaggccagtgctgtgaa

SEQ ID NO: 3203 - DNA, 120 bp, Homo sapiens
agccgagcaaaggtgactcctcaagggaggatgatggttagatgtgaggagggaccagaataggaaaaggccagtgaccaaagccgagaaacaccacataccatccttttgcaagcctac

SEQ ID NO: 3204 - DNA, 120 bp, Homo sapiens
aggcggggatagtaccacgaaatgcgtgaggtgacaaagtgggttgtgggtttgactgtggaaagaggtgccttaactaaagaagttgggcatttgagagcatctaggcagcaagactag

SEQ ID NO: 3205 - DNA, 120 bp, Homo sapiens
catcgacagggaaaggggtctttttcactcttcactttgaggggggtgtttttactctttcccttgtttttacttctcattctttccctctcctctctcacttgactcaggtcacctcaa

SEQ ID NO: 3206 - DNA, 120 bp, Homo sapiens
acccgtccatgtggggcccggtggagctggtaggcatcatcgccggcccggtgttcctcctgttcctcatcatcatcattgttttccttgtcattaactatcatcagcgtgtctatcaca

SEQ ID NO: 3207 - DNA, 120 bp, Homo sapiens
aaccgccagagactggacatggaagatccctcatgtgagatgtgtctctccaaagacaagacgctccaggatcttgtctacgatctctccacctcagggtctggctcaggtaccaagttc

SEQ ID NO: 3208 - DNA, 120 bp, Homo sapiens
tgacgtgtaataagataagataatgggttcacagaaaatctctcattccgtgggattcccaaggtctagtacacaattatccactacagaagtcctgcctctctaagctttgcaactgta

SEQ ID NO: 3209 - DNA, 120 bp, Homo sapiens
gtacgtacatctattaaaattcagctggtcccacctgagcagtggagtgctcaatttcagggccccttttgagaaacaggagtgtgccagattcctgtgaggtggtgacagctaatcatt

SEQ ID NO: 3210 - DNA, 120 bp, Homo sapiens
agacgagaatttaagataaaggagctcggggttgtttaggtctcagggtatagctcagctagctattaaatgtgaacatgaatgcaaaagaatttttttacttacttatttatgtattta

SEQ ID NO: 3211 - DNA, 120 bp, Homo sapiens
tttcgccacatcagtcaggctggtcttgtgttcttgacctcaagtgatccgcctgcctcgtaaagaatttttttaatgaagataaaccattatttttgtgacaatggtattgcattcctt

SEQ ID NO: 3212 - DNA, 120 bp, Homo sapiens
attcgtccctaaatttcaaaccttgcgcaatgtcccttcacagacccctccaggtatcacgcagccccgagccccgagccccgccccgggggcctcatcccgccccttcgcgtccgcggc

SEQ ID NO: 3213 - DNA, 120 bp, Homo sapiens
gctcgttttcccccactgagcgcccagctcccgcagtttccccggccgtcgagcgccgtgggcggggctccagggcggcggcgcctcgcggggagggtcctccgtgctgggggcgaggcc

SEQ ID NO: 3214 - DNA, 120 bp, Homo sapiens
acccgaggcagctccccgcccgcccccaaccccgccccgctctcggagcctataaagggaggcgacccgcggcccgcccggctggcatcccccagccgccgccagccccgccgaggggag

SEQ ID NO: 3215 - DNA, 120 bp, Homo sapiens
cagcgccgtctctgaggggcgtccggcgccggagccatgaccctccgccgactcaggaagctgcagcagaaggaggaggcggcggccaccccggaccccgccgcccggactcccgactcg

SEQ ID NO: 3216 - DNA, 120 bp, Homo sapiens
tctcggtcctttagtgagacttgctgacaagtttgacatctaagatgttttgtcccagaaagcacaaaatatatggcaatggagagagagacccaggtatagctgggcacagctggtcac

SEQ ID NO: 3217 - DNA, 120 bp, Homo sapiens
aaacggcctgtaccttaggagacctggcacctctgaccccacattctggctgggattgccagcccttcgggacagggtccctgaccccagccctcccaagccactgtctgtagctgagaa

SEQ ID NO: 3218 - DNA, 120 bp, Homo sapiens
cctcggagcaccttgataggtgagcccaggggacacctatcctctgaatcccactggggaagagcccctgcctcagctttgggagtctggatggcctgagcctctacagacatgggccct

SEQ ID NO: 3219 - DNA, 120 bp, Homo sapiens
cagcgggcccccaggggcatcaggtgctggtcctcctccctcctggcctcgacccctaagggcttcgcccctcccaggggcctgtaactaagtcgggtcctgccaggcagggggcctgtg

SEQ ID NO: 3220 - DNA, 120 bp, Homo sapiens
tggcgagttcaggtggggtggggacagcacagactgttccaccgttgtgcatattgttgcttctgaaccacaaactgtataaatggatggttttttgcatctgtgtcagtgtggtgactg

SEQ ID NO: 3221 - DNA, 120 bp, Homo sapiens
ccccgcccaacgcacacacatcttgttttcttgcagcctgaagccagggaaataggctgggagatttaaacttacatgtatgggcctgagctggaggccccacgcttcttcacaacttga

SEQ ID NO: 3222 - DNA, 120 bp, Homo sapiens
atacgtgtgcttggcatgcctttcttcccagcttctgaggtctcccttgaggggcacaagccagatctgtagggacctgaggcattaccacctggcctgtgaggggcccaatcacggctc

SEQ ID NO: 3223 - DNA, 120 bp, Homo sapiens
atgcgtgagccaccgcgcccggcctcccaggatgagagtctgacccctgccggcctctgcttcttactccccgctctggctgcgctgctggctgtacctggcacacttcagaccccttct

SEQ ID NO: 3224 - DNA, 120 bp, Homo sapiens
tcccgaagaccttcccacccagtggtaaatacagtcatgccctcccctgtgacagccctgttttattcccatcagactgtgcatcgccatccgagactgtcttgacttttatgggtttat

SEQ ID NO: 3225 - DNA, 120 bp, Homo sapiens
gcccgccccacccgggaggatgcacgcttcttgcacagggctcaggagccttgtctgtcttcactgcttttttcttgcctgatgctagcacatggtagaccctcaatacagtgtgtgcca

SEQ ID NO: 3226 - DNA, 120 bp, Homo sapiens
tggcggccccagccagggcacctgcacctggccaccctgtcctccctagtcccaggaagggaggacatttgattaagaaaatggagattccccaagctccctgttttaacagctgctctg

SEQ ID NO: 3227 - DNA, 120 bp, Homo sapiens
tgacgatgacaaatattggctcccaggggctcaggtctaggggaggggccccctcacacctttgttcccagatacaaggctgccaggaaaccaactgcctgggcatagcctggcacctta

SEQ ID NO: 3228 - DNA, 120 bp, Homo sapiens
ctccgagtagagagtccaagtcccttggccaccagtctgtccccaccccctgccatgtagctattcccaggagtgatgtcggtgccccctcacccaggctgatggggactcctggccagc

SEQ ID NO: 3229 - DNA, 120 bp, Homo sapiens
agccgtgagttcataggggagggtgaggggtgcccagggcggggctagatcccacctctcagctgatgggatgacggcaccagcacagcagcctcctgccgtgtaggtgggtgacaggga

SEQ ID NO: 3230 - DNA, 120 bp, Homo sapiens
gtgcgagctgcgatgctaaaaattaacccagggatcgtgtttggcagagggggtgggggtggatgggaaaaggagcagggactcagaatattgtgtggtcggtatttcccctgccctgcc

SEQ ID NO: 3231 - DNA, 120 bp, Homo sapiens
gtgcgcctagcaagggcaggttcccatcatcaggctcgggggtgggcagtgggggtggcagctgcaccacaagaaaagaataggtggccaggcgtggtggttcatgcctgtaatcccagc

SEQ ID NO: 3232 - DNA, 120 bp, Homo sapiens
tggcgcctggcaaggccaggatgctctcatgcctgtttgtctctatagcttagggtggtgagaaggaagtcttcctggaggaaggggtgtgaggacagggtggaagagatggtgagtaat

SEQ ID NO: 3233 - DNA, 120 bp, Homo sapiens
cctcgcctgtggaaaaagtggtattggcatggtgggtatatgaggtatatgagaggtaggacccgaaagagcaggtccaaggtttgccagggagcagtaggaggaggggccagcccagag

SEQ ID NO: 3234 - DNA, 120 bp, Homo sapiens
tcccggttccatgcatgcaggtgctgtgctggagggagggagagcattcccatctaaggggagcataggggggctctggagacttggtggggtccacaaaacaggggaggtgggcttgga

SEQ ID NO: 3235 - DNA, 120 bp, Homo sapiens
ttgcgctgaatggcagcaggagaagaggaaggacagcaggaggccccttctgctgcccagcccaagctcatgaggctgggaagtgagggaggctgtgggattccccagctcaggagagac

SEQ ID NO: 3236 - DNA, 120 bp, Homo sapiens
agacgtcaggctggctggctgggaggctgcctggtcctgcaccgacaggtggatgaaatgaccgtaagtggggagtgatgggctcagagaagtgagacagaaaggaagctgagggctctg

SEQ ID NO: 3237 - DNA, 120 bp, Homo sapiens
tgtcgctcggaggtgctggaggtgtcggtggaggggcggcaggtggaggaggccatgctggctgtgctgcacacggtgcttctgcaccgcagcacaggcaagttccactacaagaaggag

SEQ ID NO: 3238 - DNA, 120 bp, Homo sapiens
caccgtgggcacccaggatgttgactgtgacttcatcgacttcacttatgtgcgtgtctcttctgaggaactggatcgtgccctgcgcaaggttgttggggagttcaaggtaagggtgtc

SEQ ID NO: 3239 - DNA, 120 bp, Homo sapiens
tgtcggggagttcaaggtaagggtgtggcatagcagatggcaggggggcctcgagtgctcctccactccagcttggtgttgaaccagccttctcttcctgagtgcgtgaatcgggttctt

SEQ ID NO: 3240 - DNA, 120 bp, Homo sapiens
gggcgcgcgggcgcgtgtgtgtgtggtgggggagggagagactcataaatgtgcctgggggaaaagggagagcaggaagctgagcagtgttggcggccaggtcccctggggccatccttg

SEQ ID NO: 3241 - DNA, 120 bp, Homo sapiens
ctgcgggccccagcactgcccactccacggggctgaggagacaggcaggcggctccagcctttggcctcagcttcctgaaggcttttccctgggagggtgcttgagggagattccttgcc

SEQ ID NO: 3242 - DNA, 120 bp, Homo sapiens
ggtcgtggggagggggtggtgaagggtgggggagtagatgtagcccagagcaaggagctttgtgtggtgtgtgttggggggtgtggatggcagggttccccgcagctggggggcctcggg

SEQ ID NO: 3243 - DNA, 120 bp, Homo sapiens
gagcgctgctccgggaagtggggctgaggatttccagctgtgggggctctgtctgggtgtctccctctgtctctccaaggacaggagccatctggagggaagggcctggatggcctgagg

SEQ ID NO: 3244 - DNA, 120 bp, Homo sapiens
aggcgaaagccacctgggacagagccacaggggctggagaggccttctctgttccttccctctgttcagctttgtacctaggagccctgggggtttctgtgggtgggagtgtttgtcagg

SEQ ID NO: 3245 - DNA, 120 bp, Homo sapiens
ccccgattctggagcccctcccctgcttatctggggtagggcagggtcccagtttccatccgagaaaggagtcaggctgagtgcctgtgaggggcagcgggagggtgtgggcaggtgcag

SEQ ID NO: 3246 - DNA, 120 bp, Homo sapiens
ctgcgaagctaacgacaacgtgtgatccctgcccagcagcccaggatttggcactaatcctgggcagcggcaccacactggccttgctgagccagggacttctcacctcagggccccctc

SEQ ID NO: 3247 - DNA, 120 bp, Homo sapiens
aggcgtgtgtgtagtgtgtctgttactgcacctggcacaggcagggggctgggcccaggggacattcccccctccctttgctgggggagagggtgggaacttcctctcttgattgtaccc

SEQ ID NO: 3248 - DNA, 120 bp, Homo sapiens
acccggtttcacccagctgccttgcctgtcaccctctggccccatactctcctctcctttcccagctgggagagagggtctccagatcactgggaacccctttcttttacacgcgggaga

SEQ ID NO: 3249 - DNA, 120 bp, Homo sapiens
aaacgcggcctctcttcatacatttgcgaatcagggatggacccccaaacccctgtgccactgcccccttcccatcctgcttccccggggccctgcctaccttcttgctgtggggagcag

SEQ ID NO: 3250 - DNA, 120 bp, Homo sapiens
tgccggcagcagctcctcagccagctgggctcagctttcctggcctgaacctgaggggggatgggcttagagggtcagctggaataaacatccgtggaaaaaaatccaagcggtcagagc

SEQ ID NO: 3251 - DNA, 120 bp, Homo sapiens
agccgagggatcagggccgaaggctgatgaccttccgtttggcctttgggctcaagttcctgtggtgtgagggtgtagagtgatttggtgccgggaagggctgtgcccccagcatcatcg

SEQ ID NO: 3252 - DNA, 120 bp, Homo sapiens
gggcgggggtgtagaggtgggggcaaaggctttcttcatccaacttcctcccgttgctgttcctgagtccagtgcttggagggcagggcgtggggtgtgccagggacctcagtgttcctg

SEQ ID NO: 3253 - DNA, 120 bp, Homo sapiens
acccgaactcctagccagctcacttagcctgcaccgtccataggggaagggctggggcggctgatgggttcagatcttgccctaaccttcctccagcccctgagattttccctaagctgg

SEQ ID NO: 3254 - DNA, 120 bp, Homo sapiens
agacgggggtggctctctctacagattcctgagccccacatcgtctgccagcaagagagcctgctctcctgctgccactctggggatcccctgccaccttcagcccattcttgctgcaga

SEQ ID NO: 3255 - DNA, 120 bp, Homo sapiens
gctcggtgtgggcctggacctgggagacctgcactcccagcccgcttgaggcctgctgcatgtcctgggcactgaagtggccacacatcctggatgcctggtgcagcaggtgctggctgt

SEQ ID NO: 3256 - DNA, 120 bp, Homo sapiens
cagcgcctgtactgtctggtgtgaggcagcaacggtctgacagtgaccggcccctgctgcaagtcagtgcctctcatttgcaggcctgcagcaccccctcaatccaggaatgctgcatcg

SEQ ID NO: 3257 - DNA, 120 bp, Homo sapiens
ccccgactcccctccagttttacctatttctagcagatatagcaaccccagcccctgtcccctggcctctcctcagtggtggcttttccccttgcaccttcagatccacatcttccgagg

SEQ ID NO: 3258 - DNA, 120 bp, Homo sapiens
tcacgccagcactcggctgcccccctgtggccagtgtgggcaagagcaccgcttcattcaaccagtcactgttggggtctgtctcatcagagtccagcctgagcctcggctttgagatgg

SEQ ID NO: 3259 - DNA, 120 bp, Homo sapiens
cctcgcctgtgctcctgagtttgggtaaggccacttcttttagctctaggggaggtattgtctgccgctgactaacttccacaacactgcagctttcctgctttgtccttgaagctttca

SEQ ID NO: 3260 - DNA, 120 bp, Homo sapiens
ctccgaagaagcactgtcttgtcacggccagcagagggcagaggttgctgtggtgcaggctggcagggcaggagctgacctttccggaatggaatgctgcctgagcagtcagctccagaa

SEQ ID NO: 3261 - DNA, 120 bp, Homo sapiens
gggcgttgggccacttccctcaccctctccagtcctcagctcccctgagacaggtctcggagccctggcctctcttgtggggaagggggcaggtgaggctggctgactgtgtggacactt

SEQ ID NO: 3262 - DNA, 120 bp, Homo sapiens
caacgtgcttcttccagcctcaatattttctgaaaactggccggtgcacccggatgcctgctgggatccaggctcagctttttagttcctgactgtgttctgatcctggttcctgactct

SEQ ID NO: 3263 - DNA, 120 bp, Homo sapiens
gggcgccctcctgatcctctgtctctctttctgcttggagagtttgtgctgaggcctctggtttctgtctcaggcggaggctggacttctgagctgtagacgacagggatgaggggccag

SEQ ID NO: 3264 - DNA, 120 bp, Homo sapiens
gtccgggaactgactctgcccaccagcacctcctggtgacaaggatggtgcggtagtggcgggcattcggaagcccctctgggggacagcctgtctctgccctggagctggcaggaccct

SEQ ID NO: 3265 - DNA, 120 bp, Homo sapiens
acccgtgtcagaataagattgattgttaccacagccccacctctgctgccccagtcactagccgacatttcccatgtggcaccagcaccctggctggggcttggctggggacagtttcag

SEQ ID NO: 3266 - DNA, 120 bp, Homo sapiens
catcggtgggtgtggggggcctcagagccctccagtgtgcttctacaggagggcctaacttggcattcgttatggccccaggaaaggccggcgcactgtgaggacgcactatagcaggac

SEQ ID NO: 3267 - DNA, 120 bp, Homo sapiens
gagcgttcagaacatccacagacgtgttcagacatgcaggcccctgccgggctgcagagagtatgacaattcgggcttgtgtggtgtggaggtacccaatgggatgggacccctggagag

SEQ ID NO: 3268 - DNA, 120 bp, Homo sapiens
gcacgtgagcctccaaatggttaagaattaagccgaagtacagtttagggtttcccttaggaggctgctgtgcgtgtgagcaccctcactgtgttccccacgtcagggtagattgtgact

SEQ ID NO: 3269 - DNA, 120 bp, Homo sapiens
caacgattcacgaattattttgacatatattaagcaatgacttctccaggcctcatactggggataaaagtatcaataggccacagacacctttaggattttatgatacggtgaggaaag

SEQ ID NO: 3270 - DNA, 120 bp, Homo sapiens
caccgaatcccaggtgctcagggctttagacagattatgtcatttaaccctcacaggcccatgaatttggtcctgtagttgggcccaaggcataggtgggaaatggaggccctgagacat

SEQ ID NO: 3271 - DNA, 120 bp, Homo sapiens
cctcgctccttttacaaggctgaaggcaggctggaagtgtggggcaagaaggaaaaatcaatgatcctgcttggggcctggaaggagagagggctgagagcgcttccctcccacgctagg

SEQ ID NO: 3272 - DNA, 120 bp, Homo sapiens
agccgtcctcactgtctgtcctctgcccccaggttggctggagatggagtgggagccgtgaatatctgtaagtccttggctgcggcccatgggaagcatcccttgtgctgtttagatggg

SEQ ID NO: 3273 - DNA, 120 bp, Homo sapiens
tcacgctgaagagagccctcctcttttctctcccagctgtgatgaattccactggtggcagtagcagtggcggtggcattgggctgaccctcgggggaaccatgggcagcaatgccctga

SEQ ID NO: 3274 - DNA, 120 bp, Homo sapiens
gtgcgggtcctgggctcctgaaggcttattccatccggaccgcatccgccagtcgcaggagtgcccgcgactgagccgcctcccaccactccactcctccagccaccacccacaatcaca

SEQ ID NO: 3275 - DNA, 120 bp, Homo sapiens
ccacgtgcctggtatcctggcttcatgaggctgggcaggggaaaagacgggactagagaaggcagggtctccctggtgactaggaagccttttgtgcaggagactgagaaggcacatggt

SEQ ID NO: 3276 - DNA, 120 bp, Homo sapiens
ggacgcttacctagggtgagccttggcctccaggtctggggctgatcccaaagattctcctgaggaagcccagaagagccacggggaaatgcaggctctgccagcaattgggccttggag

SEQ ID NO: 3277 - DNA, 120 bp, Homo sapiens
agacgttcagctgccccagcttccagtttcgggtggcccagccaactttcatgccagccgtcctcagcccttcctggtgctgggtctgccaggctcatggtcagccaggcctggggccct

SEQ ID NO: 3278 - DNA, 120 bp, Homo sapiens
ccccggtaacaggtctgtgcctaggaccttagtggagggatgggtttgtatctggatccatgggagtggggaaggacatctgtgttaagtcagtgcttgatgggggcttctatgtcagag

SEQ ID NO: 3279 - DNA, 120 bp, Homo sapiens
ccccgacacacaggtctgtgtgtctgtgagtgtggcaggtgttctgtggcagggcctatgcatggggaaatgtgtccctgatgggcagcagcacatatgatgggtactgtggagccacag

SEQ ID NO: 3280 - DNA, 120 bp, Homo sapiens
tttcgattccaattttcttttgagaataagtagtattggaggagtgttcccttggtgtctcctggacgagaggatttggacttaccctggagcatggaagatttaaattagacttgtgga

SEQ ID NO: 3281 - DNA, 120 bp, Homo sapiens
tcccgctaagaaaacaatgtgaaggggctggaatggagaggtttgacatctggatcacagtggtcttccacaatgttaatgctaatccctggcccagcctcagggaaacatgatccctcg

SEQ ID NO: 3282 - DNA, 120 bp, Homo sapiens
ccccgccccttttatcaccaatataccagtctatcagtgaaaacctaatgtcctgtttgggttatcatgcctcttctttaacctcccagtgggtcccaggggctagttcaaggcaggaag

SEQ ID NO: 3283 - DNA, 120 bp, Homo sapiens
gaccgtaacctatcttgttctcttctggtcccccagaactccaagctggaggtggaggtgacccagtctgagcagcagggtgaggtggcccttagcgataaccgctgcaagctggttgag

SEQ ID NO: 3284 - DNA, 120 bp, Homo sapiens
gagcggagtcttagttgagtccacaggccgatttccaataggctccttgcatgatctattagggacaatggtttgtctcagagaacttgttctctgagataaacaatgccctaatttata

SEQ ID NO: 3285 - DNA, 120 bp, Homo sapiens
taccgatttcagagttgtatatacttctgtcatggctgatttcaggctgttgctgtgacttcatgtagaattggctagaaatgtgcacaataggctcttgtgagctggtgggagctggtt

SEQ ID NO: 3286 - DNA, 120 bp, Homo sapiens
gtccgcctggtgtggagttattgggacagttggagagttcttttgtgtcctgctgcattttcacaggctccacttcctggggggatctgggagagcctggcacttgtgttgttttgggac

SEQ ID NO: 3287 - DNA, 120 bp, Homo sapiens
ggacgatgctgggcctttgagggtgctagacccaggtcttccctcctctcactttctgggaagggcttgggtgacctcttggttgactgagttcagagctggtgaccacatggtctctgg

SEQ ID NO: 3288 - DNA, 120 bp, Homo sapiens
ggacgaattttttagctctgagggtggaaataccaaggaagtggttccattcatttacagctgcacagctacaaagagggagccaattgacaagtcttgagtggaatcattccttacgcc

SEQ ID NO: 3289 - DNA, 120 bp, Homo sapiens
agacgaggaaaccgagcagaaacagaaaagggtgagatggggattgggccagtgccttctatcaccctgatggggcatttgaagacaggtggcccttgcagatgggggctggagagagat

SEQ ID NO: 3290 - DNA, 120 bp, Homo sapiens
caccgagttgtgttaatatgatctggtggcgggcagaggaacaacacactatggtggaggaaattgtgggctgtgaaatcagacggaggctccagctctgtctctacttcagatccaggg

SEQ ID NO: 3291 - DNA, 120 bp, Homo sapiens
gtccgagtttttacaaggcattggattttggtggtcggaagatagagtggggtggctagataaaggctggatttctgggttctttccctgccacacagacccaagagaagcttctgtaca

SEQ ID NO: 3292 - DNA, 120 bp, Homo sapiens
gtgcgtcattggccagaggcttgggctttactttttaaggcactctagtgccagagtgtctgctgtgttcttctgggtgcctgcccagaggacaggtatccaaaaggccctcttcttgtg

SEQ ID NO: 3293 - DNA, 120 bp, Homo sapiens
agccggatgccaccctcctgaggggtagggggcatgaccccactgggctcacacatcagccctggttgataaatactgacctgccaacactcgcaaatgcaaacaagctgcctgaagatt

SEQ ID NO: 3294 - DNA, 120 bp, Homo sapiens
ctgcgtcactcaggactgttgctcacattttcccttttcaaataccgaacctggacttgcctgatgtcaatccagaagatccccagggctttggggtcaggtttgagtttcttcctgggc

SEQ ID NO: 3295 - DNA, 120 bp, Homo sapiens
agtcgggtggcttctgaagggaggagggctgtcctcagttcagtcattgcttctcagcagaagggcactataaggtgtgagtcctctgttggctctgcatgcctgcctcacactccgttg

SEQ ID NO: 3296 - DNA, 120 bp, Homo sapiens
ccgcggtggcgttgtctgtggcgatctctgcgcctccactactgcccctgttgtctccaccagagtcagtagcgtccccagcaacagcaacgtggtggtgggcactactaacgcctgcgc

SEQ ID NO: 3297 - DNA, 120 bp, Homo sapiens
ctccgcccgggttggcgtctgcggcggcagctgtaagaggtgctaggaggctgccgcctccgccagcgcctgtcgccgtcactctccacccagccagtacctcgcgccaccagaacgcgc

SEQ ID NO: 3298 - DNA, 120 bp, Homo sapiens
cgccgcccgcgccggcctcccaatagccgccgcccgctgcctgcactctaagcgccctccccaccgctccgctccgggagccatccccggtcgcaggagtccggggagggccgggaggcg

SEQ ID NO: 3299 - DNA, 120 bp, Homo sapiens
tcccgaggattcatctttttcttccgcctgccttctgttttttttgctgtatacattggtcttgcctgagctcttccccaaagcttggaggaacgggggaggcccgggaatgtccctgtc

SEQ ID NO: 3300 - DNA, 120 bp, Homo sapiens
gcacgacctgggactctgcccatgtgcttttgcctgtggaatggagacgcggaccctggatagtggttctatgactctgcgagggacaggcccacgcgtgtggggagaacatctcccttc

SEQ ID NO: 3301 - DNA, 120 bp, Homo sapiens
ccacgggccctgtttcatcttcaaagccctttataagcttcctccttgctcctgcccctcccactggcactgctgtggagcggggagaggggttcctgaaagcattagttgcattctgcg

SEQ ID NO: 3302 - DNA, 120 bp, Homo sapiens
ccccggagaaataccaatttaacaaccttctatgggcaaaaatatctttatgagagctctagaatccaggtgagagtttatagcacctgtgtagggcaaagaaataagaaaagatgtaac

SEQ ID NO: 3303 - DNA, 120 bp, Homo sapiens
taacgtgtattgaaaaagggtaagaaggacagcttctttttaccgatgtcacccctcccccaagcttacatagcacaatgcagagagcaaagagagggagagagagggagagagagagag

SEQ ID NO: 3304 - DNA, 120 bp, Homo sapiens
gcccgctcagctgcagaccctggcaccaagcctatctgcccacaaaccctggcactgggcctacctatgggccttgacaccaaacctgccagtctgtggaccccagcactagccccacct

SEQ ID NO: 3305 - DNA, 120 bp, Homo sapiens
ccccgtcaccaggtctgtttatggattctggaccctagcaccaggcccacttgtctgaggaccctggcactgagcacaccctcctgtagactctggcaccaggcccacccagattgctga

SEQ ID NO: 3306 - DNA, 120 bp, Homo sapiens
acccgcctccttcctgctcccatggcagatgcattcataccccattagccattcctgtcccatgtcccagcttccctcaaccctgatcaggctgggtggggtgggggtaattgtaattgg

SEQ ID NO: 3307 - DNA, 120 bp, Homo sapiens
tttcgccagacgatgcataacacaaccctcagtcattttttagggggtggcaggtggggagagggggcggagttgccctggcaactttgggtaggaggttttgctgctgcaacagtttct

SEQ ID NO: 3308 - DNA, 120 bp, Homo sapiens
ttgcgggctgagcccaggctccgtggctgcattaccatgcctggctgctgggtcatcaggatcctatctgtggagcagggaggaggcagaaacgctgagcagaggaaagggaggggaagg

SEQ ID NO: 3309 - DNA, 120 bp, Homo sapiens
gaacgctgtttgcactgtggctgggtgtgtgtgtgggaaaggggatgacaggggaagcccagattctgagaaggcttcagagggcttctgtttagcctggggacgagtttgtgctggaga

SEQ ID NO: 3310 - DNA, 120 bp, Homo sapiens
ggtcggggggcagggggtgtgtgtgagaggctaggtccacccttgccagtacctcctcctctctcccctctcagatgaatgaacacgcctccccacggaagataaagcacccccttcttg

SEQ ID NO: 3311 - DNA, 120 bp, Homo sapiens
atgcgatgtctcacatggcccacatggttgtcacctgtccagagtgaaaatgttgctcctggtagacatctagttcagtttgcttcaacacacctttattggttgctaatgtgcgcctgg

SEQ ID NO: 3312 - DNA, 120 bp, Homo sapiens
cagcgactccaagcaccccctcctctgctcagggtgccatttctagagccattttcccaattccagcccctgccaggattctttctgggtacttggtgaccctggctggagtgtggcaat

SEQ ID NO: 3313 - DNA, 120 bp, Homo sapiens
aatcgtgggtggacctgggaccacagatgtgactggtgtgaggaagggccattaggggcagagtcacccaagggaggggccaggggaacaaggaggagctgtgtgggagggagagaaact

SEQ ID NO: 3314 - DNA, 120 bp, Homo sapiens
agccgagtacagtgaaactctggcttcatgcagacggttctctttctcaccagggcagggggccggggcctgttcctactgtattccagcacccattgcagggctgaccccagaagacac

SEQ ID NO: 3315 - DNA, 120 bp, Homo sapiens
tcccgcctgttttgaatgtctcctctcctggggaggaagggggaatggggacacagctgcacgatgctggggagtccctggtgggtgtcctggagggggtgccctggtctctgtgctcac

SEQ ID NO: 3316 - DNA, 120 bp, Homo sapiens
gagcgtgggagcacactcctgggatgagcagtgcttatgggatgactccaggcagcctccctgcccagcagacacttatcaggggccaggcactctggaaccaaaatcccaaaagggtgg

SEQ ID NO: 3317 - DNA, 120 bp, Homo sapiens
ccccgagcctacctcaccgcagtggggggagtcttccttccctcttctgcttcattcttagctcagtcccaacaccaaggtgggccgtttcctgggcctcgagcagccatctgtgagatg

SEQ ID NO: 3318 - DNA, 120 bp, Homo sapiens
gggcggagggtcactctggctctagggtgctctgaattagtcctcagcagggagtggagctggatccaggcccaggtccagagagacgaggcttcaagtgggaacaaggctctcagatcc

SEQ ID NO: 3319 - DNA, 120 bp, Homo sapiens
ccccggaatcacactcacaggccccagccatgtgctgcgtgcccagctggcagctgtgatgccccagcctggagcctgctgctggcatcctgcccagacagtcccgtgggcctccaggac

SEQ ID NO: 3320 - DNA, 120 bp, Homo sapiens
ccccggtctgtatttcccggtaggctgtaagcccatggggcatgcggccaaggccccatttaaaaaaaatagccttactgagatataattgctattactgtatataattcattcatttaa

SEQ ID NO: 3321 - DNA, 120 bp, Homo sapiens
agcggccagctgccggggtgatggccgaggtggtgctgaagcccctgcggctgccagactggaaggtgatggaggactgccgagacatggtgggtgaggaaggccggcgagaaggcacct

SEQ ID NO: 3322 - DNA, 120 bp, Homo sapiens
tctcgtggcttttatgagcatcctgtgggggcggggcactgctagtggagagggccttctgatggcattccctgggcatccgccaaccctgagctcacactcggcatccctcgggaaatg

SEQ ID NO: 3323 - DNA, 120 bp, Homo sapiens
caacgtgcaaactcctttccagttgcaacttgatcagcatatgagtaagaagcaagttaattgctttccgtcatgtgctaatgatgcatcttgtaaaggactcagcaaacactgcctcat

SEQ ID NO: 3324 - DNA, 120 bp, Homo sapiens
aaccgctttcttaggcctgggaccaactccgtcctgtccaaacatcttgtgttaatacaagccactacacttcactgtttccttggggtgcttcctattccctaagcattttctcagcac

SEQ ID NO: 3325 - DNA, 120 bp, Homo sapiens
ggtcgcgctctgtaatcatcttccttaggaatccaccccattttgattgcccctttattctgctcttaagcttccgtgtctattgtgtaggtcacacatggttttctggagtgtatgtgt

SEQ ID NO: 3326 - DNA, 120 bp, Homo sapiens
attcgttccttccctgtttctcctgttaaccttgtagactgtgccctacattctatattagtctacaaaccgcaaagaagacttcaaggcacctcatctctctgttctgcaactcattgc

SEQ ID NO: 3327 - DNA, 120 bp, Homo sapiens
tttcgtggatgagggcattgagcccagaatggttaactagtcagacagacccacaagaagcagagccagattccatggtctttccacacaggtgtccttttaggggcacactggtaaccg

SEQ ID NO: 3328 - DNA, 120 bp, Homo sapiens
gagcggtagttctttgttctctaaactgtttcctccttgggactgaggcccgggggtaagcctctcccccatctagagattatttgggagtctcagtttccacaggaaagatatgaatca

SEQ ID NO: 3329 - DNA, 120 bp, Homo sapiens
ttccgttgccaaccccagccagggtggtgcatggttctcaagtggaaagaataattatgtttgttttctgtactcttcattgcatgataatctggcccccagaagaaaggacacttgttt

SEQ ID NO: 3330 - DNA, 120 bp, Homo sapiens
aaacgcttgcagagctttccacaaaacaaaggtcttggagggtccaggcgtggtgagtggctgggccagcatgcccacgggaagggaggtccccagccttctctcaccatgcttcccacg

SEQ ID NO: 3331 - DNA, 120 bp, Homo sapiens
agacggtcttactcacaggctttgccgagttagattgaaatagaaagatcgttcacctcccttcctcctccactccctcttctgtgacctttgacctgcacagtgacctttatcctggtg

SEQ ID NO: 3332 - DNA, 120 bp, Homo sapiens
tctcgggcacacacagtagcatggcgggaagcagcgctaagcacaggaggtgaggctgaggtagctggttgggtctaaacatttcccagggataaatcagagtggatccacccacagaca

SEQ ID NO: 3333 - DNA, 120 bp, Homo sapiens
atccgggtgatgcattgtttgcttgtgtgtttccgtgaatgagaacttctgtagccatggagctgtgttttccatgatcttgagaggacaggtccctttggcacccagtcttggcctagg

SEQ ID NO: 3334 - DNA, 120 bp, Homo sapiens
ccccgacgcaggggaatgaaaaattagggcccatgactcattcttgacaaagaattaatctctttgaaggaagactcagcagagggctcttctaatcagccagctctctttgtgtgtgtt

SEQ ID NO: 3335 - DNA, 120 bp, Homo sapiens
gaccggcatgtcatgagtaagatagtttccactgaacagaccagggctgtgtctgtgatgcaggttacatccgagcagccaggacgccactttcctcccttcccagaaaagggtaaaatg

SEQ ID NO: 3336 - DNA, 120 bp, Homo sapiens
agacgccaggatgacctctgcatgatcctacctgtggatattccggctgttctcccatctggccgtgagggagaggaattccctttaaaggaaatgcctgaaagtgcttttcattcaccc

SEQ ID NO: 3337 - DNA, 120 bp, Homo sapiens
tgacgggagaccaatgtcttcctttgtcgttgctgctcttaccatcagggagtaaacttaattggcaagaaggattccattgaggacttctatgttctaatggtgaacagaaaaatatgc

SEQ ID NO: 3338 - DNA, 120 bp, Homo sapiens
ccccggaagggacatgcccacagagcccctctgaagttggacctgccattgttcatgttccttcattctttgcatccattgcccttgcctcttggtttatgtggagtgtgcttacgtgtt

SEQ ID NO: 3339 - DNA, 120 bp, Homo sapiens
gggcgagcattgcactggctgatgtcaccgtccagtagatgcctagtttaggcgaggagccagctctggtgtctgctgttagcacccagagcagtagctccttcactagagggcaagcaa

SEQ ID NO: 3340 - DNA, 120 bp, Homo sapiens
atgcggtcagtctcatcttgttcatgctggcagcactctccctccctcctggggccagagtgggagctgatggagtcaaattccctgagtaagaccacacctccctagcaatgcagaaga

SEQ ID NO: 3341 - DNA, 120 bp, Homo sapiens
atgcgttatcttacttactattcatccatattcatccacaggtgatcagcactactatttgtcccgttttctgagcctcagaaaggaacatgtcttacctaagctcatatggataatatt

SEQ ID NO: 3342 - DNA, 120 bp, Homo sapiens
ccccgtcagcaacatcagcagcccatatactgaagtcacgcaaatagacatgccacttaaacaaaatggtatgctcctctgcaaaccagctttgacacagacctgccatgccaccgcccc

SEQ ID NO: 3343 - DNA, 120 bp, Homo sapiens
gatcgccacctctaagccccaagccctacccaggaagaaattctgggggtaccactagggtcatcaatgccacaatgccccctgcaagatgtagctgcgagctctctgggtctgtgaggc

SEQ ID NO: 3344 - DNA, 120 bp, Homo sapiens
ccccgcccccaccatgccctgcttccctcctctccctgcttctctcctcagccacctgccccaggagtcccagccagtttctcaatctgctctgaggccttgacccagccatcagcctcc

SEQ ID NO: 3345 - DNA, 120 bp, Homo sapiens
tgacgccacgcagcagatgccatgacctgtctaggcctctcgggcagctgacctgggcatccctgagggctgggccccctcactctggcgtcagtcatggcctcctgcaggttggcacgc

SEQ ID NO: 3346 - DNA, 120 bp, Homo sapiens
acacgttatggtctgcaagtcctcaggtacaacatggctccattgttctgagtctggaaaatgatctcactctcaccctgagaaccaaggttagccccagtccttcggtgaagcagggcc

SEQ ID NO: 3347 - DNA, 120 bp, Homo sapiens
tgacggtagtgggtggtgattgttgcactcttaatgtccaattttggcaaaataaaaggctggctctctggagctccaaatcagccccagcagctgatgtgaaatgctgtttgatgatgg

SEQ ID NO: 3348 - DNA, 120 bp, Homo sapiens
taacgtctgactgtagtggtctggaggctctgggcctggctcagggctccctcactgcacatctcttccagccaaagcatttacccagggacacctacgctgctcacaaacatgaaggat

SEQ ID NO: 3349 - DNA, 120 bp, Homo sapiens
aatcgagaaagaatcttccctctaccctcccttgtcccagccatccctaaagcagtccagtgttatgattcatccaccttttatttgcttcaaggattttccatggcatctcagaggccc

SEQ ID NO: 3350 - DNA, 120 bp, Homo sapiens
gatcgagtgagggcagctggttcccatttggctcagctgtgatcctgaagtttctgtgttatggtgtagccttcatttctgcatcatcagtggatttctctaccgctttcactagcacca

SEQ ID NO: 3351 - DNA, 120 bp, Homo sapiens
gcccgtgtggctggagggtgaaggtcagatgtaaggtagaacttttctaaagccaggatgggagacaagatggccatctccagcctgctggaccaccacaccaatgtctgaagaaaggcc

SEQ ID NO: 3352 - DNA, 120 bp, Homo sapiens
gcccgtgcccggaagaggccacttgcacggccagccccatctcctctctccctctccagagccttcttgctggtctcaggtttcattctgatggttctgctcccagttaactcagctcag

SEQ ID NO: 3353 - DNA, 120 bp, Homo sapiens
tcacgcccaccctccacaccccagttccacctcagtccaccacctcctccctctcccaactcctccctgtccccattgcttcctgtgggtcccacacctcctgcattgctctagccacct

SEQ ID NO: 3354 - DNA, 120 bp, Homo sapiens
ccacggcctggaagtgacaacaggccacagcctctgcgggcagcatgcagtaggaaagcccagggaaaagggacccagccagtgcctgggacccagagacatcaggctttggctgatgga

SEQ ID NO: 3355 - DNA, 120 bp, Homo sapiens
agccgcaggggcacagagttcccatcccgggaggcagggcagtggtgtggaaagagtgtgggttatggagagacagacctcaccggattctggctctgcagccctgggattggtatgtct

SEQ ID NO: 3356 - DNA, 120 bp, Homo sapiens
gtgcgcgctcatgtgagtgaattgaggtgcatgtgcatactttgaatactcagagaccaagccatgagattgtgctgtttattgaggttgcaacagaggaaggccattaagaataaagga

SEQ ID NO: 3357 - DNA, 120 bp, Homo sapiens
gtgcggggccttgggcagagacccagggagcccagcagagtagttagcgactgcgctagaggccgggcagaggaggaaagctggcagccaggacctgggctggtggtgtagctgggggac

SEQ ID NO: 3358 - DNA, 120 bp, Homo sapiens
agccgggtcatggaatgaggcggggcccggggcagtcttctctaccgactggttttcttggagggtgcactcaggctggaacccttccctagggtgtctttgtaatcgttggcactgccc

SEQ ID NO: 3359 - DNA, 120 bp, Homo sapiens
ccccggctcctgccctccccgcctctcacgctgcacactccagagatgcagttgctgctgttggccacatagccaccgctgaccatgctgggccggaagccatagacactgccgccactg

SEQ ID NO: 3360 - DNA, 120 bp, Homo sapiens
agccgaagccaacacccactcaggcagagagctggggaggcctccttttccccagggcagacagggcttttcttggagaagctgagtggggaggtgcacacccgctccctctccctgggg

SEQ ID NO: 3361 - DNA, 120 bp, Homo sapiens
gttcggcttatatccaatctggctgagtcttgccccattaatgctcagaggccctactccttggtccaggtaccaatacccctacctgtcctcctggacacccacccattgccctttcta

SEQ ID NO: 3362 - DNA, 120 bp, Homo sapiens
aggcgtggacatctctgggccagttatacccatctgtgaaacagtcgggggaatgcgtcatatcagaggatcaaacccctaagataccaggaacatctggcttggacattcaagaaaaaa

SEQ ID NO: 3363 - DNA, 120 bp, Homo sapiens
ggtcggataagtctggagagagaagacctccaagagcagggcaagacaaccgagtacaatataagagggtagttgctgggtgagaggaaaggggaatgcatagatgtggggacactaaac

SEQ ID NO: 3364 - DNA, 120 bp, Homo sapiens
ggacgactttgcgggggggggactctggatgccaggctgtgcacataatggggagccattgagggctactgagccagggagggcatgagcaatccatgtttgaggcagcagaatccaggt

SEQ ID NO: 3365 - DNA, 120 bp, Homo sapiens
caccgagagaggggcaggtggttctctgagcaaataattgtctccagaattagagagaatgagctgagctatttggatgacatcagcccaggtcctgccagccctcctcagcagatgaac

SEQ ID NO: 3366 - DNA, 120 bp, Homo sapiens
agccggatggagcgcagtgccgggggcctggccacaacccaccattcattggggggcaggacagctggtcagcatttttgcagctgccaaggctgagggtgtgcccaccccagaggagct

SEQ ID NO: 3367 - DNA, 120 bp, Homo sapiens
ctccgtggctgggagcacctcctttgagccatgctgcagccccacgccaagcctctagcgaagtgcatggacttgagactctgaggacccaggtcccagtcttgccttggccactcatga

SEQ ID NO: 3368 - DNA, 120 bp, Homo sapiens
agccgtgtgactgtgggcaggtctcttaccttcctaagcctctgttttcacatctctaaaagagggggtgccaacacctgctccacctactccccaaggtggttgggaggcaccttgtaa

SEQ ID NO: 3369 - DNA, 120 bp, Homo sapiens
aagcgcttcacatatattaattcatttaattctcacaacagccctatgaggtaggtgccattattgtccccactttacagatgaagatgctgagacacaggaagttaggcagcttactca

SEQ ID NO: 3370 - DNA, 120 bp, Homo sapiens
aatcgtgtaacatctgtctgtgtgtgtgtctgcaccgtctaaacctgtgcatgtgtgtggggtgtgtgtgtgtgttttgtggcccaggtgcaagtcaggtgcacctgccagcagctggca

SEQ ID NO: 3371 - DNA, 120 bp, Homo sapiens
cagcgtgtggtgttgctgactgtggacagagaacttctgccgtcaagaccgtagcaggaaatgcccctgtgcccctgagcctggcaaacaaggcagcctgtctccttcaaggaggagctg

SEQ ID NO: 3372 - DNA, 120 bp, Homo sapiens
ccccgcagagacattccgggaagagctcagaggggggtaagaaggaagaagagcgaggctgcctcccaccccccgcagagccacccgtgcccctaatccacaggtgggagtggcggggag

SEQ ID NO: 3373 - DNA, 120 bp, Homo sapiens
cctcgaagaggagctgagacgtctccgctcggttcccctgagagccctgtgctccgtcaccgacagcctctctccagaagtagagaccatggagtctggctgggtgccgcgtcaggggtc

SEQ ID NO: 3374 - DNA, 120 bp, Homo sapiens
tctcggggcggctagaggccctgggaacctggaagcccgcggggcgcggcggggcggggcagagcgctagagccgggtggcggccgccgattggctgggcccgagcgctcccacggcggc

SEQ ID NO: 3375 - DNA, 120 bp, Homo sapiens
ggccgggggccccagggcggcgccggccgcgcccgctccgcggtgactcatccagcaccccacctctggagctggacgggcgcccggcctcttcccaccccagacccgcccgctaagccg

SEQ ID NO: 3376 - DNA, 120 bp, Homo sapiens
ttccgcccccttcgcgtcctcccccggggcagaggagagtgttgtggggagaatgcgtttctgtccctgtgggagaatttgtcccgctctagggaggagaatctggtatctgttcttctg

SEQ ID NO: 3377 - DNA, 120 bp, Homo sapiens
gggcggtggggccttctgtccccacaacgggaggttgtgtgcctgtctttctgggggtgtctctgtgtcttaagatctttatgagtgtggccgatggactgtggtcttttggaatctgcc

SEQ ID NO: 3378 - DNA, 120 bp, Homo sapiens
cagcggccaggacaggcccctcaggggttagctctgagtaattctccagctctggctctgccccctccacagtgccagggcccctgaaggtctggggccagatgctaccctgcaggccag

SEQ ID NO: 3379 - DNA, 120 bp, Homo sapiens
ccccgtgtgtatgaagctccacatctttctgggttggtgtgcacatgtctgtctgtgcctgtctgtacctgtctgcgcctatgcacatacaatctcccataggaattattccttgtctct

SEQ ID NO: 3380 - DNA, 120 bp, Homo sapiens
acacgcgcacacgcatgcacacacccacagccccctgcctgcgtgtcttccctccatgatggcaaggctgccgctgcagagggtggggagggaatgtagtaaggcctttctttcatttaa

SEQ ID NO: 3381 - DNA, 120 bp, Homo sapiens
gcacggggatacagaagcattccagtcagactgggccctggccaagctcaccgtctgctggggaggctgtggtgtggtgagaagggccctgtggggtagcacagggtagggggagcccag

SEQ ID NO: 3382 - DNA, 120 bp, Homo sapiens
cctcggaggggcagggacggcttccagaggaggaaatcctaactaaattgggaagatgaaaggctcacaagtggatgggtcagccataggaggtgcattgcagacagggggacagcaggc

SEQ ID NO: 3383 - DNA, 120 bp, Homo sapiens
gtgcgacttcctcagggaacccccaggggattcagctgcctgagtggaaggccacggcagaggtgacttcagcggggtcaggcgggcctggagtgccaagctcaggggcttgtgtgtctc

SEQ ID NO: 3384 - DNA, 120 bp, Homo sapiens
aggcgcactgaactgagagtgaggacacggaagttctcaccctggctctgcccgatgctgcccaactcccctctctgagcctccaaaacgacagcgtgctgcacctcggagccgctggct

SEQ ID NO: 3385 - DNA, 120 bp, Homo sapiens
aggcggctgctttctcctggggcctgtctgctgccggcttgcctgtcctcctgggtcctgcccacgcgcttctgcccccaggcccgtgcaggcgtggacctcccgcgagggcctcagcag

SEQ ID NO: 3386 - DNA, 120 bp, Homo sapiens
tgtcggcttcctggtcctggaagtctgcttggctcctaccatctcatctcctttttccaagcagtgaggaggaggaaggtgcaaaaatgaacctacaccttaccatttaaaaacacttca

SEQ ID NO: 3387 - DNA, 120 bp, Homo sapiens
gggcgtgtgcctagctaataactgggggttctagcacaaacaaaggagagaatggatattagagaggaaaggagcattccattccccagctgggtggataacaaactgcctctgagcaag

SEQ ID NO: 3388 - DNA, 120 bp, Homo sapiens
gtgcgtcccattcaacctccacagcgtaaaggaaagggaaggcacttggggagatttcaaagaaaagccaccaggatgactaatagctcaaaacaataagacctaggacgcactgttaag

SEQ ID NO: 3389 - DNA, 120 bp, Homo sapiens
gaacggaaggaaacgggagcaggagtgacttaaagatacctgaaaggacaaatgtgctgaaggggatgcttgtcaaaatacaggagatggtataaacatatagcacgtggggattataca

SEQ ID NO: 3390 - DNA, 120 bp, Homo sapiens
caccgtggtatttgaatgtgctcttcactaaagcaaagcttgagagtttgcggggagggaggggcattcacaggtggagggagggtgaacgaccagaactcctatgatttccttctctgt

SEQ ID NO: 3391 - DNA, 120 bp, Homo sapiens
gttcgaccagttgctaggttatgaataataacagtgaggcagcagctgcagctgctgttgctgaggtggaaaatgtgcacagaggagtgaataagcagccgaggctctgcactgtgattc

SEQ ID NO: 3392 - DNA, 120 bp, Homo sapiens
agccgtgtgtggcgaggagctgctgacaggccaccacacaaagccactaatggaagaggcacacaaatgctgtcgtacacacttctccagcaagacttggatttatggaaatcatttggg

SEQ ID NO: 3393 - DNA, 120 bp, Homo sapiens
cctcggtctcccaaaatgctgggattacaggcatgagtcaccacaccaggcccatatcctattatttgtaagctcctagtactcatactgttgtatgtacagtctgctctttgtgtctgt

SEQ ID NO: 3394 - DNA, 120 bp, Homo sapiens
actcggttcagtgtttggctttccaaagtgtgtgggcaaatggggccagttcagttcagtaacagccttacctgcttatttttggcaaatcctagcctctttaaaagaacactttaattt

SEQ ID NO: 3395 - DNA, 120 bp, Homo sapiens
gtgcgtctggggtgctgtatgtgtctgggggtgctgtgtgtgcatctgggaccgggcgccactcttcttcatatggtgctgcctgaaaccccacatcaggtttgtgggatttaggaggac

SEQ ID NO: 3396 - DNA, 120 bp, Homo sapiens
gaacgagatgtctctcatgggaagatgtggatttgggaggcaccaccccagcagagaggtctttcgtgcccttagaggggccttcagctggagggaggaaagctggagtcactgcaagag

SEQ ID NO: 3397 - DNA, 120 bp, Homo sapiens
tcacgtttgattatactaaaagagaaactgctttgcaggtctgcttaaagatctcattgtgttccgcataagcagtttcgttctgaggtgaccgagattttgtaaggcacagttcttttc

SEQ ID NO: 3398 - DNA, 120 bp, Homo sapiens
agacgcaggcaccagaaagggtggttcagaaacgaggtaagaacagctctggctctgagcgctgtgaagcactctgctaagcgctttatgcactgtctttgtgtagctactaaaagtacc

SEQ ID NO: 3399 - DNA, 120 bp, Homo sapiens
attcgaaggctgaagctcagacagattcagtaacttgcccaaggccacacagccaatgattagcagagcagggatagcagtacttgacccctctgctgtctggtctctcctaaaggggga

SEQ ID NO: 3400 - DNA, 120 bp, Homo sapiens
aatcgggggaacaattcagcgaaacaagtaggggtttgtgctagtaaaggccacatccaattctggagttttcttctcctttgttttctgcttattcagagaagaagatagtacagacct

SEQ ID NO: 3401 - DNA, 120 bp, Homo sapiens
ccacgctcaaacagtgtctgttacacacaacaaaagcctcagtctatgcagatcaggatcactgacagagaatgtccagatgtgtgacaagacagagacacaaccataaaagtgacatag

SEQ ID NO: 3402 - DNA, 120 bp, Homo sapiens
agccggttgaatcaaggtgcatgggcagatcttggtcctgctcagagcagccctccaggctgctgcgccccacagccaggcaagcattctgcccactcactgctgccgtctccccggcac

SEQ ID NO: 3403 - DNA, 120 bp, Homo sapiens
tagcggcatgcgtggttcatatttgaacctagtgtgtttatgtgttcaagtgtagttaccagaacagcataggcagatgctagaatataccatcacacactaaccagacaacacacagtg

SEQ ID NO: 3404 - DNA, 120 bp, Homo sapiens
agccgtgcacagcagccagatctctgggaaggaactgaagttaaacccttggtaaatgctagttctgtgctagttttagtgtgtgaataataagctgtaccgactcctaatgactcactt

SEQ ID NO: 3405 - DNA, 120 bp, Homo sapiens
taccgcataactgatatcttacacagaacagctctcttcctggcttgggcttcactaaggccatttctaatcaccaccaagtttgatttcaactttggagtcaatgcaatccttgtgcta

SEQ ID NO: 3406 - DNA, 120 bp, Homo sapiens
ccacgacagaatttctgcagtcagctctaggcaggcccacctcctgccacactgctctccaggcacatggaagggtttccctcaccaccagtttactcctggggcctagctcggtctcag

SEQ ID NO: 3407 - DNA, 120 bp, Homo sapiens
actcgaggctgcctctggtctggaaattgtgggtctgcttcaccgtgtgctgtaaagagcttatatttccgtttatttgtttctccagatcgaaacagcattggcagagggacagagcca

SEQ ID NO: 3408 - DNA, 120 bp, Homo sapiens
caccgggactgaccaggagctgttcctccttcgcctcattttagagttgatttgggggttaaaggttacgctttttgagagaggtagtaaaacattaattatgggtaaagttctttctct

SEQ ID NO: 3409 - DNA, 120 bp, Homo sapiens
aatcggcagtgcaaatggccccctgacttcctcctgctgttgggcactgtgctgaggtgagtgctgcagggctcatggtcatcaagtccccccagtgggacaaatactgcatatcttgtg

SEQ ID NO: 3410 - DNA, 120 bp, Homo sapiens
aaccgcaaatgaatggaactggcctcattcataaatgtcatatgaagctttggtttaaaaggcaagtctgtcattccagggacagcagctgttgttatgttgaacaaaatggatacaaat

SEQ ID NO: 3411 - DNA, 120 bp, Homo sapiens
ccccgtgtcacacaagccatgatctccagtagagggcttgattgcacaggaaatcaagctcccgggctgtggctgaccggaccagcgaacacactggcaatgtttgagttactatggcaa

SEQ ID NO: 3412 - DNA, 120 bp, Homo sapiens
agccgcagcctgctcctgaataggccacatctgcaaaaagttttaacacggtactcagataaagaaaaggatcccaaaaatgggcactgacccgtctcaaaaaatgttgcaaattttaca

SEQ ID NO: 3413 - DNA, 120 bp, Homo sapiens
aagcgcatggaggctttggctgtcagatattgagaggagggaatggcagaagtaaatgacagcttaaatgcagatgtaaggagaaaagtcaaagatgggtgacagaaagttactggtcaa

SEQ ID NO: 3414 - DNA, 120 bp, Homo sapiens
ggccgggttggcggggcggcccggacctcccggctgcccgcgctagcacctgcccaaggctcgggtctctcagaggcacggagctttctctgcggaaatggccaggctcctgggcgcgct

SEQ ID NO: 3415 - DNA, 120 bp, Homo sapiens
tggcggccctggaccgccaagcagggagccccctctccggccgcggcccgccgggctgagagaccacagattaagtgcgccttggttctctcagggatgctattttgctccggcccgggt

SEQ ID NO: 3416 - DNA, 120 bp, Homo sapiens
ttgcgcccctccagcctgcctctgcccagcggaaagcccctctccccgcccgggtctcgctcttcgcttcctctcagcgacccagcccagctcaaatttcccagagagcaattagaacgg

SEQ ID NO: 3417 - DNA, 120 bp, Homo sapiens
atgcgttccggctggtttgcaggcaccaccctagagtgggggagccttggcgctgagactctgtctcagagggcagccttgccccccactccatgccaagcaaccaagaaaacattgaac

SEQ ID NO: 3418 - DNA, 120 bp, Homo sapiens
tctcgcaaaacaaattatctttgctttttaatcagttataatctgttgctgttgttattgcaaagatgttgccaaggataaaagcccatgcagatgcttcgggtttgggcaatcttattc

SEQ ID NO: 3419 - DNA, 120 bp, Homo sapiens
ctgcgcactgcttccccagacccctaagcttccccctccatttctcacaattccattcagggctcagagcaggtgactgcagcgatttggttccaataaaatcgaaagtaaacgtctcct

SEQ ID NO: 3420 - DNA, 120 bp, Homo sapiens
tcccgggctgtaaattagaaatgtttatgctgatttcccattgtatggaaaaagctcctgggcgaaacagctttgagcccgagaacgatttaaaaagctggagctgtgtacacagctctg

SEQ ID NO: 3421 - DNA, 120 bp, Homo sapiens
gagcgtttgaagttgtttaaccattgtgtgaccagaaagaagagtgacgcggcaggaagaagaagccgggtcttggggagagcggaggcgggtcagggtgggcaaaggcagccgatgcca

SEQ ID NO: 3422 - DNA, 120 bp, Homo sapiens
aaccgcccttcgcgccgttccaaactaagagatggcagcggtttcccagcgcactgctggaagtgtgctccagtagacagggtgtgggcaagatgcgcgggcagacagtccgcactcgcc

SEQ ID NO: 3423 - DNA, 120 bp, Homo sapiens
gtgcgagatctagatctgcgccatctcggctttcattccccattccctgtctctgttcgtaacgctcagagactgtttttcctcttttacatccacggccctgtcatttgaaggaaaggg

SEQ ID NO: 3424 - DNA, 120 bp, Homo sapiens
taccgaacaaagactgggcgtcgtaggcagcaccaaaattaagactatttgagaaacttagagaaaaccgagggacagcgatgggtctagggctggataaggaataatgagcccttctcc

SEQ ID NO: 3425 - DNA, 120 bp, Homo sapiens
agacgcctccttcacgcgggaacccggtcctccttcttccgacgcagagagagaagcgattccacaggtggaaaatctgagaccggctggagggaggttcgggggtgcacggcactgagc

SEQ ID NO: 3426 - DNA, 120 bp, Homo sapiens
gggcgataatagaaagaaggggaccaggaccaagtggacagaggatatgagggtgtgcgcccatggggatctgtagaagagaggccgcgggggtgcaaaatcagtaaggtgaacgggctg

SEQ ID NO: 3427 - DNA, 120 bp, Homo sapiens
aatcgcgggagaatgagaaaataaacccgcaaaagggagaggagggggcgagggcgcctgttacggcgtgggtggggttgacaagaatagagtacattatgcagttcatttagttaacaa

SEQ ID NO: 3428 - DNA, 120 bp, Homo sapiens
aagcgtgcagagtgaatgccaagagaaaaggcacaaaaaccctattgagaggccccggccgctcctggcgtagtccatcacatggcaatagtcctatttaagccgcgccgccggcgcctt

SEQ ID NO: 3429 - DNA, 120 bp, Homo sapiens
tagcgctggccagcaccccgcgctctttgggcggtgcccacggcagcagaggctactgtttcagcctaggtctcagccgcgcgttcagcctcctgggcagaggcagctgcgggataccgc

SEQ ID NO: 3430 - DNA, 120 bp, Homo sapiens
ccgcggccagggaaagcgcgtggagagccgaaaggtgcggtgggcgcagagggcgggctggctgcggggcgaccgcgcgccggggccatgccgcgctccttcctggtggactcgctagtg

SEQ ID NO: 3431 - DNA, 120 bp, Homo sapiens
ctgcgcgaggcgggcgagaagaaggcgcccgagggcagcccgccgccgctcttcccctacgctgtgcccccgccgcacgcgctgcacggtctctcgcctggcgcctgccacgcgcgcaag

SEQ ID NO: 3432 - DNA, 120 bp, Homo sapiens
gtgcgtgtgcccgctctgcgtcaccgcctcgcagctgcatgggccccccgggccgcccgcgctgcctctactcaaggcttccttcccacccttcggctcgcagtactgccacgcgcccct

SEQ ID NO: 3433 - DNA, 120 bp, Homo sapiens
ggccgccagcactctgctgtgtcgcccggggtcgctcacggcccggccgccgctgctgctgccgccgcgctctaccagacctcctacccgctgcctgaccccaggcagttccactgcatc

SEQ ID NO: 3434 - DNA, 120 bp, Homo sapiens
aagcggggccgccgcgcagagggaccgggcagaggtgatccgaagcaggatggagagccagagatggaggaagagggaccctgggctttctgggggcggtgagggtcatgtcggggacta

SEQ ID NO: 3435 - DNA, 120 bp, Homo sapiens
gggcgcttggggtggagtgaggatagagggccgggacacaacgccaggaggcggatgagggcagacgtccaggtcctggagtgtgggccggggtaagtgagggctgggatccaaggctct

SEQ ID NO: 3436 - DNA, 120 bp, Homo sapiens
ctccgggagaatcaggatctcggagctggacaaggagcgctcactgtagctctgctgtggattgtgttggggcgaagagatgggtaagaggtcaaagtcgtaggattctggcgaccgcct

SEQ ID NO: 3437 - DNA, 120 bp, Homo sapiens
gatcgcttccttctctgctctgccacctccagacagcagctctaaccagctgcccagcagcaagaggatgcgcacggctttcaccagcacgcagctgctagagctggagcgcgagttcgc

SEQ ID NO: 3438 - DNA, 120 bp, Homo sapiens
tggcggcggcggcgggggtgccggtggtggcgggagcgcaccgcaaggctgcaagtgcgcatcgctctcctcagccaagtgctccgaggatgacgacgaattgcccatgtctccgtcctc

SEQ ID NO: 3439 - DNA, 120 bp, Homo sapiens
ggacgaccgggatcttacggtcactccctaggcgcgtgtctccctaggtcgcccaccccaagacctccctgcgcctcggagactagtcctgggactcagcgctgattcccaggcacccgc

SEQ ID NO: 3440 - DNA, 120 bp, Homo sapiens
tcccgggcctgggcagggctgagagcttggcagagactggaccatggcgtccccgccccagggctcgctcgtgtccaaagccaactccaagctgtgaacactgtaagcgctcgagtcctc

SEQ ID NO: 3441 - DNA, 120 bp, Homo sapiens
caccgcggcccccgcccgcaagcctgcttggcgcagcgccttgctggcagccggcgcctcctagcccgccctctctgggctggcttgggcttcctcgcttactctactctcctccgctct

SEQ ID NO: 3442 - DNA, 120 bp, Homo sapiens
agacgggaaaactgttaaacgcctgctgtttgaaagttccccttcttagctcaaggcattctgcacacccttctaccatgaatagttgctcaaatcaggtacttcctactgcaggttttg

SEQ ID NO: 3443 - DNA, 120 bp, Homo sapiens
agccgttagggggagcgcgtccacttgcttggtttgcagcatgagatcaatgagccaggagctcaggataaaataaagtgtcaatgtctttgtctccttgaggggaagctttaggacaga

SEQ ID NO: 3444 - DNA, 120 bp, Homo sapiens
ggccgaggaaagcccagctctgggctccacggacggcacgaggaggttccctctctgcaggcgttggcagttacaccctgggtgtgcaggctcccagcgtctcctcggagaactcaggaa

SEQ ID NO: 3445 - DNA, 120 bp, Homo sapiens
aggcgttcgctgaataggagtccggctttgaaactgtgaagtcgcagcgccccctgcctgtgcgtggccgccatagctaggaagccttcccaagtcgggaggaccctccccaaggagctc

SEQ ID NO: 3446 - DNA, 120 bp, Homo sapiens
ctccggaggctcccccaaagccgggagaacctcgcacaggcatccaagagcagctctgctcccatggggacctggaacttatttggaactcagcagtccctgctctttcttcccttcctg

SEQ ID NO: 3447 - DNA, 120 bp, Homo sapiens
ctccggctgattctgtttgtcgccgacctcagctgactggatgctgtcatggtggcatggcgattattataggcatctcggttatattacattacggtcttctcactttattgagatcat

SEQ ID NO: 3448 - DNA, 120 bp, Homo sapiens
atccggtgtttactcttacttcatggccctagtagtgctgtattgatgccaaagcgtgagagactgtcacttgattacgatttccaaaggctactgtaatgaatctggcccaattcctga

SEQ ID NO: 3449 - DNA, 120 bp, Homo sapiens
agtcgtcacatgaaaacacacttctcaattttctttttttaaatatcccaaacatcaaaacagtactactcaataaacaccctcatcaagtgctatgaatacaccagttggcatcagatg

SEQ ID NO: 3450 - DNA, 120 bp, Homo sapiens
atgcgtctccctagacagcaacgtttctgtgtccacggatcaacagtccacttatgacagagcttccgattcaggcaggccctggcaggctaatttcacctccataattttatatgcaag

SEQ ID NO: 3451 - DNA, 120 bp, Homo sapiens
tttcgccactgtcacttggacctcagtatggagaagccaaagggaggcaagagtggatacaggaacctgctttggaagcttttgtccaggagagagccttgaactagagtggtggtcata

SEQ ID NO: 3452 - DNA, 120 bp, Homo sapiens
ggacgaggatggaatcaagagacactaatcggaaacctgataggattagctcacagggtgttagaaagaggaaggtgtcaaggaaaagtcacgggtttctagtgtgcccaactatataga

SEQ ID NO: 3453 - DNA, 120 bp, Homo sapiens
ctccgaaaggagacgcaagcatgagggcccttggtgtatgggaggacatcacgggtgtagtggggatggactgtgttgagtgtgtggagcgaaaacgcaaggcggtccaggagcaagccc

SEQ ID NO: 3454 - DNA, 120 bp, Homo sapiens
acccgggtggctgagcgcagcgcactggggccccgcggtccgagagcggcggggaggagcgggcgctcgccgagcgttccccgggacagtccggcttggggactcaagcgggtcatggga

SEQ ID NO: 3455 - DNA, 120 bp, Homo sapiens
tgccggcgctggccctctcctgagatcctcctgctcccccgcaggcacgagtcccctccaaatcggctcccctcctacactctcgtgacgcgaggtcgcggccagtgcccaatatcacca

SEQ ID NO: 3456 - DNA, 120 bp, Homo sapiens
tcccggcctcagcccagccccgggcagcctggcaggctttcaggagcctctgctcccggctccgggggaccctgcgtacctgccccaggtcctctgggaatgggctctgggtgccaggca

SEQ ID NO: 3457 - DNA, 120 bp, Homo sapiens
tcccggtgcgtgctgctcctagtgcccagggcctcggcagtgagaccccaacccgacagctggataagggatcagcgatcctgtcgcaaacggacagccccagcgcggacccggtctgag

SEQ ID NO: 3458 - DNA, 120 bp, Homo sapiens
gagcgctgatgctcgcgggtccaggccagccactcctcgaggcgctccctcggagaaagggcgcagcggccccaagcgtgcccgctgcaactagtgtcccaggttctcgccgtagccagc

SEQ ID NO: 3459 - DNA, 120 bp, Homo sapiens
ctccgggctacagcctcgtctccccgcgtgcaccccgccctggcctcggaggctctgccctccggccgccccatcgcagcccgcctcaggccccggcccccagccgcgcctcacctgtga

SEQ ID NO: 3460 - DNA, 120 bp, Homo sapiens
cagcgcgcacagcaggaccccggtgtcccagtagctgaccatggtgagcgcgacgcggcctgctcgcccggtgcccgcgctccccgcggccaacgacccggccgccagagtccgtcctct

SEQ ID NO: 3461 - DNA, 120 bp, Homo sapiens
tctcgttcgccgccgccggccccgcgccctgagcgcccgtctcgcggctccagccaggagacaaccacttccccgggtaatcctcgccgccaggcgcccgctggccgctgcacccgagcc

SEQ ID NO: 3462 - DNA, 120 bp, Homo sapiens
ccccggagcccgctccgagccgccgccgctgccggggaggagccgagaggagtgtccgcctggcgcgctccgagcctcccgcggacctcgatgaagagcagccgagggcgggggcgattt

SEQ ID NO: 3463 - DNA, 120 bp, Homo sapiens
ccccggcacctccttctggtgacgtcaaggggtcccccacccctcatccgcctccccacctaccctcttcttcctcccaggctcgcttccctgcggctacggagaggggcgggggccgac

SEQ ID NO: 3464 - DNA, 120 bp, Homo sapiens
cgacgagggcgggtggcccggggccgagcgcgcgtggggaggtgctggcgacgcgggcccgggagcgcggccccggcaggttcagggtctttgctccgcgccctcttgcccttgcccctc

SEQ ID NO: 3465 - DNA, 120 bp, Homo sapiens
catcgcgctcaggaaatccttgcagactccctccacccggcttactcagctctgggggccgcccgaaactggggaagggacaaggctgaagctccgccgcctggccctaggggcggaaag

SEQ ID NO: 3466 - DNA, 120 bp, Homo sapiens
gtccgatccaagggaagctggccgcgcctccgcgacggtgttcttggcacggaggactgaggcgcagtccggctgtctccccttgcctgctcttcccgcgctgtcccgccgctcctgacc

SEQ ID NO: 3467 - DNA, 120 bp, Homo sapiens
tcccgagaagtctaggaaggcaccggagaccctcggcacaaggcactgaacctggagcgcctgaggggaactgacgcttgcttggcacctttgggaagactgcgaaccagctcaggtccc

SEQ ID NO: 3468 - DNA, 120 bp, Homo sapiens
gagcgtgtccgtgtctttttcggccgcattgatgcacccgcccaagtcatttcctcagtcttctgcttcctagaagcaaaacaaggaataacattatgatacctttaaaaagctgaggcg

SEQ ID NO: 3469 - DNA, 120 bp, Homo sapiens
agccgatcgaagcttctcactcccgggaatgacctaggagacattcttgaagggagataagaccgctgggtgagactcagggccctttttttttatgaccttactctacgccagaacctt

SEQ ID NO: 3470 - DNA, 120 bp, Homo sapiens
aaacgtttcccatgggaatgaggaaatgagtaagattagggattgtgccaaattgcctaacctcaccccagcaaggttccacctgacacctcgggaagtgctagaaccttgcctctgggg

SEQ ID NO: 3471 - DNA, 120 bp, Homo sapiens
gggcggtttgccatttcctccttctcaggctcttctcccagtcacagagactcacagagccagcaggaggtgactcaattccttttaattcatttcatctttcactgggaaggcagcacc

SEQ ID NO: 3472 - DNA, 120 bp, Homo sapiens
ggacgtagtgttggtgtatgaccttgagaaattgaccagtattgtggttgctgacttcttagtaaaatggaaatgatgacacttctctgctgacctcacatagctgtcacagagattcca

SEQ ID NO: 3473 - DNA, 120 bp, Homo sapiens
gctcgtcttgggcattcagggtgcacctgctgcttctgtcttccaggatggctcctctctctgtctgcttactgaacacagtgtgggcatttccccagcttctggctttggctctgggct

SEQ ID NO: 3474 - DNA, 120 bp, Homo sapiens
tcccgtggaggggctgaggaggctccactctgtgactctgacagttctggtgaaaagaatgtccctggcagaggaggcagcaaggctgtctgatggctcactgaatagccctgggagtaa

SEQ ID NO: 3475 - DNA, 120 bp, Homo sapiens
agccgagctttctccccacagggcatggctctaagacaagaaaaagagataattttagaccacaaactttgaccttgtgaataaaaggagaataatgtaaataaagaaaaataaggtgga

SEQ ID NO: 3476 - DNA, 120 bp, Homo sapiens
agtcgtataatatataaagataagggtaattggggtatccatcaccttaaatacttgtcttttctttatgtcagggacagtggaattattctctgctagctatcttgaaatgtacagtag

SEQ ID NO: 3477 - DNA, 120 bp, Homo sapiens
ccccgcaaggataataacgttgactttttatttgtgagtggaggcctgtcattacttctatggctaaggcttgttttctagacctctgactccactgccaggcagtaggaacttctggag

SEQ ID NO: 3478 - DNA, 120 bp, Homo sapiens
cagcgggttcccagcactgctgcctgacacacgcccacaaccagttccttcctggtcatcaccagtcatctctcatctccctcttccagccaacttccagttggcggccagccaaataag

SEQ ID NO: 3479 - DNA, 120 bp, Homo sapiens
gttcgttctgtgttatgtgtatagcttgaaacttaaaggtatgagggaatgtaaaaatgcttccccaaaactgtttaaaatccgtaagagtttgggaaattatacaaaaaattagacttg

SEQ ID NO: 3480 - DNA, 120 bp, Homo sapiens
ttacgtaggcatctattcttgaatagtgaactgtgtttgctttatggtgttgcacccatgaagctgaaatttcatgcagcaaccattacaccacttttgttaccatccactctgagtcac

SEQ ID NO: 3481 - DNA, 120 bp, Homo sapiens
ccacgcctatcaacttgttaagcttcccaaacaagtgcagggtaaagcatgagaacatcagagtctggggcggcggcggtggctgcaacggtggctgtgacggtggctgccgctgggttt

SEQ ID NO: 3482 - DNA, 120 bp, Homo sapiens
actcgcagaagaattgtgatattaggaagagtacattacaaactcttaagataaaaaaagggaaggaagaaagagagagagaggagactgcacaccataaaaatcaaatacatagagagt

SEQ ID NO: 3483 - DNA, 120 bp, Homo sapiens
ccacgtatctgggaacagcacaaaaagtccaaaaatgggagtttctgtctggtgtccagtgacctcacaggcttctggaatggctgcagccagggtctctgggccaatgggagggggcag

SEQ ID NO: 3484 - DNA, 120 bp, Homo sapiens
gtgcgtaattagttaacctctctgtgtagagcagttggaactgtgatttaaaaaaaatatataccaataggagtaaatatttggttatcttcttccatttctcgtgatcttgtagattta

SEQ ID NO: 3485 - DNA, 120 bp, Homo sapiens
agacgggaggacagcatagtctgcgaagcagatgtcatacacttgatgaaacatgctgtagggcattgtttctcgggaaacaagttcagattgggtcttaaataatattttggaagtagc

SEQ ID NO: 3486 - DNA, 120 bp, Homo sapiens
agccgaaagcaaccattttctccccagaatttaaataactccacacttccctgccctcctctgtggacctcattaagcatgctgacaagcacactgcctagtacatccctccttgacctt

SEQ ID NO: 3487 - DNA, 120 bp, Homo sapiens
ccccggtgcctgactcagggcttagttcaagctccacctcctctagcatcagtctgggaggcagcagtggaaacctcccacagatgacccaggaggtagaagatgtggacacagctgctg

SEQ ID NO: 3488 - DNA, 120 bp, Homo sapiens
tcacgaccaggtaataaggggttaggagtccgctgctgtttgcaggttggtctttcggaaaattgccaacgctttaaaccacacagatggaaaagtgatcctggggttctaacaaagtcc

SEQ ID NO: 3489 - DNA, 120 bp, Homo sapiens
ctgcggtctggtagttgtgtaaaacatgcttacttgtgactgggtggcatgctcccctttctcagtgagttaagtcctggaaatctactctgtgtatgtgttatctaatatctcatgtga

SEQ ID NO: 3490 - DNA, 120 bp, Homo sapiens
acccgcatgatttgtggaaaggaaaagtattgtcaccactcaccatctgtcagtaccacgtgtttggaataactctcctctgaagttctcccacctggctccattccattcttactgttg

SEQ ID NO: 3491 - DNA, 120 bp, Homo sapiens
ttccgctaggtgcttcaggaccctccagcctgaggctgtgccaccccctaggctgaggcctctgctgggccctctgcatccagccagcaggtggaagaagagagagtgagaagaggattc

SEQ ID NO: 3492 - DNA, 120 bp, Homo sapiens
actcgggcacctgggcacacctaactgcaaggaagactgggaagtatagattcactgtgtggctggaaagaaaaagaaaccttttccttttctcaaaggacactgttgtgatggtggagt

SEQ ID NO: 3493 - DNA, 120 bp, Homo sapiens
atacgagcagcctacatgggtttaatcctacgtttactaccctgaatgtgtctgaagtcaattttccaggaccctctgttttctctgcaggaacattttcttgtataatctatttgtccc

SEQ ID NO: 3494 - DNA, 120 bp, Homo sapiens
gtacgagacaagttaaagataaggaaacaggctcatggagaacaaattcctttcccagagttagaaagcctctgattcaataccaggaccatcttgttccaaagcctttttctactacac

SEQ ID NO: 3495 - DNA, 120 bp, Homo sapiens
cctcgcaagctcttcaaggcactatgctggtcggtccttccagatattccgggccctcaagcaacctctgtcagcacatgccttatctgaccttctctcaagattggtggaggtgatagg

SEQ ID NO: 3496 - DNA, 120 bp, Homo sapiens
gctcgtgaaggatgagctctctcatctcaatgaggtgtaaactatttttgagcctttcttctgtcaacaattattccagccatctggacatgtacaatatattttttcaattttagaggt

SEQ ID NO: 3497 - DNA, 120 bp, Homo sapiens
agtcgatgagggcctaagagttaataatgacaatatttgttcccaagctatgactaattgaatgtgtgaacatgtgagtgcaagaggattttggcataaaaaaccggctgatggtgtgat

SEQ ID NO: 3498 - DNA, 120 bp, Homo sapiens
gtgcgcagacgttctctggacagcctggataagtgtgatatgcagattctggaggagcgccaactgtcaggaagcactcctagcctgaataaaatgcaccatgaggactccgatgaatca

SEQ ID NO: 3499 - DNA, 120 bp, Homo sapiens
atccgaggaggaggacctcacagccagccagatcctggagcactcagacctagtaagtagcggctctcccactctaagaattgggaggcttattttttgtaactaatgcaggaggacagt

SEQ ID NO: 3500 - DNA, 120 bp, Homo sapiens
ctacgccacagtaataaacacatcggagcgcgcatgtcaagtagtccttgagatactgcggtgaattaagagggagatgaaagacaaaactaaagtaaaatgcttccattttcaaaaacg

SEQ ID NO: 3501 - DNA, 120 bp, Homo sapiens
ttgcggggaaatgcgggccagtagataatacactttaataccgaaagaatattagttaattatccaacccattaaacatttattgagcacttaacatgtgccaaatgccaggtgaagcgt

SEQ ID NO: 3502 - DNA, 120 bp, Homo sapiens
cagcgcagcgcacagaggaaaaagctggcccagcaaagcgctgagagaaagggtcaggagccggggaaagtgatgcaaaggagtgatgcaagtttgacttggtccctgagggatgagaaa

SEQ ID NO: 3503 - DNA, 120 bp, Homo sapiens
acacgggcaggaaagagaggaggaagcgagtgctggagggcttgtaggggagaaggggctgcagggaaaagcagaaagactctaagggttaaaagacgcaaatcatctttgaaacactgt

SEQ ID NO: 3504 - DNA, 120 bp, Homo sapiens
gaacgtgtccagagaagagtgatcaaatacatacaaggtccagaaaccatgtcagaggagcaaagatcatcggagacatgcggagtgtttcaggcagaatagaaaataaaagggataagg

SEQ ID NO: 3505 - DNA, 120 bp, Homo sapiens
agacgctgggaagtctattgtgtgggcgcgggaatgaacttcttttgtgttggcaatttgggctgggctcaggtgggccgatctgcgggccttgcccggggtccctgcggcagctgcgtc

SEQ ID NO: 3506 - DNA, 120 bp, Homo sapiens
gaccgcggtatttaaagagaacaagacaagaagctgctcaccagcgctccagcacattcttttggtcaaagcgagtcactttgctggcccacattgaagggcgaggaaagtagacttctt

SEQ ID NO: 3507 - DNA, 120 bp, Homo sapiens
ggacgattgaatgaccaacaattaaacagaacactgaaagatgcagggaagcccagggagggagtttcaaggaggatcacatggtcagcagcacctggagacgatcttacacactgtcct

SEQ ID NO: 3508 - DNA, 120 bp, Homo sapiens
tagcgggatgggtgcattaataggtaacaagcccccagaatgggatggcgtagatatccactttagcaaagtgtagcacctccttagaacagcggagtatgctgagtacaagtaccttag

SEQ ID NO: 3509 - DNA, 120 bp, Homo sapiens
taacgggcctgtgtgtccagaagcttatgtatgtgttggacctggggcctatgtgccaaacctgtgtatcaggcctgcatgcccaaagcttatgtgtcaggcttgtgtatgaagcctatg

SEQ ID NO: 3510 - DNA, 120 bp, Homo sapiens
aaacgatatctaagaagaataaaaatacatcacccatgaactattcttgcccaaaacatttaacctgaatttaatcaagcctctctctaggcctaacttccactttacaagaaatgcaaa

SEQ ID NO: 3511 - DNA, 120 bp, Homo sapiens
catcgtaaagagcggattaataaaaaaaggtggaggactgttcacatcacaagtgaccaagaggaggtcatatgggaactctctgtactctgctcaagttttttataaacctaaaactgt

SEQ ID NO: 3512 - DNA, 120 bp, Homo sapiens
aaacgtcaatactaagaagattccactttctggttcttacttatttggtactgcagaatcagtggctgaaagtgcaacacttcctttttgctgtgctggttatttttcttcatatataat

SEQ ID NO: 3513 - DNA, 120 bp, Homo sapiens
gcacgttcatcacctgctggcactgatcaaagcaaaggtatccaaaacacctgaaaagctcctccctagagtaacagatatgccacctggcctagagctcggcctcaaatatggcctatt

SEQ ID NO: 3514 - DNA, 120 bp, Homo sapiens
ctacgaggcaatatatgtttgttgctttaaacaactaagttttagggtaacctgttatacagccttgagtaatcaatgtactctatacttataatttctcacgtaagaaacaagtaaacc

SEQ ID NO: 3515 - DNA, 120 bp, Homo sapiens
ccacggcagggcaggggaagctgacagttgcagaggtggggcctcacagcttggaaagttggaagaaatcctggtgctcttggaggcccagtgcccccagttaaggagacacagccataa

SEQ ID NO: 3516 - DNA, 120 bp, Homo sapiens
aagcgttggaaaaacgccagcctggaccaaaggtccagtgtccctccgaggaattatgcatgtgccacaatcccacaggggctcatagccactactcccattccttccctctccagtctc

SEQ ID NO: 3517 - DNA, 120 bp, Homo sapiens
gcccggcctaggaactgttcctttttgaactttgctgactctccgaggaaacagcattttgaggccgcttcttttactcttcattcaactgtttcctgtattcagcactgaggcttctga

SEQ ID NO: 3518 - DNA, 120 bp, Homo sapiens
gatcggcctcttgctggctggctggctccaggccagaccacacagatcacaaccagggactgcttggcccctgggcccagctgtctgtgctctgccccagcagagaccttggccagagcc

SEQ ID NO: 3519 - DNA, 120 bp, Homo sapiens
tgtcgcttcaggattcctaagttggaggagggggaattggaagaatgggttttataagaaggtgcaattacaagctcgatcatattgtagttgctacagcacctaaggggagatgacaca

SEQ ID NO: 3520 - DNA, 120 bp, Homo sapiens
gctcgctatggctcctggggacagaactaagaccctctagtgggtggtaccatgaagcagattctataaaaggaatcatatttgatctgttgtaactgtccaacaatggtacagactctt

SEQ ID NO: 3521 - DNA, 120 bp, Homo sapiens
gaacggttgggatgcttttcaaaacacaatgggggctgagcttccaggaacaggaagccactccctcttgttgccgccaagtgctggatgccatcgttaccaagaggaactggatgtgca

SEQ ID NO: 3522 - DNA, 120 bp, Homo sapiens
ttccgtgcctcagagataagcttttgctatatcttcaactaggagatttttctggggaaaatctaaacttgtaacattattgattgaattttcccctattgatatacattggagatttcc

SEQ ID NO: 3523 - DNA, 120 bp, Homo sapiens
ggtcgtgcctggaaagatttaaatgtgtgaatcactctcacagttgacaccaggagtagttgagttctcagaagaaggatgtcaggagagaaatgaatgaagggccaaggtttaggagat

SEQ ID NO: 3524 - DNA, 120 bp, Homo sapiens
aaacgctgggccacataggaggttcttgctgaaaaaataagatcttcagcgtctctctttagggagagatgacaaaaatggcacaggcacaatatcaataccataggggtgaggatttgt

SEQ ID NO: 3525 - DNA, 120 bp, Homo sapiens
ctgcggtcagcaagaatggcaatctgtgagaatgagctcaacaaatgctaattgggccatccaaattctgaaccgttgaccttagtccttaatcaacaaaagagactgaccgtattcaaa

SEQ ID NO: 3526 - DNA, 120 bp, Homo sapiens
ttacgctgtgaactgcatttatggccatggtgatttcagtggctagataagtctggtgtttctctatgcctgagctaataactcttggagaaaattaaggactcagaaagacccagcaac

SEQ ID NO: 3527 - DNA, 120 bp, Homo sapiens
aaccgaagattgataagacaaattacttactagcttggcaatacaaagtgcattaaacacttcaattcaaaccactagtgactagcgtctgggaaagcagaaattatcattgctctatgc

SEQ ID NO: 3528 - DNA, 120 bp, Homo sapiens
gcccgggctcccaggcagggctggcttcatggcagtgtcacctgtgtaattgcatagcttaatgttcttctgtgaccgtcttgaaattcttaatatgacttcctctttggacttgtgttt

SEQ ID NO: 3529 - DNA, 120 bp, Homo sapiens
ctgcgcataggcagaggggatatgccaggcagcagtgcccacatggatggggtgtggtgagcagcagcccagggcaggtgggcagggtgcatacacagcggttggccgggtctcatgtgc

SEQ ID NO: 3530 - DNA, 120 bp, Homo sapiens
gtgcgtgcctcagggaagtccaaggtacggtgggtttctaagggtgtggccagcccagcatgtgtaacagcagcagcagcagaggtggcaatggcagctccataagttataggaaaatta

SEQ ID NO: 3531 - DNA, 120 bp, Homo sapiens
gtccgtgctggagcacgtgacccatcctttgaacttctccttggcttctttctggaggccctggatgagatggttcaggtaagtgtggaaagttgccccactctcctccagctgtgtccc

SEQ ID NO: 3532 - DNA, 120 bp, Homo sapiens
gcacgtggatctcagcctccacatacgagttacgagactgggccaccaactcgtgtggaacctagaccaacggatgcatgaaagggcaacacactgagccaaagaaacgccgagactcaa

SEQ ID NO: 3533 - DNA, 120 bp, Homo sapiens
acccggctctgagccacgggccgagggccacacggccagagatgtttttctaagatcattgccaaggccgggaggggccttcctaaagtcaggaaatacaaacatgtttctgaggctgta

SEQ ID NO: 3534 - DNA, 120 bp, Homo sapiens
aagcgtcttatctagttccaagagctactagggaggcggaggttcgagccttttgctcacctcaaaaagtctgtcgcattccatgatcatgtgcgctagcccctgagctgctgccagatt

SEQ ID NO: 3535 - DNA, 120 bp, Homo sapiens
tctcgttgaggtccttttgatctggcttcccagtggcatatttcttctgtatgactctgtaattgaacgtgagtgtgctaagcagatcccacaccaacgagcttgtcacaataccaaact

SEQ ID NO: 3536 - DNA, 120 bp, Homo sapiens
cctcggcctcccaaagtgttgggattttaagtgtgagccaccatacctgccctgttgctcatccttctgatcacagtggatgggcaggcaacagccccagctccctcagcttcgttatga

SEQ ID NO: 3537 - DNA, 120 bp, Homo sapiens
ggacgggcagcctgggccatcacacagggtctcacacacttagtttaatgctctgctgtcttggttttgaaattctcaatgatttatgaacaagtgatcccacattttctcttttcactg

SEQ ID NO: 3538 - DNA, 120 bp, Homo sapiens
ctccgacgggctgctctcgccactcgacttgccagagcatgggagcccttttctgcaggcaggtggcggcgaattctggagatctccatttggtatttggatgcactgcatagccttaaa

SEQ ID NO: 3539 - DNA, 120 bp, Homo sapiens
gtccgcccagaccccttatgcctcccgtgggctcccttccctcggagtgtttccatgcgtttcaaaaatgatttggccctagccctcgtgggcttctcattcttggggtggaaggggtgg

SEQ ID NO: 3540 - DNA, 120 bp, Homo sapiens
ggccgctgggaatgccgcgggagtggagagcccgagctgcaggcggcagaagtgctggtgtcctgtctcctgaaatgctcttggctgggttgttagtcttccagtgaggcgtgcagctaa

SEQ ID NO: 3541 - DNA, 120 bp, Homo sapiens
gctcgagaatactcctccacctgactcttacagaggcagggaaggtcatctcgaatccttaaagggtcccttttctcttctgcaaaacagttagaaactgtattgtgggagggtagcggt

SEQ ID NO: 3542 - DNA, 120 bp, Homo sapiens
gtccggcagtcccaaggcacaatgattgtgaccccagacagtttagctacttggggatgactttctgcagaattaaataagtctgggattctgcagattggaggtggggattctatttct

SEQ ID NO: 3543 - DNA, 120 bp, Homo sapiens
tcccgctgccttatttttcttccaaataaataaatactgaagttggctggagcttttcacggggtgctcgattctcaagtctccttttctatttgtgatcatttggcctagtcttagctc

SEQ ID NO: 3544 - DNA, 120 bp, Homo sapiens
aaacgggtgtcacaacagtgtctcctaagtggttgcttcaatctggccatggattctggtcattattgagattcataagtaggtggagaccacatgtcagcattatttatttgaaaattc

SEQ ID NO: 3545 - DNA, 120 bp, Homo sapiens
gggcgtgtgccactagatgcgatataaagactacattaaggtcagaataccgaagtgaccaatttacagaggagcttttgtggaggtaacgcacaaagagccaaacaaatgttattcaag

SEQ ID NO: 3546 - DNA, 120 bp, Homo sapiens
tctcgcctctgggttttgaaaagctggtgacagggtaaaaatccaatcactccactgtgtggaaacaactcatgtcattagttttttggcattttcttttgtgatgcagtgcagctaatg

SEQ ID NO: 3547 - DNA, 120 bp, Homo sapiens
ggtcggtataggcagctgtatagaccagccatttgaggagccacactttagacacacaggcatggctgtgttcagtttaataggaaccatgtgttccaatcaaaacaacatctgaccctc

SEQ ID NO: 3548 - DNA, 120 bp, Homo sapiens
gctcggagctcagcatgtgctcaagacatgctgaattaaggaggagctgagagtgactttcttgctctgcataaatctcaagccagagtggactgcagcccattgatttattccctgcaa

SEQ ID NO: 3549 - DNA, 120 bp, Homo sapiens
gcacgttgctgctggtcaaagatctttggcaaaggaaacttctgccccctgaaaaagctctcctgctctcttttttctctcttggtctgatgtaaagaggctgaagggcacatgccaggc

SEQ ID NO: 3550 - DNA, 120 bp, Homo sapiens
ttccggtgatgaacaaaggattaggtcaccttatgagcaggaatgaggcctggtccagtcaggaccacccaaaatctccctgaatatgccctggaggaaacccaattcccccaggctgcc

SEQ ID NO: 3551 - DNA, 120 bp, Homo sapiens
ctacgctggttctcaggagcagaggaaaaatatatgatgtaatgggatgagttttttggggcactgaactagtcgggcctgcctataaagcctttctctctactttaaacttctccttcc

SEQ ID NO: 3552 - DNA, 120 bp, Homo sapiens
ttccgccatgtccttccagaccacctgaccactgccactgaggccatgcaaggctaagtaacaagttcacaaaggtctatcctttgtacccacatgcccttctgatccagcacttacccc

SEQ ID NO: 3553 - DNA, 120 bp, Homo sapiens
ccccggcgctggaatgtgtggttcactctgcttttctgtttcccaccacagacagtgtctttgcattctctgcaccagcgcagcaccaagcaccacaaaggggcctggttaacgtttgca

SEQ ID NO: 3554 - DNA, 120 bp, Homo sapiens
ttccggttgctaacagtggagaggaacctcactgctccccagtgacctgcgaagcctcagctgagattccaagcctccacacttcctttcctcattgttttcattcccattaaaaaggaa

SEQ ID NO: 3555 - DNA, 120 bp, Homo sapiens
tagcgaacagaactctcctctcgtaaagaaacagtgcgatttctatcataattccagtggttaatcttttgcttgaaatttccaaatattttcttacatgccctttaagaccataaatac

SEQ ID NO: 3556 - DNA, 120 bp, Homo sapiens
cctcggtacgaaaactatcctcattgtataatgcaggtactaaggttcgtgatctcttttaagctttatggtacttcttttttctgtggagtgtggcttttatttacatcctaaagagta

SEQ ID NO: 3557 - DNA, 120 bp, Homo sapiens
ccccgcgttcctaggcttgcaaagaaaatgggtgggaagtagttcacagcaacgctcttaagtgcttgtgtaggagagtggaggagtaccactaatgctgatgtcattgtcgtttctgaa

SEQ ID NO: 3558 - DNA, 120 bp, Homo sapiens
ttccgtttctgtttaagagcattgacctgggggatgtgaagagaatgacagagggagagggttgccgggaaggcagggaaagagggggaagggtcccgctctatcggggtcagacaagga

SEQ ID NO: 3559 - DNA, 120 bp, Homo sapiens
tccgtaagaaaaatcagacagtacatctgtaacatgagggctctgacaatgaactgtaacagtaatgccagctgggtacataaaattccaatgctaagaatttcattccacatcaggtac

SEQ ID NO: 3560 - DNA, 120 bp, Homo sapiens
tgtcggcaatgccttatctctgtggacatttcactgcacatataggatttctatgtcaatatttgtaaaattctaagagttatacactctggcttatattacccaaaaggagagggagag

SEQ ID NO: 3561 - DNA, 120 bp, Homo sapiens
tgtcggcaaagagtcaaccatgcactggggagtcgtattgaaaacagaagacaaaatcatgtagtacaaaattaactatgttcacaagagaggctcagaaggacataagggataaacaaa

SEQ ID NO: 3562 - DNA, 120 bp, Homo sapiens
tctcgaggtagagaaagtatgtgaagttctggcattcaacagccgcagaccagggaaagtcaacagtgaggcagaaagcataaactacctgctggggcaagccaatttcatgcattgtgc

SEQ ID NO: 3563 - DNA, 120 bp, Homo sapiens
tcacgtggcaaggcaggctgatcactttctaagctggatttcttccactattttgaagattacttcacctctcccggcctcacccaaatcatatatacactagagttttcactttcattc

SEQ ID NO: 3564 - DNA, 120 bp, Homo sapiens
attcggggttcgcatcacaagcgactgtgcgatgaaatattctaaaaatctagcatctcttttaaagttcactttgaaatttaaggagaaagcagacttaaagaggattctgaaagtgta

SEQ ID NO: 3565 - DNA, 120 bp, Homo sapiens
aagcgtgggtggccacaagcattcctggcagctataaggcatttgctaacgtatttgacttttaaagttgttaatcacacttatcaacataggcaagcagcactggccacaaaagattag

SEQ ID NO: 3566 - DNA, 120 bp, Homo sapiens
atccgcgccgagtgataagtgcatctgccagctccacaacctttcagtgacttcagaacttattaaagaccttagcttttaataaatcccagattttcttttccatcaccttacacacaa

SEQ ID NO: 3567 - DNA, 120 bp, Homo sapiens
gatcgtcaatgattctggttgccatggagaattgggggtcatcttttatctggcgtagttaaagcaagcaattgcccacccatattatgtgattggagtgaatgcttccataaccatttt

SEQ ID NO: 3568 - DNA, 120 bp, Homo sapiens
tttcgattcaacttagaaatagtttaatggctatgaagaccagaaacacacaagacaccatgcaatcgtcaatgctggagattaggaagaaagaaaaaaaaaaaagagtggccttttcag

SEQ ID NO: 3569 - DNA, 120 bp, Homo sapiens
gcacgctctctagctggaaggcacgcagatggattacaaaacatttcaggctatttctaaatgcagagtagtggaatatttccgagaaccattcttgcaattattttcaattaaatcttt

SEQ ID NO: 3570 - DNA, 120 bp, Homo sapiens
aatcgccaaaaagtgacaatacgcttgcttgagtttaaaaatcattaccaatattccaaatttaacctgaactgaaagcaaattaaaagctcaacttatatctatttatgcaggcacttc

SEQ ID NO: 3571 - DNA, 120 bp, Homo sapiens
tatcgtagcatctttcgcacttatttgcaatgaaagagaaaggggtggatttccagctggtggtctgggagctgtgctcgctgcagctcacagtgggcagccattgccaacgctgcttca

SEQ ID NO: 3572 - DNA, 120 bp, Homo sapiens
ttacgggggaggtcatcaaatctgaagccccaggaagtgtaaacatccacttttgtctgttactgtgaacaaaggttcaaaattgtgacttcaaagcatggcagacactttcctaagaca

SEQ ID NO: 3573 - DNA, 120 bp, Homo sapiens
atccgttcattcagagcctttcatgtacatgttttgtacatcaactaatatctagatattgcgacttcttttatctacatttgaaaccaaaatttaccttaccaaaacatttacataaaa

SEQ ID NO: 3574 - DNA, 120 bp, Homo sapiens
aaacgtaagtgtttctgaataaatggagaatcagaattttcaggaaatctgataagttcaagaagagttaacacttattcctctgaactcctaagccacgtccttcccgtcttcattaga

SEQ ID NO: 3575 - DNA, 120 bp, Homo sapiens
tgtcgatagtggggagattgagaaccccaatttagatagagagtaactacaaaaattccatacacagacaagagatctcagaaataagccagcgctccttttagagaaaatgcagtggca

SEQ ID NO: 3576 - DNA, 120 bp, Homo sapiens
tcacggaaacataaaccaaattggagatcccaggtggtcattttcatctcacagctcatttttgttctcccggcataagcctcaactagataacatctttggactttcagaggtcagcat

SEQ ID NO: 3577 - DNA, 120 bp, Homo sapiens
gaacgagactttcattcaataacagtggcattattttttattgtgggtcatggctcataatacgcaattcagctaaaagggaaagatacaaaacatttgagatgactggcaggagaaaac

SEQ ID NO: 3578 - DNA, 120 bp, Homo sapiens
gcacgggttgcttgggttcggaaggcagggcagcccattccttttgttctgttgctcaaccctagaaggctttccctggtgaactcgggcccacgagcagtgagaagttaggaggaggaa

SEQ ID NO: 3579 - DNA, 120 bp, Homo sapiens
aagcgggcaaagccaagtctttcactggagataacatttgcctgatattttaactgtcatctattacctgaagactcatttatccaaggccgaatgaagccagctcttgcactgacatgg

SEQ ID NO: 3580 - DNA, 120 bp, Homo sapiens
ccccgtctgcctgcctcggtcctgcctctgctagaggctccgtcctgttactctccagccaccagccagtggggggacctcgcacagaggtggcagccctgtgctgcagctgcacttttc

SEQ ID NO: 3581 - DNA, 120 bp, Homo sapiens
attcgaactttctggggtttaaattaatttcctgtttggcatgtttgcaggaggagaaaacaattatctccaaaattacaagtaattagctgtttgcttattgttgtgggataagatctt

SEQ ID NO: 3582 - DNA, 120 bp, Homo sapiens
tctcgatctgggaggttagagtccagttcccacccaggccttaccgaaatcttcactctgctcatgtaagccctgcccctggatcctaatgagtaaagaaaactgcaggagcacaatgtc

SEQ ID NO: 3583 - DNA, 120 bp, Homo sapiens
gaccgaagatctcaagatgagagtctacattctggctcatcacttactagtcgtagaatcttaagcaagtcactcagcttctctgaaccccagtttcctcattttattagaaggattata

SEQ ID NO: 3584 - DNA, 120 bp, Homo sapiens
tagcgtttctcaacagtggcactattttgggccacataattctttggtgtgggggagcatcctgtacattacaggaagttcagcagcatcactggcctctgcccactagatgccagcagc

SEQ ID NO: 3585 - DNA, 120 bp, Homo sapiens
tcacggggtttgtaggggcttaaatgagcctaatgtatttgaaactgcacagaatgatgcctgcaactattcacacagtcacaaccaaagaattggtgcaatgcagctggcatacatgga

SEQ ID NO: 3586 - DNA, 120 bp, Homo sapiens
acccgagcactctcttcatgttggggacaaaagaacatcgcgtgatgattctagttggagcattcagtcaaatgaatcagttaggtgccagccacatgccagaaaaaatgacaggaaccc

SEQ ID NO: 3587 - DNA, 120 bp, Homo sapiens
ctccgattgaataatgggtctgctcttcttgaacctgagcagacctttatggctatgttgactaatagaatacagaaaaagtgaagaggcaacttccaagactagatcataaaaagtcac

SEQ ID NO: 3588 - DNA, 120 bp, Homo sapiens
gaccgagaggcagcatccactgccagtcatgcaagtgcccaaggcttcggatgttcctggagcccagtcactgagccaggcatagcccgcaggtcttgccagcctatgtcacagtcatca

SEQ ID NO: 3589 - DNA, 120 bp, Homo sapiens
tcacgtatttcatcagcagagtctagaggtctttcttgacacatagaagggttgcagaggttatgacctcttccatgccacccatgaacagaatggcttgatcagcaggaaagagagaat

SEQ ID NO: 3590 - DNA, 120 bp, Homo sapiens
atacgggacaagaacactaagtgggagccttcaaagaagaaggctcctttgagaagcctggaaacttccggagctggttactgggtcaggagcagcctattctagagaacaacctggcat

SEQ ID NO: 3591 - DNA, 120 bp, Homo sapiens
ccccgggaaaacttgggggagaatgggcatcccaccccagcactttctaggaagaagggcagcattttgaagggctggaagtagaggaaggaggttgcgggtagaagactccatactttc

SEQ ID NO: 3592 - DNA, 120 bp, Homo sapiens
tgacgcctattccttaggtaggaacttaggaacctcaggtaggttcagcaacatgctggatcctgcccttgggaatcctgatgccttggacatttacttgggaagcagagttcttgataa

SEQ ID NO: 3593 - DNA, 120 bp, Homo sapiens
tgtcgtttggtgaatataaatgtatatgaaatgctactgttcactcatagagattgaatactaatcaaaggttcctgctgtccatatgtatgattttcagaagtaagcaggaaggggaga

SEQ ID NO: 3594 - DNA, 120 bp, Homo sapiens
gctcgaaatcctgacatgtaaattaggtacttggtgactgccaagttcctttccaatctctctgcattgtttcgcccttgtgttttatccaactgttaggaggcaaagcaacacaaatca

SEQ ID NO: 3595 - DNA, 120 bp, Homo sapiens
tggcggcttgggctaggcagtatggtaattccctatgcattctgttggagtttttggatgttgtgtgatttctctccagaagcgtcattcataatgtgaatgctaatgtgtatctctttg

SEQ ID NO: 3596 - DNA, 120 bp, Homo sapiens
tctcggagccacccatcagtgcctgagcttcagtgagtccatatcccatgtcacccacggcaaaggagactctaagacttctgaagagtttcttgcttctttcctgtggggcagtgactc

SEQ ID NO: 3597 - DNA, 120 bp, Homo sapiens
taccgactcagctttctgttctgcctacccaagatagaatctttgtgtggttgttaattttcataaaaagatggtcatctggcctttactcagttgacttttaaagtatttgtggctggc

SEQ ID NO: 3598 - DNA, 120 bp, Homo sapiens
aagcgtaggccacatactctcctagatcagcatttccaaaatgtgttccccagggaaagctggttttgcaatatgtgacttcccagtatcctgtgaaaagtggtttcaagatgaaatata

SEQ ID NO: 3599 - DNA, 120 bp, Homo sapiens
tctcgtttttacctacccacccacccacacccaaatatttctactggactataatttattgtgacgcccccatttccactgcaggatgttataagaaatgagactcactactgaattcac

SEQ ID NO: 3600 - DNA, 120 bp, Homo sapiens
agtcgggcaagaaagtactaaacatagagaaagggcaattccaaaagaacaaatgattgcttaatttaggctgacattacccagttgctgggggtatgggccatggggatgggccatgtt

SEQ ID NO: 3601 - DNA, 120 bp, Homo sapiens
tctcggtagtgaaactttctacattccacattttctatcaagaaaagaaagaggttgtattgtgaggtaagaggcacacacacggacttccttcagtagctgcaatccttgctataggtc

SEQ ID NO: 3602 - DNA, 120 bp, Homo sapiens
catcgatattaatgaaagcatgacacaggtttcaaggaagcatgtccaggtatatgctgaatgacataataagaaaaatgtaaatatgcattgcttttgtcttaaggtaatacttgtgat

SEQ ID NO: 3603 - DNA, 120 bp, Homo sapiens
aagcgccagtcagtgaggcaaataaggaccattcttatttccattctctctctctacaacaatttccctattgattcaagcaagaatgtggggtagggattatgggcagtatgacttatg

SEQ ID NO: 3604 - DNA, 120 bp, Homo sapiens
gcacgccattcaatgattatctcactataatgaggtcagtggggagcaacttacttgtttccactgttcccaacaaccatgagaaattataagtaatgatgtcttaaatcaaattaacat

SEQ ID NO: 3605 - DNA, 120 bp, Homo sapiens
tttcgttttgttaatggaacttcctcacctcagaaacagcatgtaagtcaattagcctttttctaactaaggaaacaatggactttattcacatggtatttcactcacaagtcccctaaa

SEQ ID NO: 3606 - DNA, 120 bp, Homo sapiens
aatcgttgcctgttgtggtattaatgttcagtgaagcaactggtctcagtacacagtcaagtaaacaggcatcaaagggtagaacctaactgttaacccaaagtatctgagacgggtctc

SEQ ID NO: 3607 - DNA, 120 bp, Homo sapiens
taacgttttaagtcatgaacagagccctctttactttctttcacttcaaattccagtgcctcggcctctccaaggacattccactctcctataacaagccgaggagcaggcaaaaatgcc

SEQ ID NO: 3608 - DNA, 120 bp, Homo sapiens
aaacgaaagggaatattctgaactggaaacagtgacctttatggcattattccaaaaggaaagtcaaaggcagagcctcaggaaggcaaatgtccaggatccacaggaactctgacttat

SEQ ID NO: 3609 - DNA, 120 bp, Homo sapiens
atgcggaacattccacacgaggcctgctaattacagcgctggagcatctgttttgataatgttctttgaaatcaactcaaccctgagaatgtgtgcaaatagacgaaaaagaagactgga

SEQ ID NO: 3610 - DNA, 120 bp, Homo sapiens
aggcgcaccatagtgctccatttaacagaggcctcacattcctaaaggacctctgagctggttatttccaggtgaggcctcacattttacagtgatgcactaaaaggactgaaagaaggt

SEQ ID NO: 3611 - DNA, 120 bp, Homo sapiens
ttacgacgtggctgcattcctagagaatgagtaccggtgggttatcattaatctgggaggacagaacacaggtgatgaagattctcattctgtgacctgcagcatggaatggccagcatg

SEQ ID NO: 3612 - DNA, 120 bp, Homo sapiens
ggacggacagtttattgattctcagggcaggtgacagcagactgaggaggtgccagatgagttgctgggagttgaatgcagttcagagaaggcaaatgcaggataatataccgtctgtaa

SEQ ID NO: 3613 - DNA, 120 bp, Homo sapiens
tggcgtgggcctccattcacatatgtcctgaaatttagactcctgacatctctcaatatctgataaggtgtttgttaatgtaaaaacatgcaaagcatgccagtttaataatttcatttt

SEQ ID NO: 3614 - DNA, 120 bp, Homo sapiens
gcggacaggctaccggcctggttgtgcagagaggggagggacctgagagtcaaactgcttcctaaacagactttgaaccactcctagttttaggaggccccacatcacttccaggaacct

SEQ ID NO: 3615 - DNA, 120 bp, Homo sapiens
tggcgctgccaattcctgagcctttgtgggattctggttggtttctcaaatttcctcactgctgacttaggattcagttttcctaggtctgttgtattgttggccacacttcttactttc

SEQ ID NO: 3616 - DNA, 120 bp, Homo sapiens
atccgttgtgtgaaatttcttaggttattgttacctcagcccagagaagagttttcaattcagttgcacacgagttatcccacttataatgaatcttctgaagccattagttgtttccta

SEQ ID NO: 3617 - DNA, 120 bp, Homo sapiens
ccacgatgaatatccaaacacttagacaaggtttttgaaagactcctactcagaccctaccgaggcattctgaatcagaacttctgagggtaaggccctaatgagacagccaaacgccaa

SEQ ID NO: 3618 - DNA, 120 bp, Homo sapiens
ccccggagaatctctaaccctccccacaggtgtttacatcagatgtttttgtgcagacgaaggaacttgcccagggccttgtctgagcatgcccacatgagccctgggggagcagggtgg

SEQ ID NO: 3619 - DNA, 120 bp, Homo sapiens
tatcgactgtgtcatgacaaggaaacttacaaactgcaacgcagagaaactattaaaggtaatactttttaaatattaaagtgttgggcagaaaagttcattgcattaaactagatttag

SEQ ID NO: 3620 - DNA, 120 bp, Homo sapiens
tgtcgttatataatatttccaggtttctatagaattatcttaattccatttagtaagtccactcttttcaggtggagagaaaaggtcaatgtgaaatgtcattgccttgagatgatggta

SEQ ID NO: 3621 - DNA, 120 bp, Homo sapiens
aaacgttttaccatggtctttcagattctgcgtgatcatacagcaacctcttctttagcaacctctccactatcccacccgggtactttagttctggtggcctctttcattttctgaaag

SEQ ID NO: 3622 - DNA, 120 bp, Homo sapiens
cagcgtccatgttaccttcccagatcagccttccttgaacccaccccatccacctggatctccctgtttattcttcatgagagaaccctgttctttcataggatttttctgaatttgtca

SEQ ID NO: 3623 - DNA, 120 bp, Homo sapiens
caccgtgtaagtaggaacaaagtattatttcaaagacccaagtctgaaacggtttatctgtttatacttaatggctaaggtatacatgtacacgtattctatttgactaacatttgaggt

SEQ ID NO: 3624 - DNA, 120 bp, Homo sapiens
aatcgctaaaacaagttaggcaaagaaaaaggatttaataggcaagtggaggaaatgatggcatggtaatacctaaagaatagtcataaaaagtataacaagtatgaatcatctatgctt

SEQ ID NO: 3625 - DNA, 120 bp, Homo sapiens
gggcgaacactggttttgggaggaacacactgcatccatttttgagaggcctctcgcagctgcagggattgcctctgccagctgcttttgggcggctcacagccatcgagcagcggaggc

SEQ ID NO: 3626 - DNA, 120 bp, Homo sapiens
gcccggatggaaccaggtctcccctactcattgtcctcaaggacacaggagtcatccaaagctgggcttctgggaactgaatgttcagcagatactttaaatattggctatgtcttaaaa

SEQ ID NO: 3627 - DNA, 120 bp, Homo sapiens
caacgctgaaagtgacaccaaggaaatggtccgaagttttagttcatgggcaagctttacttggccttcagtttaaggaattggtgggtttcctcatccctcaaggaagtttgggggttg

SEQ ID NO: 3628 - DNA, 120 bp, Homo sapiens
acacgtgtacttgtttgttaaggcagccgtaacaaagtagtgacaaacgaggtggcttaaccaacagaaatttactgtcttatggttctggaaactggaagtccaaactcaaggtatcag

SEQ ID NO: 3629 - DNA, 120 bp, Homo sapiens
caacgtacagtttttctcagcacaatttacatagatgtctggctagctcttccttgtaaaagtccagtgtcttcatttgatgtgctaagttaaactgtaaactcctgaataatttgaact

SEQ ID NO: 3630 - DNA, 120 bp, Homo sapiens
ctccggaggaaagggactgtgtctaggtcatggctgataaccagtgcccaattctgggcctcaacaaatgccttgtgggatgagctcatgctggaacctagcgggtgtgcagactcgtgc

SEQ ID NO: 3631 - DNA, 120 bp, Homo sapiens
attcgtaaaataacaaccacaacaatgataatacttactaattttgttatgattgcactacctacctcaggatttaaataaggattaagtgagatattctaagtgcttaaaatagacctt

SEQ ID NO: 3632 - DNA, 120 bp, Homo sapiens
gggcgactattagcaatacacctctcctcccccgatgccaggttcttctgctagagtccattttgaagagaaaaaattattagatttgatgaaaataaaatggaattgtttttcaaaggc

SEQ ID NO: 3633 - DNA, 120 bp, Homo sapiens
caacgatgagtaatatctctcacgctgtcatccagaatgactcacagcatcagagggtctcatgtccaagggcgcattcgaactgtttcttaagagtcatttcttactcatcacaaaact

SEQ ID NO: 3634 - DNA, 120 bp, Homo sapiens
agccgagccgggggccctcagagaaaagagcgaactgacctttgaaggcagagccgctaccagaggccacaccgctgagaagcgaacatctgactcatctggggagtgttagcccagaaa

SEQ ID NO: 3635 - DNA, 120 bp, Homo sapiens
caacgtgtaaaatatcacatccccatgcccagaggagtacaatagacccagtaagcccaagagtaatctccccagaaataaaagaattagggctgttgacaaatgaagacaaaagcttct

SEQ ID NO: 3636 - DNA, 120 bp, Homo sapiens
agtcgtgtgtctctcctgcttaaaagccttcactgccccaccgggtttctcaatcactgcctgtgtgggttgcacggggggtaagaccggtgtcagactctacaggggagcataaaaaaa

SEQ ID NO: 3637 - DNA, 120 bp, Homo sapiens
ttacgggctttatctcatttagtccttaaaatcagcccatgaggtaggaattattaatattcccacttgacaactagggaaactgaggctcagagagattaaatgatttgtctaaaggca

SEQ ID NO: 3638 - DNA, 120 bp, Homo sapiens
gagcgatcacaaggacatccgaggagcttggcaggactcctgagtgctctggtatgttccttcctttttgccttcactcctcccaactggacgcttggtgagctaaagagctgcagaaaa

SEQ ID NO: 3639 - DNA, 120 bp, Homo sapiens
attcgtccctgggccctccatggctgagtaccagccaagactttcactattccaagatagaagcctccacagatagaaattcccagcctaaacaggcttcagcccatggttattattaat

SEQ ID NO: 3640 - DNA, 120 bp, Homo sapiens
ctgcgttccccacactctctcttactctgaggcctggcacgtgccttcttggcagtgttatcatggcagatatgccttttaaacttagctcagacattgcttcctttgcagaaccacacc

SEQ ID NO: 3641 - DNA, 120 bp, Homo sapiens
caccggccacactcagagttccatgtgctctcttcaccctcagaggactctgtaaaagccagcacggagcacttctcttactgttgttcacctatttgtcagacttcagcactagactat

SEQ ID NO: 3642 - DNA, 120 bp, Homo sapiens
tctcggcacctgtggctgcattcctcagtggaaagcaacactcacagtggcaagaggaggggcattttaaacttccttttgtgggaagaacacttctgtgctgagaccaaaaacgtggtg

SEQ ID NO: 3643 - DNA, 120 bp, Homo sapiens
agacgaaggatgccatgtcaccatcattgggtgcgcccctgaccacagaagatcaggatcagttctcccgtttagaacccatcattcaactgctaaagaccaatcacccatcatccaagt

SEQ ID NO: 3644 - DNA, 120 bp, Homo sapiens
tctcgttccaattatactgattcgttagcttacttcaaagacagaaaatcttggtccattatctttcctctttcaaaaacagtcatgtatattttaatataaagacaattattagggtgc

SEQ ID NO: 3645 - DNA, 120 bp, Homo sapiens
tagcgaatgctgaaagcaatcttcaattggttcaactctcatcatttgggagaatgggttgggcaatgaccatggttaagtttcttctggaagattgaccaatgagaagaggttgttgca

SEQ ID NO: 3646 - DNA, 120 bp, Homo sapiens
tatcgtattgtgtcacaccaagagcctgctcatccaaatcttcagtagctgatagtggtatcaaggatattttgagaaatatttcagtagttactctccacgacagaggccttgtttctt

SEQ ID NO: 3647 - DNA, 120 bp, Homo sapiens
aaacgaataatgtcatagcagaccaccttaagggttatggcaagaccaaagcaaggagggagctttgtttattttggtcttatgaacataaatgatttaaccttttagaaagagatcatt

SEQ ID NO: 3648 - DNA, 120 bp, Homo sapiens
taccgagactttgtccaagagaaataggagcctggttatttcatccggaaatggagtcattttacagccatttaggcctctagacacaaaagtgttctgcagtctgcatctttgttctcg

SEQ ID NO: 3649 - DNA, 120 bp, Homo sapiens
ccccggaacaaaaagaagccgttcatgactcagagtttacataatgcatgtaactatccagtaggtctcttcactctcactgagtcgtgatatgtactgaaattacatgaagcccattat

SEQ ID NO: 3650 - DNA, 120 bp, Homo sapiens
tgacgcaatgcaatgatccagcatggggaatcagagctcaaacaagagtgaggaggccatctgtgtggaggggtagcctgacctgggttgtaggagtcccagcatggtcagatagtgcac

SEQ ID NO: 3651 - DNA, 120 bp, Homo sapiens
cagcgtccactgcagtgcaagagaagacaactttatgaatagaacttgcttattttagcggaactagaactaaatatgagtcatctattgaatcccatttgcaaaagggaaaacaaatga

SEQ ID NO: 3652 - DNA, 120 bp, Homo sapiens
ttgcgtcactgatccatatcactgccgtgtgatgtcaaagtgtgggtgttcagttattgaggcatagttaacctaatgtgctgcagtaaatcctaagtgctccttcctactaaaataaca

SEQ ID NO: 3653 - DNA, 120 bp, Homo sapiens
tgacgtagtcagtaagttcattttgctaaggacagaggccaacttgtctcttttttctcaaactcccacacctcccaggatgctaccactcctttcagcctgtgacatgtgcctggctta

SEQ ID NO: 3654 - DNA, 120 bp, Homo sapiens
tttcgcctgcccacacccaagttatcagctctatctcattcttaatccttctaggatgacacagaggtcttaaagaagaaattaccttttcagtttcacagttaatcaatggcagcagct

SEQ ID NO: 3655 - DNA, 120 bp, Homo sapiens
gctcgtatgcagtagtgtaaggcctataacctcttcccacccacgcttccaagggcttgctccctctccaccatcccccttggtaattgttgccacgctgagcctgtctgtctctcagga

SEQ ID NO: 3656 - DNA, 120 bp, Homo sapiens
tgccgtgtccctgctgtgtaaaaagaaaacctaggaaagactgagcccctggtcaatgtggcggtcaggtcctggcggtgagattgggaaatagctggccttgaacttctctgccagggg

SEQ ID NO: 3657 - DNA, 120 bp, Homo sapiens
ctgcggtggtcaggtttgcctctgcttttgttccctgcctttccgccacatcacacggcctcactgggcttcctaccagtttctcagaattacacgcacgaccatccaaacattggctcc

SEQ ID NO: 3658 - DNA, 120 bp, Homo sapiens
aaccgtgaattaagatattcttatcagtataaaaacactgagattgcttacctcccaaattgctttattgtattaactctcatgcttcagctcttggatttgttgtttctaactaacatg

SEQ ID NO: 3659 - DNA, 120 bp, Homo sapiens
caccgcgcctggccaagttagctttatttctgggtcaatgaatggtaccaacactctataaacatgaactctatctttagtgacactatgatacataaatgagcttatcgcccctgaatg

SEQ ID NO: 3660 - DNA, 120 bp, Homo sapiens
ccacgtaacacttgggaaggagaaagaaagaagtgagcccatcttgggacaggagctcctttggtgagtgtagcacagagtgatttgttagggaaagcacatgtctttccagaaggacat

SEQ ID NO: 3661 - DNA, 120 bp, Homo sapiens
gaacgagaaagaaaccacagttcatcccagtgctgacacccgtacccagagaggcccgggccggggatgtatcccaaggacaaaaggtggagggaggaggctggggggagttcacttcct

SEQ ID NO: 3662 - DNA, 120 bp, Homo sapiens
gtgcgcacattcacaatgttagaaaaaaacaaaaacaagagctaagcgagaagtctgaaatactgtggtgtatgatgctgttgagttgcaagaaatggaagctcgtgagccgggaggctt

SEQ ID NO: 3663 - DNA, 120 bp, Homo sapiens
gatcgtaactcctgaccaactttgtttcacccatgatgataaccagcagaggttctccaggttgtttatttttgaacatggtacaattcattaacaaatatttgccagggcttagcttac

SEQ ID NO: 3664 - DNA, 120 bp, Homo sapiens
aggcgttggcaaaaaagtgggggcttgctggttacacttgctgaaaataaatcttgcgtttatttggactctcaagattggagctctgaattcacatagtccagtgtttatgcacagagc

SEQ ID NO: 3665 - DNA, 120 bp, Homo sapiens
ttacgactggcatgaccactgccagaggtttagcagccctggcacacatccaccaaatgccatttcaatcactcagaaatttctacaacaacagaaggccccccacatgttgggatagtg

SEQ ID NO: 3666 - DNA, 120 bp, Homo sapiens
gatcgatccaaccactggtcagcggttgcatctcctcttcaacactcccctaaagggacagatcagccgggctctgctccagcatccccagcgatgaagaagtcaccacctcctgaagcc

SEQ ID NO: 3667 - DNA, 120 bp, Homo sapiens
gtacggataatgaaatggagtctcaggttaaacgacttacccaaggctacactgctaacgattggcagagccagaacatgaatctgctccaaattcaatgcctttcataattttcccaat

SEQ ID NO: 3668 - DNA, 120 bp, Homo sapiens
cctcgtgtgagtttcgacattaggctcaagaagcctgtgtgtttccactttgcgtttctgccatcaccaaacatccggagcagagccaccccagctagcccagccgagattaggtgactc

SEQ ID NO: 3669 - DNA, 120 bp, Homo sapiens
ttgcgtttcagggggctggttatgctgcagttgctaagcaatacatttctccaactttcaaaaagcttccctttccccacggggttcctttcccttcattacttggaagcctgtgctagc

SEQ ID NO: 3670 - DNA, 120 bp, Homo sapiens
actcgtcctgaacctctccttttttggcttcataacgcttacctcttgtcggcctcgacctgttcttgtgtttcttatctctctcctctcctcccatggctcttcctgggccctctcacc

SEQ ID NO: 3671 - DNA, 120 bp, Homo sapiens
cctcgaggaccaccaaagtgctgacgactgttcccagcctgcgtctcttcccaggtgcagctgtgtgtgcacgcccctagaccgctcccccgggggcctgattcacagcaatgatcacca

SEQ ID NO: 3672 - DNA, 120 bp, Homo sapiens
gcacgtgaggaaagactggcgtaggggagagtggccagggttcccgccagagaggtgttgcaggagtccaggcgagaagcgatgcggcccaacagggcattagggtcaccagaaccccct

SEQ ID NO: 3673 - DNA, 120 bp, Homo sapiens
taccgcttgctaattttgtttcagacactaattaggcgtcgctctcagagaccagggtcactcaggcatttgatcaatgtgttacttgtgtcccatccaagtcatcgataatgttgaata

SEQ ID NO: 3674 - DNA, 120 bp, Homo sapiens
gggcgcggggggcccccggagcgagcatgtgacccgaggccgcgcgctcggaaccagccccggcccgacgcccttggctggcacctgcttctcccccaccggcgtcttccgcggctctcg

SEQ ID NO: 3675 - DNA, 120 bp, Homo sapiens
ggccgcgccccccgcaccagctcccgagccttggccttcgcccgagcgatctcccgcctagaaccccgcgcccacctgtgccacctgtgcccacctgcgccagcatccctcgaggtccag

SEQ ID NO: 3676 - DNA, 120 bp, Homo sapiens
cagcgtccccggggagggtccggtcctcgtctccagggcctgggtctctccctgcagtcccgtctccagaggcgccgccccctcgggcctgagcgccggagtgacagagccctgggcagg

SEQ ID NO: 3677 - DNA, 120 bp, Homo sapiens
acccgctcggggccccccacatggtgccattcgcccggaccgcggcggagagcagacagggggactgaggtgctccccgcggcagcaccgaactcccacgggcatcagaaggcaaggtct

SEQ ID NO: 3678 - DNA, 120 bp, Homo sapiens
ctgcggatggccccagacacagaaggcgtaagccgccctgggaagcgccggcccagtggagaaggccgccgcgaggtcagggtcagtctggagcctgtctggttctcggagaggcttctg

SEQ ID NO: 3679 - DNA, 120 bp, Homo sapiens
ccacgggggctcgtgtttgcgagtgtggactttccagttagacagacttggttcagcaccgcctccgccacaccctcgcctgggatcctaaacaagccgcatcttctctgcatcgtagtg

SEQ ID NO: 3680 - DNA, 120 bp, Homo sapiens
ttgcgggctgtggcgggtctggattttgttggccctgagggcagagggccttccctctggtgtttccaggggaaactctttctgacagctgatttacagtcttaagcttccggtggaagt

SEQ ID NO: 3681 - DNA, 120 bp, Homo sapiens
ttccgcagcagtggaggaggacgggcccttaggatgaggaaggtagaggaagtggatgtggggaagggcttctatctggggtaagatttgaagggtgggagttgggaggaggaaaggaag

SEQ ID NO: 3682 - DNA, 120 bp, Homo sapiens
gggcgctgtgggctctgtgctgacatctgcttggccacgctgtccccaagaaggccacatttcatgactccccttcctgtccagcctgggcctgtggcccactctgggatccatctggca

SEQ ID NO: 3683 - DNA, 120 bp, Homo sapiens
ggccgagagaggcgaattaaccagccattaggtcacacaggcgggatggggcctggagcccctgcaacctcagactcagctccaggtgctcccaaacctatgggcagtggtgactgtgca

SEQ ID NO: 3684 - DNA, 120 bp, Homo sapiens
tgccgggagggaggcggggctgggggctggcagtcacgcctgggcctgcaggcactggctcggggcctgctatcccaggagaaacaatcatctggctcgttgtcaggctcggatttctta

SEQ ID NO: 3685 - DNA, 120 bp, Homo sapiens
gggcgcgtgccaccggctggccatggggagagctcagtggagctggctcctctgaggcctctcttggagcagggcccctggtctccaatcccctgacttccatgcccctgtgccctcctg

SEQ ID NO: 3686 - DNA, 120 bp, Homo sapiens
acccgactgtaactgggcagtggtgctgccctagaagggctgatcttgcaggccaacagtgtagggtgtgtgtctgggaggtggttccccaggcctccctggtgctgcttcagagcttga

SEQ ID NO: 3687 - DNA, 120 bp, Homo sapiens
cctcggccctccattccaactcctctggcttcacctcccgctcatcattcccttgcctgccctccgggcccatccttgctcatgctgttggttgatcccaacacgtccctgcttccatcc

SEQ ID NO: 3688 - DNA, 120 bp, Homo sapiens
cctcgctagtgaaaattggacacggccttcaaggttcagctcaggcacttcctcctccaagaaactgttcctgatctacctagtctcagggaggccagcctcgcccacaattcctgctct

SEQ ID NO: 3689 - DNA, 120 bp, Homo sapiens
ccccggaactcgggatccgttagcttgacagagacaactcccttgagggtggcaggaagcacaccctccaaagcctctggttggggtgcgtgtacccctgggatacagtgacaatcaaga

SEQ ID NO: 3690 - DNA, 120 bp, Homo sapiens
gcacgttgtttaaaatgacaccttcagctgcctgtgagccacttcctctcctcccagcctttgtcgttactctgcagcacagctgagcactgcattaagtcagagcagcacgaatgcgta

SEQ ID NO: 3691 - DNA, 120 bp, Homo sapiens
tcccgtggctctctgtgcatacctcttgcccattggcaccgccctccaaatgctcctttcaacagatcctcctggccccgtgctcctcgcccacggggaagcccaggtgacattctctag

SEQ ID NO: 3692 - DNA, 120 bp, Homo sapiens
ccccgcctctctcctgaccagaagcctgggtgagtacagagcaggtggtcacgatcggccatgtggtcagcaaatccagcgtttatggtgattctgttggagacaaatggcagtgctggg

SEQ ID NO: 3693 - DNA, 120 bp, Homo sapiens
caacgtccttcagcctccactggggggagtcaggggaaggaccgggggagcaggacggccttgcggcgccgccggagcagtggggttgtggggcgtggccatggtccttcccaggggaga

SEQ ID NO: 3694 - DNA, 120 bp, Homo sapiens
gtgcgcgctggcgccgctgaaaacgttctccttccctcgcctgtccaccttccaggtcctgctcaaggcgcctaatatcccctgggcagggtccctgacacttccttaactcccaaagac

SEQ ID NO: 3695 - DNA, 120 bp, Homo sapiens
ttccgcgtgggcctagcgcatttaggcgaacctctctgcctgcttgatcctctcccttcctccctcaagccaggcatctcacccacttgcgcgcgaggctggggcagcccacaggaggag

SEQ ID NO: 3696 - DNA, 120 bp, Homo sapiens
gagcgcgggacccgggcttgagtttgcacccaggcagagcgcccacccccgcccctagcttcggaccctgaaagtaaagtcgtcgtgcccggcagccagcccgaatcttccagccctcag

SEQ ID NO: 3697 - DNA, 120 bp, Homo sapiens
agtcggggtcggggcagggaaggccacgggtggcggcacaatcgggatcctggagtggaggcgcagactgcgggtcccgctgcgcacgctccgtggtccggttggggtgggccttggagg

SEQ ID NO: 3698 - DNA, 120 bp, Homo sapiens
gaacgggggctctggagcgtgggcggggtggagtgcacaggtcactgggctctgagcgtttccatgggccaggaccccaacgcgccgtgtcctcaggacagattggagggggaaggggct

SEQ ID NO: 3699 - DNA, 120 bp, Homo sapiens
ctgcgattatgccccagtcggaagggttttacagcagccgcgctgccctctccctgccggatacccggcagtagacaccgacgtctgggggctagcgaggcaggtgggcgcggaccgcga

SEQ ID NO: 3700 - DNA, 120 bp, Homo sapiens
acccgattctggcttccaacctccgcccagtggcgcgcggggccgtcgccccacacctccagtccgcgtggctggtgtctggctcgccgccggggcggaaggggcgctgtcggcgcaggc

SEQ ID NO: 3701 - DNA, 120 bp, Homo sapiens
ctcgcgcggccgggggtgctgcgccgggaaggagacggcaggtccggagccgcgtcccgcagcccgggctgggactcgctgccgcactttcccccattagcgttgtccaagtctccctct

SEQ ID NO: 3702 - DNA, 120 bp, Homo sapiens
aaccggacccacccggaggctgtggctagggcggagagcgcagcgcagggattctcgggctcaccttgcgccttgctaggatgggcgaagtagggggtcggggcccctgactgatcgtga

SEQ ID NO: 3703 - DNA, 120 bp, Homo sapiens
ccccgaggtgactccagccttgtgcaccccgtgttctgcggatatgggatgtgagcttgtgcttcccgaagcgccgcggcggtagaagcgctgaagttgcgggtgtggctggccaggggc

SEQ ID NO: 3704 - DNA, 120 bp, Homo sapiens
gggcgcaggaccggtgctcccgaccgctgcgtgcttctgtgttgcgtgtgtgggtggggggacgggatatagagagtgtgtgtcccggagcagtggagcggcgggaggcggtgctgtctg

SEQ ID NO: 3705 - DNA, 120 bp, Homo sapiens
tgccggcagtgcggggtggggtttgggtgttgtcctcagtacccagatccagatgtgggctgacgcccgttttcattctccaggctgcgaagagacgggtaggggaagcgcttccggccc

SEQ ID NO: 3706 - DNA, 120 bp, Homo sapiens
aagcgactgcaggcttacggatctcagaaagagtggagagcccctgccactttattccatacccccttgcgttttcgaacccctaaggtcatcaacgacccggaaagccgggaggggatc

SEQ ID NO: 3707 - DNA, 120 bp, Homo sapiens
gtgcgtgcgtgggcggggaggcttatccaagtaaaagggggtgggcaaaacggaaagggtcactttgacgtactgagtctctgcgaaggcctcaccgtatgtgccggcagccgcgtgtcc

SEQ ID NO: 3708 - DNA, 120 bp, Homo sapiens
ctccgccgggtcacgaccttcggagtttccgagtgcgcctcaggcctgggacgcgcggcgctgtctccccagtctcggagccgtgtgcgcagcggccggcagggggcactcgcgtcacgg

SEQ ID NO: 3709 - DNA, 120 bp, Homo sapiens
gcccgcccgccgcgcccgcctggcttgacccgggctttggggctgacccggagcctggcccggagctgcctgcggccgcggatgccggcgacatttggggcccggctaggcacagagcaa

SEQ ID NO: 3710 - DNA, 120 bp, Homo sapiens
ggtcgccagggaagggcgggggggcggcctcccagccggagacaaacaagcaattaattccggagctgagttcccatctgccaggcctgctgacaacaggtccggcgcacgcccgcagga

SEQ ID NO: 3711 - DNA, 120 bp, Homo sapiens
tcccgcttcccgggcggcacggcgcgcacacccacttgcgggcacacgcgcggctgtaaagacacgtgccgttcgcagacgcgccgaggcacagatacgccggcgcggtcgctgcccggc

SEQ ID NO: 3712 - DNA, 120 bp, Homo sapiens
gctcgaggcgcacaccgcggcgacactaacccacgcgcgacagttagacctaaagtggcccgcgacacgcagagtacgctgggcttgctggaaaggcgcctgggagtctcggggccgggg

SEQ ID NO: 3713 - DNA, 120 bp, Homo sapiens
tcccgccccttcctcggcccacctcgccgtgggccttgggcaagagcgtcccctccgcagcctcagttttcccgcctgtagagggaggggcgtcggcgcctcctgggagacgcgcagccc

SEQ ID NO: 3714 - DNA, 120 bp, Homo sapiens
tcccgggagaggggcgggaggcgcatgcgcgcgcgcaactagatcctcgccgccgcccccagcgcccctccccggggcagggactcacctaacaggttggggtccttggagtgcgcgggg

SEQ ID NO: 3715 - DNA, 120 bp, Homo sapiens
ggccgcgtggggaagcggggaccctaccccccccacgcgccgcccagcactgggcaagggcggggcactctctgggctcccgcccctcgccgcccgccccgggagcccgagccccgccct

SEQ ID NO: 3716 - DNA, 120 bp, Homo sapiens
gggcgatggcgcctggtcccatccagtgtcttgctgtgttgccctaggccggtctcgcataagtgactagggttggagagatggcccctgccctgtgccttgaattcctggggccttggg

SEQ ID NO: 3717 - DNA, 120 bp, Homo sapiens
ggtcggggttgggtggtgagagtccctgagaggagggcctcgtggcccgtcctggggaggggtgcgtggcccactcgtgggctttcgctgtggggcccggcctccaggatgctggctggc

SEQ ID NO: 3718 - DNA, 120 bp, Homo sapiens
ggccgccgctgttgctgagcaggtgaccagcagcctcggcttgtccccagtgggggcttcagcttgatgggcccccctccagcactggcccccaacacctgggacttggatgcccggagc

SEQ ID NO: 3719 - DNA, 120 bp, Homo sapiens
ctccgaggcctggatagggctggggcctccctggcagctgctgtctgaattcctgatggcaaagctgggtgggggcttgggtgggggccactttggcttcctgtccccttttccctgttg

SEQ ID NO: 3720 - DNA, 120 bp, Homo sapiens
gcccgtggtgggtggtgcattctcaggtcgatccgggcttcctccctcccctgccctccactctccttcctgcctcctgctgtgcagccctggagagaagggcagggtgggcttcccaag

SEQ ID NO: 3721 - DNA, 120 bp, Homo sapiens
ggtcgctggacgggcagaggctgcctggcctgtctggaggctccagaacggcgagctgggggccgggctgcctgtcaggttgggttaatagctccagcaggcggggacttccttcccctt

SEQ ID NO: 3722 - DNA, 120 bp, Homo sapiens
tcccgtcagctgggctcttcctcataggagtcgctgtgactgcagcaagaaaatgtctgtgaagcctggagaatgtggcccggagtggggcagctcagctgtggacattgggggctgccc

SEQ ID NO: 3723 - DNA, 120 bp, Homo sapiens
gcccgggggaggcgcaggctggggccacggagaggacaaggctggccttcaggcagcacaaggggaggggcagcagggcttgagcgggtgcccacggtgccagccgggcttgtggttggc

SEQ ID NO: 3724 - DNA, 120 bp, Homo sapiens
ccccgagctcggggtgcctggtttctctgctctcccccctgctgatccccaccactgccagaatgccaggcctgaggccctgcaggcaccaggtccttgccgactggtggtgtggatggg

SEQ ID NO: 3725 - DNA, 120 bp, Homo sapiens
gggcgtggtgtgggagcctccactgggcccttcccggcagggcctttggtcctgggacccgtggcagagcctcctctcatcctgatggtgtaaggatgcggattacaggatgtaattgcc

SEQ ID NO: 3726 - DNA, 120 bp, Homo sapiens
agccgcgggtcagtgtcccattagcagccccacgcgggtgctgataagcttgaacatgcatcacacccagcggccagagacgagggcgtcttatcagcgccggccctggggaccgtgtgg

SEQ ID NO: 3727 - DNA, 120 bp, Homo sapiens
tgacggggcatatgattagggcattgtcgcacgccgtgtgccgggctgagggctgatgagcacaccatcgcgttggagcacagccagaccgcgcacgtgaccagtgtggcctcagcgcca

SEQ ID NO: 3728 - DNA, 120 bp, Homo sapiens
tgccgagagcacggctggctgggaccctggtgggagcagatgggggtcttgcccatcctgctctggggtcccccgtgtgtgggacagcccaccccgtcacaaccggcctagtcctgaatt

SEQ ID NO: 3729 - DNA, 120 bp, Homo sapiens
gtgcggctgttctgggcacagccctgtggccgtgctcctttgggtcctgtttggcaggaggatttgaaacgtggagacttccagaaaagaaagaatagctccagtgctcagagctccccc

SEQ ID NO: 3730 - DNA, 120 bp, Homo sapiens
ccccggtccctgatgctaagccccctggtgccaaggagggttcctgacactgggaagtaagggtagggtgtcggcccccaggccggtgcgttggtgacctggagcccagcagagcggccc

SEQ ID NO: 3731 - DNA, 120 bp, Homo sapiens
agccgaggccggtgccgcttgccagccgcgctgcctgctgaccttgggaagttaccatagaaaccagcgcatcgggctggggacccagaggcggttctcccaaggcgggggcgctgccgg

SEQ ID NO: 3732 - DNA, 120 bp, Homo sapiens
cagcggcttctgcgaggccactgcaggtggcaggtcgtggttcaggttgtggcgggggacatcctggcaggtgggccctgtcggtggatgcctgacgtgggctggggtcggtggtgggtg

SEQ ID NO: 3733 - DNA, 120 bp, Homo sapiens
ggacgagtccaccaggagacagtggagcttcagcccccgccccaggggtcttgggcacgtgctgagggtaccttctgtgctcccacctccaccctcgaagaggacctgggagggagtggc

SEQ ID NO: 3734 - DNA, 120 bp, Homo sapiens
gaccgaggggcacctctgtggaggcagccttagatggcagcacgggacccgtgtagcagtcagggcagagtggcctctcagggagcgggctttgagggttgagtaggagtctggcaggca

SEQ ID NO: 3735 - DNA, 120 bp, Homo sapiens
agacggaatggggtggaggtcaggagtttgagtttttgaatcccgtgggcctggggagtctcagctctgctgctgcccacaagcaccccccagccggattagggcaccagcctcaggctg

SEQ ID NO: 3736 - DNA, 120 bp, Homo sapiens
gcccgggtacccgagtttcgttaatgctaacaggggcatagatagagcaggggctgagccccatgccctcaccccctgggtggggcctggggaagctgcagggattgaggcagcgcagct

SEQ ID NO: 3737 - DNA, 120 bp, Homo sapiens
ggccgggggtcactgcctccctggaaatctctttgcctagcactgctgggggtctgcggggaacaagggggctcctgatctctgtgcgtgtgcccggcacgggctgtttctccacagtcc

SEQ ID NO: 3738 - DNA, 120 bp, Homo sapiens
atgcgaggccagtggcatcagcctgtgttttgggcccaggcctggctggctggggcaccctgggtcctccccaccctcaacagtctccttgagacagggcaggtgggtgctggggccagg

SEQ ID NO: 3739 - DNA, 120 bp, Homo sapiens
tgccgctgccctggccacgtgggctgcagagctgtgccgagagctcaggaggacgccgaggtcaggtgtgggcggtggtgggcaggcagcatccaggttccccgcccagcctgggatcgg

SEQ ID NO: 3740 - DNA, 120 bp, Homo sapiens
gggcggggggcagaggagtcagcagctccttcaggagcccgcaacacttttcccagcgccccgcgtttcttaggggacagcttctgccccacttcctcctgggggcagccttggccgggc

SEQ ID NO: 3741 - DNA, 120 bp, Homo sapiens
gaacgtgacccatctccccggagcccagcctaggttaggcttaggtgaccccgagggcttggagaggccctgagaaatgactccgtgggtcaggtgagtatggagagaactgtacccaag

SEQ ID NO: 3742 - DNA, 120 bp, Homo sapiens
ggccgatagctgcctgctgctttccatttggggcagatggactctgtccccaaaggaccctttgccaggtcaccagagctatggcggcatctgcctcctgcctgctgcagagccctgcgt

SEQ ID NO: 3743 - DNA, 120 bp, Homo sapiens
atccgagtctggctctgacatctttgccggcaaggccctcagccttccttagcctcatttttcacatccataaagtgggaatggctgtgctggagtctgtgtttaagcagccccaggcgg

SEQ ID NO: 3744 - DNA, 120 bp, Homo sapiens
tggcgcatgtgtgcgtcagaagggctgcctggggggctcagggaggctctggtgctggggtgcaggaagcttggggacttgggcttagcaagtcactcttgggggtgcctcaggcaactc

SEQ ID NO: 3745 - DNA, 120 bp, Homo sapiens
atccgtggtgtctgcacctgcacctacatacaaggatggcatagtcctccggaccaaacacattcgatgaggacacgcttttcagtgagagaacagcagcagcaggaacaagcatccgtt

SEQ ID NO: 3746 - DNA, 120 bp, Homo sapiens
ccccgattctcccagacacggagcggcagaggtgtccttctctttctggcaaggtttcagggtagaggcacggtgctcggggtcccacggctggtgggtggcccctgtgcttctcgcttt

SEQ ID NO: 3747 - DNA, 120 bp, Homo sapiens
ccccgagctgcccatcatcgttttctgggtacctgagatgcagtgtggtgagttgggcgtggcctggacacaggctgagcaggtcagggcactgggagctggcctggcaccggctgctgg

SEQ ID NO: 3748 - DNA, 120 bp, Homo sapiens
caacgcagaaccctcaggaaagaggtggggagctgtgcaccagctgtctcggggtgatttgtggggaagccgatgtgtggctgcgtcctgaatcacactgggggtgttgcacacgcccac

SEQ ID NO: 3749 - DNA, 120 bp, Homo sapiens
gatcgccagcaaatctgcgggtagggggcatttgtacccaaacgaagccgttatttgtggtggcagacatggcattaattattgacgcgcccggccacctccagttaaaattcatggtcc

SEQ ID NO: 3750 - DNA, 120 bp, Homo sapiens
cttcgtctgcttgggccttcgtaacaaatgcgcagacggggcagctgaaacagcggacctttgtggctcacagttctggaaactggaagtctgagctcaaagtgctggcgggttgctgtc

SEQ ID NO: 3751 - DNA, 120 bp, Homo sapiens
tgccgacggttcctccgtgctgtgtcctcacggggccttccctctgtgcactcatgtgaccctggtgtccaaatatcttcttcgaaggacaccagccagatttgattggggcccatgaac

SEQ ID NO: 3752 - DNA, 120 bp, Homo sapiens
gggcgatgggccccacccgtaatgcacccttcccccacctgctctgggccctccacacccttgggagagacccctgggcctgcccggttctggacgtgccaattagagcctcttagcaga

SEQ ID NO: 3753 - DNA, 120 bp, Homo sapiens
gctcgggcacctgggcaccctctgtggatggggacgtggattagggcctgtgtccagcctgatcttggtgggggcatcagccgggaggtgttctgtgtcctggcagcagggcctgtctgt

SEQ ID NO: 3754 - DNA, 120 bp, Homo sapiens
gggcgccccaggcctttgtctcagaaaagcgccccagctccgcggctgcattccagttgagtctgagcctgagtcccactccggcagccacagtgcacccagtgggtgggaggcgtggcc

SEQ ID NO: 3755 - DNA, 120 bp, Homo sapiens
ggccggggctcggtgcggccccgtgtgtgactggccgtggtggctgtggcttccttgctgccacaaggcctgggctagagctggcccctcctggctggtgctgccgaggagctgcgctgg

SEQ ID NO: 3756 - DNA, 120 bp, Homo sapiens
ttccggcacgtgagtggcaccctgggggactgctgcaaccaaggctgttggcactgcaggcagctgggcctgtctgtgcgctggccaggccctccctggaagacccaggagcgggttcat

SEQ ID NO: 3757 - DNA, 120 bp, Homo sapiens
ccccgccacaccccttttctgcctcagtccacgtgccgccgatacaggactctgcaggacaggccccaactgaggccccggctggtctgtggttcctgcctggccttgggtgtcactgag

SEQ ID NO: 3758 - DNA, 120 bp, Homo sapiens
tgccgaggcggtggagactgtggatggtccgtctcctgccctggacagagggttctgggggcctcgctgacaccagccctgcagcccccagccccacctggcccaccacctctttgcact

SEQ ID NO: 3759 - DNA, 120 bp, Homo sapiens
aaccgattccgtcactgcttcctcccagagcccaggccctctccctggctgttacatatttagtttggacagagtctgggatgtgtgtagctggtagaggggacacggatgcagcttcct

SEQ ID NO: 3760 - DNA, 120 bp, Homo sapiens
cagcgggcttctggggtccccaaggcagagacgcctgcctgccttctgccaggctggtggcacagctggccctcacccagcgggcagcacgtgcgtggtttcagacagaagcatggcagg

SEQ ID NO: 3761 - DNA, 120 bp, Homo sapiens
ttccgtatcctcttcctgctgtgcttgagctgtggggagctgctgctggcccttcacgagtctctgggctaagccgggcagttcctccgccagcatggagccgtgctggcgacagcctgg

SEQ ID NO: 3762 - DNA, 120 bp, Homo sapiens
tggcgcccagcccaactgttaagggtctcatttgcatcaggcagcccagcgccggcttgtccagccctcccgatggccgtcctgggggtgcttggcgtcacccgcgtggaggcagattgt

SEQ ID NO: 3763 - DNA, 120 bp, Homo sapiens
tcacgctcggcagctccccagctccgggggcttttacgactggcatcaggtcctgctaattacagggacacatgtgtgccgggtgtgcgtgggagtgtgtgtgggagcatgcgtgggatc

SEQ ID NO: 3764 - DNA, 120 bp, Homo sapiens
gatcgtttatttgagctggatgaggactgaccgacagctgatggttagagggggcagatgggtcaccttccagcttagggtactcctctctgtaggacacgcctggagacagagatgggc

SEQ ID NO: 3765 - DNA, 120 bp, Homo sapiens
ttgcgggctgctccctgggtgagtgttagcaagacaggaaaccggggatgcccgggcttcagggagcacatggggtggggatggggttacaagatgctgcacagatgatgctggcaaaaa

SEQ ID NO: 3766 - DNA, 120 bp, Homo sapiens
agacgtgctatggctttgcaaacccacccttggcccctttgtgcccaggaggctgtaggaggcagaggtgctaacagggtcagaggccagaggaggacaggggtgtgttcctgtctccgc

SEQ ID NO: 3767 - DNA, 120 bp, Homo sapiens
ccacggtcctggctctccagccctcccgactcctgcaggctcatccatggggtgcgggcccctttcccgtctgtgcctgggtcacagcccaccagagagctcccatgtctaaagccagca

SEQ ID NO: 3768 - DNA, 120 bp, Homo sapiens
aagcgcagctgtttttagggattagcgagcattgccagcacctgcttgggttgtgcttcctggccatgccacacctggtggtggcagtgggtgctggggcctttccatgggcccctttgt

SEQ ID NO: 3769 - DNA, 120 bp, Homo sapiens
ggacgatgcagtttggtgcattgaagctgccatcagaggagagctcctgatggaaagtgctggggatgcctcgcaggctggcctcacggggccgcagcagggagatcatgagggagaagc

SEQ ID NO: 3770 - DNA, 120 bp, Homo sapiens
tgtcgtagtggggagttctctggttagtctctttcctcctttcatgcccatcctttctccctcccttccttgctgccttcctttattccactgagctatcctatcttacattattcatct

SEQ ID NO: 3771 - DNA, 120 bp, Homo sapiens
caccggccgctgtgcaattagcggcctgcggatgtcagggtgggttccagatgggaggcgcgggggagggggctcctctttgccagcttggctgggagggtgcacgtggggtaggctgga

SEQ ID NO: 3772 - DNA, 120 bp, Homo sapiens
gtgcggggcggggggctcttcccagccgtgtgtcctctctcacagactcagagggaggtggtatttaatttggctcagcagctgcccagaaaccctgaccccttcagggctgcacatcct

SEQ ID NO: 3773 - DNA, 120 bp, Homo sapiens
aagcggggtccacccggccccctcccccaatgacgtagaagctgatcatcccctttcagagttcaagcctctctgagagaagctgaccctgatccgcatccattagggcggtggctttgg

SEQ ID NO: 3774 - DNA, 120 bp, Homo sapiens
aggcggctcggtgacagttccggaggtacagatgaatacataacgtcagcttcctgcctgtccccataaccaggaggggtggcaaggctagccgtgtgtggggggctcactcaatgctgc

SEQ ID NO: 3775 - DNA, 120 bp, Homo sapiens
atacgtatttcgcccccgccccgcaggaggcccagcctgcggcggtggctgcttccccgagacttgagcacgagtgtgtgtggggccaacactggccaggaaggaggtggctactgaact

SEQ ID NO: 3776 - DNA, 120 bp, Homo sapiens
atacggaggctctgggcttggggattattccgcctgtggatttatcgcccttccggaaggcagcccaatgggcctgtgggcttggcctcaaggaatgtttggctttggggtgagagggct

SEQ ID NO: 3777 - DNA, 120 bp, Homo sapiens
cctcggaagcaggacagccccgaggcctccccagggtcctcttctgggacaagctccctttgtctttgaggacatgggaagaccccgagagggagctgtcgtgggccgccgacaaaagcc

SEQ ID NO: 3778 - DNA, 120 bp, Homo sapiens
tggcgggagctctgcgtgtggtccaaagccgtgtcccctctgtggcgggcggcatggcgggggcagctggggcccctctatcctcccgcggctgcacgtgcttccctgcgaaaagcaggg

SEQ ID NO: 3779 - DNA, 120 bp, Homo sapiens
aagcgacgtctcggggccaggaccctgctctgtagcggggcggggggtcctccagagggagaggaggaaggaaagggcgttgggctgaggggattggaatctggggtcacagggctctgc

SEQ ID NO: 3780 - DNA, 120 bp, Homo sapiens
ccccggctgggaactcagccaccctgtgtctctgttcccatctgtatctggggactgcagaaactgcctcctaggaagtcaggaacatggggcacactgggggccctttgagttcccctc

SEQ ID NO: 3781 - DNA, 120 bp, Homo sapiens
tctcggcccatcctgactctccccaccggagctcctggagccgaccctgcatgggccccacccaactctctcaggctcggacctgctggtgactctccacgctcaggacccactgtctcc

SEQ ID NO: 3782 - DNA, 120 bp, Homo sapiens
ctccgcaggccatctgtgtaccctgcatccgcacaggtgccctccccaggtccccagaactcctgcctctcaggccgggctgccccagggaagggagcacagccaggaacccggtctgca

SEQ ID NO: 3783 - DNA, 120 bp, Homo sapiens
aaacgctggtcagagcctccccaccaggccacgtggtgggtggcatgcaggctccctgggctcttaggcacccccggtggcattgacagctggggagagaggtggtctcaaggactatgg

SEQ ID NO: 3784 - DNA, 120 bp, Homo sapiens
ctacgcagcggaaacgagtgagactgggagtcagcccatggcgaggagctggggtgggggaacatggggacccgagacccaggcaaaggccaccagtgctccccaggcgtgtagcctgag

SEQ ID NO: 3785 - DNA, 120 bp, Homo sapiens
gttcgacttattggggagagagatcagaagtggctattcccttctgggagaccaggagatgctggcttggggaggggatggtcacccctctggggtgggggcaggcgatagagacccagc

SEQ ID NO: 3786 - DNA, 120 bp, Homo sapiens
gcccgcagccgcgccaggcagggagtgggcgccagctctctctggcagggctggccggcatatgggagcacccaggctggggccagatgcctcgggagggggatttggcaacactgagag

SEQ ID NO: 3787 - DNA, 120 bp, Homo sapiens
tggcgcagcagacagcacgggcccagctaggcagcctctgatccctgcttgacataagtgcacatgaggcgtgcaacctgggccagcgcagaagggccctgagcccccgtttcatctgtg

SEQ ID NO: 3788 - DNA, 120 bp, Homo sapiens
gtccgcgctgaggattaaatgtcagcatagacgggagtgcagtggtcagaatctggaggcagacctggccctgtgccctctgctgtgtgaacttggacaggttacctacctctctgaacc

SEQ ID NO: 3789 - DNA, 120 bp, Homo sapiens
catcgcaaccccattcatgagggaggtttagccaggtcagtggtcgggcaggcagcaggcctgggctcctcacgccgcagatacccactgatgacctgtgaggggcctggtgtccgtcca

SEQ ID NO: 3790 - DNA, 120 bp, Homo sapiens
tggcgaaggctcctgctcaccttcaagtgtgaaatcgggtcattcacgaggaaacgggatctttgcagaaagctgtttggcgcgtgatctagaaccacaggttccgcgggggagcggggg

SEQ ID NO: 3791 - DNA, 120 bp, Homo sapiens
agtcggaagaggggctgcaggccgggaggcaaggaggagccattcccagggtgggagaagagggctccaagcagaggctggtgggggcgtttgctgtgttcccggaactgcggggggccg

SEQ ID NO: 3792 - DNA, 120 bp, Homo sapiens
gcacgtgggctgacgtggctgctcagaatgggggtgcgtccaccagcggtggctccccggcacagcaggccccaagttggccccgcccctgaggcccgcccgagggtgaaggcttctaca

SEQ ID NO: 3793 - DNA, 120 bp, Homo sapiens
ctccgatggcagctgcctgaccagtgcagcacccgcaagctgcactccagcttggggctcccttccctgtcctcccgtccactgtcaccttgcacagccttcgactcgctctcctgactg

SEQ ID NO: 3794 - DNA, 120 bp, Homo sapiens
gaccggcctctcccagccaagctgggcccctgggagagcccccacactaggtctgcaccccgtggtctcccatccctgactccgtcccacaaaccaagctcctgggtggggagagggggc

SEQ ID NO: 3795 - DNA, 120 bp, Homo sapiens
ccccgtggttactttgtccgacagcggtgggttggccggggttggtctctcctgcactggggcagaggctggggggacaggcagcctggatgcagcctctgagcctgtccctctcgggaa

SEQ ID NO: 3796 - DNA, 120 bp, Homo sapiens
ttccgttctgtcttcttgtatttccactttttttacaaaagaaattgctcagaaatgatttagagctttttgctaaaagtgcattttgtcattacatggaaaaagcattgataattatcc

SEQ ID NO: 3797 - DNA, 120 bp, Homo sapiens
ccacgaggatagatgggtctgacatccatatccagccctcattgtcctcactgcctggtgcctctgccaggatgccagaccaccctcgtccctggccaaagagagaagctccttctcact

SEQ ID NO: 3798 - DNA, 120 bp, Homo sapiens
ctccgtttttttgggcccctccattctgggttgtgggaggcatttggggagccgggcctggtgtggcctcgggggttctgagtcagtcacggggcatcctcacaggaaggcatgcaggga

SEQ ID NO: 3799 - DNA, 120 bp, Homo sapiens
gggcgaaagttctggcagcagctgcctgggctgggctgggctggctgaagcctcagccactgctcctggtgggaagctcacatggaaagcattccagacccagagtcccagcagggccaa

SEQ ID NO: 3800 - DNA, 120 bp, Homo sapiens
gcacgaaacataagcctggcctgattctcccttggatgcgtcttctgcaggcctggctccctaaggacatagcagggaaggttctggccacggtgggaccccaggaagccagcaggcagc

SEQ ID NO: 3801 - DNA, 120 bp, Homo sapiens
ccccgtgcagcttaggctgggcctggagagcaccgaggaggccatcccaggcacagctggcgctcacatgctgcgggggggttggatggtgcccctcaaggatatggccatagcgtaatg

SEQ ID NO: 3802 - DNA, 120 bp, Homo sapiens
tctcgaggtgaggtcgtcctggatcgtctgggtgggccttaaatcccacggctggcgtgtgtccttacacaaggaaagccgagggagattggacacagagaaggaggccctgtgaagatg

SEQ ID NO: 3803 - DNA, 120 bp, Homo sapiens
gggcggctggaggctctgtggggtttgcactcgtggtggacggccacccctgctggcagcctgatttcagacctctgacctccaggccctgaaaaaatgcacttctagtgtaagctcccg

SEQ ID NO: 3804 - DNA, 120 bp, Homo sapiens
agacgtttgatgcagcggtcacaggggagcaaggcagatgctggtctgggcgcctcaatcaccatctctggtcccgtctgtcttgctcccgagaccccagggcctggtccttggtagcac

SEQ ID NO: 3805 - DNA, 120 bp, Homo sapiens
gaacgacacggcagacccaagcactggctggagggcggtcaccgtcaaagacagggcccaagagtgagagtgtggccacaggagccgagagctaggagggccaagtgtgaattgcaaggg

SEQ ID NO: 3806 - DNA, 120 bp, Homo sapiens
ggccggggctgtcctatagcagggctcagggccccagcggatgcagcctgacactcgtggtccagcttcctgagcacgttcttcgagccacatattttgaggacctactgcgtgctggcc

SEQ ID NO: 3807 - DNA, 120 bp, Homo sapiens
ctacgaccttttggtgcagaaaaatccccaatttttatgacgtatagcaactaaaacttaaacagaaagttgcaaacttactggctgaaggggtgagagaacagtgtttggaacttccag

SEQ ID NO: 3808 - DNA, 120 bp, Homo sapiens
gcacgggcacaaaggaagctccaggaagcccagcacaaagctactgctgaaaggctggaataatccagcagatagttcagcagaggtccaccaaaggagaaacatggtttgaagtctatg

SEQ ID NO: 3809 - DNA, 120 bp, Homo sapiens
tcccgccagcctgccacggagcacctgtggggctggagcctccgacgcagcctggcagggaggggtgttggtgaagagtcagactctgccggcccccctggtccggcacccgcgggcatc

SEQ ID NO: 3810 - DNA, 120 bp, Homo sapiens
ctccgtagccaatgcttctctaagcaacctgtggtccctgaatccggacctggtgcccttgggtgaagggaggtgacgtgcctgttctcaagatgctggatgctgggctaccccaggctc

SEQ ID NO: 3811 - DNA, 120 bp, Homo sapiens
ccccggggccccagatggaaagagagtagcggttgggcctctgtgcataggatggaagggggccctggggcctgtcccccactccatttctctttcctcatctgtgaaatggaggaaagc

SEQ ID NO: 3812 - DNA, 120 bp, Homo sapiens
gcccgggaggaccaagggcctgggggaggcagggcttggccagggtggctcgtggctgtgagcaggtcccagagactggcctgtctccctgggtccactgcagcatgatgggttcctgct

SEQ ID NO: 3813 - DNA, 120 bp, Homo sapiens
tgccgtaccacaccaccccggggaagccaggcccaggtgcccaggagctgcccagagccaggcccacatggatcccagcttgctttctgcccctccttgtcctgagctacctaagcccag

SEQ ID NO: 3814 - DNA, 120 bp, Homo sapiens
ctccggcctctgcagctgtcctggttttgagacattttactccacttaataaagattatttgttgaaagcagaaatgaatgtgtctcatttgtgtgctgcaggaattcataagcatcacc

SEQ ID NO: 3815 - DNA, 120 bp, Homo sapiens
cctcgctcctgtgggacctggtgtttccccactggattccagcctgccctcctggcaccacccaggccgccccagccaccgcagccaccctactccctctccctctccctctccatctcc

SEQ ID NO: 3816 - DNA, 120 bp, Homo sapiens
tgacgcagcgactgagtcggcttttgactctatgtgatgtctctcagctccgtggcctctaaatgaaaagattaattagttcggggagcccagcacaggactgccaggggcactctgctg

SEQ ID NO: 3817 - DNA, 120 bp, Homo sapiens
gaccgtgtcattgccgttttgaattgaaacaggcctcttggagagaaccatgcttaggaaagtgtcgagaaacctccagcgctttggggcaataagggtgtagtgctgtcaagatgctca

SEQ ID NO: 3818 - DNA, 120 bp, Homo sapiens
gagcgggaagccagcgcctctgatggagcagaaaggcccacgtgtgaggaggaggcaggaagggcttcgcttccaggagggccagggcgggaggactggagactgtgtcctctgagtccc

SEQ ID NO: 3819 - DNA, 120 bp, Homo sapiens
gaccgtgtgaggaactccataaaattttatggagtgaatgaactcgccgtgtttggctcgagcaagtgacaggcttgccagctctgaaggtctgttaaaaggcagatgggaagatccgcc

SEQ ID NO: 3820 - DNA, 120 bp, Homo sapiens
gtgcgaggtgaggtgtggggaccggcagcgggcctgccgcgcttcccgggcagcggagccggactgcgcacccagcgccccgctctgtggtgtggggtgtgtggtatctgagcccgggac

SEQ ID NO: 3821 - DNA, 120 bp, Homo sapiens
ggacgcggctcagtgactgtgatgggggctgttcagctgttgtgggactgagttacacgcatctcactggcaaagccacatcatctcaccccacaaaatacggaatttggggtgtcatgg

SEQ ID NO: 3822 - DNA, 120 bp, Homo sapiens
ctgcgctggacagtgtggggtatggtgggtgtgtgtccgtctggacgtgtgtccctctgcctgaagggatgcagggccgtgaatggacccagcagcccccgcatcagccctgccctccca

SEQ ID NO: 3823 - DNA, 120 bp, Homo sapiens
agccgaggaggctggtcctaagccggcgtctgcacagctccctgagggggaacaagggggagggtctcagaatggggctgaatttttctccacattcagtccccggctggacctgcagaa

SEQ ID NO: 3824 - DNA, 120 bp, Homo sapiens
ggacggctttgaccctggtttacagctttcgggaaccccagggaatgctctggcctctaggctggaaccctgcccctctgaccccagccctccggccattcctacagcgaaggcccaggg

SEQ ID NO: 3825 - DNA, 120 bp, Homo sapiens
ggccgggagcagtcccgggaggcgcccctgtttagatctcatggctggtctctgtctccacgttctcagaggcctgggaggggcaggctgagggctctgccagaccctcctgcccagagc

SEQ ID NO: 3826 - DNA, 120 bp, Homo sapiens
cagcgaggggatggcatcactccctggggtgggtgccggggattacggcaggtttggggaggaggctggtggggcctgagcacgggctggtgtgggggccaggtgaagggtgcccaggtg

SEQ ID NO: 3827 - DNA, 120 bp, Homo sapiens
atgcggctgggagctcactcggctggggggacgcctccccagcgcccgggtggtgaaagtgggtttccccctccagcaagttctttcctcagcccataaagcgggaatcctcccatgtgg

SEQ ID NO: 3828 - DNA, 120 bp, Homo sapiens
tcccgctgcctgttctccccacggcaggtgaagggcctccttggagggcctctgctttccagtctgttaacacgaagcctgccagaaagtccccaggaccccaacccccactccttagag

SEQ ID NO: 3829 - DNA, 120 bp, Homo sapiens
ccccgacactgccaactccaggcccccgttaccccactacttatgggcttggtcacctgtcacctcccccaggaggctccttgggccccaggctgccctccagctgggcccagcggctct

SEQ ID NO: 3830 - DNA, 120 bp, Homo sapiens
tcccgctggctggggactgcacctgctccccaggcgtggcctggtgccatcacccggacacccaaggacaggtttggactgcccatcctaggctcccatccaggagagggtttggcgggg

SEQ ID NO: 3831 - DNA, 120 bp, Homo sapiens
gcgccctcccggctgcccggacagcaggtgcacccggggggcctcggcgcatttccagggcgaatgagtccagggccctcggcctgcaggctaagcagcgaggacagcggcaggggggct

SEQ ID NO: 3832 - DNA, 120 bp, Homo sapiens
ctccgtggcacggcctggggggtcaccgcgcacgcctaggccccgggagctcggagacgcagcagccgtcgcgcggggctaacaaggcactccaggcgcctgcgccaccgacacggagaa

SEQ ID NO: 3833 - DNA, 120 bp, Homo sapiens
gaccgcgctgggtttctgccggttagatgctcagatgctttgttaccgcggcacgaactacccccaccccgactgtgcgtgggtgccggagcctttgtccataaggatccgtgtgggcag

SEQ ID NO: 3834 - DNA, 120 bp, Homo sapiens
tcccgcctgcatctcagtgattgcaagcgctgacctcacacacactgtctatatcccataagattataacgcagcagaaagcctccagggtttagtgacatcttgatggtcctgatccta

SEQ ID NO: 3835 - DNA, 120 bp, Homo sapiens
agacggtcggggaaggggtgccctgccactctgctgcggaagaatctgttgccgtggaagcatccagagcaacaaggaggagatgactttgtaccccaggaagtggggctctctgcccag

SEQ ID NO: 3836 - DNA, 120 bp, Homo sapiens
ccccgcctgtggagcaagagccgcagggcagggatgggcaagcaccagcacccacggctgcggccgcagtccagccacctcagagtccccaggccttcacccagcctcgcaagccccgtt

SEQ ID NO: 3837 - DNA, 120 bp, Homo sapiens
gggcgatctcacctatgacatcttgcaatgagacaggcggcatcacctattttataggagcaccaggttaagccactggccgaagtacccggtaggagacaggctgtgtgcagaggccag

SEQ ID NO: 3838 - DNA, 120 bp, Homo sapiens
aggcgtgcgtcaggctaacttcaggagcctggactcagggtggtgggtagggccagaccacgggaggcacctggcacaaaacccaaggaagccctctcagggggtgccagcccctccccg

SEQ ID NO: 3839 - DNA, 120 bp, Homo sapiens
gatcgtgtgcctcctcctcttggcatcctccacggatgatgcaccgggcctggtggagaaggcgtctctctgcggaagccacatcagcaaaggaaccaagaaggaaggggaccaaaataa

SEQ ID NO: 3840 - DNA, 120 bp, Homo sapiens
tgccggggcagggacgcccacagctgctgacagccagaaaagagagaccagcagaaggggcacacggccgggtgggggtcagagcagcacccccgtgggtcccacctctagctacatcaa

SEQ ID NO: 3841 - DNA, 120 bp, Homo sapiens
caacgccaggccaggcaggggactgaggacagtgggcgtggtgccaccgccacagaccctgggcacactctgggacaaacagccagcctctgcaaaacacaaactgcacaggggaaaaga

SEQ ID NO: 3842 - DNA, 120 bp, Homo sapiens
gaccggcagaggcgcaaccctgtagaaacagacacaggacaccggggagatgtgaacggtagctaagtatgcaatgatgtgaagacgttgtttttcattgttaggtataaccacactgtg

SEQ ID NO: 3843 - DNA, 120 bp, Homo sapiens
aggcggccttattgtttagcgatatttacagatacatgaatccaaccctggggatttgctccaaaccccccaggtgtggacatgcagatgctggagaggagagaggagactgcgggtcgg

SEQ ID NO: 3844 - DNA, 120 bp, Homo sapiens
tggcggagggaaacggagtccacagcactgtcccctccccgtggtgtgcttggaattctccacaaccaccttttgaggaaggagctcacatagagacccgcagaggggcctggccactct

SEQ ID NO: 3845 - DNA, 120 bp, Homo sapiens
tctcgagtggagggcgggagccgagcagggaaagccaaggccgcctggggtgaggagacaggagggcaggagggggctggagctgactggaggtcccaagttcagaggtggggcacccca

SEQ ID NO: 3846 - DNA, 120 bp, Homo sapiens
ggccgctgtctgtccacagctctgtggcacctgtggatttggccaacaccccctccgcagtgaggggggacccccaagaggaggggccacctctgtcctgctgttccctaagccccagca

SEQ ID NO: 3847 - DNA, 120 bp, Homo sapiens
cctcgctgtgccaccatcagccttgcagccaccatcgggcggcgtcctgccttcctccctctgaaaggcctactttgggaggtcagcccgactcagaggcgaggctgcagagctggacct

SEQ ID NO: 3848 - DNA, 120 bp, Homo sapiens
cttcgggaaccttcacaacccagccacaacggcccccagcacccgcagcctgccgaaggcatgcttctatcctcagcctcgctgccctcctgcaggccggggcctccctcctgcaatgct

SEQ ID NO: 3849 - DNA, 120 bp, Homo sapiens
cagcgaacgtccagctgtcaccccagcccccgcggcatctcctgtccccacacaacaagccaggcagggctcgggctgggaggaaggggccctgggctccccttcgtctgcctggactgt

SEQ ID NO: 3850 - DNA, 120 bp, Homo sapiens
catcgaatgatgtcagagaagctcattccgctggagctcggagcctcaacggccacccaggaagccctcagagtggctgcggcccctttcaaggggagagaagggcaggagccatgctag

SEQ ID NO: 3851 - DNA, 120 bp, Homo sapiens
cctcggaggggtgggggtatgcctaccttggaaggcaaagacccccggactctgctccccgccctcccctcagcaccgctgtgactcctctgtgcagggggcaaactgcacctcagaaga

SEQ ID NO: 3852 - DNA, 120 bp, Homo sapiens
gcacggggcagccccagcatcgctttgccatgttcctaacccacaccgccaggccccgtgctccagagtgagcctgtctccgatccaatacgctctccttcctggctaatccagttggag

SEQ ID NO: 3853 - DNA, 120 bp, Homo sapiens
cagcgcaggctgccatcactatccccgaactcgagagcaggggcagaggaccctcagccatcttcctgtcccatagaagaactcccagtgggaaaccccacccccagcagaggaaacagc

SEQ ID NO: 3854 - DNA, 120 bp, Homo sapiens
ccacggctgccagatgctctggggaggccgcaccaactcacacggcctaacagccctgccgagggatcccaggtgtttggggacggactgcacacccaccctgatccagggctgtgactg

SEQ ID NO: 3855 - DNA, 120 bp, Homo sapiens
ctccggcccttccccagaacacagcctgcctcctggcacaacaaagaaagccgggtgtgggcatggcccactgcacaaccccacccccaaagccagggctgagccggccagcccacaagc

SEQ ID NO: 3856 - DNA, 120 bp, Homo sapiens
aggcgtgtgctgcctccctgagcaccgagcaccagggccaatggccaggcccccgaggctaggagcccctccccagaactgtctgcagccctcttgcctgtggggacccctgacccatgt

SEQ ID NO: 3857 - DNA, 120 bp, Homo sapiens
ccacgtggccccactgggctgggattcccccgggtgtcccgaggccaccgcacactgcagggcccatgagtttgcagtttgtcccagtaaaaaagctgccctgagcccagacacccacgt

SEQ ID NO: 3858 - DNA, 120 bp, Homo sapiens
gcccgagattccggccttgttgctcctgcccttaggaaatgcgttgctgtctctgggttcctctgggtagcgaggcttctgggcctgagggaagtgtgggacagccctacagcacaggcc

SEQ ID NO: 3859 - DNA, 120 bp, Homo sapiens
tcccgccaatccccacccccggggtcaggccctgcctcctgcatccctcttcactggccagtcctccattgccacctggtggccattgccccacgacagccgggaccgccaacctgcccg

SEQ ID NO: 3860 - DNA, 120 bp, Homo sapiens
acccgagctcctccaggcaccggtgcctcctgggtggacactgggcagctgtcctgggcctgaactcgccagactttggcagaaggcagggttcaggggtccccagcccccatcctagat

SEQ ID NO: 3861 - DNA, 120 bp, Homo sapiens
aggcgccccggtccgggcattgctggaacagcgcccttgatcttgaaaaggagcttcagtcatcaaaggggctccatccctggagggcaaatggcaataaaaagacacaaacaggcggcg

SEQ ID NO: 3862 - DNA, 120 bp, Homo sapiens
gcccgaggctcaactctcaagggcctgggaggggtgctgccggccaagagggtccaggacctcactggactgtgccccacagggagatcccgaagagcctgtttctgtccctcggggagc

SEQ ID NO: 3863 - DNA, 120 bp, Homo sapiens
gagcggagagattgccaaaggcaggtgcaggtggggaacctgccccagctgggcagcaggtgtgggcagagactgggcagagcggagagattgccaaaggcaggtgcaggtggggaacct

SEQ ID NO: 3864 - DNA, 120 bp, Homo sapiens
aaacggagacagtcccaggccggccctgtgtccacactgaggccaggccgcctctgggggaagcagggaacacggccacttcaaacttagcagcgggggtgctcctggccacacaggagc

SEQ ID NO: 3865 - DNA, 120 bp, Homo sapiens
ttgcgcgaaacagcctgggcagtgggagaaggggctgcactctcaggggaatgcaggcagccgtgccaggcatgaacccagccagccttccctgaagggccttggtggggggcatcctcc

SEQ ID NO: 3866 - DNA, 120 bp, Homo sapiens
ctccgagggcaagtctacgcaggcccagcctagcaggaatggattcgttactccagtaactgaagcctagttctcagtgtttgggaatccctgagaactggctcttttctgagccgtcag

SEQ ID NO: 3867 - DNA, 120 bp, Homo sapiens
ggacgccacgccatttcttgggcactactgagctttgcagtgccctggacagttggcaaacagcccccattccacatatgggaggaagggcctgggggggtcccccgccctgtctgtctg

SEQ ID NO: 3868 - DNA, 120 bp, Homo sapiens
tctcgaggcctagggtggcccctgcacccagcagatgagcagccatcacccggtactgctgctacctcgagccctaactgcacctcgggatgtgagggcccatctaggcatggagagggg

SEQ ID NO: 3869 - DNA, 120 bp, Homo sapiens
gggcggtcagcccagccaggggcctccccacaagttctccctcttacttaagtcgagaacgcatgttgtctggggagctgccagcgtggttccagtggtgagcgttgggctgggagccaa

SEQ ID NO: 3870 - DNA, 120 bp, Homo sapiens
tcacgccctcgcggggcagcctcgccagatgccgagcagcaggctgtgtacagcgagcaatgccccagccaggaacaacctcagagctggcccggctcccagggtgcctcagccccagtt

SEQ ID NO: 3871 - DNA, 120 bp, Homo sapiens
gcccgaaactcccactccatcttccagactcaggctgggcccatacacgtgagcagaccagcagagaaagggcccaggtaggcaaatgtgtaggagctgcccccgcctgcagcctgggag

SEQ ID NO: 3872 - DNA, 120 bp, Homo sapiens
gctcggccccagggaaaaggaggccgaggccaccaaccagccctcctcacggccctggcccggcccctgccccatagagcttgcaaactctggccccttagccagagcccctctgccatt

SEQ ID NO: 3873 - DNA, 120 bp, Homo sapiens
atccgagacagcgggcagacgaagagaggttcagtggggacttgcgtgaagagacggggtcaggaggggctcctgtcttgcctgggcccctgaggctgagtctggctgccctgcagtccc

SEQ ID NO: 3874 - DNA, 120 bp, Homo sapiens
tagcgcaccagccaggacagggtacaggttccaggacggtgctgctgggccccacatggctcagacctgggtaccagcggcctcccgccggggactcaccagtctgcttcccgcccccac

SEQ ID NO: 3875 - DNA, 120 bp, Homo sapiens
ccccgtgccctctggcttccggctgggtttgggcaatggggtgggagggcgggagagcaaggtgggaatttgctaccaggtccctccactgaaagtcactgctcctctccaggtgaccca

SEQ ID NO: 3876 - DNA, 120 bp, Homo sapiens
tcccgttagccagggatggggacagcaccacctccactgaccccatgaaccccaccacttcatctcttgtcaaccagccctccttcaatgacctttccttgggtgagccatctgctgctg

SEQ ID NO: 3877 - DNA, 120 bp, Homo sapiens
gagcggaacgcagtaagcccgccccacctctgcagtcttggaccagctgctccgccccagccaaggagaaggtggtggcgaggcacggccagggtcagctccacagccagaggcaaggaa

SEQ ID NO: 3878 - DNA, 120 bp, Homo sapiens
cctcggaagttgagcaagacttgactgcgaggtcaccattgcggtgaagcctccgcacaggtcctctgctggatttgtctgccacagcccttgcaggaaaggctgaagcttcagctgaga

SEQ ID NO: 3879 - DNA, 120 bp, Homo sapiens
agacgtgaacagcactgacatcagtgagagtgcgggccggaccaggcctagctggggtcacttggtaggggctgggcacggatgctcccactcctcccaggaccaccagataccagacca

SEQ ID NO: 3880 - DNA, 120 bp, Homo sapiens
gtgcgtgctggtgtggccaatcattgcccaactgagaaagcttcacttaaaggtacgtaaaggtacttcacttaaagtaggaggccaagaaaatggtctgcacaggtactcagggagatg

SEQ ID NO: 3881 - DNA, 120 bp, Homo sapiens
aggcgtaagtgttcaccaggaatgctagcttggagaactttcgcccttaatgtggcactctctttttttaaaggaaaaattccatacctcaggaaagcaagataggaaccaaacatgaaa

SEQ ID NO: 3882 - DNA, 120 bp, Homo sapiens
gcacgttggcaaagaaattgttcctgaaaaaagtgcaaattgctacttcactgcatgtaaatgaaccactaattgcttcttgcaaacaatatttatgcaaatggccccgcactctgcaaa

SEQ ID NO: 3883 - DNA, 120 bp, Homo sapiens
attcgtctctgcccttcctttcatctctcagcgagcggaagaactgcagacaccagctagctggcgagcccccaccacacacacacacacacacacacacacacacacacacacacacac

SEQ ID NO: 3884 - DNA, 120 bp, Homo sapiens
acacgctgcctttctctgtgttcctgcaggtccctctctgctacctccttccctgctctttccccatcatctctgccccacagctccacaggaagagagttaagtgtcccccagtcctgc

SEQ ID NO: 3885 - DNA, 120 bp, Homo sapiens
gaacgtaaaggcctaagccctccgccatgctgccggagctaacagcatcaggctccttcagcaaagcccacagacaacctaggaacttagagaaaccttttgcaaggcacaacaccattg

SEQ ID NO: 3886 - DNA, 120 bp, Homo sapiens
ggccgggccgcaggtggagctccggcgccctcgtgtggcccgtgtgtgcaggacctcagccgtgctgccccatgggaggatccagggagccgagcacaagatcagcgattacccaggtca

SEQ ID NO: 3887 - DNA, 120 bp, Homo sapiens
gcacggcccctccggagaggaggcctctcctcggggagaggaggggatgacagaggcagaggtggggcagccagggaggtaggagggtgctatggactgaagtgtggcccccccaaatcc

SEQ ID NO: 3888 - DNA, 120 bp, Homo sapiens
ttacgtctgagggtcatttgtgacgcagcaacaaacagatgcattttgccggtggcgcatccgcccacgacggagcctggctcagctctgcaggtgcgctgcaccacccctggtgtcctg

SEQ ID NO: 3889 - DNA, 120 bp, Homo sapiens
tggcgtcactggtacctgtttctctctcaaagctgtcctggtttggaagatgagtggtacagccatcccatcaatgcgaaaccaaaggccccctgaggcagcccccacaattgaagagca

SEQ ID NO: 3890 - DNA, 120 bp, Homo sapiens
aagcgagaccctgtctcaaaaaaagtcatagcttgacttccagagtcttcctgtctgcccggtgctggtcggtggtctctggaagccctccagctgccaccttcctttctgtccctcccc

SEQ ID NO: 3891 - DNA, 120 bp, Homo sapiens
ctccgaagcttcccttctcctactccacccctgctgtggggagaaaagacctgcagagtaccccaacaagccctctgcactgggggaggggtgcacgtccactcacccagaaggggattg

SEQ ID NO: 3892 - DNA, 120 bp, Homo sapiens
ttccgggaccccagtgtccaacacctgcccccccagggtgctccacagcccctgcctacacctcaacccccctccacctccacatctgttcaggtgatgtccaacaccacccgaatctta

SEQ ID NO: 3893 - DNA, 120 bp, Homo sapiens
gggcgaggttggcctctgcatggtaaagctgggtaaactgaggcagcacgttctgggcagcccaggacgcccaggttcccgccagcccacggcctctcccgccttgcacgggcttcacag

SEQ ID NO: 3894 - DNA, 120 bp, Homo sapiens
cagcgagggcacaaacgggggctccgcgggccggcgactcaccgcgccttccctaccccgccccagtttctcccatggagctggtctgcaggcccggcatccacaagccccaccgcactg

SEQ ID NO: 3895 - DNA, 120 bp, Homo sapiens
caccgctctgcaggtcgctggcgcctgttctggcctcgctgggacccccacccagacgcaccccacagccaactccaccggacccacgctgcccgagtatttttagcagagggtcagatg

SEQ ID NO: 3896 - DNA, 120 bp, Homo sapiens
agacgtgaatttcctccctgacagctgcggccaggagccgcacgtcctgcctggcgggcgtgggcggttctgacctcggaggcacagctgcagggtctgcagtcctctgggaacttcctc

SEQ ID NO: 3897 - DNA, 120 bp, Homo sapiens
ccccgatttgggctccctgggtgcctccgccccaggccgcccaccaggcgctcacttgcccggtcctccgtctggagcccctcccgatggccgtcgccacccactctccttctctgtctg

SEQ ID NO: 3898 - DNA, 120 bp, Homo sapiens
acccgtttcctccactgtgaagtggaaggaaaattgcccacctgggggctgttgcgactataaccagccagcggtgcctgcagcacccacagacccccaggcgtcttcagggctccctgt

SEQ ID NO: 3899 - DNA, 120 bp, Homo sapiens
cagcgccaggagcctgcaggaccgagaggggccctggcagggctgcacagatattcagatgttcagacctgaggcccaagacctgcctgccaggacagggacgctcctgcctggggatgc

SEQ ID NO: 3900 - DNA, 120 bp, Homo sapiens
cagcgccctctgctctcacttcctccccaccaagcacaagtactaattacgcacacctcagctccccgggggggccaggaggaaatgcccggcagagccctccgtcctaccccgtgcagc

SEQ ID NO: 3901 - DNA, 120 bp, Homo sapiens
agacggatgaagtgtgggtgtgtgtgggaatggatggatgaatgggtgaatgggtacataggtgggcaaggtgggtggacatgggtgagcaggcatgttttcacttacttcattctgtaa

SEQ ID NO: 3902 - DNA, 120 bp, Homo sapiens
ggccgcctgctgcatgcagggctgtcctgactgcacggcggcgccaacatcaggctgggaggatttctctcagaacgcccacacctgcctgcctgtttctagcagaactcaagctgtcgg

SEQ ID NO: 3903 - DNA, 120 bp, Homo sapiens
ctccgcctgggtgtgtcacagtaccagcctgtacctgcacgaccctgttctcaggcatctgggtacctgcagctgggggccggcacttgtgtacccggctccgaggaaggaccgacaccc

SEQ ID NO: 3904 - DNA, 120 bp, Homo sapiens
ctccggaagccgcaggcagtggctgcaggtggtgtgtttctgaggccaaatcggtcctctcttcaaccccagggccaggaagcaagctcagaatagggccaggatggagtctgggagcgc

SEQ ID NO: 3905 - DNA, 120 bp, Homo sapiens
agccgggttgaaccctgctgccccgggcatggtgggttcaagcctgacggaaaaccccctttcagtgtccacatttccaccctcccagacctctgacctcggcctccactccacacacac

SEQ ID NO: 3906 - DNA, 120 bp, Homo sapiens
ccccgagggccagcctcaggccgggtctgtccactcaccattcacgccagcctgggcagggtctgtgtgctgggtgagtgggtgaggaggaaaggaatgagccagcctgcggggtccctc

SEQ ID NO: 3907 - DNA, 120 bp, Homo sapiens
ctccgcacggtctcccaccctcatccctcccagtgcgacgtgggtcctgcaggagcgttcatttcacaggtgaggcgcgggacagtcggtgccattttacactcagtgccatccattctg

SEQ ID NO: 3908 - DNA, 120 bp, Homo sapiens
gctcggggatgccctgagagaggctgctggctggaatttgggctcctatgagatgagacaaaaatcacagaagctgtcagttattacccaggtcccagccatttggggccagtggccaga

SEQ ID NO: 3909 - DNA, 120 bp, Homo sapiens
ttgcgggtcagagtgctgcatatatggtctggccgtggtgtgtttgcaggttcagcctcatgctgaaaagcagttggaacattctccggtgtagagcctgacggggggcctgggtgagat

SEQ ID NO: 3910 - DNA, 120 bp, Homo sapiens
gatcgggcagccttggcagcaccacagaaggaggagagcagctccggcctcagcctccggggcctcagccggagccctgtctatgccgggccgcagcccagcgagaccctgttacactca

SEQ ID NO: 3911 - DNA, 120 bp, Homo sapiens
ggccggccctgcctgcggagggctgtgctcattgaccagactgagatgactggcaagtcctaggcccagtgaacactaagtttcctcctgctcaggccagagccccgcccctcctgtatc

SEQ ID NO: 3912 - DNA, 120 bp, Homo sapiens
tcacgcagcgcccaggggagggccttccctcccccaaggtcacggcccggttccattgtgtgccacctccccaggccttggtgcacgttactcgatgggagtgggcatactcgcccttcc

SEQ ID NO: 3913 - DNA, 120 bp, Homo sapiens
gggcgtgcgggtgcctggtgacccgggggcagcctggcagggcgcaaggcactgacctgggagctgccactcttaggtcgctatccctggctatgtgggtcacatgtcagccacagctgg

SEQ ID NO: 3914 - DNA, 120 bp, Homo sapiens
gagcggggctggtacactggcgctgacccaggctgccccgcctgcgtgttggtggtggcagcagcaggcttagcccacctggcccctcctgcacagagacctggaggatgccgacctgct

SEQ ID NO: 3915 - DNA, 120 bp, Homo sapiens
tttcgaggaggctaaggccgaggacgaggaggagctgctgcgagtctctggcggggtcgacatgagcagccaccaggaggtctttgcctccctgttccacaaggtgggctgggggctgca

SEQ ID NO: 3916 - DNA, 120 bp, Homo sapiens
gggcggagggcagccctccagggcaggctgtggccctgaggtccagaggctgggcctggaacggtcctccctgccctggtcagaccctgctgtgacctgggccatggtgccagctttggg

SEQ ID NO: 3917 - DNA, 120 bp, Homo sapiens
tggcgcctagagcgggcagcctgggggccgggctgggccctgggggcaaagccagggccacaggacccagaaggacggggctccaaagaccagtgcggcccacagccggccttactgtcc

SEQ ID NO: 3918 - DNA, 120 bp, Homo sapiens
tctcgtcaagctcaggccttcccctcattccctgaaccttgcagctctcatctgggggcagttgtgtccccaggtggcatctggcaacatctgaagacatttttggctgccacggctggg

SEQ ID NO: 3919 - DNA, 120 bp, Homo sapiens
agtcgctgaaactctcatctctagggatccgtgggaatagagggggtgatggggctggacaccctggcagacaggccacagtccttagtccaccagggaggggccggctgctgacctgca

SEQ ID NO: 3920 - DNA, 120 bp, Homo sapiens
actcgcccgtccaggtgagctgctccccggtgtctgcccagctcctgtcggtgctgcagggcctcctgcacctggagcccaccctccgctccagccagctgctctgggaggccctggaga

SEQ ID NO: 3921 - DNA, 120 bp, Homo sapiens
cctcgtgaaccgggccgtgctcctggccagcgatggtgagggggcggggcaggggcgtaggcacagcctggtgggcagacactgaggtcttagaccatgggggggggagcctgcccttgg

SEQ ID NO: 3922 - DNA, 120 bp, Homo sapiens
catcgtggcccaggtggaccatggcttgggctcagcatgggtccccagccatcggcgggtgaacccacccacactgcgcatgaagaagctgaactggcagaagctgccatccaacgtggc

SEQ ID NO: 3923 - DNA, 120 bp, Homo sapiens
gcacgtggtgagggtccccagacccccaagggaagcttcccctaggacgggggctggtctctgctggggagaggggcaggtggcacatggaacttgtgtgcgcgtcctgcccgtgcgtgg

SEQ ID NO: 3924 - DNA, 120 bp, Homo sapiens
gctcggcgcctgtggttgaggtggggacgggggaggagcagggcaggggctacctctgaggacccccctccacatgctcccgtgagccagtgcatctggggtgccatggtgccctggggc

SEQ ID NO: 3925 - DNA, 120 bp, Homo sapiens
gtacgctggacctggacctactgggccccaggcaggacatcctttagaccctctgggaggctccagcccctgcctgctggatcgccaggccccggggctgcgagagcctcactggccgtg

SEQ ID NO: 3926 - DNA, 120 bp, Homo sapiens
acccgacagagcacaactctatgtgggcgtccctgagcagccccgacgccgaggctgtggagcccgacttctccagcatcgagcgactattctccttccctgcagccaagcccaaggagc

SEQ ID NO: 3927 - DNA, 120 bp, Homo sapiens
ccccgggccaggaaggagcccaaggaggtggggacggggaggggactcagaccggggccgcctgcctggccaccctccggtaccagcctgttgggtggggggttttctagatcactttcc

SEQ ID NO: 3928 - DNA, 120 bp, Homo sapiens
cctcgatgccaagaagagcctgaacctcaacatcttcctgaagcaatttaagtggtgagtgagggaggtagcccccatcccaggccacggagcctcgcctccacctgagccttctgactt

SEQ ID NO: 3929 - DNA, 120 bp, Homo sapiens
ggccgccatgggaagtgcacactgcatcccctaggcaggattgtaggcgggtaatagccccatgctgccccagctaggggctgtccaggctcccagggacagagcgctgggacctccccc

SEQ ID NO: 3930 - DNA, 120 bp, Homo sapiens
ccccgagtcctttcctgctgcgggtgtccagcactggcccgagggagctggctggacccgacccatcctgcatctcctgagcagggcccatggagggtagcgagggtgggagtcagcctg

SEQ ID NO: 3931 - DNA, 120 bp, Homo sapiens
tgcgggctggggcgccgggtccctcccccaccgcccagcgagcccccctcccccgacccagacggcccctgtcctcccatgccctggccggtcactcacccgcttggatgccttccttcc

SEQ ID NO: 3932 - DNA, 120 bp, Homo sapiens
ttccgggagcacctttcccagggccaccccacccacgcacgcacacgcaccactcacacaacccccgacccacacacaccgccctccttccacccacccctactccaccaccccggcagc

SEQ ID NO: 3933 - DNA, 120 bp, Homo sapiens
gagcggatcagacccatggtccgagatggtgtttactttatgtatgaggcactccacggcccccccaagaagatcctggtggagggtgccaacgccgccctcctcgacattgacttcggt

SEQ ID NO: 3934 - DNA, 120 bp, Homo sapiens
gtccgggagggtgtgcgtgccaacgacctttcgtgcctgccagggaagacccagctgcggagagccgtgggaaccgatgggggagggaggggcagacccgctttccaaggccacagtgcc

SEQ ID NO: 3935 - DNA, 120 bp, Homo sapiens
gcccgcggaaatgatcctcgtgtccttagtgttcctattgtcagcaagggaggggagaggagaaagggctgggctagagatgaaagaacagggtgacaaggtcaggggtggggccaggga

SEQ ID NO: 3936 - DNA, 120 bp, Homo sapiens
ttccgatggtctgtacagccatatcccgtcctcacccccacgggcgcaccagcttaccctcacccccgaggcggcctggtcacctcaggccatgctgtgggcaactttctccctcctctc

SEQ ID NO: 3937 - DNA, 120 bp, Homo sapiens
attcggccactccaccaggacaggccaggctggcgaccccacggagggggccccccacggtttgaactgcccactgccctttactgagaaggcctcttgggccgggtggaataatctaca

SEQ ID NO: 3938 - DNA, 120 bp, Homo sapiens
caccgtgggcggtgtgtgcacgggcctgggcatccccccgcagaacataggtgacgtgtatggcgtggtgaaagcctataccacacgtgtgggcatcggggccttccccaccgagcagat

SEQ ID NO: 3939 - DNA, 120 bp, Homo sapiens
caacgtgagtccccagcccctcgggaccccgtgggaggacagggaggccaggcaggggtgccgggggtggggtgagcagtgccagggtggaggctctgcggaccttgccagtgccatctc

SEQ ID NO: 3940 - DNA, 120 bp, Homo sapiens
gggcgcttcctgccgtgcaggccaggggagagcttagtaagaggcgctggggtgggcctgttcccacggccacagcacgtgagctcacacggggtgcgcacatgcccacacgtacacgtg

SEQ ID NO: 3941 - DNA, 120 bp, Homo sapiens
cctcgttcccctcggagtgtgtgaggcccacaggcaagtgcggacgccttgcagttcctcaggacaccctcattcggggtagctggtggactcaccttggctcagagaggacactaagca

SEQ ID NO: 3942 - DNA, 120 bp, Homo sapiens
acacggggaggggcggacgccatccagagaggcttgagagggtgcagggatacatatcgggagatacacacacccctgacccccaaagccaagctgcagggccaggcccgcctcccccag

SEQ ID NO: 3943 - DNA, 120 bp, Homo sapiens
gcccgtgccttccccagctcacaaagcctagtggtctggtgtgttcaggaagagcgctcgccggctcgggtggcattgtgggccaggccttgcccattgtgagcctcagctgctggacag

SEQ ID NO: 3944 - DNA, 120 bp, Homo sapiens
acacgcacacctgaggcacacacctggggcacacgcacacctgggacacagccacactggaatacacagacatctagaacacatctagacacctagccacatctggggcacacgaacacc

SEQ ID NO: 3945 - DNA, 120 bp, Homo sapiens
agccgctggggctccgtggcaggctctggcccagcctgtgcaaagcaggaggaggctgaggggccagtggggggcctctgacattccagcatcgaggccctggcaaccacaagggggcct

SEQ ID NO: 3946 - DNA, 120 bp, Homo sapiens
gctcgggaccagcctggtggggagggtggcctgtgtcaacacaggccagagaagtggaaaccggtgtgaagccccggcacacccacctcccactcgctcctggatggtccgatctgcccc

SEQ ID NO: 3947 - DNA, 120 bp, Homo sapiens
tctcgagcccactgccccggaaccgttccccggagaaaagccccggacagaggcccagcacagcccctggcccctgcccagctctgctccttggccaggcgctccaggccactcacctat

SEQ ID NO: 3948 - DNA, 120 bp, Homo sapiens
acccgtgtgcctctccagagagctccccacctcgttccttcccaatgcctcggcctggcgagcacacccacagcacccacccccagcaaggccctgtcccaggtgccaccaggcacgctg

SEQ ID NO: 3949 - DNA, 120 bp, Homo sapiens
aaccgaggagacactggggagggtgtgggacaagtcacagtgagtctcctgcatggttacgaggctgtcaggagacaggggtgtctgccttcctggtctcccctcacccctggggtgccc

SEQ ID NO: 3950 - DNA, 120 bp, Homo sapiens
cctcggcttacaggaaccaggtcctggtaaaccccaccccaaccccagcccctcagcctggggctttgcagggcaaggcctctgcccctcccaactagaagcttcagggcacggtttgct

SEQ ID NO: 3951 - DNA, 120 bp, Homo sapiens
ggccgaggcttggggatgtgggagggagcagggcaccctctcatggaagaggcagtgacattgcgggctgttcttgaagtggttggacctcttgcttattttgcactggctgtctccaag

SEQ ID NO: 3952 - DNA, 120 bp, Homo sapiens
agacggggatctcccagtgggcagggccatctccctctcctccagcgtcccagagggaaagcagagtcctctcttcaagaacaccccctcccaccccagacagaatggtcaggagagaac

SEQ ID NO: 3953 - DNA, 120 bp, Homo sapiens
acccgggcgtcggggacgccgcgagcgggcggccgcccgggagtgaagttcaggagcgcccgggcggggacgcgcgcaggtttgcgcggctccggctcctgcgcctgagtcccgggaccc

SEQ ID NO: 3954 - DNA, 120 bp, Homo sapiens
acccgcccccgcggcggagctgctactgtttactttcgatcgagtttttcctgctcggggcaggtgcccgcggcggctctggacgggaggttgcgcgcgtcactcccgcgccgctctttc

SEQ ID NO: 3955 - DNA, 120 bp, Homo sapiens
ttccgcgctgcctgcagccgggaagggcgcttcgtgggcgcctccaggcgcgctgacgggcgtcccgtttgtgcccaggtgatgacggcggcggcatggagttccctgagcacggcggac

SEQ ID NO: 3956 - DNA, 120 bp, Homo sapiens
ggacggctgctgggccgcctgagacagcagcgcgagctgggcttcctatgcgactgcaccgtgctggtgggcgacgcgcgcttcccggcccaccgtgccgtgctggccgcgtgcagcgtc

SEQ ID NO: 3957 - DNA, 120 bp, Homo sapiens
gaccggcccgcgggcagtcgcgacacggtgcggctcaacggcgacatcgtcacggcgcccgccttcggccgcctactggacttcatgtacgagggccgcctggacctgcgcagcctgcct

SEQ ID NO: 3958 - DNA, 120 bp, Homo sapiens
ggacgtcctggcagccgccagctacctgcacatgtatgacatcgtcaaggtctgcaagggcaggctccaggagaaggatcgaagtctggacccggggaaccctgcccctggggcagaacc

SEQ ID NO: 3959 - DNA, 120 bp, Homo sapiens
caccgtgcccctggcctgtctggaccgcggacctctgcccagctgcccgaaaggccaagctccccccgtttggggtcaaggctgccctccctcctcgagcatctgggcctcctccctgcc

SEQ ID NO: 3960 - DNA, 120 bp, Homo sapiens
tgtcgttgaagtctggcccaaggcaggagcgggtccacccaccgtgcgtcctccagacacccctctgcagccagaggcagccaggggcccagccactggtgaaggacgaacgggactcac

SEQ ID NO: 3961 - DNA, 120 bp, Homo sapiens
gtccgaacaggaggagagcagcagctctaggagcccccacagtcccccgaagccacctcctgttcctgcagccaagggcctggtggtgggcttgcagccgctgcccctcagcggagaggg

SEQ ID NO: 3962 - DNA, 120 bp, Homo sapiens
agccgggagctggagcttggtgcagggcgactggcgagtgaggacgagctggggcctggtgggcccctctgcatctgcccgttgtgcagcaagctgtttcccagctcccacgtgctgcag

SEQ ID NO: 3963 - DNA, 120 bp, Homo sapiens
ttccgtgagcgagacagcacccgggcccggctctcacccgacggcgtggcacccacctgcccgctctgtgggaagaccttctcgtgcacatacacactgaagaggcacgagcggacacac

SEQ ID NO: 3964 - DNA, 120 bp, Homo sapiens
actcgggtgagaagccctatacgtgtgtgcagtgtggcaaaagttttcagtactcccacaacctgagccggcacaccgtagtgcacactcgagagaagccgcatgcctgccggtggtgtg

SEQ ID NO: 3965 - DNA, 120 bp, Homo sapiens
gagcgccgtttcacgcagtccggggacctctaccgccacgtccgcaagtttcactgtggcctcgtcaagtcccttctggtgtgatgcatccctgtgggtcctgagggtggggtggaaggg

SEQ ID NO: 3966 - DNA, 120 bp, Homo sapiens
actcggtaacttgggcagccttcctcccaccttgcctctcctttcccctcactctccaactcattccggcccccaggctgtgccctgcctaggctgtgacactatcttcctctcccgtcc

SEQ ID NO: 3967 - DNA, 120 bp, Homo sapiens
ttgcgtagggggccccatgccctcccccccgaccctctctcccctacacagtactgcgaattttgtaattgttagtacagctagtgtcctcatttaaaaccttctagcagtaccaggcta

SEQ ID NO: 3968 - DNA, 120 bp, Homo sapiens
ccccgacaccccaaattcacactcctgctgggagttgtgggaagtgcctgtctccccgctcctcccatcccagtctctcatgaaaacgtctgacaggtgaaaataccatcttccggtagg

SEQ ID NO: 3969 - DNA, 120 bp, Homo sapiens
ttacggcggaggttcagcatcttgcagtcagcagccattggggcttcctttgtgcagcgtgtccggcggcctggccctttcctcgttgactgatagtagccctttgttgggagaatcggc

SEQ ID NO: 3970 - DNA, 120 bp, Homo sapiens
tcccgcggtccctccctccgtcttcctcctcctcccctctctcctcatttcccttcgccgccgtctccccgctgtccctgcctctcccggcctgtgcgctccttccaccgccggcctgcc

SEQ ID NO: 3971 - DNA, 120 bp, Homo sapiens
ccccgcccggctcgctgcccttccctgccctgggcctagccacctttccccgcctcacctctgactgtggcccttccggccggggcggctgaggggacaagtttggggcgtttattattc

SEQ ID NO: 3972 - DNA, 120 bp, Homo sapiens
caacgatggccagcccagccccgaggcagccgaaggccgttttggagcgtcgcgggctcccaggccttttcagggtgggcggccggggcagtgggtggcctggctctggcacagcggcac

SEQ ID NO: 3973 - DNA, 120 bp, Homo sapiens
gctcggcttcatttcgccttaaacagggaccgtggactcctcagggcgggccgcggcaggtgatggcagagggtgaggcctaggagggctggctgggggccggaggtgcaatggtggggt

SEQ ID NO: 3974 - DNA, 120 bp, Homo sapiens
gcccgatagagcaccctgtggtctcccccagcagccctagggagggtggggctgtagaggcctcctggaggctttgctgtctggggctgcagggtcatcgaagtgccagccccttggcct

SEQ ID NO: 3975 - DNA, 120 bp, Homo sapiens
gtgcgtggcttaggaagggcagggcccccagagtgagagggtcctggctgcctggagctgccttctcctggtgaggatttttctacatcttcccacctccctgcccaaggtgagggttta

SEQ ID NO: 3976 - DNA, 120 bp, Homo sapiens
gcacgtggtcacttgggcattcatgctagctggagctgggtgttggttttccctgctgctcaccgaagggagctgagatctggtgaagagcctcaaagctgaagaccttgggcgtgggca

SEQ ID NO: 3977 - DNA, 120 bp, Homo sapiens
gcacgcctgcaccccttgagcccacagttcttgtggggttggtgggccaccagctgggcaccctctgtccccagtggtgagaggcaggtgatgggggggtgaggctatgctccctagtat

SEQ ID NO: 3978 - DNA, 120 bp, Homo sapiens
gaccgagccagcagggctcaggggttggtggtttctgatgaaacctgatttgcgcctttggcagtcagtgcagcgggtaggcagaagtctgggaggaggacagctgcacgagggtccgcg

SEQ ID NO: 3979 - DNA, 120 bp, Homo sapiens
gtccggtgggcacaaagggaagggaaggagcgagagtgagaaagtgcctggtggggtgtggaggggtcggggtggggtatccaagcctgaggccccagacttgagttctggttagacagg

SEQ ID NO: 3980 - DNA, 120 bp, Homo sapiens
atccggggatcaggctctcggctcccacctcggtccaggaggggtcaccctgccacccccagctttggccccatgtctgctgtgttctgctgtcagcccacacatctgtgttgtacagcc

SEQ ID NO: 3981 - DNA, 120 bp, Homo sapiens
agccgcagctgccggtgtctggttgggatgcaggtccgcccagaatggaagaccgctggggactgggaagctttccagaaagccatctgagctccccagagcacctgtcagtgtccagac

SEQ ID NO: 3982 - DNA, 120 bp, Homo sapiens
tcccggaggtcatgacaggtgcagccagctgggcagcctggctccttggctccgttagagcgagggcagcacattgtggggaccaaggaggagttcagggccggcagcagatggggactg

SEQ ID NO: 3983 - DNA, 120 bp, Homo sapiens
aggcgtgtgtgacacatctcaggggccctgcatccccagcgcagtgtgcacatggttccctatgggtaactggccccagcgcagtgtgcacatggttcctgacgggtgactggccccaga

SEQ ID NO: 3984 - DNA, 120 bp, Homo sapiens
tgacgcagaggccccctgggcttccgcaaggatggaaagagcttgggtggagggcccaggaaggagactgtgggcatgagggccagcgccctgacctgagggcactggacactgcttctg

SEQ ID NO: 3985 - DNA, 120 bp, Homo sapiens
cagcgcctctgtgctctgagctgcccgtctgcctggagcatttaagggagcaaaggtcctctctggtgagggcagggagtgtggggagcagctgtccaagaacagccctggcacctcgtt

SEQ ID NO: 3986 - DNA, 120 bp, Homo sapiens
cctcggagaagggactcgccaggcagggaaacacaggtctgctgggctgggggtgggcaccacggtcaagggcccctgagctgggcacagccggctgcactcccaaatctctccagggta

SEQ ID NO: 3987 - DNA, 120 bp, Homo sapiens
ggccggtgagggagggtgtcgacagcaagccctgggcacaccctgtgctgggaacctgcatgggggaaggaggaggagacgtgaccagccctgctcctgctggccctcgtgcctggtcct

SEQ ID NO: 3988 - DNA, 120 bp, Homo sapiens
ccacgcgggacagtccccagccccaccctcagccaccgcactgggagcggctgttcctacactgcctgtagtggggatggagtgcagaggctcagcgagcggcagacctgcctctggcca

SEQ ID NO: 3989 - DNA, 120 bp, Homo sapiens
ctgcgcagtggggacccctccagtcactgggctggcaggagcctggcccaggaacacaaacaggaagggggaaatcctgcccgcctcgggataaggctgcgcagccaggctaccggcctc

SEQ ID NO: 3990 - DNA, 120 bp, Homo sapiens
cctcggacccgcgccagtcgggagagagaggaaggcccccagtatcccagtcccccgccaagagcaccgcctcccaggcccgagctcctgaggaagccccgcctcggccgcagagcgcag

SEQ ID NO: 3991 - DNA, 120 bp, Homo sapiens
ggccgcctttgcccgcccggcctccggttctcccagacaggctctgcaagtggccccatcacctgaatcatgacactgtttgttgacggtcaccaaagccccacttcacagaggagaatg

SEQ ID NO: 3992 - DNA, 120 bp, Homo sapiens
actcgcctgagccaggcccagctggtcaggccgttggcacctggttccttccccaatgcccttcccccactccccgggccccccagcgccctggcctcaacactaccattaacattcctg

SEQ ID NO: 3993 - DNA, 120 bp, Homo sapiens
ctgcgggtgaaaacttgaaccttgtggagggaccccgggacccaggtcagtcccttgcatgccagggcaggtgggggtggtaccacagtgaaagccgcagaggacacccaccctggccca

SEQ ID NO: 3994 - DNA, 120 bp, Homo sapiens
ccccgagaactggactatcctggcgcagggcctgagcaggcggggcctcaggcagtgtgtctgggggacgagcagatcctggccgggaggcggggaggggccgagcgggaggggagaagg

SEQ ID NO: 3995 - DNA, 120 bp, Homo sapiens
aggcggggagtgtggcagaggctcaccaacacccctgctccacagctgggtccagattgaggactcccaccagccaccagctaaatgagagttcttggagggtccagaacaggtccgtgg

SEQ ID NO: 3996 - DNA, 120 bp, Homo sapiens
ggccggaaaagtccatcctgggtgggaggaacgaatggcccactccaggtttgcaggtgtgtgtgcacacgtgtgtgctcacaggatgtacgtgctcaggtgctagggcgtgtgtgcact

SEQ ID NO: 3997 - DNA, 120 bp, Homo sapiens
aggcgggagccctgtgggagtcactgccctcgggctggaaacctggtgcccacccagacacaggcacacacagccggccgcacttgggcctcacccagtcgtggaacttcatgaagaagg

SEQ ID NO: 3998 - DNA, 120 bp, Homo sapiens
aagcgggctgactgtcatgagaccttcagacttccctgagcaacatcccccgcccctccccgatgcttcttgagataactctctcgggatgagctcaggctcttgctcctgcctctgtgt

SEQ ID NO: 3999 - DNA, 120 bp, Homo sapiens
acccgtgaggctattcacatcaccctctcccgaaacaacctttcgtagctccctggtgccatccatcggtcagactggcctggcagcctctccgtgcctgctctagccctagccgacatc

SEQ ID NO: 4000 - DNA, 120 bp, Homo sapiens
aggcgctctctctctgggctttcccaggctgtcttctctgctgggcaaattcacagactgagcttggccaccctgccatggcttctggacactgccggctccctggtccccagaacactt

SEQ ID NO: 4001 - DNA, 120 bp, Homo sapiens
aggcgggctagcctgagccagtttccctgggctgaaaggccggccccacagacgtccagggcagtgtgaccctgtgatggagctacccatcgccccaggcccccacagcccacctcgggc

SEQ ID NO: 4002 - DNA, 120 bp, Homo sapiens
acacggtcatctgaggacccttctccaggccccacgcccaccttggggacttgcagacctgcggctgccctgaatgtgggtgctcttggcattcacctccccccacacccaggctccttg

SEQ ID NO: 4003 - DNA, 120 bp, Homo sapiens
ctccgccggcaccccagggaccaggacccaggagaaggggctccggggctttctccctgacatccctgcccagcccgctggccctggctggagccacggtgaactaacacccctgcccgt

SEQ ID NO: 4004 - DNA, 120 bp, Homo sapiens
ggtcgggggatgcctagcccagctctgttcctccagccccccttgctggtggcctgctggcccccacagacccgcggaagagtgaggcaagcaggtgtccggacatggacacaggagcca

SEQ ID NO: 4005 - DNA, 120 bp, Homo sapiens
agacgctctcccaactggcccagaagcgaagatcccaactggccacctccccctgccacgcccggttcttccctccacagctcctccccccattgtcccgcctctgcctgctcctagggc

SEQ ID NO: 4006 - DNA, 120 bp, Homo sapiens
gggcgggtcccctgatgggccaggagcctggccagcccccaacactcactcagcttcttggagctggggaccccaccctgagtgcccacccccagcctgagcagctgactgcagaggaac

SEQ ID NO: 4007 - DNA, 120 bp, Homo sapiens
gaccgctctgagtcacacagccagcccagtctggtgagtgccttagtgtgcgccaggtcctgctgtgtggacagacacaggcctgaggcaggtccctcctaggcaggctctgcacaaacc

SEQ ID NO: 4008 - DNA, 120 bp, Homo sapiens
agccgaccctggcctcccttcagcccgctcagcccaaactcacagcggccaccacacctcgaagcaccagggtatctggtaagcagggtgcggtggggctcaggaagcagcattttttga

SEQ ID NO: 4009 - DNA, 120 bp, Homo sapiens
ctccgcactggcctagcttttttttttaacaagcctcccatccttccccgtcatttcaatacaagtggtggctgagaaacacctgagtcccatgaccccaagtcccccactatccagagc

SEQ ID NO: 4010 - DNA, 120 bp, Homo sapiens
ctacgtgtagcccccctgggatcccagtgtgccagccctgtgcccatagcctgggtgtggacgtgcctccaacaggcagtctggagcaggcccacacagccgaggcccagcccaggcctt

SEQ ID NO: 4011 - DNA, 120 bp, Homo sapiens
cagcgaggggtcagacccagcctgggaggtcagcgatggaacggcttgcacctgcaccaggccccaacggcatgggaagaggtgggaaggtgcagctgagagggctgcccccgccacggg

SEQ ID NO: 4012 - DNA, 120 bp, Homo sapiens
tgccggcaaatggggtgggagaggcctcaggggctcctcaggcctgaaaggtggggacctgattccaggccccttctgggcctccccccattgcaataccctaaaaaggctgacacaaaa

SEQ ID NO: 4013 - DNA, 120 bp, Homo sapiens
taacggtcacaaagatagaaaacgactctatttacacggaggcaggaaagctggccacgtctgctccagggacactcccagacagctctcacctgggaacgctgtttactgtttaccacc

SEQ ID NO: 4014 - DNA, 120 bp, Homo sapiens
cagcgccgtacccagaggcccagcctgctggagtgggacaggaaggagacgctggcacagagcggggccgtcatgccagacacagcactgacccccgcaagagcctttgctggggccccc

SEQ ID NO: 4015 - DNA, 120 bp, Homo sapiens
ctacgcccacctcacagcagccagagggaggtgccctgcacagctggccacagcgctggccacgcaagcccttcccagaccctcgctgcagtgcggccagtgtggtccgccaagccctgg

SEQ ID NO: 4016 - DNA, 120 bp, Homo sapiens
gcacgttcctgggccgcagggttggggagggtctgggaaccggtgtgctggacagaactcccaaggtctctgatcttgcaagtctcctaccaaagctccagcgagagccactgaccttat

SEQ ID NO: 4017 - DNA, 120 bp, Homo sapiens
gagcggatggttccgtaggctggacacagggagggactgccccagacgggctgggaaccatgaagccagcacaagcctctgtggaggcagggggtggatgagatggtcctggaccctgca

SEQ ID NO: 4018 - DNA, 120 bp, Homo sapiens
gcccgtgagtgaggaggaagcagagcagaaaggctgtgcagggaagctgggggcagggtagtggtcccatgcctgggggccctgcccttctccctctgaggaggtcgacctgcagccatg

SEQ ID NO: 4019 - DNA, 120 bp, Homo sapiens
caccggagccatcatcctcccgctgctgtgcccaaacaccttgggctcccatctgcgacaccgtgaagcaggtgctgtaggggcctccctgctctggagccccccagacaagcctcccac

SEQ ID NO: 4020 - DNA, 120 bp, Homo sapiens
gtgcgcaccagacagacaggccacaggaggggccttggtagtgcctgctgcagctggggggcatgcccaggccaggggcacccctctcacctgcagcattgtcggcaccattagcattga

SEQ ID NO: 4021 - DNA, 120 bp, Homo sapiens
tgccggccagcccaaccccctggccagtggctgccaatgccctgggtgtggtcagctgcagcagcatagacccagcgcccaagggactgccctgcccccctcagccctgccctccaagat

SEQ ID NO: 4022 - DNA, 120 bp, Homo sapiens
ccccggaaccaggcccagtgcagggacagacacacaaagagcagcaggtacacatgccgtagcctgcggctcagagggaggctactgaccatccctgggggcatgccagtaggtagcacc

SEQ ID NO: 4023 - DNA, 120 bp, Homo sapiens
ctgcgggaccctgtggcctgactttgaccccattcaggcccctcaccaggccccagacctcaggcctagccctgccacagcctccacctagccagcgaccccaccacacagccacacagt

SEQ ID NO: 4024 - DNA, 120 bp, Homo sapiens
agacgcagcccagccctgcctggaagccccggaccaaagtggagagcccagactcctggaccagcctggctgctctcccgcaaagcaggtgagagggcaagcctggtgcaggtgccccgg

SEQ ID NO: 4025 - DNA, 120 bp, Homo sapiens
tcccggcggccccggctttcacgccccttgcagacaccagccctgctccagagtgcggtagcacctcccaggaggccgcctctcgaccagacagcgtcccaggagcggggcaggagcgag

SEQ ID NO: 4026 - DNA, 120 bp, Homo sapiens
gaccgcgagtgacagagggagtgagcgacagagacgagtcagccaccgagaaacaaagtgagcgacagagacagtctcagaggccgggagaggagcaggaacctacagccacggacaggt

SEQ ID NO: 4027 - DNA, 120 bp, Homo sapiens
gaacgcgaggcatgggagaagagactccagcggccgggaaggcccagaaccacgcgcgagtcccgcaggcgtctccgagtcccccgcccccaaggcccgcactgcgcgcccctggacacg

SEQ ID NO: 4028 - DNA, 120 bp, Homo sapiens
gcgccgcgtgcgggagcgcccagcgctgggggcagtcctggagccagaaccccgcccagagtcatcctttctgctgattcttgtcaagagcctagggcctaggacacagcggcaaccagc

SEQ ID NO: 4029 - DNA, 120 bp, Homo sapiens
tggcgtagacacaagcaagcctgtaaggatgaggcgttctgcagggcggcactgccctgggggcgggggaacggaggtcctggagggctcctggcagtgtaagctgggaccttaggggtg

SEQ ID NO: 4030 - DNA, 120 bp, Homo sapiens
aagcgttctggagagaggggacagagtagcgtgtgtgcagagaatgggggcaaaagggctggggttgaaagtcaggcccagtgggcgggggcagggcagcaaggaggctgagggggctcc

SEQ ID NO: 4031 - DNA, 120 bp, Homo sapiens
tgtcggtaggaggtgccacttaaggctccaagcagggtctctgagcgtggtgagagctgaggaaagactgcgcaggtggctaggggtgttggcatggggcacagctggaaacaggagcag

SEQ ID NO: 4032 - DNA, 120 bp, Homo sapiens
ccacggccatggtatgggagggagtgaaaggatatgcaggcagaggggacttggtgaggatcagagtgcagagggtgggagcctccctgggatctagcttgggcaccacacagaggcagc

SEQ ID NO: 4033 - DNA, 120 bp, Homo sapiens
tgacgcctggcctggtgtagacccaaaccgggcataccccagaaggagtggagttctgcagggattgtcggggaaggcagggctggaagagacccaggagaggaccgccacctccatgag

SEQ ID NO: 4034 - DNA, 120 bp, Homo sapiens
acacggacaccttttcctggggtgggaagaggccaggctgtaccggaagggccaggcagacacacacactcatagataagatcacaaactcaccaagacacagacacaggccacctgaga

SEQ ID NO: 4035 - DNA, 120 bp, Homo sapiens
gcacgtgtatacatacacacaggggcacacgcattcctgggctcatttggagaccacgcacagctagcgggcccaggtgagccacccgggcacgatgactcaccctagacagttcccgtt

SEQ ID NO: 4036 - DNA, 120 bp, Homo sapiens
agccgcgctgcagccaccgggcagccatccagcagcaggtcagatggacgccagagccactgctgggaagaggccctggcagcctcctgccagtgagcccaggcatgatgggcacaacct

SEQ ID NO: 4037 - DNA, 120 bp, Homo sapiens
cctcgtgtggggacctggcgcaggtcttaccccaccccctcgcagtgtccttttttcggggctgagcagtgttgcctggggtccagaggccctgcacttacctccctccccaggagccca

SEQ ID NO: 4038 - DNA, 120 bp, Homo sapiens
tttcgcccgctagtcctctgtgtctgagtctggctgcagggcctgggaacgaggggccgctcagggcactcacccacctttgtgtcctcagcccctttaggtgtgtgcccttgacaaagt

SEQ ID NO: 4039 - DNA, 120 bp, Homo sapiens
tggcgtgatctgcgcagggctacggggactccccttggctttgcgggatgggtgaggatggagccctgggtggggaagccgaggttgcccccgacatgtccctgtccctgggctactacc

SEQ ID NO: 4040 - DNA, 120 bp, Homo sapiens
ggccgagtgagagcgcaagttcagcgtggcgtcacgggagtgtggggaccccacacttgggaggactttgccctggtcctgcccctcagcctggggtggctgagatcttcccctagctgt

SEQ ID NO: 4041 - DNA, 120 bp, Homo sapiens
gcacggggctgcccacttccaaggtgggcacagacacacacacgcagctgcgccatgctcccctgtggccccagaattcaggatggggtctgggcagggcctgctccacccggaggccgt

SEQ ID NO: 4042 - DNA, 120 bp, Homo sapiens
ctgcgctgccctgagtgctggggccacagtctggttgtgactgtcggggagctggggactgcccctcccaccctccttctgggggtcttctcctagcttgagggttaagctgacagtgtc

SEQ ID NO: 4043 - DNA, 120 bp, Homo sapiens
ctgcggctatgtgcagttgaggactggctccccaggggccagccagaatccctcctcccgcccaccagggcctcagcagctgaaacaggggtccagggtcacagctgtgggagcagggga

SEQ ID NO: 4044 - DNA, 120 bp, Homo sapiens
tcccgggccctgcccgccagctgaagcctgcgctcctgtcgtcacgcccagctccagtttcctccccatgtgcccctctgaggacagatgcccagctagggaggaccacagaagcatgcc

SEQ ID NO: 4045 - DNA, 120 bp, Homo sapiens
catcgctggacacaagcccaactcacagccgcccctggcacatacaaggccccacacctgctgtaggtgtcaccccagggagagggcatcgcatgctctctcctgtgcacacagcctcca

SEQ ID NO: 4046 - DNA, 120 bp, Homo sapiens
tgccggggcctgggtgaggagccgaggctccccaggccctgatcatcagcagagccgctgccctgcccccatggcctgactggcgctgcttgcctccaccctctgcaggcagggatgccc

SEQ ID NO: 4047 - DNA, 120 bp, Homo sapiens
ctgcggcagctgcagcaacataagcaaaaatagctctgctgtggtccctgccccgccccagccacagccttgcatccagcccagcctcgtgcccagatggaggggtgtgaggtgaggtgg

SEQ ID NO: 4048 - DNA, 120 bp, Homo sapiens
atacggagatgatgggggaggaccccctgaccaggtgggggacacttgtccacccagcctcccactcttgcctgaccacactgactcctgacctctaaccgcctcactctcccccaaagc

SEQ ID NO: 4049 - DNA, 120 bp, Homo sapiens
gcccgtttcaggcctgggtattgtccccaggtccacttcctctgcacccacacagctgggatcaggaaatgtggcagtggtggggcatgtcagggtgctgccatcgttccactcggatgg

SEQ ID NO: 4050 - DNA, 120 bp, Homo sapiens
catcgggctctctggctcagcagtccgtgtgggctagcctgggatccgagcagcagcaggttcccatgctgccgcctgcaagccctggcactcctgctgccagaggtgaggacaggcaca

SEQ ID NO: 4051 - DNA, 120 bp, Homo sapiens
acacgccccaacttgccctagggacttggggctgaggatcccagaggaccaggatgcctgggtgcttctggggacccctccccagccagtccttgctcatcaggtgatgctgggagatcc

SEQ ID NO: 4052 - DNA, 120 bp, Homo sapiens
gaccgaggtggctggagaggtcctgggagggccacatgggctcctcgtcccgaccacactccacctgccccctccatgcccctcgggagtcatggctaatgtcccccacacccaggcttt

SEQ ID NO: 4053 - DNA, 120 bp, Homo sapiens
ctccggcccagtctcccctagcagctgggccagttcaatttgagcagtgcctgctccaatcgccaacctggaagccttatcctcagctcgtgcctttcaggctgtgccatgaagcaggat

SEQ ID NO: 4054 - DNA, 120 bp, Homo sapiens
cagcggcctagcagccacctgggctgcccccacctcctcctgcaaccagggttgggcacctgatgtcaaggttgccgctgccatttcctctgcaccttggcttccccgacgcagcacttc

SEQ ID NO: 4055 - DNA, 120 bp, Homo sapiens
ccacgctcttcacgtggaagctgaggcccagacgggggtggggaattgcagagaacgaggagagcagctcctgtcccagctctgcttctcacgcaggcctttggggtggggcctcagttt

SEQ ID NO: 4056 - DNA, 120 bp, Homo sapiens
ggacggcaaggacgtgcagtggatgaggggcagcagtgggaacggacactgcccttaagctggcaagacaggcccaggcctggtctacaaacccagccagctcctgatcaccatccttag

SEQ ID NO: 4057 - DNA, 120 bp, Homo sapiens
ctgcggtgctggggtggccaagccaagatccagtcctgggcagtctgaccgaagagcttccatactgcatggcccggctgctctgcccctcaggaaggagcggggacaggaggctgggtc

SEQ ID NO: 4058 - DNA, 120 bp, Homo sapiens
atgcgagcctgaggtagatagggggtggacagtaggtggcatggttcagggcttcaccagggccaggccctccccttacccagaggaggcagtgatgggggccagtctgggaaggccagg

SEQ ID NO: 4059 - DNA, 120 bp, Homo sapiens
gcccggaggggagctgccagaggccagcctagctccttggtcgtccagtggctggagaggggctgtccgtcagccctgctctgcccgggtctggctggtgacaaaggaggggagcactcc

SEQ ID NO: 4060 - DNA, 120 bp, Homo sapiens
atgcggcctgcgagggaggggtggagcctccccgcagctccttcccccaggaatggggacgagttaggggcgggcgaggttttgggattcaggagtcagcaagacggacttggctctcgc

SEQ ID NO: 4061 - DNA, 120 bp, Homo sapiens
ggccgtcgctcagctgcacccacagaggggtcggcggcgcggcaagttaggctgcggggcgccgggagaaggggctgcgggtgacgggtgcgctgggacggacctggggagctcgtcgtg

SEQ ID NO: 4062 - DNA, 120 bp, Homo sapiens
gggcgggggatagggatggggcggggcagcggagggagcagactgctccccacaggccctctgcggatcagcagaagtgcagctgcttcccctgcccccatccaggccagcaggagctca

SEQ ID NO: 4063 - DNA, 120 bp, Homo sapiens
gcacggaaacccttatgggggaacccggcccagtggctcccaacaggcacctccccttccccgtgccagtgaggggggggtccagtgtcccccgttccacagaggggacagttagggtct

SEQ ID NO: 4064 - DNA, 120 bp, Homo sapiens
tcacggcagggaggggtgccactggcttctagtgggtggagaccaaggaagctggaaaatgtcctgcaacacacaggacagcccctcccgccaccacaaagaagtttccagccccaaatg

SEQ ID NO: 4065 - DNA, 120 bp, Homo sapiens
cttcgggcagccaggggaaagctcagagctgtcctgttttagaatcattgttccgacgcccccacgggagggctggcggctgggagggtggctgggagacggctagtgccaggaggccac

SEQ ID NO: 4066 - DNA, 120 bp, Homo sapiens
ccacgcgatagaggggcagcccttgcgtccctgccagtgtccttcagcccgggggaagcccctaaaggtgcagtgtccaggttggcagctgaggccaggacagcaacccagacaccactg

SEQ ID NO: 4067 - DNA, 120 bp, Homo sapiens
cagcgctcagcacccatgctggaaacattttggttccctctgcaggctgtcggggttccagccaagctcagctgccaggggtctggttaacaatccagggtcagggacccaaggcttctg

SEQ ID NO: 4068 - DNA, 120 bp, Homo sapiens
cagcggcctccctgttcccctcttgccacagtctctccaggataaggtgagggtgtcaggggcctgggtccccacttgcgaccccaccgggctgctcctgggacgggctgtgcaggccag

SEQ ID NO: 4069 - DNA, 120 bp, Homo sapiens
tggcggacctaagaaactgagacgtgtttctcagctcccccaaccacgtccccagccccgccggtcccggagctgccctgccgcctggtggctgcggctgcgctgcgcccgaccggcccg

SEQ ID NO: 4070 - DNA, 120 bp, Homo sapiens
ccgcgctccagggcatccgacctccagttcccccgcccgcgcccgggagtgcgccgagagcagcagaggtcgagacagcagcccggaggtggtgttacccgcaacctcggctcctgcgct

SEQ ID NO: 4071 - DNA, 120 bp, Homo sapiens
gctcggggccgcttctctcctgggtgcagtcagctctgcgcgggggaccctcagcacgccgtccacggacacggctccctcggccacagtctcctccccgccatcagacgcactgcagac

SEQ ID NO: 4072 - DNA, 120 bp, Homo sapiens
gggcgtgctgcgcccacgggcgcagggaggacgggggagcccgccctgggggcctggaggattcgcgtggcctccgcggtccagaagtactcctctcccctagcgatccccaggattctc

SEQ ID NO: 4073 - DNA, 120 bp, Homo sapiens
aaccgagactcacagctccccacccctcggtcccgagttccctgtcccctccccccaggccgggaaccacccagtcccctccgcgcctccccaacccccagcccagagcattcctgcccg

SEQ ID NO: 4074 - DNA, 120 bp, Homo sapiens
gatcgcccttggcctcgcctctggctcttttatttgcacaatcaccccgaggtgggtgatgctattgttcccacttttcagattcgaaagtcgagacacaactggaattcgtatccaggt

SEQ ID NO: 4075 - DNA, 120 bp, Homo sapiens
caccgcccgtcctcgggcagaggtttgcgcagaaacaagcatcattcctgaccttagggacctcaccgagcctgcctgcgggcagggcagggaggtgctgagaattcgggtgcacgtgcc

SEQ ID NO: 4076 - DNA, 120 bp, Homo sapiens
acccggggccccagagctcccctccccatgaagccctccctcagccccctccctggagaaatggcgagccatctggaaggaggtcgagaggggacccgctcccgccaggacctctcttct

SEQ ID NO: 4077 - DNA, 120 bp, Homo sapiens
gggcggaggagaagggttcctgagtccccaacccggtcccaggccctgggagccgcccctcgccccctcgggaatctagttctctttgccaaaccgccagcccgggcggagggctggggg

SEQ ID NO: 4078 - DNA, 120 bp, Homo sapiens
gggcgggggcgaagccgagcgcgctgacacacgcgcctggaattcccaggagagccggccgcggcctgtgacctcttctgctcttggccggccccagccagcggggccgaggggaggaca

SEQ ID NO: 4079 - DNA, 120 bp, Homo sapiens
ccacgggggtggggcgcacacccacctcgttcctcctgctggagcccgccctgtccgtgtccctccccctcccaggcagcctgcctggaggtagcagtaccctctgtgctccggacccag

SEQ ID NO: 4080 - DNA, 120 bp, Homo sapiens
gcccggggcagaccctgtccagctcctgccccagggccttgagcacattaccaaatgctctgtgcctgtttccccatctctgcaaagggtgctaacggccatctcagaatggctcgttga

SEQ ID NO: 4081 - DNA, 120 bp, Homo sapiens
ccacgtctactcaccagcccccagcccccaccactccccgcacagtgtcctccatcatgctgtgggttttggaggttcagagggcacccagctgggagctcgaggcaggctgagctgtac

SEQ ID NO: 4082 - DNA, 120 bp, Homo sapiens
gggcgtgcatgtcatgcaaggcagtgtgctgtgtgccctccacgtgtgaaggtgtgtgcctgtgtgtgagtgctggtgtgaacatgtgtgtgtaccctgtgctcatgcaagtgtgcatcg

SEQ ID NO: 4083 - DNA, 120 bp, Homo sapiens
gtgcgcgcacgcatactctgggcaatccactcctcgggtgtggtgttgtgtaaacagtggaggtctcagatgccagtccctggggacactgggcccccgccccaggtttggctggcccag

SEQ ID NO: 4084 - DNA, 120 bp, Homo sapiens
acacggacaccttgggcctggcctccacttctcccagcctggctgcccacactccccaccctagcagcgggcagtgtctggcgcaccagtcctgctccccctgctgccatcctccggggg

SEQ ID NO: 4085 - DNA, 120 bp, Homo sapiens
tcccgacttgcagcctcctggcgggaccaatgtcctctccaggcccttcctgcatggaccagcccccaggggcattgctccaagccagcagcccctctgccctggcctgcagccctccca

SEQ ID NO: 4086 - DNA, 120 bp, Homo sapiens
cagcgcctgctccaggcttgacctctccctcaccttctcctccttcagctcctatcacccaagggcacagaaaggcactgtcgcaccaccagggggcgccctgcctcaggggcgggctta

SEQ ID NO: 4087 - DNA, 120 bp, Homo sapiens
ttccgggcttcaggacaactcagccaggtggtcactgtgggcccactccccagatgaggaaacaggccagagaggaggatgccaccggccctggctcttgggagtgggaggtctgtgtct

SEQ ID NO: 4088 - DNA, 120 bp, Homo sapiens
ttccgtttccccacctgtacagtgggggtgggaaggcatcactgctggggctgagcatgggactacaggacagagcttggggccctggctccagcaggctggtctccagcccctgggagc

SEQ ID NO: 4089 - DNA, 120 bp, Homo sapiens
ctccgccagcaggtgaccctgcacccatgggtgggggtccacagggccaactcagccctgcacctgccagctgaggacaaactctcctggggagcttttgggctgtggccagaacaagcg

SEQ ID NO: 4090 - DNA, 120 bp, Homo sapiens
gagcggctgcctttctgctttctgctgtgtgcgtgtgtgagcatatctgtgtgtgccaggggcctgggctcggtgtgacccctagcaggtatgccccagctgtcaacaccctctccctcc

SEQ ID NO: 4091 - DNA, 120 bp, Homo sapiens
ggccgagtcccccagcccagagcgccccgggggtcgggagtgcccactgctttgagccacagaaacccaggccccaacctcctcaggacccccaggcctcctgggccaccaggatgcaaa

SEQ ID NO: 4092 - DNA, 120 bp, Homo sapiens
ccacggctcggccgagaggagggtgccgtccgctctgctcaggcactgggccgggtgccagcagcaccacgttcccacgctctatggtgccaatcttggcaccccagccctgccccaccc

SEQ ID NO: 4093 - DNA, 120 bp, Homo sapiens
caccgggaatgtggctgtggattccgccccctggggccacggattcctgtctcagtgggcgggggtggaggacggctttccaccctttgatccttgccagttccagggagcgaggccacg

SEQ ID NO: 4094 - DNA, 120 bp, Homo sapiens
aggcgagacagagctgactccctcagctcaggaaccccagctcccagggcctgggcctgctccccaggtgccccagaagctcctgcctcacctcttgccagctgggcacggggcctggtg

SEQ ID NO: 4095 - DNA, 120 bp, Homo sapiens
aatcgggcagagaccagcactgggcaatggcccagtccccaccttcagcctgtgatggccacagcaaccccttccctcacctccccagtctgccacagggcacagagtcccagcccctct

SEQ ID NO: 4096 - DNA, 120 bp, Homo sapiens
ctccgccagcctggcctcacatgctcaccctcctgccctagcaccccccattcggcagccacaactgccccacccagagactcctgggcgcctggtgctgttcaggacactggcctgctc

SEQ ID NO: 4097 - DNA, 120 bp, Homo sapiens
gcacgcggctcagaaccctcaaccctatgtgcttgtttcctgctcccccagcctctggagccggctgacagctaccccctcagtacaccttcatgcgtccccgacccctgttcaagcacc

SEQ ID NO: 4098 - DNA, 120 bp, Homo sapiens
ccacgtgggaggggcccagggccaggagtccagataaaggaggggcccaaggaaggatctcgcccgggctcctgagaggcaggaggatggctccactctgccagccgtcctgatctgcta

SEQ ID NO: 4099 - DNA, 120 bp, Homo sapiens
tagcgtcccctcccagaggcccgtggtgccctgtgggcctggaacttgccccaccccctctgccacatatggcccagggagaaggcgctaaaggtgagcgccggctgcagggcggaggac

SEQ ID NO: 4100 - DNA, 120 bp, Homo sapiens
ctgcggggccgagccacggagccacctggcttgcggggatccctgggacccagccttgttctactgcccacttgacgcggcgggcaccctccttcctggtgggtccttactcccaaccct

SEQ ID NO: 4101 - DNA, 120 bp, Homo sapiens
gggcgccttcctatgcagacagaggagaggggagtggtcaggctgggtcctcaaggtgcccagacaggggtgcgaggaggcaagtgctcaccggagcagccaggaacgctccctggagga

SEQ ID NO: 4102 - DNA, 120 bp, Homo sapiens
gcccggaagctccctggctgcaagagtggattcctgagcaaaagctccgcgggtggagaaagagagtatggcgggggccacgggggtccgagtcccgacacgcggctgcgcactcgctcc

SEQ ID NO: 4103 - DNA, 120 bp, Homo sapiens
caccgcgggcggggctggggccggaaacgcgcgcggcggcctcggattcctgcgcggtgggacaagcccgcgcctgcgcgccgcccggacagggcacgtcgcccgcgaggggggtggcgg

SEQ ID NO: 4104 - DNA, 120 bp, Homo sapiens
ggccgtgccaccctcctgatcaccgcaagcatggaccccccagcacgctgcgggtgggacaggcagggcccctgtggggtggcttgactggcctggagttggggacgaagtccccgggct

SEQ ID NO: 4105 - DNA, 120 bp, Homo sapiens
ccccgagggcttggttgggcgtcccggggtaggtggctgccgcggcgatgtgggcggcttgcgtgtggccgatcggggtcgctgctgagccccggagagcggagggtccaggctaggctg

SEQ ID NO: 4106 - DNA, 120 bp, Homo sapiens
gagcgagaggcgagggcggagccgcggaggtgtgggcggctttcgtggtccgagaggccccaggttcccggcagggcggggaaggctggggcggggccagagccggagccgcgaagccgc

SEQ ID NO: 4107 - DNA, 120 bp, Homo sapiens
ccgcgatggagagggcctggagggtgcgccaggagccggcgtcagggcctgcctccatctcctccaacccccaccccatttattcctgtaacaaatccctaccgggagctggcacagcag

SEQ ID NO: 4108 - DNA, 120 bp, Homo sapiens
gtgcgctggggacacacgagatgctcaccctccctgccctccaggagcttggactcagctgaggtctgcaggggccagcaggagcagggccgagggccctggtgggaaggtcgtggccca

SEQ ID NO: 4109 - DNA, 120 bp, Homo sapiens
atgcgcagggtctgcctgctccatccctgtttagcagctcctccaggatccaggccgcaggctcagctgaaggtccctaaaggggtgggtgggagccccccatgcccacctcagctggct

SEQ ID NO: 4110 - DNA, 120 bp, Homo sapiens
cttcgtggggattaagacacaagccaggatgaggcccgcacagagacccccaccaaacaagagaatccaagctgtgttcagagccttccagttgccgccttccggtgtgtgggcggtgat

SEQ ID NO: 4111 - DNA, 120 bp, Homo sapiens
taccgcctacggggggaggggctccctgtggagatgccacctctcctgtgctttggcctgggggcaggtactcgggtactcgagagagggaagccccaggacagagaagccccctgcccg

SEQ ID NO: 4112 - DNA, 120 bp, Homo sapiens
ctgcgcccactgccccactatggtgggggagggggtgctgggtgcctctgctgggcacttggccaagtggtgaacaagggagactccgcccctgcacaccctcaggagcccccagcccgg

SEQ ID NO: 4113 - DNA, 120 bp, Homo sapiens
ggccgccagagcgtggacgggcatgggtcagccagacctcacgatgtccatgagagcacccaggtcaggaaggtggccgcacctgcccttaggaaggagggggacataggaggcatcgga

SEQ ID NO: 4114 - DNA, 120 bp, Homo sapiens
cctcgcccctcatacatatttcacaaaacacatttgccccctgctgcaccttgctggggtgaggggctgagatcagtggcggccagggctccagccccaaccctcaccagaccaggctac

SEQ ID NO: 4115 - DNA, 120 bp, Homo sapiens
cctcgtcattgttctggggcccactggaccacagcaccctccagcctcccagagccacccgtcccccagcctggagggctcccactctgagcgctgggcggtgcccagcttgtatgcaga

SEQ ID NO: 4116 - DNA, 120 bp, Homo sapiens
ggacgggctgccaggggtttggacagagccggcgaggctccagagtaagctgtgcttccgctgggtcctgcagtgctaaatatagcagacggggaggggagtttccggttacaacccccc

SEQ ID NO: 4117 - DNA, 120 bp, Homo sapiens
tgccgggaaatcaatgccagctccattaggcccggcagcactgcctgctgacccaccccatcgggctgcggagcaaagtgaggggctggactacacccaggtccgggtgccctgtcacct

SEQ ID NO: 4118 - DNA, 120 bp, Homo sapiens
ctgcgagaggtccctctgaggtagtgggaggcctctgctggtcaacccggagggcccatcgcactctcgtggtgtcaccaggcaggctgctggtaagggcagcacagcaaggctgctgtg

SEQ ID NO: 4119 - DNA, 120 bp, Homo sapiens
acccgcacaccccatacctggcagcccctccctggcacacaccccatacctgacagcccctccccggcagccctgtcgctggccttgctgatgcccacagggccccacctgggccacagc

SEQ ID NO: 4120 - DNA, 120 bp, Homo sapiens
gagcggatcgatcctgccgcagactgatggcccagcagtgccctcgaatgcccacaaccagtgccaacacacccattcacctgcagaacccttactgtgcacctgtggcccaggaagcag

SEQ ID NO: 4121 - DNA, 120 bp, Homo sapiens
aggcgagctgggtcccctcctgcctcacaagcattctgggcacctggggagcagctctgagctgcacgcatctcccacagccccaccctcaggacaggtcagaaggcaaggccagggcat

SEQ ID NO: 4122 - DNA, 120 bp, Homo sapiens
gggcggcccaggctgaggccgtgccccgggaccaggaccgggctggcaccaggaacctggcccatgtcaagaccactggccttgtgtccccaccctgtgccgccacctgctcctcttgga

SEQ ID NO: 4123 - DNA, 120 bp, Homo sapiens
ggccgaggaaggtcccttggaaaacttccaaggctgggggtgcacggatcagctactggggcccccgacacagggcagctttggctccgggctcctgtggagtggctctagcccagcccc

SEQ ID NO: 4124 - DNA, 120 bp, Homo sapiens
aggcgtcctgggaggagagtaccggtttccaagggaagggagggccggcgtcccgcgcaggtcaggcagcccgagaggccgtggggtaccactcccgggaggcgaccccaggcctgcctg

SEQ ID NO: 4125 - DNA, 120 bp, Homo sapiens
ccccgaaccaccacccagccagggcaggctccagggaagccccctgcccacagcctgccatgtgcctgctgtgcccatgccccttccccaccactgcttccccccgagtaacatcacccc

SEQ ID NO: 4126 - DNA, 120 bp, Homo sapiens
aagcgtgtcagacccttaggtccagccaggtcaaggtgcagggaggtttagggaggctgctgaggcctgggagggaggggcagggctgggtgcaaagaagaccccatcgcctcggagcca

SEQ ID NO: 4127 - DNA, 120 bp, Homo sapiens
ccacgggggtcccctgcctttggtctgcctgacatcacaggcctcccctggctggacgcagcaaaaagctgagggctgcagctgcccctgggtggcagccagcgtccagcccaatgtccc

SEQ ID NO: 4128 - DNA, 120 bp, Homo sapiens
tgccgcccagcccgagcctacatccgtgtccaccacagccacagcccgaaccagctcagctctggtcaccagaacccttcagcagagctgtgccggcgggctgcccgctgaggctgcaag

SEQ ID NO: 4129 - DNA, 120 bp, Homo sapiens
tcacggggagtgagggagagagtgctgccaccagggccacagagggcacctgcctgggcctgcacctgctgcctgagacccagccctgtggggactgtgcagccacaagcaggcatccca

SEQ ID NO: 4130 - DNA, 120 bp, Homo sapiens
caacgtcagggaaaagggcagtgaccccatgtctccacctgctgtaccccgactgatcccagctgccccctgccagcaccaccagcttagcttcgccttggggagagggatcccctgtcc

SEQ ID NO: 4131 - DNA, 120 bp, Homo sapiens
cagcgccaacaggactcccgcaacagggaaagtgaggggcacagggcctctctcaggctgggggccaagagggcttctccaggatggcgaggggcagagtcctggatgtgatggggggga

SEQ ID NO: 4132 - DNA, 120 bp, Homo sapiens
ctgcgacctggaccacctgacctgataggctggggggctggactgactgtgaccaggaaggtggtctttgccttaatggcatgaaggagctctggcagaggggagatctgctgggggcag

SEQ ID NO: 4133 - DNA, 120 bp, Homo sapiens
agacggcccgggactcagtgatccactggatgtgggaaaaggatggcagcagctccttcacccaacacatatgcctcatgcctgtaatccccatgctttgggaagccaaggcaggaggat

SEQ ID NO: 4134 - DNA, 120 bp, Homo sapiens
tgccgtggcctggcatgggagaaggtgacaccctaggaggtggggaaggctgagcttaggcagatggagactccaaggaggtgccctccctggaaaaaaccccaaggaggaagcctgctt

SEQ ID NO: 4135 - DNA, 120 bp, Homo sapiens
ccccgcaggactctcgggctccacctcctgctcggcccagccgcattccccaaccacggcagggtctccccaagacagagcagccaaacaggcccacagcagggctgggggctgcaagcc

SEQ ID NO: 4136 - DNA, 120 bp, Homo sapiens
gaacgccttatggtcccttcctgggaagaggagggagggtgtggcaagtcagaggaggacacatctgccctcctctccccagcccaccctgtacatggggactccggaaaccaccgccag

SEQ ID NO: 4137 - DNA, 120 bp, Homo sapiens
tgccgcactcaggcccacccagcccctccttcgataggcccccagccctgctcctgccggcacccgccttgtggacgtgtgtcacctggggctggccgctggaccgaggcccccattcct

SEQ ID NO: 4138 - DNA, 120 bp, Homo sapiens
aggcgcccctgggtctcgaagggaaacggctcagcccagggccccagcaccaagtgagccccagcccccgttgcagagcaagcccacccggaaagcgctagcccagggaacaatgccctt

SEQ ID NO: 4139 - DNA, 120 bp, Homo sapiens
cttcgtgtgacagactttcccctctgtgagagaaaatagagttcagtagaatggcaacttcctgcatttgtgcctgtgcctgaaggggtgattcacgcacggacctcccacaaagacagc

SEQ ID NO: 4140 - DNA, 120 bp, Homo sapiens
caccgcgccccagccaacaccgccaggcccagtgtcccagagcctccccgctctgccagccccccggggccgggccagggcccactgcccttccagggagcccctgccttcttcctaggc

SEQ ID NO: 4141 - DNA, 120 bp, Homo sapiens
acacgcatcaacacagctggtgtaaatcacggagggcttcctgaggagccaggcacagggtgcttgggcactgaggggctgtggtgagggcaggctgtgggtgcccaggcagcaagggtg

SEQ ID NO: 4142 - DNA, 120 bp, Homo sapiens
ctgcgggtcctggaaagcatgtgctcctgagtgagcccagagcccatgggacatctgacctgccaggggacagtccttcatggtaaaggaaacttgagggcaccccaacatctttccctt

SEQ ID NO: 4143 - DNA, 120 bp, Homo sapiens
cagcggaggttcctgccaaccgaggcatagctcctctgcaccccgcccccagcttccgggagaatccacccagctccaaatcattgctctgagggcccagccgccgtcagtctctcccca

SEQ ID NO: 4144 - DNA, 120 bp, Homo sapiens
ccacgaggcagcctggaacccgcccccagaccactgcccttcctgggaccacttgcctcctggtctctcttgggcagagacccggccaaccaccctggggcctctggtcttcaaggttct

SEQ ID NO: 4145 - DNA, 120 bp, Homo sapiens
ccccgggggacacacatgccctcctctgccaccaggtgaagatggctgtgacgaggctgtgtgcagacatcctgacgcaggagccagtagacaatgcccagctgcccagcgctggccccg

SEQ ID NO: 4146 - DNA, 120 bp, Homo sapiens
catcgtgcccaggcagccccagctctgaggctcctcccacccaccacccagctctcttacctccatccttcccagcacccctgcgtcagtcaggctctccctgctgctgtgcctcctccc

SEQ ID NO: 4147 - DNA, 120 bp, Homo sapiens
aatcgcacctgcatgggatcctggtgtcctcttctcagaggacctgagctcacacaggagactcagattcagggccctgttccatttcctgggctgtgtgccctctggctccttatgcca

SEQ ID NO: 4148 - DNA, 120 bp, Homo sapiens
ccccggttcgtgccaggcccttcataaacacgtgctgctgcttgtagagtgcccactaagatctggcacctcctttcacctgtgtgaactcccccaggagcctcagaggcagggaagact

SEQ ID NO: 4149 - DNA, 120 bp, Homo sapiens
catcgagttcccgggaggagctgtaggtgggaatgctgaaagccatgtgcacgtggcccccaggcccaccgtgcccgtgagctggagggtgggggacctcctgtccacctggggcccact

SEQ ID NO: 4150 - DNA, 120 bp, Homo sapiens
acccggggcccgctgtactcatgagctggagggtggggggcctcctccccacctggggcccaccgtgcccgtgagctggagggtggggggcctcctctccaccagggaaggctgcctccg

SEQ ID NO: 4151 - DNA, 120 bp, Homo sapiens
aggcgaggctgtggcctgcaggtgctgaccctagctcagcctcagcccacagtgccgcctccacctgccaggttctgtggcacctgcagtccggccctgcactgccgcccaggaccccca

SEQ ID NO: 4152 - DNA, 120 bp, Homo sapiens
cagcggccaactcagctcaatgggtgggtggtcaaggctggagcagagccatgggggccagcccccgaggtgtgctggcggccgggttaggctggggtcattttcccaggctccaccaag

SEQ ID NO: 4153 - DNA, 120 bp, Homo sapiens
aggcgggtacctggcagacaacgttattgtccacagggaggcagcaatgactcagtcgggctggtgcagaggcccccggccgcaaaggaaaggagggtccccacatcgtctggcagagtg

SEQ ID NO: 4154 - DNA, 120 bp, Homo sapiens
gcccggcctcctatcccaatctcagtccagctagggcctcctgggcctctgtggtcccagctttgctgttaagtgggtacatgtaacgctccctccctgcctgtcagcgggcctgagctg

SEQ ID NO: 4155 - DNA, 120 bp, Homo sapiens
ctgcgggcacttccccaatcgaggccccccggactgctcaggagtgccccgaccccagctgtggctcctccctgtccagggtgagctggggtgtcagtcctgggggcatcagtgatggaa

SEQ ID NO: 4156 - DNA, 120 bp, Homo sapiens
agtcgggttgaggtcagggttgggtcccccagcctagcgcccctgacttcacagttccagccgtgctcattgtgtggggacaatggcttcctgagccaggttcctctccgggcaggaaaa

SEQ ID NO: 4157 - DNA, 120 bp, Homo sapiens
ctccgcccacggcccctttgaagggcctgggccagcctcaggcactgactgcagccttggggcctgcccccggcgccacctcttaccagcctagcccaggccccggtctccccagggacc

SEQ ID NO: 4158 - DNA, 120 bp, Homo sapiens
acacgtagtacaggctgcagggacagttactgacggcccaggaagccgccggccagaaccatgcaggcagtgggctcaacacagcatcagagcttggaaggacgcagagtcctgggcccg

SEQ ID NO: 4159 - DNA, 120 bp, Homo sapiens
ctccgtacaggctggagacggaggcaaccgacccccctcggtgcctcccaagaggccagggtacatctgcagggtggctgagccctgtgggggcggacagccaagggaccctggagggtg

SEQ ID NO: 4160 - DNA, 120 bp, Homo sapiens
aggcgcacctaggctggagagggcagagggtcctggcactcaaggcctgagaagggccatctgtcctcacacaagacaggggactcgaagcggggctgcctcagggcgtgtgcatgccct

SEQ ID NO: 4161 - DNA, 120 bp, Homo sapiens
agccgtctgttcaccttgctggtgaaggtcttagaccccaggcagaggaggctgggatgttcaggcctggggtgtgtccagggccccactaaggtctctggtgccaggactgggacaggg

SEQ ID NO: 4162 - DNA, 120 bp, Homo sapiens
ctccgagcctgtctccaccgtcttggccaaggggtcctcagaccctgaaagggaaggaccgaggaggaaggcgagaaggccttgctgtgtggggttgggggccaccagccaggcagggct

SEQ ID NO: 4163 - DNA, 120 bp, Homo sapiens
cttcgtggcctccggattcaccagatggggtgcaaggtgggcttcatcacccgggaaaaggccaagtgtcccaagaacataaatgtccgcttccagatggtgccgcccgtggccgccagg

SEQ ID NO: 4164 - DNA, 120 bp, Homo sapiens
gggcgggccagccgagtctcccggacacactgggcaggccggtcccgcaggagcctggatcccgggtgcccatccctcagcgggtccacgtcagcctgctgtgtctcgctaccacctcca

SEQ ID NO: 4165 - DNA, 120 bp, Homo sapiens
gggcggcccccacccaccatcacccagctgtgggggctgggaagggcgtgctccacactcctttgcccgactccctcaaaccaggggagcgggtggcagtccctggtggcagactcagac

SEQ ID NO: 4166 - DNA, 120 bp, Homo sapiens
ccccgcagcttcccccacacagtgagtggggtccacggggcctcctgggcctgcaggtcacaaccttcactgacactcacccctaattagggagcatgtatgttccaattttcatttctt

SEQ ID NO: 4167 - DNA, 120 bp, Homo sapiens
gcacgcgtctgcaccgacactactctttgcaatttgtataggtctgaggcacgaccaactctagtaaagataccgcgagtttttgggaaaatacagactacattctctgtggagaacaaa

SEQ ID NO: 4168 - DNA, 120 bp, Homo sapiens
cagcgcagccccagcccccacctggaggaactgtaaacgtgtgtgccaggaagccctgaaacagacaaaacaaaaaactgacaaaactgtgggtaggacaggacggatccagtcactgtg

SEQ ID NO: 4169 - DNA, 120 bp, Homo sapiens
tctcggtggcagacacagagaaccagccagtggagaggaagagggatgtgctgcgctgcacccgcttcctgcaggaaacgcattcaagcgcccaacacacatgcacgtccacaaaactgg

SEQ ID NO: 4170 - DNA, 120 bp, Homo sapiens
acccggccacggctcgaagcatttccgaagactgaaatcacacagagggtgctctctactgcagaagaatcacaccggcagtcaggaagaaaggcgctgactatactcctctactagtaa

SEQ ID NO: 4171 - DNA, 120 bp, Homo sapiens
aagcgtaaggatccatccactctgctgtgagggatcatcgcaagcccaactacccctgccagcctaggtgtgtcggtgctggccacccgtcggcagcagcagccaggagcagaggcaggt

SEQ ID NO: 4172 - DNA, 120 bp, Homo sapiens
gcccggcctcctggagatggcccaggagaaaacagccagggtgacgtgctgtccacaagagatgttctacctgtcccgaccaccttccagcatccacactaaggctgcaggacatggctg

SEQ ID NO: 4173 - DNA, 120 bp, Homo sapiens
caccgatcacaagaatccctcacgtggtcctcaggttcctgagagtgtactcaatgaaacagtgaagccaaagagatcctagcacaaagtatccctgcctggactgacccacggccaacc

SEQ ID NO: 4174 - DNA, 120 bp, Homo sapiens
gggcgacagattgagaacctgtctcaaagaaaaaagaaacaagaaaaaagaaaaaacgtggctggagggagcttgtctgctgcttcccccatgtgaggatgcaggaagagggcactgtct

SEQ ID NO: 4175 - DNA, 120 bp, Homo sapiens
acacggcatctgccagcaccgtcctgtgaaatgaatagtggtttataagccacttggactgtggtggtttgccattgcagtgtgaaccaactgaggcagggagtaacgctccccacgtga

SEQ ID NO: 4176 - DNA, 120 bp, Homo sapiens
atgcggagaactgccctggggaccggttaggtgccccatgctgcaagcgccccaggaagcttggaaacatttaggactgactgacaagctcaaagagtcaagcaagggcggccaaggggc

SEQ ID NO: 4177 - DNA, 120 bp, Homo sapiens
ccccggggttgattccaggcctcactctcagcagttgagctgctctaagggtgaccgtgggaactgtccacaggtgcggctgcgggtgcagcgatctcagcggtcttagagctcttggcc

SEQ ID NO: 4178 - DNA, 120 bp, Homo sapiens
gggcgtgtgctggttgtacgatgctggggtggtgtgtgctcctcccacaggtccaggcagggcgtccctggctttgacttccagctttgctgtaagaggtcagcggccgtgacaggctgg

SEQ ID NO: 4179 - DNA, 120 bp, Homo sapiens
agacgtctgggtggctttgtggtcatgtcatcgttgccaacggtcgtctcatggtgggtcctggtgtgggttctcttgtgattgcctgagtcggggttactagacttgctgactttgtgg

SEQ ID NO: 4180 - DNA, 120 bp, Homo sapiens
gatcgatgattttcatgagtcccgggaagctctcagccactttttcttctgctgttggttctgcgctattctctctctcacctctggagcaacaattggacgtgttgctcttcctgccgg

SEQ ID NO: 4181 - DNA, 120 bp, Homo sapiens
gggcggcggctggctggggcagtagcctgtctccagcccttccccctgcctctgtccacgtgcaggggcgtctcctcaggacgcatgttgcctactgaccgctgccagcctgcacgagac

SEQ ID NO: 4182 - DNA, 120 bp, Homo sapiens
tcacggcgggaccctgtctgccttgctcggtgctgcccagagcctgcacagtgtagctccttggcggacgttcctgtaatggaaccaggatgtcatgccaaggagtgtggtttcattttg

SEQ ID NO: 4183 - DNA, 120 bp, Homo sapiens
agtcgctggactatttcaagtgtgtgtatttgggagagcagtgctgctggagtggtggaccacactggaggtggagattgcctcagggtgtgcaggtggagatgggtgggaggtgtcgtg

SEQ ID NO: 4184 - DNA, 120 bp, Homo sapiens
tttcggaggtggtctgcagtgatccagggaagatgggctgctctgagggaggggctgaggaagctgacctgggcagccagtggcctgtaggctgggcagcactcgagctggggccaaggg

SEQ ID NO: 4185 - DNA, 120 bp, Homo sapiens
ggacggtgcccgtagccctggaggccttggggattcggaggacctggcccatcgccgtggcctgcacggtgcgtgcacaccgctctgtccgcgcaggctgtgccctgctttcaagatgcc

SEQ ID NO: 4186 - DNA, 120 bp, Homo sapiens
atgcgtctcaggaaggtttgatggagtgggcagctgcggtgctgtggcggggtcggggggctgctgcagagagcgggtctgcggtcagtcacagtgacgggggtctctttggaccctgtg

SEQ ID NO: 4187 - DNA, 120 bp, Homo sapiens
tggcgttgccgagacagggtgctcaggtgcaggtgggaaggggtggcaggatggaggttgtacagtgctttccccaggaccagggggcagggtgtggcgtgcttattcctgcctggccgt

SEQ ID NO: 4188 - DNA, 120 bp, Homo sapiens
tcccgctgagggcagccctgaggcctgtgagctgctggccccgcagggtggctgggcctggctggctcagcagctgctctgagaggcagccctaaaaatagccgagcgctgagaggccgt

SEQ ID NO: 4189 - DNA, 120 bp, Homo sapiens
ctccgcaggcgcgcgccgatgtgtgctcagctcaggccgacttagcagggttgtgagagtgatgagagcgtggctgctggtcatggtgctggggtcgtcagcagctcctcgagggctccg

SEQ ID NO: 4190 - DNA, 120 bp, Homo sapiens
ggccggtggcgccccgtctcaccccacggatggggggcaggctctccaggagccccagggagcactggctactgctgggctgctctcaggcccgggacattcatggccgtagccccaggt

SEQ ID NO: 4191 - DNA, 120 bp, Homo sapiens
tgccgctcaacagaggagtcaggacccaaaaggggcagaaatgggcaagggaagacactggggaaggggtgggtctgcccttcctgctgggggtgcacacgggcctggggctgagcaacc

SEQ ID NO: 4192 - DNA, 120 bp, Homo sapiens
acccgctctgggcctggctgttccgctccactgccccaaccagcctttcctcagcaccccctggccaagctgtgggcaccccctgcccccggacacaggcagcacctggccaagtgcaga

SEQ ID NO: 4193 - DNA, 120 bp, Homo sapiens
cttcgcctgtgtcccagccctgagggcaccgtcgtagggtggtgggacgggggggggctcggacacagtggttgtggaggggtcagtgctgtggctcggggtggggtggggctgggggag

SEQ ID NO: 4194 - DNA, 120 bp, Homo sapiens
tagcggctctcttcaggggttcagcaaggagacagatgggttctaatgacccctgagtcctgagacaaggtggggtgagctggagcaggggaggggacttggaagggccttcagtcccca

SEQ ID NO: 4195 - DNA, 120 bp, Homo sapiens
tttcgggccaacatcctgggccttgcttggcagaggagtttgggatccacgggcttgaggcccaggtggtcagctcgctcggtgcaatgctgtgtctcgcatttctgtctctcgactgcc

SEQ ID NO: 4196 - DNA, 120 bp, Homo sapiens
gcccgtgtcctaagagcagctggcagcagccgccacgcacaggcagctcagctcagcagccccaggagccaggtgtgtcttgagctgggcagcaaagtggccatgcagtccagcctccct

SEQ ID NO: 4197 - DNA, 120 bp, Homo sapiens
cagcgaggcagacctgcagatgcacatccctcttctcaaatgctgttcttgttctggtgagcacggggaacggcaccaagccaatgctgatgggaagggccctgaccttgggctgctgtc

SEQ ID NO: 4198 - DNA, 120 bp, Homo sapiens
ctgcgagcttggcccctctgctgggcccctcctccatgcctttgtttactctccaaccttctgggagtcccacatctgcatcaggacagaggtgaccagggaccagttgacagctaggat

SEQ ID NO: 4199 - DNA, 120 bp, Homo sapiens
gctcgtgcaggtgtctccagggccgcctcgagaccagcgcccgcctccctggtcctggatacaggtggggcgggggctcccccgcagcagtggagttgagacccgcacctgcttcctggt

SEQ ID NO: 4200 - DNA, 120 bp, Homo sapiens
acacgggtggggcgggggctccgcagcagcagtggagttgaggcttccgtatgagctcgctcctggtcagtttgagggtggacataccagacatcctgcatcttcccagtcgccccagga

SEQ ID NO: 4201 - DNA, 120 bp, Homo sapiens
gagcgcctcaggagggtgagtggcaggaggccgatgccctgctagcaggcagtccctcggggccaggccttcctggtgcggtgctgaattgggctgttcgttcctctgagcaccaaggag

SEQ ID NO: 4202 - DNA, 120 bp, Homo sapiens
tggcggctcaggcttcaggcagtgcccgccggtgcctctagaaggtgctccgtggtggggcccgggagggtggcccttccacattctcgggctgcctgtgtgccacccaagtgtcaggtc

SEQ ID NO: 4203 - DNA, 120 bp, Homo sapiens
cctcggtctggcctagggctctccttcctcccccacctcaagcctggggtgtggcctagccagggaggggagcgggagctctggccgtgaagacccaccctgaggtctgggctctcctgg

SEQ ID NO: 4204 - DNA, 120 bp, Homo sapiens
gagcgtgctttctgctatgagctccacgttcaccctgcggccaggactctactgttcctcctggtgggagctgctgtggtgccctgggtggcctccagtcaccgccagcctgccccttgc

SEQ ID NO: 4205 - DNA, 120 bp, Homo sapiens
cttcggctcctgcagtttccagcttggccctggacttcctgtttttcccacctagctggacgtaaaggttgtcgcgccttggaaagttaagtcactacacccgaatcgacgcactcttgg

SEQ ID NO: 4206 - DNA, 120 bp, Homo sapiens
gctcgcctggctatggcttcagctggaaacggagctgagcgtggcttatgtttataaatacagcacctatcaggtccagcgtcgctgtctcctgcgggaggtgtcagctttgggcgtgaa

SEQ ID NO: 4207 - DNA, 120 bp, Homo sapiens
ggccggcgtgcctgacctggccacacagagcgagcctcagaagcgagggggaaggagggcaggccttggggaggggtccaggaaggtcgagaggctgcagtggtggtagcctgaggggat

SEQ ID NO: 4208 - DNA, 120 bp, Homo sapiens
gtgcgcggccaggtcagtgcctgccgctactgcctgctgcgctgactgcctgagcactggggatcgtgggcctgaggggcggggaccttggctcccgtggatagctcctgcaccatcctc

SEQ ID NO: 4209 - DNA, 120 bp, Homo sapiens
cctcggcaagtggtgacagggggctggggtggagttgttctcctgccgtggtcctgtcaaatggtgctgggggcggggccaggaatcacagcaggtgtctgccgctagcgctcggagcct

SEQ ID NO: 4210 - DNA, 120 bp, Homo sapiens
tgccgcttgctcactgtacttgcctggggaggatgtggcaggggcagaggacagctggccaggctcttggactgcacctgactctggtgggctatcgaaggttttggaggtttctttaat

SEQ ID NO: 4211 - DNA, 120 bp, Homo sapiens
ttgcgactgtggctcgagcggttccctgccagggagcaggaccattgacagccgagccttgactcaccggcccaggccacccgaggggccattgacaactgagccttggctcaccggccc

SEQ ID NO: 4212 - DNA, 120 bp, Homo sapiens
acccgatggaccattgacagccgagccttggctcaccggcccaggccacccgaggggccattgacaactgagccttggctcaccggcccaggccacccgaggggccattgacagccgagc

SEQ ID NO: 4213 - DNA, 120 bp, Homo sapiens
caccggcccaggccacccgaggtttcactgcggattctatcagaacagtgcctccccccaggattcgtcaaccttcagtggaccaggccctgcagtggttccagttattccctgggaaaa

SEQ ID NO: 4214 - DNA, 120 bp, Homo sapiens
gcacggagaagagaggggtgcagttcttaaaggacacatggcttatgccacaccccctgccccaacccccggagtggccagctttcctttgactggggaggaggcagctgtccagggttg

SEQ ID NO: 4215 - DNA, 120 bp, Homo sapiens
cttcggctctcaggagaggagggagctcaggctgtggctgctctgtgagttggacacggacgctccagccgctgggcccagcagtgtgaatggccatagagaacaggggcccagaggctg

SEQ ID NO: 4216 - DNA, 120 bp, Homo sapiens
tctcgaggacactggcagcagttgtgctctgggctcgccatccttgaagctggaatattccacaagtgccacgcacttgctggaggtactgcctgggggtagactgtggccaggccctcc

SEQ ID NO: 4217 - DNA, 120 bp, Homo sapiens
gcccgagtcttggcgcgtgggctggactcccacactcagcacctttctgctgacctgaacacccagggcacagtggcagcggcgtcattaggatttccaactagctgtttctgttaagag

SEQ ID NO: 4218 - DNA, 120 bp, Homo sapiens
tcacgaggcagggcggcgtcctctctcagtgccactgtgacctggcagcacctcttttgcatattattgacctagagagagaggtcaattgtaattcggagctgcacagtcggaaaattt

SEQ ID NO: 4219 - DNA, 120 bp, Homo sapiens
aggcgctctaggcattcgatgaatcttctccaccttgctgtggggttaattcaggggagcagtggggagtgtgctgggagtgagattagagggaggactccctggaggctggccctgcgc

SEQ ID NO: 4220 - DNA, 120 bp, Homo sapiens
gagcgagggtgtgtacgggagcaggatgggctgcacagaagcctttccgggggtgcctgtggtttgcaggggcctggctgcagctgccctgtgtgatctctgtccccgtcttctcccggc

SEQ ID NO: 4221 - DNA, 120 bp, Homo sapiens
gaccgctctggtgtcagccaagtggcgggcaccttctgggcttgggggcggggcttctcacgatggctcagggaggtccagacagcccccttgtctaggtgcgcacctggagtcctttcc

SEQ ID NO: 4222 - DNA, 120 bp, Homo sapiens
ctgcgtgacttgcaaacaggccttgcagggctctagtgtatcagctcccggactgcaggcagcagcaaactctgccgtgtggtactgcttctcatggacaggagaccaccaggctccttc

SEQ ID NO: 4223 - DNA, 120 bp, Homo sapiens
cagcgggagcatccaggcctggaactcgagctgtggtgtggtggtgccagcccaggagccaagcacagccaggagatgaaacccatccctgtggtctgcacgtccatgccagggccgagc

SEQ ID NO: 4224 - DNA, 120 bp, Homo sapiens
ctccgagaagcctggggtccatgtgtgggaaggaacggggacagggagcctccgagaagcctggggtccgtgtgtgggaaggaacggggacagggagcctccgagaagcctggggtccgt

SEQ ID NO: 4225 - DNA, 120 bp, Homo sapiens
ggacggaacggggacagggagcctccgagaagcctggggtccgtgtgtgggacggaacggggacagggagcctccgagaagcctggggtccgtgtgtgggacggaatggggacaggagcc

SEQ ID NO: 4226 - DNA, 120 bp, Homo sapiens
ctccgagaagcctggggtccgtgtgtgggaaggaacggggacaggagcctccaagaagcctggggtccgtgtgtccgtaggaacgggggacaggaggttgtgaagggcgtgtgggttccg

SEQ ID NO: 4227 - DNA, 120 bp, Homo sapiens
agacgaggtcacacaggggaaggttactgtgccgcagagttttctttccgagcactcaatgctcacctcctgggagggagtggggccgcagccagccctgacccagctgggtgtgtggcc

SEQ ID NO: 4228 - DNA, 120 bp, Homo sapiens
ggccgctctctggacccccggtcccagggtggcagctagtgcagcctaggccacaccagcatgacccctcgcccctgtctccacggagcaccgtgggactctggcatcagaatcctgggg

SEQ ID NO: 4229 - DNA, 120 bp, Homo sapiens
ccacgcatttcctgtcttttctcaggcaatcgccatggtacccagggctggccttgtttcagcttcctgacgagtgccctgtggtcagtcatttctgtcctcgcctttacctcaaatcct

SEQ ID NO: 4230 - DNA, 120 bp, Homo sapiens
gtgcgttcccaattccatctctgtgccagctgtgccccatgcagcctctaccggcatctcacgtgatgtcaaccttctgggtccttggggcctagccttgctctggtgaacggctttgtt

SEQ ID NO: 4231 - DNA, 120 bp, Homo sapiens
gtgcgatgatatagttgcatgtattcctgtcattttgatcattttgattgtgtttattacgtatttcctctcctaagttttgttatttcctcctcggaaattaaggaaggatcaagactg

SEQ ID NO: 4232 - DNA, 120 bp, Homo sapiens
gctcgagtcatcctcccatttcagcctcctaaagtgctgggattaacaggcacgaaccattgtgcctggcctgagttttatgtattacccactccaggaaatcactgtagtccttttaac

SEQ ID NO: 4233 - DNA, 120 bp, Homo sapiens
tggcgtttttgtccccctcatacttggtgatcacagagttcttctaggttgacagttttgtctcctcggtactttgacgattgttttattgtcttctggcctctgttgtggttttgagga

SEQ ID NO: 4234 - DNA, 120 bp, Homo sapiens
ctgcgatcagcctgctccttgttccttgtgggacacatgtgtgatctgtggttgcttttagcgtttttattttgatttggtgcggatttgttatcaacattgcttttgatcctccttggg

SEQ ID NO: 4235 - DNA, 120 bp, Homo sapiens
tgccgtggggctgcctgtgcctctgtgcctgcttctccttccatggggagcccctcccagcccctcactggcgctgggaagcacagtggtcctcccctctgtgggctgtgttgagaaatg

SEQ ID NO: 4236 - DNA, 120 bp, Homo sapiens
acacggagcacgggggttttgcctggtgcccgtgatatcagtggggagtgagaggagcaggtggccccctcggctgtgttcagggtgtgcctgtgtggccgaccacctccaggactgagg

SEQ ID NO: 4237 - DNA, 120 bp, Homo sapiens
gctcggtgcctggggctgagttgggaaggtttggtgtctgacccacttcttcccaagtgggagctccctcctcgggcactgcatggcttctctgcggggcctctgcctggtcctctcgtg

SEQ ID NO: 4238 - DNA, 120 bp, Homo sapiens
gggcggtccaagacctggagcccaggaggtggattctgaggtctgagtcccccgcaggacagcagttccatcctctggtccctctcctgcccccaggggccagtaggttacagacacctt

SEQ ID NO: 4239 - DNA, 120 bp, Homo sapiens
caccgccatcgtccccccacttttttgtgggggtgcccaatctgtgctctgccccctccccaggctccgctcctgtgggctgcgtcgtggtttctcctctctgtgggacgtgtgctgggc

SEQ ID NO: 4240 - DNA, 120 bp, Homo sapiens
gaccgagcctgggcccatgtagaccaactggcgtgggtgtgagagagagagacgcatacccactcaggcacatacacgtgcacacacacacccatgcacgcgtgtgcacacacaccctgg

SEQ ID NO: 4241 - DNA, 120 bp, Homo sapiens
agccgtgccctgtgcagagcaggtgctggttctgccctcccctggcctgccccaggcggggacactacactgggaagctgccccgttgcaggcgttcccatggcgccactgctgtgttag

SEQ ID NO: 4242 - DNA, 120 bp, Homo sapiens
ggccggccagtcctggggtgctggacagaccctcctggaagccagtccctggccgtcctgtcctgctgggggcacagtgtctcggcagaaggttctggctgctccctggggtgctggctt

SEQ ID NO: 4243 - DNA, 120 bp, Homo sapiens
ggccggggaaggtgggaatggggagttggggttgaatgggtagtttcagttgcgcaaggtgaagagagttctcgggatggatggcggtgagggctgcacaacagcatccacgcacgtagt

SEQ ID NO: 4244 - DNA, 120 bp, Homo sapiens
aaacggcaagttttacgttatatttaccacaataaaaaagagaaatagacatcgtcaagctgttctccaaaataaggctgtcaccgtttaccttcctaccagaaaaaaacagttaagtcc

SEQ ID NO: 4245 - DNA, 120 bp, Homo sapiens
gcccgtggctatgcctccctgggcttaggtggcaaccctgcgaggagcttgggcctctcgtcttttgggttcctgttcaaaatgggaagtggtctccaaaccccagggcccacctgagcc

SEQ ID NO: 4246 - DNA, 120 bp, Homo sapiens
ggccgcccaggcagtcatacacaggctgtacccatccagtgctcccgttgcctgggggcagggatgtgtgctggaagggcctgggactgccttcccaccgccatgtccacacccaatgcc

SEQ ID NO: 4247 - DNA, 120 bp, Homo sapiens
agacggaagcacgtggcggccactgtggcactggtgggtggctgcgttccatggcctgactgtgtctggcgcctgttctggtgttttacattcatactttgagggccaagcaccagccca

SEQ ID NO: 4248 - DNA, 120 bp, Homo sapiens
agccgggcagggcagacagtgccatccctatctggatggtggtgccttcacccttctgctgtcctgagcaagaagaaaaatgagccaagcttcaaagagagctgtgccaaagtttccgga

SEQ ID NO: 4249 - DNA, 120 bp, Homo sapiens
tggcgcgtgtacggcagatgccccggggagatggcatgttcacacggggcagcactaggcagagtggagggtagggtctacacccctccactcctcagcaacagagccctggacactggg

SEQ ID NO: 4250 - DNA, 120 bp, Homo sapiens
ggccgtggaatctgttttgtgatcgcgttaacttcagcaggagccgctcctggtttctctctcatgtcttagggcagattcctggaggtggaacctgtgggccgaagggtctccatgttt

SEQ ID NO: 4251 - DNA, 120 bp, Homo sapiens
tcacggtgtctttgcctggtttcctgctgatatgcagtcctttgagctagaacaggtcttgcttaatcacagggctccaaacgaatcctgcggtcccatgagattgtgctgccccccagt

SEQ ID NO: 4252 - DNA, 120 bp, Homo sapiens
gctcgtccatttctgggatggcagcggaagcaggcactacacacgcagcttcagggggctctccccatgcttcctagctgcctggcactttctggtgtttctggctaactttctggccat

SEQ ID NO: 4253 - DNA, 120 bp, Homo sapiens
agacgctgcctgtctgtcattgcccctctcctgcacctggccgctggctggctgctcttccctcccaatcaccagcaagccagctcctgttccctgcagcccagcccgcaggatgtgtcc

SEQ ID NO: 4254 - DNA, 120 bp, Homo sapiens
caccgccctgcagctcgggttcctggccctgtgctaaccctggtggggctttccttactggtctgctctgcagccatgacattgtggccaccgctctccttgggacccccacctggcttt

SEQ ID NO: 4255 - DNA, 120 bp, Homo sapiens
gcgtggcggcccctctgcagggcgttcctatgaactgagagcccagctgcagggagcaggcgtcatgggtgatgggtctgccgctggtccagggactcagagcgcggccccactcttgcc

SEQ ID NO: 4256 - DNA, 120 bp, Homo sapiens
tggcggctgggccttgcggtgattctgcagggcccacaccccccggggttgtgtcaatctccgtttctcctgcttctctgtgagctcatggcagccagggtgaggcccccagctgatccc

SEQ ID NO: 4257 - DNA, 120 bp, Homo sapiens
ccacgtcactgcctccacccagcccctgctggggcgtccagcccacagtgcaggcctcagggtggagggtagacacccgccaggctgcactgtggcccctgtggcagagaagccctcccc

SEQ ID NO: 4258 - DNA, 120 bp, Homo sapiens
ccccggcagggctgtgagcatgaagcctttctcaggacagaatgacagggagaggggaacgtccctcctcagaggagggcgtgggggccctggagaccacagccaagagtgggagtgagg

SEQ ID NO: 4259 - DNA, 120 bp, Homo sapiens
tcacgcttaggggtgtatccagggtctgagggagggttcagagtgtgaggggtgcagggtacactagccagccccacctcctgcctgggtgtttctgcctgttgagggtcttctgaggag

SEQ ID NO: 4260 - DNA, 120 bp, Homo sapiens
cctcgcccgcatctccgacaggctgcaccacagagccctgttctgctgaccgggacgctggtgaaatgggagtttcggagccgctgtgggctcctgtccaggctgggtcagtgctcggat

SEQ ID NO: 4261 - DNA, 120 bp, Homo sapiens
gggcgggcgtgaacaaaagccagcctctggtctggggctggtgtgtgggcctctgggccctggtgatgtctgagttcagggtgcagtttgctcgtgggtccccagaagtgggagcgagtg

SEQ ID NO: 4262 - DNA, 120 bp, Homo sapiens
ggtcggccctgccctgttctatggaccgggaggaggtgaggctcagccgccagacaccccaggcttttgaggcccagatagggccggcccagaacaggcccagcatggctgctcccagcc

SEQ ID NO: 4263 - DNA, 120 bp, Homo sapiens
tggcgcctgggagggcccagaggagccaggacttcctgcaggcaccacaagggggccgcagagagcgagcagcccggctggctgtggtcccatctggggaccttgggctcagagagccgg

SEQ ID NO: 4264 - DNA, 120 bp, Homo sapiens
gggcgctgagcgggatgagtggcccactggcggccggtgctgagcgtgcgaggggcggtggggagcaccactgcacgcccccattttgggtgttataagaaccctacttgggttcctagc

SEQ ID NO: 4265 - DNA, 120 bp, Homo sapiens
ggccggtgcccggccccggtctcatctggacagcctgttctgggaagccccagtggagtgggggcaggggtggcctctggacaggggccctccacagccaggcttgtctgggctcttccc

SEQ ID NO: 4266 - DNA, 120 bp, Homo sapiens
ggacgtcgaggcccagatgatcttcaaccgggtggtcttcacgccccaccgggaggcctgcggcccccgttctgccctgccccctggcggcacagccctcggtccgggccctgggcaggg

SEQ ID NO: 4267 - DNA, 120 bp, Homo sapiens
ggccgccaccctgtgctgaccgtgctgccgggtgctgtctgtctgttatatagccctgtcagtctgctataaggccggaccgggggcggacaacggcgaggaaggtaagagccggcctcc

SEQ ID NO: 4268 - DNA, 120 bp, Homo sapiens
ctccgcaaggagggcgtcctcctgtctgtgtccctgggctgggggcggcagcgccgctgagggacagagtttgggcgggccgcctgcatgcctgtgccctgcgcccggccggcccggctg

SEQ ID NO: 4269 - DNA, 120 bp, Homo sapiens
gagcgcacccctactctggaaaccttatctctgaggtctcagaatgggggatgaggagggctccaatgggcccctgtggaatgtcctatcagaccccaggacttagccccagtcggggga

SEQ ID NO: 4270 - DNA, 120 bp, Homo sapiens
gggcgccaggaggagggcaagcaggatgtggccttgggctgggtgtgctggtgtggggctctctggagtgtggcctctgtgccagacgcctgtgccttggccgtcctacagccctgctgc

SEQ ID NO: 4271 - DNA, 120 bp, Homo sapiens
aggcggcttctcttcctctaagtgcaggcctcgaggtgccgacaggggtgcggtaggattcagggaaagtgaggttgggatcacaggtgcagttagggctcagggcccgacagcggtagg

SEQ ID NO: 4272 - DNA, 120 bp, Homo sapiens
tcccgttctgcttgctacacccggaccacccgggggcacggcgctttctaggcaggcctgcccccggcgaccggggctctgtggtcccaggcagatcctgagccctggatagcatagacc

SEQ ID NO: 4273 - DNA, 120 bp, Homo sapiens
ggccgcttcctcgcaccctgctgctggccttccatcctcatccttctttctgggggtctgcccgcccgtcatcactggcttcttcctcttggctggcttggtttcaggggatagggcagg

SEQ ID NO: 4274 - DNA, 120 bp, Homo sapiens
aggcgtgagccaaccacttgggctgggctctgtactgtcctgagtgacgggctggcactgtcctgctccaggtgcatatggccgggcaggagggcagaggctcagggctggtgtgacctc

SEQ ID NO: 4275 - DNA, 120 bp, Homo sapiens
aggcggatggcctggctcctggcccctagtcttgtgtctgctggggcttcctgctcgtagcaagggcctgtgggttccagctctgcagcccaagcctgggggattgcatgcctcactcat

SEQ ID NO: 4276 - DNA, 120 bp, Homo sapiens
tgacgcctgcctggcccctggtgccagctggacctgtgtccctggctgaagccgggctggcgcccacccagtcagcctgcactggcgttggcagtgctgaggcagcatccgggcgtcctg

SEQ ID NO: 4277 - DNA, 120 bp, Homo sapiens
aggcggctcagcgaagcccaggcttctggcccctgggacccctgggttggggcagaggagaggctgccctggccccaggctgctcctgcccagtgcctctgtgggaccaccctctgtggt

SEQ ID NO: 4278 - DNA, 120 bp, Homo sapiens
ccccgccctctccccgaagctgtgtgcggcactggccaggtggactggggccatggctggcttccttccaaggtttctggagcgggagctgcccaaaacctggacctggcctacccaaag

SEQ ID NO: 4279 - DNA, 120 bp, Homo sapiens
tgccgggtgactgggcagcacccttggatcctggtggggcctcagcctgcagcctgctctccccttttagggcggtaagtcggggaggctggcagggaagtggagaccgcaggacttggg

SEQ ID NO: 4280 - DNA, 120 bp, Homo sapiens
tggcgagggggtgtgtttgctcctcctctcctgcctgctcccacccctggcccttaccttcttgggaactgtggtgattgccttctgtcaggtgtgttgaagcggccgtacccatggtgg

SEQ ID NO: 4281 - DNA, 120 bp, Homo sapiens
tggcgtgctggggtgggcaggtgggctgcagccccggcaccagcctgctccagctcccacaccgcccacagacctccctgtcctcatattctctgaccgcaggcctgcctgcctctgctc

SEQ ID NO: 4282 - DNA, 120 bp, Homo sapiens
ctccgccccagaggggctgggttggacctggtgttcaaggccattcctatctgccccccagcccactgctggagccccaggcccctgcagcctgctccacactctgggttcccgggggaa

SEQ ID NO: 4283 - DNA, 120 bp, Homo sapiens
ccccgggcccagggtcactggtacagatagcccatgagcgaacctgggaggccttccgtgtgtgggcagagcagctgctgtgtcctggccattctccagccgcctgtctgtgggcactgt

SEQ ID NO: 4284 - DNA, 120 bp, Homo sapiens
aaacgcgtccgttccgtttccttcctggcggcgggaacgaggcccgggtgctctggcgaggcagcagcgccctctggaggcctcgctgtggttcgcggccgccggttcgcgcatgggcgc

SEQ ID NO: 4285 - DNA, 120 bp, Homo sapiens
aggcgtgcgcgatgcctcggggccccggcgcggagaccgcgcctggtgggaagcacgcggggtgcggggggcggggggtgttgggggaggccgctccagcccgcaccctgatcttgtctc

SEQ ID NO: 4286 - DNA, 120 bp, Homo sapiens
gcacgtgcccagctcacagaggggacctctgaggcggggtgtggtgggcacacagcagtgagccatgaggctggtggcccagaggcttggacatgccgtgggccccataggaagtgacag

SEQ ID NO: 4287 - DNA, 120 bp, Homo sapiens
ctgcgtgaaaggagagctgcaaaaggacaacttgacccagagagagtcgccctcaccagggccctcctcccggcttcactgggtctctggatgggccagttgcacaaatacaagaagatc

SEQ ID NO: 4288 - DNA, 120 bp, Homo sapiens
actcgttcattccccaatatacattgagcacctactatatgggacactgcatttggtattataagaagtacaaatgtgcataacaaagcctctactcttaagaagatggtggacattcag

SEQ ID NO: 4289 - DNA, 120 bp, Homo sapiens
ccccgagtcccgtggaaaatgaggccggcggacttgctgcagctggtgctgctgctcgacctgcccagggacctgggcggaatggggtgttcgtctccaccctgcgagtgccatcaggag

SEQ ID NO: 4290 - DNA, 120 bp, Homo sapiens
caacgcatccccagcttaccgcccagtacgcagactctgtgagtacccgggagagatcagggtaggacccagagatcaagggcatctgcagaggtggcccgaagtgcacaaaagcagctc

SEQ ID NO: 4291 - DNA, 120 bp, Homo sapiens
gcacgccttactgtgttgttttaaccctgctttcagtttcattatgacagtaactgctacatctgccttctccaaccccactgccatctgtggtcttgggtttcgacgaagtaagtggtt

SEQ ID NO: 4292 - DNA, 120 bp, Homo sapiens
actcgcttctctaactgaaatttatttagaaaggttacaagtggaaaattagcatgacttcgtacaaataagaggtaaccagaaaactaaagacagaaaaaacaaaaatataattaaatt

SEQ ID NO: 4293 - DNA, 120 bp, Homo sapiens
gcacggtgtccttggtagtatcgaaaggatggaaagacaatagagaaaggaattactttctcactgtgtgattcacggttatttaatgccaggtgggcactccacctaaaataatctcac

SEQ ID NO: 4294 - DNA, 120 bp, Homo sapiens
tcacgtacctccaagtcatctttgttccacacttaaagaaatgtggatgttttgtatatttcacaatggttttagtcacaatcagtggttgtaatctgaataacaattgtttccaagcta

SEQ ID NO: 4295 - DNA, 120 bp, Homo sapiens
catcgccctgggtgggagattctatttactcaattcacagggtgaacaaactagtaagatctgtaaaatctgctctccccacaatgagtgattatacggagctcatgagctaatgctggt

SEQ ID NO: 4296 - DNA, 120 bp, Homo sapiens
atacgccttgatcacaggttagctattattactaatgcggtggtaggtctgagagcctgtcagatgtggcctgatttaaccctcggtgtgagcattatatcaatttgtggagggcaagct

SEQ ID NO: 4297 - DNA, 120 bp, Homo sapiens
actcgtaagaaacttggcactttatagaaagtatgtatttcatgaccaaaaaaatagggtggcttggagggattgtgctttctttttgtattgtatccaatatgttcagtatcaacagca

SEQ ID NO: 4298 - DNA, 120 bp, Homo sapiens
tcacggtgaagagcagaggacagttttccactgaattcagggaaattattgcatgactatgtgaaaggactacttacacagtaagagtgctaagtagaaatggacagtggaagtcaggag

SEQ ID NO: 4299 - DNA, 120 bp, Homo sapiens
tttcgggttacgtctttatcagcagtatgtatacgtctttattagcagtgtgaaaatgaactaatacaccatctaacaacctggaatacttatttgcaaaagattcctaggtctcatttt

SEQ ID NO: 4300 - DNA, 120 bp, Homo sapiens
tatcgagccagactctctggaaaatccaaaaatctgcattttaactagtaccccagataatcctcacactaaagaccaagctccttagtatagcatgttaccatacaccaactgctacta

SEQ ID NO: 4301 - DNA, 120 bp, Homo sapiens
atacgtaaccttaatagactattccttacgatcagcagttttctcccacaattccctatacaagacaaatgtcaaagtctcaacagcctcaaagaaaagccatcactcactgcctccatg

SEQ ID NO: 4302 - DNA, 120 bp, Homo sapiens
aggcgtgagccaccatgcctggcctaacacctccattttgcattcttggttagcttttccttctcagtaaacaacgaagatacagagttggttagaagaatggtaaatgcagaggaaaac

SEQ ID NO: 4303 - DNA, 120 bp, Homo sapiens
cctcgtttagaagacagaaaaagatgctaccaactacagataaaacctcaattccttcctcactcaacacctcttcaagggacaaaagactggaaatgtccctcagataaaaacaagatc

SEQ ID NO: 4304 - DNA, 120 bp, Homo sapiens
agtcgcctgcacgcaggcatttccaacgtaggcaggtgacgatactggcagaattctcaacctgttgctatagtagcagaaagaatgtgattccagcagctctgctgagatccatatcca

SEQ ID NO: 4305 - DNA, 120 bp, Homo sapiens
tcccgcagagaacattaacccttcactgtcctttctcaggggcagaaacacctgggaagaatcccaaatttttcttatgagctgggtgctgtagtcttagcatttgctcattcactcatt

SEQ ID NO: 4306 - DNA, 120 bp, Homo sapiens
taacgtgtagcatccaatgtacaaatgcctatgagagtcaggatggctatcagtgccgttaactgcatgggcgacttacagtggcttctatttgttttttaatcataactgaaaagtcac

SEQ ID NO: 4307 - DNA, 120 bp, Homo sapiens
tttcgattaatcagccaaggggaaactagagccgcaaaaaaacaaactactggcattatcaccacaggaacactgggcatgacaatgatgacgtagtgctgatttacctccagcaaaaga

SEQ ID NO: 4308 - DNA, 120 bp, Homo sapiens
ctccgtacagggaatccttaagttgcctgcacagagttgcctaaaacaaacctgtgctgcatattcagagtcatctggcataggtcaaaccttcacaggtgtcatggcagtgcctcagtt

SEQ ID NO: 4309 - DNA, 120 bp, Homo sapiens
taccgccctcctataaaaccccttagcttagcatcctcacactctgatgtaattcctcaaattaactttacatgtagccttgtctttcctacatgtttatgaatatcttcccaggtatta

SEQ ID NO: 4310 - DNA, 120 bp, Homo sapiens
caacggcttgtgtttagaataaatatttgagacacacaagcctgttaacaatgcagtgcttgattactctgaattactctctcacccacagcaactgagggagagggccttggcaccagc

SEQ ID NO: 4311 - DNA, 120 bp, Homo sapiens
tcccgaccattctctcaaagaattctcaacacactatacaaagatctcagttttctcccttaaatgccacacaaattccacattgaacacagacttttttcttcccattagcaccacaga

SEQ ID NO: 4312 - DNA, 120 bp, Homo sapiens
ttccgttccacactgaactcctttaaataaagggtctctttttgtttgttttgagacaaaacatcaccttggtctattacaaagctatcttgacacttaagctacatttcaattagtcag

SEQ ID NO: 4313 - DNA, 120 bp, Homo sapiens
tatcgggttacaacttctaataaaccctcctgcgaaaagacatttctttgtctggggaccaccgagaactaaccaaacaaaacaccttcaattgtctcagaaattctgccatctaaacac

SEQ ID NO: 4314 - DNA, 120 bp, Homo sapiens
aagcgttcctgctgcgggcagcccttaccattgggagcagaggccccctccggaccctcgccggggttctggctcctcttgggctggggtgagggtggcgaggggtccaggcggtgggtg

SEQ ID NO: 4315 - DNA, 120 bp, Homo sapiens
gtgcgggtggaggtatgctccgagcatgcttgaacaggactcactgccgtctgcctgcctgtctgccactccgtcctcttgtctgggtgggaagggccaagatgaaaaaaaaatgtgcag

SEQ ID NO: 4316 - DNA, 120 bp, Homo sapiens
tggcgggcagacacacccaggaggagggagaggccaggcgcagacaggagagtcttcagaggctgagcctgagatctcccttctgatttccttttgtgattacttcctgaactttaagct

SEQ ID NO: 4317 - DNA, 120 bp, Homo sapiens
agacgttacttttcacatacaagataatgatcataactactattacaaatgtctgtatctgattttcttaggccaagttcacagtttcacttccagtgagcaccaggtgacttttgttcc

SEQ ID NO: 4318 - DNA, 120 bp, Homo sapiens
ggacggtgcttgttgatacaagaagggagagggttgggtggatatgtttaattgtaaattcacagataagggacacattttgcaaaataaaaataagatcagctatgcttcttgctttat

SEQ ID NO: 4319 - DNA, 120 bp, Homo sapiens
ttccgggaggtcacaagggaagcaagccaagactgatgtattactaacctaaatcatcactgctggaaaaagggcctcaaagtgcacttgaacactagcaattgagaaggcacaatggga

SEQ ID NO: 4320 - DNA, 120 bp, Homo sapiens
gggcgtgtatggggcacatacccactcacccacagagctccaattaactcctgggattcctttcagactcttctagatagtgctagtccacctactgtaacaaaagttctgccaatacta

SEQ ID NO: 4321 - DNA, 120 bp, Homo sapiens
tgtcgtaaaatcacaaagatttatttttcccatttatacccaacaagggtcacctgcagctccattcctcattttcatttcagggctcaggttgaaagaacagatcctgtctacagcatc

SEQ ID NO: 4322 - DNA, 120 bp, Homo sapiens
ccacgctagactgttaaattatgtgttatactccttgaccaatattatgttcataacaacgcagaaagccataatggagtttttttgttttttttttgagatggagtttcactcttgttg

SEQ ID NO: 4323 - DNA, 120 bp, Homo sapiens
acccgtaaaatgtggaaattcgactaaataatctcttaagtttcttctaactttaaaggtctgagatgcttaaagaaaccaaaactcattatgattctaaaaccaaataagaagacttat

SEQ ID NO: 4324 - DNA, 120 bp, Homo sapiens
actcgcgggggtactctgtaccagccaccatggcttgagcacttgatgtccactgatactttgttgagtgcatgttaacattttatctttaaaaagcatagctcataaatctttctgaag

SEQ ID NO: 4325 - DNA, 120 bp, Homo sapiens
tgacgtttgtaactaggagaaagaattttaaaaattagttaacttgtttctgttatccaagcaaaatatattcaaggtttaaaaatatcataaaatagagatgtgccttaagaacacaaa

SEQ ID NO: 4326 - DNA, 120 bp, Homo sapiens
caacggtaatcactgtttacctgcaaatctgggccctccactctggtttggagctctatgagctgcagcaggattacagcaaaacaggcaacagagaaacatgttatatcttgtacagag

SEQ ID NO: 4327 - DNA, 120 bp, Homo sapiens
aggcgatgatcttattaaataatgacgagaacctttctgagcatctaaagttgttgtcacaaaaattgaggttccccaggctacaactctctactcactttgggaaatcactttgagaca

SEQ ID NO: 4328 - DNA, 120 bp, Homo sapiens
atccgttaaatgcaaatgaatcaagaacatctggtctaaatttgttttaaagcctatgagggtttaaatacaaagaaagtctggcaaaatatagttttgagtctgctgaatctagaattt

SEQ ID NO: 4329 - DNA, 120 bp, Homo sapiens
tttcgggaattttcaaagtctttaataagcgaatacatgttataaatctccaacaaagggggcacagcgtgacctaatacactggccccagcatctggatctttttggcctcttgcatgg

SEQ ID NO: 4330 - DNA, 120 bp, Homo sapiens
agacgattttagccacccgtatggtaaatccacctgatagcaataacataaacacagcctgagaaggaccctgtatggcagattcacatgaatgtgtgtgctgagctaatgaatcctggt

SEQ ID NO: 4331 - DNA, 120 bp, Homo sapiens
ccccgcagaatgtgggctccatggggcacgagtatttggctgtatccacagtgtttgaacatgacttgaacgtgagcataaagcgggaaatcaaaataacatggattatgtgaataataa

SEQ ID NO: 4332 - DNA, 120 bp, Homo sapiens
cttcgggatcctgggtagattaaaattttaaatacatatattttgatgtcatgtcctttatattttgatgtttaatcaccagagttataggatttttttgatgtgtaaatgtgcccatcc

SEQ ID NO: 4333 - DNA, 120 bp, Homo sapiens
caacgtggggagagcagggactgtgtccagctctcccataactgtattcccagcacctacatttttttctgcatgaatgaactagttaattgatgcatgcttgggtggtttattgtgttt

SEQ ID NO: 4334 - DNA, 120 bp, Homo sapiens
agccgcaaagaagtacaacagaatacagtacatatagactatcacccaacttaagtactttacaaatatcaattacaatggaactgtaatgaaatgtccgggaaactccccatgtgaaag

SEQ ID NO: 4335 - DNA, 120 bp, Homo sapiens
tgacgactttctcaagccctgtcaaatgtgtgtcactcaatgtggtaatggctgcgggccaagataaggcagtaaaattgaagagtcagattcctcctctttcaacgacagcagcatgta

SEQ ID NO: 4336 - DNA, 120 bp, Homo sapiens
acccgtcaaaaaaaaaaaaaaaaaaacccacaatacaagtccctatgctgacacatgcagtgtcatcactcaatggggaaaacatcctgccaatcctgcaatgatgaacccagcaaaagt

SEQ ID NO: 4337 - DNA, 120 bp, Homo sapiens
ggacgaaggtgaaggtaagaggaaaatatttaaaaattttaaactgaaaggttttaaagatcaacaacttcaggtgttatgagaaaactgaggcccaaggaaatcaggcacacgaataga

SEQ ID NO: 4338 - DNA, 120 bp, Homo sapiens
tgcgaggcatcagttggcctagaaatgagtagtgagagaaggtaccggaggcagggtcaacacagtggacaacttcagggcccattcccatggtcatctatgtgagccatgcccacgaag

SEQ ID NO: 4339 - DNA, 120 bp, Homo sapiens
caccgctgctataatcgtcagccaaggtgtcctactgctggtgtggccaagtcatctgggccatttcagtcaacaggaggcagcactgtgaccaaagctatgaccaacctctttggacca

SEQ ID NO: 4340 - DNA, 120 bp, Homo sapiens
tatcgaagggagtccagttgtgacataagggtctggttttatctaatttatcagtagagctgcaggcacacaaaacctttatgtttaaagctcctgccaacactctctataccaagaata

SEQ ID NO: 4341 - DNA, 120 bp, Homo sapiens
tgacgcagaggaaaaactatttcccccttcctcttttgtaaaaatcaaactttccttgtgggttgaactgccaactcccctcaacttgttcctgccactcaagtctttagcatcccaaaa

SEQ ID NO: 4342 - DNA, 120 bp, Homo sapiens
atgcgacaaaaaccacgttctcttatctgacgctgcccctagagctattcaccgccccgcccccggcccccagctctgcaacagcacaggccctcccacatcaccatccacactgtagaa

SEQ ID NO: 4343 - DNA, 120 bp, Homo sapiens
gtgcgctgcacacttttcttgatgttatcactacgtacacaagtcaccaaccaggaagagttctcaagttagggccaagaccaagatgtacaactcagacttgaaggcctctccttgaaa

SEQ ID NO: 4344 - DNA, 120 bp, Homo sapiens
tttcgggcctttcaaaacaaaacaaaattattccagaggagcccagcagaaggaagccaggcactgtggcttctactgaccctgaactgataattccttatttccgttttcagcaaagcg

SEQ ID NO: 4345 - DNA, 120 bp, Homo sapiens
atacgtccttcccttttctgagaatccttcccctccctcttcccccaacaaaacagacgcatgggcataaaaccaaaacagcctggccaaaggctaaaacacaggctgctgcagtggcct

SEQ ID NO: 4346 - DNA, 120 bp, Homo sapiens
aaccgacgcatcccaagtttgtgtctgctgactgaaggctggggcatgtgggtgtctccaactgccagggacagccacaaggaaccaggacacactgggtgggcttggcacagtgcgaga

SEQ ID NO: 4347 - DNA, 120 bp, Homo sapiens
agtcgatgtctgttgactgaggcctggctgctttggtagagtggagtctgaggttttgatacatgaaatgcactactgacatcccctatgtttaaagtaaattctaaatgtggagagcag

SEQ ID NO: 4348 - DNA, 120 bp, Homo sapiens
ctacgtgtttatcctctagctccacgtctacctgtagcagcagcgtttccaagctctttgcacacaaatctcctggagatcttggaatgcagattctgagattctgcatttctaacgagc

SEQ ID NO: 4349 - DNA, 120 bp, Homo sapiens
ctgcgtggactaaaacaatattgtccatctgcttttcctgtgaagtctttggagactgtgtgggttttacacttagagcatgcctcactggcaccagccacatgggacaagtaactgttg

SEQ ID NO: 4350 - DNA, 120 bp, Homo sapiens
atgcggtagcgcagatctaaaccttttattttacttggagaatattcataggggacaggaataaatcatggagcagctacgatctacttgtccccgaataagcacttaacatccattatt

SEQ ID NO: 4351 - DNA, 120 bp, Homo sapiens
gcccggagtccctgtccattgctgcggtttggaattatccctctctgcctgcagagctgcagacgtggcaggagagagttgggagggtggggcagggtgcaggcagagttctggacaggg

SEQ ID NO: 4352 - DNA, 120 bp, Homo sapiens
cagcgactgggtgagtgaagcagcttctttgtgagccctcgtagaagtttggggatgggggcagtttaaggaaggcagggcatgggtaattatgatgctcattatttcaacttgaggtct

SEQ ID NO: 4353 - DNA, 120 bp, Homo sapiens
caacggctttaaagacacgtgagttttcaaagctgtggtgtggctgggatctacaaggatggtctcctaaaggagtttccttgcacaaataatttgcttgtaaaaccaaatcaaaccaaa

SEQ ID NO: 4354 - DNA, 120 bp, Homo sapiens
ggtcgttccttccctgccatccccatttaagcaacaatgaagtagaaatgccattctgttgctcaacaaacttgcttcagaacccaattttaagcaagatgtagtcagtttaaactcagt

SEQ ID NO: 4355 - DNA, 120 bp, Homo sapiens
tggcgttttaattattcattcatgatcaacaaatgtttattgagatgatatgcagaaaacagttaacacagcaagcctgactagttatcttttgaaagaccgcttatcatgtggccctcg

SEQ ID NO: 4356 - DNA, 120 bp, Homo sapiens
gctcgcagcagacctgtagtctgttctttcttctcactggcccaaaacagagtgagcagatacctctctccaagcatcatcaaatcaccttagaaatatggtaaagagagacctctggca

SEQ ID NO: 4357 - DNA, 120 bp, Homo sapiens
aggcgctccctgagtgagcccaggcagtggaggctgttaggcccagacctggaaaaggatggtggaaaaaaataggagggtggagacctcttaagcacctctccacatttccctccccca

SEQ ID NO: 4358 - DNA, 120 bp, Homo sapiens
tgccggctacctgttccccctcacctgaggaagcgttggcacacaaggtccaagctaccaccagcgccctcctgacaacactgggacactatgaaggagaagaggcaggaccaaccaggg

SEQ ID NO: 4359 - DNA, 120 bp, Homo sapiens
agacggtaagccccatgaagtcagcccctccccctcctgccgccgccactcgtccgggagccagtccgtaagtaagactaagacgggtcccacagggcttgttagcacaccaggtgcagc

SEQ ID NO: 4360 - DNA, 120 bp, Homo sapiens
ggccgaaacagcacagtcccctcaaaccacagccccctgggacaaccccagcagcctcctcgccccacttggagttcagttatcggaactacctcagaccgtgactactcgcagcctccg

SEQ ID NO: 4361 - DNA, 120 bp, Homo sapiens
ccacgcagtcatcacattcctaagcttttttgatactgctcagtgggaagctgtgggaccagtgctctgccgtgccttttgcccagccctttccatgtagtaatactagaaacctcccca

SEQ ID NO: 4362 - DNA, 120 bp, Homo sapiens
tctcgtttgaagctgcagacagccgatgtggagctctgtaatactttctcctgggtgacttcactgagcccattagctctctcagcttgggcacagcagctcagagagaagcctcctaag

SEQ ID NO: 4363 - DNA, 120 bp, Homo sapiens
gcccgtctcagggctccaggacatccgagctgcttactggagcctgggcatgttcttgcatctgactgggctcctgccatggcactaggccaaaggcaggactagggatctgtatgtgag

SEQ ID NO: 4364 - DNA, 120 bp, Homo sapiens
aagcgctgctgccagagacttgacatacctggggatctcacccaggcttttaccgtttgatgagaacattaaggaggcaatggaaaactgaaaaatgacctccatttccagtgtgggtgc

SEQ ID NO: 4365 - DNA, 120 bp, Homo sapiens
actcgtgggaagactcagaaactgagtgaggtcacaggttcagaagcaacacttctgtttccgtgacacagatgggaaaaccaagcccttaagaaatgctgctgaaggcatgaaaagaca

SEQ ID NO: 4366 - DNA, 120 bp, Homo sapiens
tgtcggctagtgccttcctctctctgctgcggagacccgtgggaccccagttcttgggctgctcctcagtcccacaggcaggagcttgcatctcaagttgcttctctctaggttcaggta

SEQ ID NO: 4367 - DNA, 120 bp, Homo sapiens
tcccgagtatattcaggagaagaaaggctgccgattcagtgaatccttggttctggtataaacacataatgggaattaagtaattcagaatgcctgtctaagaaacagcttctggggctg

SEQ ID NO: 4368 - DNA, 120 bp, Homo sapiens
ttacggtatatttttaaaacaagaccaaagggcttagtgagacatattttacctggcatcatgccctcagtgggccatttcttcactacctaatgcttttataaccactttcttaaccga

SEQ ID NO: 4369 - DNA, 120 bp, Homo sapiens
ccccgccccaagttcctgggcacttggcctcctgtcaccgactctctctgactctggctctaagaaagacagtccccatcacatgtatccactcacttgtagaaggcttggttctcgatt

SEQ ID NO: 4370 - DNA, 120 bp, Homo sapiens
acacgcttcaggagttggagcaaaatatgtaagaataattttcttttcctgcaaaaaattccacattgatatggctgagtgtggatggagaagcaaagggtgaagtaggcgaggaccctg

SEQ ID NO: 4371 - DNA, 120 bp, Homo sapiens
ggcggagcagaagctgtaggtctcgcttcctcacttgcgaaagtgagctccctgaggtctaggctgggtggaggattttgccctcccagaggggcttcctttgtgacaggggcgtcaggt

SEQ ID NO: 4372 - DNA, 120 bp, Homo sapiens
caccgtcaggctgcatgaatggtgatggagagggtgtaagtgtgttgaggtgaccagaaacttatgctgtgatgctggtcaaatgtgcctgcaggagagtcttctgggccacagctcagg

SEQ ID NO: 4373 - DNA, 120 bp, Homo sapiens
caccgggcgtgaggcatgggtgtgggggctgaggctgctgggccaggtcagcctgaggtttggctctcctggcctctctgctttcagggctcacctccctgacacagattctcagcctga

SEQ ID NO: 4374 - DNA, 120 bp, Homo sapiens
ggtcgcaagaacagtggggcctctgcagggcctcatgagtcctgcctcaagaagcagtccagttttgccttaaaactatctctcagagtcagggttacaagtatgagcatctgggtccag

SEQ ID NO: 4375 - DNA, 120 bp, Homo sapiens
acccggggaagtcctacaactgcaggcttagaaagaaagagactgggagtggagaccttattgtgtgaatggtggtatagaaagggtctcagaaaatgttgagcagatgaaggtgttaga

SEQ ID NO: 4376 - DNA, 120 bp, Homo sapiens
gaacgtccgtatgtgcgtaaaaatgagaggggaggcagaggtgaggcagaggcacggaaggggtcataatgcccgctgagataaaggaaaggcctaggaaggagaggtggagggatggaa

SEQ ID NO: 4377 - DNA, 120 bp, Homo sapiens
taacggaaggaagtagggaagggagttgggagggaaggcaggggagggaggcagcggagggcccccctctgcttcttccactctggctcatatgggcagtgacaggcagaagagcacccc

SEQ ID NO: 4378 - DNA, 120 bp, Homo sapiens
gtgcgggctcttggtcaaaccgctcgggtccaggtccagctctgccactcattgtgtggctgtggccaggtccttaatttctccatggtcagactccttgtcttagaatgagggttgatc

SEQ ID NO: 4379 - DNA, 120 bp, Homo sapiens
aagcgggcatcatttcctgggggatcccctgctttgaactaggtttctggagggctgtccctactattctgatgtctcctaaagccctccaggcagttccagcacatccctgatctcttt

SEQ ID NO: 4380 - DNA, 120 bp, Homo sapiens
gcccgtgtttattctgatttttaccacaaggggtcgctattccctaacagagtgacttgaggagccatggggtcctgcacctgggaaggcacaccgagggagaggggcgggaagcatcta

SEQ ID NO: 4381 - DNA, 120 bp, Homo sapiens
gttcggtgtcgccattccgctgggagggtcaggaacccctcctgccacaaggcatgggcagaggggtctgtttacaaaggctaaggaggctttgggttatatttgttggtaaaatcattg

SEQ ID NO: 4382 - DNA, 120 bp, Homo sapiens
ggtcggggaaggaacaagttgaagcttagtattagcattagaaatatccagctctgctccctgttgccaggcatagtctttcctcggaacagtagatacacaaaccttttaaaatatttt

SEQ ID NO: 4383 - DNA, 120 bp, Homo sapiens
atccgatgttttacagaggagtcggccatggtagagatcccttttgatctgcaggaagactaaatacctggagagaaaacagagaataaactataaaggatttctttgattgctttaaag

SEQ ID NO: 4384 - DNA, 120 bp, Homo sapiens
agtcgatctggtgccgaaaaagaaaactatgccatcagagactggcaaactgggcctctctccgccttggatgccagctgatgttccttcttaagtagaatggtgggtgaaggaactagc

SEQ ID NO: 4385 - DNA, 120 bp, Homo sapiens
caacgtgtaggatagtaccttcttccccttggatttttcaaggaggcaggacatagaggcagaatacattttcccatggtacttaacgtctgggggaagcaatgaaaccattctatatgt

SEQ ID NO: 4386 - DNA, 120 bp, Homo sapiens
tctcgtttaccactgtatcaccagtgcctagcacagtgttcaataggtagctgctgaatggcaaagggactgggcccatacttccttcttttctggctacttcaatttagtgtaatgtct

SEQ ID NO: 4387 - DNA, 120 bp, Homo sapiens
gggcgctgcagtcagcatcctggcctcccttgattcccagtgatcaccttctgggctgggccatgggtcatgcagttaatggacccactaagagccagttcttctgtcagctccacatgg

SEQ ID NO: 4388 - DNA, 120 bp, Homo sapiens
ccacgaggctggcaactcattatagccactcaatgtggttaagaggcccttctcacattacacggcccaccgcggctcagcttcacagggaggcaaaggcaagagatgaaattgctcaga

SEQ ID NO: 4389 - DNA, 120 bp, Homo sapiens
agacggaggaggcctatctgttcagagcacactggaattgtggacagtgaggagaacatagccagtgccagggattcagtacacagaacagcaacacccccagacattagactgatagat

SEQ ID NO: 4390 - DNA, 120 bp, Homo sapiens
aatcggtcccagattcactagcaaacagacaacatgggcttagggaggagggattaaaagaagaggaaaagaagattcagagaggagggtttcctcccctatctgagtgaatgggccaat

SEQ ID NO: 4391 - DNA, 120 bp, Homo sapiens
aaacgaagtagagtctagcagagggtaagagtgattccaacttcctcctggctacatgctatgaccttggttcacaatctgttaaagggtagctggccttggtttcacgggcccttagag

SEQ ID NO: 4392 - DNA, 120 bp, Homo sapiens
acccgtagcccaaagtacaagagtccagaggtggaagaaagccacactgatactaggcaccctggaggaagggcaacagttgaacgagttgtccttggaggcctgccggggaagaaacag

SEQ ID NO: 4393 - DNA, 120 bp, Homo sapiens
tgccgatgtctgccaggttccagagcagatgctgtgtaaaagcactttaatgttacagaggaacagccacagtaggtcatcttctcagggccatggcattagtgagctgagcagaaaagt

SEQ ID NO: 4394 - DNA, 120 bp, Homo sapiens
agtcgtaaaccaatgaaatctgtccaggaactgctgaggctgcagctagaagagcagccagctcactctgggagaagattaagaaagctcattccagggggaaatgcagagacgtccatc

SEQ ID NO: 4395 - DNA, 120 bp, Homo sapiens
ccacgtaaccatgtggctcctggaggagtggtgaggccccaaagtggagggaaatcagagctcagaaggagaaaggatcagtgcttcttagccactgttctcaccaaatccttaaataca

SEQ ID NO: 4396 - DNA, 120 bp, Homo sapiens
catcgccacatggtgtgacacgcaggatgtgcacgtggggtggggaaatcacattcagtctggaacatggaggtcaccgtgcgcaaggaaatgtcatgggagggaggactaagtgttctg

SEQ ID NO: 4397 - DNA, 120 bp, Homo sapiens
actcgttcatctttcttatctttggagaagccacttttacaagtaaggtgactcttaaaagcatcactgcatcttgctattgattgaataaattttagttgtatttttccaaccagtgct

SEQ ID NO: 4398 - DNA, 120 bp, Homo sapiens
ccccgatccccactcccaacacacacacacattctctaatacagctgcacttctcatacaacgctgcttcaaataacttgtaaagaaaatctagaatttggggaaagatcgacttcccct

SEQ ID NO: 4399 - DNA, 120 bp, Homo sapiens
gaacgagcactaagtagacttagagtcaaggccctggtctgccacttctcagcttgtgatctcagacccatcccttaatgtactcaagcttcagcttccttatctctaaaacagagttaa

SEQ ID NO: 4400 - DNA, 120 bp, Homo sapiens
tttcgtgccaacttcctcagcctcttgagacctcttcttcctccaggatggatggacttgaatgcacaaggcctcagcaatgagtcaatgcactcaaggaacagaagcctgtcctccctg

SEQ ID NO: 4401 - DNA, 120 bp, Homo sapiens
ctgcgtcttcttcttacccaaggctatttttttcctgatcagaagagtagaaaatttcaaatatatgtaatcaaaccaaatcccctcagaagcctggcagcctctaatcagtgccacaga

SEQ ID NO: 4402 - DNA, 120 bp, Homo sapiens
cagcgtcctgatctctctcaaaaaacagaacaggttccctctgtagttaaacctatgggagctacctgtagcattagactcttccccctgggattccccagggcactgcacaacaggata

SEQ ID NO: 4403 - DNA, 120 bp, Homo sapiens
ccacgtttatgcctcccttcccagcactgagtagaaacaacctcactggaacaacaatagtgagagtcccaggagaggagtgagacagctggggcccagagccagacagatgggtggaga

SEQ ID NO: 4404 - DNA, 120 bp, Homo sapiens
taccgaggcctaggaaagcagcaggacaaaccccgaatcttccaatagtggttgtcccactggtggaggagaagaggagaaggaggcaagataggaggcagacagctagctcactcagaa

SEQ ID NO: 4405 - DNA, 120 bp, Homo sapiens
ctccggaccattggttctcacacctgagtccacctcagaatcacctggagggcttgttaaaatacagattgctgggccccgcccctaaagtttctagttcataggtctgctgtggggcct

SEQ ID NO: 4406 - DNA, 120 bp, Homo sapiens
ccacgttttcatataacaagagtaccaacttcagagcattagactgtgagttaaatattacagagaaacactgcttcttcctaccaggtttttaaattctgcctttcatgacagtgggca

SEQ ID NO: 4407 - DNA, 120 bp, Homo sapiens
gttcgagtccccaattaccatttattttcaatggctaactagctcaaaactcactgcacttttgctatgaactagatcatcagaaaataaagccagcagttatcatcaaactcaatccgg

SEQ ID NO: 4408 - DNA, 120 bp, Homo sapiens
aggcggggctggaaggtgccccagtacctcatcctgctgtctcctccctacatctacgctccttgaggctccttagtcagaattctgtcttggctgtcaagaccagccttctcctttctc

SEQ ID NO: 4409 - DNA, 120 bp, Homo sapiens
aagcgatgggagtaagaaaaggcacattctgactgtgatctcttgggcaggtcattttccctttctgtgcctcagtttctctatctgcaaataatctcatgtcctcttatgtgctcaaaa

SEQ ID NO: 4410 - DNA, 120 bp, Homo sapiens
aatcgggtagctttaacaggtagatgtttattgctagtgtaattaatctaaaaaactcagggccattgctcaaagtaaatggaaagagtaactaaacagaatccattcaattttagaaac

SEQ ID NO: 4411 - DNA, 120 bp, Homo sapiens
gagcgatggaaaagtcccattagatcatctaatgcccgcctccagcctcataaaatgaggatcgttgcaagatcttctcagagtggatcctcaggctaataccagcctctgtccttccca

SEQ ID NO: 4412 - DNA, 120 bp, Homo sapiens
cagcgggactgctggatttctatatgcgagggctttaggcgtgacagtctggctggggtgagggtggggaataaagatttatttgtatgatcttgtgtataagattgagaactcttcaac

SEQ ID NO: 4413 - DNA, 120 bp, Homo sapiens
aaacgtggctgaggcagaagctgcggatgtgctttcagacaagtaccattgggtccctcaacttgttagtttcctgaaggttctcccacatgtggtatttcagtggctgagcagcaacag

SEQ ID NO: 4414 - DNA, 120 bp, Homo sapiens
gtacgacactagagttgttgcatcattccacatagccaatggtgttttttgtaagttggctttgtgtactccccagtgtcttacaggtgaagcagtccaattaggcaatgattgtttaaa

SEQ ID NO: 4415 - DNA, 120 bp, Homo sapiens
agtcgtgctgcatacatatttggagagtaagtgcacttcagggagttctgctaacttaaaaaaaaaaggatgaaagaagaagacatttgcatgctgcatggagattccaaggcttgggaa

SEQ ID NO: 4416 - DNA, 120 bp, Homo sapiens
acacgtgtcaggcagccaggagctctggaacttgcattggtcatcacaattatgcctcagtttcttgaactgcttccttcttccttcttggtatgcaggaaggctagaggttgtcctaca

SEQ ID NO: 4417 - DNA, 120 bp, Homo sapiens
aaccgggaaggtggataggtgaacgaaggagtagggtgtgaccaaggagggacatatgcctcctttaatgagatcctaaattcaatcctattttcctcaataaaaagggagcaggccatt

SEQ ID NO: 4418 - DNA, 120 bp, Homo sapiens
acacgcattcacatagacaaacagccatgcttaaactacgatagactgaaagctgatgacaagtccttggggatgatgattctatagtctctcttcagctacctcaggcatacttggaaa

SEQ ID NO: 4419 - DNA, 120 bp, Homo sapiens
caccgactgagcctctcttaacctcagtttcacctgcagctcctaaataatgtgggcagaggccaagcgttcccattcaatggatctgagtccccagagtgagctcagcttgggacctgg

SEQ ID NO: 4420 - DNA, 120 bp, Homo sapiens
cagcgacagcaaaccccagattctaaaatggtttactccagctgccttgctcagtgctattttaataaccggagaggctggctgtttaacagttgaatgcttcccctgccatcattttgg

SEQ ID NO: 4421 - DNA, 120 bp, Homo sapiens
cctcgaaatgcggtgtgagaccagataacaaaattcaggtgggccagtcagaagatctacagaggaaatgatcaaatcaggtaattagcatatgcatcacctgaaacatttatcatttct

SEQ ID NO: 4422 - DNA, 120 bp, Homo sapiens
gaacgaacaacaacacaagacaaattctcccctgaccaggcctctcttacatcttgggtggaaggctaaacctgctaaggggacacatttttttgggcccgagtctgtatgtgcatgtgt

SEQ ID NO: 4423 - DNA, 120 bp, Homo sapiens
caacgatctgctcagcacagcgagcaacttcctcaccaggtgggaaaatctggacctgcctcataatgattttctgtcatgccccacataagcaaatgctgcactaaatatacatcccaa

SEQ ID NO: 4424 - DNA, 120 bp, Homo sapiens
ttccgcccagtgtcacagcagtacttatgtaattactctatataactctgccagcaagaagggaatgaaatctccttatcagggtattgcaaaccaataacacctcagcagccagtctct

SEQ ID NO: 4425 - DNA, 120 bp, Homo sapiens
atgcgctgctgcattttggatagtctgggagcacggccatcatgcagagggaacgcttgggtgaccaaggcttcagcactgcagactcgcttccaggaatgaacactgcactttcttgag

SEQ ID NO: 4426 - DNA, 120 bp, Homo sapiens
aagcgagcctgcagcttctgagctgtgtcctcttcaattgggatgttcaaaggggcatgtgtggccagtatgcagccatgcggtcagcacgcagcttttgtcagaggctgctgaaggcag

SEQ ID NO: 4427 - DNA, 120 bp, Homo sapiens
cctcgagcagttccactaaggctttgtcctgtggtcctaagaatgactttttctctactggtaattccgctttagatgtgataggagccttgagctgccccaggggctatgaaatccaag

SEQ ID NO: 4428 - DNA, 120 bp, Homo sapiens
gaacgtgtatggaatatatgccgggtgttttattggctagtctaaaggaaattgtttttctttctgtaatttgagggaaaaacacattcctatgtttaacaagcttttccttcattgcaa

SEQ ID NO: 4429 - DNA, 120 bp, Homo sapiens
taacggaaagacactgaaaaaaatctttattttcacaaaaatcctatgttgttattttattctgaatttctgcctaattcatagactatgtttcctagagttggacaggactatgggtga

SEQ ID NO: 4430 - DNA, 120 bp, Homo sapiens
attcggtcatttatttaacagatatttactcaacacctaccatgcccagttctatgtgtgcttctgagcatataataatgaataagagagatatggtccctctcccatgggtggaacttc

SEQ ID NO: 4431 - DNA, 120 bp, Homo sapiens
atacgcctttgagggcctatactagttaactggatagtttccttgttaagaagagatgaatgatactattcctctatcctaagattttctggaggtaagaactatactggttataaatgt

SEQ ID NO: 4432 - DNA, 120 bp, Homo sapiens
aaacgagcacatcaggcatgtgtaagttgctgattacatgttatgtcaattataaacttagttaacttttaaaactataggtttcctagggatgaaagcacaagaggaaattaaggtggg

SEQ ID NO: 4433 - DNA, 120 bp, Homo sapiens
aaccgtgcctggccctgaaggtattttaatagtgcattttcttctaataatgagaagaatataaaatatatcttcttttttgacagtgttgctctaagaaaaactattcaaaatggactc

SEQ ID NO: 4434 - DNA, 120 bp, Homo sapiens
ttacgtcatactgaaggactatgcacttacagatagatggcttgcctttgcccagtattcaaggatcagagtagctgtcgttttttcctttactgcagaattattattttaagtaaatga

SEQ ID NO: 4435 - DNA, 120 bp, Homo sapiens
tcccggtttacagataatctccaacagaaaaagactaacaccttgccttcccaccagttcataggacccaaagaagcattatctcttgcttcaaaacccagccacttatcagttatgcaa

SEQ ID NO: 4436 - DNA, 120 bp, Homo sapiens
atacgaataatgtatttcttcattataccctgaaacaggccatagggatgcagcaatggcattgtggaaactaccatttctggcaaatgaagacttggaggttgggcgcagtggttcaca

SEQ ID NO: 4437 - DNA, 120 bp, Homo sapiens
acacggaaaaggaagggagaatgaacaagcagagaaaaatataatctatgacatgcaggaaaacagtagtttataagcgaaaagtcatcttaaagacttttccaaaatactttttctccc

SEQ ID NO: 4438 - DNA, 120 bp, Homo sapiens
atgcgagatggaagtgcagcaaagcaacactgatttcctcagcctggagataaatcagtttgttaaataagtgaggataaaatcaaaggccaagtgcccactccttcttcatgtttggga

SEQ ID NO: 4439 - DNA, 120 bp, Homo sapiens
cagcgttgtagcaggtctggtagagaagtgtctgaggttcaggtttcctgagcccccatagttcccataaggcacagatactgagagattataagaggatgaactggatggcagacacac

SEQ ID NO: 4440 - DNA, 120 bp, Homo sapiens
cttcggataacactgctgcatccttttgcttcaaggaaaaaaaaaaaccagaaccacaaatagctgtgcaggatttcgaccttgcagtcacaataagaaagcagcaataggaaccagaat

SEQ ID NO: 4441 - DNA, 120 bp, Homo sapiens
ttccgattcagtaggtctggggtggagcatacgcaatgctaatttttagtaacgtctcaggtgattctgatgcatggccacagcattctgcaagtgagaacacctgaagaacatcatcag

SEQ ID NO: 4442 - DNA, 120 bp, Homo sapiens
aagcgaacagggattgactcagtgaaacttctagcttcctgtaaacttcattcattctcaagcttaatggaaacaaaaccctatgctaggaaaaagcaagtatgtttccctttctgagtc

SEQ ID NO: 4443 - DNA, 120 bp, Homo sapiens
tgacgacatgggatgcaagagaagcagactttgaagtatttaagtttaatgctcccgatttttaatttaaaaagcaaggggaataactgcttcatatttttctctcataaaacagtaacg

SEQ ID NO: 4444 - DNA, 120 bp, Homo sapiens
ggtcgtcactctcttttgggaatctagtccctctgttttgggaatctagtcccttgattgaaagggtctctgcctctcctgtatgtctagtccttcagattccacttccacaatgttcta

SEQ ID NO: 4445 - DNA, 120 bp, Homo sapiens
taacgttgctaagatacagctgtgattcacgaagtcacaaatatttcttaagcacacactctctatgccagacactgtgctagactctaaagagtcagagaaaaagacacacagttgttg

SEQ ID NO: 4446 - DNA, 120 bp, Homo sapiens
cctcggggagggctctgcctttaacactgtatatagaataatatgttacagtgtataaacacaaatatatacacacacagaaccgtctatctgtgtcttggagattcagactagtaattt

SEQ ID NO: 4447 - DNA, 120 bp, Homo sapiens
ttccgtgggcagaaggactgctactgtgtgcccagatgggtacataggacaaattatgtttactcaacttcagagaaaccatgccaaaatgttcttcccaaacaattgatttcaacttgt

SEQ ID NO: 4448 - DNA, 120 bp, Homo sapiens
aaccgaactattctgattaagcaatttttgctagctttccttctttctgatttaacccagagcatttaacaagcactctgaaagcccccctacactctgagtctagccacacaaaagctg

SEQ ID NO: 4449 - DNA, 120 bp, Homo sapiens
catcgtgccaggccaactaatagcttcttaatcacagttttgcatcccaactctccacattgtcacctagcagcaaatggaatccacagcactataaataattagtgtatgtcaaactgc

SEQ ID NO: 4450 - DNA, 120 bp, Homo sapiens
acccggtttttctgaattctttttattcattagactaaatggcctaaacaagggaactagttcctgcagctagaaataaactagtcttggggccaggcacagtggctcacgcctgtaatc

SEQ ID NO: 4451 - DNA, 120 bp, Homo sapiens
ttacgaaatttcttttagacctgctacctgatttccattcaatgctagcatgtgatcaagagctaatttgcatagctgataggaagctgagtccagtcatttattcacagcaggcatagt

SEQ ID NO: 4452 - DNA, 120 bp, Homo sapiens
ttacgtgtttgcaatccctaagttgtaagcccttcgacaacaggggccttgacttttcctttcccctagtgcgtcaagttgtgaacaaaatttatttttaaaaaatatacaaatatacaa

SEQ ID NO: 4453 - DNA, 120 bp, Homo sapiens
tgacgcactgcagaatctttagactcctacccacttgaaaataggtatgcatatctgtagacaacctagcatttaccttgcaagggaagagaatctattaagacaattcaggaataaatc

SEQ ID NO: 4454 - DNA, 120 bp, Homo sapiens
attcgccaaagtgatgccaaagaatgacaacattacatatacttaacaatccctgtgttctttagattccatgcaaaaatcacaatgcacaatcattaacatgtctagacagtggacact

SEQ ID NO: 4455 - DNA, 120 bp, Homo sapiens
cctcgcaccctgcaacaccgcggttcccgccctcttgggagccggagcgaggaggcggcagggtgctggatcacagtccctgcacctgcagaatgcggatacctctcgctccagataggg

SEQ ID NO: 4456 - DNA, 120 bp, Homo sapiens
gggcgactgcccccgacctgtgctgtaccctaagttggcccgtctggcctctgtgctccagccctcttattttgggaaacaggagctacttaaataaaagctaaagggacctcagaggtt

SEQ ID NO: 4457 - DNA, 120 bp, Homo sapiens
agccggcagtctctcagacatgtccactgtgattaagagacataaacactcccattggccagtaagagctgatcttctggttatcgtgcacctggctccagaccaaggtagggcataaca

SEQ ID NO: 4458 - DNA, 120 bp, Homo sapiens
agtcgactctggcagtcactgtctggccatggggagattgttgaagagtaagcaatactgccgccttgtggaagacaatagttatattctttgtggcagaaatggcaacaaagaaaagta

SEQ ID NO: 4459 - DNA, 120 bp, Homo sapiens
caccgcgcccggcctagaataattttcgattgctggttgagcagagcaaggccaatatgagttgaggaaagcagagatggaaaggctctttatagttaatgatttctcatttttgctttg

SEQ ID NO: 4460 - DNA, 120 bp, Homo sapiens
agtcggcttgtcatctgagagtggagaggatttgttagatcttatgaagccagagctcacttctgatgtgaaccaagtattaataattttggtggtggttttctgtactgcatctgagag

SEQ ID NO: 4461 - DNA, 120 bp, Homo sapiens
gcacgtcaagctcttgataaataaaaggagctgttagaatgtagaaaaagtcctcaaaattgtcgttttattacacacatacacacacatacacacacatcagttttgaggtttgaagct

SEQ ID NO: 4462 - DNA, 120 bp, Homo sapiens
aagcgtattacaaaaaaatgctttttgggggaaaattttggaatataatagtagtctctcttattcttgagaggtttgagtaaattgattaaaattcttaaaacagtgcctactacattg

SEQ ID NO: 4463 - DNA, 120 bp, Homo sapiens
aaacgatatccctttcctaccttcttggttcctataaatgatgcccatgcaactgttatttaagactgaggttagaaatttggtgttgtctttgattccttcagtgtatcatattgagtg

SEQ ID NO: 4464 - DNA, 120 bp, Homo sapiens
gatcgaattaaaaaaaacgtcattctgactgcagaatagagaacttggcagatccctaactagtcccctttccttggtctccatttctttttgtcagttctcctgtgaagccagcctgaa

SEQ ID NO: 4465 - DNA, 120 bp, Homo sapiens
catcgtctatctatttctcccttcccctcctccttcatatctagtcagacactatattagtacgggttctccagagaaacagaatcaataggatgtgtatatgcagaaagagatttattt

SEQ ID NO: 4466 - DNA, 120 bp, Homo sapiens
tgacgctgcagtctggaggctgaattgcttcttcttaagggtctcgttttaatttgaactgaccggatgcggcccaccctcattatagagggtaatgtactttaatcaaagtctgctgat

SEQ ID NO: 4467 - DNA, 120 bp, Homo sapiens
catcgcctagccaagttgatagataaaattaaccattaaagtcactaagttccattgacaatgacctttaaatatttctcaagttggtttcttcttctccattgccattgccttaattta

SEQ ID NO: 4468 - DNA, 120 bp, Homo sapiens
tctcgtttaattaattcataaaatacttacgtattaggcattatgccaaatgttggagatacaattgtgagtaagattgtgtccttagggacttacattccacccttttcctgacttctt

SEQ ID NO: 4469 - DNA, 120 bp, Homo sapiens
tttcgctctttctcttgtgcccctctaaatctttatctttagccatgttatgatgcctctctgatatctttacccatgttatgatgcggaacaaagccctcacccaaagcaaaccagata

SEQ ID NO: 4470 - DNA, 120 bp, Homo sapiens
aggcgagaaaaaacaatgtgggttattagaagacatatatcaaaacaagacaagggggtaagaaaagctcaaaaatcccaaagctgacaatgtgcccagataactggcagctatagttat

SEQ ID NO: 4471 - DNA, 120 bp, Homo sapiens
atccgggagctcagagaagacagtgagtcttcagcctgctgtgagatcatgatggaggtgatatttggcaaggacttaaagttggacaagttttggctcagaggaaaggaacaggaggga

SEQ ID NO: 4472 - DNA, 120 bp, Homo sapiens
cttcggggctatgggaactccctgtgctgagacacgaagggtgctgatatatcctgggggtggctgtcagtgtctcatatgatttcagctttcagaacattttcaacacaaccacttttg

SEQ ID NO: 4473 - DNA, 120 bp, Homo sapiens
tctcgcaataaacctgtgagataagtagggcagatgaggaaatgaattccaggcaaccgaagagacttgcatgaggtcattcagcaagcaggtgacagagttgggacatgaacccaggtc

SEQ ID NO: 4474 - DNA, 120 bp, Homo sapiens
ccccggccccacgccctgggctgggatgcccaaaggagccgcccacagggctgggagttgggagcagcagcagagatgccagttgggaaggatggcaggacaggcacccaccctgggcat

SEQ ID NO: 4475 - DNA, 120 bp, Homo sapiens
ttccgacccctttgacctaccctaatttgttattttgtttatggtccctttgccccactctgatgtgctcactactgtatcctgcatcaatctcagggctggcacacagtaggtactcaa

SEQ ID NO: 4476 - DNA, 120 bp, Homo sapiens
ggacgctcaacaggcgtcctctccagactccatcctctggagtgacatcacctttcagatccccattcaccttgacctctaatggctgcaggatcaggctctcagcagatctacatctga

SEQ ID NO: 4477 - DNA, 120 bp, Homo sapiens
tggcgcaaaggccaaagggaggaattgtccgcaaaggacctttggggaagacacctaaaaccacggcggaggggtgaaattaaagactttcaaaacttaaaaataaataaataaataaaa

SEQ ID NO: 4478 - DNA, 120 bp, Homo sapiens
ccacggctggtatttaggcacattctctgatatagccagaatgctgctgaaatgctgaaagatttccaaactagtaaagtagctactacccagaggatcccatccctctccttcctgcca

SEQ ID NO: 4479 - DNA, 120 bp, Homo sapiens
ccacggggctccagagggtgtggatccaggaggagcaagaggggcacacgttacaatgtgtgccttgctctggaaggtccccaaagtctcccactgcccctttcctctgtttctttagtt

SEQ ID NO: 4480 - DNA, 120 bp, Homo sapiens
cctcgagatcaaactttttatacccattgttcctgcttattggaatgtccttctcctattttatctgagaaatcccttgacataaaacaaatgtctttcccttttctaattacaagaaca

SEQ ID NO: 4481 - DNA, 120 bp, Homo sapiens
aaccgtgcaagtgtgactcagcattcctgtgctctggtttccccatttataatctggggatagtagtagaatcttcctcacaggattgttttaaggatcagttggtctaacacatgtcag

SEQ ID NO: 4482 - DNA, 120 bp, Homo sapiens
caccgtatgcagggtttgggccccacttttgctctcacataatatgttgactctgtggtgagggctaatggagtgggcagcaggtatcctccaagtcctgggccccagccagggcttgtt

SEQ ID NO: 4483 - DNA, 120 bp, Homo sapiens
caacggcagcacagatggccagcctgggccacagaggcttaagaggtttaactagtctacaaaagttccttcacctggactcctaccttctcctccctcccttccccagactctcctcct

SEQ ID NO: 4484 - DNA, 120 bp, Homo sapiens
cagcgcctaatgacatacacttaatgaacactggctaagagatggtcttacattgactggcagcccctaccaatcctcctaacctcagggcaggaatattttgttcaactttagatgccc

SEQ ID NO: 4485 - DNA, 120 bp, Homo sapiens
ctacgagaatctaagagctatacctttccccagaaaaataggaaatatctgcacacaatttctggcggttcatgaagcccaggaacctctccatgagctaagaagagccctggttgtaat

SEQ ID NO: 4486 - DNA, 120 bp, Homo sapiens
gtccgtgttacctctccacccaaccccaaacacgtatcttggcatgagggaggcaaaggacacactgcacagatggtcacaggcagctgagagctttgtccaatcagagccctgttccca

SEQ ID NO: 4487 - DNA, 120 bp, Homo sapiens
agacgagggcccagcaccgtgaagctcttcctctggccagatggcaaggccctgcctgcccgttgcagggcgcggctcctgctgctcccacacctgccctgccaggcctgcccagatggc

SEQ ID NO: 4488 - DNA, 120 bp, Homo sapiens
ctacggcagtgggtcccagggtgggctggcagccagaaccccacatggggagaaggctaatggtcctgaaccccctgggcctctcggtactgtcgaggacctggttctctcctgccccca

SEQ ID NO: 4489 - DNA, 120 bp, Homo sapiens
aagcggccacatagtacataaacaccagctccactgggccacaggggcatgcgccagctcacatccaggagcagcatctcttaggtttagggtaagggactcaggtaccttgtttgagct

SEQ ID NO: 4490 - DNA, 120 bp, Homo sapiens
ccccgggccaactcagatggcatcctgggtctttctcatcacacccattaaagaaaccacagattgtatggctcctgggagagcctgctggatttcattcctgtccctgtagctgacaaa

SEQ ID NO: 4491 - DNA, 120 bp, Homo sapiens
ttacgtgtcgccacgcggtcccctgtggggagcgcatccatccccatctgttcttttccccagctcccagctcgtgcgagacgcaaagaggggagcccccagactcctgactctagggag

SEQ ID NO: 4492 - DNA, 120 bp, Homo sapiens
ttacgcctctcctcttccctctcccaggatctcgcaactgggaaactataatctaggaggaaaatctaggcgggcaagaaaaggggctaggttctgtaagatgtgtctgtaagcctcctc

SEQ ID NO: 4493 - DNA, 120 bp, Homo sapiens
tcccgtgctaccttgggagccccacaacctcctcccatccaaccgtacgcactgcacatacccgaacctacgttacttcccgatccaggcaaacacatctcacatcacatacaaacaact

SEQ ID NO: 4494 - DNA, 120 bp, Homo sapiens
agacgcccacttctcccgtgtcgttttcacacacgcccttctcacacgcaaacagccctcgctcaaacatcccccacccacgggagcacctgctccaaacgggcccacatggccctgacg

SEQ ID NO: 4495 - DNA, 120 bp, Homo sapiens
atgcgcacgcacgcagaaatcccttccagccacatcccgggcttcattgtcaatcagattagtaacagaatggaaacagacaagtcaataaatcaagtctagaaacagtcccagtgttgt

SEQ ID NO: 4496 - DNA, 120 bp, Homo sapiens
agccgaggaaaagtgcttggttgcctgcagattaatattattgccaccagatggcaagaattcctcaaaggctctaagtctaagatttttgtttcattttcttcttcagatctttccaac

SEQ ID NO: 4497 - DNA, 120 bp, Homo sapiens
caacgcattagaaagggaattctcatttggcttctctccatctagtctggctccatcagagatctgactcttttcttcctaaatggctctgctggaaggtcactgtataatcagcctgga

SEQ ID NO: 4498 - DNA, 120 bp, Homo sapiens
tcccgatttttgtagtgtgagatcacacaaccaaaatgtctgcttcagcttcacaaggaagacactcacatatttctctgtcgggtaagagactcatcaataaacctctccactccgggc

SEQ ID NO: 4499 - DNA, 120 bp, Homo sapiens
agacgctgttgcctcaaagggttttctcaggaccttgtcaccagaatttatctggtaccttagcggtgtttgaaagatatcaggagtaaagagatattcccagatttaatcaaactcatg

SEQ ID NO: 4500 - DNA, 120 bp, Homo sapiens
cagcgtatcctcattcttcttggatgcaggacaagagttcgggtacgagttataatacaggtgggctgtctgctggggcgcacccggtccagcctcctcaggctgagccggtatgcaagc

SEQ ID NO: 4501 - DNA, 120 bp, Homo sapiens
caacggaggtccaggctggggagtggtacgtcgctggccggagatcccggctggcaaagtgaccaagaaaaaaatattgtgtcaatatcatctggaggtaagaaaatattacacattcac

SEQ ID NO: 4502 - DNA, 120 bp, Homo sapiens
ggacgactcaaatgctgaggggtggcttgaaaggctggaaatggaaccatctggagccttcttcactcacagatccggtgcctgggctgggatgacatgaaggctaggcttagctgtggc

SEQ ID NO: 4503 - DNA, 120 bp, Homo sapiens
gagcggggaaaaaaaaaaagaaaagaaaagtagacaatatgcttcttatctttgaagaaattacggatgggtagatgggttaattttaaaaaggagaagacacatgctactatttaaaga

SEQ ID NO: 4504 - DNA, 120 bp, Homo sapiens
atccgcgctgtggcagcagctttcctcattaccctcattcttaggcatcttctatgtccccagaggaattgaagtcaactctgtttttttattcagtacagtgtccagcagcaactatga

SEQ ID NO: 4505 - DNA, 120 bp, Homo sapiens
acacgtgtgaaagtatttggaagtgcataagtggtgtgtgtaaaggggaatgtcatgttcagccttgtgtttttccttccttcttcctactggaacccgtttgagtctttgttacccagt

SEQ ID NO: 4506 - DNA, 120 bp, Homo sapiens
cagcgatgagaattctggccctttgtctttaagcattatattaagcagactttgacgtttttgtttgagcattttactcaacattactaaccccttttccttctctggtccctgggaaaa

SEQ ID NO: 4507 - DNA, 120 bp, Homo sapiens
caccgttttgctacataccatgagaatgactcaacctcttgcacgctcaagtacctgactttgagcagttacctttcctaagtgaaaagtgagcatctgaaaagagatcacttgctttag

SEQ ID NO: 4508 - DNA, 120 bp, Homo sapiens
acacgctgtgatctggcagaacagggagattagcgtgggaagacacttctgcctatctctctgttgtgcactttgcccagttctcagtctgtgcttgctatttcgctcctgtctgtctcg

SEQ ID NO: 4509 - DNA, 120 bp, Homo sapiens
tctcgaatattcttacttgtcttgggcaacatcccaggaggaagcactcatctcctccacttatggtcatttaagtgacaaaacgtcctccatagtcacgttctccctgctaaagaaagg

SEQ ID NO: 4510 - DNA, 120 bp, Homo sapiens
ccacgcctacttgtacaaactagttaacctcaaggttctgttgaagtcctagtttctcaccattctattctaataccttagaaaggtattttgtatacgtttcaaaacaacgttggctgg

SEQ ID NO: 4511 - DNA, 120 bp, Homo sapiens
aaccgttgagcaagtagtagcttgaatgttatcttacaccaagtaatcagcagaggaaaaatagctgagattttgacttcatttcttgaatagatttgtttgtgtgtataagctagccag

SEQ ID NO: 4512 - DNA, 120 bp, Homo sapiens
gggcgtagtgtgtttgccaaaacttcattccaaaggcaccaggcgggtcaggcactatttcatggttctgaaacatactgagttcactcaaagtcagaaaagtttgcaggtctataaaga

SEQ ID NO: 4513 - DNA, 120 bp, Homo sapiens
acacgtatcttcatccttttgtcttcagttttgctattttggaacccagcgggtcatttcttttggagtcagccctcccattccaaggctaaaaggtcatgagatctctctctcccctgt

SEQ ID NO: 4514 - DNA, 120 bp, Homo sapiens
agacgcaaggctagggcgccatctcctggtcgattttgaatatgacaaaattgaacttggattgagactcgtgttaatagaggtgaaaatcagctgatttaagttataggtggaaaggcg

SEQ ID NO: 4515 - DNA, 120 bp, Homo sapiens
gatcgggcaggaaagacagtactggaggatcagcctctttgctctgatcttcctcctgagccttccctttcttgtgataaggatccctttcactgttccattctctatttccacccattc

SEQ ID NO: 4516 - DNA, 120 bp, Homo sapiens
ccacgtgtctgcaaatcttcccagagccctgatttggatttattttccttctcccggatgttcttgaattggggtgtgttcctcttagtgctagctcctcctatcacttcttcttcccat

SEQ ID NO: 4517 - DNA, 120 bp, Homo sapiens
acccgccttcttagagtttaagtcagagggtgtgatggttaattttatgttccagtttgactggactatggggtgcctagaaatttggtcaaacggtattctgggtgtgcctgtgagggg

SEQ ID NO: 4518 - DNA, 120 bp, Homo sapiens
ttacgcaatcagctgaaagcctcagtagaacaaaaaggcgaacactcccgtgaatgagagacaatcagccctgcctgcctgagtgtcttggagctgggatatcggatgttcttctgtgtt

SEQ ID NO: 4519 - DNA, 120 bp, Homo sapiens
tcccgggtcttcagcctgctgactacagaattgggacttagcttctataatcttgtgagccagtttccaggaatgtccttcatgtaatagggaaatgatgatgtttgctttggttgcctc

SEQ ID NO: 4520 - DNA, 120 bp, Homo sapiens
gatcgcagaacaaagggtcctgactcaccaaggatacaggtatttgttgtgatttactttctcattcaaaatacatattggatattgtatctaattttgtattggtaattttgggttatg

SEQ ID NO: 4521 - DNA, 120 bp, Homo sapiens
gaacgtcaacatccttctttgagagagatacaattcaacccatgacactctcccagtgccaacctcctgcccagaggaaaatcaatggccactgcacttgcctatctgttcctgtctgga

SEQ ID NO: 4522 - DNA, 120 bp, Homo sapiens
aggcgctgtctcacaaaaaacatgttaagattgtccaaaagcttcagaaaaatattcaagatttttggtggtttgcctaatgtttcctgtggaactaggcatgtactggttgggagctgt

SEQ ID NO: 4523 - DNA, 120 bp, Homo sapiens
tgacgtctgttcaattcaggaacctcactttaaatgacagtggtctgagagctgtgtcaggtggctactgtttctggtatatgttgtattttagctaatgcgtgggcgggtctcccagtc

SEQ ID NO: 4524 - DNA, 120 bp, Homo sapiens
aggcggccagaatcaagtttgtcctgccccgtgaggaagtacaggacaggaatttctggaaggagctgccagagccccaggcttggtactttccctgctgagtctgatttagtgatagct

SEQ ID NO: 4525 - DNA, 120 bp, Homo sapiens
tctcgcgtggttctctcctgcctagctcatctgttctgggttcatggaactcccaggaggcacccatcatcacacagtggtgacaggctccacatttagaaaggcacagaacttcaaatg

SEQ ID NO: 4526 - DNA, 120 bp, Homo sapiens
aaacgagcctaggaagtgcttcgttaaacaaggtcaacaggattctcgatacagcacttctcagggccttgccaactccaggagggagatttacaggcagtttcctgttcttatttgatc

SEQ ID NO: 4527 - DNA, 120 bp, Homo sapiens
ccacgctttgggaaaccacaatctaaatcaattttcatttgtttccccctttcattttataggtgggaaggagaatagactgggtgagaagtgactctctgaggaccagtggggctaacc

SEQ ID NO: 4528 - DNA, 120 bp, Homo sapiens
tctcggtgtgtcacccaggctggctggaatgcagtggcattattccagctcactgtagcctgaacctccaagtgatctcgctcagccttccaagtagcggggaccacaggcaccacactg

SEQ ID NO: 4529 - DNA, 120 bp, Homo sapiens
cttcgtcctcccaaaaggttgggattacaggcatgagtcaccacacccagccaggatctcttatgtatggacctctcaccctcttcctccctcacaactgtcctgtggcttttctacccc

SEQ ID NO: 4530 - DNA, 120 bp, Homo sapiens
ccccgaagtttctcctacaacccccatccttacctacacatgggcaaaagtcagaggagctgggacaatgcaacacaggcaacagaaggttggatccaggggagaaagggcagtgtttca

SEQ ID NO: 4531 - DNA, 120 bp, Homo sapiens
ggacgggagaaggatctagctggtaactacagctaccgagatatagggagaggactgcagggtggctgggaaaggccttggagccacatttccaaagatacgtaagaatccagggggtga

SEQ ID NO: 4532 - DNA, 120 bp, Homo sapiens
gtacgctgcatacacatctggacctacccaggaagccacaagagggaccaagtccaaggtctagcctctgcttcccttccgccttggaaactcttccctgggattgctctacccatccat

SEQ ID NO: 4533 - DNA, 120 bp, Homo sapiens
ctacgccccactggatggaattgagagaggaagagaagttatgcatctagagtggaaactccggaggaaccctgaaaagagaaaaccttcccagcagcctcggggagccctcaacagaca

SEQ ID NO: 4534 - DNA, 120 bp, Homo sapiens
gtacggcttgggataagccacagctcctctctggccttcagtctccacaataaagcaagtggttggactagatgtgctgggaaggactctactactacacctacccaggctccacagctc

SEQ ID NO: 4535 - DNA, 120 bp, Homo sapiens
aggcggtggttaacactcaagtcagcttaggtaaatgcagctacctcgactctaagaatctcagttctgagcacaccccagagccctctctgccctgcctaccaggacccgctcccctac

SEQ ID NO: 4536 - DNA, 120 bp, Homo sapiens
caccgaggctcctcaggcaatgtcacctggtccttctcccaagtaatgatgggagctggcagcccttcaatgtggcactcaaagcgagctgtcccgttctcctccaccgtctgagactcc

SEQ ID NO: 4537 - DNA, 120 bp, Homo sapiens
ctccgggtgcagagagaagtctgcgagtgctggggacagtgagacacaggcagggacgggaaaagaataggagagagaagccacagcaagcacaaacagtgaaacacatccgcatggaga

SEQ ID NO: 4538 - DNA, 120 bp, Homo sapiens
gaccgagggagacacaacaagaagtggtgattagcggtcagatactgccagcagaatgaattccaaagcccccctgcccaacatcatcatgatggtcaaactatacagtaagatgcacac

SEQ ID NO: 4539 - DNA, 120 bp, Homo sapiens
gagcgtggggtttggctccacatgttccacctgccgtgcaggcaggagctcccttaggaggcagctttgtgcctctgacacaaagggggcactctggcaggctccctggaggacagcaca

SEQ ID NO: 4540 - DNA, 120 bp, Homo sapiens
aagcgggaagattatggaatacccaagaatgaggatagacaataccaggaagagacctattgagcaggatgggaggcagggaaagggggagtgggatcaagagagaggcatttgtgcaag

SEQ ID NO: 4541 - DNA, 120 bp, Homo sapiens
cttcgcacaccccaagtctgggtttcagcctcagacccccgcccgatgcaagcacttactggcaagcttgacgacagcagtctggctggccagcactccgagggggccgtgggctaggca

SEQ ID NO: 4542 - DNA, 120 bp, Homo sapiens
gcacgaatagttgccttcaatgacccccacagcctcagggactgactcgtcactgccattgggtgctagtggctgggacagccacagggaaccattgggcagcaggtgtaagtggtcgtg

SEQ ID NO: 4543 - DNA, 120 bp, Homo sapiens
cagcggcagcagcccccaggctacagtttagcactgcagcctgctctgggcccaggatcacttgcagtggccccactccacagctcagctccacagtcgtctcctggggcaacagcagct

SEQ ID NO: 4544 - DNA, 120 bp, Homo sapiens
gcacggggccatcagtgtatgtccccccacctcccacagcctctgctcctgagtcacccatgcaggggctggggcaaatcaaggagaaacacctgcatctggatcctggctctcccctta

SEQ ID NO: 4545 - DNA, 120 bp, Homo sapiens
gaccgatagtatcataaaactcttagccctacctatttcagcttggcactgccacttggctctgccttttaatctcccctgccaccttccagcgtattttggtttgcttttttttttttg

SEQ ID NO: 4546 - DNA, 120 bp, Homo sapiens
caacgtcatcatcacagttaatgagcatttatgccacatgtggtagtcagcactttgcatccatcatttcgttactcctaactttaaggaggagtacttttcccctgttatttaggtatg

SEQ ID NO: 4547 - DNA, 120 bp, Homo sapiens
aaacgctcttaaccctctgatgccactgtggtggggcctcaggctaagacaataaacaggctcaagaggaggccctggaggagtcagagtggaaagaccaacaaaaagaaaggctggtta

SEQ ID NO: 4548 - DNA, 120 bp, Homo sapiens
atacgtggcactgtcaacacagaacagctttggtggaggaaagaaaaagcttggagagaagcaatgtttaatgacacaaaaatccacatatgtaaaactattacaaggttagtgctggtt

SEQ ID NO: 4549 - DNA, 120 bp, Homo sapiens
ccacgaagtatactcctctgactttcttgaagtggtagacaatattttcataacttttaacaaattcacttcagaaaacatttgtatacaaaacactgcactaggcacagaaggaaagca

SEQ ID NO: 4550 - DNA, 120 bp, Homo sapiens
actcgttgctatgggagcccaagcgagtggagtgattaattctcattgtgagaattgaaggtgacaaaatagacaaaatagatggcatttggaccaaccctgagagaaactggactttct

SEQ ID NO: 4551 - DNA, 120 bp, Homo sapiens
catcgttgtttggggaacggggctgagggtggtacaaggaaggaaaggtgtgtttgtttgtttgtttttactttgcatctttataatagagctaacaaaagaaagagatgctcataaatt

SEQ ID NO: 4552 - DNA, 120 bp, Homo sapiens
acacgtctttagtccatacctctctcctgcacttcaggattgtgtattcaactgcctccagatagctcagtcccaagtatacctgaaattcagcatttaaaggtgaagtcattatcttta

SEQ ID NO: 4553 - DNA, 120 bp, Homo sapiens
tctcggtttgcaacagtcacagcagctatgttacaaccacagaacaaggttttgcaacagtatggccttgaaatagaatactgcccagttgaaaacttaagcaatcaaaatggaatatat

SEQ ID NO: 4554 - DNA, 120 bp, Homo sapiens
ctacgtacctgaactccatcagcatgtgaatttaacagctgcaatagtgctctgaagccaaagcctgtttgtcaaaaatgtgttaatctctttctctctcattttttttttcaagaggcc

SEQ ID NO: 4555 - DNA, 120 bp, Homo sapiens
acccggctaagggccctctttatttcagtgtctgttctcattggaaagagagccctccatttgatctgtatgtggcctttcctcctctcgtccagttacaaggcttgtcattctgttgaa

SEQ ID NO: 4556 - DNA, 120 bp, Homo sapiens
cctcgtaacaaccctatgaggtggatgaaaatatgttttccttccttcctacaacttgctcatatctctaggcttgggtcatctaatctgagtgcttcgtgtacttctcaacttcctttg

SEQ ID NO: 4557 - DNA, 120 bp, Homo sapiens
cctcgcagctgcatggagaagcagaggtgttagacacagcagcattcagatcaggtggcagggccccagtgctccagggttccctaggaattcctccgcagttaatggatctgtattagg

SEQ ID NO: 4558 - DNA, 120 bp, Homo sapiens
atccgctgaactgcagtcctgctccctgccaggagggggaagcaaggctcagactgaatacattggaatgtagggtgcttgggccaatacttgtgggatgacttaagtgttcttagtgta

SEQ ID NO: 4559 - DNA, 120 bp, Homo sapiens
gcacgttccttccaggctcaggaaggctcccagctcccatgacaggctcatttgcagggactgggtgctgttgaagggtggggcaggatttgcatggggtcttggtcttgggccttcatc

SEQ ID NO: 4560 - DNA, 120 bp, Homo sapiens
catcggggtagggaacaccctcaatcaacaacgtctctgtggtcagagtccttggccacccctcaggatctaggctgttggagaggccacagagtctgctacagggttgggaggagaact

SEQ ID NO: 4561 - DNA, 120 bp, Homo sapiens
actcgggcagtctcaggaaggaccagtcaacgcggtcctggaaggaaggaatctgagacctgcgtgggtgaggcctgggcatttagactcacaggagatttcacagccaagactatccct

SEQ ID NO: 4562 - DNA, 120 bp, Homo sapiens
gggcgtgcagctgcggtgagggcagccactccaggccccgccccagcccctccacctcctctaccctccccacccaggcaccctccaggtcccgcccctccaggtcccgcccctccaggt

SEQ ID NO: 4563 - DNA, 120 bp, Homo sapiens
tgccgcatgactcactagacgccggtgtagccaggtgcgcagaggcactcgccggcgcgggggtcgcagctggcaccgtgtcggcactggcacggcagctggcatcccttgccgtgggtg

SEQ ID NO: 4564 - DNA, 120 bp, Homo sapiens
gtgcgcagagctcctcgcagcgccatccacggaagccggcggcgcacacgcaggcgcctgtgatggggttacacagggcgccgttctggcactggcaccggttgctgcagtggggccccc

SEQ ID NO: 4565 - DNA, 120 bp, Homo sapiens
ggtcgctgtcgcagcctgcaagagacgggacagtcagggatcaggagccccgaaggctctccttggggcaggggccaggaaccgatgcccatgcggccttcccatctttgcagcgctgct

SEQ ID NO: 4566 - DNA, 120 bp, Homo sapiens
ccccggacaggtggcagcaaggggtgcctggaagctttggtgcctcataacctgcatcagttcttccaccaagccatgcaaatagtcgcacaggctaagaagggcagagcgtttgtttcc

SEQ ID NO: 4567 - DNA, 120 bp, Homo sapiens
gtccggccattctcttccaaccaaatggctgccctaagcccccctctcctgtattgaaattccggagccacaagctgtttacatccctctttgctaagctcttggttggctgcctgtttc

SEQ ID NO: 4568 - DNA, 120 bp, Homo sapiens
tgccgggccctttcttttcccatctgccacccctctcctctgtgaccctacccctctcttcttgggacctgcgggacccagcccattccagctcccatttctctatctttcctgcccgct

SEQ ID NO: 4569 - DNA, 120 bp, Homo sapiens
acacgcattggttttctcaccatttgcatttcactcactctctgggaatatttcctctaactccctgcccctcccctggctccatctccctgtcacccttttcatctcttcctcatgctt

SEQ ID NO: 4570 - DNA, 120 bp, Homo sapiens
ctacgccccctggttgcttcagcttcagttcagtttcattactttccaagcagccagcttcagaaggagcaggaaaaagaaaggcttccctgggaagtaacaggcagccttcaagatctt

SEQ ID NO: 4571 - DNA, 120 bp, Homo sapiens
ctacggctatggaaaggggctgagtagcagagccccagagaggtcaccaagcctgctgccacctcccactctgaccctccccgatgcatatgggacacacaataacaagatgtcctcagt

SEQ ID NO: 4572 - DNA, 120 bp, Homo sapiens
attcgctcaaattctggggtgaaagtagggtgtggagttcaggcatggacaggcacacataatgttctgggagaagttggatggaaagaatgattgctcccagctaaggagaccaggcaa

SEQ ID NO: 4573 - DNA, 120 bp, Homo sapiens
ggccggtcaccgagattatctgttgctgtttgtgctccaggtttctagggtttagacactcagagaggaaagggggcaggtgagtgggactgggaaggtgtcactggggtagactcaata

SEQ ID NO: 4574 - DNA, 120 bp, Homo sapiens
tggcgttcaagtgttgggcgtgtacaagggtacaaggttccagtgtggccagtaagtgcatgtgatctttgggggctgaaggttggtggaaggatcagccccaccagtccccgacatgtc

SEQ ID NO: 4575 - DNA, 120 bp, Homo sapiens
aagcggtcaatgtcatggagcctgcctatcatcctgtagcagacagaatcaccaaggcctggaactcccattaccctatcttggttcatcccttcttcatctgtgccccaagtattcaca

SEQ ID NO: 4576 - DNA, 120 bp, Homo sapiens
actcggtgttacttaaccacaccgtctatacctcccttaaacctccaaggggaggctgggattcacagaggctgcggctgcatatcccacccatctcctagggtagcagggatggaggag

SEQ ID NO: 4577 - DNA, 120 bp, Homo sapiens
acacgcacgtggggaaaaccctaaccccgagagcttaccagggaccagctgcattctcccatgggttgtttcctctaattttcttactaatcctgtgccagttattcataccctgcctca

SEQ ID NO: 4578 - DNA, 120 bp, Homo sapiens
ccacgagatgccagtagtacctccccgacacacatacacacaattgtggcaatcaaaagtgcctccagatattgacaaacatcccctggcagtgggtaacatcacctgattgtgaaaggt

SEQ ID NO: 4579 - DNA, 120 bp, Homo sapiens
gcccgtgaccacacagctaacaaactggagagctgcatttgaaactagctgactgtatccatctagggctctttgcctcccatcacaccagctattacgagatgagaggctcaatgtcaa

SEQ ID NO: 4580 - DNA, 120 bp, Homo sapiens
acacggggtgatgagaggagctctgggcaagctgtctgctaaaactggggagggtgctccactgtcaggctagagacaaggaggcccgggagcgggcagtgtctcgggcagcagggcagg

SEQ ID NO: 4581 - DNA, 120 bp, Homo sapiens
tgccgtagcttccaccacagctccaggcagccaggtccatttcaaccaggagtatcaccatcaacatttcaggagtgagtggggagattcaggagcagttttatcagagccgggcatctc

SEQ ID NO: 4582 - DNA, 120 bp, Homo sapiens
ccccgttcctcaagggctgcaggaatccctattaaaatgcaaacaaccccgtttgtgcctctgtgtgtgtgtgtgggggggggggttagtcacatcctgaggcactatcagccattaata

SEQ ID NO: 4583 - DNA, 120 bp, Homo sapiens
cttcggggactttatcagggactttatcggggactttttttttttttttaaatcagcatctgctctggatgtagaatgccacagtattgtgtggacagataatgggaaggaacagtaagt

SEQ ID NO: 4584 - DNA, 120 bp, Homo sapiens
cagcgagggtgatctctggcctgtttctgagatgaggacattgaggacccaggaggcaccgcagagctggaacattggagttcttttatactttgttcagaagaaggtattgacacccag

SEQ ID NO: 4585 - DNA, 120 bp, Homo sapiens
tcccggaactcctgccaggtctccagacggtgctgatcacggaggctgatgccacctacctgcgctcccggcaggagcaccccgcactgtcctccctgctgttctagagtccaagtcagc

SEQ ID NO: 4586 - DNA, 120 bp, Homo sapiens
gctcggggtgagaggcaaactgcagtgggctgtcccacagggacccagggacccagaaagctatctgtccttagctctgctcaaagccctcccctccacccacaggcttttaatgaaggc

SEQ ID NO: 4587 - DNA, 120 bp, Homo sapiens
cagcggcccagcagcttctgatctgtttgcatcactgcctttgaagcttcccagccccaaagaccatttatctccacaatttgcctggaaagcctcataaatcatgtctgtgcacaaagg

SEQ ID NO: 4588 - DNA, 120 bp, Homo sapiens
caccgggctagccttgttggtcctgcaccctccccgacgtggccccctcacttgccttttggggtccctgagcaagtctcaggctgtgtgggggcgggtaggggagggagagggtaggga

SEQ ID NO: 4589 - DNA, 120 bp, Homo sapiens
agtcggagtgggcaacggcactggaagttgtggggtccaagcccatttcctctgaggagtgaactccagacatgaccatttccccatcattccccttcccaccatgaggtctggtctgga

SEQ ID NO: 4590 - DNA, 120 bp, Homo sapiens
tcacgggctgtgggcaaggcaccacccttccagacgtcagtgtcccccttggcaaaaaacaggatcaggccagatgactgtgtgccaagctgtgcccatggagttcagaggagttctctg

SEQ ID NO: 4591 - DNA, 120 bp, Homo sapiens
gagcggggttgggctgtgacaggggccccggacctcccatttccagggctccagagctgctgtgttttcgacctggatcctcacacagggacaaagcactaagcagctaaaagcggggag

SEQ ID NO: 4592 - DNA, 120 bp, Homo sapiens
aaacgtctgtgtttaattcctctcacactcagaaagttcttccctaggtctcactgaggaagttctcactggaagttctttcttttccatcacccactcactgagcagccacttcagggc

SEQ ID NO: 4593 - DNA, 120 bp, Homo sapiens
gcccggctccctggtgggcccacggagcattttggaatgaaggcctgcctcacctgttgccctattcatgctggagctgggggcctttttcaccgggtgggaaagaggagtgagagagga

SEQ ID NO: 4594 - DNA, 120 bp, Homo sapiens
cctcgacaggaaaattaattgctgctgtcattctgctttttgttccagtctatatcccaggaataagagatccgaatgacattaaataacctgtatataaaagccctttctaaagagcag

SEQ ID NO: 4595 - DNA, 120 bp, Homo sapiens
aagcgtgcacatgtggacacataatgggagggagaccttcatgctttcccttggaagcagaggaaattgagcccactgatccaatattgcaaacaaacacaagccccctccctctccctc

SEQ ID NO: 4596 - DNA, 120 bp, Homo sapiens
gttcggattcagcggctgcacgctgttgacctgcctggggctgagggtccaccgtgccagcactgagtgtgctaacttaggaagactcataggtcagcacacgtgagtcaccaggcactt

SEQ ID NO: 4597 - DNA, 120 bp, Homo sapiens
tgacggcagcgtttacatgcatcactagcagcatgaggcttatgcaatgtttagccttaagcaacagccaagcccatacttgggacaaactcaggaaaataaagtcacacatttatacca

SEQ ID NO: 4598 - DNA, 120 bp, Homo sapiens
atacgacggtgcccacttttcagaaggaaaaactgactgagcgccagatgacttactcaagcttatacaggttgtgaagtgaagaacctggatggggccaggtctgtctagccaccatgt

SEQ ID NO: 4599 - DNA, 120 bp, Homo sapiens
acccggaatcctccggccctgctggtctgacccgtccttcctcccctcccaggatgcctcccccaggaggtccttgcttgctccctggtgtctgagggtcacacccttctcctcagtacc

SEQ ID NO: 4600 - DNA, 120 bp, Homo sapiens
gctcggctccacttgctagaggggtctgagaagccgaagcccagaggctatttgctgatgtctttgctccaggcgcagaatgaccattggtcttgggtccagagagaggtttcccaaagg

SEQ ID NO: 4601 - DNA, 120 bp, Homo sapiens
tagcggctgccaggaagacagagagatgagaggcaggccctcaaggacaagagagggtttcagggaaggagccgctcgcagggcaggcaaagagcctgattgtcacacttcagggaagga

SEQ ID NO: 4602 - DNA, 120 bp, Homo sapiens
agccgggtgggcttgaagccagaaacagtcaagtggtgaatgtgagagggagcggggaggaagggcactggggcaccaacatgtgtgtgatggggcagtgcccaccccagcagggtccct

SEQ ID NO: 4603 - DNA, 120 bp, Homo sapiens
agccggggagtctcccttgggtgcctgactgtctcggggtccatggagcccccagcacagttcagagtctgcccctcccatctcattccagtcactaagcagggcacagaccagccagcc

SEQ ID NO: 4604 - DNA, 120 bp, Homo sapiens
ttccgccttgcccagctgtgctcttcaggagaagtgacacctgtggctgggctccttcctctaggctctcccctccgactcctccctgtgaaataagagagtggggctacaggcagcaca

SEQ ID NO: 4605 - DNA, 120 bp, Homo sapiens
ccccgctgtggtttctgtgcagtgcatgaagagtaaggtgaaccccagatgcccactctagggcagggagtggggacagaagaccctggctgtatctgctgagtcagccagcagcccacg

SEQ ID NO: 4606 - DNA, 120 bp, Homo sapiens
gaccgtgaatgactgtgtgggagagggtgtgcgtgtgcaagctggtgagcgcatgtgtgagtgtgtgcgagcgggtgcctgcctatgcgtgggtgagggtgtctgcgtgtgcaagtgtgc

SEQ ID NO: 4607 - DNA, 120 bp, Homo sapiens
ggccgggaagccagaatgagatgtgtagagcaggagagaagagaaagaaaccaagaacgctaaggtgaggaggagaaacgcagaaagaagagagatttggcagagagggcagagtcatct

SEQ ID NO: 4608 - DNA, 120 bp, Homo sapiens
cttcggaaggtccatctgacagtgaggcccatcaccacgactccaggcctgtgggactctccctgtctccacacgtcaggcttggtccctcataagtggcaaggggcagggaggccaaga

SEQ ID NO: 4609 - DNA, 120 bp, Homo sapiens
cagcgagtgtggatgattttggtgacagggcctgtgcgtgggaaccaggagcttgacctcctgacccttcccttctgggccctcagtcctcccagaggccgcagacagcactccccttgc

SEQ ID NO: 4610 - DNA, 120 bp, Homo sapiens
gaacgaagtctaatttacttggggaaaaaaaccttctgtggcccccaaatcaaatcactcagggagggaatggggttgaaaggaaccaggggaaataaatgtattcagcaagtgtatttt

SEQ ID NO: 4611 - DNA, 120 bp, Homo sapiens
ctgcggctgccttggtcttaggccaattttgccctccctcccctgggggcagcacaagcctctcctccaggaacccagcagctctgagggaggctagggaaccgcaagccccttccagcc

SEQ ID NO: 4612 - DNA, 120 bp, Homo sapiens
ccccgcagccagcagcagaccggctcctccagggggcctggcgctgtttccggaatgctgctgagagcttcggatggagaattgggttggaatactgcttgctgggtgacctcgggtatg

SEQ ID NO: 4613 - DNA, 120 bp, Homo sapiens
atgcgacctcactcgctgagcctctgtttcttctcctcatcttacgacattcttatgaggatcaataaagacaatatgaaaaacctcacatgcatcacttatgccatccttcccacggac

SEQ ID NO: 4614 - DNA, 120 bp, Homo sapiens
caccgctacccatttccttcaatccttcacctgcccattccaagacagcccatggccactccggtaagcacacggaggtggggttgtgatggagctaaaccggggaggggataacgggca

SEQ ID NO: 4615 - DNA, 120 bp, Homo sapiens
caccgcccctccccagctcgggtcctgtaggtggtcctgtaggaggttgattctacccttgtacagcacagggcccaggcccctaggattagatcattcaatttcctggtcgcagcgatt

SEQ ID NO: 4616 - DNA, 120 bp, Homo sapiens
aaccgaggcaaggtgcagacagattgctgacaacatcatctgagcccctggtgtggctgggcctgaagcaacatccacctctgttctttccagttacaagaggcaacaaatccccatttc

SEQ ID NO: 4617 - DNA, 120 bp, Homo sapiens
cctcgcccctcccagcttctggtttgctggcatccttggccttccttgctggccgctgcataactgcaggctccgctttggccacctcatgggatcccccatttgcatgtctttacacgg

SEQ ID NO: 4618 - DNA, 120 bp, Homo sapiens
ggtcggtcacattcaggcactgggggttaggacttcaatatgcttttttagaggggacataattcagcctgtaacagggaatgtctcaaaactctgaggggctgtctcaatccttccgaa

SEQ ID NO: 4619 - DNA, 120 bp, Homo sapiens
aggcgggctggggccatggctgtttcttatggtaaatattatcttctagagctttccttgtcttcacatattgagagctcttcgaggctgggtctgagtcttattccctctgactccagc

SEQ ID NO: 4620 - DNA, 120 bp, Homo sapiens
gggcgtcctgggggactgaactggccccatctgctctcctggcaggacttctgagggatgtctgggcagaagccacgataataccacactgcgtggcccagaggcccttcgcctgtgtgt

SEQ ID NO: 4621 - DNA, 120 bp, Homo sapiens
cagcgaatgtaattatgcccgcgtgatgttgacacaaaagaagccatatttgagaaggctttatcagcatccagagtcccagatgaccacaacagaaaggttttcacacactgcaatcta

SEQ ID NO: 4622 - DNA, 120 bp, Homo sapiens
gaacgtcctacccagaagaactggccctgctgagaagccagactctttagaagctgtaatggggcagtgacaggcaccaggaacctactcatgtccccacatgggactctgtcatttatt

SEQ ID NO: 4623 - DNA, 120 bp, Homo sapiens
gagcgggaaggatgaacagaagtaagcgaccacataaatgctgaagtatttacagatcaaccagcacgatgcctgggcaagggggaaagggagtggggtaatcatgacatgggagtcatt

SEQ ID NO: 4624 - DNA, 120 bp, Homo sapiens
gcccggcctccctgacccctttgatctccactggaggccttagcctttcttttgccagttctcccctcctggctggcatccttgccctcttgggtccccagttcccagctctgctcagtt

SEQ ID NO: 4625 - DNA, 120 bp, Homo sapiens
ttgcgttgatgcagcagctcctagccagctgctctccactggctggcagtccaccctgtactctagccaaccatgtgaaacacaaaagcgatcaggtcccctcttggtttaaaattctct

SEQ ID NO: 4626 - DNA, 120 bp, Homo sapiens
actcggtctttaaaaatcacctccaggggtgtctggatgaagatttcctccattggcctgggcagagtgagcggcctggaaaatggagtgagcacacatgttgaacacttgggctgcaga

SEQ ID NO: 4627 - DNA, 120 bp, Homo sapiens
ccacggcccagcacagtcccgagcatagagcgagcactaaacacagttgcactcactggtggtttctatatactcagggccccgggggacccaggctgtatttcaacctccaataggctg

SEQ ID NO: 4628 - DNA, 120 bp, Homo sapiens
ttacgcaaaacaaaacacagataagggcgggggaagcccagacattttacccagtgtgttttgcagctcaagtccacagaaagactggttggacatcttcctttatttagctcacctgtg

SEQ ID NO: 4629 - DNA, 120 bp, Homo sapiens
gggcgaataatcgggcttagatccctagtggagccgcttggctatgttatccactcaggtcaccataaagagactctactccaactcaaagcaggaggaaatttgggcttcaaccttagt

SEQ ID NO: 4630 - DNA, 120 bp, Homo sapiens
ctgcgagtgtcctgttctaattttggggacacagagacatcccaaatgtccaccagtctcacaaatcacttcctctgagcctctgtgggcacccacaaaactgagcttttggaccagtga

SEQ ID NO: 4631 - DNA, 120 bp, Homo sapiens
agacgacggcgacctcctcagtgtgtactcctgggcactgtgtcaatttcacatcaaccatcaaagaccatatctagaggtgttccatcaaaagtcagagttgtccagatgatcccacaa

SEQ ID NO: 4632 - DNA, 120 bp, Homo sapiens
tagcgagactccatctcaaaaaactacaaaaaaaaaaaaaaaaatgccatctgtttcttggttgggactctaactggtccaggagccaagccgaggtttgcacccacacgtgtgatgcca

SEQ ID NO: 4633 - DNA, 120 bp, Homo sapiens
gctcgcacagggtaagatgagtaagatccagcagcagatctgtcactgacttgctgtgagaacttagctcatctccctccctcctcagggtctgtttgtctgtctgtgaaatgaaagggt

SEQ ID NO: 4634 - DNA, 120 bp, Homo sapiens
gcccgggaacaaacgtgttcagaggtacagatggaaggccagggcatcagttctggggcagcaggtgagcttgcataagcaggccgggacccaggacagcgatcttggcaccaagcaaag

SEQ ID NO: 4635 - DNA, 120 bp, Homo sapiens
gtgcgtcagacttggggtctcctctgcaatcaagctgctcagataacactggcccttccctaaccaaaggtggccccatctgctgtccccagctcatggaagccctctgaatcaattctc

SEQ ID NO: 4636 - DNA, 120 bp, Homo sapiens
ccacgccccctggccaactagcctgacattcagctaagatccaagaaggctgggaggtcagggaaagggtggtagcctcccagaatcctccagcatatcatctccagagccacccccgaa

SEQ ID NO: 4637 - DNA, 120 bp, Homo sapiens
ccacgtggacccaagtgccaattctgaggtgacatgcttagcatgagtgattctgccatgcccaaggtcacacggcatgtgtgtacgtattagtgtgtgtctgtgtctgtagtggggctc

SEQ ID NO: 4638 - DNA, 120 bp, Homo sapiens
ctgcggtgagactgctatcacaatggtgtggcatgtgtccacgctgtgatggtatactcatgctatgatgaaaaacattatgccgtttcaaagacccaaaatgatctcacgacacagaaa

SEQ ID NO: 4639 - DNA, 120 bp, Homo sapiens
gcacgattttgtcagctgtattcagaataataaatgagtcaggtattcagatttttaaagcaatttattgaggctctttgtccatgacactgataacttctggcttgcagcccggtcggg

SEQ ID NO: 4640 - DNA, 120 bp, Homo sapiens
tcacggccggcacttcacctccctcctctgctctcacactggctctgctcctccctggaacagcaagcacagggagccctggaatctcaggaggtttctgagtcctaatcccagctctgc

SEQ ID NO: 4641 - DNA, 120 bp, Homo sapiens
tcccgggctcccagcttcctcttctgcaaaatggggttagtaataaacctgactcccaaggttgagatgccaaagagacacaggttatgagaagggcctgtgaacagcatagccccaggg

SEQ ID NO: 4642 - DNA, 120 bp, Homo sapiens
gggcgtatgggatgcagtacagatactactgggggtgcacagggggaatgagtatattagggtcctgggcctgataaggactgcctcccgggggtggggcaagtctgccagaagggaaga

SEQ ID NO: 4643 - DNA, 120 bp, Homo sapiens
ggccgatcaaaatctgtccctcatctccccaggtttaatttggaaaatggtacataagtcccagagtcactgtgtgcctggcctgattagtcgttgtgtatttcagtgttttccaggaaa

SEQ ID NO: 4644 - DNA, 120 bp, Homo sapiens
ggccgaggtaacgatctatttctggagcaactgaagcctgtgcttccattaagagaattatcaatcaattctgttttgtctgggggcatgtacgcactgtgtgtgctaaattaaaaagct

SEQ ID NO: 4645 - DNA, 120 bp, Homo sapiens
cagcgtagtttcttctgagggttccgtggaagaatgccgaccaaggcatttaggcttcagagaggcaaggcaggttatgaggaggaagtcagggggacttgagccatgtcactaagtcag

SEQ ID NO: 4646 - DNA, 120 bp, Homo sapiens
agccgatcacactccccggtgccagtcaggctcagtcctcaccggcgcatttcaaccaaagccagtgcggttttttcttcccctctcctgaaaagcagcttttagggctagcttctgata

SEQ ID NO: 4647 - DNA, 120 bp, Homo sapiens
aagcgttttggtaacaggtgttgaaactacagaaaggttttttctgcataccttccaactcagtaggaaattcagaaatgtgaaccacccattccttattcctggaggcaaaatggaggc

SEQ ID NO: 4648 - DNA, 120 bp, Homo sapiens
tcccgcctgactccagcttctctcagttgctttctgttccctcctcaggcaggcctgggcccatgaggtactaaccctcaatacactgaatcaccctatgtagaaggcaggacgcttgca

SEQ ID NO: 4649 - DNA, 120 bp, Homo sapiens
tggcgtgcccacaaatttctaaatttgccgtaatacatacagggactcaatagggtaggaagaacgggaggcaagccagaagcttgctaagccatgggaggcctctgacacaggtatgtt

SEQ ID NO: 4650 - DNA, 120 bp, Homo sapiens
gtgcgaagagggaaagaggagaaagaaaaaggaataggggtggggagtgaggccggtgggaggccagcctggcaggcttgggagagcaggcatctgtgggcctgggtgtgcacagctggc

SEQ ID NO: 4651 - DNA, 120 bp, Homo sapiens
aagcgggcctggaagtctgagctcagccgggtattgggtactaatgccatattcggggacttgcgagcccttactaagaatactctgtgaatattccctgttggattagaacctagatgt

SEQ ID NO: 4652 - DNA, 120 bp, Homo sapiens
actcggttgaacattgagtgtgctgttcactcatcagccactgtgcaccttactgagcaccagggcaaaagaaaaatggatggttcccaagaccttgtactgtgccaggtgccagccttg

SEQ ID NO: 4653 - DNA, 120 bp, Homo sapiens
tggcgaaatgcaggctcacgtggatgacctagacacaaattcaggactaccggcttgtccaatgccaagcttctgggatgtctctgtcctgcagactcaggggtgtgtgtgtgtgtgtgt

SEQ ID NO: 4654 - DNA, 120 bp, Homo sapiens
tcacgagattggagcagcggaggggaggatgttaatgctattgtgagaaaagagaagacgactggcttggaactcagaagacaagcttgggctggctgtgtgaccttgggtaggaggctg

SEQ ID NO: 4655 - DNA, 120 bp, Homo sapiens
ccccgaaggtccctttggctctgacctcaggagatgggctgcagatgaggatgccagacctcctgaaccatgttaggtcacaatatcctgtgtgtatttccctcctgtcatcccttggcc

SEQ ID NO: 4656 - DNA, 120 bp, Homo sapiens
agccgattgtgcctcagctgtgctttgaggaatctagggagagactggggataggcctcaaaaggggataagccctactcctcactccccacccttagggcaagcattgtgtgtgttggg

SEQ ID NO: 4657 - DNA, 120 bp, Homo sapiens
ggtcggtggggggatcggcggcaataactggcaagagatctgaataggaaaggtgagcttggggatcaagaattaagcacatgatccccctgcgcctcccctaccttagaggatgtggag

SEQ ID NO: 4658 - DNA, 120 bp, Homo sapiens
ccccgcgatgggaactgggaagggacagcaagttgtggaattctgctaccacttctgcacggctctcaagaaacagcagtagccgtggcaacatctttgcatcaaaaaggacatatctag

SEQ ID NO: 4659 - DNA, 120 bp, Homo sapiens
aggcgcccgccagactctggaccattccacaaagtggagatgaggataaaatcaccccgagggaggaaggcagaggagatatttatttcaagccaatttcacccactgtggagcaatcac

SEQ ID NO: 4660 - DNA, 120 bp, Homo sapiens
aagcgtgggaagagtgagtgagccggcacgaccgccagcctggcgcagctgccacagggaggccctgtgaggggacagcatctgctgatgagactgagtctgaggacggcctgagctgag

SEQ ID NO: 4661 - DNA, 120 bp, Homo sapiens
ggccggggacaaaaaagcacagaagtgggtctcttgccccaggtgtgccagtaatcagctgtgtgaccccaaatgagtcactgcacctctctgggctgttctttgatgagaaggagctag

SEQ ID NO: 4662 - DNA, 120 bp, Homo sapiens
tctcgcttgagaagaggacatgggcctgaaggcctgagtttgagttttccagcagcatccaccagccatgggactaacagaagaaccttaacagcttctctaggccttagcttccccatt

SEQ ID NO: 4663 - DNA, 120 bp, Homo sapiens
gtgcgtcctagtgctctcagcacctgccacagtgcggatatcaataaacattcgataactaatctatgattggatcaatgaatcagtgaacaagttcctgcatttgcgagagggaactga

SEQ ID NO: 4664 - DNA, 120 bp, Homo sapiens
agacggtggtggtgggaagagacttgccgaaggtcacacagctgatcatagcagagctaaccccaaatccagcactcatcccactccaccatgctcccaagaaagggaaaggaggccctg

SEQ ID NO: 4665 - DNA, 120 bp, Homo sapiens
gctcgccctttgcccctggctcccactcaatgatcctttctggcccctcatcttcctttcctgcacaaccacggccacaggcccaggcgccctggagatctagtgacagggagcctctac

SEQ ID NO: 4666 - DNA, 120 bp, Homo sapiens
atgcgttccaaaagccacatagaggaaaagtcctctgtggcatggcgagtcataaccccagacagtctagatgggcttggtttctgattctgccttccttgtggccttgaccgtcacttg

SEQ ID NO: 4667 - DNA, 120 bp, Homo sapiens
tcacgcagaatacaacccactggggttcagacaaaatgtactgagtgagaagctgactgtcatgcagttacaaaggttaattgcaggattcaacaaaaagagggagggagcctggcccac

SEQ ID NO: 4668 - DNA, 120 bp, Homo sapiens
agccgattaagaaacaagcatcatttaataattatgccactgatagaaatacaccatccacttagcagttttagagcccagtggggaggttcacctgagacactcctgatgatggccaca

SEQ ID NO: 4669 - DNA, 120 bp, Homo sapiens
gaacgcccatcccattgctccctggaagcagtgcctgctggacccctcgagctgtccgttaacagcatctggctaattaaagcgagatgctacatttcactctttgactgagtcagagct

SEQ ID NO: 4670 - DNA, 120 bp, Homo sapiens
tggcgggagcctgggagaagcagcccccacatcccagccggctccccctttcatgtggctctggggagacaaagcttctctgatccctttgaaagctgtggtccctccagcccccgagca

SEQ ID NO: 4671 - DNA, 120 bp, Homo sapiens
gaacggcagttcaaagccagcctggcgggcatggtggggtccagttgggatcaggaataattagggcattccagaccataagaatcaataacacaattaacaaatattgtgctattcctc

SEQ ID NO: 4672 - DNA, 120 bp, Homo sapiens
taccggagaaagggaactactcagaatgaagacttccttggagagtaattaatattctttgaggagtcgcagagcctgggagtggggctttttcccccaattgtgatgacattaactgca

SEQ ID NO: 4673 - DNA, 120 bp, Homo sapiens
ctccgttcgcagcaagacagaccgctgaccctgggagggtaggataagaaggggagcagggctggctccctccccacccggctgctgcccagatgctcttcatcagtgcctggctcccag

SEQ ID NO: 4674 - DNA, 120 bp, Homo sapiens
gggcggggggcagggtgtgcaggcagatgcagcagcaccgcccttcacccctcccacctgcccagctccaggttccaaggccccagcctcggcgcctctcctcctacttcctgggttttc

SEQ ID NO: 4675 - DNA, 120 bp, Homo sapiens
tctcggtgtccccacttatgaatatgaacccaccttggtctcaagtctcacctttccctcaatgcatccctagtgccctcagagggtaggaagggcaagaaagagggtccctggttttca

SEQ ID NO: 4676 - DNA, 120 bp, Homo sapiens
attcgggactttgcggtgtaagtcacctctcagcatcaccttctaggcagataaacagaaattattctgcaactcgcttatccagaagcataggctgacccttgatatctgacccctgat

SEQ ID NO: 4677 - DNA, 120 bp, Homo sapiens
gagcgaggggcacatgagactctccccctgctgtcctcccactgtggcctgtggatgcacatggccggatggcagtgggtggccagcacgcttcctgaggccagcctgcccaattggcag

SEQ ID NO: 4678 - DNA, 120 bp, Homo sapiens
gaccgggcatgggagggtatccaggctgaaggaggctgcccctccccgccgaagccaccgcttgctcacatgcagccctcctgggccttgtgtgtactgccatgccggtcccgccttgac

SEQ ID NO: 4679 - DNA, 120 bp, Homo sapiens
ctgcggtgaacccgcatacttgctggcttgcccataattattcatccatagtaatagctaaagtaaattctggctgtctcagcgagcactgacatctcctttgggaaaactttcaaagat

SEQ ID NO: 4680 - DNA, 120 bp, Homo sapiens
ccacgtccttggttccttatctaaagcttccctgccccattttgtttcattttcttttttgcagctaatccttgtgaagaaggcatcgtagaccaggatagctccttcttgaccccgggt

SEQ ID NO: 4681 - DNA, 120 bp, Homo sapiens
agacggccagcgctgctgggttccttcctacccgcaggcggagcaggagcaccgcggcagccggaccatcccggcaggtcacatacacacagtttgtacaactggccagtccttctccaa

SEQ ID NO: 4682 - DNA, 120 bp, Homo sapiens
tctcgggacacacatgccctccctggcgcctccattcaccccccacagcacactaagattcacaatacactctatgctgtgtcaggccctgggcactacccagggcttcaatttcctttt

SEQ ID NO: 4683 - DNA, 120 bp, Homo sapiens
ccccgatatcaggccagacttaagatggaaggctgcctctgaagaaggaacacagtagattcactattttaactatatccctccccccgccaaaagaaataaacagcaaaaatcctactt

SEQ ID NO: 4684 - DNA, 120 bp, Homo sapiens
ccacggtgaagtctgagctcgggctggagggagggccgctctccgggctggccatttaattgattatcgacacattctcaaggccaaagcacaaaggattcggcttttaaggtccctcct

SEQ ID NO: 4685 - DNA, 120 bp, Homo sapiens
ggtcggggttgcgggggtgttaagtctggcaaccgcagacggagcagcactgaggcagtgccaatgcagggcactcatctgctttcccccgaggggagaggaaggcaagatgtggtgggg

SEQ ID NO: 4686 - DNA, 120 bp, Homo sapiens
gagcgatgaggggtgaccagttgagagtacctggtatcacagcggcctcagagcaagccatcaacccggttcagatgcccccttgaggagggcatgggaatgacactgtcttatcttgat

SEQ ID NO: 4687 - DNA, 120 bp, Homo sapiens
ggtcgtggttacataaattaatgcatatgacaaaattcagaggaatatacacttcccccaaaaagtgagtgcatgtaaaaactggggaaatggaagtaagggctgtagtttagtaagtgg

SEQ ID NO: 4688 - DNA, 120 bp, Homo sapiens
ccacggcagggtaacagcctgcagggaccatcccccaggcctcccaactgcattcagtacttctgtcttcctctctgcgactctccttgggagagggctgcctgggtcacgggctcgcag

SEQ ID NO: 4689 - DNA, 120 bp, Homo sapiens
agccgctccagcacgcctgcctccctcccacactcctgaatcctgcccatgcttccggccccagctcagtcctgcttcttctcccttgaaagctttccagattattctagcctgcaagca

SEQ ID NO: 4690 - DNA, 120 bp, Homo sapiens
cctcgttcaccctttccagtcagaccaccggctcctaaggactcagaccataccaccctccccacagccctggcacagctgagcacttagaaggcagagagaagtggggagggagcgggg

SEQ ID NO: 4691 - DNA, 120 bp, Homo sapiens
aatcgataaatagaatccagatgaaaaatgctggcgtttaggagaacaactcttttatggttcttttcttttgggtctaattaacacattggggataaagtgtgctgttacatttaccag

SEQ ID NO: 4692 - DNA, 120 bp, Homo sapiens
tctcggagtggatgacaccttttcaattataacactgctataataaacccccacagagccaccgggcatggagtctacatccaatacacgacacctatttattccctaattatattgcaa

SEQ ID NO: 4693 - DNA, 120 bp, Homo sapiens
cttcgttccaggcttccccatcttataatctcaaaaaatcattcactttcccttgttctaccacattgattctcaaagtgtccaagtgtggtctccagaactagagaatcagcatcacca

SEQ ID NO: 4694 - DNA, 120 bp, Homo sapiens
atacgggctgggcccctcttactgcacagctgtcccaatctacagattcagggctccatttactcatctgtacaatggggctccagagcacaccaaacagctgtggatgctggaatttaa

SEQ ID NO: 4695 - DNA, 120 bp, Homo sapiens
cagcgtcaaatctttcaccttggagccttgaaccactagaggggaggttcagaattccctattatattgtcccatttcaggacttcttcagacattgttgtgtatttgcctctgttctac

SEQ ID NO: 4696 - DNA, 120 bp, Homo sapiens
ctacgactaaactttaagcctatggaggagagagcctagaatgtcagcatcacaaggtatgggactcctcctgtctgattcattgctgtatcccaagggcctagtccagtgcctggcaca

SEQ ID NO: 4697 - DNA, 120 bp, Homo sapiens
aaacgccagaatactgcccatctgaccccaccacacttggctcatggggaactgacttgccggccgattgctcaccctaagtctaggcctagaagacccctggggccaggttctgagctt

SEQ ID NO: 4698 - DNA, 120 bp, Homo sapiens
agccgcttaaccagctttcctgcctccttcttaggactcaagccctgtatcctgacaaccctccttccccaaatggaaacctacccgaggatcagctcctaatcttgccttctccacgga

SEQ ID NO: 4699 - DNA, 120 bp, Homo sapiens
tcccgaagtgatttcacctgagaatgcctacatgcactcacttccttgactacaaaacaatggctcctctttccctatgggttgcacctgatggggctgagccctgtgtgcgggctccat

SEQ ID NO: 4700 - DNA, 120 bp, Homo sapiens
gctcggtgcagggacagaacaggtatgcaacaaactgtcacatgagtgatttatcctgggagatgctcccagcacagcacctaacccgaaaatccagagacaggtcctctgcctctaacc

SEQ ID NO: 4701 - DNA, 120 bp, Homo sapiens
cctcgagcctgtcaaggatgtgcagtggcctaactgggaacacttgccctgtgcgaagaaagcagtaaagttagagtggaatactagaaaaggccctgacccagaagtcaggagacttgg

SEQ ID NO: 4702 - DNA, 120 bp, Homo sapiens
cgacagcactccaacaaagagagctgctgggccggggctccgctggctccgagaagccgcagaggtcggcgaatccggcccctccgactccgggaacgagtgggactgagcccccggcag

SEQ ID NO: 4703 - DNA, 120 bp, Homo sapiens
ctccgattgccccagccggccgccgcgagccgcaccccccgccccccaccccccaccccccaccggccggggttttaacccttgtttccctggcagagcgccggaggggcgctggtgccg

SEQ ID NO: 4704 - DNA, 120 bp, Homo sapiens
gggcgcgaggacccctgcccaagggagccgagatggccaggagcccaaaccatcccaaaggcctcctccaacccgccgcaggccctgttctctcggctcttggagggatggagagtgggc

SEQ ID NO: 4705 - DNA, 120 bp, Homo sapiens
gggcgatcctgaagcggagccactttgaaatatttttccggagaacatgaccactcgggagacagtcacactggcctcgcagcgcgggctgcggggcaccgatcccgagacgcggctgcc

SEQ ID NO: 4706 - DNA, 120 bp, Homo sapiens
catcgttatggctgctattattaacatttatccagtaccaacattttacttagcacagcacaaagtgtaaaggaagatccagcatctgctttgaaaataaacatctaggctcccccacag

SEQ ID NO: 4707 - DNA, 120 bp, Homo sapiens
ctacgtcaggtcttctggaatctgttcagcgttccaaggccctggctgggttgcatgaccctctgtggccaaagtcagggttcaaagaaccaggcagagagcagaaacagacatgaacaa

SEQ ID NO: 4708 - DNA, 120 bp, Homo sapiens
tggcgaaagaaagcaccgtgctttctcacgactcacgtgtgagtcaaactaaatgcttcacttaatgtcaccactctactgctccagtcgccttgtttttcttatcacctcatcatgcaa

SEQ ID NO: 4709 - DNA, 120 bp, Homo sapiens
ttacgaatcctctcatacactttaaaactcaagacccacaccatagtaaattttatctgtacaagtctttggaacacgaaagcattgacaagtgtccatggccatctaagaaatgtacaa

SEQ ID NO: 4710 - DNA, 120 bp, Homo sapiens
aggcgtatatttcaccagagtgagccactttttatagagtgggggagaaaaaagaagcccaaacgcttttattgctttctaaccaacaggatttctggatgcaaatgaatgaatcacctc

SEQ ID NO: 4711 - DNA, 120 bp, Homo sapiens
tgacgattggctgcctgagtttccttgtcacacttggagcaggctcggtggatgtgacttgtatcctcatgagtccaaggcaagataaaggactgacattgctaccagtgagttatgaga

SEQ ID NO: 4712 - DNA, 120 bp, Homo sapiens
taacgcagcccagccatcgcctattatatgtggcttccatctacttttctgtataatgtgatccactgtgcaaggtgatttggagaagcccagtgaataaattagtcatttttaaaagct

SEQ ID NO: 4713 - DNA, 120 bp, Homo sapiens
ctgcgttaagtctttaaggccaccagggtagcttttaatgcattgctgccattcttcaatagacactggtcttcttttgacatgcattttgatgacagtctggtgaaaaaagtagctggg

SEQ ID NO: 4714 - DNA, 120 bp, Homo sapiens
gaacgttatcagacaatgtgaactaaagaggaagaaaatccattttgacagtaaagaactcttggtaccaaattggcaaggttgcttttcccttggcacctgtgcttacctctaacatag

SEQ ID NO: 4715 - DNA, 120 bp, Homo sapiens
atacgggacctgaagttgatgcaagttgtaggggtcctcaaagaaaaatcatgcaaaaatagctttcttttgtgtattttgcagaaacatgtgagcatattactagggtcttaagtgtta

SEQ ID NO: 4716 - DNA, 120 bp, Homo sapiens
atacgcactgcaggcctctgtacatgctgttccctttgcctggaatgaatcactcctccttccctaggtaggcaggaagcagtcttcacctatttgcctaaatgtcacttcctctgagat

SEQ ID NO: 4717 - DNA, 120 bp, Homo sapiens
tttcgaaaaatcgtcctggtctcttgctgcaacttgattgtgtttttacttcatgtcctgtgcccttgttgctcagaatcccaagagagctgtttagaggctcagttacatgtttgctaa

SEQ ID NO: 4718 - DNA, 120 bp, Homo sapiens
tttcgtcttctcctcccaagatgaatagtgttttgttttgaaatagcaggtgttttctgaatcccatgaagggccaaaagctaaaagtgctgatcctgactctgatttcgctgcataact

SEQ ID NO: 4719 - DNA, 120 bp, Homo sapiens
catcgacaggtttgcggtcctctctagtctggggtaggtcttaaggggaaacttttgggagggacacacatacagtacagtgaaactgtacatgaactactcaggagacagatcacttgg

SEQ ID NO: 4720 - DNA, 120 bp, Homo sapiens
tggcgatctttgtacatatttgttctgctttactagctacattgtaagcttctgcagatgaagagttcagccttgatgtcccatctcccgcccaggcctgccatgtactagttgatcagt

SEQ ID NO: 4721 - DNA, 120 bp, Homo sapiens
gtgcgttgagtttcttgataactgttcttgaggtttctttttttttttggtcctttttgactgattaagcaaggctggactggttggagaccccagatgggaccaagaaatgcgaatcct

SEQ ID NO: 4722 - DNA, 120 bp, Homo sapiens
tgtcgctgtaaaagcaactatcctttgtaaacttactgcatagctaataatgtaaatcagtgttgtgtttaggaatcagctccaggactgtggtttgatatgtggaaacacctctgcgtt

SEQ ID NO: 4723 - DNA, 120 bp, Homo sapiens
aaacgttaagcatctaaaaacgaagtctttaggaggcttccaaggatctggaaagctgaactcagcaatttttagacttcagttttctggacaggacagctcttctagtcaaggaagcca

SEQ ID NO: 4724 - DNA, 120 bp, Homo sapiens
tttcgttaaacaaaacatactatatatattcactggaaatgtatttcaaagaaatctagaagtgtatatattctacagtgttaagagtagttatctgagggaaggtggaacatagagttt

SEQ ID NO: 4725 - DNA, 120 bp, Homo sapiens
actcgccttctaaacctaattctttagcatggtgtgctgtgcccttcatggtctagctcagtttacctgcagccccatctcatcactcacctggatgcatccactctcaggatattctca

SEQ ID NO: 4726 - DNA, 120 bp, Homo sapiens
aaccggagaactagggacccagagttaatggttcttgtgcaggaataaaagcttttgaactgttattttcataaagcatttgtctcttccatagaaaaccttcacaaaagcaccattgac

SEQ ID NO: 4727 - DNA, 120 bp, Homo sapiens
ttccgcctagtgctgcccccacctgcttagggctttcttttttggcttcaccaattgttgctctttggcatgaagagatgctttgtgagccagatgggtctctgaacagatgtctttgat

SEQ ID NO: 4728 - DNA, 120 bp, Homo sapiens
tttcgtcaaccttctgtaccagcttactgacagcaggcaactgtcgctgagaacagagtaagacgcaaattacgacatcattgcaagcaaaataaccccatataaatgaagccccttctc

SEQ ID NO: 4729 - DNA, 120 bp, Homo sapiens
caccgtattatcatcaataaaccagacccaggccgctaaattccatcagagatgaccagtcttaggtagtgaaacaaaggatacgtttccaaaagcaccctggccagagcggtgagtccc

SEQ ID NO: 4730 - DNA, 120 bp, Homo sapiens
atccgagaaaatcatgtggttcagaaacacggaccaatgaagtggaatttcatcactactgtaaagcagtccctaaaatatctgcagaagatataaatccatacctgctaattcactgac

SEQ ID NO: 4731 - DNA, 120 bp, Homo sapiens
gggcgagcacacgcctaaagaaaaagacaaggattatttttattgacaagtaatgtttgaagcaaactcttctcatacgccaacaataccattaaatactcaattgcagaagagactggt

SEQ ID NO: 4732 - DNA, 120 bp, Homo sapiens
acccgggctctactcatcccaacttccatccctgtcccactcaccctcaccctctactaaacacgtgtttccaaagctcaccagtggaaagactggtgatattactttttgtttaaacct

SEQ ID NO: 4733 - DNA, 120 bp, Homo sapiens
ttccgggcggcccccagcctgggcaccagcagtagcatccacagaagggtggcgacccacactggcttcatggtgcctggccctcccccatacctgaaaaagtgcagctggctctgcagg

SEQ ID NO: 4734 - DNA, 120 bp, Homo sapiens
aggcgcttgatctgcacccagcagcagaggctgaggctggatgtctgatgctgtttccgtgcctggggagctctgagactgatgggcaagactccaaactatcccttctccctaccttgg

SEQ ID NO: 4735 - DNA, 120 bp, Homo sapiens
ccacgtctacctcagggaagctccagtctgagggggcaggtgggaaaacccacagggccctttggctctcccaacgacacgcagacccctcccccaagccggggttgcccatcccagtgc

SEQ ID NO: 4736 - DNA, 120 bp, Homo sapiens
acacgagggagacccctcgctctggaatcccctctttggtgccagcccagccagcttacccaggatcgtccttgatcgcagacacccccagagcagtcgctggtagtcagagccctctcc

SEQ ID NO: 4737 - DNA, 120 bp, Homo sapiens
ctacgctgtcccctgagagaggagccacagcacagccgaaggctctggttgggggtgtggtctgtggctacagaaactttcaatagctccattcagtgggggccgggcaggaatgctgag

SEQ ID NO: 4738 - DNA, 120 bp, Homo sapiens
ggccggcagggcctgagtcagcagctgggggagcttggcgctgggtggggggcgggggggcaggggagctatcaatcaactccccatcctgggacagaagggcagccaaggaggggggag

SEQ ID NO: 4739 - DNA, 120 bp, Homo sapiens
cttcgagtcccaagctgggggtggcgcaggaccagtgtatgttgccatgtgtctctgtctacttgtcccagctgccaaaaaaaaaacaaccaaaaaacccaccataaaagatagagttgg

SEQ ID NO: 4740 - DNA, 120 bp, Homo sapiens
ccccgttcattcctcctgcctctctccaggcccctctgttaggccatgaaccccagcctgggctgtttccatcaccctgccactgtggccaagaaaacaggaagcatctgagtcacccat

SEQ ID NO: 4741 - DNA, 120 bp, Homo sapiens
ctccgcagaagccaggactgtcctgtggggctctgtcttcccacaatgtgggactccagacactcagtgatccaagaacctctcccccattcttcacactgccttaagatttggaattct

SEQ ID NO: 4742 - DNA, 120 bp, Homo sapiens
tctcgagtagactctgctccccactggctgtgggcctgggattgactggtgggtcttgattttggctgtaaattaacatcacctgggggtgctttaaaaactactgacacctgggttcca

SEQ ID NO: 4743 - DNA, 120 bp, Homo sapiens
ccacgcacggtgcttcaaattaaatgtttaaagcttccccaggtgatttcaaactgcagccaagcttgagaacgactgggctggtcgttctccctaagtccaagtctctccctgccaaag

SEQ ID NO: 4744 - DNA, 120 bp, Homo sapiens
taacgacatttttcggagggggaaacagtggcttagagagccacctgcccaaggattccagctgttttctgcctgaccccagacacatgctctttcctgcataccccgtgcccctccaaa

SEQ ID NO: 4745 - DNA, 120 bp, Homo sapiens
tggcggtgtagaccctggcaccctgtaccccagaggcaagggagagccaggaagggcccaggctccaaagcaggaatgtacccccccgccgaccccccacccccagctttcctcagctct

SEQ ID NO: 4746 - DNA, 120 bp, Homo sapiens
agccgggccctgttatcttcctctgagcctgacgccttgttcttcctgtttaaaattcagactctggacttttcctttgggggcggttatatgtttgttttgtgttttggattctcctcc

SEQ ID NO: 4747 - DNA, 120 bp, Homo sapiens
acccgttttgaataccccagtgactgagtagggggtcctctctgcccaattccctggcaggggaagagggaggattctgccgctctttctctggctgtcacatccaggctccaccagccc

SEQ ID NO: 4748 - DNA, 120 bp, Homo sapiens
ttccgctgccccctgttcaccccacggctccccttccagtcccatcccacgctgaggggctccaggctccctgcagcactctgttttgagcccagcacaccccaggaaggagattcagcc

SEQ ID NO: 4749 - DNA, 120 bp, Homo sapiens
ccccgatgggctgcatttttgatagtggagacaagaccttaaaatagctggcattgctgcctaaggggagagggcacggaactgggagtgaggagacctgggctcccatcttggctgtgc

SEQ ID NO: 4750 - DNA, 120 bp, Homo sapiens
catcgtgagatgctcttgaggactccgggtggggtaactgtggggagacccaggggatagagcacaagcacggggtgaagtgtggaagtgtgctcagctttgcagtgcagacccagcccc

SEQ ID NO: 4751 - DNA, 120 bp, Homo sapiens
tcccgctggctccctgaggaagggccggagccgagttctgctccactcctttctcctttcatttgcaggttttggaatatcttttctgtttactaattttggaaaaagtctagctgtttt

SEQ ID NO: 4752 - DNA, 120 bp, Homo sapiens
tgccgaagacaccacctgtacgtgggtacattgtgaggaggctccagtgaggggtagggctggtatgctggggcttgtccctgctggcctgttctcagtccccaccccagccagcctcgg

SEQ ID NO: 4753 - DNA, 120 bp, Homo sapiens
aggcgggcacagtgatccccacgtagctggctcccagcatcctgccgccagctccccaggctgcccgtctgcaagccctgcccagccctgcccggcccgccagagtggctgagggcctgg

SEQ ID NO: 4754 - DNA, 120 bp, Homo sapiens
agccgatggaatcagcgtgcccttcccttctttgtctgctggtgcttccttcccttcacagcgtgctttcttttttctggtttatcaggtcctggggaaagcctgggccagccaggctcc

SEQ ID NO: 4755 - DNA, 120 bp, Homo sapiens
agccgagcacccttgggaggccgccagccgggagcagacatccccatctcagtctccgggccggcagctcagcagtcccctccctccacctgatcccagcagttccagcctggcggccag

SEQ ID NO: 4756 - DNA, 120 bp, Homo sapiens
aaccgaggtctacagacaggcagtgcctggaggagccggaccctggctcagggctccttctcaaccagctgcagcttcctcttctcttccgcaacacagcgggcaagtccaggggtctgt

SEQ ID NO: 4757 - DNA, 120 bp, Homo sapiens
tatcgtgaccccatcactcactagctgggcaagttaacaaacatctattcttcagtttacaaatctatacaatgaagataatgatgcctgcctcactggctgttctgaaggttagaggag

SEQ ID NO: 4758 - DNA, 120 bp, Homo sapiens
ccccgatcaaatgtcctttgatatccaagtcatgtgtgttctttgtaggaaggttgggaagccttaagaaacaaacagaagccccagtcttccacgttggagggagtttttgcagaggtt

SEQ ID NO: 4759 - DNA, 120 bp, Homo sapiens
ttccgggctgctcacaactctgctcacaggagacagctctgccccgacggtggggcagacgagggagctccgagctgggaggaagctgggtcctgaaggggctttttctctggccttagc

SEQ ID NO: 4760 - DNA, 120 bp, Homo sapiens
taacgctctcttgctgaagaagcatattatttcttgctttctgtgctacctgcaagcagtgggtagcaaagaactctgggttcctgcatgtttattagataactaaccaatcaaataaaa

SEQ ID NO: 4761 - DNA, 120 bp, Homo sapiens
gctcgtatcttggcagtgcactgagaagtatgtcctggcccacccaggagcaacctgaaatcaggggctgttttgctcaacactgaatcccagcactagcacaatgcctgacatttagag

SEQ ID NO: 4762 - DNA, 120 bp, Homo sapiens
ggccggtagttggtatttgatgcggctcagctgggagggctgggtgaagtgcatgtacccatttatttggtttggctggtctgttgccttgtacaatacagccttagtctggggaagctc

SEQ ID NO: 4763 - DNA, 120 bp, Homo sapiens
ggccgtctgactcatctccggcggccagggcacagagatgacccagccagtgccagaggtcaccaggcctggccagcagacagaaatgactcctgagagccactgctccagccctggacc

SEQ ID NO: 4764 - DNA, 120 bp, Homo sapiens
ccacgcctggcctctacatttatcttgaaaaatgggggtgccacacaccaagtgagtgtcaccatgactgccttttgtcttgtggttgttgcatgtcagacatgaggctaagcactccac

SEQ ID NO: 4765 - DNA, 120 bp, Homo sapiens
caacgtgttaaagatcacacagctgctaagtggtataactaggactgaactctgtgctaggctgacgtttgtgcttatacttctgactgcttggcaatactgcctctttgttgccagatg

SEQ ID NO: 4766 - DNA, 120 bp, Homo sapiens
gcccggtttccccctctgaaaccacttcctgcttcttcccccttcttccttggtccctatctcctccctctgaggacagtgggttcctcatgatcagtggatcttccccagggacttcta

SEQ ID NO: 4767 - DNA, 120 bp, Homo sapiens
agccgggtgctggggtggagtggggagggacacttgcctctaaggacattttgaaatttgttctgtgttcacatctgacctatttttaaaaaatgaacacaaattggagcataatcagaa

SEQ ID NO: 4768 - DNA, 120 bp, Homo sapiens
tagcgcaggcacaccgctagcgagcaaagtacactggaacaccggcactgagggactcccacctggcagcagtcacctccgcaccttcaccgaccactgcagggagccccggtgacagaa

SEQ ID NO: 4769 - DNA, 120 bp, Homo sapiens
ctccgtcccctcccccactctgccccaggcttgtctcggaaactggggtcctcaggaggggacccacctcttctgggcatgggctaggggcctcctggcctcccagcccgtgggagtcag

SEQ ID NO: 4770 - DNA, 120 bp, Homo sapiens
ccccgccctgcccggctcagcggcccctagccctgcttgtctgctcctcctagctcctcctggaggtgaggaaggggtgataatgtgcagtttgcctcttgctggcgccagccggccgcg

SEQ ID NO: 4771 - DNA, 120 bp, Homo sapiens
aggcggccttaaagtgccaggagctccttttctgcgtctcccatcatggggcttagggttgagtcttcaggttctgggggcaggaaggacgggcactcaggaggccccctccccatccac

SEQ ID NO: 4772 - DNA, 120 bp, Homo sapiens
acccgggaggcatgtggatcttttcctaagcaagatgctgagctggaaagatgggggtgtaaggtaatgtcccaaactgaaactttgccaggcactgggagaggctgtgaactcttttct

SEQ ID NO: 4773 - DNA, 120 bp, Homo sapiens
ccacggaggctccaagttgctacttgctcggtcccctgaacttgggttatttctgtggtcagggcaatggcagcgttttcaggtaccagcttcaccacagtcagcactttccagaagagt

SEQ ID NO: 4774 - DNA, 120 bp, Homo sapiens
acacgtgcacatgtacagagatgcatgagaaagaagaaaaaagagagcgctgccccacggccaactaagttctctttttctttcctcccacagatctgtccgattccacattgtcttaca

SEQ ID NO: 4775 - DNA, 120 bp, Homo sapiens
aaacggaggctaccaactccctcatcactgctccgggtgaattctcaggtcagcattttttcttgtgcattgctgttgtgttgaaatttatcgaaggggacagctgcggagggggcttgg

SEQ ID NO: 4776 - DNA, 120 bp, Homo sapiens
ccacgttttaaccagttgtctctctcttgtctcacttggaaatgataaaagctcagcacagctctccctttcgtgtttagaaagagatcctcttcccccagctgcgagaggcagcaaagt

SEQ ID NO: 4777 - DNA, 120 bp, Homo sapiens
agccggttgaatgagcttgcagggaggatctggcaagtgaggagtttggcaaagccagtggtttctgtgtctctccctgagcagcagatgctgggataggaagccgagggaaccgtggtt

SEQ ID NO: 4778 - DNA, 120 bp, Homo sapiens
atccggaggaatacctgaatcaaactttccttgagaaatgagaggttggtgttggactggggacatcgagggccaggaccaaggtctgtggggccctttgggagcatggctggtggcatg

SEQ ID NO: 4779 - DNA, 120 bp, Homo sapiens
agtcgccaaaatcatagccatttattgagtgtatgctatggccggcactccacttggccgctttatatgcattctcttgggacagccatgggctgtttgtctccagggtttgtgctcttc

SEQ ID NO: 4780 - DNA, 120 bp, Homo sapiens
acacgggacagaagaaaggagttttccaggagggcaggaggcctcagtgcagccctgtgcaaaggggattggaaaagccagccctgggccccttttcagctctgccaccaacttgctggg

SEQ ID NO: 4781 - DNA, 120 bp, Homo sapiens
cttcgctcttggtagggtctgggcctgtctgcccttgtttcaggcccatcaatgaggggctgagcaggcccttttggtccagccctgggagagccagggaggttgctatggcccaggtgg

SEQ ID NO: 4782 - DNA, 120 bp, Homo sapiens
gaccgcctgctcccctgctgacctagacccctgaagacccagaggactcgggctgagcctcccacgaatgccctgaacctttgagtctaagctgggcacaacgctggttccttcaggggt

SEQ ID NO: 4783 - DNA, 120 bp, Homo sapiens
aagcggggagccggaggaaagcaggctgcagtttatgctcaggctcttggagcatgcagcccacgggggagcacacaggaacgttcctgccctttgttttgacagagaactgctgattcg

SEQ ID NO: 4784 - DNA, 120 bp, Homo sapiens
aagcgaaaaggcttttcttgggatttcagcactccccgcctccctcagactgcagtcagctcccttggtgtccctgcacccccacaaaattacatgttgggctcgcagcaccctccctgg

SEQ ID NO: 4785 - DNA, 120 bp, Homo sapiens
aggcgtagagaaaagaatgccagccatcagaggggccgatttctgtgcaggggagaaggcctattgttgggaccagtcaccacctcctcctcggcgcagacagccaccaccctctggtgg

SEQ ID NO: 4786 - DNA, 120 bp, Homo sapiens
acccggacttagtacctctcagtaagtccaaaacagtcttcctccaatgtgggaaaatgtggctatatcttcagttgagcaccagataaagtcgctggcttgcgtttagggtcctcatgg

SEQ ID NO: 4787 - DNA, 120 bp, Homo sapiens
atgcgtctttaatcgtcagagtcaccctgaggattgaaagttcatgcgatgcttctctgctgtgctttcagtccttgccgtgtgccctgtcttctcaccgccaagcctttgcacctgccg

SEQ ID NO: 4788 - DNA, 120 bp, Homo sapiens
tcccgtccatataccctgaaacgcctctgcctgtgcagtggcctcccaccgtgtggtcaccgcctgactgcctctctgtctttttatctttttcaccaggtccttccttctcttttgctc

SEQ ID NO: 4789 - DNA, 120 bp, Homo sapiens
cagcgcctagcatcgaatttggtgcacaagaggtgcacagcaaacgcctgtggaatgagtgaacggtggggacggtcagggctgcccctgcttgcacccgcgggaggctggggagggcag

SEQ ID NO: 4790 - DNA, 120 bp, Homo sapiens
gagcgctgcggggccctcccctccccgccgtcctcccaaaccctttccctgcccaacagggcgccactggcctgtcccacaccctctctgccgcctgcccagtgacctaattattgtttt

SEQ ID NO: 4791 - DNA, 120 bp, Homo sapiens
ccccgcggaggggaaaacagaaattcctggtggatgacacaggcccggcggccgcctgcgagccgagcacgggaccggctgggccggcttcgcccgccctgaacccgccacccgccccgc

SEQ ID NO: 4792 - DNA, 120 bp, Homo sapiens
ctccgcaggctgggggtggaggcctggcctgggtcaggtcggggtgcgggggacagatcttccagccccctctccctggaaggtccttgtgatcatggaccatatcttatttgttcctgc

SEQ ID NO: 4793 - DNA, 120 bp, Homo sapiens
ctccgacagctccccaggagccacagtctggaattccactgagggagatatgtctttgacattctcttcctgggaataattcagagggttcatttactgcactcaggcccggaggcttta

SEQ ID NO: 4794 - DNA, 120 bp, Homo sapiens
aaccggggtggaaacctgggtgctgggagatctgggcagggacgggtgtgccagcctgctcctcagcctccagtggggaaggggtgagcccccagggtgggactgatctccagacaggct

SEQ ID NO: 4795 - DNA, 120 bp, Homo sapiens
ttgcgctgcaggagcccttggggcctgtgggaatagcggggcctctgacagacgctttatcaggccctgtcgccagcgttatctgcggcttctcagcaaagaaggagctacagtcactca

SEQ ID NO: 4796 - DNA, 120 bp, Homo sapiens
ggccgggaacaaagcagccgagtcagctggcgtcccatggctctactgccagacccgtgggctcggcagcctgtgccccaagctgggtgttcaaggaggtggctggcccagccaggcgac

SEQ ID NO: 4797 - DNA, 120 bp, Homo sapiens
gcccgtctgctgggactcccccgccaagagcccgccgtcactgggaccacctcccttgagcctatcttcagaagggggatggggcatggggtcactccagtccttccagggccctgctga

SEQ ID NO: 4798 - DNA, 120 bp, Homo sapiens
tgtcggcgtgggatgagggctggggcagggctggtcaaatgtttacttggaatgatttgagtgggcaccctcaggccacgggggcagctggcgcctggcacggagcccctgtacccactc

SEQ ID NO: 4799 - DNA, 120 bp, Homo sapiens
tcacgcactgcaaaagggcaccttgtcgctgaaataagtggatctgaaatttgtgcaatgcagtaaggggctgatttagcccagaggctgctttttggcaattttctgctaggagagggc

SEQ ID NO: 4800 - DNA, 120 bp, Homo sapiens
gggcgccattgcataccgggcactggggatgacaacatggttcttttggtaggagctcacagggttttcgggggagggttgccagatgtaatacaggatgcccagttggatttgggtttc

SEQ ID NO: 4801 - DNA, 120 bp, Homo sapiens
caacgaatatacatatataaaatatgggatattataaacactatatatgtaatgcttttagtataagtcccatgcattattgcaatgtctgaagtgtcatgagggacacctccccccagt

SEQ ID NO: 4802 - DNA, 120 bp, Homo sapiens
gtacgtagggttagggccctggggccatgcgggaggctgagcagccgggcagtgtggctgcagaggagcctgagaggcaacagggacaagatggagtgtggccttgaagtgccgggagtg

SEQ ID NO: 4803 - DNA, 120 bp, Homo sapiens
aagcgtcattcatatgaaatgactgcaggatccctgaccagctcagcacagcaacccagcttccctgggtggcagggctgcttccccagaggtgccatgtgtctgatgggcaccatgaca

SEQ ID NO: 4804 - DNA, 120 bp, Homo sapiens
ccccgcacttgcatcaatacgatccaagctgacgttaattctcttaacagctatatgacatctttattttttaaatttctgttttagttctcttccttgcaagatataccacatctttag

SEQ ID NO: 4805 - DNA, 120 bp, Homo sapiens
caccggccagagtcttagtgaccagagtccagctgcagggctgggctcagccactgatgagcctgtggccttggtcaagtcacttcacctttcagcctctgcttccttctctgggaaacc

SEQ ID NO: 4806 - DNA, 120 bp, Homo sapiens
acacgagtgtggagaaagtcagcctgcaaggcgagcaccaggacttgacagtctctaaaggatggacggatgtccgtccggaagggcagtccacgcagacccccgcccttggccggacag

SEQ ID NO: 4807 - DNA, 120 bp, Homo sapiens
tttcgctgccacccacccacggcgtccccagtgtccctctcccgacagtcccctcccccacttctctgcccataggagggaaacccatttccctgggaacagctgtgtttcctcaacaaa

SEQ ID NO: 4808 - DNA, 120 bp, Homo sapiens
aaacgtttttgaggaagagcggatggtaatgagcagacatctggccgagcggcacactttcgtttttggcagctccggagcccgccaagtgactattccctaatgttcaccacatcccag

SEQ ID NO: 4809 - DNA, 120 bp, Homo sapiens
ctacgcctcaattaagagcagatgtggggctgagcgaacaaggaggaaaaaacacccttccccagcgtccctctgcactgctcaaaatccaaggaagtggtctgagaactcgcagcggct

SEQ ID NO: 4810 - DNA, 120 bp, Homo sapiens
gtccgtccgtctatccatccggctgcccctgccatggcctttggggatacagatctgaacgacagatcctttccccctgtctcctcgacagacattcttcttccctataatacaggcatt

SEQ ID NO: 4811 - DNA, 120 bp, Homo sapiens
aaccgagaactcaggaagagatcaaggactgggttcaagtcctcccactccccccaccccccatctaatttgatgactatcattgagatactgaccacccctctctggacttggtttctt

SEQ ID NO: 4812 - DNA, 120 bp, Homo sapiens
gggcgcactgatgatggctgcttggctctacgcgtttgggaggattggccaaagtcagaggtgggaaaggactttgacaaggcctggcctcagcccttccccaccaccatccacagggga

SEQ ID NO: 4813 - DNA, 120 bp, Homo sapiens
tggcgggaagagatctccaggccttccgcccagctgctccgtgcccttgggagcccctgcgtcgccagcccacgaccagccgatgactttaccagctgtgtggttgaaacccgagctctc

SEQ ID NO: 4814 - DNA, 120 bp, Homo sapiens
agtcgaatttccctcagctgacgtcagccccaacttaggcccaagcccattgaacctgcagtggggctgagggagggctgccttgcaggacagaaggtgcaggtttcaggcaccgatggc

SEQ ID NO: 4815 - DNA, 120 bp, Homo sapiens
ctccgaaggaaagttgcaggaagctcattcattctgagaggggttagaaaggtgggtggaacgtgttttctaattttggtccagtcacttactgttagctgagtgacttgggctggacac

SEQ ID NO: 4816 - DNA, 120 bp, Homo sapiens
acacgtaacctcactgggacacgtaacctcagtgggactcagtttcctcatctgtaaaataggaataatagtccctcatacctcctagtagtgggtatcaaatgtaaatcattaaaaact

SEQ ID NO: 4817 - DNA, 120 bp, Homo sapiens
caccgcgcccggccacatacaaacattttaaaagctcccagttgcacgcatctagttgatcagtgaatgacagatctttcttaattattgatgttccaagactctatcagcctggtgtca

SEQ ID NO: 4818 - DNA, 120 bp, Homo sapiens
ttgcgtaagcatgagccttttgttaggcagcgtggatgttgcaagtttaaaccccaactaggaaatgaaaagtgagtttcctcctaaatagttctttttcagtatcacatggctctccca

SEQ ID NO: 4819 - DNA, 120 bp, Homo sapiens
ttacgctgtcactgctcaaaaatgccaaaaggcattttttccttaaaaaatcacctctgggctaagcccaaatgtggagtaatgaatccagaaaggactttttgagtagttacaagtggc

SEQ ID NO: 4820 - DNA, 120 bp, Homo sapiens
ggccggcctggggaaatccatgttttttaactttcctaggtgattccggtatgtggccgggattgagaatcacagccatagatgcttatgtaaagctgtgttcagtgttacaggcatctg

SEQ ID NO: 4821 - DNA, 120 bp, Homo sapiens
aagcgtgcacacacacacacacacacacacacacacacatacacagagaacagctctaggttctggaagtgtgttgatttggtcaccacaagtgctggtggtgagtagttgccctgaggt

SEQ ID NO: 4822 - DNA, 120 bp, Homo sapiens
ccccggtggattctaggggctgtgaaggctgtaggggtgtgtgttactccctgctgctttggtgagagagtgtccctgtctttggctgagagcatcctgtcctgccacttcatcagcagt

SEQ ID NO: 4823 - DNA, 120 bp, Homo sapiens
atgcgccctaggaggggagactatatcagtgctgaaagcccttgagggctttcacagatgaagggggatggtatgagaagctttacaaataacaaggtttgagatgcagttgtagacaca

SEQ ID NO: 4824 - DNA, 120 bp, Homo sapiens
tcacgtgatagcagtgaagaccttctatgtcctggccacacagtgaggatcagaagacagagcatggagagtggaatgggacacatggatcaaggaacgtggacctgagcaagcaaaagc

SEQ ID NO: 4825 - DNA, 120 bp, Homo sapiens
taacgtgatgtcagtgtctctgggaagcagccttagttggcacctcactggcagcaagaatgacttcatgttcttgctcccatgaaaattctctgctttcaggaatacactttcctctag

SEQ ID NO: 4826 - DNA, 120 bp, Homo sapiens
agccgccttctcttgcaaagtgggcctttaaaaaaggggtgtatggctgcttagttctgaagaggccaggctaggagaccccagagggacacccagaaatcccagatatacctcctccat

SEQ ID NO: 4827 - DNA, 120 bp, Homo sapiens
cttcgtcctcagcctcccggtggggtgatgagtcacaccagtgggaaagtgcactgtatacttggtcatgtgcagagcaccttcccattggtttatctttacaactgccctgggtggaga

SEQ ID NO: 4828 - DNA, 120 bp, Homo sapiens
tagcgcaggaacagggactgaggccagccctcagttctttgacagagttctttgtctacactgtgttgcctcagaaaaaaatgcccatggggagtgtgtgtgcgtgggcatgtgtgctct

SEQ ID NO: 4829 - DNA, 120 bp, Homo sapiens
cctcgtgtccctcagaaaagaatgaattcttttccaactgatgtcactgggaaagggggacaccactactttcctgcgtactgcactttacagtttacaaagcactttcccacacgtcat

SEQ ID NO: 4830 - DNA, 120 bp, Homo sapiens
tttcgtttcatctccctgacagtccctggaagtgggtgctagtctggatgagcaggcgcagacttggagaggctgagggacttggcccagggcatatagctaggaagcggccaggcagta

SEQ ID NO: 4831 - DNA, 120 bp, Homo sapiens
attcggtggtctaaccagtggccagcagtagtgttggggtttgctgccctcacctctgaagccacacaggctcctgcttcctgaggtcaccctctcctggagggctgcccccgcatggga

SEQ ID NO: 4832 - DNA, 120 bp, Homo sapiens
gcacgagggggaggcacacccaggccgagtggaacaccaccctaagggggtggtgacaggtggcactgggagtggctggagtcggggttcaccttactcagggtcagggcttcccatttt

SEQ ID NO: 4833 - DNA, 120 bp, Homo sapiens
tctcgagtccgattttgccaaaaatcccaactttcctgctgagtagctcatgagacaggcatttcacctctctgaacttcaacttgggggtactcagatttccttcagaggctgtgaaag

SEQ ID NO: 4834 - DNA, 120 bp, Homo sapiens
ttacgcatctgtcaaatggagcattcgtgggtgtgcctgccttagaggatgagacccagctgagatgacatatggagaaatcgtttataaacttaagtactggtgttaggaagagctaac

SEQ ID NO: 4835 - DNA, 120 bp, Homo sapiens
acacggtgagtcttcagtgtttctttaagtgctgctcactactgtcctgagagactccaagaagcagttactttgtttgggcctcagttcatcatctgtgagatgagaggattgggcttt

SEQ ID NO: 4836 - DNA, 120 bp, Homo sapiens
gagcgagcgagcaagcaagcaagcaagccagcaggatttggaatcgtcccctaattggaaccacaatcgcaggtttcagggactcaggaaagggtgcagcccagcttgtggttgagaaat

SEQ ID NO: 4837 - DNA, 120 bp, Homo sapiens
ccccggtagcctgtcactccctggcgaacagcttggcagcacagaggcaaaccacagagtacatttgaggcccagatctgcttatttcgagggtggggccgcgtttttctcctgccacag

SEQ ID NO: 4838 - DNA, 120 bp, Homo sapiens
cttcgggagttgggagagaactgtccacaggacacttggggaggcttgctttggttgtggaggcctccacagcccccggaaggcaggtggaagtgggcatggagggtcctacgcatcccc

SEQ ID NO: 4839 - DNA, 120 bp, Homo sapiens
cagcgggggtctgagggcccactgttgctcagctgggggatttggggacggtgggagggcatacatggatgggagggtggactccgttcctgagggggccagtgtggaggagggtcaggc

SEQ ID NO: 4840 - DNA, 120 bp, Homo sapiens
gagcgtatgtcctgagcgaggatcaactctgtgagtacccatgataattctcctttctgtggttgccgccctgttgattcatgtgtcagccttagagaaagtggctgtgacttctgcatt

SEQ ID NO: 4841 - DNA, 120 bp, Homo sapiens
agccgctcttgttcacagtcacagggctggaaagtgggataaggactaaggacttctgtctctggattcagcatgctgattatggggaaaagcagacatcaattcctcatgtcttgtaag

SEQ ID NO: 4842 - DNA, 120 bp, Homo sapiens
tgacgttgaatggactgggaagatctggatataccatgtttctgtaggcatgatacgtggtcccttagcttggtatttaaagttctttggaagtgaccgctttctggatttacctctgtg

SEQ ID NO: 4843 - DNA, 120 bp, Homo sapiens
ttacgtttcctgggatgctctcctagactcctctgtacctttcttctttcaaacccaaaacaggtcccatctccttagtcttaactgtctatgaatggtctgttgcctcacttcccagct

SEQ ID NO: 4844 - DNA, 120 bp, Homo sapiens
gtacgtgctcagtacacatttttgaatgcattaatttggctcttttctgtgaaggcagcttgtctgtgtgtcattcatctgcccaaatttgattgtcaacttcctttgtatggagctgta

SEQ ID NO: 4845 - DNA, 120 bp, Homo sapiens
ggtcgtgcaaaagctacacacttgaacctgttccgtgtggtttcacacaaggcacatggcctccttgggactcacttcacatcactcgacaaggggatagcaggacccaccttgactgta

SEQ ID NO: 4846 - DNA, 120 bp, Homo sapiens
acacgatgcaaacatgagttattcatggttttgtgtccaggctaactgtgccctgacattaaggctgggtgggtctggcccagggcttctggggtaggcgctgtgctggtgtgtgctact

SEQ ID NO: 4847 - DNA, 120 bp, Homo sapiens
gtgcggttttcctaagcacatagcacaacaaggagctggaacagagctgcaacaatgaggagggtttcctccaactgtcagtgcttctggatccaccgtttcggctttgacattaccgtg

SEQ ID NO: 4848 - DNA, 120 bp, Homo sapiens
actcgttgctggattgccataaacacttacttggattgattagagaggctatttgccgtattgaaggtggcagaattatttcaccttttccagaggtgttgacgttcaagggtagttggt

SEQ ID NO: 4849 - DNA, 120 bp, Homo sapiens
gtgcgtagccgagaaagtgcacaacgggccctatttttaaaagtgcctgcctctgctggttttgttgtggcagcgctcaaaggcaggaagacagataagatcggatttcaggattttcgt

SEQ ID NO: 4850 - DNA, 120 bp, Homo sapiens
ctccgcccccaacttttgacaaccaagaacttttccccaccaggagtgggtatatttcaacttctgtaatccctgcgtctcgcacaatgcttggtattacaaggtgctcactgagtgttt

SEQ ID NO: 4851 - DNA, 120 bp, Homo sapiens
agccgcaggtttgatcggggaagagacactaatcaatgtatctgattctagaagaagatggagcttctaggaagggcctgccctcaggctgtcctctgtgttccccggcattctgcattt

SEQ ID NO: 4852 - DNA, 120 bp, Homo sapiens
tatcgtggcccccagtaagtgataaatattcgtactaatttggggcagtgtcctttttccagctgttttcccatgagtgccctctgttccgtcaggtggccgaagacggataactttggc

SEQ ID NO: 4853 - DNA, 120 bp, Homo sapiens
ctccgtgttatcttgtttccccgatggtcattgccacacaagaaagtacttcctctgtgggctttgcccaccctcttctcttgacagagacctctgggcctagataaatgtataaactgc

SEQ ID NO: 4854 - DNA, 120 bp, Homo sapiens
agccgtttccattaagaactggggtctatgtcctgggatccagttcttctcccccttttagtactgaaagctgcttcccatctgaaagctgtctggggacagacaccgtgcagctgcgtg

SEQ ID NO: 4855 - DNA, 120 bp, Homo sapiens
aagcgtaaccactgtgaggttataaccagggtgctctgtctgcttatgggcaccccacccgaccagccaaatggtcagagagctgggtgggtcggggaaagggagggagggagtcatggg

SEQ ID NO: 4856 - DNA, 120 bp, Homo sapiens
ccccgtatgccatccaggcccacccactgctgggccggaccttcccctctggacagttcttgcttgggcactgactgggtttgctgctgaacctcctggcctggcagctctggttgctga

SEQ ID NO: 4857 - DNA, 120 bp, Homo sapiens
acccgcttctttctttatagagattaagagcggctccagtgtgtgtacggagagcctctttgaagcgctgttgcctttctgtggctagatccacgatcttctctctgggatcaccccata

SEQ ID NO: 4858 - DNA, 120 bp, Homo sapiens
caccgtgggtggatgaagccggtgggaacagaatgataggagttaaccactttttaggcgttattgggccttttcactttaatagcttaacagagacatctgtgatggcttgcatccaga

SEQ ID NO: 4859 - DNA, 120 bp, Homo sapiens
gtgcgtggtgtttatttttgatttgaaatatgaaaagcatttttttaagacaactgactcctctgagtcatgcccaggggagcaaacggcctgaaatatgagcttgtgcttgctggagga

SEQ ID NO: 4860 - DNA, 120 bp, Homo sapiens
aagcgcactgaccataagagcaacatgtgggcaagagccgcggcactggggtaatttattgccgccgctcgcttcaccaggaaccccacacgctgggttcccacaggatgcgacattccc

SEQ ID NO: 4861 - DNA, 120 bp, Homo sapiens
actcgggcctgtgttgagcaaccacgtttgagtaagagttatcttatttggcagggtgggttaggtgtggggtatttgtcactgagaagcagaaactgtatgctcgacacacactccctg

SEQ ID NO: 4862 - DNA, 120 bp, Homo sapiens
ttgcgtagtttttttcttttcttttctgggttcatcttaccagcagtcgtgtttgagaatgtgcacagctcaccttcgttcagccctttacagtttacctccatagccttctttgcgtct

SEQ ID NO: 4863 - DNA, 120 bp, Homo sapiens
ttgcgaggtgtcaggccaggtgttaggatgctctgtttacagatgaggagattgaggcatgagttgtgattgctcacaattgcctcctgagtggtggggccatgctggggcactgtgccc

SEQ ID NO: 4864 - DNA, 120 bp, Homo sapiens
gtccgggacctcctgctgccagtctcctagcccgttaccacagctgtctgtttcttggcctctccctagatttctaatggaactcttggggtacagtctggaaataggtattttaaacat

SEQ ID NO: 4865 - DNA, 120 bp, Homo sapiens
ctgcgtttaaggcccatcttcaccccataaatgccagctccccaaggacagagccctttcctgtcttgtccacaccatgttccagggccctggacggtggttggcacacagtaggccctt

SEQ ID NO: 4866 - DNA, 120 bp, Homo sapiens
tgtcggatgagtatgtctcttcctcagctctgtggttagctgggagagctccgacagtagagtctggcaggtctggttcaagcatccctttggtgtaacatggtgtgaatggtggggcct

SEQ ID NO: 4867 - DNA, 120 bp, Homo sapiens
ctacgacctcctggtgaggagaagatagtcaccacccacacaggcacactcttgaatattccaggacgaggtgggcactcattagagggcagctcttacggccactgcctggtatgtttt

SEQ ID NO: 4868 - DNA, 120 bp, Homo sapiens
tggcgtgagcagtagggtcatcgtggtggtcagtttttccactgccatcaaatgggatccatttagctctcagacagacaaggtatagggctggactctgtgccgtgggctaaataccgg

SEQ ID NO: 4869 - DNA, 120 bp, Homo sapiens
tcacgtttagcaccttcacgtttagcagtactcctcattagaggaaaatgggatgatgtgggcagagtcacccacagagtcactccaggtttcagatgtgctggtgcttaccgagtgcca

SEQ ID NO: 4870 - DNA, 120 bp, Homo sapiens
caacgccccaccaagccagtcacccaccactgcacattgagaatctgctgctctgtgaatgaaattggcctggggttaatgagtggtgaatgtgtgtcagtgtttggtatttgcagcagg

SEQ ID NO: 4871 - DNA, 120 bp, Homo sapiens
ctgcgattccctaagctcagatgaacggggcctttaagatgccatccagccatcggagagatgcaggaaaggccttttgaaatgctgtttcccctgacctatttgaggtgaggccctgtg

SEQ ID NO: 4872 - DNA, 120 bp, Homo sapiens
ttacgctcggggtgccttaaagggcttacagcgaccctacctccagcttctccagctccctttccttggcaaacacttgacccatcccagccccttgggctttctttcctcctcctctgc

SEQ ID NO: 4873 - DNA, 120 bp, Homo sapiens
aggcgcgactctggctctcaaagactctgaagtccaggatcgagaagaactgtgtttacacggagttgtcaaggatcattctgccaatgataacctattatcgtgcaactctgtgccagg

SEQ ID NO: 4874 - DNA, 120 bp, Homo sapiens
tcacggcagaggtgagacagaatgctgagagatttctgcagacaaggaatctgaggtttaaagaggcaatgtttgatgagccactgaggggtggggctgggattggaaccgaagctggct

SEQ ID NO: 4875 - DNA, 120 bp, Homo sapiens
ggccgggaagagctgtgtttggaaggttcctttctgtgccaggggtcagcaatctgggttctagcactgagaggggcaaaacgtgggtttgtaggggagagagggtgacccccagtgagg

SEQ ID NO: 4876 - DNA, 120 bp, Homo sapiens
ccccgggcccagcctgcccccttcacagtcccctgactgcttgaggctgtgggccagtggctttgccccttggaagcttggtttcctcatctgggacagaaaggggtcaaaacacccttt

SEQ ID NO: 4877 - DNA, 120 bp, Homo sapiens
tgccgtgttcttagacacaaagacagctgttatgctgtctttgcaaaaatgttgaggtcttgctttccacaggcttgtggcctgatgcacgtttccagttttgcacaatgtcacagcaga

SEQ ID NO: 4878 - DNA, 120 bp, Homo sapiens
ccacgcccttggtttttcacagccaggcatggggctggaatctcagagctgcggttgctgtggttctctgattcctgctcagaggattgcgtgatgggggctggagtgcaggcaggaagt

SEQ ID NO: 4879 - DNA, 120 bp, Homo sapiens
aggcgcacagggaggggttgggggtagggggttgccatgggaatttcttccccagccagagagccagggtggagtgtgttgctggggagttggaaatgtaccctcttttccatatccatt

SEQ ID NO: 4880 - DNA, 120 bp, Homo sapiens
tcacgttctcctgaaagaagtcttcttactgtgtgtaagaaaaatcagtaagcctctgataaatagtcaaagactgtcagaaaagggaccttggaaatatctggtccagcctgcccattt

SEQ ID NO: 4881 - DNA, 120 bp, Homo sapiens
ccacgaaggggggagtttgaagaaggcttggcaaaatttgatagacctgggaaagagattgttaatctctcattctgtgctcaaggatgctgtgccatttaaaaaacaaaaacaaaaaac

SEQ ID NO: 4882 - DNA, 120 bp, Homo sapiens
taacgttaaaattcaggagtggatgttcggcaacatcattgggcaggattttctggttcgtgaatgaaaggttatgggtgacactgtatgtcagtgtggcgcttaccggtttatgaaggg

SEQ ID NO: 4883 - DNA, 120 bp, Homo sapiens
ccccggagatgaggcacttgacctgaggtggcccaggtggtaaggagaggagccagctttccaatgcaagtcccaatttccagtctcctgttgtttccaccgtgtctccctgcaaggcgg

SEQ ID NO: 4884 - DNA, 120 bp, Homo sapiens
gcacgcagaacaacagcttgacacagtgggaagaagctgggctttaatgtttagagttcagagttcagctctgctcccctgcctgctgggtgaccttgtggaatactcctaacctctctg

SEQ ID NO: 4885 - DNA, 120 bp, Homo sapiens
gcacgtaaaagtgcccgattaaatgttcctgtttaactggtgactcagtcttcagacatttttagtttggtaactttctttgtggaagctcatgggttagtagccattcctgacatttaa

SEQ ID NO: 4886 - DNA, 120 bp, Homo sapiens
agtcgccaatactcttataacgcagtgattttagcattcataaagatttgaatatataattttccttctatatctttagaaattgccaagtaaaacagtctagaagtcacagtggcttca

SEQ ID NO: 4887 - DNA, 120 bp, Homo sapiens
tcacgttacttcacttgatccttactgcctcagaggtaggttttaattagtatccccacttcacaggcttagggaggttaagtaccttgacctgagtcatgtgactagtgagtggcagaa

SEQ ID NO: 4888 - DNA, 120 bp, Homo sapiens
gcccgacaaggatgactgacttgctctaaatcacagagttaatgagtgggcagcccaggcttcaaacacaggcagtctcgcagtctagtcctagaatccgtgctcctgaacaacaggctc

SEQ ID NO: 4889 - DNA, 120 bp, Homo sapiens
ctgcgatgggaatacaggtgtggattcgagtccctgccttcaggaagatcccagtctatgaggaactctcaccatctagttggggaaggagggtgcacagtcacagtcggtctaagctta

SEQ ID NO: 4890 - DNA, 120 bp, Homo sapiens
cagcgggagagaacctgtgctttatagtccaacagctgaaggtttgactgcctggtcgagaaagctgagaaagactgttaagaaatttggcaataagtcccagcatggtggctcacacct

SEQ ID NO: 4891 - DNA, 120 bp, Homo sapiens
ctacgaagtctttactcttgttacttccattttacagatgatgaaacagacctaggagagtttggtaacttacccaaggtaacggtattttgcacagtttcctcactacaaaaattgtct

SEQ ID NO: 4892 - DNA, 120 bp, Homo sapiens
atacgggggttacttgtcatcaaagagaaattgagaacatttggggccactaagtggtaggcccaagcagtctggccacagggccttttcacttagccatgaggccaggctgctccttta

SEQ ID NO: 4893 - DNA, 120 bp, Homo sapiens
ttgcgtggtgtagaagctgatatcagctaattgctcattgtgctctcagctgtttgtttgcacatccccttttttatatcacagctacattttgaaatccagcattccctggaggcataa

SEQ ID NO: 4894 - DNA, 120 bp, Homo sapiens
cttcggtggggacaacagtctggcatttcacattccaaagttaagagttcaaggatccttctggaccaggtttttgttccttccctgtcctcagggcccattcagaggccttgtcatcag

SEQ ID NO: 4895 - DNA, 120 bp, Homo sapiens
agacgggctgccttctcaaagttggtgcctgggtcctgctgtttgggaggaagcagctcttggcccggtttttcccttagttttaggcatctcttgcttaagctccttctaagcccccag

SEQ ID NO: 4896 - DNA, 120 bp, Homo sapiens
ctgcgtcttcatctgggcaatgcttacctgggtataaatgtgtaaaatttcattgattgtgcattttcctgtatgtatgttataccccattaaaaataaaaaagaatagggcagtttcaa

SEQ ID NO: 4897 - DNA, 120 bp, Homo sapiens
caccgaacaatgtgtatgttaccactggtatttttaaaaagaatataggaaacttacctttcactccatcttttacagcatttgaattttctaccatgggcatgaattacctactcaaaa

SEQ ID NO: 4898 - DNA, 120 bp, Homo sapiens
tgccggcctggcttaggctacatcctaccacaaaagaagacagatataaggggagtttaccccaggctcaaaagatactttcccccatggcttgatgattagggaaggagctgttcaact

SEQ ID NO: 4899 - DNA, 120 bp, Homo sapiens
tcccgtttccattgtaaatccgtactcttctcatgccagtctattttgtatgtgctttgcgtcgacatccctatctttccatgttagattttaaattggctccctacagagtttgaggtt

SEQ ID NO: 4900 - DNA, 120 bp, Homo sapiens
gaacgttttaccctaatcctacagagcatcctggcagtccctctggactgaagtttatctttcctctcctttccaactctgtcaagaagattctgtaaataacatccacttgctactttt

SEQ ID NO: 4901 - DNA, 120 bp, Homo sapiens
acacggttcttgtgacctaccttttaagaagcattgtacatttgatacatggtacctccacgctttggcactgctgaggccctgtttcctcttatcccaaggggcatctgggaacttctg

SEQ ID NO: 4902 - DNA, 120 bp, Homo sapiens
ccccgacacacacacgtatatatacacatatatatttctctctcttttagtatactggcacccatttagtaacgttccagcttgcattttctccagataggatgcacctgaaatgattga

SEQ ID NO: 4903 - DNA, 120 bp, Homo sapiens
gcacgtgggaatttggagccatggtgaactacatcaagaagacatatcccctgacccagctggtcgtcgtgggcttcagcctgggtggtaacattgtgtgcaaatacttgggggagactc

SEQ ID NO: 4904 - DNA, 120 bp, Homo sapiens
ctgcgtcagcgtgtgccaggggtacagtgcactgaggtgagtcatctccgccttccatcagggccttcagttagcccttatttatagagatgccccgacgcacaacacactgttctgtga

SEQ ID NO: 4905 - DNA, 120 bp, Homo sapiens
gaccggggaacactgtggccgactgagtagaagtttctgagtcttggactcaccttgttttgtctgcatatcatacattggagatgccccatcagaccccttaagcctgggatatgcagc

SEQ ID NO: 4906 - DNA, 120 bp, Homo sapiens
ctgcgttttggggtcagatctgtaattggagaagtaaaaccccctttgatagttgctgtctcctagggaatctctgtcaggtgacttaatttgttcaggcttcaggagtttttatagaaa

SEQ ID NO: 4907 - DNA, 120 bp, Homo sapiens
aaacgtggattaatgaaagagcacaggagactggcaagctgggatctgaaagctgggccttgggatcccagatccctccttcctgcaagagatgagtcccagatggcatctggaagggat

SEQ ID NO: 4908 - DNA, 120 bp, Homo sapiens
gctcggtgattgggtgacccccttccctctgaccacaggcaggtgagcacagtcctgctttagccggggtccctcatggtggtctggtcctatactcttcctgtagtgcttggttagagt

SEQ ID NO: 4909 - DNA, 120 bp, Homo sapiens
agtcgggcgggggttggctgcacatttatgcagtggccttttgacccttcagggtggtggtagtcttcaccttgagcttagcctgtgtttgatgagcacattgcagaccattaaattcac

SEQ ID NO: 4910 - DNA, 120 bp, Homo sapiens
ccacgacattgtgggaaatgtttgtcactccaaaactgtggaattttgccattctaaaattgtagcagctttggggaaattacttttataaaattacttttataaactccctggattgaa

SEQ ID NO: 4911 - DNA, 120 bp, Homo sapiens
tgacgtccagatccattcacagggtggagtcaggcctggagattttgaaacgtgcaagataaaagtttccctgtaatgagtgtggactcagtgtccgcctgcgtttggattcacgcccaa

SEQ ID NO: 4912 - DNA, 120 bp, Homo sapiens
tgccgccattgaagggtcagagtgtggccctcacagccacacactagtgtgccagtcacacactagccctagaggcagaaagacacttccagaccagccccaccagctgtgcctacaaag

SEQ ID NO: 4913 - DNA, 120 bp, Homo sapiens
cttcgatttccttgcctcttcaatggtataaggctaatcaaaagatagatgtatttggaggagatcccagttaatgattttcctttacctcttgatcagcaatgacagaagattttttag

SEQ ID NO: 4914 - DNA, 120 bp, Homo sapiens
tcccgttccatgtgccagtcattaaaccagaaaacttgcctgccaggtagggagccaaatacagaaagtgttcacatgacaattgaagcagactttggtcctggcaggctcagtgactaa

SEQ ID NO: 4915 - DNA, 120 bp, Homo sapiens
tgtcgggggtgccaccaacaaagcctctggcgctagagagggcctttgccggggtccccttcccctgcgctgtcttggtgtctccatagatttctccacaggtgtttgagctctgcacat

SEQ ID NO: 4916 - DNA, 120 bp, Homo sapiens
agccggccctctccacacaagcacctcaccccatggctagagccccctcctggctgcccgcctgcacccccacaccgcagtcaccctcactcgctgtggttcttccagggcccaggaaac

SEQ ID NO: 4917 - DNA, 120 bp, Homo sapiens
aaccgtgaaaagccaggactcctgttccttcaggggaaaaaaaaaaatgcaggtgtggtacagactctctgctgcctgcatttgtgacttgattagaaacaaacttgtcttggccaggcg

SEQ ID NO: 4918 - DNA, 120 bp, Homo sapiens
caacgtgcagctttaaggatcttgaagataaatgtctgtagtgaaaactcattgactccattgaattctcctcgttctctagtaaaaatactgtaaatgccatgaatcgctactcagagc

SEQ ID NO: 4919 - DNA, 120 bp, Homo sapiens
aagcgtctaactgatgggctgcgaggaaagcagagcccgtcctggttatagtttccaaaaacattcctgggctcagaagtgctgacgagccacgttgtgtgcaccatcaaactctaatcc

SEQ ID NO: 4920 - DNA, 120 bp, Homo sapiens
aggcgacttccgggcacagccccacagtggaacttgcttattctgggacatttagcctgtcagctgcagtcttcccacagggctcctgcagccttcttctctgttctctgctcacatgca

SEQ ID NO: 4921 - DNA, 120 bp, Homo sapiens
gaccgccctttgagtagtgaggctccaggagatcccacaagcttccagatttgacaattctgagcttcctcaactccagagccaaacccctaaccgaaagtgggatcagaggccaggcat

SEQ ID NO: 4922 - DNA, 120 bp, Homo sapiens
gcccgcttccttcctgagacctccacccacagcttgatgaattgcctccagactctgctgtctccattctcccaacgtccacattagcatggcagaaatgcactgctgcaaccttccaac

SEQ ID NO: 4923 - DNA, 120 bp, Homo sapiens
tcacgttttgttgtcccccttcccatagctggtggccttcaaaagagtattttattgtctctctccaataatgtgggggccatttgtaggaatcacacacacaggcagctgggattttgt

SEQ ID NO: 4924 - DNA, 120 bp, Homo sapiens
gcacgtcagattttaacattggtagtcttcagacacgttttcccaaaagcggcaccaccttctcaggcaaggtctggcccagcccacccagctaaccctcctgcccagcttgtccctgga

SEQ ID NO: 4925 - DNA, 120 bp, Homo sapiens
gcacggccagcagggggcggcgcgagcacacattcagagccggctcgcgggattcccaacccctatggcttcttcctcagaaagccacttggttttcttatcagacggggtccctgggct

SEQ ID NO: 4926 - DNA, 120 bp, Homo sapiens
ggacgaccccagcatcccattcgggtttgagtaggagctagggctgccccaagagtcttctgctcagcatgtgcctgatttcatttatatatttagagctgccacaaattcagagtggac

SEQ ID NO: 4927 - DNA, 120 bp, Homo sapiens
gctcggggctccggggaagatgggagtcagtggatagggatcaaccagtgtttccctcagatttaggacccaggtcttaaggaaaaattagaagtatatcatgaaaacgtaaaagatacc

SEQ ID NO: 4928 - DNA, 120 bp, Homo sapiens
agccgtgaccaccaggaaggaccttagaaccggccagtctatcaggtccaggatgatctggagtgccgaggctggacccttttcacaggagagagaatgcagtcatgttcccctcatgtt

SEQ ID NO: 4929 - DNA, 120 bp, Homo sapiens
ctccgcactgtcagccacctcaccttctgcaaggtgtggcggggcagctggctgcacgggccaaagacaggtccatggtccttggttgtgagctgctccagttgggcacggagctcctgt

SEQ ID NO: 4930 - DNA, 120 bp, Homo sapiens
atgcggaacgtgcccacctgggcagagaaaggaaaaagaggaacagccaaccgcatcagcctgagccagccagggaaatgggcctgctcagaccttcagttcttttgcccaaggtcattg

SEQ ID NO: 4931 - DNA, 120 bp, Homo sapiens
tcccgggcagagcataagatagagaagtaaggagggagggagagggaagagagagaagagagggaaggtgggtggaggagagccctggaggacagggtacttaccccttctgacatgttg

SEQ ID NO: 4932 - DNA, 120 bp, Homo sapiens
agccggccccttccctaggataggaagtcagggctgcaggggttagaaaaaccattctgttattgtctcagaactgtggatctcaaactttcaattgcatcagaatcacccgaggcattt

SEQ ID NO: 4933 - DNA, 120 bp, Homo sapiens
aaacgcaggtgcctgggtcccaacctccatgattctgactctgcaggtgcaggctgtggcctaggaacctgcaatttaaagcacttcctggtggctctgagggagatggttcttgggcta

SEQ ID NO: 4934 - DNA, 120 bp, Homo sapiens
gcccgaaggagtccctcagaaacttcgcagcctagtggatggccctttccccaatgcattcattctcaagatgggtgatgaccagttacataagtacataatcacgagactggaagtgtg

SEQ ID NO: 4935 - DNA, 120 bp, Homo sapiens
aaacgggaggaggaataagtgacttgtccaaggtaacacagccaaaaaatagccagggatcagtactcagacccaagttgtgacttcctgtcaggaccaagaggcagcctgctgtggcgc

SEQ ID NO: 4936 - DNA, 120 bp, Homo sapiens
ccccgtgggaaggaaccatgagggctcagaagaggctctgtcaatgctgggtgatagactctgtcacaaagaacattcctgtgcaccaagaacacttttgagttaatggcccagccctga

SEQ ID NO: 4937 - DNA, 120 bp, Homo sapiens
tttcgggatactagcaggccacgaggtcattctgggggagcagagctttctgcagcattatcttctgctcacagcccttctagtgcctctaatcttccctcctcccttcccaagagtcac

SEQ ID NO: 4938 - DNA, 120 bp, Homo sapiens
tcacgctcacgtccagctcccctggtgggaacaatagtgcctctgtgagaggagatgcaccctcattggcccagacacctgtgctggcaacattggcagacaaccatgggctccctggcc

SEQ ID NO: 4939 - DNA, 120 bp, Homo sapiens
aggcggggatggggatgacttacatttgttgtgccccctttctgtaccgtggcctgtgccctaccagccttatctcagccaacccttccagatgtgagagagtataatcccctttttcat

SEQ ID NO: 4940 - DNA, 120 bp, Homo sapiens
gtccgggaggtgaggggtcttcccaaagccacacagctggttagaaatggagtctcggccattctaaagccctctcagcattcaacacacaaggctctccctcctcaagaagcgagatca

SEQ ID NO: 4941 - DNA, 120 bp, Homo sapiens
gaccgtgcacatgacacacaagcacaactccatggccctccccttcagggcctctgtcaaatccagagtccagggcccagatggacaccactgaacagaagggctccattctttcagcct

SEQ ID NO: 4942 - DNA, 120 bp, Homo sapiens
cagcgccacctgattacagtgggcccgggtaccaggaacacactgacccccagagattcccacatgggctccccctcacctctccaagaagagcggtagctgctgctggaaaacctcatg

SEQ ID NO: 4943 - DNA, 120 bp, Homo sapiens
acacgtcctgggcacagtactgcatcaggtcctggcacaaggtgacaggaaggcgcaaggtgggcagccatcccattaccaccaccagctctcagggtcaggcctggcagctgcatctcc

SEQ ID NO: 4944 - DNA, 120 bp, Homo sapiens
tcacgaatgtccttcatggtgcccttcacaaacagttctcgaggctccttctctaagggaggcccccctacataaagtctgtgcacctctgccagactgttgacactgctgatgtccagc

SEQ ID NO: 4945 - DNA, 120 bp, Homo sapiens
cctcgggccagacgggctggtgagagggggtcccaagcactatgctcctgcccaccggcagtgtgctctcaccgctgggcctcttctggctttcctctgggacttctggccttgctttgt

SEQ ID NO: 4946 - DNA, 120 bp, Homo sapiens
ctgcgctggaagctgcttagccctgagatggccatgtgcatgctcatggtgtccaggaaacgcatgcgggaaccctgaggaggaggaggagaaaagggaagggaaggagggaggctgcaa

SEQ ID NO: 4947 - DNA, 120 bp, Homo sapiens
caacgtagatacagagtggccaaaataaagccttcagggctatctggtctggccccaaccctgccactcaaaagctctgtggccctgagcatgtcaacaaggctgtctgagcctcagcac

SEQ ID NO: 4948 - DNA, 120 bp, Homo sapiens
aggcgctcacagtagtcatcggtggttaaggcaggaagtgagcccaggctgtggctcaaaaccttcaagacccatgctaagctctaaaatgccacagagacgaaggccattattactttg

SEQ ID NO: 4949 - DNA, 120 bp, Homo sapiens
tcccggggacatacaacagctaggcacagagaccagaggcacagctggtcaacagatgcgccttgcggcttcagcaaaggcaacagagacacgtgccaggaaaggagtacctcccctaac

SEQ ID NO: 4950 - DNA, 120 bp, Homo sapiens
gctcggtcaaaggaaacattgtgccccaccactaactgctcctgccagtctctctgggtggggctgctggcaccagtagggacctccagggggatgaggtcagccggcgacagctggctg

SEQ ID NO: 4951 - DNA, 120 bp, Homo sapiens
taacgctcttccaccagccgctggctgcaccaggaatacctgagggaggtgagaggcaggcaggttcaccatggagacattaaacttccactccacaacaaccactgcacacctaccgcc

SEQ ID NO: 4952 - DNA, 120 bp, Homo sapiens
tggcgggcaagagctacaaaagcttctttaaacttctgcacataaaaatggaactactgggctattagacctacgtgcaggtattctattacagcctgggctatcaaggtgtttgctagg

SEQ ID NO: 4953 - DNA, 120 bp, Homo sapiens
tgacgctattaggagagggggtaaaggcaccaaatcaccgtgatcttaagtggcctcccgaaggtctcatgtacagcgctctactgtgattctctgcgtggcctttactgcctgacattt

SEQ ID NO: 4954 - DNA, 120 bp, Homo sapiens
cagcgctccctacgtgagcacccagcccgtaacaggacctcagaaaatgttcactgaaacaaactattaagctgggcccccatgcctgcttatgtccccaaccctgcccctacttaccag

SEQ ID NO: 4955 - DNA, 120 bp, Homo sapiens
ggccgagggggatatggccaccgccaatgtggggcaagttccctctgccaagcagacctccacgtcgaacaccagggcccgctcctcggggatggccacgggtacggcctccccctcggg

SEQ ID NO: 4956 - DNA, 120 bp, Homo sapiens
ggccgtaccgggtccagccctccgcccaggcccaagccgggggcttcgggggcagctgggcctgcaacagcaagttggccgcctccaggtagggcaggctctgcttctgggccaggaggc

SEQ ID NO: 4957 - DNA, 120 bp, Homo sapiens
aggcggaagtgctggtccaggttgtccccgtagaggggcggcaggcgcagctccacgtcgggcaagggcacggctggctgcccccagagcccgtgcttctgcaggtgctcgacgctgcgg

SEQ ID NO: 4958 - DNA, 120 bp, Homo sapiens
atacgtattttatctgtaaggcacatcacagcctacttgtgcttgggaacagtagagagcacttcagcactgagctgggaggccgtgttacacagcaaaaccaccaacaaaaaacacaaa

SEQ ID NO: 4959 - DNA, 120 bp, Homo sapiens
aagcgtgatctggaatagactgcagaaagaacatttgtttacagcacaagagctgagacaagaagacagagcgtccccttgttcaacctcacaaatggccactctgcaaatgccctccaa

SEQ ID NO: 4960 - DNA, 120 bp, Homo sapiens
aaacgccatgattatggatttagggattacaaataaatattagagagtaggcaaattcacaaatgctgaatcatgagaatcagctgtatatagatttaaatgtattttctaaaatttcca

SEQ ID NO: 4961 - DNA, 120 bp, Homo sapiens
acacgaaagtctgatgactggtagatagtaagctggacagtgtcttcaggcttccccacttgagggcccctctgactgcgagggaagcaacggaggcattttatccctgttttacagatg

SEQ ID NO: 4962 - DNA, 120 bp, Homo sapiens
tggcggtagatgtggctgagagccctgcccttgagccttttggcttgaggcttcatgccagcatccacggaggcacagcttcagggtccctggtggcccagccactgggcaagagaggat

SEQ ID NO: 4963 - DNA, 120 bp, Homo sapiens
tgccgtgaagtgaaggcttctgaaagaaatgagtctgaatcctggctccacctgtccaaactgtgtgaccttaagcaaattacaagggagcttgctgtgcctcagcatccttgtctctat

SEQ ID NO: 4964 - DNA, 120 bp, Homo sapiens
ccccgagctggccagcccagcagtagctcagataatggcaggagagagccagaggaggcagccacatgcctttcattcatttggccccacctcctaaatgctgtatcccaagactgagcc

SEQ ID NO: 4965 - DNA, 120 bp, Homo sapiens
aagcgggaggtacatgttgaggtccctttaccgctgagctgagacaactacagtcaggtcagatcccggctcatcccagcgcatagggccaagggccccccattgccagcgccaacaggc

SEQ ID NO: 4966 - DNA, 120 bp, Homo sapiens
gtccggtccccttattttacagaggggaagacaaatcacttaggattctattggctaccagcaccagaagcctaattaaaaccaattttggcagacaaaaggggaacttattagcacata

SEQ ID NO: 4967 - DNA, 120 bp, Homo sapiens
ggacgggacaaaaggagcctgacgtcactggggtcttgtccagctctcgttccttctttctacagattagaccagcttcctccttatcacaggtccctggctgtggcagctctcaccttg

SEQ ID NO: 4968 - DNA, 120 bp, Homo sapiens
ccccgaaagtgtatcaagcatggaagtggatatttggagagggaaaatgactgttttcttttctttttttcttataattttttaagagatggagtctcactccgaaaatgtgggattaca

SEQ ID NO: 4969 - DNA, 120 bp, Homo sapiens
tttcgtacaaggacaaaaaaagcaggaatggctgcacaccttaggcctttctcctggcagtgccagcctgtggatacagctggaatgactttgacatagtgatcctcactcctgggctcc

SEQ ID NO: 4970 - DNA, 120 bp, Homo sapiens
tcacggaggactgcctgagagccagcaggtccccagaatgcacctgaggaccctgctcctccagtgagcaggcagaaaacagtcattctcgagaccatggggtattttgaagggtggaca

SEQ ID NO: 4971 - DNA, 120 bp, Homo sapiens
atccgccaacccacatggataaacaaagagaagagaattcaaaccttccataagcctatcacccagagataatcactgccaacattttggtgagggcacttcgtgatgttactatatttg

SEQ ID NO: 4972 - DNA, 120 bp, Homo sapiens
caccgtgatatgattatttttctgtgcattgcatgaccccttaaccaataatatttgcggggatgttgagcctggacattgaggctgttttccatttatttcctgccacacatggtctcc

SEQ ID NO: 4973 - DNA, 120 bp, Homo sapiens
acccgttagcagggctggcagccgcctctgtgacacagaagggtggcatcactgagtttcgatttagctgagacagaacacccacagatgccacctgcacaggctgccgggaacatggct

SEQ ID NO: 4974 - DNA, 120 bp, Homo sapiens
agacgttctgacccactctagcttggagtgagatgatgccacccctgatctggctggcctcagagtggggacagggcaggagaaatgcgcaggacacaccctccctccccagccaggctg

SEQ ID NO: 4975 - DNA, 120 bp, Homo sapiens
agacgggacttcatggctaaaaggagctgatggcaggttcctgagtgtgtgggagctgggcacaggggagtgtgtggtcagaacatgacagcaggtctctcggggagagagggatcaaaa

SEQ ID NO: 4976 - DNA, 120 bp, Homo sapiens
aaacgggctttcagaaaggatggtggtggggacttcagccagcggggcaggagagtcccggtgatcaaatgacccaatgacccaatggcagctaaggcctgtgagcctggaacacacact

SEQ ID NO: 4977 - DNA, 120 bp, Homo sapiens
gcccgtctcttatgggctaaagtgtgtccccccacctcaattcgtgtgttacagttgtaacctccagagttagcacctcagaacatgactgtaattggagagagggtctttacagaagta

SEQ ID NO: 4978 - DNA, 120 bp, Homo sapiens
gggcggtggtagaggggaagtccctgacttcagttttctagggggcctttttttttaatgttaggttcctgatccttaattccctaggtctctctcctggcaagtggtacgaggtgggta

SEQ ID NO: 4979 - DNA, 120 bp, Homo sapiens
gggcggcataggggaggccgcgctctgtccaccccagcctggtgatgccgttcgcttcttgtgcccggtattgtgggctacatgcctttccggcgtacggagctgagcgtccaggccagt

SEQ ID NO: 4980 - DNA, 120 bp, Homo sapiens
acccgaggccgtcgtgcaatgagactattcgcatggcattgtcaacgcggcggcgcgcgcgtctcggccctccgcggcttgccagactgtcctgcaaaccacctcacccgtctctttggc

SEQ ID NO: 4981 - DNA, 120 bp, Homo sapiens
gcgcagaggatcctgcgctctgtcccccaaggtcttggcgtttgctgagctctctccgcgcgcgtcgaggagaggccgcctctcgtgagcaaaagctgggagttgttagagattccgcag

SEQ ID NO: 4982 - DNA, 120 bp, Homo sapiens
tcacgcctctcccagctcccacgcctctcccagctccacggcggccgcgggctttgtgagctggggccgcgcgccgcgctgcacctgcccggatttaagtaccttggcgaggcagcgcag

SEQ ID NO: 4983 - DNA, 120 bp, Homo sapiens
aggcggctgttctaatcgccgtctccaagtacctgctcatgaataaacaccaaccccatttatcaggtacttagcgctcattgtgaaggggaaattggcccttttctgaaattgtctatc

SEQ ID NO: 4984 - DNA, 120 bp, Homo sapiens
ccgaggtgtctgtggtgcctgccagcattggtcgggtgggccccagctgtaccctgggttcccctactttcccccagttgggccccacatctgggtctggctcttaagtcttgggcatat

SEQ ID NO: 4985 - DNA, 120 bp, Homo sapiens
ccccgggctagtaggaggaaaagtggctcctctgggaacccggatgggccgaacagcagcttccggcagaggccctcaggtttcagagttctccaagtggggagaagggcggcctgctca

SEQ ID NO: 4986 - DNA, 120 bp, Homo sapiens
gcccgcgcacccgtggcagcaccacagagggaataaaagcagggtaaacaatttgaagatccccacgaaggcaagagagtaaatttacaaactcatttgcgtccggaatacttgcttctt

SEQ ID NO: 4987 - DNA, 120 bp, Homo sapiens
gggcgcgcattcccaggactcggttccctgggtggaattcacccaggaatacaatcgattttctgaacctgcgtaaggccacaggcagctctgaaaatgaaagcgtttgctaagtggggg

SEQ ID NO: 4988 - DNA, 120 bp, Homo sapiens
caccgatcgaacgtttaaaaatggctttgtcttcattcagctctcccgatttattctgtgttttacaaatagaagctcagagcttctgtcgcccagtccttgcatgactcatggcggtgg

SEQ ID NO: 4989 - DNA, 120 bp, Homo sapiens
acacgggtttcagggataacgggatgtttagaaaatcgctgcatatcggagtttcctagcacgttccatttatactgaacgcaggcggccgctgaaaatccagcctcgactcttgctaat

SEQ ID NO: 4990 - DNA, 120 bp, Homo sapiens
cctcggggtcctgcgacggtgctggagggtgttcccggctccgatgtggggaggcctgcgcggggactaggttctcgagaggcgagcgggcgcgccagagaacccgagactgctgcgggg

SEQ ID NO: 4991 - DNA, 120 bp, Homo sapiens
ggccggatgcgggatccctgggctgcggttctacgcagaaacgccaatggccatgcctccccagctcctcccagccccagtcactaggccggcgcctggcccggagatcctcccagagcc

SEQ ID NO: 4992 - DNA, 120 bp, Homo sapiens
cgggatagtcgcaccgacaaaaatcacaggaaggagcgcgcagttgactgtgggcgggcgggacggcggagccacttacagcgggacctgcgagggtgtgggtacgggactccccaacgg

SEQ ID NO: 4993 - DNA, 120 bp, Homo sapiens
aaccgtgcgaacactggagggattcattatgtgcaccgtggaggcgcggacatccacctgagtgtgcagaagcaggggagggacacaagagatagtccctgagactggctccaaccaatt

SEQ ID NO: 4994 - DNA, 120 bp, Homo sapiens
gaacgttagtccaaacaccctctttaatagcaggaaactgaggccctgagagggcaacgacttatccaaggtcctgcagcacttaaaaacagggctgactcaactagcgctggggaaggg

SEQ ID NO: 4995 - DNA, 120 bp, Homo sapiens
gggcggcccctccgctgccctctaagcctcagtttcctccgttgtgaaacattgcagttgtactaggtcgtggttctggaggtatgcctgaaggggtgtgcaggagtctgcatgggtatg

SEQ ID NO: 4996 - DNA, 120 bp, Homo sapiens
gcacgtgttggtgcatgtgtgtgttggaggcagcctatggccgtctgagaagggctatgtctccatgcgtgggtgcctgtaaagagctccgtgggtgcctgtgtgtatttgtgtgtattt

SEQ ID NO: 4997 - DNA, 120 bp, Homo sapiens
gtacgctggaaaagggcctggcactccccatccactggaaccccaccgcctgcctttactgctccttcacgtgtgccctggagcccattctcattctggaccccacagaaaggggcaagg

SEQ ID NO: 4998 - DNA, 120 bp, Homo sapiens
gaacgagagaagaaggaggattacggcaaattcatttctattttccagcccagtaagcctgcagtgtgtccctggtgttagcatgagaatgggctagggctctgtgaacaccccccgccc

SEQ ID NO: 4999 - DNA, 120 bp, Homo sapiens
ccccgacctactgacccctcttcccccctgacatgaatagtgggactcacagcctccccagcctctccaactagtgcctgcaaagccacggctcctaatcagggtaatttaatatatttt

SEQ ID NO: 5000 - DNA, 120 bp, Homo sapiens
ccccggcggctttattttccctccttttcgagtttgttttaggcattcacagctctcaccccgtcattagacggccttatttgacggatggaaggagctgctatgagaccacagcccttt

SEQ ID NO: 5001 - DNA, 120 bp, Homo sapiens
ccccgtaattagaatggtattcccagccattgaggcttttcatgaggcagaacaaaaactccccgagatgaatatcccccaactcccagccccctggccaggaaaggggctgtgagttaa

SEQ ID NO: 5002 - DNA, 120 bp, Homo sapiens
cagcgtcaggatgtactgggctcatcagaggaccttcatattctatggggtcttggggtatggaaccaggctggaatgtgcatgtaaaacacaaacacacacggtcacactagtcactca

SEQ ID NO: 5003 - DNA, 120 bp, Homo sapiens
caacgtcactaaactaggttaggaaatacttgtaaatatacacacatcacacacatgttacccagacagaaccagactgcagtttgtctttatatctgtgcacacacacacacacacaca

SEQ ID NO: 5004 - DNA, 120 bp, Homo sapiens
aaccgtcccctgacagtgccctcccttggttatcttagtcttctgcatccttaatgcatcatacagaactggggtggggggacagccagttcctgtttgctggttgaaggaaggaatgaa

SEQ ID NO: 5005 - DNA, 120 bp, Homo sapiens
gaacgggggcatcatgtggtgggggcagggcagaagagacagagggatcagatagagctgggttcaaaactctgctcctcatctcctagctctgtggcgttgggcaagtcactcagcttc

SEQ ID NO: 5006 - DNA, 120 bp, Homo sapiens
ccccgtctttctggcacctctgagtcctctgctgctcccaaacttccagcctcagcctgtcccataagggaacagacacaggggacagagagctgcccaccttcaccttgagggagcctg

SEQ ID NO: 5007 - DNA, 120 bp, Homo sapiens
ggacggtgctggaattggtgggaaaaaagccccacgccggtgaggaatgagttcctgaggcctgggcgccccacaccccctgggcccgcctgctccctgcagaaggatccctggtacctt

SEQ ID NO: 5008 - DNA, 120 bp, Homo sapiens
ggccggccagttcccacattaccacatgaatggggcacaagcccccctgtccactcgagcaaacaatttggctagcaaattgacataattacaagagacagcgagggaagaaaaacgccc

SEQ ID NO: 5009 - DNA, 120 bp, Homo sapiens
cagcggatgactcccgccgagttcctcggggctttgtgggccgggcgctcagggctgattagaaaccttgtggccttttcaagagccctaagtgattggtcccttaatctgattacaatt

SEQ ID NO: 5010 - DNA, 120 bp, Homo sapiens
aagcgccccgctagacgatgtgcgagtacacacacacacacacacacacacacacacacacacacacacacacttagcacccacttgggcctgctgggcgggggctctgccattttcatt

SEQ ID NO: 5011 - DNA, 120 bp, Homo sapiens
ccccgttccctgtgccccaaacctcagacacacaaagggcctgacactgcccctaatacatggggttgcccatctttagagggtcccacacagatacaacgcccaggccagggacatatg

SEQ ID NO: 5012 - DNA, 120 bp, Homo sapiens
ggccgccccgagcatccagggtgaggctgcctgaccccatcaagggcagcctctctccccagcagcggtatttctggggctccttgggccacagctcccacgggattaggcccagcaggc

SEQ ID NO: 5013 - DNA, 120 bp, Homo sapiens
acacggagtccaggttcagacactggaatcagaaggatctgtgaccttgactgagtgacttatcccatctgggcctcagttttcccacgtgtaagatgggaatgctgcagcctctctctc

SEQ ID NO: 5014 - DNA, 120 bp, Homo sapiens
cagcgcagtcagtgctccctgccaggctgtgtcaatgttcacaagtcaagaacaaagaggggacttgaactacaaccatcaaacacaccgatggggcagtctgtgtgtgcaccccctgta

SEQ ID NO: 5015 - DNA, 120 bp, Homo sapiens
ccacgtttgtcagatctacctgatcatgtgacccagtgctggttttggaaagaggggcctcaacccagatctctcccagggaggtgaggcaggagaatagggtccgaaagcagggaacct

SEQ ID NO: 5016 - DNA, 120 bp, Homo sapiens
ggtcgactctcagttaatagctatggatgaatgaatgattgttattgtctcagaagcacccaggtgtgccagctgagcagtggtccaggagctcaggtgggatttcacaggaagggctgc

SEQ ID NO: 5017 - DNA, 120 bp, Homo sapiens
gtccgcctcccaccaggagggctgacaggttctggtgcccactgcagcctggccaaggctgcaggagcaatgcttacggcacagctgcctgcaccttgcctgccctcatctgtttccctt

SEQ ID NO: 5018 - DNA, 120 bp, Homo sapiens
catcggtgctgagtttacatgaacaaatacacctcagcttaggtttctcaatgtgcgcaaatgatttcatgtatgatcgtgttgcagggtttatcacatttctaactgttgtggaagaaa

SEQ ID NO: 5019 - DNA, 120 bp, Homo sapiens
aagcggggaggggagttggcaggatgacaggatggcagcgctgttgacaaacacaaggcagtgggaagaggttgctgcgtgggagggaggtgctgggtctggcctggccgtggtgaattt

SEQ ID NO: 5020 - DNA, 120 bp, Homo sapiens
gggcgggggttagggggagaaatggagcctggctgtgggggcttggagctgaggtctgagattggccaggcctgcaaatagagctgtgagttgcaatgtgggaatgaagggagagagaga

SEQ ID NO: 5021 - DNA, 120 bp, Homo sapiens
agacgaaggacacgctggcagggaggtgggaggagcccctgggggaagacagcatcaccgcaagtggggtcctttcgatgagaagggtgtcagttgcctggtggtatagaggcgacatgc

SEQ ID NO: 5022 - DNA, 120 bp, Homo sapiens
gggcgaagctgaagaggaccaagggagccgctgctgcaggggaaggtgtgtgtggtttcagggctgccttggcctctgtgtggcctgagagcaggagcagggagccctcgctttcctggt

SEQ ID NO: 5023 - DNA, 120 bp, Homo sapiens
ctccgtcaggaacacagacacccacttccttctccttgggcacctccccaatttgtcctcttgcttcccatctctttatctgtcaaactggtcttaattcagcatcaaaatgtatccatt

SEQ ID NO: 5024 - DNA, 120 bp, Homo sapiens
ccccggggcggcggcacggccgatatggcatgctgtcacaaagtaatgctgctgctggacaccgcgggcggcgccgcccgccacagccgggtccggcgggccgccctgcgcctcctcacc

SEQ ID NO: 5025 - DNA, 120 bp, Homo sapiens
tgccgattcggcctggccagggtccactgggccttcaagttctttgactcgcagggggcgcggagccggccgtcccgcgtgtctgacttccgcgagctggggtcccgctcgtgggaggac

SEQ ID NO: 5026 - DNA, 120 bp, Homo sapiens
gctcgaggatcgcgcccacctgcccggcccggcgcccagggccacccacacgcacggcgccctgatggagacgctgctagactaccagtgggaccggcccgagatcacgtcgcccacgaa

SEQ ID NO: 5027 - DNA, 120 bp, Homo sapiens
agccgatcctgcggagcagcgggaggagactgctggacgtggagagcgaggccaaggaggccgaggccgcgctcgggggcttggtgaacgccgtcttcctcctggccccctgtccgcact

SEQ ID NO: 5028 - DNA, 120 bp, Homo sapiens
actcgcagagggagctgctgcagttcgtgtctgggtgcgaggcccaggcccagcgcctgccgcccacccctaagcaggtgatggagaagttgttgcccaagagagtccgggaagtcatgg

SEQ ID NO: 5029 - DNA, 120 bp, Homo sapiens
ccgcgcgcccctgctctccgcacagcgctcccgctccgaaggtgctctgacaaccccgcaggcgctattcggagccggggcagggcagctggggctggaggcggcgggcgcgggacggag

SEQ ID NO: 5030 - DNA, 120 bp, Homo sapiens
aatcgggacccgactctcgcagccttggcgctcgcccctccacgcaggcccgggatgccggcctcagcccccagatgtcgggaagacggcgccggccagtccaaggaagagcttccagga

SEQ ID NO: 5031 - DNA, 120 bp, Homo sapiens
atgcgtaacaccccacagcttgtgtaaacacaagcggggagtgcatacacacgtgcctgcaggtgcatagccctgcatacacaagagatggcaccgtggtggttttcaatgaaggggaac

SEQ ID NO: 5032 - DNA, 120 bp, Homo sapiens
gctcggggagaaagacacacatccttttgcaatatttgaattctgtaattgtatgaatgcattttctagatttatcaaatattaacatttcgaagactagggttggggatgaactgtggc

SEQ ID NO: 5033 - DNA, 120 bp, Homo sapiens
aagcggcgggtactcagaaagtgacactagtattttaaataaacacccaagagcttttgcatctgattgttcccttcaaagtagcctgctgggagcctagatcatcagaggatgttcatc

SEQ ID NO: 5034 - DNA, 120 bp, Homo sapiens
attcgtggcaaatatttatccgcagaggcagaatctgaattttggaaacggtcaaatatcttttggccacaagtttggttaaagagatgaaaaatcaagttaggcaattactcttatagt

SEQ ID NO: 5035 - DNA, 120 bp, Homo sapiens
ctgcggctctggtgtcccttaaaaactggctctgagagtgaagccccaaaaggatgctaaaaaaaaaataaaaataaaataaaaataaaaagtgcgccttggcagcatcatcaggatgag

SEQ ID NO: 5036 - DNA, 120 bp, Homo sapiens
tcccgagggaagacagaagtgttagttttctagcagtagcttgcagggcatagagttctatcttctttccttctccgtacctacctgctttccctacccctccaccaagtgagagcaggg

SEQ ID NO: 5037 - DNA, 120 bp, Homo sapiens
ctacgaagaacttcttcgatttttggcatccctcatgaatgtggaggctctggggtggaaaacattagttacaaagaaggattcacagggtggtaccaggacaccattaaggtttacaca

SEQ ID NO: 5038 - DNA, 120 bp, Homo sapiens
cagcgattgacagggctactgtagagcaccatctccatggcagcagtctagatgagttcatttcagaggtccctctcaacccagaggctctacatctcaatctttctccatcctcctcct

SEQ ID NO: 5039 - DNA, 120 bp, Homo sapiens
ggacgggacgcgggtgcgttgggcccactcacgttgaatttagggtaaggaggggctcggatactaaactccctccgtaggagctggcaacgtccttcctgcttccatctactaggctat

SEQ ID NO: 5040 - DNA, 120 bp, Homo sapiens
tcccgggtgcaggggaataggcacgggagccgagttagggcgagaaaggggcggaggccgctggcacctgactcacctgaagagtcggtcccggccctgggtctggttggtgaagcgggt

SEQ ID NO: 5041 - DNA, 120 bp, Homo sapiens
caacggataacatctagagtcggccagggtgtggggaactgggatccccccacagtcctggggcacatgggaatcgctatgaataaaatggcaagccctattcacaatttaaccacagct

SEQ ID NO: 5042 - DNA, 120 bp, Homo sapiens
taacgaaactactgcttaaaccattcatgcaggaggaggcttattagagcattccttgttcgagaagaaaaataagccaaaatgtctgtagagcaccctttaaacaagtgaataaaggtc

SEQ ID NO: 5043 - DNA, 120 bp, Homo sapiens
gagcgtgtgtgctaactctgtatgtatcaccttggaatgatgtctgttcgtacatttttaagttcaaaagcaagttccaagcaatgcatttcatctcaccctctattacaacagccccag

SEQ ID NO: 5044 - DNA, 120 bp, Homo sapiens
aaacgtgagattttcatagcaaccacccaccactacaaaaccattaaaatactgcttaaagggtgaggtgcagtggctcatacctgcaattccagcactttaggaggcagaggaggttgg

SEQ ID NO: 5045 - DNA, 120 bp, Homo sapiens
ctgcgtggcatcccttgctgccacctccatctcagtaactcagccccacgtggtgctcggaagagcccttgggagagggtgcgtgatctcagggcgtggcagcttagtgggggactttcc

SEQ ID NO: 5046 - DNA, 120 bp, Homo sapiens
ggacgggagcagctgtttctaaacctccctctccccacaagcttaagcagcacaggctgcctgcaggcactttggtcagctgtgtgtatgcgtggctcccgtgcaccgaggatgactggt

SEQ ID NO: 5047 - DNA, 120 bp, Homo sapiens
ctccgtgggcgcagggttcctgcctgcgctgttttccactgtatgcagcacttagcacaggacttggcacatatagggcgaactaaagaaccaaagcagggcatgatggtgtgcatctgt

SEQ ID NO: 5048 - DNA, 120 bp, Homo sapiens
gatcgctggagcccaggccttcgaggtcagcctggatagaatggtgagatgacagaaacccccacactgtgacgagggagggcaggagaaggtgagtgtccatggggcactgttgaggaa

SEQ ID NO: 5049 - DNA, 120 bp, Homo sapiens
gtccgtagcagagggaccaacatttccaaaagcagggggtccggtgcatggcgagggggaggctggagtgctcagggacagtggagccctgaatgccgagctagggaattgagctctatt

SEQ ID NO: 5050 - DNA, 120 bp, Homo sapiens
cagcgggtgactctggttctcctaaaattctgcccttacttgccactcaccacacccccagatctgaagggccagcccttttctacctatgacacctcaccagcaagtaaagggcacagg

SEQ ID NO: 5051 - DNA, 120 bp, Homo sapiens
gcccgtgttagtcctgctagtcagttcagaccttgtccactgaatatgaagttgaccatgaaagatggctaacatttctctgattggagatagatgggacttaagaaagttggaggctgc

SEQ ID NO: 5052 - DNA, 120 bp, Homo sapiens
atgcgctgaccttgaggatgcctgcagaaatctaagtaaatacctgagagaacactgacagataaagtcacaaaccaacacagggaggctggtagggaaagaaaatctgagacgtgagtc

SEQ ID NO: 5053 - DNA, 120 bp, Homo sapiens
cttcgagaggcctaaactcagcttcacacagtgtgcattgaacaaatatgaattatgaagtaataataattcaaccttctactcagcaagcatgggaaataatgacactagcaaaattca

SEQ ID NO: 5054 - DNA, 120 bp, Homo sapiens
cttcgggtgataaatctgaaatcttaaaaggtaaaatgaggcatagatactgatgttttccaagatcaagatacataaatttatgacaacattttagtgagtgaaagtcggtgtttttag

SEQ ID NO: 5055 - DNA, 120 bp, Homo sapiens
caacggctaaaacctggggcacatcagaatgtcctcgcaaggaccaagtccaagctggccccttgagaagcatcaggtaccctttggaagctggtagtgctggtcagtttaatctcactc

SEQ ID NO: 5056 - DNA, 120 bp, Homo sapiens
gtccgatcctcgggccctgggctcacaagccatcgcttcccatcgtggctccattctgtagctgcaaatcacaagactgtagacttgccattacccagaagcaggtcacctctgaaattc

SEQ ID NO: 5057 - DNA, 120 bp, Homo sapiens
gagcgtttcagcccagcccactctcactccagctggctctcctagaggtccctggccacctactcatgcccagtggcccatcttgtgtgacttcctcttacctgactgcccggtggccca

SEQ ID NO: 5058 - DNA, 120 bp, Homo sapiens
cttcgaatgtgctgggggcagggggctgtagggaagactgcttggtggaggtggtgtctagctgagtcctagcagacaaaggcggcatgggggaccaggcgtggtggctcacacctgtaa

SEQ ID NO: 5059 - DNA, 120 bp, Homo sapiens
gtgcgtgaatgcatggaggtgatttgttgggcagtgtggacagacgggaagcaatctcaatgtcctccagtgcaagaattggcaggcaaatggggatgtgtgtgaacggtgtgactatga

SEQ ID NO: 5060 - DNA, 120 bp, Homo sapiens
gatcgattacggacatgcaagatggaaaattgcttgtggcatccagataagggaaaacaagtaggacaccagattgtatacactgtgatcaaaaccatgtgaaaaacacatgcatgaaga

SEQ ID NO: 5061 - DNA, 120 bp, Homo sapiens
atccgtctttttcaaaccttttgtaatgggtggttttattaattttataatggaaaatgttaatttaaaagcaagttatttacagtttagtaagctcatggcagggaaaggctgtgctct

SEQ ID NO: 5062 - DNA, 120 bp, Homo sapiens
caacgcctactcccatgcctggcaattatagagataataaatgtgggtgtggaatgagtgcccactgggaaacctctcagaggactttgacccaggaacatatttgcacagggtttccct

SEQ ID NO: 5063 - DNA, 120 bp, Homo sapiens
aggcgtgacccaccgtgcctggccaaaaaactttttagtaattaaaaagatcaagcttgataatcacaatcatatgagcagttattaagtgccagcctaagtgcatttacagacattcct

SEQ ID NO: 5064 - DNA, 120 bp, Homo sapiens
agtcgattctcccctaagaactggcatcaaggagtccagctcctcccgtaactaacgtgtggcccaggcgagctgctgagtgctaataatagcagcaaacaccacaagcgtgccaggttc

SEQ ID NO: 5065 - DNA, 120 bp, Homo sapiens
aaccggtgcttcaaaacctggtggggttttttaaagtccatttctacgcctcacagactaatactttatcaacctggctcaaatatcacagcattttcacattgctatacaagtttcttt

SEQ ID NO: 5066 - DNA, 120 bp, Homo sapiens
tcccgcctctccagggtcctcctcaggttctggggcccaagggaccctcacagccccacaggcactggggttgagattgcccatttcctggcaacccaggggctcccgtgtggaccaagg

SEQ ID NO: 5067 - DNA, 120 bp, Homo sapiens
ttccgtgggaccgggtccattcccagcatctctgtccttccttacacttgatctcattactttttccaagtgttcgtcctctccccactccttcatgggatttagatatttttagtgata

SEQ ID NO: 5068 - DNA, 120 bp, Homo sapiens
cagcgaggaggtggccaggccaattctagagcttccaattgctgaggggccccaccctacctccatggcctggccggaggggcctcaaccccacagtcagtcgcaccgcaggcagagggg

SEQ ID NO: 5069 - DNA, 120 bp, Homo sapiens
ggacggaaaccctcacaccactagtcacagccagccattcgcttgttttataatcatcccctctactaaagtcactttcgcccttgggtcacacacatgcatttgaattccagcatctgg

SEQ ID NO: 5070 - DNA, 120 bp, Homo sapiens
atccggattgaagaggaaactagttcctgctctgggctgagctgaccacgttgggtaccctcccctgtgacatccatggtcctgccctcgagaccctcttccgtctctccttcccaggcc

SEQ ID NO: 5071 - DNA, 120 bp, Homo sapiens
tcccgcctctcctctaccctgcagccaacaggctgccttggcctcctcctttgtgagctcctagtaatgagcagacccaggagctcctggctgggatgcccatcatgtggctcccgcctt

SEQ ID NO: 5072 - DNA, 120 bp, Homo sapiens
aggcgagcatctccctccgcagctcaactgcagggtccagtgtgggtacccaggcttccaccccttgcataggtcctacccctcagctcactgcatgaaagtatcattgttaggtgactg

SEQ ID NO: 5073 - DNA, 120 bp, Homo sapiens
ttgcgcgctgctcctgcctgcctctgatgatagcctgtgtggacggccgcatgtgtctgatgtctgcgtgtgtacgctatcagctgatacgttgcaccagctgtccctccccccaggaga

SEQ ID NO: 5074 - DNA, 120 bp, Homo sapiens
ttacgtgaatgagagaggcattctttactcctcctggcataaatccgtactcgagctgggtgtgtgggtgactgcaaaataaatgttgattacagtagtggcttcgggaggcagctgctg

SEQ ID NO: 5075 - DNA, 120 bp, Homo sapiens
gaacggagagggcttgtgcccaggccatactcttcacctgccctcagacctcagcaccttccctacctcctgcgcttctgtccgctttcccttcccttctccgtcccatgcttccagcct

SEQ ID NO: 5076 - DNA, 120 bp, Homo sapiens
ctgcgatgtgtcaggagggggtatacagcacaagacacagtccctgctgctaagagacatagacacgggaaccattaagttataatacaaagtttttataccaaacaagcagttaagaca

SEQ ID NO: 5077 - DNA, 120 bp, Homo sapiens
ccacgtgggattatttactggaatgcaggcaggcacgcgggaacagctgcagtagcttaactctggttttggaacagctgaccagtgaatggcctgggttttctggcagaaacaggtatc

SEQ ID NO: 5078 - DNA, 120 bp, Homo sapiens
agacgagaatgaaaccccgtcggctgctcttggtagctccttgctactcaaaatgtggtaggaggatgagcagcctcggccccacctgggatcttgctggcctctcagctccacccacac

SEQ ID NO: 5079 - DNA, 120 bp, Homo sapiens
agacgctgcctttcccacaagttcccagttcttagcaaagcagccgctggttcagggacctcatgttgagaacctttgatccagactgcagagggctggctggcaaatcagctgcatgtt

SEQ ID NO: 5080 - DNA, 120 bp, Homo sapiens
tcccgcggggactcacatttcatccagccaacattccagggcattcgttttgtggtgtgcaataggcagacagtaacatttggcaacagtggtgagagggtattgggatagagcctgggg

SEQ ID NO: 5081 - DNA, 120 bp, Homo sapiens
tggcggaacccccaagagaggcaggactccagagatggtatagaggagatagaatcagcaggaattgtagctggtttgacatggggcatggccgggggaggagtcagagtgactcagact

SEQ ID NO: 5082 - DNA, 120 bp, Homo sapiens
aggcgttgacagcagagctatttatggtcatctccaaacttatttccctgccagctgtctgtgccccctcccccacccaatctgccctacctgctgcttccagcactgtcctcccaaagc

SEQ ID NO: 5083 - DNA, 120 bp, Homo sapiens
ccacgccatacacaagcaactctgaacagcttctaacagtccatggcctccacctccctctcttctcgtctgctatttccccctccccaggatccctaaatgtagcattctcctgaattg

SEQ ID NO: 5084 - DNA, 120 bp, Homo sapiens
cctcggtgccctcgcgttgtcccctccctccaccacacaggttctgtactgcccacagccagacccaactcacacttggtggctgctatggactgagtgttttttggcttgtttgtttct

SEQ ID NO: 5085 - DNA, 120 bp, Homo sapiens
ccgtgcttgatcttaggtaatggggcaggaagttgtttttccttcctttgtcttgctacctagctggattttctacattttctttcatgagcttgtgctactttttgtaatggaggaaat

SEQ ID NO: 5086 - DNA, 120 bp, Homo sapiens
cagcggatggggcagggggatttctggcagaggctgaaatggaaggtgggacctgtggccagtgtggtgggggcggggcagtctctgcctttcagacctgggagggaactgtgtgcatga

SEQ ID NO: 5087 - DNA, 120 bp, Homo sapiens
ggccgaagagtttgtaaacaagtgcctggctactcaaaaaaagtttaggtcctttggcccagactagttctatcccaggctactgagaaacgggatgctgagtccctgccactggtcttt

SEQ ID NO: 5088 - DNA, 120 bp, Homo sapiens
aaacgacaatggaagatgcgctgaaagattggagagggtcaaaacgccattccctttcctgaaaggaaggcaacagaaacttcaaacattggggcagagggctaagcaagattaaagggt

SEQ ID NO: 5089 - DNA, 120 bp, Homo sapiens
ccccgtagaaaaggatgtgacaattcatgggagctggaatgggtcatcaactgcagccccagaccaacctcagctcgtgatgtgaggcacagagatcctagattcagcaggtctcctaac

SEQ ID NO: 5090 - DNA, 120 bp, Homo sapiens
gaacggtcaggtcaaatgacagcccccaaatcagtggactgatgccaaggtgaggcaggtctctaagtccatgtcaaaaggctctgttcgccttgttgcccaggttggagtgcagtggca

SEQ ID NO: 5091 - DNA, 120 bp, Homo sapiens
ggacgtgtgacccaggggcttgaacggagttaagaagagcagggccaggagcagacagacctagagagcaagaacattcaggagcaaagcctgaggcaggagggtggtcatcaacacaga

SEQ ID NO: 5092 - DNA, 120 bp, Homo sapiens
ggtcgggcggcatccccaccactcctcccggggatgacttgcacctgaaacagaggtaataaaacacagcagccttgtgaggatgacatgacttaatccgtttaaagggctgagaaagtg

SEQ ID NO: 5093 - DNA, 120 bp, Homo sapiens
acacggagtgatgcttgagactgggggcacaggtacctagaggacggggtggcgtggcccgtgtctggggtctgtcagcgaggcgatccctgggctcttggcagggctggcactgctgaa

SEQ ID NO: 5094 - DNA, 120 bp, Homo sapiens
ccccgatttccttggaagaagtggagacatctataaaagcaggaaggcagacccagggcagaggccctagaagccgggttgttagaggggagccagcccctgagcagagggactgagcgt

SEQ ID NO: 5095 - DNA, 120 bp, Homo sapiens
aggcggcaggcaggctcctaaggtgacggcagtggtctgtgcacccatggcacaggccctaggtcgggactgggactgcctgggggttctggcagaggctcttcgtctgcccacttgggg

SEQ ID NO: 5096 - DNA, 120 bp, Homo sapiens
ttccggggcatgccccaggagcacagatgctgtgaggccaggttcccttgccctcgttgccactttcttggtgacctcagtccatgggaggacccttggcacacaatacccccaacctct

SEQ ID NO: 5097 - DNA, 120 bp, Homo sapiens
actcgactctggcactgggctggtgtcagcagaatgtggccccctcctccatgctccatgaggaagaagtggctgccctgcccaacacgggccgtgtggaggaaggaagtgcacccaggt

SEQ ID NO: 5098 - DNA, 120 bp, Homo sapiens
ccccgtcagcactcctgccctggaggtggggctgctgctggggtaagtgggtccaaggttctggtgacttatcgtgacatccctggggacgaagggctacaacagcctttcaggaggctc

SEQ ID NO: 5099 - DNA, 120 bp, Homo sapiens
tcccgcccagacccctctctgagagtgggggaggccactggctgcctccttgcattggaggccccttccccaccgactccacagggaagctggtgttttctggcctgatcctgctggggc

SEQ ID NO: 5100 - DNA, 120 bp, Homo sapiens
cagcgtcttgctgccgtgcccggagccacagtagagagaaaggtggggtggggttctgagtcacagcgctgctgcagctagctggctggcctggggtggggactaaccagggtggggatg

SEQ ID NO: 5101 - DNA, 120 bp, Homo sapiens
ttccggctgagtcacagggaaggaggacccttacatggggctgagggctgagtattcccacatcacttcctactcagaaccccacttcctactcagaaccccacttcctggggtggggag

SEQ ID NO: 5102 - DNA, 120 bp, Homo sapiens
tgccgtctccctccagggagggacagggcagccccagaccagccccggtctgcctttttgaaggatgatctgcctagtgggatgcactggccttggtgaagcccctggctgaagcctgtc

SEQ ID NO: 5103 - DNA, 120 bp, Homo sapiens
tgtcggggtggagggagagggttcaccctgaatgggaaaaccggccgcagcctcggcgtgccctgctttcttcatactggactaacccactggatagatggatttagaggatgtccgagc

SEQ ID NO: 5104 - DNA, 120 bp, Homo sapiens
gagcgagcgagacactctttgacacaagggagagcataaaagcttaagactgaccccaaggtgcgccagcccctcgcaggaagtaaagtgcagaaacacctccacccctgcacaaagagc

SEQ ID NO: 5105 - DNA, 120 bp, Homo sapiens
gtgcgcaagcgtggacaagccctgcggtaccgtgtacacacacacacacacacacacaccacaggcaagctcaggcagggtccttcacagacgtctgcagtcactctggaggtgacccaa

SEQ ID NO: 5106 - DNA, 120 bp, Homo sapiens
caccgagcacagaccagctcgcgcccacaacacgagcctgtgacacgcaagtctctgtttctgagctgatgccgtctggctttggccatgagaccctcgtgtgaccaggtgcgtgcctaa

SEQ ID NO: 5107 - DNA, 120 bp, Homo sapiens
ggccgaaggaaagtttgccagtcacaaaactagctgagcccctgggctccctgcagcacacacactctgtgcacgctccactgtgccccagaaaacccgtgggttctttgttcctagact

SEQ ID NO: 5108 - DNA, 120 bp, Homo sapiens
ggccgggcctgggtgtggaagggggggctcggcggtgccccctggtggcatgcttgggcgtgggactgatatcccctcgctccttccccccagcgcgactgtcaaaactacatcaagatc

SEQ ID NO: 5109 - DNA, 120 bp, Homo sapiens
tgccgctcagcggcagtcacctgttcacctgtggcacagcagccttcagccccatgtgtacctacatcgtgagtgacctgtcctcagccctgaggctgacctgggaactgcccctctttc

SEQ ID NO: 5110 - DNA, 120 bp, Homo sapiens
aagcgcagccctgacagccatgtctccctgtgcggggaggcgggggcacatgcggtcacttacccatgaagatcctgtgccacccaggccttgctgccctcttctgcttcttccagcatc

SEQ ID NO: 5111 - DNA, 120 bp, Homo sapiens
caccgcgcccggccaggctcacatcattttctaagcctcacctcctccgccaggtgggtctgataatgtgtcccgcgtcgggtcactgtgaggcagtgtggcactgtgtctgggtgaggc

SEQ ID NO: 5112 - DNA, 120 bp, Homo sapiens
gagcgcttgcaccttgagctctggaaggctgagaatctgctcgaagggcacttgtgcccgaagtgacgactccacgctccgctgctcctggggaagcagctcacaaaaccgcctgtgggc

SEQ ID NO: 5113 - DNA, 120 bp, Homo sapiens
tgtcggtgttctcagcgatcggtctccctgtgtgttcattcccactccttgcctgctgctcattgtcaaccaggtgaggagctaaaaccacgtacacagaacttccgagtcatcaggcaa

SEQ ID NO: 5114 - DNA, 120 bp, Homo sapiens
gcacgtggccttaccatggctgtcactcttgaatgcataggctttgctagctaaacttagagttactaaagaattgagcccggcgtggtggcacgctcctgtagtcacagctactgggga

SEQ ID NO: 5115 - DNA, 120 bp, Homo sapiens
gggcgacacagcaagaccccgtctcaaaaaaaaaaaaaaaaaaaaaaagggagaattgaggagaggcaaacagctatttgtcctcattatatgcttggccaaattccttggcccggggtt

SEQ ID NO: 5116 - DNA, 120 bp, Homo sapiens
gtgcggcgagaactggcttcgaagcgggagggctgcaagtcccatgatacaccggaagaatctggcgtcgaggccggccagctccaaagggcaaacgctgtctcccccacccaaggtagc

SEQ ID NO: 5117 - DNA, 120 bp, Homo sapiens
cctcggcccgcgcccaagtgggtgtggctgcgggaaagccccgcccccaggacgcttctccaatgggaactgccctcgtgtccatggcaacggcggcggccacgggcttgctagaggaag

SEQ ID NO: 5118 - DNA, 120 bp, Homo sapiens
aagcgctgccccggcagccgcagccacggccaccgggagctaggagtgaacccctgcgggggagcagcttccccctcgcgatcgtggggacagccagtcctgtgaaacgaggaggcggtt

SEQ ID NO: 5119 - DNA, 120 bp, Homo sapiens
ttccggacgcccagaaacgcccagggagacctggagccgggggaagaggggacatgagcggccagctgagtccatccccaggcggctaggggcggacccagcagcccctcagctctcctc

SEQ ID NO: 5120 - DNA, 120 bp, Homo sapiens
cctcgtaaccacgggtgggcagtctccaccgtcacagcccaaagggtcttagccatcgggtgcctgtccctagtgtgtacacgtgcagaaaatgagtcctgggagagggaaagggccagc

SEQ ID NO: 5121 - DNA, 120 bp, Homo sapiens
gaacgatatgaggattctcacctgggaaaataccggcggatctaccctgggcctgacacagagaagtatgcccgcttcttcaagcacaatggctccctcttccaagagactgctgcttcc

SEQ ID NO: 5122 - DNA, 120 bp, Homo sapiens
gaccgacattctcctctgcacacctaggtggggacaagtcctgaagctgcattgcttcccagcagggaaagaggaagccagacaccagcaaagaggaatggagctataaatcctatcaga

SEQ ID NO: 5123 - DNA, 120 bp, Homo sapiens
tctcgcatcagtcctaagaacagattgtaatttcctgctctttcctcatccccatttttcctcacccctcttctccccaacaccatttctctactgtctgaagctgctgtgtcttgtcag

SEQ ID NO: 5124 - DNA, 120 bp, Homo sapiens
atccgccttaagcaggaacagcaggagacctcgggcactaagaggcaaaaggccagggaccagaaccagggtgaatcagctggggagaaaagccgacccagggcagggctccagagcctt

SEQ ID NO: 5125 - DNA, 120 bp, Homo sapiens
aaccgcaactgggagaaagaggtgccaggggttttgtagctcttatctttccacaggaaaatgggttgggacaactagataggggaatgaatctctgctgtcttctcctccccatgcaca

SEQ ID NO: 5126 - DNA, 120 bp, Homo sapiens
atccgatcctttggaagatgaagtgagagaatggacagcaaaaggaaccttcctgggtcagggaagggatgagggtagagtgggcaggaggcctgtagccatcctgggtgatggtttggg

SEQ ID NO: 5127 - DNA, 120 bp, Homo sapiens
tgccgggacagctggacaccatgaggcctcaagaaattgtggaagaggaggagctggagcggatgaaggccctgctacaaagggagactctcatccgaagcctgggtattgtagagcagc

SEQ ID NO: 5128 - DNA, 120 bp, Homo sapiens
acccgtctgcagcaccctggcccccagggccagaaaaaacttcatgagagtcgggtgagggtccctgtgaagtctcccagaggaaaagggaacaagggctgtcattccaggacatggtgt

SEQ ID NO: 5129 - DNA, 120 bp, Homo sapiens
gtgcgctagctggaccttgggagagggtctgttgattccttttgcgtctgttcccaagctcctttgttttagatatgacatccagcaagttgcagctccaaaccttctcatttacaggaa

SEQ ID NO: 5130 - DNA, 120 bp, Homo sapiens
tgccgctttcactattccctgggctggtagcaaacctgttgggtcttctgtttttgttgaaccccaaaggagtatctggttaaatagtggccgcggcctagaagagatttttttcagtta

SEQ ID NO: 5131 - DNA, 120 bp, Homo sapiens
caacgctccatccaaacttacataaaaatgtggtaaggggctgctcttctcctctagcctagattttgctaggacaggctgggcagtcaagaactgaaatctatgagtctggtcctactg

SEQ ID NO: 5132 - DNA, 120 bp, Homo sapiens
gggcgctcctcatttcctgcatccagttctgccccatgaatcaatccccaggatcttaggggcactgccaagcatgaatgctgcaatcccacatgttccccggtaccatctgcagcccaa

SEQ ID NO: 5133 - DNA, 120 bp, Homo sapiens
agccggcagccatcaactcctgttcattgtcaatgaagaaggctgggaggtgctatttttccagtgccagaatcaggctcactagccgtaagtatgcaaaactagctttggtcattttga

SEQ ID NO: 5134 - DNA, 120 bp, Homo sapiens
ccgccgccagccccagcactatgtcaggactggctcagaggaacacccattccagacaataacaactttttctttcttgcccaggtgttttcaacccttaaaccagactgggcttgttct

SEQ ID NO: 5135 - DNA, 120 bp, Homo sapiens
tcccggaccatagagctacaaacttccccgaagagcgacttccaattggtttttaggcatccttggtgtgcctttcatacataaaggtaggtcaagggttccctaccttctctgacaata

SEQ ID NO: 5136 - DNA, 120 bp, Homo sapiens
ctccgtggggagtcagctacccgggggcagactttctggcattctttggaaaagcagtgaaaataaaactcacaagttacatcttcagcagagtatctgctacatatgaatatattgtac

SEQ ID NO: 5137 - DNA, 120 bp, Homo sapiens
ctccgcaaacaccctgcaggctccggccgccggggatgaggtggaagactgggcagaagagaggccgcaaaggcccgagggctgagctgctctgcgctggggaggggcgaagtgccagag

SEQ ID NO: 5138 - DNA, 120 bp, Homo sapiens
gagcgcgggagacctcatggtgggcaccaggctgctccgcggtaggtgggtgaggccaggagattcacatctgcagatgccacagtgaggatacagcatttagatccctcggctccaaac

SEQ ID NO: 5139 - DNA, 120 bp, Homo sapiens
aggcggttccgggggaccggtagctggggaattgggtttagcactttccaacgcttggaactggacatccacggctccgagtcctttgaggtcttgctcgggactacgtttcccagaagg

SEQ ID NO: 5140 - DNA, 120 bp, Homo sapiens
aggcgataattgacagctctatcagcctatggacagagaaaaattctagccatggaaactgaaaagccaatagcaagaggatgggggcggtactttccggccgctggctgtcgaagccgg

SEQ ID NO: 5141 - DNA, 120 bp, Homo sapiens
tcacgaatcccggtcgggttctgggaggcacagcctcggggttgcgggccgggtgcggctcggcggtggaggactcacttcctgctccatccccggctgggccctggggcggtgagtgat

SEQ ID NO: 5142 - DNA, 120 bp, Homo sapiens
gaccgcggcggcagcggcgcgctgctgaggggcgtggagggggcttgcccgccacccagacgttttctcagcggggttcccgcgctggcctttgggagcccccgggtcttgctgggctgt

SEQ ID NO: 5143 - DNA, 120 bp, Homo sapiens
taccgtcggcgggataagtcattctcttaatcagttttcttgcttctcgatggtggtcccagggtttcagctgatctgtgaccctctgaccgccgcaccccggttagggcgcgagcaccg

SEQ ID NO: 5144 - DNA, 120 bp, Homo sapiens
gaacggggttcggccccacgcgtgcagtcatgttcctattaataaacccggtgaacgcactggagcttctcacagtggcacttagtcacagcccctcagcgctgtggggcctttgaggtc

SEQ ID NO: 5145 - DNA, 120 bp, Homo sapiens
ctccgcacatttagcttatgacttcaaccatcatttctcagagcatgggtctggctcaacctctctcctgaatttcagacctacaagtctagctacttggtggagacctccccagaatga

SEQ ID NO: 5146 - DNA, 120 bp, Homo sapiens
ccccggaagcattcccccaggcatttctctttctgccttcaattccccattctcctacattgccttgccagaagcctgctggtcagcttggatttctttttgtccttttttttctatatt

SEQ ID NO: 5147 - DNA, 120 bp, Homo sapiens
ccacgtgcttgttgtaaacatttccagaaaatacagaagtgctcaaagtgaaaaaatggaaatgccttgtcccttcctcattccctgccctaacctcacgccccagattcagctatgtaa

SEQ ID NO: 5148 - DNA, 120 bp, Homo sapiens
aaacggattgttttccatctggtctccttggcttttcctttcagtgcagctcaacagacattaatcaagtgccttccacacaccaaagtcctaccctagatcctagaggttcagagacaa

SEQ ID NO: 5149 - DNA, 120 bp, Homo sapiens
ctgcgtatggtgaagaatgctttatggaatactctgcattcctttctctcaagacttagatttaccattaccatatggaaatttctaggctgtttccaatgcctaggtggtgctcagaag

SEQ ID NO: 5150 - DNA, 120 bp, Homo sapiens
ttccggcattggtatgttccccttctgtattgcacagagctgggaaaccactgaagtcatgtgctctgcagaacttgttcaactggtttcctctccacagacccctaattcagatttcca

SEQ ID NO: 5151 - DNA, 120 bp, Homo sapiens
tttcggcatggcattccagagatgtatagaaagtctagttgcttacaaattttaggttgaaaagagagctggaaccaggtgccgattttagataacagggaagttaattacttctaaatt

SEQ ID NO: 5152 - DNA, 120 bp, Homo sapiens
tagcgggtaacatgtcattcttggtttttcttatgtccttccctcttatctcagggaggaagtggggtatattcctttctgtagctggctgccgcctctgctcttcagaaccttgctttc

SEQ ID NO: 5153 - DNA, 120 bp, Homo sapiens
tcacgtgttcttttcttgcagactataaaaatatgctttttccacaatcatttaaaaaaaataaaaagacactttcccaggacatgtcaccatctcagactaactccttctccgttcccc

SEQ ID NO: 5154 - DNA, 120 bp, Homo sapiens
acccgcctctctgcagcattgaaagctggtgacctctaccagtttgctgattttttccttccgtgattgccattgtgtgattctctcctggttcttaacttgatcacagacgctatcttt

SEQ ID NO: 5155 - DNA, 120 bp, Homo sapiens
ggacgtcccgttgacatttcaagctgaacatgtttcaaccgtgaattgctcatcctctccggcttttgtgggtgtccccattcttgtttaatggcatcatcttttatgtagtcatccatg

SEQ ID NO: 5156 - DNA, 120 bp, Homo sapiens
tgccgcaagtcaccaaatcatcttttaaaaaataagaaaaaaaccttctcttttcgttttatagaagtgtttgtaagtttgctgtagatggtatatggtgccggattttctcctagaatt

SEQ ID NO: 5157 - DNA, 120 bp, Homo sapiens
ccccgcctctgagatctgactgggccaggcagggaaaggatgtgtgtggaactgattgtaaaagagtgctattatgttcagtttaagcttctccaaggagaatggaaataaagcttaaaa

SEQ ID NO: 5158 - DNA, 120 bp, Homo sapiens
gatcgagaacagaccagatacaaggtgagtccttccttgctttgtgcttagatttctgtcaacttgagaaagttagcatgttttattttgtgtaagagttattgagaagtctgtgtaagg

SEQ ID NO: 5159 - DNA, 120 bp, Homo sapiens
aaacgtgttgtacagatttgtgtatgtgtgtttatgtgtgtatgtggtatatatgtggttatatatttatatatgtaatattgggtctatcatcacacatgcaaaccaagccacatagta

SEQ ID NO: 5160 - DNA, 120 bp, Homo sapiens
agtcggttatgtgggcatcagtatgagcccttactcttgactccaccactgttagggacatcctcagtgaaatccctgacaatttcttcagtaatacatatgttatataacactccttta

SEQ ID NO: 5161 - DNA, 120 bp, Homo sapiens
gctcgtgcttcagcagagtgcagcaaaatgttccctgaccaaaacgactgtgtctgaagggcacagcttgggggaatacagctatgaaaaaaactacacgaggaacaaaaacattggatg

SEQ ID NO: 5162 - DNA, 120 bp, Homo sapiens
ctacgttcctaaattgtccataatgtggttatatttttttaataataaaagtccaatttaacaaatatttattggacactgcgtgtcagacacaatgcttgatgctggagatacaatgac

SEQ ID NO: 5163 - DNA, 120 bp, Homo sapiens
tggcggaacttcagtccagtgggagaggcagatgattttacaagtcattgtgacaccatgtgacaaacccacaatagaggagttcagagagtggctggattgtgtccgagtggtgcctaa

SEQ ID NO: 5164 - DNA, 120 bp, Homo sapiens
aaacgggttgggaggaggtcccaggaaaggcttcctggaggaagaggtgactaagctgggacctgagggctatataactgaagattggagtgaggagtgttctaagcaaaagaagctgca

SEQ ID NO: 5165 - DNA, 120 bp, Homo sapiens
aggcggtgtaaagctattggaaggatattcatttgcttgcctgcttgctcacttatttattcttccaaatttgttgtagaaactcaaataatatggaagcatgaaacatgaaaagtaaaa

SEQ ID NO: 5166 - DNA, 120 bp, Homo sapiens
agccgggagccaggagaggatagcattatgacctttactcctcagtaactcctaaggctcacagagtggttagttttccctcccctgtctgtaggcaaaagtggggacttgcagatagga

SEQ ID NO: 5167 - DNA, 120 bp, Homo sapiens
gttcgttatggagactaaagttcttaccatgatgaattaaaaaaaaaaatttatttttgtatttttctgctgtttaaaccatgatgaatttttagcaacctctcatctgggcagattctc

SEQ ID NO: 5168 - DNA, 120 bp, Homo sapiens
ctccgttcccatcttcagaggggtctggtggcggctagatggcctttggtgaggatgctgtctggttgcattggctggcccggaagatcattccaaactctgtggcttatgagtccagac

SEQ ID NO: 5169 - DNA, 120 bp, Homo sapiens
caccgttttagacattttaattcactgtaacagtaaacagcatggtccctgacctcaagttgcccagggttcagtgggagaggctactcagcaaacaagcagccacggcaggtatggcgt

SEQ ID NO: 5170 - DNA, 120 bp, Homo sapiens
gcacgtcggaggtgcagcttgaactagtctggggaaacgaagaaggcatcctgggggaacatctgaggcttgaaggataagaagtaagaggataaagtgttcattcagcagatctttaca

SEQ ID NO: 5171 - DNA, 120 bp, Homo sapiens
ccccgtctctgtgccaggcactgttctaagcactggggacccagtgatgaataagggaggcatacttcctgctttcttgagttcacagtcctgtgggagatgacagcaaacaggcaataa

SEQ ID NO: 5172 - DNA, 120 bp, Homo sapiens
catcggttgatgcaaagaaagttctttagcccagtctcttttgaggaatcaagggtccgtgaaatgggatgattttattttggtgttaatctattccacttggaggaggagggctgtgat

SEQ ID NO: 5173 - DNA, 120 bp, Homo sapiens
ttccgtctttgctttcacgacctgcattctgttggttgtgaaataatctgcttaaaattgtggccttgaacatttgtctatgactttttaaatgaagtttcttcatttgaaagtataaaa

SEQ ID NO: 5174 - DNA, 120 bp, Homo sapiens
aaacgaacattgtttaacaaatactctggcctcctctcagagtgggcagccacagcacgcagagctctgccacaggagattccttctggagtgggctttgcccttggcatgggtggccac

SEQ ID NO: 5175 - DNA, 120 bp, Homo sapiens
aggcggaggagaggcactgccagggcttgctcctggctgggggcctgggctcgggcacttggaagagaagctcttctgcccttctgcagatgtgcagtctgtagcagcccttcttactct

SEQ ID NO: 5176 - DNA, 120 bp, Homo sapiens
agacgtgccgtgtcccaaacaccattgctaaacttctgaactattaacataaatttatagcaaataaaatattttctcagccttgtggatgacacgctcagaaggaaacacgaaatgcct

SEQ ID NO: 5177 - DNA, 120 bp, Homo sapiens
cagcgtgaagggtcgtgaagagatgcctaagacctactagagttaggaatgattctcctctctgggctgggccttgctttgattcttttcatcataatgagatgaaaatgttaggacatt

SEQ ID NO: 5178 - DNA, 120 bp, Homo sapiens
gaccgtatatatcagggctctgaaaagtcctgcagttaataaacttcttatctttaacccagaatttcaaaacttaagtgatcacaaaatccaactgttacctaacacccgtcttatctt

SEQ ID NO: 5179 - DNA, 120 bp, Homo sapiens
ctccgagcccacttaccccaccagctacatggaaggtctcaggcctgccccacaaactgtgtccctggcagaacacagagttccagagcaggagagaaatgactggcttccaggctgccc

SEQ ID NO: 5180 - DNA, 120 bp, Homo sapiens
ccccgacaaggcagttcctgagccctgcccaggtacactgaccgcacagggacgggaagccaagagaagggaaccctgggcctgctcacccagccgcaggtcaagcagcacaaagaaagg

SEQ ID NO: 5181 - DNA, 120 bp, Homo sapiens
gggcgggtcttgttttcagcttctgtggctcagtaaccccacccactggtaaactggccaactgatgtcctctcttatcagaagaagaagagctgctccccttcctttggtgaagagtaa

SEQ ID NO: 5182 - DNA, 120 bp, Homo sapiens
actcgaggaggaagattttcctgcacagaactgcagaggcttggggagagagagaacacactgggatgactctgagatcctaacatgagtgtcttggtggacggtggcctcactaaatga

SEQ ID NO: 5183 - DNA, 120 bp, Homo sapiens
caccgcctgctccctgctgtccccagtcccagagccctgtggggactgagtgctgtcagtgagattgcctcctggtttttcctcactgccagcctagcatcgggttttctcagctctgct

SEQ ID NO: 5184 - DNA, 120 bp, Homo sapiens
caccgggccatctgctgctcattttccagcttttgttgccattttcttctctcccgttatctttgtcctcgtgttgtttgttatcatttagtgttctgtgctgttgtttagtgtttttta

SEQ ID NO: 5185 - DNA, 120 bp, Homo sapiens
acacggctataaaacaaaacaaaacatgattttcacggagaaaactgaaaggaaattggttaaattggctgttttcttgtttagttcttttaagacaatagaacttgtcattgaatggaa

SEQ ID NO: 5186 - DNA, 120 bp, Homo sapiens
aaacgggcttctcacagcattgcacagaacaccgcggtgaggaaaatctcaggcttcctctcactctgacatttcctaatcctaaaggacttaacgccagaaacgcagaagctcattagt

SEQ ID NO: 5187 - DNA, 120 bp, Homo sapiens
gaccgaagccaactttcctttctgcccacagaagctcaagcccaggtgtcgccgccacccccttaccctgcaccccaggagctcacccagcccctcctgcagcagccccgcgcccctgag

SEQ ID NO: 5188 - DNA, 120 bp, Homo sapiens
tcccggcccaggtgagttctggcaggagcgttggtgcagagggaatgcttgttttgctctgagttccaagctaaatgatcatctccttattccctgaagggctcatctttgaccaacttc

SEQ ID NO: 5189 - DNA, 120 bp, Homo sapiens
ccacggcccttcctccaccagatactctgtcctgggttggcctctagccctgtcccttccccagacccccatcccagcagggttcaacgcgaacagccacatctagcacttgtcataaag

SEQ ID NO: 5190 - DNA, 120 bp, Homo sapiens
gaccgcactgagaattcttccgtgtcccctcttctcagcctgcccgtcctctcctagcttcccttgcttctgcccgggcccacctggctcgtggcctccgtggcacccccaggccccttc

SEQ ID NO: 5191 - DNA, 120 bp, Homo sapiens
ccacgccactcttcctcctcaagacctgccaccacgtcactcgggctgagctttctgttgctgggagccctgcgggaagaaccagcacttccaggctgtgctgacccagccctctcctgc

SEQ ID NO: 5192 - DNA, 120 bp, Homo sapiens
ccacgtggggcacccacgccctcctctcctcaaggctcatcagaccacatgaggccttcttgcctcccatccaggccacctgggccagctcccgccgtgtcccagctgctccccattccg

SEQ ID NO: 5193 - DNA, 120 bp, Homo sapiens
gcccgtcgcgccttccccagcgtccctatgccttacgaggtcctgtttccacgtcaacctgaccttccgcaaggacttgctgatgttctagggccttctacttagccctctctgatggca

SEQ ID NO: 5194 - DNA, 120 bp, Homo sapiens
ccccgccggctacccctcatgccacagccctgtgtcctgcctctcctggaggagcactcctgctcagcctccttctgcccgcagccccagggagccctccaggattccctactctcctgc

SEQ ID NO: 5195 - DNA, 120 bp, Homo sapiens
agccgcatcctgaccctttggccactctctcccctccgaaatcctctctggctccagtaaggcttttctgcatattctaccacccaggccatgcctgtctcctatcatcctccccctcca

SEQ ID NO: 5196 - DNA, 120 bp, Homo sapiens
ctccgcctcacacctccctcacccctcctcctccacacccctcctcatcctccacacccctcctccgcctcacccccctcctcctcaccccttctcctctccacatccctcctcctcaac

SEQ ID NO: 5197 - DNA, 120 bp, Homo sapiens
agtcgagcagcccgtgctgctggggtagccccttttttattcatttactttcttaataaacttgctatcactttgtcagcttacttttgaattcctgcatgaagccaggaatccatgtgg

SEQ ID NO: 5198 - DNA, 120 bp, Homo sapiens
taacggagccctgaaaagggagcgcaattcatcaatccgctgacggtgatgggccccctggcccggtgcagcggacccttaggtcctggtgggggagtcggtcagtcaatgcatgggtga

SEQ ID NO: 5199 - DNA, 120 bp, Homo sapiens
ccccgccttcagccatttaagcaatctatgtgtctattggctcagatgagagatgaaatggtaacaaaagtggaaaacactccgaaacaatagtttctgaaagaaactaaacctattctt

SEQ ID NO: 5200 - DNA, 120 bp, Homo sapiens
ctgcgtatagggtgttttggttggcaacgccacaggcactctaagatgtccatgcccttgtttgacactgaagcaacagaaagattcccatggcccccaggctgtaaatagaagtggagg

SEQ ID NO: 5201 - DNA, 120 bp, Homo sapiens
acacgtgaagtcattacgttaaaatagtttgttgcacacctgatttggcagactgagattatgttattataataataaaggtcaccatttagaaggactttactgagttacatccactgt

SEQ ID NO: 5202 - DNA, 120 bp, Homo sapiens
gaacgaatacaatttaagttacctgataaatttaaaatcgagagagatggattctttgctcagttgggatacaattaatgtaacctgtgtgaattagtttaaaaaattagttttgtagag

SEQ ID NO: 5203 - DNA, 120 bp, Homo sapiens
taccgaagacttttccttcagtgaacctctacccaacaccacaaatcagcaaagggtcaaggacttctttaaaaatgctccagcaggacaggaaacacagagaggtggatcaaaatcatt

SEQ ID NO: 5204 - DNA, 120 bp, Homo sapiens
ctccgaaggaagttgtatgcactacccaaaacacaccaactgtaaagaaatcccgggatactgctctcaagaaattagaatttagttcttcaccagattctttaagtaccatcaatgatt

SEQ ID NO: 5205 - DNA, 120 bp, Homo sapiens
aagcgagcaaatagatttgactgaggaacagaaggatgactcagaatggttaagcagcgatgtgatttgcatcgatgatggccccattgctgaagtgcatataaatgaagatgctcagga

SEQ ID NO: 5206 - DNA, 120 bp, Homo sapiens
ggacgtactgatgaaatggaaggttttagtctgctaatatagtttccaggatagctctgtgattttatacatgaagaaaatacaggagtttccccttgtccacagctttgcattctctga

SEQ ID NO: 5207 - DNA, 120 bp, Homo sapiens
acccgcagccggctgaggtctgaaaatattgcatcacttctcttgcgctttgggaccattattaagaaaacacaagccctgcaataccgcgacagtcaatctgataactgagaccactac

SEQ ID NO: 5208 - DNA, 120 bp, Homo sapiens
ggtcggggcaagattttatcacactatactcaaaacagcttgaaactgaacacttatgaattaatttatttctgggattttccatttacatcacaatgcctacatcattcacctctcttc

SEQ ID NO: 5209 - DNA, 120 bp, Homo sapiens
gaacgaactgcttcagcagcggaacataaggtatcttaattttcccccttctggaatatatctgattatatttctaccactctaagtgaaaaatggacagggcaaaatgttcaggctttc

SEQ ID NO: 5210 - DNA, 120 bp, Homo sapiens
attcgtattcatgtttttaagattgggaaaaaagcgaatatattttgctacaatttctatttggtatgaaaactacagatttgcttttgtggcctaccagagtaaactacttatatttaa

SEQ ID NO: 5211 - DNA, 120 bp, Homo sapiens
gtacggctctaaagtcattacaaatgtgatgtgcctttgaattaacattttttagttcctaaaacaaactcatgagggccaagtttttaatgattttgggatgggcaaaagcaaaaatgg

SEQ ID NO: 5212 - DNA, 120 bp, Homo sapiens
attcgcatgctaaaaatgtattttagaattctgtactgatgagaatcgattaatacaaagtagagaagcatgttttatgtgttaaaatgttaaaatatagggtagtctataaaggatatg

SEQ ID NO: 5213 - DNA, 120 bp, Homo sapiens
ccacggaggtttttcttacagttacgctgctgacctttaaaacaacgattaatggatttatttttgtatcatgttagaatgtgtcatacttgatgtttgcaattatcttgagacagttga

SEQ ID NO: 5214 - DNA, 120 bp, Homo sapiens
tagcgtaactgccagagctccgtgagtacctcttgttctctgtgctgaaccagagttgcgacagccaggctgcagagcaggggcacgtgtgagagatgttatgaaagaagagcctgagga

SEQ ID NO: 5215 - DNA, 120 bp, Homo sapiens
aggcggagtcagatttggagaaaagctgagaagggctagtttaagtctagaggttaaagtgctggtaagtcattcaggtaccaatgtcttgcagacaacgggagctgtgtgcaggactgg

SEQ ID NO: 5216 - DNA, 120 bp, Homo sapiens
acacgggtcatgtttaagatcataggactaggaaagctccaaaaaagaatgtctacagagcccagtcccaaatatctgaaagactccctcccctatttatggggcagatggaggtagtag

SEQ ID NO: 5217 - DNA, 120 bp, Homo sapiens
gggcgctttctgcacaccaggggaacaacaaagacagcatggtctgatatgtgtgatgatcttggcagtttccttctttcttcataattgcattgtttctgacagccgctttttgatttt

SEQ ID NO: 5218 - DNA, 120 bp, Homo sapiens
taccgaaattaaaggcattagaaaacgttagtttaattttgtggttttgagtgcgcaagtgatcagtaagtgctcttcagtgagaacattttcttatttccatcatttattcctccactt

SEQ ID NO: 5219 - DNA, 120 bp, Homo sapiens
agccggagaccttaaaaggcatctggctcaacacccagggtttttgaagaggaagcttaggcctggcctggggagggcttatcggaggacaaccctgcctggtctcgatttcaaaggtag

SEQ ID NO: 5220 - DNA, 120 bp, Homo sapiens
aagcggacactggcctgcccacacctgcccagagcacgttcacttctgcatgttgcctgtggagactcctaaaaaacacgcatggtcttccatctcatctttatgtattagaacaaagca

SEQ ID NO: 5221 - DNA, 120 bp, Homo sapiens
aggcgtgagccactgtgcccagccaagatgggattcttttttaagccctaccagctaaagccagtgcactgtgtgactttgtgttacccttggagcagcctctttttgctccactctcct

SEQ ID NO: 5222 - DNA, 120 bp, Homo sapiens
caccgacccagtgtgctccccggattgagagtccctgtgcagtgaaagaataaatgtggctctctgccagcaacctcacctccccaccctaccctcagagtttcacatcttcagaacaac

SEQ ID NO: 5223 - DNA, 120 bp, Homo sapiens
ggccgattcattctgtaaatcaacataaacagcaggttttctctctgggcttaatttctcagcaggaaatcagcatagggaaacttcaggctgcatctctgccagtctagcagatctctg

SEQ ID NO: 5224 - DNA, 120 bp, Homo sapiens
agacgggaggctacttgtatgccctggtgccgtggaattagtgtggggcctgacatcagccggttacagagcagcaggaaaggcttctgcgggtaatgctgcccacagccatcactgtaa

SEQ ID NO: 5225 - DNA, 120 bp, Homo sapiens
tgccggccccatggttttgtttgtttttattttacttaagggtgggaagggagctgttatcttaaggtctgcaaggaaagtgagatgctggaaggacttggtaatcggctctggcggctt

SEQ ID NO: 5226 - DNA, 120 bp, Homo sapiens
cagcgagtgggagggagagctggcagatctctgggtgtaggcaggtgagccagggagctgctggacacggtcctaacagaaggccgcatctgcagccttcctggggcttcctggggctgg

SEQ ID NO: 5227 - DNA, 120 bp, Homo sapiens
agacgcccagctttgccactcctggccacccagctccaccccatgcatgctcaccccacagctgccttgctctggactgtgcaagtccagtcattccggggtgcctgtcagcagggagct

SEQ ID NO: 5228 - DNA, 120 bp, Homo sapiens
tgccgaaggtgtgggtggagagaggggcggtgggttggtcacaagtcagaaaattaagaaacagtcctgcacatttcagaaagacaaatccagaacaaatttatatgaagggccgcggtc

SEQ ID NO: 5229 - DNA, 120 bp, Homo sapiens
gggcgggagggagaggtcccacccagacccacggacctctgctcttggggtggacaggccctggagattggcattttgcagagcctcctgaggaggggagttcagactttagaaggcaga

SEQ ID NO: 5230 - DNA, 120 bp, Homo sapiens
gggcgaactccccaaccccaatacctgaccacatgcacaacaatgacaaatttttgggaaaagagtgagccaacaggccaaggtgggtggatcacctgaggtcaggaatccaagaccatc

SEQ ID NO: 5231 - DNA, 120 bp, Homo sapiens
caccgtgcccagcctaaaaatggtcttgattcaatgagtgagtaaatgaagcctgtgcccagggcctgccaggccccctggggctgcccacagggtaaacacagacccacacggagcccc

SEQ ID NO: 5232 - DNA, 120 bp, Homo sapiens
ggtcgaaaaaaatgctgctccagctgaaggctttctcagagaaatgactcagcctgagcactcagatgcaacttccacgttttatggactgaaggtgctttcataacagctggtgatgat

SEQ ID NO: 5233 - DNA, 120 bp, Homo sapiens
aggcgggctataaacagagcggtgatctggtcctgaacactcaggtctcagcccccacccacaagcagggcctctgaggctgtggcttctccacactggtgctgctttgtgctggcaaat

SEQ ID NO: 5234 - DNA, 120 bp, Homo sapiens
gagcggggagtgctgccagcaatgacagtcccgctggggggacgtggtacagactcactgagacacagaaccctgtgagcaaggggggttcacttaatcctccctgaggactcagacagg

SEQ ID NO: 5235 - DNA, 120 bp, Homo sapiens
ctccgtaagtggaggcagtgagtagggaagggctgagacagatgcaggtcaggcaccagccctcactcctgccacatccagcttgtagggctgtgccagggagcatggggatgtgcccag

SEQ ID NO: 5236 - DNA, 120 bp, Homo sapiens
cagcgcctggcatgagcacatgttggggtccccaaggcgtgcctaaggggcgctttggccagagcactgtggcaaggtctgagactggcaaagaatgaccccggggactgagcagtggat

SEQ ID NO: 5237 - DNA, 120 bp, Homo sapiens
ccacgtccatctgcctcaccaagttcccagcaaggagtcggccctgatgggtgtattcctcagccacagctcctcagtgggccagcaaggtgactcgaagggcctctgccacctctaaga

SEQ ID NO: 5238 - DNA, 120 bp, Homo sapiens
ctgcgggtcaccacccatggcgggacaagtgagaaaagttggccttgctcaccgctggagcccaaaccacaggtttcatttccccttgataaagacaatgtttgctattgttgcatctga

SEQ ID NO: 5239 - DNA, 120 bp, Homo sapiens
gggcgaccaatgccagcaaggccctgccagcctcagtcagcctggtccatgtgccccagggggttgcccatgtagtctgtgtggcatcatgtgaacaagttgggaagtactggcctcaga

SEQ ID NO: 5240 - DNA, 120 bp, Homo sapiens
cctcgtgggccacccaggaaccaggccacaccaaaggctgcactgaaagtacacagccatgcaaggggactggcagctctctcccaagagaaaaatcacctgctagcaccaagctgccat

SEQ ID NO: 5241 - DNA, 120 bp, Homo sapiens
aaccgggagagcattcctgcttcaggaggagggagggtagaacacaaccccagcagcccttgttgctggttggcacagctgtcactgatgatggggtactgctcttacccaattttacag

SEQ ID NO: 5242 - DNA, 120 bp, Homo sapiens
aatcgagggctgggctgatcaccaacactgcagcctcccaacaagtttgcagaggggaagggcagttcagcacttcagtagcatgaatattacaaaaaaaaaatcagggcaggcgcagtg

SEQ ID NO: 5243 - DNA, 120 bp, Homo sapiens
tcacgctggcagctctgtgtggcccccatatcctcagggcaaaacgaacagtttgcacttggtggcatctgaggcccttgagatctgtctctgggaagagcccttgtgaagggctgagcc

SEQ ID NO: 5244 - DNA, 120 bp, Homo sapiens
agccgagagcacccagtcaaggctaggcgtggcccaatggctggcaagttcgggggcctgactccctgctgggaggagtgtgcctttctctgccaggagcagcccctggtccatctgtgt

SEQ ID NO: 5245 - DNA, 120 bp, Homo sapiens
atccgttttagggttttcagacatctttctgtggttgttctgggttaaaagactgagcaactacacaagtcagtaaggactggagaggtgaaagggagaataaggccatctgtcccggtg

SEQ ID NO: 5246 - DNA, 120 bp, Homo sapiens
cctcgagatcttgtacaagaacagctgcacccacctccaacacctgcacacactggggcctctgtccccaacacatcagccatgcaccgagcccctgctccaagcatactctagaaaaca

SEQ ID NO: 5247 - DNA, 120 bp, Homo sapiens
ttacggaggtgtgcagcaacactaccgatggctgttgatctaagtttttcatttctggtttattttgttgtatgtaacccgtcctgattcggtttcctgcctgggcccctaggcccgttc

SEQ ID NO: 5248 - DNA, 120 bp, Homo sapiens
gagcgtggggggtaaactgccagggccagccttcccctttctggacctcatgcttcctcatctgcaaaataacggcccaggacgagcccctcatcaggttccctcccagccgtgggaacc

SEQ ID NO: 5249 - DNA, 120 bp, Homo sapiens
caacgatggagtcagagccaatgttctggaaaagctgaagcgacttcagatactatagcagatgctgtgctcagggctccagcgtcctgcaaggctgcgtggctttatgtaacaggaagg

SEQ ID NO: 5250 - DNA, 120 bp, Homo sapiens
ctccgtcataaatgttgccaaacccccagatgtttaaatttctagaccaagaagacagacccccaaagtaccaaaacaaaaacgtgcaagtccacgctgcgacaaaccacgctcaggtga

SEQ ID NO: 5251 - DNA, 120 bp, Homo sapiens
gaacgataaatggggagcagagagaagcctcccacgcaggtgggctcatgactcctgcagacccccagaggcggcggaacctcacacctccagtgaagactgcagagcgacgtcctcacc

SEQ ID NO: 5252 - DNA, 120 bp, Homo sapiens
caccgtccagacactcaacaagcacagcccccaccaggccaccgtcagcagagacagctcatgtgaacgtgatgtgcgggggaggtgcgtcacagggcctggggcatcgggggcaaacca

SEQ ID NO: 5253 - DNA, 120 bp, Homo sapiens
gcacgtggccccaggcctgcagactcccgtgagagcgcctgaccccagcacaccacttcagcctgtgctgacagctcatgggcgcctcggcaaagtcaggcatgtgtgcgtggaggggtc

SEQ ID NO: 5254 - DNA, 120 bp, Homo sapiens
gggcggagccacgttgtgggtgcccaaggcatccccaggcctcctgccctgccctggtgacactgtctggcctgcttgttgaatgaggtgacacactcaagtgtagctgagacctgagga

SEQ ID NO: 5255 - DNA, 120 bp, Homo sapiens
cagcggtgcccaccccagcaacagccacacagtggggaccccccttacaagtgcccactccagcacagccacaaagtggggacccccccccacaggtgccctgatgccagctgcagccct

SEQ ID NO: 5256 - DNA, 120 bp, Homo sapiens
ctccgaccagggaacaccggagccacaggcgctgtgctggaggcagagcattcaggctcccggaagtgcacgtggccccagacactccaacctcaactcagccgccctgaccaggatgga

SEQ ID NO: 5257 - DNA, 120 bp, Homo sapiens
ctgcgccctgcccgcaccaactcaccaccacagccttccatcctgggacagggtcctggttccgaccactcagccctgagccagctgcctcctgtctcccgtccacgaaagacacaagag

SEQ ID NO: 5258 - DNA, 120 bp, Homo sapiens
gagcgctggtaacagtactctcttcttcattctcttcctcctggcctatctccttcttcctcctttccctagtttcactacttggggctccaatatgaagacctttttggatgtattgca

SEQ ID NO: 5259 - DNA, 120 bp, Homo sapiens
cttcgtatctccagggcccagcacaatggctgtattttcgtacatgcttctccagcatgtatgaaatgaatgaattctctattgaaattattggccaggcgcagtggctcacgcctgtaa

SEQ ID NO: 5260 - DNA, 120 bp, Homo sapiens
tggcggaggagcaagtgtgggggctctggggtgcgatggggcgctcggagtccccaggaaggggcatggggcacagggatcctgaaactcagtgtgtgagggagaggggagacaggtctg

SEQ ID NO: 5261 - DNA, 120 bp, Homo sapiens
gggcgtgggagcccttctagcccagccagcgacgaaggcccacagggacctaggagaagaggaggtacccctcgtgtggggcgggggccgggccggccttgcacgttgatgatgcttgca

SEQ ID NO: 5262 - DNA, 120 bp, Homo sapiens
ggccgagcagggccccccgagcagtgcagaagctatgcggggacctctgcagggtcctgggctgcctctgtgcctctcagctgagtgggggatccaacgctcccaggctactgtgtccac

SEQ ID NO: 5263 - DNA, 120 bp, Homo sapiens
gtccggcctgaggggagtgtggggggcgtggtggggggaaaaggccaccaggaagcgctgctctgtggcaagggcggcagggagggggacacagctgcacaggtggggagcctggtgtct

SEQ ID NO: 5264 - DNA, 120 bp, Homo sapiens
gcccgcttctgcttccttacccggcagctgcccaggcacagccgcagggaagccaggctgcattcacggcatctccgggagagacagggcccctttccggccccctgttcagcaagtcct

SEQ ID NO: 5265 - DNA, 120 bp, Homo sapiens
aggcgtcgcagcgacccgtctgtgattgtgaacccataaaagtggctggtgggaggccgggcagaggcagcggcgggctcggaggggccctgaaggacatgccccgtgaaagtggagggc

SEQ ID NO: 5266 - DNA, 120 bp, Homo sapiens
aggcggccacacggtggtgaccccatcgtgcaaagtactgcccattcccaagcggaagaatgtgtggaaacgtgtgtggctgtgacacggaacccagcggcagccgctgggcaggagggg

SEQ ID NO: 5267 - DNA, 120 bp, Homo sapiens
cagcgtgtggcccccgggtggctccaaccaaacgggccaagctgaggctgttcccactcgggggccgcccactgtgtgtccacatggccgtggccccatcccgggacagggctgatcagg

SEQ ID NO: 5268 - DNA, 120 bp, Homo sapiens
cttcggtgtctgtggcaaaatgagacccccacctctgagagacgtgtggcaggcggggcaggcggcctcagtcctgtgagtgccttgccacaggcttttggctttgctggtctccaggca

SEQ ID NO: 5269 - DNA, 120 bp, Homo sapiens
agacgctggctgagtgcgtcctaggctgggttccagggtggtcccaggagcgccggcagtgagcagttcagggctgtgggtgcggggcttggtccagcaggcaggagcagccccgcccgg

SEQ ID NO: 5270 - DNA, 120 bp, Homo sapiens
agacgcagggcagagacatagggcagagacacagcgcagagcggccagggcagagacgtaggacagagacgcagcgcagagcggccagggcagagatgcagggcagagacacagcgtaga

SEQ ID NO: 5271 - RNA, 120 nt, Homo sapiens
gagcggccagggcagagacgcagggcagagacgcagggcagagacacagggcagagacgcagggcaaagcggcagggcagagacgcagggcaaagcggcagggcagagacgcagggcaaa

SEQ ID NO: 5272 - DNA, 120 bp, Homo sapiens
gagcggccaggggcccagaagctggaagaggcgggaaggaccctcacctggggcttccggagggagcacagctctgctcacacctcgattttaggcctgtctccaggctgcgggagagga

SEQ ID NO: 5273 - DNA, 120 bp, Homo sapiens
catcgctgcagttttcagctgtgccattggtggtactcagagccggcattcccttcctgcagcagctggcctcggcgaccctcactccactatggcaggcgtcccctgcctgtctccgca

SEQ ID NO: 5274 - DNA, 120 bp, Homo sapiens
caccgtgcctcagccctgctctggtcccacaagggctgcagctgccccgactctcccagggcagagagacaaacgggggagcagaaagcagagtgaccgggaatgtgcctggcggtcagg

SEQ ID NO: 5275 - DNA, 120 bp, Homo sapiens
ccccgaggaagcagacgtcgtgtgtggcctgccttggcgtccaggagaccatctcctccggtggggtcagaccacagaggggccctctctgtctctgcccctttccctggtgtgagcagg

SEQ ID NO: 5276 - DNA, 120 bp, Homo sapiens
acacgtgcacacacaggacacacgtgtgtgcacccaggacacacgagtgcacacataggacacacacgtgcacacccaggacacacgagtgcacacccaggacacacccgtgcacatgga

SEQ ID NO: 5277 - DNA, 120 bp, Homo sapiens
acacgtgtaccactgtgcagccctgcgccccctcactgcgtcctgttgcaggcctgtgttgctgttccatgtgctgccctctgcctgcacgcaggtgcccatcgccagcggggctgggat

SEQ ID NO: 5278 - DNA, 120 bp, Homo sapiens
ctgcgttctgcccgcctaagtggcccctccggctggtcctgagcatctgcttgctcagctctgtcctgggctgggctggtggcattgaggaggagctggctgggcgctgggtgaggcagg

SEQ ID NO: 5279 - DNA, 120 bp, Homo sapiens
gagcgcctcctccacctgcatcggaccgtgctccggaggccacggtgctgtggagggtggtggcggatcttgggcaggcagaggctgccagggggcctgggcggggcctggggtgaccca

SEQ ID NO: 5280 - DNA, 120 bp, Homo sapiens
acccggaggcatgccctggacgtgggtccaactctgcgtcatgcagctggggggcaatggacgcgccccccttcctggcctcggtgtcctccctgtagctgggatggctgagaggagagg

SEQ ID NO: 5281 - DNA, 120 bp, Homo sapiens
gctcgtggaaagtcaccatgaggttctcgtggataaataaaagtctgtgggatctgcccacggacagagtaagggtccactgctgtcctcttcttcataataaccacgaatctccacccg

SEQ ID NO: 5282 - DNA, 120 bp, Homo sapiens
ttacgtgccagggaacaagagtcagagagcccagctggcttcccgcggagagagaacgtgctgttaagatgaccgctccgtccgcccaactccattcccgccctcgggagttcttcctac

SEQ ID NO: 5283 - DNA, 120 bp, Homo sapiens
agccgattcccagtctgagttggagccttttcccggaactgtaggcaagaggacaatcccgaggtgtggaacctttcaatacagacctgagatgttcggcgtctggaggtccgaggcaat

SEQ ID NO: 5284 - DNA, 120 bp, Homo sapiens
tcccgctccaacggccagggaggctctggcccagaaccctggggagggccgggctggtgagcagtcacccaggccaccctgcaaggactcccaggcctgctccggggctggtggttcaac

SEQ ID NO: 5285 - DNA, 120 bp, Homo sapiens
ctccgaggggacggtggctttggcctctgttttcaggaaggcagaggtcagcccagcctcctgccctagtatctggacaccagccagccaggagtattcaggcgtctgagatgccatggg

SEQ ID NO: 5286 - DNA, 120 bp, Homo sapiens
ggccgcccagctccatgctcactgtggctggagctctgggcacaaagtcagcatttggctctctccggaaatggcaacaggcgggacactggaatttggcagtgccccagggcagaagcc

SEQ ID NO: 5287 - DNA, 120 bp, Homo sapiens
cagcgtggcaccagagaaaccattatctagcccacttaaatctgaatttcccttcccttttggggtcctgttactttaagagctgatcagggatctagcaaaagtcctaggctcacacac

SEQ ID NO: 5288 - DNA, 120 bp, Homo sapiens
caacggaagcagagaacacaggtcatccccgagtcctccaggctcacagctcttcccaccgccgcacgcagggtagtacctgtcagtgaggggacagtcctgtcagaaggacaggcaagg

SEQ ID NO: 5289 - DNA, 120 bp, Homo sapiens
ttccgatcactgtccccttgcccgttctttaaaaatgaagcagttattcagccagcatttattgagcacctgctatgtactgggcatgagtaaggcatgctctgtgtgccctggggctgc

SEQ ID NO: 5290 - DNA, 120 bp, Homo sapiens
tgccgggtccctaaagggcaagggtgtgtaaacggacggatatgacgtgatgggagacacttgtggtgtgattggccctgtgttggggtgggagcagcatcagaagcttcatggaagaag

SEQ ID NO: 5291 - DNA, 120 bp, Homo sapiens
aagcgacacctgagctgggtctctaaggatgggcggagtggtggggagagggtgtcacaggcaaggagttcgggacgccccacagtgcagagtggcacacttaggagagcacgttccggg

SEQ ID NO: 5292 - DNA, 120 bp, Homo sapiens
aaacgtggggaagctattggagcagccctgttgagaaatgatgagggtctcaaatgagttgggaacagaggggtggacagaagggagggagccaagagagcttccagaagcagaagcaac

SEQ ID NO: 5293 - DNA, 120 bp, Homo sapiens
tgccgtgatctgcactgggacaggaagcagaagtagcatgtttgaaggatgagggaaacagttcatttggttttagaaattggtgacatggtagaaatgcattcaggtagttggaaatat

SEQ ID NO: 5294 - DNA, 120 bp, Homo sapiens
aaacgggctagaaccaggaatcctggtgtcatgggtacacaggtggcagacaaagccactggtagatgagaaatcctgctcagggagaaagcattaagggagaagaaaggatggaagaga

SEQ ID NO: 5295 - DNA, 120 bp, Homo sapiens
agacggaggagtgggcacagaggtgggagggcaaccaagagcacatgatgggacccagaagccaggagagaaaagactagaaaaatgggacaaggagggagaattagctcattggccgaa

SEQ ID NO: 5296 - DNA, 120 bp, Homo sapiens
attcgcacaaaactgagatttcctctttgaagaggtgaaagagaatttaaaagggagtgatttgaaaaggattctatgttacttaatgctatgtgtctggtccaacgaaagcatctcaga

SEQ ID NO: 5297 - DNA, 120 bp, Homo sapiens
cctcggaacaagaaggaattctgccagcaaatgaccttcagacttgaactacatcatcagctcatccatgggtctccaagcctgctggcccgccctgcagattttgaacttgccagcctc

SEQ ID NO: 5298 - DNA, 120 bp, Homo sapiens
ttccgatgcacttggaatcccacagtaacatttccctactagcatgcctagggggctatgaggtggccatgctggaaagaaagacaatctcccaaccccttgcctgtcccactggagtgc

SEQ ID NO: 5299 - DNA, 120 bp, Homo sapiens
gtgcggctgtgcaactgggaaactgactcaacacaaagagaatcacgcactcatgcagtctcagctgaaaggcgctggtgtgaccatgagaacacaccacccccagcctctgcctggatt

SEQ ID NO: 5300 - DNA, 120 bp, Homo sapiens
gctcgctgtcttgtgaaatcctggatccaggatttccggggagctgggggctcctttctgggccccatgtgagctggaggccagtcttcaagaaaggaagggcagagctcagactgcttc

SEQ ID NO: 5301 - DNA, 120 bp, Homo sapiens
tcccgggacgcctgctccagggagcccgcagcagcaggagcgagtcctggcctgtccaacgctctcacccttcaccctcaagtcacccagttggccacactctcctggggggggcggagg

SEQ ID NO: 5302 - DNA, 120 bp, Homo sapiens
tcacgaggcctggcaaagtccagggctctggcttaccctggtctctccctgtcctgccccaaaggtcaccactgagaatcccagtcccttgtcctttggggcactctcagagctgcccct

SEQ ID NO: 5303 - DNA, 120 bp, Homo sapiens
agccgatgggcacaggcctcctgttagcggcaacctccgcctggggtgcctggccacacaggcgattcccagagagtgtgggcggcagacaaacaagcgttcagtgtcagcacagcccac

SEQ ID NO: 5304 - DNA, 120 bp, Homo sapiens
tcccgggggtggggcctgacagtaacccctgggcccagtgacagcaggggccacccactccctagcgcccctacctcccactcctcctactttgcagattcagccctcccctcccatcaa

SEQ ID NO: 5305 - DNA, 120 bp, Homo sapiens
tcccgccctctctttccatttcctgccccctcaggcgccctgccaagctagaaatcctgaaatgcaggctgcagcctcttgtgggtgctggcctggctgcagggtaggaagccaagaggc

SEQ ID NO: 5306 - DNA, 120 bp, Homo sapiens
aggcgatgttcacagaacctgaaattaacaaatacagacggagaggggctccgatggagagattggcagggagagaggagctgtttgaaatccaggacataccgtggtgaaaggaatact

SEQ ID NO: 5307 - DNA, 120 bp, Homo sapiens
aagcggtgcatggcaggatctggagagggagagggagcaagggagcaggtgcagctactagaatgcatgacctgaagtgcaaaatgctcaaagcagttgcctagcaatatcccgatgccc

SEQ ID NO: 5308 - DNA, 120 bp, Homo sapiens
aaccgattctctgcctccacctgactttggggagagatgccctcccagcaggaggtgggtccagctacatcagggtgggtacttgtgtcctcttcccatactcgcctcaatcctggaccc

SEQ ID NO: 5309 - DNA, 120 bp, Homo sapiens
cagcgcccacatcatccaccttggcattcttcttgtgggctagtcttgcgtaggccgggtaagaagtacagtatgctcagaattgaatcacagttagttactgtgactaatttcattcat

SEQ ID NO: 5310 - DNA, 120 bp, Homo sapiens
tgccggggtcagccatcgcctgctgaggcttgggccggagccccatcctgcctgggtgttcacacggctccagctccactgtgatgctgagacccgggaacgtggccggccggcaactcc

SEQ ID NO: 5311 - DNA, 120 bp, Homo sapiens
ctccgtgaagtgccaaacgcaaaaggacatacggcggcagccatcgtccctcagtatccgtgaggggtcgttccaaaccccagaggacaccagggtccgcgggtgctgaggtccccggct

SEQ ID NO: 5312 - DNA, 120 bp, Homo sapiens
gagcgtgcggtgtccgcacatgaaacagggtgtaactttacatcatctgcagtccctgctgaccccaatgccaggcacacgcgcagaagccgttctcacaccgtgtggcttggggaagag

SEQ ID NO: 5313 - DNA, 120 bp, Homo sapiens
gtccgtgttcagcacagacgcagccctccactaaaagatatattttccatctgaggttggttgaatccccaaaagtggagttcacggacgcggccggctggctatatcatgcagccataa

SEQ ID NO: 5314 - DNA, 120 bp, Homo sapiens
agacgtacagacaccccacagatgagtcccggaaacacggcgcacgatgacacgagccagacacaaaaggacgcacattgtgactccatttacacgacaggtgcagagaaggaaagtccg

SEQ ID NO: 5315 - DNA, 120 bp, Homo sapiens
gaacggagcccattggttggcgggggctggggagtggtgggagtgcctggtggtttgggggggactccctttgcgctgataaaaatgttctgaaagcgacagtgaagacgttcgcacagc

SEQ ID NO: 5316 - DNA, 120 bp, Homo sapiens
ctgcgaatacggcaaaggcccctcgagctgcgtgcttccgtggctgggtggcgtgctgtgtgaatcacatctcagtagagctgttaggtaaagaatgtaagcatctcattcattattttt

SEQ ID NO: 5317 - DNA, 120 bp, Homo sapiens
gcacgctgccacgataatattgtggataaactgggtgaagtgaaatattagcatgaatttgaatttcacgtcttctatttcaccttcttcgctgtggacaccagaacgttcgcagttgca

SEQ ID NO: 5318 - DNA, 120 bp, Homo sapiens
gctcggattcgtggctggagttctgttgctggagctgctccaggccctgacagcgctcaggcggtgtggggagctcccctgttgccgtggtgacaggccccagccccgcaggctgccagc

SEQ ID NO: 5319 - DNA, 120 bp, Homo sapiens
gcccggtgggccaaggacacagccggtccccacgccaggtcccccgcaccgcggcagctaacggggccggttcagccctcatgcagcagtgggggcgtcttctgttctgcttgccaggtg

SEQ ID NO: 5320 - DNA, 120 bp, Homo sapiens
ggacgtgagcgtgttcggaagcggggccttggcaggtgtaattggcagcattaaggttatattggctgagagtgggcgtggatccagtgagtgggtccttaggagaaaaggaggtgacac

SEQ ID NO: 5321 - DNA, 120 bp, Homo sapiens
ggccgagcacagatggaggcagagactggagcgaggtggccaccaccaggaccgcccaggacagcggcagccgccagaaaccaggagaggcaggaggacacccaaggatccccacaggac

SEQ ID NO: 5322 - DNA, 120 bp, Homo sapiens
gagcggccgacactgtggctttgacttccagtctctggagctgcgagagcagggatttgtgtggtttgaggccgcccagcgtgcggtcatttgccacagcagccctaagaaaggaatgcg

SEQ ID NO: 5323 - DNA, 120 bp, Homo sapiens
ccacgtgccgccctcagtccagaccgctggagctcactaatcccgaaccatgtggcacggctctctgcacccgcataccctgaataactcaccggcctggggacctgccacagtcttgtc

SEQ ID NO: 5324 - DNA, 120 bp, Homo sapiens
ccccgtgggggagacggggctgggggctgagctggatgaaccctcacacacactgagaatcctcggcagggagatcacagaaagtctccctttgttcacattctgggaacgcgttacagt

SEQ ID NO: 5325 - DNA, 120 bp, Homo sapiens
acacggatgcaaatttatttctgagatcaacgcctgcctcagggaacagttgttcccgtgctattttttacccccgtgggctgcgagttctggaacgttccaaacgacagtgacaacggt

SEQ ID NO: 5326 - DNA, 120 bp, Homo sapiens
tgacggtggtgggggcagggagggtggcgtccttccgtccctaagcgcacgcgggccgggcgctgctgaccacatcaccgtagtgaatgacttctttctcacggcggctggcgtcctatt

SEQ ID NO: 5327 - DNA, 120 bp, Homo sapiens
ttacggatgggcaaggtgaggaccttgggccaggcccttcctgaaggccagagaccccggcatgccctcgggggaggagggaggtggggccggttggtctggggccccgctggccggagc

SEQ ID NO: 5328 - DNA, 120 bp, Homo sapiens
gcccggccactggacacggagcggcagaggcaggcgtggtgcagccgagggtcccagggggtcctgtgggccccacctcccacaggagcagcaggtgcctccttcccacggtggaaacga

SEQ ID NO: 5329 - DNA, 120 bp, Homo sapiens
tttcgtgaagtcccatccccagcccggctcatgtgaagggagctgctgtgatcggggtctgtgcttggccgtcagctcctcagggcacacgcccacacgcatggtgactcagcgcggctg

SEQ ID NO: 5330 - DNA, 120 bp, Homo sapiens
acacgggtcccacagcgggtgaacatttccccggagccgtgtaccccaacactggctggggacctccacccccacgccccacactctcctgcttggatggaagctctggcccctccagga

SEQ ID NO: 5331 - DNA, 120 bp, Homo sapiens
tgccggacaccatgtccaagaccctgccctgggaccagctcatatgaggcgaggctgagaagccggtgtggctgacgggagcgggcgctgggactgagtctcggggacctggggacacct

SEQ ID NO: 5332 - DNA, 120 bp, Homo sapiens
tgccggaaggctcagcttcctgaccgcagggcggggacgtggactgtgcccatggggcggccgaggaggacggaggggaacccgccctgacctcagtgctgccggccctgctctcaccat

SEQ ID NO: 5333 - DNA, 120 bp, Homo sapiens
tcacgttcctgtcggggcgggcggctggtttgcagagcctcccacctgggaggggcggcccctcgactgtctgcccgacggaaaacagatggcccctcttcctgcagagcctgggaccgg

SEQ ID NO: 5334 - DNA, 120 bp, Homo sapiens
gtgcgggtgtggggggccggggccacgttccaacatgcaccgctgcttcccctcagcccagcgccgtgcagccccgggaggacgtctgcagacactgccgcctgccagacactgcccctg

SEQ ID NO: 5335 - DNA, 120 bp, Homo sapiens
atccggacgggcctctggaggccttggcccccttccccagagtggagcccccagccccacccatcctcttgctcaccactgggagggtggacgtggctgtttccggtcaccagggaggct

SEQ ID NO: 5336 - DNA, 120 bp, Homo sapiens
ctccggactctggttcactgtccaaagactctcctggccgtcccctctggggcctgcagctgcttccccaaccccccggcgctgagcacggctgctggggtcccagggctcaccccactc

SEQ ID NO: 5337 - DNA, 120 bp, Homo sapiens
ctccgcctgctcccttccgcgggcactgctcaattctcaagccccgactgggggctccctgctgccgggctgcacggggagtgaggctgcggggctgcgggagtcctgcccactctcccc

SEQ ID NO: 5338 - DNA, 120 bp, Homo sapiens
ccccgagcttggcagcccactacctgccacgtgcatcaactccagtccagccttgggaccccggggccaccacctccctccagcctgtgcacccaggcccagtagacgctgcctgttctc

SEQ ID NO: 5339 - DNA, 120 bp, Homo sapiens
agacgttgcccacggtaggctggcttgaggcctcagcgcaccaactctcccagggtgctgtgctgagcccccaacatccacatccacacagaaccttagaacacagcctagtgcggaggt

SEQ ID NO: 5340 - DNA, 120 bp, Homo sapiens
attcgcagatgtaatcaaggcaggggcgcgcacgcagggttcagggtggccccaactccaaggacttgtctctataagaagtggagagaggccaggctctcctgggtgtgagcagtggct

SEQ ID NO: 5341 - DNA, 120 bp, Homo sapiens
cagcgctgagagagaacgcatttctggcatctcaaggcatcctgtcgtggggcgtgctccctgcagccccgggagagatgcgtggcccggccactcggctccgggtctgtccccaaggct

SEQ ID NO: 5342 - DNA, 120 bp, Homo sapiens
ctgcgcacagacgcagcacggcacagcccactgggcttgaacgcgggtcacgccacggctgggatcctccacgtgcatgagctcccgcatctgtaaagtgggggtgggggaggggcccag

SEQ ID NO: 5343 - DNA, 120 bp, Homo sapiens
ccacgggagggctcagggctgctgccggctctggcgggcgtctctcgccacagaccccgcccccgccgtgtcagtgtggcctccctggaggcctgtccttgagcggagccagctcccggc

SEQ ID NO: 5344 - DNA, 120 bp, Homo sapiens
ccccgccatgaggccccctgacagcccgctccctggcggccgctgcgcctcctgtttaaattgccacctggtcgggttcccactgcctcctccgcccccccgtggctcccctccggcttg

SEQ ID NO: 5345 - DNA, 120 bp, Homo sapiens
aggcgggcgccctcctggttctgggctctctttccagtgggtgtgggccggctggaaaatgacctcagagggcggggtggctaacgggcctggggagctcagggggctccggggcgtggg

SEQ ID NO: 5346 - DNA, 120 bp, Homo sapiens
acccgagggcctggcgcatcacaaggccccagcatcgccactgcccgatgctgcttgcgcctggctctgctgcccggcgtgtgttgtggacctgtctggagggcatgagccggggctggc

SEQ ID NO: 5347 - DNA, 120 bp, Homo sapiens
acccgagagctggccggagggggcctggggctgcccaccatgcaggccacactggcaggactcagccaggacctgggtgtgggggcttggctttcgccaccggggctcggctttccccac

SEQ ID NO: 5348 - DNA, 120 bp, Homo sapiens
caccggggctcagcgagggtgtctgtggtcccttaggccagatggacagtgggctcagaggctgcgatcccactgcagggtgggagacagtggcttcccgttaacaggataacaatattg

SEQ ID NO: 5349 - DNA, 120 bp, Homo sapiens
catcggagggcgagactggtcacctggcagagtctgggacactgttccttgtcaggtgggagccagggctggagccctgatgctgctgagacaacttcaggggatccctgtctcccccac

SEQ ID NO: 5350 - DNA, 120 bp, Homo sapiens
tcccgaagagcccacctccctggagactgcccagggctcagcagggcagggaggggagttgccatcttgggcaccggccaggtgctggactcagggggagcttccaggctctgcctctgc

SEQ ID NO: 5351 - DNA, 120 bp, Homo sapiens
tgccggttactgcctctaccatacagatggggaaactgaagctcagggaggtcaggtgcccagcctcagctacccaatgcagcgctcggtgggcagtgtggggctgaccacccgccctgg

SEQ ID NO: 5352 - DNA, 120 bp, Homo sapiens
ttgcgggcacagcggcccccacaccggctgccggggctgcacaggctctggtgggctttagggtggcaaacatgcccaggttggggcctacaccccccaggttgagggagtggctccctg

SEQ ID NO: 5353 - DNA, 120 bp, Homo sapiens
tgccgcccatcccggcgtttctgggcttgtggacgtgtcgccccagccctgccggtcttcacgcggccttctctgtgtctgcatctttcccaccgctgtctcttacaaggtcaccctgtg

SEQ ID NO: 5354 - DNA, 120 bp, Homo sapiens
catcggcaaagaccctttccccaaacaacgctaccttcacagtttctggatgacgtaccttttgggggccacccttcagcccagggccaccgggcacacaggcagggcccagggatgacc

SEQ ID NO: 5355 - DNA, 120 bp, Homo sapiens
tgacggaaactggagtccaccctgactttccagatggactggactgctgcccatcatcctcagcatcaggggatggaggtggctgccccaaactccaaatccttgccaggaagaggccag

SEQ ID NO: 5356 - DNA, 120 bp, Homo sapiens
tttcgcttacatgggatgtgccctgtagaaccaccccccaggtccaagggcagagccagggtgattcccccgggaccagtccagtgacggccaaggactggctcactcccaggctgggga

SEQ ID NO: 5357 - DNA, 120 bp, Homo sapiens
ttccgccccagacaaccccacatcccagggaaaggagctgaagtcttgccctcccagacaccatgccctgttaactgtttatccacccacccatccgtccactcatctatccaccagtcc

SEQ ID NO: 5358 - DNA, 120 bp, Homo sapiens
gggcgacagagcaagactctgtctcaaaaaaagaaagaaagaaatgagagactgagtcgcagcccattgactttctagctgagcgccccttcctccgcatcccagcctcagtgtcaagag

SEQ ID NO: 5359 - DNA, 120 bp, Homo sapiens
ctgcgagcctttcgggctcacgtgagtggtgaagctccaggtgctaaggagtcactacacctgacagtgacaagccacagcaggacttgggtacagggatctgtgataacattaactgag

SEQ ID NO: 5360 - DNA, 120 bp, Homo sapiens
gagcggtgtttatacacagtaatcacattggaaaaactcagagttgagaaggaaatgcaaagttgtccacattgggcagtattccttatttccttttagtcagttgtttgtgtttataat

SEQ ID NO: 5361 - DNA, 120 bp, Homo sapiens
aggcgttgcggaccccacggtccctgtcccagccccttagccgtgccactgtggcatgaagcagccacagacggtgcctagagggacgggcatggctggttccggaggaactttatttat

SEQ ID NO: 5362 - DNA, 120 bp, Homo sapiens
ccggggaacacagtgggactccccaggagctccgtcagcctgaggtgcccttgagtcaccagaagggcctgggagcgggtgcacagagcccggccagcttcctcgtcgctccctcctcct

SEQ ID NO: 5363 - DNA, 120 bp, Homo sapiens
gatcggggccccacggggctgaacaagacatgagctctgcccgtactgtccctgtgtgtggctgctcctctgggggtctgggagcggggagggacccaggaagccttcttcctccccctc

SEQ ID NO: 5364 - DNA, 120 bp, Homo sapiens
ccccggggaggggcgtggggtacaccgcccgggggagcttggtgctgtgaaggaggggttccccggggaggggcgtgagggaccacagccctgggagcttggtgctgtgaaggaggggtt

SEQ ID NO: 5365 - DNA, 120 bp, Homo sapiens
ccccggggaggggcctgaggggccactgcctgggggagcttggcactgtgccctgtcctggatgtgggtttctgcagtttctgcccccgaggggccttggtggaggctccatcttcagag

SEQ ID NO: 5366 - DNA, 120 bp, Homo sapiens
gagcggcccacgccgtcccatgtccctgcggtccagcgctcccgtggggccccacctgccatccccccagtagggtcctgcccacactggctccaccctgatctgtcccccactcctcaa

SEQ ID NO: 5367 - DNA, 120 bp, Homo sapiens
cagcgcaggggtcagtgtggtttcttgcccagggtatcctacctggggttctgtcagggagtccctgcccccacctaggaacctcaaagcttaggggacacactgtagctgggacggggc

SEQ ID NO: 5368 - DNA, 120 bp, Homo sapiens
ccccgtgtgtgggcagccagccgaggcagcagcgggcagagacatgcagggaagtggccctgcggccatgactcatctcagcgctcagctgatggtgctcggcagctcctgagcctggag

SEQ ID NO: 5369 - DNA, 120 bp, Homo sapiens
ttgcggcctgtggctgaaagaagccgaaatcagaggtagggacagatcctgagctggtagtgccaggaaggtcccggtcccggtcaggcctgggcccatgaagtgggtaactgctgtgag

SEQ ID NO: 5370 - DNA, 120 bp, Homo sapiens
tgtcgggagggcccagacagcgccatggaggggccatgtgtaggggccaagacctcctgactcccagcactgatggaagagggcaaggtggaccccaggtagggctcccccagccccagg

SEQ ID NO: 5371 - DNA, 120 bp, Homo sapiens
cctcggccctggctgacagcttgatggtaatgtctccctaagccacaccacccagccaagcccttctcgattctcagacctcagaggccgtgtgagacagcgaggtcttcaattgtttaa

SEQ ID NO: 5372 - DNA, 120 bp, Homo sapiens
agacggggcagctcacatagcagacatcgctcccctcaccgcactggagcctgtgaaccagggtgggcttctcccgccgtctcctcctggttcacatatggcgccttcccaggtccccac

SEQ ID NO: 5373 - DNA, 120 bp, Homo sapiens
gtgcgcgtctccagccctctgctccctggaagggcactgtgaggctgcattaggcccccggaaggcctcgttttaaaagaattgtgtctttaacggcctgtcctcaagtacagtcacatg

SEQ ID NO: 5374 - DNA, 120 bp, Homo sapiens
atgcggaggtgccaagggctgggacctctggggagacacactcagcccacggcagcagcagaggctgacgctcccaccaccctgccttctgctccagccctggctcctgggggcttcttt

SEQ ID NO: 5375 - DNA, 120 bp, Homo sapiens
ccacgaagcctcacgtcgccggctgctctttcaggggcgccccacgtctgcttgaccccgtagcccatcacacgcaccagcgttctttcatttactcaaccaagggtgagggcagttccc

SEQ ID NO: 5376 - DNA, 120 bp, Homo sapiens
ccccgctcggaccctggcattgtccctgcgtgacgatgtcctggtcgcctgtgagctcccgggcggcttctcgggggagttgctctgcagcccacgccgggggttctcctgggaccccgt

SEQ ID NO: 5377 - DNA, 120 bp, Homo sapiens
gcacgagacaatgaaccccaggtatttaccacagacaacactgcttcactagcagtggcatgccaccatgaagatgctgggttcaaggaacccccaggtgccaggggaggcagctaagat

SEQ ID NO: 5378 - DNA, 120 bp, Homo sapiens
ttacgaaatgcaggacccacaaccccacccccaggcctcctgagctagaatctgcactttaacgagtctcccgagtgattcttctgtgtgggacaattgaagtgctctcttctcttccat

SEQ ID NO: 5379 - DNA, 120 bp, Homo sapiens
gaacgccgtggggcctgcactaacccaggggatgaaccatctgggctgatctgatttttcttttccagagtgacctagatgcaatgttagctccatcatccttctgaaacgggcttctta

SEQ ID NO: 5380 - DNA, 120 bp, Homo sapiens
agccgggaggtcagggtttgggactgttgggatatctgagcagaggctgattgccaagtgctcagtttccattcaaaggtcagcacaatagaggtttatgtgtagaagtgaataaaagaa

SEQ ID NO: 5381 - DNA, 120 bp, Homo sapiens
gggcgccaggcattgaagcagcctcggtcagaatctaccctgccgcttccggccccgcaacacaggcagttcgcaccgcgtctggggccggaagagccactcagccttcatgctccactt

SEQ ID NO: 5382 - DNA, 120 bp, Homo sapiens
aggcgctcattcacggagccccccggggggctgcactgcaccaggcacggccctgagtcccctgggctctgccgcacggagcttgcttcttggtgtgaactacaacctggtcctctgaag

SEQ ID NO: 5383 - DNA, 120 bp, Homo sapiens
acccggggaaatacaggttacgcagcgctagctggacctgtcagtgcaggccttatcagagccttgagtgttcgaatgggtaccaggcagattcagagggaggcagagccatgggctgct

SEQ ID NO: 5384 - DNA, 120 bp, Homo sapiens
ctgcgtgtatcaggccgggttgagggggtggcaccatccctgctgcggaacgagaggcaggcaggtgtcccagactacttccttgtcgcttctggaagcttgtgcctccagcccagccct

SEQ ID NO: 5385 - DNA, 120 bp, Homo sapiens
aaccggcccaccccggctgcatccctggggccggcctggtcccacctaggtctcagtgttccctctgaaccaggggctgggaccttctctaggacccctggccctgccactctgtcatca

SEQ ID NO: 5386 - DNA, 120 bp, Homo sapiens
tagcgtcccctcagtccccgcccccaggcagtcatacgcacacacgtgcagagacacgcaggtggacacacacacacatgcacacgctgactgccctggctccaggctccgtccatccag

SEQ ID NO: 5387 - DNA, 120 bp, Homo sapiens
gctcggggatctgctgggtcccagaacttcatggaactctccagacatcctgctccctgcccctaaaactccaaggtggggccatgtccaggtttccccaccacgggctgctgaagcacc

SEQ ID NO: 5388 - DNA, 120 bp, Homo sapiens
ctacggctggcacctccctttccagatggggaaactgaggcaggggccgagtgatgtccccccatgtcaggaccagagtgcagcagagccgggactcaaaccaggctgccttcgagtctg

SEQ ID NO: 5389 - DNA, 120 bp, Homo sapiens
tctcgttatcactggatcctcatcctctgaggccttctttcctgggctctgtcctggttccccatcccctggcagcctgggagctccagcagggaagggcaaggcctgggatacctctgc

SEQ ID NO: 5390 - DNA, 120 bp, Homo sapiens
acgtcagtctggcaggaccatggcaggctgtaagacacgcagagtgtttgactctttagctgcgagcaaagggcagttggcatagagggtcagtggggagtggaaagagtttgactacat

SEQ ID NO: 5391 - DNA, 120 bp, Homo sapiens
ctccgtgtccccaccaggcaggatggaagtggcagcccccaaacctgtcacaccaaagccagcagctgctcatcaccctcagcccagcattcctatgagtggcactccctacgatcccac

SEQ ID NO: 5392 - DNA, 120 bp, Homo sapiens
ctccgtctcaaaaaaaaaaaaaaaaaaaaagatcacttgtgttatttccagttcaaatgtatctgggtggcccctattttctggcagtcctattgtaaccatacacaggctcggctgctg

SEQ ID NO: 5393 - DNA, 120 bp, Homo sapiens
gggcgacagagctagaccctgtctcaaaaaataaaatattttaaaaagggaacctagaacgggagtggtgccgggtacaaagccagtttgtcttgttccagcggctatctcgagccttgc

SEQ ID NO: 5394 - DNA, 120 bp, Homo sapiens
tgacggacagaaagtcatccccatggtgtggtcactgtggggtctgtcccctcctccaccgagccccagtgcgccaactgccccatctgcttggtccattactgaactctctgttctgtt

SEQ ID NO: 5395 - DNA, 120 bp, Homo sapiens
atgcgtgaccccaaaacagctggttaattccctgaaaagaattgagtgccagatgtgggggatcgtgtaacctgagggctgcttctctactttcagttttggccggggtgggagttctaa

SEQ ID NO: 5396 - DNA, 120 bp, Homo sapiens
atgcggcaaaaacacacgccaggtcatttttgtgagggacaggcactactgagaaaaccacacgatgtaggcacaggtggctgtcagggagggcttcttggaggaagtgatctttttgtc

SEQ ID NO: 5397 - DNA, 120 bp, Homo sapiens
tcacgagcgaagatctagggtggaggaattccaggaatagcaactaaaacggtcccgcagcaggaatgggcattgcgtggacactaccggtggcgctggagctgggagggaggtgggggc

SEQ ID NO: 5398 - DNA, 120 bp, Homo sapiens
gggcgggtggcgtggacactaggacctcgccacgtggctgcctcgagccagagcactgtggggaggaccctcccttctgcatcgacggtgccacagtgggaggaaggtttatccaccgaa

SEQ ID NO: 5399 - DNA, 120 bp, Homo sapiens
ggccggcccatccccatcccgccccttcccggtgctgctccagctccagagcctgcagctccccagtcagcacttgggggtcagaccctggcccaggccacgtttgcccccacggcccca

SEQ ID NO: 5400 - DNA, 120 bp, Homo sapiens
gcccggtccttgcctccctggaaagcccaaccctctgcccgcccctcggccagcagagcctttcacggaactggaggacacctggctgagctgcctggaaggtctgcagctcacagcctg

SEQ ID NO: 5401 - DNA, 120 bp, Homo sapiens
ggacgcctggagctggctcagcacaaaacaggatgtgcctgatgctgagttcgcaaaactgcgcatgagcacgggcggctgagagcagcaggaggaccggggccgtgcaggggggcggtc

SEQ ID NO: 5402 - DNA, 120 bp, Homo sapiens
cagcgaggcgtggggactggggcctttgaggcttcctcctcacagccccttgcaccttcccacctgctgggagttttagggggtttccagaggctgcagaaccaggacaatattttctag

SEQ ID NO: 5403 - DNA, 120 bp, Homo sapiens
aaccgaaagccaggccttgggactgggcggctgcttcccttggctgggatttaagcacaggccagacacacatgaggccttcagagccatcctgccagccgtgtgacccaacaggcaggg

SEQ ID NO: 5404 - DNA, 120 bp, Homo sapiens
agccgctgtgtcttaggtgtgtcctgagaccaaagctggaagttcagagcacattgcccagaagaagtgagacattttcgaatttttttttttaatttggacacagggtcttgctgtgtc

SEQ ID NO: 5405 - DNA, 120 bp, Homo sapiens
tgccgtctgcacagatgctgaccataagagccccaatcagcaggcagctgtggtgcccaccacccacaggctcccattggccaatgcggggcccagacaggagattggaaggtggaggag

SEQ ID NO: 5406 - DNA, 120 bp, Homo sapiens
aagcgatggcttggtaccctccgtagcccgaagccggccggcagggagctctgggcagctgtccacagacctgggggagccctgtcctaaatggacagcggggtccccgccaggcccagc

SEQ ID NO: 5407 - DNA, 120 bp, Homo sapiens
tcccgcctctcccaggcctgggggcagtgggcagttggccacttcagccgctttgctgtggtccaggcaggcggggaccctcagggccccagcggggcatcagggtgttcgggaggcggc

SEQ ID NO: 5408 - DNA, 120 bp, Homo sapiens
cggcgccggctgtgagtggggccctgggccggcggcggcgggggcgccggttttctcggcattaagcctggctccgctctgccggctgtggaattcctggtctgatccgtctccagattg

SEQ ID NO: 5409 - DNA, 120 bp, Homo sapiens
aatcgatttgtgccacgttctagcagcacggcctcatcatgacagacgccaggcaaccacgggcagggagccccccgccctcctcctgggacccctgggctcctcgctcccctgccccac

SEQ ID NO: 5410 - DNA, 120 bp, Homo sapiens
tcccgcccccacgcccctggccggcctgctggcgcctgggaaggggaagagggggttgccgcttgccgggagtcacgcggcactgcccagaagctcagcggggtctcccgggcggcactg

SEQ ID NO: 5411 - DNA, 120 bp, Homo sapiens
atgcggcccagaaacgagagtgtccccagcacagggacacccgcccggggccgcctggggggccgaggtggggccaggacagctccgggcctcttcctctcccttggcctccttgctcca

SEQ ID NO: 5412 - DNA, 120 bp, Homo sapiens
actcgaggaaactgaaatctaaactttcatattatcattttccattctgcatgggtttttttgttacagttgcctactattcttgcacaagggatactggctttccaattgtgataaaga

SEQ ID NO: 5413 - DNA, 120 bp, Homo sapiens
tgacgacattgtggtccagagagaggaagtttcttgccaggcacagtgagtcagtggccaagtggaggctggcacccaggttttcttgactaagcacatggcaagtggccactggattga

SEQ ID NO: 5414 - DNA, 120 bp, Homo sapiens
ttacgacagcagatccttgtccctggctctgtgcacccactgtttgttgtttcatcatcttgtaatgcagatctcctgcaacctatccttttagttttcttttatctgaaaatgtctatt

SEQ ID NO: 5415 - DNA, 120 bp, Homo sapiens
ctgcgttcttgagggatatttgcactgaatgtagaactcaggatgaacatattttaaaatcttatctcttctaagatattcttccacagtcttccagccgccatggtttcaaacaagaag

SEQ ID NO: 5416 - DNA, 120 bp, Homo sapiens
agtcggtgatcattcaggtgttctatatgtactgtgttattttgaactggctgctttcacgagtatctttttagctttgattttcaacagtttggctattatgtgcctaggtgtggtttt

SEQ ID NO: 5417 - DNA, 120 bp, Homo sapiens
ctccgtctcaaaaaaaatgaaagaaaatacagattcctgggcccggctgcagactccctgaatagaatcactgggggtgaggcccaggacgctgtgtttttaacacccttcccaggtaat

SEQ ID NO: 5418 - DNA, 120 bp, Homo sapiens
tgccgatggctggactccgtagtcagatctcagcaagcaggactggctcgtggttcatcttggggtctccagcacccagcagagtgctggcggggggactgtgttaagtagagccggatg

SEQ ID NO: 5419 - DNA, 120 bp, Homo sapiens
aagcggggaagggaactcttatcccaaccctgcattctggacagggaccgaaggtctcctggctgcagctcatacagctcatcttcattctcatcctgggaccaccaggcccctcaccca

SEQ ID NO: 5420 - DNA, 120 bp, Homo sapiens
attcgagttttaagattttccaagttgttatgaggtcagtgtcctcaatcgggacccagagaagataggtggcttgcctgaactttcagagggggcatctgtggtgtcttttgtggggtc

SEQ ID NO: 5421 - DNA, 120 bp, Homo sapiens
ccacgtccctcttggaggaaaaatagaagtaagttgtctcaggtcagattgtctgggaagccaagtaggagatggagatttgcatataggaggtttactggggacattcacaggagggaa

SEQ ID NO: 5422 - DNA, 120 bp, Homo sapiens
acccgaaggaaaagggaagaaagcagggttgggaagcagcaggagttgaggtgcaatgcagtcacaacagaggtcttagccaatcccatagggagcactcaagctgggacagcaaggaag

SEQ ID NO: 5423 - DNA, 120 bp, Homo sapiens
ctccgtcctcccatacaggcatagcctcccccatgatgaacactcagcaccagactgatacatttgttataatcaatgaacctacattgatgcatcattattacccaaggtccatggttt

SEQ ID NO: 5424 - DNA, 120 bp, Homo sapiens
tcacgtcataacaggcagcttcacccaagtctgctcctcaagtctgtgggttttctctctgcttctggaaggtgaagcccaggcctgggcaagtattcttttgcagcatcctgaaatatg

SEQ ID NO: 5425 - DNA, 120 bp, Homo sapiens
tcacgggatggttgtaagactgaataagttacaatgtgtaaagcatttagaaaaggaatttgcacagagtaagcattcagtagatgttaggtactaccccacaaccaccgttatcattat

SEQ ID NO: 5426 - DNA, 120 bp, Homo sapiens
caccgtcacctatctctcagggtttcctaaacatactctgaacaagtttcctcactctgccactgtgacccagaaagctatctgttctccttctcccagactctgcctcatctttcaagg

SEQ ID NO: 5427 - DNA, 120 bp, Homo sapiens
gagcggactgagcttggaccagagccccagtcatccaactcagcattaccagctcttcttactcgccagactgagagaaactgctctcctcttcgccagagctcttcacttactgaggac

SEQ ID NO: 5428 - DNA, 120 bp, Homo sapiens
ggcgtgagccactgcacctgctgcttttatatgcagccctgcaagggagttctgaggctgaatcatggcaaagtcatggccctgaaatcatacccgcagcagcacctgacctgttaaaag

SEQ ID NO: 5429 - DNA, 120 bp, Homo sapiens
tgtcgagtaaacagctgaagttggcatcagtgacactcatcatgctattttcactgctactaatgctggttgtgaatatgctgcagaaactggagctggtccagtgactggctttttctc

SEQ ID NO: 5430 - DNA, 120 bp, Homo sapiens
atgcgaccctcaccaatgttcctgtgatgtagtcagaaccatagctaacatttagttcattctaggcaccaaggcatgttctaaatgttatatcagcattgattcatttactcctcccca

SEQ ID NO: 5431 - DNA, 120 bp, Homo sapiens
ccacggggctgacctccaggctgcaggggacactgagatcctagaagcaatcaccacagccctgaacaagagaactagtgggacctggggacagaaactttgagcaagtcacttattcat

SEQ ID NO: 5432 - DNA, 120 bp, Homo sapiens
ttccgacagcttgtacaataactgcatctgcgacgtgggagccgagagcttggctcgtgtgcttccggacatggtgtccctccgggtgatggagtgagtgtgggagtctgggcggtgggt

SEQ ID NO: 5433 - DNA, 120 bp, Homo sapiens
gcccggggtgggagacactgaagtctctccctggtgtcctggaagagctggatgtgggggtggccttggtctggagctggggagtcccaagggccaggccccaaggtgagtttctcttgc

SEQ ID NO: 5434 - DNA, 120 bp, Homo sapiens
cagcgtccagtacaacaagttcacggctgccggggcccagcagctcgctgccagccttcggaggtgtcctcatgtggagacgctggcgtaagtccaggcaaccctggtgggtggagaaca

SEQ ID NO: 5435 - DNA, 120 bp, Homo sapiens
aggcgtgtggcccagtgtgaccccggagctcaaatcatgctcttcccttcaccaatctgcaaccctgggtgagcagacacttccccctctggcttcagcttcttcatctgtaaagtgggg

SEQ ID NO: 5436 - DNA, 120 bp, Homo sapiens
ggccgccctctctcctctaacctggctctgagtcccatccccccttgcaggatgtggacgcccaccatcccattcagtgtccaggaacacctgcaacaacaggattcacggatcagcctg

SEQ ID NO: 5437 - DNA, 120 bp, Homo sapiens
ccgcctgtactctcccacacctcagtctcctcgcctgtagaaaggggtcaatcgtttgaaccctgcttcacttggtgtgtatgtgaaggtgctttgaaatcaagtgctctgcaaactgga

SEQ ID NO: 5438 - DNA, 120 bp, Homo sapiens
tcacgccagcccgactggggcagactctctcaaccccactggatcttctgctgtttgtcagccacaaggttctgcctagaactcctttcccgaatctcaaagttaaaaaaaaaggcaggg

SEQ ID NO: 5439 - DNA, 120 bp, Homo sapiens
ttccgggcctgcagctgttggccccgaggacagacgcagcctcctcagcaacagctgggccggaggctcgggagccaagagagaccagagcccaggccagcccggcccccaccagggatc

SEQ ID NO: 5440 - DNA, 120 bp, Homo sapiens
cctcggctacagatgccagcaggggggactttcagggggtgggcaccaggctggggtgggcagctggggtgggccggggctgcagtgctctcccacccagccttgggcacaggacgagcc

SEQ ID NO: 5441 - DNA, 120 bp, Homo sapiens
aaccgttgcatgtctttcaggaaaacatgatctcgcccaaagagccttccaaagcagttcaagaaacctttaaatctcaggccacactgagctgagtattttacatgcatcgcttaatcg

SEQ ID NO: 5442 - DNA, 120 bp, Homo sapiens
gtgcgtactttttacagatgaaaaatacgagcccagggatcctacatttctgagcctgggtgtgtttctttggaggccagatcctgttcttttttgctccatgactttgtcttgccccac

SEQ ID NO: 5443 - DNA, 120 bp, Homo sapiens
aggcggagaatggatccatggcaggtagacagacgcacacctactcttggtgctttcaagttttggctaaggtggcactgacagtgttagagcttggggtacaatattgccatgttgatt

SEQ ID NO: 5444 - DNA, 120 bp, Homo sapiens
tatcgtcttcaccatgccacatattatgggtcctaggctcccactatgtcacgtctaagttcttccaggccttcccaccatctagtttgggagcacagggagttaggaacatccttgtta

SEQ ID NO: 5445 - DNA, 120 bp, Homo sapiens
agacgctgtttaaatggagaccaacggggtgagtcgttgttaccaggcagcggggtgtcaggtggaaggaaggatgtttcaggcagaggaaaaggcatttgagaaagcctagtggggcaa

SEQ ID NO: 5446 - DNA, 120 bp, Homo sapiens
tcacgtggttcagcaggggagtgttcactgggtgaagaggaagtgaggacccaagctcagagccatgcttggcagtctccagaggccaggtcccctggggccctgtaaatcactttaagg

SEQ ID NO: 5447 - DNA, 120 bp, Homo sapiens
gggcggggagcaggggctctgctgccgtcccctggtgagttacggtagcagctgctgtcatccaggtgtatctcctgttggtggtccactcacacacatacctcgcctgcccacttgagg

SEQ ID NO: 5448 - DNA, 120 bp, Homo sapiens
ccccggggcaagatctaggtacaggcattttaacaagttcccaagttggtcacagtgcggcagtgagtttgctggtggcccttaggagtcactgatttatgcagcttgaactgaaggtag

SEQ ID NO: 5449 - DNA, 120 bp, Homo sapiens
ctccgagttggagaagattgtaagggtcttttttaggccatttaaattttttcatttatccgttcatggattcagacagaatcaggcagcactgagtaagttccaggcccatgacctcac

SEQ ID NO: 5450 - DNA, 120 bp, Homo sapiens
agacgaggacagagaggcacccacaactgagtcagcccgcaggcacacctcatttcttccaagtgtcccagatgcaagattatctggtgttagcttgagtacagagaacacataactaga

SEQ ID NO: 5451 - DNA, 120 bp, Homo sapiens
aaacgtcattctcttcctttagagaaaggcactggatggtctgtttccttttcaagactgaaagagccaacgtgtacccccagaagccagtgccgctaggctgtgtacagacaagtatcc

SEQ ID NO: 5452 - DNA, 120 bp, Homo sapiens
taccgacatcaggaggaaacaggaaacatctacaaatgtagggttttggtttctgtgcatccttccctgaagtgttctcctccccagtaacttttcctggtagttgccagaacccactga

SEQ ID NO: 5453 - DNA, 120 bp, Homo sapiens
cagcgacagaacttgcgcagcatggagggaagggatggagcacactcagggaacggtcccagggtggtgactgtccactgttagcaggccccagaggcctgtggggatgacggctggtaa

SEQ ID NO: 5454 - DNA, 120 bp, Homo sapiens
ctccggaggtaaaagggcctcagcaggaggcaggacagagccagctggtcaccatgcagaggtgctccaaggggatggagttttcaagattctcactacagatgagtaaataaaagaaag

SEQ ID NO: 5455 - DNA, 120 bp, Homo sapiens
gcccgtttcttcggctgcaaaatgagggcctaactattcttctctaacagggtgggtgtgaaatggagcatcttgaaattcattataaacgaggggcttttccaaggccagagtgcccta

SEQ ID NO: 5456 - DNA, 120 bp, Homo sapiens
tgccggggcgtccagtgccccagctggtacaaatgaacgtgcttggtaacttaaggagcaagttctcgtgggtcagcctctcatccgtgagtaatggtgaaaggtttctcagatggaaaa

SEQ ID NO: 5457 - DNA, 120 bp, Homo sapiens
ttgcggagtggacttttgagtagcaccaagaaaggacagccctagggccgtggaggaagtcagtgggacaggacgcctttgttcacacagaaggcttttggctttgtgtattttgtgctg

SEQ ID NO: 5458 - DNA, 120 bp, Homo sapiens
gctcgcttgtgtgacctgatctctctctctctctcctgccaccctgcactagggaggagaacggccgaaaattagcctgccggtgtctctttatcttctgtcacaggtatgcttgatcat

SEQ ID NO: 5459 - DNA, 120 bp, Homo sapiens
tggcgtgccactgccttgaagaaaatccccaggccttatcaccccatcttctctgtcccccccatgctggagtaaaataacagcaaaacagaaggggctttctgttttccaggtactaaa

SEQ ID NO: 5460 - DNA, 120 bp, Homo sapiens
catcgcttttactcctgcagctttgaatgaagccccacactgcagaacccacagcgtgcatacacacagcaaccttggtgtaacaaacttcctgaaatgagtctattgttaaagggcttt

SEQ ID NO: 5461 - DNA, 120 bp, Homo sapiens
tatcgcggttctagttcccagattaccgtgtggaaggaatcttgtagcaaccttagctctcagatttgtgtcttgagccaatttatctccctcccctccttcaacaagtgtgtttccttc

SEQ ID NO: 5462 - DNA, 120 bp, Homo sapiens
tggcgacccagttacataactttaaaaatatttttattacaagcagtccagactctcagggcatctcattagactattaagtagtccagcatttacccagaattctgtttccgcttttgc

SEQ ID NO: 5463 - DNA, 120 bp, Homo sapiens
gggcggggctttgtctttttggcccaagaggagaggttcagaggccacctcctccccggcaggtaggccaatccggacatgtcctgaccatcactcacagcccagagtcctattctgggg

SEQ ID NO: 5464 - DNA, 120 bp, Homo sapiens
gcacgaggccaagtttgtctgaatgccgctctgtacgacggcgctgagcataaaccccagcctctcctggcagcttttttctgctgcctctttccaagtctgccggcatctcctgcttga

SEQ ID NO: 5465 - DNA, 120 bp, Homo sapiens
gcccgggcagggtctcctccagagagcatggccgccaactgcccacagcgggaacgtcagtggagagagttaggacttttctctgagactcctccctcaccggtttgctttgtaaaggac

SEQ ID NO: 5466 - DNA, 120 bp, Homo sapiens
acacgcttttctatgcaaatggtagataagccacaccctgtgctacaccctcttgcctttacattttaaaacaaaatagcaggcatgtctaggccagctttgcaagacagttttgaatac

SEQ ID NO: 5467 - DNA, 120 bp, Homo sapiens
tctcgtgtgattttcagccccgtagttcacatacctcctgacgatgctgtggaatccccgtgtgctaaaacccaccacagggtcagagctccctcccgtgatggaatctctgtgtagcca

SEQ ID NO: 5468 - DNA, 120 bp, Homo sapiens
ctccggccccttcttcttgtatcactaaagtattgggacagtgccttctagtcttctcataaccaaatttgacactaaaatgcccatggaaaggaaggagtgtgctggtttggctgttct

SEQ ID NO: 5469 - DNA, 120 bp, Homo sapiens
tcccgcattgctccacttcagccggatttggcttcacccagccatgagggacagtctcgcattaatgcacttccttccgaggaagagcagccagccaaataggcaacagtctgaaggaga

SEQ ID NO: 5470 - DNA, 120 bp, Homo sapiens
aaccgagtcctgcttcctgtggctcattctttgaattttgcatcgtaggaattgctgcttaatacaggacttaggtagcccagcctggtcgcttctgatccaggaagcaagaggttgaaa

SEQ ID NO: 5471 - DNA, 120 bp, Homo sapiens
taccgcacactttcatgcaaatcccgtttcttttttttccgccaggtcttcttaattatacatcatgcaccgctggtgaactcgttagctgaagtcattctgaatggtgatctgtctgag

SEQ ID NO: 5472 - DNA, 120 bp, Homo sapiens
gtacgctaagactgaacaggatattcagagaagttctgtaagtcattagcttcgggactgaccttaacaggaaaccattgctcattttgctaatctgtgtgtttctctaaaatcagaaac

SEQ ID NO: 5473 - DNA, 120 bp, Homo sapiens
gtccgggattcagtgaacctaatcagagtcttgattgcatacccaagagaagctgggatcagggaccacctggatttgattgattgtgtgttcttaaacatggaattgtaccactccggg

SEQ ID NO: 5474 - DNA, 120 bp, Homo sapiens
tatcgggacacagtgagaaaatgccttatcagaggaactaatgtctacagaagttgggcgatgaacatccatgaatgactcaggccccaggtgagggcagtagagagtggcgaggggtgt

SEQ ID NO: 5475 - DNA, 120 bp, Homo sapiens
cttcgtctttgtgtccccatgtctagcatggttcctgcagtcaacgttgattgtcttgatgtgacaagtctcggtacgggaatcaaacacatatctctaatgagcggtggacatccggtc

SEQ ID NO: 5476 - DNA, 120 bp, Homo sapiens
ctgcgggatgctttgcctgatgggagcctgagggctgcacttgagcaagaagggagcattttgctcacttctcagagacccctgccctttctgggcattccagcagagttcacaagagtg

SEQ ID NO: 5477 - DNA, 120 bp, Homo sapiens
attcgtttcatgcctgagggcagtgcagctctcatccctggaggtgattaatgagtgggagtttccctagagagttctgaggccagttgagtagcagatcctggctggcctgaaattgat

SEQ ID NO: 5478 - DNA, 120 bp, Homo sapiens
gcccgttccctagggtgagtggcagcatgtccgaggcagcgggtgccccaagaggcaggcatctggagccagtctgcagggggtggcacaggcagcgactgaactgtgttcctatgagcc

SEQ ID NO: 5479 - DNA, 120 bp, Homo sapiens
agccgtgtggggctgctggggggcagttggtcagttagtgagctgacccactctgcacctctcagaatgggtttgcagtaattcagccagcgggtgggagggatgagaggtgaaactgag

SEQ ID NO: 5480 - DNA, 120 bp, Homo sapiens
gagcgcttgccagggcaaggccccgtcataggcactcaaacaagcccagatgagtctcactgaagtgaacaagaagattaattgtgactgtgacaaatggtagaaggaaatgaacagggt

SEQ ID NO: 5481 - DNA, 120 bp, Homo sapiens
ggtcggggagggctcctctgaggaaggaccagcagagccacagcccagagagtgagaaggagccagctctgcaaagacctggggcaagagtcctccaggtgaagggagcagcatgtacag

SEQ ID NO: 5482 - DNA, 120 bp, Homo sapiens
ccccggggtgggaaggagcagaaagtgggccaaggtgaggctggccaggcgggcaggggccaggtcatgaagggccttgaaggccctgaagaggaattgccattttttctccaagtgcaa

SEQ ID NO: 5483 - DNA, 120 bp, Homo sapiens
taccgaatttttaagtaggacagtgatgtggtcagatggaagtttttaaaagaaacgttggctaccagacagaaagtagatgactgggggtggggatgagttgcaggagggaacaccgag

SEQ ID NO: 5484 - DNA, 120 bp, Homo sapiens
aggcgagataatgtggattggattaggctgctggctggggagtagaggaaactggaaggacttgtgattatttcagcgctagagccaggacgtgctgatggattgaatgtaggggtcgag

SEQ ID NO: 5485 - DNA, 120 bp, Homo sapiens
ggacgagtcagatgactcctgtgatttggcttgagcaatggtgggggtgcatttactaggatgaggagacaaggagagtcactaggctaggggtgaggggttctggttgatttgaaagga

SEQ ID NO: 5486 - DNA, 120 bp, Homo sapiens
aaacggaaaagttcaagtccggtgccctgaggcccaggtgcctggggaagctgcctcgtgggggagctgccacctggtttatgctcagtcctggcctgtgagcacagagtctgcatttgg

SEQ ID NO: 5487 - DNA, 120 bp, Homo sapiens
ccacgttcataaaaaccaaatgtgagctcaggccttccagtaatcataatagattagatgctgcaccgaaatgaatatcccacagtggaaagggttgaccggttggcggaaggcgcttgt

SEQ ID NO: 5488 - DNA, 120 bp, Homo sapiens
tggcgctcccctgtccgctgggaggcagggaggctggcccagggggacctgacatgaagagtctgtcttacagggctcaaggggatggctgtggtctccccttgcctgtgtgtgttctac

SEQ ID NO: 5489 - DNA, 120 bp, Homo sapiens
acccggaatggaaaccagcttttcaccttgtccaggaggttgggaacctgagggaacacagcactgcctctgtcccagccccccattgctggttttctctccaccagcagagtccaagcc

SEQ ID NO: 5490 - DNA, 120 bp, Homo sapiens
agccgtatgggccccagcaggaccacactgagccctctctccagccccgcggcctggctctgggatgtacccataccaccccttttagtcccctgcttgctgagtgtgtccccttcagct

SEQ ID NO: 5491 - DNA, 120 bp, Homo sapiens
atgcgagtgggttagggtccgagcccacaaatgaggacattggccttgttttccaaaaatagaccatgactccagggccctagaggaagcctgtaaacctcctggtctgacagacatctg

SEQ ID NO: 5492 - DNA, 120 bp, Homo sapiens
ttgcgtgggtctctttctccacagagaagttggaataagatcaagacttaattcgcaggcccagcattagtcttctgaactcgccggctatatgagtcatctccactgtggagggaggca

SEQ ID NO: 5493 - DNA, 120 bp, Homo sapiens
aatcgacatgtcagaatatctagtaaatcattcgcgttccacctggtgccccttccattcccctgaaaaagcctgcccttgttcagcgcctctcgaagacactgtggagaaagaggtagc

SEQ ID NO: 5494 - DNA, 120 bp, Homo sapiens
agccggggctgggtggtgatttacctcgaggaaaattaatatggtgccatcaattctgaaggcagaaagggcccatggccagaaggctgcacgcaggctggaataactcacggcccatga

SEQ ID NO: 5495 - DNA, 120 bp, Homo sapiens
agtcggagttttgtcaggcctgggggaagggagccagcaccagaagcccctcttccccaggagcctgtcgttgtctgaagggttgaaaggcacctctgtgccacccttctcggccagcac

SEQ ID NO: 5496 - DNA, 120 bp, Homo sapiens
agacgaggccatgaagcccccaccctgggttccaggaggatcacgggaagggggctttcagcctggctgtcagagaagaatgtgacaggcccattttcactccacaggccttaattggat

SEQ ID NO: 5497 - DNA, 120 bp, Homo sapiens
tggcgggatgggttagtgaaggagaaagcacgcttgcttcaggttgagtgcccgtggaggtgctggggcagcacgctggcaagcaggcagactcggccaagacccagctttgtcacgtgc

SEQ ID NO: 5498 - DNA, 120 bp, Homo sapiens
gtgcgtgaggccttggctgtcctcttcatctttctgcgtgtctgtttcttcagctgtaaaatggagatgatgaggcccaacaacataacataggaggatttggtgagaaaatgcatttga

SEQ ID NO: 5499 - DNA, 120 bp, Homo sapiens
tgccgtgtgttataagtgcttggtagttgttattgtcctgtggtagccttgggtctctagagccaagaacagcctcctgtctggatctgagtggcttcatcccactgtgtgggactctgg

SEQ ID NO: 5500 - DNA, 120 bp, Homo sapiens
agacgtggggtcccagctgtggcttcctaagagctgagcgtgagggcgttagtgtggccatccataatggtatttgggatctgacaagtctccaaaccacttgtccatagaccctccagg

SEQ ID NO: 5501 - DNA, 120 bp, Homo sapiens
taccgggtgccccaggctgccaatgggcctcccttcgaggaaccctggatctctcccaagacgctgtgtgtgagcttcagcctttccagttgcctgcacattctcgcccaagtgctgtgt

SEQ ID NO: 5502 - DNA, 120 bp, Homo sapiens
cttcgttcaagagcctttcccacccctccactgggcccagtcctatgtgggggccaggacagagagatgcccaggcagtgagcaggtcagaccctgctcatcctcagaggccagggtgga

SEQ ID NO: 5503 - DNA, 120 bp, Homo sapiens
acacggagagacagctgtgtgggaatgggctttctgtgtgctctgcagagagcgtggcggctaaggtgaggcatgggagtcataacccccaggctgagtgagccaagagtgcatgtggcc

SEQ ID NO: 5504 - DNA, 120 bp, Homo sapiens
gagcgccccattccttccaggtcagggagctccaaggccctgggccaggctgcttcatgccacccgggtttgccaggacaggtcattctcatgcacggctcatcggcagacgtggagcag

SEQ ID NO: 5505 - DNA, 120 bp, Homo sapiens
ccacggtcccacacagtggacagggtctcgttttcttccctctaacccttcgctgtccaacacggtagccacttgtggctgtctaaatctacattaatgaaaattaaggttaaataaaat

SEQ ID NO: 5506 - DNA, 120 bp, Homo sapiens
agtcgtggatagcaagacaacggaaaaaggatatttaattgtatttaattttaattgaaatgcaaatagccacatgtgtggtggctctgtactagacagcatggtcgtaggacatttcca

SEQ ID NO: 5507 - DNA, 120 bp, Homo sapiens
cagcgctgtctagcaggtggggtaaaatcaggaaacaagaaaggcaagggtttggagtctttcaggatcccagctccgtcactttctagtgtgtggctgcatgctgtcaactctgctggg

SEQ ID NO: 5508 - DNA, 120 bp, Homo sapiens
aggcgtcctcgtctggaactgaaagcccagatttgtgtggctacctcctcacccaggtgcgaggacggggcaaagtgaggatggtaacagtaacagaggtgtggactgggcacttgctct

SEQ ID NO: 5509 - DNA, 120 bp, Homo sapiens
gcccggctccagaacctgggcctgcctgccggggtggttggcacagctgggatgccccatgtcctgttgctggtcccagggtcagcaagtgtgaggctgtgccaactgggacaacagcaa

SEQ ID NO: 5510 - DNA, 120 bp, Homo sapiens
cctcggctctctgcagatgacacaatccagcccttcagccgcactggctggctggctgtgcctcaccagggccaagtgcgtcccatttcagggcctctgttttcgtgcttccctccgcct

SEQ ID NO: 5511 - DNA, 120 bp, Homo sapiens
gaccgttttcccatggtcttcatagtccttagctttagctgaaattgcctcttgtattccttgttctctgacactatcctgcactagaatggaaggcacttggccagggggtgggtacag

SEQ ID NO: 5512 - DNA, 120 bp, Homo sapiens
cctcgtttgtcttgtccttgacagtgctcatggatgcctatgaagtagttgctcagtgaataccgatgtgtgggcggatggatgcattggtggatgggaggctgggggacagaggatggg

SEQ ID NO: 5513 - DNA, 120 bp, Homo sapiens
caccggtgttatctttatcaaaggcacctaaaccggcagggtcagtcacgtgacccagagcacttaatagttccgtggaaaagcctcgccggttccagaggcagcccttggcagctgagt

SEQ ID NO: 5514 - DNA, 120 bp, Homo sapiens
gaccgcaaagcctctgaccgccatccaaaaaggcaaaaagaaaattgatgtttcattcatagacatcagttcagacctcccctgagaataacgtcctaggtgctaatgtcatctcatggt

SEQ ID NO: 5515 - DNA, 120 bp, Homo sapiens
gcccggtcttaaccctttcccagccttcagctcactgcttagagacttgggccagcaggttagtgaggcgggtccgtgagttatggaaatttgattcctaccctcaggccttttataaag

SEQ ID NO: 5516 - DNA, 120 bp, Homo sapiens
gttcgagcttcccaatagccctcagaaggaagatgttaccattttccctttcagcaggtcagaaagtggcctacccaaggtcacaccagataccctccctccagcgtcagaccctgagtc

SEQ ID NO: 5517 - DNA, 120 bp, Homo sapiens
ctacgttgtcggctccaactctaagcatattttagacagaaaaatttgtatctatttctggaagtgtgagctataatttggaagaattaaccatgttgggcactttatatgcacaaattc

SEQ ID NO: 5518 - DNA, 120 bp, Homo sapiens
tcccgaccaccctggaagctggtatcacttgctctgcctcacagataggaaactgaggctcaaagcaagactgcagagctcacatgagataggctgagatctgtacctccccttcctgcc

SEQ ID NO: 5519 - DNA, 120 bp, Homo sapiens
taacggaactacagagaatgaggcagcaaaggaatctctcagagaaccagggggttttgtgtgtgtgatgagcaaaaggatagaactaggtgcttgagtactgccggctaggaaccagca

SEQ ID NO: 5520 - DNA, 120 bp, Homo sapiens
atgcgcggaaggataaatttagcctgcatttcaggggaaaacatcgatctcaaatgtagtgctgtcttttaaaagaaagtggaagccttaggccggtcatctgggacaatttcacttgaa

SEQ ID NO: 5521 - DNA, 120 bp, Homo sapiens
aaacgagtgctcataaccagctcatgctgctagcacacccacaagatcttccctctgcaggcgggcggctggtgtctgcatgggtctgacagatggtcctcctgctacccttatctgttc

SEQ ID NO: 5522 - DNA, 120 bp, Homo sapiens
tgacggggggcccaagctctgtgtttgctcagctgctggtccaggacattgacatctggtgggttgcacctgtcagagcagggccagtgccaatcccctctgttgtctagaagctgagca

SEQ ID NO: 5523 - DNA, 120 bp, Homo sapiens
tgacgttcccacaatctcgccagtcaggtggtgacggcatctttcctccagcctccctctgacactgctcccctgtgtcaaaggggaagaaagtccagtctgtcaatatttggggcacta

SEQ ID NO: 5524 - DNA, 120 bp, Homo sapiens
ctgcgttcgggcgccaggggtcattgaaaggctgagacgcttccaggaattcatggctctaaaaccgtggggctgactggaaaggatctccagcgagggtatgaagaaagaaacccaaat

SEQ ID NO: 5525 - DNA, 120 bp, Homo sapiens
cagcgcagggtgcgaggtaggcagggctgggcccccgggccttccctgtgaaccatctgcccgccggttgcaggaggcagttcctggaaagcaagcgggccgagttcctcacagagatca

SEQ ID NO: 5526 - DNA, 120 bp, Homo sapiens
ccccgccctggatgctggtgacacttcccctgggcgggaggggctgggagcatgcagatctcagccctgaacagcctgtcctctcgcctcgaggttcttggtaggctgggaacagcctgt

SEQ ID NO: 5527 - DNA, 120 bp, Homo sapiens
acacgccgcacagctgccaccgccggccctggcccgggagaggggggtctctggggatcttagcaggccatggtgggggtgtcttggggccagcctgaactgaaagaccatcacagcttg

SEQ ID NO: 5528 - DNA, 120 bp, Homo sapiens
aagcggtgcatggcaatgtgataggggaatgaaacacagcaacagaatcaatgccccacgctgggcaatagccgactttctgttcgctcccatcccttccttccctccccgcctccttcc

SEQ ID NO: 5529 - DNA, 120 bp, Homo sapiens
acccgctgtgtgccagccactgttctaggccctgaagacacagaagtgaacaaaaaaaaagagtccctgtgcacatcctggagggactttccccgtgtgtgtgtgtgtgtgtgtgtgtgt

SEQ ID NO: 5530 - DNA, 120 bp, Homo sapiens
ccccgtgaagtcagtgatattagtcacagaggcccagagaagtgaagtgacttgcccaaggtcacacagccagcaagaggccaagcccggattgaaccccagccgcctggctctggagcc

SEQ ID NO: 5531 - DNA, 120 bp, Homo sapiens
caccggagacagacatcgacagccactaggagatgttaaccaacaggcttgtcttcacggcacggcccccgcttcaccagctgcactgtttgatgagctttgcaggtcccagatcttata

SEQ ID NO: 5532 - DNA, 120 bp, Homo sapiens
ggtcggcctaaagttagaagtgggcccctctctgccccaagacagcccttcaccccaattccattcccacagtttgggcatccacccaggctgccaagccaagcgggggctgcccgggtt

SEQ ID NO: 5533 - DNA, 120 bp, Homo sapiens
ggccgcctctctgaggagtgggtgccccgcccctccgtgggccgcctggtttctcttattggcagcgtctgtagtcccctggctctgtcacccgcagctattctaggcctctggttcctt

SEQ ID NO: 5534 - DNA, 120 bp, Homo sapiens
ctgcgtcttcctgcctcggtggttccccaccatccagcctgagacctccccgttgcccgccctgggtttctgtctgctcctctccgtggtggccggccctggctctgccccaaagccatg

SEQ ID NO: 5535 - DNA, 120 bp, Homo sapiens
gcccgttttgctggagggggcatttgaggcctggccagcttagccagcctacaaggagtgttactggggtgaaaacagccagcggggaccagtctgcttgtggcccgccaggtgcctggg

SEQ ID NO: 5536 - DNA, 120 bp, Homo sapiens
cagcggctgccgggtgcgagcgggctcaggcctgtggccctgcctgacgttggtccccatcaagccatgtgacgagaccaggccacaagaaagaggtttcaacaagcgttatcgtttcct

SEQ ID NO: 5537 - DNA, 120 bp, Homo sapiens
actcggcgacttccccgaagaccggctgtgcctggcgggcgggctgcgcacagcggggacaaggctgcccccttcctcctccgctgcctccgcggccgcgtctatctcagtctgactacc

SEQ ID NO: 5538 - DNA, 120 bp, Homo sapiens
cagcggccctcggctcagctgccaggtcaccggcaaccccgggagcggtggggcaggggctgctccgccagcctctgtgatgttcaggccgggctgcaccagcccgggacccctaggtgc

SEQ ID NO: 5539 - DNA, 120 bp, Homo sapiens
aggcggatagtttctgtttctggctgactaggccctagaaatccagagaaggggctaaaacctcactttggtggaggtggggtggctgagaactcaaattcttgggtaccaccatctcgg

SEQ ID NO: 5540 - DNA, 120 bp, Homo sapiens
cacgggacgtggggtgcagctcccagggctttaggtcactgtacctatgttagtatggatttaagtgactcataaagggaggaaggggccagctctgggaagtgtgatcagagggggcct

SEQ ID NO: 5541 - DNA, 120 bp, Homo sapiens
ttgcgtaaggaaaatacgattttcatacttttttcaaaggaggaaaaaaaactgtaacatattgcaagctacctgctagctgacccctcttttgaggaggacctgttttcccatctgtaa

SEQ ID NO: 5542 - DNA, 120 bp, Homo sapiens
aaacggggatgttcacagtccctacatcggaaggctgggtgtgagttcaatgttttacacaggtgatgcgggacctgggagcagttcctgcacagacaatgctacatagaaatatgagca

SEQ ID NO: 5543 - DNA, 120 bp, Homo sapiens
cagcggttaggtcctccggttgcctagtggtacccagcctctgaaaaagtcctgagtgggtttgcaaaacctggctccaccccttgttgtggtcctgctttgcctcttggagcccgtttt

SEQ ID NO: 5544 - DNA, 120 bp, Homo sapiens
tgacgtgtccaccaggctgcttaaccctaaatctgaaaatgactcagttcaccatgtgttgagtacaaccctcaagttaccaccatggcccatgtgtcaggctggccaaagacacagaag

SEQ ID NO: 5545 - DNA, 120 bp, Homo sapiens
aaacgtcctggagccactcttcccttccctggctcctgaaaacatccacctcctctatgatgcgcagaaagttgcccttagaaaggtggaggcccagggaggcaaggggaattgccctag

SEQ ID NO: 5546 - DNA, 120 bp, Homo sapiens
agccgccagcagcaccctcccgccaccacagaccacacagtctccttctggctccaagttgtgtgttcaccaaaaagtacacaagacagagcagggtgagaagaaggaagctagacccag

SEQ ID NO: 5547 - DNA, 120 bp, Homo sapiens
gcccgtgcctcacagggttgtgcctctctttataggattaagtaaatttaagtatgcaaagcacagaattagggctggcacgcacaaagtgctcaaacgcgagctgctgtcttaccggac

SEQ ID NO: 5548 - DNA, 120 bp, Homo sapiens
acacgccaaaactagaccaaccgtttctctccctggagagttgtgggtggaaccgtgagggatgcccagccacagggcaggccccgtacaccacctgcagcccagcaggtcagccttagg

SEQ ID NO: 5549 - DNA, 120 bp, Homo sapiens
actcgctagaaaacttatttttttttaaaaaaaaaactttcataataaagtttattacctaaactgactttaaaaaatataaaataggattctgcacagcagaaaaataaagccagagac

SEQ ID NO: 5550 - DNA, 120 bp, Homo sapiens
gtgcgagttcaggtcctggctccagatacagttaagctgctacaacaaccagggggacccagagggagcaccaggagggggaggaccccctcaagaggtgagaaggggtctgcggcctcg

SEQ ID NO: 5551 - DNA, 120 bp, Homo sapiens
agccgagggcgggaggcgcctcgcccctacacccatccgctccctccaacccaggccggggagggtacccacatggttccaggcaagtaataacaaaataacacggcatcccagttaatg

SEQ ID NO: 5552 - DNA, 120 bp, Homo sapiens
ctgcgtgcacggcgggcgctgccggtcaaatctggaaggggaaggagctcaggtagtcgcggaggacggggttgagggggatgcgagccaggttctcgcggcccacggtggccacgatgc

SEQ ID NO: 5553 - DNA, 120 bp, Homo sapiens
atgcgctggcggcacagctcctgcagcggccgcacgcggcgctggcgcagcggggcccccagcatgcggcgcggcgccgccacgtagtgctccagcagctcgaagaggcagtcgaagctc

SEQ ID NO: 5554 - DNA, 120 bp, Homo sapiens
tctcgcggctgccatccaggtgaaagcggccggcctgaaagtgcacgcggatgctcgtgggtcccgaggccatcttcacgctaagggcgaaaaagcagttccgctggcggctgtcgcgca

SEQ ID NO: 5555 - DNA, 120 bp, Homo sapiens
ccacgggctcggcgcgcagccgctcgtgcgccccgtgcacgctcaggggcccccagtagaatccgcaggcgtccaggagcgcgctggcgcgcgtgatgcgccggtaatcggcgtgcgaac

SEQ ID NO: 5556 - DNA, 120 bp, Homo sapiens
gaacggaatgtgcggaagtgcgtgtcgccgggggccggggccgggaccgcggggcacggccgcgggcgcgcgggggccgcgggcgaggaggaggaagaggaggaaggttctggccgccgt

SEQ ID NO: 5557 - DNA, 120 bp, Homo sapiens
cgtcggggctctgctgctgtggagactgcattgtcggctgccacctggttgtgtgctaccatcctacagaaggggccagccggaggggtgggccatagcgtccgggggtgcgctgcggga

SEQ ID NO: 5558 - DNA, 120 bp, Homo sapiens
tcggtagatgtttgttgttcatctgagggtgcctgtgggtgtggcagtgtgttggagcccacagacgcatggcttcaacccctgtgtccatttttttaaagagatggagtgtagctctgt

SEQ ID NO: 5559 - DNA, 120 bp, Homo sapiens
acacgtgggttctcctcactgccaccagtgacagacagctttggtttcattttctgaagtcctgtgttcaaaatgaaaccaaatccagatgccgaaagagaaaaggaaatctgctggttg

SEQ ID NO: 5560 - DNA, 120 bp, Homo sapiens
gtgcgaaaccctgaggggctcagagtgctcggtaggatgggaccaggctctgaccccagacctgctgcatgaccttgggcaagtgacctgtcctcttgggacctgatttgccccaactgc

SEQ ID NO: 5561 - DNA, 120 bp, Homo sapiens
tctcgtacctcacagagcagccagacatgcagagccaagggcaaaatgccaggcatggagtcggtgcttggcacaatgacctcttgtcacagggcggatggaccagccctatatccacag

SEQ ID NO: 5562 - DNA, 120 bp, Homo sapiens
cctcgtaccccaaatgtgaggggcccagccagcatctgggggaagtcaagatcctggtggcttatggcacttagcttttcagtttctctttccggctttggtggcgccttgctgggaaaa

SEQ ID NO: 5563 - DNA, 120 bp, Homo sapiens
aatcgtgaaactagcctctgccccggaattcctcagccctgcttttcctctaacccatgtgtcgggaaggttcccatgggagtctgtgcccctgggaaccccgagcagtggggctcacag

SEQ ID NO: 5564 - DNA, 120 bp, Homo sapiens
cggacccctggctcccatctcccatccagccctgctctctcaccggggccaagaacctctgcatggccagccgggacccccacccccagcagcccataccccccacctctggttcttcaa

SEQ ID NO: 5565 - DNA, 120 bp, Homo sapiens
agccgtgcagctgtcctccggggcctggacaccaagggctcggctctgggcagtgcccacttgggacctgcaagcccagggcccctcacagctgctctggggtccccgacagaggccttt

SEQ ID NO: 5566 - DNA, 120 bp, Homo sapiens
ttgcgcaccccctgctgcacgggaagctgaggcgacaggcagagctggcagggacacgggctctgtgtggggtgggcgggacgtggctgcagcctggctctgcctgcgtggcactgggtg

SEQ ID NO: 5567 - DNA, 120 bp, Homo sapiens
gaacgggctgagtgagcacaaggctccccagagtgctgaccaggcgccctgctgctgcagccaggaccaggctgtgggcttctctcctggcacctcttagcgccaccggccgtcagcaca

SEQ ID NO: 5568 - DNA, 120 bp, Homo sapiens
acacggggtagggctgggggtgtcccggtcggggtgggaggcctggggtctgccaatctcccctcggcccaccccttcctgttcgggcgcctttctctctaaggcggaagcctctgtgcc

SEQ ID NO: 5569 - DNA, 120 bp, Homo sapiens
ccccgtgagtgcccggagatggctccgacccctgccggttgccgggcgccctgggtgtgtcccgctatcccagccaggagcagactcaggccctgggccaaagtgcagcctgaggccccg

SEQ ID NO: 5570 - DNA, 120 bp, Homo sapiens
gggcgaaggagagggaaggttccgggtccagccccagcgccagtgcccctcctgtctctagcagggccagggttcaccagccacggccaccggccccagcccctcctgtccttggttgtc

SEQ ID NO: 5571 - DNA, 120 bp, Homo sapiens
taccgcccccccacagacacacaaggtgggacttgagtacggggccacttgggggtgctgaggggcagcctggccccagggacagcctcagggaaagaggtggatgccgggcgacttggg

SEQ ID NO: 5572 - DNA, 120 bp, Homo sapiens
tggcgcagccgggacagagcccctctccctgcagaggggccatgtgtgcacagcaaatggcgggcccctgtagccgcccctcctcctgtcctgcgctgttgggggccacgcttgttcccc

SEQ ID NO: 5573 - DNA, 120 bp, Homo sapiens
ccacgtgcccacacctttctctggtttcactttcagtttcttggaaaggctgtccttccctactccaagcccctcccctcactccccacccaggatctgggcactggaggcgccagacat

SEQ ID NO: 5574 - DNA, 120 bp, Homo sapiens
tgccgggtaaggctggggcagcaaggggcccggaaagtgccactggctgcagtcaaagtggcctgagcaaggtgttctctgtgtttctgaggctgacctctgtgaactcagagagagaaa

SEQ ID NO: 5575 - DNA, 120 bp, Homo sapiens
gtgcgcttgtgtgcatgtgtgcacaaccatgcggtctggcaggcttgtgggacagtgcccatgtacaagcagctctcttgtgtgtgcagggctgcttggaggccatggtcctgggctctt

SEQ ID NO: 5576 - DNA, 120 bp, Homo sapiens
ctacggttgcaagtgggcagactacgtgagaggggtctgggagcctttgtgtctgtgtgcatgcgtatgtgtgcctgcgcctcagagtgtatgcatgagtggatgagtgtatgcacacct

SEQ ID NO: 5577 - DNA, 120 bp, Homo sapiens
gtgcgtgtatatatgcttatgtgtatgggagtgaatgtgccgccatgtgtctgcttgtgtctgcaatagcctgagtgtgcatgcgtgtgagttttgctttcacattcagtgctagtcaga

SEQ ID NO: 5578 - DNA, 120 bp, Homo sapiens
acccggcccccagctggccgcaggccccaccatccctggcatctgcggcatgaagccacccatgggagtctgagggaagtcacattactgggactggccagggtagagctgccctgggaa

SEQ ID NO: 5579 - DNA, 120 bp, Homo sapiens
tcacgcctctcctctgtctctctgaaaaccctccaaagagtccctgttgcatttcaagcgaaacatgagtctctacccagtatctcagatgtcaccagggccctgctggccagaaagact

SEQ ID NO: 5580 - DNA, 120 bp, Homo sapiens
cttcgagtcccttcctgtaaaagctgagtaggaagtccttgcagggggcagggatgattgcgtgcttgtggccgttcctctgtccagtgggtagacactgggaggctctggagacttggc

SEQ ID NO: 5581 - DNA, 120 bp, Homo sapiens
tcccggtgggccagagccttttccctttccatatagccatatgcgatagtaaagagcggttgcttctccaggctttaaaaaattttttattttatattttattttttgagacagggtctt

SEQ ID NO: 5582 - DNA, 120 bp, Homo sapiens
aaacgaatgagtgcttcttctttaatcctgcaactaccccacatggtcagcacttatattttcactcttacttggcagatgaagaaattgagtcctgttaaggaacgtgcttaggatcac

SEQ ID NO: 5583 - DNA, 120 bp, Homo sapiens
ggtcgtgctggaattcaaatccaggcaggtgctagcttgagagccactgctctataaagcccttctcaggcctccactcaggccaagggaggaggaagggccctcaggcaggagcagcgt

SEQ ID NO: 5584 - DNA, 120 bp, Homo sapiens
cagcgtgaggtcaaaatggagaggcaagaggagggaggggtgtggaggtccctgaatgccagcatgaacgctccgggccttctgtggggtgggcggcacgggagaaagggagtctagcca

SEQ ID NO: 5585 - DNA, 120 bp, Homo sapiens
ctccggctgggtgccctggctcaaaccatccttgcctcaggcaaggacacctgcatggacccagtcgctcaagtcccaaaccaagtccatccttgagttctgtctttgtctcccctcatc

SEQ ID NO: 5586 - DNA, 120 bp, Homo sapiens
catcgggccgtggggagtagagtgaaaccgcagctgcagcctcctggctagtctctccactcctctgcccccacagcccagtctccacgcggcggccaggggcgtctactgaaaacgaaa

SEQ ID NO: 5587 - DNA, 120 bp, Homo sapiens
atgcgcattcctggtacatttaaagcaaaatccaaattcctttaagtggcctgtgagtctctacctgatcttgcctcaccgacctcttgactgcatcactgactgctcccccatcactgc

SEQ ID NO: 5588 - DNA, 120 bp, Homo sapiens
ctgcgcacccatactggcctttctgttcctcatacacacagggtcgctcccgctgcagggccttagcattcgccattccctctggtgggagtggcccttccccagcccaccagccccttc

SEQ ID NO: 5589 - DNA, 120 bp, Homo sapiens
tggcgaaacctgcttgtgtgctagaaaaaagacccaagctgccgaaaaccacctgtaccgtatcctgccccatttgtcctcacccaacttctggtaagtagtgtccattgaaaaatgcta

SEQ ID NO: 5590 - DNA, 120 bp, Homo sapiens
tggcggggtggaggtaggaaaaggagggcactgtgtgtttttcctgacagtcccctcagaaatgctggtggcttggtgctggaagggtgttgcctcaccatgttagctgagctgtgtggt

SEQ ID NO: 5591 - DNA, 120 bp, Homo sapiens
tttcggcttgagtttcctccctgacatcaccagatgaaaacatatgtcagaggttttgggtttctggtgccaaatccaagatggcttatcagcaagcgccccccgccagacagtggaggc

SEQ ID NO: 5592 - DNA, 120 bp, Homo sapiens
aaccgaaaataagcaaccgtggctgtgacttcacttttcttggaactgctttacattaccccccaaatggagaaaaccctcatttagcagcttttggattgccaagttctctaattcttt

SEQ ID NO: 5593 - DNA, 120 bp, Homo sapiens
gagcgctttgttgcctggcctgtgggtgtgtggtttcatggttgaggagaaaaagcacctggaagacacagtgtgtgtagaatgccttccagttccaagggtgacaaccctgcgatctgc

SEQ ID NO: 5594 - DNA, 120 bp, Homo sapiens
agccgaaacttacagagcagctgcctgcttcaaggacaaggggaaaaatgcattttcagtcataatgacctacatttagcagatatttcggagcccgtgcgaaaggacatcttcaaaggg

SEQ ID NO: 5595 - DNA, 120 bp, Homo sapiens
aaacgtggggcccagtcctggtcctgcccgttcctgtctgactttggccttggaagtctgtgaagccgagacaattcatccttcaaagggtggtaccgggtaagttcttgggaatggaat

SEQ ID NO: 5596 - DNA, 120 bp, Homo sapiens
atacgttgttctgaaatcatctgttgctatctctgtccctgttggaggcgcttccagtgacgtcgtgattgtgtcctacttatctcagtatccctgcccagcatggggtcttaggtaaca

SEQ ID NO: 5597 - DNA, 120 bp, Homo sapiens
agtcggtcaatgttaggactggctgggttttaggctagaagacagaggaaatatacaagcaaaggcacagtgtcttaaatttacacttggcccgcagcagttttcagaagaaaggagccc

SEQ ID NO: 5598 - DNA, 120 bp, Homo sapiens
agccgttgtgggacacagaggtctctgagacagccctctaaactcaggagcgggtagccgcccaaggccccacccactgtggctgggcagagccctggggcgtggtggctggtctgctcc

SEQ ID NO: 5599 - DNA, 120 bp, Homo sapiens
caccgtctcagccaggcccagagagcctctcgtccggagcccccagggcagggcctgcaggggcctcgggaggccactcctctgcctcccccagactagggaaggatggtcccaccttgg

SEQ ID NO: 5600 - DNA, 120 bp, Homo sapiens
tgccgaggggaagccagagccaacctgggtccccctgagcaaggtaggccccctcccaacagcagctgccccaacaagcctggcccccctgccaggtgggccttgcctaccccactcccc

SEQ ID NO: 5601 - DNA, 120 bp, Homo sapiens
ttccgctagggcaggtgcacgggtcgggatcctcaatattccctgaagatgggctctgctggacaaagatctaggctgcctccttcaggaagccctctgggattgtagcacagggcaagg

SEQ ID NO: 5602 - DNA, 120 bp, Homo sapiens
ctccggcagagggagcctggcaggagtgggtgtgtgcatgcacggaggcctgcaggagcccccacggagttcccggccgtcccagcccctggccctgcctggcagacaatcagggctgga

SEQ ID NO: 5603 - DNA, 120 bp, Homo sapiens
ctccgctggggttcagggggagcccgacctgcccagggcggctgtgaagactcccacaaccagccccaggccctgtgcttcctgttaccgtctcagggatgctccctgcctggccggccg

SEQ ID NO: 5604 - DNA, 120 bp, Homo sapiens
agccgtcaaagagccctttcatgcccgcctgggcgcccgtggcttcctctgggctgtccaagagcaacaggccgagaggccagctccgccgagccctggacaggatcctggcagggcccc

SEQ ID NO: 5605 - DNA, 120 bp, Homo sapiens
ctgcgaagcctgcctcgcggccccagggtcctcctgccagccccgtgcccatgagcggggctggggcccggcgtcttggccggctgggttgggggatggtgccgtgggcacgcagctctc

SEQ ID NO: 5606 - DNA, 120 bp, Homo sapiens
catcgggaaaccaagcctgctgcccgcctggggtgcggcgccctgaggagaagcaggcagatggaagctgtggctgggcgggcccggcgggggggctgtaggccgaggcccgtgttcggg

SEQ ID NO: 5607 - DNA, 120 bp, Homo sapiens
gcacggggcccccatggccaccaagccaccgggtgacgcacagccctcatgctgctggcggggaagccaggctggatggagcccaggagcgcagcctccccaggctccgtggggtctctt

SEQ ID NO: 5608 - DNA, 120 bp, Homo sapiens
ccccgcaccagccccgcctctcagcggataaggactgggccggacgactcgcgggaatgacttctaggcctcccaggcctcagcgggcgggggctccattctctgtgggccccaggccaa

SEQ ID NO: 5609 - DNA, 120 bp, Homo sapiens
tcccgctccgaccctgggcctctggacacggacacgcggccattccccacaggtccttcctccacaagccggcccctgttgtgggaggtgctggacgtggcaggagaattgtggcggcct

SEQ ID NO: 5610 - DNA, 120 bp, Homo sapiens
gggcggggaggggccccgagctggctcagtcccctcggcagatttgtgtgcgacctggggtcccgctctccccgcagcccctcagcttggcctggccctcagcacccccatgctaaagac

SEQ ID NO: 5611 - DNA, 120 bp, Homo sapiens
gaccgaggaggaaaggaggacaggaggtgaggggagaccaaggggtcccccctgtgggagcttcgtgtgccaggctgcgggcaacgggctggggagggctgtggtggggaccgcaccagc

SEQ ID NO: 5612 - DNA, 120 bp, Homo sapiens
agccggttccaggctcccccctccaggtggccctgggcggtgacagctcacccttggcagcggcacccactaggcccagcggccccctctggggacagccatcttcaccctgttggctgt

SEQ ID NO: 5613 - DNA, 120 bp, Homo sapiens
gagcgcctgtgactatggcacctgcatccgaccgagccggctcagcgtggctgtgccctgggcggcgagaacacagctctgcagatgtgtcccagtgggacagtgtgctcctggggcttg

SEQ ID NO: 5614 - DNA, 120 bp, Homo sapiens
agacgggcggacgcccacactctgctgtgccctgggtctgagcctcagcctcccatgcccgtgaaatgggcacccatggagctcagaagtatccagagcgtccctgaggcctagacacag

SEQ ID NO: 5615 - DNA, 120 bp, Homo sapiens
ccccgacgccagcagaactgccccctaaaaagagaggcatgttcctgacagtcccccttgagggcaggtcccagagcctccccacgcacagagcagggtggagggaggctgaggggtggg

SEQ ID NO: 5616 - DNA, 120 bp, Homo sapiens
gaacggcccgggaagggtgcctttgggtcccttgggttcgggtggcccgggatgacccgtcctggggagagtccgtctgggcaggcggctggcagggccgatgcctgaactatgtggcac

SEQ ID NO: 5617 - DNA, 120 bp, Homo sapiens
gagcgcggggggtgactcagtggggcaggacagcatgtctcctggacagaaatagccctggccaggcatgaccgcggcattgccgtggcgacgggggagcggctgctgccgggtgccctg

SEQ ID NO: 5618 - DNA, 120 bp, Homo sapiens
cagcgtcccaggcgggccccgggagggccgccccctctccgtgctgcggggcgcttgtgccagtgaggtgcgggtggaggtgccaggcactgggggagggggcctcagcaagacccccga

SEQ ID NO: 5619 - DNA, 120 bp, Homo sapiens
ggacgcctgggctcactcagcccccgagaggagtggatgatctttctaaaggaaggcgtttggggtccacccagaaagtggggagggctccatccctgggtttcaggattttactactag

SEQ ID NO: 5620 - DNA, 120 bp, Homo sapiens
aaacgaggagagaagaagcccctgggcagggtggtcacaggagtcagtgtgtcggaaggtgtcaaagcattcagcactgcacctggtatgtggcaggcacgcaggatgcgctactctcaa

SEQ ID NO: 5621 - DNA, 120 bp, Homo sapiens
ctgcgaaagtctgggcctcctttttcagcacaaggcgggcggcccccgcgtgccctagtccagtggtctgcctgcacgtgggggagtggggaggtcaggaaattgggggcgggggtgttg

SEQ ID NO: 5622 - DNA, 120 bp, Homo sapiens
ccccgagttacctggccgacaggctgtacaggtccagcagtggtttgcagagcctcttcagtgcccgtgagaacgtggcctcagcccaagacagcatctgttgggcggcctggagaggga

SEQ ID NO: 5623 - DNA, 120 bp, Homo sapiens
ctacgccccatccttgctcactcaccagctccagggctcctttcatggcccccagggccgccctgatgggccttggaccccctttgcctggcatcccgggcacccaggcctgcagccgcc

SEQ ID NO: 5624 - DNA, 120 bp, Homo sapiens
cgccgcatggcctcctctgctcgctcccgccacacctcctccaggggccgcagtgtcacctccaggtaggcatccttcagtgtggccaggggccctgcaacaggcagccaccacccacca

SEQ ID NO: 5625 - DNA, 120 bp, Homo sapiens
acacgccaggcctcgaggagatagggcctgttcctgggattaagatgtggggagctgggggaactggaacagagcagtggcactggagattgcaggggagttgtcacagcaggcctgagc

SEQ ID NO: 5626 - DNA, 120 bp, Homo sapiens
agccgtctctgcaaggcctgcttataaggttgtctgggaacttggattgggggagggttcccaccagtcctagaattgatatgaggctccctgcatctgaactgtttgtacaaacgtggt

SEQ ID NO: 5627 - DNA, 120 bp, Homo sapiens
tgccggacccctgcttgcttcctaggagtctgacagtgtggtccgtgccaagcagcacctgccagtgtggcagcccccaataaaaaccctgggtgctgagtctcccaggagctgctctgg

SEQ ID NO: 5628 - DNA, 120 bp, Homo sapiens
aagcgctgggactgggagagtaccctgggcactggccctggttctccctagactccgccccagcccccttccctgtgctgacactcctgcatcccctcactataataaatcacagctgtg

SEQ ID NO: 5629 - DNA, 120 bp, Homo sapiens
tagcgctgggcggagtcctggcgcattcctcctgattcactgccctgggggtggtcacaggaacactctggcacagcagggaggatcgggaggtaacattcaacagccagtcagagggat

SEQ ID NO: 5630 - DNA, 120 bp, Homo sapiens
tggcgctgggcagggccttgggggctctgtgctgtgctgggcattagccctggatggcggagaggccagaggttcccagtcctgccacgaggctggttggggcagcaggtgtgagccttt

SEQ ID NO: 5631 - DNA, 120 bp, Homo sapiens
agccggggagtcgcccccattgctgcagccatcagcctggccctgacgtgggagcacagtgggcgcagggacccctgggctcagtgtccccagctgtaaagtgcacgtgaggcctgacat

SEQ ID NO: 5632 - DNA, 120 bp, Homo sapiens
catcgtggaaccagaaagagatgctgtggcagtgagcttcacagaaacaaggctgtatactcaaaagaaagcaggcgggagactgaaaaaacctaggcagcaggcataagggagatgagc

SEQ ID NO: 5633 - DNA, 120 bp, Homo sapiens
aagcgaggccacatttctgattgaaacagtgccacaggccaatgtgagcgcttagggccccggtggagaggggggacattgatttccgcacaggattgagccctccccctcccacactta

SEQ ID NO: 5634 - DNA, 120 bp, Homo sapiens
tcccgcagctgctccagccccacctgcagccactccaggtaaagaggcaggtgctgggtcagtgcctggctccgggcccacaaagtggctactgcccaaccactcgcctgcatggcctcc

SEQ ID NO: 5635 - DNA, 120 bp, Homo sapiens
tcccgccccgcctgggacagctgcagaaggaggcctgccacgccgtccagggtgcctgccggctgcacctggacagggaaaccgaggcagaatcagggtgaggtccagggcagagagagc

SEQ ID NO: 5636 - DNA, 120 bp, Homo sapiens
agccgggcttgcacctgggagccaactgctgcaatcctggactgtgaggacagaggaagaggctggggcctcgcaggaatgaagtagacacaaggttctcggtgccagcagcaggtgtgg

SEQ ID NO: 5637 - DNA, 120 bp, Homo sapiens
gctcggaacagcgcctggctccgtgttcccaggctggtgccaccagccagcctcagcgactccttccaggccccctcccccgtgccccaaccctcggcttctcatcagccaccccctccc

SEQ ID NO: 5638 - DNA, 120 bp, Homo sapiens
ccccgaggggacatgccagagcgctgcctgggcctgggcaataatgaggcctgagtgcgcggccggcgcggagggaccattatctcccaaggctcttaatggccactggccgagagtaca

SEQ ID NO: 5639 - DNA, 120 bp, Homo sapiens
gatcggtccagtgcatagagtcaccacattcaggaaagagggtgacacagcagcagctagtggccccaggctcctgggcacaaatgactttccagaaaccacccgggcgcagacaccgta

SEQ ID NO: 5640 - DNA, 120 bp, Homo sapiens
tgacgccacgcgcccagaaacagcagtgaggcggctcggtgccggggctgcggggcattgcaagcttggctctaccatgacatgccaggcacggggccagggccccacggaaggccccag

SEQ ID NO: 5641 - DNA, 120 bp, Homo sapiens
gttcgattctggccaccactgcctggccatatgactacgactccatttcccccttacaccttcctggcagacctgcagctgtccccaacccagggggaccacacggcgattccagtggag

SEQ ID NO: 5642 - DNA, 120 bp, Homo sapiens
atccggaagtctactcacccactcttgtgagccagtatgagccagtcctgttctgccactgtctatgccatttcgtgagtgtaaaccgtccttaataaacacctgtaactcgagctcctt

SEQ ID NO: 5643 - DNA, 120 bp, Homo sapiens
ctccgtctgtctgtcccctcccaaccccactgcacccttgcttcctcctcctttgttccttagggacgcccttggccatcccaccctctgccccccacatcgaaactccggggcctctct

SEQ ID NO: 5644 - DNA, 120 bp, Homo sapiens
gcccgactcgggggtttgctttctattgagcgctgagtcctggttttgtttccagactgaaaaacaaaccttgtctcctgcccaccatcaatggggaggggcagaggcatttcaagccga

SEQ ID NO: 5645 - DNA, 120 bp, Homo sapiens
tcccgggggcccaggagctgcttggtgtgcaccgatgtgtccctgcaaagccatttctagcaacagggtcctcagcatttcacccctcagcccaggggacctccacggtggcagtaactt

SEQ ID NO: 5646 - DNA, 120 bp, Homo sapiens
agccgcacagtgccctctggggctagcaccgccagcgtccaaaagtggagatcgaggcccacagcccttgccctgagccacccctgccaggggaaatgtccagttaggtggtcaggggtc

SEQ ID NO: 5647 - DNA, 120 bp, Homo sapiens
gttcggcagtgcaacggttagagcacaggccacagagcagcggtcccctactggtgacaagtgtgctccccagggccatctggttgccacggactgcaggtggtgatgatggtggtatcc

SEQ ID NO: 5648 - DNA, 120 bp, Homo sapiens
acacgagacagatagtggggggctggccagagctgaagcaattttggacagaaaaccccaaattcctcagcctctttaaagagctgcagcctctgacaggctcggagccgctgggtcggc

SEQ ID NO: 5649 - DNA, 120 bp, Homo sapiens
cctcgctcacggtcatatatggagggcagcacaattagagacagcccagggtgctgctcacagctcctaatggtcttatgccagccagggacaggcctgggacagagctcacggctcctt

SEQ ID NO: 5650 - DNA, 120 bp, Homo sapiens
ttccgaccctgtactaccagggaaaggctgggaatgctgctcacagcccctactggtcctacagggaccagaacagacacaggtgggagggggtacttcagggatgccttctgctggctc

SEQ ID NO: 5651 - DNA, 120 bp, Homo sapiens
cctcggccctggcctcagggcagaagttctgcatcagacctcaggaggaagtgtgcgggcccttaagacacaaactcccattctcagaagaaagttggttgtgcctccaagagatgtgcc

SEQ ID NO: 5652 - DNA, 120 bp, Homo sapiens
attcgtatatgatgaccatgggaaagatcctaaaccatactttattacggaaaagctgtgagcctcaccaacatggaatctaaaagactgcgtgtggaatttcaaggtaagggggtaaaa

SEQ ID NO: 5653 - DNA, 120 bp, Homo sapiens
gaacgtactggcacttcacttagactctttggcagagtcacttcggtcactctcctgattcccagggtggagggccaaggaatggtaaggggggcctgggaggccacacgtacttggatt

SEQ ID NO: 5654 - DNA, 120 bp, Homo sapiens
gggcgctggctgggtataatacgaaggaggattcatgcccttcccatcaggccccgtcacaagccccgtagttggcccaggcatgggagctggaggtgtggggtaataactgttaacagc

SEQ ID NO: 5655 - DNA, 120 bp, Homo sapiens
gtgcggatggtgctgaggaaggcccagtggccgcctggtaaggtcctggaaccgacattttacctaaaacagaaacagaacataccagataagaaattcagttgatctctccctctcttt

SEQ ID NO: 5656 - DNA, 120 bp, Homo sapiens
ctacgtaccttccatatctggtgtttcttcttcgttgtttttttttgtttgtttttttgtggtttttttggtttttaaaccactgtggttttcactaactgtttcaggtaacggaaaaga

SEQ ID NO: 5657 - DNA, 120 bp, Homo sapiens
agccgtgggagtcacagaaggttatagagaaggggaaaggcccaaccccagaaaagacagatgagacagaaggtctttaagaggagcaagaagcaaagtagagaaggccacagaagcagg

SEQ ID NO: 5658 - DNA, 120 bp, Homo sapiens
gatcgcaggaggtgtttgtgaaaacaggctctggtttaacactgagacatggtgtaaagtggtttgaggcgtgttgctagtttcctctgacgtacaggaacagaaatgcagcagtcccag

SEQ ID NO: 5659 - DNA, 120 bp, Homo sapiens
cagcggacatccctcccagatgaccccgggaacccctgacatctgcttctggctttgttgaaacttccagcaaagggaacgacagggcaccctgggggtctggagtgacctacatccggg

SEQ ID NO: 5660 - DNA, 120 bp, Homo sapiens
gaacgtcgaggactcgccgtcacagccccagacccacctccatgatttatggtgaaaactgactcgtataaaaacttacaagaccaggaaaagccagtgtgtacagaaatcctcaaggag

SEQ ID NO: 5661 - DNA, 120 bp, Homo sapiens
ggtcgtgattgccaatggaatgctttgagggaaaacaaggcctggggcatcctaaacctccaagaggcaatggctgaattcggcagcggcgcaattcctgcaaaaaccacggcctctcct

SEQ ID NO: 5662 - DNA, 120 bp, Homo sapiens
tgacgacctttaaaagatgggtgggccccagtttctcgttttggaaattaaggcctcggccaccgcctctccccctttattgagaccatctttcatgtggtaacatcttatcttctggga

SEQ ID NO: 5663 - DNA, 120 bp, Homo sapiens
tttcgagacactgcatcttctgagcattgctttgagatcaaacagccacacaaacacatttataattctgaaaagaacaagagcaacaggccagaatagtaaaaaagactcataaccgct

SEQ ID NO: 5664 - DNA, 120 bp, Homo sapiens
ccacggttagtcccattttgtttcccttgttttgcgccttcatttcaatttggcttatctcctgggataagaggcccacccaccaaccatccctctcctcatcaccccccatcccctcct

SEQ ID NO: 5665 - DNA, 120 bp, Homo sapiens
ctacgaaactcttagaacagcaattagtccccctcaccctaaactcacacacacactctccacaatgtcttttttttaaaaaagagggaaagggagaaagaaagagagaaacagggtctc

SEQ ID NO: 5666 - DNA, 120 bp, Homo sapiens
attcgaacactttttgaacaaagggcctcgcgtttccatgctgcactggagcccagaaattaagtagccaaatgtgaccggtggtgacagaaaaggaaaaggaggcattcctgatccatg

SEQ ID NO: 5667 - DNA, 120 bp, Homo sapiens
gtgcgtttactgtgcacttttatgccacatacttgatgccatgcaaaaaatacctgccaatgatgggttccaactcattctgtcactgggcaccttgcaattcaaggtgacctgcttctt

SEQ ID NO: 5668 - DNA, 120 bp, Homo sapiens
gaacgttaatgatcagccgaggatggaaagtcacaaagctcagccctctcatattgagaagaaaaacaatgaaattctgagagagctcagaatttccctggaggcagggtgcccaaagct

SEQ ID NO: 5669 - DNA, 120 bp, Homo sapiens
tcacgctccagccccttatctgagctgactgtgcacttcaggtcccaggtgagagctggggggcaaagctttggggcactccccaggcatggtgcccagggatcattccatccacatggc

SEQ ID NO: 5670 - DNA, 120 bp, Homo sapiens
acacggtcccaggctgccaacagtccaacatggggctgatggcggctccatcccaccaacacaatttgctacttcaaagcctctgaggacttggacaccagcagaacccagcgtgcaagg

SEQ ID NO: 5671 - DNA, 120 bp, Homo sapiens
tgccgtgggcgcctcctctgagtgaggtaaacaggcttgggcatctgctttgatgataaatatataccttatttgggagtcttctatttgcttacttcctttgttctggccaaattccag

SEQ ID NO: 5672 - DNA, 120 bp, Homo sapiens
ttacggataatgtgggaacagggtggtggtggacattgcctgtcaagcgcttttcatgcctgtttcacatcccctggctgacaccacatgatctagcccttgatgacatatgtcttcctc

SEQ ID NO: 5673 - DNA, 120 bp, Homo sapiens
ttacgttactctctgcccaccccaggggaagggatgtgatctatatttccccacgagggcttgagaaagccaagtgcatctgacatccttgcacagctgaggtctcctgtgcccatatgg

SEQ ID NO: 5674 - DNA, 120 bp, Homo sapiens
gcacgagccaagggcagcaactccacatcactgggaaatccctccagggcccctcacccatgcagagccccagagtgcaacagggtcggacagaaaggcatcctaactgagaactgggtg

SEQ ID NO: 5675 - DNA, 120 bp, Homo sapiens
actcgtgacccaaacccagcccagacctgcgtgtcctggatacggcccagccacagcgtgaaggggtcacagctagacttcctcatcgtcccccagccctccctccacagggtatatgga

SEQ ID NO: 5676 - DNA, 120 bp, Homo sapiens
tcccgaggggtttcaagggcctccctggctgtcttccacgcgcccttctcttcccctccagaaatccaggggaacatccaaaaaggaaacacgccttgagatgtcggtcttcattttcca

SEQ ID NO: 5677 - DNA, 120 bp, Homo sapiens
aggcgctccagttttagcctgggaatggctggaaacgccctgggggacacagctgcctggcaaggtttcctagcagacagagcaatgcggcagtatcagaaatggttcggaaaatccgca

SEQ ID NO: 5678 - DNA, 120 bp, Homo sapiens
acccggccacctcagcaggcatgcaattgtgtttccagcttagctgacaaagagctctcagaactccttcttataaatgcacatttaagaatccactagaggccgggcgcaggggctcac

SEQ ID NO: 5679 - DNA, 120 bp, Homo sapiens
atccggtctatccatacaacggagcattattcagccatggaaaagaataaagcactgatacgggctgcatcgtggatgaaccttggaaacagtacactgagtgagagaagtcaggtgtga

SEQ ID NO: 5680 - DNA, 120 bp, Homo sapiens
acacgttgggaaggcaggtggtgctcggcaaggggcttccggaacccacagtgctgggacagcattctgagtacactcccagcatgttctcacccagaaaatggacgaatgctcttagtg

SEQ ID NO: 5681 - DNA, 120 bp, Homo sapiens
cagcgtagagactggggccactgccaggaatcagcaggctgaatccagggggccagcctctccaggagtctccacctgtgcccagcagcactaggcgacatccagctggttcttcactca

SEQ ID NO: 5682 - DNA, 120 bp, Homo sapiens
gaccgttgccagctgatgggctcacacacatccatgacttccctggctcctgctctccgctgctcctcacacctgactccctcccatctcagagccctgcaaatgcgctctgcccaccct

SEQ ID NO: 5683 - DNA, 120 bp, Homo sapiens
ccacggaaggtgccggaagaccctgccccccacccagcagggtcctgagtgggcccagctgggcgctccagctcccctggccaggtgtggggctcggccctcagggagtgcaccacgctg

SEQ ID NO: 5684 - DNA, 120 bp, Homo sapiens
caccgccctcaccacaggaagccctggaacagtgtcccaggacagtggggacctcccgggtggggccgcctctgacaccctgatgttcctctctgggagcctgtggggcccccatcctct

SEQ ID NO: 5685 - DNA, 120 bp, Homo sapiens
ccccggactgtcggagcaccgccaggccacccaggatgaccactgcacttttggggaagctgaggcctatggagatggggctaaaccctggtaaccccccaaccctgctctgcacagcgg

SEQ ID NO: 5686 - DNA, 120 bp, Homo sapiens
gcccgaagtggcccaggaggggctgcacccagcacggcctctcctcactgtggcccaggcagaggggacaggcagctcctgctgtcattttgggtccagcaggaaggtcccctaccaccc

SEQ ID NO: 5687 - DNA, 120 bp, Homo sapiens
catcgaagctgcttggcctctcagctctaagccacagcagccgctgggagaactgtcagcccctcccgggagcaggactgggagtgggagcctggagctcccagggccaccccttcctcc

SEQ ID NO: 5688 - DNA, 120 bp, Homo sapiens
ggccggcgggccacgcctccctctcccagccatccagtgttaacaccgcctcgccttagcaagcggcaagacataaatattggaacctgggttcctccgccctacggagatggtgacgcc

SEQ ID NO: 5689 - DNA, 120 bp, Homo sapiens
cgccggatgcgcgaggcagttgcctggcaaccctgctgccggcacccacgcaggcccagccctgcctccactcagcacctcctgctcggggctccagctggccaggctctgaggggactg

SEQ ID NO: 5690 - DNA, 120 bp, Homo sapiens
cttcggcccataggccccaatggtggagcagaagggggccctggccgaatccctctggacgggtggggtgtctgccagccgactctcctatccacagcggcctgttgccccagggcacct

SEQ ID NO: 5691 - DNA, 120 bp, Homo sapiens
ctccggcctctttgccatcctcggatgaggaactgaggcacagaggctgggccagcccgtggccaggtggcgggttggccccatcaggggcaggaccggctgatttgagaagtggaaacc

SEQ ID NO: 5692 - DNA, 120 bp, Homo sapiens
gggcgatcagggagggccctcctgaggaaggggcacttaagctgagatcgggaagatgaagtagaagagttccagctgcagggagccacataggcaaaggcctggcggtgggaaaggctt

SEQ ID NO: 5693 - DNA, 120 bp, Homo sapiens
gggcgcagggaagaaagcccagcgaggctgagtggagggagtgagggcctggccacctcagcctcgtgagcccaacccgccatgctcttccagaggcttctgcttgagaatgggaaagaa

SEQ ID NO: 5694 - DNA, 120 bp, Homo sapiens
ccccgttcccaggaggaggtcccagctcgccctgccccctcctgtcttctcaagtcccctgggccacagaagccttgagggacccaccctcaccccttctgtgggccccagggctggggt

SEQ ID NO: 5695 - DNA, 120 bp, Homo sapiens
tctcgccgatggccttcttggggtggatgagtggagattactccaataactggagcctctgtcttcccaggtagacaggcctggcctcaaaaccctctctccatcaggagcaggctgtgg

SEQ ID NO: 5696 - DNA, 120 bp, Homo sapiens
ttccggagtcatcttaataaaatgtgttgggctgtttatacagggcaggcatttggtgggggccaaaccaccgggtaattatgctaaaaataactatgattataggtggcagaggggtgc

SEQ ID NO: 5697 - DNA, 120 bp, Homo sapiens
tcccgcagaggaatgagagcttcgtcagggccgggaccttgtctggctcgtggctgctcccacgacgactggcgtggcaggcacgtggtcagtgttccgccatcgactgactgggcggat

SEQ ID NO: 5698 - DNA, 120 bp, Homo sapiens
gaccggagggtgatgttgcccgtccccgtgtgatgagtgatccgaggcagacctgggcgaggggaggctcccagtgagacatcagtgacattgcagcagaggctgaggggccctcgggct

SEQ ID NO: 5699 - DNA, 120 bp, Homo sapiens
attcgcgaacgactgatgcccagcttcctcccgaagcaaggtcattcacctcagcggtcgcgcctctcccctgcccctgccccggattccccgccgctctcagctctcgaggagtatgca

SEQ ID NO: 5700 - DNA, 120 bp, Homo sapiens
ttccgtgcagcgtgcctcagtttcctccgctgtaagcaggcgggaccaaggcagcctgccggggtcaggatgaggctggcagaggaagggcgcctgtagtggggccccgtacccacgggc

SEQ ID NO: 5701 - DNA, 120 bp, Homo sapiens
aggcggtccttggcctggatccctgggcacagcacaaggcaggagttcattcacatatgtatgggccactgtcctgtcactgctgcctccacagtgctcaggactggcctgctctgaagc

SEQ ID NO: 5702 - DNA, 120 bp, Homo sapiens
caccgctgggtaggcactgatcactgaacaacgcaggccatcggggtccctaatctggggtaacggaggattcctcaagatgacctctcagctgggtctgggaagacgagctgcctggca

SEQ ID NO: 5703 - DNA, 120 bp, Homo sapiens
aagcgtcgcaaggactcagtcaggtaatatgtatatcaaaaactctcccaacatagtaactcctcagatttgattctaattattacttacagtgcatataacaggtgacacagagacact

SEQ ID NO: 5704 - DNA, 120 bp, Homo sapiens
gcacgtatttctagtggaatctgtccatttttctctctttatttttccaactgcttccactttggaaagtttccatctcccagaggaatcagcaaatcctattttttgttttgatttttt

SEQ ID NO: 5705 - DNA, 120 bp, Homo sapiens
aagcgcacatacagtacccatggaatcacaataccagaatgtggatatctattggtctttccttttaatttcacaaatgagataaaccagggctggtggagagatctgcttgggatccca

SEQ ID NO: 5706 - DNA, 120 bp, Homo sapiens
ccacggggccatcctggcaaccaggtcagtgctctccccacagaactgcactcagccacctacgaatctagtcagggctaaacatcaacatcatggaaggaacactcagaattcatgagg

SEQ ID NO: 5707 - DNA, 120 bp, Homo sapiens
aagcgctgcagaagaggcctgcttaccttgccacagtgaatgtgtccatgggcaggttccgagctagctggatgaagatgtgattgagggatggacagaagccgcaccacggagcgtaat

SEQ ID NO: 5708 - DNA, 120 bp, Homo sapiens
tcacggtccataattgggccatcacgtggttactcttctatacatcaaaaacagctgctcaccccaacaactgtagtttggaaattattttaagagggacagatggcttaacttttgcct

SEQ ID NO: 5709 - DNA, 120 bp, Homo sapiens
gagcggatgcaagcaggaacagtcagggggtgagaagagccgagagctgtgagcgtgtacggggaacctgacctccccaggactgtttcggccggggaccacagccggccccaggaacct

SEQ ID NO: 5710 - DNA, 120 bp, Homo sapiens
ttgcgatatgggatcccagactggatcctgaaacaaaaacagacactagtggaaacatggagacaattcaaatgaggtctgcagtttagtgaataggaccgaaccaatgttaacttcttt

SEQ ID NO: 5711 - DNA, 120 bp, Homo sapiens
agccggggaccacagtcggccccaggaacctccccaggactgtctcagccggggaccacagtcggccccaggagacagcagagtgctcagctcatgaaggaggcaccagccgccatgcct

SEQ ID NO: 5712 - DNA, 120 bp, Homo sapiens
aaccgacagttataggtcctgcgggtgggcagtgctgggtgttctggtctgccccacccctgtgtgcctagatccccatctgggcctcaagtgggtgggattccaaaggaagagccggag

SEQ ID NO: 5713 - DNA, 120 bp, Homo sapiens
gaccgtgtttaccaatcttaccatgcaatacagttcaaaagatttctgtgtgtttccaaaaataaacccacttttttccctactgagtacatggaatagtaagctctcaatttggaagga

SEQ ID NO: 5714 - DNA, 120 bp, Homo sapiens
ctacgtgatggtaaacaaactgcttcaccccttatgcctgcagtcctgcttcagaaaaacagggctgacagcatcgccttgcaaagtggttgagaattggcatggggcctggcacaccag

SEQ ID NO: 5715 - DNA, 120 bp, Homo sapiens
caacgtgaactttgttctctaaatttggaaggctccacagtttctaagaaaaaccaaatgacagttccaaatgaacttctggaactcagctgcctacacacgttacttcacatcagtggt

SEQ ID NO: 5716 - DNA, 120 bp, Homo sapiens
atacgtagggcaggggtgttggtagatgtcctgctacactcaaacctgctttgcacacggaagagtcgtccatagcattccagaggagttcaaaacgcctgccaaacactgatgttgggg

SEQ ID NO: 5717 - DNA, 120 bp, Homo sapiens
ctacgtttgtaactatcccattcagtgattctacataaaggtatatggacctgttctgactgtgcacttacatactaaaatatatatcatttagttacaaattactttcttcccccctca

SEQ ID NO: 5718 - DNA, 120 bp, Homo sapiens
aggcgtggggaggggcaggcccaggctggacaaagagtctggccagggagcggcacattgccctcccagagacagtggctcagtgtccaggccttccccaggcgcacagtgggctcttgt

SEQ ID NO: 5719 - DNA, 120 bp, Homo sapiens
cctcggggggatccaaacagtgtctcccccaccccgctgacccctcagtgtatggggaaaccgtggcccacggaaggcctcactgcctggggtcacacagcatctgagtcactgcagcag

SEQ ID NO: 5720 - DNA, 120 bp, Homo sapiens
ctgcgggcaggactctcgatgaggctgagggacgaggagggtcaagggagccactggcgccatgcatgctgacgtcccctctggctgcctgcagagcctggtgtggaagggctgagtggg

SEQ ID NO: 5721 - DNA, 120 bp, Homo sapiens
ggccgcgtgcacaggtgcagggagagccagaaagcaggagccgatgcagggaggccactggggacagcccaggctgatgcttgggccccatgtgtctccaccacctacaaccctaagcaa

SEQ ID NO: 5722 - DNA, 120 bp, Homo sapiens
ggacgctggatgaagccttgcctccgtacggtgacctagcagacccccatccccaagccacgcagctcctgcctcccccagcttcacacatgaggctcccgtcacactgaccttttaaga

SEQ ID NO: 5723 - DNA, 120 bp, Homo sapiens
aagcgtgaagaaggagggtgcccagcaggaaatgactgcatgcaaacagagctggttatagtggggcttggcccccaaccctttggggaaacaaggtgggaagtgaatcaatatagtggg

SEQ ID NO: 5724 - DNA, 120 bp, Homo sapiens
cagcgacggaaaaaaacctgaaaccataagggattcctcaagatatacaatgacaagtttcactgatcccctcttctcctaaataaaaaagaattccagggaagaaggcactttgttttt

SEQ ID NO: 5725 - DNA, 120 bp, Homo sapiens
aggcgtgacctgtgtctggcccaaggagagatactttgaacagttcattttaaagcaagaaactcaattaaataagaatttcattaaattaactgaactcttacaaactggaatatcatc

SEQ ID NO: 5726 - DNA, 120 bp, Homo sapiens
atacgtattaagtcatttaatcctcctgctaaccttaagtgacaggtactataaagaaactgaaatacagataagtgacgcagctggcccaggattacacctaggaagtagcagagctca

SEQ ID NO: 5727 - DNA, 120 bp, Homo sapiens
ttacgtgccaaagacgcctggaggggagtgagcatctgtctagggtggccctgggctgggctctgaaagacaaatatggctctgatgaacaggtgggcactttaaagccattcaggagaa

SEQ ID NO: 5728 - DNA, 120 bp, Homo sapiens
acacgcatgcgtgtgcacttgtgtacacaaaaagatatgctcaacagacgtcatttaatgcaactcagacaaagcagagggctttcacaggaatgcagtaggccaggagtctggacatca

SEQ ID NO: 5729 - DNA, 120 bp, Homo sapiens
cagcggctgactccatcacagggtggtgtagcctgtgggtacttggcactctctgaggggcaggagctggggggtgaaaggaccctagagcatatgcaacaagagggcagccctggggac

SEQ ID NO: 5730 - DNA, 120 bp, Homo sapiens
tgtcgagtttgggaagagactagagagaagctctggccagtccaggcatagacagtggccacagccagtggagagctgcatcctcaggtgtgagcagcaaccacctctgtactcaggcct

SEQ ID NO: 5731 - DNA, 120 bp, Homo sapiens
tggcggcggagttgactgccaaccccggggccagaaccatcaagcctgggctctgctccgcccaaggaactgcctgctgccgaggtcagctggagcaaggggcctcaccccgggacacct

SEQ ID NO: 5732 - DNA, 120 bp, Homo sapiens
agacgtgtcctcagctcacatgagcctcatcccagggggatgtggctcctccagcatccccacccacacgctgctctctgaccctcagtcttctgtttgactcctaatctgaagctcaat

SEQ ID NO: 5733 - DNA, 120 bp, Homo sapiens
aatcgtgacacacgagaaatatgaaaggatttaggaaatattttctttttcctcttaaactaataaaactttggcatcaactttaatcacgctgagaacgtgaaacccttaagaataaag

SEQ ID NO: 5734 - DNA, 120 bp, Homo sapiens
ctccgtctcaaaaaaagaaaacagaacaggtacaggtatttaaattgacttgaccattcctccactcaattttatttgcaatcattaagtttatcaaggcagtgttagtgcctagtttgt

SEQ ID NO: 5735 - DNA, 120 bp, Homo sapiens
agccgccctagggcctgtagacacaggaatccctgaggacctgacctgtgagggtagtgcacaaaggggccagcacttggcaggaggggggggggcactgccccaaggctcagctagcaa

SEQ ID NO: 5736 - DNA, 120 bp, Homo sapiens
aggcgaaaacaccctccccaggctgcaggtgggagaggcccacatcccctgcacacgtctggccagaggacagatgggcagcccagtcaccagtcagagccctccagaggtgtccctgac

SEQ ID NO: 5737 - DNA, 120 bp, Homo sapiens
gcccgaggcaggcccctcgcgggggagggggaggccagaggagctggagtcaggggcgcaaagttttcagccggcgcctggtggttccgagtgcgtggggagacccgtggggcctgtgag

SEQ ID NO: 5738 - DNA, 120 bp, Homo sapiens
gagcgccgccagggccttttccgtggagagaggcggtgacgttggttgtgaactcgctttttctggctgaactcggtggcggggctgacttaagtcatgcgcagctgaagggtagggggc

SEQ ID NO: 5739 - DNA, 120 bp, Homo sapiens
tctcggccagagcggcacagactgcagagaaggttccagaacagagttgggtcagggccaggggcatttgtgggatgtacacggaggtccagggggccccccagcaggtggccttggggg

SEQ ID NO: 5740 - DNA, 120 bp, Homo sapiens
gggcgggtctccgcgtgccctgagaagggccttgcgtggtgcctgtgtcagggccgggtctccccaccggcccttctgagccggcagctggggtggccaggccgtggcttctgctccggg

SEQ ID NO: 5741 - DNA, 120 bp, Homo sapiens
ggacgggtggagagaccctgcccgcagacgtcccccgtcggaggtggggagacaggctggcagcaggagcggcctgtgtacacttccctaccttgtgtgtttaactgtacaaatattaaa

SEQ ID NO: 5742 - DNA, 120 bp, Homo sapiens
tcccgggggcagccggccccggccagagggctgcctcggagccccacacccgctgcccgggcggcctaggcctctgtagcctcagggtggtgtctgcgagtaggtgggtgtccccgggag

SEQ ID NO: 5743 - DNA, 120 bp, Homo sapiens
agccgaggtgcaggcccggccttgaagagcggttgtaggtttgtctcctctctagaaccaaggcgggaggtggtcatgcccctttgttctggtaggaggtgactgggtgtggggttagtc

SEQ ID NO: 5744 - DNA, 120 bp, Homo sapiens
cttcggtcctcagcagcctggctcagcttcctcaaaccagatcctgactgatcacactggtctgtctaacccctgggaggggtcctctgtatccatcttacagataaggaaactgaggct

SEQ ID NO: 5745 - DNA, 120 bp, Homo sapiens
gtccggcggtgccagcaggccatggggaagggtctggaagggactgcatgggttggaatgggaggctggccccgagccaaggcctgcgttccttgtttcccaacgtgtgcagaccggaga

SEQ ID NO: 5746 - DNA, 120 bp, Homo sapiens
ccccgggcctggctgccccatccccaagcagggcatggactctcttcacagccccgggcctggctgtcctgtcccctctcggctgagagagttttggagcctggccccggtgttctgggc

SEQ ID NO: 5747 - DNA, 120 bp, Homo sapiens
ttgcgttgctgtgtgcagggaaggtgttggctgggtggcctcatgcaggtgggatgagctctccagggggagaggagggctggggccagcggcatcacgtgacccaagcgctgtcccccg

SEQ ID NO: 5748 - DNA, 120 bp, Homo sapiens
ggacggctgtcagacccttctaagaccccttgccacctgctccatcaggggcatctcagttgaagaaggaaggactcacccccaaaatcgtccaactcagaaaaaaaggcagaagccaag

SEQ ID NO: 5749 - DNA, 120 bp, Homo sapiens
agccggtgtggcggaggccctcacagccaagagcaactgggggtgccctgggcagggactgtagctgggaagatcctaggggagggcctgatggtccctgaaaggcaggggagacctgga

SEQ ID NO: 5750 - DNA, 120 bp, Homo sapiens
ggacgactccccctaaaccaagagcgcaccctagaaagtcagctccccaaggtggggaccggccagctcatgaggggtgctggttgaggggcctgcttgtgcaacggaggccacccagcc

SEQ ID NO: 5751 - DNA, 120 bp, Homo sapiens
caccgctgggtcagagaagacttggcccaaccttcttaggcgcctcctcgttttcttaggaagtgaatgtgccttctctgggcccagatttaggaaattatgactggagcccactaatca

SEQ ID NO: 5752 - DNA, 120 bp, Homo sapiens
gggcggggacagtcactggcagcaggacggggccagtcagatgcagtactagctctagaaagttgagtaagcctgagtgcattactgctctgagcgtcagcattcctggctgttaaatga

SEQ ID NO: 5753 - DNA, 120 bp, Homo sapiens
aggcgccttgagttaatctggggaaggtgccaggcacatgccaaggcccctggtgagagcttcagggacatcttgtccatggcccaggagctggggcgttggcatggagggggctttcct

SEQ ID NO: 5754 - DNA, 120 bp, Homo sapiens
ctgcggtgtttatctcttcaccgctggtggatgtctgggccgtttcaccctttgctgctgttcatggcgctgccgggccgtccctgctccaggttcgggggaaaccctggcttcgtgtct

SEQ ID NO: 5755 - DNA, 120 bp, Homo sapiens
ggacgtaaatctgggagcaaaattgctgggtcaggcggaaacagtgttgagtcctcggaggaatggccaggctgttttccaaagcggtgcccacctgttgacccacctctcgcccccagc

SEQ ID NO: 5756 - DNA, 120 bp, Homo sapiens
agccggagtccagggctgtgggagtggacacggcccttcctttcctcgccgaccctttggggcgtctcccatcgggaaatggcagcccctgacctgccccgtggggatgaaacgggctct

SEQ ID NO: 5757 - DNA, 120 bp, Homo sapiens
ttgcggggggcctgtggggtatgggcctcctgtcagcagcccgtcccggtgggtggggcttgccggccgcccgcgaatgtcaggaaccttggattcctgacacacgggtgcgggggcgat

SEQ ID NO: 5758 - DNA, 120 bp, Homo sapiens
tatcggcgcggagcgggcggggtggcgcccgggccgcgggtgggagaatctggcgtgtgtgtttgcacggcatccatccctccatccgtcctctggagaatttcaacacccacacttgga

SEQ ID NO: 5759 - DNA, 120 bp, Homo sapiens
gtgcggttgccatgggaacctgttgctaatgaatctctggggtttcctgttacctttgccaagtcgaggaaggctggagccacactcctcaccgcggcggtgccactaatggggttgccg

SEQ ID NO: 5760 - DNA, 120 bp, Homo sapiens
caacgcctgtcactaatccccagctgctcctggttgaccggcccggcctgtgttacataaagcggtttggcccatgcaagccggctcctggctagggaccccgagacccctcctttgctt

SEQ ID NO: 5761 - DNA, 120 bp, Homo sapiens
acacgggaaacgggacacctggagctgtggcgctggtgtgtgcttagaaagtgcacctgcgaggttggggcgtggcctggccgtccgtccgcggggcccgggctgcccatggcagcaggt

SEQ ID NO: 5762 - DNA, 120 bp, Homo sapiens
actcgccccaccagtgcgtggagcacgtggggcctcaggagccaggcctgttccccggggctgcctggaggcggccgcttgtccccaaggcctggtgaccgcacctctgtctgccctagg

SEQ ID NO: 5763 - DNA, 120 bp, Homo sapiens
cttcgagttgggggacattttgtaaggagccgctgtgcctaggccagagatgttttcggaaggggtgcctgtaccccgagaggtggaccagaattcccctggggcacggtggcgggagac

SEQ ID NO: 5764 - DNA, 120 bp, Homo sapiens
gggcggcctctggtgcccccgccccctccagttggggcggttgatgtgggatccccccccccaagtgacagtttctgcccagctcaccccgatgagcccaccatgtccagtctgtttgga

SEQ ID NO: 5765 - DNA, 120 bp, Homo sapiens
ggacgctggccatccagcaacccccatctcctccctcctagggcctgaggcctgcagttcccaaagcaggaaggtctgaagctggtagagtccatgcagtccgaccacccaccccggggc

SEQ ID NO: 5766 - DNA, 120 bp, Homo sapiens
gatcgccacactgctactcttggtttatatactgatgaacaagaagcaaaggtcctgccctcagaagctgtcagaactgtggggaagacaagcagcaagcattagaaaggcaaagcctat

SEQ ID NO: 5767 - DNA, 120 bp, Homo sapiens
cagcggggctgaggtctcaggatggggggtttggcctgttttggtggcgggtggtaccgctggcattgcgctgccagaagtgagggggagagtgagttggaggatgctggagagggtggc

SEQ ID NO: 5768 - DNA, 120 bp, Homo sapiens
gctcgtgtagattttatcccacgtacaatgggaagccagtggaggacttgaagcaggggcgataggatttactcacttcctcttgcgaagagcaggctctgaagcctgcttgccacgcag

SEQ ID NO: 5769 - DNA, 120 bp, Homo sapiens
gtgcgttccttccgtccttcactgctccttccctccgccctcccttgtacaggcagtgctgagggctcccctgtgtctcggggtagggagtcctgagttgacttagcggccatactctca

SEQ ID NO: 5770 - DNA, 120 bp, Homo sapiens
gggcgtggttctaggatggggccaacgatgtggggaggctcctgggcaggcggggaggctgctggacttgtgattgtggctcctgcttgggctgctctgggggaccctccagcttccctg

SEQ ID NO: 5771 - DNA, 120 bp, Homo sapiens
gcacggtgccctaacacccgtgagtcatagagctgtgctaggtgcagcaggagagacgcgtcccagcggggagttctggagccaggatgcggggtggggcggtgcgcgggccggtatcag

SEQ ID NO: 5772 - DNA, 120 bp, Homo sapiens
caccggcgtctcaggggtgttctgaggtccaaacgtactagcttagtaaggcattagacttgagtgtggaaccgggcatcctttgtgattggagccttctcagctacctggaagctttta

SEQ ID NO: 5773 - DNA, 120 bp, Homo sapiens
ttacggtggggagcggcggggctctagttcttccgggttaggactttgcgcaggaatgcagaggcagtgggagggaatgggggtaaatgttccgtgccgcctcacgcggttattgatggt

SEQ ID NO: 5774 - DNA, 120 bp, Homo sapiens
aggcgccatcagtgaaccaagaagaggaccctcaccagatcccgaatctgtcggtgccttgatcttggacttccagctgccagaactgtgagaaaatcagtccctgtcgttcacagtgca

SEQ ID NO: 5775 - DNA, 120 bp, Homo sapiens
caccgggtccatggtgttttgttttcgcagccctactcggcggaggtgctcctgcaagaggccctctttccctggccgtccatctagaagagcgcagcacaggcaatctcatcccatccc

SEQ ID NO: 5776 - DNA, 120 bp, Homo sapiens
aaccgagttcccagagggcgggctccagtctgttataatcaccattgtgtctctatctcgggatgcagtaaaggcctggtaatatgagttgctcaagggagtggattttcaccttttttc

SEQ ID NO: 5777 - DNA, 120 bp, Homo sapiens
ggtcgcttgacctctctgtgcctcagtttcgcaagctatgaagtggaggaggcttccctcaaggattctttgtggtgctgaccatctgttctgggaaaggagccagaatatccacattct

SEQ ID NO: 5778 - DNA, 120 bp, Homo sapiens
ttgcggtgattaaagaaccactctgctgaagtttctcatgacttgcctgacctcgttagtttctttgataccaaagacaggtgtcttcctttcccccttgcctactgtctcctttacaca

SEQ ID NO: 5779 - DNA, 120 bp, Homo sapiens
acccgaggccaggtgttggccgatgtgggaagagggctggaaagaggcagaatggtatttgtgtgagtgccagacccctgtggactgttttgctgagatgctgtcttatggagtttgtag

SEQ ID NO: 5780 - DNA, 120 bp, Homo sapiens
tgccggaggaggatggaatggagaatatttcccctgtattccacatgttaagagatcacctctgcactggattcattggagcacctggaaggaggcctgatggaaaccacgctgcctggg

SEQ ID NO: 5781 - DNA, 120 bp, Homo sapiens
cagcgtggtggactctgagtctcaggagatccacatgattcccattgtgtttgtccagttatgctctgagtgtctcttgttgctccgcatttctgggccttgcttgccttgactccaaga

SEQ ID NO: 5782 - DNA, 120 bp, Homo sapiens
gcacggcatctttcattttgcagatgcctaatctcttttccccattgaatcacctccataatttgggaggttgtcaggaggtgccgtcatgcccatttcagaggtggggaaactgagcct

SEQ ID NO: 5783 - DNA, 120 bp, Homo sapiens
agtcgccgagccgggctggaacctggcccctcctgactacatggctcctgtgttctgtctaaggatgttctggttatttctcaaagtgtcaggtgcagagtaggatggtgcagagttggt

SEQ ID NO: 5784 - DNA, 120 bp, Homo sapiens
ctccgggtgtgagatctgcctgcaccctctcagtggctggctgcatctaattaattgcagattatgtgtgagagtctgtttgagaattgcccgtgcatatgataccacagcctgaagggg

SEQ ID NO: 5785 - DNA, 120 bp, Homo sapiens
ctccgcatcctcattatttatgagtatttcgcatgcaattaatcttccttgccaccagttaaccccaccactccactgtgcatgaggccagtgacaacagatgttggcctcgcagcccca

SEQ ID NO: 5786 - DNA, 120 bp, Homo sapiens
agacgggtcggggtcatatctctgctggttgcatttggccggcgagcggccagcggacaggaacagatgacgaggacagctaatgtgccacattcacttgcaggagccagaaactggtag

SEQ ID NO: 5787 - DNA, 120 bp, Homo sapiens
ctccgcattttgtagatgtaacatctgagacccaaagtgggtttgaaatgccatgccagttagaggctgggcccacagtccttgtctgttacttgccgtgacatcacatgtctttgctta

SEQ ID NO: 5788 - DNA, 120 bp, Homo sapiens
ccacgttgcctcccgtgccaactcagtgtaggttccacatagcatatgagctgtgactcatttggttacaagggacagaaaccagctcaagccagcttaagtaaaataagggaataatat

SEQ ID NO: 5789 - DNA, 120 bp, Homo sapiens
tatcgttcccctaactccagcatccagaggtacagctgcaagtaggcgtccctggatcccagggttggatggttttcaggtctacccctgaagggctctgttaggaggagagaggtgcag

SEQ ID NO: 5790 - DNA, 120 bp, Homo sapiens
acacgtccatgacctgtggccatgctggctttgccccaatcctgttgaggctctgtctctaaaatgacatgatggtcttgagaatgttgatttgtgcagaaccaacatgaagccctggcc

SEQ ID NO: 5791 - DNA, 120 bp, Homo sapiens
attcgggagacagtgagtatcactgtggttatgggttccagtgtcagatggcccgtgtttcagtcccggttctgtatcgtcattcctttttttttttttaattttgtttttgttcttctt

SEQ ID NO: 5792 - DNA, 120 bp, Homo sapiens
agacgcctctcacccctcccttggtgtcactgtttcattgctttatatagcagcctccgaggccgtaatcatttgtgtgaatgggcctgtgcgtcatctggctgtgtgtctgtgtttatg

SEQ ID NO: 5793 - DNA, 120 bp, Homo sapiens
tgccgagaaaggaggggaacggttttgtaggctcgtcctgtttgaggtcatggtaatgatgtatgggaccgtgtcccctcctccccatgcctgtcgcattcccgagatgcataatggaaa

SEQ ID NO: 5794 - DNA, 120 bp, Homo sapiens
caacgggagcctgaatctctgtcactggggcaagaaattacagctgtgaacctgctggttagtgttctgtgccgaggccttgaacttatgattaacgtggttgacgtttctgtccagctc

SEQ ID NO: 5795 - DNA, 120 bp, Homo sapiens
tgccgtgtgacctcaggcaactttgagcctgtttccttatttgtgaaatgcggatatggggattgagtgaaatgggggaacccttagctcagtgcttgtctgtttaagtattgacttctg

SEQ ID NO: 5796 - DNA, 120 bp, Homo sapiens
gaacgaggatctttgcctgtggcgtggaatcatttctccaatcatggagaatgggcggagaatgagatttgtaacacacctgcctgttagttttagatgagcccttctggaattaatatg

SEQ ID NO: 5797 - DNA, 120 bp, Homo sapiens
acccgtctaacaaagggtttctttggctcccagcaaggctggcacccctgcagatgtatgacgatacccagccaagttgatctctctgcctaatccctagttccagggatagcctgtgga

SEQ ID NO: 5798 - DNA, 120 bp, Homo sapiens
agacgatggctcagcacactgtatgttgggctgcttctcaagaactaattcccagtaactagcaatcccagtattgagtagatgcaagatgattttgagaactctcgctgttctgtttct

SEQ ID NO: 5799 - DNA, 120 bp, Homo sapiens
cttcggatatcttggaccaggcgtttctccctaaagcttttgctgaagtttcaccaaaggattttatgagactgtaggttccatggaccacatctgcatagagacatggctgtgtatttc

SEQ ID NO: 5800 - DNA, 120 bp, Homo sapiens
tcccgtgcttttgcagacattactaatcaatcactgcactctttgtagccctagaatcttagaatccagtgcatctaggcagccacttccagtcataggcaccaattttctttactgaaa

SEQ ID NO: 5801 - DNA, 120 bp, Homo sapiens
ccccgcccgcccgccggtccggcccgcccgggaatgccctggagcgaggggcgtgcgcccgggggcgggcccggccggagcggggcggtcgcgctgactcagagctcaggaatgcgcgcc

SEQ ID NO: 5802 - DNA, 120 bp, Homo sapiens
cgccgcccgcctgcccggcccaagtcacctcctcccggaaggccgccgggctcccttctccccagggtccgcctgcggggacacctggggctggggtctccagcgcctcggcccgacgga

SEQ ID NO: 5803 - DNA, 120 bp, Homo sapiens
gagcggaccgcagtgtcagcgctgggcggctccgcctctccctggctccagattgaggcttgagctgtcctgccctgatttgtgctgagaagagggtgaggagggagagcaggcacgggg

SEQ ID NO: 5804 - DNA, 120 bp, Homo sapiens
gggcggaggatgggtgtgtatccctggctcccctaaacccgacctcctccagaggcccacgctgacaagtcctgtatcccacactcacccaatcccactaagcactcacattccctcaca

SEQ ID NO: 5805 - DNA, 120 bp, Homo sapiens
gtgcgtccgcattgcagaacacggggcgttgcaggccggagctgggttttcacacagattgagaccaggcgtcgcccacagagcataatgtgaggcgagagggactcgggctgctgtggg

SEQ ID NO: 5806 - DNA, 120 bp, Homo sapiens
ggacggtcccatagctgggggcagagcagggcaggctgggtgaggagggggcaccccaggtgtctgaaccccaggtctgtggaggcccgaggtctgaagggaaatccccagtggtgggac

SEQ ID NO: 5807 - DNA, 120 bp, Homo sapiens
tgccgtggagggtgggcctgtgtcctggtgtccctggcgtccccataccccctccgaggcacagccacagtctctgggtcctgagcaggggctgcagtcacagccaggccgtgggggggc

SEQ ID NO: 5808 - DNA, 120 bp, Homo sapiens
tgtcgggtggggagtggcccacctggccttggctttcccggggcaggtagggaggggcctgggcagggcggggcagggagggatgaggtgcagactggggagagtgcagggtgtgcagcg

SEQ ID NO: 5809 - DNA, 120 bp, Homo sapiens
tgccgccgaataggggcctgtggctcccacagggaggccccttaggtgaagaggaccagagtgaggtcagccctggtccacagccaccccgccctggactccccgggccagcacccgacc

SEQ ID NO: 5810 - DNA, 120 bp, Homo sapiens
ggccgccagcgtgctgaggacagacctgctgggccgcgttggcaggggctcaccccgtcttcccgcaggaaagcgccttggcgggactgcttccgccagcttcccggccagacccaaggg

SEQ ID NO: 5811 - DNA, 120 bp, Homo sapiens
caccgatcactcacaatcatacacacacgtccccacatccttccacttcatgcgttcattcgcctgcacatgcacgtgctcacatgcacccacctactcatgtacatctttcatgggtac

SEQ ID NO: 5812 - DNA, 120 bp, Homo sapiens
ccacgttcccatggagggagcgcctggtcccctggggtggtctctaatttgggccacggcagctgtgcagtggcgctcaggcagttatttctggcctggagaattccagctcggagcagg

SEQ ID NO: 5813 - DNA, 120 bp, Homo sapiens
gcccgtcccaggggcaggcggccgtcttccccaaggtcccctcctggctgggtttctgctgcccacgcctttcccttccaagcctgggggcccgcagcaccctcatatggggaccaagat

SEQ ID NO: 5814 - DNA, 120 bp, Homo sapiens
acccggcatggccggcccctccacctcccactccactgccaggacaaagccagcctgaccaggtggccctgaccggggacagctgccgagcccccggcaacggtgggagctgagccagcg

SEQ ID NO: 5815 - DNA, 120 bp, Homo sapiens
tgacgcccgcgtcggccaggagagtctgggggtctgctccagttccggcagaacatcctgggtggtcgtgcccccgaggtccttgccggtgtggctgcacgctgccaccaagtggctggc

SEQ ID NO: 5816 - DNA, 120 bp, Homo sapiens
tcccgcaggcacggagaggagggctgggatcaggcacttttccactcaattatgccttgaaaagttcccaaatcaagctctttattagagataaataggtatattaggtctctttctaat

SEQ ID NO: 5817 - DNA, 120 bp, Homo sapiens
gtgcgcagttagagggagctgtccgcgtgtgctccagctccgtggtggtgctgcgagccaacctctcctttcattcctggaggtgggggacccgccctcatctcaggcctgaagagggct

SEQ ID NO: 5818 - DNA, 120 bp, Homo sapiens
gcccggcccatgcacacagctacacacacatcacacacccacacccggacacgcgcctcaggtccccacactgcccttacacacatgcgcccctcacacatgcatgtcccctttgcacac

SEQ ID NO: 5819 - DNA, 120 bp, Homo sapiens
acacgccccctcgcacacgcatgccccctcgcacacgcatgcacacaggctcactctgctgcctgtccctggctgctgtgtgcttccggccctccctgtctccccacacagatggacaca

SEQ ID NO: 5820 - DNA, 120 bp, Homo sapiens
caacgctccccagggtgagaagtggccgcccaggtgagcctggtgtttccccgggctgtggcaggggcaggagcagggtccgtgcctgagacagcgcaggtgatgtgattgttttggccc

SEQ ID NO: 5821 - DNA, 120 bp, Homo sapiens
acacgtgcacacacacacgtgtacacaccgatgcacacactcagttcaggaccacagtcattacccctccccctgccctgtgcccctacccccagaagccccgctccaccagcaggcact

SEQ ID NO: 5822 - DNA, 120 bp, Homo sapiens
ctccggtgggtggcaggtgggaggctctgcggggtggaggaggcgggcctcagcccacctgggtgcagcctggcggacatagaggcggaggccagggccgctctctgtggggccagagtc

SEQ ID NO: 5823 - DNA, 120 bp, Homo sapiens
tcccgaggccattgctcagggaggagctctgttgagatggaatgttccggcagccgggagtgagccgtccactcatgcatcagtgatttcaatcccccaggtggtggcctgtggtgggtg

SEQ ID NO: 5824 - DNA, 120 bp, Homo sapiens
ccccgcacccctgcgctgggggcggtgctctcccacgggcagcccagcccccgtgccctcctgtgacccgcggcgccggctggagacaaacactccatgtttggctgctgcccgggctcc

SEQ ID NO: 5825 - DNA, 120 bp, Homo sapiens
gcccgtgtgagtcacgcaagtccaggcggctggctccggccacgttcccctggccaggcccctggggagaggggctcccacatcgggggcctggctggggtgaaagctctgggcaggctg

SEQ ID NO: 5826 - DNA, 120 bp, Homo sapiens
gctcgcagccccccgacgaggctgtcagtcactgtggcggggacccccaccctggccctcctctgacgttgcccagaccctctgttccctgcctgggatggggtgcaggtgacctctctg

SEQ ID NO: 5827 - DNA, 120 bp, Homo sapiens
caccggccccacccgaagccactcagcagaggcagcgcagtgtctggtgtccactctgggctcttctcactgtctcagagctcagcggccaccccggggtgggctcatatccctgcacaa

SEQ ID NO: 5828 - DNA, 120 bp, Homo sapiens
tggcggctacctctcatctcctctgggtcctctgagcccctgccccacttctttagcaactggcttcttgacctttcaggaattcagttttcctgtctctaagatgggggaacacacatg

SEQ ID NO: 5829 - DNA, 120 bp, Homo sapiens
gttcgtaggaagtgcttgctgaaatcatcatcatcacccaataataatcacattatttaggctttgcctccctgaacgtgtgtgcatttcccggttccatcagtgccctttctcgctcct

SEQ ID NO: 5830 - DNA, 120 bp, Homo sapiens
ccccgttgcggtgccgaggtgcctggtgcctgttccgcttccctggctcacacccctaagaggcagccgccattggaggggctctgggcacccagccatggggagcctttggtgggccgc

SEQ ID NO: 5831 - DNA, 120 bp, Homo sapiens
gcacggtgcccacagtgagggagcagctggctcttccagctgtctaattgctcatcagacccactttagcaccagcttaacaaattccactccttcatcgcaagccatctttttttgtga

SEQ ID NO: 5832 - DNA, 120 bp, Homo sapiens
ttgcgttgggtttgagaaatttccagacccagatagagaagctattggtatttaggtctttgggtcatttttgtgggtctagcggttctagaggcatgttcaagggttcattcacgagct

SEQ ID NO: 5833 - DNA, 120 bp, Homo sapiens
tggcgagacagtcattcgggccattacctgttggtgaccatgcattcgccttgatgtagatctttcattcattcatagcacctttcaatactgtgtttattgagtgcctgtcatgggcca

SEQ ID NO: 5834 - DNA, 120 bp, Homo sapiens
ttccgctggggctgctggtgagagtttcccagcatttctctcctgacactgggtgggctgaccctcccagggtgggggacaggggtgccaacagcagagtacgggcagggctgtccagga

SEQ ID NO: 5835 - DNA, 120 bp, Homo sapiens
cttcgtcccatgggtccctaaggacccctctacagggtgcccccccatgcctcggacaaatgtgtcttcaggccctgtgctggtcacaaggtgctgctgcttcagtgccatcctctgggt

SEQ ID NO: 5836 - DNA, 120 bp, Homo sapiens
gcccgacgcagacaatggcctgctccttggctagacagaaaaggggagaatttgaactaaaggtgctggtacacttaccggtagatcccagagcctgggcaagattcccctgcccatatc

SEQ ID NO: 5837 - DNA, 120 bp, Homo sapiens
ccacgggatagggcggtgcctgcacataatgggtgctctctgaacacaagcaatatcaacacaattctcatgtagaaggagacaatggaagctttggagggggtggagggtaactccacc

SEQ ID NO: 5838 - DNA, 120 bp, Homo sapiens
tcacggacaccgggtgagagggagcctgccccagtgccaacactcagtgctccgatagcctgcacgtgccacccctcccatgccaggctcacagccagagacaggacagtctccatgctt

SEQ ID NO: 5839 - DNA, 120 bp, Homo sapiens
tatcgggcctggatgcccagactaggctggcagggccagaagtggtgtcctctctggaaagctggggactgggcttgcctccaaagcatgccacagctgggcatctggtgtcagcaggtc

SEQ ID NO: 5840 - DNA, 120 bp, Homo sapiens
gcgggtctcagccctcagtcctggagtccaggggtggctggaaattgcctgctttggtagtggaatgtgtgtgtgctggttgggagccggcccaacttgaaggagagtgtggagagagga

SEQ ID NO: 5841 - DNA, 120 bp, Homo sapiens
aggcggtccgaggcacccacaggacaagcagtcccaccaccccccattgggtagatgggtaaactgaggcctgggatgccctgtgcccagggagaggcagtgccacctacaagacccctg

SEQ ID NO: 5842 - DNA, 120 bp, Homo sapiens
tgccgtgggggctcaggtcagggagcaccgttccccacacctgcctgctgtgtcctgtttgggccgggtgtctttgagctcctccccgccagcctgttccgtttacccaagaaaacccct

SEQ ID NO: 5843 - DNA, 120 bp, Homo sapiens
cctcgggaaatgatggccctcagagatgcacaaagacagtccccagccacccccgcagaaaggtgctatttgcggcagttaggggacaaaggtgcccgaggctgggggcggagccgccat

SEQ ID NO: 5844 - DNA, 120 bp, Homo sapiens
catcgctcccttgcactagtgccgggtcaggaggctgggagaggccaaggggcctggcacggcttccacagcagggcctcggctcctgcccccaccaccttgaccaaggcacgcaaaccc

SEQ ID NO: 5845 - DNA, 120 bp, Homo sapiens
cctcgtccagcaaggactgtgctctgaggcttgccgtgaaggcgctcacacactctggccgctggggtcgcagtgggtgcgtcatcggtaggcggcagtgcgtgctgtggccttgcccac

SEQ ID NO: 5846 - DNA, 120 bp, Homo sapiens
cagcgcgtggctgtgccagcatgccagctgccttggcgggaggctgatttcggctttcttgcagcagtgttacagcagaggcgcctgttaccgctgaacccattaagtgtaattaccgca

SEQ ID NO: 5847 - DNA, 120 bp, Homo sapiens
agccgtggcactggcatcaaatgctgacctgctaggaggctgggccctggcttggtgggagggagggttccaggatgagctgctggggtccctgggggaggggctccaggctggagtgac

SEQ ID NO: 5848 - DNA, 120 bp, Homo sapiens
cctcgtcaccaagcctgttcccctcctaccgtggcagctgcccttcctgtgatccctgagagtttgagacactcagaccctgaccccagtgctgcacgcagcacccaggacctccgctgt

SEQ ID NO: 5849 - DNA, 120 bp, Homo sapiens
gagcgtggcccgtgttgggcagggggcgctgctgccaccatcatccgggtcccaagcaggcctgccaggggtgagggggagccgtgggcgctgaggcctgtggtctgcgccaggtgggtg

SEQ ID NO: 5850 - DNA, 120 bp, Homo sapiens
gggcggcccccgagagtcaagcacaggcccaagtccagagccaggggtgggggcggccaccgggctgcccctgaatcagctgtgagaggatgcccagctctgtctcctcctcggttccca

SEQ ID NO: 5851 - DNA, 120 bp, Homo sapiens
acccgctccaagacccagacactcatcgccagctgccaggagcaccagtcacagctggctcagagctgaaaccccccgcacccaggagtcaccttcagtggggagcatgccccagtctgc

SEQ ID NO: 5852 - DNA, 120 bp, Homo sapiens
ccacgtgttggtgacggcagggactgtcagagctggtgcctgacttcccaaggctgttcgctgacaagttggtgctttccaaatgccggcttctaccttaaggaaggtccctcctgggtc

SEQ ID NO: 5853 - DNA, 120 bp, Homo sapiens
tgacggattgcctctccctccttcctctggttccctggtcagggtggggccgcgcagccctgggacaggggccctggaaagtctgccccgagttgtgccaccgtccaggcctggagggtg

SEQ ID NO: 5854 - DNA, 120 bp, Homo sapiens
ggacggggagtcctgtccggtgggttgcatggcggtgccccgacattccccctgccctggggccctcccagttgcacagggtgccctgcctacagccccccagcgcgggagccctatgca

SEQ ID NO: 5855 - DNA, 120 bp, Homo sapiens
taccgatgcggccagcccaccgagggctcctgcaccccgctttcctgatgagccaacgccgagggccagggggccgggcctgggaccctcacggagcagagcccggccaggcgcaggccc

SEQ ID NO: 5856 - DNA, 120 bp, Homo sapiens
aggcgccacctggtggctgctttcaggaggggcggccgtcggtcccgagtcccccaccccatcctggacacccccacgcgcgcacacccgtggcggggctccggctgaccgggtgggcat

SEQ ID NO: 5857 - DNA, 120 bp, Homo sapiens
acacggacgcgcacgaaactcaggattgtacccagtccacatagacaagtgtgtgcacatatgtgtgctctgcctcctgcctgccctactactctctgtcctggtggaggagccccctat

SEQ ID NO: 5858 - DNA, 120 bp, Homo sapiens
atacggaaacccagctcccggcccctctcttcccgcgtcatgcaccctggagaaatggaaatcagctgcagttgcccagcactcccggggctggtgggcaggcgtctgagaatgggttag

SEQ ID NO: 5859 - DNA, 120 bp, Homo sapiens
acacgagggaatgggagccctgaccagtaagaggagtgttcccaacagctaccccagaatcctctgctaccccagaatcctcagctcagcttctaggccacaagtaatcacccaaggggt

SEQ ID NO: 5860 - DNA, 120 bp, Homo sapiens
tcggatcgttcattcctcgactcctcaccaaatgtttgtggaggggacagtcctagtgaccgtcctctcctggggaaacggaggcccagggctggtttgggactcaacctatcactatgt

SEQ ID NO: 5861 - DNA, 120 bp, Homo sapiens
tcccgtctccggactccagtctccctacctagaaaagagtggggagaggtctccaagggtgctcccgcacccaacggactgcagtgttggtttcagggttggtgctctcgtaggggccgg

SEQ ID NO: 5862 - DNA, 120 bp, Homo sapiens
cagcggctgcccctcccaacttcctgtttaccgtagctgcagagcctgtcccttcacttaaagccagtgtgatcaccatggcaaccggcctgtgtttgttccaacaggtgggcagaacct

SEQ ID NO: 5863 - DNA, 120 bp, Homo sapiens
gaccgcagaggcaggggcgtcactcccagacccggtctccagacccaccagcccctcaggagaacactgctacagagtggggctgagggcccaggccccctcccctgcttcccccaccgc

SEQ ID NO: 5864 - DNA, 120 bp, Homo sapiens
ccgcgtccctgtcccagccagtccctgcatttcctgcaagctccctgccctcccccaccggcctggctgtgctgggtcaggatccggcagagcctgggccgagcgtcccgaaggagagcc

SEQ ID NO: 5865 - DNA, 120 bp, Homo sapiens
ccccgatcctgcacagacaggtgtggggcgggcatggatttgagtgagttgggatccagaagccaagacagttgttggcagacgggccccctccctttgaagagctgtgttctggaagcc

SEQ ID NO: 5866 - DNA, 120 bp, Homo sapiens
cttcgggtgaaaactccaaagtctgaccaccccccaccccttgtccccaaagggctgcgagtgtccagctgtattcgaccaagggcaggtgcgaccggggggccgctgcgccctcggcaa

SEQ ID NO: 5867 - DNA, 120 bp, Homo sapiens
ccccgcccccgcagcggcgtccgcccagcagttgctcagtcgtcggcgcgcgcggctgggagcggtagctgtgcctcggcgtccccgagctggtgccgagcgcagcgccccaggagcccc

SEQ ID NO: 5868 - DNA, 120 bp, Homo sapiens
ccccgcgccggcccacggtaagtgccgcgggctgcggccagtgctgttgggccgccgtctgggctcggccccgcgccccaacccggacggaccgacggccgccgcccccttggtccgggt

SEQ ID NO: 5869 - DNA, 120 bp, Homo sapiens
gcacgggggtggcctccgaggcggggggcggtgggaaggtctcgacgtcccctcggccctggggaaactgaggccgcgcatgcttggaggggcggggtctcgggggcatttcccctccga

SEQ ID NO: 5870 - DNA, 120 bp, Homo sapiens
gaacgcgcaggagagggtgcggcggtggggtccgcactgcggagcggacggggagggtatccgggcgctggcgacggcctcccccgcacttgagccgccaagcgaggcttcgacccccgc

SEQ ID NO: 5871 - DNA, 120 bp, Homo sapiens
ccgcgcctccctccccgggggagcagacgggcccggggcctcccagcacccctcccgggcgggctgcaccccccagcgtcctcgtcccttccctcctcccgcaggtcctcgtaaggccct

SEQ ID NO: 5872 - DNA, 120 bp, Homo sapiens
ccccgaaatccctgcgagtgcaaagcggcccctccttcagccccactcggcaaagggctgtgggctcttgcctgggccggggtctccgggggaggagtttaaagtgacacactagacccg

SEQ ID NO: 5873 - DNA, 120 bp, Homo sapiens
ccccggaccgcccgccccctccgaggggagagacccccatagaactgggggtgtggctcctgcgggcgcccggggccccgggaaagggggtgccgcgaggcggggcagggagggggtcgg

SEQ ID NO: 5874 - DNA, 120 bp, Homo sapiens
gagcgctgcgcagacacgggcgaggggaggaagaaggcgcctcgggctccggtctcctgcgctcctgctgggcgccagcggctggaccttggcagccgtctgaggcttcggggagcccaa

SEQ ID NO: 5875 - DNA, 120 bp, Homo sapiens
gtccgaaaaataggcatgccaggcccatggcccggcgtcttggtgacaagccgaaccctcaggcctgggcagtggcacctgcccctacacacctgaatgcagagactccatctcgaacag

SEQ ID NO: 5876 - DNA, 120 bp, Homo sapiens
ttgcgtacgtccctatccactttctgccctgaccctgcaactggccccagtcccaacgggtcaacctacacccacctggcaaacatgcggaggtcctcagggttctgggctgcgggtaca

SEQ ID NO: 5877 - DNA, 120 bp, Homo sapiens
ctgcgcgttcatgctccgacagctggccagcaggttctccgtcatcctctggttcagtggcgagtccccgctgggaagtagctctgcgctggagttgtccatgctggggctggtgagggt

SEQ ID NO: 5878 - DNA, 120 bp, Homo sapiens
catcgctgctggctgtgggggacatgggtcagggtgaccaagtggaattccaggacacccaggggaacagcgagggcagagccagcagccagcctccaatgacacccctaactcctacaa

SEQ ID NO: 5879 - DNA, 120 bp, Homo sapiens
attcgctgctgccccacctcctgggtgtgacacgcccctcatacggctgacttgggaaacgggtagcctcccctctgggggcaacctcaagggacctgaacagaggtgcgatgtgtgccc

SEQ ID NO: 5880 - DNA, 120 bp, Homo sapiens
gtgcgcctaggattggaacagcccggcagggggcctgaggaggggatgtggggctgtcccgcctccacccacgacagacctcctcccccagcccaactccagcagctggcgaggagagct

SEQ ID NO: 5881 - DNA, 120 bp, Homo sapiens
agccgccaccatcctctgcctgcacggagcccagagcaacctgtcacccttgcagctggccgtgctgtgagtgggtggagctacgagtgggcggggaatgtgggcgggcgtgagcgagtg

SEQ ID NO: 5882 - DNA, 120 bp, Homo sapiens
gaccggggacctgggacctggcaacaggctgctgccctcaagccacactggccatgacggctcttctggggcgcagaggtgtcagctgtcctggtagtggtatgagatcctgctctgctc

SEQ ID NO: 5883 - DNA, 120 bp, Homo sapiens
agccgccaccatcaaacctgcacgctggactacagctacctgctggggctgctggaggacatgcaggcacactgggaagaggctccttcactgccccaggagcaggtgggtgcagccggg

SEQ ID NO: 5884 - DNA, 120 bp, Homo sapiens
tggcgaagggagtgctggggactggggtcgctcagtgccggtcggcgaggggcagagtcctgcccgcgtgggggtcaaagacaaatggacaaactgtatgacgtgggcgagagccagcgc

SEQ ID NO: 5885 - DNA, 120 bp, Homo sapiens
agacgggagactcgtgggagtcacctcggggggcggccaggacttaggacagggctggggaaagccgccaaggtggcgcccatctgagcgacaggagggagcggccctggcaggacggac

SEQ ID NO: 5886 - DNA, 120 bp, Homo sapiens
ggacgtgggaactgcaggggcacaggccctacgtgagctgcgtgggtggaaaccgaggctgggacaggccgtctgggacaggccgactgggcctgtggagggtgctgctcagagcagagc

SEQ ID NO: 5887 - DNA, 120 bp, Homo sapiens
gcccggggaagggtgttgcgggccaaggcagggaggatgtttctcctcatcagtggccggtcggggctgctggcactgaagggccctgtccccacaggaggagagcctggctgatagcct

SEQ ID NO: 5888 - DNA, 120 bp, Homo sapiens
ttccgccttctctgagttcgggctgcagctgctgcgccagctccgagactacttccctgccaccaacagcaccgctgtccaccgcctggagctgctgctgaagtgggtgcagcgccgcgt

SEQ ID NO: 5889 - DNA, 120 bp, Homo sapiens
cagcgtgggtgggggcggctggcagggcaggccccacgtcagcgtgctgcccccacccaggtgtctgggcaagctgcagctcttccaaccctcctttgagatctgccccttcgagtcgga

SEQ ID NO: 5890 - DNA, 120 bp, Homo sapiens
ctgcggccctgaaggtgtgttccaaagcccagtggaggccggctgctaagccctcccttccccttccctgccttcccgtcccctgcacctctgcaccacggtctcttgcccacctcttcc

SEQ ID NO: 5891 - DNA, 120 bp, Homo sapiens
aaccgtgagtggtacgacaggatcctgaatgacaagagtccccgagagcaggtgcagttgtgggggaccctggccatgaggggtacgggcagccgagaggtgggtacgagctaggcttcc

SEQ ID NO: 5892 - DNA, 120 bp, Homo sapiens
cagcgcctgcctgggctggttgtgctggctgacgccgtctatgatgaccttcagttctgctacagtgtgtacgccagcctcttccacaggtgggcctggcccctcagtgctgtcctgggg

SEQ ID NO: 5893 - DNA, 120 bp, Homo sapiens
ggtcggagccaacagggcctgcaggtggggcgcaggtggatgaggtgtgtcccttgctctgcagcatcctcaatgtggacgtcttcaccctgaccttccggcagctggagcgtctggtga

SEQ ID NO: 5894 - DNA, 120 bp, Homo sapiens
ccccgggtgcctgccaggcatggggaagtgggcagatgcccttggctaggacggtcctgggattccttgctgctggaggcctgatcctgctgtcccggacaggtggctgaggaggcgtgg

SEQ ID NO: 5895 - DNA, 120 bp, Homo sapiens
tgacggaggagctgagccccaagatgaccctggaggtggcctcggggctctttgagctctacctgaccctggctgacctccagcgcttctgggatagcatccctggccggtgggtgcccc

SEQ ID NO: 5896 - DNA, 120 bp, Homo sapiens
gcccggagacagagctgccacctcagagtcacggtggtgctaggagacaggagaggtgtctccacgggggacacgaggcacgtgcatgtgcgtgtgcagctgtgtggaggcccctcatca

SEQ ID NO: 5897 - DNA, 120 bp, Homo sapiens
ccacgttgagcctcctggatgccacccccaagcgtctcccctgactaccacagcggtgccctgggggtcctacttggggagccaaagctgagggcgttgggcgtgctgaggctgcgaccg

SEQ ID NO: 5898 - DNA, 120 bp, Homo sapiens
cgccgacccgggcagtgaaggggacgtcgtcctctcgcggacggggctcctcctcgctgggtgaggccatcaggcagacataggtgtgcagctggatgagaagccggcgctgcagcatcc

SEQ ID NO: 5899 - DNA, 120 bp, Homo sapiens
ctgcgggtggcagcaggtgaggctggtccccctccccactccaacttcctcctgggtgatcagggagccatggccctagacatggccacagcacgctccctgtgctgacgcacaggcaga

SEQ ID NO: 5900 - DNA, 120 bp, Homo sapiens
gggcgtcctcctctaaccagtgcacttgctgctgcagcgcaggcccttcaggggacggggatgggggccagtcccctccctgcctccacggcccaagccccagccttccccacagtcctg

SEQ ID NO: 5901 - DNA, 120 bp, Homo sapiens
gcccgtggctgacagtctcggtgggcgctgtgttaaggtggcgtccccagccaggtcccgactccccagcttaaagaacagggtggctgctgtggcttgactcacgagttgccactggcc

SEQ ID NO: 5902 - DNA, 120 bp, Homo sapiens
acacgcccttgctctagcactgcctggggctggcctggctggagggtagggacgctgcacgccttccctcttcccccaggcgctggtgacactgccctgcaaccgtcagcaccatcatct

SEQ ID NO: 5903 - DNA, 120 bp, Homo sapiens
ccccgctcccccagccccggcacccaccattctgctgtctctgaacttggctattcatagacgtcacataggtgactcataactgtgtgcgaccttttgtgtctgaccaactcctcttgg

SEQ ID NO: 5904 - DNA, 120 bp, Homo sapiens
ccacgttgttgtttacccgtcatctgtccatggacactggagtggcttccaccctctgcctgggaataggctgctgtgaacttgggtgtaaatatttgagtctctgcttccaatttctga

SEQ ID NO: 5905 - DNA, 120 bp, Homo sapiens
caccgtttcccattccagccagcattgcacgaggggtccagtttctccacattttcaccaacactgttttttgctaacagccatcctagtgggtgtgaagcggtaccttagggttgtttt

SEQ ID NO: 5906 - DNA, 120 bp, Homo sapiens
acccgacaaactacggctcgcactcaactcagagggcgtcagccaccacctacctcagccaagtcacctgtgctgaagcccgggaagctgcctggagaggggacgttcagggagcgtgtg

SEQ ID NO: 5907 - DNA, 120 bp, Homo sapiens
ccccgagagactccggccccgcttcaaagccaagtgcccctcatccaaagagagcaccggagagggtcctggaggctccaccacccctagggtgctatctagggctcactcccagaaatc

SEQ ID NO: 5908 - DNA, 120 bp, Homo sapiens
ctccggaaacagagtgacccaccagggctgggccccaggggcttccgcaccgccacaccagcagcaacgccctgctgacctgcagcagggacagcagggaaggggtacagacagaagaaa

SEQ ID NO: 5909 - DNA, 120 bp, Homo sapiens
ccacggcagggaagtgaaggggacatcaaaaggagaccaaagctttgtccaaggagactctgagagcaagggtgagaggcacactgtccacacaaactcctgccagacaacctcagaaga

SEQ ID NO: 5910 - DNA, 120 bp, Homo sapiens
ggtcggtgctcatcaggacacggagggtcactgcctccctcactctgcagggttgtatggagtggtgagttcttttaaaattctctgtctcctgaatgctatgaaggtgggcaggacatg

SEQ ID NO: 5911 - DNA, 120 bp, Homo sapiens
aggcgggagacttactctcaaagacagaatccaaaaaggctgctttcggggaaaagtggcctgagagtcaggccttgttggacaagttcccctaacgtgctaagcagagacctgtttcac

SEQ ID NO: 5912 - DNA, 120 bp, Homo sapiens
aggcgggcccacctcacgcctgtgttcctcggcagcctctgctgccccctggtggccatgctgtgcacaccgccaccagacgagggcgccacccacaggcaccacctgctcccaccctca

SEQ ID NO: 5913 - DNA, 120 bp, Homo sapiens
tcccgtggctctgggccacgcccacatgactagcagccacagctgatcccatggcctgttggccaccccatcagcagcccctgcttctgatttctccccgtgctttttttttttttggaa

SEQ ID NO: 5914 - DNA, 120 bp, Homo sapiens
agacgaggctgaggggccctccatctaatcagaaagggcagccctctgcatggacaggcccataagcatgtggctcagcaaggacgtggcatcttgtacagagtgcacaggccaacacat

SEQ ID NO: 5915 - DNA, 120 bp, Homo sapiens
gggcgtaaggccaccaggttaggtctctgttctgcacatgggagggccccgcatccaagcttcctgcccttagttcccgtatgttgttcatgcaccactgtgagacccccatggccctgc

SEQ ID NO: 5916 - DNA, 120 bp, Homo sapiens
gcccgctgctgccctgcccaccccctagctctggtgcctcaacctccaggactgcaagcaccccagtcctttctctcacagactcgccttacctctctgagacagaagaacaagtcagtc

SEQ ID NO: 5917 - DNA, 120 bp, Homo sapiens
tcccgtggctcactcacaaagccagccctgaacccaggtctgactcagatgccaaaacctccagccatcccagggactggccccaccccatggtgggctgtgccgcggctctcagctgga

SEQ ID NO: 5918 - DNA, 120 bp, Homo sapiens
aggcggcctgcctttcctgatgccccagcaccgccacatgccacccatctgggcctccagagctatacctgcagcaaggccaggtccgcatcttgggctagctgctgcaggttcttcaca

SEQ ID NO: 5919 - DNA, 120 bp, Homo sapiens
ccccgagagccacagatcctcccaggagggtcgctcttaacttacatgctgctcccaggccttccgccctcccgcgcccagcctgccatagcgcgcagggttagaagcggcgtgacagct

SEQ ID NO: 5920 - DNA, 120 bp, Homo sapiens
ggccgatgctggcctctgcgaaccaggacttctgggggtgctgccgctgtgtaggagtctggccgtggcctcctccccactcaacctgaggaaaggaccagagcgggccgctgagacaat

SEQ ID NO: 5921 - DNA, 120 bp, Homo sapiens
tgccgaccgccctttccgaggcaaacagagaccacgaaagtggcgtgacggctggcgtggcctctggagcccacctgcactcaccactgcctctctgctcttggcccacagtgcagttcg

SEQ ID NO: 5922 - DNA, 120 bp, Homo sapiens
atgcgcgcctgcaacctggtggccacggccgcgctcaccgcaggccagctcaccttcctcctggggctggtgggcctgcccctgctgtcacccgacgccccgtgctgggaggaggccatg

SEQ ID NO: 5923 - DNA, 120 bp, Homo sapiens
ggccgctgcattccaactggcgagtaagtacctgggcgggtgtggccaccgcgcccttgccccctgtggccttctggtgccacaggagggtcctgaggccttgggtggcctggggggaag

SEQ ID NO: 5924 - DNA, 120 bp, Homo sapiens
ctgcgaccacctggcgtgtctgtcacacccttttccactttaaaggctgaggcactttgctttcctgagtctgtggggtctgattgctgactggcccttgtgcagtccacatggggcagc

SEQ ID NO: 5925 - DNA, 120 bp, Homo sapiens
gtccgagtctacagggtttagtccttcctctgatttgacagtaaacaggaagaggcagagaagactctgtgcgtgttgtttgctgacggagtgtgtaacaggagagaagcttccatgttt

SEQ ID NO: 5926 - DNA, 120 bp, Homo sapiens
tcccgaaaggtggaagctggtggccccctgcctcccgcctgcagaacccctgtggggctcacaggccggcgccagctgggacgtgagtctgagccttaggtcagccaggctcctctctga

SEQ ID NO: 5927 - DNA, 120 bp, Homo sapiens
acacgtgactcgggatgctcccagaggctgagaacaacaggtcagtgaagcgaggggagcagctctctcagagccaggcactccaccgtgtctcagaatgctcgtggggcacacatgggc

SEQ ID NO: 5928 - DNA, 120 bp, Homo sapiens
gcacgccctctcagaagcagagaatgactgtttcaggtccaaaagggaccttggagacacggggaccaagtcgcagagaaggaaataacttgttcaaaagaacctactggggtgtgtgta

SEQ ID NO: 5929 - DNA, 120 bp, Homo sapiens
tgacgatcccattctctcagtaatttaaaaacacgtccatgcatgagtcacacacggacgggtgtccagaagccagaaccctactgaaaggagccaccagcctgcccacagtggctgcct

SEQ ID NO: 5930 - DNA, 120 bp, Homo sapiens
tagcgagccatgtaacaaactaagaacagaacctgccctgagcaaagaccctgctagtgtctgtggtcaccactgtactgctgactactggtaggcagaaccagtctacaatttgtaaga

SEQ ID NO: 5931 - DNA, 120 bp, Homo sapiens
tcacgacaggccacgttactacagggatgcacggtacaaaaagagaggcaccaggccaattgttcactgaatacttttggtcctgaaggatgagaagctcttcccagcagaagtcacact

SEQ ID NO: 5932 - DNA, 120 bp, Homo sapiens
cctcgaccctctggaacctatcagggaccacagtcagccaggcaagcacatctgcccaagccaagggtggaggcatgcagctgtgggggtctgtgaaaacacttgagggagcagataact

SEQ ID NO: 5933 - DNA, 120 bp, Homo sapiens
atacgttcttcatctggagctgaagaaattctctatattctcatcagatcccatgttcacaaacagaactcacacctggatggacttacaacaaggcagcatcccttgccagagaaagga

SEQ ID NO: 5934 - DNA, 120 bp, Homo sapiens
ccacgagcaaagcaaggaggaggacaatgatcctggatatgtgattattcagctgaggcacaacagtgtccatgagttggatgtccagggcccatatgcttgacctttccagacatacaa

SEQ ID NO: 5935 - DNA, 120 bp, Homo sapiens
ccgtcaggcattccagactcagtggctgcttgctgctctgcagttggctgtttttcctgggagcccagcttccctttgcaaagtggtatttagaaaccaagacctgggcgctaaggatgc

SEQ ID NO: 5936 - DNA, 120 bp, Homo sapiens
gatcgaacactaggttctctatggcagtgcctgaagcagcactgaggtgaggctgttctgtggaacacaagttctcttctgaaaatctaagtcacactcagcttttgcaaagaagcgttc

SEQ ID NO: 5937 - DNA, 120 bp, Homo sapiens
ccacgtataatcagagtatagtctgtgcggttcacttactaaatgctcacgtttgctgtcctcgtttgaatatggaatatattttgtcagattaaagcagtgaggatgtttctgatctgt

SEQ ID NO: 5938 - DNA, 120 bp, Homo sapiens
agtcgaagttcaagttcatacacagataagagcttggaagggctgcttgtttgactacagcctgtctcctttctcctttctcggaaccttggaaagggtccagttaacacagaaagctgc

SEQ ID NO: 5939 - DNA, 120 bp, Homo sapiens
aagcgattcagaacaacattgcgctgaagtacaagaagaaaggcaagccagcaagcatggtgaagaacaaggagcaggtccgccacttctactaccgcacctggcacaagatcaccaagt

SEQ ID NO: 5940 - DNA, 120 bp, Homo sapiens
catcgactttgatcatggtgagtgtgccacgggccaggctcgggggtgcccacaggcagggccggcttctgctcagagcgcagcttccagcaagcccgccggacctgctttctggcattt

SEQ ID NO: 5941 - DNA, 120 bp, Homo sapiens
agccgcttggcctggggctcctcgccttgcagcgctttggctgattgtgtgctgtctaactcggtcaaaccaagttgccaggaagtggcccgtatcccatgctccagggttcttaccact

SEQ ID NO: 5942 - DNA, 120 bp, Homo sapiens
gtgcgtgagttctgggtccctggctcacctgaagcctgtggtctccactgcaaatgatagcaccatggtccagcgaggggcttgggccgcaggcaccgtgcctggcgctggtcttcctgg

SEQ ID NO: 5943 - DNA, 120 bp, Homo sapiens
ggacggccagccttcccaggcctctcgccctctacactgggacccaggtctgcgtcggccctcgttcagtcacgggaccaagtcatccccaggtagaattctggcttctggctcagagca

SEQ ID NO: 5944 - DNA, 120 bp, Homo sapiens
gtccggtggacgtctggttgctcagtgttctgtgatcgtttctgcagggggtaaaggaagtggtatctttgacgaatcaacccccgtgcagactcgacagcacctgaacccacctggagg

SEQ ID NO: 5945 - DNA, 120 bp, Homo sapiens
cagcgacatttttgggtctccggtcactgccacttcacgcttggcacacccaaacaaacccaaggtatggactgcattcagacgtgacagcgcagcagcgggtatgccaggtgctctttc

SEQ ID NO: 5946 - DNA, 120 bp, Homo sapiens
atgcgacatgtttttagggagaatcatggtgggtgccgtagattatcctggatgcaagcattagtcatcgagtttggaagttcccctgagtcacccaggaaacagtccagccttgtgctg

SEQ ID NO: 5947 - DNA, 120 bp, Homo sapiens
agccgtgggggaagctcttctgtgctggtggcggacgcccactgcagacgggctgtggcggctcctcactgcagtgctgcggggcgcggagaagcggtggggagcggaacgtgccgcaga

SEQ ID NO: 5948 - DNA, 120 bp, Homo sapiens
agacgagctgggcccttgtccgtcttccactcttcctgtttcaccttgcagaggaaaagtgacagttcttttctgatgggcttttccccgcacagtcaaggtcctcggctggttacctgt

SEQ ID NO: 5949 - DNA, 120 bp, Homo sapiens
taccggtgggtttccagggctcggtgctggttttcctcagagagtcgggggagcctgcctagaatgggttcctctccgttttctgtgccctttgaatcaggagaaagccgggctgcaggc

SEQ ID NO: 5950 - DNA, 120 bp, Homo sapiens
gaccggccatgggagaccagagacgcgacctgggctggggaggttggcgctctcgttctgagtctccagcagcggggaggaagggcctgaagtcagaagctgccgtcctacagagctggg

SEQ ID NO: 5951 - DNA, 120 bp, Homo sapiens
ctgcgatggcaaaagcctccctcacaccccatcaaggcctggccagctgcgaaagctgcatcgtgcctgcctgttctgggggttacacctgcaaacgagaagggtcagaacgtccagctc

SEQ ID NO: 5952 - DNA, 120 bp, Homo sapiens
tcacgttctggatgatacagaagaagctgtcagactctgcttccgagtctctggacgtgagagcaaatgcacggtgtgcgcaaaggcccagctggccaggggcgtgccgtggagcctgca

SEQ ID NO: 5953 - DNA, 120 bp, Homo sapiens
tctcgctgctctcagctggagcagggacctgcagttctcagggacttgccctgagaacgggcggcgccggccatctgcccacccagagcaccatgagaactacgccagggcgtgtggatg

SEQ ID NO: 5954 - DNA, 120 bp, Homo sapiens
ccccgagaacaggtggtgccagccatccgcccacctggagcaccatgagaactacgccagggcgtgtggatgccagcttgccccgagaacgggtggtgccagccatccgcccacctggag

SEQ ID NO: 5955 - DNA, 120 bp, Homo sapiens
catcgccaacgggaaggtcaacccgtcccagtccacagaggaggccacagaggccacggaggtgccagaccctgggcccagcgagccagagacagccacattgcggcccgggcctctcac

SEQ ID NO: 5956 - DNA, 120 bp, Homo sapiens
gcacgtcttcactgacccagccccgaccccgtcctctggcccccagcctggcaggtgagctcttgggctggggcaggagcagagggaaggcttgcagaggtgggaagggcctcggggtct

SEQ ID NO: 5957 - DNA, 120 bp, Homo sapiens
gtgcgtgctccgtggccccccctggagccaccgttcttcctgcagcgagaacgggccagagcctgacagcagcagcacacggccagagccagagcccagcggggaccccacgggagcagg

SEQ ID NO: 5958 - DNA, 120 bp, Homo sapiens
tcccggggttccaggcctctccttagtctggcagtgggtgtctcaacccgatgccctgagcagaggtggggcctggccaggcctgagcaggtgtccggggctccctccagatggccagtg

SEQ ID NO: 5959 - DNA, 120 bp, Homo sapiens
acccgcaccactccatccgctgcatggctgttgtgtacgaccgcgtgtggtgtggctacaagaacaaggtgcacgtcatccagcccaagaccatgcagatagaggcgagtgccggccagg

SEQ ID NO: 5960 - DNA, 120 bp, Homo sapiens
ccccggggaggggaagaggctcctgctggccagcagctctcccgcatcttccatacggaagtccacgaggccctacgtgggtcccatctcccctgtaccacctatgactcaggctcgaac

SEQ ID NO: 5961 - DNA, 120 bp, Homo sapiens
aggcgcaaagcaggcgctggctgggaggtctgaggggactgcaggtggccctggagctgtggcaggtttggggctccccacttcctctcctctccccagccctgttgatgggcagccatg

SEQ ID NO: 5962 - DNA, 120 bp, Homo sapiens
tgacgcccacccgcggcgggagagccaggtgcggcagctggcgtggatcggcgatggcgtatgggtgtccatccgcctggactccaccctgaggctctaccatgcacacacgcaccagca

SEQ ID NO: 5963 - DNA, 120 bp, Homo sapiens
ggacgtggacattgagccctacgtcagcaagatgctaggtgaggggccacgccagatggggtggtggggtgctcaaggccagccaccctgaccgctctcccccacaggcactggcaagct

SEQ ID NO: 5964 - DNA, 120 bp, Homo sapiens
cttcgtacgcatcacggccctgcttgtcgcgggcagccggctctgggtgggcaccggcaacggagtggtcatctccatccccctgacagagagtgagtggcctgcacacctgcaggggca

SEQ ID NO: 5965 - DNA, 120 bp, Homo sapiens
gtacgtgggttcacggggtggctctgcagggccaccttggagggtgccttgctgcccctacgctgaccgctctcctcttctcccatgctcctcccatgtccccagctgtggtcctgcacc

SEQ ID NO: 5966 - DNA, 120 bp, Homo sapiens
caccgaggccagctcctggggctccgaggtaagcccagccacctcgtgtcccctcacgggagcctctcccactctccacctgtatgcgggctcagcgcctctgggttctctccctgcagc

SEQ ID NO: 5967 - DNA, 120 bp, Homo sapiens
accgatctcatttatggagtaggaaatcaagctggagaggtggggtcagcctaggtcagagcaggcaaggactgtgggaacctctgagggagggacctggtctggttattattttgcaga

SEQ ID NO: 5968 - DNA, 120 bp, Homo sapiens
tagcggggagaggtgggcggaggaaagaggcctgggatgtggaaccctaggatctagccctgagggcgggccaggtccgggcagcctgggtcccacgcagctgccctgaagaaggggctg

SEQ ID NO: 5969 - DNA, 120 bp, Homo sapiens
gggcgtcctgcctccacccgcgcccccaaccacgcctgccgttcccaccggccgcgccacccccgcccccgcccctggctctgtcctccggtgaccctggaaggggcacccgtggctgcg

SEQ ID NO: 5970 - DNA, 120 bp, Homo sapiens
tagcggtcacttcgtgaagcccggcaaaccccctgcagctgcccctggcaccctcagacgaccagaggcctcggcctgggtccccagcaccggcccaagggcgggcgtggccgaggcggt

SEQ ID NO: 5971 - DNA, 120 bp, Homo sapiens
ctgcgcggacgctcgctgcctccgccgcaacccccgcggccacccggggaactgcagcgccgtcaggccccccgccgcgcctgcgcacgcagaccacccggcctggcagcaccgagcgag

SEQ ID NO: 5972 - DNA, 120 bp, Homo sapiens
gagcgtgccccctgctggtcagtcctgcgcacggtcccgcgcccgggcccgggaggccgcctcgagggccggggcttgcacgtggcctcggcgccttcgccgaccctaccggacgccccc

SEQ ID NO: 5973 - DNA, 120 bp, Homo sapiens
tgccgacccgtccgcgggtaggagcctcccgggagctgcccacggcccccacccccaccaggggccacagccccaccagggccaggctctgcgcggcacctgccactgagagagcggaaa

SEQ ID NO: 5974 - DNA, 120 bp, Homo sapiens
aagcggtggttgagcaagggtctgaagtatggtctgttcccccatacgggccgcagacgcttcctggtggctgctctgagccaggcctgggccccggcgagggatcacggtgtctcagac

SEQ ID NO: 5975 - DNA, 120 bp, Homo sapiens
cctcgcccgaggtgacggcccagccgtgcccaggcctgcccgctgcccctgaacccaacccttgaggggcaaggccgtgccctggggaggaaggggctgccccctcagagtctgctgttc

SEQ ID NO: 5976 - DNA, 120 bp, Homo sapiens
agacgcgggggcagccgcaaggatggggtatcacccagcaggagcgggagggtaaggtgactgattccacaccagacgctccattgctggaaacaccaccccctcctccggtgacctggc

SEQ ID NO: 5977 - DNA, 120 bp, Homo sapiens
ctccgcagctccagggagattctggcagctagcctcagttctggcccccagcagggcagagatggagacatttgctagaacaggaggctgccacagcacatgctgggggaggggcaagca

SEQ ID NO: 5978 - DNA, 120 bp, Homo sapiens
gtacggtcctccccgaagggcccttggtgctttcatcaacactgactcttcccagcacccgccccacgcgcccctacctctagacggagagcccactggccagcagcgccaggagtcagg

SEQ ID NO: 5979 - DNA, 120 bp, Homo sapiens
gcccgccccgggtggctctcctgtgccctcatccaaccggaagacaggctgggtgccactaagggaggcacaaagagaggaaagtcgaatgtcccgcccaagatcagggtcacgcaagca

SEQ ID NO: 5980 - DNA, 120 bp, Homo sapiens
ccacgcccgctcccgcgtacctgcatagccaccagccgcggtctgacgtttccaacacgcgcacgcgcgcccccgcgggcacggacagctcatctgcgcggctgctctcgtaggcgcggg

SEQ ID NO: 5981 - DNA, 120 bp, Homo sapiens
caccgcggggccacagaggacgaggcccgcccgcacccttctccacattctccttgcttgagtctgctgacggcggggccgctctaagaccggttcggggcttcctctaggtgcggagac

SEQ ID NO: 5982 - DNA, 120 bp, Homo sapiens
gcacgggctcctggcccgccctgcccgcggtgcttctggcccagtcttgccacacggtcaagccgcagtggtggcgtgaggggtggggttaggcgcataccgctgctccctagggacggg

SEQ ID NO: 5983 - DNA, 120 bp, Homo sapiens
tcccggccttggcccggggccgcctcctccaggtagggcgctggaaaccaggcggtctgccggtcttcgttctccaccagccaccagcctgtgcgcaagaagcgggcagggactcaaatc

SEQ ID NO: 5984 - DNA, 120 bp, Homo sapiens
tctcgaggctccctcgggtccaggagcagaggagcaaatccctgggttcttggggggccctacctgaggggtgccgcagcagcacgtccaggctctcctgggcctgcgcctgaaaaggcc

SEQ ID NO: 5985 - DNA, 120 bp, Homo sapiens
tcccgcgtgtcctgggtacagaagggctgcaggcagcgcaggctctgagcctccagactgtggatggagaggcggcccgcagcgcgagaaagaggctgctcctctggggtgggcaggatc

SEQ ID NO: 5986 - DNA, 120 bp, Homo sapiens
acccggctgggaagggcagcccgtacgagtgagaggtaggcggatggggagggtgaaactgggggcgccaccccggcaagaccgccagcctcccactctctgcccctattcgctggctgt

SEQ ID NO: 5987 - DNA, 120 bp, Homo sapiens
aaacgccgctgcatgctgggagtttggggcgagtcaggcacctgccgggtggcagcgcgggctccaggtccaggggttgcggtgcgaagaagccagtgatcgtcgggctccgtgccacgc

SEQ ID NO: 5988 - DNA, 120 bp, Homo sapiens
acgcgctctgcagtcgccagcagcctccgagaataggtttccaacagctgcaggcgcgccaggccgcggctcgtgcgccccacgcgtcccaacagtggtgcatcttaaggcaccacaaaa

SEQ ID NO: 5989 - DNA, 120 bp, Homo sapiens
aaacgtactgtgatacgccgctttgggcttcactggtccctggcgcccccaggcaagccaccgccttccccgctcccgtacccaggctggcctgaccgagaagctttgggagaacgcggt

SEQ ID NO: 5990 - DNA, 120 bp, Homo sapiens
ctccgcagcaggcccgcctccaccgggaaggtctccttgagggtcttctgagggcgggaaccagggcattggtcttccagagcccactgtgcacccttgagagggcggggtccctcaccc

SEQ ID NO: 5991 - DNA, 120 bp, Homo sapiens
acccggatggcaggggctgggagcttcagcagggacgaagggcctccagtgggagtcactgatgggaggcagtccagtgggaggcagccgcgtggggaagccgccaccgcggcatcaggg

SEQ ID NO: 5992 - DNA, 120 bp, Homo sapiens
attcgtcccaactcctgcgcacgaaggtgtcgctgccgtctgaccagcgcacagagaaggcaaacgtctgggggacaaaaagttgggagtgccgtggaggtgctggtccaggcaccccct

SEQ ID NO: 5993 - DNA, 120 bp, Homo sapiens
ccacgcagcaccatctgtgcacccggctcgtgtagcagggacctgggttgcttattatctgaagtacagggtggtaacagtctccgccactacacaggtcaagcgcttggcgctgtaaat

SEQ ID NO: 5994 - DNA, 120 bp, Homo sapiens
cagcgggacacagggcagccaggcaccacccccacccgactcctagtctctgatgccgctccctgccctccattccagactaggcgccgcaagtacgctggggagacccaggagtaggga

SEQ ID NO: 5995 - DNA, 120 bp, Homo sapiens
ccacgggcaaggagcggagacaccgaaaccaacactcccagcggcgctggccacggtggctctgtcccctccctcaacaggtgctcctggggccaacgcctttcttcccaccagatcctc

SEQ ID NO: 5996 - DNA, 120 bp, Homo sapiens
ccccgccagaggctagaagctgtgatagcagctagagcacagtggggggccatgagaaagaccccagttatccatctggtcttcttgggaccagggccagggagccggtcccctctcccg

SEQ ID NO: 5997 - DNA, 120 bp, Homo sapiens
gcccgtggacctcctacccctttactccctcacccaagtgcccttcccagaggagcggactcctcctgtctgtcctcccggctctagcaaagtctgcgcccagcacccgagccccaccct

SEQ ID NO: 5998 - DNA, 120 bp, Homo sapiens
ccccggggacctggctggtgggttcctgaggatggtctccatctcgggaccggggcaggcaggtgagggtgggggatgggaggtgggcgcggcggagggagaggagggacccggccccgc

SEQ ID NO: 5999 - DNA, 120 bp, Homo sapiens
ggccggcggcgccggagagggaccttgagaggtcaccgccggtcgcctctacccctacctcctccccgggtctaatttcagtccctttccgcagcccttactccgtttttcctgttctcg

SEQ ID NO: 6000 - DNA, 120 bp, Homo sapiens
ggacggggtggggacggaattctccgaggggcaggagggggctacgggaaccgagaagcgcctccccttcccccgcacacacaccctcgggtctccttggcagggagcctgtcccctggc

SEQ ID NO: 6001 - DNA, 120 bp, Homo sapiens
tggcggcggtgtggaaggcaggtttgggagcagcctagcccactggggcgtccctgggagggccctgctgctccttccctccggcaggggaggtggcagttgggtgccgagctctgggtt

SEQ ID NO: 6002 - DNA, 120 bp, Homo sapiens
agccgcacctcggcgcctgtcttggaggagggcggtgcccacggtggggcaggggctttggcctcccctgcggagtggctctgaccagaccgggaggcaggacgctgcgttttggtccga

SEQ ID NO: 6003 - DNA, 120 bp, Homo sapiens
gagcgcacgtcccgacttgtggcccactcttggggacaagtgcatgtcccggcttcccccttggctccactctcggagctggagcgggaaaggagcgaagggatgaggttgaggctggag

SEQ ID NO: 6004 - DNA, 120 bp, Homo sapiens
ggtcgtttcttggaaacacagggctgccccgtgcagcgctggttaaaatgactgcggtccccctcatgcctgtctcccggaactggtgggcaggaggcattgaggtttgacggaacctca

SEQ ID NO: 6005 - DNA, 120 bp, Homo sapiens
caacggtgtcatcttttcagcccaaacacttacaggtgatattaataatcagtcacgtgggggctgtcatccctcgggtacccaccacgtgcaggaagctgggtggacatgtctgtccca

SEQ ID NO: 6006 - DNA, 120 bp, Homo sapiens
gcccgtcaccctatttgcatgctagaaaacaggccagacagttcccaaccgcgcaggaagcaacagctccgctgcctccataccctccctcccgccccgctctgcctgctgcactctcac

SEQ ID NO: 6007 - DNA, 120 bp, Homo sapiens
cttcgccgttccggctccagcctgggaatcgcgggcccaggtgaaggctcctgttcccacactcttgagtgggctctgaggggactccacgggcccacgcggtgcagagtacctggcttg

SEQ ID NO: 6008 - DNA, 120 bp, Homo sapiens
ccccggcttttgtcagccatgtgatcccggacaagtcacttcacctgttggggtcccaatgtcccccgcatttataaagagaataagaacaatggcgatcccacggggactttctgagga

SEQ ID NO: 6009 - DNA, 120 bp, Homo sapiens
ggacgcatgtaaagtggctgtttaacacaatgtctgggcatagtagatgctcactaaacggcccgtgttgtcaataattactaaatacgcgagggttcgggaaagaaagaggtgacaccg

SEQ ID NO: 6010 - DNA, 120 bp, Homo sapiens
atacgggcctgggaacgcagggacaggcccaggggcgtgggcgctcgaggcgggctcgcagaggtcgggtcgccgcagggccctgagcgccgcgccgcacgcaggtgttctccatcgccg

SEQ ID NO: 6011 - DNA, 120 bp, Homo sapiens
cttcgggcccatcgtcaacgagggctacgtgaacaccgacagcggccccgagctgcgctgcgtgttcaacgggaacgcgggcgcctgccgcttcggcgtcgcgctgggcctcggagcctt

SEQ ID NO: 6012 - DNA, 120 bp, Homo sapiens
cctcgcctgcgccgccttcctgctgctcgatgtgcgcttccagcaaatcagcagcgtccgcgaccgccggcgcgcggtgttgctggacctgggcttctcaggtgggcggggccggggcgg

SEQ ID NO: 6013 - DNA, 120 bp, Homo sapiens
acccggaaagagaagttctttccaataaccttaaggaaacagcccatttctcagactgctctactcttctgtggagctggtcttgcttaggaacctaccatcccctgccaagtgggcatc

SEQ ID NO: 6014 - DNA, 120 bp, Homo sapiens
aggcgcctctggtgtggggggaatgcaggtggcccctacccagcctctcatctcctagccagccccagcatggccatcacccaggggacacagttgagtcccagtgtccaagtcctcagc

SEQ ID NO: 6015 - DNA, 120 bp, Homo sapiens
tgccgccacatggctgacccagcccctctgcagccactgaccttggctcttcatcaccatgggagcccctttctgcttgctttagagaaatttccccactttctctgatctgaggacata

SEQ ID NO: 6016 - DNA, 120 bp, Homo sapiens
ctgcggagatcaggccctgccaccggagagccggactcagtcatcccctctggcccgggccctggatgaagacgggctggcaccccgccccgggcccgcctgacccatctggactccccg

SEQ ID NO: 6017 - DNA, 120 bp, Homo sapiens
tctcggggactaggtacgcccgtggggcaggcagcagcctgggtctgggggtcagaaggtaaagaggaggtggaggcttcagccttcacagtggcccaaggggagggtaccgttcctcca

SEQ ID NO: 6018 - DNA, 120 bp, Homo sapiens
gcccggcgggggtgggggaggcgtgcccttcaggagcaccacagcgctgaagcctgaggggtggcaggacaagacccagagaggaccctcgctgactgcgggctgcctggcctccagggc

SEQ ID NO: 6019 - DNA, 120 bp, Homo sapiens
tcacgcaccctcagacctgggaggcgccatgagggccggtctcacagaggcaaggaacacagggtggttaacgggaggctggaggtcatgtgggtggccgatggcatcacacaggggtcc

SEQ ID NO: 6020 - DNA, 120 bp, Homo sapiens
ctgcggctccagcctgaccccggcccctcccgacacccagggagcaggcctgagccagcacgcgtacctgggggcggcggcatccggggtgggcaggggccgccgagcgctgggaagtcc

SEQ ID NO: 6021 - DNA, 120 bp, Homo sapiens
tggcgtggggcaggggaaggaccccaggggccttgggagcccagggggttccttgggggcactccgagcaggggccgggccctccatgtgtccattaacgacgacggcaactggcccctc

SEQ ID NO: 6022 - DNA, 120 bp, Homo sapiens
ctacgtgagccctggagacggccaagctaggccccaaggagagcaagaggcaaatggggtgaggcctgcttaggaacaggaggcccccaagaccccccacagggacaggtgtggtgtctg

SEQ ID NO: 6023 - DNA, 120 bp, Homo sapiens
gagcggggtggggggacagcagaagcagggagcattttacagatagggccagggccacgggggacgggagcagggcggagggggagcagtaggagtaggaaagcatgacccaagccagca

SEQ ID NO: 6024 - DNA, 120 bp, Homo sapiens
ctgcgccccctcccactgcctgcctgtaaggtgcaggtgggctgccctggggggcttgcagcctcatcaggactcctgcagtaacaccagggaccagagcaagctggagagcaagatgca

SEQ ID NO: 6025 - DNA, 120 bp, Homo sapiens
cacggaggggagcctgcctcggcttccaccctgagcacctgccaggggtcaggcccatctggctcctggcctgagcagcagctgcagcctccacagggaaggcctgggtccaggtgtgtg

SEQ ID NO: 6026 - DNA, 120 bp, Homo sapiens
agccgattccacacggcatcctggacactttcctcacaattttcgcaaaaccttagtcccataagggaggccaaggcaacgccagggttcaggagttgagggttgcagtgggaattcctg

SEQ ID NO: 6027 - DNA, 120 bp, Homo sapiens
ctccggctctgtgctgggtgaagaggtggtcacacacctcacagggcaactcattctcctgcgagctcattccttcccactcctgcccctgttcctcactgaacctgacctctaagaaca

SEQ ID NO: 6028 - DNA, 120 bp, Homo sapiens
cctcgtcaccaccacaccacgcctcaagggctccccactgcctatgggacgatacccgtgctctggcagggctggctctgtctgctctcaccgcccctcccactgcctcctcccccttcc

SEQ ID NO: 6029 - DNA, 120 bp, Homo sapiens
caccgcctgctccagactgcagattccaggacagcccgggacctcccccgccgaaggaggactccagggccccaggctgggttaaatgttcttcctggggctgcttcagctctggcctcc

SEQ ID NO: 6030 - DNA, 120 bp, Homo sapiens
ctacggctcacatggggaattgcctgggctggctgtgcctgacccctgggaaccaggtatgtgcaagggggcctggctgggctggggaggagggcagactggggctgtgcctggactcag

SEQ ID NO: 6031 - DNA, 120 bp, Homo sapiens
ctccgaatctcacatccctgggcccaaatggagctgaggaggcttcgtgggtcttttccctctccaggcctgtttgcaggtctgtgaagtggccggtcccctagggttgttccaggtaaa

SEQ ID NO: 6032 - DNA, 120 bp, Homo sapiens
actcgtgcttcaggtagaggctgagggacgtggacggctgtgggcaggggaggggaggcctgctgcctgcctgtggacactgtggagcagcgcctgtgcacacccagagcttagagccca

SEQ ID NO: 6033 - DNA, 120 bp, Homo sapiens
cctcgagactcatatccttttgtcaccctgcaaagtcacagtccaggcctggggtgggctgggacacaagtgagggggccggcccggccaagggaaagaatggcagcagggcgtgggaac

SEQ ID NO: 6034 - DNA, 120 bp, Homo sapiens
aaccgacgcggtgcagataggccgaacacggtgggtaggccagggagtctcccagccactggcccccaggatgcagggaggggctgctgcgtgtcacttttaaagccctttttgcctcct

SEQ ID NO: 6035 - DNA, 120 bp, Homo sapiens
agccgagaggagacaggcaagggggtccggaagggcttcccggggagggtggggagggctgtggcccttgttcttaccctttggcccctttgtcggggtcccttggcctggagacccttt

SEQ ID NO: 6036 - DNA, 120 bp, Homo sapiens
acccgtcgcccacctcaagacctgcctcgatgctgcgcatacagtaggtatccaataaatgttcctgggatagaaggcaaaggcgctggcaccaaggcggctgcccagagtaggggcgag

SEQ ID NO: 6037 - DNA, 120 bp, Homo sapiens
tcccggtggttaaggggtcccctagccctgccgcctccccctgccccgcctcgggctggccgggcgcggaggtaggggcctggccgggacggctgggactggaggcgggggcggccgggc

SEQ ID NO: 6038 - DNA, 120 bp, Homo sapiens
gggcgagacgcaccaccaggtgggggccagcgctcgcccccggcccgccgccccctccccgagcgcgtccccctggggcgagcaggggtcgcacgggggcccgagggggctcccgcgggg

SEQ ID NO: 6039 - DNA, 120 bp, Homo sapiens
ggacgcggacgttgtcgggaggcagcggcccggcgccttcggagtcccggcgcaggaagctcagtcctgcacgggggtgggggggggcatcctggcagggaggggcccgcactgcggctc

SEQ ID NO: 6040 - DNA, 120 bp, Homo sapiens
ggccgctggcctcgccctttggtcgcgttttggcctcagtgtgccgtgaaggagggtgttgggccgcctggagcccctccggaaaggtgaagacctgggtgcttttgcctgggtgtgtgt

SEQ ID NO: 6041 - DNA, 120 bp, Homo sapiens
acacgtgtgcgtgtgaacacagctgggcgtgtgtatgcaggtccctttggggtcagccatgtgtgcatgcgcctgcctgtgcgtacccaggaggggtcgcagtaaaggcatcagtgtgtc

SEQ ID NO: 6042 - DNA, 120 bp, Homo sapiens
gcacgtgtgcctgtgtgtgtgcaggtctggactcctgggcgtatgggagctgggctctgtgtgtgtgcacgcctggctagtgtactcatcactgtctgcaggccggtgagtctttgtgtc

SEQ ID NO: 6043 - DNA, 120 bp, Homo sapiens
gaccgggctgagttggtcattgctggcaaccacattccttagctacaaaggcactactcctcctcagaggctgcctagcctggctggggttactggccgaagcctcctgcctcctggcta

SEQ ID NO: 6044 - DNA, 120 bp, Homo sapiens
cagcgtccacacaccccttttcctccaggtcccctgtccctcacagcaccgatgaatccataacctgtctacatggctggtcctggaacctagagattagcaggttggttcagctggacc

SEQ ID NO: 6045 - DNA, 120 bp, Homo sapiens
tgtcggccggccccatgccttccacccagagtgtctgctgtgtaaggttgtttgctgaagaatgtggggatcaggccaggggcctggacctgagggattgagggtagggctgccagggct

SEQ ID NO: 6046 - DNA, 120 bp, Homo sapiens
cctcgccctgggaacacctgcttttccaaggccctgtggggctggtctctgaggactggacacacagaccatggtggactctccccactgccccaggagggcaagaggggcagttactgc

SEQ ID NO: 6047 - DNA, 120 bp, Homo sapiens
gcccggcagctggtggggagccttgtccaccctcccccaggccgcaggtgggagtagggctgcccctcttcctgcccacttcccagtgggcactgctttctctccgcgggtgtgcgctgg

SEQ ID NO: 6048 - DNA, 120 bp, Homo sapiens
ccccgcgtggtccagacacttcacaggcacctgcacgcacacaccgacggccaccaagccacagctgtccacaggtgcacctgcctctccccctcgccggctgcacctgaatcctgcttc

SEQ ID NO: 6049 - DNA, 120 bp, Homo sapiens
gcccgagccaggagcccagcccttcccctctctgcagatccagagggaatgggcccatggccatggcctggaggtagatataaggcctagggtcaggagtttagactcccacactgcacg

SEQ ID NO: 6050 - DNA, 120 bp, Homo sapiens
tgacgggaatgggcacagacacactcaaactggggcccagggagacacacctctccttcaaacctggacggagacacagactttgaaacagatggatgcatgcgcgcacagggacaggca

SEQ ID NO: 6051 - DNA, 120 bp, Homo sapiens
cagcggccctatcctgcagccccttcccagccccgcctggagaagaccctgggctaagggcaaggctctgggagcaccctgaagccctcacagcctgggcctcagtgtccggagcctgag

SEQ ID NO: 6052 - DNA, 120 bp, Homo sapiens
agccgctggagtccgggggtggggggcggggccggcaggcctcttggtgcagccacccgcccatgcagaccagccgcctgtccgcacgcctgggccagcccagagtggtgccactgccca

SEQ ID NO: 6053 - DNA, 120 bp, Homo sapiens
gcccggaatgtgggccactgacccgctcctatcgcccattcgccccaggtggtgcaaaggatcaaggctgtggaggggcagactcggctgctggtggtggaccaggagacagatgaggag

SEQ ID NO: 6054 - DNA, 120 bp, Homo sapiens
gggcggcctgctccacctcctgctaggtggccgactgggaggggcggcctggcaggccttggggaccaggaggaacagcctgaagctgtctgtcttatcttcctggaggccctgatggca

SEQ ID NO: 6055 - DNA, 120 bp, Homo sapiens
gcccgacagaggcccccttctccctggagatccgtcctcgaggtgtgctagtgacacccgattttagccctgtcacctccctttaatgcccctgtgggtctcatcctgggtcgtgccaca

SEQ ID NO: 6056 - DNA, 120 bp, Homo sapiens
ccacgtggggcccctggggtcggggccactgccttctgtcctctcctgggcaccacctggtaaggagttgccctccagtctctgcctcctcagggagctggcggtggcctcaccccaggc

SEQ ID NO: 6057 - DNA, 120 bp, Homo sapiens
aggcgttgctcacgccggccattcctgcacctgaaccccctctgcaccatgagccggccaggccacctgcctgtcactgccaggcgcccggtgcctgccccgccgcatctggagtccacc

SEQ ID NO: 6058 - DNA, 120 bp, Homo sapiens
gcccgaggccccctgccgagtggaggagcacacactgggggggggtgtgcctctgtgcacatgtgtgcgtgtgcaggtgttgtgtgtgtctgtgaaaccacaatctgcccttggtttccc

SEQ ID NO: 6059 - DNA, 120 bp, Homo sapiens
ctgcgtgctcgtcccgaagtgacctgcctggttccgacaaggacactgaggtatggatgttctccactcctgagctcacacgtggggttgctagaggccttggggtaggcgtctgtggag

SEQ ID NO: 6060 - DNA, 120 bp, Homo sapiens
gcccgggcagtggggtctctgttcaggaagtcctcgtgagccccagccccagcaggcagcctctgttggttgctccctaggaggggccaccgtctggggtgtgggactagggctcactcc

SEQ ID NO: 6061 - DNA, 120 bp, Homo sapiens
tctcgggaccctgggacccctcccgcacggaccttgggcctcagcctgccccgagctcccccagcctcagtggactggagggtggtcctgccattgcccagaaatcagccccagccccgg

SEQ ID NO: 6062 - DNA, 120 bp, Homo sapiens
tcacgtccccagccggcctcccaggcagccctgctccagacacgcgagcacgggtgtgtacgaacacatccttgtatgcgattcccaggctctctgccccctcagggacagacatcagcc

SEQ ID NO: 6063 - DNA, 120 bp, Homo sapiens
aggcgtggcttcctgaagcgtaaagccacttcacagacggtggccacagcggcacctcggccagagccatgcggccatcagagaccctgggcggccgggcagagggcttggttgaggcag

SEQ ID NO: 6064 - DNA, 120 bp, Homo sapiens
aggcgtggcagcgagggtgcacaggcagacaggtctgctggccgaagcccaccaagagtccattgatctcgtgccacagctccctgtgggggtgggggctgggtcagtgctgacagaggg

SEQ ID NO: 6065 - DNA, 120 bp, Homo sapiens
gggcgggcggggtgagctcttctccctaggaagccccccacatactcatacctaggcagccactcctccagggcggcgcgggtctcctctggggacttggttgccttcttggtccacctc

SEQ ID NO: 6066 - DNA, 120 bp, Homo sapiens
tggcgattctgtgcacatgcgtgtccactgctgctgggaggccaagcggggtgaacaggggcacactccaccagcctagcccgtgcccctccccgcccagaggcgagtctgccaccaccc

SEQ ID NO: 6067 - DNA, 120 bp, Homo sapiens
ccccgtggccctccagttagacattggaaccgcaaagccctggctgcaagcctacatgtgaccatcttggctgcccctgaggtgctggggcaggggctgagccctctgttggggtgcagg

SEQ ID NO: 6068 - DNA, 120 bp, Homo sapiens
actcggctctgcttggagctctattccccacaataacagcgacagctcgcttggacaaacgcttgctgggggccagaccctgccagagagattggccagctcagtgagtcctcatgaggt

SEQ ID NO: 6069 - DNA, 120 bp, Homo sapiens
ctacggatgctgaaaccgaggcccggcaggatcccgactccgaagcacctctcagccctcagcctccccaggaacgtggccctgtccccggaagggtccatccaggcttccctctgtctg

SEQ ID NO: 6070 - DNA, 120 bp, Homo sapiens
tctcggcataagcactggctctgggcaccaggctgggtggcaacagctctgcctggcaggccggcatgaggtcactgcctgcagacctagcacctgccactgcagcggtcagggacacag

SEQ ID NO: 6071 - DNA, 120 bp, Homo sapiens
cagcgggagcatgccctggccggccgcagctgctgtccacctgggttctggctcctgctcccctcagctggccaccccaggcgtctgctcactggggctcccttctcccacccggtggcc

SEQ ID NO: 6072 - DNA, 120 bp, Homo sapiens
ccccggccagctgcagccccagccctgcctcctcctcccgtgtttcccaaagagaaagccgaggcctgcaccagctccttcgctgctgcctagaaaaaggtgtccgagggtgtggggaga

SEQ ID NO: 6073 - DNA, 120 bp, Homo sapiens
tcccgcctgctagctcacccctcactcgttcatgccacaactgtccatcatctaatacacttggggtgctctgccctctgcagtctggggtatgtgggccctccttatgccagcgaccct

SEQ ID NO: 6074 - DNA, 120 bp, Homo sapiens
agccgggcgcctccatgtggagatgtagctcagggtggatgacagcatcaatgacccacagtgacagggacgtcaggtgcttcccacatgcccgcttgccctgtggcttggagagagggt

SEQ ID NO: 6075 - DNA, 120 bp, Homo sapiens
cagcggggagaggtggcagcgcaggctgaaggaggtgggaaggaagcctgggtgtcctctcctgtggggaggagctggggtaggacgggcgtgagccgtctccctctccaccaggtctcc

SEQ ID NO: 6076 - DNA, 120 bp, Homo sapiens
ggacgccgtggtctgctacaactgcctgccggctgagagcctcccgctgttcatcgttaccctctgtcgcaccatcaacgtcaaggagctctgcgagccttgctggaaggtggggtttct

SEQ ID NO: 6077 - DNA, 120 bp, Homo sapiens
ggacggccagtgtcattttcccaggcagttgagctgaggtcagggttttggtggcattttgagaaccctgctgcctctgtctttgggaggagatggtggcgagctggccggaccttgggt

SEQ ID NO: 6078 - DNA, 120 bp, Homo sapiens
aggcggggccagcagcgggactggggctgggggcagggcttatgcctgccagcccctgacacgcattgtgtctcgcagctgatgcggaacctccttggcacccacctgggccacagcgcc

SEQ ID NO: 6079 - DNA, 120 bp, Homo sapiens
gggcgcagggcagtggaggccagcacagccctcggggcagctccagtgtcccttgccaagcacacactggcttagagagtccttgtcctctcgggcagctgttccagaggctgccactag

SEQ ID NO: 6080 - DNA, 120 bp, Homo sapiens
aagcgcagccggtcgcggctctcctccaggctcaggcccagctcctgcacgtagcccccgctgtcatacacggcacaggagccccaggaccatgccctgccggagaggggtggcgtgggt

SEQ ID NO: 6081 - DNA, 120 bp, Homo sapiens
tgccgcaccccagcccttccggcaccccggagccaggctggtcaggaggccgcggcactcctggagaactactcccttgtccttggcgtagacgcccggggccctcgctctgctcacccc

SEQ ID NO: 6082 - DNA, 120 bp, Homo sapiens
atccggcgctgaataggcccacgtccccgagccattgtgaggactctcccagccaacgtcgtaatcgctggtgctgaagcctcctgcggccgagcacgtgtggaccctggggccgggagg

SEQ ID NO: 6083 - DNA, 120 bp, Homo sapiens
ggccggggccagggcctcatcaaaacccaacaggagtgtttcctgctggccagctcgcctgagctctggttcggcgccaccccagggaaccctcccagcagccatcaattagacaacgtt

SEQ ID NO: 6084 - DNA, 120 bp, Homo sapiens
aaacggcggtgttaagagggcaaaggtcacacagctagggagcagggctgatgccagagctccgctaaaggctgctctctcaacaagaggaacgatttaagtcttggggcacgccctgcc

SEQ ID NO: 6085 - DNA, 120 bp, Homo sapiens
agccgcacctgccgcagccgtgggggccccagctctgggctggactggttcccgtggacgtagggcagcagcacgtgggccatccatggccagagctcctcagacctgccacagcatcag

SEQ ID NO: 6086 - DNA, 120 bp, Homo sapiens
acacgctccagcccctactgccccatgcccgcctcgagtgagcggccaccagagacccagggaacatggctcccactgccctgctggccacggctagacctgggcttctcagccttatcc

SEQ ID NO: 6087 - DNA, 120 bp, Homo sapiens
gcccgtcctgtgcactgcaagacacggacctgtgtccctcccctctgcctactgatgccagcagcacctacctccagttctagcagccacaaaggtatctacacatgtccacatgtcccc

SEQ ID NO: 6088 - DNA, 120 bp, Homo sapiens
caccggatgcccgtaccgcgtgatggccaggaaggcccggctgtgcagctcctgcttgatggcgctttgcagacggtaggcgtgcccatggcatgaggcatccccatagctggccagcag

SEQ ID NO: 6089 - DNA, 120 bp, Homo sapiens
ggacgggggggccctgtggtcagcctggccccagcccacagtgacagcagggctttggcaacggctggagccatggctgcggcaggtgtggctgcaggaaggtgagctggcagggggcgc

SEQ ID NO: 6090 - DNA, 120 bp, Homo sapiens
gcccggaaccccacctgggggcagacacacaggccactgcagtggtgcttaggggccttcagggccaggcaggagtgggcattggagctgggccctggcagggactggggcagcaagtgg

SEQ ID NO: 6091 - DNA, 120 bp, Homo sapiens
gggcgtggggtaggagggagaccgggcaaaggctgcagagcattgaacccctaagggccttctgaggtgaggaaagggggacaggagtgtcctgcgtgcatgggtgggaggtgggagaca

SEQ ID NO: 6092 - DNA, 120 bp, Homo sapiens
agacggaggtggcaggggcacaggccgcacccaggctcacccgcagcatgccatgtagcctcttgaccttgcgggcttcttccttggccaggaagagtgcaaagccgtggggtggccgta

SEQ ID NO: 6093 - DNA, 120 bp, Homo sapiens
gaacgtggccttaaacaccaccgccccctagaggctctcttgggtactttcacttgctcactgcatcaaatcttgaaaccagatcaaaactgaagctcccacaagcacagcctaattcag

SEQ ID NO: 6094 - DNA, 120 bp, Homo sapiens
ggccggaagaaccatccgcagagggtcacaggacagctggacaccctgacagcccagatcactgaaaggtaaagatggaaatcatggactgggtgcggtggctcacgcctgtaatcccag

SEQ ID NO: 6095 - DNA, 120 bp, Homo sapiens
cgcaggaagccagcactgctgagagcaggcaactggctccgtaggagtgaggatactgctctgacagccacagaggcgcacatgactcccccgttagctcatcttctgtgtggcagatca

SEQ ID NO: 6096 - DNA, 120 bp, Homo sapiens
tcccgtctgggagcacctgagtcactgtggtcacgtctgcaggcaacagacaaagggtccccattcgggcagggatggacacctgtttgtcccgacccacccggtagggcctcagggcca

SEQ ID NO: 6097 - DNA, 120 bp, Homo sapiens
caccggagagagcttacctgtgatgtcacccacgtgctggggtgactcagtgctcctctctcgggtggaagttgcgttcagtgctgccgcagttcctccaacgtctccatggcaacgttc

SEQ ID NO: 6098 - DNA, 120 bp, Homo sapiens
acacggatttcatagaacataaggtgtttgagctggaagggacctcagagatcggctcctcctgccccctcatttcatggagaggggagcaggcccagacagggaatgccacgtgcccag

SEQ ID NO: 6099 - DNA, 120 bp, Homo sapiens
agccggggaccccgcggagggcacagaccgctgagctccagaggagggtcttgggaggtgccctgggggcacaggccgtggcggctttgccactccctggcttgctaagagccccttgaa

SEQ ID NO: 6100 - DNA, 120 bp, Homo sapiens
gcggggaccgggcgccgagagacccgggcgccagtgcccctggagccggcccgccaggctgtcaggcgttcctggcccagggttcccgtgggaggtgtcgagggattgtgaagaggaatc

SEQ ID NO: 6101 - DNA, 120 bp, Homo sapiens
attcggtgtcagggaacccgcacccccaacccccaagcatcctcctgctcctctccgcaaataatgcgggcgccacagcttcccccagcctcagtccgaagcctgaccccaaggtagccc

SEQ ID NO: 6102 - DNA, 120 bp, Homo sapiens
ccccgcaccgactgggggtcgcctccatctccatccacaggggctggaacctcccgccggcaccaaccgacccccggcccacgtctgcccactctccagcctgcagcccaggcaggcgag

SEQ ID NO: 6103 - DNA, 120 bp, Homo sapiens
ccccgacttgtgaccctctgagctcctggctgaaggcttgggccaccctgcgcctcaggccctctcccgtcaggcctgcagcattctagaggcagatcagtgggggtctgagtcccgact

SEQ ID NO: 6104 - DNA, 120 bp, Homo sapiens
ctccgtttccctcatcacccaagcgggcaaggccgtttggagaatttggggagggtcgcacccattctatgaggcatggcctggcaccccactctgtgtggccccagaccattgagcagg

SEQ ID NO: 6105 - DNA, 120 bp, Homo sapiens
caccggggtcccggcatcctgtgggcagctggccgttcccgttccctccgtggggtctcctgttaggttcaggtagcagcccttggtcttccagcactcctgggaggggtccccaaatgc

SEQ ID NO: 6106 - DNA, 120 bp, Homo sapiens
acccgctgggtcaggcactgtgctggtcacctcctagatgaggttggactcactgtccccattttacagatgaagaaactgaggctcagagaagccaaggggctcacctggggtcccaga

SEQ ID NO: 6107 - DNA, 120 bp, Homo sapiens
agccgagcagatgcttaagccccacctattaatttgggtaactggttttcaatttctttttttttattctgcagattaaagacactcaatctttaaccttgaagggcaggcaaaaggtcg

SEQ ID NO: 6108 - DNA, 120 bp, Homo sapiens
acacgcagtcactttcctgattattcttcacatcccctagagtggagactccggtgagggtcaggatggtcttcaggccacaggtggcgcctaggaggatgtctgtgtccaggcggtctc

SEQ ID NO: 6109 - DNA, 120 bp, Homo sapiens
tgacggtgcgctcggggttgatgccgtattcctgggacacgcagtcgaaaatgaagcggctgggcttcccgatgatgtcggcctggcgctgggcggccatctccacggctcggaccagac

SEQ ID NO: 6110 - DNA, 120 bp, Homo sapiens
acccggtacctgcggggcacaggggaccgggtcaaagggcagggagggggcccgccgcccgccccccagcctcccgccccagggcgcacggacccgcgatgaagcggccgttctcaagcg

SEQ ID NO: 6111 - DNA, 120 bp, Homo sapiens
agccggttgtccatgttggtgcccacgagcaggcagccgggctgctgcaggtagcgcagggccttggtgagcttcatgtagctgaagtgcgggtcaaagcccaccaccaccgcgcgcacg

SEQ ID NO: 6112 - DNA, 120 bp, Homo sapiens
catcgtggtggaggcggcctctctggcagcagacatcagccacgcatctgaccttgttggtaagccgacttccatgaatcgctggcctgatagaccttcgtggttggggccagaggatgg

SEQ ID NO: 6113 - DNA, 120 bp, Homo sapiens
gctcgtctctcccgagaccagggcctggctgggaggggccgcggcctcgtggcagcctttctgcgggcacagcctgcaggaggaggaagcgttgggcactgggccttcctcaggtgtcca

SEQ ID NO: 6114 - DNA, 120 bp, Homo sapiens
ggccgggggcacacccaggcaccagggagtcattgggctgtgctctctcccgtcagctttcccgggtggtctctgccgtgtccctcccagaatcttccccacttccctgccaccccctgg

SEQ ID NO: 6115 - DNA, 120 bp, Homo sapiens
gtgcggcaggggcgagtggctaggtgtgcagacgcgagggaaggagctgtctagggacctgatgctgtgggaggtggggcggggcatggctgctgcctggggagcctgctggaccggggc

SEQ ID NO: 6116 - DNA, 120 bp, Homo sapiens
aggcggggagtgggcagctggacaggaagtaggtttgggcaccaggcggaacctggccttgggcagccctggggactggctgcagcaggaagagggggtggaggagccgtggcggaggcc

SEQ ID NO: 6117 - DNA, 120 bp, Homo sapiens
acccggggcctgggaagggcacctgtgagcaggctgctctccaggaggcagccagggcacctgtctcacctccgtgctgcctttccctggcattcctgcgaccaagacactcatcaatgc

SEQ ID NO: 6118 - DNA, 120 bp, Homo sapiens
gctcggaatgttcatgtgggaggtggggcgggctctggccttgacctggcgtttggtttctgggatggtggcgtcacctgggagcatgaactccttaggttctggcggggtctctgggct

SEQ ID NO: 6119 - DNA, 120 bp, Homo sapiens
ttgcgggcatcctgggtactctgtgtgtgcccttggccagtcagcaggcccggtgggcttagtccagggctgctagctctcctgttggcctctagtggagatggcagagggtcctgcctg

SEQ ID NO: 6120 - DNA, 120 bp, Homo sapiens
gggcgtgccaggtcctgtctttgcgggtgcaggggtgcggtcagctgtgtgggcagttggaacccacctccaggccctcctgccgcttcgcggaaaaagttcgcgtctcctctggcctcg

SEQ ID NO: 6121 - DNA, 120 bp, Homo sapiens
catcgagcgtgtaagggctcgggcaggagaggctcttaattgtttctgagtcaccacgcttttgtcgtgtttcaagagaacagcttgtcaaaacaagacgccagccggactgaggtggtt

SEQ ID NO: 6122 - DNA, 120 bp, Homo sapiens
cctcgcctcaggctgtcccgggtgtctggagagcgttcactctcccaggccaagcctgccttgggacggggctctggccaggcctgcctgccctgctgcagtggcccagcccatctcctc

SEQ ID NO: 6123 - DNA, 120 bp, Homo sapiens
ctccgatggaagagtggccccggacgcacatcctccctatgttggtgggagcagtggcaggagcagtggcagcgagcaggacaggcggctgtctcttcacccaaggaccttgtcaccagg

SEQ ID NO: 6124 - DNA, 120 bp, Homo sapiens
attcgcacgtcctcctggctttggggatggggcatctgtgctccatggtgggtctccctgtggacacatttaggggccctggagcatctctgggcagcctgacagagtcgggaggtgtct

SEQ ID NO: 6125 - DNA, 120 bp, Homo sapiens
gctcggacctgtgtgttgagggctcagtgcaggttgggtccagggtgtggctcagagcagcaggtcccctcccctggagccagcagtctctggggtctctggacaggggcaggtcctggg

SEQ ID NO: 6126 - DNA, 120 bp, Homo sapiens
catcgtggctgctgaggcggagctgggagacggtgagatggccgaggccccgggcagcccccgccagcaggggctggggctcgcaggggagggtgagcaggcccaggtgaagctactggt

SEQ ID NO: 6127 - DNA, 120 bp, Homo sapiens
ggccgctatgtgtgtgcgctgtgccacaagaccttcaagacggtgagccggcgtgcggggagccagtgtgtgggtggcaggccccctcctgttcccccaggagggccctgagctgccacg

SEQ ID NO: 6128 - DNA, 120 bp, Homo sapiens
agccgcaaggaccacgagtgcaagctctgtggggcctccttccgcaccaagggctcactcatccggcaccaccggcggcacacgggtgagctggccgcacctcgggctggagcccggtag

SEQ ID NO: 6129 - DNA, 120 bp, Homo sapiens
ccccgatggttggccctggggtgccccagcctcgcattccccagctttgggggatgaggcgggggcccctgcctgccttcgccttgtcaccttgtcgccagcctgctggggctgcccggg

SEQ ID NO: 6130 - DNA, 120 bp, Homo sapiens
gagcgcccctacaagtgctccaagtgtggaaagagcttccgggagtcgggtgcactgacccggcacctcaagtctctcaccccctgcacagagaaaatccgcttcagtgtgagcaaggac

SEQ ID NO: 6131 - DNA, 120 bp, Homo sapiens
ggacgtggttgtcagcaaagaggacgcacgtgcaggtcagcatggtgcgggcagctgcctggtcctgggggctggctgtggacgcagccgccactggggtgtgtgagggatcttcactcc

SEQ ID NO: 6132 - DNA, 120 bp, Homo sapiens
tgccggcttggggacagccacatcatcggtgacaggcgagcctatagagacttcacccgtgattcacctggtgacagatgccaagggcaccgtcatccacgaagtccacgtccagatgca

SEQ ID NO: 6133 - DNA, 120 bp, Homo sapiens
gggcgacggggggccccggagggctgctctgtcttctgcctgctcggtgccagtctttgttctgggcactggctccaggggtctgagccaggcaggcgagggctgggcttcccacaggga

SEQ ID NO: 6134 - DNA, 120 bp, Homo sapiens
gagcgccatgggggtctgagggtttgcacaaggctcctggcgtgcgtctgccccatggggtgggtgctggatgccaggctgcctggccagcctcctctctctgcctcccctgcagccccc

SEQ ID NO: 6135 - DNA, 120 bp, Homo sapiens
ccccgtctcccaggagctcccctgctccagcgagggcagccgtgagaacctgctgcaccaggccatgcagaactccggcatcgtccttgagcgcgctgctggggaggagggtgccctgga

SEQ ID NO: 6136 - DNA, 120 bp, Homo sapiens
tgccgggtccagtccccagcccctggcagtggcagccccgcagctgccggtactggaagtgcagccgctggagacagtaggtgccagcaccacctgcgggctcctcccagggctggatcc

SEQ ID NO: 6137 - DNA, 120 bp, Homo sapiens
ccacgctggccttcgcctccctgaagtggctttctgcagtgactttgtccattgatctgtttactgccttccctggggccacaagggagcctgccagggtggggcccatggttgtgttct

SEQ ID NO: 6138 - DNA, 120 bp, Homo sapiens
ccccgggtgctggagaccttcctgtggttccccagcaggtggccagcgaggcctcagcggtgcccaggacccacccatgtcctcagtgcagtgagaccttcccgacagcagccaccctgg

SEQ ID NO: 6139 - DNA, 120 bp, Homo sapiens
caccggtaggtgatgggtgggtgtgtggcccatggcagtggatgggctataggtggccggggtgcttctgggtgtccagggtgggtccatagacagcagggagccaggggatctgtgggc

SEQ ID NO: 6140 - DNA, 120 bp, Homo sapiens
caccgccggccgccactgccactactgccgggagggcttctatcgagaccctggccgtgccctgagtgaccgtcgggcttgcaggggtgagccaccaccggccacctgcaggccctcacc

SEQ ID NO: 6141 - DNA, 120 bp, Homo sapiens
agccgctccccagtggcgccctgtgttagtgagtgaccctgccccgcctcagccaccaagccaaggccaccccagctccctgctgttgtcccgtctattccccgagccctgcagatctct

SEQ ID NO: 6142 - DNA, 120 bp, Homo sapiens
tcccggcaagggtccttctagccttgctaccttggtaaacctgtggccttaggatcgaggtgtggacattaacttttctgctctggcggcttcctgggctgtcctctccatgttcccagc

SEQ ID NO: 6143 - DNA, 120 bp, Homo sapiens
aagcgtagaagtgtcttagtcagagccccaaaggacactcaccggcccacgttctcatggagctgggtagctctgaccagacttgccctctggggccctgtcctttgaccacgctgtctc

SEQ ID NO: 6144 - DNA, 120 bp, Homo sapiens
agccgaggcaggccttggcgctgggaaagcaccgtgtcacagcacctgcaccttgaattggcatcgtcagtacacctgacccgggctggggtggggccatgcctctgtactcctctgcac

SEQ ID NO: 6145 - DNA, 120 bp, Homo sapiens
cctcgagctggatctctccttaggtctaaagacacttgctgagaacctgatgtgtgcctggccttccaaggcacacctgtcactggcttggaactcagaccaatcaaaatgcctgtgctg

SEQ ID NO: 6146 - DNA, 120 bp, Homo sapiens
gaccggactaggctggggaaagaaagatgtctggctatgaaagggtggctggccaaggttgaggctcagcctgcccctgctcaggctccgagcagcaggctcagcagccacagttaggca

SEQ ID NO: 6147 - DNA, 120 bp, Homo sapiens
tgccggggtggcctgtgtctccaggactcgtgggagggccctggtactagaagtggccgagtgccctgaagtcccagacctgcgtgggtcctgcctgtgctcagggaccctctggagcct

SEQ ID NO: 6148 - DNA, 120 bp, Homo sapiens
tctcggaggtcctcgctgtcccaggatgaagggagatggagcagcaacagcagccagcagctgtggggttgtgttccgccccgaggctggggtgagctgcttgtctgctggagcgaaggg

SEQ ID NO: 6149 - DNA, 120 bp, Homo sapiens
ccccgctggggcccctcctgccccgttctccagtgaggatctacttcctcccacatccatgctacctcccacctgcctcctggctagaaattagctcagggtgccacactcttgacagac

SEQ ID NO: 6150 - DNA, 120 bp, Homo sapiens
agacggcccgcctcccagccctggccgccttcctcttcctgtgggcgccttcagggggtttgctgccagggacggatttgggggtttcttggagctcccatggagtgaggacataggctg

SEQ ID NO: 6151 - DNA, 120 bp, Homo sapiens
tggcggggtgggggtctgcaagcctgtagccatttaaagggcccctcctcacatgtggtagagccagaactgtgccctgtggccagagggcacggtggtcacatgcgtcagatgacatat

SEQ ID NO: 6152 - DNA, 120 bp, Homo sapiens
ggacggtggcctgtgagagagctgcccctggcccgtgcagttgcacctccctctgcaggaccggctgcgtgttgacccgctgggaccgtgatgtcccaggcattctagaacacctttcta

SEQ ID NO: 6153 - DNA, 120 bp, Homo sapiens
gagcggtcctggccggccgggctgggctgagtgctttctatcaacaggctcagtaaatcccgcaacagaacagggactagagcccatcccttgccagtttcccactgcgcttggaatata

SEQ ID NO: 6154 - DNA, 120 bp, Homo sapiens
ccacgggggcttgtgggtgtgtccgtgctgccctctgcgccctgtagcgcagccagcctgttcctccctcagcctttgcacctactctgctggtgtctggagcgcttcatcctcagcaat

SEQ ID NO: 6155 - DNA, 120 bp, Homo sapiens
tcccggctgcttctttctcactcctctggctcaatgtcatctcctgggagaggtgtgccctgaggatcctcagtaaagtagctgtcaccctccagacccacggtgtggacccccaccatc

SEQ ID NO: 6156 - DNA, 120 bp, Homo sapiens
tctcgtgggtgtcaggtggaatttttcctattttcctggaattgcaggctgggcccaaggctgaggaccaaagacaggaggagtgcttctctgctccacactcagggagctgctggcagc

SEQ ID NO: 6157 - DNA, 120 bp, Homo sapiens
cctcggagaaccagcgccacctcactccgtgcctctgcagggaactggagcctggtggggaagcacactttaggtgaaggcagtgcagtgttcatggcgagcagcgattcgctcggaccc

SEQ ID NO: 6158 - DNA, 120 bp, Homo sapiens
acccggagagagagtgggatagactgttcatggggtgtcacccttatgtcacctgcaccccaccctgtcagtccagagtgaggctcaacccacaggggttgcttgggaactgttgcccgt

SEQ ID NO: 6159 - DNA, 120 bp, Homo sapiens
tatcggctccgctctgcagacatggcaaccgcaggttagggaagatgcacggcttgtccgcatttcaagcaaacaagtggcagagctggactttgtggccaggcctgtctaactgcaaag

SEQ ID NO: 6160 - DNA, 120 bp, Homo sapiens
ccccgtttccacagtagcccctgcctcccctctcactccctccccggccaccgcctccggctctgcacctttgtcaggggttgggggactgcagggaacagaggaggccttgtttgctgc

SEQ ID NO: 6161 - DNA, 120 bp, Homo sapiens
ctgcgtaggagcaggtgcggcttatgatgtacagcagcagccagccagcagatagacaacagggaaagccactcggccgtgaaagctcacctccagagtgtgggcactcaagcccataag

SEQ ID NO: 6162 - DNA, 120 bp, Homo sapiens
tagcgattatctgtatgtggaaggggagtaggattagagaggtaatttaaacagaactctacatttttactccctaattttggtactatttgactttttgtgatttttgcattcaaatat

SEQ ID NO: 6163 - DNA, 120 bp, Homo sapiens
ggacgctgccatccaggacctggggcccaaggagctgagctgcactgaactgcaggaactgaagcagctggcgcgccagggctactgggcccaaagccacgccctgcggggaaaggtgta

SEQ ID NO: 6164 - DNA, 120 bp, Homo sapiens
cagcgcctgatccgggacattccctgccgcacggtcacgcctgacgccagcgtgtacagcgacatcgtgggcaagatcgtgggcaagcacagcagcagctgcctgccgctgcccgagttc

SEQ ID NO: 6165 - DNA, 120 bp, Homo sapiens
gttcgtggacaacacgcaggtgcccagctactgcctgaatgcacgcggcgagggggccgtgcgcaagatcctcctgtgcctggccaaccagttccccgacatctccttctgccccgccct

SEQ ID NO: 6166 - DNA, 120 bp, Homo sapiens
tgccggccgtggtggccctgctgctgcactacagcatcgacgaggccgagtgcttcgagaaggcctgccgcatcctggcctgcaatgaccccggcaggaggctgatcgaccagagcttcc

SEQ ID NO: 6167 - DNA, 120 bp, Homo sapiens
agtcgtcctgcatgacgtttggggacctggtgaacaagtactgccaggcggcccacaagctgatggtggccgtgtcggaggatgtcctgcaggtctatgcggactggcagcgctggctgt

SEQ ID NO: 6168 - DNA, 120 bp, Homo sapiens
cttcgcccgggtctttgacgtcttcctggtggagggctacaaggtgctgtaccgcgtggcgctggccatcctcaagttcttccacaaggtgagggccgggcagccgctggagtcggacag

SEQ ID NO: 6169 - DNA, 120 bp, Homo sapiens
cagcgtgaagcaggacatccgcacgttcgtcagagacatcgcgaagacggtgtcccctgagaagctgctggagaaagcgttcgccatccgcctcttctcccgcaaggagatccagctcct

SEQ ID NO: 6170 - DNA, 120 bp, Homo sapiens
caccgtgaagcagaagaggtaggtcgccggcagcctgtgaggggtacacccagggtcgggggctggggcaggacgtgtctggcgtgagctcatcctgccggcctccaggcggcctctgcc

SEQ ID NO: 6171 - DNA, 120 bp, Homo sapiens
cgtgccttcgggctctgacccctgctcgctcccctcaggcagtttgtacacttggccgtccatgcagagaacttccgctcggagatcgtcagcgtgagggagatgagagacatctggtcc

SEQ ID NO: 6172 - DNA, 120 bp, Homo sapiens
ccccgagcgctttgccctgtgccagccccttctgctgttctcctccctgcagcacgggtacagcctggccaggtaacaccccaaggggccagagcgggcggcagagccgcccagccacgt

SEQ ID NO: 6173 - DNA, 120 bp, Homo sapiens
cctcggcacctggtgaggccctgcttcttcctgtggggcctaagaatcagggtccctttctgggctctgtcctccccacaccacccagactttgggggtcatggcaggcgtgccacagct

SEQ ID NO: 6174 - DNA, 120 bp, Homo sapiens
aggcgtgagccactgtgctgggcccaaaatgtataaattttttaaaaaatgggagcaagcatgggctcaattaattccaacggtcaacgctgccaaattactaagatttctcttgcccta

SEQ ID NO: 6175 - DNA, 120 bp, Homo sapiens
cttcgcacgaactttttccacttccataagaatcttctgggattcatccacattaccttcagcccctagctgttcggctttagcaaggagttttcctatttcttcatttaactcatgtac

SEQ ID NO: 6176 - DNA, 120 bp, Homo sapiens
aaacgagtcctatgttccaatgaaaccagtggcacctttgtcacttccgacatgcttccaaggatcatcacagattggtcattgtctaggctgtctctctttatgactttttcttctggg

SEQ ID NO: 6177 - DNA, 120 bp, Homo sapiens
cgcagtctctgtccatgcaccctgggccaccggggagtggaattgtccatttcattgtctctctcaggggatgctggcgcgggggtgggtggcgcctgtccgtggggcccttgcctgcct

SEQ ID NO: 6178 - DNA, 120 bp, Homo sapiens
ccccgtggtgctggcgtgttctgtcactgagccactctggggcttcagtgtccctggcatgggtgacactgctgggagtgcctctgggctccttgcctgtggcctttttttttctcagga

SEQ ID NO: 6179 - DNA, 120 bp, Homo sapiens
aagcgaggctacttctcagtactatttccgaatcgcttcctcagtgagtcctccccaggctgcaggtgccgagcgggagcaccactcctgcacgcccgtgcctgtggcatgcccagatga

SEQ ID NO: 6180 - DNA, 120 bp, Homo sapiens
gagcggcccagctcaatgtcttcatttagggccattgagagtttcttgtgtcactgaattcctcttctgggaatttttagtttgtgtcattttgttgagttttctgttgggttccaagcc

SEQ ID NO: 6181 - DNA, 120 bp, Homo sapiens
tctcgtggcactgtgaatttgctgtggggtgcagctgatggcccatggcggctgtatctggaagtcctttcccgccccagctgtggtcctggtggttttttaggtggaggtggtttcgtc

SEQ ID NO: 6182 - DNA, 120 bp, Homo sapiens
ttccgtggctcccacagctcagtgctgggctgctgttctcgctctcagccaggaaggcggcccctcccacacaggttgcagggatgggctgctgtgttcttctggtttttctctccttcg

SEQ ID NO: 6183 - DNA, 120 bp, Homo sapiens
tggcgtgtggtgaaagctgaggatggggagaggccgtggggccctctccgtcctcatctgcctgcaagagctctgactggcctgggctcaaagggaccctgtgcctcccacgctgcctgc

SEQ ID NO: 6184 - DNA, 120 bp, Homo sapiens
ccccggtgtaatttatgatgaattttcctttgttgttcctctgcgctgttgcctggtcacaggcctgtctgtcagagtggcttcctgccggctctgtggtccctccaggcatttctgtgc

SEQ ID NO: 6185 - DNA, 120 bp, Homo sapiens
aggcgaagtccctggtgcgagaggagggctgcacttgcccgcatgccacacactcctcttgcttcagacccacaggatgggatgtgtgtgtgaggccaggccctgggtcctccctcttgg

SEQ ID NO: 6186 - DNA, 120 bp, Homo sapiens
actcggccagtccggtcttctcacaagtgctgttggccctgtgtgcagccaggcaggcgtgtggatgtgctcagatattgatttgatcatcttatgccttcttcaaatataaaacatatt

SEQ ID NO: 6187 - DNA, 120 bp, Homo sapiens
ggtcggctttcctctagagagagccggttttggggccatttccctttgatgctttggtggccttgccccgctctgcagcacagacaggccagatgcatttgtcctttgcctagctactcc

SEQ ID NO: 6188 - DNA, 120 bp, Homo sapiens
actcgggcatgtgacctcgaggccactgtgtgcctttgtcactcaggcatccctggcatgagtcaccaccttaaggtcagggacccaggacctctgaaccccttctcactgctgcgtttc

SEQ ID NO: 6189 - DNA, 120 bp, Homo sapiens
ttccgtccagccccgtctgcagcctgagtcctccgtagtgactgtccaggatgtggggccaccccgcccactggggagcagctccatgcaggcgggcggccctggtggctcaccatcact

SEQ ID NO: 6190 - DNA, 120 bp, Homo sapiens
aagcgtgccaggcaggtgggggattaggaggtggatggagttttaggaagcagctcagccttcgggaggcccaagtccaggctgccgcgcaagttcaagagcctttttctggtagctggg

SEQ ID NO: 6191 - DNA, 120 bp, Homo sapiens
gagcgagcttcgtctggcactggctctcagggccctgcttgccagagcctttcccgaccgatgaattcagggctgcacggttgctgcgtgcggagcagacgtggacgctctcgtgtcgtc

SEQ ID NO: 6192 - DNA, 120 bp, Homo sapiens
tgtcgagccacaggtgctcttgggatttcaggaacatgactcattttattttggaacttagaaatagaaatatttttggaggcgaacgaggaagcagaaaacagcagctgttcgggccgc

SEQ ID NO: 6193 - DNA, 120 bp, Homo sapiens
ccgcgtgttttgcttttgtggatgtgctcaggattgctttgggcctcgtgccctgtgctgagaactgcagagtggacctcagcctccctgggtcacctgggctggggccacaggcagcag

SEQ ID NO: 6194 - DNA, 120 bp, Homo sapiens
gttcgagcaggtgaggggccctggccagcctggtggcagccatgctgcagctgaacttgtgctcacaatggctcagggctcagtgctcctggaaatgcagactttgctgctggcgtcttc

SEQ ID NO: 6195 - DNA, 120 bp, Homo sapiens
tcacggcagcgacctgtgccctgtttccactggaggagccttgggagttcgggtggggtgggcagaggtgtctcaggctctgccccgcaccttcccctcctccctggcctgcctcttctt

SEQ ID NO: 6196 - DNA, 120 bp, Homo sapiens
cagcgctgcgctttcttcgcatcatctggcacctctgtgtgagggaggggactggcgtccccagagcctcctggccagcccactatccagcgcaatccccgtcccccacagctcactcca

SEQ ID NO: 6197 - DNA, 120 bp, Homo sapiens
catcggagcatatggaggccctgacgcctttcccaggctgcctccccttcccgcccatgctggaaggtgctgccaggccctcgttgccttctctctggttttggcaagctgcggcgggtg

SEQ ID NO: 6198 - DNA, 120 bp, Homo sapiens
ccacggaagccacctgagtgctgcatgggccactgtgccatggcattgtggcttgtcatcggggacctcaggacacgtgaggcatggcctctgaccggggggcccttgcccacgacctgg

SEQ ID NO: 6199 - DNA, 120 bp, Homo sapiens
gtgcgcctgccaggttgtgggagtgacaggctcagccagtgtccctctgaatgaaagctaccttttccttggagtctttcaaaataatagatcacattgtagggtacttggagccccccc

SEQ ID NO: 6200 - DNA, 120 bp, Homo sapiens
tcgaccttagcacttctgggtggattccaaacccattgcaaagaacgggtgtcctcccccttccttgattacgacctgcttggcacgcttcatcccttggggaccccttctcccagttca

SEQ ID NO: 6201 - DNA, 120 bp, Homo sapiens
agccgctgggctgaccagctgtcccggctgtggggtgggaccctgcggggtgctgggaggtggccagaccggacccagggtccccagtggtcagcaggggattgcaagcagggcttggaa

SEQ ID NO: 6202 - DNA, 120 bp, Homo sapiens
ctccggggggcatggccgtgagtgctcccaggggtacccttagctgcttgggcccatgccggcacccctgtggccgcctcactgggctgggtccactgctgcccactgggtcagccgcca

SEQ ID NO: 6203 - DNA, 120 bp, Homo sapiens
cctcgccagctgctgtgactcctcctggtggctgctccacgaagccttggctgttggactccccgcccccccgcagggagattcccattcacggtgtcccccagggcctggctgtctgag

SEQ ID NO: 6204 - DNA, 120 bp, Homo sapiens
ggccggcacggggcttggagtaggggagagacccagtttctgctccaaggggtcttcccgctgcccgactcccaccaggagcctggctaggccttacagccccttgaccaggtagagttg

SEQ ID NO: 6205 - DNA, 120 bp, Homo sapiens
cagcgtggcaggcgtccccagccaaagcccggagcaggtttcccatccaagcaaaaggctgtaaaggagacaggccctgcagtttgggtcctgaagccgaggatgctcagggccgctggg

SEQ ID NO: 6206 - DNA, 120 bp, Homo sapiens
gcccgcccgctgtggggactggggcccagccctgtggctccaggaagccagcgtgggggcagaagaggaggcaggggcggggcacatgcaggtgccctgcgtgggtgcccgtcctcccca

SEQ ID NO: 6207 - DNA, 120 bp, Homo sapiens
cagcggctggcaccaccctccttgacatccctgcatttattggtgtccactcagcagggacttctagcaccctccttcctcctaaagctcgtggcagtggccggctggggcgatgaagag

SEQ ID NO: 6208 - DNA, 120 bp, Homo sapiens
tgacgtggcatctgtgtgagggacgatgacttccggcacctctgcactgagccgtgccccccaagatgggtcactttgccctcagaccacctcttcctccccagtgttcccaggcctggg

SEQ ID NO: 6209 - DNA, 120 bp, Homo sapiens
gctcggcacagggaggcctggcctgtggctgacccctcaccgcagttctggcccgaatggagcccacagacttctttcctggggctcccgctcctgctctgtgtgtgtgtgtgtgtgtgt

SEQ ID NO: 6210 - DNA, 120 bp, Homo sapiens
tgccgcccgctctgcctacctccctgtgagccacagaatgtgcgcgggcctgtgccaggctctccctcgagtccctcctggagctggcaggggccctgctgccgcccacctggcagatgg

SEQ ID NO: 6211 - DNA, 120 bp, Homo sapiens
cagcgtgcaaagtctgagctgcacccccgccccaggatggaaaagggacctgtggcaacctggactattcccttcctaacgtccttctcacggcatgcttcgtgggagctgttaattgca

SEQ ID NO: 6212 - DNA, 120 bp, Homo sapiens
ccacgggcatctgcctgttgacatcctgggtctgggtggggtctcagcacaaagacagcaggggctgccctccctagaccatctaacctgtagcctcccctctgaccacgggggcctggg

SEQ ID NO: 6213 - DNA, 120 bp, Homo sapiens
ctccgtgattacagcccccagcgtgggtggacctgtgtgggtccgtcttggggttccctcgttgaacatgctgtcaaaccaggacactggctccagcttgtgtttctgctcttggccatc

SEQ ID NO: 6214 - DNA, 120 bp, Homo sapiens
catcgtctgggagtggacatgcaggctatgggggtggggggcacttagaaggagaaaggcctaaaactggaatctcttgtccctgaggctggctctggtctttgtgtctctcccagtcct

SEQ ID NO: 6215 - DNA, 120 bp, Homo sapiens
tggcgtggttggtgtggctggctagctgctaacaatggcttgggtctcagggcaacccaggtccccatggtgcctttaagcagcaggctgggccaagttctcagccagggtctcaggatc

SEQ ID NO: 6216 - DNA, 120 bp, Homo sapiens
catcgggcagctctggcgggctggaaaacggctcgatgcacagggcctcaaaggtgtcatctgtggaggaagcagcagagctgcaggggggtattccagctcttgccccagctggggcct

SEQ ID NO: 6217 - DNA, 120 bp, Homo sapiens
tcacgtgtgatcatctgcagctttggggatctccatgcgaacgcccctccacacggctgtagtctccacagcgctgacctccctgttccagctacccccgtggccccacggtaatgtctc

SEQ ID NO: 6218 - DNA, 120 bp, Homo sapiens
tgccgtctgtctctccctctgcttcccacgctctgaggctctggctctctatgttcttctgtaagttctttcctaactcagaccttcgcacttgctggtcccagcactcggaatggctgg

SEQ ID NO: 6219 - DNA, 120 bp, Homo sapiens
ccacgcacccccaaaagtcaagacatcctgacactctgggcgtaggggcacttaccactggacaaactgcccttttgactggctccaggaaggcaaaggccttccctgtcttgtccctac

SEQ ID NO: 6220 - DNA, 120 bp, Homo sapiens
tggcggtcacaaatggggaggtggggtgccccagcgctatctagtgggtagaggcctgggatacggctccacgtgctatggtgcacaaggcaacccacacagcaatccagcccaatgtgc

SEQ ID NO: 6221 - DNA, 120 bp, Homo sapiens
tgccgaggttcagaaactaatccatcttccaagccacaaacctgtgacaattcgtgccttcactacctccctcattcttttgtgatgagccgggacaatgccctttaacatttgatttga

SEQ ID NO: 6222 - DNA, 120 bp, Homo sapiens
aggcggagggtggggcacccattcaaggcctgggaacaacatgatgatgggttgagctgcacccagaagtgtgtttctgcaagcattccatggggaagcaaagagctgacagcccatgct

SEQ ID NO: 6223 - DNA, 120 bp, Homo sapiens
ctccggagtcaccaccacattccatgccatattaggggttgtgggagaaaaacaagtcaccttccttagccttgattttctcatctgcaaaatgggtctatcagtatcttccaagtcaca

SEQ ID NO: 6224 - DNA, 120 bp, Homo sapiens
gcacgacctgtgtctatgccagccctgcacctgactcttaacatcaccatctgggcagaaagagcccacagaaaggctctgaagcttcccatctgttgggcactggcagcaggccagacc

SEQ ID NO: 6225 - DNA, 120 bp, Homo sapiens
gaacggaaaggtggagctaggactctactcttcctcttcagcctttgctatgttcccttacaggcagaaaaataagaattccttacaactttatccaagttttctcagccatccacacag

SEQ ID NO: 6226 - DNA, 120 bp, Homo sapiens
tggcgagtagtaaaccactccctaatccccaggtttctaaagcttgggcaggggtggggtatggctgatggaagcccaggctctggatctgaatcctagatgtggcagtcccagcagatg

SEQ ID NO: 6227 - DNA, 120 bp, Homo sapiens
gcccggcagtcagcatcctaaccgtggctccctacgtgactgctggtaagcctgtgtcctcatctgcagaacacggatgatggtatgtggacttcccagggctactgagaggatgagaca

SEQ ID NO: 6228 - DNA, 120 bp, Homo sapiens
gcacggagccaggcactcactcagcctcctgtaaatgtgagctggcttcacaaaataagctttggtttctgtaagcatctcatttggttgcttcttttttaaaaaaaaaaaaatgaggaa

SEQ ID NO: 6229 - DNA, 120 bp, Homo sapiens
gcacgaggaagacactgccctgaaggcttcaactccaggctccctgatgaccttctttggaacagtgttcccaacctgcttggctaccacccagcccagtgggtggtgggcctctcacct

SEQ ID NO: 6230 - DNA, 120 bp, Homo sapiens
acacgggaagtcagaggagggaagagagagttccctcagtgtggcccaggaccaccacgctgcttgacaaatacacagattccagggttatatccaagaacttctaaatcaaaacctccc

SEQ ID NO: 6231 - DNA, 120 bp, Homo sapiens
atccggttttatccaaattctccaggcaaatctaatttgaggagccactgagctatctggagataggcagacctggctttcaatcccagctctgtcaccctggactaggcatttgaacat

SEQ ID NO: 6232 - DNA, 120 bp, Homo sapiens
cgcagcagcagccgctcaagggcaagtccatgggcacagcccagcttcggcctggtggggttggggcagaggcccctgggcttctgatcctgcccctcccccagccagcaggaccttccc

SEQ ID NO: 6233 - DNA, 120 bp, Homo sapiens
agccgccaaggccctgggaggaaacagctcctgactttgctcagagtctcattcaggacagtcctacccagagatccaagccagggactcatgttcctgcctccagtgaggctgggggct

SEQ ID NO: 6234 - DNA, 120 bp, Homo sapiens
ccccgcgtgcaggagaggctgagcgggcgtgtgtgtctgggtgcatgtgtgtgcatccatcttcaagtgcacgtgtgtgaacaagtacgtgtgatctctgtgttcgcgccgtctgaacat

SEQ ID NO: 6235 - DNA, 120 bp, Homo sapiens
ccccgtcagggctggggtgtcacggggagcccccttcctgactctgccatccagcaccacggacagggctttggtggttctttgggaataggtatcaaccaggggtgggcggacgttttg

SEQ ID NO: 6236 - DNA, 120 bp, Homo sapiens
gagcgcacggcggctgtgggccagtgacgcttgacttaatgaactggagcatgggaatttcaaagaattttcatggaccacaagacatcgttcttttgaatgtttcctaagaatattaac

SEQ ID NO: 6237 - DNA, 120 bp, Homo sapiens
gggcgaggcagaaacaggaggtggttggctgggccatagttcgccacccctggcgcaggcacctggttcaagtcgtgaaagtcctgctcctcccgcagcccctgcccaccctcatcccga

SEQ ID NO: 6238 - DNA, 120 bp, Homo sapiens
tcacgatccaattttggaccaggcgcaatggtgagtgcttacacaaggactgcctcatttaatcatcacaaacacccttgcggtgggtgttaatctcacatttttaaagacaaggaagcc

SEQ ID NO: 6239 - DNA, 120 bp, Homo sapiens
gagcgagtgagtcatggaattccaaccgcaatcccacagtcctcctgccacttcctgctcaggtgttggcccagtcccaccattgtcgggggaggttctttcctgagagtccctgcgtcc

SEQ ID NO: 6240 - DNA, 120 bp, Homo sapiens
tgccgctggcagagcctgctgtaatcctgagaattccttttcatcgactcactgcaagttcagagacaaggcatcgactcactacaagttcagagacaaggtgcgtgccagacctgcacc

SEQ ID NO: 6241 - DNA, 120 bp, Homo sapiens
aaccgctcgtcctacgctgggtccctgcctctgctcctgcttgtcacccttggccaaacgttccccaatcccgagcggctctggcctttggacagaagtcagcctgtcagccttctggaa

SEQ ID NO: 6242 - DNA, 120 bp, Homo sapiens
ctgcgtccattgtggccacttcctcatccccagaccggctcagtcttgcaggggcgtttgaattgtttcctcctacacaacactgaactgtgcagctcccgccccgacctgtctctaaac

SEQ ID NO: 6243 - DNA, 120 bp, Homo sapiens
tgccgtgcacttagagtgggccaggcagctggaacctaagaggagctgctggaggaagtggagcaccttgaatgtcacctggactcacgtctgcccctaccgccccctcggacccgcacc

SEQ ID NO: 6244 - DNA, 120 bp, Homo sapiens
ccccgtctcaaaaaaaaaaaaaaaaaattaacactaatttgtgggggagttgcaggaaatctgccttggaattcaggagaaaggcttactccatggtattttctggacagactacaaaac

SEQ ID NO: 6245 - DNA, 120 bp, Homo sapiens
gttcgccctcaacttatttttaggaggcattgtgagcccttctcaagtactgtaaaagtttttcagttctgcaaaggaaaggaacttgtgtttgggcttttgagtgctgactgcatgtgc

SEQ ID NO: 6246 - DNA, 120 bp, Homo sapiens
cagcgtgttcttggtggtgacacagccacattgtgtaaatacatttcttaagtcatttgtgtgtatagcagctggatttggggacaagcatttgggcacactcgctacaagattggttag

SEQ ID NO: 6247 - DNA, 120 bp, Homo sapiens
tgtcggaaaattcagatcttgattgtgagttatcttacttgtcttttaagttctctttcatccatttggctcaggggacacagcagacatcttcctggccttaaatagctttctttctgc

SEQ ID NO: 6248 - DNA, 120 bp, Homo sapiens
atacgcaccaccatgcccagctcgaagtactactttttgtaaatataacattttggaaatcctcttgaattttttttccaacttggaaaaatttccaaattcttgtttgaaaacattgcc

SEQ ID NO: 6249 - DNA, 120 bp, Homo sapiens
acccgtgtaattttaccaaggcaataggaacatttcaggagcaacaccaccatcttgtggccatatggagtattgctgctgaggatttaaatttgcgcttcccccgtgacgggtggtcct

SEQ ID NO: 6250 - DNA, 120 bp, Homo sapiens
tgacgcagtccccaccttcactctgacggcctgggacaggcccctgcccgcctgcactcccatggcgcagctgtgtcctgcaggaccagctggcggggtgaacagtgtgcgagtcactgt

SEQ ID NO: 6251 - DNA, 120 bp, Homo sapiens
tggcgtccccatgcctcgccctggctgggagggaggccgggaatcacggcagttctcagggaggtgcctccccaggaacaaaggggactttctccagagggcgggggcctcgcgggacct

SEQ ID NO: 6252 - DNA, 120 bp, Homo sapiens
ccccgggagggtgcagggtcaaggaactgccacgtccatcgtccatccattcccatacatcccggttcatgctgtcctgcctcgtcctgccctcatcctcatccttcctggtttagcctc

SEQ ID NO: 6253 - DNA, 120 bp, Homo sapiens
gaccgggccttaatggagttaaggagccgctcccctctgcgttgtctccggagccgaccaggccttcgggagtggaatgtggggccccaggccagggaactttggatcaaagtgggagac

SEQ ID NO: 6254 - DNA, 120 bp, Homo sapiens
ggacgctgaaaatgtcagggactgcagtctcgattccaggctgagaggtgggaaagaccccaccatctgcccacactcagttgccccaaaaaagccccaccccacaccatgactgccact

SEQ ID NO: 6255 - DNA, 120 bp, Homo sapiens
agccgtcttcccagaacgtaatgtgtcttaaatccgtcatgctgacctggggccctgggtgcccttgggcaggagctgatggcactagtaccttgataaagttcttactggcaccagaag

SEQ ID NO: 6256 - DNA, 120 bp, Homo sapiens
tgccgctccccagctccctgcgctttatattgttgaggcctcctctctcagctaagaaacaggaagtacacagatgtgtattcttaaagacagcattagccacggggcccccaccctcaa

SEQ ID NO: 6257 - DNA, 120 bp, Homo sapiens
gagcgataactgctgctggttgaaactgacagttactactgataataaagttaattgttacccagtcagtggagtctgcccaggtgtacaagtgaaacctccattatgcttttgacaaaa

SEQ ID NO: 6258 - DNA, 120 bp, Homo sapiens
cctcgatccccaaggtgccagtccagggatgtgccagggttgaagcagagctgtctcctctctgctttacagccaggagcacctgaggtttgggcagctgtgacttgcccagggagccct

SEQ ID NO: 6259 - DNA, 120 bp, Homo sapiens
gctcgcatgaggttctgggagtccagcccgctgccccctgcaagtggggagcaaagggcacttcccttgccagggacatggcaatgagagtgagccagctggtggagggggcctcttccg

SEQ ID NO: 6260 - DNA, 120 bp, Homo sapiens
cctcgaagaatttgggacaaggaggaacgggatggtgcttgggaggcccagaagaaggagaggccctgccccgctgccctgtcgggaaagaggttcaggaggctctcttagcccacctag

SEQ ID NO: 6261 - DNA, 120 bp, Homo sapiens
tcccgctgtgcacttggtcaggttcgctcagctccctgagcttgttcctgtctgtgaaggtgggcagtgagcccgtgagggtgacagctgcaacaccgagatttagctgcaccttttggt

SEQ ID NO: 6262 - DNA, 120 bp, Homo sapiens
ctccgggcgcagtgggtgactctgcccttggggttcttagtgtgctgcccccacacccacccccgcactgttcctggcgcatggtagctcctggtaacttccttcctttcctttgtggtc

SEQ ID NO: 6263 - DNA, 120 bp, Homo sapiens
aggcgcgggttaacccacttcgaccctatctaagctgatctctggtttcttctgcccacctgagcctccctgcccctctttcctcctagacggaacaaaaacgaggtccattttgtcgct

SEQ ID NO: 6264 - DNA, 120 bp, Homo sapiens
agccggcttcctttcctcccagggtagtacagtggggaaggttcccctcccccacctcttttcccagacgtggtggatgggggaggggacttcgctggaggtgttaaagtgccattgaga

SEQ ID NO: 6265 - DNA, 120 bp, Homo sapiens
aagcgcagggggacggccgtgtggggaaacagcaagaggacgcccatctgcctgcccaggaggaggcatccggagaaactagcccctcaggcaccttgatcttggccttccagtttccag

SEQ ID NO: 6266 - DNA, 120 bp, Homo sapiens
gaacgtaaacttctggttgagcctcccagtccttggtgttttgttctggcggccccagcgagcgggcgcgggatcgcagtgtttgcctttgcatctccagctccgcatcctgctcgctgt

SEQ ID NO: 6267 - DNA, 120 bp, Homo sapiens
ctccggcggctgcccctgaactgctccgagactgagcagtttaactcacactcgcccacccgccctccccaggaagcctcccgcccgcttcctccagttccttccccacctgtccggcct

SEQ ID NO: 6268 - DNA, 120 bp, Homo sapiens
gcccggtgctctcggcgcgggaggaggcggctcgcagacccccaggtctcggcttcccggatctcccccgcctactcactccccggtccccggctcccggcactggcaggcgctgtggct

SEQ ID NO: 6269 - DNA, 120 bp, Homo sapiens
ttccgcgcagtggctgcagcatttaaatgtccggcacttagggagaggggtgcagtcgcggagcagccgctgctcccggcatctagaggggcccaaacccccgcgtgcccaggccgagcc

SEQ ID NO: 6270 - DNA, 120 bp, Homo sapiens
ccccgcgcgcagcccacgtgggctgagggactgagtattggccctcgggcagctgcaaccgcgcacagctggagctggcggggcggagggcgggccgggaccccgcggggaaggaggctt

SEQ ID NO: 6271 - DNA, 120 bp, Homo sapiens
gcccggaaatccccccggctctcagacaacctgccccacggggtcctggggggaaggagaggggcgggatacagggatggggagggctggctgagccgaaggcccgggccgccctccccc

SEQ ID NO: 6272 - DNA, 120 bp, Homo sapiens
ggccgcgcggcttcgagaaagcagaagcgagccctgccccggggagtcccacaggagcggggatctgggaagagaaacttgcggacgagggagttagagccgtggacccccggcccccgc

SEQ ID NO: 6273 - DNA, 120 bp, Homo sapiens
gcccgggcgtcctgcgtcggaggagggtctctgggtcgggcaggggccacctcttggcccgccccttgtcgctggacgtccgaagattgggccatttcccttgccgcgcccttaccgcat

SEQ ID NO: 6274 - DNA, 120 bp, Homo sapiens
tatcggggtgcgcccggcccggcccggcccgccccacccagccctccgctcgcgcccggagaggaggggccgctggcgcagcgccccgggaccccgagaggccgccgcggcacatccaga

SEQ ID NO: 6275 - DNA, 120 bp, Homo sapiens
ctccgccgctcccgcgccctctcaaccatcctgggattcccgggcccacccgacccagcggcgcgaccctggccctccgggaccctccgctgactccaccgcgcacttcccgggaccccc

SEQ ID NO: 6276 - DNA, 120 bp, Homo sapiens
ctccggccgatccctccctactcggtgccgggtgccccccgccctctccaggcccggatctcctcccccaggtccccggggcggccccagccaggcccccttcgaaccccgccggcggcc

SEQ ID NO: 6277 - DNA, 120 bp, Homo sapiens
gcccgggctggggcgcaccatgcggctgcggctccggcttctggcgctgctgcttctgctgctggcaccgcccgcgcgcgccccgaagccctcggcgcaggacgtgagcctgggcgtggt

SEQ ID NO: 6278 - DNA, 120 bp, Homo sapiens
tggcgtgacaagggtgcaggaaggggtgcagggcccggaagcccagtatggccaaggagagacaaggcagggaagaaggtgagagatgaaagatatcgccctgattgaaacaccaaacta

SEQ ID NO: 6279 - DNA, 120 bp, Homo sapiens
agccggggctggcgtgtgaatcctctgggtcctggcagtcctgagcgcctgagctgaatacagagggaagaggctgggagcaaggccgggtgctggggccggcaggctgtgttctgagag

SEQ ID NO: 6280 - DNA, 120 bp, Homo sapiens
agacgggtgggggtcgctgactatagactgtagctgggaggaggggatgctcccagggctggggctgcctgaagagaatggcacgcaccttgtaggctcctgccctcaccccaccgccct

SEQ ID NO: 6281 - DNA, 120 bp, Homo sapiens
agccggcaggatgccttccaccctgcagagggtcctatcttgtcccacaggtagatctacatcaccactagccacccctccaacgtgcacaggcccctgccctcacggcgcccctcttag

SEQ ID NO: 6282 - DNA, 120 bp, Homo sapiens
gtccggcagttcctgcctccttctgatccagaagtttctctggcctctggagccggggcacacctcatgcaaggacagggtccaaattcctttgtccttggatcccacttggctgacgtc

SEQ ID NO: 6283 - DNA, 120 bp, Homo sapiens
tcccgagtctggactttccctctgcccctccccactctcaggctggtggggtggggaaagcagcccattcctgggctcagagactcccaccccagctcagagggagcaggggcccagcca

SEQ ID NO: 6284 - DNA, 120 bp, Homo sapiens
ggacggaccctcattcctcccagggaccccagacctctgtctctctcgggtaagtctccatctctgtctgtctctgtctctgtctctgtctctgtctgtttttcacgcactcagcaaggc

SEQ ID NO: 6285 - DNA, 120 bp, Homo sapiens
ctccgcccactaccccccactttccccataaaaccagctgagtatttgtgccaggaagactgcgtgcagaaggtgactgtctcagtggagctgggtcatctcaggtggggagttggggtc

SEQ ID NO: 6286 - DNA, 120 bp, Homo sapiens
ccccgaaggtgaggaccctctggggaggagggtgcttctctgagacactttcttttcctcacacctgttcctcgccagcaggccttggctccttgaacttttggccgccatgtgcttccc

SEQ ID NO: 6287 - DNA, 120 bp, Homo sapiens
tcccgaaggtgagtgagaggctgcgtgtgcttttgtgggcatgtctgaaaacagaccgtaagggtgcgggtgccctcagtatttcccgaggtgcctgtgtgtcagggctcagtcaggggc

SEQ ID NO: 6288 - DNA, 120 bp, Homo sapiens
cagcggcaggaggatagtgatggggtgagagtgtcagtggaggcgctggaggtcatatgtgtcgggggcgctggagaacggcaggggtgtggatgagagggagcacctgtcccaggagcc

SEQ ID NO: 6289 - DNA, 120 bp, Homo sapiens
gcccggaaagcccggggcaggggtggggcagggctctgctggaaacgactcggagaatgcttctctcagaggccggctcagctgggtgggcccaagagcaaggcctgtgtgggtcctggt

SEQ ID NO: 6290 - DNA, 120 bp, Homo sapiens
ctccgacctcccatcctctaccactgccccaccgcaaatgctaggcccaccacaccctccagggagctcttcggcctgtgacaataggggtttccatgatgtggcctggctcaggttcag

SEQ ID NO: 6291 - DNA, 120 bp, Homo sapiens
acccggaggacacatggctcccgcatgtcggcacggtgctgctttcaccctggttcctgggaaatcaggctagcgggatgggaccatcgctgcctgaaagtgtgcagacagctgccctgc

SEQ ID NO: 6292 - DNA, 120 bp, Homo sapiens
ctgcgcactctgtgggtgactgtcaccactctatagtgggggaaaccaggcatgtcacccccgagactaggcccttgacgtgggggctcagcggggattctgtggggtgcctctggcctc

SEQ ID NO: 6293 - DNA, 120 bp, Homo sapiens
ccacgtgtctgcaggcaggaatggcccgggacctgtgggtctgcatgttggcagtcgggaagagtggcaggttgtagggtggacctacctggcaccccaaatattaatcagctcatcaga

SEQ ID NO: 6294 - DNA, 120 bp, Homo sapiens
ccccggcctgaggggactttggccctgcatctttcttgtcatgactccctcttctgtcctcatcccccgggcagggctggggccgcaaaatctccttggttttctcccaagatcaagggc

SEQ ID NO: 6295 - DNA, 120 bp, Homo sapiens
gagcggactcaggagtcccccactaggccctggtttcaggggagaggcaagaaggcagaggtcaaatctctgggcctgaggcctcagcaccctgcagttgcagagcctagggcggccagg

SEQ ID NO: 6296 - DNA, 120 bp, Homo sapiens
ccacgctcaacgggcctggcagaggctcccgtcttcctccacttcgtgcctccgctgactcacacagaccaccctcccccattcaggggaggcttggcagccagcagcagccggtgagat

SEQ ID NO: 6297 - DNA, 120 bp, Homo sapiens
ttccgtcctttcctggggttccatgactcctgcctttgggctgagcaggaaggaggaaggggaaatgggccacagcctggggaggagcaaacacccacaggggaggctccctgagcagct

SEQ ID NO: 6298 - DNA, 120 bp, Homo sapiens
ccacggtctgggagggacactggggtgtgctcgagggtgtggggggcttggggaccaggaacattgctgggggtcagtatgcccctccctggtctgcccgtttggagcattggatgcact

SEQ ID NO: 6299 - DNA, 120 bp, Homo sapiens
gcacgcactccttggcgcagcctagtgtccagcaggggaaacagctggacagcgaccccgacagtcacctttggtggccctggtcaccctgaggggccctgcttgcttccagcccctgtc

SEQ ID NO: 6300 - DNA, 120 bp, Homo sapiens
atccggacttctctctgcagagcctcaaagagccccgcaggctttcctccttcgcatcctgcagaaacctctgatgtccctttatcctggaaggactgtctctggcctgagaccccagct

SEQ ID NO: 6301 - DNA, 120 bp, Homo sapiens
ggccgcccatggctcgaccctggtcccgcctctccttaccccgggccacatgctgggatctaccctctgccactgctcaagttcttttttgttttgttttgtttttctgagacagagttt

SEQ ID NO: 6302 - DNA, 120 bp, Homo sapiens
ctccgccttctagctgccgtccctggccttgcctctctcaatctatttccatgcagtagccaaagctgaagtgattttattactagaaaagaaatccctccctgcctgagccctctgcag

SEQ ID NO: 6303 - DNA, 120 bp, Homo sapiens
tggcgtgtcagccctcagtcattgggaactgttgtgtccccctccgggacagatgctgtccagctgcatctggggctcctcccttccccaggcctggcttcctgatactccctctgccag

SEQ ID NO: 6304 - DNA, 120 bp, Homo sapiens
ggccgcccctcccacatccttcccaggccaccttccccttattcccctcaataacccagcaccttccctggcacacagtaggcactcaatacatcaggagggcttcccgtgcttcaaatg

SEQ ID NO: 6305 - DNA, 120 bp, Homo sapiens
gcacgtgtgtactccgaggtctgaggccaccgaggaagcctcagggactggcctccgtgtagagctgctctcactgccctgggcattggggacaaggccaggacaagcaggaccccgtgc

SEQ ID NO: 6306 - DNA, 120 bp, Homo sapiens
gtgcgtgtttcctcgaatggcttatggtcgcttcagaaagacactgggtgtttgttggcgttcgggctgccagggccatcgaatccggttgtctgccagggtgtgcagggggagtggcgc

SEQ ID NO: 6307 - DNA, 120 bp, Homo sapiens
aaacgagggatggaaaaaggagacagactaggccctccacagcccagctgcatgtgtccttggcgaagtcacttttcatttgaaaaccatcactgcctcctctgtaatgtgtgaacgatg

SEQ ID NO: 6308 - DNA, 120 bp, Homo sapiens
aaacgtgtatgaatccgtacctgacgctagggggcgttaaagagagtgtggttccctactgggttggggtcaactgtgcggagtgggacggggaacctttggagtagtgtccttcaagag

SEQ ID NO: 6309 - DNA, 120 bp, Homo sapiens
actcgttatatccaaaatattatttcaacaaatacagaaatttgctaatgagaggctgcacattcttttttctcataaaagtcttcaaaatccagtgtgcattttacagcgagagcacgt

SEQ ID NO: 6310 - DNA, 120 bp, Homo sapiens
ctccgactcgccccatttaaagcactcaatagccttttgtggctttggggcggttctgggacctcagagttgtggtgtttcctgcggggaaagactattgtggctgctggagggcggaag

SEQ ID NO: 6311 - DNA, 120 bp, Homo sapiens
agacgaataacaataggcggagtgcagggcactgggttgccttaggacctcgcctttcccctggagaacacagctgcttcctgaaatgatcaggaacctaaaacctctgcagggaagaag

SEQ ID NO: 6312 - DNA, 120 bp, Homo sapiens
ccccgggggacaccggggaagtgagtaaatggagccggggcagcttgatttgcagcaaatttatgattttaaaggcccggcaaggtcaggcaccgtggatcactcttgtaatcccagcac

SEQ ID NO: 6313 - DNA, 120 bp, Homo sapiens
gtgcgcacggcgggggggattaatgaccagcgccaccctgtgtttatccaggactttcctgagctggcagctccttctccatcattatctgcgtgaacctcatgaccattctgtgcaggg

SEQ ID NO: 6314 - DNA, 120 bp, Homo sapiens
ctgcgtcctgaaggctgcctgattggggaggggtgtcgctgggtctggcacccaggcactctgattcctggcctgaggttctttcccttcaagacccaaacacagacagggcgtggagga

SEQ ID NO: 6315 - DNA, 120 bp, Homo sapiens
ctccgcttaaaattccagtttattcggagaaggggagaataccggaagcgggggagaagggaggggagtgagtgagaggagggaggcggggaagaccgggcatccgcgggcagcacttca

SEQ ID NO: 6316 - DNA, 120 bp, Homo sapiens
tctcgggagtcaggtgaaatctggatacagggaagggcagagtgacagtaaagggtgccccggaaccgatgcccgacgcctgctgccccacggccttcattcttgctcctcctcacgtcc

SEQ ID NO: 6317 - DNA, 120 bp, Homo sapiens
tcccgccagctccccccagtgaagggcaagggggcgcatcgcagaatcgcccctggtgcgcagcgtagttggtggcctaagccgtcttctccgagagctcagccatcctgggcacttgag

SEQ ID NO: 6318 - DNA, 120 bp, Homo sapiens
aggcgctgcggggctggttcagtcgatggagaaaagagactctcagcgtcagcctttagggttcgaggcccacgtgggaaactcgctttctgggttttggcttccctggggagaagggag

SEQ ID NO: 6319 - DNA, 120 bp, Homo sapiens
gaccggagccggagaagcgtgaggtgcggcgaggtagggtgcctggtagctggtgtctcgtgcactccgtcaggcctttattgaacacccattggtgccacgctgagggactgcagcgtt

SEQ ID NO: 6320 - DNA, 120 bp, Homo sapiens
aggcgagcttgcagtgatcgaggctcgcagaccctcagcgcagccgctgcctgctattgggaggttcccatgtcctgcggaagctggagctcctcactgcgcgcctcggagacgccgaat

SEQ ID NO: 6321 - DNA, 120 bp, Homo sapiens
ggccgagtggcggtggcgggcgaggacccagggcccttctggattgtggtagcgccagggctgctccccattttgtgcgtcgcggaggaggggccggggctctgggcttccgccacaccc

SEQ ID NO: 6322 - DNA, 120 bp, Homo sapiens
aggcgggtctgaaataagattctactcactgggtcctgctgggtccgccccagccgcccccaggatgctaggacgcccacaaagataaccttaatgcgtaaatcgtgtggctcgttggtc

SEQ ID NO: 6323 - DNA, 120 bp, Homo sapiens
tctcgcttagggtgcgagaggtcccgggttcaaatcccggacgagcccggcttttggtgcagggtaaaagtcgtttcctgctcttttttagattcggctcgacttacagacctcagcgca

SEQ ID NO: 6324 - DNA, 120 bp, Homo sapiens
ggacgtggacgccctgcaaaggtaatttgtacaaaggtctcaagctatgttgacgccgcctactatcccactacctcttcttaaaattcatctagagtcctgtcaccagtgttgccagag

SEQ ID NO: 6325 - DNA, 120 bp, Homo sapiens
cagcgagggggggttactatggggagggtctcagggagggcagcggaggggatgggggttcagagagggagaggggttccgtgagtagaggagacccgtagggagagtgaactggggtgg

SEQ ID NO: 6326 - DNA, 120 bp, Homo sapiens
aaacgtggtttagggcccactgtaaccccggtcctatgtgtggggccctgaggacatacagggactagaggcctggctgtggggccggggccagggccagcggtatgactgcccgaggcc

SEQ ID NO: 6327 - DNA, 120 bp, Homo sapiens
ctgcgatgcttgtggccaagactgcatacattgctgtgacggtggctggttaggggcagggtgcatgagagattgggtcagctttctacatgggccggatgccggctgtcagtggagcac

SEQ ID NO: 6328 - DNA, 120 bp, Homo sapiens
ggcggggagtagcccctcccccgcggcaactttgggggcgcgcatggggacctcgcggcgccgaccccccggctggggtctggcaggggtgggggacttcatccaggctccagccctgtg

SEQ ID NO: 6329 - DNA, 120 bp, Homo sapiens
gtgcggacgggtcggcttgggaagcggcggcgctgggaccctctccccctggacaccgccgcctggagcccctctgtcttgggtggggctggggctggggctcaggctctgtagggcgtg

SEQ ID NO: 6330 - DNA, 120 bp, Homo sapiens
ccccgagaagacgggagcgaagtgggcagggactcagaaacccctgcccagggcaccagggagaggggcttcaggaggccaccagcccggggcgccatgggaggcggcgcagagcctgag

SEQ ID NO: 6331 - DNA, 120 bp, Homo sapiens
agccgcccccggcacccgagcaccatggggaggaactcctagactgtgggaaagtgttcagagaccccagtccagagcagggtggtggagggccctagagggtcagtaggcttggggggc

SEQ ID NO: 6332 - DNA, 120 bp, Homo sapiens
ggccgccgagggccctagagggtcagtaggtttgggggccgccgagggccctagagggtcagtaggtttgggggccgccgagggccgctgctctctagcaggtagcccctgaccctgggc

SEQ ID NO: 6333 - DNA, 120 bp, Homo sapiens
cttcgctcccccgccctttggtctccgagtcagggagggggcccttgtggacatctgggccagaggagctgcaggcctggcggtctctggaggcccctcctgaaggtctgggtgcggtgc

SEQ ID NO: 6334 - DNA, 120 bp, Homo sapiens
gtgcggcacctccccaggccgccctgctctctctgctcgctctctccctgagcccccagaggcttcccttgagtccctttggatagtgggaggtacagctggccagagggggctccagcc

SEQ ID NO: 6335 - DNA, 120 bp, Homo sapiens
gctcgaatgccagggtccgctagtggctgctgctcacgcccctccccacccccagtcctcctggctgacaaggagggtgggccgccggcagtggacgaggtgttggatgaggctgtgccc

SEQ ID NO: 6336 - DNA, 120 bp, Homo sapiens
atccggtggctctcaagcatccccaacgtgctccaaggagagtagtatttctccaggcagcgagaacgggaaagaaaaacattaaggagtatcgttctgaagtccagcgtatgtttttgg

SEQ ID NO: 6337 - DNA, 120 bp, Homo sapiens
ttccgttcagggaggccagttccccactcccgaggtgctgctgcccttgagggagttctcggctctcctgggcctcccggcaggagtccagccccagcacccggcgcaagtgtgagtgcc

SEQ ID NO: 6338 - DNA, 120 bp, Homo sapiens
tctcggagaagttcctatccccaggagtgatttgcagaaccagagactcccttttcaggcttgggcaaagcagacgcctcctgctccgcatcggctcacacgcggccgggcccacgagcc

SEQ ID NO: 6339 - DNA, 120 bp, Homo sapiens
aaccgccgccccgggcctcggggctgccgctcccctcagcgtcggctctgcccccagaagcgaaggccgccctgcgcccggtcccggcctttccctgccctctggccggtcctcctcccg

SEQ ID NO: 6340 - DNA, 120 bp, Homo sapiens
ccgcggccgtcccgggacctgtgcccagacccctggggccacgatcacgccccagccgcccaagtcaccgcccctcccctcccttccagcgttcccgcccgggcggtgtatggtggctcc

SEQ ID NO: 6341 - DNA, 120 bp, Homo sapiens
ctccggtgtatggtggttctcgcacgcacagccgcaggggtttcctctcctagactcgaggcggtggcgcacctgcaccctctaaaactcccccgtcggccctcgcggtctagcgggagg

SEQ ID NO: 6342 - DNA, 120 bp, Homo sapiens
aggcgcggagggccgagctggggtgcgtgcgagcgggcgccaggaaagcgcggggccgccctaggggctaggcctttctttaaacagtgggaggcccacgaagtgtctgaagcccgaggc

SEQ ID NO: 6343 - DNA, 120 bp, Homo sapiens
gttcgctctcttctggtaagagaataagggtcgggcaagaatggagaggggacagaaaaggaaggcagggcaactgaagaggcagagtcaacgcagaaggcgaagggagcctggaccagg

SEQ ID NO: 6344 - DNA, 120 bp, Homo sapiens
ggacgaagagtggagaggagagatccaggaggtggagcggtcaagacttacgtgggccgagacccgtctaaaatctcgtaggatgtcccccagggacactagccttgacctgtctttcct

SEQ ID NO: 6345 - DNA, 120 bp, Homo sapiens
ctccgccagaggcccccaaggcaacggtccagggaccttgcagcttgcctgggagatacacgtgcccaccgcagagactgagcccctgcttcacaactttaaacccagctcaaaagtcac

SEQ ID NO: 6346 - DNA, 120 bp, Homo sapiens
tcacgcactgtcctctcagacacctcccctgctatccaagtctcaaaggccctccctatgctcactttggctccggcccttacacatcccatggtggtttgttctcattcattttcttgg

SEQ ID NO: 6347 - DNA, 120 bp, Homo sapiens
tctcggtcactctaggaatttattatcactaaaaagaatgatgatgtttgatgcaaagacccaaactaaaaggaactagagagctgcccagagtcctcatctgccatccccctccacttc

SEQ ID NO: 6348 - DNA, 120 bp, Homo sapiens
cttcgccctcacccaaccccagcttgcagtcattatggactaatcttaaaaaaagaaaaagtcaagctgcttgatgttaaaggtctcccatcttccaccaggctgcagactgaataaggc

SEQ ID NO: 6349 - DNA, 120 bp, Homo sapiens
tcacgcctctcatgccctggcaactaagagtgggggcgcggcagacccatccctggagagacacaggactgtttttctcaccaaactggcctgatgacagacaggcagatggacaagaac

SEQ ID NO: 6350 - DNA, 120 bp, Homo sapiens
gaacgtgcaggccttggcttttattgagatcagagctgtgggctccccggcctctcagggaggcggtggcgggggggcctgattctgcactcagcccggcctcccaggtacaagtggctg

SEQ ID NO: 6351 - DNA, 120 bp, Homo sapiens
gcacggccatgcttctattgcttctgcccctccctcggaacctcctcctcctccctctccccatcacattctcccgaggcccaggcctgggcgctgggccgctgcctgggccaccccatg

SEQ ID NO: 6352 - DNA, 120 bp, Homo sapiens
tgccgggggccgagcccctcctgctcaggctgcctcctcggccatcctgcccctcctgtacccagtcctggcactcgggatccctatggcctctccagggccccagagcgggttctcttg

SEQ ID NO: 6353 - DNA, 120 bp, Homo sapiens
atccgatattcttgaaaacagaagggaggagggcaatgcttcctccttaacagaatccccaggggagggaggaggttgagggaacagaatggttcaagctggaaggaccctcatctaacc

SEQ ID NO: 6354 - DNA, 120 bp, Homo sapiens
tcccgtccaccttcacccagattccccaagggctcacattctgccataactgctttatcatccccttaccggcaggcacatgcgtacacacacatgcccacacatgcgcaggcacacaca

SEQ ID NO: 6355 - DNA, 120 bp, Homo sapiens
acacgtacacacacacgcacacacacaggcacgctcacttttctgaaccagttagagtgtatttaacaaaagcaaggtcgctctcatacctaaccacagtacaaatatggatggttaaaa

SEQ ID NO: 6356 - DNA, 120 bp, Homo sapiens
tcacgtggcagatcttattccaattttgccagctgctccaataacatccttcatagcaaaacatgttttaaaatccaggccgccagtgtctaagccgcggagggatgcagccagggacag

SEQ ID NO: 6357 - DNA, 120 bp, Homo sapiens
ctccgtgtgtgtggccttcctgccctcccgccgtgggctctggcgcagtcctggctctgtgcacccgtttctcatctacacaatgagagtagaaacagcatctaaacctgagaaggatgg

SEQ ID NO: 6358 - DNA, 120 bp, Homo sapiens
agacgaggctcagagagaggctggccctggagccacaggcttcacttcaaggaacgtggagtatgaaggggccaagggcacgcccaggacactgggtgatgcctcagagctgggaaaagt

SEQ ID NO: 6359 - DNA, 120 bp, Homo sapiens
ggccgtgcacagcgccaggaaggggtctgtcccggagccaaggaggagcatccagtgcttctggaagatgatgaggaaggctggggctggcaccagcagggatgtgggccggtgtgtccg

SEQ ID NO: 6360 - DNA, 120 bp, Homo sapiens
ggacggcagggcgtccacacagatggcaaggaactaacaagccaccctttcccgctgcacccggggcctggaggctgggtggctggggggccatgctggcttttccgtgcccagtgctgg

SEQ ID NO: 6361 - DNA, 120 bp, Homo sapiens
aggcgcagacgtgggagtggcacacacaggaatgggagctgccagcactgcagggaccacggctgctgtgtctgcagacagccagaggcgcagacagacgcgcttatggtctgaacagtc

SEQ ID NO: 6362 - DNA, 120 bp, Homo sapiens
gcacggctgaggggccaacaggagcactcatgccgccacgcgagctccataaaaagactccaggtggccttgcaggctgcgtcaccacggttctgagaacagcaaaactgtcagagtcat

SEQ ID NO: 6363 - DNA, 120 bp, Homo sapiens
aaacgtgaaacttccaagtaattgtaaaggctaaagatgaagaggcccctccccgcagggcacgcattctggtaccagatgctgtaaagccacggcccccaaccttttggcaccagggac

SEQ ID NO: 6364 - DNA, 120 bp, Homo sapiens
tttcgggatgaacctgctccaactctgatgggcaggtgttaaagagtctcacaaggtgcacacagcctgggcctccgtgggtgcagccacaacagggttctgctcctatgagcgtctaag

SEQ ID NO: 6365 - DNA, 120 bp, Homo sapiens
aaacggcatagcttttgcaaaaccaaggccctcaacagagcagaagtgggcagtgcaaccacggcacgtcctgctagcttatcggcttcctgggcctccccccgcctctgctcaccacca

SEQ ID NO: 6366 - DNA, 120 bp, Homo sapiens
cctcgggtccagtttcccagtagcagcagtgagcaggccccgggcagctgtgcccgtgatgtgggtttctcacttgggcctctggctgagggacctcccaccgaaggttccaaccacagc

SEQ ID NO: 6367 - DNA, 120 bp, Homo sapiens
ctccgatgaggttgtttgctgcagactgttcacacagaaacgcacactgcggcccccaccccaccacacaagggccctctgggggtgcggaacgcagcagggcctgctcctgtctgtgcc

SEQ ID NO: 6368 - DNA, 120 bp, Homo sapiens
tgccgcctctgttggctttcatcttcctggcgactcaaatgtgaccctccaggacctgagggctctgtgcttccctcggttctggaaggttctgacgacgacaccagggactcgccatag

SEQ ID NO: 6369 - DNA, 120 bp, Homo sapiens
ccacgttccaggcaccaacgcactccacagcttctgtccttcctgacccttctgaggggaggttgtctgcctgatgccccctcatccagagtctgtggcatgcactttctacacacgaag

SEQ ID NO: 6370 - DNA, 120 bp, Homo sapiens
aatcggggcacccctgtggacagaagcctcccgcgggcctcagcccactcaagccccgtcctcatgggcacagagggctgttccgggcctgtggttgctcagctgtcttgtctctcgggc

SEQ ID NO: 6371 - DNA, 120 bp, Homo sapiens
ctccgtcatcccagcggctccgcgggttcttgacgttcaggacctgtgacttgaaaatcagaggccggtggctgtgcaggtgccctcgacttgggctgtgacctcatgatagccttgggc

SEQ ID NO: 6372 - DNA, 120 bp, Homo sapiens
tctcgtggagtctccccagtccccctccccagagtagctcaggccttaaggccactgtccttcctgccagcatcccttctccctcccctgccctgcactgaggtcacctggacccaactt

SEQ ID NO: 6373 - DNA, 120 bp, Homo sapiens
tcccgggcctcgatgctgctccagggacagcaagactggggggcctgggggcgtccatctccatgctcctgggctcagccctgctccagctgcgtggtggtagatgccctgggaatccct

SEQ ID NO: 6374 - DNA, 120 bp, Homo sapiens
ccacgccaaccaaccaaccgtgtgggggccgagagcagtgcagccccgaccttctgcagccccaccgagcccaccggctgtccctgtggctccgggtcctcacctcttcctgtgctgggc

SEQ ID NO: 6375 - DNA, 120 bp, Homo sapiens
cctcgcagacacatcgaggagccggggcaccctggcttggtcaccgcccccgtgcaagttaagtgcgggggcgatgctgggggtcttgactctgggattaagtgtccctgcaggtggcat

SEQ ID NO: 6376 - DNA, 120 bp, Homo sapiens
tgccgtccgcggcaggagatcgcactcggcccctggaagtggacctcagtgggtggcctgccctgacagggaagggcgtgagggggaaggacatggcccagagcaagccacatgagaaaa

SEQ ID NO: 6377 - DNA, 120 bp, Homo sapiens
atccgctggggacagggagcaagcaacatggggccactgagggaaggaggtgacaaggtgggagccaagggacaggggtcctggggtctgaattttcctcagcaagcaagtgggagccag

SEQ ID NO: 6378 - DNA, 120 bp, Homo sapiens
acacgatggaccctcgagaaggctgcccgaggctccaggcaggcagagtgcagacccagcagctgcagcctcggctgtggggagcaacaaaggcgcctgaaaccaggccgcccacaggat

SEQ ID NO: 6379 - DNA, 120 bp, Homo sapiens
ctgcggctcggccccagccctggctaggatggctggtgggcaggtggcgtgtggcgcacagaccagagctgggaaggtctgagcttcatgggtaaccaaaaccccaaatgacccccacag

SEQ ID NO: 6380 - DNA, 120 bp, Homo sapiens
ctgcgaagcacaggggaagaggtcataaaacaagcacgttcctacacatggggtttccctggacaatgaaagaataagcttctgcctgtcacctcgagcgtcacacatgtgtggcccagg

SEQ ID NO: 6381 - DNA, 120 bp, Homo sapiens
cagcgtcggcagaaacgccaccctcagggaccacatcactcgccacagccagtggtgaggcagctggcctgtgcctgtctttaagctgaaaccccagactctgaaaaccaaagagcaaac

SEQ ID NO: 6382 - DNA, 120 bp, Homo sapiens
gcccgggcagcctacagactgtcttaggttcaccctcgatccttcctcatagggaggtcccagcagccctggtcacagagagaagcaaccgacacaaagctgagccctcacttgtactgc

SEQ ID NO: 6383 - DNA, 120 bp, Homo sapiens
ctgcggtacagcctgcctgcatgtccagacgcactctcactgagacctggggagccaggaaacacttttcctgaagacaaagcccaggcatctctgggtcagcacgaagccccctctgag

SEQ ID NO: 6384 - DNA, 120 bp, Homo sapiens
ggccgcgctctgcagcagggtgggacttacacgctgccatccgcaagaaacagggtgtctggggcaggacttacacattgctgtcctcaagggacaaggtgtctgggaccggacttacac

SEQ ID NO: 6385 - DNA, 120 bp, Homo sapiens
gtccgtgagggactgggtatccggggcgggacttacacgctgctgtccgtgagggacagggtgtctgcatcgctggacaggctctgctgctcgctgtcgttggcactggtggctggggcc

SEQ ID NO: 6386 - DNA, 120 bp, Homo sapiens
agccggcattgacataataggggttgactggctcccgccaggatccatacctgcaaacaggcaagcagggcatgttagtgacagcctgccaacagcctctcattttatttcacattttca

SEQ ID NO: 6387 - DNA, 120 bp, Homo sapiens
caacggggtgcattaaagcaccgggcatctttccagatctctcctctgattttaggcgggggctttggtgcacacacagagcatccacacgtgatcatttgggtttgttttccgtgcacg

SEQ ID NO: 6388 - DNA, 120 bp, Homo sapiens
ggacgcagatgttctgctcattctgcagtgcgcgtcgggagaggacactgggttttgatcaggatgaggcccttgggattcagctcagacgtctctgcacctgtgcccaagtccaagcat

SEQ ID NO: 6389 - DNA, 120 bp, Homo sapiens
ccacgggactgatgtcagggccggtatgtgacagtgtgtgtgggtggtgccacctcctgtccccctacctagagcagaggttcctccccagctcctgggacgattcacctcctcttgtta

SEQ ID NO: 6390 - DNA, 120 bp, Homo sapiens
agacggaggtggccgcacagacccaaagatgcacgaccttctgagaagcacagagagccccgtcttgtggccagggaaacccaggcagcgcatgccgcaggcgtgaggctgggtgcttct

SEQ ID NO: 6391 - DNA, 120 bp, Homo sapiens
gaccgaggggcagctggggaacatggcgcacaccccaggctccagggatggccctgctggtagtgcggtctaacgggaggcaataactcatgactgagtatgtctcccctcaacccatca

SEQ ID NO: 6392 - DNA, 120 bp, Homo sapiens
gcccgcagtggagtgtgcacctgtgctcaggtatggggacagatgtgctcctacggctgtgtttcctctgcacaggtgtgggaggcctgtgcaggagctgagttagcatggcaggtgctg

SEQ ID NO: 6393 - DNA, 120 bp, Homo sapiens
gtccgcgaggcaaagagtccatgcagactcgggtgtgcgtctgcccctcaataccccatccatgtgtctccagccacctgagtcccacagagccactgaggatggtgggtgaatcctaca

SEQ ID NO: 6394 - DNA, 120 bp, Homo sapiens
aatcgctggctcccggggaccctcttcattttctggagctgtgggcggtggacggatgagtgcatcctttagagcccagacactggcagacacaaaagcctggcaagaagcaacacaggc

SEQ ID NO: 6395 - DNA, 120 bp, Homo sapiens
tggcgggcagtggcctgggggaagaggtgagccatggcctgcagctgcgtcccagctctggtctgcagtcatgtccagggaaggggctctggcaccagatggcagggagcggtcacctgg

SEQ ID NO: 6396 - DNA, 120 bp, Homo sapiens
ccacgccttctccctggctgtggttctggggaacagtgatcccctctggtggctctctcaatccagcagaatgatctgactgaggacaccaggaagcaggtgttgggaacgcagctctgc

SEQ ID NO: 6397 - DNA, 120 bp, Homo sapiens
gcacgcggcacctactcccaccctaccaccatgggaacagcgggcacagacgcctctcctgcgggaaggcagagcccttgcgttggagcctctatctggcctatcctgttgcagctgctc

SEQ ID NO: 6398 - DNA, 120 bp, Homo sapiens
tcacgacggctccactctcatgaatgggagtagggcccttagaaaacaggcttgagggagcttgcctgccccttccaccttctgtatgaagatgcaagaggcactgcctgagtcaaaggg

SEQ ID NO: 6399 - DNA, 120 bp, Homo sapiens
caacgcgctggtgaacacacaaggccttactgaccatgggctcctccttcctcaaagcccagtcagactcccatctgcagatcctcgctcaacatgcccataatgtagccacagccccag

SEQ ID NO: 6400 - DNA, 120 bp, Homo sapiens
aggcgccagtgctgtctccattggcaaagcaagggtggtcagtgccactcagcaaataatccacagcaagcagcaggccagggagactggccagctgtcagccttcccattgtaggcagc

SEQ ID NO: 6401 - DNA, 120 bp, Homo sapiens
ccccgccactggctctgtgcagaactgccctccaggccaggggaaacaactcaccctgaaggccaaatgatgtcatagtgcagaacgcaaatctgatgcatcttccggccacactccttg

SEQ ID NO: 6402 - DNA, 120 bp, Homo sapiens
caacgaaactaggaggcaaagaaggcgcactgttaaagcacacggaaccacaagaccagagtcacttgtagaagtctgtgtgtgcgtccacaccttgttctctgggttactttgagtagt

SEQ ID NO: 6403 - DNA, 120 bp, Homo sapiens
atgcgtgtgttggctgattcagctatattttacaatgcatccgtatgatatcttctacaggaaaaagctttcttcttttgtttgtacaagcgcttcattcctcttttctcccaatctccc

SEQ ID NO: 6404 - DNA, 120 bp, Homo sapiens
ctgcgacaaatacatatttcacaggccggtatttctgacactgctacacatttgcaagaacaatgccttctctaggtgatttcacatgccaaaactgacttaaaaaatagagaacaatac

SEQ ID NO: 6405 - DNA, 120 bp, Homo sapiens
acacggccagttcagagcagccacgctaggcgcgaggcacaaaaacaccagttctgagtcagttacaaaaggtggaatgtgtcaggcctactggcaagttgacaagggtttattcaagta

SEQ ID NO: 6406 - DNA, 120 bp, Homo sapiens
aagcgagagaatggaccacccattccccacgaatcctccacactgttctacggcagcccacaaccacggcccaccagggctccgtcacctccaggaaccgcctcaacccaggaatcttaa

SEQ ID NO: 6407 - DNA, 120 bp, Homo sapiens
ctccgaggataggctgaagggactggtgagtaatgtgattccctgtgtgctcctgagctttgagctacagctcctctaaagtgtgcccctgccctcgtccccttaatctgtccattgcac

SEQ ID NO: 6408 - DNA, 120 bp, Homo sapiens
gcacgtgctatgcaagccctcagccatgggtctaccctcatctggcttctctgcccagtctgctggagggaaagaaaagacacacacacagatctgtgaaaaaaaaaacacacacacaca

SEQ ID NO: 6409 - DNA, 120 bp, Homo sapiens
tggcggcacccgttcatggtcctatggcactctctgacagcccggctctgtctggctacctctcccttccacgtggcagctgctctgaatctgcactcctttcctccagtgcttatcctc

SEQ ID NO: 6410 - DNA, 120 bp, Homo sapiens
caacgctaagaatttcaaaggttggggccaagaacttcctcaattcctgtgccgtctccaaaggtcccctgctctcaactcttccctcccatgtcaggggaaaggagtgtcccccaaaac

SEQ ID NO: 6411 - DNA, 120 bp, Homo sapiens
acacgttagttactgaaagagaactgtttcagtgcagtggttctatactggggatacacttcagaattatttgtgaacattttaaaaatgattctgaatcactgttctagagcaggggtt

SEQ ID NO: 6412 - DNA, 120 bp, Homo sapiens
acacgaagtttgctaatccttgttctagagaaatgaaatgttatggaaagttaagaataatcatttagtgaggaaatctaatatataataatgacttatgcagcattatttcacattaaa

SEQ ID NO: 6413 - DNA, 120 bp, Homo sapiens
aaacgagaccctgtcttaaaacagacaaacaaacaaaaaaaaacttaaaacaagaattttatcttttagggaggatttggtgtgttttaaatacatgtatattttgtatacagtagcaat

SEQ ID NO: 6414 - DNA, 120 bp, Homo sapiens
atacgcactacaactaacaaaagaggaaaaaaggaaggaataaatggaaaatcaatttcttcagctctagattgagaaattaaaaacatttaacaagaagggaactattgaaatgattct

SEQ ID NO: 6415 - DNA, 120 bp, Homo sapiens
actcgctttttaaaatcctaatgcctctcagggtcacgttaaagttagaatttaaaatacacaaacaaaaaataagaaaacaaaaactcaaagatcaaaacacaaaagcatacaaaccaa

SEQ ID NO: 6416 - DNA, 120 bp, Homo sapiens
aaacgagttaaggactacaggacaaaggtggagaaaacaaagagaagctgatacaaagacatgaaatgtgcattctggaattttaatttccacgaaggaagacagaaaaaaaaaaccaaa

SEQ ID NO: 6417 - DNA, 120 bp, Homo sapiens
ccacggtcccagtggggcacagtacctgtgacacgcctgtttgggctggcggctgccccatgcccacactcatcgccccgctggatgacgggaactggttctgtggcagaaactggctct

SEQ ID NO: 6418 - DNA, 120 bp, Homo sapiens
gagcgggcgcctgggccatcatgttgttggtgtgtgcacccatcatgttcggaggctgaggcattcgggaaggagaaatggccatctacgagacaacaagcaccaccagagctgtagttc

SEQ ID NO: 6419 - DNA, 120 bp, Homo sapiens
gttcggaagctgacggccagagttttcaaggtgagccagaatgatccaaggcttcacaaccccagaggatggcaagcacagggctcacatcctgcccttcctcatgggaagagaccacca

SEQ ID NO: 6420 - DNA, 120 bp, Homo sapiens
tcccgcgctcctgggcaccttacacactttctcaggcaatctctcaaatgagccagcttcaaaatgtcctctgaatagaaatcaatagcaggctataatttaaagtttaagacatgccta

SEQ ID NO: 6421 - DNA, 120 bp, Homo sapiens
cctcggaacagcgagctctcagtcaacagatgctgacaattccctgctggccacatatctgaggctgccttctccagccttggaactcccacattctcacaaagccacacattcctatga

SEQ ID NO: 6422 - DNA, 120 bp, Homo sapiens
cagcgaaagagaacacttacccctggcactgagcccatgctgttcatctggacagagtggttcattggggaggctgcacgaggtcccatgggtgcttgtggcaactggacgttccccaag

SEQ ID NO: 6423 - DNA, 120 bp, Homo sapiens
caacggttcattaggaaaagcacccacaggaaaacagaattacaacttgctaaataaactcttaagtaaaataagatggaacgcacaggcaacagaaaactgaaaagaaatcacccaatt

SEQ ID NO: 6424 - DNA, 120 bp, Homo sapiens
aaacggcatcaatgtgggggtggtgacggtggcatggtgaggggtaccagggaaggacgaggacatgaaggcataaggttgggtaagacaggaacaagtgagacattaaacgaggctgtg

SEQ ID NO: 6425 - DNA, 120 bp, Homo sapiens
tgacgcccatcatccgaggattcccagctccttgctgggtttacattcattgttagaatctgtgctaagtctccaaatgttcttttaattttgcaagcaccttaagcattaagaagtgcc

SEQ ID NO: 6426 - DNA, 120 bp, Homo sapiens
ctacggccagatcatttgtaaagccaaaagcattttctcttggcaacctaccattgttggaagaaagccaagaaaagcagttttcatggaaagacatgactgcattcagttgtctgctat

SEQ ID NO: 6427 - DNA, 120 bp, Homo sapiens
actcgcttgctcttggaatccttccagtatatcaacttggtaaatatagagtaaggagaaatacgccactgattacagtgccacagacagcacttggctgtccagggtgcacctggggca

SEQ ID NO: 6428 - DNA, 120 bp, Homo sapiens
gtgcggcccccaggtctgaacatttgccctggaaggataagtcctaactggaagactagtaacaaagtatttagcaactctcactgtatttcatttggataatgtctttcaagaagcatt

SEQ ID NO: 6429 - DNA, 120 bp, Homo sapiens
tttcggaggctgaggtgggaggactgctcgaacccaagaggttgaggatgtagtgatccataattgagccactgtgtacacacacacacagccacgaccagaatgtgacttagaagaaga

SEQ ID NO: 6430 - DNA, 120 bp, Homo sapiens
aaccggcaccctaatactattggtacaccttggcaggtccctacagttagagacgctggttccccaaggtgcagtctgcattaatgcataagcaaaaacgacgggtcaaggtcactggag

SEQ ID NO: 6431 - DNA, 120 bp, Homo sapiens
acccgaatgcctgtgcttctccccggctctgccacctcttccttgttaacatagcagggagtgagctgacaaccctggaacacagctttctcattcagtgaaatggatactgtgccaaca

SEQ ID NO: 6432 - DNA, 120 bp, Homo sapiens
tcacggacacattaggccctgtactttccaactgcctgacctgcaagctgtcctacttctttaagaattctcattttaaagacagaaatggggcagagatctttatcctagaaagaaatc

SEQ ID NO: 6433 - DNA, 120 bp, Homo sapiens
gcacgtggagagcccaagaggaaaaacaggagtgggccacgtggtcccattttacgcattactcggagggaaagcccgcggttaggtaggaagtattgaaagtgcttcagttcacttacc

SEQ ID NO: 6434 - DNA, 120 bp, Homo sapiens
gtgcggtgttcagtcccgcgtgaccagtcatttgcggggaaacctgcgttagggtctcagccagcacgctgctcgaggcgccctgcatggctggagtagggtacggcattccagctcccc

SEQ ID NO: 6435 - DNA, 120 bp, Homo sapiens
ttgcgcctgcccttgtgaagcctgattaattaagctatggccagagttactattgaggaggcctgggtgggtctggttaaagttagcattcatgcagataccaggtccagtctgtgacgt

SEQ ID NO: 6436 - DNA, 120 bp, Homo sapiens
agtcgccagccccacttgcttttgtgcttgcggattcagtgcttgggaggcagcgggggtgggcccagaggtgctggctgcctgtttaggcaggctgggggctgaagaatctccctggct

SEQ ID NO: 6437 - DNA, 120 bp, Homo sapiens
gttcggctgcccttgagcctggccacccaggccctgctgcacggggctgctggcgctcacatttcctattcctgggttgatactagagccgctgcctcctcgtagaagctccgacagttg

SEQ ID NO: 6438 - DNA, 120 bp, Homo sapiens
gaacgttccctggccacaggagggagagtaaccagataagcccaccaccacgatcacgttcccctttgcaagtgacacaatctcagctaagggaatctgaaggtacactgaaccaggacc

SEQ ID NO: 6439 - DNA, 120 bp, Homo sapiens
tctcgtcatgggcaggtgacaatcaccctgtagccaggagagcagacaccacttgcatgctaaggatggctgtagccaaaaacataaacacctggggtggggagatcatctctgaactgc

SEQ ID NO: 6440 - DNA, 120 bp, Homo sapiens
gcacgtgaggctatcttcttggccttcctttacaggacaacaccagatgccccctactttccagccacaacactgagagctggcacaggcattgggaatctttcttcttgaatctctcat

SEQ ID NO: 6441 - DNA, 120 bp, Homo sapiens
gggcgaggatgaagagaccgtgtcaagcactgtaacccagaagcaaacaagggccaaatattttatatttaagtttggaaaaatctgcaaaaggcgacctaactggctattttgaacatc

SEQ ID NO: 6442 - DNA, 120 bp, Homo sapiens
caacgccccagagttaaaaacttcacccatcatcctgccactctcagagctatcagttttcatttatggtttattctagttcttatcaaattcacaggcaagtttcaaagttgtaagcag

SEQ ID NO: 6443 - DNA, 120 bp, Homo sapiens
caccgtgaccactttttcatcctatttcagtccaaatacatataccagctgtttgggtgaaggcagagttagacaaattcttcttctgtaattcaccatatgaatatgtgtaaaaccaaa

SEQ ID NO: 6444 - DNA, 120 bp, Homo sapiens
gggcgcacacgtagtcgtaccatcacccttctgtttaccactgtcaccacatttccatattccctagttcagcaaaactgacaaaggggagtgaaggaggcaggccaggatattgcaaca

SEQ ID NO: 6445 - DNA, 120 bp, Homo sapiens
catcggaagttcctaaggttcacgattgacagcgatccagtcccaggtaagccctcttctctctgaccgttaccagggggcccgggagaatgcaaagaaaaggagactgtgggcaccctg

SEQ ID NO: 6446 - DNA, 120 bp, Homo sapiens
tctcgttccttctcacccccactcaggccatctcccctcgccccaccacttcctccctgcacctacctttcttccttcctttctcggtgaagtgaagggtcacctctcattgtggaagaa

SEQ ID NO: 6447 - DNA, 120 bp, Homo sapiens
aggcgcgaggtctctattccccatgtgacaatcaagctgggtgcgttcacgcccaggatgctggggttgtcccacctctaggtttggagtgggacgacgaggagaagcaatttgttcagg

SEQ ID NO: 6448 - DNA, 120 bp, Homo sapiens
gttcgcttggctgtgactcatcgcctctccattgagagtctccggcgggtccgtgatcatcggacacgatcatgatccgtcctcaggccccgcctgtgcagagtgcgcggaggccaagga

SEQ ID NO: 6449 - DNA, 120 bp, Homo sapiens
gagcggaatgagcttgcgtacttgaagtctgtggccgtctgccaacatctccttcaaatatgaacattcttattttcgctctggaagtttttgtcaggtttattgcaaatgcaagggtgg

SEQ ID NO: 6450 - DNA, 120 bp, Homo sapiens
caccgtgcccggctgggatgactattttaatctcaagagagccatctgggttccttccagggcacaattctatttaaggatatactttcttatttttacacaagtttgataactggataa

SEQ ID NO: 6451 - DNA, 120 bp, Homo sapiens
agacgaacttttttttttttttttttgcatggaccaaaaaatgtagccataagagcatttgttaatacgcacgtctaacatcctccttcccacctccctgtgcagcacaaagtggtaaag

SEQ ID NO: 6452 - DNA, 120 bp, Homo sapiens
cagcggaagtacaacctctctttgtatcatgttactcatccgctgcacacacctgttcatccaacaacagctaacaaaagtcagactccgagttaagcgatgtacacatcacagtttgtg

SEQ ID NO: 6453 - DNA, 120 bp, Homo sapiens
tctcggctcctaagcttggcagcttgttttcagcgtattcttaaaaacctaggaaactggcaatcatacttctaagttaaaagattgggaaatcaggccagtgaataaatacttactttg

SEQ ID NO: 6454 - DNA, 120 bp, Homo sapiens
agacgtgaaccaccacagctaccccgtggttcttaaaaaggggtctccttaaaaaggaagcttcaccttcctttttggtgtgagggagacagaccgtcagggagagggcactttgttctt

SEQ ID NO: 6455 - DNA, 120 bp, Homo sapiens
gaacgggacgcctaaacctcaaatccccagtggcattcaaggctgctcgcaggcacagggcgtgttctggccaatcctgttcgagcaaggggagctgacattggcccagcacaggcaggc

SEQ ID NO: 6456 - DNA, 120 bp, Homo sapiens
aagcgcctgcatcagagccaaggacaggccacctagtagcagtgtccctggagcctggtgcttggctcagtacattaaaatgcaacaaccaggccgggtacagcagttcatgcctgtaat

SEQ ID NO: 6457 - DNA, 120 bp, Homo sapiens
gagcgattcattagcttaattttaatctggattaagacatttcacaacatgttttttgccaagtacagatgcctctgtgaaatgtttcccagccggctaaacagcgtctccccctgcaca

SEQ ID NO: 6458 - DNA, 120 bp, Homo sapiens
acacgggcaggcacattagagaaaaagcagtgtcataatgacagtagctactatgacttaggaatgtctatgggccaagatcctacccgtgaacaagtcgggcccccatccacgcaatat

SEQ ID NO: 6459 - DNA, 120 bp, Homo sapiens
tctcgactgtatgatctcgtcctttgcagccacactgtgaggcagcaatgatcattccgcagacggccacagactccagggccctgggacccggaccaccgtcatatggctctggccccc

SEQ ID NO: 6460 - DNA, 120 bp, Homo sapiens
ctccggcatcaagggaagtctcaagacttctaaggtcctcccagcagcacgcctggcgggccagggagtttgctggctgttgcctgggtaacctgagattccctggagaacgcccaagag

SEQ ID NO: 6461 - DNA, 120 bp, Homo sapiens
ttccggattatctttgctccttcccccatgtggacgtgggctttggagggaagagtgtagccatttctctaacacacttgggcacatttgcatttgtttttaacacatttcaggacgtgc

SEQ ID NO: 6462 - DNA, 120 bp, Homo sapiens
ttccggtcaaaatatatggcacaaagctataaaatcgttttttcttcaaggttatttctcatcacaagataaatcatttctaagccaacagctgtcccttttcaaaactgtcaagggagg

SEQ ID NO: 6463 - DNA, 120 bp, Homo sapiens
cttcgtcttctcaacacgactgttttgcaagatgtcgtgttatcagaagcatcctttgctcccaaactcaaaatgatgttaacatggtgagcaggaatagtcatgatattgcaaccacaa

SEQ ID NO: 6464 - DNA, 120 bp, Homo sapiens
taacggagaaacccaaaaacctccattttctcctgagatatctctgctatctctaatttcacttcagcagcactggtggctgaaatactatggactatgtatttcggacttcctttttct

SEQ ID NO: 6465 - DNA, 120 bp, Homo sapiens
gggcgatttgttctcccactgcacaccatgcaactgtcatttatgccttaagaaaatcccattgaagttgtggactcaatgcacaatcaaaactgaaagcaaaaccgaggcagtgagtag

SEQ ID NO: 6466 - DNA, 120 bp, Homo sapiens
gcacgagaggaggggacaaaggctgggtccccggccatcaacaaacggagagctagctcataaaacagtgacctggagcttcagtcagcagccctcactcccaaaaggggtgaggagtct

SEQ ID NO: 6467 - DNA, 120 bp, Homo sapiens
aggcgtgagccaccgcatccggccagagtgtgttgttttctcattgcagtccctaacttgccctgaaccctcccttacccaggtagccacgaagcatctggtgactgaggcctgggagtg

SEQ ID NO: 6468 - DNA, 120 bp, Homo sapiens
tgacgctctgccgtgacccacttggggcttctgtgacgtccccttcagcctgacaagaggacccagttctcctctgtgctcaccctgaacaaaacaggtcctagtctgggaagggcgcca

SEQ ID NO: 6469 - DNA, 120 bp, Homo sapiens
ttccgcaaatggcagtacaatggcaaacaaaataaaatggagtttattatgaaaatggatccattaagctacctaagaataacatagccctacaactcctgcacttgtagagggacacgg

SEQ ID NO: 6470 - DNA, 120 bp, Homo sapiens
aaacggacgtcagtacccctgcaagaatcacacagataggcccctcggtgcacctggagagggaggccacaatggcaaataataggagacacagcgatgccccactcccttctttcccaa

SEQ ID NO: 6471 - DNA, 120 bp, Homo sapiens
ccgtcaggattcatcctgcctcaccctgctccctttgtctcttcccctgacccttcctcgggacacccggagagggtctgagggtgagggtgcgggcgctgcgtgtgggcttgcactcga

SEQ ID NO: 6472 - DNA, 120 bp, Homo sapiens
ggccgagggcagggccgcagccgcgagaacaatgggcagaggaggcgcgtccacctgtccgcccggccgcctgcccggcttacctcacctgcctggctccgtgtgcctgctcacgcccca

SEQ ID NO: 6473 - DNA, 120 bp, Homo sapiens
caccgtcccgctgtccgccatgatgggcttggccgtccgtccgagcactttcagccactctgggaagcaggtccctgctcttggccactgtgtggctgggaggcagaagcgtgactctgg

SEQ ID NO: 6474 - DNA, 120 bp, Homo sapiens
gctcgggctcctgccgccgattggctgaggcagggaccagatgacgggcctcagaaccctatggtagccatggcaaccagcccctttagacaccgccacccccgagccactcctgactgc

SEQ ID NO: 6475 - DNA, 120 bp, Homo sapiens
aggcggcactgcccgtgggcccatgccagggtccccttggaggaacgaggtgggcatggctgcatggtagctgtccccacaacagctgttaagcgtttccgtgtgtttcattcatgtcca

SEQ ID NO: 6476 - DNA, 120 bp, Homo sapiens
gtccggggccactctgtgccctgccttacccccagcagaggcagaagcactggccttgcagcccctgctgagaggaggacttcaggtcaggcttgcctcaggggctgaaggccaggccca

SEQ ID NO: 6477 - DNA, 120 bp, Homo sapiens
aagcgggagcagggagaacttcccagccccactgggcagagccaagctctcgcccacctcagacggcaaaggctgccagctttctctccgcccacagtccactccgccaccctctcgtta

SEQ ID NO: 6478 - DNA, 120 bp, Homo sapiens
ctgcggcctgtggaatacgtgcacgtgctcacacagtcccgtctcacaagccccctgaggcccctcccgaggccttgctccctggaccttgggttcccactgggcaggactctgggtctt

SEQ ID NO: 6479 - DNA, 120 bp, Homo sapiens
gaccgtctcgccatcagtcacacacctgcggctgcacccgctctcccctgggctgcagtgccctcttgcgtcccaagaacgcctcttccctccagggcgcaccagcattggcccctggca

SEQ ID NO: 6480 - DNA, 120 bp, Homo sapiens
tcccgtatgtctggagacgaggcttctcaaccgtcacccgtggacatcctgggcactgcagggcactgagcatccccggaaccaccccctgcccccagccccgtgacagccagaaacagt

SEQ ID NO: 6481 - DNA, 120 bp, Homo sapiens
ccacgcgctctgacagcagcactgcctggccaagaccccttcgaaggcttcccctaagcccgggaagctgagtcccacttcctggcccaggcccagcacccgatgagcagaatctggtga

SEQ ID NO: 6482 - DNA, 120 bp, Homo sapiens
aagcgagagccttgggctgctgcagcccagggaggccactaccaaggccatcagagggacccgggatccaggggagcctggagcatggtccatggggatccaccttcaagagagcgactt

SEQ ID NO: 6483 - DNA, 120 bp, Homo sapiens
cttcggggccagtcccagggaaccgggcttggcatgggcctgggcgccgggggtctcgggccgcggctgctcccccaggactctgggcgccgggggtctcgggccgcggctgctccccca

SEQ ID NO: 6484 - DNA, 120 bp, Homo sapiens
gggcgccgggggtctcgggccgcggctgctcccccaggactctgggcgccgggggtctcgggccgcggctgctcccccaggactctgggtccggatccaagcttcttcgcactggcctgg

SEQ ID NO: 6485 - DNA, 120 bp, Homo sapiens
agccgcctgtcccaggatggaacccggccttgaagcccttcccatgccatgctcagagctaccagcttgtctggggacaggatgtgggtagggacaccatcccaggacagcaggcagtgg

SEQ ID NO: 6486 - DNA, 120 bp, Homo sapiens
tctcgtggaacacaaactggaactaatcagcaggcggcacctgggaattctagtcacttaacagcagggagaaggttgcacgttgctcacagcagatcatgaagccatctccacctcctg

SEQ ID NO: 6487 - DNA, 120 bp, Homo sapiens
ggccgcacaggagaccctctgtcattcctgcagaacagctaatgctttgcagagctccagatgtaagtttaagaaatacgtttgttataaggtttcttaacaagacacatcagtgatatc

SEQ ID NO: 6488 - DNA, 120 bp, Homo sapiens
gctcgaaagccttcgagagtgcttttacctcccaccacatcaaatctagatttcttcctttcatcctgacacccacatgttcaacatcacagcacatgcggggagcccccagggtgcagg

SEQ ID NO: 6489 - DNA, 120 bp, Homo sapiens
gggcgctgtgtctgcaggggcgtgtgggtaaaagcaagagagggtgtaacggtgggtggggggagggtgctgtgtctgcaggggcgtgtgggtaagagcaagaggggggcagcaggggag

SEQ ID NO: 6490 - DNA, 120 bp, Homo sapiens
gcccgcctagggagggctgcggggcgctgcggcagagggagccaggaccgcacgggagcccaggctgctgggtgtggccatgtggccagggttccagcttgggtggctggtgggtgtcag

SEQ ID NO: 6491 - DNA, 120 bp, Homo sapiens
gggcgctgtgtctgcagtggcgtgtgggtaagagcaagaaagggggcggcgggggagtcttggagaagggaggggtgcggaggggcactgccttgtgaggtcactggtggtgatgtgggt

SEQ ID NO: 6492 - DNA, 120 bp, Homo sapiens
tcacgcacaggcagagttggttaaatgatccaatttcacaagtttctcctagaacaagcagctacattttcattttttaaaatgctgcatgaaggttgggcagtggctcacacctgtaat

SEQ ID NO: 6493 - DNA, 120 bp, Homo sapiens
ccccgttcccacacacctaccttccttaccagcagaagcctgattctgcttggggtatctcccttctacctgcttaggaaggagatgcacacacgcacacacacacatgcatgcatgcac

SEQ ID NO: 6494 - DNA, 120 bp, Homo sapiens
ccacgcatggacgcacacgcacacacaccatgcatgcgcacacacagcccacccgcagtaagtagctggagcagggtaagttcaccccaatggggcttccctcccctttccagtaactaa

SEQ ID NO: 6495 - DNA, 120 bp, Homo sapiens
ccccgccttggccaaagggagctgagagatgtctgcttagtttccatgccagtaaaataagacatgcaggattggaaaagcccctcttctttactagatatcactgtgtcattcggaatg

SEQ ID NO: 6496 - DNA, 120 bp, Homo sapiens
gggcggtttctcatagtttaacaccatctcgctttggtgctgttgttatgatagtgacagtgatcggtggagcaggaacaagagagacagcacctcccctctctctttctcctgcttctg

SEQ ID NO: 6497 - DNA, 120 bp, Homo sapiens
cttcgcttcaccttccaccatgattggaggtttcctaaggcctccctggaagctgagcagatggcagcaccacgcttcctgtacagtctatggaactgtgaacaaattcaatctcttttc

SEQ ID NO: 6498 - DNA, 120 bp, Homo sapiens
taccgtgaactttttcctacccaggaaaaaggaattctttattatcatcagcctctaaaacagggctttctgttacttgcctctgtatgaactccaaactgacacgctatctaatttatg

SEQ ID NO: 6499 - DNA, 120 bp, Homo sapiens
atgcggcttttacctactgagctggacaagattgtggaagtgaaagtaaaatttgaagattggatgaaagatgttaaaatcatgggaaggctgaataatttgagaatactcagacatctc

SEQ ID NO: 6500 - DNA, 120 bp, Homo sapiens
caacgtgtacctgtgtgtttcacaaggggattctacagaacaccagcatttcggaccctctgcactagccatcctcagtaccaagggccaggaagctctgtcttgaagttgaaactagag

SEQ ID NO: 6501 - DNA, 120 bp, Homo sapiens
cttcgtgcaatcaaatgtagattctattccagcccgtccaagtctccttagcacatgtttataacaagtacctgccaaggttattcttccacatgacttctcatccatttgaactagagc

SEQ ID NO: 6502 - DNA, 120 bp, Homo sapiens
atgcgtaagtaaaatacctctgaccattactcatacacagttatgcaaatcagtcattagtaacagaatccccagcgggggcaggaatcactctccaaatctctgcctggttcatctgtc

SEQ ID NO: 6503 - DNA, 120 bp, Homo sapiens
ccccgccccacgttttggctctcattggctgtatattaagtgcagcagggagcaattcagaaaacagagttcatgccgcagagcaggcagcctgcccccttccttgttctagatcttgtc

SEQ ID NO: 6504 - DNA, 120 bp, Homo sapiens
actcgtggaccgggcaaacgtgggccagcagcctcttctggtgtcctgtttttccttgactttatcctactgggtaaacattcactgctcaggaccccttgctcttccactttttttttt

SEQ ID NO: 6505 - DNA, 120 bp, Homo sapiens
aggcgtgagccactggcccctcccctgctgtcttaccactggcgcccccaccccccgctgtcttactacccagcgaagtaaccttgggttgctccttactccctctgcacacaactttat

SEQ ID NO: 6506 - DNA, 120 bp, Homo sapiens
attcgcccataaaatgtagataacaatacctgctttgccagccccatcagagcgttttaaacatcaggtggtgctcagaagcatttcaataaatgtcagctatgagcatcattctttcct

SEQ ID NO: 6507 - DNA, 120 bp, Homo sapiens
cttcggacaggagccgagccagctggcccttcacgctgttcctttagccctccgggtctgggggctcagtcagggggcccggagccatccatccttctgccagggactcctcctccctgg

SEQ ID NO: 6508 - DNA, 120 bp, Homo sapiens
aggcgaggagctgcagggtgcctgggggtgagccctgcgctcttggtgaagttctggctggtctgggaacggagcaggctgagctgtcaacactcccaggggccaggagctcgttctgct

SEQ ID NO: 6509 - DNA, 120 bp, Homo sapiens
ccacgtcccatcccttctgtccagtcactgaagtgaggtgaccccgcacttcaccccaacgcaaacgcgcactcaggaagtttaaacagacccattctaagggccacgtctttctgagaa

SEQ ID NO: 6510 - DNA, 120 bp, Homo sapiens
ttccgaaggcagaggaccggtaagggcccttcaaagctctctgaaacagcaacacggtcggagggaggtcattagcagtgctgtgtggcttcctcatcctcatggtaagtgagcactggg

SEQ ID NO: 6511 - DNA, 120 bp, Homo sapiens
agccgggactacaggcgtgagccaccatgcccagctctgctcagctcagctcagccttcagacagaagctgccagagccctcagcctaaaagaccccaccccattttcagaaaccatgca

SEQ ID NO: 6512 - DNA, 120 bp, Homo sapiens
agacgtggggcagaagaaaaaccatgtagcccggctactcctttccaatggtcccatttctgatgccctggagccagcgtcagccagctgcttctataaggggccaggcggtaaacagtt

SEQ ID NO: 6513 - DNA, 120 bp, Homo sapiens
cagcgctttatgaatctgggttttcctacgtctggctgcttcatgtgggggttcagagctagaaaggggaaggcggtgcaatatctcggggccaggggatgacgtgtgtgtaacgaggct

SEQ ID NO: 6514 - DNA, 120 bp, Homo sapiens
aggcgtgagcctgacaagaagagtttcttgggggaaagaagtaggtttaaccctgaaaaactttctccgatcaaatgagaagaggtccccagaagcggcaagtcaacatcacagtcacaa

SEQ ID NO: 6515 - DNA, 120 bp, Homo sapiens
ggacgggcactgctcaagtgctttccctccctgcttgtgcttaaagtctgattctagggaagactctggggctggtgcctcctggaggccctctgcctctgtccctacatcatttcctct

SEQ ID NO: 6516 - DNA, 120 bp, Homo sapiens
acccggtggatgccgagcagttttgcttacacgctctccaatccttgaagcaacctgttaggcagtttctctaaggagagatcccagaccacttgaccaaaaaaaagtctctggaaggct

SEQ ID NO: 6517 - DNA, 120 bp, Homo sapiens
ggacgcatcgtatttccaaacaaacaggaagaccctcaagccccctccccaggtccccctctagtgagcctgggtgagggtagactccagctgcctgcagcctggccggaggggagggtt

SEQ ID NO: 6518 - DNA, 120 bp, Homo sapiens
agtcggtgtgctcttcgcccagcagcaataagcattattatagttgtcttggataaaaatatcaaaagttaaataaaagcaaaaaaaaaaagccgtaatccaattttctccaaataacca

SEQ ID NO: 6519 - DNA, 120 bp, Homo sapiens
aagcgcactcgcaggacactccaaggcaaggggtgttcctcacattgcccttgacaacactgccacgctggtcactcacctgaccccatgctgctgggagcggggcagggatgcagcccc

SEQ ID NO: 6520 - DNA, 120 bp, Homo sapiens
acccgcttccttctgcaaagagaccaagtggttctcagggtgggtgcacacagccccccagtgcaccctgcacctccacaggcttagggcctgccagccaccctcccccaagcaggaaag

SEQ ID NO: 6521 - DNA, 120 bp, Homo sapiens
aggcgtcagccaccgcgcctggcctagaaggagctttattcagagcaggactccaaccagctccctattagcctagtgatctcaagcctcagtttccccatctgtgagatcgggaaaatg

SEQ ID NO: 6522 - DNA, 120 bp, Homo sapiens
acacgtggtcagtacctaatggtcctttaccccctctggtgtatgacccaccccaggccaaggggccctggaagagactgtcttttccgggccttagtttccctgagtgtgctgggtcgc

SEQ ID NO: 6523 - DNA, 120 bp, Homo sapiens
ccccgtgccttccagtagggagggtggggacagtggccggccccgcctgccagggcgggatccttggctacctggcctggccggggactgcgggcggggggccgggtggctccgccagcg

SEQ ID NO: 6524 - DNA, 120 bp, Homo sapiens
ggccgtctgctcgggctgcggtcgggcacacaatagcagccattgtctcggccagggtggcggggggcccgcccagcccaccctccgggtgacccccgccctgcggtgggtgggaagggc

SEQ ID NO: 6525 - DNA, 120 bp, Homo sapiens
gcccggtcccccgaagcccccgccgtcccggtggtccccgcggccgcccccgcgcgcttcctccctcgccgcagccgcttcctcccgctcgccccgctctaattagttccttttgcagct

SEQ ID NO: 6526 - DNA, 120 bp, Homo sapiens
caccgtgctggacctgtccacgggcgtcaactcagctgccagcagcccagaggcgttggcccctggctgggtggtcatcccgccgggctcggtgctgctcaaaccggctgtggtgaactg

SEQ ID NO: 6527 - DNA, 120 bp, Homo sapiens
ctgcggacagttgtggtgcccccccggcagctcccggcactgcccccgacgaacggaaactcttctgtgaaatagcaataatgtcctactgcccgggcagccccagcccagcccgccggg

SEQ ID NO: 6528 - DNA, 120 bp, Homo sapiens
ccccgggtggggacctggcctgtcatgcagggagagctgtgctcctgggtgctgaagcctcgctcctgtctgtcccccaccacctggccctcagcttctgagaggctttcccctgcccga

SEQ ID NO: 6529 - DNA, 120 bp, Homo sapiens
tcccgtttccctctcccaccctggcacctccctcacctagtgaccacccatggcaagttgccctctcccagcagagggggtgggtggggtggcatctgccctccctgctagcaccaggct

SEQ ID NO: 6530 - DNA, 120 bp, Homo sapiens
aggcgcctcccactagttaggaggaggcccgctctgcagccgccgtcctcaccccaggccaggcctgcagtaccagacgggatagctggccactccacccctgcaccccagggtctcctc

SEQ ID NO: 6531 - DNA, 120 bp, Homo sapiens
gagcgtgggaagcaggtccgagggcccctgagctggcaaggggaggtgccaggccagctgtggtgccaagatactgagtgacctgggccctggctcagggagcatgtggggccaggccca

SEQ ID NO: 6532 - DNA, 120 bp, Homo sapiens
cagcgccccgtcttcctccttctacccccgctgggcctggcctgggcagcgccccctgcagaggcctttgggtccttggtcctgtaacaggaagggggaggctggctggggacgaccgac

SEQ ID NO: 6533 - DNA, 120 bp, Homo sapiens
acacgttgcttcctctggcttttccctgctgggccgctttctcagaggcacttccccacccctaacacccagtgggcccccccaggttctgtgccactcagagggaccctggcaggggcc

SEQ ID NO: 6534 - DNA, 120 bp, Homo sapiens
ggacgccctgagggatggacgcagccatgcaccccccatctggggcctctccctgctccctctcccacctggcagctgggagttctggcttctaggcctgccctgtcaccaggcctctga

SEQ ID NO: 6535 - DNA, 120 bp, Homo sapiens
aaacgaggcagctgcccggacagccttggggtccttagtggccctgcaggtcctctggcagctctgctgaccccaccctctcccggactgcccttctgtcccagaggggtcaccctgacc

SEQ ID NO: 6536 - DNA, 120 bp, Homo sapiens
acccggcccaccttgccactgggctttggactccagccctgacagggcccagccacactggctctgcccctcgaaggggctatgagcaaggtaggagggagctggtctcctttcttcggg

SEQ ID NO: 6537 - DNA, 120 bp, Homo sapiens
tggcggggtcatgggtttgcgacttgagcagagcggaggaacagggcactggaaggccgacgagctcagcatgcgactcggtgacggaccaggctcggcagggccggtgtactttttgtg

SEQ ID NO: 6538 - DNA, 120 bp, Homo sapiens
tgtcgtggatgtgccaggaacccggccctgacatgaggccaccactgccctgagcccctgcaggcctgatccgggctttctccccgaccctgcaggtgcccctccctctcaatctgccgc

SEQ ID NO: 6539 - DNA, 120 bp, Homo sapiens
gggcgcacaggtgacaggaactgagacagaagattccaggcggagcatcccaaggtccaagtcctcagcccactactgcccgctgcggctttggagagtggtgggcaaaggcccttctcc

SEQ ID NO: 6540 - DNA, 120 bp, Homo sapiens
tgccgacaagagctctggggccaggagaccgccaccccgtgggaggggcaggggcgctatgggagggagcctcaccctggcacgggtgctgtggaagcaggagcggctgcatcctgtacg

SEQ ID NO: 6541 - DNA, 120 bp, Homo sapiens
gcccgccaaccttacccagcccggcccttctgggctgttaaaggctgctgcctccccatctccagcacccacagccctgcaaccggcaggaggagcaacctgccttctggaatctggaca

SEQ ID NO: 6542 - DNA, 120 bp, Homo sapiens
aaacgagaaatgcagaaaagaaatttattaccaagctataaattagaggcggcggggtgggcggggggagccgagcagtcacgtatggggcatctgccctttttctctgtcctcctgggc

SEQ ID NO: 6543 - DNA, 120 bp, Homo sapiens
aggcgctcctttgcgcggaccacctagtgggtcacggataatcaggccgggaggccaagcctccgccccataccccttgcccacatgggatggcctattcccatcagcccaggtccattt

SEQ ID NO: 6544 - DNA, 120 bp, Homo sapiens
ggtcggggtggcctggggagacagagctgggctgcagggcccagcgcatgctgtgacctctgtgagctgagagctgtttctagcaccccacccatgggggctcctgctccttcgaagtcc

SEQ ID NO: 6545 - DNA, 120 bp, Homo sapiens
ccccgcaaagctgaagcagtcagaggggtggcagttcagggggcctccctgaggctggggcaccatgggaaagcctggcacagttttctgtgtgccaagcccttagctggccagctcccc

SEQ ID NO: 6546 - DNA, 120 bp, Homo sapiens
ccacggatttatcattcaccttaaataagtgttcatagttctgcagaggagaggggacgggtgagagggctgcagactgcaggcaagagatgttgggcaggctatgtggggccacgtgag

SEQ ID NO: 6547 - DNA, 120 bp, Homo sapiens
cagcggcaggtccagaactaggcggtgcaggcaagcccctcatccacctatccagtaccccaacatcccctgagcttctgccatgggtcaggctgagttcagagctcattcacagggagc

SEQ ID NO: 6548 - DNA, 120 bp, Homo sapiens
caccgactgacacttgggcctgagggtcccaggtgagaggacccagctgacttggcatccaacttcaggccacgcggctgtcagagagcagcagtcagaagcacaggatccaatcctggc

SEQ ID NO: 6549 - DNA, 120 bp, Homo sapiens
atgcgtgggggcagcatgtgcacttcgttgttgggcagcaacctggcccaaggcaggaccagatcccagcagctgggaccacagacagtgctgtgggaggcactcagcaatggggcttac

SEQ ID NO: 6550 - DNA, 120 bp, Homo sapiens
attcgcgtgcaatgcgcctttgaggccaagccccaggctctgggtagataagcagacagcctgagactcactctcaaggacactctggtcacccagggcccctgagaatagatacgggca

SEQ ID NO: 6551 - DNA, 120 bp, Homo sapiens
gcacgtgccacaacatcagggacctggccagtggctggcgcagtaagtgcccctggtgcatctgaatgaatatggctgttgcagctttgcccaatctgctgtctcatgaactccatgtcc

SEQ ID NO: 6552 - DNA, 120 bp, Homo sapiens
aagcgcctcctaacccttctgcgggagggttctggccatctcccagtaaacacacaattctccaccgccgcctgcagatttggtccactccccagcttggcattcacagcgcctggtctg

SEQ ID NO: 6553 - DNA, 120 bp, Homo sapiens
cctcggacaagaacgggtcagggagcctcaccttccccaggccctgtcttctgccagcaggggctctggcccatgtgcggctgggagaggcttgtggcacatgtggggccaggtgagtcc

SEQ ID NO: 6554 - DNA, 120 bp, Homo sapiens
tcccgggagcaagtggcctccgggaccttctctacagcgtcccgggagagccaagcggtttgcatggccccagccccatgccactccactgcccaccatgggcgcagcaggaaatcctgc

SEQ ID NO: 6555 - DNA, 120 bp, Homo sapiens
cagcgagggctctggtgggaggggaagtgtgaatcatcaaaggcagggaccccatgggtggggagaaaggggccgagccccagtgagcaggacaagctgggggacaggaacaaagggccc

SEQ ID NO: 6556 - DNA, 120 bp, Homo sapiens
agacggtgccaggattggtggccttgggatgccccctcagcccctgcattagggatgtgcccaggctttctggaaaccctagaagtgggagcattttccaggaaggctgcatgctgaggt

SEQ ID NO: 6557 - DNA, 120 bp, Homo sapiens
tggcgcgggtgttgatgtcagtgccgagtcaggcccagccacgcgaggctctggattcaattagcggctgctgagggctctggcacgaggagggaggaggcgggccgtgggtcatggcgg

SEQ ID NO: 6558 - DNA, 120 bp, Homo sapiens
cagcggcggcagcccaggtggatttcctgtaggcctgggtcccattaggggagtggctgcggccaggcctgcctcccccggcccgtggctgcatcgtcaaaggggcctttgtgggcctga

SEQ ID NO: 6559 - DNA, 120 bp, Homo sapiens
acacggcggctgctgaagaaatgttttcactgcaaagcaaacctggccgagtgggatggtggcagggggcagtggcgggggggtggcagggcccaaaaaaaggaagccttccctggaaca

SEQ ID NO: 6560 - DNA, 120 bp, Homo sapiens
ctccgggcctgggatgggggacatggggccagatcctagacgtggagtctgaaggcccgggagctccgactcctcaaggcggggcgggtcccactgactcctccctgaatctccaatgcc

SEQ ID NO: 6561 - DNA, 120 bp, Homo sapiens
acccgtttgccagcctcagcaagcctcagagaagagccgtctccccagctcctcattctcctgcatagggggcaagaacaggggctgcagctgggacccaggcatcctgctaccctgcag

SEQ ID NO: 6562 - DNA, 120 bp, Homo sapiens
ccccgcagggggtgcaggaggggaggcgcgtgcccgccccttcatcaccatggcgacacttcctgtgcagggcaggatggttccaggagcagccctggctccttgctggggtgaggggac

SEQ ID NO: 6563 - DNA, 120 bp, Homo sapiens
atccggggccccctcccgcccagacaagggttctgaggcctcgacactcatttggggctgccactttcccagaacagcctgggctccagggcctcacccagccccagctgggccggttgt

SEQ ID NO: 6564 - DNA, 120 bp, Homo sapiens
gggcggcagtgggggtcctgggggttctgcatccagaggggcgagcctgcctctgtcaccctgaggtgggaccatggagaagccacagaaccatccgactctcggggtctgcacctccga

SEQ ID NO: 6565 - DNA, 120 bp, Homo sapiens
tggcgcataacaaagggtcatacatgcagtataagaaccaagcatgggtgtgaggaggagcctccccagggtcccctgctcaaagctcacgcctgaggcagggctccaacaagacagtgg

SEQ ID NO: 6566 - DNA, 120 bp, Homo sapiens
gggcggactccctggcccactctgggctccgggatagcaccagggctcaggtggggtgggacccacagaggacagaggttggatggagggcaggcggccccgctccctgacccccagcca

SEQ ID NO: 6567 - DNA, 120 bp, Homo sapiens
cctcgagccggcccctcggctcacaccggccctggctgccagcagcggttttcctaatagaagccaggtgtgggccagatgccctgggcggaagtggggggcagggccacacggagagcg

SEQ ID NO: 6568 - DNA, 120 bp, Homo sapiens
ccccgcaccagggcccgagcacaggccccagccagcagctggaaggggtgggagccacccacgctcttcccaggtctcctcgccccaaagccccgcaggggggctccctccagaaccaga

SEQ ID NO: 6569 - DNA, 120 bp, Homo sapiens
cttcgaggagctgggagccccttggatagcagccactctatccccacctcggcatcagtcaccgccccagccctgctggaagaggaggggagaggaggaggaaggctggaaagagggggc

SEQ ID NO: 6570 - DNA, 120 bp, Homo sapiens
gggcggaggaggggagaataggaagaatcacgtgggcccagtgagctggctcagagccatgcccggtaggtcgggggcagaagcataggtgccccagcagtgccctgggctctggagagg

SEQ ID NO: 6571 - DNA, 120 bp, Homo sapiens
ggccgggggaagcctctgtggcaccttcaagctgagcctgggccccgctttctgggcaaaggcttggaggtcaaagaaagctacctagtgaggataccgtacacacccacactgccttga

SEQ ID NO: 6572 - DNA, 120 bp, Homo sapiens
tgacgaagaggtcagccagcctcaccagcaagtacgaccagggtgtggccaaaaccaccctgcctggctagtttcactgcttaaatgggagtcctctcggtcttcagctggacaaaagtg

SEQ ID NO: 6573 - DNA, 120 bp, Homo sapiens
taccgtttggactaaaaagctgcaatcttccatgtgactgggtttctctcctgagtcttgtgtgtgtagggggctctggggctccgggctaccactagtttggtttgggctggtggtttg

SEQ ID NO: 6574 - DNA, 120 bp, Homo sapiens
ccccgggtggggaaaacgtcctagaaatggggagggggtatctatgatgggcctaggtctttgctggggagctcctctcctgagctaacagtaggaccctaaacttcaccttcctcaggg

SEQ ID NO: 6575 - DNA, 120 bp, Homo sapiens
atgcggacagcgccacccctgggcagggctgggcgctggggctaagggcggaactcacagcacacactccatgagggcagctgggccaccctcatggaggagcttaacgcggggtccaaa

SEQ ID NO: 6576 - DNA, 120 bp, Homo sapiens
cagcggagaggaactgggctgcagaggccgcgtcctccccggctcatcaggctcaaccatgccgggagtcaggagcgcagcaggccggaatgggccatccgtgaggagagcgcgccccct

SEQ ID NO: 6577 - DNA, 120 bp, Homo sapiens
tagcggcctcctgccccttctctcccagctcgggaggccccttcacccagtgggagtagctgagagggagcaggagggggctttggtggtcctgggaggcagacctgctcacacagaggc

SEQ ID NO: 6578 - DNA, 120 bp, Homo sapiens
gcacggaggcttccccgccaggaaggagatggggcgggggtgggggcacactctggtggaaagtcccatgaccccccacccccatccccatcaggcagcccgtggcatgagcagctccag

SEQ ID NO: 6579 - DNA, 120 bp, Homo sapiens
gtgcggctgcaaagaggggctcacgctcgctcctggtgtggggtgggcccatccagcagctccagccacagctcaggacaagccctcgctctctgcacactcatgggcatcactggctgc

SEQ ID NO: 6580 - DNA, 120 bp, Homo sapiens
ggccgccccccactcccggctccatactgccagggtttccagtgtaggatgcccccaccaggaccccgatgtactccctttacagcaaaagaaggtggcagccgacccagggctgaggta

SEQ ID NO: 6581 - DNA, 120 bp, Homo sapiens
gaccgtcttgtctcccattgccttcagcccagcactgtcggggagcaccattaaaccccttcgcagctctcacagatatccacagctcaggagatggggaaagtgctctgtggaattgct

SEQ ID NO: 6582 - DNA, 120 bp, Homo sapiens
gatcgcaatgacgattgataggcacgtggtttaaaggaaaaacacacagttttgttgtgagaagacctgggcttgggtcttcattcactcacttactagctgtgtggccttggacaagtc

SEQ ID NO: 6583 - DNA, 120 bp, Homo sapiens
gggcggggtggtgtccgtttgtaaaaatgggaatagtcctcccgctacctacctcatagggttgggctcatatcaaaatagaaaacaaagccagggaacagtggctcatgcctgtaatct

SEQ ID NO: 6584 - DNA, 120 bp, Homo sapiens
caacgtggaggatttttactgttcatcactatggggaactagatgggggataaacgaaaatacaaagaaaaaaagggggggaagttacaacggtgacagttttcatattactgagctctc

SEQ ID NO: 6585 - DNA, 120 bp, Homo sapiens
ccccgtgagtaagtaactctgtctgagttcttagtatcctcagtgcttagtacagcctggcacatggggccaacacagattgagcaatggctacgcatcaagtactataggaagccttta

SEQ ID NO: 6586 - DNA, 120 bp, Homo sapiens
tatcgtctgtctttttaattacgaccctagtgaataagaaatgctatctcgttagagtttcgatttgctttttccctgatgactaatgatggtgagcatctttcttgtgcatgttggcta

SEQ ID NO: 6587 - DNA, 120 bp, Homo sapiens
aaacgtgtgtttggatccattgcccacttttaactgggttgtcttttttttttaattgggttgtaatggaatgaacagaggcatggggacaggaagcagagatcctggcctgtgaagagc

SEQ ID NO: 6588 - DNA, 120 bp, Homo sapiens
caccgctgcactggctcagggtgtccgcccctgccaaggttgggtccctctcttcccatgtgctgcgagggtgctggctgcctgtgagttctttccaaagcttcccggcggaagccttgg

SEQ ID NO: 6589 - DNA, 120 bp, Homo sapiens
gctcggtccacaggaggctaacgagccggcagcagagcctgatcctgagctacgccgaggacgagacagatgtggaggggacggtgaacggcgtcaccctcaccagctctggtaaggagt

SEQ ID NO: 6590 - DNA, 120 bp, Homo sapiens
acacgtgggggcctcagagccccccagggtatggacaattcagggcagcatgttggggtttccacttcgggttcttcatgaagcctttaaaatgtgcagttgaaagaggggggctgtggg

SEQ ID NO: 6591 - DNA, 120 bp, Homo sapiens
gggcggggacagcgggcagggagccgcagcccccagtccaagcttcgcctcctctctctgtgtgtgtttctgtgctgaggtgagagcaccagggcacttcctgcaggcagctctgcgtgt

SEQ ID NO: 6592 - DNA, 120 bp, Homo sapiens
cctcggacaaatccttccctgagagctcctggcaaaagcgtaaggagagagcatggattggaaggatttgtgcacttcccacctgggacactccgccaggatttcagagtgtcttaaaac

SEQ ID NO: 6593 - DNA, 120 bp, Homo sapiens
agccgcagtcagcagactccgtccgccgctttagagcaggactccctccaagttatctagccgtgaacagatgcaccatttaccctgagctcagacatcgtgctagcgagtggctgtgtt

SEQ ID NO: 6594 - DNA, 120 bp, Homo sapiens
gggcgctgagacaatggcaccccagctgcagcccctcttcccatggggtctggggcctctttcctgggactcctggctcagggcagggcaggctgtgcccaggggtccttggttcaggcg

SEQ ID NO: 6595 - DNA, 120 bp, Homo sapiens
attcgtagcaggtgtttggagctgggggccgattttccaataaagtggaggatttggagctccaggggcaggggcaggggctgggatggaagtccctggaatttcactgagctcctgttg

SEQ ID NO: 6596 - DNA, 120 bp, Homo sapiens
agccggctctgatgtggaggacggcagctgcacggctcctggaagaggcttgtttcacactcttgcttgttaataaatactgtgcaggtcttatcttttaactagaagttctgcttattt

SEQ ID NO: 6597 - DNA, 120 bp, Homo sapiens
aggcgaagtgggtccatagttatatggccaagggcatgatccacagaccttagcttactggtcacctcccccgatgctgctcctgtccccatttatttatccttcctgttttgttttttg

SEQ ID NO: 6598 - DNA, 120 bp, Homo sapiens
gtgcgttgtggaccacagctctgccacatccgattttcctttttccaacctgtttgaagttcacctgtgtccaggatggtaccccaaggccggctccttccaggacaaggatgaggagag

SEQ ID NO: 6599 - DNA, 120 bp, Homo sapiens
ccccgcctccctgcagagcctgtctccagttcacatgtgcagatggcctcactagctctggagatgaaaggggtgtgtcagaagctcggctcctggggctcctctgtgtcctgtgctatg

SEQ ID NO: 6600 - DNA, 120 bp, Homo sapiens
ccccgtctgtgaatgaatttcaaatgtgggaacagaggctgctggtcagagctgttctgctagctgaggtcagaacaggccacttcacacctgtctgactaaacacgtttaggtcactcg

SEQ ID NO: 6601 - DNA, 120 bp, Homo sapiens
ccccgggtcccctcacttactgctgtgttggtacagccctggaccccccccccccgctccaacttactgctgtgttggtacagccccggaccctccccaaccacttactgttgtgttggt

SEQ ID NO: 6602 - DNA, 120 bp, Homo sapiens
ccccgatccccacaaggggccgcgaggcgggcaggtcacagcaggttgaagtcccctttgtgctgttccagccactggtccagcgtcagggccttggggttgagtctcagggtcagctcg

SEQ ID NO: 6603 - DNA, 120 bp, Homo sapiens
tcacggtcgggtctcagggcatagaaacggaacatgttggccaggtcccgggcaccgggaaagccaagcttttcgtagtcctcaggagtcatctggaagcagaggagcctgtcgtggccg

SEQ ID NO: 6604 - DNA, 120 bp, Homo sapiens
cggcgtcctccagtgccccgggaggtggcggggcagggaggccggatgggctggggtctcccgacctgctacacccagagccactattgtctcggtccctgacccaggtcctccgtacaa

SEQ ID NO: 6605 - DNA, 120 bp, Homo sapiens
atacgattgtcctggagagagaatctgaagccttgctctgattctgaaagggatttgcaaccaaaaaaggataaggattgttctgacaagtaccctttcttcccatcttcaaaagtacac

SEQ ID NO: 6606 - DNA, 120 bp, Homo sapiens
cagcgtgtccccatgtgtaggcagtggtctaatctggttcctaggagaggactgctgaggccacagcaacttaactggctagtgtgggtgaggcagaagtgtttgaagctcaaggtctgt

SEQ ID NO: 6607 - DNA, 120 bp, Homo sapiens
tcacgaacttttcaaggaactagtgggcaactggaaatgatatgtgaaagagtagagggagctctggcctagctgccagaaaactctgggcaggtcaggtctgggaacagtggctaatcc

SEQ ID NO: 6608 - DNA, 120 bp, Homo sapiens
gaccgtgcccagagccactggtcacttagcacaggtagtgggaaatggtagccagcaaatgtttaattgaatatcttatgtctcctagaccacagctgagcaaactaggccaagctcaag

SEQ ID NO: 6609 - DNA, 120 bp, Homo sapiens
tttcgctgcaacgagagggaaactccatctcaaaaaaaaaaaaaaaaaaaacaggcttgagtatacctctcacagccctggagaatgcctgagctgttggacagttgccttttccattat

SEQ ID NO: 6610 - DNA, 120 bp, Homo sapiens
atgcgtggatgccatatatagatggttgaaaccagcatcagaggaaggaaggtgaccttacagccactgccgagaccaacgtgtgccctggcccagtcacagctggaaatcccagggctg

SEQ ID NO: 6611 - DNA, 120 bp, Homo sapiens
acccgactctggtttggtttaattaggtccttacgtgttggtgttgtcccaggcagttggcatggcatcagcactgagggtgtgagaccctgaggactcagcctcccgtcctgccagtag

SEQ ID NO: 6612 - DNA, 120 bp, Homo sapiens
gggcgggggagtgaaagggccaatttaatgagaaactacaaactgagactgggccacgattcacagtgacaggaggccatgcagtggcagtgcgagaccaggaaggacagtggcaggata

SEQ ID NO: 6613 - DNA, 120 bp, Homo sapiens
gggcgaggctggtgtccaccaaggcagttctaccacttgtggctgctccttcctcgtccctagcccagtgtgcctgcaggagcaggtgtgagcaggcacagcaacagcctgtcagctggg

SEQ ID NO: 6614 - DNA, 120 bp, Homo sapiens
gcccggcacttacagggaagaaaatccatggagaaggctctgcacatccaagcgcacccacaagggggaccctctgccatctcttgcccagttgggatacaccagccaccaggcagaggt

SEQ ID NO: 6615 - DNA, 120 bp, Homo sapiens
acacgcagtgaggacacagggcagacgggaaggggctaggctcaggggctccttccggccccagcaatacagggttcacagaggcatggcctgaaagggggtctgcacactgactcaaag

SEQ ID NO: 6616 - DNA, 120 bp, Homo sapiens
tctcgggcactgggacagggtattagacatcctgggcttctatacctgagagttctgagggccagagttggcagttttacttccagccaccatgccccacctctagcaccccagaggcgc

SEQ ID NO: 6617 - DNA, 120 bp, Homo sapiens
ctacgtgggcccacctgactccagacaacttacccattctcggcccagcaggtcagaaacgcctgtggccacaggcctggggactaactggctaactgctctggctgctgttggtcccag

SEQ ID NO: 6618 - DNA, 120 bp, Homo sapiens
tcccgatcacacacaccaagcagaccaacaacacacaagctcattgtcagccccctgccacccactgacccttggccttaaatcccaacagaatttttgccagaagagtcagcggctcag

SEQ ID NO: 6619 - DNA, 120 bp, Homo sapiens
gcacggctcccagccccaagtgggagcgggaaagtgaccactgagcacagggagcaaagcacagggggccagactgacaggcgggggagtcccgagtcccagctccgttagcacaggcgc

SEQ ID NO: 6620 - DNA, 120 bp, Homo sapiens
tcccggtactccaggcaaatggaaagtttagatctgtaaagttggaatgtaatgacctcacagtcctgctagcctaggagaccccgccaggagacccagcaggaggtcacctgaccaaag

SEQ ID NO: 6621 - DNA, 120 bp, Homo sapiens
ccccgttggatgcataataaaaacgagtgatagagcccatgctgaggacacagccccggcctcccaactcgcccagtgatctcgccaggactctgaactacctcccaggcagaacgctgc

SEQ ID NO: 6622 - DNA, 120 bp, Homo sapiens
ggccgttaagtgcagtcaagacacgtggccactcacggccacccaggtggaagagtcttaattcagacacaaatgtctcctggccgtccttagccagggagctgggctctgcccgcggcc

SEQ ID NO: 6623 - DNA, 120 bp, Homo sapiens
ttccgtgggtcggggtgggatgtggaaaagcaaacctctaggctttcttcctccaaatgtgtcagtcaccatacatacctgtacacagaagctccccctccagcaattttccctcagaac

SEQ ID NO: 6624 - DNA, 120 bp, Homo sapiens
ctgcgacatttagatctctcatgttacagggcattctttcaattattttgaagacatttctgatgggtgaagaaagcgctctaggaactgagagtgggaatctaatttgtattttacact

SEQ ID NO: 6625 - DNA, 120 bp, Homo sapiens
ccacgtccttgcaaaggacatgaactcatccttttttatggctgcagtttggggactttttatagcaatggtttcatacagcatgaacccttttatgtatgtaattccgctcaattttat

SEQ ID NO: 6626 - DNA, 120 bp, Homo sapiens
atgcgatagttggatgggaatttttagctactatgagtagtgctgtcacaaacatccttgtgcatggtgtatgtcaattcctggtgggttccggtcgagggctggactggctgggtcaca

SEQ ID NO: 6627 - DNA, 120 bp, Homo sapiens
cttcggagctatcatccatttagcaaacacttactgagcacctactgtgtgcagggatctgtgttctgatactagaaagacagagaagaaagagaaggtctctattctgaaagagcttca

SEQ ID NO: 6628 - DNA, 120 bp, Homo sapiens
ccacgcctggctgaagagccaggttttgtggatggactggtaatgacctctgcagaagcatctgttgtgaagtaggaacatgggattgattcacaagcagcatccctgaaaatatcccac

SEQ ID NO: 6629 - DNA, 120 bp, Homo sapiens
aggcgttttcctggactcttgctcccacagttctaaccattggcaagagtggctgccagatcagttctggtcaaggagcgatttgtattttgttttatttgagatggggtctcactctct

SEQ ID NO: 6630 - DNA, 120 bp, Homo sapiens
tcccgctgtcctggaggctggaaatcctaaatcaaggagtcagcagggctgcactccctccaaaggcttgaggagggtccctccctgtctcttcagcttctggggccgatggcactccct

SEQ ID NO: 6631 - DNA, 120 bp, Homo sapiens
aggcgggccagacaccgtctcaaaccctgcattctcctgggcgggatgtggcttctcctcgagaggactggccgttccagcccctgccccctgcctggtatctgctgggagggctcaggc

SEQ ID NO: 6632 - DNA, 120 bp, Homo sapiens
gggcgtcagggatcaccaggcaggatcacaacggtggctaatatttaatgaaccccgacttcgtgccaggccctgccccacctccttcaccctccaacaacctgccaaggagtttcacaa

SEQ ID NO: 6633 - DNA, 120 bp, Homo sapiens
tgccgggcggccagggcagatggagtccacatctgatgcacccagtcctgtccccactcattcactggcctccccaagggctgtcatctagagggaggggctttcccccttggctcattc

SEQ ID NO: 6634 - DNA, 120 bp, Homo sapiens
gagcgaaactcactctcaaaaacaaaaaacaaaacaaaacaaaaaacacttttcctttttatttgctgaaatgatttcattagaatcacttccaattacagttcctggcactgtgccttt

SEQ ID NO: 6635 - DNA, 120 bp, Homo sapiens
ccacgggaaccagactgggctgtgtgcatcctttttatttcatgttctttctaccagtaactagttattaatttttttaaacaaaatctgattgtttatatttgcctcttggctgatcca

SEQ ID NO: 6636 - DNA, 120 bp, Homo sapiens
gtgcggcgcccgtgggatattctgggatggccatcccttccagggccaggtgccacttgcctgtttcaagcctttctggttcctgtgctcaccaccgatgcgtttggtggaaaaagagcc

SEQ ID NO: 6637 - DNA, 120 bp, Homo sapiens
acacggtcttgctgcggcaattcagggattggccttggcacgcagagcagagggctcccccaggcccccctcccaacaatgctcctggcctcatttcttccccttctgacagtttgcctg

SEQ ID NO: 6638 - DNA, 120 bp, Homo sapiens
tctcgcccctaacgctgtctcgttttgctctctccttctgtactattgacggttctatcccatctcggagactaaaacaatgtccctgtgcaggggtgaagcctgacccgccgccatagt

SEQ ID NO: 6639 - DNA, 120 bp, Homo sapiens
ccccggccccggtggccatcggagtctggggacactgcatgcctactctgttcctattgtcctcaaggtccctggcccagctcactgcgacccacgccccccaccctggctgctcttttc

SEQ ID NO: 6640 - DNA, 120 bp, Homo sapiens
ccccgacccctataccacagatgagtattttgggcaatttctgcccagaacaaaatcttccacatttctgaccgtggatgaggggactggcggagtgccttctgtgtggggaggtgggac

SEQ ID NO: 6641 - DNA, 120 bp, Homo sapiens
acccgaggctcagcccgtgggcaggagagaaggcacccagggtcacagagagagaggccccaacttgccggcccccaccaggaggctgaacctgctgggtcctgtgacttccaccccctc

SEQ ID NO: 6642 - DNA, 120 bp, Homo sapiens
aggcgtggcccccgctctgctgagctgggaggggagggctcctgggggacaccaggccaggccatcttgacacgtgacacccagggcatcccccggtcccgcacagctgggcccccctct

SEQ ID NO: 6643 - DNA, 120 bp, Homo sapiens
gagcgaggcctgggggcatctcctctgcatcctcacgggccacctgggggcttgggaaggtggggactccggccccacagcaggcccgtgaggagcagtcccggaagaaggcagtgccca

SEQ ID NO: 6644 - DNA, 120 bp, Homo sapiens
aggcgtgtggtgggaggagcactagcttcagagtcctgggctgatggtagcccctcctgtgccagtgacttcctcagtggccttggccagtgttttgctcaatggggccccaggtttccc

SEQ ID NO: 6645 - DNA, 120 bp, Homo sapiens
cctcgcccagcccagcccagcttttgtttttcatgatgcccagaagttttctggaaaatgttctgtatttcctggatgaccctgaagtggtgaccactcctgcctgcccacctcccagac

SEQ ID NO: 6646 - DNA, 120 bp, Homo sapiens
acccggtgccgcctgggtccgacattgcctggctttccccgcgcccttccgctgtgtcccgtgaggctctctagctttgcgctttggggtcatcttgtccagtggacgacggcgtggtgt

SEQ ID NO: 6647 - DNA, 120 bp, Homo sapiens
tgtcgtctgcaccatccctgcagtgcctgacttgtgctcgctgaacagctgtagaattacccggagctcagccctttgctgcgccctaggaggggctggaagaggagcggcctgtgtccc

SEQ ID NO: 6648 - DNA, 120 bp, Homo sapiens
gagcgagtgttcggtcatttgcctttccatagacctgggcgaagaagcgagaggtttgaggagtgactgaaatcaagacctgaggccgttagaagaaacaccgtttgctcagtcctttca

SEQ ID NO: 6649 - DNA, 120 bp, Homo sapiens
gctcgcgggggacttgggtcctctcacgtggtcttgggtatgtggcctcagcggggcctggcatccctgaggtgggcagaaggttgcattggctccccagggctcagcactggcgccact

SEQ ID NO: 6650 - DNA, 120 bp, Homo sapiens
tctcgccccgcggaacagatgctctctgtgatgtctctgagagcccagactcccagggagccttctggggaatcgaaagaaagaaaagattgcttcagtgctttggggaaaaagtgtgtg

SEQ ID NO: 6651 - DNA, 120 bp, Homo sapiens
ggccgccttagtgccgtttatggaagctagcccaggcaagaaatggagtgtattgaaggctccgagggaagtcccagtaacctcaggggaaacggacaagtggaagctgcgggaacccag

SEQ ID NO: 6652 - DNA, 120 bp, Homo sapiens
gttcggctccagcctcagcgccatcctgcagtcctgcagagcgccccagctgctccggcgtgtgtgaggccatcgccacccaccaggctggtcaagggccaagtgctgccgtcgtccctg

SEQ ID NO: 6653 - DNA, 120 bp, Homo sapiens
attcggatggcccagtgtgccagtgtccaccttagggccaaccagccctgtctagggggtgggggccaccctgagggtggtggaggctgtttccagaaaaggggaggacacacccccaac

SEQ ID NO: 6654 - DNA, 120 bp, Homo sapiens
ctccgtgccccagcgtctttgcttagtcagagttgttctcagctttgtgttccgcactggaagccagagccctgtatttaatatggtatcacgtttacatatgggaggtccgaaagggac

SEQ ID NO: 6655 - DNA, 120 bp, Homo sapiens
tgccggaggctcctttgtgttaattggcattttttatcctcaggacgtcctgagtttagggtggccctctcatctcaagtttgcagttaaagaaatcaaggttgggtgtggtggctccct

SEQ ID NO: 6656 - DNA, 120 bp, Homo sapiens
acacgagataaagcagcagtgacactatgaggagaatggcggcgggagcgttgaccacgagctggcagttggcctgcgtggtggtccaggctggcctcaccgcggcatcccaaggaggga

SEQ ID NO: 6657 - DNA, 120 bp, Homo sapiens
ggccgggaaggtggggcggggtgggcagggcatgtggaatcactggtctgcagagcggggagcttggccatggccttcaggtcagggtgcagcaaccttcaccattgggcatcattaggc

SEQ ID NO: 6658 - DNA, 120 bp, Homo sapiens
cagcgtctgccccctcggtgcgggaggatgaggaacgcctgcctgtggatccacacatggtccccgtattgggggtgtggaggaaaggcctttctgacatgatctgagcccggcctcttt

SEQ ID NO: 6659 - DNA, 120 bp, Homo sapiens
tcacgaacctctgacccggtgggccctgaactctggtctgataaacatgggtcagacttctccctgaaaactgtgagcgtggagttcaggcacaggcaggcggggcaggtgctttcaggc

SEQ ID NO: 6660 - DNA, 120 bp, Homo sapiens
ccacgctccgcggctccgacggtgtttgctgcggctcctctgctgcgttgagtccgtctgtgcactcagatggcctgtgcttcgcctttcgcccgcgttcttgggaggccttgccgcgtc

SEQ ID NO: 6661 - DNA, 120 bp, Homo sapiens
tcccgggcctcccgcccttccaaggttggcttgtttcagtgattcggaatgtccctgttttcctctcgcagatgtctggtggcgttcattgcacactgtgtaccacaagatattgacaag

SEQ ID NO: 6662 - DNA, 120 bp, Homo sapiens
agacgggcccagaaggcttcttggctcactctgtggcctgtatggaagggacagggctgtccccctcccctggccatccccaagacagcctctgacctgtggccttgtggttttggtttt

SEQ ID NO: 6663 - DNA, 120 bp, Homo sapiens
aaacgtatgtatcctcctgcctggaggcatgtgtggagagcattgaggctgttcggggaatgcctcgaggcctcccacggaagggattttgcagttttcatttctgtggctgttgtctcc

SEQ ID NO: 6664 - DNA, 120 bp, Homo sapiens
gcccggacacctgcaagccacccagagtccgaatccctcgggcagggaggcagtgaactgctgggctccagtccccctgggggtgacagtaaaccaggggagaaggatgcctttgtttta

SEQ ID NO: 6665 - DNA, 120 bp, Homo sapiens
gttcgaggactgccctgaggccctgggtccttgagtgtgttggttccacatagccgggatttccaggacaaccttgggaccctgtggcgtctgtcgggctctgtgagcccacaggaggat

SEQ ID NO: 6666 - DNA, 120 bp, Homo sapiens
tggcgatgacaccactgactcctgtccccgtggtcccccggctgcaggaggggaggtgcccagcacagagactgagaaacaagtgggctctggagtcggggtgtgcgccccagctccacc

SEQ ID NO: 6667 - DNA, 120 bp, Homo sapiens
caccgctgatgagcttgggggccttagccaagcttcgtttcctgtatgtttgaaagtgtgggccttgtctgcccctctttccttggggccagcgggaaagggggtgaaggcgctgacctc

SEQ ID NO: 6668 - DNA, 120 bp, Homo sapiens
ctgcgttctttcacctccacagctgccttcccacttcccactcacagtctccttttctttttcctccacccccttggcagcgctgcctgctcctcttggtcctgagctggtgcacataca

SEQ ID NO: 6669 - DNA, 120 bp, Homo sapiens
gcacgcacacaccacatgtgtgtcattcttcttgaggcaaaggaaagggcggccccgcccctaacacttccccaggcctggtcccttcctcctgccccatcagggacctagggtctcctt

SEQ ID NO: 6670 - DNA, 120 bp, Homo sapiens
tcccgtgtttcttctccatgtgtggatacccatgtgtgagcaataggattttttttttgttttttggagacagagtcacgctgttgcttgggctggagtgcagtggcccaggggcccaat

SEQ ID NO: 6671 - DNA, 120 bp, Homo sapiens
tctcgtctcctgcaggtgtgagttgttgattgtctgcgccgtgttgatcacgtagaccctgttcttgagtgctgagggtccatccggtaaccctgcactgtcatgcatttccctgtcagc

SEQ ID NO: 6672 - DNA, 120 bp, Homo sapiens
ccggagcatagttggggatttgcctgcgcagctgcaggacacatgcgcttagtaggccagcagacctccaagccgggcgtggggctgtgcgaggatgctggtctgtgcagtcaggccatg

SEQ ID NO: 6673 - DNA, 120 bp, Homo sapiens
ggccggccgcccagcctgtggcagatcctgtagcagggagggccggcccaggctgtctgtcggcctctcctgtctgaaagccacagagttgcgggggcagggaccaggaagtgggggcag

SEQ ID NO: 6674 - DNA, 120 bp, Homo sapiens
aaccgagtccaattctggaatcttcaggtgtgtggggtcagtgggtcggggccatcagactggagttcagagctcccgtgtggctttgagcctcaaggacgtggcggtagaggggcccct

SEQ ID NO: 6675 - DNA, 120 bp, Homo sapiens
aggcgcccgagggcagagactgctgttctcagtagaaattgacacagaggaggcctgaggccctgtccctgggctgacggcagatgcattggtttgttggaggtggctggtttggtggtt

SEQ ID NO: 6676 - DNA, 120 bp, Homo sapiens
gttcggtttcctggcctgcacacgtcactaaaggtgtctcaggaacattctacagcagcctgtggggcccttgtgtgagcaggactggcactgtgggatgacagggcatcctaggtcctg

SEQ ID NO: 6677 - DNA, 120 bp, Homo sapiens
cagcgtgatgtttttgcctcagtttccccagcgtgactccccacttcagcttcctcagcatgatgtccttgtctcagtttccacagcatgacatccccacctcagcttccccagtgtgat

SEQ ID NO: 6678 - DNA, 120 bp, Homo sapiens
ccccgcctgccatcctgtcctgcagccaagagctcctctgggctcagccaggactgctgatttgcagtcacgtcctgtctcgggtgcagcctggagcttcaggggtgtgacgctttgggg

SEQ ID NO: 6679 - DNA, 120 bp, Homo sapiens
ccccgccttgggcagcactgcatggccttgctgtgtttcctgcccggggccatttcattaatactgtgtttgcgggagttctgtctctcgtctttggagcgccccctccctctatttctg

SEQ ID NO: 6680 - DNA, 120 bp, Homo sapiens
gaccgttgtgatctggaagcggggtcaccccaggacccctatggtgtggggggggtgttgatccctggggctgggagggtcccctcggggctgggtgtgtcgcctgggcctgatctgagc

SEQ ID NO: 6681 - DNA, 120 bp, Homo sapiens
tgccgcagctttccgggccctcctgcagatccgggcggtgcggaagaagccaggagccctgtcccccgtgtccttcagccccgtcctggcccagagcctggagcatgatgagcactctgt

SEQ ID NO: 6682 - DNA, 120 bp, Homo sapiens
tgccgcctcctgcctgcgggatgggcgggagaggggcatgagtgcctgggccaggcgcaaggcccagacggtccagccagcagccccgtgttctcttctgtccagtgggcaggcatggcc

SEQ ID NO: 6683 - DNA, 120 bp, Homo sapiens
tgccgctgctgggaacagcgctgctgccatcagtaccagagcctgcgacaaggctgagcgcggtcgaggtctcggtggagccaggtgcttttttttttttttttttctttttgaggcagg

SEQ ID NO: 6684 - DNA, 120 bp, Homo sapiens
caccgcctccaccccgtggttcttagtgaatgagccatgctgtttcccccatgcgctgctgtgcaaggggcactggtgaccctcctcccacgctccaggcccaccaggcgccctcagtgg

SEQ ID NO: 6685 - DNA, 120 bp, Homo sapiens
gggcgagagagaggtggagagacacagggagaggcagagacaaatgtggagagacacagagacaggatgagagagatgtggagagacaaagggagagacagagaaagatgtggagagaca

SEQ ID NO: 6686 - DNA, 120 bp, Homo sapiens
agacggagagacagatgtggagagacagggtgagagagatgtggagagacacagggagagacagagatggggatgggtggcaggggctgtggtgggcagggagcagaatgggggagttgg

SEQ ID NO: 6687 - DNA, 120 bp, Homo sapiens
gcccgggtcttaggccccctgctccccactggccacgcgcattgtcagattgagtgcctttcttggctcttagctgtggctgttatgagccgttggttcttccaggctctgctgcctctc

SEQ ID NO: 6688 - DNA, 120 bp, Homo sapiens
tggcgttcacagacagcgcctttgctctagaaggctcctcccaagcccccttgatcagggccttgacctgggccctatgggcctccctggcagcaggtgcaatgtttctgaaatggggtc

SEQ ID NO: 6689 - DNA, 120 bp, Homo sapiens
gatcgatgctcaggcgtggctaggtttattgtcccttgtttttgcccctccctgtttgtgttctggtggctgaggatccagtaggtccctccatgtttgtccctcttatgctgagtgagc

SEQ ID NO: 6690 - DNA, 120 bp, Homo sapiens
gggcggccggggtccgaggtgtgaccaggcagctctgacctccacatgccccagaagggctggcacccagccagggagccgccgtcctctctgcatggagcaaaagcaaacgctcctcct

SEQ ID NO: 6691 - DNA, 120 bp, Homo sapiens
caacggcctccgggctgtctccccggccatcccctcggcccctctttatgaagaaatcacctattcaggcatctcggacggcctgtcccaggccagctgtcccctcgcggctatcgacca

SEQ ID NO: 6692 - DNA, 120 bp, Homo sapiens
agccgccagaagggcaggccgcagagcaaggcccccgacaggtgagcagcagccaggccaggtgcatggcagggtgtgtggtggcgcgcgtgcggagcgggtgtctttgtggtttcaaat

SEQ ID NO: 6693 - DNA, 120 bp, Homo sapiens
tggcgattccccagaaggactcggagaccccgtatcaggttagactcatgggtaaagtttattacggcaaagaacgcagcagacgaggcaggaagagcgtccgggcagctggaggctttg

SEQ ID NO: 6694 - DNA, 120 bp, Homo sapiens
acccgctgcctgtgtttcctgggcttccgctgcagcccttccacaaggaccacggcctcctcaccgctctccggctgctgctcgcgtacccgagcctggatctcccccggcagcacagtc

SEQ ID NO: 6695 - DNA, 120 bp, Homo sapiens
gtgcgcagctccggccgcagccagcggcagcacagctcccagaggcggctcagggcctcccggggcccagccacctcctggtagcagaagagccggaagagctggcggaaagtctcaggg

SEQ ID NO: 6696 - DNA, 120 bp, Homo sapiens
ctccgtctccacggagggctcctcttccaagcagaagtcctcctccaccttcacaatcaggatctcttcctgttccaggtcctgctccaaggttggcaggggctggaggccagggacagt

SEQ ID NO: 6697 - DNA, 120 bp, Homo sapiens
ttccggtgggccttgttccttttcaggccttagagttgaacctgtctctctctatacctctggccagacacaggaagagagtttttttcagggccctgtggagagacgataaaaccatct

SEQ ID NO: 6698 - DNA, 120 bp, Homo sapiens
tcccgggtaatttactgaagggctctgggctttgcttcctcactgggcaaacagagatgataacaggacctacacacacaggttgctgacagaactaaaagggatggctgggggcagtag

SEQ ID NO: 6699 - DNA, 120 bp, Homo sapiens
ccacgggaggaagagggagaggagggaggatggagagcggtgggcatgcaggggacttggcagggcagggtggagaaggtgggaccactgggaggggaccgaggtaagagtggctcttca

SEQ ID NO: 6700 - DNA, 120 bp, Homo sapiens
gctcggggtgagtcacatcggggctgcttccttgcacccagtgatctggggaaaagtttaggaaattcctactctgggaattctcagttggcggcttcctctcctctttctcctccacca

SEQ ID NO: 6701 - DNA, 120 bp, Homo sapiens
agacgtgtcagccagacacagggaggagggccagagcccccagggtcagccagacgctcctctccagaagagaggcgcaggggcatttaaggccatctgtgcactcacaaaacactcacg

SEQ ID NO: 6702 - DNA, 120 bp, Homo sapiens
caacgtgccagggactgtcccagagcaaaaccgggaatgaggtggacagatcctctcagggagtttaccctctagtggggaaaaagacagaagatgcataaatagagaaataaaatcatt

SEQ ID NO: 6703 - DNA, 120 bp, Homo sapiens
cagcgcatccaaggaaataaaataattgacgtgacaggggctggaagacgccagctccagccagagtggtgagggagggagagcctcactgaggaagcagcgtgagccaagctgcaggga

SEQ ID NO: 6704 - DNA, 120 bp, Homo sapiens
agacggtgatggtgacagtgatggggagcagcaagcacaaaggaacctgaggcatggagcatcgtgcactccaagaaccaagcggaggccagtgtgtctacagcacagagctgagagaca

SEQ ID NO: 6705 - DNA, 120 bp, Homo sapiens
gcccgacggcgacgaaaggcccgaggaaggcccaggacacgccatcaaatcctgaaatcagaaggtgctgggagagcccctcaagcggcccagagtccagtgcacacaactccattcaag

SEQ ID NO: 6706 - DNA, 120 bp, Homo sapiens
gctcgggctgcctcagggacagacagcgtctcagcagccgtaacacatgtgcaccaagccggagaagccgcctgcatttctcaatcactagagatgtatttgcacctcaaagtgcggcct

SEQ ID NO: 6707 - DNA, 120 bp, Homo sapiens
ttgcgggcctggggtcggaaggaaagaaaaaactttttttgccaacattgtgtacagagtgccaggcagaatggacttaaatcctccctcaaagggccccctgggcagggcacttcctgc

SEQ ID NO: 6708 - DNA, 120 bp, Homo sapiens
gtccgccggtgcggctatcttccgcggtggcagcggcacgctctcccctgcctccctcctcagcaggaggggagggaggtgtgaaaagccatcgaaaagaggtggctgggagcggtcaag

SEQ ID NO: 6709 - DNA, 120 bp, Homo sapiens
tctcggagcccccaggatttctgggcaagcaaataacaaagcaggcgggaaaagagggcacagcccccagaagaaaaccttcctccctcggtcattaaccgagcccaccagaaccctccc

SEQ ID NO: 6710 - DNA, 120 bp, Homo sapiens
tcccgcctcctcgcccgctttcccgtttctgtaatctttttctaatctgcttgccgcttcctgcttcctccaaaccaccttaattgggaactctttagttcacaaggaaagttcatttct

SEQ ID NO: 6711 - DNA, 120 bp, Homo sapiens
tatcgagggtaagccaggctcttcatcataattcttaccagacatggctaataatgaccctctttcgctaatgaaaaaaacacacacatgcacacattgtggctgcggtaattaagcctg

SEQ ID NO: 6712 - DNA, 120 bp, Homo sapiens
tgacgagttgagttggagagaaattagatttatttacacgctgttctgttgctgatgaagcacaagctatcgggaagctttctcattaaccctcgtttacagggtgtgtgctcttttgtg

SEQ ID NO: 6713 - DNA, 120 bp, Homo sapiens
taacgctaaacttaaccttcagtgtaaccctaaccctgataaccaaacctatgctaacctctagcataatcccaaatgaattaattaataagccatgaaatgctccctgcctgaccctgt

SEQ ID NO: 6714 - DNA, 120 bp, Homo sapiens
agtcggcagcagggagagggcagcggagacggaaggctgagtttccctcctgggaggcctggccagacctgagtagggcagaccaggccaagcggagctggagcagcggtcacagaacag

SEQ ID NO: 6715 - DNA, 120 bp, Homo sapiens
gaacgctgagccgacccccactcccaggagcggctactctggcctgcgagggccagcccagcgggtggggaggcgatgccctgcccagcttcctgccccattccaagctggccaggagcc

SEQ ID NO: 6716 - DNA, 120 bp, Homo sapiens
ggccgcccaggcaggccctgctccgaggccacccggggagggaaggaggccattgtcggcctttgtttcagtttccccagcattacccaggctccaagaggccactgggagctcacaaag

SEQ ID NO: 6717 - DNA, 120 bp, Homo sapiens
ccccgaccctggggacaggcctgccaggcccctggtctcttaaagaggcaggtgcagggtgtaaaatgaagtcacatgcaagttgggggttgcggggcggcccatgcaggccacagcagg

SEQ ID NO: 6718 - DNA, 120 bp, Homo sapiens
aggcgaacagacagatgcaccaagactggggtctaggtccacaccagggtcagcccagcactgggcccaagtgcaggggtgcaaatctttggatggaaagaatgtctagggccctgaggg

SEQ ID NO: 6719 - DNA, 120 bp, Homo sapiens
gtacgacaaagaaatggaagaaagaaaacagagcaaggagacaatctggacatcttgaacaccccgcctgggcactgttcctgatccttcaagggagacagcccagaaacaggctttttc

SEQ ID NO: 6720 - DNA, 120 bp, Homo sapiens
atgcgcactatgggtatgttggcagtgtgaacacactcctgtatgcacgtatgggtgtgcatctgtgttatgcatgtgtgtgcatacctgtgtctgcaggcatctgtgtgggtgtgcatt

SEQ ID NO: 6721 - DNA, 120 bp, Homo sapiens
gtgcgtacatatgtgtgtagtatggaggaacatgtatgtgaaggcccatatatgtgaatgtgtgtattgtgtggagtatgcatatgccaatgtgcacatacgtgtgtgtttacatgtgca

SEQ ID NO: 6722 - DNA, 120 bp, Homo sapiens
tcccggcgcctgccggacagggagccaggggcatcactgccaagagaggccctggctgcatgaggagcaaacaggagagcgtgggccctcattcaggagctcccaaagacctctcaaagc

SEQ ID NO: 6723 - DNA, 120 bp, Homo sapiens
atgcggggatcctgactgtcacgtcacccccgacaccccacgagtctgagctccctctattacctctccctggaggcatgagctcagctctgccagccctgagaatgcagagcagcccct

SEQ ID NO: 6724 - DNA, 120 bp, Homo sapiens
tgacgcccatagcagggagcttcaaggcttgtgcagtgggaaaatcactgcccatctgaactgtagccacaagaaggaaatgtggccctcgggagaataagggaatattagtctccgtat

SEQ ID NO: 6725 - DNA, 120 bp, Homo sapiens
aatcgtgttgcatggggtagtctggattggaggcaggaatgtgacacgaagaatatcatttccataaccagctgggtggctttctgagttcctgggccagcccccaggaccccctgcaac

SEQ ID NO: 6726 - DNA, 120 bp, Homo sapiens
ccccgggcatttacctgctgctgtcacggaggaatcccaggccagcgagaagtctgaggcctccccctcttcaactgaaagagagaacagagatgggcctgtgagtttgaaggctgtaca

SEQ ID NO: 6727 - DNA, 120 bp, Homo sapiens
tctcggaaatgccatgggtatttgagggcagtcggccctaccggacactttctgtgcatttacactttctctccttcaacacaaatgggacctggggcatgtctgagtggtcttgaggcc

SEQ ID NO: 6728 - DNA, 120 bp, Homo sapiens
cctcggggtgtgcagggcagcgctgagagtccggccacaagaagttcacgggcccacgaggatgtggctaaggaggggcatcagggtaatggggggtcttgaaaccacatcttgggaggg

SEQ ID NO: 6729 - DNA, 120 bp, Homo sapiens
ctgcgctggctgtgtggcctcaaggggtcaaaccgggaccaaccagtggaaggcactacagaaagatttcaagaagaaacagatgggacgatttcaagaagaaacagatgggacgctatc

SEQ ID NO: 6730 - DNA, 120 bp, Homo sapiens
tcccggcatgggaggggaccaagcagcggtagagagacccccaagaaagtcaaggctcagctaggagaggagttagagttggccttgatgggatctcaaatgatcgcaggggaaataggt

SEQ ID NO: 6731 - DNA, 120 bp, Homo sapiens
ccacgctgccacccagagtgtgcttagcagggtcccattttctggtttctccagggaggccagagatctgaatatttataggaaccattccaattttaagacaggctgaccaaacttcta

SEQ ID NO: 6732 - DNA, 120 bp, Homo sapiens
tgccgaccccctggtcagacaaggagctcacagggcaaacgaggctactgaaagaaaagggagccatttccgggcccagaagagcagccatccccgcaggactggaatgggttaaagtct

SEQ ID NO: 6733 - DNA, 120 bp, Homo sapiens
cctcggcctccggaaaaattgttatgttgcctttttttttcagtgggggtagagaaagagctattccattctttttctgggggtagaatatcccctaaccctgggattataggcgtgagc

SEQ ID NO: 6734 - DNA, 120 bp, Homo sapiens
tttcgttgactcttctccgattcagacttttcacgaaattcacagtggcctcctgcccaaagagcaccaccagatggcccatctccagggtcctgaccccacattccaaattcaggcatt

SEQ ID NO: 6735 - DNA, 120 bp, Homo sapiens
ttacgggaggctcagccatcgctgcttagaatctcacttgtcctcaaatatctcctgtttatcttggtaacagtctacatgaatagtccgtttgttggaagaacataatattttccttgg

SEQ ID NO: 6736 - DNA, 120 bp, Homo sapiens
atgcgagcagttaattagaattacacagacatgtttatagaagtttaaatgaagcatagttcgagtttgtgaaaatatatataattactcacaccgacacttcccactgaaaaagaaaag

SEQ ID NO: 6737 - DNA, 120 bp, Homo sapiens
ctccgccagcttaaacagctccactttgagggacttggggagaccaaaccctgttggggaacccacagacccaccaccaaatgctttgctcattagactcacactgcagccaacaaattc

SEQ ID NO: 6738 - DNA, 120 bp, Homo sapiens
gggcgggcgccatgctccaggcgagtcctgtgtggatccttgtacatacactacagtcccgcccacgcacacgcagaaaggccatcatctgtcccacaaccggctatggaggagaggtct

SEQ ID NO: 6739 - DNA, 120 bp, Homo sapiens
aaccgtatttttggcaggctgaggactcaaattagggaggcttcatggcaggctggcctgtggccttcaagaccctttctagcctggttccactcgcctcctggtctgatccctgctccc

SEQ ID NO: 6740 - DNA, 120 bp, Homo sapiens
tcccgctgggccctcattcaccctccaatgttgccaacccagccagagcaagccgttttctcctctatccccagtcccacaccaacaatgcagcagcacccatatcatgtggctgtcccc

SEQ ID NO: 6741 - DNA, 120 bp, Homo sapiens
cagcgtgatatgattgctgggtgacaaagcaagaccttgtcttttaaaaaataaaaaagtttaggttccctgggtggccttgggcaaaccctctcagtgcctcagtctccccatttgtga

SEQ ID NO: 6742 - DNA, 120 bp, Homo sapiens
gcccggtgcagtaattcccggggctgccgctgcctccgctgagcggcccagccccatcctggccatgcgctttgggacatgccagggcctggcttcccaggggccagagggagctcccgc

SEQ ID NO: 6743 - DNA, 120 bp, Homo sapiens
agccggctggcctggtcattctctttttttcctattataaacggtcccagctgcaacacacagggaaaaaaaaaaaaaaaaaaaaaaaaaaacatctcccaggcctgggcaggggccggt

SEQ ID NO: 6744 - DNA, 120 bp, Homo sapiens
agccgcagccgcctgcctggcctcctgcagcagacaaaggcggctctggcctccggcacccactgggagaggccctggagcccctgcccagagccaagaccatagcaggagtaaggggaa

SEQ ID NO: 6745 - DNA, 120 bp, Homo sapiens
gtacgtagccaccatcttcctcatttaagagctatatagttaacatagctctaaatctaagatgaaaataaggggcaaaaccaaagaagaaaatgcttgctccaaaccattagctgaaag

SEQ ID NO: 6746 - DNA, 120 bp, Homo sapiens
ttccgtttccagtaaggatgagcacagatgctctgctcgaccctcttctcaatgctcctcgccaagtttgaaggccacgagaaggaataagcagatggttcaatgtgagtaagtcaaaag

SEQ ID NO: 6747 - DNA, 120 bp, Homo sapiens
ttccgcttcctagcaactaaaccaaatgatgccaagaaagccagccggctctaaggaggaacgctgcaggggatttgaaacccagcggtcaggcagagcagagaaggcctcaagacacct

SEQ ID NO: 6748 - DNA, 120 bp, Homo sapiens
caacgcccacccttcccactcccctcacagttccagcaccagcctacctgcccatgctaacatcaatctcctgactgtccatttcacgacaaccttccaaattccagcgacatcagtgag

SEQ ID NO: 6749 - DNA, 120 bp, Homo sapiens
cttcggccagctggacaaagaattctacaggccaagaggcagcatccttaccacccgtgggcccaagtgctgcaaaaggcaggcaacacacaccggctggaatcccagaagcctgggaaa

SEQ ID NO: 6750 - DNA, 120 bp, Homo sapiens
ccacgtcgaggaattacattcaggcaggaattgccttggtggaagtacataaatatgcatatgaaatacatccccactacagtacaaatgactgaagcaaggctgaggcattgtttttgt

SEQ ID NO: 6751 - DNA, 120 bp, Homo sapiens
cttcgtaactcttgcttctccccacttctgttacatactgtctgccagactgtcttcaaactaaaggaatttgtactttgcctgaattgtcccttgcattcttgcctcttattttagtat

SEQ ID NO: 6752 - DNA, 120 bp, Homo sapiens
agtcggtgatggtggcatacttgtgctggtggtgtgatattgcagtaaaggggaacaatcttgggtgcaggaagcatttcagctgacacagtctgcagagagagaaagttctcccaaagt

SEQ ID NO: 6753 - DNA, 120 bp, Homo sapiens
agacggggcacagtgagtgaggctttattcattcaggttcacatttactgtgctcctaatgtatgccaggcactgtgctagacgctggtgataaaaagatgattaagatgtaatttccag

SEQ ID NO: 6754 - DNA, 120 bp, Homo sapiens
ctacgctgagaacagtgccgtggccatgcacagatttctaagaaaatagtatctgtggagtaagcccttgtgactcagcccctgtgggagagctagggaagaggctgccagagagagccg

SEQ ID NO: 6755 - DNA, 120 bp, Homo sapiens
gggcgtcataaaggagggggtgagaaaaagcaggttagtgtttggagagatcactcaggcagctggaggaagggagagcacaggggcctggcagcaggaggaccagtcaggaggctgccg

SEQ ID NO: 6756 - DNA, 120 bp, Homo sapiens
tcccgattttcttgtatgcaaaaaaatacaggcatccctgtgacatcgttaaaaaagaaaggggtcacacttcacatgcagttctaggagctgctattttcaatttgtggtatgtctgaa

SEQ ID NO: 6757 - DNA, 120 bp, Homo sapiens
ggccgggtgcagggaaggacaggcggcctctggtgcggcccagctgccaagtttttcaaaggaaataagggcttttggttggcagggcggttgctttcacatctgttcttttaggattct

SEQ ID NO: 6758 - DNA, 120 bp, Homo sapiens
ccccgtctcccaggcgtggcagagatcggggccctggggatcatgggagtcaggcccctgcccttgagtgggctttgtcgcttacatgaagtcgggctgttcatctttccttgttgtggc

SEQ ID NO: 6759 - DNA, 120 bp, Homo sapiens
cagcgatttaggaggggcagtagccgcagggtgccgggtttaatgggaaagatgctgtttacttagaatatgtgttcatttggagtggctttggggcttaccccaggccaccccttagga

SEQ ID NO: 6760 - DNA, 120 bp, Homo sapiens
aggcgctagtggacccgggcattttcttatgttcctagcctgcacaggaacagatccctgcacatccctgagcccacagctgagaagagatgtgggcagaggcctggaggaggtgggtgg

SEQ ID NO: 6761 - DNA, 120 bp, Homo sapiens
ccccgcctcccagcgtgaaagatgcatctgggaggagggggagtgtctccatcgagctgtgctgcctctgcgagtccctctccctggggagctcacctcagtcccaagtgtggaagagct

SEQ ID NO: 6762 - DNA, 120 bp, Homo sapiens
gggcgtgaaaccacacggagtcagccctgctctgtcctcccacgtagggtgagcaggaggggacgctcacacggctggctgcactgtgttattgttgggagtatctgggtacaggtcaat

SEQ ID NO: 6763 - DNA, 120 bp, Homo sapiens
tgtcgtgaggtcctgtggtgctggggagaggtggtccttgccctcagccagatgggtctgatggaggagaagacaggaccttcagtcactcctgagcagggagggtgctgcatgaataag

SEQ ID NO: 6764 - DNA, 120 bp, Homo sapiens
cctcggactaatcattttctttctgttcctcagtttccttatctgtaaaatggggctgatggcagtgctcaggtaggttaatgggagggctagctgggtgaaaacccttcccaggcacct

SEQ ID NO: 6765 - DNA, 120 bp, Homo sapiens
tgccggggatcccgccagccccctcatctgtgcagtggccccctccccaccaaggacagtagcatggtgtcacccggcttgccataggcatctggcctgacctgctgctgcacacggatt

SEQ ID NO: 6766 - DNA, 120 bp, Homo sapiens
ggccgaagcaccctccgttccctgctctcccctggaagcctggaagcctttctagaagggaccagtgttggggtggagaagggttgggtggtgagtctgggaccagagctccgttcctct

SEQ ID NO: 6767 - DNA, 120 bp, Homo sapiens
tgccgagatgaacctgagcagactctgtgttaggatggggtggggacggctgaccttgggcctgggagaaggtcctccctgttctagagcacagccatctggtcagtttctcctggcttg

SEQ ID NO: 6768 - DNA, 120 bp, Homo sapiens
gaccgggcctgacttccctccccactcccgccacttgtcaccgttatccactctgggccagcccccctgacattttcactcccagcttggctatctcctgcccctttcctgcccttggcc

SEQ ID NO: 6769 - DNA, 120 bp, Homo sapiens
agccggctctgctcttgagctgttcactcagccgcctcccccacccccttggccttgctttgagcccctgtcttgctgtggctggggcccaagggacgccgggataccctcttctcacca

SEQ ID NO: 6770 - DNA, 120 bp, Homo sapiens
caccgctgaccactggaagggtgaacccacgactgggcctgagggaaagggaagccaagggaggtctttggtgcaggtacccccgtttccagttgtgtttcctggccccaggctctgccc

SEQ ID NO: 6771 - DNA, 120 bp, Homo sapiens
acccgccttctagggcccggatccctggaggccgctggacccagggcaccctgatcggggtgctttgtcttccaggccccaggctcttcctgccctccagggtgcccttcctgcccctgt

SEQ ID NO: 6772 - DNA, 120 bp, Homo sapiens
cctcgggcgcagctgactgagatcattgcttcctggagtcaccgactggctgggcagggagaagcctagcaccctgggatgcagctgctctgcacagatggggaaactgaggccctggga

SEQ ID NO: 6773 - DNA, 120 bp, Homo sapiens
gtgcgcatctggctcctgggcccccaggcctgtctccggtaccccctctggctgggaggaggagcccttttaagctgtctgaaggagctattttaaggggggcctgggctaatgggaagt

SEQ ID NO: 6774 - DNA, 120 bp, Homo sapiens
ggacgtgatacctctgctcttggtggctttggagttcagacaggacccatgcggtgtgggtgagggagtgacagggaggcagggcttgccttgagctaagggaggactcagggccagaaa

SEQ ID NO: 6775 - DNA, 120 bp, Homo sapiens
aggcgtggccctattgcacagatggggaaagggaggccatggcaggtgccagcttcccagtcagagcatctaatctctgggcagagttgggcagggctggtcccagccttttctcctatc

SEQ ID NO: 6776 - DNA, 120 bp, Homo sapiens
ctccgcacaagacccagctccccaactccaagtgtcagagacacaggggactgtcagccggtggagcagccgggggaatgtggcctctcctacatccccgagagctgggctgggtccatg

SEQ ID NO: 6777 - DNA, 120 bp, Homo sapiens
gtccgagaggagatcagggtagctggagcctagtatccaggtctgccaagattgcctgctttctaggaaagccactgtcctcttgtccttgcagtcactcagaactcactcagcatgtgc

SEQ ID NO: 6778 - DNA, 120 bp, Homo sapiens
acacgctgaaactgagtaattggcggagggcacaggccagggatggttcccaggctgggcaggtgcaggggacctggaggcagggctggtgctgtgtctggggcctgggtctgtgatggc

SEQ ID NO: 6779 - DNA, 120 bp, Homo sapiens
ggacgaggacaggataggctcgagtcctggagacagatggtgttccaggagcaggcctagccctcgtgagcctgcaggacagagccctcttagctccctcctggccagaagccagagcac

SEQ ID NO: 6780 - DNA, 120 bp, Homo sapiens
gggcgtccagtccgagggtcagctgagtggggtagagggtggggaggggagagcagaggcagatggcgctccttcttcagctcccctaaagccccacccatgaggcctcggtgcatgtgg

SEQ ID NO: 6781 - DNA, 120 bp, Homo sapiens
tgacgcagcagtgcctcagatgaacctcagagggctctcgggggtccccttctctccctgggccttttcctatgagtccccaccctcgccgctctcctactctgccctccccattccctc

SEQ ID NO: 6782 - DNA, 120 bp, Homo sapiens
cctcgcagtctcttccccagctttgtggccccagggctcctgtgagtccttgagtactcttcctgcagagactggcatggccggctctctcggttcctcggggtcttagctcaaatgttt

SEQ ID NO: 6783 - DNA, 120 bp, Homo sapiens
tcccggcccctccccctggctgctgccgctctgggggtgtctgcaccctcatctcctagcccctctgccctctgaacctgacggctgctgtggggagtcggcacggcggcttgagccgtg

SEQ ID NO: 6784 - DNA, 120 bp, Homo sapiens
caacgtgaaacctcaggctgctgtgatactcatggttgcctggggcccaccttgcatggcttgggcaggttccagcgttcttgtccctggactgatggggacctgtctcctctacagccc

SEQ ID NO: 6785 - DNA, 120 bp, Homo sapiens
ggccgcgagcagcaagacaagagccctgtgtgagcccctcccggtgagtgcgccgggcccggctccgtggcctcattcagagtggggctgctgctgccagaggtgtagtttggaccctca

SEQ ID NO: 6786 - DNA, 120 bp, Homo sapiens
gtgcgggtctctggtcagggcacttcctctctgacaggcctgtcactattttatacacgagtatgcacagctcagggaggggcttcattaggtgatggcgccagggcaggcccagacagg

SEQ ID NO: 6787 - DNA, 120 bp, Homo sapiens
agccgaggcgtgtgttgggagcagtggggttttgggtgggttgtctcctggagagggagtggggagaactgggagatggagccgggggcaggcttgatccagactgggaggtgcaggaat

SEQ ID NO: 6788 - DNA, 120 bp, Homo sapiens
tgccggggtgtgaagagcgtggtctttattctgggggctggggagccacagcacaatcttgagcagggcagaggtcctttgggagggtaagctcacaaaaactcagggaggcagcttgga

SEQ ID NO: 6789 - DNA, 120 bp, Homo sapiens
taacgcagaactgggccagagctgcccaggggtctgtggctccaggatctttgctggtccaagactcagttgtctgagggagaccctcccctggaacctggcaaacagccatctgcccag

SEQ ID NO: 6790 - DNA, 120 bp, Homo sapiens
taccgaagctgccagggcattactaatgggctgtcggctgtaatcagggcagcagcctttcatctcctgccatcccctcctgctcagggcagcctcgcaccagcttcctctcctggctct

SEQ ID NO: 6791 - DNA, 120 bp, Homo sapiens
ggccgctccggagctgggacccaggcaggggctggagggaggaggcctcgctggaaaccgctgccgaggcctgggctctgtgtccaattgtggagtttccgggggcccgcaggccatccc

SEQ ID NO: 6792 - DNA, 120 bp, Homo sapiens
ccccgccaggtgaggctgggcccctctctgagcctcggcctggaaagctccatccactccagtcaggcccgcctgagattacctaggtgttctggtgacttctgagggcctcgcatgaaa

SEQ ID NO: 6793 - DNA, 120 bp, Homo sapiens
taacgcccaaatcaacaaatctgccattgtggctttgaagagactgtttcaatcactttattttgtctttatgtcaggtttgccagatggcttgggtctttctgaggtcctgtaccgagg

SEQ ID NO: 6794 - DNA, 120 bp, Homo sapiens
cagcggctgggaaactgcctcggctccctcaagtctctcccacaaaagaggcgcggccgaggctctaatgaaagccagataaagggatggctggaatcagaaacagagggaaaagagcag

SEQ ID NO: 6795 - DNA, 120 bp, Homo sapiens
agtcgttagtctttcttgtagctgtttcaaaagaaattctaagacaaattatggctttgggtgtttttctaaaaggactgcagcagggagaggaggtgggggaggtgctttgacccctca

SEQ ID NO: 6796 - DNA, 120 bp, Homo sapiens
gtgcgcgtggggatgaaaggcgcgctggcataattatgggcgagggtgcgcgggggcgggcgggcggctttaccttgccgccagcgctattaatgatgaggctccctctttttcttctct

SEQ ID NO: 6797 - DNA, 120 bp, Homo sapiens
tttcgggaatggggtggggcaccgtgcgccgaggctgacatttggcgcaggtggtggggatgcgatgcattgctcagtgcagaggtgcttgggagccacagcgccctcgtggctgccaag

SEQ ID NO: 6798 - DNA, 120 bp, Homo sapiens
catcgtgagaaggaggcagatgtaccggtgggtcatcctgcctccctttcgccctcctttaaggtctcaaggtctgtctcttgggccctggggagggttgggggggcgggggcgttctga

SEQ ID NO: 6799 - DNA, 120 bp, Homo sapiens
acacgctgtcttaaatccacactgtcagcccaaatgtcaggccctaccagtgctgctgagatctcatggtgtgccgggctatccttacctcctatctcaccttgggccatcttagtttcc

SEQ ID NO: 6800 - DNA, 120 bp, Homo sapiens
tcacgggagggacagggtggatagcgtgggagtccctgagtagcacccctgggaaggcacctctgattctgaaggtgatggcccacagagtcacaaggccgctgtattagtccattttca

SEQ ID NO: 6801 - DNA, 120 bp, Homo sapiens
cctcgggtagagagatgtggatgttggagggagaaagcccagacatctggggaggatgccaccagcacctgctccactcctttctggaagctctccacagctcatgcagtcctcagtctt

SEQ ID NO: 6802 - DNA, 120 bp, Homo sapiens
ccacgtgccagcctcgcctctcaccccacaaaccatcttcagtgtgggctcctcaggcatccctttccctttctggaatcctaacctcatcctctccatctttctgagtcagccttcact

SEQ ID NO: 6803 - DNA, 120 bp, Homo sapiens
tctcgcatccagaaggctctgggagctcagattctcagtaacatcaactttgtccataactcgggctggatgccattggtgttctcactcccagaacatgacttgtttcttacccagctc

SEQ ID NO: 6804 - DNA, 120 bp, Homo sapiens
tggcgaggcctccaaagagcaggtgatgggtcttgcaccttagctaactgctctgtttctttttcttttttaaattttcatttgtttggatttaaacaaatgatctcactctgttgccta

SEQ ID NO: 6805 - DNA, 120 bp, Homo sapiens
agtcggtttcttcttgacaagtcactcggtttctctgaatctgctttcctgttttcactaagtggttctttttcctcctgggcaccacagctaaaccacacttccctgcctgccatgtga

SEQ ID NO: 6806 - DNA, 120 bp, Homo sapiens
ggccgaagggaatccccaccccaggcttgtcctggaaaaccatctcaggcacgaccctttattgtccttttctgtgagactaaagacagaaggagcatggcccttgagtcaccactgaag

SEQ ID NO: 6807 - DNA, 120 bp, Homo sapiens
agccgccccagggagccccacccacagacactacccttataggctactgggtgaacaggaaataaacttttattgttttaagccactgaagttttaggatgattagagcattctgtctaa

SEQ ID NO: 6808 - DNA, 120 bp, Homo sapiens
catcggtgggctgtcaccaagattaatgacagaaactgtttaaaagatgctcagtgagtgttccttctcttcctctctagaaaactataagacactccagtctttaagaatgatgtccac

SEQ ID NO: 6809 - DNA, 120 bp, Homo sapiens
atgcggctggttccccaaagaagatcaaagttactagaataatgtaaaatggatgttattcaagtcaaactaacaggtgtgccccctgcccagggaatgcttgggactgtccatactgat

SEQ ID NO: 6810 - DNA, 120 bp, Homo sapiens
gggcggtaagagggaagagtaggggaaatctggccatccttcccctctggggctgctggtgccaagtttctggctggagcttctctttagaagactggatcacaaagctctggaaatggg

SEQ ID NO: 6811 - DNA, 120 bp, Homo sapiens
gggcgtttgggatggaaacacagacacacagttaattacagcatcatgcttggcgccaccctaattaaggcagttccctggtggaggccaagatttaaagttctctctttcacagtgcct

SEQ ID NO: 6812 - DNA, 120 bp, Homo sapiens
acccggcttgctggcaggcagatgagaaaggctgcctaggctctgtgagaggaacacatctgccctcccagaacatgggataggacaagtagggacagtgtgaggggcagaaatgtcaat

SEQ ID NO: 6813 - DNA, 120 bp, Homo sapiens
gggcgggacagtcatgttccacctcaaagaaaaaggttagaattatcttggctcaggaccttcctgaaagcacgaaatggcttccagagggcactggtgaccttggaggccaggaacacc

SEQ ID NO: 6814 - DNA, 120 bp, Homo sapiens
tgccgtgtttggcttcgtaggggatgtggaacccaatatgctcagccagacttccaatgtccttggatcccaccatgctctgacccaacctaatttaaatagaataggaagggcagattt

SEQ ID NO: 6815 - DNA, 120 bp, Homo sapiens
tctcgaactggccccatgaccacctccctgcatttgcccctaagataagcacggtcctgaattctgtgtttctcattcccttgtatgggtttgtatagttttatcacatgtaaatgtata

SEQ ID NO: 6816 - DNA, 120 bp, Homo sapiens
caacgtattgctttgttttgcctgcttttgagcctcacaaaaagggtacactctacacagtcttccgggagctttcctttctgcaaagacgcttttactgggttttctgcttctcgcggc

SEQ ID NO: 6817 - DNA, 120 bp, Homo sapiens
acccggaatagtgtttagtcaaatgtctaagcactccatgggccagtcaagttgacacacaaaacttgccaccccagcttcctacagaagccaactccctcaagaagagatgaagattcg

SEQ ID NO: 6818 - DNA, 120 bp, Homo sapiens
tggcgtggcgttgtgtacctagaacaatggtaggccactctctgagtccctgtggggattttctagggtaaatcagaccttgattcatgttcactgtccttgctgatgagtccttatcac

SEQ ID NO: 6819 - DNA, 120 bp, Homo sapiens
agccgttagatgttatgctcactttcaccccatccctcagactcagaccttcgcattcaatcccagggctttggtcatgggtagttccagctgtctgcacctcacagttgacaacccctc

SEQ ID NO: 6820 - DNA, 120 bp, Homo sapiens
ccccgtcgcacccaggctgccagggtgactttcaaaacactcttctttcactgtagacccataagatgtgggaactggcagggactttagagacagtgcatcctctctgatcttccttgc

SEQ ID NO: 6821 - DNA, 120 bp, Homo sapiens
cttcgtgtgggtccccaggtgtggtggaaatggcggggtggtgagagagggctggggtcatgatggatggagaggatgtgagtagagtgattgggaggagtggggatgggagggggactt

SEQ ID NO: 6822 - DNA, 120 bp, Homo sapiens
acacgtctgcatatgagcatgtgtggctcctaccaaatgaccccaggtgatggaatctggaatggatggggaaagggagttgggcaggagcccagcagtgtcagctagttaatagataaa

SEQ ID NO: 6823 - DNA, 120 bp, Homo sapiens
gggcgctgaggtctccatccacttcagactcaacttgtgtccatacagacctcactgagggcttccagcaggctgttctgctcccagctctcctgggaggagtgggcgtgggttttaatt

SEQ ID NO: 6824 - DNA, 120 bp, Homo sapiens
aggcgaacctggggcccagctcggtggaaccattttcagctgtgtaccccagtaagtgcttggcctttcagatcatagtttctctcatgtgcgtaagaaggggtgggtcaggatggaggc

SEQ ID NO: 6825 - DNA, 120 bp, Homo sapiens
aggcggtttccaaacaccagtcttccatgccaacatctgccccctagacttggcaaaaaccagaacaataaggacaatgccataagttgttcatgaaactaaatgcatccagtctaatgg

SEQ ID NO: 6826 - DNA, 120 bp, Homo sapiens
tgacgtccttcctttttttgatattcaaatgcccttttgaaaatcaaatgatagaaactctgtgtgtgtgtgcacgtgtgcgcatttgtatgcttgtgaataaaggcatgctgatgaaag

SEQ ID NO: 6827 - DNA, 120 bp, Homo sapiens
gcacgcatcaggctgggacgttcttgcagtaaaacaaaaaagagaaaaagagacaatgtcacttaagaatgtccttgaagcagaaaaatttattaacttcttcatttttcaacccttgag

SEQ ID NO: 6828 - DNA, 120 bp, Homo sapiens
gagcggattggctggcctgctgggctgcccaagccttctggccttgagcatagagctggggtcctgaggaggggagaggcagagcataaaaggaccctgttagcaggatggggctgtctt

SEQ ID NO: 6829 - DNA, 120 bp, Homo sapiens
ggccggaggatgtttttctaacttcagaaggctgcgtgggctggtgggcccctcactcagaggcctcggcttgcggtggctccagtgagtgggtttgggggtgctggtgtgtggtgccat

SEQ ID NO: 6830 - DNA, 120 bp, Homo sapiens
agtcgacatagccgtcttcccccagggactaaatttaggattccttgggacttggctgggcctcatcttgtttttggaaactctccattttgctcctcctgctgctggtggccgaggccc

SEQ ID NO: 6831 - DNA, 120 bp, Homo sapiens
gcacggccgaatggcagtgcagcgtggtctcgccttggattgatcttgttggagttcattagcagctggcctcgcaggcctggcctccagcgggcaggaggagctgtgcctggggcgtgc

SEQ ID NO: 6832 - DNA, 120 bp, Homo sapiens
cctcgttgtcgtcccaggcagaggccctctgagggaggcgcttgggttttctttggcacttggtgagcaaatggctccctctcccttttcttctgagccctgtaaaaataaaaagttaaa

SEQ ID NO: 6833 - DNA, 120 bp, Homo sapiens
tttcgctggaaggaaaggaaacttgctcagatcaagttctttaactaggggctgagagatagggaggccagtcttctggggtaacgttggcactaaaagattcaccagtgcccagaggct

SEQ ID NO: 6834 - DNA, 120 bp, Homo sapiens
aggcgggtggttcacaagtgtttgcttcataggccagagccggcttagggcctggttttcagaacatcagcgcgagggtaattgtattttcggggagaaagaacaaatggggttgtctgt

SEQ ID NO: 6835 - DNA, 120 bp, Homo sapiens
ttgcggtatctgccctgtactgatgtattgcttaccagggacaatatttcctaaatatattatcccactggagattctggggaaaaaaagattctttgcaaaattagtgttgtgaaacaa

SEQ ID NO: 6836 - DNA, 120 bp, Homo sapiens
tttcgtattactcaggattccttcagtttagggaccagtttcccaagcttctctggccagggagtcctttggcaaacagtgctgcagggttttgagtgctctcattctctcgggtgcttt

SEQ ID NO: 6837 - DNA, 120 bp, Homo sapiens
catcgagggcttcccaaagatgcagactttccctttgctaaggctttgccttctgccagctcctattgctttgtgggacccctgccacttactcagaggcacctcggatggagagaactg

SEQ ID NO: 6838 - DNA, 120 bp, Homo sapiens
atgcgtgccctttattgctgttagccttgatttggaaagggcagggtggttcaggaggcagagagcatgttgctgattgctcagagcaaaggattttgtgtccaggatctgagtgttgca

SEQ ID NO: 6839 - DNA, 120 bp, Homo sapiens
atgcgtttgtctctttgcccagccatcgtaaggcagctcatggaccagatgccagccttgatctgctgagctctctgggatgtttctgagaaggccagagtgcattgcccgcccaaggat

SEQ ID NO: 6840 - DNA, 120 bp, Homo sapiens
gaacgtggttttagttagatgattaaggactctcgcagggctgtcctccctacagcagtccctcaggtctgtgcctagagccccagccaaaatgagattcaaaatgccctgagagagagc

SEQ ID NO: 6841 - DNA, 120 bp, Homo sapiens
tctcgtgacacagcagggattctggggttccaaggctgctacctttgtcttgatgttcatccacgaattatctgtggttctgctgggaatacaccatttgtttactcaatgcatatgctg

SEQ ID NO: 6842 - DNA, 120 bp, Homo sapiens
aggcgtttcttattgcagggacagggtctgagagaggaagtggactccccagtgccttatcaagtttctgtatcacattcactaccgtcccgtctgctagagcaagtcacgtggctaagc

SEQ ID NO: 6843 - DNA, 120 bp, Homo sapiens
agccgttggtaaatgttagcaattattaaaataccagccagcttataagcaacccaaggccataggcacatggagaattgagagctactggggctgtttggtttctttcccttgacctcc

SEQ ID NO: 6844 - DNA, 120 bp, Homo sapiens
tgtcgtctgtagatcgtaatgaggcccaggcgcccagactgaggtccgagatgtgggcctggctgcacggacccccgattgaaggcacctgctgccgagcccaggcatggcattttccct

SEQ ID NO: 6845 - DNA, 120 bp, Homo sapiens
gtccgagtgctgccagatttggggtatgctgctttggagaacagagaggattcttttttgttaatttttctgtaaaacttgttctttcatgggatttccttccagtccctggagaaggtc

SEQ ID NO: 6846 - DNA, 120 bp, Homo sapiens
tctcggcttttccacacccacctttggtgtgatcatcgtgcactgctgcgtggcaggcgggtgggattggtgccctcattttatagatgtggccactgaggctttcgatcacagccctgg

SEQ ID NO: 6847 - DNA, 120 bp, Homo sapiens
atgcgaactgctgagtttcagaatgaaccgagtcctctggaagccgccagtgtgaccctcttgattatgtcctcatctggtggttggggatggtgggaagtcgaaatccacagtggctcc

SEQ ID NO: 6848 - DNA, 120 bp, Homo sapiens
ctccggaggaggcaaaagacttcactggcagtagagggaggagggcgctccgggtgaaggggacaggatggtccagggctgggaggctccaagtgggcggtctggcctgtgagagggatg

SEQ ID NO: 6849 - DNA, 120 bp, Homo sapiens
ggccgcatgggtggactctgtgtgtgtgtgtgtgtgtgtgtgtgtgtgtgtgcgcgcacacctgtgctcatggacactcttgtcctgtccgtaaaatgaggcctcagggtataggaatca

SEQ ID NO: 6850 - DNA, 120 bp, Homo sapiens
tttcgtttaggttcagaaaagcaagaagctcaagcccttcattcctgaggctgagcaagaaattccaggcttcttgggtccccaagccccttccctgggcaggagcacacatcctttccc

SEQ ID NO: 6851 - DNA, 120 bp, Homo sapiens
tgtcggcaggtcacacgtgctagaccctggcagcagaccgggggcctgtcccagggccaggaactgctggcagatgccgccccagctgcttggtgatcagaggcacgccacaggccctcg

SEQ ID NO: 6852 - DNA, 120 bp, Homo sapiens
actcggctgtgtggcgtggcgggccagtggctgggctagtcagcagtgtggcaggtggtggcatggtggggccagtggtgtggtgggcagtggtgtggcaggatcagtggtgcgatgtgc

SEQ ID NO: 6853 - DNA, 120 bp, Homo sapiens
tggcgggcagtggtggggcaggatcagtggtgtggtggggtcagtggtgtggtgggcagtggtggggcaggatcagtggtgtggtggggtcagtggtgtggtgggcagtggcttagagag

SEQ ID NO: 6854 - DNA, 120 bp, Homo sapiens
ggccgtgtgtgtgtggtcagcagtgggtgggagggcagagactccgacaagcgctgagtgcactctctctgctctctgcagccggccagaagtggggtcgcctgaggccttctggggtga

SEQ ID NO: 6855 - DNA, 120 bp, Homo sapiens
atccgctgtggcatccctgacaaaaaccagggcagaagagagcatgtgagggaagagaatgaaagaccagggcccggagggagaaggaggtgacagctgtgacttgggacacgctatttg

SEQ ID NO: 6856 - DNA, 120 bp, Homo sapiens
actcgagtgagtcacttaacctctctaagcctcagtttcctcatggccaaagtgggggtcatcgcagagcccagcttctagggctgctgggagcacttggtcggtgatgcccctaacgtg

SEQ ID NO: 6857 - DNA, 120 bp, Homo sapiens
tgtcgcacactgactaagactggttatcatcatcactgagtcctttatattcatgacctcagttacccccaggccccaacatgcccatcagatcccagtttccactgtagaaatgccttt

SEQ ID NO: 6858 - DNA, 120 bp, Homo sapiens
ggccgatgtggcatcaggaatgagagtggggtggtcggcaagtgtgggaccacgcccttaggttgcgtggttctgcccagatggttgggtgggtgactgctggattctgacctctgtttt

SEQ ID NO: 6859 - DNA, 120 bp, Homo sapiens
ggtcgcaggcgagaggagatggtgctggcctagcctgggagcttggggctggggagaggtccatggggctggaggttggagctggtgagaagggggttgagggaacgagagagatcaggg

SEQ ID NO: 6860 - DNA, 120 bp, Homo sapiens
tggcggtgtcacttctgaggtggaggttttggcgggtgaccatcaagcctcccgtttttggaccagttgggttcaagatgcccatttaacatccaaggagaggtaccgaggaggccgtgg

SEQ ID NO: 6861 - DNA, 120 bp, Homo sapiens
ccccgagaggaccccatcttcaggcacgagacctgttatagatctgaggttacatgcacctgcgcggcggtcgcaggttagcacgtctgggctccacttgcttcttgtccagcatgtggg

SEQ ID NO: 6862 - DNA, 120 bp, Homo sapiens
ggacgagtgttttcttctctgtggatagggcaggagaagttcacctttatgctgccatatgtgaattctgggttaacaaggtcacctcctcctcaggctgtggttttcgggctgtttcaa

SEQ ID NO: 6863 - DNA, 120 bp, Homo sapiens
attcgaaaaaaaaaagaaatagattggctcatgtaactgaaatttggtccggggtctgactttggggatggcttgacccagaggctcagtggcttcaggacaaggtgttcatcactgctc

SEQ ID NO: 6864 - DNA, 120 bp, Homo sapiens
ctgcgttgtccttcactgctttgataatgagaggaagggagagagggtttccaaggaaggtggcccagcccggccctggagaaagtgttcactgggtcatgtcttcctcccaccgaggag

SEQ ID NO: 6865 - DNA, 120 bp, Homo sapiens
tgacgccacccctcaaatttggctgtaaatacagttcccttccacgccttctgagtgccagggcagatgggctcccacctcacggcatctgcagcccagagctggggtgtgggccagctt

SEQ ID NO: 6866 - DNA, 120 bp, Homo sapiens
aggcgttcgttcatgcaggaaatactgagcacaccgattcctacgtgtctgccctgtgtagtcagtgaggttgattttcaagctagaattgccaaagcacataggctctgagaccctcgg

SEQ ID NO: 6867 - DNA, 120 bp, Homo sapiens
gagcggccatcagctgcctcatctgtataatgaaacctccttcatgggctgcccaagatagagagagtgagcaaatggggccttatggagaagccagagggaagaaaaggaggcacaagg

SEQ ID NO: 6868 - DNA, 120 bp, Homo sapiens
ctgcgggcctcgtcgaaagaagtgggatccctccccgagatgagcaaggcagctagggagtgcctggagcctgggtctcaaacttatggcccccacaatttcaatctggcccccagatgt

SEQ ID NO: 6869 - DNA, 120 bp, Homo sapiens
tcccgccttcccttccttccctcctccctcctttcttcactggggagaaagaatttggcattcgagtatctcaccccgtcttgctaagcagtttagttagactgcaggccagtctctgtg

SEQ ID NO: 6870 - DNA, 120 bp, Homo sapiens
agacgtgggcagagcaaagagagacccacacttggcacttcctgcccagaaaggacctgctcaggcctggctggcctttaccaccgtcatctccaggctttctgttcatccgtactttca

SEQ ID NO: 6871 - DNA, 120 bp, Homo sapiens
actcgataaaacagacatcatctctacctacctttgtggagctttaatctagtgtgggggacggggggactgcttccacccagaaacgacatttttatccactgcgataacttctgggga

SEQ ID NO: 6872 - DNA, 120 bp, Homo sapiens
gaacgcttgatgaactggtgcaggcctgtatggccgggtacagctggcaacgaggaggcccggtatgggcagaatctgggggcctgaatggtggagagtctgcttgtcaccccaagagac

SEQ ID NO: 6873 - DNA, 120 bp, Homo sapiens
agtcgggagagagaggatgtgacactctagccaccaccacgcagagaagggattggaaacagtagcccggagaggaggctctcttggtaggatcccacggcaaccgaatggatgcacgtt

SEQ ID NO: 6874 - DNA, 120 bp, Homo sapiens
tgacgttcttacccatgaaagcgctcaaggatccgcttgcttgcttacatgtgggatcagcactaccttccgtgctgccgaacatcttcttaagcgagggaaagaacaaaaagaaaagtt

SEQ ID NO: 6875 - DNA, 120 bp, Homo sapiens
acacgtgagtgtttactgcacatcctacagatgaggagctcacaaggaccctggatgggggagtcctctgaggttgctggagctgctgcagccatcttgtcactgccaggggagagctct

SEQ ID NO: 6876 - DNA, 120 bp, Homo sapiens
gagcgaaggcacagtggaggaaagcagaactaagaagagacagagaaagcgaaagtgggagagagagagagatatgaggtgacaagtgtgggtccttggatcctgcttggtgtaaagcta

SEQ ID NO: 6877 - DNA, 120 bp, Homo sapiens
gcacggcccacacacaggctcccagctcatttcctttgcaatgagtggtaactggaggcgggcggtgcatggacctgccttgcaaggcttctctgttagtggtgcctggagcccactctc

SEQ ID NO: 6878 - DNA, 120 bp, Homo sapiens
gtccgggtgtgtcctggacctaccccctttctgggtgcaaaccagaactgaggatgccgagggtggtgggggggtagtttcctgcctcagggctgtgctcctgctacctctttgcctaaa

SEQ ID NO: 6879 - DNA, 120 bp, Homo sapiens
cagcgccccctctgagaagccttccctgaccacctggctgaggacatcattctgtcccagcttccatttgctttgggagtggcctcctgacacttcacttccgtgaggcagggaccagtt

SEQ ID NO: 6880 - DNA, 120 bp, Homo sapiens
catcgtaggagtgccagggatctttggttactgagaaaacgagcagctagatcaaggttcccaacaccaacacgctggggacatgttgggagtcaacttagccctaccagcaggtggaac

SEQ ID NO: 6881 - DNA, 120 bp, Homo sapiens
ggccgagcctgggagctgacagatgagggctcggcgtggggacttttggaggggagggcattttcttgatcttaccatgggggcaacagctagatgggtagggggggacccactcaagga

SEQ ID NO: 6882 - DNA, 120 bp, Homo sapiens
ctgcggcttcaggcttcgaccagcccagaacgctcgctccatctgagggtcttgatatcagggtgtggcgtcaggagccggagcctacgggttgaaagccaagagtgggcaatcaaagct

SEQ ID NO: 6883 - DNA, 120 bp, Homo sapiens
cagcggcctcaggctcagggcctgtctcaggtaaaagcgggttagggtgtaataacagtgatcggtttcattgtgtttatttttgtagctactttctaattatagcaagtgattctgagt

SEQ ID NO: 6884 - DNA, 120 bp, Homo sapiens
ccccgcttttagtgtctgttaagtgctagatgtttccagaaatatttgtgaaataaatgactaaattaaggtggattggaatagaattacaaatgtttgagacaacttagagaaagggac

SEQ ID NO: 6885 - DNA, 120 bp, Homo sapiens
gatcggctggagggagtagctggtatactgactggttaggcatggaaattcaagacaaggaaggtgcaaatgacctgaggaagctgccagtggaacatagaggtagagctgggacttgaa

SEQ ID NO: 6886 - DNA, 120 bp, Homo sapiens
ctacggcctagagaaagatagagccagtgcctccctggcaccccctgagcacagatgggggcgggagtcatgcatgtccctgagcacagccagcgcctgtcccttgctccaggggtgaga

SEQ ID NO: 6887 - DNA, 120 bp, Homo sapiens
agccgctggcctgggagaggggaggtcagctggggcctggagcctgcacttcagggggaagtgcttgctgtgtcgggtgaaaggaaccctggggccttctccgtttggctctgcacagcc

SEQ ID NO: 6888 - DNA, 120 bp, Homo sapiens
gggcggccctcagggaccctcgatccaacctcaccttttacagatgggcaaacagaggcacggagcaggggcctggctggcccagggctgcacgttcttgagcatgccgtcacgggcacc

SEQ ID NO: 6889 - DNA, 120 bp, Homo sapiens
tctcgcttgtctcttgtgcctgtcagggagtcaggagacatcgccttccatcctgaccaaccgtgtgtccttaagcaagtgctttaatatctctaggcttcagtttccctacctgataaa

SEQ ID NO: 6890 - DNA, 120 bp, Homo sapiens
ccccgtcctgttgataagatgatggatgactaggggtgggttccctacattctgactggtgcctaagtgagacagtggatggtttacgtgattcttggtggctgggattcttgggggccc

SEQ ID NO: 6891 - DNA, 120 bp, Homo sapiens
tggcgagtggccttggcctcaggggccccagcctttgcagatctgctttcatgaccaggcagctggctccaggtcagaagcagggcactattggcccagagaccctgtaagaccctagaa

SEQ ID NO: 6892 - DNA, 120 bp, Homo sapiens
cctcggcttgacactccagtaaagactgagaaagctgattataaaaccaggccttagaataaaatcaaattcagcagccacagtcagctcccttatggttgtctcttacaggtttcattg

SEQ ID NO: 6893 - DNA, 120 bp, Homo sapiens
agacggttccatggccctttccttccctctcctcaccctctgtagcaaagatttcttgactttataacaaaatactaaaagtgttgttgctgttggcctgggggcctgtagttggcccag

SEQ ID NO: 6894 - DNA, 120 bp, Homo sapiens
agccgtgtgtgcacagacagtcattctcctcctcctgtccccaggtgtcctaaccaccccctctccaagagctgactgccaagtccagtccttcttctgctgggcacacagaggccacac

SEQ ID NO: 6895 - DNA, 120 bp, Homo sapiens
agcggtgctggctggctttggccactctggtttatgtctcttggctcggttttctgccactactggattttgcagggaagggcaggctgtctcatttttcacagtttcaccttttttttt

SEQ ID NO: 6896 - DNA, 120 bp, Homo sapiens
ccccgtctcattgggattttgggagcattaaaaggacaaaagcgtgtaatgttagctattagctttcattatctcccacacagtatactgacaattgggctaccatatattgagggctaa

SEQ ID NO: 6897 - DNA, 120 bp, Homo sapiens
taccgaaaagatatggacacatgttttgagttagggctggtatctcttgatctctgaaatttagcagctcacaatgggaaactcaagaaccaagtggatctagagactctggtatccctc

SEQ ID NO: 6898 - DNA, 120 bp, Homo sapiens
gaccgcaccacttgaacataccaggcatcctgccaggtgctttatggacaatgtctaccctttgcaacaaccctgagaagtaggtggtgtttttttccaccttatagatgtggaaactgg

SEQ ID NO: 6899 - DNA, 120 bp, Homo sapiens
tgacgagggaggggaagatgggtctgattgtaaattgtccccacctacactttctcttttcttgggagaagaaatgtcagttgtaaagagagagtgcaagcctggcactctttagggctt

SEQ ID NO: 6900 - DNA, 120 bp, Homo sapiens
gggcggggtggctggaagtctgtgcctggcactcgcgagtgcaccgtctcattgaagaacaggatctaaacatcagtgcgccacagcagggtgcgcggcacggagtgcaggccctggttt

SEQ ID NO: 6901 - DNA, 120 bp, Homo sapiens
ggtcggaagaggaagatatatatctgatatgtactggagaggaagatatctatcttatggtctaagttcagggatcctggtatattcagagggcagaaagctcagcaataatcatcaact

SEQ ID NO: 6902 - DNA, 120 bp, Homo sapiens
gggcgtcccctttgtgtgactgcagatagtcatcagtgagctcagagctctatgaaaattacttgctagtttttgggttgaaaatagtgggccagtgtttggttgggggcagtgaggctg

SEQ ID NO: 6903 - DNA, 120 bp, Homo sapiens
tggcgggggaccatgccaagctcctaccagcctgggacgctaaaccagcacttccccatttcctgaaaggggaactaaactctgacacaggaaatggtttgcttgcattactttcaggat

SEQ ID NO: 6904 - DNA, 120 bp, Homo sapiens
ccccgtgcatgaaaactctccctgcatggggtgcatggggaggatggggaagtggaggcaggatcacagactcttgttcgagtgctcagctggggcaccccggtgaccccgaggccttcc

SEQ ID NO: 6905 - DNA, 120 bp, Homo sapiens
gcacgcaccaccatgtaaacatggaacctaagtttcacaaaatgacttcgctttatgaactctgagacactctgctctcttctgttctgttctatttccattttagaaatgctgctcagg

SEQ ID NO: 6906 - DNA, 120 bp, Homo sapiens
ttccgccaatcctgccaacccagtcccatctgctttccatcttccaggaattgcagacaagttcttgtttttccacatgtggttatagattcattttgtcttttaaatatggcttttctt

SEQ ID NO: 6907 - DNA, 120 bp, Homo sapiens
cagcgaagtccctgggagaacatgaggacttgaagttcaggtggtgggctagcttaggacaggcaggacaggtcaagagcaggcataggtgtaggtgtgttcccaggtttggtggcagga

SEQ ID NO: 6908 - DNA, 120 bp, Homo sapiens
ttacggacacagaggcttcctgggtcaccctgaggccacccctaggatcagatgcccagcccagagaggctgccctggccagtccggaaatactcttagaagagtgctggttgggatgtg

SEQ ID NO: 6909 - DNA, 120 bp, Homo sapiens
cagcgggctgggttcaagtcctcatggggccgcttagcagctgtgggatgctgggaagccatggccctctctaagcctcttgttctctcctttactgaggcagtgggggcattgacctca

SEQ ID NO: 6910 - DNA, 120 bp, Homo sapiens
gggcggggatacttacgcccttatcatttatttttacgtatcgaaaaacattactcgtaaaatctagaaagagagtgattgagatgggtaataccatcaccctctggctaagctatgaag

SEQ ID NO: 6911 - DNA, 120 bp, Homo sapiens
aagcgtgtttttttattccactgttcatccttcaagctgataaacagcaacaatgggaaacagctgggacaggaaaacatttgagtttgtattttcaaagcaagcaagaaagaaacccgt

SEQ ID NO: 6912 - DNA, 120 bp, Homo sapiens
ccacgcccctccccaatccatgctctgcgctgctgtgctgggaccttgccttccagttaataggggtattgtccccgccctgcgggaacaaggcgagctcagctggccttagtcacaggt

SEQ ID NO: 6913 - DNA, 120 bp, Homo sapiens
atccgcagggatccgcggatgctgtgacaaggggcgggcgagggagggctccgcgtcaggggcagacagctccaggtgctggaggctgccgcgcggagaggtccgcccagccaggatgtg

SEQ ID NO: 6914 - DNA, 120 bp, Homo sapiens
gtgcgttgtcctgagaatcgaattacccggaaccccagagctcaccctctctgaaggagagcaggtgcctcctgagagcagggcttctctaccttggggcactatgaacattctgagtgg

SEQ ID NO: 6915 - DNA, 120 bp, Homo sapiens
ggtcggggacgagagggcaaaagcagccccagttgggagccactgctttagagaatggagcttggagctgatttctgggacaaatcccatgggatagccaggacgtgcacctgggtaagg

SEQ ID NO: 6916 - DNA, 120 bp, Homo sapiens
taccgggtagagatgaggaccccaagtagtgctaagtggcagcactgcagatgcagagggttggagcatggcttcatgggaggtggtgttcctggaggaggtgagaagtaggctggcctc

SEQ ID NO: 6917 - DNA, 120 bp, Homo sapiens
gagcgtgagaccgtatgaagatcagacacaggctgggatctgtcagggcaggaaatggaaataatattaatagcaataaactgtgaccttgatttttgagtaatggccatgtgccacatt

SEQ ID NO: 6918 - DNA, 120 bp, Homo sapiens
attcggctgtttctgccctttcatctgaaaaggtctatgtgactcatttttatgctcatggctcttttcagaagttaaagcaaagtaaaaccaacaacagtgctttgagaattgggggga

SEQ ID NO: 6919 - DNA, 120 bp, Homo sapiens
ccccgtaagggacacatcccctgcagtactgatgccctcaggaacaagtcctcttccagtgctgtgccaagtctgggccggcaaggagaatggaaccaggtggaagcaagagtggaataa

SEQ ID NO: 6920 - DNA, 120 bp, Homo sapiens
ggccgagagaggagaaaagcagtagctcagtgtcagcacagaatctcttggctctgaggggctgtctggggattgcattttattctttaggtctgggaacctgctgccctccatctccaa

SEQ ID NO: 6921 - DNA, 120 bp, Homo sapiens
atccgatttctgccctcctagggtggacattaaacactgaagagctgatttggattttgtcctggtctagtgacagatctcagctcagatgtcacctcttctgggcagagtggattgggt

SEQ ID NO: 6922 - DNA, 120 bp, Homo sapiens
aagcgtctgttggatcgtgaatcctttcctcactgcactgtgagctcctggaggccaaggctgggatctgtaatccattcattcccttgtctgttgttgcatctctgagacccagcatgt

SEQ ID NO: 6923 - DNA, 120 bp, Homo sapiens
tgtcggaggttctctaagcaagtgaagtttccccgaaagcagagcctgagacaaaggcttatgatcaagaagtttattaaggaagtgacaccagggagcaagaatgcaagacaagtagca

SEQ ID NO: 6924 - DNA, 120 bp, Homo sapiens
aaccggtgggtcaggaagggattttccttagaggctaatgtcttctgcgacatgccatgcacgtgagtgatttacatgccggacttgcaggtattatgggctgccctcacagaggcactg

SEQ ID NO: 6925 - DNA, 120 bp, Homo sapiens
ccccggtcttccgggccctgcacgtttcctacccatctgaggccagggctgcctttggtggcattttcccgcagactgtgggttctttcacacggctgttgtgttttctttccctctcct

SEQ ID NO: 6926 - DNA, 120 bp, Homo sapiens
gctcgagacatttttccgtctcactcagcatttccacccgctggggttcaggcagccagcagctgcctgacctctggtgaactcttccctttgcccattccttggacagccccttggttc

SEQ ID NO: 6927 - DNA, 120 bp, Homo sapiens
catcggagctgggaacaaatgtgggcagaggggagtctggcatctgccaggaagggctccgaaggatgagcagagcattttccttcctccgttgatcgacttagatgccaggcttggcac

SEQ ID NO: 6928 - DNA, 120 bp, Homo sapiens
atgcgggagagttgaaagggtgcaggtggcaggatgcagagaggggaaatctgtgttttcaggtgctcatgggggtcctgtattagagttagagatagggttctcccagggcagacagag

SEQ ID NO: 6929 - DNA, 120 bp, Homo sapiens
ccacgcagtgcaagggtcttggccagcagaagaaggctcagacatgcagcacctgcagcgaactgcccagacagccctgtgcagaggcctctggtgacactcccggaaaaatgccactgg

SEQ ID NO: 6930 - DNA, 120 bp, Homo sapiens
gctcggaggcatcagcctccgaggggccccgctgctggggccatctttccttttactttcccagatcatctacatctggataaagacacaaacctgggggatttgtagaccaactctgaa

SEQ ID NO: 6931 - DNA, 120 bp, Homo sapiens
aaacgagcgacggccttagcttcaccaccaccatactgggcaggcaagtggctttttctcaaagaagcagcaagaccaggcactcaggtttcctgcagccctgggctgaagtttctatca

SEQ ID NO: 6932 - DNA, 120 bp, Homo sapiens
taacgggagatgtttttaaagttaaatccactcacaaaggcctgggggaggggtccgtggcagctctccgatgccatcaccaataactgaaatacaaaataacaaaaacaaacccaaaat

SEQ ID NO: 6933 - DNA, 120 bp, Homo sapiens
tttcgcccgcctctcctggaagccacagcagggcggtggtgactcgcttacctcccccagccccacccctccctgcccattccacccagcccgagacccagaactagacaggggatttgt

SEQ ID NO: 6934 - DNA, 120 bp, Homo sapiens
taccgctgatgtgtggcccgtccgaatgaagggggcttttcattaacaaagtagcgggcggtgtcatcttcccctgagtcggaatcattcactattagcacaatgtgttattattgtatt

SEQ ID NO: 6935 - DNA, 120 bp, Homo sapiens
ctgcggggtgggggccgggatggggatcttcttatccaagcacaatagtcctgttaccccatcctcagagcgcatttgatcgcgaggtagatgactgggtgggaagctcgaatatttccc

SEQ ID NO: 6936 - DNA, 120 bp, Homo sapiens
tcccgcagccgttcctggggttcacacctgggccgggaaatggccagagtgtatagatgcggtttcaggttttaaataactatgatgattgacgcatgattaaacgattgatttggagag

SEQ ID NO: 6937 - DNA, 120 bp, Homo sapiens
tcccgtctatttcaaagaaactcttttgtaaaaacaaccaaatggagacaggatgattcaggggtcgattcagactttgcccacaaacattgtgcactcacacccttttggctgatgttt

SEQ ID NO: 6938 - DNA, 120 bp, Homo sapiens
gctcgcacagagaagagagagcattcaccccaccaacaaacatttgctgaacacctactaagtgccaggtactaggaaatggataaataagcaaaggtgaatattttataagcatctctg

SEQ ID NO: 6939 - DNA, 120 bp, Homo sapiens
tagcgacagcccacatgtcaccttccaagagaggtgacccctattaccacctagtctgagacacccacagcctagtcactctctatccttggccctttaaacattttcttcatggagcta

SEQ ID NO: 6940 - DNA, 120 bp, Homo sapiens
tcccgtcaccgccctatccttactggactttaagaaagttccacaaggtccttgtccttggctgccacattctgtagtatgcccccagaacagaggtaccaggcacctaccagtgattaa

SEQ ID NO: 6941 - DNA, 120 bp, Homo sapiens
gggcggggcggggtggggggcaaggagtaggaggccaccataggtcgcattctgaacaggaatgaatgctatgtctccagcccgagctgctttaactcgtgacgatctccttgctgtcct

SEQ ID NO: 6942 - DNA, 120 bp, Homo sapiens
ccacgaagcgggtgaagcggaagttggttccgttctcactgcttgccattttctccaggccggccaggggagcattgggctctgagttctggagcctctccaggtttcccgtcagcccac

SEQ ID NO: 6943 - DNA, 120 bp, Homo sapiens
taacgtgttcactctctgcagccctgggctgtctcccctcttccaaggcaaggatgccttacttactctttttttattaaccatatttagcttataatggcctcaagcaagccaggcagt

SEQ ID NO: 6944 - DNA, 120 bp, Homo sapiens
tggcggatagctcctttcagggttagaattgttaggtccactctcattgcaatggtaagtattgtatctgacaccctttaccctataaatgtccttttcagatggggagaaggtatccct

SEQ ID NO: 6945 - DNA, 120 bp, Homo sapiens
ctgcgtatggagagaaaagccagaaagtaattattcatctcacattactgggagcaatctccagagaaatactctgtcaacagaaaaatgtacacactaagagcactcaactgttgctct

SEQ ID NO: 6946 - DNA, 120 bp, Homo sapiens
tgacgttattgtttttagacaaacaaaccatgctggactgcatagttatgaaaaatagatacatacgccgagaaccctaattattaagtgatacgggcagcacacaggccacgtggaggt

SEQ ID NO: 6947 - DNA, 120 bp, Homo sapiens
caacgctaggctttcttggtaggtaaagcaattcatttggtgcacttagcgagacaacagagagaggccgctgcttcgcttaggtaccaaattattcaatgtgcactgacattcagtgag

SEQ ID NO: 6948 - DNA, 120 bp, Homo sapiens
ccccgtcaaccatgtgcagcaggttcccttgcaagagctctctccctgaatatctgggctgatgactctgggggcatgcattatagataatcaatggcagtgggacagggttgatggagc

SEQ ID NO: 6949 - DNA, 120 bp, Homo sapiens
agacgggacgtgactggtgggggtgtccttactgtcctgaggagaaacatgcacgaagccgttgacctctgtcttgatgagagatgacaacgagttggcgggaatcaccgctgagttctg

SEQ ID NO: 6950 - DNA, 120 bp, Homo sapiens
ccccggtctctaaaagggaagaggatccccaaagaatcttctttgatgattttctctgcgtgactagatgtcaaatccaaagccccaccattcactggggtgggagacaaaccattggca

SEQ ID NO: 6951 - DNA, 120 bp, Homo sapiens
gcacgatggacactgtagtgggttttaagattccctttcgtggtgaaagcccggccacagatcttacacttaaagggcctctccccagtgtgtgtcctgtagtgcattttcaaggcgctc

SEQ ID NO: 6952 - DNA, 120 bp, Homo sapiens
gctcggacatgagcggcaacaaagggttggtgaaggtggtggcactgcccgcggggccgcagtctgccgctggggagctcaggacgctactgctcgccgtcgggactgagttggtgacca

SEQ ID NO: 6953 - DNA, 120 bp, Homo sapiens
tgacgaatctgttcgatcaattgcagctggtggatctgctgctgctgcagagctaggagttgttccatgagggctgggacggccagcttgcccccagaggccccgccgcacctcgcttcc

SEQ ID NO: 6954 - DNA, 120 bp, Homo sapiens
tgccgccgccgccgctgctgctgctgctgctgctgctgctgcttggggcggtactgctgtggctgccgctggaagtgccgctgccgcttttgttagcaaccggggcctccacctccatgg

SEQ ID NO: 6955 - DNA, 120 bp, Homo sapiens
gggcgactcggttgacccttttctgtgtctcctacaaatgtcaaaaaggtgcaggattagaaaaggggccaggacacacagtcacctatgacttaaaaaaaaaaaggctaatcaatggtt

SEQ ID NO: 6956 - DNA, 120 bp, Homo sapiens
atccggtatttcagagagtcatggccttcatataattcatcaaaatataaaatactacaaatgggagacattggtgcatgatgaaattccatagcaaaatattgatttccaatcttttat

SEQ ID NO: 6957 - DNA, 120 bp, Homo sapiens
gtccggagagggtccacaaaccattctgaggacttattaggctcttgagtttctgtcaaccttattcattttcaaccgactcaaagatatctgtgacagtttgttctgtcactaaactaa

SEQ ID NO: 6958 - DNA, 120 bp, Homo sapiens
cctcgaacctgcgctaagtctgatccctgacaaacgcactttagtcacatcagtaacaaatcctccagaccgttcctcaaaactcacttgaacacaaagggatggcaacacacacaatga

SEQ ID NO: 6959 - DNA, 120 bp, Homo sapiens
ctccggctaccattccactaatcaaagaatatatgccaccatgctccgaatggcaacattatgcctctaaatatttcatcaaaagtgctctctatgtctataaaaactggcacaagattt

SEQ ID NO: 6960 - DNA, 120 bp, Homo sapiens
aatcgtttaacagattgtcctgaacattttattataaaaatccctttatttcatgtttgtttccattggttgctcagatgtcttctcactaagatccatttgtaaattaaacagaaaaat

SEQ ID NO: 6961 - DNA, 120 bp, Homo sapiens
ctacgaaggctgtgaagaaaaaaaaaaaactgtttaattcaaggattacctccctgcatgcttttctgcagaactgaatcagataataggtagtttccatgacttccaaattgaatctcc

SEQ ID NO: 6962 - DNA, 120 bp, Homo sapiens
gtccgttggaaagggtcagctgtttgcttttttgtagtaaacatttttaaaaacttgactagttttgcattccagaaaataaaattaatacctaaatactaacttctggaaattccttaa

SEQ ID NO: 6963 - DNA, 120 bp, Homo sapiens
tgccgaagttgattagaatccctggtgaagtatgccaaacgtacgcacactttattcactgggagtgttatttgagtagctaagttatacttaacaagctagctttcctaatacccatct

SEQ ID NO: 6964 - DNA, 120 bp, Homo sapiens
tcacgattaaaagagattttaattctttataacttgcaaacatctgatattctcataatatacagagaaaataaaaggaaggttactttacaggatttagctgattattactttcctgca

SEQ ID NO: 6965 - DNA, 120 bp, Homo sapiens
cctcgagactcacttgagaattttcaagtttttcaatctaaacatttttatatttaggattgtgctaactggatggaaaatatagatgtttaaaaataaatgcaaatgcctgcttgcttt

SEQ ID NO: 6966 - DNA, 120 bp, Homo sapiens
gggcgggaagagtgatcttatacctccaccaaatttatactaaaatcccagatgctttagttcctgttgtactatttaggtacctgatgcctaattcaaatttgtcagtttttcatcatc

SEQ ID NO: 6967 - DNA, 120 bp, Homo sapiens
agtcggaagcagaaaattgaagtgttctaccatatctgtctactgagaaaataaaaataaaactatgtcccacacagaaaggtttagccagccaggaagggaaaaaacaaaacaaaaaac

SEQ ID NO: 6968 - DNA, 120 bp, Homo sapiens
catcgacctgggaaaagtctgaatccaaatggaaaagtctgaatccaacttaggattccaaagaaattttaaacactacgacatatgctgtgcatattttctgtgatgtctaaagtttcc

SEQ ID NO: 6969 - DNA, 120 bp, Homo sapiens
tgacggggattagagtattctcttgtggaagaatacaagtgaaatctctgaaaaaataacaacatggacgaggcgttgcttttaaaatagtgatccaagcccacctaatgtacacaataa

SEQ ID NO: 6970 - DNA, 120 bp, Homo sapiens
cttcggttaaataatagaatttcattattaatataaataagaggaatttttatgatacttcatatgattgttagtgttttatctgcaattcatggtgtttcattcttccaatattatctt

SEQ ID NO: 6971 - DNA, 120 bp, Homo sapiens
agccgccagtctgtgtgacccctatcctgcaatcctgcttttagtatgattcagtagttaggatatgcagaaacctctgtgtcttctttttaccccaatgagtatggttgaaaagtagta

SEQ ID NO: 6972 - DNA, 120 bp, Homo sapiens
cagcgggattttgcccaaatttcttaatctggtagagcttcactttcctcctatgttgtaaactgagtggctttatctgggtagtcaccagctgggcgggggtggtggccagaggccacc

SEQ ID NO: 6973 - DNA, 120 bp, Homo sapiens
attcgagaaatatttatcaaatgggtgaatccagagagtgaagggatgctacggtccatctgtgcacactttaacatgctgacagatgctagcagccttggattcttaccacagagcagt

SEQ ID NO: 6974 - DNA, 120 bp, Homo sapiens
cctcggagggcgcctacagataatgagcctaccatcaggtcacaattttctaaacacagatgtgtaaagatataaggaatttcctgtttatcatcctgtctttgcctatacaaattcctt

SEQ ID NO: 6975 - DNA, 120 bp, Homo sapiens
aaccgggttataaagaatagcagatattctggcagaaaagaatactacggcttaataaatttgggaaatactgcatgccttgaatcaccagatacaatggcatattaatgactctcctat

SEQ ID NO: 6976 - DNA, 120 bp, Homo sapiens
aaacgaaactggtttcactctgtttcccccagtgtttcttcaaatagtttggctatgaactgctttcttcacagaacagctatcatcatcttacctttgtggaaggcagtttgagaattg

SEQ ID NO: 6977 - DNA, 120 bp, Homo sapiens
ttacggtaggcagaattctaaaaatgcccttgtttcccccaagattctcctcttctgttgactcaattgaacattaacacaaatgctgctgagagggaattttgcagatgcaaataaagc

SEQ ID NO: 6978 - DNA, 120 bp, Homo sapiens
aatcgactttaaaatgtggagagtatctgggtgaacctgacccaatcaggtgacctcttaattgaaaaggtgaggatttgatgttccttctgtggctttgaaggtggagggaaccccatg

SEQ ID NO: 6979 - DNA, 120 bp, Homo sapiens
ggccgagaccaaccccaacccccagctgacagtgacaaaatgtggatgtcagacctgaagccacaaggaacaggattctgtcaacaactgtaaaaaattggaagcagaatatttcccaaa

SEQ ID NO: 6980 - DNA, 120 bp, Homo sapiens
aatcgtgggatattaaatggatgttgttttaagctgctaaatttgtggtaattcatttcgcaacaacagaaaactactacatactgattcagagaaatcaaaacagaagtggtacactct

SEQ ID NO: 6981 - DNA, 120 bp, Homo sapiens
gggcgtgtttcctttactgtcttttgcattcaaataggaaaaggcatttggagagactgcaattgggagcttgcaaaggaggatgaaaaaaaaaaattcagggaagaacacatcaagcag

SEQ ID NO: 6982 - DNA, 120 bp, Homo sapiens
caccggaagtgggctgctgggatgctttatatggacaactaagggcgaagacacgcaggcctgtaatatcaagagaaacagtgtttgcaggctgacctcccagatgggtggtttgcagag

SEQ ID NO: 6983 - DNA, 120 bp, Homo sapiens
cttcgccacaactagcattcctacctgtacccatagcccttaaggggcccctcactcagtgtcatggagcagcacaagtcatctgggaccactccccactaacccccacggacagaagtg

SEQ ID NO: 6984 - DNA, 120 bp, Homo sapiens
ctacgttttaactccattctcacagcaagctcatgaggtagtcgggaaatcattagggttcttaacaaatgtttctgtccagaagtggatccaggttttgccgagcttaaagcttatcca

SEQ ID NO: 6985 - DNA, 120 bp, Homo sapiens
ccacggaaaagtgtgccaagatggaacctcctttgccctggaactctgagtctatgatatctagagcaacctctctcttaaccctgccctgtgtcaactggcatgagatatggagtgtaa

SEQ ID NO: 6986 - DNA, 120 bp, Homo sapiens
tttcgtcatggtaattcactaagattttggagatttttttttttttaaccacagtgaacctcgcttaacctaactgatataggcagggtcttattattgtttccattttccagatgagaa

SEQ ID NO: 6987 - DNA, 120 bp, Homo sapiens
aggcgtgtacacaacagcatttaaagcttgcccttgtgaattcatacccccaggaagaatgactaaatctgttttaagtgtctttgtcctctttctttactgattgtgtcaggtgacctt

SEQ ID NO: 6988 - DNA, 120 bp, Homo sapiens
ctccgacccctgaggcactggagcttcccagtgcaaagtcctggtgagtagcatgtgggttccagtgagacatgcagttgatgtctaagcctcaggaggatgtcagctgggcctcctgat

SEQ ID NO: 6989 - DNA, 120 bp, Homo sapiens
aaacgtgactgagaaatgcacattttgaaaaaccagaccatctggctttaaaatacatattgaaagtaagagtgccagtgaggttgtcaagtacacactgtgttcaggacttctgattta

SEQ ID NO: 6990 - DNA, 120 bp, Homo sapiens
taccgactcctgcttgtcctgattctgcatctctcctgctttcaatcatcattctccctctttagaagagcaacaggcagaaatgaacatgttttgcctgaattaaaataacaaaaccaa

SEQ ID NO: 6991 - DNA, 120 bp, Homo sapiens
aaccgaaaactagactcaaagagacttcgtacctgtgaattagagcctgggagttaaaagaggaggtaagtttggcttgtgtatccccaagagataaaactcaggctaatggaaatcact

SEQ ID NO: 6992 - DNA, 120 bp, Homo sapiens
tatcggcaaaagtgtctgatgaaataatggattgctttgggaagtagtaagctgcatgtccctggaaacactgaaatatgacctcgatgatcattcattaattcattatttagaaaatat

SEQ ID NO: 6993 - DNA, 120 bp, Homo sapiens
tctcgtggagtttccattttagtggggttgagaatgcagatgataaacaaggaaaccaaaatatttctaaatcatagattgtgataaacgctaaggacatagacaggctgctctggtagg

SEQ ID NO: 6994 - DNA, 120 bp, Homo sapiens
ctgcgtctaccccgtgtgtctccatggccctaagcccacgccatgcatttcctctccagctcaccctaaccggagtcctcttggatccagcaaaatcttatttcaacacccgtcaaccca

SEQ ID NO: 6995 - DNA, 120 bp, Homo sapiens
gtacgggaccactgtgtcagtcttgctacccccagaagctcatctccctttccccaagctccttgtctccttccacctgcagcaaggtgcctcccaggggggtcccactcacctcccacc

SEQ ID NO: 6996 - DNA, 120 bp, Homo sapiens
ttccggaggcaagcttcaggagaaaaggaaaagcagatgtcagcctgtgacacagaataatcgatttgctcagtgcttgtattttcctaccaattttgtatttttcaaaaaggacaatca

SEQ ID NO: 6997 - DNA, 120 bp, Homo sapiens
tctcggctaattaatgacaagctggtaaaagcatctcctcattgttccatttatttctccatttctcccagttaacagccctgtctctgaaatgaatcaatgtcgtttacacaatgctgt

SEQ ID NO: 6998 - DNA, 120 bp, Homo sapiens
aatcggggtgttaatcccttaatggcttttctcagtgcttaaaaaaaatgaaaggaaaaaaaaaaaggaaagaaaaaaagcccagctcctgctcactcttaatccgcctgtagacaatgg

SEQ ID NO: 6999 - DNA, 120 bp, Homo sapiens
aggcggccctgtgaggtgtttactcaaacaagcaggtccagttggggatttagccctttctgtttgttggctaaacaggaggccaactggggatacaccccttcctcaggtagggtctgc

SEQ ID NO: 7000 - DNA, 120 bp, Homo sapiens
ccccgcccaggcctttctgctggactctttgatgaggtctcccacatttgccctgatggtccaggaaagccttgatgccaggtgggggtacaggatgggagaagatgggatagggacttc

SEQ ID NO: 7001 - DNA, 120 bp, Homo sapiens
tctcgcatgagagcagtggtggtccagaggggtcttctgatgcactcagaaatttcagaacaactatactaaggggtttcattttaaggttaaaaagtaaatatctagaattaaagctca

SEQ ID NO: 7002 - DNA, 120 bp, Homo sapiens
cagcgtgggagatgaggatcaaaggcatccagaaatactgaggcagtaggggtgtggagggggccaagaactctgtctcagcctgctttgcaggaatctaggttttccagaatctcatgt

SEQ ID NO: 7003 - DNA, 120 bp, Homo sapiens
gctcggaggctttgaggtaaatcagaaggtccctgccctcaagcagctcacaatctagtgagagcacagaaaatttgcacaaacaacttgcaaagacccctggagaatgttgcaatagcc

SEQ ID NO: 7004 - DNA, 120 bp, Homo sapiens
gcacgatcaccccagtgcaggtggttgtgctggtgatggagatggtggtagatatggtggtgctcgtggtagtggtgaagatggagttggtggtgatggagatggtgatggtggtggagg

SEQ ID NO: 7005 - DNA, 120 bp, Homo sapiens
gaccgataaaatccctgctgcttgaaaaagtaagtcacaataaaataccatgttgaatataccccttcaaagcactaatggacatcttaagaggaaaaatctttgtgggaatggaggctc

SEQ ID NO: 7006 - DNA, 120 bp, Homo sapiens
atgcgtgtgtgtgtgcatgcacatgtctgtgagatgtatgtgtgaatctctgtgtgcctgagaagtgagaagaagaatgactctatctgtgcacttctatgtttttcaaacacattcagt

SEQ ID NO: 7007 - DNA, 120 bp, Homo sapiens
gtccgaggcatccaagcatggcctattgcctgtgtctttattctgaacagaacagggcagccttgggaaaatgctggctgctcagctagctcacttaaaaaaaatcacgtaagcactccc

SEQ ID NO: 7008 - DNA, 120 bp, Homo sapiens
caacgggacttgttaacacttaccttctactgttgctacatgaacatgcccaggctagcctgatggatgatgagagacatgtggaatagagcagagtcaccacattcatctcagctgaga

SEQ ID NO: 7009 - DNA, 120 bp, Homo sapiens
agacgtgtgagccagcccagccaagatcagccaagtccaacctgaataattgaacactgaggtcttgttgcagaataaaagtgtattattgtaacccacagtggctttatgatttttaat

SEQ ID NO: 7010 - DNA, 120 bp, Homo sapiens
tgacgcctcccttgctcagaatctgtcttttgtaagtgcgggggaagagatcaagaaattggtttcagatttttagctatgctggggagccaagagtttatcctagccaaatctgcccct

SEQ ID NO: 7011 - DNA, 120 bp, Homo sapiens
actcgtgaattgtggccacctgacagtgaggtatgggagccaccttagggtcccacagctcccaaagcccactgcatgcaaaggaacccaggtgtgtagtgcacacaggccagagcacct

SEQ ID NO: 7012 - DNA, 120 bp, Homo sapiens
gttcgttgtcatcctctttcttctctgcctccaccttttccttctcctccctcccttttcaagtctttttttctcagaaaaagagattactttccacccttcttattcatctaaatatct

SEQ ID NO: 7013 - DNA, 120 bp, Homo sapiens
ggtcgaatgtctgagcttgcctggaagttagcatccattgatgtgaataagagatatatgacttcttccagggcaaaacctgaagcgttatttctgtttcaatgcttattctgtggatgc

SEQ ID NO: 7014 - DNA, 120 bp, Homo sapiens
tcacggggtgcatttaggatcatgctacttatctcagggtaacattagtcatcctgatgactcacatgtgggtggagatagagcagatggctgggaggatgctctgcaatgcagagtttc

SEQ ID NO: 7015 - DNA, 120 bp, Homo sapiens
aatcgtagttttggactcgggatttaaaccagaacatctggttaccttccagatggctgcttggtgtggggacctgtaaagtggccgaagcactcaagcatgcacatggaaagacagagg

SEQ ID NO: 7016 - DNA, 120 bp, Homo sapiens
tgtcgccatttcaaacctaggacttgagttcttttcacaaagtagtttaatttcccctgggatgttttaggggcaacccgttctccagcttcttttactgtggattgggaaagaattcta

SEQ ID NO: 7017 - DNA, 120 bp, Homo sapiens
caacgttgcccatattctgcagttaagtcaggcctgtccccaaatattatttggggaagatgtgtgtgtgtatatgtgtgtgtgtgtatgcatgcatgtgtgtgtgagcatgcatgcatg

SEQ ID NO: 7018 - DNA, 120 bp, Homo sapiens
aagcgatgatgtaggcccgctttcagtagcaaaaatcaccataattagaggaaatgctacaagttcatttccgcaaaaaagagcaagtgagggagaaggagcttaaagactagatgttta

SEQ ID NO: 7019 - DNA, 120 bp, Homo sapiens
tgtcgctggctctcggagagtgagtaatagtaattccattgttcccctttatttatgccttggctgtaccaggcagatgaggtaggttggggctttgatatgttattattccgcactggc

SEQ ID NO: 7020 - DNA, 120 bp, Homo sapiens
tttcggaggcactgtttcacacctccttacaactccagatcaaagcgtttcaacattttattatgaaatcatggaaatcctcctctagtttgcatatgaattgtagccttttttaaaact

SEQ ID NO: 7021 - DNA, 120 bp, Homo sapiens
aaccgcaaaagggaacaaggtgttagatatttattccttgaaggctgtgctagccggataatcttgccgaatgcttttcgccagggtactgtccaagatccagcaaacacaaaagcttgc

SEQ ID NO: 7022 - DNA, 120 bp, Homo sapiens
tcacgcagaggccaacgatttctccttctcttgtcaggaaacaaaatgtggtgtgaaagcttccctgtgggagagaagaagaaagaaaagtttatgcaccttgcaatttcaagctaaaca

SEQ ID NO: 7023 - DNA, 120 bp, Homo sapiens
attcgcatataaactgagtatctccctttttagttgacctccttctctggggacaattaataatctcccttggagtgtggagggtgagagggaagttgcctgacaattttgatgtttcca

SEQ ID NO: 7024 - DNA, 120 bp, Homo sapiens
ccccggggtgttgcttcttttacaggggtttttgtttcttatgtggatctataaggagtacacagactgcaagaaatcaaagccattttagtgaaggaagctttatttgggatgggaaag

SEQ ID NO: 7025 - DNA, 120 bp, Homo sapiens
gggcgcctctcagagaccataaaggtgacctgtcttatgaaacgtggagggcgaggaggtgcttcatggaggacagagaggaagaaagagaagcaaaatcatgttccttttctgagggag

SEQ ID NO: 7026 - DNA, 120 bp, Homo sapiens
agtcgtcattttaaggtgaagacaggtgagctcaccccaggccatagcccagccagccccacatttgtcccagaatccagggtgagaaaagccagcgattggccattcctagcggctccc

SEQ ID NO: 7027 - DNA, 120 bp, Homo sapiens
atccggcaggtcaaactagcaagatatggcgggcgtttgacccctgagcccagataactctttcaaaccccgtgttccacgttgccactctgtcccggaaggctgccttggaggtctgcc

SEQ ID NO: 7028 - DNA, 120 bp, Homo sapiens
agacggccatttgtcccctagcaggcctagccagtcgcctgttgctgtcagcgggggactcgggcctggcagtttcatgtcttaaaagtagttttgtgcaaatgagctcctcccagcccc

SEQ ID NO: 7029 - DNA, 120 bp, Homo sapiens
ccacggcccacaggatttccaggcaccggagaaaagaagctggtttgatttaagcacacagagagtttgggagctgggggtgggggggcggtgtttatattttctgcctccattaggatg

SEQ ID NO: 7030 - DNA, 120 bp, Homo sapiens
ggccgagcagagagaaacttcatttatatgttaatagttgccagcacccgggctaaactgacagaactatttcatgggaaactgacaaattttgtcagccaggctgtgcgtccacatctc

SEQ ID NO: 7031 - DNA, 120 bp, Homo sapiens
ctccgggttctctctcaggttacacttggccaatgtgaggaaggctgggccttcaagcttgaacacattttcaaaagccgccgagtttaggcaaatgaagggaaccgttggggtgggggc

SEQ ID NO: 7032 - DNA, 120 bp, Homo sapiens
gggcggggggagggaggcaaaggacaaaaggggttaatttgattgaccgaatcttcatagtcttataacagtcatttacttagcaagtaattctgcaagaaaccagtggcgccgacagga

SEQ ID NO: 7033 - DNA, 120 bp, Homo sapiens
attcgcatcccccttggggccctaattaccacatgcagaataagtcactatctaaaaatacacacatacacacacacacacgcacacgcacgctccacacccacagagtcactgcagttc

SEQ ID NO: 7034 - DNA, 120 bp, Homo sapiens
tgccgttacctcatcttgactcaggattggtcttcatttttattattagttcattgtattgctaattaaatctggaacatggtgacttattcccccttctaggataggaactcggaccgc

SEQ ID NO: 7035 - DNA, 120 bp, Homo sapiens
ctccggttgctttattttcagtctggccaactggccctgtttctgtttgtaaacatacactcaggaagggctgcggttcccccatctgcctggataccaggagaatccttgagaagaggc

SEQ ID NO: 7036 - DNA, 120 bp, Homo sapiens
gggcggtgagtgagaggaacacacacagattccacacctccccagtgggaagctcttgcccactgttagaccaatcctgctatcatccattgctgaggcctcctggaaaagcaatggttc

SEQ ID NO: 7037 - DNA, 120 bp, Homo sapiens
atgcgatgtgatgaattaatttattttaagctttttaccttgaaatagttgtaggcttaccaacatggtacaatgaggtcctgtgtacccattactcagcttcccctaaagatgacatct

SEQ ID NO: 7038 - DNA, 120 bp, Homo sapiens
tgtcggcatagtacaattaactagactacaggccttacacaaatgtccctttttcttttgcatgcactcatttgtttttcttttgcttatctttgtgtatcattctatgactcatttatt

SEQ ID NO: 7039 - DNA, 120 bp, Homo sapiens
tcacgtgatgtgtgactacatcttggcctgtgataaacgatcgtgtctcttgacccacaggagtttgtaacattcttttagtgtataccgagtcattactattgcactgaaccaaagtaa

SEQ ID NO: 7040 - DNA, 120 bp, Homo sapiens
caacgtttgcagatgagagagcctaacagcacatttctcagaacgtattcccaccccccgtagttaagcaatgcatgattgtaattgtacaacagatactagtattgtgagttaacagcc

SEQ ID NO: 7041 - DNA, 120 bp, Homo sapiens
ccccgcatgtataaatacagagggacatggttaaaacaattctgttcagttagcacaatttgctgaactagactttaaaacaaaatctaattttaaacagtactccagttttcaggatat

SEQ ID NO: 7042 - DNA, 120 bp, Homo sapiens
agacgttaagaatatgcttgcgtgttaaggggaaaatgatttttttttctagtttattttgtaattcctaggttcactctaagctttaggtctaagcgaatgaaggacaaattcttaaaa

SEQ ID NO: 7043 - DNA, 120 bp, Homo sapiens
ctccgatatctcagaaagccattttgcctaggaagagtaagcccaaagtcctggggtattaacagccccttgaagcaggtctcaaacaatggctgaagttggtgtataaacaccccagct

SEQ ID NO: 7044 - DNA, 120 bp, Homo sapiens
ctgcgaaggtggctcattctgaggcctgagctttacaccattctttggagtttccccacaggattgagctccagttgctcacaatgttagctagttctataagaagctacctgctggcca

SEQ ID NO: 7045 - DNA, 120 bp, Homo sapiens
ttacgtttggctgcccttgtacaaaactttgggacatgatttgaccggcagggtgtgctgattaggataataatgtgttgcattttaatagacattctctcatggaagaaagacaaatag

SEQ ID NO: 7046 - DNA, 120 bp, Homo sapiens
tcacggtcccttgagagtactgggcctacattcagagctgggggaacttgggtgaaactgaatcagcttctcaaaagaatgggaagccttgaggctttgttgaccagtaagccaaaatcc

SEQ ID NO: 7047 - DNA, 120 bp, Homo sapiens
atgcgatctttatgacactgatgctttggtacttgctgggccggctgggtggtttttatgcatgtgatgggtacgcctgagaggatgcttcttttctaatcattggtcccctgagttcat

SEQ ID NO: 7048 - DNA, 120 bp, Homo sapiens
gtgcgagctggagactcacgttagcttggtctcagtcgcagggaggagaaaagccgctcatgaagctggtagctgtgtcgtttttgttttgtatagctgtgtttcgtcttcactcttaag

SEQ ID NO: 7049 - DNA, 120 bp, Homo sapiens
gcccggggacccccagaactggttgtcatcggagaggcctcagtgtttggggctgagatgggtgcatggaggccaagcacaagaccccaggaggcagttaccacttccatgaaaaacaag

SEQ ID NO: 7050 - DNA, 120 bp, Homo sapiens
tggcgatgtaaccattttggaagattggaggagggaaaatggggcagggtgcagtgtggcagggcatctcatggggactgtttggcaaaacagagggaagtagatgcgagcttagagggg

SEQ ID NO: 7051 - DNA, 120 bp, Homo sapiens
tgacggaatcagtgacagaaaactgtgatgatctgtttaccatcttcctttgcttttgagaaactgatggcgctacattacccccaaagcctttgttggtggtttggggttggacatctg

SEQ ID NO: 7052 - DNA, 120 bp, Homo sapiens
atccgtggttagagctgtaagacctaaaacctggacgttcttgaagaccatgtttcctgccatgccaagaaaaccaggctgcagacagtgaaaattaacagaataggcaaagagaaatag

SEQ ID NO: 7053 - DNA, 120 bp, Homo sapiens
ccacgagccagtattttcccttttgtagctaaagtggtgtgaatagcatttctgatacttccaactgaaacagccctgatggatataggcagaagtagaatgtggactgaaaagggattc

SEQ ID NO: 7054 - DNA, 120 bp, Homo sapiens
aaacgcattatccttggaagttaaataaatggataagacacttgctgtccatgaactcatagctacaaataattagaatttttattcacttctgtacactcagcacctggctccaggact

SEQ ID NO: 7055 - DNA, 120 bp, Homo sapiens
caacgtccagagattatgaagcagctgcctgcagaatgaatacaaaatggcagcgtggaggaggtatagagagggacttccttccagctggtccaggaacagaaaaggacaatttcccca

SEQ ID NO: 7056 - DNA, 120 bp, Homo sapiens
agacgggatgtggcagggacttgaaatgtgtttgtgtgcttggttgtataagtgtactctggtgtgtcctccatgactatgagaaagacatgcccagactagctcactgacaccacaagg

SEQ ID NO: 7057 - DNA, 120 bp, Homo sapiens
gtgcgttgtacagctactgctaactactggggaggtttataacaaaattgtgtcaagggccagagaagtccacccaaatgagactgaattgtctttcctattttgctccaaggtagctga

SEQ ID NO: 7058 - DNA, 120 bp, Homo sapiens
gttcgtggtgtgtgctttagatggattagttcattaaattaaagttcctctgtcaatcagtcccatgtccgtatactcttttcggaaaaattgtggggcccacagggggacctgtatgca

SEQ ID NO: 7059 - DNA, 120 bp, Homo sapiens
gtccgagaggggaagtgattttcccaagagtccgcagtgagagagcgggaacccccaccccgaacccaggtggtcccacacccagagcagtgctctttctcctgtgtcatgcccccttac

SEQ ID NO: 7060 - DNA, 120 bp, Homo sapiens
taacgagaacatttaggggtgcatcagcctgagaaagtgagaaaaaggaatccctgatagccatagccatatgattcttggtagagaaaattatcaatatgttcttccacatgtaagctt

SEQ ID NO: 7061 - DNA, 120 bp, Homo sapiens
atgcgtgatggtgctagagtccaccattcattgaacatgtggtttctgagtagctataagacattgcagggatttaagagatggcaacgtcgtcccatccaacatgtccatcaagactgg

SEQ ID NO: 7062 - DNA, 120 bp, Homo sapiens
caacggtgttcccattgtttttaatccagtccaaactgactatatgtgggtcaccttccacgtaaagcagtgaatggtgtttcttgtagcttctttcacattttgacatttcacaggatt

SEQ ID NO: 7063 - DNA, 120 bp, Homo sapiens
taacgggttgagtgtgtttcatttcaggagaaaagttaatttgacgatgagcaggttatttggaaagcaacagctttgcagatgggaagtcttgtgactaccctcctgtaatcttaacac

SEQ ID NO: 7064 - DNA, 120 bp, Homo sapiens
gtgcgctacgtgccagaaaagactaagcattttccacatgtcagctcatttaatctgcagaaaaatccaatgtagcagtgtaattatggcctcccatttacaatccaggaacctgaggta

SEQ ID NO: 7065 - DNA, 120 bp, Homo sapiens
aaacgcaaaccaatctatagtttccaaagggcctagggaggctgccaaaattaaagttggcagcaaacagtttactaaatctctaaagaagaaaaaaaaaggttatattacaagtcccat

SEQ ID NO: 7066 - DNA, 120 bp, Homo sapiens
taccgacaactggaagttatctgcaaaattttatacctaagtacttgcagatgtaatttatttttctgacagcaccgcctgtgtaatgaaagttgcttttaataaaacatgaatgcagtt

SEQ ID NO: 7067 - DNA, 120 bp, Homo sapiens
atacgtagctccttaaattcagcactgacccatagaatggcttcagaatttctaaagtgtttgtgaaagatgaactcccaaagctccaactgcccaggcagaagggaggtggtcctggcc

SEQ ID NO: 7068 - DNA, 120 bp, Homo sapiens
cctcggtgccacaaagactcagagcactcagggccctggccagtcactggctgtgctggtctcggcttgtcatagggtaaacttgctctgcacaatgtggctggcagagcgtgttcctgg

SEQ ID NO: 7069 - DNA, 120 bp, Homo sapiens
cctcgatctcctatttagtttgtcaaaaacattgactggtattcactcaaatcagaaacaagcatattgatatttgttgactcttattctcaagcattggtctatgtatttttgtggcat

SEQ ID NO: 7070 - DNA, 120 bp, Homo sapiens
gtgcgattaagttgaggactaaagaattaatggaagcaccatctactaatttgtgtttaaatttggccaaggtgtattgtagcatttgaagcagaaagcatggaactattacttgaattt

SEQ ID NO: 7071 - DNA, 120 bp, Homo sapiens
ccacgcacagttgctcctcaaatcctgccagttctattccttaaacaggtccccatctattccctcatctttcttctccagccactgctctgacatcctgtctcacatggatcattgtaa

SEQ ID NO: 7072 - DNA, 120 bp, Homo sapiens
ccacgtggaacaaggagcttttaaaaaagtcgattactgattgacatagttgaactttaagaactagagagagaggaattgaatttttgctggtcctcagtttccctagctgtgaaataa

SEQ ID NO: 7073 - DNA, 120 bp, Homo sapiens
cctcgggagtcagggacacagcctgtcatggagagttaagacgggtcttttgtaggtttggacaggtgaagtgctcagatccctctgcagggtcaaggctgggaacagcagtggccccgg

SEQ ID NO: 7074 - DNA, 120 bp, Homo sapiens
ccacgattctgtcgtcagggtaggggttggtttgttcctgtggaccatggctaacgtgaaatggggcaagctcagctctaggggttcctgggaggccttggcttggaaggtgcccactct

SEQ ID NO: 7075 - DNA, 120 bp, Homo sapiens
cctcggaggagcccgatgctctgtctgggaagcctgggggctgccagctgtggactgtggctgcctgtggttgccggtgtcttggcttagtgactgaaggggtgagagagtgatcgtcca

SEQ ID NO: 7076 - DNA, 120 bp, Homo sapiens
acacgccaagctggggccttctcccagacaccgtccccttctctctttgctgtcacctgggccaatcccacagcagctggggcaccccgttctccttcccagcagctgacagatgggcct

SEQ ID NO: 7077 - DNA, 120 bp, Homo sapiens
ctgcgcctgtctgcttgagagggcggtgagctagtcatcgtgagccggccagggctctcctatctcactgcattagagcttgagccaggctggtggaggtggctgcagccgagggagagc

SEQ ID NO: 7078 - DNA, 120 bp, Homo sapiens
gcacggctggcacctgtgaggaccatggatggggacacatggggcaacgggcccgtgagtgctgtcgaaccagcctgttccaggctctgggacgtagcacgaaacggcagtgcagaaccc

SEQ ID NO: 7079 - DNA, 120 bp, Homo sapiens
gaacgtctgggatgggaaggcagcatcccagcagggctgcacctggcatgtttggaggccacagggaggcagggtcagaaggagcaggtgagaggcaggcctcacaattctgtctccagc

SEQ ID NO: 7080 - DNA, 120 bp, Homo sapiens
aggcgtgagccaccatgtccagcctagatgcctttgtcgagttgactgtggaggtttcatttgagtctggagtatgttcatctgttttccgtgtgtgtggtgtgaagtccacactgccgc

SEQ ID NO: 7081 - DNA, 120 bp, Homo sapiens
gaccgtctgcagtgcagccccggccacattcagttcctgtggctgttccctgtggtgctcacctccaacgtcctaaacaacacgtttcccgttttcagtatcatctgcccgttctgagcc

SEQ ID NO: 7082 - DNA, 120 bp, Homo sapiens
gtacgtttcccgttttcagtatcatctgcccgttctgagccatttgctctctagccctaccatacagctgccatcctaagagtacgtttcccgttttcagtatcatctgcccgttctgag

SEQ ID NO: 7083 - DNA, 120 bp, Homo sapiens
tgccgtacagctgccatcctaggaattccgagtgctttctcctgtgtttgattccttattttctgggtcccacgttttcttctgttttgccaactcattttctgagtatgtcactgatag

SEQ ID NO: 7084 - DNA, 120 bp, Homo sapiens
ctccggccaccccaggtgcctttagtgtgggaggcgaggccatctgggggtgtattcgctgcttcagaactgccttgaccagagctcggggatgcccttctcggtgccctactcccgagt

SEQ ID NO: 7085 - DNA, 120 bp, Homo sapiens
gagcgtctggaggaggtgagctgccaacagcctggagctgtggccagtggggccagcccatgccctgcctgtggggcagctgaggtagccctgagctctgtgctgagcgggatactgtgc

SEQ ID NO: 7086 - DNA, 120 bp, Homo sapiens
gaacggggccagctcagggcccaggccgctggaagacactggaccgtgctccacccacaggagcagggcccagaggctcactcctagatggacccagggctctgaatctgggaattgtcc

SEQ ID NO: 7087 - DNA, 120 bp, Homo sapiens
tgccgacgtggaggcagaggctacacatggggctcccacaccccagcttgtcactgcgagacctccctgcccccacctcaccaggtgtgctctgggaagctcccaggaaggatattctca

SEQ ID NO: 7088 - DNA, 120 bp, Homo sapiens
gcccggctggaggtgcccacagccactgagtcaggtcctgtccacacaaaggtccttcctgcccctcgtgagaaacggccctcgtggcctgcgtgtgcgcctctacccagaagcaggtgg

SEQ ID NO: 7089 - DNA, 120 bp, Homo sapiens
tgtcgcgctccaagcacgggcgccaccgcgttgctgttgggagactcagagattggagggacagacggccggggcaagctgcatgcacaggtaggtgcgtgacccgcatccagggcaggt

SEQ ID NO: 7090 - DNA, 120 bp, Homo sapiens
agtcgctgacgctgcggctcagtgaagagcaggagaacaagaggagaatgggggacaggctgagtcacgagaggcaccagttccagagggacaaggaggccacccaggaggtgagcaccc

SEQ ID NO: 7091 - DNA, 120 bp, Homo sapiens
ccacgcccagtcctgcgcccagcctgccccacggggagcctttgtttcctgagacgctagctcttggctgtgctgctttgggcatagccgctggtgtgtgtcgtcctcccgagagacggc

SEQ ID NO: 7092 - DNA, 120 bp, Homo sapiens
tgacggtggcccctgggagcccaggccccccggctcactgcacggttgccctgcagctgatcgaggacctccgaaagcagctggagcacctgcagctcctcaagctggaggccgagcagc

SEQ ID NO: 7093 - DNA, 120 bp, Homo sapiens
cagcggcggggccgcagcagcagcatgggcctgcaggagtaccacagccgcgcccgggagagcgagctggagcaggaggtccgcaggctgaagcaggtgggcaggcctgggcctccctcc

SEQ ID NO: 7094 - DNA, 120 bp, Homo sapiens
ggccgtggagggtcagcatctgagctggaggcctttttccccgggcagtccttgtccctgctcagccaccagcaggggccacagcccagtagtgatgttgctgtgccttcaggacaaccg

SEQ ID NO: 7095 - DNA, 120 bp, Homo sapiens
gaacgaggagctgaacgggcagatcattaccctcagcatccagggcgccaagagcctcttctccacagccttctctgagtccctggctgcagagatcagctccgtctcccgagatgaggt

SEQ ID NO: 7096 - DNA, 120 bp, Homo sapiens
tcccgtgtctgcacggtgtggcctggggtccacagtctgcactgtctgtgcgctgtggtttatgcgctgtggcctgtggcccatgcgcctcagctctgaccacctgcttgccctacagct

SEQ ID NO: 7097 - DNA, 120 bp, Homo sapiens
aggcgattcagaagcaggaggagatcaacttccgcctgcaggactacatcgacaggatcatcgtggccatcatggagaccaacccgtccatcctggaggtcaagtagaggcaggaaggtc

SEQ ID NO: 7098 - DNA, 120 bp, Homo sapiens
attcgggactccaacaccctggagtggttccgtcagaccatgaggagccaagaccagcaggtcccacagccgacagtgcccagagcatgcagggaaccctcgtgcagctgagctggggcc

SEQ ID NO: 7099 - DNA, 120 bp, Homo sapiens
ggccgccaaagaccggggctgccaaaggggcagagggtggtggagaggagagggagaaagggaagtcccagggcccggggtccacagaggatgagggttgtggcagggccgtccatcagc

SEQ ID NO: 7100 - DNA, 120 bp, Homo sapiens
cagcgctgaccttccgggggcccagagcttcccagccctgagtcaagctggccatgaacgcgtacacttcagttcagcaggatgggctggagagcctctctgtgcagcggtgtggggtga

SEQ ID NO: 7101 - DNA, 120 bp, Homo sapiens
ccacgtgcagccctgttgggaagaaaggaagaaaacaggtccctccaggggtgctgctgcctaagccacccacataagtacgctggtgccgtgtcacccatgttgagccgctcctgatgg

SEQ ID NO: 7102 - DNA, 120 bp, Homo sapiens
tgacgggctcccagaccctcacctcggacatggtggtgggggaaggacgggtgggcaaggctggtgcgttccccagctctccctacgctgctcgggccattgcccagccagatgtggtca

SEQ ID NO: 7103 - DNA, 120 bp, Homo sapiens
ggccgccctgctgacagctgtagtggccgggtggcactcgggctggggtccgggggagtctaggtggccacctggctgtgtgcctgtgcctgcccaagctgggcacctttccctggcagt

SEQ ID NO: 7104 - DNA, 120 bp, Homo sapiens
gctcggccgccctccctggctggtgctgctctgcagccccgctcatggactcttgcccacggcctgctccttgtagcagggtcgggccgtgggaggtccggacaggatcttgaatggccc

SEQ ID NO: 7105 - DNA, 120 bp, Homo sapiens
ctgcggtcctggctggccggaggttgaccgcactggacaggtcaagggccttaaaccagggtagtgaggagcctgctgagcccctgctgctccccgggctgcctttggcgctcggacaga

SEQ ID NO: 7106 - DNA, 120 bp, Homo sapiens
gctcggacagcttctaaggcgaagggtctcccggggctgatttcccgggactctggctcctgcagagagggctggaggcggggctctgtgttccagggtcagagtcctcctggtggaagc

SEQ ID NO: 7107 - DNA, 120 bp, Homo sapiens
agacgcggcacagagagggcctgggagcttgctgcagcttcaggtgagtttgttcccaagccctgcggctcgtttatgggtttgcttgcgctgcagaactgtttgtggagcagcagggtt

SEQ ID NO: 7108 - DNA, 120 bp, Homo sapiens
ttcgctgtcacccgtggggagcaggacaggcctcatggagggtgcctcagccagcaggtcacccgcctgtggtccagacccaaggaccctgcttgggggtggcagcctggggctgccttg

SEQ ID NO: 7109 - DNA, 120 bp, Homo sapiens
ggccgtgtaggggacgtgggaatagtgtccgggcagagggcgcagcctgcaacaaggcgcggaggcaggaacaccacagcatggggagtcctcaggggacctggtttttctttcatagaa

SEQ ID NO: 7110 - DNA, 120 bp, Homo sapiens
ggccggagactgcactctccctcctccacccggcccagctgcgtccctgccagtggctcctcccacttcctccagttctagtttccaacaacagaggctgcagccacccagccccgaagc

SEQ ID NO: 7111 - DNA, 120 bp, Homo sapiens
cagcgagacagggcccaggtaagagacccctccccccggcctctctcggtggggcaggtggaggccctcggaataggctgcctcgcccctaaggggtcagaagtctccctgacctagggg

SEQ ID NO: 7112 - DNA, 120 bp, Homo sapiens
gctcgggtagaagggctgtgtgtgggtgaccgcccccccgccgtagaaaggggttccacaggcagatggatttgagaaatgttgcttatctgtctgaggcccatgagctcatctggggct

SEQ ID NO: 7113 - DNA, 120 bp, Homo sapiens
cagcgagctccacgggtcatgtgtctcccagactcaagtcccaggcacctagacactagggtggccgctgggcttggtggccaggtagaccctcaggaccaggaggacccggcctcatag

SEQ ID NO: 7114 - DNA, 120 bp, Homo sapiens
aagcgtgacccagctgcagagaagctgagacggtgattcggactgactggactctggcctccaggtgtctgcacctcacactggacccacctggagactccacgggctcccggcagctcc

SEQ ID NO: 7115 - DNA, 120 bp, Homo sapiens
ctccggctgcttgggtggatccgggtgcccgcaggggctgtgggagggccccggggcctgcactgctcccccgatggcctgctcttcctcacggccggggctgcaccctgtgtccacgtg

SEQ ID NO: 7116 - DNA, 120 bp, Homo sapiens
ggacgccccatctgcctcctgccctgccgcactccggggagcggggccttcgttccagaggacgtggctgtgacagcgtcagggcttgtggtggtcagcgatcccatccatggggctgtc

SEQ ID NO: 7117 - DNA, 120 bp, Homo sapiens
gcgggcatctgctccaactcagagggcaatgttattgtggcagacgagcagaggcgccaggtgaccctgtttccccgggctgggccacccatctgcctggtgtcagaggggcttgggcag

SEQ ID NO: 7118 - DNA, 120 bp, Homo sapiens
caccgcgggaggaaccctcaggatgggtggagcctccaggctatgggcattgcctgcctgatgccagcaccacctgggctgggccctgggcttggctcgagttctcctgctggtgaggct

SEQ ID NO: 7119 - DNA, 120 bp, Homo sapiens
ctccggatctcaggagcagccctgagtctgcttcccaggctgcccctgccaggcctgcagcctccccagccagggctgctctctgctgtccccattcagtgccctggcccctgcattcat

SEQ ID NO: 7120 - DNA, 120 bp, Homo sapiens
ccacgcctcctggggcttccaccaggtcaaggtcttgacacagctcagtccactgctctgtgatggccatgtcatgggtcgtgcctggcagcggtcaccccctctgctgggcactgggct

SEQ ID NO: 7121 - DNA, 120 bp, Homo sapiens
tcccgagggccagctaggtttggcgccagagctggccaatggaacaccgtcaccccagccactcgcagccaccaagaggtgccgcctgcacctgcaggctccgtctgtccttgctgcaca

SEQ ID NO: 7122 - DNA, 120 bp, Homo sapiens
tgccgacccagacagggcaatgggctggagcttttccaaggcctgcccaggaccatttatggaccctcagggcaccctcagaagcagacaccttccctttcagagttggggccgcccaca

SEQ ID NO: 7123 - DNA, 120 bp, Homo sapiens
caccgggcccagccagcacattctttatgtttttctgcaccatttgagtcagctgcccattttggctctggaattttcagcgtgcatttcctcagaacaaggcagccagtgcggtgctca

SEQ ID NO: 7124 - DNA, 120 bp, Homo sapiens
acccggggcttttgcagggatgccgtccaagccaccgaccccattccagcgtgtcccacgtgtcatgggccagtctccaaagcctctgggggcttagggatggagcccgttactcaggag

SEQ ID NO: 7125 - DNA, 120 bp, Homo sapiens
caacgtgactacttggtcgaggtcttgtctgcaggattttccgctgcaaagctacattcccttgtcattaatttgtccacagaaatgggaccatgttgacgctccatccctcactgccct

SEQ ID NO: 7126 - DNA, 120 bp, Homo sapiens
ccacggctgggtctggagagcgttttactttgtttttcttttttaaaaaagtttatttttgtgaagaccataagaacatttttaattgtttatttttgaggcactttttttttttttttt

SEQ ID NO: 7127 - DNA, 120 bp, Homo sapiens
gaacgagacaccttctcaaaaaataaaaataaaaacgtggactgataggtgagagaggtttgatggtttgggaacagcggtgctgccacggctgggtgaggggccatgcgatctgcttgg

SEQ ID NO: 7128 - DNA, 120 bp, Homo sapiens
agtcgtggacagcagacaccactggggatggtgggggacagggtggcaggggacagggtggcctgagcaagcccctccttgcctgggaactcagggcctcctgatatgcagatgggagcc

SEQ ID NO: 7129 - DNA, 120 bp, Homo sapiens
gcccgtggcaggatgatggcaggataaccgtcagcccaaaagaagcggccacgagacgccgccgagagccccaacttagaagccagagtcaccagcttcctggctagggtctgtccttga

SEQ ID NO: 7130 - DNA, 120 bp, Homo sapiens
tggcgtcatcagagataccgcatccacgaatgaagagccagacgctgccagaggggaacgctcagagcaccggaaggagcttttagaaattataaataagcagcacattttaaaaaagcc

SEQ ID NO: 7131 - DNA, 120 bp, Homo sapiens
tggcgcggctcaggatggagggcgggagctgtgtgcctggaggggggagctgaggcacgtcaggatgtgtctccagactgcaagggccacagagtacgaaaaagaccacccagagcaatg

SEQ ID NO: 7132 - DNA, 120 bp, Homo sapiens
ccacgggagggtggggatgtgaacggcaccagcctggtggctcgggtgccaggccagggccagatgtagcctcataccagcccagctgggagtccgcttgctgagacttggtctcctgta

SEQ ID NO: 7133 - DNA, 120 bp, Homo sapiens
aagcggcaccctgtgcggtagacagaaccagcagccgaggcgccggtggctttgctctggtggcaggacaggtgttctgacctccctgcctctgtcccctgaggtcagagcgcctgtcct

SEQ ID NO: 7134 - DNA, 120 bp, Homo sapiens
gagcggctctgaccaggacagtgccgtgtgtctcatggggttgtgttcaggtcggctgagaggcagcgcctggctggggctagatgaacaagagggttattgggaacagtaaacctgagg

SEQ ID NO: 7135 - DNA, 120 bp, Homo sapiens
ctgcgtgaggcctcagtgggcctgcacggagcagctgaccttcactggcgcccttgccttttcactgagccgggtattagcttagcttatttttgaaaagacatttcaacaggaggtaaa

SEQ ID NO: 7136 - DNA, 120 bp, Homo sapiens
agccggagcccactgcccctgcccctgcgccgtcccccagcgcgggctccaggcctctcctgggtcactgctctgtgcctccaggagctcctccctctaccccgccctgccccaccccgt

SEQ ID NO: 7137 - DNA, 120 bp, Homo sapiens
actcggctgactgtgcttagagaacaggccgctgtttgtgtctaaatggtatccatggggacgttgtttcatagtcttcttacacttttcctcttcactgttgctgagaatcctgttctg

SEQ ID NO: 7138 - DNA, 120 bp, Homo sapiens
tgacgcgcaccgtgggcaaccgggtgcggagcctgcaggatgggtgggacgcagacgtccagcgggaggagcatcccagagcagcctctgattcaagagcaaggtgctctagaggccccg

SEQ ID NO: 7139 - DNA, 120 bp, Homo sapiens
tgacgtggtccccaggcttttcccggcatccccgttccttttgcagcagccatggctcctggtggccctgggccatggcgccatctaggggtggcctaggggagtccccgggccatcagc

SEQ ID NO: 7140 - DNA, 120 bp, Homo sapiens
tggcgcctgcctgcttggccacattggcacgtcgaggtgaccgtcaaggagaagcagctatggcctttgtggcaatcgtggtgtccaactttggcctctcaggtcagcctcatgggggct

SEQ ID NO: 7141 - DNA, 120 bp, Homo sapiens
ctccgtccctgtgtccctgcttgacagaaccaccggaggagggaggtgcgggaagggtgttgacggcctgagcgcggtgcctccctgaagagtgttgtttcacttgtgagtgtgcacggg

SEQ ID NO: 7142 - DNA, 120 bp, Homo sapiens
tggcgggggcactggggccatgtgtgcagtgtgtgtgcaggtatggtgggtgcgcttggccaccctcgtttctgtctcctctgggcccccaagcacgcttttgtgctgactggatctgct

SEQ ID NO: 7143 - DNA, 120 bp, Homo sapiens
tggcgaatgtgaggccggaaggagggcaaggacgtgaagcccatgtaaacagacctgtcatggccactgttgttgctgcttcagtgggagggatttgagcgggtctgtcctgtctgtgat

SEQ ID NO: 7144 - DNA, 120 bp, Homo sapiens
ccccgccgacgggctccaccgcgggcatcccagccaccccccccgacgggctccaccgcaggcatcccagctcccacacagggaggtctgtgggacacgaggccagtacagtcgtgattt

SEQ ID NO: 7145 - DNA, 120 bp, Homo sapiens
ctccgtgttctttccaaagcatctggcacaactggttatgtctttgttttgtcttgttaactctggaaattctgagctgtcattttccacatgcgaggagcaggttacagacccaggtgc

SEQ ID NO: 7146 - DNA, 120 bp, Homo sapiens
ccccgggagaagcacctgagtctccaggcgggcctctgaccgccgtgactgagcatttgggccaccccgggagcccagccctgtcctgtgtctctcctgcctggtgagcagcggtgaggt

SEQ ID NO: 7147 - DNA, 120 bp, Homo sapiens
gtgcgggtgcatccagccgaggtgcagagcccaggtttgcagcagggtttctcccgccgcccctgatgagacacagactagcaaggactgtctgtcccagccgggatttgtcactctgcc

SEQ ID NO: 7148 - DNA, 120 bp, Homo sapiens
ctccgttagagagtggagaggcctggaaggtccccgcggcctgggtcttgcagatggcaccagcaaaggccaccggccactccccgctgccgtcacctgtcacacagcagcagtcccgcg

SEQ ID NO: 7149 - DNA, 120 bp, Homo sapiens
tcccgcgaggcccttcacgtgccgccgaaggccgggctccctagacttcatggtcgtgtttgcatattctgttgctgtgatctgagacggcccctctcagaagcgggtgccacaacccgc

SEQ ID NO: 7150 - DNA, 120 bp, Homo sapiens
tgacgggatgtgccatcctgtttagctgagaatttggggtcagcgggcttagtgccaggaaggctgtggccaagtgccatgtctgcttcaggacaaaggtgtggatttgtttccctgaga

SEQ ID NO: 7151 - DNA, 120 bp, Homo sapiens
gagcgtggtacgggaggcacacgtgctgctggcttgtcggcacacaggtgggcgggtggatgtgagtgggcgcggcttggcagtagctcccattttacatgtcagttgctcctgggcaga

SEQ ID NO: 7152 - DNA, 120 bp, Homo sapiens
tctcgctggctgtaccttgggagcttcagccacatgggtggaaggggcatgtgtttgtcaaaattcatcaaaatgttcaaacctcggatctttgtattttgtgctttgtaagttacagct

SEQ ID NO: 7153 - DNA, 120 bp, Homo sapiens
tatcgtgtaggtcgagttgatcaaaaaaaggtgtaaacgtgctcagatgcatattgccaccgttacccaagagctggcgcagtaccagttcacgagcaggcgggggtgctgggcctgagc

SEQ ID NO: 7154 - DNA, 120 bp, Homo sapiens
gggcgtgcgggtgggagcagcgccaagtgcctccacccccttgaccccgcccgcgaggcatgagcggcaccgtggacacgtctgtagacgctgaggaaactgactgtcagggcggctcct

SEQ ID NO: 7155 - DNA, 120 bp, Homo sapiens
tcccgtgctctgccccttgagacacgcagctgagggtgcttagggtgccgttcgttaggcggctgctggtcaccgagagtctccttttggtttctcactccgtggtcatttgggtccctg

SEQ ID NO: 7156 - DNA, 120 bp, Homo sapiens
ctgcggcctcactgtgacccacgccggagcaagcctccgggtcctcctgtgccatcgcccctgcccgtaacccctactcctcagacatggccatcccaggaagtgggggcccgctcaggg

SEQ ID NO: 7157 - DNA, 120 bp, Homo sapiens
gcacgcttttacatgcactgctgctgtcttcagcatctgcacggtacatttcactgccgcttactcagctgtcccctgaggctggacatttaatttgtgtctggcttgtcgttgttatca

SEQ ID NO: 7158 - DNA, 120 bp, Homo sapiens
cagcgccactgtgacacacatcctcagttacttctgagttgtgggcttgccatgcgggaggttgccatgcgggaggttgccactagggagagtgggctgtgttgtacgctttggtggccc

SEQ ID NO: 7159 - DNA, 120 bp, Homo sapiens
tatcgcccaccagactgacttggccatctctggcctcgaagggtctccctcagcgagaggtgtccttcctgagctgtcgctccatcctgagcaaggccttcgccctgggagcttagtaat

SEQ ID NO: 7160 - DNA, 120 bp, Homo sapiens
tatcgaaagatggttctaagaggctctaaaaaccctaattttcagatggacagtgccctcttctttcagcctcagcctcttgtgtgataggctcttccattacgtgaaggttttgtcagc

SEQ ID NO: 7161 - DNA, 120 bp, Homo sapiens
ggacgttggggagaggcgggcataggggaatgggcctgtgatgtcaccgtttcgcccgacagggctctgagtgtgagcagtgtgctcccctgtgctgctggagagccatgactgtcactg

SEQ ID NO: 7162 - DNA, 120 bp, Homo sapiens
tgccgagatatttagggcaggtggaaacagcccagagctgagctccaagtaattggtctctaagggatgtggcaaaaagtccccgtggcaaaacctgctctgcctggctgggggagcttc

SEQ ID NO: 7163 - DNA, 120 bp, Homo sapiens
tcccggggggattcactgatggactggccgagaggacacttagcttccacagctgcacgtcccccggctgccagaaccccgcatctgcctgcccaggaaacttccacaggctgatggctc

SEQ ID NO: 7164 - DNA, 120 bp, Homo sapiens
aagcggcatttctgacaccatggaaggcgcccacccccctgctgcagtcctgccaggtgagggcaggggtgaggggcagggctgcaccagctctgcctggagggcatggctcatctgccc

SEQ ID NO: 7165 - DNA, 120 bp, Homo sapiens
atccgccaagtaataagcatccttggccctgcccgggaactgaggcccctgcacctgagcgtccctgggcctgggctggccatgcgtgtcagtgacccctgatgacccccaagtctctgt

SEQ ID NO: 7166 - DNA, 120 bp, Homo sapiens
aaccgctggtcctttgacggcatcgaccgctggatcaaggagatcgatgaggtaggcctgggtccggggagccctcccggggaaggcaggctggatggaggtacctgggccccgggtagg

SEQ ID NO: 7167 - DNA, 120 bp, Homo sapiens
tcccgcctgccgcccctcctgtggccccggctctgcaccctgcactgtcccacggcctacgcctgggcatgctggtcactgtgcacacgacagtcgggcgtggagcccagcaagaccagg

SEQ ID NO: 7168 - DNA, 120 bp, Homo sapiens
ctacggggccacccggaagggctgcactgtagggcctgagccctggggtctgcccaccttgacctccgcccaccttgacctcccacggccctcaccccatcatagtccagacaatgaggg

SEQ ID NO: 7169 - DNA, 120 bp, Homo sapiens
gggcgggccctgctgcggctgaggggtgggtggcaccctgcgtttgtgcgtctgctgagttctgtgcccccagcatgcacccggagtcccccggatcttggttggaaaccggctgcacct

SEQ ID NO: 7170 - DNA, 120 bp, Homo sapiens
aagcggcaggtcccgacggagcaggcccgcgcgtacgcagagaagaactgcatgaccttctttgaggtcagccccctgtgcaacttcaacgtcatcgagtccttcacggagctatcccgc

SEQ ID NO: 7171 - DNA, 120 bp, Homo sapiens
catcgtgctcatgcggcacggcatggagaagatctggaggcccaaccgaggtgggtgggcgggcgccggccagccctgaggtccccgaacctgggctgccctgatcacatggaggctgag

SEQ ID NO: 7172 - DNA, 120 bp, Homo sapiens
caacgcgcagtaggggctcggccggcggcaggtcagtgacttggtaagagcagcctcgggggagaggcggcagcactggggggcacaggagcagctgatgaccccccctcagggtgccgc

SEQ ID NO: 7173 - DNA, 120 bp, Homo sapiens
cgccgtggccgctgcactctgccatgcctgtgggtccctggcattgctggtgtgggcagtgtgtgctcgctccttcctggttccggggctggtcctgctgtcaggggagcacaggagccg

SEQ ID NO: 7174 - DNA, 120 bp, Homo sapiens
tcccgtgaagcccccctcagggaggtggtactgttgattttgtggtgcctcccagcagggttcactgctgaacagagagagggtggctgacggtgtcactgtccttcttaagaggaagca

SEQ ID NO: 7175 - DNA, 120 bp, Homo sapiens
tcacgcagccctcacactgggagctgcatcatccaggccaggaactgggcagagtgccctctggaagccccgcagcagcaccgcccagcgtgcctggctttagggagcaaggcaggggat

SEQ ID NO: 7176 - DNA, 120 bp, Homo sapiens
gggcgtccaggtcctccaggagcccagcctgggaacacctctaggagtgtggagaccccgccaggcttctcttgggcacctcaggtctccctgcacagggcctcctcccccacagcccca

SEQ ID NO: 7177 - DNA, 120 bp, Homo sapiens
tgccgggccatcgtctcctgcacccccgtgcacctcatcgacaagcttccactgcccgtcaccatcaagagccacctcaagtccttctcgatggccaacggcatgaacgcggtcatgatg

SEQ ID NO: 7178 - DNA, 120 bp, Homo sapiens
gcacggccgttcctactccctggccagcggggccgggggcggcggcagcaagggcaacagcctcaagaggtccaagtccatccgtccaccccagagccccccccagaactgctcgcggag

SEQ ID NO: 7179 - DNA, 120 bp, Homo sapiens
tagcggggatgggcggggccgcctgtgcagatgccaggagggctcgagctggacactcctggctggacgccaggccagtgccgcctacgtggagactgtccacacagctgcctcagaagc

SEQ ID NO: 7180 - DNA, 120 bp, Homo sapiens
aagcgccgggctttcctcacacctgagccgggtgcgaggaggagcatgcacggaccaagcgcggcaggcgggaggagggggcgcggctgggctgctggtgcttccgggaatcttggtcgg

SEQ ID NO: 7181 - DNA, 120 bp, Homo sapiens
agccgggcctccccagctgcctgggcttgaccggcggggagcctggttggcctttcttatttatatagagaacacttcacttttttgtacatttttaaggggccttcagggaagcctggg

SEQ ID NO: 7182 - DNA, 120 bp, Homo sapiens
gcccggtggtggtgcactggtgacttcatggccacgccagctgcggggacgcacttgggactcctcgagaggggactcgcggccgcgatggcaaggcatcctgtgaattcatgcgctgcg

SEQ ID NO: 7183 - DNA, 120 bp, Homo sapiens
taacgtggcccacatggcttagggaaaaaggtagagaagggaaaggagcaaagcaaaaggaacagcacttcaaagagggagtttcatagttcgaagggaacttgtcttctgctttgtttt

SEQ ID NO: 7184 - DNA, 120 bp, Homo sapiens
aaacgaccccagctgccctgcagtcagcagtccaacaggcacaagtgcaacagtcagggctttccctgatttagacaacagccactcaccatgccctgttcagaggggcctggggctatg

SEQ ID NO: 7185 - DNA, 120 bp, Homo sapiens
aaacggggaggtcaaaggtcactcaagaagagttatgcttggtcgctgcaacagggctctggttccacaacattctatgggaatggggaatcactaaagcacctgtgctcaaaacacaac

SEQ ID NO: 7186 - DNA, 120 bp, Homo sapiens
agacgcctctcccttctccagcagctagccctcaacaccttcctacagactctgctccacaggtaagatggtgtttattagtggatggctcgggagcctctgtacaaacccctgcctcga

SEQ ID NO: 7187 - DNA, 120 bp, Homo sapiens
tggcggggctgcccagaggccgggggagcagacagggccggtgctccctctggaagcttgggtgaccggggccctggctcccacgggatggagggtgtggtcctgtggtcagagcccaag

SEQ ID NO: 7188 - DNA, 120 bp, Homo sapiens
ccacgaggacttcagtgagtagggcgtgagagggaggtagggtaagttggactgaccagggtctgagatctaactcaagtggcaacttgccctgcagcatttggagagtctcggcccgaa

SEQ ID NO: 7189 - DNA, 120 bp, Homo sapiens
agccgctcacggctcccagcctgacctccgacgaatcgtggagctgcctgcacctgccgacttcctcagtctgagcagtgagaccaagcccaagttgatgacacctgacgccttcatgac

SEQ ID NO: 7190 - DNA, 120 bp, Homo sapiens
tagcgcctccttgcagcaggtactctcccagggtagggggacctgggaatgcctcagccacaggccacaggtcttatttcctgcatctccccagatcactgcctctcccagcagcagcag

SEQ ID NO: 7191 - DNA, 120 bp, Homo sapiens
cagcggtagcagcagcagcagcagcagtagcagcagctcccttacagctgtgtctgccatgagcagcacctcagctgtggacccctccttgaccaggtgaggcaagggtcagagatggag

SEQ ID NO: 7192 - DNA, 120 bp, Homo sapiens
gcccgcgtggcctcctgcctggcctgctcccagccccagctgacaaactgactcccaaggggccgggccaggtgtgtgactgggtgtgtgtgtgaagtgtggggagcaggtgggcagcag

SEQ ID NO: 7193 - DNA, 120 bp, Homo sapiens
acccgacatggtccgtgtttccctgaggtcatttcaccctcctgtgtttcctggtgggtgtctcctcagcctccctgtccccacctcctcttcttggctgtggcctcgtttttgacctgt

SEQ ID NO: 7194 - DNA, 120 bp, Homo sapiens
cctcgttgtgtctctagcatccaacctagggctggatataaagggtgcacttgtgggagggtgtggaatgaaagatagaactcctaagtccagcatgggtagtgctacagtaagcaagag

SEQ ID NO: 7195 - DNA, 120 bp, Homo sapiens
ggccgtcagggagattaccatcctcctgctgtggcctacttttcccctggtttttgctctctaagtccctacttttccatggaatagagcggggcttggggaggggggaaagaatctgct

SEQ ID NO: 7196 - DNA, 120 bp, Homo sapiens
caccgtggacaaggagtaccttattgttctgagagagcctgggggatggatgtcctgagcccagtcccctctgcattaatatatctcttcacctaaggacctccctcctgctcttctcca

SEQ ID NO: 7197 - DNA, 120 bp, Homo sapiens
atgcgctgaatgtctgtaaaacaggagtgttgtgtagatttctgagtgccatcaaccctggaattcatattccttttaaccctcacaacaactctgtaaggtcaggattatgaccccccc

SEQ ID NO: 7198 - DNA, 120 bp, Homo sapiens
cttcggctaggataaggggcccaggcagaggagtgaggagggtgggcgccctgacagctgaggctatgcgtgttcctgccccctctcagggttgaagagcagcatgagactgaggcccag

SEQ ID NO: 7199 - DNA, 120 bp, Homo sapiens
agccgtgaagctcgggccatcttttcagctagaccctgtgttgagtctgggctcttgaacagcaaagccatactcccgaccagggaaataaatgagagccaggacttcagttttttgttt

SEQ ID NO: 7200 - DNA, 120 bp, Homo sapiens
tcacgcctggccaggagtttggttttaatgagactgagtttctggagagggagggctgaggaggatggctgatttccttagagttggcctggctgtgctgacttgttctctctttgtgtg

SEQ ID NO: 7201 - DNA, 120 bp, Homo sapiens
agacggggcactgccttcagagcaggtcctgccagcctcgctggagaggatgccctcgtgtccgtgatgggctgtgggacaagcaaggtccttcccgagccacccaaggatgtccagctg

SEQ ID NO: 7202 - DNA, 120 bp, Homo sapiens
tgacgtgtacaagcacttcatcacagaggtggacagtgttggccctgtcaaagccgggttcccagcagcaagtcagtatgcacacccctgccccggtcccccgactgctggccacacgga

SEQ ID NO: 7203 - DNA, 120 bp, Homo sapiens
ccacgcagggccagggtagctaagtacagggccaagtttgacccacgtgttacagctaagtatgacatcaaggccctaattggccgaggcagcttcagccgagtggtacgtgtagagcac

SEQ ID NO: 7204 - DNA, 120 bp, Homo sapiens
aggcgtgagccaccgcacccggtgaaactgaaattttaagatagatctgggaatgtctgaagcttgagaagctgattgtgttctgggagcactgcatggtgccaggctgttgagggtcca

SEQ ID NO: 7205 - DNA, 120 bp, Homo sapiens
atacgctgacagaggaaggactctgctacaagcctgtaggtttgcctgagttcctgattctggcagtcgttgacctggcagctaatctaattggagcttgcacagtcttgctaactggct

SEQ ID NO: 7206 - DNA, 120 bp, Homo sapiens
tgacgaatggggtggggagtgggttcctgcccgctcctactgtagccgaaagactgggtccttagattctgttgttcttctgctggaatcacagggcaggactctgcagctcacagtgaa

SEQ ID NO: 7207 - DNA, 120 bp, Homo sapiens
acccgctgtggagagctctgggttgggagggatccgtctgggacatttcctgggggaggggtccttatcatgagatcaggctctctcagctggagaacatccagcagaccctcaggcccc

SEQ ID NO: 7208 - DNA, 120 bp, Homo sapiens
catcgtgcctgacgtccctcggtagatgtgtggtgcccagagagctctgctcccttgtggcccagccagcttggagcagaaggcttagtcacattcatctcttcattcttcctccatccc

SEQ ID NO: 7209 - DNA, 120 bp, Homo sapiens
tcacgctgcagcaggcttctaaatctggaaccttccagggctactccaggacattgttaaaagcagacatcgctatgttggtggcacaggcctattgcaaagcgagcaaatagcatcctt

SEQ ID NO: 7210 - DNA, 120 bp, Homo sapiens
tctcgatcttgagttgtgtcctgtctctctcctctccttcccctccactctggctctgggcagggacaggtgggggcacacgatttcattttgttatccatttcaagtttcagaacacag

SEQ ID NO: 7211 - DNA, 120 bp, Homo sapiens
acccgccctctgccgagtcccagggtggtagattctgtctggtctggaagcccaggcaccaggatgatgggtttttgaccacaggaggggatgctggctctgctgccacacagtgtctaa

SEQ ID NO: 7212 - DNA, 120 bp, Homo sapiens
cttcgtcgtgggcagcatgacagggtgccgttcttgttgtcatgctgctttcctgagtaaactcaaagctctgtttccagaatttcctctgtgcccttttctctgctctcattcaggccc

SEQ ID NO: 7213 - DNA, 120 bp, Homo sapiens
ccacgtaagtacagaaaggaggcctttgaaggtgggaatagtgggtctgaaaatacatcttgaaatagagctgagggaagaactgagtcatggtagcaaagcccaggcttcttcctccct

SEQ ID NO: 7214 - DNA, 120 bp, Homo sapiens
ctccggtgggtgatgggggctacagtgaatgtctgtggtctggactggctgcccccagtagtggttccttgtgttcaggaggcaaccatggagctttcttttttaaaaaaaaatttatta

SEQ ID NO: 7215 - DNA, 120 bp, Homo sapiens
gaccgaatctaaattatcttccctctgcgtctgtgtctgtctcttgtttttccacctgggctccctgataagtgggcatccccttctgggcacctcaagaagggccttggcctctggcga

SEQ ID NO: 7216 - DNA, 120 bp, Homo sapiens
ttacgtaattatattgtatgactttcacctgttggcaattggggctctaagatttaagtaacagcctatgaattgctagtttaccaacagctgaaatttaatctttgggacagttctagt

SEQ ID NO: 7217 - DNA, 120 bp, Homo sapiens
acccgctagctgctcctccaggtgccctggcctgccggctgtttgtgatgcccattttgatgactccttcctcctctgtgtgttgtgtgactggggttatttctgggctgttgatgtgca

SEQ ID NO: 7218 - DNA, 120 bp, Homo sapiens
acccgtttagattttcacccagcgcagaactgctttggctttccagaacagttttctgcattttgctgtttgataatttatttttagtagcaacaagctactttgctatgtggtcattgg

SEQ ID NO: 7219 - DNA, 120 bp, Homo sapiens
tggcgaggccagagcaaggttcccagcctcgcacagaggcacaaggcttttctcctggtataaggtgtctcccctggcccatcaccctgttcccatcatttcttcaggccttgacaaccc

SEQ ID NO: 7220 - DNA, 120 bp, Homo sapiens
aggcggggtctgtcctgtctggttctgtttggcactgcagctacagaaactatgagatcacgtgtgtggtgttagaagctgctgagtctgtggtaatttattacacagttctagaaaact

SEQ ID NO: 7221 - DNA, 120 bp, Homo sapiens
ggtcggggtgctgctgaacataccaccatgcacagaacagcttctcacaataaagacttacttggcctaaaatgtcaatagtgctgaggttgagaaactctgtcttaagggtgcactctg

SEQ ID NO: 7222 - DNA, 120 bp, Homo sapiens
cctcgggatcctccctcttgtgtaggcttatacacatcaatggaaagtatttgctttgaagatttcaacatggaagtagttcattgctgacacagcggcatcaaagcccagcgcctgctc

SEQ ID NO: 7223 - DNA, 120 bp, Homo sapiens
gacgtgctcaaggatgacaagatgggcctcaagttcttgggcaccaagtacctggaggtgacgctgagtggcatggactgggcctgcccctgccccaacatgacggcgggcgacgggccg

SEQ ID NO: 7224 - DNA, 120 bp, Homo sapiens
tatcgtctaacatatggttcaaaataaaatttgtctccagaagtccttgatagcttttgtttcctcagtctacgatccagttaggtttagtgcattgagtctgactgttttgtaaattcc

SEQ ID NO: 7225 - DNA, 120 bp, Homo sapiens
ttccgagtacgttaaagcctttggaatgcgtgccatggactgttctgaaaaggttccccttaaaccactaggtttaaaccaatttttttccttcaaaggaaacattcagcacagctctac

SEQ ID NO: 7226 - DNA, 120 bp, Homo sapiens
ctacgtgttgaagagagagctttggtgctactctgatggggtggggactggagcctgcacttgtcccctcccctgagccactctggcagattgctgctcttggccacattgtgtcttcct

SEQ ID NO: 7227 - DNA, 120 bp, Homo sapiens
tcccgcaaacttttgggccactggcctctgagtttagagtttatttatctccttggccacaatagccagctgtagtctacattgtggacgtcctgaaaactggcagttctctggcatttg

SEQ ID NO: 7228 - DNA, 120 bp, Homo sapiens
gctcgttgacagctgactctgttctccgtttcagtggcgggaccactggatgcagtgtgtgtacttcctgccacaagaggagcctgtggtgcagggctcagcgctctatctggtagccca

SEQ ID NO: 7229 - DNA, 120 bp, Homo sapiens
ccacgatgactactgcgtatggtacagcctgcagaggaccaggtacgtcgagcctcgtgggggtggaggatgagcctctgagacttgtatgtaaattccccatttacagatcctctggag

SEQ ID NO: 7230 - DNA, 120 bp, Homo sapiens
attcgtgtgtacccaggagaggctgtcatgggttgctggaatctgtttagagcagatgcgtaggaaaagtctggaattagcgggtgctctaagccctcatgcctactggagaccagtgtc

SEQ ID NO: 7231 - DNA, 120 bp, Homo sapiens
aggcgctcacagcccacgtctgtttgttcatctcctggcctagccctgaaaagaatgagagagtccgccagatgcgccccgtgtgtgactgccaggctcacctgctctggaaccggcctc

SEQ ID NO: 7232 - DNA, 120 bp, Homo sapiens
cctcggtttggagagatcaatgaccaggacagaactgatcgatacgtccaggctctgaggaccgtaagtgtccagccccttggcttgttgtggggaaaagggagaaagaagtttgtccca

SEQ ID NO: 7233 - DNA, 120 bp, Homo sapiens
cagcgagcgcctcctgggtgggcactggagcagaaagcgggagagcctggggctggacttcctgagggcttgctctctgctctactgggagagcctctggctgggctcctgctggacacc

SEQ ID NO: 7234 - DNA, 120 bp, Homo sapiens
ccccgcaggtgctgaagccagacagcgtgtgcctgtgtgtcagcgatggcagcctgctctccgtgctggcccatcacctgggggtggagcaggtactgacatgcacccttgtcagcctcc

SEQ ID NO: 7235 - DNA, 120 bp, Homo sapiens
ttgcgtggtccgggtgcacaattctgtgatcaaggctctttgcaaaggccactgttgtgggcacagcatgctcgggtcaggggctggggggtttattgcctgtgcgtgcaggcaggcgtc

SEQ ID NO: 7236 - DNA, 120 bp, Homo sapiens
tgtcgcattttaatctttaatttcttctctgttaagtgaatatcttacaactaatagcgtggtgttccctctaggtgtttacagtcgagagttcagcagcttctcacaaactgttgagaa

SEQ ID NO: 7237 - DNA, 120 bp, Homo sapiens
gctcgcttgcacccctgtgttgtcttggttgctgcctggagagcagccagaggccttgggagctgtcactgaaatagaggcaggcatttgcactctgctttgtttttttgtgtctgaaga

SEQ ID NO: 7238 - DNA, 120 bp, Homo sapiens
ccccgtggtgagcacagctggcctgggagacgctgacacgtggagggggtattcgtcctccccacaaccttgcccttccctgtcagagtggccctgcgcgtgtggtggttcccacggtcc

SEQ ID NO: 7239 - DNA, 120 bp, Homo sapiens
caccgatgcaccattttcctgaaccctcctgggagctgaagcaggtcagggtcagcaagtgctgcttgcgtccagggacgggcagccctgtcctgctccggccctcaccccaccctcgcc

SEQ ID NO: 7240 - DNA, 120 bp, Homo sapiens
gcccgaggagtgacttctcctggaagcacctcccaactcggggcaggcagccaggcagggcgggcgccatcacctgagctcccagggttgctgtctggggcatcagaggggccttccggc

SEQ ID NO: 7241 - DNA, 120 bp, Homo sapiens
caccggccctgccccatgtgtggcccggctgcagggctcgggttggctcaggtgggggcttggctgcggctcttctggctggggtttttctgaggaacgtttatgtaactgcagcactag

SEQ ID NO: 7242 - DNA, 120 bp, Homo sapiens
tcccggcagggcaggaaggaagtggggaagaccacaggtttctggaaagccgcaggagctgcagctgttcccccgctgcctcttgtgtgactacttctgctgggcccccctctccttgac

SEQ ID NO: 7243 - DNA, 120 bp, Homo sapiens
gcccgggcagagccacgcagcggtgctatggatggagtaccacctgaccccggagtgcacgctcagcactggcctcctggagcctgcagaccccgaggtagtgcctgcgcaccgggccca

SEQ ID NO: 7244 - DNA, 120 bp, Homo sapiens
gtgcgtgcagaccctgagagcaggcgccgcctggggaggcctccctgcccccatgctctgggtgtttctgtcacaagttcttcgggccagatgatgacccctcagtggtcctgggccatc

SEQ ID NO: 7245 - DNA, 120 bp, Homo sapiens
ctgcgagctgcctgggctggaggctggctaggaaggaggctcaggtgccagggagccctcaccatcttcctgctcttcttcctacaggggggctgctgctggaacccccactgcaagcag

SEQ ID NO: 7246 - DNA, 120 bp, Homo sapiens
ggccgtctacttcttcagccctgccccagatcccagagcactgctgggtggcccacggactgtcagctatgcagtggagtttcaccccgacacaggcgacatcatcatggagttcaggca

SEQ ID NO: 7247 - DNA, 120 bp, Homo sapiens
gtgcgcgatggcgtggccgtgctggacgccggcagctacgtccgcgccgccagcgagaagcgcgtcaagaagatcttggagctgctggagaagcaggcctgcgagctgctcaaccgcttc

SEQ ID NO: 7248 - DNA, 120 bp, Homo sapiens
gggcgggggagggcccggcctctgagccacctgtagtagggtgggagtgaggggtgggagtaaggggcacatcctcccaccctggacctggcaacacatccccttcctccccagaaagtc

SEQ ID NO: 7249 - DNA, 120 bp, Homo sapiens
tgtcgagacaaaaatatatccagggaacagaacaccaacggaccatatgccaaaatgggaaggttggatctatctgtcaggagttgcttcaatttcagcatcccttgctgtgaatgaaga

SEQ ID NO: 7250 - DNA, 120 bp, Homo sapiens
ggacgaaccagaagtgggggccagggcccttgctgcctgccctggctcccatagggcttgaagacaagctctgccactcatggcaggcgccaggttgcgcaccagtgtttccctgggcag

SEQ ID NO: 7251 - DNA, 120 bp, Homo sapiens
aggcggagtgtggttgcttctgaaggcgaactgggaagtgaggaaacctgccctaggcaggcctctgaaccgcagccctccctgcaaagccaccactttttcatgtctcaccctaaaggg

SEQ ID NO: 7252 - DNA, 120 bp, Homo sapiens
aaccgtggaagcaccatgagcggcttttggatagagaacaaaagtcgacactctgagcatctcaggcgcagtagaagataatgtgtaatgaccaaattaccacagcctaaaaactcctcc

SEQ ID NO: 7253 - DNA, 120 bp, Homo sapiens
aatcgaatccaaattagcagaaataattatgattcactttaattagtgactatggaagcgaaaccatggctggtgggcagacagcctggcagggcagctgcacgacagccaggagggagg

SEQ ID NO: 7254 - DNA, 120 bp, Homo sapiens
aggcggtgtcacggcctggagacctgagggtcccgtctgcttgcctgatgcgcttggtctgggctggtctctctgcctcgttatgaaccgacagggcccctacctcctgttcttcctcac

SEQ ID NO: 7255 - DNA, 120 bp, Homo sapiens
ccacggctaccaccgccactcttgcgccagctcggaacccttcccaggccttactgctctgttccactcccaccctctctccactttacagttggggaaatggtggctcagagatctgag

SEQ ID NO: 7256 - DNA, 120 bp, Homo sapiens
gaacgggcccagatcacccagatgggtctgtctgagcccagagcctcggtgctcatccctgcattggtcttgaccctgtccccgagccagggccctgctgtttggctccaggaaagaccg

SEQ ID NO: 7257 - DNA, 120 bp, Homo sapiens
ccgcgtctgcctcccactccaacctcccactccagcccccatgacgatgaggactccccgctgcagcccccctgcctacatggctctaggaccagctggcacgtggtcctcaggctgggc

SEQ ID NO: 7258 - DNA, 120 bp, Homo sapiens
ggccgaggtctcctaccttgagaaacagagctcccttagaggccagggcatcgtcgttacacttgttggggtaacagtgataggccacgtccatgatggggtagcggctggcaaagagga

SEQ ID NO: 7259 - DNA, 120 bp, Homo sapiens
ggccgctgttgagacacttgaagctgcagcagccctggcagccgtagaccccgacgtcgtacaggatgtactcgaagtagccgtgcagctgctctttcaatttggtggctgctcgcttgt

SEQ ID NO: 7260 - DNA, 120 bp, Homo sapiens
tggcggggaagaaggcggagacctcatggtcgaaggcctcgtcggggtgccgcctcctgcgtgcagccgccttcttcaccaccgaggccttgtacaggagcttgctgttggcacctggct

SEQ ID NO: 7261 - DNA, 120 bp, Homo sapiens
ccccgctggcactggtgtctggcccagctcgccccttcaccagggactcccgggaggccgaggggctgcccaggctccctgaatccccgtcctgctgattatggttgggcgtctggcccc

SEQ ID NO: 7262 - DNA, 120 bp, Homo sapiens
ccccgccagctccgttcctggcctggcccccaggcacagggtcgtcagcttcaggtggccggccgccctcctcgccaccgatgcgcacgatgcaggcatcctccgggctgctgctgtcga

SEQ ID NO: 7263 - DNA, 120 bp, Homo sapiens
ccccgcaggggcctgcgccaccccgtcctggtgaataaacgcactccctgtgcctcagacctcctggcttgctgctgctggtcgggcgaccctcatccttccaggtgccccatgcccagc

SEQ ID NO: 7264 - DNA, 120 bp, Homo sapiens
tcccgtgtggcgcatccctgacactggcccatcagggctgggatctgctattggctgagatggggctatggagggtgtagaggagagagactctctcctcagctgccctgggcccccctt

SEQ ID NO: 7265 - DNA, 120 bp, Homo sapiens
tcccgctgcccttccaggcccctcctagtgactccaggtcccccgtccatagcccctcgccagcttcccagctgctgccccctgccctgctcctgtgtgcggcccctgcctctgcataga

SEQ ID NO: 7266 - DNA, 120 bp, Homo sapiens
agccgctggcgcaggagacacaaaagggattgccacccatggagaaaccatggagctagtttctaaggctctgtggttaattatcttgtctcagggaaatgaaaggagggtaaataagca

SEQ ID NO: 7267 - DNA, 120 bp, Homo sapiens
gcccgggcctgctgcgtggtggtgctcagccgcactggtgcctgtccccttcctgttgcctgcgctcctttggcctagttgggccattgagtgggcccaggccagagtctgtctccaggt

SEQ ID NO: 7268 - DNA, 120 bp, Homo sapiens
ccccgctctctgcttccatgtccctggactggcaagtttgccaagtagagtccactgtgggcccctctgaggggactggcaggacccccaaaggccttgagggctgagtttttgcagctc

SEQ ID NO: 7269 - DNA, 120 bp, Homo sapiens
ttgcgaatcctggtatgtagcttctgaggttgcccagaatgacatcccccaacaccatgctctccagacctgagttggagtcccgttgtctccaggtcgtcataggtcctggcaggcccc

SEQ ID NO: 7270 - DNA, 120 bp, Homo sapiens
ccccgacctagaaaaggagactttagacctgcccctggccctcggcttcaccggccactgcttagcttgggcttgggactcagggtgacctgagtgcaaccctgcactagtcaggacttt

SEQ ID NO: 7271 - DNA, 120 bp, Homo sapiens
acccgctcctggtaggacctcccgaccactcctcccctgagggtcagcccttgtgtgccctgtttgctctccccagcctggtgtcctgggcacggttctgggggtcactggagcccaccc

SEQ ID NO: 7272 - DNA, 120 bp, Homo sapiens
ttccgctggggccttgacacccactggggcttgggctttggtacaaggtcaccagggagtgcctgtccgcccctgcatccccaaccagctccatcctgcctcagcagctgtctcggcccc

SEQ ID NO: 7273 - DNA, 120 bp, Homo sapiens
gcccgagctccagcagcaaggatcaggacgtcccaagcccttgaccccacaggagaccccgtctcccacccaacctcacaaggtgctcctaggaggaggtggggcagacaccagcaagcc

SEQ ID NO: 7274 - DNA, 120 bp, Homo sapiens
tgtcgtccgcccttaaccccagacttagtaccagctaacacaggtggagcacattcctgatgctgaacattgtcaagcggtttatctcacttgatcatcagccttgtcccctctgaggca

SEQ ID NO: 7275 - DNA, 120 bp, Homo sapiens
gggcgggcagttgaacccccaatggtctgatgctacagcctatgcccttaaccagtctgccagtctttcccgtggggctgtttgatgattcattttattctatacccagaaacaatgagg

SEQ ID NO: 7276 - DNA, 120 bp, Homo sapiens
aggcgtaaaccagaataaaagggggctatcatgatatcactatttgccatttatctaaattagacaataaatcacgaagctacttgaaataatatacacgtcaaccttctgaacatttag

SEQ ID NO: 7277 - DNA, 120 bp, Homo sapiens
tgtcgccctcggtagcggcaggtccagctgaggattgctgctgagccccaaatagctccgtgtccattcatcagactcagcataattgggcatctgccactggcatctccagatgtttgc

SEQ ID NO: 7278 - DNA, 120 bp, Homo sapiens
agacgccgatgtggttcagagttttcactgagagcctcgtaaaagctctagctggttggggacgcttattgttcattttatttgagttctttatcatgtgcaaaatgttccaggcaccat

SEQ ID NO: 7279 - DNA, 120 bp, Homo sapiens
gggcggaagctcaccgtagcgtggaggagacacggccacagacatttacaaacatttgctgaacacagtcagctggcaggaatgaaaaatccgctctcagcagcacatcggggcatgggg

SEQ ID NO: 7280 - DNA, 120 bp, Homo sapiens
aatcggatggctgttctgggctgtttgctcattaatgtggtctttagattcctgctcagtaagattgggacgtggggccagaaatagggcagaagcttgatcaggagaatattgaaggga

SEQ ID NO: 7281 - DNA, 120 bp, Homo sapiens
actcgtcttgcttgaggtgaacatttgagggctgtgtccaggcacactgtaattactgcttaaccataagtgtagcttggcaagatgcatggatttatacataggttgctaagggcattt

SEQ ID NO: 7282 - DNA, 120 bp, Homo sapiens
aaacgtaggcgaggagaactgtctccatcaatttataacattcatgtctgagacagcatcatggaagggcagacaaccctgctcttaggcataaattaaagctatccttcctggaaaaga

SEQ ID NO: 7283 - DNA, 120 bp, Homo sapiens
agccggcagcaggacatgctttattctgagcaggctgggcccttcggccagcggctgagagcacagactgggtggggctgtcgtccacaaggtccggcctagggaggcagggttcgtgcc

SEQ ID NO: 7284 - DNA, 120 bp, Homo sapiens
ctccggcagggatgcaggtgtgcgggggtgaaggaggggcttagtttttccggaagatcaggcatttgttgttggctggcatgtccacctggagaaacactttgctggaggacggccctc

SEQ ID NO: 7285 - DNA, 120 bp, Homo sapiens
actcggagttggccccagcctaccaggtaccctgagatggggtgcatggaagccccagggctggattgctagtggtctaatctccattgtgggcaaagccaatgcctgtctgctttcttg

SEQ ID NO: 7286 - DNA, 120 bp, Homo sapiens
cagcgcttcaagcctcctgtattgattccaggagtataattgtttctgctctcagcaagaccttgagggcagaaaaaaggagcttggggtgcatgcagtgggcaccacaggcccttactc

SEQ ID NO: 7287 - DNA, 120 bp, Homo sapiens
ttgcgtgatcagttgcagcccagctggggaggggtggggttgtgtagcccagggcagacactggcctgtcctagttactcttgtcagcaatgagtatgagccctttgggctgtgcccttc

SEQ ID NO: 7288 - DNA, 120 bp, Homo sapiens
ctccgtgcttttcaaaatgaaggacttgaggacaaagggagggaccttttcctgggaccaagcagtgtgtcctttcttaggagagggtagtgaagtctgggtcagcagcaaggaaaggaa

SEQ ID NO: 7289 - DNA, 120 bp, Homo sapiens
agccgtccaggcccttctgtcgctgcacctgttaccccccaaatctgcagagtggggttggagtggggttaggagcacattcagttaaagtggggccaggcttccagcatgagtgtagag

SEQ ID NO: 7290 - DNA, 120 bp, Homo sapiens
ccccgctcccccacctaccatcctctccaggagcaggccactggcctttcccaggtcctccaggagggctgtgtcccgaagcccccattctgggttcctgcagagggtggggagatggag

SEQ ID NO: 7291 - DNA, 120 bp, Homo sapiens
tttcgcaggccaggcaggctaggcacaaagcaacctgaagctaccttcaccctgagggcatccactcggaccctaggtcattgctgtggcttgagagttaaagatgtgactaccctgctc

SEQ ID NO: 7292 - DNA, 120 bp, Homo sapiens
gcccgaagcgcaagctctggccgtgccacacacatgaagactgaaacacacatgggtacattcatctagtcacacacattcacacccacactctgacccacaccatcatccatgcaaacc

SEQ ID NO: 7293 - DNA, 120 bp, Homo sapiens
gggcgtgggagggtccagtcaggatgtccctctggaccctggcccactcacgccctgtgaactccaggccccttgctcaaggtggagcccccacctgtccctgtcctagtggtcacaggt

SEQ ID NO: 7294 - DNA, 120 bp, Homo sapiens
tctcggcccccgaaggggccctggtcaccatcgcgtgcacagaatcctgggtgcctggctggccttagggtagggggtatgggaaaagggaaagatgtgggggcatagtgccctgccctg

SEQ ID NO: 7295 - DNA, 120 bp, Homo sapiens
agccgcctcctccctcgggattttccatcccggctcgcgcgggcccgctagaagccggtgcgctttgtctcccgccccgctcctggcacgtttccgtggaagctgcccgcgccgcgcccg

SEQ ID NO: 7296 - DNA, 120 bp, Homo sapiens
ctccgcggccgcgccccccgcccagcccgcggcgcaggcctgccagtgcggcgaccgccgctttgtcctctcgaggatgcctgggccgagcgcgaaagccccatgccttggaacagccac

SEQ ID NO: 7297 - DNA, 120 bp, Homo sapiens
caccgcgcgtcctggaagcaggtccccgagcctcggtttggggtgcgccctgcatcggagcggagcagcccccaaagattcgcgggcacgaggttgggggtagcgtctacctggagctct

SEQ ID NO: 7298 - DNA, 120 bp, Homo sapiens
acccgccccgtcccgctctgtacatgcccatctgggattggcccccagctgcggtgccagaggctcggtccccggggcgtggtgggctagggcgggtcgtctcgacttagagccccaggc

SEQ ID NO: 7299 - DNA, 120 bp, Homo sapiens
cctcgtacatccccctacactacctctcacacccaggccacccaaccctcggcgcgggcccgagcgcgggggattccgagtgtcagtgctttcctccacccgcgactccgagaaggatgg

SEQ ID NO: 7300 - DNA, 120 bp, Homo sapiens
cagcgtttccctgccacattccaattccacccttcaccagtaacctaggagggtccaagtgggaggggtaagagtcctctgtctcttccacatcctcgatcctcctctttacaaaaccct

SEQ ID NO: 7301 - DNA, 120 bp, Homo sapiens
gggcgagtgtggaggaaggggcctgggcaagggtcttccctgcatcccaagcagcccttcctgaatacccctgggagggtctgggctaggggagcggtccgcgatctcatccatcaccac

SEQ ID NO: 7302 - DNA, 120 bp, Homo sapiens
cctcgagcagccgaagtgttgcggggaggggtccccctgcctcgagtcccttcatcccacaacacctcatcctcccgtcctgagtaatccgagcagccccgtcgccaggcacagcgggag

SEQ ID NO: 7303 - DNA, 120 bp, Homo sapiens
cctcgctctcccaggagagatggggggtgggggtgacccccagccctcgcccctcatacccaagagccttctccatgataaaacgaaaactaacccaagctgctccgacctccggcgccc

SEQ ID NO: 7304 - DNA, 120 bp, Homo sapiens
gcccggccacgggaggcccctagtcagtcggcggctgtccgggacccgcggtcctgagagcaacgagaacacgtcccgtcaactccccagcccctcacgcctcggttcgcccgctcccca

SEQ ID NO: 7305 - DNA, 120 bp, Homo sapiens
aagcgaattcagcagcactgacctctgacggcgggcgggagggcggtcagcgcccggcagcgcaccccgctcctcccggctcctcacagcccgggctcccggccgcagatctggcggcgg

SEQ ID NO: 7306 - DNA, 120 bp, Homo sapiens
ggccgcagcggcggcggctctcgcggctctcgggtccggagcctccctcagactcagcacctggagcggcgaacagctccgcgcttcattcctctgaccccgcctccctcgcgccgccgg

SEQ ID NO: 7307 - DNA, 120 bp, Homo sapiens
ccccgcctctagctctgacctgcatctgagcatcaggtcaaagtccacgttgctctggggggagatcttcccattgatggcatagggctgtgggcatggggacacagcccactggaccaa

SEQ ID NO: 7308 - DNA, 120 bp, Homo sapiens
ctgcgccgggcccccctgtccttgttcttgtacacggtacatgttaccatctaacatattatatttccacgtattttttcactttcctctaccctccacactctggatggcaagtccgaa

SEQ ID NO: 7309 - DNA, 120 bp, Homo sapiens
aggcgcagggatgtttgttcactgttgtatcttaagtggttggcacatcgccggctgtcagcaaatgtttttgaaatgaatgaatgagtgaatgaccgacaaggggagctaaggggaagg

SEQ ID NO: 7310 - DNA, 120 bp, Homo sapiens
cagcggtgcggtccgcgtcgcaggcagaagagctgactctccaatctccgctcctctctccgcccccgtccggaatgctgagtgcccgagaaggaggcggaaatgagcgcgctcaacagc

SEQ ID NO: 7311 - DNA, 120 bp, Homo sapiens
agccgggtgtttacttaattagggcctgcatcccgaggctcgtttgtgtttaaccgtccgcctaatggcttcgtctggctccgggcgggcgcgggggaacctgcgaggcgagcgtaggcc

SEQ ID NO: 7312 - DNA, 120 bp, Homo sapiens
tcccgccgggggcccactccattgcgccgcgcgggtgcgcgtagacctgacctcccctcgggcataaaaagcgccctgcgggagatccaggccgggagggcgcggagctcagcgagcagc

SEQ ID NO: 7313 - DNA, 120 bp, Homo sapiens
aaccgcgtggtccacccccagcctcagtcccagccccagctgctgggctcacccgccggctaagggaatgctcccgagataccagatgccagttgctcgttgtaccctcagccatgaaat

SEQ ID NO: 7314 - DNA, 120 bp, Homo sapiens
caacgcttctcattctcttaattcaggggatgtggggatgctagaaagagagacggctcgccagacatctgagagcaataataccaggcagcatttgggcacttgctgtgtgccagatat

SEQ ID NO: 7315 - DNA, 120 bp, Homo sapiens
tagcgttttaaaccttctaatttatttaatactcatctatgagagggtaaaatactaagatcataacagccccatttgacagatgcagaactgaggcccagggggtttattttacttccc

SEQ ID NO: 7316 - DNA, 120 bp, Homo sapiens
gagcgcaggagggcatccgggaggccaggaggggttcgctggggcctcaaccgcacccacatcggtcccacctgcgagggggcgggacctcgtggcgctggaccaatcagcacccacctg

SEQ ID NO: 7317 - DNA, 120 bp, Homo sapiens
ctgcgctcacctggcctcctcccgctggctcccgggggctgcggtgctcaaaggggcaagagctgagcggaacaccggcccgccgtcgcggcagctgcttcacccctctctctgcagcca

SEQ ID NO: 7318 - DNA, 120 bp, Homo sapiens
cctcgtggacctctcgcgtctctcctccttctccaggtactccacagcctcgccgtggccccgaccgggaccgctccctggggggcgggcggggtccgcatggggcagtggcgtcgggga

SEQ ID NO: 7319 - DNA, 120 bp, Homo sapiens
gagcgcggggctgcgctccctggggccaagggagtcccggaaggcccgtgaggaccctgcggtgtggggagtgcagggccgggcacgcctggacccagcctccttcactctctgccctcg

SEQ ID NO: 7320 - DNA, 120 bp, Homo sapiens
gggcgcaggtttgctggctgcagtgcgcggcctccgagccgtgccgggcggtcttcagggaggctgaagtgaccttggaggcgggaggcgcggagcaggagcccggccaggcgctgggga

SEQ ID NO: 7321 - DNA, 120 bp, Homo sapiens
aaccgcagggtaggggccgcacgtgaccattttggtgtggaccgcgcgaggggtgttcgggccggggcaagggactcctggcgccacctcagttcccggggaggcgcagaacgcgcctcg

SEQ ID NO: 7322 - DNA, 120 bp, Homo sapiens
tgacggagaaggctgggcagcagagcgcctatgacatccagccccttgtccggtagccactgcttaccttgaccccctcctccgagatgccggatggctgagcccctcacccagtctcga

SEQ ID NO: 7323 - DNA, 120 bp, Homo sapiens
cgacgtgggaagttctcccccgctggccccagcagaggaatgcgccggccacattcttcccccaacccgcgcgcaggtgtggggatgagccgtgccccgggcagcccccttcgcccctct

SEQ ID NO: 7324 - DNA, 120 bp, Homo sapiens
tctcgggccccctttgtgaaccgtgctttgtgtctccgacagacagaccgggtctgtttcttttctccgagcttccctaccccgccccccttcttcctcggcagctggaatgcactctta

SEQ ID NO: 7325 - DNA, 120 bp, Homo sapiens
tcccggagggcctgcgcccttgtagcctgcctggaaactgggccctggcacacctgggctggggccatcacgtacgggaaccaccccgcccccagcgtctggggcctgggatgctaggtc

SEQ ID NO: 7326 - DNA, 120 bp, Homo sapiens
gggcgatggacgggagatcaaagcacatttttgatccctcagttactcctaccccccccctccccgccccaagttcaaaaacctgagggggtgggcggtgcaacgttagtgaggagaacc

SEQ ID NO: 7327 - DNA, 120 bp, Homo sapiens
aggcggttggttgctggctagtggagggctttctccctctaggttaagaggacaatggatgggggctccagcaagggttgaaacctagttcttaaacgggtataaccctggatccttggg

SEQ ID NO: 7328 - DNA, 120 bp, Homo sapiens
ggtcgggtttcagaggatccttacactgaaatttttgggaacttgagtattcatttttagggggaaggaaccgtggcttacctggccttcaaaacactgagaacccttgctacctagcat

SEQ ID NO: 7329 - DNA, 120 bp, Homo sapiens
aggcgagttactgagtccaagctcctcagccttgaggccctaacttccctgtgcgtgcatgggaaatggccctggagctatgagagggcggctggctggactgctcactggccagtgaga

SEQ ID NO: 7330 - DNA, 120 bp, Homo sapiens
gttcggctgctctcctgggtgtcttgctgaaggctgactgccttctgagcggcctttgcacagcgtgccccatcttgttgtaacttcaggcaggggagaaacagcaacttgtgagctctc

SEQ ID NO: 7331 - DNA, 120 bp, Homo sapiens
ggacgccaggcccacacactgccttctccctgtagagtcgcttcatccaggcttcccaccgtacttcgaaacctgctcttctcttgtcttttatggtctttttccgcttccagaagtctc

SEQ ID NO: 7332 - DNA, 120 bp, Homo sapiens
tatcgtctcctccccaatgtataccattttatattgtttacatagggacggttggttggttgggatttcaaattaatacatgaaaatatgttcactgtaaagacacacttttttcaataa

SEQ ID NO: 7333 - DNA, 120 bp, Homo sapiens
ccccgttttacaggtgaggaaactgaggccagagaagttaagtaacttgcccaagatcacacagctaagtaagtagtagagctcagattcaaacctaagcagactgagcttacaccactg

SEQ ID NO: 7334 - DNA, 120 bp, Homo sapiens
acacgtgaaatttcttccccagttctactctcttaagggcaagcacacagttactgattttataagaatccttgtagaccctttttttttttttttgcacaaaaaacttatgtatgcata

SEQ ID NO: 7335 - DNA, 120 bp, Homo sapiens
gctcgctttttaacttagaatcacaggcatctttccagactgttaaatacacatctatcttgtttttaatagcgccgtagtcttttacatggtgaatgtaccatgatttatttagccagt

SEQ ID NO: 7336 - DNA, 120 bp, Homo sapiens
gatcgagtgaactgttcatcttaacatcatccagataaattgagctttcatgtttaaacaatacctttaatacagactctgctgtaaacttaaggttactataccatttaaaaatagttt

SEQ ID NO: 7337 - DNA, 120 bp, Homo sapiens
cagcggctgccctccctgcaggacagtgtgtgacgacttcctcttctatgctggaggggtccctgttgaaaggcaggggttggggaacagccagctctgctacttgctagcacatttttt

SEQ ID NO: 7338 - DNA, 120 bp, Homo sapiens
cttcgattatttcctctaaatcctcacaatcaccctctgaggggactttctcctttaaagaatggccacattgtatttgtttttttaaatgacatctggtcatcatcgaaatcaagcaaa

SEQ ID NO: 7339 - DNA, 120 bp, Homo sapiens
taacgtgaagttcaaagtcatctttgcaattagccaaaagaatctgaagtgaagctgaggaaattgctgatgttgaaataaacatttccttccatgaggatgactaattctgtaaagcgt

SEQ ID NO: 7340 - DNA, 120 bp, Homo sapiens
aaccggagttatcggtgccacctgctgaatcggaacctctaggcagggccctgctgtgggttgacaagccctccgtgggatgctcctgcacactcaggtttgctgccaagactctgaagg

SEQ ID NO: 7341 - DNA, 120 bp, Homo sapiens
agccgcctcctgcctctcccactgagctggggcctcagattcccctctgccagggctgtctttgctgacagggagtgtgggaggattgggtgtctctgctagcaaacacctgctgcccgt

SEQ ID NO: 7342 - DNA, 120 bp, Homo sapiens
ggacgggttgagatgggtcgagagtgtgtgcagagatgaggttggacaggtaaggagcggggggccaaggcgcccagtcctgggtgtcctccttcacgcctgggctggaggctgagttca

SEQ ID NO: 7343 - DNA, 120 bp, Homo sapiens
tcccggggctggcagaacctggttcctcctctgctgtatcctcagtccctgaggatgcggcagggcctgtcggggcctgtgggcagctgcagagctggcaggcgggagctaggagattcc

SEQ ID NO: 7344 - DNA, 120 bp, Homo sapiens
tctcggggaaccggggagcctgtctgagagcgccctgtagtctggtagggcggtggctaagacagcagcccctaaaggctgcagatgtgggagtgactcaccaccctggcctctcagtgg

SEQ ID NO: 7345 - DNA, 120 bp, Homo sapiens
aggcgatggtggaaaagcactcagtgtttagcgctgagcctgcagtgcagttggggatcgccaggtggtcactgccagccttgtcctcgcttggtattaggccctctccaagttagaggt

SEQ ID NO: 7346 - DNA, 120 bp, Homo sapiens
aagcggcaggggtgtggcgggccggggaggaatctgagaggggcggggcgggtcaggaatgcctgggctccgttccaacttctgtccccactgttgtccatccggtaaaccacggccagc

SEQ ID NO: 7347 - DNA, 120 bp, Homo sapiens
gggcgctgagacctctgtgtgtcctccaggaacctgacgacccaggcactccaggaagacgatgcccactaattacaagaatgatagactgggcgcagtgactcaagactgtaatctcag

SEQ ID NO: 7348 - DNA, 120 bp, Homo sapiens
caccgcgtctatgcgaggccgggtgggcgggccgtcagctccgccctggggaggggtccgcgctgctgattggctgtggccggcaggtgaaccctcagccaatcagcggtacggggggcg

SEQ ID NO: 7349 - DNA, 120 bp, Homo sapiens
ctccggggctcacctggctgcagccacgcaccccctctcagtggcgtcggaactgcaaagcacctgtgagcttgcggaagtcagttcagactccagcccgctccagcccggcccgacccg

SEQ ID NO: 7350 - DNA, 120 bp, Homo sapiens
gaccgcacccggcgcctgccctcgctcggcgtccccggccagccatgggcccttggagccgcagcctctcggcgctgctgctgctgctgcaggtaccccggatcccctgacttgcgaggg

SEQ ID NO: 7351 - DNA, 120 bp, Homo sapiens
ggacgcattcgggccgcaagctccgcgccccagccctgcgccccttcctctcccgtcgtcaccgcttcccttcttccaagaaagttcgggtcctgaggagcggagcggcctggaagcctc

SEQ ID NO: 7352 - DNA, 120 bp, Homo sapiens
cctcgcgcgctccggaccccccagtgatgggagtggggggtgggtggtgaggggcgagcgcggctttcctgccccctccagcgcagaccgaggcgggggcgtctggccgcggagtccgcg

SEQ ID NO: 7353 - DNA, 120 bp, Homo sapiens
gctcgcgcgggcggtgggggcgtgaagcggggtgtagggggtggggtgtggagaaggggtgccctggtgcaagtcgagggggagccaggagtcgtggggacgatcttcgagggaaggaga

SEQ ID NO: 7354 - DNA, 120 bp, Homo sapiens
atccgtagaaataaaggcacctgccatgccaagaaaggtcgtaaataggagtgagggtcccggggataagaaagtgaggtcggaggaggtgggagcgcccctcgctctgaggagtggtgc

SEQ ID NO: 7355 - DNA, 120 bp, Homo sapiens
tcccggtctaaggaaagtggggtactggagaataaagacatctccaataaaatgagaaaggagactgaaagggaacggtgggctaggtcttgagggggtgactcggcggccccctcccgg

SEQ ID NO: 7356 - DNA, 120 bp, Homo sapiens
gctcggcggccgtaggtttcggggtgggggagggtgacgtcgctgcccgcccgtcccggggctgcgggctggggtcctcccccaatcccgacgccgggagcgagggaggggcggcgctgt

SEQ ID NO: 7357 - DNA, 120 bp, Homo sapiens
tttcggtgagcaggagggaaccctccgagtcacccggttccatctacctttcccccaccccaggtctcctcttggctctgccaggagccggagccctgccaccctggctttgacgccgag

SEQ ID NO: 7358 - DNA, 120 bp, Homo sapiens
acacgttcacggtgccccggcgccacctggagagaggccgcgtcctgggcagaggtgagggcgcgctgccggtgtccctgggcggagtagggaggggttggaaaggggccgagaaattgc

SEQ ID NO: 7359 - DNA, 120 bp, Homo sapiens
aaacgacaccccttggaatttacgcagatttggggatccaaacgtttacgactgaacactgtggtggagggggtaaccctgcctggttgttgactatgttataaagaagaggaggttgag

SEQ ID NO: 7360 - DNA, 120 bp, Homo sapiens
cttcgtatttctcttattgccctcagcactgtagagacagtctctcatttcagactgcaaaaacctggtgggtgggaaggcctggcaggagtattcccgttttacagttgagcaaaccga

SEQ ID NO: 7361 - DNA, 120 bp, Homo sapiens
acacgttcaatctgaggaactggcttgtgattttaaaaggccgctaggacttgggatgtggcctgactctctttggacagtgcacggaagtgaagggatggatgtaacattggcaccagg

SEQ ID NO: 7362 - DNA, 120 bp, Homo sapiens
aggcgcggaaaaaagaaaagctggcaggctttcccagtgattgttttcttcctttgcttgctctgcaatctggccttggaaacacagggcctatatttcagtgttgaggtttggctgctt

SEQ ID NO: 7363 - DNA, 120 bp, Homo sapiens
ttccgcacagtgtgtgagtgccttctgtgtgctctgtgtcagttaccagccttgtttccaggagtttggagctgacccaggggtgatagaaaacactgggatgccaagtcgtcagacaat

SEQ ID NO: 7364 - DNA, 120 bp, Homo sapiens
atacggggagactctcagcctctgttgttggctgagagggggatgccccaagcctagagaggtgggggcgggacctcctgtgcagagactgggagacaggaatatgacagatggtatatt

SEQ ID NO: 7365 - DNA, 120 bp, Homo sapiens
ttccggtcctcgagtcacacaggagggtaggggctgtgagaaaactccctcgttggttcttcctacagggcctttgaggcagacagggctcaacagagcctggcaggactgcagaaggac

SEQ ID NO: 7366 - DNA, 120 bp, Homo sapiens
acccggacagcaggtcctctgccctcccgctgcctggggcagcccttggagaggcctgagtggtctaggctgatacatcaggcttggggcagccccgctgggctatcccataccctctcc

SEQ ID NO: 7367 - DNA, 120 bp, Homo sapiens
attcgtttgttcagtaatgatggaggggctgttatgcgccaagcactgttgtgaatggcggacacagagacccagacacatatgaatgtcccccatcatggaatttgtattctcaggtat

SEQ ID NO: 7368 - DNA, 120 bp, Homo sapiens
aatcggaatggagcattgctgggaagtactagggtgatctgagaaggcctcactgaagggggacatttgagcaaagacccaagagaggtgaaggatcaggccatgtgactaggtagggaa

SEQ ID NO: 7369 - DNA, 120 bp, Homo sapiens
agacggaggggagggcgttctagatggagggaacagcaaagacacacccctgacactgagcagaagggcaaggtcagtgatcaaggggcaggggctggcagaagggcagagggggtggca

SEQ ID NO: 7370 - DNA, 120 bp, Homo sapiens
caccggctgcctcctcctgccagttctgcctcccctctccattctgggcagtggagcctgatggttagtagcatgggcactggcctgcctgctcaggttctgagctgagcacagaggtct

SEQ ID NO: 7371 - DNA, 120 bp, Homo sapiens
tggcgctgctggctctggcatattctgacccctccactggggacacctcccagtgttccttgcctggctcatttctctctcagggccatcttcgttgttgctacctctaggaagccttct

SEQ ID NO: 7372 - DNA, 120 bp, Homo sapiens
tgtcgggatacgtcctactccttccctttgccagttgggatcccctgggttcctttatgctcccccaccaggctgggtacttgggaagtattcgcagcccccagcattaagcctggcatg

SEQ ID NO: 7373 - DNA, 120 bp, Homo sapiens
aagcgttcaattcccctgctttttacattgaggagaaattatggtgacagctattcctgttttgcgtgcttagtaccagccaggcactgagcccaaaactccaactcactcttggctgtt

SEQ ID NO: 7374 - DNA, 120 bp, Homo sapiens
agccggcttggcagaggcaactgctgaggcagttgaggaaaggtgaggacctcccagagtgagaggggcaagggaactggaagtcaactgtgggacctggaagtaggggagggaagaata

SEQ ID NO: 7375 - DNA, 120 bp, Homo sapiens
ctgcggaggggtctccttccctcggccctcctcccccacttctgggaaagtggttaccgttgtcagctccaggatttgaaatgctgattagttcattagcagttgtttataggcctttgc

SEQ ID NO: 7376 - DNA, 120 bp, Homo sapiens
gggcgagagcaggtttccaaacctgggccagagctggttggggggatggcggacacatggagagcttaaaagtggagactttgaggggctttccctcccagaggttttgagtcaagagat

SEQ ID NO: 7377 - DNA, 120 bp, Homo sapiens
acccgaagttgtagacaaaggggtgtgtgtgtgatcagttcacagatgtggatcatgtctacatctttcatcagatttctctgaggagtcatcccagatgacatttagggctaactctga

SEQ ID NO: 7378 - DNA, 120 bp, Homo sapiens
ccacgtggtcctgccctatgtgtagagccttggtttgcagccttcccagaaacagaaatgcttctgggaaaccacagctccctacctgctgaaggaaatggacacctgagataagctgaa

SEQ ID NO: 7379 - DNA, 120 bp, Homo sapiens
ggccggttttccagatgagcctaagctaatggcttaaaagggtgtttaaaagagaaagcagtagcctgactggtctgaactcctgccctgtcagcagaaacggtgcagtcacaatgagaa

SEQ ID NO: 7380 - DNA, 120 bp, Homo sapiens
taacgctggtatgaacggcaagcctctgcctcctgatttagttaataagcagttttcctatggaattgattgagggggagagaggtttttctcttcctggctcccttggtgtgtgccctc

SEQ ID NO: 7381 - DNA, 120 bp, Homo sapiens
caccgcctgcctcatcagcacttttagccttccacctgcagtgcgggcttgactgagatgccccagtggcttgtcctgggaaaactgctcccatctgtaagctgccaccctcctttggtg

SEQ ID NO: 7382 - DNA, 120 bp, Homo sapiens
gtccggcaggcctgagttcaattcccagctctgctgtgtgctgttatagctacgtggccttgggcaaatcccttaccactgtgagtattgctttattcacctgtgaaatgggagtaacac

SEQ ID NO: 7383 - DNA, 120 bp, Homo sapiens
acacggtacctaccttctaggctgttgtgaagattaactgcaattctgcatggtgcttctgatagggtcagtaactgaggggttggccgggcacgatggctcacacctgtaatcccagca

SEQ ID NO: 7384 - DNA, 120 bp, Homo sapiens
gcccggctctctacaatgaggctccagctacgtctgactttgtcactgactacccttgtgtcactcgctctactcagccaccaccctggattggcttccaaccaagttgtgtttgctttt

SEQ ID NO: 7385 - DNA, 120 bp, Homo sapiens
ctccgtatatctgccctgatgcaatgtgtgagtccctctgtgagatgaagtcctaaaaatgggctttgctgaaagaaaggatttatgcatgtaaaatctataaacatgatcagaatgttc

SEQ ID NO: 7386 - DNA, 120 bp, Homo sapiens
ttccgcctctgtgcattacagatgataaaacgaacccagaaaaaatgcaggggtcttgcctgacattctccagagagaatctggtcatctgactctggtcaactgacatccagcattttt

SEQ ID NO: 7387 - DNA, 120 bp, Homo sapiens
atccgccggcagcacccccttccctctcccatcatgtgtgggtcatcctcctttccaccgcccacatggacccctccctctggtctcctgcatcctgcatggtgttggttatgtgaacaa

SEQ ID NO: 7388 - DNA, 120 bp, Homo sapiens
aggcgggagcaggcccctcctaccctcctgttcggtcattttagcagatgactttcaccctcatgccttttgcactgtgattgcaagaagggattatttttaactttatgaataggttat

SEQ ID NO: 7389 - DNA, 120 bp, Homo sapiens
gggcgatggcttacacctttagccttgtttctcccacttcagaaagtaaagggtaaagggtcctgggctaatttttccttaatcttcaatgtcactgttttctctctccacccccgtctg

SEQ ID NO: 7390 - DNA, 120 bp, Homo sapiens
cagcgttcgttgttgacatctgttttcagggtgtagctcagtgaagacagagacgatacataatttgttctgggcacatatgtttgggggacgttagaaggaacttgataagcttcatgc

SEQ ID NO: 7391 - DNA, 120 bp, Homo sapiens
ggtcgcctgtcaacaggggtgcaggagccgcagctgccaccctgagagcacattgcatggatgttgtgggcacgttaagagtcatgcttgtgcaacgtgatactccaacctgcttatctt

SEQ ID NO: 7392 - DNA, 120 bp, Homo sapiens
tgacgttggcagtttagaggaactttgacttatttcagcttatgcaaagtggtaacatacagcgagacctttttgaaactggagtatagtgtggctgttggaatatccttaggtttctct

SEQ ID NO: 7393 - DNA, 120 bp, Homo sapiens
tgccgttattctcattcaagttactctccaactgtcctattcttttgtgagaactaacttctcagatccattcagctagcaggcttgtgaatggctcatcagtactaacagacaggctgc

SEQ ID NO: 7394 - DNA, 120 bp, Homo sapiens
tggcggctaagtagcatcagactacagcttccgtcacttcatagctatggaacttggttaagttccttctctgtttccccatttataggaaagggatgctggccaggcgcagtggctcat

SEQ ID NO: 7395 - DNA, 120 bp, Homo sapiens
tagcgaacagtggcctactaactttcagaaagaccatgtcccatctaagaaatagcatgatgaaaaactgccaagtggttgggtttggaatgttggaaagacttgaaagtactgtcagga

SEQ ID NO: 7396 - DNA, 120 bp, Homo sapiens
tggcgaatttaaagccccctggagaggcaagcaaaccattagttttctgtagacacttgattatgcaccaaggattggcactgttgtgaaactaagaggggtggaagggtaattattctc

SEQ ID NO: 7397 - DNA, 120 bp, Homo sapiens
tatcggggatgggtaaattgatccagctgctcactaggtaacgtggaggataacaaaagagtgtttaattttagagaagcatttgggaacatttccagctctttttttctctctctcttt

SEQ ID NO: 7398 - DNA, 120 bp, Homo sapiens
tcacgtaacatacagtccactcatttcaagtgtacagctcagtgttttttagtatgttcatagggttttgcaaccattgtcagtctaattttagaatatttttgttccccttaaaagaaa

SEQ ID NO: 7399 - DNA, 120 bp, Homo sapiens
agtcggagcggaaaggggtcaaagaaatctgtaactggttgtgattaattagttgtaaataccactgcactggagcatgatgtttttaaggttcatttgtattgcagcatgaagcagtac

SEQ ID NO: 7400 - DNA, 120 bp, Homo sapiens
gcccggaagggggaaggtagatacaagatgaaattgttttcacagagtttcaaattgagcaggattacaagtcttaacttgtcagggcctgaatctctatctcattctcagatttctacc

SEQ ID NO: 7401 - DNA, 120 bp, Homo sapiens
ctgcgaagtttatcatctccatttatgtcctggaaaagggaagatttcttttacatcctgacctggtttctgtaccacttacttaacaaataagcatttagagaatgtctctcatatatg

SEQ ID NO: 7402 - DNA, 120 bp, Homo sapiens
ttccgttatccctaatgttggcagcacctcaagttagaatcattcgtgaatttcattaacatcactacctcccttttccacatactaaacaaagatatcaactaggaacaaagcagtccc

SEQ ID NO: 7403 - DNA, 120 bp, Homo sapiens
ttccggtagttattttctccgaggcactgctgccaggtgcgctgtcatgtagcagagtgactgagcatgcgggtttgcagtcctgccccgccacatggcagctctgtcatcttgggccat

SEQ ID NO: 7404 - DNA, 120 bp, Homo sapiens
ctccgttcctcaactctttgtgcctcagcttctctctcaaggaattacagtggtatccacttcaaatgattgttgggaacattaatggatgaatgcatgtaaagtgcttacgactgtaca

SEQ ID NO: 7405 - DNA, 120 bp, Homo sapiens
ttgcgagggttctttatatgtagtggaacctctcttgaccccacatctccttctaactgtcaccctagttatctggtctcctccagagtaaaattcttggaaaagctgtctgccttgctg

SEQ ID NO: 7406 - DNA, 120 bp, Homo sapiens
actcgactttccagtagcacttgatatgtttgaccacccctgctttttgaaacgccttcttctccaggccttcctgacaattgacttgcctttttctcctgccgcctcagagctgctttt

SEQ ID NO: 7407 - DNA, 120 bp, Homo sapiens
aatcgcttataaatatatgagtatcatcacagagatctatttatcactatatttagtcttctagtagggttgccagatatcaaagtggggaggtgggaccatctacagtggcagccactg

SEQ ID NO: 7408 - DNA, 120 bp, Homo sapiens
attcgacatatggacttaactttgaatgcattttagttttctttaacagaagtgctatctgtgaccctggagtcataactaactgggttttgatctcgactctaacctttagtagcatgg

SEQ ID NO: 7409 - DNA, 120 bp, Homo sapiens
gtgcgatcatcctgttctactccagagaaaaatccaagtacatgtatttgtttctgtgacagccgttccttgtttgcttttcaacagagattctttggaaattactcatctttccaagtc

SEQ ID NO: 7410 - DNA, 120 bp, Homo sapiens
ccacgattcacttagaccaatggaaactgtagcctgaatcacatggggagggatggcgacaggtggatacttgaacaaaattaatgtactgtttgtaaggaaaattgggaaaatgccagt

SEQ ID NO: 7411 - DNA, 120 bp, Homo sapiens
tggcgtatttactgctagcccaggagaatgatgagacagtgatgggaaagtgttcaggcacccgggtttcctgacctcccgggacctgccaacaggagctctgtaagagagcaaaagcag

SEQ ID NO: 7412 - DNA, 120 bp, Homo sapiens
ctacgcgattcagcaacttcccacaatgtacacagaactgaaaaaagcatggggtagagaaaaactgaaagagaccagacaccttcagggctgccaagctggggagtcagtcctgggact

SEQ ID NO: 7413 - DNA, 120 bp, Homo sapiens
attcggggattatttcttcccagagagtgattattctgataatcagatgggcctacaggttgcaaaacccatttatctttgctccatcctctgaaagggaggagttctgactaagtgtac

SEQ ID NO: 7414 - DNA, 120 bp, Homo sapiens
tgacgcgaaatgacagcctggattgatgctctggggtttgttccagctcattgctcatcaccccatggattgtttgctcatagcaaatctgcgccaaataaattccatgtcctccaaggt

SEQ ID NO: 7415 - DNA, 120 bp, Homo sapiens
attcggatgccacacagccagtaagcaggagaactgaatgcaaacccaggctatcttattgccagcttggctgttctgaaggaactaattagaactggcttgagatcatacttgaggaag

SEQ ID NO: 7416 - DNA, 120 bp, Homo sapiens
ccacgtgggaggctttccatgcagaaaggaaatagaagtgtggtgccctcagcggggtgtctgcatggagatcttgaaggactggaaacaatgaagcctgttcccccatatgtgatcact

SEQ ID NO: 7417 - DNA, 120 bp, Homo sapiens
tctcgtaagcagtagcctgctgcctttgcacacacttcgaccattttccctgctgctttgtgctatttcagggcttgtgggggtgtaggaaagctgccgccttcctcaggttgctattta

SEQ ID NO: 7418 - DNA, 120 bp, Homo sapiens
caccgctgctcctgccaccacagctgccactcctgtcccagctgcagggagctgcatggtcactgaccactccagcccttgggcagcatgcctcagcataagccagccagggagcacaca

SEQ ID NO: 7419 - DNA, 120 bp, Homo sapiens
gaccgcctattttttgtttaggactcctgagctatcatccctcccaagggttaactgctacccaccatcttggtctttgtccctaaacaacctaaactgtccatgtccctgtagcatttt

SEQ ID NO: 7420 - DNA, 120 bp, Homo sapiens
acccgcctcatctcctttccaccccatctccaatttgcactttagatgctctcctcatttagtagccagaaagggtaaaagtgccatttatctctaggtctagcagagaaaaatactctt

SEQ ID NO: 7421 - DNA, 120 bp, Homo sapiens
gaccgtcctgacgctttcagtgaagtgtctcaaaagcctggtctttcaggtttgaattggccctaatttctttttcatagacccatcaaagtgaaagtttgggttttatcaggaaagcat

SEQ ID NO: 7422 - DNA, 120 bp, Homo sapiens
actcgcctcaaagaccttggagtctggcccctttctgcttccccggcagaattcttcctgatgctttccattctgcagcatagcttgatcagagcttccagtgtgccagctaccaacatc

SEQ ID NO: 7423 - DNA, 120 bp, Homo sapiens
atccggtaactgataacagggagctcagcacccctcaagtgtggagtgggttttgcacaggcagtattgttattttaaggacacagaagtgcccagggggaaattcctacccacacggag

SEQ ID NO: 7424 - DNA, 120 bp, Homo sapiens
aggcggaaatgacttcctttgcttccagagaattgcctgcgtttctctcttagaacggagatcactccatgtggggtgtgtgtactgcctccccacagggctgtagctgccacctgggag

SEQ ID NO: 7425 - DNA, 120 bp, Homo sapiens
gttcgtgccttattcatcttttttatcgccagcacagtgcctgggcatgacagaggcccatagtactgattattgaatgagtgagtaatcatgaggcaatagcggtggagagtcatcctc

SEQ ID NO: 7426 - DNA, 120 bp, Homo sapiens
tgccgggaattagctcattttcatgcggccagcctcaggaaaaataagacttccttgcccaaagacaggttagaaagggcactcgaagccaggcctggtggctcacgcctgtaatcccag

SEQ ID NO: 7427 - DNA, 120 bp, Homo sapiens
ccccgacctaggagacctgactgtggctcagaagctccctgagaaagcccaggaggtaactgcccagcagggaccaggcagcatcttcctgaggtttgctcacaggactcaggtgcttca

SEQ ID NO: 7428 - DNA, 120 bp, Homo sapiens
tttcgggagccccctagacagcgaactgccccttcgcgtgcagaagtcggggaagagtgctctcagctcgccttccttgcagggtgagtaggttttgcgggttagagagcggggcgtggg

SEQ ID NO: 7429 - DNA, 120 bp, Homo sapiens
gggcggggagggagagtaacaattttggaagtccctgcgtggtatctggaaagttaacgacgcttcaggttctaggttgagcccaatgaccgtcttgccttggcagctggtcccagggcg

SEQ ID NO: 7430 - DNA, 120 bp, Homo sapiens
agccgcgtggccttcggccccactcgggggacccagcttcggagagggcgcaggggctgcgagtcttgcgagccggagccgcgtccacccgggactaggcgtccccgccgagcgctggct

SEQ ID NO: 7431 - DNA, 120 bp, Homo sapiens
tggcgctccctgggaccgcgcggggtcgggggtgcgcccgcgggggccctcccactctggtcaactttcccggccccagggccgggggaggcgcctctcctggcgggcacgcgccgggta

SEQ ID NO: 7432 - DNA, 120 bp, Homo sapiens
ccccgggcttcccggcggccgttcctgcagccccctccccactgacccctcctccctttcttcctgcatcctctcctcttccagcctcgcctccctcctccccggcggctcctgttttgt

SEQ ID NO: 7433 - DNA, 120 bp, Homo sapiens
aggcggacgccggtgcggggctccaggctggctggggtacccctcccccgcaccttctacgacctcccgggggtttgcacctgtccgggcaccaaggtaccaggcgcccacgttcctgcg

SEQ ID NO: 7434 - DNA, 120 bp, Homo sapiens
agccgggccgcggcagcacgtgtccgggggagtgggctcccctcccctggccggcctggaggggcccggagggcggccgggcacaagaggaggagccccgttgggcgcacaagtttccat

SEQ ID NO: 7435 - DNA, 120 bp, Homo sapiens
tgccgctgcgtgtggccctgccgcggggcgcacctgtcagcgggagagacgctgcacaccagcagcccctcaaagtttcggaggcttgatggagaagcgtgcgtccttgactgggggttc

SEQ ID NO: 7436 - DNA, 120 bp, Homo sapiens
ttccgtagtcctgggagccggacttgagagcgcccccaaccttgtgcccttgaaagccgagtgcgcgttagtttgcctgggctgggctcccgtggatgagcgaagggcatgaggaggcgg

SEQ ID NO: 7437 - DNA, 120 bp, Homo sapiens
cggcggtccaggctgtaggatcaccccacagcctctgccggcttggggtgacacagccccccgccccaggtctgggcaggagaacctcgaccacagcctgcaccagcgcctgattgcacg

SEQ ID NO: 7438 - DNA, 120 bp, Homo sapiens
ctgcgggggaggggtcccgcccagggaaggagagggccggctacaccggggatgcgcctttgtctacaggcacactttgccaaggtagctggggtaccaggaagagcagggcctggtccg

SEQ ID NO: 7439 - DNA, 120 bp, Homo sapiens
ttccgttccttcccggttgggtcgtgggaaagcggcacgtgggtgtggccggcgccgcctttgccaagaggcgaggctcgagcggggatgagaagcgtggcgagtgcgttcgcggctgct

SEQ ID NO: 7440 - DNA, 120 bp, Homo sapiens
gggcgccgcctccggcactgcaccgaggcggggcgccagcgcccaggttgctgggctggccttggcgcccccttcccctacccagagcgcaggcaggcaggggggtcccgccgcgcccct

SEQ ID NO: 7441 - DNA, 120 bp, Homo sapiens
ctccggaggggaatgggggcgctcctaggctgcggatgcaggcctggggactcctgggccgcaggcgcgagcagtagggtggcaacagggagggctgggagtcctgtgaaggaagcacac

SEQ ID NO: 7442 - DNA, 120 bp, Homo sapiens
acacggcgggctccccgggacggtggggcagagcgcccggaggccgcgcttcccggagaggctaggctgccagcagctcttttcgggccaacgctgctggaaggctgctagtgccggagt

SEQ ID NO: 7443 - DNA, 120 bp, Homo sapiens
ggtcgatttaggcagtgactgcgtgttcttcgtcccttctacgtgagaggcgtcccgacaggaaagtgtgtttgttttgggggctccgtttcctgagacctaagagttggagcaagcttg

SEQ ID NO: 7444 - DNA, 120 bp, Homo sapiens
aagcgaggcatcattgtctgtagacctcagtgaacatggggttctctagatcaggcaggtggcagagaggagatagtgtgggtcagaatgggaaggccggcagccatccttgccaccttt

SEQ ID NO: 7445 - DNA, 120 bp, Homo sapiens
cttcgggaggctctcggggaaggggctggcctttgtatactggcttttgctgatttgactatttgtctactttgcgagtaagcacataaatcttacacagaaaagtgattaggccagtat

SEQ ID NO: 7446 - DNA, 120 bp, Homo sapiens
attcggaaggtgaccctcatccggaagtatcattgatttggctaacttgctttcaactttgaactctggggtatctgaataacctggtttcattaaaggaggtacaggctgaggttttga

SEQ ID NO: 7447 - DNA, 120 bp, Homo sapiens
cttcgctaaagctactaaaacgctgtctgcaggcttgaggaactggtcttaacatcttcgaaaaacccagctaggaaaattcttcatggctgtgatttacatgggatacgagcattttct

SEQ ID NO: 7448 - DNA, 120 bp, Homo sapiens
acacggtgttttggtgtgtttgtgaaggtgggggtggaaggaacatgggggaaagcagcagatggctctaaaggaggtgtgcacggggatgtgtcactggaatcatctcgtgggccctgc

SEQ ID NO: 7449 - DNA, 120 bp, Homo sapiens
ctgcgacctctgggtgtgggaagcagagctggctgacaagtgccttctgcaagatgagtgatacaggaagggcccctcccactctcttgcctctttgtaattgagcccagatcatttttt

SEQ ID NO: 7450 - DNA, 120 bp, Homo sapiens
catcgcttccttacagtaggcatagctatttcccaggaagtcagagacaaaatatcatttctttggccagaggccacctcgaggtgtcagtgacatcagcacaggtggtttgtgttgagg

SEQ ID NO: 7451 - DNA, 120 bp, Homo sapiens
tttcgcctggggagaactccagtcacttgtccagtctgtgatctggttgggggagagtctagaaagcacagaccctgtgtgggctgagctcctgcacttgccagtttgttccattctgac

SEQ ID NO: 7452 - DNA, 120 bp, Homo sapiens
agccgcagaagggccctttgatcttgctgcatggagttaacaagctctctttgcctcatacacccaccctctacagtgtggctgcaagagtagcttcagctctttctccctctctctcct

SEQ ID NO: 7453 - DNA, 120 bp, Homo sapiens
tcccgaattaacgaatgtcagggaggtactgaatatatatgatggttagaagatgatgttgggctcaaaatgcactacagatctttggtctgcagaagcccaataaaagtaaccatttaa

SEQ ID NO: 7454 - DNA, 120 bp, Homo sapiens
ccacgaatgaatcagatgtcatccggaggcgcacagctcatgcttttaaaatttctaagatatataaggtaaaacatcttgtgttgttattctggatagttggttcctttgtgataccaa

SEQ ID NO: 7455 - DNA, 120 bp, Homo sapiens
aatcggaagataagagcaccttcagtttccatgcagagaacctggcttgtgggagacaagtcacctttttgaggctggctgtcccttgtatatgttttattgttcttgccttagtaggtt

SEQ ID NO: 7456 - DNA, 120 bp, Homo sapiens
atgcgtaagtagtgagaaatgttggcgctgagggtagagtctttgttgtcatgagagctggctttaaattttacttgttggagtgttccataggataaatgtcaagcaggctgggcttgg

SEQ ID NO: 7457 - DNA, 120 bp, Homo sapiens
gcacgttgatcatgtctatgaatgaccactgctctcctgcctaggcaacatagcaagatctctaaaaaataaaaaaaaaagcttttatgcattccaactattttgagtcccagggcagga

SEQ ID NO: 7458 - DNA, 120 bp, Homo sapiens
actcgtggcagtagaacggcctctggatgacatcattgctcagctcccaccacccattaaaaagaagaaatttggaacctaaaacagggcactgtctgtgtccttccttgaactgtctac

SEQ ID NO: 7459 - DNA, 120 bp, Homo sapiens
ggccgcaatctcagaagaaaagatatttgtgttctgttccctattacatgcctaaggcttcagagagctgatagccttcacttcctgccagcccccagcccatggaactgcgtaggaatc

SEQ ID NO: 7460 - DNA, 120 bp, Homo sapiens
cctcgccctggagggcagaggaccgtaattacttacccaggatagcctgaccactaataaccataatcagccttagagttcaaggaagaatttcaactccagcattataagggagtgctc

SEQ ID NO: 7461 - DNA, 120 bp, Homo sapiens
agccgttaattttatttaaaagtaaaaaaagcttgggttatcagtcccattaactgcctttttacctgttatgtgctggtttcaaaaggtatggaagggccaggcatggtggctcatgcc

SEQ ID NO: 7462 - DNA, 120 bp, Homo sapiens
actcgttgtagagctgtaaattcagagaatccttgtcaactggaatctagtttatggcttaacttacttaaattctaaaatcttgtgggttgtggaggatgtaattctcacagagagagc

SEQ ID NO: 7463 - DNA, 120 bp, Homo sapiens
ttccgaagtagaaaacttggaatacaaatgaagcagaaactgactagggcaagttagagaaattgggggaagggaagggaggggaaaggaggggagggaatgtgaggggaagggactgtg

SEQ ID NO: 7464 - DNA, 120 bp, Homo sapiens
gaacgctttagtgcatgggtttcagggtgtttttactttgggggtttgtgtaacctagacatttaaaacgtttccctcttggcgttatgtttctgttttggccattttgcatacctctgc

SEQ ID NO: 7465 - DNA, 120 bp, Homo sapiens
gaacggtcttttttgccaatctgactcaaatgctttaaaaattcactcttctcatgtactggttagtaaactaatctctgaatggataattcacatgtaccgtggagagtatagcaaatt

SEQ ID NO: 7466 - DNA, 120 bp, Homo sapiens
taccgaaccacaatgtatgctgtagataaaaatgaagttattcctattgggtggagatgaagcaggagtttgtaaaagaaacgtgactctcagtctcattttttttcctttttttttctt

SEQ ID NO: 7467 - DNA, 120 bp, Homo sapiens
gcccgcctccaccctttaagctaaatctttcactgtgctggatacatagacactcgataaatgtgtgatgatagttctaaaataattatgctatatatcagggttctgtatttttgagca

SEQ ID NO: 7468 - DNA, 120 bp, Homo sapiens
ccacgttgggtgactgaactgatgcttattctagttttagaagaggatccacatttaatgtaaggcataaatatgccttttgcaaattattgcttgttctccagtgaacatttgatcata

SEQ ID NO: 7469 - DNA, 120 bp, Homo sapiens
gagcgagacttcatctccaaaaaaagaaaaagaagaaaaagatttataatttctgagtcccctaagtccctttctcagtttgcaataatcttacgtccatgctattgacactaattttga

SEQ ID NO: 7470 - DNA, 120 bp, Homo sapiens
atccgttatttctcagcacaccatgccatctgtttatcattcagcagttaagtaattcatcacttcatatttttaccaaagtatatttacaagtctgtttatctggatctggcaaactgg

SEQ ID NO: 7471 - DNA, 120 bp, Homo sapiens
agacgagaagccaccagggagaggagcgctgccttcctgtctcatctgaaggaacatcatgcagaagagggcagacaagggcagcctgtgcctaagctcatttccaagaaggtttggggc

SEQ ID NO: 7472 - DNA, 120 bp, Homo sapiens
atccgctgagttcatttcacatcagcctggcccagcctcccctggcctgtctgttttgtcgagctgtctgtgtgtgtttctttcggagacttcttccttgcagataagagagggctgaac

SEQ ID NO: 7473 - DNA, 120 bp, Homo sapiens
ccccggccctgccaagagccggtcaggaggtttattgtttgctgtgcctggaaccgtgggtctgcggtgggactgcctgcctggtaactggtgccggatctgaggaggagaattctggtc

SEQ ID NO: 7474 - DNA, 120 bp, Homo sapiens
cttcgtgcaggcgttggtgaagctgcggtttttaaaaccaggctttaaaaccatgtaggtgctttactgaccggtcgcggtggctcatttctgtaatcccagcactttggaagccaaggc

SEQ ID NO: 7475 - DNA, 120 bp, Homo sapiens
aagcgtcccttcccagggtgtcactttagacagcgaaggaaactgtcttctctctgcagcctggagaagcaagctgcatggagccaggaggaggaggagagaggcctttcagtgtatcct

SEQ ID NO: 7476 - DNA, 120 bp, Homo sapiens
gtccgggcaggactttccttctggctggctcttctctggccctgaggccgggtgcaatttctggtctccttgctaaacaaaccagcagtcacttgctcccgcgtgtcccttctgccaggc

SEQ ID NO: 7477 - DNA, 120 bp, Homo sapiens
gctcgggtctgtttctctttcccttgaggcagcagaatagaaagtcccatgaacttgccccttgagccctgacctgagatattaggtcaggtttccacttgctgaaatccagagcgtggc

SEQ ID NO: 7478 - DNA, 120 bp, Homo sapiens
aaccgtctgagcttattgtgaagatggccggctggttttcaaagccttctttgaaggcctttctagccgatgttgaaaaagtaggccaatgaaatggcccgcaagcaataaatccacagg

SEQ ID NO: 7479 - DNA, 120 bp, Homo sapiens
cagcggcatccctcgtcacgtttcatccccatgcctgtgaccccagggactttccacctctccgaggaagcactgagccatttgctttgcctttccagaaagccattgatctggtgacga

SEQ ID NO: 7480 - DNA, 120 bp, Homo sapiens
ctacgaggaggcgctgcggctgtaccagcatgcggtggagtacttcctccacgctatcaagtgtgagtcacacgaggggtcctcaggctgccgcactccagaggggagcggaggagaggg

SEQ ID NO: 7481 - DNA, 120 bp, Homo sapiens
tggcgcacgagcctcacaggggcccctctgtgttccctttcacagatgaggcccacagcgacaaggccaaggagagcattcgagccaagtgcgtgcagtacctagaccgggccgagaagc

SEQ ID NO: 7482 - DNA, 120 bp, Homo sapiens
ttacgaagcaaagagaaacacggcaagaagccagtcaaagagaaccagagtgagggcaaggggtgagtgtctgcagcgtccgcccaggaacctgggccctcctcacggctccctatcatt

SEQ ID NO: 7483 - DNA, 120 bp, Homo sapiens
tggcgctcatgctgccttggacttccctgtgggaatggtcctcatagtgcagggatgacagtgccagcagctgctttcagggagcatggcctggagcacttccatgttcaccgtctcatt

SEQ ID NO: 7484 - DNA, 120 bp, Homo sapiens
ggacgggaccccagctctgtcacctcccagcctagtgccaggaccccgtgtgcctaccatctccacatcttggaagtggggaggtcgtggaactcacctccgagcgttgccacagggagc

SEQ ID NO: 7485 - DNA, 120 bp, Homo sapiens
tgacgtgggcagtgcccttggagcttggcacacgagagcatgcaatgagtgccagctgctgtgactgtcaaagagtcacctgcctccaacaggtggggcggccggctcgggttaggagcc

SEQ ID NO: 7486 - DNA, 120 bp, Homo sapiens
tgccgaggtggcacaggatggaacttggacccccaaagcagggcgggtggccccgattccccagccagggtcctctccacagcctctcacctcaggtactgggttcgcccaccacggtga

SEQ ID NO: 7487 - DNA, 120 bp, Homo sapiens
tctcggaggcgtgggaggggaagtgagggggtcccccaggcaggagaggggtgggtggtgtcagctgcctcaccagaggcgaggcctcctcctggatggagggtctgcaccacgttccca

SEQ ID NO: 7488 - DNA, 120 bp, Homo sapiens
atccgcagagggagaggtctggcgaggcaggggtggaggccagggatctccaataaggattaaatcaagttttgaggatgacagattccatccagggaggaagtagccctggggtgacag

SEQ ID NO: 7489 - DNA, 120 bp, Homo sapiens
ctgcgttctccccaggagttccctttcgatttcggttttgctttctcctctgtccttcggcagtggctgctttggagtcaggggcacatgctgtccctgagtctctacaaaaagcttctg

SEQ ID NO: 7490 - DNA, 120 bp, Homo sapiens
agccgaaattactgaataggtttgacacagcaattaaagttggcctagacacaagaattctattaactcaagagattgcttgcttaacagtgtctgccatctgttgccctgcaatccaga

SEQ ID NO: 7491 - DNA, 120 bp, Homo sapiens
tgtcgctgatgcaatcagagtaaagagaaatgattcagttcaatcctgccaccaacctcaggattttggccaagtgcaggtttggggttggttggtgggttattttttcccttcctgatt

SEQ ID NO: 7492 - DNA, 120 bp, Homo sapiens
gctcggtctggggtggactacctttgcttatgtctggggagagaatgaaatctagtgcccctaatttttctttcccttccacccagtaaagacacagagctgaaaggtgtctttcaaaag

SEQ ID NO: 7493 - DNA, 120 bp, Homo sapiens
acccgggactaaacagaacaaatacaacctctatttgttcatctctcccctggctttagatggtgctttatggccagggttatggggatcagctgaaatccaggctgatgtttattcctg

SEQ ID NO: 7494 - DNA, 120 bp, Homo sapiens
aggcgatataagtaataagatgaaacggggccatgtgatcacccgaccccagggcagatggagggtgtggggaccgccacaggaagggacaatggaatgaaccccacagggcgagaaggg

SEQ ID NO: 7495 - DNA, 120 bp, Homo sapiens
agacgggggtggggaggcccagtgagggcaggctgaggggctggcttgggggctgtactgggtcagggccatggactctgttgttggatttgctatgatatcctggtgctgcccccaccc

SEQ ID NO: 7496 - DNA, 120 bp, Homo sapiens
gcccggagcagtgtccctggaagtgggagaggttggcggtgatccataggtgctcgccgggccggtgccctttcccccagagagcagcagccttacgtaaccagagcccctggggcggtg

SEQ ID NO: 7497 - DNA, 120 bp, Homo sapiens
gcccgagagccgccacctccgcccttcgattcacagcccctggcaatgttcttgtcttcttagacattgataatccaacctccaagctttcttggagtttctggctttccgaggtgggag

SEQ ID NO: 7498 - DNA, 120 bp, Homo sapiens
cagcgggcaggcctgggaggtgcccctgcccctgtcccatctccacctgcacgttttaagatcctctgtggccaccagaccctgccagccctggggccggcaggaccctgcgcccctcaa

SEQ ID NO: 7499 - DNA, 120 bp, Homo sapiens
aaccgagagcggcgctggggcacctgagcccaggaaggcaacaggccggccgggaccgcgagtgcctggcggagcaggcgcagcccaggactcccggctcccacctccggctgtaggtgc

SEQ ID NO: 7500 - DNA, 120 bp, Homo sapiens
gtgcggccccattccctccacggccctgtcccgggctttgtgtgctcagggctcggccagctggggccgctcatccctgccctgggcccggctggccgggacgggcccaggggcccacca

SEQ ID NO: 7501 - DNA, 120 bp, Homo sapiens
agacgttgcgtgcggcactgcgggagccatctcctttggcatcgccccttgtctcgggccggtggggagtgggcgagggttatagtcactctcccgactcagggactgcccatcccggca

SEQ ID NO: 7502 - DNA, 120 bp, Homo sapiens
ggacgtgggggcagccagggagagggcaaaggcccccgttcccgtccaggtccatccgtccatggagggaaacatcgtggagatggaggtgcttctgtggggcgagaatgtggcctagaa

SEQ ID NO: 7503 - DNA, 120 bp, Homo sapiens
agccgtcctttggggtactggctagtggcatgtggctttgattcttagcaacaggcctgtgggtaaaataaaggacttcaaggattggatgttttgtagctgattgaataactaaaaaaa

SEQ ID NO: 7504 - DNA, 120 bp, Homo sapiens
cctcgtggtttccaggatcatatacattctatgttcaatatcaaaagactggctggaattgtaaaagcaaagtcattgagtacagtcacatttataggaaagatcactgacgagatgcac

SEQ ID NO: 7505 - DNA, 120 bp, Homo sapiens
gcacgcacaatcccagcattgtctgctaaacggtaaggcagcttcccgaagaagaaaggccgtggtttgctgcaggaacacattcagcagggtttcaaagcccccttcagctggcaggct

SEQ ID NO: 7506 - DNA, 120 bp, Homo sapiens
aatcgctaaccgcaggattcgctaactgaaggaatcgctaactgaaggaatcgctaactgaaggggagactaagtacctggaagaaagcaagctcaaggactgtacatcatctctgcagc

SEQ ID NO: 7507 - DNA, 120 bp, Homo sapiens
aggcgtgagccaccgtgcctggccttgcagttgcatttacacatgcaacagtaatacagccagattcccaatatctgtgaaatccatgtaatactgcacctttaaagtaatcacccttat

SEQ ID NO: 7508 - DNA, 120 bp, Homo sapiens
caccgtccctggggactgggcacacggcagcatccatgccccgcctcggggtcctgcatgtgacgccgctacccctaggtgtacatcggccactcggaacccgtgcaggctgtggccttc

SEQ ID NO: 7509 - DNA, 120 bp, Homo sapiens
cagcgcaggggacgccgtcttcctctgggatgtcctggcccctactgagaggcaagtgcctactctcagctgtgtctgcctaggccccccaggccctcctgaaaccctctctcctccctc

SEQ ID NO: 7510 - DNA, 120 bp, Homo sapiens
cagcgaccaaagcttccccggggcccccccagcctgcaagacaggtgagtggctgtgctcagctggggtgcaggtgctgcgctgactctggggcccgtcctgtgtctgcctagtggccct

SEQ ID NO: 7511 - DNA, 120 bp, Homo sapiens
gcccgggcgcaggaccgctggaggacgcagcgtccagggccagcgagctcccccggcagcaggtccccaagccatgtcaggcatctccaccacggctgggcgtctgtgccaggcctcccg

SEQ ID NO: 7512 - DNA, 120 bp, Homo sapiens
tggcgatggtgagcagcaggggtcctggaggagtggggggattcgggggtctgagagggcacaggcccagtggcagcaggtactcacgcacgtccagctctggggtgcaggtgccatcgc

SEQ ID NO: 7513 - DNA, 120 bp, Homo sapiens
ggtcggggtgggggcagcttttcctctcctccttagcctcatcaggtggaacacggtggggtcgggatgggggcagcttttcctctcccccttggccccaggcaccttgtccccgtcaga

SEQ ID NO: 7514 - DNA, 120 bp, Homo sapiens
ccccgaggggcttgggcaggcctcaggcccacctgtgctcacggaggaggaggctggcagggctggagacggggcctgggctgcggcagtgggctcctgggggcttgccctgcctccccg

SEQ ID NO: 7515 - DNA, 120 bp, Homo sapiens
ccccggccaaccccgtgagcagtggagggcagggcagggacgctggtgccggtgcaggggcctgaggacggtcggtgagtcccccgtgtgacgaggcaaggtcacctgcagtgggacacg

SEQ ID NO: 7516 - DNA, 120 bp, Homo sapiens
ctgcgtctgtggctccggcctgtgccccgccgtgcagttctcactgtgtggtagaccaggggcttgtggggagactgcgtgtagtgtggggtctctgaagagctcagggcagtgtaatgc

SEQ ID NO: 7517 - DNA, 120 bp, Homo sapiens
acccgtgtctatcctcacagtcactcgtgagaagaggctggaccaggagaagggacagacgcagcggagcgtcctcctgtgcaaggtggtaggggcccgtggagtgggcaagtctgcctt

SEQ ID NO: 7518 - DNA, 120 bp, Homo sapiens
tctcggccgcggcctgggggtaagcaccctagactcccccaccaccccaggggctccaggggcagggcagggcaatctggggggcactgcagccagcgagtgtcaggacttcacctccct

SEQ ID NO: 7519 - DNA, 120 bp, Homo sapiens
acacgagggagcagcctcccggctacgccatcgacacggtgcaggtcaatggacaggagaagtacttgatcgtgagtgctggggcggcgcggcctgtgcccgagggtggacccggggaca

SEQ ID NO: 7520 - DNA, 120 bp, Homo sapiens
gaccgagccccagggacccttcctaaggccgctgtctgtcccagctctgtgaggtgggcacagatggtctgctggccacatcgctggacgccacctgtgacgttgcctgcttgatgtttg

SEQ ID NO: 7521 - DNA, 120 bp, Homo sapiens
cagcgtctacaaggtggggccctgcaggggccacgtggccatggggcagggtctgtccctccagctgtgcctcggccaccccaggactgtacctcataccactctctgcccacagcacca

SEQ ID NO: 7522 - DNA, 120 bp, Homo sapiens
ggacgggcagaccccctgcctctttgtctcctccaaggccgacctgcccgaaggtgtcgcggtgtctggcccatcaccggccgagttttgccgcaagcaccggctacccgctcccgtgcc

SEQ ID NO: 7523 - DNA, 120 bp, Homo sapiens
tgccgttctcctgtgctggcccagccgagcccagcaccaccatcttcacccagctcgccaccatggccgccttcccgtgggtacccagtagcgcagccctggggactagcagtgtctgtc

SEQ ID NO: 7524 - DNA, 120 bp, Homo sapiens
atccgagcagtgggcagcggtggtgtcaggcctggaactggggactagcagtgtctgtcatccgagcagtgggcagcagtggcgtcaggcctggaactggggccagagtggcggggtgga

SEQ ID NO: 7525 - DNA, 120 bp, Homo sapiens
caccggctgtgcctctggtctgggatccccgcctgtggggccctgtgagtccaggacatgggagggtgcccagcagcaagctgggggcatgtgcctgaggtatctgcagatgattcttct

SEQ ID NO: 7526 - DNA, 120 bp, Homo sapiens
ccacgcagagctgcatccctcttccttctggctccgggggctgctgggggttgtcggggccgccgtggccgcagtcctcagcttctcactctacagggtcctggtgaagagccagtgagg

SEQ ID NO: 7527 - DNA, 120 bp, Homo sapiens
cctcgctgctggggctctgcaggggcagcacagctggggtgcaggccaggctgccactccgggaacgcctttgcgccgggactttttgtttctgaaggcagtcgatctgcagcggggcct

SEQ ID NO: 7528 - DNA, 120 bp, Homo sapiens
tgccggacccccagggtgggccgtggcaggtggctgagcaggagctcccaagtgccggccaccgctgtcagggattgcccacccctgggcatcatgtgtgtggggccggggagcacaggt

SEQ ID NO: 7529 - DNA, 120 bp, Homo sapiens
aggcgttggggggtcccccctcaagtttggagccgtttccgtggttgtagcagaggaccggaggttgggttcctgattaaacttcactgtgtgttttctatctcggatcccagtctctga

SEQ ID NO: 7530 - DNA, 120 bp, Homo sapiens
aaacgccacccctcctttcattcctgggtcactgttctgaggtctcaggcgtgtgcatatggcctctggaaggtccactctgggctgctgtggcctgggagcccagtgtccttggaggtc

SEQ ID NO: 7531 - DNA, 120 bp, Homo sapiens
ctgcggtctgggagtgggagcccactgcgggaggacggtgcgcgcccggcatggactggggggcgccggtgcctgagatgtttccccggtgactgaccccttctcagggtccagtgtgcc

SEQ ID NO: 7532 - DNA, 120 bp, Homo sapiens
gagcgtcctgccagcctggctgagctgcgccgagaacctgggcttgtgtgaccagatgtggtcactgcctgccacagaacggggtgaccctggggccctgacctgagggaagcaggatgg

SEQ ID NO: 7533 - DNA, 120 bp, Homo sapiens
ggacgggctgggagttgagcccagatgcctgcttctcgggacccagggcgtggccttcccaaggtcacccggacaagtatcagaaggcctggtcccccccctcccatgtctgcctttagg

SEQ ID NO: 7534 - DNA, 120 bp, Homo sapiens
acacgggccctgccttggagcttgtggcattggcccctgaggtccctcccgactgatggtatttgagcccgctgtacccccacggcctgtcttctgggactactgcaaccctaggagaag

SEQ ID NO: 7535 - DNA, 120 bp, Homo sapiens
acacgtgtcttatctgtcacctccattgtggaggggttggcccgccttcccaggagcaggtcccctcatcccaactgcagccctgccccctgggggttctgctctgtgttggaatgcccc

SEQ ID NO: 7536 - DNA, 120 bp, Homo sapiens
cagcgtcttcctcctcctaagaggcggctgtagtggccatgcgggacgagggacttccttgctgctgcgctcggtggggggttgcggggggagggggtgtgtctgctgcaagcagggagc

SEQ ID NO: 7537 - DNA, 120 bp, Homo sapiens
agccggtggcaacatgaaccgcagggagtactgggtcagcctggagggggagcaagcagtggtcagggaaggcttcctggaagaggtggcatcctcacaggcctgagcccgggaaggctg

SEQ ID NO: 7538 - DNA, 120 bp, Homo sapiens
gggcgaacggtcttgcatggggggttttaggtgccccccatccccgtgactccatttaccagcggctgccgtggaggtagtccagtgtgctggagctgcgccagagcgggggtgggggcc

SEQ ID NO: 7539 - DNA, 120 bp, Homo sapiens
ggccggcgctgagacgcggtgctagctggaggcggttcctgtccggggtgtgcgtccgcgtgcagggtgcgcgcgtgtcttggccgcgcgtggcggcgtgtgcggcaggggcgggcaggc

SEQ ID NO: 7540 - DNA, 120 bp, Homo sapiens
atgcggaggttatcttcaggccagcgacatccacgcacagggtggagtgggagcagtcccgggcaccctcctcaggcctccagtctgtaagtgggtggcagggggcactgggcacagcca

SEQ ID NO: 7541 - DNA, 120 bp, Homo sapiens
ccacggaaagaagcagaggtgggaccctcactgtgccaccatctgctccacagttcggatctcctgccgcccccaccccgacatccggggaggaggtagagcccctggggtcacacgccc

SEQ ID NO: 7542 - DNA, 120 bp, Homo sapiens
tgacggtacctgctcccttggggcattgcaaagtgaacgagctcagtgcgtggctcatagcaaggtctgggagagtgatgtctgagccccacggccacactccagggcaaagcaagatgc

SEQ ID NO: 7543 - DNA, 120 bp, Homo sapiens
ccccggtcttaggtgactccaggactaagcctggagcctcatgcaggtcctgccttcctgccccaaaatctcagaggaggggccaaagcctctcccagcccaccctgccccctcctgcca

SEQ ID NO: 7544 - DNA, 120 bp, Homo sapiens
ccacgaagattccaacgcttggggtgggccctgcaatatgcagactctcaggaagaggatggctcacatctttttggctgagtgtcccttctggggctacagggcctggcctgctccacc

SEQ ID NO: 7545 - DNA, 120 bp, Homo sapiens
tggcggggtctcggacggcactgcaaccccaaggcccgcagcccattccccataatctggtcaggggggaggggaggcagggaggcagggaggcagtgggaggtcctgccccgctcttcc

SEQ ID NO: 7546 - DNA, 120 bp, Homo sapiens
caccggtccacatctggggagggggtgtagaccggagccgggaccaggggtctcgccagaacacgtggccctcgtggctgagaacccagctttgggtttaaagtccttcctgccctaatg

SEQ ID NO: 7547 - DNA, 120 bp, Homo sapiens
attcgggtcctggaaggtgaggccgggccctccacagaggaggcacccacagccggtgacccccatcatgtgcccatgatcagaaggcgcggcctccggaggccgacatcacaacgtttg

SEQ ID NO: 7548 - DNA, 120 bp, Homo sapiens
ggccggctggggtcggcacatgattcgacctcacggccgcccttaggggtggaggggtcgctacctcaggtttggggaaggaacacgaggctctgaggagcgaatttgccccaggtgtcc

SEQ ID NO: 7549 - DNA, 120 bp, Homo sapiens
gtccggggaggcctggcgcggggctgcctcggttccctcccagagccggggagaggggatatcgcaggatgccggcgcccgaggcggcagcaccaggcccacgggcgccccagtctaaat

SEQ ID NO: 7550 - DNA, 120 bp, Homo sapiens
ctccgtgcccctagagcggggaccctcgctccccagacccggaagcgccgccttccccgccagggacgcctgggcctccgcagaccccgccggccggcgcgccacccgcgccagcaccat

SEQ ID NO: 7551 - DNA, 120 bp, Homo sapiens
cagcggccgccccagccgcgcgctcagggccaggcccgggctggcttccaccgcggacggctgcggggtcggggcagccccgcaatcccaaatcccggcagcccccgctcagcagggagg

SEQ ID NO: 7552 - DNA, 120 bp, Homo sapiens
ccccgggggcgaagagtgggggagaagccgggaaggatccggaggaggcggcgggggcggcgccaggggaggaataatcccggcgcagtgccgatttaggttgaaaacgctcccagtcat

SEQ ID NO: 7553 - DNA, 120 bp, Homo sapiens
gcacgtggagcgccggggctgggggaggcattcgcggggctcctttcccgccccgctcgggagctcacgtttgccggcgcccacagtcccgtccccacctccaggcctcagggtcgagat

SEQ ID NO: 7554 - DNA, 120 bp, Homo sapiens
agccgcactttgagagcccacaggagggaggggacaggctgaggagcggccgtctgggtatgggtccggggcctggcttccctcatccacacccgcagcgctgccagaaggcgctgctct

SEQ ID NO: 7555 - DNA, 120 bp, Homo sapiens
cctcgacccgtgtgcttggtgggagctgcatccccgcacaggcagccccactgctccccaatctcgcgtccacgttcctgccggcccccgctgctcctcacactcccggcttgactgact

SEQ ID NO: 7556 - DNA, 120 bp, Homo sapiens
gcccgaatatcccccaccccgtagctcaaaaatgcaaacagccacacactttggcccaggcatgggcgctgcgggagaaagctgagctcaactggagactggggtctctctgcccgttca

SEQ ID NO: 7557 - DNA, 120 bp, Homo sapiens
cagcgagaagtccctgggggctcacacaagggcccctctgcttggccctgggcccggccccacccacccagccagacggtcaccaaggagccggttcccatggctcacagagcccccttt

SEQ ID NO: 7558 - DNA, 120 bp, Homo sapiens
tggcgactgtgagagccctcgttccacccagaggggctcggacgacctgcgtgggctgctagggactgcctctccctttagggacaagcagcccgggtgctaatacggggaagagacttg

SEQ ID NO: 7559 - DNA, 120 bp, Homo sapiens
ctccggggctcaccccaggggaaagagagagaggtggccccacctcagctgtcttgtcctcagcagcctgagcctggcctgggagctgctggggagaggtggccgtggcctctgtgtcct

SEQ ID NO: 7560 - DNA, 120 bp, Homo sapiens
ggacgcagtgtgaagcgtgtggccagagtgagcctagggagcacggtggggcctgggtgctcctgggggtccccacatgtacatgtacagcatccaggctgaccattcccagacggccat

SEQ ID NO: 7561 - DNA, 120 bp, Homo sapiens
ccccgcaggagctgcctcttctgcgaatcaagtcactgagcccggagacctcagctccggccccttcccagccctgatgccacagcccagccatgccattcctcctcccctgctcctctg

SEQ ID NO: 7562 - DNA, 120 bp, Homo sapiens
acacgccgttccccctgcttgcctggcagggtttccctgccttagccctgcaagctcttctcctccatccctcagttcctggtgcgaggtcgcccctgcctcctgctccgggacccccag

SEQ ID NO: 7563 - DNA, 120 bp, Homo sapiens
aagcgtctccagggtcttgcaatcacatgggttatcatcactgtccacctggtgtctctcctcctggcctgaggactcttgaggacagacagcaccaacgtgcatggcctctgcatgttc

SEQ ID NO: 7564 - DNA, 120 bp, Homo sapiens
gttcgcggaatgaatgaattagggaacgaatgaatgaatgcggaatgtggctccgctagctcagtcacgcagaaaggggtgcagctgccaaggcccccggagggctgatggaggattggt

SEQ ID NO: 7565 - DNA, 120 bp, Homo sapiens
ggccggtcagcggggaaggcacagctcgggaaattaacccggatcgtgccatggccagtgtccgcggggagagtggcctctggggttgggactaggttggtacctgagtcactgagaggg

SEQ ID NO: 7566 - DNA, 120 bp, Homo sapiens
cttcggatgaggagggcccatctccttttcagctggctctctcttcaggagctgcagggctgaggaagtggctgcccgtcctccaccatctggcctgagccaagagagggaagggggtcc

SEQ ID NO: 7567 - DNA, 120 bp, Homo sapiens
ccccgctctccctggcaccacacgcacccctcctctgaccggccagagtccttccttcacacactgcctaactaggagtggggaagcagagcttgcagacggattttccagaagttacat

SEQ ID NO: 7568 - DNA, 120 bp, Homo sapiens
ccccggggctggctgattccctctacctgggtcctgccaggtgtacctcacagggtcctcgctctgccctgttctgcctcatggggtctcgatgccttcctgctgggccctgggctagtg

SEQ ID NO: 7569 - DNA, 120 bp, Homo sapiens
ccacggcgctgcattccttgcagaggctgcacaccgcgtgcccacccctgggacatccttttggacacatgcctgggaaacctcctcacccctcagcgcccccagtttgaaggtctcttc

SEQ ID NO: 7570 - DNA, 120 bp, Homo sapiens
catcgggctccatctgcagtggcagccccagagcctggctgacagctggggtggctggggattggggacagggtgcagactgacacattccgtggcagccccgtgacgcaggcacacccg

SEQ ID NO: 7571 - DNA, 120 bp, Homo sapiens
ctgcgagcacctcatgtgctcagccccaggccgagtctaccctttaacctttacgatttttatattttatttatttattttttaatttttattgagacagggtctcttctgtcgccctgg

SEQ ID NO: 7572 - DNA, 120 bp, Homo sapiens
ttccgtactgttgagtacatttgtgttgtgtaatcaagctcctgaattctgtccccattaagctccaatccctcattcccctccccagcccctgctccactttctgtcctcatgaccgtg

SEQ ID NO: 7573 - DNA, 120 bp, Homo sapiens
ctgcggccacgagcacacgcttagcaacctggagtttgcccagaaagtggagccctgcaacgaccacgtgagagccaagctgtcctgggctaaggcacggcccctttcccgccgcggcaa

SEQ ID NO: 7574 - DNA, 120 bp, Homo sapiens
cttcggggtggggggggctctcagacaaggcctaatggtgaccggggcctgtggtcactccagaagagggatgaggatgacgtgcccactgtgccgtcgactctgggcgaggagcgcctc

SEQ ID NO: 7575 - DNA, 120 bp, Homo sapiens
ctgcgggtggcgtgagtatggctgttgtcccggggcctccaccgttacgtggacccttaggaaggcatctggggactgcgtgttgggctgagtgagcatctctggcttgggggaggctgc

SEQ ID NO: 7576 - DNA, 120 bp, Homo sapiens
agtcgggccccggtggggactccgggtctggaacccgcgtctcggctgaggacacggtggcagctgcctccggtctgggccccggtggggactccgggtctggaacccgcatctcggctg

SEQ ID NO: 7577 - DNA, 120 bp, Homo sapiens
gcacggtggcagctgcctctggtccaggccctgctgctgtcaccgctggggtcgtaaccagggtttcagggctggccccggagctggacagtggcaggcaggggccaggcggacctgaga

SEQ ID NO: 7578 - DNA, 120 bp, Homo sapiens
ctacgaagatccctggctggaccagctgggtattcccatggctctggttgtgggggctgggggttgtccggggccggcccagggtctgtgcccaggccaaagctgcacggtgcttgctgt

SEQ ID NO: 7579 - DNA, 120 bp, Homo sapiens
ggccgataggagcctggaccactgcgtctgtcctgggtcctgctggggcctcagggcagggaagagagctaggaaaggtctgggtggccagacctgtcccttggaagccccacttcggac

SEQ ID NO: 7580 - DNA, 120 bp, Homo sapiens
acacgttcacggtcatccttggagccagtcactgaacatttatttggagtccctggagccctgctgtagccaggagcccaggttgtggcatgggggacagaggaggtgggacctggcaga

SEQ ID NO: 7581 - DNA, 120 bp, Homo sapiens
tcccggaggcagagtgacaatgcatggctgtgtgggagccaggcaggcggtgacgtggcagagctgccagcaggggcccaagagactgcagcaggttggtgctcacagtggatctgaggg

SEQ ID NO: 7582 - DNA, 120 bp, Homo sapiens
gggcgtgcgtggcagggccttggccatggcccctgaccaacccctgtgcaccaaacaccacactgagctcagaatccgggcagagagggaaccactggtacagtgaggccaaggcacacg

SEQ ID NO: 7583 - DNA, 120 bp, Homo sapiens
agccgggcctgcagactcgagcccagcagggaccattaggtctcgggaggaggcagctgagggcgacaggatctgcacagagcagtgaggggcagaggacgcagggaccagatgggtctc

SEQ ID NO: 7584 - DNA, 120 bp, Homo sapiens
gaacggcccttcccagcccctctagagggtaggttgggggcagtagctcaccaggcccaggagcagcccatcctggaggcaaagcctatcccaaaacctggccctgcctcttcctgaggt

SEQ ID NO: 7585 - DNA, 120 bp, Homo sapiens
gtccgtaaaactgacgcccctggggtgacgcttgagagccggaagctgttccaggaggagggaggggcctcggtttctcccggggcatgtgggcaggaaggccctcgggatcccgcatca

SEQ ID NO: 7586 - DNA, 120 bp, Homo sapiens
ccacggccgcggtgcggtcgtcacctgtgatcacggctgcctggcgccccctgccggccccacctcagcccttcctcgcaggcctggccggggcaacccagtgggcctgatgctgcctgg

SEQ ID NO: 7587 - DNA, 120 bp, Homo sapiens
cctcgaggccccagagccagtgagcagacgctcgctcgcccatctccctagagtcccgctgtgcagctgacaccccctgccccagccccacggctctcagctgtccggttccagcgtcca

SEQ ID NO: 7588 - DNA, 120 bp, Homo sapiens
ctccgacagccactgcaggcaggggccccgctgtgcctcagtctcagggggcttggttgggggtggaggaggccggccgggcccaggcaggagtgcggaggggctgcctggcctggggcc

SEQ ID NO: 7589 - DNA, 120 bp, Homo sapiens
cctcggggtcagggtcgggggtggcccgtaaggcctgcacgagctggtccagcgactgcagcagtgtgtgggggctccagcaggcatccagggagggcaggaaggggtcaggcgtgcaga

SEQ ID NO: 7590 - DNA, 120 bp, Homo sapiens
actcggtgtccgtggggatgcgcaggtagaaagcgtgcagcatcattctgaacggccggtcctcccggcccgagacttctccgtaggtcaggtcgcccaccacggggtggcccagggcac

SEQ ID NO: 7591 - DNA, 120 bp, Homo sapiens
gcacgcgcagctggtgtgtccggcctgcgggatgagggcggtgccggatcaagctgggagcggggccgatccacacctatctccctgaccaggacccacctcccgtcatgaccccgctgc

SEQ ID NO: 7592 - DNA, 120 bp, Homo sapiens
gctcggtcctggagaatctaggccagccagacccccaaggaatcagtcaggagccagcagggaccctgtgtcaggtgagaagctgagaggctgcagggcgtggagttaagaacgcaggag

SEQ ID NO: 7593 - DNA, 120 bp, Homo sapiens
cttcgtggccctgtgcctcagtttcccttctgtcaccaccaggacaccgcccaccccagacacacccgtgagcggcttcagcagcactttggagacaggatcgcctgcgtacagcccgtg

SEQ ID NO: 7594 - DNA, 120 bp, Homo sapiens
ccacgagatctgtgaggcttggctttgggttctcacaacctggggcgcagaaggcaggtgtgaggttagtgggactgacccggggcccaggcccaccccaacgcacgatgcccgcccggt

SEQ ID NO: 7595 - DNA, 120 bp, Homo sapiens
ccacgatgcccgcccggtgggtccctgcctgccacaccctgcgagccctcgatgcacatggtgtgggcccggccctccgtgctgttcctgccaatggcatggctgatggttacccggctc

SEQ ID NO: 7596 - DNA, 120 bp, Homo sapiens
ccccgcagctgcaggagagggagaatcgcacgcagttcacggggcagcccagtgctgccggggagcccacctaacaccaagcaaccacgtagagcgtggtgggaggctctgagccagggc

SEQ ID NO: 7597 - DNA, 120 bp, Homo sapiens
ccacgccccaccccaggactgaccaggtcttaccaatgccaggtaagccttggtcacgcgccgctccttgaagcacctgtacgcgctgccggcggctgccttgtttagggccacgcacag

SEQ ID NO: 7598 - DNA, 120 bp, Homo sapiens
caccgatgagttgaatgacagttgagtccccgctctggagtgaaggagtgagccctgacagaaccagggaggttacccccgacagggaggaacagtccctcacttgatcaggtgcgggct

SEQ ID NO: 7599 - DNA, 120 bp, Homo sapiens
gtgcgtaaacatttggcttcataagacatagaataaaaccatgtcatttctcatcctactaaaaaccagtctaccaaaaaatgccaccatgaaccttttcacacctgtaactttatatac

SEQ ID NO: 7600 - DNA, 120 bp, Homo sapiens
atacgtgtgtgtgtgtacatatcatatatatctcatacggggctgagggctcaggcactgccccttggtgcagccgtgggtggggggcctcaaggactgtgtgggagtccccggggtctg

SEQ ID NO: 7601 - DNA, 120 bp, Homo sapiens
gcccgcaggaggcaaggagaggccgagacccccagggagcgcccaggcctgaacccctcctgcgccgctgaccctgcagatgctgccgtgggcggcgaccgcacagacatcccctctgct

SEQ ID NO: 7602 - DNA, 120 bp, Homo sapiens
ctgcgggaccggcaaggacgccggaccgacacggcctccccatccctgggtccaccccgactcccatggtggggagcggccggcttggagcccctgtgggacggagtggaggtggagcaa

SEQ ID NO: 7603 - DNA, 120 bp, Homo sapiens
gcccggagctctcggccatcatgtgcgaatgttttgctccgtgctgacgcctccctcggcaccgtcctgtctgtgttgtggactgggcagctctcacggggttgggcgcttctgcccccg

SEQ ID NO: 7604 - DNA, 120 bp, Homo sapiens
ggacgctggccggcatctggagacgtctgtgatctccgctggtgttgccgcaggcatctggctggtggagcccggggaggccgcccaggaccctgcgacccgcaggaccgccccgccgcg

SEQ ID NO: 7605 - DNA, 120 bp, Homo sapiens
ggacggccagccccgaacccccagcgcccggggcacccctgcctgcctgccctgggcggatccccggggccgcgcggttcgggccgcgctcctgcccgctggggtctcccgccgtcctcg

SEQ ID NO: 7606 - DNA, 120 bp, Homo sapiens
cgccgtcaccaccgggtggagccacaggtccgtgtgatcgtccccgtgaccccgggttccggaaggatcctcacccaacgctggcccagcccggctcccaggacccttcacaatcctaaa

SEQ ID NO: 7607 - DNA, 120 bp, Homo sapiens
attcgggcttttgtttacgtgggcggccgctgtggacattcactctaccagaaacagagcatttaaaaatgttcaccttttcacgtaaaaatagcaataaatccattgcacgtgaacata

SEQ ID NO: 7608 - DNA, 120 bp, Homo sapiens
aggcgtgactttgtgctggattctcatgtctgcgtctgcttgcaagccggtggcctccggaacattccgccccacactttcaggagagtgggaaggaggccgggcgcagcggctcaggcc

SEQ ID NO: 7609 - DNA, 120 bp, Homo sapiens
aaccgttcttagaagtgtcaggaaaacaggtttgacctcggggaccctggaagctttctgggtcccctttgagaagcatggtctggacacagccgccagatgcctgttgtggggtcttta

SEQ ID NO: 7610 - DNA, 120 bp, Homo sapiens
agacgagaggaaatcacagaaaggcaaagagcccaattaacagacaggcagaggacccgacctgacgcctgtccacagcaggcccacgacggccagcagcggggggagctcgtcacacta

SEQ ID NO: 7611 - DNA, 120 bp, Homo sapiens
ggacgaaagtggcagtggggtatcgatgcaacagacagcacttccagagctctgttgtacccctgttccaagatgcctccaagcgagagtacaccagaagggcaaagccctctatgctgg

SEQ ID NO: 7612 - DNA, 120 bp, Homo sapiens
ccacgacggccagcagcgggtggagctcatcacaccgtcacactaggcccacgacggccagcagcggggggagctcgtcacactagggggactctggtcctccgccttgaccagccccca

SEQ ID NO: 7613 - DNA, 120 bp, Homo sapiens
tgccgcccccagtcccacgttggcagctgtcccctccccaggcccggcagcgtgtagggaggcctgggtcccccgagtctgtggacaaatgtggtttggggacaccagcccctgccgaag

SEQ ID NO: 7614 - DNA, 120 bp, Homo sapiens
cttcgtgctgtgtcgggaaagggatgctgtggcagggacgcacctgagcgtccaacctggtcctggggacgggggcggggtggggctccacatcccggcaaggcgtcgggagctgtgagc

SEQ ID NO: 7615 - DNA, 120 bp, Homo sapiens
gcccgtaacacaagtcattacgatgctggctgagcgtgggcctgctgagagccctggtgggcacgccactgtctcgtccatggcaccgccgtcccatccgcggcaccaccatctcgttca

SEQ ID NO: 7616 - DNA, 120 bp, Homo sapiens
tcacggcaccaacgtcccgtccacggcaccctcgtcccatccatggcaccactgctggcctggccaggatgcatccctgcgggggggctgcccctgctctgaggatgtttgcagcctcct

SEQ ID NO: 7617 - DNA, 120 bp, Homo sapiens
attcgagatgggcaaaaacatcccacgttgccctggggtgccctggagggcggagtcccccggggtcttctctggacagtgagaagccacgatggggcattggtgccgattccattcgcg

SEQ ID NO: 7618 - DNA, 120 bp, Homo sapiens
aaccggcgggtgctcagccggccgcctctgcccttcctccctcccccacagaccccgttctgtgcaccccagaatgtgggctgacttttgttcttcaccgtgagagcttccgggaagcag

SEQ ID NO: 7619 - DNA, 120 bp, Homo sapiens
gagcgggattccttcctccttgtccctctccgagcgggagggtgatggccgacggcatcggggcaaatgtgttgctttgagaggctgagaggaggacgcgtggcccccaccccttcccat

SEQ ID NO: 7620 - DNA, 120 bp, Homo sapiens
cttcgtgctgtgagccacaaacggccgtggatcccagagccagactccgggcccgcccagcccagggggagggcggactgccaagctcaagcacgcggcctcggttcagggacaggttcc

SEQ ID NO: 7621 - DNA, 120 bp, Homo sapiens
ccccgtgcggcgaggggcacggtgggccgagagccagatgagaacccgctgcctccacgcggccgtgccctctggcagcctgggctggagggaggtttgcacggctgctagacatcttcc

SEQ ID NO: 7622 - DNA, 120 bp, Homo sapiens
ctccgttctttcctaaaacctgtacttttctccctcggttcccatcaaaccgggatttgagaatgtttatttgctaaaagcgattacgtacagccgcttcctttgagcctctgcttttat

SEQ ID NO: 7623 - DNA, 120 bp, Homo sapiens
tttcgccgtcattccactttttaaagtccgggatggctttcggtgtcgagcgctgtgggtttgagagcgagagggttgcttgtggtctctttgtccccttcaggaaagcgtgtcagaatt

SEQ ID NO: 7624 - DNA, 120 bp, Homo sapiens
tgacgccctatcaccctatttgcagctccagatgatacaccaatagcttctaagcaggaagcagggccagcctggttacacaagactgactagtgttaaggaggagaacaaaaacagaca

SEQ ID NO: 7625 - DNA, 120 bp, Homo sapiens
actcgggggcttaaagcaacagaaacccacccccactgtcctggaggccagaagtctgagatcaaggcttcggcagggctgtgttcccactggagactccaggggagggtcctcctgccc

SEQ ID NO: 7626 - DNA, 120 bp, Homo sapiens
cctcggcttgtggccacgttgctcgtctctgcctctgacttcacttgaccacgtcctctgtctgtgttttctcctcgcctgtctcttagaaggacccctcccactggatttagggcccac

SEQ ID NO: 7627 - DNA, 120 bp, Homo sapiens
caccgtactccaggacgatctcgtctcaaagccctcaacctactgatgtctgtagagacccttttccaaatactgtcacgtccacaggttctggggcgaggacgtgggtgtctctttttg

SEQ ID NO: 7628 - DNA, 120 bp, Homo sapiens
ttccgcattctcctactattacggtctctaggcctccgggccagcccctctgctgcctgggtctgtgggtggctccggccccactctggccctgcccagttatgggtgtgcacggcccga

SEQ ID NO: 7629 - DNA, 120 bp, Homo sapiens
ccacgggggctttgctcttctcagctcgggggtcgtgggatggggaggtcagcagagccggcaagttattcacaaggtgcttggtgtctggttcccaccctgtgggcctgaggacgaagc

SEQ ID NO: 7630 - DNA, 120 bp, Homo sapiens
caccgtcaccatcaggtcattcccttactgccaccgagtggccggggctgcaacttggcggtggggtccccattgcggtaccgagagagggctgagggtgctggtcacgcactgccctgt

SEQ ID NO: 7631 - DNA, 120 bp, Homo sapiens
ggacgtggccagggcatgtggaccagctggttttcggcgctgcctgcagggcgatggactcagcacagtccccactgtgaactgggcacccggggttgaggggatgcctgggagaccctg

SEQ ID NO: 7632 - DNA, 120 bp, Homo sapiens
ggacgtccaggaaacgctgccagctgtgctgccctgcagagtgggaggctgggtccatgtgtgggcactttgttctgagcagcctggatcagaggcctgggctcacactgtctacacagc

SEQ ID NO: 7633 - DNA, 120 bp, Homo sapiens
gggcgtggggaggcaaccccgagctgtgggtttaaccctcacctgcctgcacccctgctccctgtggaggggcagcctggcctctcccgtgtccccaggtggggcgcggtctccttgccc

SEQ ID NO: 7634 - DNA, 120 bp, Homo sapiens
tctcgttgtttccccctccccctgccaacctgcccccagggaagatgagtctcattgacatcctgctcccaggagagccagaggcccggccccgaaaggcagatgcctcaagcccaggga

SEQ ID NO: 7635 - DNA, 120 bp, Homo sapiens
ggacgtggcgtcctggtgtggtcgggctgaggagccctgggggctgtgtggccccctccttgctgcagctctgcttctggctgagatcactgggctgggctgggctggggagggtccacc

SEQ ID NO: 7636 - DNA, 120 bp, Homo sapiens
ccccgaggaggtgtggagcccctgtgaggtggccactgccagccctgggataggagaagggtgaggactcaaggatgtgtggatgggtccaatcggctgccaccacctggaggcccccag

SEQ ID NO: 7637 - DNA, 120 bp, Homo sapiens
tgccgctaccccagagccctcaggacaacagaggcctcgaacgcgtcctgccagccaggagcctggtccccagcacctggctccatggcccccggaaggcaggggctccgtagttgtttg

SEQ ID NO: 7638 - DNA, 120 bp, Homo sapiens
acacgggcctcccactgtgggggcttctggggggccctgctgcagctccgcatagggggctgggggctgccgtggacagcgtccccctaagggggtggtggacactgggcgtggagggtc

SEQ ID NO: 7639 - DNA, 120 bp, Homo sapiens
ggtcgcggggggcagggcagcctgaggatggtcagagtgatgccctggatgaggtgtccccacccctgccctggatgaggtgaccccaccccccccagaggccggaccttcctccgaaag

SEQ ID NO: 7640 - DNA, 120 bp, Homo sapiens
tcacgtttccccttgggaaagaaaagccctgagcccctttctcaggtgggcatttgaggtcttgggcctggtggctcttgcagaagccaggcccagcagcaggggctggagacgaaaagg

SEQ ID NO: 7641 - DNA, 120 bp, Homo sapiens
ggccgctccgtgcaggggccgctccgtgcaggggccgctctgtgcagcggctggttcagggacgtggctggggtgtggtcacctccggggttaagagcaaccgccgggcagaggctcagc

SEQ ID NO: 7642 - DNA, 120 bp, Homo sapiens
acacgcctcactcctatttccaaaatacctttccattcacacaattgacaacactgatgttagcaggaagtgtcgcacccgcggctgtgtacttatgtgtgctgtcatctggtgcgtgca

SEQ ID NO: 7643 - DNA, 120 bp, Homo sapiens
gcacgtgtttccacacaggtgctctgtgtgtccccctggcctgagaggggtgtcaccggtgcctctgtgtcctggtgcccctagccacgctccctcctcttccctcccagggaacatggg

SEQ ID NO: 7644 - DNA, 120 bp, Homo sapiens
ccacgatgccagctcccgtcgcttggggatcttctcgcaggttcctgcatggggctgcccaggccctacctaccagcccccgttatccctcgaactctcagactcacttggaccagggat

SEQ ID NO: 7645 - DNA, 120 bp, Homo sapiens
gtacgtggctgcatgtgggacaatttctcgggtcattttcgtcggaaggtacctggttgttcttgtcggaaggtacctggtcgttctcgttggacggtacctggccgcgtgggggatgat

SEQ ID NO: 7646 - DNA, 120 bp, Homo sapiens
tctcgggttgttcttgtcggaaggtacctagttctcgtcggaaggtatgtggccgtgtgtgggatgatttctcgggttgttgtcattggaaggtacgtggctgcgtgtgggacgatttct

SEQ ID NO: 7647 - DNA, 120 bp, Homo sapiens
tctcgggctgttctcgtcagaggtacctggccgcatgcgtgggacgatttctcaggttgttctcattggaaggtacctggccacgtgtgtgggacgatttattgggttgttctcgtcgga

SEQ ID NO: 7648 - DNA, 120 bp, Homo sapiens
ggacgatttctctggccgttctcgtcagaaggtacctagccgtgtgtaggacgatttctcgggttcttgtcggacggtacctggccgcatgtgggatgatttctcgggttgttctcatcg

SEQ ID NO: 7649 - DNA, 120 bp, Homo sapiens
tgacgagggagctttcttttctgccactgtgggccagctgctgccgtctgtggtattcttgtgtgttgctgatctgaagctccaaagctgccattctcccaaaccttcctgctcagatga

SEQ ID NO: 7650 - DNA, 120 bp, Homo sapiens
gtgcgggactggggcagcttagtgtcagggcgcagagcaggccctggagagccagggggttgccgtgtgggcgctggcactggttgctagtgtaaaggccccacggccctgaccacacag

SEQ ID NO: 7651 - DNA, 120 bp, Homo sapiens
agacgtttgggggagatgggctcagtgtggtgaggccttgggactatctgccaaagacagatgaggtgaggggaacccagccttggaagggtcaggtgtgacagactctgggtctgcaga

SEQ ID NO: 7652 - DNA, 120 bp, Homo sapiens
agccgaggctgtcacaacccgacctcaggtcacctgtccgccccaggtgagtggacgtctctgggaacctggatccagagactggacccccaccattagggctcctctgcctgccagctg

SEQ ID NO: 7653 - DNA, 120 bp, Homo sapiens
tcacgggtcagagccaagggctccatggagtgggccctcgaggcccccagctgggtccaggggcccccctatttttgtgaccttggtggggtacccagaggtggtagcagacctgccttc

SEQ ID NO: 7654 - DNA, 120 bp, Homo sapiens
ccccgaggctggccgagatggggagggcagatcacaccatgactcccaccccgagcaccccttcagatgcccaggcctccgcccccaggggacttcctgaccacaggcatcggcctgaca

SEQ ID NO: 7655 - DNA, 120 bp, Homo sapiens
acacgtgtcggggccactggccccattgccccacaccggcaggtgggaccctccgtcacacagaacacaggcagccgggggctgggcgtctcgcacagactctgtggagagttcagacgt

SEQ ID NO: 7656 - DNA, 120 bp, Homo sapiens
gcccgatgggagggctgaggcccgtgattccgtttatatgaagggtcccgaacagggacccacagaggcatgagatggattccctggggctagaggctctgtctggaagatggaaatggg

SEQ ID NO: 7657 - DNA, 120 bp, Homo sapiens
gcacggcctcgggagcgcactccacaccacaaactgttcgcttaatgacggccctggtccacttcatgctgtgtgacttgaccccacatgccctgtgaccccacccccaggtcccctggg

SEQ ID NO: 7658 - DNA, 120 bp, Homo sapiens
caacggaggatgagggtgtctgctccagggctcttgcaggcccttcccgtggtcccaggacagtgctgcggagtctctgggctgtgggtcccatgaacggggtgcccagtcactactgct

SEQ ID NO: 7659 - DNA, 120 bp, Homo sapiens
ctacggggtccccgggagaccagtggtgcacagctgccctgggacaagaggagcctggagcggggtgaaggagcccgggaggaggggctgtgggattcgggacccactacggggaggaca

SEQ ID NO: 7660 - DNA, 120 bp, Homo sapiens
agccgcacgggagggttccgggcagggggcatggagggctgttggctcctcaggtctcccccttgcagaggctgggcaggggcaccccgtggcaccagcctttcccaggcgatgggtccc

SEQ ID NO: 7661 - DNA, 120 bp, Homo sapiens
cctcgggttcccacaactgccgctgcctgagatgtccgcccctgagctgtgccacagggctgggccccaccaacagcagagtccctgggacagccccccgggaagggccgcccaggcccc

SEQ ID NO: 7662 - DNA, 120 bp, Homo sapiens
ggccgacagctccgcgtggtcgctccggcagacttgctggctcctggtgcgtccctctgaggccctgtctgtccctccacagacacagggcgccctgtttccccgggagctggaacacgg

SEQ ID NO: 7663 - DNA, 120 bp, Homo sapiens
caccgctctcctctccacgtctctcttggcgatgcccagcttgggctgggcgcagggaagggcaaacgttgctgagccgccgaggggctgggtcttcgcctttatttctggtgcacgtct

SEQ ID NO: 7664 - DNA, 120 bp, Homo sapiens
gcccgggcagaggccacccacggtccctgaagtagggcctcagctcctccaggctgagcggagggaagtaggctccgatcctcttccgcacccaccacttgccctcggcggcgtgcctgc

SEQ ID NO: 7665 - DNA, 120 bp, Homo sapiens
ggacggctgaacttgtacctgtagtgctctcctcggacccacctgcaagggggcacatgtcagcccagggcctgctgggactcccggcccccgacccggctcctcagcctgctgctgagc

SEQ ID NO: 7666 - DNA, 120 bp, Homo sapiens
aaacggcccagacacccagataaagggcaggacttgtcagactggatttaaacataagacccaagcatacgccagctctaagagatccgcttcaaacacaaagacacacacaggcggaaa

SEQ ID NO: 7667 - DNA, 120 bp, Homo sapiens
ggacgtacagaagagttgaaaaacactattggccaatttgatctaatgaatcctgacagaacactgtctgttcatttttggctcaaacggaactttcactaagacaaaccatattctggg

SEQ ID NO: 7668 - DNA, 120 bp, Homo sapiens
ccccgtctctttggagcctttaaggaactttcattccagtgcatgttacgacatttgattctcacaaccgccgtagggtagtgggtgatcagtttaaagctggaaagacagaacttgctc

SEQ ID NO: 7669 - DNA, 120 bp, Homo sapiens
gggcgcatggaggatgggcagcacagggctgcataacaacagggctcagatgcaggcgctgctgtccttggctgcgtgggtagaacagccgtgagcactgctgaccttgaggcgccaccc

SEQ ID NO: 7670 - DNA, 120 bp, Homo sapiens
ccacggcttgtccctggcaagaggaccccaggacaagcgggaaatccaggcccacggaaggtcggtgtctcctcaggcctgcactcgcccagtgggctgctctgctgagtgatgccaggg

SEQ ID NO: 7671 - DNA, 120 bp, Homo sapiens
ctcggctcccagccgccggatgggattcaggcgtggttcccctaatggtgacatttacagtcttcacgggcgacgccaacctggatatatattatttccacattagcgggcccccatatc

SEQ ID NO: 7672 - DNA, 120 bp, Homo sapiens
gggcgcttggtgacccacagtctgagcgggctggcagcccacggctcctggtcgcagttaaaggcattacaggatctcctggcccaaatccttgctgggtgggtcctgggacaccaggag

SEQ ID NO: 7673 - DNA, 120 bp, Homo sapiens
agccgctgtgctctgtgtgagccttgcgggggcaggctggaaaggggcgcctgcctgacacggggatgcaccagccacaagatacactgcgtggaagctggccgggccaggctgagcact

SEQ ID NO: 7674 - DNA, 120 bp, Homo sapiens
acacggattcctgcagctcctgctgggagtgttggggcacacgcggtctcggtacccgtgggggagctcggcgggcacgggggcgtgagccgaggcttctgtcagcaaggctgctctagg

SEQ ID NO: 7675 - DNA, 120 bp, Homo sapiens
gggcgtccacagcagctctgcaccccctcagccactcccacccacgcctggaggccccgcagaactctgggagcccagcccagagagggctgctctgtgtggtccgccccacgcagagtg

SEQ ID NO: 7676 - DNA, 120 bp, Homo sapiens
gtgcgcgctcctagcatgaatggcctctagcctccgagagcacctcagggtgagcagggtggtcgcaggtaccctggaaggcatggccgtggcctgggcccggagtcagggtgcagacag

SEQ ID NO: 7677 - DNA, 120 bp, Homo sapiens
ttccggatcactctacttaagcagtggcctaaaactccccctgcaggtgtgggagcccagagacgcacccccaagttgcaggctgccggccacaggctgggacacccttgctccaggagc

SEQ ID NO: 7678 - DNA, 120 bp, Homo sapiens
gagcgtaggtggccccaggcagatccaggggacccccgccctggtcaggcagctccctgagggtctgtggtgcgtggcctgggccccagcggtgagtcgactctggggggctccgtgccc

SEQ ID NO: 7679 - DNA, 120 bp, Homo sapiens
gcccgtcacggggcctgtctgtagccctgacagcatccttcggcggacggaattgtagttctccacgacgtcggcccaagctcacagacaggcccggcctcggcccaagccttggggtgc

SEQ ID NO: 7680 - DNA, 120 bp, Homo sapiens
ggccgtgggtccctgcccgcccaggccctggcaggggctgccctgtgccgcgtctgggaagtggctccgaaaggggtgtggaaggagcgccgtgggactgaatcagagtgttggatttcc

SEQ ID NO: 7681 - DNA, 120 bp, Homo sapiens
tcccgcagctttctagcaacagagttatgttcaactcccctaaaaagcaatggagaattgtttgcaacgttcagggtccctgtactccagatccagtgagttttctctgcatcaaaacca

SEQ ID NO: 7682 - DNA, 120 bp, Homo sapiens
gcccggattttccatttcagcagctagtgccatccctgctgctaaaagcagctgcgtgacccccacattcacaacctgctgttgcatccgcgtcgtcaggcaaccgctccgatgtgggga

SEQ ID NO: 7683 - DNA, 120 bp, Homo sapiens
aggcgtcctcagctgggacaggagctgcatcccccctctcctgtgctgcgctggccctgggatcctgggggtcctcacaacggtgctgaggacatggctctggtccctctgccggctgag

SEQ ID NO: 7684 - DNA, 120 bp, Homo sapiens
aagcggccgtccatgcatccccggtgtctcatgggagcgggcccttggcctgcggggtctgcactcaccctgggtagaggtcgtcagaactgagttagctgcagggcaccctggtggagt

SEQ ID NO: 7685 - DNA, 120 bp, Homo sapiens
acacgacgtgaggaaagccacaggcttgttgtcaggagtttcaggcagagccacccggtcgcctttcaccctccagggggctggccccttctcttggaacttggggatgccttccctgct

SEQ ID NO: 7686 - DNA, 120 bp, Homo sapiens
aaccgactgaatttgccggcaactgcctttcgttaccagcagatgaaaaaagcggtgagtgtggggtgtgaggctgcggatggccatgggtgtgaggctgcggatggccgtgggtgtgag

SEQ ID NO: 7687 - DNA, 120 bp, Homo sapiens
gcccggagggaggagtcccgagggaggcatccccggggtgcatggctgcctcttgctctgtgctgctgaaacttccggaggttttcaggctcctgaagaggctcagcgtcccctacagca

SEQ ID NO: 7688 - DNA, 120 bp, Homo sapiens
acccgtccccctgtccaccgggccgtctgcccactcgtcccctgtccaccagaccatccgcccacccgtccccctgtccaccgggccgtccgcccacccatgcccctgtccaccggaccg

SEQ ID NO: 7689 - DNA, 120 bp, Homo sapiens
acccgtcccctgtccaccggaccgtccgcccacccgtccccctgtccactggactgtccgcccacccgtccccctgtccactggactgtccgcccacccgtccccctgtccactggaccg

SEQ ID NO: 7690 - DNA, 120 bp, Homo sapiens
gtccgcccacctgtccccctgtccacctggcagtgcgcccacccatcccctgtccaccggatcgtccacccacccgtccccctgtccaccggaccgtccgcccacctgtccccccgtcca

SEQ ID NO: 7691 - DNA, 120 bp, Homo sapiens
tgccgggccctgctccaccccatagaggccgcatgctgcaggcgcaggtgcgacaaggcgcagagaggaaggacggccaccagtcgtggcagacgcagtggcacataaaggacaggaatc

SEQ ID NO: 7692 - DNA, 120 bp, Homo sapiens
gttcggaggcgatggctgtggtgggtgtagcatggtgggctctggggcagccgcactgggctgcaggtagcgctgtctcactgttgcccacacggtgggaagagggtgagggtctctctg

SEQ ID NO: 7693 - DNA, 120 bp, Homo sapiens
tttcgtaatggccgcctcccatcagcgagtgctcccctccgtgggcgtgctggggtgtcgggcctggctcctggtaccatgacactgggctcagggtttccacacgaaatggaattcggg

SEQ ID NO: 7694 - DNA, 120 bp, Homo sapiens
acacgatctgttcacagcggaggccagcctcggcccggacagagctgacagggctgtcctgggcagggagccccggggcggggtggggatggccacgagggaggaagacagggtgagggc

SEQ ID NO: 7695 - DNA, 120 bp, Homo sapiens
gggcgcccccctcaggcagaagcgtggggtacagcagggctgaggaggccgcggggggaggcccaggagcccctggaacgcagggtcccatctgccacggcgccagtcgcggtcccactg

SEQ ID NO: 7696 - DNA, 120 bp, Homo sapiens
ctgcgggagactggcctccagacggcggggggtgcggcctgaggcctgccggggccatcaggacctccagagcaggggccggagctgctgttgggatggaatttcctcctctccagggag

SEQ ID NO: 7697 - DNA, 120 bp, Homo sapiens
cctcggtctcctgcctggtcgggtcagcctcgggctcccagtagaatcctcctccccaggtcagcccatcacgggctgtagccacgtctgcgaaacattaatacctcccagtagcacgga

SEQ ID NO: 7698 - DNA, 120 bp, Homo sapiens
acacgggagggccttcggggcggccgtgggcccctagccggggccaggcaggacgggagccgccgggttctctggctacatgtgaccgagaaggcagcaggctctgctgctgtctgtgca

SEQ ID NO: 7699 - DNA, 120 bp, Homo sapiens
ggacgacctgggcaggggaggggcgtgtccaattccaacgtgtttggaacatggggctcgcgagactggcgggggagtgggagagccaggagaggctgcaccgcgccctgaaggacggca

SEQ ID NO: 7700 - DNA, 120 bp, Homo sapiens
gcacgtggctcaagtgaccgatgccgagagggacacgaatgagaaacggcaggggagtgggaccaagagcccagcccggccctacaggaacaccaagcaacaggcaccctgttcctcacg

SEQ ID NO: 7701 - DNA, 120 bp, Homo sapiens
ccgcgcactgtgaaggctgcctctggcggggccatgtctgggtccggcatcgccgtctctagggtcttgctgtacgtccctgccctcacatgccctgtgcccccaacgacagggagggcg

SEQ ID NO: 7702 - DNA, 120 bp, Homo sapiens
cgccgaacacccgggagtgttactgtttaaagacctgaagggtgaactgttttaaaaactgagagtcaggtcttctggaggctgggtttgctcagatcacaaaagcaccggagactgttt

SEQ ID NO: 7703 - DNA, 120 bp, Homo sapiens
tcccgcttgggctcctgttctgcaaacaggcatgaaaacagccgagggtgtccagctgaccgggcggagaaggccccactcctcaaggcgctgcccacacccaggggagctgctgcttct

SEQ ID NO: 7704 - DNA, 120 bp, Homo sapiens
gcacggctccaccgggcaggggcacaaccaccgccactgctccccccgcatgagcaccagctctgctccctgcagaatccgagagtggaactctatggagattcaaaccaggaaaagaag

SEQ ID NO: 7705 - DNA, 120 bp, Homo sapiens
ccacggatttttttttctcccagagcaagtgtcaaaggaacaaagccttctttgaggcttttcagcccaaaattaattctaaaaaaaaaaatggcacagacaggccaataaacgcaccag

SEQ ID NO: 7706 - DNA, 120 bp, Homo sapiens
agccggggacccacactgcccgtgccaccctcccgctctgctcggaatgccagaactttccaggcccatcgacgatgttcccgccttgcaacgtgtggctgcagcagctcttctcctgat

SEQ ID NO: 7707 - DNA, 120 bp, Homo sapiens
actcgaagtgtcttgacggtcgtatgcggagaaggagacactctgtggagaccccgcttctctcacttggcccccagaggccgccatccaccctgcagcgacagccccctgtgtaccctt

SEQ ID NO: 7708 - DNA, 120 bp, Homo sapiens
ccccgaaagcaccggctaacgtggtgtttgaggagggggcgccgccaggcctccctccgagccacaacctcctccatccttctggcgttagggtcccctcgcctgtatcagtggcccttc

SEQ ID NO: 7709 - DNA, 120 bp, Homo sapiens
actcgcgacaggtcctgcctccgcaggagagactcaaaggggagagctttgtcctggagtcaggtcacagcccagtgcccctgtgagcagctgcaggggtctcagacttgttgcaacagc

SEQ ID NO: 7710 - DNA, 120 bp, Homo sapiens
ccccgagtgctctgagagctgggggtgggtggaaaccgtgtctcagggtgaagggaccgctggtgggctccgtgggcagaggcactatggggtctatcaagaccctctagtctccatatc

SEQ ID NO: 7711 - DNA, 120 bp, Homo sapiens
tcccgcctggctccgtggctttcctgtcttcctgggatggtttccgcactttcttgccctcatgcaagagagaactggcatgggaggtgggctccgcccccgagtgcttcagctcacgca

SEQ ID NO: 7712 - DNA, 120 bp, Homo sapiens
ctgcgtggtgggcgccttctgcgtggcgggcgtcctctggaggaggggcctcgcctctgggccacttcatgcctcagaacagtgggctgagcatcaaagtgaggtgggccagggtctcca

SEQ ID NO: 7713 - DNA, 120 bp, Homo sapiens
ccccgtggcttcacattgaggacaaagctcttccctcagacacgcagctgactggctcatcgacactggctgggctctaacttgcagaccaagggacctggacctggacaaacgccctgg

SEQ ID NO: 7714 - DNA, 120 bp, Homo sapiens
gctcgcttgctgcctggaagtgaattcccatgagtttgagggcagctgtttcctccccaagcacctggaaaaggctgtcccaagctgacagtcgggccgccgcagagcctaggggaccca

SEQ ID NO: 7715 - DNA, 120 bp, Homo sapiens
ccacgctgcgggcaggggcactgactttctgaccaatgccagccgggagagcctgggcttccgggatctaaggcctgttctcagaggcttgtctgtctgaaaacacctgaactgctcctt

SEQ ID NO: 7716 - DNA, 120 bp, Homo sapiens
ccccggctctgggtgtccttgaggccttggctgctggggcctggagcagcccaggtgggggcagagccaaggggtggcagccaggccgtgtaggggccaggatttggggcacatgctgtc

SEQ ID NO: 7717 - DNA, 120 bp, Homo sapiens
ccccgccctgagatgccgatgctctgtcctcacaaaaccaggatggggaaagaaaggggaaattattttttaaaatagcgtcattaaaggccatctgttgccttcaacgctgtgacttga

SEQ ID NO: 7718 - DNA, 120 bp, Homo sapiens
ccacgccattgatcacgtcctgagtgaaagagaccttcactttgacacgactgaaataaactcatttaaagcagaaaacctggccgaaacacgggggaaatgctccagggctccaggaga

SEQ ID NO: 7719 - DNA, 120 bp, Homo sapiens
agccgtctgtgcgtgcagccccggtgggatgtaggctggagacagccctgagtcaggaagtccggcgaggccatctgggtccacgtggctttttggtgctgtccccgcagcttgaggcaa

SEQ ID NO: 7720 - DNA, 120 bp, Homo sapiens
aggcgccgcctgccccgcctgtgtctgcaaggaaccgtgctgactccatgatggctctggcccagccccaggaagccatgacccgcacaacctgaggatccacgaagcccagccagggcc

SEQ ID NO: 7721 - DNA, 120 bp, Homo sapiens
ggccggccccgaaccgggtggagagcagtggggggtggggtgggggtggttcttgtttcagtgcagtcaggtggcagccaacccacacatacagccagcctggccaccagcactggggcc

SEQ ID NO: 7722 - DNA, 120 bp, Homo sapiens
acccgctgacaccctgtggcagcggcaagctcagctatcctgtgcatggcacggacatgggttgggctgaggatgcccactgcctgccgctccagggcctgaggggagctctgggagcca

SEQ ID NO: 7723 - DNA, 120 bp, Homo sapiens
acacgcctggggtggacagccctgggccagcgcagcagccggagtgagacggagcaagtacagtgagtgccaggctctgctccagcccccgcaggccgatgcgtctggcctggcattctc

SEQ ID NO: 7724 - DNA, 120 bp, Homo sapiens
cagcgtcccccgccttgctggagcccacgagaggatgcggcttcctgcagctgcgccctgggggctgcctgtttcaggctctggctctggctgggctgattgtctttccagggctcaaag

SEQ ID NO: 7725 - DNA, 120 bp, Homo sapiens
atccgccaagctgacggtgcggcgctggttgtgacccaagtgcgcgagcgggggaaggggtgtgcgtgccttcctagccggctctgtccacagggtggttcatcagcaggtggacactct

SEQ ID NO: 7726 - DNA, 120 bp, Homo sapiens
aaccgcctggcggctcctctgcggggccggctcctctccctggagctctgcttctctcccagggcttcggcctgacagcgcttcccccacccggctgctgtccacagagtccttggaaat

SEQ ID NO: 7727 - DNA, 120 bp, Homo sapiens
acccggagacagcatcccactttcctgcgcgatctggatgccgggttgcagctatgccctcctccaacaagccatggccaactgtctgcagccactcacgcacccctcagccaggaccct

SEQ ID NO: 7728 - DNA, 120 bp, Homo sapiens
gcccgacaccacgtccagaaagctctccaaagaccccacccacccatgtttccctcccgctgtgccatggccccgagcacacccgaccaggcaaggaggcagagatgggaaggccctggc

SEQ ID NO: 7729 - DNA, 120 bp, Homo sapiens
gctcgtgccctcgaggggatggggcaggtcaggccctgctgcctccagctgcttccagtgccctccccagacacctggcctcgtggacagaggctgagctcaccagcccagaggtcacca

SEQ ID NO: 7730 - DNA, 120 bp, Homo sapiens
atgcgggagcggctcctgggaggcggagccagcccgcagggttcacacagtaaaaacagtgaggacctagagtaagcacccaagactccccacagccccagaaaaccaacctgtcaggga

SEQ ID NO: 7731 - DNA, 120 bp, Homo sapiens
ccccggtgcccgccatccacaggtatgcagtgacattgcggacgggtgcccaccacccccgtgcggctggggcaggaacacctgggttgaagctggcatgccacagagggcagagaggaa

SEQ ID NO: 7732 - DNA, 120 bp, Homo sapiens
ccccggcaagtgctcatcatgagaggccatgtaaccctcccagaaaaggaataaagggaattaggtgctcgcataccaccagggagcacctcaagaaatggccagttcactccatgcatg

SEQ ID NO: 7733 - DNA, 120 bp, Homo sapiens
tgacgtttctgcagcactggctaagggctggcgcaaggtgagacgcagggatgtgagtgagggggagggaaaaggagggcgctggggaagatgggagccacagggggacagagccccgag

SEQ ID NO: 7734 - DNA, 120 bp, Homo sapiens
gaacgagatggaaagaagagctatgcccagacatggacgttacgatgcagggaacacacggtgaggaatgggcccagacagcccctcacagtgcaccaaagcacactaaacactacacca

SEQ ID NO: 7735 - DNA, 120 bp, Homo sapiens
ccacgccacacagaaccacgctatgcgctacagcgagccacgccacacagaaccacgctatgcgctatactgagccacgctacacagagccacgctacacgctataccaagccacgctat

SEQ ID NO: 7736 - DNA, 120 bp, Homo sapiens
acacgctacagcaagccacgctacacactacactgaaccatgctacacgctacaccgagccacacttcatgctacatgataccccaaaccacgtggagtcatcgcttcctgagtccgtgg

SEQ ID NO: 7737 - DNA, 120 bp, Homo sapiens
gtccgcagctgccccggggggacagggtgggaggagccgcccagcactcgggcccctgcctgcggcatgacctgaagctgaacacaggcacggcagccacgcctcgaggccagggagaga

SEQ ID NO: 7738 - DNA, 120 bp, Homo sapiens
gaacgttccggactgaaggagtggccgagacggcggcacactctggccgtggccctggcgtgagcgcgctgtcgggtggggcaggcacaagttccttggggcagtgcccaactcttcgta

SEQ ID NO: 7739 - DNA, 120 bp, Homo sapiens
gtacgtcttcagcgaatcctccacgaaacacttaagcaaacagatgctcagagagcatatctgtacgacatggtttccaacacaaaaacatgaagattttatcattccagcccaaaatga

SEQ ID NO: 7740 - DNA, 120 bp, Homo sapiens
ccacgtgaagcggaagagcaggtgagagctgcgtagctctggtcagtgtggcagacgtcaaaaggaccacgtcgctcctgcttttaaagtgcacatcgtgtttttgtgaactcagaggtc

SEQ ID NO: 7741 - DNA, 120 bp, Homo sapiens
caccgtttgcagggcagacgcagatgagcagcccctggctgggcaggaagcacgcacagcccgccgcccccacaccagggcccaggagggaacccgccacccccaccccggggctcagca

SEQ ID NO: 7742 - DNA, 120 bp, Homo sapiens
ggtcgtcctgagagacgtcaaagccaagcaggcaaagcacccgggaggaaggacgcagccaagagaccatgaggaggccgcgctttccctgagcgtcaggacggcgggtctcatacctcc

SEQ ID NO: 7743 - DNA, 120 bp, Homo sapiens
gggcgtccagtgctcctctctgagtctcctcctgaaacagactcagaggtgtggttctgtcccagaaacagggatcatgagcatgcccgggaaaagccagccggtccccagcattcaaac

SEQ ID NO: 7744 - DNA, 120 bp, Homo sapiens
gtgcgcagctggccaggccaggccgacaggaggacagagggcggcgggggaggaaggaaacagcctcacctctcctagaagcctcacaggttagaagagccaccgttattccccaaacac

SEQ ID NO: 7745 - DNA, 120 bp, Homo sapiens
ccacgcagaagagctccacttactgctccaagcatgatcctgaagatcagccaccggaagccccacaggacaatccgggatgtgggggtatgctggggcagccttgacagcgtccacaga

SEQ ID NO: 7746 - DNA, 120 bp, Homo sapiens
ccccgtctccagaagctgggactcccatcctaaaacaacgagacataccaaaggtgagttaatggaagccacacatttcacaaagaaatcatttcagaaactcagtttaatggaaacggt

SEQ ID NO: 7747 - DNA, 120 bp, Homo sapiens
gcccgcacgtattagtctcaacatcgacacgcaaggtcaggtctgcaggagtgggagctctggcgtgggacccagggcctaggtcgggacttcctgtgacctcggcacccttcgccctgg

SEQ ID NO: 7748 - DNA, 120 bp, Homo sapiens
ccccgctctgaggtccgccacctgccaccctgcaggacgctgcacggacctgacatctgagaatgcgccctgcacacatgctgccggcagactttgggggaagcttttcccctcccatag

SEQ ID NO: 7749 - DNA, 120 bp, Homo sapiens
tctcgtgggagttcccgtctacaggtatgctgttcggaaggtgggcttaacagagaacgttcacaggtccaacctcaagccaaacaacatgggctcagtcacctacatggcccatgccct

SEQ ID NO: 7750 - DNA, 120 bp, Homo sapiens
tcacgtgccctggtgggcctgaccaagctgaagtcagggcaccccctcctcagtgtccacggtgccaagcaggggctcagcaagtatctgccagctgtgtaaatgacccgatgacagttg

SEQ ID NO: 7751 - DNA, 120 bp, Homo sapiens
agacgctcacccacctgccaggctctggagactaatccccgtctagccaggaaggtaactctgttgtttcagaggtcagctcacaggcaggactgagtgctaggcaggagtcagatatca

SEQ ID NO: 7752 - DNA, 120 bp, Homo sapiens
ccacgccatttgaaaggaggacacgaccatgacccggctgacagaagagacgcccagggtgggctctctgagtgcctggccttgtgtggcaactgccacccctcccaccacggggtccct

SEQ ID NO: 7753 - DNA, 120 bp, Homo sapiens
ggacgtcacttttaccatcaaatatgtctacgccttgtcaaatcccttcccatgcattaacacagagacagaggctgcagcccagccagggagggccccacccacccagttggggctacg

SEQ ID NO: 7754 - DNA, 120 bp, Homo sapiens
catcgtcagtgagaaatgaagcaccgagggcggtgtccctgggtgctggcggcctcccagcgtcccctccagccctggcgctgctctcagtactctttgaagtggagccaccatccgtcc

SEQ ID NO: 7755 - DNA, 120 bp, Homo sapiens
tcccgccacaggaaggaggacccctgaggtgtcctgactttggtccaagtttctggagaggatctttccttccttctggggtcgagacagtggggaagggatggcggtgctgccgtgctg

SEQ ID NO: 7756 - DNA, 120 bp, Homo sapiens
tcacgccatggtaaaaggattaagctccatgcagaccacaggggcctatggtccccctaacagagttgccacataccaggtgaagcaagcaatgcctatgggcactgccaaacagacaaa

SEQ ID NO: 7757 - DNA, 120 bp, Homo sapiens
agccgacagtatgactgggaagccacgctgcagagggggaagatgatcaaaggcaagctccatttccctgggtgccccaaggttgcatttgaagcccaaagaaggctaaagggcactgga

SEQ ID NO: 7758 - DNA, 120 bp, Homo sapiens
cttcggtgttggaaagagaagaaaagcctccatcttgggccctgtggagcagccacgctcaaactgatggccccagctcacgtgacagacagcgtccccccacaaggaggggtccagtga

SEQ ID NO: 7759 - DNA, 120 bp, Homo sapiens
tgccgtgtgggattcatgcagttccagagttcccaatgcacccgcgcccccccaccgcccggccacctacatctaacctcactgctatttgggctgctgttttactggacactgcaactt

SEQ ID NO: 7760 - DNA, 120 bp, Homo sapiens
atacgccacatgaaccaccctgttaagcctgtcctcctgcaactcagaggagaaaactgccacttgactggcccctgtcaagagagccacacaatagtcttggaaccaaaatgggacagc

SEQ ID NO: 7761 - DNA, 120 bp, Homo sapiens
gagcgaaatcattgcgggttaattgttgattgcagaaaacagcagttttgatctgctggggacacactttatttgccttgaggtccaggatccttaattatcttgccccactcttccacg

SEQ ID NO: 7762 - DNA, 120 bp, Homo sapiens
ccccgatttcactgactaagaggagataccagattccatccttgaacaagagggatagaaagaggcagtatagagaagtgcagcgactaactacacagcttaatgtgtatgactttcatc

SEQ ID NO: 7763 - DNA, 120 bp, Homo sapiens
aaccgtgataagcagtaaacttagatatctacaaagccaaagagaggatacacactttatatgattgttgtcatgagactgatgttttagggaatatattattacaagattgtctgcatg

SEQ ID NO: 7764 - DNA, 120 bp, Homo sapiens
gaccgggactccctggtaggggcctgagtctgggagcataggtcatctttaagcagaaggacactgaccctgtccagacaatacaaatgtgctgagcattcaacttacaagagtttctcc

SEQ ID NO: 7765 - DNA, 120 bp, Homo sapiens
atgcgggccctgttctagctgctgctctagatgtaccaagataagtgagacatggctcctaccttaaggactgtgtgtctagaagacagacatttgcatataatttcaatatagttcgat

SEQ ID NO: 7766 - DNA, 120 bp, Homo sapiens
tttcgagagagggaaggaaatgcaccagatgccccaagagcatagacgggcgctgagtccaaactggagaactggagaagccacacggactctcatataataggctgattagctcactaa

SEQ ID NO: 7767 - DNA, 120 bp, Homo sapiens
agacgcacgttttagaatgatcactctggccatggtgcagaaaatggattcaggggcagggacaaggcaggtagctggaaggtgcatgaggaggcctttgcatagctgcactggggttag

SEQ ID NO: 7768 - DNA, 120 bp, Homo sapiens
gggcgtaatgcctacggaggatgctacccaaatgcaggattcagtagaaggctggctgtggggtgagggagagaggagaggccagcatgaccgcctggtgtgttcactcaggcaagtggg

SEQ ID NO: 7769 - DNA, 120 bp, Homo sapiens
cagcgatgtctcagaagccaggggaatagagcttcaaagagtaagtagctaacagtattgaaaggagcagagtgatccaacaaattaaagacttcaaagtgtactttggtaacctcgcaa

SEQ ID NO: 7770 - DNA, 120 bp, Homo sapiens
aggcgtgagccactgcgccccgcccactgtcttttttttttttttaaaggacctcaggtgattctgatgcacagctcaggttgaaagcactgaactaaaggaaggagccttttgatatgc

SEQ ID NO: 7771 - DNA, 120 bp, Homo sapiens
ttccggagactacacagagattctagtggtttccacttaaaacgctccagtgcattggagaggcatttgccgggcatgcacgcttgtagatttcacatcccatgagtgtggagctacttt

SEQ ID NO: 7772 - DNA, 120 bp, Homo sapiens
aaacgtgggtttctcatctccaacaaccctaatctacttagctctctaattactaacttcttactagtctgtgagtcagaaaaccacatgacaaaattgacttagaactgtcacacgata

SEQ ID NO: 7773 - DNA, 120 bp, Homo sapiens
caacggaggacaggacactctcaggacttacaaattacaactgctattacagctcagcatttcaaattcaagataatttcttattcaaatgtggaccaacagataactgaaaattcagtt

SEQ ID NO: 7774 - DNA, 120 bp, Homo sapiens
agacgtaagcagctagatgtaaaggggataaagaggacaaagtcatgcgcttttacattcggaattctgcacttccagcacagttctaaacatcttgtattgactttggaggagaatgaa

SEQ ID NO: 7775 - DNA, 120 bp, Homo sapiens
aatcgcaatacctaggagaagagtgtttggctgaactgaaatacttttaacacacagtgcagttacatgagtgacttaagggttcttatctctggactttgagttttggcctaaaatgat

SEQ ID NO: 7776 - DNA, 120 bp, Homo sapiens
agccgaaacagctcagcaggatgaatgaagatgaaggtactggctatcccaaggagcccattcaacagcagcttacctcttctcagctccatattttcaatgtgactgggtcttatagta

SEQ ID NO: 7777 - DNA, 120 bp, Homo sapiens
acacgcagccactgaggtacctgaggttactggataatagtaagctgtctgaggcttttttatacccttgttggaaaactctagaaacagggaaacagagtaggctttgtttctctaaga

SEQ ID NO: 7778 - DNA, 120 bp, Homo sapiens
gtacgatgaaggatatcaatctccctccttggtaattcacaatgtaccatgaatgatcaaagcctgcttaactttcaaaacttagtgtctttcaaacggatttatcaggagacttgtttt

SEQ ID NO: 7779 - DNA, 120 bp, Homo sapiens
tgacgggaaaggcagttgcaattgcagtcatgaactgcatcagtggagaatgaacagggaataattcgcttagttttaagatcttcaggtttaggaggaattctccccatagaaataata

SEQ ID NO: 7780 - DNA, 120 bp, Homo sapiens
acacgcattatggaaatgaagagctagaacaaaagagctgctacccccaccagtgacagtaaaccaatgcccgtttacaagcacaaaacccatctctgctccctctgcctactgcaattc

SEQ ID NO: 7781 - DNA, 120 bp, Homo sapiens
tatcgtctgtgtctcttgttcttggtgaatgtgcggaggcgtttaatgtgtgtggacaggtctctatccctctttagctgcagtagtaggctccagggtacctccttctttctgagcccc

SEQ ID NO: 7782 - DNA, 120 bp, Homo sapiens
ccccgcctgtgcccttgtttctacctagactctgggtctggggcttccttgccccaccacatctgcatagcagcctttttctgggatgccctctggtttacatcttctgctcttctggtt

SEQ ID NO: 7783 - DNA, 120 bp, Homo sapiens
tcacgaacttaatatttcaagtcatttttatctgggtgttcagtccacccccttgtggtgcccttcgttagtcttcataatgacttcttgaaagctctctgagtcaggccaggttgcttc

SEQ ID NO: 7784 - DNA, 120 bp, Homo sapiens
taacgcgtggaaggtgcttttctccatgagctgctggataaatgaagcctgtcatttcttgcatactgcagcttctcaagcactttcctgggactccaaggagaccaacgtgttctggcg

SEQ ID NO: 7785 - DNA, 120 bp, Homo sapiens
cgccgtgagaggaaacactggcagttttgataccagtgccataaagaatcaatgcacagccatggagtacagagagacataaggcatccttttgttcagctgcaaatactgcattccagg

SEQ ID NO: 7786 - DNA, 120 bp, Homo sapiens
gtccgaactcccataaaaaaattccagccagtgggagtgaacacagacacagtccagacagtcgattgtagatgtcctggattttggcttttacagtgaaactattccaggaattcatgg

SEQ ID NO: 7787 - DNA, 120 bp, Homo sapiens
gaccgtggtctattgaaggaggaggaaagcaaatacctcctcaaaaaaaggtgccacttgcaaaaaaagttgatttttatggttgaggatttattgcttactaagaacttggtatctaga

SEQ ID NO: 7788 - DNA, 120 bp, Homo sapiens
tcacgcctatccttagttctctcatacacacacagacatgtgaattcagctaaataatcttaaaactgtgttacatctttggaattacagatacacttgtaaaacttgttcactaggtag

SEQ ID NO: 7789 - DNA, 120 bp, Homo sapiens
atacggtgttctggctgctgcagctaaaacactgttgtcaatcccagaaaactgtcgaggcaactgccaaggacatctcccagctgctgtgtcctcaagctccagtgagaaggcgtgggt

SEQ ID NO: 7790 - DNA, 120 bp, Homo sapiens
gcccgtgggcactcccttggattcaagactgggcgtgatgctttttgccctgtgaccacaaggtagtaagatgtgttcataacatcctagagggttagggctggagttgacttcatcgtg

SEQ ID NO: 7791 - DNA, 120 bp, Homo sapiens
gatcgtagaacacaagttccttggaaagtgatatgaagccatagagatagatatcctactatagcctcatattcattggcatatcaggcccttacgagtttgctaaatgtgaattacttt

SEQ ID NO: 7792 - DNA, 120 bp, Homo sapiens
ttccgtcatctgatcatgactgagttcaagataacaagagtccgtttttggtaatggaggcatttcaaaagagaatgattttgtttcccttaagttcacataggttggccggaagccccc

SEQ ID NO: 7793 - DNA, 120 bp, Homo sapiens
atacgcattaaaaacgccagctatctcagcaataatttccagccccaggccatttactaagacacacagcacctctaccaccctgctctgatgcaccgccacggccatcccgcagacctg

SEQ ID NO: 7794 - DNA, 120 bp, Homo sapiens
agacggcagcgccggtgcctctgcacccgaccgcagctgagaacgtgtggctgcccgtatgattctgctcagttcatggtgtctcctcagccactgtgtcctgagccaagagatttgagt

SEQ ID NO: 7795 - DNA, 120 bp, Homo sapiens
atccgtagaacaagcctgagagtttcacccaaatgccatctccgtgaagaggccctccagattcacggacaccctcattagtgagttctggcagctggccgttagatgtaggacttttaa

SEQ ID NO: 7796 - DNA, 120 bp, Homo sapiens
ccacgatctaaaatccttctattaaaaaagttataattcatcccgaataaattagctgtcctctttgagaaatcttcctttaatgttttgcttaatccatcaacaattatttcatgagca

SEQ ID NO: 7797 - DNA, 120 bp, Homo sapiens
ctgcgcatccaggcttggcaatgccacggattctaattccttctcctatcctcactcctcatcctcatcaagaagaggatttgcctctgatcctccaccatgacttgggcagccactgaa

SEQ ID NO: 7798 - DNA, 120 bp, Homo sapiens
gctcgctttggggccaactcagagcaagggtgaaccaatcctagctgtcctctgacaaataacagctggagtcctgccaggagctcctcccccaagcacttggttccacaaggcaaaccc

SEQ ID NO: 7799 - DNA, 120 bp, Homo sapiens
acccggccgagagctaattccctcttggcttcaaaatccatcctatgcttggagatgctggggctgggattctacaaaccacattctggctttgtgccctgataggctcagcccccaggg

SEQ ID NO: 7800 - DNA, 120 bp, Homo sapiens
tgccgtgtggctgataggacaagtctacgaatggtgggtttttctcgtacctgctgaagcaggaactaggaaacgataaaaagaaccaagggagggagtgtttgagactgcctcaaaact

SEQ ID NO: 7801 - DNA, 120 bp, Homo sapiens
tgacgggaggggcaggaggcagagcgttgaagcggctttcttgtttttcctacagacacaaagcccaagttcagactactgggctttcagagccagctccccactcccccgctcaatctc

SEQ ID NO: 7802 - DNA, 120 bp, Homo sapiens
gaacgtgaaacaatcaaccttgatcaccttccttaacttcttaggacctcagttgtcacttacaaaatgaggaagaggatgaactcctgtcccagaagacacagttctgtaatttctttt

SEQ ID NO: 7803 - DNA, 120 bp, Homo sapiens
atccgggaacgggcccttcatggagcgtgttctgtggcatcctctccccaacaaaggcctggcctttaaaaaccaccctcgtgcagcattgcagaaaaaccaccctctctttactgttct

SEQ ID NO: 7804 - DNA, 120 bp, Homo sapiens
agacggcaattgataggagaattcaccaaagttcccaaaacagtaaaactgcgtattaaacaattgttttggggaaagtgtagcatggaattcagagcacgagttcaagacaggtcagtg

SEQ ID NO: 7805 - DNA, 120 bp, Homo sapiens
ctgcgtgaccaggaacaaggaacaagacagttaaaattcagaagcctccgtgttcttatctgtaaaacagaggcagtaagagaaactatccttggagtgccatgaggatttcatgagata

SEQ ID NO: 7806 - DNA, 120 bp, Homo sapiens
ctacgttgaagatcagggaagggactgaagtcatgggaggtcagaagacatgctcaggggacccttcaacacaactgctgccacagtgctgtccctacatctcacccatccctccccagc

SEQ ID NO: 7807 - DNA, 120 bp, Homo sapiens
aaccgagggatgtttccagccaacaggcagcaatacacacaggtgcacatatatacacagccctgagcagaacatccgtatagtcactggcatgagaaagagtctacgagccacacacac

SEQ ID NO: 7808 - DNA, 120 bp, Homo sapiens
gtccgctctccctcaccccagctttgacatcccttgtcccagctgagttctatttctcttctcagatcattgcagccctggtgtagaatgacttaaggagcaaaactgagccaagaagtc

SEQ ID NO: 7809 - DNA, 120 bp, Homo sapiens
tctcgccagattcctactggaagtaatctggagacttagatctgccaacagcatcaaggggctgtagggtagagcacagaatttggaggtaggagaactcacgttgaaacccaccttcac

SEQ ID NO: 7810 - DNA, 120 bp, Homo sapiens
cctcggtatgtcccatcttgagcaagttccttagtctttctgaagctcagtttcctcatccccaaggtgggaaacatcctgccccatagtatgttatgatgatccaattgatgtaagtaa

SEQ ID NO: 7811 - DNA, 120 bp, Homo sapiens
cgctctggagctcccgtgtcagcggagccatgccttcaacctttccatgggcccctattttgtggctcagtgtccctgagccctgagtatctccattcagttcttcaaacaagttctaga

SEQ ID NO: 7812 - DNA, 120 bp, Homo sapiens
tcacggaggtgcgggacagcctgggcgtctggaaatgctacgggaaatgcacaggtgagggggatgggggggagttggggtgggccagtctgacaaggttctgctctctctcccagcaag

SEQ ID NO: 7813 - DNA, 120 bp, Homo sapiens
tagcggatgagcaggggacctcccctgtggttccacaagaacctccaaagactcaccccagaagtcttctgcagcttgaagtgactctctgagctgcttatacctagcgctgatgtgcaa

SEQ ID NO: 7814 - DNA, 120 bp, Homo sapiens
gcccggcagggagccagaccctcggactcgagaaagccatttgagagtgacatcagcccaccacctgctagtgcgcactcacagtgtttccggaagccatgatgctaatcatgtctgttt

SEQ ID NO: 7815 - DNA, 120 bp, Homo sapiens
ccccgtgagtcaacagatcctgtatctgggctcaccatgggcttctactggcactgagaaggggcaagctgagcaaacatgcaatgtgaccccagtgctgaccaacccagagatgcccca

SEQ ID NO: 7816 - DNA, 120 bp, Homo sapiens
cttcgaggcagtttccactactctaatccccattttacaaagtgatgaaactgaggcacacagttcagtaagttgcccacggatacacaattcataagtagaaaaatcaaagtgcaaatt

SEQ ID NO: 7817 - DNA, 120 bp, Homo sapiens
agtcggcagtatacatgtgcatgcaaatgtatgaacatgtgtctctgtgtgtgtataatcgggggtgggattagctctgaaccgatgagcttgttgcctaaagataagaatcccacatcg

SEQ ID NO: 7818 - DNA, 120 bp, Homo sapiens
taacgaagtttgtggtttcagaaataatgagtcattctgaaacagtgtattgtttcacagcttttaagttgcatgactaatacagtgcattactatatacctttcacttacattcacaaa

SEQ ID NO: 7819 - DNA, 120 bp, Homo sapiens
ggacgacagagtgagattccgtctcaaaaaaacaaaacaaaacaaaaaatgatattacaaaggacatagaccagggtgaggtgtgagaaagagcgaggcgtttccatgccctccttgggt

SEQ ID NO: 7820 - DNA, 120 bp, Homo sapiens
aaacgtgaaactataacaattcccaggaatctcatccagaaatgacagtgtccagaggaaaaggagacttctttgatgtttctcataggatcaaggtaatctttcctagaagtctccaag

SEQ ID NO: 7821 - DNA, 120 bp, Homo sapiens
gaacggatactgggacaaagcagctgctctgctagcaaaggaagatctttgtaatagtgagccgtctcactgaggaacattctatagctcctgcttatagttttcttcatatagatgaca

SEQ ID NO: 7822 - DNA, 120 bp, Homo sapiens
ttccggaaatcatgatacaggttgagcatcccccagaaccgaagctttctgagtgccaacatgatgcataaagaaagtacgcattggagcatttggatttgggtttttggttttgggatg

SEQ ID NO: 7823 - DNA, 120 bp, Homo sapiens
ggccgaatttgaatattgttgtgtgtcagggaataagggagccagaggaggagagagacagggaacaaccagtcagtggaggagtcaggacacacaccacctttatgggttgtttgccat

SEQ ID NO: 7824 - DNA, 120 bp, Homo sapiens
aaacgaggtatgcttgcatttaaaagaaagccaggatttcacttgtaacaatcaaaacaaaaaacaaggttcgtcctcctgccattaaaatgtggtaattaaggaactgaaatttctggg

SEQ ID NO: 7825 - DNA, 120 bp, Homo sapiens
aagcgcgagactccatctctaaaacaaacaaacaaaccaacaaacaaaaacggcagccattatcattactgaaagatcctaccaaagcattgaaaagctaacaaaaagcccaacttaacc

SEQ ID NO: 7826 - DNA, 120 bp, Homo sapiens
cttcgttcttcaattggcaagagacttgccacacaataaacagtgcatctgtgctgtctcattgagattaggaataagtatgagatcacaggtcacatgagctgcatttatgttctcttc

SEQ ID NO: 7827 - DNA, 120 bp, Homo sapiens
gggcgacagggggagactccatctcaaaaaaactaaataaataagagtgacagtcaaagctcccagtactgtaaatcagaccatgcccaaatgaaagcataaaaatctaccaagagggag

SEQ ID NO: 7828 - DNA, 120 bp, Homo sapiens
attcgaaaaaaatttaaaaaaataataataaatagccaccaggagagtctaaactgtaaggaacacttccactttggaattataagtactcttgcagtctgttatctgtacaagcaaaag

SEQ ID NO: 7829 - DNA, 120 bp, Homo sapiens
aatcgcggacactcgagatgctcctcgggccatctaaaagactgcggagcagccaggagggcgagcggcagggagcattagctggctgagcacataaaagcctccctacgtaggtatccc

SEQ ID NO: 7830 - DNA, 120 bp, Homo sapiens
ccccgccgccgcgcgaggccggagcatctcttcgcgcgcgcttctctcccggatcaataacctccgccccctgctccctccctggcagtgcctggaacaatgacgggattttgcttccca

SEQ ID NO: 7831 - DNA, 120 bp, Homo sapiens
caacgcttctacctttcccttccacccaccctcaaaaacacgtgtgcaaacacaaaaaaaaaggggattcgggtaagagaaagccgtgggatttatgttcttttcactaagaaaggcccc

SEQ ID NO: 7832 - DNA, 120 bp, Homo sapiens
ttgcgcgccagcaagagacaacgtccccgagcacgatgcttatggccgggaaagactctttgtgtcccaagacggctgcgcgcgccctcaagctccggacgaagccccctttccattccc

SEQ ID NO: 7833 - DNA, 120 bp, Homo sapiens
caccgccccgccccgccgcccttagaattaaggaataaccccagtgctaacgggggagccgcgtcggctccgtaacgtggaaggctcagagctgaaaggcgcccaaggcctgcacgcggg

SEQ ID NO: 7834 - DNA, 120 bp, Homo sapiens
ctgcgagcccgactcctgccgagggggtccgcgtggcaacggctcccgcgccccccggcccgccgcactcacaaggtgtctagcaggagcttggcggcaccctcggaggtaagcttctgc

SEQ ID NO: 7835 - DNA, 120 bp, Homo sapiens
tgccgcttctggaacgtctcccagcgctcccgctgctcgcccaggtccaggttggacgccgaggacgtcggggtcgcgggagtcggcggcggcggcggcggtggcgggagcaacgccagc

SEQ ID NO: 7836 - DNA, 120 bp, Homo sapiens
taccgggcagtgagaaagagttaatgcaattaactaaggggcactattttgtaccctcaggcttgagaggccgccaagctactccagcctcatacaagtggggaaagactttgacggagt

SEQ ID NO: 7837 - DNA, 120 bp, Homo sapiens
aaacgaagcctctcctggacagacacaacctattaggcccagaacttggaaagctgcctgatgctgttaaaagttattcaataatacttgttaaaggacagtaagcaagactttatctgg

SEQ ID NO: 7838 - DNA, 120 bp, Homo sapiens
tcacgtacatgtagaattcaaataataagaagaatgtccaactatgacaagaaatggagctttatcaatttctctgatgtgccccatcatcccctcaccgctcctcaagaggtaaccacc

SEQ ID NO: 7839 - DNA, 120 bp, Homo sapiens
aggcgtgagccactgcaatctgcccaaattagctattttttaatggatagatttctgtacttttgaggcctaacatgaaaacagtacagattttgctctgtgttcctttgggcattcaat

SEQ ID NO: 7840 - DNA, 120 bp, Homo sapiens
cttcgggaaaacattgaaccaggagcctgtataactaacttacagttctggcaactgctagaacttcccagtgaagtcattataccagtcatgagatctgccttctagctcaatctgcga

SEQ ID NO: 7841 - DNA, 120 bp, Homo sapiens
aaacgaaaatccatactttatataataaaataaacgttttataaactacctcccaagtcgttcaaaatcacttccaaaattatcttaaactgtttatttctatctcctgcttattcacat

SEQ ID NO: 7842 - DNA, 120 bp, Homo sapiens
tcccggttttagttaatttaactgaaagctgtctaggtgttaactcatataccagctcatttgtcgacatagcttctcaacgttatgctcaggtatgttgaaatttagtaattagcgacc

SEQ ID NO: 7843 - DNA, 120 bp, Homo sapiens
tcacgtgaaaaacagccaatttcatgtttacttccaccccacccccgtgactgtgccaggcaccaggatccaaacacatctgccttactcaccttccttgggttatctccttgcaggacg

SEQ ID NO: 7844 - DNA, 120 bp, Homo sapiens
acccgttgcttggtcctagctggttaacctcacccttgcacaacaagcacgtcaatgggagcaggatcagctactttcttgtaggtgaattcccgtttttgaagtggggtttcggctccc

SEQ ID NO: 7845 - DNA, 120 bp, Homo sapiens
cctcgcctctctgggcctggtggtgagcggcttcagcaacaggtttccggtccccgcagagggtcccactctgaactcccgatttacagactgttctcgggccgtgatgaggattaagac

SEQ ID NO: 7846 - DNA, 120 bp, Homo sapiens
caccgctccagagcgcgctcccgggtcggcctccgccctccaagccggagggaaatgctgtggtcccgccgtccgcctgcatcctccagttcctttggagggcaggggagtggagcccac

SEQ ID NO: 7847 - DNA, 120 bp, Homo sapiens
tggcgcatgaggagggcgaagctggagtccaaaggaaggtccttccgttcccgcccccgacccgggatccgccgaagcgactgcggaggcgggtcccaggcctgtcccaggagggggtgt

SEQ ID NO: 7848 - DNA, 120 bp, Homo sapiens
gtccgggagggggaccgatgcctacgtcagacaggagggcaggggactcgcgggattcgtggggaagcgagaggggaaagagcagggaacgtgcgctggggacgcggccgaggcgcagtg

SEQ ID NO: 7849 - DNA, 120 bp, Homo sapiens
gggcggggggcggggatgcgcctgaagctcggtagcgagaggtactggggtcgcggtgggagtcttagcagaaccgcggtggagcctactacccgagggacggggtagggggcgcggctg

SEQ ID NO: 7850 - DNA, 120 bp, Homo sapiens
ggtcggggtgtgaggggtgggaggcgcggctgaagtgggatggaagggcgtggagaggcgagggtgggaggcgtggctgaggtgggatgagaagaaagtagcgaagtgaggggtagggga

SEQ ID NO: 7851 - DNA, 120 bp, Homo sapiens
agccggaggaggggtgaggcagatgagggtgaggggtcgggggatgaggggtggaggaggcagaggtgagggtgggagggaggtgggggtgaggggtagtggggtgaggggtggaggagg

SEQ ID NO: 7852 - DNA, 120 bp, Homo sapiens
aggcggatatggggtgggaggcaggttggggggtaaggggtggaggagttgaaggctggaggggtcagtggtgggggaggaggaggtgcggtgggaggcaggtggaagcgtgaggggtgg

SEQ ID NO: 7853 - DNA, 120 bp, Homo sapiens
aggcggttgggaatgcatcctgtgcctgcggaaattggggaaattccccagaggggtaggggcttggggctgggctcccagatttggccaagacctggctgtagctattctgggtcctgg

SEQ ID NO: 7854 - DNA, 120 bp, Homo sapiens
agacggaacgtccgggcctggctgagctgtggcctctggggctccctggggcggtatgggaaggggccatgctttgcgtgagaaattatctcaggctgggcaggctgtgcccagccagct

SEQ ID NO: 7855 - DNA, 120 bp, Homo sapiens
ctccgctgcctcagtcttccttgctccaggaagcctgtgctgcctgctaaactgccttattcgtatttcttttctgtgagattcagacacaatcttctcagggaagcttcatctggccag

SEQ ID NO: 7856 - DNA, 120 bp, Homo sapiens
tttcggaattagtacaaagagaagcaaaggctgcaggtccaggccctggcttgtctacaccgctccagcccctacccccagcaccctcaagtgtcccatctttttttacttttaaggcca

SEQ ID NO: 7857 - DNA, 120 bp, Homo sapiens
agtcggttttctggaatgtgttggtggattacttaagagttatggggaaagagttcttacggcctgtctaggtcagtgaagtcatactggcaagtgacaagaaggaagccaggtttgtca

SEQ ID NO: 7858 - DNA, 120 bp, Homo sapiens
catcgtaggctgctctgtcaaaggatatagcgatagctggtcctatgggcagatgcctagaatcaaggtgggcctcagaaatagggctgggtctccataaggaggtaggccacgttcagt

SEQ ID NO: 7859 - DNA, 120 bp, Homo sapiens
tctcgggcaaccaggagttacaggaattttgctaaagattcccaccttccttgagtggggacacattcctctggttggagcttgttcccctaaatgaaaaatgtaatgcagtacatgtag

SEQ ID NO: 7860 - DNA, 120 bp, Homo sapiens
caacgggaagttttaacacaaatccccttccccagatgatatggtttgcctttctgtaggtgggtggcccaggccaatttttggcaatatccttaacccacctgataggagaagcgccct

SEQ ID NO: 7861 - DNA, 120 bp, Homo sapiens
tcacgtctgagctgcagctacagtctccttgccctcatggtggtcttcggcaggtgccacagggccccctccagggtcctcctggcctactgtcccttcccggacctcctccccactgcc

SEQ ID NO: 7862 - DNA, 120 bp, Homo sapiens
gagcgcttgcgcaggctgagcaggaagggctggggcaaggagaagatgtccacgttgttgcccaggtcaatccacgtgacattggggaacttgctgggatccttaaggatgtcagtgagg

SEQ ID NO: 7863 - DNA, 120 bp, Homo sapiens
ggtcgcgcagcacggcccgggtcaaccggttgccattgagtgccagtgtggtgaggcggggcagggtgctgagtgctggcagcagctgcaggaccatgtcgtccgtgaggcctgtgaagc

SEQ ID NO: 7864 - DNA, 120 bp, Homo sapiens
ccacgctgtctacctgctccccacagcgctgtaggtagctggtcacccgctccaggtctcgggaggtcagtgggattcccgacaggtccactgtgttgtctggggggcttccggccagga

SEQ ID NO: 7865 - DNA, 120 bp, Homo sapiens
gctcggctctccgacgctagggactgcttttacgaaacacttggatgtcggatgccacaagtgcagaggtgggagcaaccagggacctcagtcccctgacactgccgcacgtctcagctg

SEQ ID NO: 7866 - DNA, 120 bp, Homo sapiens
acacgcacacacgcacacgcacacacgcacacgcacacacacacacacgagaacagaggacaagggggcatcactgcactgccattgccacaagggggcagccacgcacagggccaggct

SEQ ID NO: 7867 - DNA, 120 bp, Homo sapiens
gctcgggatggaagtgtatctgccactaccagggagaactgaggagcctgcgtctcctcactggctagacaggaacaatagatatggacacctcatagagttgccttgagagcacaagtg

SEQ ID NO: 7868 - DNA, 120 bp, Homo sapiens
ctgcgatgcattgggcatctcctctgagcactgtttgcatgaacattttggggctcagaacacaattccaaagcatggcgccggggccagcagagagctttgaactaacggaaattggaa

SEQ ID NO: 7869 - DNA, 120 bp, Homo sapiens
caccgctctcactgcccccaagaaggattgtaagtcgcctagcatttcatttccttgcaattcttattttgcttgttaatctcccctttcatctcatcctgttggttttcttttccatca

SEQ ID NO: 7870 - DNA, 120 bp, Homo sapiens
gatcgtgctgtagatcattttcagaggtcggggttcaggttccagggtatctatcctacgctcaggcttcccccctccccagcttgtgcactctcaaagaggccaagatctagtgacacc

SEQ ID NO: 7871 - DNA, 120 bp, Homo sapiens
ccacgtctatcagcgcatccttgtccccatgacggcctccttgggttgggactgagtccacctctcagggctctggcttgcagaagagtccagccccaggatgagtctcaggcactgtgc

SEQ ID NO: 7872 - DNA, 120 bp, Homo sapiens
tcccgccttgggagttgctgtctctgaaccgatgcagacagaggcatgggagaggatgaagggagaggggagtggaagagccctccttttacctccaaattgtcacttgcgtggtacagg

SEQ ID NO: 7873 - DNA, 120 bp, Homo sapiens
ttccggaggtctcagattcctgggaggaaggctgcattgtgtctttcttggccctgctccatgtgtctagcagtgaggaggctcctctcagactgcccacctgtctttgtttccagtgtg

SEQ ID NO: 7874 - DNA, 120 bp, Homo sapiens
tcccgattcttttgtgcattgcacactgctataaaaccattctttctagagtaccaatttcattcccagtcgcagggggtcatgcttgtaatcccagctacttgggaggccaaggcagga

SEQ ID NO: 7875 - DNA, 120 bp, Homo sapiens
gggcgggttcgcgcgccctcttgcggccctctaggtgcagtgcagggagctttgcgttttagggacttgggctccctccggccatcctctattgctttttggtattttcagtagagacgc

SEQ ID NO: 7876 - DNA, 120 bp, Homo sapiens
gcacgagccatcccttcctcagcatagggcaccagtttgccccagcctttagttagccacgaccaaatccttcatccaggtaagggttagcctatagggtcctcaaaaggagtacttaaa

SEQ ID NO: 7877 - DNA, 120 bp, Homo sapiens
aaacggcaaggacctggacaactcacgctcccttccttccagtaacagtactgtaagactcacgctataaactacttttattcactcaatatctgtcccgagagcttccacatctgtctc

SEQ ID NO: 7878 - DNA, 120 bp, Homo sapiens
gtgcggcagggtcaagattgaaacccaggctgtccaggcctagggttcagcctttccagtgctctgctaggtgttggacagggccaacgagacacagagaaagagcatcacctgacttgg

SEQ ID NO: 7879 - DNA, 120 bp, Homo sapiens
ggacgggcaggaggggtctgctgcctaatctgatggatcttccatcctggtggggcagggggcagatgagaaccaagtgggcacacagggagatgggaactcaaggcagggggatggtgg

SEQ ID NO: 7880 - DNA, 120 bp, Homo sapiens
aggcgaaaggccaggcggcccagccccctatccagggtccccagagcttgttattggtatgttgtgctcacctccctgtccaggagtgagaattggctgtgtctgactccttgggaaggc

SEQ ID NO: 7881 - DNA, 120 bp, Homo sapiens
tctcgcaccccagagtcactctgacccccgatgtgaactgaccactgagcttcaacaaattaagggccaagtgcaggaacaaagttggatcccaccctcttctgcttcctcaagccacgg

SEQ ID NO: 7882 - DNA, 120 bp, Homo sapiens
gcccggagtgatgagccacctccgctctgacctcacctcctcccagctccctgactccttcggcggggggcctggccagcttgttcggccactctgggctccaggctcttcaactggaaa

SEQ ID NO: 7883 - DNA, 120 bp, Homo sapiens
tgacggccagcctgcgactccttgtccagaactctgtcaactccaccagtgcctgtcacggaaaccgcatggccaccagcttcaggtgacaggcctcttgcctgggtgatgagcttccca

SEQ ID NO: 7884 - DNA, 120 bp, Homo sapiens
gtgcgctttttcacaggaagaggatcgagagcaagggtcccattctggtggtcctcagcccgcatctggcccacagatgtttaattgggctgacataatatatagttttacctttttttt

SEQ ID NO: 7885 - DNA, 120 bp, Homo sapiens
aggcgtgagccaccgtgcccggtctagttttacatttttaatgcattgccaacatttgaacatgagtagctttcacacagaaagatggctctttggctcctctgaaacactggacgaccg

SEQ ID NO: 7886 - DNA, 120 bp, Homo sapiens
tgccgagcagaccatgccagccatcaacaccgcaggcctggcccttgggcattggagtaatgggtctagaatttccttcacattgtcaaaggagcctgtgacccagaaatggtaagtaag

SEQ ID NO: 7887 - DNA, 120 bp, Homo sapiens
gtccgattctcaccaacaaagcaggcatgacctcagacaagtccctaccctgctctgggcctcagtttctcctttagtgaggaggtgggtgagggtcctgtcctcctccgggaactggcg

SEQ ID NO: 7888 - DNA, 120 bp, Homo sapiens
atccgccggagtcctgaaaacacccacgccctttgtcccagcaatcctgagaaaggccacactgataaagctgtgggtggccagatgacagcattcttgggcctcagacgaagtgggagg

SEQ ID NO: 7889 - DNA, 120 bp, Homo sapiens
acccgcttagctcctcatagcccaggggagcggggacagtgcctgctggggccgtgggcagcccggtgccagcccctactggcatttcgatgatgccacaagtgccgtgccacagcaggg

SEQ ID NO: 7890 - DNA, 120 bp, Homo sapiens
agccgcacagtcatattttgcaaggttttgaggaaagaatgccagtgtggtaggaggggagaccagtcccctccctcccacccctctgggctccatctgaagctggttcctgagaagcac

SEQ ID NO: 7891 - DNA, 120 bp, Homo sapiens
gcacgattgtgccttttcactgaaggaggggcccccagctgtactatggacttactgacttgtttcccagctcagcctgccccggagcagagctaggcaggaccttggtgaagagggtgc

SEQ ID NO: 7892 - DNA, 120 bp, Homo sapiens
tgacgagagtatcagctttgtgaggtgaggattgcctccgtcttttccactgctgtatgccggggcttagtagtgggcctggcgtatagtagatgcttaatatgtaattgctgaatgaat

SEQ ID NO: 7893 - DNA, 120 bp, Homo sapiens
ccccgtctatccttcatccccgatgcccacccccagtctccccagccacttcataggaaaggggccagacaggcttcctgtccctggagcctgtgtctagagagccatcaaagcaggctg

SEQ ID NO: 7894 - DNA, 120 bp, Homo sapiens
actcgaaccctgactgccccagcatccaacactcacacgcatgcacatgtgcctactcagccggacacaacacacaactatgcatgctgacacgcacttgtgcagaggcataggcacaga

SEQ ID NO: 7895 - DNA, 120 bp, Homo sapiens
ccacgagtcacagcccctgaagtgatatggtgaactagaagtgtcagcccccattcctgtggactctgagcaaacctccactccccagcctggccacacgcaggcacgcaggccggaaga

SEQ ID NO: 7896 - DNA, 120 bp, Homo sapiens
tgccgcctctccctgccccggccagctggccgtcctccaggcttggtgcagatggtggggccagggcagggacagcccagcctgtggcctgtgttgcctgcctcttgagtcccaggcctc

SEQ ID NO: 7897 - DNA, 120 bp, Homo sapiens
cctcgatttctgatttcttttggaaaattaaaagatcgatcacgaccaggcccaaatcctgtaggacagacggctacgaccgaggccatggagctgctgcctgttgtaggagcatggaca

SEQ ID NO: 7898 - DNA, 120 bp, Homo sapiens
cagcgctgccagagctaatttcaaatgatgacagctggacttagtgagattcgacgtgacgaatgcccagcacacggcacacagcctggcacactgtcagtgctcgatggttgtgaattc

SEQ ID NO: 7899 - DNA, 120 bp, Homo sapiens
gcccgagcaacaggaaaagaggggacccaagaaacagcctaatccagcccgccacttactacttaaataaagtttgattgtaacacagctgcgccccttcattatgtaatgtctatggat

SEQ ID NO: 7900 - DNA, 120 bp, Homo sapiens
tttcgacagagaccatatggcctgacaaggctaaaatatttagtatctggccctttacagaaaaaatctgccaacccctggcataggggttataggcatactaatacatgctgatagttc

SEQ ID NO: 7901 - DNA, 120 bp, Homo sapiens
caccgtgtttcagggactgttctaagcacgtcacatatataaatttctttagtcctcacaatactcgtatgacatggctactatttatggtagctagtctcaatggtggccccagtgaac

SEQ ID NO: 7902 - DNA, 120 bp, Homo sapiens
ccacgtctcctggggctgacgcctctgtgggccccccacctcgagtctgggacatcctgtgccgtgtgctgactaatggcatgcggtcgagtgccaggcctggcattaaggaggatgggt

SEQ ID NO: 7903 - DNA, 120 bp, Homo sapiens
gcacgcagagcagaaggggaagccatggggaaaggagaggctctgaggctgcaaggaaaggacgaaggtccagccagccctgtctcagtccagcctccagtgacctcacccagctaccat

SEQ ID NO: 7904 - DNA, 120 bp, Homo sapiens
tgccgggcagagcccagtccactctcagaaccagagagacaagaaaatagtgctcaagccactctgctttgtggggtggggtggttctgcagcaatagctggctgagacacaccacacca

SEQ ID NO: 7905 - DNA, 120 bp, Homo sapiens
cttcgcctttccaccctcctttatccagtggttccaactcctgtgtggttatgagaatcctccaagtagcctttacagacaccaattaaatcagaatatctggaaatggaccagaatagg

SEQ ID NO: 7906 - DNA, 120 bp, Homo sapiens
atccgtggaaaagtacacagctctggaagcatttgctacttctcctcctaaaacctcctccattccctgagcgacagctgctgtggctgccactaccacatgctccaatgtcacctcctc

SEQ ID NO: 7907 - DNA, 120 bp, Homo sapiens
ctccgtgaaggctgggttagctcacccccctgtttaaagactcaccatgactcccagctgccagtgggatgacatgtgcacgcctgggcttggaatacaaggcctgggtgatagagccct

SEQ ID NO: 7908 - DNA, 120 bp, Homo sapiens
ggccgctgcccgcagtcctggtggcagccctggggtgccacaggtggtggtgagtttcctccgtccctcccttgggccttgggttggaaggttcctggagtgctgcttctctgggacttg

SEQ ID NO: 7909 - DNA, 120 bp, Homo sapiens
agccggtgagggccgtggtgggcaggctggcgtatccccctctaaactggacgtgcaatgttccagtattatgtaattgcaccctagcttttttccctgggttctagcctgttacctgat

SEQ ID NO: 7910 - DNA, 120 bp, Homo sapiens
aagcgggtgcctgccttctctttgcagagtagtgtgctgatggaatggggagttcctgagccccccatgtggtgagggatgttccaggaagcacgctggctgccgcctctgggggaagta

SEQ ID NO: 7911 - DNA, 120 bp, Homo sapiens
cagcgaggcacaggggaagacatcctactactggacatggaggatcattgggtgctaatttggaagcatctgacctaagaaaacgggctcttctcttatcctgggaaactcattccccaa

SEQ ID NO: 7912 - DNA, 120 bp, Homo sapiens
caccgttggaccaggtggatggttttcaagctttcatcaaaagcagtgcagctctgggcaaggcagccaaagcctggagcttggcctcccatcctggggcggggtggcgggggagggcct

SEQ ID NO: 7913 - DNA, 120 bp, Homo sapiens
gttcgaaaactctgccctagattttgtgctttttccagttttagcaattgaggcagtcttacagctgctctggaatggagcccccatgccctacccagagctctcaaggcattgtcactt

SEQ ID NO: 7914 - DNA, 120 bp, Homo sapiens
ttccgttgggggcaagagcacctagggggttgattcactgacattttgtctctggaagctggaactgaaatcttccaaaccactcactggttttctcagtcagggtcatcctagttcaca

SEQ ID NO: 7915 - DNA, 120 bp, Homo sapiens
gggcgcagcttggcggttgcatgctgtgccagaggtggccctggtgtcagagctgctttgcagcgagactctgagtggatgggcctgccggatcctttgaacctctacctactatattgt

SEQ ID NO: 7916 - DNA, 120 bp, Homo sapiens
gcccgtgatttcacacagacctcagcaggcaagggtggccagcagggctggtggcagcaaggcctccctcggaggaggggaccctgagttttcagagtggttgagcggcctgcccaaggt

SEQ ID NO: 7917 - DNA, 120 bp, Homo sapiens
ggccgtgatacagatttcagctccatgaggctcccgtgccagagtccaccctggctccagactccaccctggctccagactcatcctccctgtccttgggaaggccactttgctttgtaa

SEQ ID NO: 7918 - DNA, 120 bp, Homo sapiens
ccccggggcagatgggtagtagggagattggtatattgcagtgctgcagaataaatcacagctgtttcctggacttctagttcctagccctgggaagagggacctgctggggctgtctgc

SEQ ID NO: 7919 - DNA, 120 bp, Homo sapiens
agccgccgagacctggagaggttcagcagaggttcagcgacctgcctaggtcacaggaagtccagcacgattttttccaaagtcctgtttggccaccttgtctctaataagtgttaacct

SEQ ID NO: 7920 - DNA, 120 bp, Homo sapiens
gggcgtgtgtgtgaacggtgcaggctgttgtgcagggcatcgcccagatcttcacctctcctcagcctcggggtgccccacatccccaacatgggctactggcctaggcagcagccacac

SEQ ID NO: 7921 - DNA, 120 bp, Homo sapiens
aaccgtggcgcactttccacacaaggtttctgacctcctcgtggtccttcccatagataaaggggccaagggaagggggagcagctgcagggagccccagctgagccagagaaaggggcc

SEQ ID NO: 7922 - DNA, 120 bp, Homo sapiens
tgccgggcctggttgaaatgcccaaggaaggtagagaggatcccagagctggggagccgggtctagtcccaaatcactgggtgggtgggagatctggccaggacgtttcgtggccccctg

SEQ ID NO: 7923 - DNA, 120 bp, Homo sapiens
gaacgagctcttctaataggcagatgtcacctcggcagacagcccactacttctcaattccacatctcccttcccgcctggaaaccccgtgagcctgggagcttaggagtcctcttccta

SEQ ID NO: 7924 - DNA, 120 bp, Homo sapiens
gcccggccagctagcacctggccttctatggtgtggaggttttcctatacggaaattgctgaagggtggcctgccctggcattgttttgtggcgctgttggtggtattcatagctgacag

SEQ ID NO: 7925 - DNA, 120 bp, Homo sapiens
aggcggagttaagagaagggtagagagaggtagtataatatgcctagagcagctcctctggtggcaaagccgggaggaaacccagctgtgggactccaggccttccctgtctccacatga

SEQ ID NO: 7926 - DNA, 120 bp, Homo sapiens
actcgagaggactgagcttggccttgagaccatcaatgtctggctgtgtgtggcccccttggcccctagtgtccaggagcggggctgaccaccttggcatgtgcggggaagggtggggct

SEQ ID NO: 7927 - DNA, 120 bp, Homo sapiens
caccgtgcttctgtcctacctgtttctgaatgggaaggacggctttttgaggaacagggtgtgactcttccctgcgaagacgttgccccagaaatttgtccccacgcattctccagccct

SEQ ID NO: 7928 - DNA, 120 bp, Homo sapiens
tggcgtcatgttccaaaaatcctgtggccacgggctgtttgtcaagaccaaacagggaagaggcttttaaaatgtcactttccccctccagcttgaatacagtggggagcaggggcaggg

SEQ ID NO: 7929 - DNA, 120 bp, Homo sapiens
ggccggggctgggcttgcaggacctgtgtgtgggcagagggaggccaggagcccagtgggagttgggggtagtttacagccagccagcagctgtgggccctgctgtccccgtgctatgat

SEQ ID NO: 7930 - DNA, 120 bp, Homo sapiens
tcacgcaacataaaattaaccattttagcatgtacaattccattgcatttagcctacagtattgtacaactgccacccctcttcagttgaaaacatttccattgctccaaaagaaccccc

SEQ ID NO: 7931 - DNA, 120 bp, Homo sapiens
agacgcgagtcctccctgtgttcctaacccgaggacacctgtcagagcatgcggagcaccttgcccttaacttccacgaggatctccctctacaggacggtgagcgcctctaggcagcac

SEQ ID NO: 7932 - DNA, 120 bp, Homo sapiens
ctgcgtagacagggcacatgttggttggctggcgaatcaggcagctgtcctccccagctctttcttgcttgagtttctgatgtaaagatttcaggtaggccactcccaaaagtccccctt

SEQ ID NO: 7933 - DNA, 120 bp, Homo sapiens
ggccgcactgagaggatttggtgacctcaggtgcccagtgagtgcctttctgtctcatcaggactgtcccgtgcgcttaccttcctgttacataagtggtgagtcaaggacacaaaatgg

SEQ ID NO: 7934 - DNA, 120 bp, Homo sapiens
gagcggcgagagctgtcgtgagggtaaaggggtttctgtggcccacaccccgcactggggaggcagccaggaagatgggctgtgattggcacccttgctggtctatcttcagagctgtgg

SEQ ID NO: 7935 - DNA, 120 bp, Homo sapiens
tgacggtaccctgcagcgtgaaggctcgtgataacgtactgggcgtctccctcccacacagagagaaatgactttagatattaagaaagtgaaaagcttggaatagttggttaggaaact

SEQ ID NO: 7936 - DNA, 120 bp, Homo sapiens
gagcggggaaagaagtgtcaaaaaaagtcatttcatgggaggtgcaacagaaaatatttagggttgaaaaagcaaagccacatggctggtgctagtgtcttcacgtgtttgtgcagtgct

SEQ ID NO: 7937 - DNA, 120 bp, Homo sapiens
ccacgtagggcaccacttctggcaggcaatgtagtatgttagtgtcttagcctctcctggcctctgcaagactgtttttcagaaaaatcttttctttggccgggaaggaaatgttcttta

SEQ ID NO: 7938 - DNA, 120 bp, Homo sapiens
acccggggagcagttgcactggtgggatctcagagatgcaggtcagcagcacagggaccttaggaaggaggtgtccttcaccttatgccatgtactggcctgagggctggtccagcccac

SEQ ID NO: 7939 - DNA, 120 bp, Homo sapiens
gcacggaccagtcacttgcaaacacctgccctcagtgtgtcagaatcgaactccagggtggcttcctttgtgggaggtgccagtcacagcacacaacatggcaggtgtgtttgtttcctg

SEQ ID NO: 7940 - DNA, 120 bp, Homo sapiens
gtacgggtgctgatcagttctcctgctctcagccctgcccctgctgttggagtcccctctgcccccaggccctgagctttctggtgtctgcagcagtgccagcctgcctcctcctagctg

SEQ ID NO: 7941 - DNA, 120 bp, Homo sapiens
gcccgcagcctgtcgacacgtgttggtgtccatcatgggcatatcgtgcctgccttgtacccacctgtttccatgccactgttccctgtcctttcccacactgtcccctgtgtgggtcat

SEQ ID NO: 7942 - DNA, 120 bp, Homo sapiens
ctccggctgccttgagcaataccatcaggcagatctggggctcagccctgtccttacccagggcctcagagcactaatatattttccttttcctcactccagatgtcttcccagtgactc

SEQ ID NO: 7943 - DNA, 120 bp, Homo sapiens
tctcgtcggctgctgggaagaccaaggggccagccatcgcagggagcataagcactgagacaggcacacgtgcctgcccggctatcgtagccaggctggcagccttgcaactccctgggg

SEQ ID NO: 7944 - DNA, 120 bp, Homo sapiens
acacggaggtaaaaatcggttcatattgtggttatgtatctattctcttatgatgtgtatttatgtgcttatgtaagacctaaaaacaataatttttaaataaaccagttatttttaata

SEQ ID NO: 7945 - DNA, 120 bp, Homo sapiens
tttcggacatccaagttgttttcagatttttacttttttaatatgatgcttcagagaacattcctggaagtaatgttgccagtgcagaggtgcaagcatgtttgagacagctgatagtta

SEQ ID NO: 7946 - DNA, 120 bp, Homo sapiens
aaccgaggtagcctgacccattggaagcctgcagataattgaaaaaatcttattttagatcctgtgtcattcttctgctatcaaaccagagccagcagcaaaggaagctgggggtgatgg

SEQ ID NO: 7947 - DNA, 120 bp, Homo sapiens
ctgcgctgcttctgccaagagtgggctgctgggggtgtcctgctggggccaggcaccagggttccaatgccaagtagtggcattcacgcaccttttgataagcgaggaaaccgctggcag

SEQ ID NO: 7948 - DNA, 120 bp, Homo sapiens
cagcgctcagcctcaacctctttccccagaacctgcgcctgcccactccacctccaaggcccctcactctccaccacccatttggccttttggaattgggactggaattgtttccagctc

SEQ ID NO: 7949 - DNA, 120 bp, Homo sapiens
ccccgaccctcggctaggggaggaaatgagatctccctctcttgacaggattagaacggaataaatacgaaaggctgagtttccagagttgaaagggtagggctgcctttgtcgggtccg

SEQ ID NO: 7950 - DNA, 120 bp, Homo sapiens
tggcgtggcatcggtgcaggcccacactcggaggagggaatccaggagaaagaaggaaggggaaaagagcaagaacccctttctcccctctgcatatgggatggccaagagaagccaggc

SEQ ID NO: 7951 - DNA, 120 bp, Homo sapiens
ccccggtgggaaagaagctggctcccagggctcccaagccccagccacgcctggtcagcacaggcaaaaggagtctgtgggaagcctccaacctccaggctgcctgaggcccctggagct

SEQ ID NO: 7952 - DNA, 120 bp, Homo sapiens
gcacgtgggtgaggcctacagatattccaaaagcagggggtagtggggtgggggatgaagaatacgcaaggatctgcttccaccatcccctagaggggctttggagggaggagggtgggc

SEQ ID NO: 7953 - DNA, 120 bp, Homo sapiens
ggtcgatgtgcaaaaggcttcttttctttcattttcccctactcagaaacccaaaaatagccatgtcaaaggcacatacattgcaaatagcagccgagaagagccagctgaaagccattt

SEQ ID NO: 7954 - DNA, 120 bp, Homo sapiens
ccccgtcctctgcagtccccttctttccaggctcttgctgggccaaccagtcctgcagccttgtagggtccagcacctccctatagggttactgagttgcatctaaattcacttaatagg

SEQ ID NO: 7955 - DNA, 120 bp, Homo sapiens
aggcggtcacagctttttgtgaaaacccatgaggaaatgtgaaaagtcctcctttggttcacttttcttgcaactttgaattttcctactaagagtccttaaagtgaagcaaacctgtag

SEQ ID NO: 7956 - DNA, 120 bp, Homo sapiens
caacgttgaggtcgacactgtggacaggcagctccatgtaattcttcttcctgcccttacccagccaaacctgcacccttctgggggtggacctctgtttgtcccgtttgtaaccacttc

SEQ ID NO: 7957 - DNA, 120 bp, Homo sapiens
gagcgagtactggactaagtcagaaggcccaggcagttcaggcagccacagattaagtcacttccactctggccatggggtctttgtaagatgaggaggttatgtcagatgcgctctggt

SEQ ID NO: 7958 - DNA, 120 bp, Homo sapiens
tgacgtgtggagctaaggaggtcaggcttgtcaccaggagctggccctgtccccagccatgtgtccccatcagcactgctgggaaagcagctcagaccccagggccggcagccgtgaggg

SEQ ID NO: 7959 - DNA, 120 bp, Homo sapiens
cagcggctgctatttttagtaagctgcctaattggaggtcctggtggagcttaaccagctcaccttgtgctttgatccttctgtttggccttctctttttacgtggaaagagctgaagtt

SEQ ID NO: 7960 - DNA, 120 bp, Homo sapiens
agacggaggcttttgctgttaaaaaaaactgccccttcccaggcccctgctctgtctcttaagtaatttccagtgggttgtcagcattgatgttggttccttcctaataagatctccccc

SEQ ID NO: 7961 - DNA, 120 bp, Homo sapiens
cttcgcacatgatttctctcacttttgatgccctcactttattttaagccgaagaaccaaaccttcgagtaaagcctctttgttcctttttagcagtgagatatctcctaggatgggaga

SEQ ID NO: 7962 - DNA, 120 bp, Homo sapiens
tctcgggaacagtcatcatttagctttttcccaaaggaaaggaactctgtgtgtccctggtggctctgggaatggcgtgtgagcccatttcctcaggataaaactaagatggtaatgaat

SEQ ID NO: 7963 - DNA, 120 bp, Homo sapiens
gctcgtaaacactctcagttaattcttgtgacagcctttagggaataggcctcatgcttacctccattatacagatgaggaaaactgaggcctagagagtctgagtcgtcccactgctat

SEQ ID NO: 7964 - DNA, 120 bp, Homo sapiens
cagcgctcctgatgtgtggacgtgagtgtctgttttctggatgtgcatacagcagtgtaccaggctgcatgaccgtggggtgctgctgcatagaacctttggccatgagcgagtttttgg

SEQ ID NO: 7965 - DNA, 120 bp, Homo sapiens
ggccgtgtctttcatccttccttcctcccgaccagtccacggctgtgttcaagcctggtggggagccgtgaaggcagaaccgtttctccgtccttccttttgtccctgtcaccttcccct

SEQ ID NO: 7966 - DNA, 120 bp, Homo sapiens
ttccgctgcgtctgctccttgcctccccctcagccacccacgaggtctcagtgctgtgccagctagcttgctgcagggagccgctgcctcccttcggagcacccacgcttccagtctccc

SEQ ID NO: 7967 - DNA, 120 bp, Homo sapiens
gggcgtgtttgctgctttctcctgtcttccctgtcacagtccactttagggttatataaaccacacacagaagcctacaaatagacttttgttgttcatcctcaagtaggcactaattcc

SEQ ID NO: 7968 - DNA, 120 bp, Homo sapiens
attcgatggaacctgggatgggcatcgctttctcccagggcagggagcactgcctgctgtcccacagcatgtctcacccaccctcgtggtggggcaggtcgagggcccaacagggatgct

SEQ ID NO: 7969 - DNA, 120 bp, Homo sapiens
aggcggagtcggtcttgaaactgggtggggacccctccattcccccgtgctcctcttgactggggcagtactgttctcgccccctaagaaggaggtagaggtgaggtccctgttcacctt

SEQ ID NO: 7970 - DNA, 120 bp, Homo sapiens
agacgctgtctctgattatccgacgtcctgtaatgagatacttttcagtgagggctgttccctggaaacagtgtgactccaggactatgggaagggggtctgatttgggccctaattcca

SEQ ID NO: 7971 - DNA, 120 bp, Homo sapiens
cggcatctccaggtgggtgtgggagcttgtccagggcgaagtgtctgcagtgttgcagtgaggcacggggtggcctcaccaccatgtctttctcagccctgccggcgtccaacacagcag

SEQ ID NO: 7972 - DNA, 120 bp, Homo sapiens
ccccgttttctactgagtgactgaatgggtgaaaggcaactggattcctacactcttggtcttttccagggagtctgtgtcttggtgtttctgctgcttcactctttgtggtcgacttgt

SEQ ID NO: 7973 - DNA, 120 bp, Homo sapiens
tggcgtgggcagaacctgtgatcttgaaagagttgagcctccaccacttcagagagagggcagcaagagcgctctggagcctgccctccacagagcttggtgctttgagacctggacagt

SEQ ID NO: 7974 - DNA, 120 bp, Homo sapiens
aaccggatcttcctgagtccctcagtggctttgactggtgaaggctggccaggcctgctggagagatccgggatgcagagctgtttagtctgggaggcaggtcagtctcagaggatgggt

SEQ ID NO: 7975 - DNA, 120 bp, Homo sapiens
gcacggagtctgtgtcgtgtcctgagcctgctgtgggtgtggcagggtcattgtccaggcttgctctgtggcacttctggccccagcgtagcagtctgtcactggggacaatgccctgct

SEQ ID NO: 7976 - DNA, 120 bp, Homo sapiens
acccggcaagggccagggctcctagtccccgagtgccagggtcttacctggtacttgtctccttttctcttcccaggtggctggagatgctcatggtctatccccggaccaacaagcaga

SEQ ID NO: 7977 - DNA, 120 bp, Homo sapiens
aaacggaaagtggagccccccacaccacaggtaggcagtgggtttgccagatggcatcccctcagtggagccagggcttgggaagaagtgagggctccctgaggttagagggtgaggaca

SEQ ID NO: 7978 - DNA, 120 bp, Homo sapiens
cctcgctatcctgctggcagctggggaggggcagcacgggcagcctgcagccacagtcaaaaggactctgcacccacagatggccctgcaggcagccggatgcagtaggatggggaggag

SEQ ID NO: 7979 - DNA, 120 bp, Homo sapiens
gggcgtggctgactggggtggtccctcaaggcccagtccttccccacaggccatgatcctccttccctccctggccagtgtgcaaggcttagggcatagaagggtcctacaccgccttac

SEQ ID NO: 7980 - DNA, 120 bp, Homo sapiens
ccacgttcctggggccatgggggaatgaggtaaccttttttgagcctcagttaatcaacttgcaaagcaggcctgttgctgcctaatcgccaagattgttgtgagcatgaaaggaagttt

SEQ ID NO: 7981 - DNA, 120 bp, Homo sapiens
atacgctactcttcccaagtcctgagcctcatagtcacccgagagggagcagggtggggatgggggtcccttgggcatcacaaggccagaggcccacagaagtgaagagagccagcccac

SEQ ID NO: 7982 - DNA, 120 bp, Homo sapiens
ccacgggctacagaggtcagggagcatgcactggtctgggtccctttctctcctcagccccttgggctgcccttggatatacctgccctgggctgctgtattggccctcctgctgatgga

SEQ ID NO: 7983 - DNA, 120 bp, Homo sapiens
atccgctggaaaggagatgtcgctagcaagaagtcagcgaaaaatacagagtggttcctgggactgaaaatggagcttcctgctggggaacagcagttaatacgtaaatcccccaaagct

SEQ ID NO: 7984 - DNA, 120 bp, Homo sapiens
cagcgtttagggttacactgcgtttccatggtgatgccttggaaacagtgcagaagcggagctcctgcctctaataaggtaactccaagtgcagaagccgctctcagcccagtccaggga

SEQ ID NO: 7985 - DNA, 120 bp, Homo sapiens
ttgcggggtctctcctttctaccctttggtcccgagagcatcccatttgaggctgcttgtttccagaagctttgaattgtaatcagaggccatctctttgtcaagtcagtcttgtggggt

SEQ ID NO: 7986 - DNA, 120 bp, Homo sapiens
tgacgtgggggcactgcagaggagcagcagggtccatggttgagatgggatctttggtcaggcctcccctctgcatgcagcctgatgctaaaggcattctcatggcctagggtggggctg

SEQ ID NO: 7987 - DNA, 120 bp, Homo sapiens
aggcgagaacccaagaccctatatttctttctccatggcccagtgttggcccgggagagtttcagattgaaccagtggagagcttgaagcgttggctgcctgttgtgcccagtaagaatc

SEQ ID NO: 7988 - DNA, 120 bp, Homo sapiens
gatcgcactgcgggagcagcagacagcctttcagctgagggcgggagtctcaatagagtctaggcctgggagaagagaagggcttggccctgacaagagtttccaaagcctgtggcctga

SEQ ID NO: 7989 - DNA, 120 bp, Homo sapiens
aggcgtgggctccaggcaataaaggaaaaagcctggagcagaaggaaacgatgacccatgtaggtgtgaagggcggaaggatggagatggttgggaagcccagagctgtgtttccagcca

SEQ ID NO: 7990 - DNA, 120 bp, Homo sapiens
ccccgggtctccactcctctggtggagctgaaggaggcccgctcctccatctcccagccccccaggttcttctgcttttctctggctttcttctgagttcagtgtgagcccagccagcac

SEQ ID NO: 7991 - DNA, 120 bp, Homo sapiens
tcccgttggttgccatgctccgtgttcctgctagggaagtggggagccttctgaaactgctgcagagagaggccctgcttggcaagcaaggctctagagcaacttgtgctttggggaagc

SEQ ID NO: 7992 - DNA, 120 bp, Homo sapiens
aagcgctgctgccggggtgggcagttagggtggttctgccctgggtcttcttcccagggcagcacagctgctggtttcccatgggtaagcagcccaggatgctgtgcttggtgcagggac

SEQ ID NO: 7993 - DNA, 120 bp, Homo sapiens
ggtcgtcctggggcggcatccccttgggtcattggagcccttgggaaacttgtcaggagaaaccttcactgtttgcttccgagaagctggcttcttctgaggggagccttcagcctggga

SEQ ID NO: 7994 - DNA, 120 bp, Homo sapiens
gtgcgtcctgggtctgtgggaagagcctccctgcttttatcctgtccgtgaggcctggaatccttgcaaaagtgccaacagctttggacccagagccccacccaaggcagtgccccacca

SEQ ID NO: 7995 - DNA, 120 bp, Homo sapiens
gcacgtggtggaaacactcagacccccatgctgcccctcactggctgtgtgcgtgtgggcctgctgcctcttctgtcagcgcctgcggcctcccttgggaggtgggtgggtgagactgga

SEQ ID NO: 7996 - DNA, 120 bp, Homo sapiens
gtgcgcacatacatgcatataaagaacctgtgtcatctgcaagcctctccaagggcccaagccagagagagactaaggtggttttctaaaaatgaggcttggccatcaggatgggagtgg

SEQ ID NO: 7997 - DNA, 120 bp, Homo sapiens
ttgcgagagagctgagatgtgcttcacttttggagaggggccaaagccatcctgttggcagccctctgggcagggttgttggggcccaggatgtgacctggcactgcggagcagctgagg

SEQ ID NO: 7998 - DNA, 120 bp, Homo sapiens
cctcggagctaccacttccagaaccatggagagattggggattgacaccttttccatctgggctactggcttgtatctagctttgtgtgtgagcttgtgagtgtgagagagcaagcatgt

SEQ ID NO: 7999 - DNA, 120 bp, Homo sapiens
tgacgactctttccttcacatagcgtctgggcactccattttagcttcttaggggcaaaaagcagagggtgggtaaggccacagggctggcccagacttgggcgctgtgaacttgttctt

SEQ ID NO: 8000 - DNA, 120 bp, Homo sapiens
tctcgagggtgtgttctctttccttactctgttctgtctcaccttatttgagtcttggatgtctaggaatgacagactccaaagcaactactgtggtctcactgttttggggcagtatct

SEQ ID NO: 8001 - DNA, 120 bp, Homo sapiens
gcccgggtgccccctatagctaggcagccaggacctgtgacccaacctgagctgtgtgctcctgcaccttcacagacaccactttctcctcctccaggagcctgggcctgccaaggtggc

SEQ ID NO: 8002 - DNA, 120 bp, Homo sapiens
ctgcgggaacctgggctagagagcaaagaaggtgagcggaggccaggctggcttgtatgcacgggaatggccctccctcccatcagagctggccctggggattcagccaaggcctgtaga

SEQ ID NO: 8003 - DNA, 120 bp, Homo sapiens
agtcgcaagcctggacctcgattccctttgtccatcagccctgggggtagcacctggcctggtatgttctgagattcccgggctccagtcttggccttgccccttctagctcttaaatcc

SEQ ID NO: 8004 - DNA, 120 bp, Homo sapiens
aaacgttttgcagcagggtctgtggatgggaaggcctctgtcactgcaccatcgtgtttctttctgtgtgcatcctgccccaagaagctgcagtcagtctcatccctctcaccatccgca

SEQ ID NO: 8005 - DNA, 120 bp, Homo sapiens
tgccgaagaagatgagggcccatgccctgccctgcccttgttctccagagtttcctggagaactagagaaagagttggatgtcctctgaggcctccaagcccaaatccagacgcaagtgc

SEQ ID NO: 8006 - DNA, 120 bp, Homo sapiens
gcacgccttcaatcaggcttgcacccctgcatctgtatactgaggctttgccttgacagcagggttcctcagccaggtttatggatagacttacagacttctggaggtccatgatgacct

SEQ ID NO: 8007 - DNA, 120 bp, Homo sapiens
agacgctaccaggagggacaggtgaaggcagccatgggctcccgtgcctcgaagggcaggtggagggaagtgtctttacatcctgcccccttttcttctgagcacccaccattggctgac

SEQ ID NO: 8008 - DNA, 120 bp, Homo sapiens
aaacgtcccagatgaaaaggcctgtgagcctgcaggttagtctccaggataaggaagcatctcccagagatactgctggtgagaggaaaatgacacgttgacttcctagggaaaggaagg

SEQ ID NO: 8009 - DNA, 120 bp, Homo sapiens
taccgcccccagttatagatgtgaaaactgaggctcaggagtaggtgacttctcaacaatggatagctggtgcagatcccagtggggccttagccaggaagtccctgctcccatcctgtg

SEQ ID NO: 8010 - DNA, 120 bp, Homo sapiens
tgtcgtggtggctccagagcaggatcagctatgtcctggtttagcgccagaccacagaattagcattcagcacacctgcttggcttggcttcttctcggagagactccttttgaactcgt

SEQ ID NO: 8011 - DNA, 120 bp, Homo sapiens
tgtcgcctgggacaggtgcagtctctggggctttgtactctgcatgcactgccacacggggatgggttttcacctggtgctggccccaccccccaccagttctgcatactaatactgcag

SEQ ID NO: 8012 - DNA, 120 bp, Homo sapiens
tgtcgctttctgaggcctgctcactggatccctagtagcccaccctgtgcttggttggattcctgtcccctggttgattagagcagaatctccaaattggcaagagattcttggccacac

SEQ ID NO: 8013 - DNA, 120 bp, Homo sapiens
gagcgagactccgtctcaaaaaaaagaaagatctgcaagctaagcaggctgtcagagagggggcaggtggcagtcccacgtctcaggtcctgtgccgcaatggcaactacaagcttgcag

SEQ ID NO: 8014 - DNA, 120 bp, Homo sapiens
tggcggcaaggacagttgcacagcttggcaggacgttggggttgaaacagggctctgtagagggacttcttatctatctgggtcagtcttggccagacctaggcagcagcggactgtggt

SEQ ID NO: 8015 - DNA, 120 bp, Homo sapiens
gagcgctttgttctggtagttatcctgacaattcttgcctgttctcactctcactccttggaataatacaaacagacatcaaagctagcttctgctcagatggctgtagaaaagagagca

SEQ ID NO: 8016 - DNA, 120 bp, Homo sapiens
cctcggaccagagataaggtgacccatgtctctgtggggccagccaggtgggctgtagatggcagtgctgtctcaggctgttcctcagggcccaggtgtgtctgggcggcacaggtggag

SEQ ID NO: 8017 - DNA, 120 bp, Homo sapiens
gagcgctgtgcctgggcgctgcccccctgtctgccatcctgcttcttgtgggggaatacaggtcaagcctattcctggtggagaaatggcctgagggtctcagcggggctgcagctgctg

SEQ ID NO: 8018 - DNA, 120 bp, Homo sapiens
caccgcacgtctctgtttcccaggcttcctgtggcttctgcaagaacttttgaatcaattctcctttcagccttccctgcagatgtttcccttcaaataaaatgttctgtgactcttcat

SEQ ID NO: 8019 - DNA, 120 bp, Homo sapiens
ggccggagcccacactgctcacagggcaatgagaccataccttctctcctgccagcctgccaagcccagcatctccttcctcaaggtcgcgtgtgcctacagaaggctggttgcaggcag

SEQ ID NO: 8020 - DNA, 120 bp, Homo sapiens
cctcgaggccaggtttcacccagccctgctcatgtcggcctgctgtcagctgtgcctgtgttgttccttgcacatcactgttgtgacactggtgccgcctccaagagatgatgctgcctg

SEQ ID NO: 8021 - DNA, 120 bp, Homo sapiens
ttccgtggaggctgcagaacttagatgcagctgttttttacagcacctatttttgtcagattggtaaggaaacactgagtcacagaatacttaagaattggagactccagtaatgtagga

SEQ ID NO: 8022 - DNA, 120 bp, Homo sapiens
ggacgtccaagtcccaaggggtggacacggcatgttcctcgggcacagcctcagtgggggccttccccaggcgcagctcggccacctgaggaaagggtgtttcggaggcgcagccacaca

SEQ ID NO: 8023 - DNA, 120 bp, Homo sapiens
cagcgctggcagcctcacggtcacgcccatcactccctgccccccactgcccttgagaagttagtggtgtcacatccttagttttatagacagctaggaatagattgtgaagaacactca

SEQ ID NO: 8024 - DNA, 120 bp, Homo sapiens
caacgtatctactgacatactgttaggattcaaaaccagttaagtataagaattacttcatgtggttttcctagggtacaatttataaaaggtagaaagcatccaagtggctcctcaaca

SEQ ID NO: 8025 - DNA, 120 bp, Homo sapiens
attcgttatcaaaggcaaaacctactgtgccaagctggggcgctatatgtgaacggagtggaaatgcttcagtcacctctgccgcagcttgtgattccagcagttctcacaaacgttctg

SEQ ID NO: 8026 - DNA, 120 bp, Homo sapiens
taacgcttaacaaacagactaaaagctgtgtgcagaagaaagggctgaatgagtaccgcctccctaggttccagcacagcgctcgggtctaagaagtagagccccggggtagggtgggcc

SEQ ID NO: 8027 - DNA, 120 bp, Homo sapiens
aggcggtgtcggcccagaggttttttcctagcccaagaggttttttccagccggcgttgttggaaggcctgccctgctttaagcataaacagaggaagagactaaggcagccgagggcac

SEQ ID NO: 8028 - DNA, 120 bp, Homo sapiens
ggccgggggcatagggaaacggggcaatgtggtggtctgggctggatcctggaaccgaaagaagacattcacggaaaaactggtgagagccaaataaagtctggagcttaatcgcattgt

SEQ ID NO: 8029 - DNA, 120 bp, Homo sapiens
acacgaaggaaaaagtatacagaaatcacactctcagcataatttgaagtcagagaattttgaaacttcaaactgagtaagatgaggaaaatcagcagatcgcaacatggattctcacag

SEQ ID NO: 8030 - DNA, 120 bp, Homo sapiens
gagcgaagccagatggagataaactgcagggaagtcaggagagggacgccagaaaaagaaagtaatgttctaatcttggcctaaaactactgccagaaagactaggtccacctaactctc

SEQ ID NO: 8031 - DNA, 120 bp, Homo sapiens
atccgggcagaaaccagaggcaagaggcttcagagtgagcacaatttaaagggggcaggtgtgacttaatgaggcagtctttgaaacacacagcttcaaaagaaaagaaaagaagagcgt

SEQ ID NO: 8032 - DNA, 120 bp, Homo sapiens
aaacgtatattatatgatttggtaatctgttacagtagtggcccccaatgaaccaggaattcacatttccaactactcgtggccttgtgtggtcctctcccctagaatctgggctgggcc

SEQ ID NO: 8033 - DNA, 120 bp, Homo sapiens
acacgtgcacagcaatagagtgaaactgatcctgtgccagttccaggcctcatccttcagaagacctgtcaacatctgctttttggaggccaccatgaaagaagtatgtctatctttctg

SEQ ID NO: 8034 - DNA, 120 bp, Homo sapiens
ttacgtagcagtaaacaaatcatataaaaaaatacacgcttaattcttgattatctatactaatagagtgcacatcatcaagaccaagacaatcgaaaaaagaatgtctgccaaattaca

SEQ ID NO: 8035 - DNA, 120 bp, Homo sapiens
ttacgggtgagattccaagggtcactcatcaaataaatggcagtcaggatctgaatcctgctctgttgggatccaaagctggcgacacagcctagcggcccctgcagaggagaagaggag

SEQ ID NO: 8036 - DNA, 120 bp, Homo sapiens
aagcgatgtgaattgaaaacctggtgtttcttcccacttctgccctcaccctagctatgccactgctgccagggccacttttggtgcatcagcctctgggtctcttgggtgccaaagggc

SEQ ID NO: 8037 - DNA, 120 bp, Homo sapiens
aggcgagcacccacttcttccatcctccaggtacatttatctcctgcagactttcagggctgctaggggtcctggccatctgtggaaggcatgataggaagaatatgagctttggagtca

SEQ ID NO: 8038 - DNA, 120 bp, Homo sapiens
acccgtctgagcctcagttgactcatctgtaaaatgagtacagtgatatgaaaatggctgagaggacccagtgagctgatgtgtgagcactgtggagtcctgtgcccatatgaggcatgg

SEQ ID NO: 8039 - DNA, 120 bp, Homo sapiens
gcccggtgggacatctccttcttggaggcagtttcttctgactcagcctaagtcagtggcctcatagtttcatttcacgttttttcaagttctaatattacctcaggttgctgttgtctt

SEQ ID NO: 8040 - DNA, 120 bp, Homo sapiens
ctccgtgtgaaggccaagttcgaagccagagtcccagctttctactacatcccccaggccaacgactgcctgtgagtgggtgattccttagggactgggtgaggggtctgtcctggttcc

SEQ ID NO: 8041 - DNA, 120 bp, Homo sapiens
gtgcgcaggtggatccaggaaagcactggataccatcacagagagcacatgggaagactggtataagcctctttctgcctctgttgcttgggcgtgtctcttcctttctctgggcctcag

SEQ ID NO: 8042 - DNA, 120 bp, Homo sapiens
ccccgtggcaaccattgatccgttcatcattatagattgtactttcaaaaatgccatataaatggaatcatttaatatgtaatttttattttattttattttattttattttatttattt

SEQ ID NO: 8043 - DNA, 120 bp, Homo sapiens
agacgtttacttggtcctgcagctctctctctgtggaccagtcttttttgttgttgttgttgccagatactcaccgcctctactgtttatccacccatttcctttataactctgaaaagt

SEQ ID NO: 8044 - DNA, 120 bp, Homo sapiens
ccccggaaaccaatctcttccagttcccaagacacaatacttttctactgaattggagttccttagcgggggtcttagttttgttctgctattcagtgcctttgtccctatcctagccat

SEQ ID NO: 8045 - DNA, 120 bp, Homo sapiens
attcgatgattttaatattctaacagcatgtctctgtgacccagcagtctattgggagctgaccccacttgatttaccaaactctttcccattatgcctctgcatgcacctatgttccag

SEQ ID NO: 8046 - DNA, 120 bp, Homo sapiens
gaacgctatttgaattctcttctagtcaccccagtgcccagcacagtcttaaacacacagaacattgatggaatgtttttcatatgattcctggttgaagggtagactggctaaataaaa

SEQ ID NO: 8047 - DNA, 120 bp, Homo sapiens
ttacgaaggaacataaaaattcctttctctatcttttcccacctctagaaatgcttgaaatgagattctgccttacgtctcacaaattaaataccacatttgtgtctcacccatctcagt

SEQ ID NO: 8048 - DNA, 120 bp, Homo sapiens
gttcgtcagacccaatgattttattcttaagctaatcttatttttaatttaggtaattctgatttctgatttgtaaaagataaattttcttctccttcatgtagtaggattttaattttg

SEQ ID NO: 8049 - DNA, 120 bp, Homo sapiens
aaccgttaaacttttcttattaaaatgcaaagcctagtgtcttctagctttttgaagagcttttgtccattatataatctgtcaagtagccaagagttcctcagaagcaggacatcattt

SEQ ID NO: 8050 - DNA, 120 bp, Homo sapiens
ctacgattttacttcagtaaaatatccttggatactaccgccattttatttaccttaaagattttaccaaggtaccctagaacaaaaatggtgaggtcattttgattctgctaaagttgg

SEQ ID NO: 8051 - DNA, 120 bp, Homo sapiens
gctcgaatcactggttagatatggacatattttcccaactgtacatcagggaggagtgctttcattagtttcagaaaatgcagaccctcagacagccagcatgaccacaacattgagcaa

SEQ ID NO: 8052 - DNA, 120 bp, Homo sapiens
aaacgttgtttcctttgttcgatattgtttgggtattttggtcactttgggttgagttaccacactcagagagttaatggtgtccactgtctgcatcccacttacagtgaataagcttga

SEQ ID NO: 8053 - DNA, 120 bp, Homo sapiens
atacgaataattcaagcctgaattttaaaacagttctcctttgaactctcctgcacactgctgaattaatcttaaaagtgtgcatgatcaggttactactgccttgcttgagggtttaat

SEQ ID NO: 8054 - DNA, 120 bp, Homo sapiens
agtcgttgccacaaagacctgatgtgccgagcaagaaggtggagagaagagcccggccgggtcctgcagggccccgaggctgggctgggaagttagcacaagctggggtggaggctccgc

SEQ ID NO: 8055 - DNA, 120 bp, Homo sapiens
ctgcggccagcgggacagagattctgtcctggattctctgagcttggggcatgcgggctgccagggaggtgtgatggtgggaacccggcgaaagggaggaagcctcttccaggcgtggag

SEQ ID NO: 8056 - DNA, 120 bp, Homo sapiens
aagcgcctcgcttttcctccctccggcctcatcctggttttctcctcatctccccgtcgcagggtcccgggtccaggctggggttcagttgcctgctcctcctctctgtgccctcccccg

SEQ ID NO: 8057 - DNA, 120 bp, Homo sapiens
gcccgatggccccacaagtgctgtcttgcaggagagcgccgggagaccgcagggcggaggtgaagaacggagtccagagccctccagagatggcagcgaatcccggccctgcctcttgcc

SEQ ID NO: 8058 - DNA, 120 bp, Homo sapiens
gtccgacctctctgggcctcagcttcctccgggatgaatgcagtcacggaacgcgccaatgcaggaggcccccaggacatcctgagcgctcgggagacgccaggcgcggcagcgggcacg

SEQ ID NO: 8059 - DNA, 120 bp, Homo sapiens
tagcggaaaggggcgcgaccccgcggaatcctccggcagggcagggcctttgggtggctccgggtgtccagaggaaggggtgggctcggggacgcggagggaaactggggacgcggaggg

SEQ ID NO: 8060 - DNA, 120 bp, Homo sapiens
tcggactgcgcttcggccagggcgaggaggtaagctggcccgaccccagtcccggcccggggaccccagcccagccccgccgcccctcccccagctcccccgccgggtcacccgcgtggc

SEQ ID NO: 8061 - DNA, 120 bp, Homo sapiens
gcccgaggcggtggcctccctcccaatcccctccctccgccggagcccaggacctcggccccccccgggtatccctggcccagccgggccctcgctttccgccccccggcgcccgtgccc

SEQ ID NO: 8062 - DNA, 120 bp, Homo sapiens
ccccgagcgtcacgcgtcacgcctagggtggcttctgcgcccaccttccttcctcggccatgcaggtccttctgagcggtctgcacatccacccttgtctgggggagagagctgccagaa

SEQ ID NO: 8063 - DNA, 120 bp, Homo sapiens
atccggccctaggctccccaccccacccggcgctgcggagaccaagatgcaagggtctgtgtacgtcctgctgggccgggccagggggtgaaagggaccggtaggggtgctctgcagcct

SEQ ID NO: 8064 - DNA, 120 bp, Homo sapiens
cctcggctgcacacaccctgcccagacacggaaggaggtgtctgctggggccaccgtgtactcccgggccagtgtcgggtgacctctcattcaggctctgctgggcagccaggctggcag

SEQ ID NO: 8065 - DNA, 120 bp, Homo sapiens
gctcggggagtggtggctgagcagagggctttcatgtggcggggccgcatctatttggggaaagcaggacttacgtagattgttaacagggctggaagcggagggtcggtgccgccagta

SEQ ID NO: 8066 - DNA, 120 bp, Homo sapiens
ggacggagtcatatcactaaacgcacactacaccagtgtcctctggtgccaccggcatggggactggggactgtgtctcaaggggaggacaagacacccacctggctgaaatggtcaggg

SEQ ID NO: 8067 - DNA, 120 bp, Homo sapiens
ggtcggaccaggcatttcagaacatgggagaagctgggtgatggccaggttgggcccgtgcctctgcgtcaccagagagtgggaggcgattgagaatcatctctccacccgcacctgggc

SEQ ID NO: 8068 - DNA, 120 bp, Homo sapiens
ggccgggacttgtgagtcgctgagagctgtgggcagaagagagtgaggcagcttcagggcttgagaactcaggtacccaccacaggaaagaccactgcagtgcctgtgagagcccagact

SEQ ID NO: 8069 - DNA, 120 bp, Homo sapiens
ctgcggggctttgctgagggacactgcctgctgccaccatgacccttcttccccaaaggccagccaagcccttccgtttttccagtggctcccatctggggcaggctgagcagactcctg

SEQ ID NO: 8070 - DNA, 120 bp, Homo sapiens
agtcgcgctccttcctctcagaacacagactgcaggtcgggtaaagaagctaccagctctggctgaaacctggagtccccgaactcagagcctcagtagtgggaagggcctcccaacaac

SEQ ID NO: 8071 - DNA, 120 bp, Homo sapiens
caccggcctcagccacgtgcccagcaagcctcacccacttctcccccagctggacagttcctgccattagaaccttctccctcatacactctagagacagacctgcttgtcacttagtca

SEQ ID NO: 8072 - DNA, 120 bp, Homo sapiens
ggtcgaggctggtgttggcacaagaggtggcctaatagagagggaagggggccagcaagaggccatcaggcctcctgctatggttcaggggaggactccagcctcatggcagaaaaacca

SEQ ID NO: 8073 - DNA, 120 bp, Homo sapiens
agacggccgcagagttgatccgggcagccagatgcagctagctgggctgaggctgttccctggcccgtgtgtggtcttggatggtggtggagccagtagggataagggttggtaagggat

SEQ ID NO: 8074 - DNA, 120 bp, Homo sapiens
ctccgctccgttctccttttgttagagtcttattcaagaccagatggtaaattgtatcaaatgtcttcccagcatctattaaatgtttcaacgatgcttgctattttcccagttgatgta

SEQ ID NO: 8075 - DNA, 120 bp, Homo sapiens
cagcggcagtccacccaaatcacagagaatggggaggagcagctccccagaggaaaatcagggtgcacttaccaggtgaggggcattgcaacgttgggtagaaagaaactccagatgtgt

SEQ ID NO: 8076 - DNA, 120 bp, Homo sapiens
aaccgactgggtgagtaaacaaatagagtgcaaggggaccagcccggaacccaggagccccagctcctcctgagccctgcccccaaaatcttgtgatttggaagcaagttcctctctgct

SEQ ID NO: 8077 - DNA, 120 bp, Homo sapiens
gaacgggtcagaggtcaactcccagatttccagcttgccggctctatgacctgggatgggcctctgtacttcctggtgcctcacctgcgaaattgggatgcgatactgttcccctgagag

SEQ ID NO: 8078 - DNA, 120 bp, Homo sapiens
taccgagaggagttattagggtgcactctgtgtctttggggatatttagaagaggaagttctgcgctggttatagattatttggggctcttgtggggatagggataagtatccaagtcca

SEQ ID NO: 8079 - DNA, 120 bp, Homo sapiens
agccgcccaatctggattcccctctcagggtctcatcatcagaatctccaggggaggccctggaaaatgcagcttccagggtcccaccctggtgaacaggctctgcagatctgtgttgag

SEQ ID NO: 8080 - DNA, 120 bp, Homo sapiens
cctcgctttcctctcttctagcccagagatcccagctaagtccctgactctctggagctttggttttctggtttattaagtgaggccagtaacttccctccaagggctcgcatgaggata

SEQ ID NO: 8081 - DNA, 120 bp, Homo sapiens
acacgcctgagtcctttctgatacccaggactctgttacactggtcctccaccccaggcctctgagctactttcttttgggaaagaggtttaaattataaataagggcctcaatcatgga

SEQ ID NO: 8082 - DNA, 120 bp, Homo sapiens
tgccgtgcttgctggaaaagaactttgcctctgcaaagagcgtctacaaaatgagtagactcaagacctcccctgtggcccttggccctgccatacgggccctgaggaatttgctgagct

SEQ ID NO: 8083 - DNA, 120 bp, Homo sapiens
gggcgtccttccgaggagaaggtgcagttgcagcagagaggaagcgagggctagaaagcctgagacatagacagcccctctggccatcgtccttgcctcagtcggggctctgggagggcc

SEQ ID NO: 8084 - DNA, 120 bp, Homo sapiens
ggccgcagccaggctgggtaggaccgagcatctcatgaggggccgtgtgaggttcacttgttctgtttggggatgctgagttcaatcacctggggagcagcttggtcctgggaggaccca

SEQ ID NO: 8085 - DNA, 120 bp, Homo sapiens
ccacgagctgcaggcaggggtgtggagcaagtgaacctagacagttcatcctctaggggtgactgcgcacaccaccaccctcctctcacacagatgccggttttgccatggaaatggccc

SEQ ID NO: 8086 - DNA, 120 bp, Homo sapiens
acccgtgtccagcaaacagagggaggaaagggtattctgatccagcagttggtcaagcaatgtggaaatggagcccgctcccccttcactttagtccaggaaagcctccgggtaaaaatg

SEQ ID NO: 8087 - DNA, 120 bp, Homo sapiens
ttacggatttcagaaacctttctacatgtaacacattgacactctctaagaaatgccatcctggtgatcttgggtgaaggactcaacctctctgggtcccacttgcttcatcagtgaaac

SEQ ID NO: 8088 - DNA, 120 bp, Homo sapiens
ccacggataggaaggggcggggccaccttaatctctgctgcccacagagcctgggagctcctcttgtccccagcccctggctagacctggcccaggaaatgtacgtgaacaccagtgagt

SEQ ID NO: 8089 - DNA, 120 bp, Homo sapiens
aggcgcagataggtttcaggtcctctgccagggctacaggctgcacctcccctgggatccaagtggggtttccgtggtggagagattgaccagtgggcagtgaggtgaggagcagtacct

SEQ ID NO: 8090 - DNA, 120 bp, Homo sapiens
ggtcggggtctgccagggcctcatggtacgtttgaaattccattatgggattcccagaacaagtcgcccttctcacttgccatcttgtgttgtactgacagcaacagtggaatttctgcc

SEQ ID NO: 8091 - DNA, 120 bp, Homo sapiens
tggcgggagcttttcagtttgagtctagttgaagtgtcagagctggggagctcggcatgtttcggatggggcgggatagatgggttagaggaggcagggtccagggaccacagctcagag

SEQ ID NO: 8092 - DNA, 120 bp, Homo sapiens
cagcgagcagcgcctttcaaactatgctgagagccagagatgtcaacagagggcctcacacggagggcacggagggagctgtccttccataggccccccgagaagagagtgtcttccctc

SEQ ID NO: 8093 - DNA, 120 bp, Homo sapiens
ccccgcccccatatttagcctccccctgccctccagccactgagaacagctggtggttcctcagacccttcgagcacctctacggcctggccttggctaccctctccctcctccctccct

SEQ ID NO: 8094 - DNA, 120 bp, Homo sapiens
ccccgaagtttaaaaatgatccagttcatattttaaattcagccagttaaaaattgctggaagaagaggtgcaacgactggctgtcccagctcatgaggttcacgggtgtccgcagcttc

SEQ ID NO: 8095 - DNA, 120 bp, Homo sapiens
cagcgttgacccaagagggcatcccttctccagcaggggaagcagggaggggacagcttcctgttcatgggccccaccctccagagacagcctctcccagagccccctgcagatgtcttc

SEQ ID NO: 8096 - DNA, 120 bp, Homo sapiens
ccccggaactggcttggtccagtcagaactcatgctccaggttgagtggccccaggcacctggtcagacaggaggtgggcacctcaggcccagggggcgctctacgtggacaaagaggag

SEQ ID NO: 8097 - DNA, 120 bp, Homo sapiens
tgacgaatctgcctccgttcttgtcattatttcttgactttatagaagaggggaagtaaaaggctcggaagagaggttgagtaattccccagggccacacccactccaaggtccccaagc

SEQ ID NO: 8098 - DNA, 120 bp, Homo sapiens
ttccgtggtgaagctccagtaaatggaggcatttttctcccagtcctctgaccccgtctgcttctccactctggttttcttctcttcctccccccaatccccatgcccaccccaaacatg

SEQ ID NO: 8099 - DNA, 120 bp, Homo sapiens
ttacgatcatagagacttcagagctggaagagacattcaatattaatgttatccagtgctgtcattgtccagatggggaaactgaggccgagagaggggaaggagctcagcgagaccact

SEQ ID NO: 8100 - DNA, 120 bp, Homo sapiens
tggcgaggattaaacaaattcatatgcatagagcgctcagaacagtgcctggcacaaaggaaggctcgctaagcatttgctttgattcccgtgagtaatggctgacgtttattaggcacc

SEQ ID NO: 8101 - DNA, 120 bp, Homo sapiens
cagcggcaagataagccggcttatctcacttgctcagatgaggcagctgagatttcagaaaggcaaatggcttgcttgagtccatctggccttcagaccttgaaattagggaggcgtggg

SEQ ID NO: 8102 - DNA, 120 bp, Homo sapiens
caacggcaacgaagctttttaacatcatctggtctgagctagaagagatgtgacccaggggactgagtggggggaaaaaatcagctcaaagagaaaggcaacagaaatagaaggggaagc

SEQ ID NO: 8103 - DNA, 120 bp, Homo sapiens
tggcgaacccgtctctcctggcctgggagccagagggggagccccagggctgcccagccacgcatggtgtgtgccccagggtgggggcggcccccagctcccctgcctggggcccaggct

SEQ ID NO: 8104 - DNA, 120 bp, Homo sapiens
ccacgaagaccacatggggtggctatttgctatgctccctgcgtgaccttgagcaaacccctccccccgctgggacctcgcttcaccaactgtgaaatgacgggctgggtcagtggaatg

SEQ ID NO: 8105 - DNA, 120 bp, Homo sapiens
ggccgaggaccatctgtggcaaaaggttacctgatgtccaggaaggtcgagactctttgtgatccaaggcgaggggtccccacgtagtgagtaaagcttctttgatgctcagggcgccag

SEQ ID NO: 8106 - DNA, 120 bp, Homo sapiens
ccccgtgagagtctctggcccaggaaggcaacagggagcagtggctgactctctggggtcagtaagacctgggttcaagagttgccactacaggtgggcaaaaattttaaatttaaaaaa

SEQ ID NO: 8107 - DNA, 120 bp, Homo sapiens
ccccggttgcagcttgggccatggcgtgggtgcttcggggaccatgcagtggccctcagtaccccatctgtctgcctgtcatcaaacaaccccacccccacctctgtcccaggtaggctt

SEQ ID NO: 8108 - DNA, 120 bp, Homo sapiens
gctcgccccaccagtgtctcccagcctcagggagctgtggacacagggattacagaatccaaatccctgcactcctgcctcctaggtggacttgaggtgagggtcctcatcagtcagtca

SEQ ID NO: 8109 - DNA, 120 bp, Homo sapiens
ggccgactccacccttgacttgcttcagaaataatgaaggcagagccctgaccttggagaggactgtaggcctgagcatgggaggctggagggtagagggtgccctggctcatccccaca

SEQ ID NO: 8110 - DNA, 120 bp, Homo sapiens
cagcgatgcaaaggcaggaggagaggaggcggaatgccagccaggatggtgggtgggctcccctgcagccctgcaggtggcacctgggcattgctattctcagaagccacgtcattgcct

SEQ ID NO: 8111 - DNA, 120 bp, Homo sapiens
gcacggcccctctgcccttccctcaccccagactcaccccagagtggaaaagcagggtcagctggaatcaagatgcaagcacagagccgccaggttccaggcaaggagaagatggttagg

SEQ ID NO: 8112 - DNA, 120 bp, Homo sapiens
caccgctctccatctcagtgcccaagggagggcagctccattaccgctcttttcctcttctcccatccctgctgtgatagaatctgccccgagcttggggcccattctaattaaggtaac

SEQ ID NO: 8113 - DNA, 120 bp, Homo sapiens
aaccggccttttgcaaaatagcaagtggaaggcctgcccttgaggcccagcctgccagctcctgtttgcccttgcctggtgttcgagatgactgggccctgcagccccagtgaaggaggg

SEQ ID NO: 8114 - DNA, 120 bp, Homo sapiens
attcggggtgagctgcgctggtccattgtagtttgcactcagtgcttccaggagctggaaaggcaaacaatagatttgggtcacgaggggttgggggaggagatggtcagatttagcagg

SEQ ID NO: 8115 - DNA, 120 bp, Homo sapiens
cctcgcttcgtctcccttcctcgcttcctctgctcagacccccacacacatgcaaagctggcctcaggcagacacatgccaccactgttctgggctcctttccttagatttgagaggcct

SEQ ID NO: 8116 - DNA, 120 bp, Homo sapiens
ttgcgcaggttatttaatctttctgtgcctcagccttctcatatgcgaaatgggaagagcaatgcattctctggtggatctgggttgtgtggggcctgaagctcttaccacatgtagagc

SEQ ID NO: 8117 - DNA, 120 bp, Homo sapiens
gcacgtgagggtcctagaagcttaagctctgttagcttcacagtaaatccagatgtatacatgcctacctgataggactgtgagggattaaatgagctcatatttgagctcctagaacag

SEQ ID NO: 8118 - DNA, 120 bp, Homo sapiens
agccgagggcctgagagtcgctgcttctgagacccatcccacatcctctgcctgccactatcaaagtggttgtgacctccctggggtagcagagtccaagaacagtcagtctcccagaca

SEQ ID NO: 8119 - DNA, 120 bp, Homo sapiens
gtacgtttatccctatttcacagatgtgagcactgaggctcagagaggcaagtgaacattgtctcctctgtaatgaccgtcccctataaactcctggcaggagggccttgccagctgagt

SEQ ID NO: 8120 - DNA, 120 bp, Homo sapiens
tgccggagcactcatagaaatgcacacatactgaggtcacaggaactaactgctttagacatgttaccccagccaagcccccaacaacctcgtgagagagatactattcctatccccatt

SEQ ID NO: 8121 - DNA, 120 bp, Homo sapiens
tggcggagcccagctgcaaagtcagggctgctgaaggggagagaggtggccgtgtgcccagctgtgagcaggctagaggtgctgggggacagtctgggtgtgcacagaagcagctcccga

SEQ ID NO: 8122 - DNA, 120 bp, Homo sapiens
tctcggtgctaatgtgaggatgaaaggcccccaccctgctgctgcccagtgggagagcctgacgctcaagttggcgatgagccttgcaggctgggcctggatgtgtgtctgaaacaggga

SEQ ID NO: 8123 - DNA, 120 bp, Homo sapiens
caccgccctgggctcataaagaaccactgtgcagtgccgcgtgatgagtgctccccccatacccagcgcagggaacctggggagagagtggctggttctgccctgggggtcggggccagc

SEQ ID NO: 8124 - DNA, 120 bp, Homo sapiens
agccgcagggagctggcagccaagctgggccttacgcgctgagtcatggctctcatcataaaggcttcattcagagacacggccacaggcggccccagcgctcaccatccctggtcctca

SEQ ID NO: 8125 - DNA, 120 bp, Homo sapiens
aaccggcccaggatgaatcccagccgcacaccagggatacacctgcgcacaggaagacatggtcccttctctcaaagaattgcggtctgaggggagaagcaagaccatgaacacggaaat

SEQ ID NO: 8126 - DNA, 120 bp, Homo sapiens
tagcgcccatgctgatagagaaagtgcatcaagaaggcgaagcagaagggaagacagggatggccatggtgggggtttttctctaggaagagggcctcatgcaggaggtgacgtgagccg

SEQ ID NO: 8127 - DNA, 120 bp, Homo sapiens
actcgtctcaaaaaaacaaaaaagaaaaaagaagtgagggatggaggcacgtgaggtgggggagtgggaaagagcttggctgtttggtggctgagtgatgggaaggtggaatggaatgga

SEQ ID NO: 8128 - DNA, 120 bp, Homo sapiens
acccgggcagaggttctgagagcacaagcaaggagtctgcacaagaggccaggcaagggcttttagctgggaaatgacaagacctgcctgatgttttaaaaatatccctggccagtcaca

SEQ ID NO: 8129 - DNA, 120 bp, Homo sapiens
cagcggctgctttgcctcagagacaagccctggtaaacataggggccgctgcgaatttactggcaggagagactgagaaggaagttgacagccaagaggcagagaagtgggcaaagctgg

SEQ ID NO: 8130 - DNA, 120 bp, Homo sapiens
gtgcgtgtgtgcatgtgtgtgtgtgcatgtgtgggtgtgggtgggtgtgtagggtggtgcaggaccaaagcacccagatgccccactggtcctgcccgtaccaaagtgccgttgccactt

SEQ ID NO: 8131 - DNA, 120 bp, Homo sapiens
tgccgctttacattcatctcatttttgtctttttaaagtccagggcatggttaagagtgatggggggatggggagtacatttttaaacatttaattttttgtagagacgagatgtcgcta

SEQ ID NO: 8132 - DNA, 120 bp, Homo sapiens
ctccgcctcggccactttgtctgagccactgtgcccggcctgaggacacatgtttgacataaatagtatttactagcattcaacaggaagggtcctctcctttttttttttggttcttta

SEQ ID NO: 8133 - DNA, 120 bp, Homo sapiens
tctcgttgccgcttggttctttgtgttcctgggctggttatggagatggttccgacttcacatgaaaaggctggaaaagttgtgggtaggactctggatgaaagtcagcctaggcgcccc

SEQ ID NO: 8134 - DNA, 120 bp, Homo sapiens
ccccggactcattagggggtggaggcggcggcggaccgtgtggggcggggtgcgcagtgtgagccggggagcgccggccggaatctcacagtgcggtgacaaaaaaccgtgagggtggcg

SEQ ID NO: 8135 - DNA, 120 bp, Homo sapiens
gaacgggcaagagactacagcgcctacctggcaggggcgcgagctcacacgccgactcctggagtcccagccagggctgccctgagctgggcgcgcccaggcgagctccacctccggagg

SEQ ID NO: 8136 - DNA, 120 bp, Homo sapiens
aaccgaaagatctccagcacggcctttggacggtaaggcccgcctcgagggagggcaaattgagtgctgtccccatgctgcccactggccggggctccctgccagcagcccggactcagc

SEQ ID NO: 8137 - DNA, 120 bp, Homo sapiens
gcccgcatgtggctgagtgagcagaggggaacgaggccatcccagggcagtgcagccagggcagcgtcacttctgaaaaagaggggccagctcctccctgctctctccccaccccttgtc

SEQ ID NO: 8138 - DNA, 120 bp, Homo sapiens
cagcgttcagtgcccttcctgcctcttggagctggcagccatactcaataaagagaccccgggtttcctgcaggcggggatctgggcatgagtgtgcgccattggggctggtcactttgc

SEQ ID NO: 8139 - DNA, 120 bp, Homo sapiens
ctccgattaagtcctgcggcagttcagtgtggccccaggtccacactcagggctctgggagctggcagcaagggcccaggagctaggtgggttggcctcttggcagagaccctggctgct

SEQ ID NO: 8140 - DNA, 120 bp, Homo sapiens
gcacgggttagctcagcaggcccagtcccaccccagctcactgctctgcaaggcctggagaattctctgcctttgccatcccccagagttcccagagacgtagcaggagccagcttggtg

SEQ ID NO: 8141 - DNA, 120 bp, Homo sapiens
tcacgtgccagctgaggtcactgggtagctgcaggccagcatgctggcgtgaagagggttctgaggccgcaggagaagctgtgcgtcattggctgtgtctgccaggggaccccgggggtc

SEQ ID NO: 8142 - DNA, 120 bp, Homo sapiens
gggcggggtgatccgctgagtttggcaacattcttcctctcaggctgagtgagggcagcctccttaaaggggcagaccccctggggtactggatgctcgcctagccagtagtgtgagtag

SEQ ID NO: 8143 - DNA, 120 bp, Homo sapiens
caccgaagacctgttccgggacagcattgactcttgcgacaatgacatcacagagaaggtgggccttgggtggctggagaagggactgaatgcatgcctgctcccaggggagatggggtg

SEQ ID NO: 8144 - DNA, 120 bp, Homo sapiens
ctacggcaagctggagagggagaaggctaccgaggtggagctgctcaatgccaggtgggcccctccaccgagccccctccctcagagggaccccctgtcctggggcagccctgtgggata

SEQ ID NO: 8145 - DNA, 120 bp, Homo sapiens
acacgcagttactctcccacatcctggcgtctccggagagacagtggggcagcaggtctccaccaaggggattccactgacctcccacccctcgctaatcttgggacagctcttactcag

SEQ ID NO: 8146 - DNA, 120 bp, Homo sapiens
tagcgggcattgttggggctgcctgtgcctcaccatgtcttccaataagtcccagttttggggcccagtctcagtccctactgagtaaatggtgctgtcttctacacccccttcccaggc

SEQ ID NO: 8147 - DNA, 120 bp, Homo sapiens
gaacgatcaggaaagaggtacttgctctttgctgagatcattggcttgcagctgccagaggccatttttactattcggctgtttgagaatgaagtcagtagaatgaagtcagaaggaagt

SEQ ID NO: 8148 - DNA, 120 bp, Homo sapiens
ggacgcagagtcccgatgatgtctttgtagctcctggatccagccaggccagaagctagttaatctctggtaattttaggaatgaagacatcaacattttcctttttatttgcttaaggc

SEQ ID NO: 8149 - DNA, 120 bp, Homo sapiens
aaccgaaatgatcctgactaatacagtaggttccctatgaatgatcgctgtggttattgcaactaatattagaaacacatcgatgggaagatgcaaccacggggatgcataggccaggtt

SEQ ID NO: 8150 - DNA, 120 bp, Homo sapiens
caccgcagctcttcacacatcatgcccgggatatcaggtcccagagggtgagtttttttctctttgctgctgatgtatcccaggtgcctggcagatggcaggtgattggtaaacatctgt

SEQ ID NO: 8151 - DNA, 120 bp, Homo sapiens
cctcgcctctcacaccaggcctcgcctctctctccccacctgccttggccaggctgggccctggagtgttgtgctcactagtgcccaggctcagatctttgtgtttggataagctcatgg

SEQ ID NO: 8152 - DNA, 120 bp, Homo sapiens
agccgggctctcccctccccgggcaggctggctccacattccaggcacatcatcgcctacgccaggccatctggcctccagcatgggtggggaaggtgcagcagctggtgagagctgtag

SEQ ID NO: 8153 - DNA, 120 bp, Homo sapiens
tggcgctggtagcatggccagcaccaggccaggatctaaggacctggagggtcagagggccactgtcaggcccaccgcccaggagtgctccatgaaaggagtgagtaccagccaccttgg

SEQ ID NO: 8154 - DNA, 120 bp, Homo sapiens
agacgtctcccctccctggccatgggttccccattcaagaggaggcagctcagtatttctcaatagggtgctattgaccctttgggagggacagttcttcctagtgagcattcctggtcc

SEQ ID NO: 8155 - DNA, 120 bp, Homo sapiens
caacggagtgagactctctctgaaaaaaaaaaagaaagaaagaaaagaaaggaaacagggaacttctatgggttttaatagagtaacaggatggaagctaaaactcactcaaggctgaag

SEQ ID NO: 8156 - DNA, 120 bp, Homo sapiens
gaccgacactcccttttaggcctccagggtactcccaagggatggactctgcaagatgtacccacccccatccccactgcctggctccagcttgtcctcccagatccggagtcccctcct

SEQ ID NO: 8157 - DNA, 120 bp, Homo sapiens
tcacgttatttatttacttcccttgaatttactctgattccaaaaacatttaggaggctcacaaaactaaacacaatggtgactgtgattattagggacaaaaaggaacaaagaccataa

SEQ ID NO: 8158 - DNA, 120 bp, Homo sapiens
ttccgacttggatgctatatttggccctatgtggaaaaaatgttcactttacattggttttgtcctctggtgacagaaagcattcgcatgcagctgtggccacaagcttttttttctggg

SEQ ID NO: 8159 - DNA, 120 bp, Homo sapiens
actcggctgaagcagatgctaggagaggagagggaccagagcgaggtgcctgctgtccctggccctttaagccagcccaaccagtaacacatcacatcgttggtggtcaaggcaattatc

SEQ ID NO: 8160 - DNA, 120 bp, Homo sapiens
agccgcccagatggagcctacttttagggagtggtggcatggagggcttgcctggtcacttaaaggaatcttcgagggtcacaggggaatgaaacagggggctgagcaagtagcagtcaa

SEQ ID NO: 8161 - DNA, 120 bp, Homo sapiens
aatcgtgattacaacaactgaggtgcaggctgggcactggaatgctttcatcctctcctttttgactgctgagcacttgcatcacttccagtgtcttgctgttggaaacactcagcctca

SEQ ID NO: 8162 - DNA, 120 bp, Homo sapiens
acacgttttgcccgggcctgtgcctggctccatctgcctctggcatttctccccactttctgagtcagactggggtggggaaaggctcctttaaaggtgcctaaggagaagtggctgaga

SEQ ID NO: 8163 - DNA, 120 bp, Homo sapiens
cctcgccctggaatcagaaagggcagagaagacacagctcgtctgccccaactccaccccagctcaggtccaggttgcctatgcatgtgaaacatcatcctgcatggaaagccacctgat

SEQ ID NO: 8164 - DNA, 120 bp, Homo sapiens
tctcgatggataccagctaccatcctcctagagccacgggccagagccaaagctcactgccccaacatgcccaagtatctcaatgtcacctttatggcatttaatctatttaacacttat

SEQ ID NO: 8165 - DNA, 120 bp, Homo sapiens
tgtcggcaggcatctgtgaagcgcttaccacgtgccggattcaggcaggtgctgggaggaatgatgatgaccctggccctagatttcacagtaaccgcttctgagaaaactcagctgtaa

SEQ ID NO: 8166 - DNA, 120 bp, Homo sapiens
atccggagtaaatcctgaggattcgcaggtgggtttgccagccagcaggaagccagctaacaggaaggtaacgctgaaccagactcagcctctcctccaaagcccctggatgtgggtcgc

SEQ ID NO: 8167 - DNA, 120 bp, Homo sapiens
agtcggtgggtcctacggagacagcggagtcagtgggtctttactgccacctgctggacaaacagaataaggccacaggcagcagcccagagaaattcaggcgcctgcctgaattcagct

SEQ ID NO: 8168 - DNA, 120 bp, Homo sapiens
gcacggctctaacttgtatctgccacatttgttcaacagctaatgagagggtatcagaggagattgcttttgaaataaaaaccacctgaccagaaaaaaagaaaataaaaggaaaaccaa

SEQ ID NO: 8169 - DNA, 120 bp, Homo sapiens
caacgtggagcgtgcctccgggagaaatttctctttctgactcaaaggcgagaaggactagaaaaccctgtgaggtgggaggaagtatcttcttttaaaaccatggtcatactttactcc

SEQ ID NO: 8170 - DNA, 120 bp, Homo sapiens
gtgcgcaggaatccaactgaactgtcctgcccataaacaatgcaggatctagctcagtcctggaaaactgcccaaagcagggaggccgttctttccgaaggccttggctttgcagccaga

SEQ ID NO: 8171 - DNA, 120 bp, Homo sapiens
caacgtgggagccagccctgcctcctgccttcctattccaccctccaacttctcttccctccacccgatagttctcctccttggcctgccacactcaggagtgcacacacacacacacag

SEQ ID NO: 8172 - DNA, 120 bp, Homo sapiens
ctccggaaaaccaagggcagtgcagcgccaagatatttacttagcccatgagtttacttccatctcccaaggagacagtctcagatttcctcaaggcagcagggctttgctgaatccagc

SEQ ID NO: 8173 - DNA, 120 bp, Homo sapiens
gcccgtcttagcccaggcacacaagtgtggagagtaaaacttggggaagcactgcccatcataacctccggaggtcttatgaccaccaaccctactggaaacacagcaccaagctaagct

SEQ ID NO: 8174 - DNA, 120 bp, Homo sapiens
cagcgtcagggagcagggggaaaggatccagagacatttgcgcagcagagatggccaggaagctgctggagagtgggaggagtcaggcgcaactccaagattttgaatcccaactcctgc

SEQ ID NO: 8175 - DNA, 120 bp, Homo sapiens
cagcgtcctgaaggcctctgtccccctctaagtccaggtttaccaaagcctgctgcaccctggagttctcagttctctgagcacggccccatacctgattctaaattcacaccactgctt

SEQ ID NO: 8176 - DNA, 120 bp, Homo sapiens
gcccggtgatgtggctccttctcctgccctccaccagagcccccatctcagcaagggctttgctttctgtctcaaagagaaacacggtgctgagcgggggaagctgagcacaaaagagta

SEQ ID NO: 8177 - DNA, 120 bp, Homo sapiens
ccccgcagctgaccccggtaatgcccctcccttccctgcctcaggtgccccttggtctgcctggaagggcacatctcagaggatcagggccagccaggagagggcaggagcaggcagagt

SEQ ID NO: 8178 - DNA, 120 bp, Homo sapiens
ggtcgcatcctggtgaaagactctggagggcagcaagtcctcagttattcagcatttcagtcccagccccaaaggcattcaggggaaactccagggtctgagtggctgtgcaggtgacac

SEQ ID NO: 8179 - DNA, 120 bp, Homo sapiens
ggtcggctgaaactacctttggagaaaaggagttttactttttaaaaatgagggaagcagccgggtgtggtggctcatgtctgtaatccaagcacggaagactgaggcaggcagatcgct

SEQ ID NO: 8180 - DNA, 120 bp, Homo sapiens
aggcgtgagccactgcacccagcctggcctgttttaaccctgtgcattctggccaatgagaaaccccagggttttgcagaccgggtctggaggatgtgtttgccctgcttgcctctagcc

SEQ ID NO: 8181 - DNA, 120 bp, Homo sapiens
cttcgagtgctgggccagagctgcccggaggtctcctctcccccaccctgcttttgccacatgtgcctctacttccatgtgcttgcctcaccacagcccctgcccatacagtctgcagaa

SEQ ID NO: 8182 - DNA, 120 bp, Homo sapiens
ggtcgtctcgtctctgaagcgctccctcttagggcctcagggcctgccagccctgctagagatcttccctttctggtctctaggaacagactcgtggttgatcatcccttggcctggaat

SEQ ID NO: 8183 - DNA, 120 bp, Homo sapiens
cctcgttcactgtgatgtataatcatgtgaggagcaccgtatggagagtcagacttttattttccaccacagttgggagagcaggggggtcagaaaacagaacatcagctagcagagctt

SEQ ID NO: 8184 - DNA, 120 bp, Homo sapiens
agtcgggagggtccttaggcctggacccctgaacccacatgtacttggacctcatgggcacaggtagagtgtggcctgtgtccacagaggcccaggacagcttccaggctgggggctgtg

SEQ ID NO: 8185 - DNA, 120 bp, Homo sapiens
gggcgctcctcactcagggctctctgaaggccagaactttgcagagcttggagcagggatgagccaggcccttggaagctgggaaatgtttccttgccttctgaatgtgctaacatcccc

SEQ ID NO: 8186 - DNA, 120 bp, Homo sapiens
tggcgaggggaaggagaggaagctgagggtttggaaattttatccaagtgggcccaggctggaaggagctgagcctcactttttctcagcccatttagccgctctgtgccgcctgtcctg

SEQ ID NO: 8187 - DNA, 120 bp, Homo sapiens
tctcgagttagggtgactttctgattatcattcttgttgagagtgaaaaggggtgcattgaaatttatccctgagcagcagacatgaactgggacttgggcgtgtggtcaccctgctcca

SEQ ID NO: 8188 - DNA, 120 bp, Homo sapiens
cctcgggaagtcatttaatttctgagcctcatgttcctcttctggaagatgggaatgaaagtgtgcgtgtccggcccattttttagggcaatgattgtcagggtatgaagagcttggtca

SEQ ID NO: 8189 - DNA, 120 bp, Homo sapiens
agccgtcgggtcagccagccgtaactttagatacacttatccatgtgtaatgactttttaagaagcaagatcagtttccccagccctttatgggaatacccatgtgtccatacttgcttt

SEQ ID NO: 8190 - DNA, 120 bp, Homo sapiens
gaccgcctgggagcagatggtaccatggccttatttacagatgaggaaactgagacccagaggggaaagtgactcccaaggtcatgtaggtaagcatacggctcccctaaggatgaggca

SEQ ID NO: 8191 - DNA, 120 bp, Homo sapiens
atgcgtgcctgggaatagggaccttgacttttcccctgtcccatatgggcccaggggccggttctgggctggcccaggtggggctagagcagctggatccaggcacatgagatgtgaaag

SEQ ID NO: 8192 - DNA, 120 bp, Homo sapiens
ttacgccgcatggagcggctggaggaaggagagagggagcaagggtgccgcagggtcagattgccacagggccagggtgccacagggtcagggtagggccagggtgccatagggtcagag

SEQ ID NO: 8193 - DNA, 120 bp, Homo sapiens
tgccgctgggccagggtgccgcaggatctggttgccacagggtcagggtgccgcaagcacaaggagtcacccgtgattctccagggtctggctcttgggctgagatccaggagaccttgg

SEQ ID NO: 8194 - DNA, 120 bp, Homo sapiens
caccgaggccggtgttctcgtcccaccatgggactcagcctgaagaagacaaggtgaatgaacgaccatttctctctaactcagttggctaagaggactgagctggcgccgaggctctgg

SEQ ID NO: 8195 - DNA, 120 bp, Homo sapiens
atgcgctctgcttgccctgcctttaagacttgaacgtgtgaaagtgccttgaaagctgtaaagtcctatccaagggatccttttatgatgagcaggggtggaggcgggagtgggagtatc

SEQ ID NO: 8196 - DNA, 120 bp, Homo sapiens
tgacgaggagctttgttttactagagtgcaggaaatacaactggtgcaagagacctgcattcatccaggttcttgtaattgctgggtgtcaaatccacacagttgcttgaaaagaagaaa

SEQ ID NO: 8197 - DNA, 120 bp, Homo sapiens
aagcggaaattcctttaagctttttggtgcttgattctaatccaccctgagccatggtcccaggcctcctacgctccttgctcctccgatgtttatatgacagaaagttattttccccag

SEQ ID NO: 8198 - DNA, 120 bp, Homo sapiens
gatcgtggcggtgtggctggaggacaggaacaggctcagaggccggccccaggtaggaggggcgagggagcgatccgggcgccgcccctcccctcgcctgcgcctctttttttaaaaaaa

SEQ ID NO: 8199 - DNA, 120 bp, Homo sapiens
aagcgtgggcgtgccttgcgcaggcgcagtactgcgcgagccttagccgcgcaggctcagcgaagggaggctggcggatctgctaccttttgcggttcccaccaagagtgacaaaacctt

SEQ ID NO: 8200 - DNA, 120 bp, Homo sapiens
ccccggaagatgaaggtatttgtggcatccctgccttccttcccacccagctccccaggaccaaggccacatctgcccatgtgagtaggtgtaggggctagcaggactgcatgagctcca

SEQ ID NO: 8201 - DNA, 120 bp, Homo sapiens
ggtcgccttgactctgagctgccgtgacactgctgagaatccaggcaattcacatacgtgttttcatcctggttgttgagggacctaaacttgggaaagagagtagggctaaaggtaggc

SEQ ID NO: 8202 - DNA, 120 bp, Homo sapiens
tgacggtcctgccagagaggctgggagacaactggctgacaagggtctccggagagggcattggacagctcagctgggctggaagacaccaagcgcccctgtagggaaaggatgggggca

SEQ ID NO: 8203 - DNA, 120 bp, Homo sapiens
tgacgatgcaccagagaatgttctccatgcatcattcccaacttttcgttctttactctttggtgctaggggaacccaccaagccctactcaagcccagggatgtctgcatgggaagaat

SEQ ID NO: 8204 - DNA, 120 bp, Homo sapiens
tggcggggcgggggcaggcaggcatctgccgtgagagacgaaattgtttaaatccattccagcccaagagcaaggagaaaagctctgggaggctgtgaaaggcaaagtgggtggagggga

SEQ ID NO: 8205 - DNA, 120 bp, Homo sapiens
ctccgggtttttagggacctaggttcagctctcagttgcagctgaggctccagagagcttgtaagaagggacaatgtgcaggagtgagcccaggcccatggggcgcctggggatgggatg

SEQ ID NO: 8206 - DNA, 120 bp, Homo sapiens
cagcgcttgtgaaagctgagtcatgtggtggcagccagccccaggatcccagggctcatctgaggccatctctccattgcttagaccatggttctcaaatttgaaagtacacaagaggga

SEQ ID NO: 8207 - DNA, 120 bp, Homo sapiens
caacgctctgctccaggaagaaccaacctggggtctatcctacatattctttctgaggctctgtgagtctcatgcgaaggatgctgaatgctttgtaaaaatgcttcttgcggctgggcg

SEQ ID NO: 8208 - DNA, 120 bp, Homo sapiens
ctccgagaagccctgttccaggatgaaccctctcctcctgggtgtgaggagggagcctgagtagctggaatccctaaatggtcttccagaagcccccaggccatgttcttgtcccaagag

SEQ ID NO: 8209 - DNA, 120 bp, Homo sapiens
ggacggggccatgccaccctcttcccctccacagtcggccagtgggagtcagcaggtaaccctgggcacaaacctctggaggacatggcaccagctgcagttgaaggtcaggtctgagga

SEQ ID NO: 8210 - DNA, 120 bp, Homo sapiens
aggcgtcacagctcctatgctgcaggcaggctgcaagagagaaggcagtggccgctcagcaccgagcctctccttgggctccaaagggtgcaactctgaattcctggtatttacagaact

SEQ ID NO: 8211 - DNA, 120 bp, Homo sapiens
cctcgcttcctccctccctagcttccttccttctcactagaaggtcaggccctaaactgggtgctggggattcagcagtgagacctagtccctgccttcttagggcttagactcatatgg

SEQ ID NO: 8212 - DNA, 120 bp, Homo sapiens
tcccgcctccaattcccaaagtgctggggttacaggcgcgagccactgcgtcaggccacatctctttacaatttaccgagcccagttgtttatttaaaaataaaaacatttatttaaaaa

SEQ ID NO: 8213 - DNA, 120 bp, Homo sapiens
aaccgaaaccatcctgagctgtctgcagaagacttctgatccacagaaaggaaaggcagaccttatatacatttggcttcaataaacatatgatgaattaatgaaaaggaggcaagaact

SEQ ID NO: 8214 - DNA, 120 bp, Homo sapiens
cctcgttcccttgagcaccctggtggggccaggttcttggaggagcactgcttgccccctgtggtttgtgcgaggagtctgactggcttcctgtctcccaaggccctgcgttctgaaaac

SEQ ID NO: 8215 - DNA, 120 bp, Homo sapiens
tttcgggagctgcctcctttggaaggttgtagaaaccaggcaggtcttgcactctccctgccaactgtcttggatgatggggtccctgccctgacacagggtccctcgcattcctggggc

SEQ ID NO: 8216 - DNA, 120 bp, Homo sapiens
tcccgtccccgaaacgcccagtgtccccagggcctcagaattggtcttggtggaaaatctccggaaatcttgagtctggacaagagtcctgtttccactgtgatgtggtggtagattggg

SEQ ID NO: 8217 - DNA, 120 bp, Homo sapiens
cctcggagctgccagctcaccctgggactgggagggcaggctagacgcctcgaggcctccaaagcaagaggttctgaattggaaggagcattgtggtgagatggcctggcggggggtgcc

SEQ ID NO: 8218 - DNA, 120 bp, Homo sapiens
gtccgcagccaggagggttactgaggaacgatggaggaaggtgatggggcactggggtttgtgtagggggaggcaaaaggcatggcagcccacccgccagccctcagtcccttgatatgg

SEQ ID NO: 8219 - DNA, 120 bp, Homo sapiens
tcccgccactctcctcttatcttgcccaccctctgccgccaacccatcatctagatgagacttccttaggccacagtgatgctgagctgtcagaggcatgggagaaacaggtgactctgg

SEQ ID NO: 8220 - DNA, 120 bp, Homo sapiens
tgccggactcccagccagggccacccattctccaggttgggggtgggcagatagtgggaaagggcgtttgcggtctggctgctgggggtatcaccagcattctcaggtgaacaccaccca

SEQ ID NO: 8221 - DNA, 120 bp, Homo sapiens
ggacgagggcagggtagagtttgggtatggagccacctgagtctcgggcgtgtgcagacaccctggtgtgtgtaagcactgacattctctcatgtgtgtgggaatccaagttagcagagt

SEQ ID NO: 8222 - DNA, 120 bp, Homo sapiens
tgtcgaaaaccctacttcctttgttcattcaaaggagtgcttgtcatggaccaggcacagtcccggctctcctgtgcttacattccagggggaagataggcaacagacaccaatacatgg

SEQ ID NO: 8223 - DNA, 120 bp, Homo sapiens
gagcgaatatcggggaaagctgcgatcggtatttactcagcaccacccatatgtgccaggcttgctagaccaggagctacagagcctcagtgagcctttgggtttgaagaaggggaagaa

SEQ ID NO: 8224 - DNA, 120 bp, Homo sapiens
tgccgctagagggagcgaagagcagggaggcagtttgggacacttggcaggcctggagctgggtttggcagggcccccgggaagatggaggaaagcagtgggagctagggttgcctgtac

SEQ ID NO: 8225 - DNA, 120 bp, Homo sapiens
gtacggtgcaggatttgaatgccagaccgaggagccgcagtactaggaaggtccaagcagcgtgcccaatcgctcctccggactacagaggagcccgggaacccagggaagagctccagt

SEQ ID NO: 8226 - DNA, 120 bp, Homo sapiens
ccccgcccgagagtcacttacaaccggtagagaatggtggtctttccttcattgtccagtcccacgatgatgaccgtgtgctctggaagcgtcggaggaagggcagcgtcagggccaaac

SEQ ID NO: 8227 - DNA, 120 bp, Homo sapiens
acccgaagaccaagggactgtgtgcccccaccagacctcccaggaaggagatagcgctccccgcaggctggggacctctgcccaccgtaccgcgtctgcttcccacccagctccgacacc

SEQ ID NO: 8228 - DNA, 120 bp, Homo sapiens
ctccgggacggtggaaaagacagctgagcccccacctcccttcacattccagaaaagtgtctgaaaggcccggggcgcttcggggcttgccaagagacggtgtttagagaaagagcataa

SEQ ID NO: 8229 - DNA, 120 bp, Homo sapiens
taacgcgaagtcacaatcgcaggaaactcgcagcagccccccatccccgccgctggctccgtttagcggggagaaaggagggtcgcccagctttgcgtcctggggcgcaccgaagcgccg

SEQ ID NO: 8230 - DNA, 120 bp, Homo sapiens
ggacgggggcaggggaggccgcggggcagtcgaggagcgcccatatacgaccctcggagcccgaggtccccccgtgcgtccgaccacagatcagaggagtcccagaagagggcgagatca

SEQ ID NO: 8231 - DNA, 120 bp, Homo sapiens
aagcgctcgcttggatgccctgtgcgccccttaccctggttcccgaagatgctcattaacttggcgatcagctgtcccatggcacttcccgggccggacaggtgcaggagggctcagcgg

SEQ ID NO: 8232 - DNA, 120 bp, Homo sapiens
gagcggagtcggccctggtattcggagctccgctcccccgggagggtctggcagattttgcctacgaagttagggaagccccacacgtcaccaacctgacctgggaaccctctgggacgc

SEQ ID NO: 8233 - DNA, 120 bp, Homo sapiens
cttcgtgggcactatggacaccccagtgactaagggctgcctgtcccgggcccaagaggtgcaaggaatatgggggttccaggctccagccctccccctcgccctgcgaaaactcctgag

SEQ ID NO: 8234 - DNA, 120 bp, Homo sapiens
ctccgggtggactgctccactaccgcaaatcaggggagactcagcactgcgcgcggaaccggatcccagctctccctcctctgagtgccatgtctagggcactagactgaagcaaaaccc

SEQ ID NO: 8235 - DNA, 120 bp, Homo sapiens
aggcgacccactttctgtacctaccagctgtgtagtacagacagggctcaccgatcctctctgagctgggagaatattccaaccctccacagatgtgcagttggttcactagcgtgggtc

SEQ ID NO: 8236 - DNA, 120 bp, Homo sapiens
tcacggacaaacctactgcccaggcacagcttcctgatccccaaaagtgggcgcctgaagacaaggatggagcatgaagagagatcctccggctggagaccctgcagagaggccccagat

SEQ ID NO: 8237 - DNA, 120 bp, Homo sapiens
caacgtgccctcaggctgcaggaatggttagcaggagatccagccaacacaccagggagccagctccttccacccgactgtactgccttcctgcagcctccactaaggtaacaaccctcc

SEQ ID NO: 8238 - DNA, 120 bp, Homo sapiens
ccacgaacagcccccacctgccttcacaggtttatctcccaggctctgtatctactggttcctgcctatacatgcctggctctttctgatggtgcctttgcttctgcatttcctccttga

SEQ ID NO: 8239 - DNA, 120 bp, Homo sapiens
agacgggcaagtctgtttcctcccatcaactgtgagtaccagggtgggattcatatattgttaaccagcatatgacctcccccgccagcccaatcactccctgcctggtccagaaccctg

SEQ ID NO: 8240 - DNA, 120 bp, Homo sapiens
ttgcgggaagaagaaggaaaatagctgactaaatacagactttcatcccaccctgcttggtgcccagagttagaaggatagagttgactgccagagcccatctgggctgattgcatttca

SEQ ID NO: 8241 - DNA, 120 bp, Homo sapiens
atgcggggaggaacatcttagtgcatgctgccctccccacctcctctttgcagaattgaaagtaacactctgcaagctggaaacacattcagtaaacagacaaggagagggcatctctct

SEQ ID NO: 8242 - DNA, 120 bp, Homo sapiens
agacgagaagatctgcctccactttgaggcccaggacctggatcttaagaagcattcattcgttcattcattcatttgacaaatatgagccaggaaatacatgaagtagacaaaacagac

SEQ ID NO: 8243 - DNA, 120 bp, Homo sapiens
gaacgaggggggcattagtggagccagaagctcagcccctccctctcctgaggtgttggggcacagtgatgccacaagagcagaaaaacagtcatgtgtatttaagacattgcaccagtg

SEQ ID NO: 8244 - DNA, 120 bp, Homo sapiens
ccccgtgcatatcagcagctcccaggtgcctacgctgacgactatgtggcgaggacaaagaagcaggcttgggaggcagccacaaaggacaggacagtggttttatatatggcaaaatac

SEQ ID NO: 8245 - DNA, 120 bp, Homo sapiens
tggcgagacaggcatgaggtgcccatccctgaggcgggcagccgggcaggccccagtccttgttggcacactcggctctctctggcccagctgggatgctggggaggggcagggttgctg

SEQ ID NO: 8246 - DNA, 120 bp, Homo sapiens
tcacgagaggcaaatacagagcagcaacagcagcagccaagccccccagaggagatccgaggtcccaaggcaacccctgggcaccatcccacgggtcctctcccctggggcctcagggtg

SEQ ID NO: 8247 - DNA, 120 bp, Homo sapiens
aggcggaccagagtgttccatgggctccacacccaggtggcacagggatggggggctcagatgcagaggggccccctctactaatggcagcaggcaagggatgttggaggccaagctcat

SEQ ID NO: 8248 - DNA, 120 bp, Homo sapiens
cagcgtctcggccgctcactcctcagggttctgggccctggacgttgccatggccacggagggtagagggtgctgtatgcctgccagcttccacccagaaccctccccaagacaagctcc

SEQ ID NO: 8249 - DNA, 120 bp, Homo sapiens
caccgaccagacgatgctgccaggaagctgggaggaaggggcaggcagggtgagggaccttggatctggggtctggggaagagagcccccatgggaaagaatctgtggcctccctttcca

SEQ ID NO: 8250 - DNA, 120 bp, Homo sapiens
aagcgcccagcccttccccagtactgcagcttgggagaaggagagccatcccacttaggaccgtcacttagggccccgagtagaaagagttaaggaagtgcaccttttctctaggagggt

SEQ ID NO: 8251 - DNA, 120 bp, Homo sapiens
aaccgacagctggggcttaagggcctcccgggagctgggatggtaacaccaaagaaaccccaagctttgagcaaaggcatctgaaaggagggagacagcgccccctggaggcgaatacat

SEQ ID NO: 8252 - DNA, 120 bp, Homo sapiens
cctcgctccctcccctcccctgggctcagagcccttcctcccgccgtgtggcccctgcctctcagcgaatgtagacgcctcgtccccagccctccagctcattcttgttgcgccccaaaa

SEQ ID NO: 8253 - DNA, 120 bp, Homo sapiens
cagcgcagtagcgggccttattccggccccggttccggttgtcggtcagctcttcctcatagtcttcttcctcgtcctcccaggatccctgtcgggctgggggcgtgccgccccctgcag

SEQ ID NO: 8254 - DNA, 120 bp, Homo sapiens
ctccgtgtaggcagagtttcggctgccgggggtgtcggcatcaaaagtgtcttggcgggacagtgcccgtagcgtgcctgcccggcctggtgggtggctgctggggtaaaggcctggggg

SEQ ID NO: 8255 - DNA, 120 bp, Homo sapiens
cagcgtcattcttcccagccctggccatgtcctgcaacaggagggatgagggggtgattgaagaaaggacttcctgtctgttcctatacttagaaaaggctagaatgaagcctccccttc

SEQ ID NO: 8256 - DNA, 120 bp, Homo sapiens
gcccgcccctgggatattgctgggggggggggcctcatggcagcaaacagggcagtgtggcttgagaccccgctttgtgggggagaagtggggcaggggcctttgggtacgagggtctgt

SEQ ID NO: 8257 - DNA, 120 bp, Homo sapiens
taccggaggcctctggaacagaatgttcccgggtaccagggcagccccgactctgccggccgactccctggcttggctgtgggccccagatcccaggggggtggagaagcgagaaggaat

SEQ ID NO: 8258 - DNA, 120 bp, Homo sapiens
catcgggcttggctacccaaaccacattttggctcagccaggccaggtattccggctcctggggctcctcattcctggagaggacctttgcccatctcttctccccactatacttttggt

SEQ ID NO: 8259 - DNA, 120 bp, Homo sapiens
acacgtaagccccactcaagtcaccaaatgactgcagtcttatgagcgacctattggggagatggcaggaccgtcaggctgcataatgaattgttttaagccacaaagttacagggtggt

SEQ ID NO: 8260 - DNA, 120 bp, Homo sapiens
tcacgatctaaatttcatagattaagaaatttaaaaaaagaaatttcatagattaagcaaaatttctaacatacaaaggtagcccaatacaggtcaaatcttttggtggtaggaaaatgt

SEQ ID NO: 8261 - DNA, 120 bp, Homo sapiens
acacgagggcgctgctggccaattaaaactcatgccccttagcagacagtttggggatgagggcaccctttctccaaaacaggggtcagaaactctggggctctctgggccccagagagc

SEQ ID NO: 8262 - DNA, 120 bp, Homo sapiens
ccccgttgtccccctgccttaatggcagtcactttccgacccagatggtggaggtgcctgtggtttttagggggaaaaaatctcttataattgttctaagaaaagtgttttgttagtgag

SEQ ID NO: 8263 - DNA, 120 bp, Homo sapiens
ccccgtcacctactccagcacaaacctatagaattcaagatggtctagtggatgtttgcagcctcagtggctggaatacaccccaggacattccagggccctgagccaaaaatggtgtca

SEQ ID NO: 8264 - DNA, 120 bp, Homo sapiens
agtcggtgctgctggaattactgcacagctggcgctccccccagcaccccgagcagagcagcagtgcagattaaaatctccaattagcgttaaagtgaagtgaggaggtgctgaggctgc

SEQ ID NO: 8265 - DNA, 120 bp, Homo sapiens
agacgggggccctgggttggcaaaacccccactcttgcctggattctgagtgtcacccttagtcacccctactttcccagctcctctcccaacagctttcagtgcccattagttttgtat

SEQ ID NO: 8266 - DNA, 120 bp, Homo sapiens
tatcgcttggggccagagggctttgcagaggggtggaagggggcaaatgccttacctaaaatgctagggacaccgtaagtatggaggaggagagcggtcagtgctcatcaagggagatac

SEQ ID NO: 8267 - DNA, 120 bp, Homo sapiens
tcacgctacagctctgcttcttctttttgcttgaagaaaagataaacaggacgggtcctttcaggtcctttacctatgaagtgctaggggacatggtgcccacatgaacatctctctctg

SEQ ID NO: 8268 - DNA, 120 bp, Homo sapiens
caccgaagttatggctccttcctccctctctccattcttctctcagctttcctgtgggcaggggtaggcacagccaggcttgggagcatcgccatgccctgccacctgggtcccagcctg

SEQ ID NO: 8269 - DNA, 120 bp, Homo sapiens
cctcgttatagtcttcccagtttggggaagagcagtgatatgccaagaatggaggcctcagactctcccaatccctgatttttacatgtccccctataaggcccctctgccatctacact

SEQ ID NO: 8270 - DNA, 120 bp, Homo sapiens
gggcgacacagcaagactctgtctcaaaaaaaaacaaacaaaaagcagcagtgtcatggatcaggggacctgtgcccttgaaattgtttcccctttgccagagaacaaggctaaagtgaa

SEQ ID NO: 8271 - DNA, 120 bp, Homo sapiens
gtgcgcctgagcattctatccagacacctgagacctggaatggggaagggaggacccagcctttggatgcctatcagaggatgagatattaaggtcctctttggaaatgtgctgttgaat

SEQ ID NO: 8272 - DNA, 120 bp, Homo sapiens
ggacgtggtagagagggcatgagcacagtggaagcaaaaatgccagttcagtgcttagtgctgactttaccaccgttcttcatggcaactgaactcatggacagctcaggagaagctaga

SEQ ID NO: 8273 - DNA, 120 bp, Homo sapiens
ttacgtatcactcctccatcttcttgggcccatcaggaacagcatatctcccagtggtacccactgtccctgcccagtagtcccagccatgtgggatataaacactgaggctagacctgg

SEQ ID NO: 8274 - DNA, 120 bp, Homo sapiens
catcgaaacaactagagatacccattctgaacctctgtcctctggttgggagttcttagacaaagggagaccactctttactagctctttcacctctacccactctgagattttctggct

SEQ ID NO: 8275 - DNA, 120 bp, Homo sapiens
aatcgagggtaggcttcaaaagcccagctgggcctcaaacttcaggcctgcctcagctgcttttccactctcaacttcaacgcattttcctctctcatttttttcctcctttctttctct

SEQ ID NO: 8276 - DNA, 120 bp, Homo sapiens
ctgcgatccaaaacagagacaacatacaggcgtatgcacacacacacactcacacacacgaatacacacaacatgcctgggccactcttgacttccaggttggctgggagagtgtgtgtg

SEQ ID NO: 8277 - DNA, 120 bp, Homo sapiens
aagcgaggcagggtagggagtgggtgagtgggaaccctgactgggtggtgtgatctttagatggccatgagtcaggtgggctagggatacccacatgtaaatatctgagagaactcaata

SEQ ID NO: 8278 - DNA, 120 bp, Homo sapiens
tcccgccccccccccgcccccatatctctctagggaaaaacttggtatctgtgccaacttttttccccctcccctcctccctctctcttcttcttccactctcccaactgctgccagccg

SEQ ID NO: 8279 - DNA, 120 bp, Homo sapiens
cagcgccgaattgccatctccttgagctctctgtggagcaatctcagagagcagtaaggtgtgacgcgaggctctgccggcttcgcagcaccgcctgcggaaagagcgcaggatggcgga

SEQ ID NO: 8280 - DNA, 120 bp, Homo sapiens
aatcgcgagcagggctcggctgccattggtgtgtgcaaacgccgaggaggaagggagagggagagtgagagtgaggaaggggggagagaagggggaaaaaccagcagctgtcggcctaat

SEQ ID NO: 8281 - DNA, 120 bp, Homo sapiens
cctcggtgccactcacttatacttgacatacgttaatgttctatatctccattttccggttcttgatgacggtggacttgaggtcgaggaggatgggggcctgggtggccaaggggcaca

SEQ ID NO: 8282 - DNA, 120 bp, Homo sapiens
actcgccctttagaaagcaaaccagtttacatctgatgccaccatttggcattttacagccccttataagatgcagaggtcagaggatacctggaggaccttacccctaagtcacccctc

SEQ ID NO: 8283 - DNA, 120 bp, Homo sapiens
aggcggagtttgctaaggcctggggaaagggctggtcttggaggacaaaccaaccattccctatagctggcctgctattcagaggtctttgacccccacctttcctaccctcccacctct

SEQ ID NO: 8284 - DNA, 120 bp, Homo sapiens
tgccgagactgcagagaccatctgttgccacccctctgtttgcttctgtcctcttaccctggacttcagggaaagagatggttaaaccaagtaggagggataggcagtttaccagatgca

SEQ ID NO: 8285 - DNA, 120 bp, Homo sapiens
cttcggccaggtgattggagcagaggaacacagaatccaggaacagccagtcctttggggctgtactccctagaccctgggaagcagggtatagataaaatgacctttatgaggtgtcca

SEQ ID NO: 8286 - DNA, 120 bp, Homo sapiens
aaacgtggtagctccttgctgtctgtggctattccccattcttaaccttgaacaagcacacagacgtttgcccatctcccagcccagagcatctcttcatccagctcagtgccaataccc

SEQ ID NO: 8287 - DNA, 120 bp, Homo sapiens
gcccgtcagcacccaggtatctagggtcctggatctgggaagccactctgggcagtgttgctctctctgaccccacctgttctctgggccctaatgaagcaggacaactcaaggcttcag

SEQ ID NO: 8288 - DNA, 120 bp, Homo sapiens
aagcggccttcttttattcatgcgttgttttattgctggcaaatgctgctgcttgctgctgttggaggcgttcctgccaaatccatcccaacatcttggcctggcatcagggcggcatgc

SEQ ID NO: 8289 - DNA, 120 bp, Homo sapiens
agccgctcggctttaaatcggaattttaaatgagcagcagtgctccgaggggacctgggcaaaatcgaacagtatctgatccacccttcctcctcccacacccacagcatcaccccaagt

SEQ ID NO: 8290 - DNA, 120 bp, Homo sapiens
tcccgttttaccaggaaacaagaagagaaggcctgctctgcagagaagagggaaggtggaattccaagaagacactcacacacaacatactcttgttgccaatgggatgtgtgcacacag

SEQ ID NO: 8291 - DNA, 120 bp, Homo sapiens
gggcggtctttctttccctatccaggacactattgtaaccccagagcaagctggcttctgcaagttgctagcctgaactgtgccccaggtttttccgtggatcctaatttcccagatcct

SEQ ID NO: 8292 - DNA, 120 bp, Homo sapiens
aagcgagagaggcagagtctgtgcctccttgtgattccctctccttacctatctccaggaggtaggtagcccctcattatcagaaaacattttttgagtgcctgccctcagggagacacc

SEQ ID NO: 8293 - DNA, 120 bp, Homo sapiens
taacgacccaccaagcaattttgctaggcaggaccaaatgtttaatatagtaggggttgagctaggcctaggtacggaaacttgaggagtgaggcttgggctggaattctgggagaagtt

SEQ ID NO: 8294 - DNA, 120 bp, Homo sapiens
taccgacagtctgggattgtatgacctgggcccagtgccagggcagagtggagggtttgattccattctggggtggaagccaagatccttggctctcttgcccctgctgcccacctcagc

SEQ ID NO: 8295 - DNA, 120 bp, Homo sapiens
ccccgcagcccgcaacatacctgccatcccaaacatgggcagttttctgaaggcagtgttttcttccatccatgcctttacctacactgtttctctgcctggtatgcccttcctgtttca

SEQ ID NO: 8296 - DNA, 120 bp, Homo sapiens
gaccgcaggccaagcctccacagcctccacggcctcataaatcagtttttaagtagcaaccacatggacatttcccagccgagaggcctggcctctgttggtgcagctagggcagccctg

SEQ ID NO: 8297 - DNA, 120 bp, Homo sapiens
tggcgggaagtgaggctggagcttcttcaagtaaaacctggggcaggggctcctgccaatagagactaggtaagaaagtggcaagtggctggcagtgggtccaggactccctgctgggtc

SEQ ID NO: 8298 - DNA, 120 bp, Homo sapiens
ccccggtgaagctgcttacagaggagggggagcgtgttgctactggaactccttccctccagctcccacccctctataagaacaaagagtcagggtgagtgtgagggcaatgtgtgcgcc

SEQ ID NO: 8299 - DNA, 120 bp, Homo sapiens
atccgaatgtgcgcaccaggccttgaggggcaggaaggtgtttcctgatacccagcccaggcctggcacagacagggcacccaataaagttgcttgaatgaataagtgatggagtgggaa

SEQ ID NO: 8300 - DNA, 120 bp, Homo sapiens
ttgcgtgcgttcacaggaattggagatttctatccgagtgtgtcctgactggagtctgtgtgtatgtgtgtatgtgggggtgtctgtgggtgctctggtatgtgggagggggtggggaag

SEQ ID NO: 8301 - DNA, 120 bp, Homo sapiens
tggcgaaggggatctatttcagccaacgtccctccacatcctccctttcaggacgtcttccctacacagccctccccagagccacgattctccccttctaagaatccatcagtggggcgg

SEQ ID NO: 8302 - DNA, 120 bp, Homo sapiens
tcccgcgcccccaccccctgcccctgctggatcccgcggttgacgccctcctctcctcctccccgcactggccgcgtaggtggcctcgggtgcggaggtcccggcctggcgcaatcagtt

SEQ ID NO: 8303 - DNA, 120 bp, Homo sapiens
gagcggatggggcgggggcgcccagccttcttgcgcgcggtgtctcctccctgggtgaacagatgtctcggaattttagatgtgctctccgcccctcctcgcaataactccccccaccac

SEQ ID NO: 8304 - DNA, 120 bp, Homo sapiens
gtccgcgagatctgtcccctcacgcaggacccttttgtagttctagaaatccagtatccctgagagttctagaacaccaccaaggtgcaagttccagcattctagaacctctgaaattca

SEQ ID NO: 8305 - DNA, 120 bp, Homo sapiens
aatcgtgctgagtgcccagttcttatattgccctcttcgtgggtgcgcgggaagtggatgctgtccggtgccccgagcggttcgcactgcatgcctggtcctcaccggctgcctccagaa

SEQ ID NO: 8306 - DNA, 120 bp, Homo sapiens
tgacgttgccttccagagcggaccccattcctgctcctgtcccaccctggccctccacgcctgacctggctgtcctgcctctgcccctgccagcggctgtgggagtgagctggttggtca

SEQ ID NO: 8307 - DNA, 120 bp, Homo sapiens
ggacgaagaaaaagggggcaaagaaactggtcacgacagaggagggggcacagaggggtttgggctgtggtttgtggggttgtgttttttaatctttcctactttctttttttaaaagaa

SEQ ID NO: 8308 - DNA, 120 bp, Homo sapiens
cctcggctcctccccgccttccccccgcgcctggcaccgggcaccgggcaccggctgagtggcacagactggcaccaacgcgcgagggtgggcagggggcgacctgggctcagcgccagg

SEQ ID NO: 8309 - DNA, 120 bp, Homo sapiens
gggcgtccgggcgctggggttggccaggagggagcttttccgtggtggtaccagggagaagtgtctgcgggatttttctgtctttttctacaagattatcagtagttaaggattttggtt

SEQ ID NO: 8310 - DNA, 120 bp, Homo sapiens
ttccgatatattttttaaagcaccgccctccattccatataaacccaaatgtttttgatattttaattgagttgtttttaaccctccccctgcgccgcgccccagcctcggcctgggagc

SEQ ID NO: 8311 - DNA, 120 bp, Homo sapiens
gcccggccgagcgcgagttcgctgcaagcgggatccgctctgagcccggccggccggcagcctccgcggtattcccggcgcgggcccctccaggggctcccctgcggctcctgggggcag

SEQ ID NO: 8312 - DNA, 120 bp, Homo sapiens
tctcgggctgttcccaagggagaaggaaaaaactatgtgagtccgttgtgccctcctgcctccgcctgcggtcaagaaagggggcaccggctcaggcttgaggggttggttctgagcccc

SEQ ID NO: 8313 - DNA, 120 bp, Homo sapiens
cctcgcttttaatgcgactctggcgagaacagatgtcccaaaccgggcgaactgcccagaccccgcccagctgtgcccttggtgaagacttggctaagagtaggaactggcatgcaggtc

SEQ ID NO: 8314 - DNA, 120 bp, Homo sapiens
gttcgggggttcccgcgacccctgtgggacctgacctagcagccttggcctcctggccagctcagcctcaggcgggaggcggaagagacccggaaagacccgttcctaattcaattaatt

SEQ ID NO: 8315 - DNA, 120 bp, Homo sapiens
ttccgaaaagaggaatgagacgcagacagatactgacagaagctgggagagaggtttaaatacccgaacaccagacacacactctggtatggaactccgcagcccctgtcagcgcgggga

SEQ ID NO: 8316 - DNA, 120 bp, Homo sapiens
cctcgctgcgctcccgcgctggagagggcaggagagttggctgcgctagagccataccctggctcacatctgggcagcgtctccacccaacgctgtgccccagctccctgggcatggccg

SEQ ID NO: 8317 - DNA, 120 bp, Homo sapiens
cggcgcctagaggttccctcttctcctcccctcggagcgccccagcttcccttccctgccctagggaactaaggtgactccgctcctcgcatctccctcctgaaatccgttgccctcctt

SEQ ID NO: 8318 - DNA, 120 bp, Homo sapiens
ccccggtcttggccttcttctcacgtccacactcccagggctggcgcccctgtcccagtgctttaggttggagaaagtttccagagcagaacagccctcccaaggcagctgcgccctttc

SEQ ID NO: 8319 - DNA, 120 bp, Homo sapiens
tgtcgagaatttttaaagctgcaggacagaaaggcagaagctgcttcaggattcagaaccggggcagggttttaaggtttctcacagttcaggtgtcatttctgctctggccccgtggcc

SEQ ID NO: 8320 - DNA, 120 bp, Homo sapiens
cagcgcctgggtatcccagccctgaaggatggaaaaatgacagtgtcttgggctgtgagttggggagcctgttctgacagcagaggcccatctgcccctcccacttttcgcaaaaagcag

SEQ ID NO: 8321 - DNA, 120 bp, Homo sapiens
ctccgcgctgcccctctgttgtcatggaggggttgggagggtaggtcaggctaaagctgctcagtcctggcgtctgccttctctttctcctcaggtgccttaaggactaaactgcagaat

SEQ ID NO: 8322 - DNA, 120 bp, Homo sapiens
gaacgaaatctctgacctctgcccagaaattcttgtatccaccagcttgtggactttcccatgaaagggaaaaagagaagcaggcacagccccgtggagcttccagagtatcagggtttt

SEQ ID NO: 8323 - DNA, 120 bp, Homo sapiens
ggtcggtgtcccgcagtgatttatcgggctgtctccccgagtcacaaaatcagggctgggggttcactgggggtccatagctcactgtccgagtcatggctggaacgcagctcaacaatg

SEQ ID NO: 8324 - DNA, 120 bp, Homo sapiens
tcccgccagatgggcaaatggcctggactcggagatacctctttttctctgtcatcttccaaatgctggacttggaatggggtctggaaaatcaagaggaagatgtcctcctgattgaac

SEQ ID NO: 8325 - DNA, 120 bp, Homo sapiens
agccgtcgggttcagcggcccaggggttgagctgagccggctggtggacgcttggagagcctgccgctgaggctagggcaagaagggcgtcctctctgtgccttctccccaggccaggca

SEQ ID NO: 8326 - DNA, 120 bp, Homo sapiens
cagcgctggcccctttcctcctccctcccctgcttctgttcttggagcatctctgggtgtgtgtgcgcaggcgggagagcaagcaagagaaagagacctgcgaggggacgtttggggccg

SEQ ID NO: 8327 - DNA, 120 bp, Homo sapiens
gtccgcgcacatcttcttctcctgctcatcacaccatctcgccagggaagttgagcactggggaggagggtgatgagaggctagagccagccagagtgcagggaatgtggggggaagggt

SEQ ID NO: 8328 - DNA, 120 bp, Homo sapiens
aatcgggaaaggggcgactggtgtggatgccgggattcaccagaagctgagtcactcggggggatttctgtcccaaaagggacctgtgcacccccacccaatgtgatcacagctcacaga

SEQ ID NO: 8329 - DNA, 120 bp, Homo sapiens
ccacgtagggtagctgaagaacaatgcatagaaagaagtctgtggtctggccaggagagccacatggaggggtcctttgcttcaggccccaagccacctggatcccgcccagctctggac

SEQ ID NO: 8330 - DNA, 120 bp, Homo sapiens
gagcgggttctaggaaactgactgagtaggggagaagcccaattaaccttgttctcagggcaggataagaatcaggcctcgggataagtgccaagttccttttctctgcaattgcccctg

SEQ ID NO: 8331 - DNA, 120 bp, Homo sapiens
ccacgccatgagtgcagatcagacttttgcaggttaggatctggggtatgtgccttgctctacactccctgcaataagtgagggggaaggaagatgggccaactcctttcttccatgaat

SEQ ID NO: 8332 - DNA, 120 bp, Homo sapiens
atccgggggatgaaggccctagtctgtgatctcactctagagaggcgatgccgggagaattccagagaaggcagtgaaattttgaaagaatgctggtaaatgttctgaaaactgctggag

SEQ ID NO: 8333 - DNA, 120 bp, Homo sapiens
agacgagggtcagcatgccacagtggacagctcctggccttggcgcctctgccgacagctgtcctgaccaccgggagggtattctttctactgggggacagaagaggtttgaggacagac

SEQ ID NO: 8334 - DNA, 120 bp, Homo sapiens
ccgcgcacagccgacgagccgaagactagcccgtggcccgtgggccgcgaaccgggcagcgccgagtagtgcatagagtagtggtagcttttctcgtggtcgggcgaggagtcctgcttg

SEQ ID NO: 8335 - DNA, 120 bp, Homo sapiens
gagcggggggctgagcgggccctcgtactcggagctgttgtagtccgggctcgcgccgccaccgcctgccgccgcatacagcgtctcgtaggcggcgcagtagccgtgggtccgcagggc

SEQ ID NO: 8336 - DNA, 120 bp, Homo sapiens
gggcgtgcgccgcgccgccgcccaggccgccggccgcctggcactgtgcgcccgccaggcgcgagcacgggtacgggtaggggtgcatggcgaacgggccgcccgagccgtggaagcggc

SEQ ID NO: 8337 - DNA, 120 bp, Homo sapiens
ggccggcaccgtcggcgccttgctccgtgaggaagttgcgagagttgagctgcagacagccggccaccagattggtggtgggctgcgacagacccttgcacagagtctgcacgtaggaca

SEQ ID NO: 8338 - DNA, 120 bp, Homo sapiens
ctgcgttcaggtcgtgcatgcggttgcgctcccgcgcgttcgccttctgccgccgaagcttggagcgctccaagcgcgccttggtcatcttgcgcttcttgggcccgcgcttcttgggcc

SEQ ID NO: 8339 - DNA, 120 bp, Homo sapiens
ggccgctcgccctccgcctcgtccagtccttcttcctcctcctcttcctcctcctcctctccccccagctcgccttcctccttgacctcggccaacgtggcctccgtcccctcttctcca

SEQ ID NO: 8340 - DNA, 120 bp, Homo sapiens
ccacggagagggactggcttggccgcccgggctggccccggagcccctggcccgggcgcaggcggtggcggtggcggcgcgtcgcccttgtcgctcctcggctcgtcgtcttcgccgtcg

SEQ ID NO: 8341 - DNA, 120 bp, Homo sapiens
tggcgaacttgggcacgtccgagagaaggccgggctcgctgaacaggcgggtcagcatggtgcctgagggcgccccgcgggcgggaaggggagacagacagcacaaagtgaggggcgcgc

SEQ ID NO: 8342 - DNA, 120 bp, Homo sapiens
taccgacgcccccccacaaccctcctccacccccgagtctcgtgcgggctcctgcctaggctaccctggatgcccacctccgccgcctgccccgcccagagccggcccagccctacccgg

SEQ ID NO: 8343 - DNA, 120 bp, Homo sapiens
tgccggcctgggatctcggcccaggccctctccccggcgctgggccccggctccgcccctcgcttgaatggggggctgctccccgcgcctgcttcttctcagggtcagggcagggaccgg

SEQ ID NO: 8344 - DNA, 120 bp, Homo sapiens
aggcggcgcgctcgccctgaaagcccgttctctcctggcggtggagagaggctggtcggccgccggtggggacagctgccccgctccgcgctctcgcggcccgggccccccggcccagct

SEQ ID NO: 8345 - DNA, 120 bp, Homo sapiens
tcccgtggctctcacccccacgctccctaatccaatttgcaacttggctgcgcgccgccccttgctcggcccccacccccgcacccccaattccagaggcgggaggatcgtctcctctag

SEQ ID NO: 8346 - DNA, 120 bp, Homo sapiens
agccgatgcgtccccagctcccggagccggctctgggcggcgaggactgaagcagcggggcgtggggaggagactgagagaagcgagcccagtccgtcccctctgcggtcagggaccccc

SEQ ID NO: 8347 - DNA, 120 bp, Homo sapiens
tctcgttgtattttgggattgatgggggaaaaatccaaatttgtttgtttgcttcccttttttcggtggtggggaaaggtggcaggctttttgggacaaccatggaggggtcctccgtct

SEQ ID NO: 8348 - DNA, 120 bp, Homo sapiens
tctcggcctcttcgcatatccccctccgtgatcctgccttccccccccaccgagcccatcgcaggcagagacacctcctctgcagccccctgggctgcagcccctaagggagagagaacc

SEQ ID NO: 8349 - DNA, 120 bp, Homo sapiens
ctccgatgcccacccaatgaggggggcatcatcccaggaaggaggtatttgaggaccctcctgtcggccgaagctgccgcccctcctcccaaccggcgggtcagatctcgctccctttcg

SEQ ID NO: 8350 - DNA, 120 bp, Homo sapiens
cctcggagaggagtcaaggggagaggggaggggagggggggagggggcaagagagagaggggggagaagagggatcttctcgcttatttcattgttcccccatcttcagggagcgggggc

SEQ ID NO: 8351 - DNA, 120 bp, Homo sapiens
cagcggctcctcaaggcggcgggcgccggcgtcttcagagcgccatgcgaaccgcggagcgagtgtggcatctctaccaggcggggtaccagcctctatgccaggccatatgggcttggc

SEQ ID NO: 8352 - DNA, 120 bp, Homo sapiens
cgagcttgggagcacggggagggaaggggccacctgtcttctcacccccctcctcagatttgaggggaagggcaggaatttggagatccttgagggacctgtgttcctgccattagccgt

SEQ ID NO: 8353 - DNA, 120 bp, Homo sapiens
gctcgaagattcctcctaaagcatcggagcacctgccacctccctccccagcccctgcctcacatcaagtccaaaggatgctgggggagggggacctgcagcttcttcctggctctgggg

SEQ ID NO: 8354 - DNA, 120 bp, Homo sapiens
ccccgcccgccgcagtatgccggggagcggcgggcacgccagatggcgtggctgagaatgcggcgacgttgccgggaggtgagggctggcacgggtgatatgcggctgcgtgccttgtgg

SEQ ID NO: 8355 - DNA, 120 bp, Homo sapiens
ctccgtgctgacctcctgtcctgacctccactcaccgccaggattctcttcaacttcctccgcctgctccctgggctcccactgtgggcctagaccccacccaaagatgggtgggaccag

SEQ ID NO: 8356 - DNA, 120 bp, Homo sapiens
tggcgctccagcctctggcccttggcaccgcgttgaacatttggggatggacagaccagcttcaggagccccagcttcaccacttgctcaccagctacctgcagcccccgcccccgtctg

SEQ ID NO: 8357 - DNA, 120 bp, Homo sapiens
cagcggcgtcctaggagcaagcacctggcgcccggtgagcccccgccactcgctccttctcctccttgtccttctcctggcttgctcccggttctctcctcgccacccccgccccgcgcc

SEQ ID NO: 8358 - DNA, 120 bp, Homo sapiens
aatcggggcccctcattctcccagtaatcactccactgcactaattgcacatgcaaatatgcaaatgcgtattaattaattactatactaattagttctgtggtatttgcgagtaataaa

SEQ ID NO: 8359 - DNA, 120 bp, Homo sapiens
gagcgaggaagctggagacctggcccattttcattctgcataaaattttaatggtctctctggctgatccgggacggcagcgcgcggagaggctcttaaagggccagtggcggcgggaag

SEQ ID NO: 8360 - DNA, 120 bp, Homo sapiens
cagcggtggggatcgccgttgaccccggcggggactggcaccctagaaggagttggagatgcggcctcacattctgcaggggccgtctccggcgtgcggtggcttctgcctccccctctg

SEQ ID NO: 8361 - DNA, 120 bp, Homo sapiens
gggcggggaccaggagctgaactaggattctttaagaaaggaaagaggtctaggagatgtgagaggccaatgccaaggctttggggccccaggtagcctgggagacaggaatgaagactc

SEQ ID NO: 8362 - DNA, 120 bp, Homo sapiens
gggcgccacaaggttgggggtgcctccagctttccccttccacacgatcaaaccgctgccccgcccccatgggcaccagctggcaccctggcagagtagtcctgggcttgagtgggccct

SEQ ID NO: 8363 - DNA, 120 bp, Homo sapiens
ctgcggcctgtcaccatgagggatgcactgagcatgcagtctggcacagatctggctgatagatgttggggatcccattgccagcggcctgtcacatcccctccccatcgcctgtttcca

SEQ ID NO: 8364 - DNA, 120 bp, Homo sapiens
ttccgtagcactgtggagatgaacctgtcatggggctcagagtgtggtgttgggagtagccttggcctggtgcctctgcctcacctgccctccgactctgctgcaaacagtcagttcctg

SEQ ID NO: 8365 - DNA, 120 bp, Homo sapiens
ggacgagctggcttgctcagaacctcctgccagccacaaactgagctgcgcttgttttggacgtggtagactgaggggcccaggaaggtagtccacatagtgaaagtgtggcaggacacc

SEQ ID NO: 8366 - DNA, 120 bp, Homo sapiens
gggcgacctgttccaaaagtctccgttgacggccctcagatcctgcagcgagtggaagacaacaccctcatctcctatgacgtgtctgcaggggctgcgggcggcgtggtctccccaagg

SEQ ID NO: 8367 - DNA, 120 bp, Homo sapiens
tgccgggccccctcctttcagccaggtcttctgcactttggccttgggtcattgtcccctgaactaaccctccctcccgcagggacttcgtgaatgtccggcgcattgagcggcgcaggg

SEQ ID NO: 8368 - DNA, 120 bp, Homo sapiens
gaccgatacttgtcatcagggatcgccacctcacacagtgccaagcccccgacgcacaaatatgtccggtgagcctcactttgcctggggtcacccctgccagcccctcccctgggagca

SEQ ID NO: 8369 - DNA, 120 bp, Homo sapiens
gggcgcaggcatagtgtggcccctgcctgccctggggccaccctggaacagtaagaccctctgggaagggaagaaaccagacccagccataagctttctccccttctccctcaaatcgcc

SEQ ID NO: 8370 - DNA, 120 bp, Homo sapiens
atgcgaaggcaaggagaaaaggaggatggagagagccccagccatccccattttccttcctctgcctccgaggggctgcttctggagggcactgttgtgtggggaccctgtgaggtttgc

SEQ ID NO: 8371 - DNA, 120 bp, Homo sapiens
aggcgggcaaaggggcaccagacagggaacatgcacacaggcagcctggccatggagagctcctggctgtccgcccaggtggcgccttgggcagagctggcgctccacaagtgattattg

SEQ ID NO: 8372 - DNA, 120 bp, Homo sapiens
caccggcagtcactcatctcacatgcccaccagcacgcgcacacacgttcccctaacccacgctaacacacccaccccctgcacacacacactttgaagccacacctcttccccgacaac

SEQ ID NO: 8373 - DNA, 120 bp, Homo sapiens
acccgtctccacactgcgcacctaggcctgagctcacacacacccaggcccatgctcacggccctgtcacctatgcactcagcctggcccacactcccgacacacggtggcaggctctca

SEQ ID NO: 8374 - DNA, 120 bp, Homo sapiens
aatcgccgtgaaccttggctggccaaagaacaagcatccagcaccacctagtggtgtcctggaggagggtggggggtggtaacagaaggggaccccctgtatccctaaggcctgtggtcc

SEQ ID NO: 8375 - DNA, 120 bp, Homo sapiens
tcccggtagagctaagagcacactcagttccaccccagttcagctccaggaggtagaggggctgcccactctcgagtcccagatgctgggaggccttccctagaacagactccaaggctg

SEQ ID NO: 8376 - DNA, 120 bp, Homo sapiens
gggcgggggcaggatccccactggggcagactcgctccaaggtcttcagtccagcttgaacttgtcctctgattccttcagcaggtacaggctgtcatcttccagaaagctgtgggccaa

SEQ ID NO: 8377 - DNA, 120 bp, Homo sapiens
gctcgcatggagacaagggtggggtgcatgcaggcaaggtgggagggggcggatgggcacacagagcccccaatctcccctaaggagtgggcaaggaagggtccaaagaaggtgagcacc

SEQ ID NO: 8378 - DNA, 120 bp, Homo sapiens
ggacgtggacagggatggtgctgatgtgccagatggcatgggcatccaggacccagaagagcggtgggaagtcaagcagctcgagcagggacagcccctgcagcagcaagaccaccacca

SEQ ID NO: 8379 - DNA, 120 bp, Homo sapiens
cctcggactctcctcccagcctcctctctctcccacctcaaattcttctccattcctctaccccaagagtctctctagaacctccttctccaggaatggcaccaacctcccactcgcacc

SEQ ID NO: 8380 - DNA, 120 bp, Homo sapiens
ccacgttggccaccaggttgtagccatagtcgaagcggatgaggctcaggtaggagacgtgcacggtcagcatgagcagcaggagagcccggaaggcactgaccacagctgggtgctgca

SEQ ID NO: 8381 - DNA, 120 bp, Homo sapiens
ccacggtcctgccccaccgtccagggttgctcagagggcaggtggcccatccccagagcagcattccctgaagcatctcctccccccaacattggtgcatggcccctgaagtcactaccc

SEQ ID NO: 8382 - DNA, 120 bp, Homo sapiens
gggcgtaggtgttgggagactagtgaagaaggcccccaggggaaggctgggtgacccctttctgcccccagggttcgattttgcccctgcagccacccaggcaggctcacctgacgcagc

SEQ ID NO: 8383 - DNA, 120 bp, Homo sapiens
tcacggagaggacccgcggggatgggggcatggaggagtggcagagaggggccggggtcctgggcctgcctatcactgtttcactctgactgagtcttgtgttcacatcaccatacaagt

SEQ ID NO: 8384 - DNA, 120 bp, Homo sapiens
ggacgctggtggagggttcctgctgaggctccaggacatgaccacgctgcacagaattcagagcacagtgtggagtctgacagccatggggtcacgtcctgtggcaacccttcactggct

SEQ ID NO: 8385 - DNA, 120 bp, Homo sapiens
tgtcgaaggctcagctgcctcatcaggcaagaagagcgaatactcatccccacctgatgaggctcactgaggatcaagggcaccaacaggtttaggatgcccaccccatactcctcccag

SEQ ID NO: 8386 - DNA, 120 bp, Homo sapiens
ccacggggggctgcagcctccacaggttccggcctggcctgggaaccagttccggtatagccaagctccctagttactcaattgctaagacaacagcccccaggggccttgcctcctcct

SEQ ID NO: 8387 - DNA, 120 bp, Homo sapiens
aaccggcaggtgttgacagcaccaccccacccgggcccaggggagccagtgacctcagcctctgggggcgggaatgaggtgggtggggtggaggggctcgagccagcttggggtgtgttc

SEQ ID NO: 8388 - DNA, 120 bp, Homo sapiens
acccgccagaccagtggctgctcccgagcctgggaggagtagagggcaggactggaggggctgtggtgggccagggcccaggggaatgtttgaggccttcttcctggaaattagctgcgt

SEQ ID NO: 8389 - DNA, 120 bp, Homo sapiens
tagcgaatgagcctaagagcttgtgggcgttggtgctggcactttcttcagggactgctgtgtccacagcaaaggcccaaactgctgaaagcagggtgggctgaagggaagggctgggaa

SEQ ID NO: 8390 - DNA, 120 bp, Homo sapiens
aatcgtgacaaccaaaggaacagcaggccaggccgggaatggcctggaggtggggagggatgcgctagggtgggacaggcctggcggagatgaggaaaggccaggaactgctcagttggc

SEQ ID NO: 8391 - DNA, 120 bp, Homo sapiens
agtcgcaggacagaagagtgctttttgtttcagcagagcagcctggggagagataaaagctactcctggggcctgggcctgcattcctgagatgtgggtaagaggggcccagggtcagag

SEQ ID NO: 8392 - DNA, 120 bp, Homo sapiens
catcggactgtggaccagacgactcctcccgatttctgtttgttttcagtcctctgaccccaagctggctggtgaagtaggtagagggaggagactttggtgcatgcatacacacacaca

SEQ ID NO: 8393 - DNA, 120 bp, Homo sapiens
acacgtctcctgtgccccccagtctccatggctggtcaatgattgactggcatttcacaggccgctggttgcagccccagcctgttgacttagaggtcaccctcggaagctagagccctg

SEQ ID NO: 8394 - DNA, 120 bp, Homo sapiens
acacgcatctgccctgatctgagtttgctgccctctgtcccgcagtcagccccactctgttcccactccctctccccagccccctagctagacccctctcaccagcacccctttcccttc

SEQ ID NO: 8395 - DNA, 120 bp, Homo sapiens
cctcgctgtctttgtccctcagacatcctctttcctgggctctcctgccaggccctgctggagggacagttaaggaggaaatcgaatcagcagcgcccacccctgccccccttcctctcc

SEQ ID NO: 8396 - DNA, 120 bp, Homo sapiens
agacgaggttttttcctctggcttcccagctctgaatgggctcattctttttcagaggctcggcccctctcgagcctcctccccagggcgtgagttctgaccccagctcctccccccatc

SEQ ID NO: 8397 - DNA, 120 bp, Homo sapiens
taccgcccaccgggactgggcattgtctgccagtccgggtttcttcctgggatttgggatgcagagaggatgggtttgcttgggcgggggggtggagagtgaaggggggaagcaggatct

SEQ ID NO: 8398 - DNA, 120 bp, Homo sapiens
gctcgtggaatctcaaggctcaaggttcctcttctgcaaaatggggaatgataacacctgcctcctctggagtcttggggactcagtgttctgaggaacgtggctgtaggtcagagtggc

SEQ ID NO: 8399 - DNA, 120 bp, Homo sapiens
ccccgggggtcctggaagccacaaggtaaacacaacacatccccctccttgactatcaattttactagaggatgtggtgggaaaaccattatttgatattaaaacaaataggcttgggat

SEQ ID NO: 8400 - DNA, 120 bp, Homo sapiens
tcccggactccgggggagggggcagagtcaccagcctctgcatttagggattctccgaggaaaagtgtgagaacggctgcaggcaacccaggcgtcccggcgctaggagggacgcaccca

SEQ ID NO: 8401 - DNA, 120 bp, Homo sapiens
ctgcgcgaagagagggagaaagtgaagctgggagttgccactcccagacttgttggaatgcagttggagggggcgagctgggagcgcgcttgctcccaatcacaggagaaggaggaggtg

SEQ ID NO: 8402 - DNA, 120 bp, Homo sapiens
gaccggagaaaccaggggagccccccgggcagccgcgcgccccttcccacggggccctttactgcgccgcgcgcccggcccccacccctcgcagcaccccgcgccccgcgccctcccagc

SEQ ID NO: 8403 - DNA, 120 bp, Homo sapiens
agccgggtccagccggagccatggggccggagccgcagtgagcaccatggagctggcggccttgtgccgctgggggctcctcctcgccctcttgccccccggagccgcgagcacccaagg

SEQ ID NO: 8404 - DNA, 120 bp, Homo sapiens
ggacggagcagcggcgggaccctgccctgtggatgccccgccgaggtcccgcggccggcggggccagaggggcccggacgagctctcctatcccgaagttgtggacagtcgagacgctca

SEQ ID NO: 8405 - DNA, 120 bp, Homo sapiens
agccgggccctggggccctcgggcgggagggggcagttacacggcagcggctcgagatggcccatccaagagactggcgctttccaggctccgaggggctccgggaacttgtcaaagaag

SEQ ID NO: 8406 - DNA, 120 bp, Homo sapiens
tcccgcaaagggtgtattgcgtagagcgcgcgcgcgcgtttccccccttcttgagccccctcaagctttctcaaagcctttccagttggcagcctccgcctccggactggcctgggctgg

SEQ ID NO: 8407 - DNA, 120 bp, Homo sapiens
ccccgctccccttcagacgattttggtttggttgctcctgcttctggcggggtcgggtgtgtgtgtgtgtggtggagtggagggtggcatagcaacctgtcccaaccagagccggggagg

SEQ ID NO: 8408 - DNA, 120 bp, Homo sapiens
gcccggagggtggcctcttgctggggtctgggttgggggcgggggagacgtttgctttgaacagattcttggggccagcttagggactgtgctctgtgacttttggagcgcgtggaccat

SEQ ID NO: 8409 - DNA, 120 bp, Homo sapiens
acccgttctgaccctccagcccaacccagcccagccaccctgccctccgtagagcctgtggtgtttatcggtggcattgggagaattagtgtgtatttatgttggcgtggggtgtggggt

SEQ ID NO: 8410 - DNA, 120 bp, Homo sapiens
aggcgagagctaacccctgccagcctcagttgtcttctttgcaagatggaggttgcagccccagtctctggagcatgttatgcagatccaccgagagtgcctgccaggcacacagtaggt

SEQ ID NO: 8411 - DNA, 120 bp, Homo sapiens
tggcggcccccactccccattgttgttgttttcctattgcctggcggccacagctggtatcccttgaaaagggctacagggggtggagtcggaccctgccccagccctgtggagaccctg

SEQ ID NO: 8412 - DNA, 120 bp, Homo sapiens
ggccgggggaggtcctggcagcagggcgttattttgggcctggcctgccacccccagctcctgtttctcttgggagtctgttgggggaggaagtgtggggaagaggagggggtgcaagtg

SEQ ID NO: 8413 - DNA, 120 bp, Homo sapiens
cctcgtattaccccctaggatttgaccttaggctccaacttgctgggagagcagtgcctctggtgtcagaccccaagccagcccttgtgctgtccctgaatctgcatgtagcctgtggga

SEQ ID NO: 8414 - DNA, 120 bp, Homo sapiens
aggcggagcagtgaccggcaggaattctgggcagctcaggcacctgtgggcctgagggtgccctctgcccccacccttccgatctcctgggcaagacacgccaggtgattcatctcacca

SEQ ID NO: 8415 - DNA, 120 bp, Homo sapiens
ccccggcgcccctcaccaggggtgctttacctcctctagtattcctgaccttagtgggcatttctggtctcagggataccaggctggggtccaagtgggccaggtgtggcagttcagccc

SEQ ID NO: 8416 - DNA, 120 bp, Homo sapiens
gctcgcgctgggcaggtatgcagggctgacgtagtgcctttgtggcagcagtttcgtggcacacattctgccagctggttctggagtcttgccctgaggaggtggccagggtgagggtgc

SEQ ID NO: 8417 - DNA, 120 bp, Homo sapiens
cagcgcaggaacctttggcgcatgcttcaccctggcctgggatctgcagcctgggtccagatgcccacaactggaatctgacgctccttttctcttcatgggggactcccagaggtctct

SEQ ID NO: 8418 - DNA, 120 bp, Homo sapiens
ccccggttgtcccatgcctcagctgcaactccagctgaccctccttccccactctctgggtggcattacgggggtgtggatcccttgccaagaggttggcatgtgggtgtgctggaatgg

SEQ ID NO: 8419 - DNA, 120 bp, Homo sapiens
caccgagtttgtttgcttgggagaggggcagggggtatccagaagattcatgattcgtcatcgcctctcttgggggatttttacccctttgccctgagttgtgcctttgggacaaaggaa

SEQ ID NO: 8420 - DNA, 120 bp, Homo sapiens
tggcgggcgagctccccagggctggcacgctggggcagcctctgaatgcacagggtgggcctagtcagaagaagcctttcccctgaaatccctctacttcccaagcacgcaagctttctc

SEQ ID NO: 8421 - DNA, 120 bp, Homo sapiens
gggcggaggggtccttcagtcaggcttctccctgtctgaggtggcatgacttggagtgagtttggatggggtggccaggtctgagaaggtcccccgccagtgtcctctgacccatctgct

SEQ ID NO: 8422 - DNA, 120 bp, Homo sapiens
caccggcacagacatgaagctgcggctccctgccagtcccgagacccacctggacatgctccgccacctctaccagggctgccaggtggtgcagggaaacctggaactcacctacctgcc

SEQ ID NO: 8423 - DNA, 120 bp, Homo sapiens
gcccgtgggcaacccagccaggccctgcctccagctgggctgagccctctgtttacaggtgggtggcagaagaaggtgccctgcccttctgtttcctctcttgttgtggtttctcaacca

SEQ ID NO: 8424 - DNA, 120 bp, Homo sapiens
taacgtggctggccgaggtcatgtctggatgggatgcgtctgtgtttccgctaaatcttgtgctctcttgccagcatgatcatgtcccctgtccacctgctccagccactatccctctcc

SEQ ID NO: 8425 - DNA, 120 bp, Homo sapiens
aaacgcagcgctcccaagggagaggtgactggggaaaggccttggggagagaagtgagaaactggagaagggctggggattcactgggaaggactgagcaccacttgggaccctggctcc

SEQ ID NO: 8426 - DNA, 120 bp, Homo sapiens
ccacgtgtaaaccattgctggagtgtccccctccttggccatggcacaggtcaccccagcctctggggccaaggcgcaagacctgtcggagaacagccaggcaaaagcacagagaatttt

SEQ ID NO: 8427 - DNA, 120 bp, Homo sapiens
taccgctgccgccgccagttccctcacagcccccttgggggatttccctgctgaagccagcagaaagcccagcagtcccagcgcccctcctgccaccgtcagagctgcactgatgcccca

SEQ ID NO: 8428 - DNA, 120 bp, Homo sapiens
cagcgggagccgctgcccacacccctgccccctcccctcagccttccaggaagcgaaggccagacacagggaaacagaaacatgttgcccttttatttgcgtttctcagaatactgtaca

SEQ ID NO: 8429 - DNA, 120 bp, Homo sapiens
acacggggtgggagatgcagggtcaggagggagaaaacaggcccagtgacctctcccgttcccttggacccctggaagaggacacagggacccacaccttttcaaaattaacactgcccc

SEQ ID NO: 8430 - DNA, 120 bp, Homo sapiens
tcccggcctcactttcttctctgcaggctgagacagtgcctacaggccacgtcttgccccttcctctgtgctgcttgagcagggatcctacaggactctcaccacagaccccacatgggg

SEQ ID NO: 8431 - DNA, 120 bp, Homo sapiens
caacgccacatgtggctgccacatgagaggccctgcccagtgccagtctgtatgaggaagttaaggggtgagggcctgcagaggaccacagcacccatcgtttctgtcacagcttcccca

SEQ ID NO: 8432 - DNA, 120 bp, Homo sapiens
ccccgcaggagtcagggccaagttggacctgtgcttacaatgactcacgggccttttccccacctgtctacccaacagccaacccaggagttaaacccacagcagcctccctcccctatt

SEQ ID NO: 8433 - DNA, 120 bp, Homo sapiens
tctcgactcactagctctcctacagctccccaacctccaccaggccaggatggcagcagccctggccccctcacctctggaaccaagccatctacactctaccccatctttccccaacct

SEQ ID NO: 8434 - DNA, 120 bp, Homo sapiens
ccacggtgggttgcagagaagctgccaaaagcctgggacttggattagacagctccctacccagaaaggcaaagacccatcccacacttgcttccatacacaaaagcacacactgcgtgg

SEQ ID NO: 8435 - DNA, 120 bp, Homo sapiens
catcgaaaaaacctaggaatcacagtgaaacaatccagaagccgtaccgccctctgctccctatgcaggggttaaagtgctttggctgcctgagggcaaacaagtgagcaggggtttttc

SEQ ID NO: 8436 - DNA, 120 bp, Homo sapiens
actcggccgcccagcaactggggccagagccactgagtcacagtaatgccaggaacaaggtagctgggctctcccaggagacaggcaggatgtatttcctcatcttccttagtgtctcaa

SEQ ID NO: 8437 - DNA, 120 bp, Homo sapiens
aggcgaagtcattctttgtcagctaactcatgggaagggaaaacagactttctttctccactttttgctggagtctcaaagaaaagtcaagtgtgtactgatatgggataaggcctggga

SEQ ID NO: 8438 - DNA, 120 bp, Homo sapiens
tctcgccccaaccctcaggttagggttggtggatagttctgtcaccgcattccttggtaaagaaaaatggggccaggctcaaactggggggtagagcatgggtacctaaagggggctgag

SEQ ID NO: 8439 - DNA, 120 bp, Homo sapiens
aaacgcttctgccacagagacacagtacatgtttgctgagtcagatgagtgaatgcatgaataggaaagtgagtgagtgatcaagtagcgtgtttgcgaaggtcagaaaagagaggggtg

SEQ ID NO: 8440 - DNA, 120 bp, Homo sapiens
taccgacctctcattgtagaactgcagggtgttctcactaaacagtggccctgccagctggcggatcatctgcagcgacttctcacgctcatccagccccagcatccggacgtgggccac

SEQ ID NO: 8441 - DNA, 120 bp, Homo sapiens
caccgccagactgcataccttccctttgatgttatcagtgattttctaggggagacggaaaggtgatgggctaccatctatctccctttcttgagccaacatcaccttctcagcctctgc

SEQ ID NO: 8442 - DNA, 120 bp, Homo sapiens
ctgcgggcagctaagtgcagcgggtggagtcccgggccacattccacacctctctccacaagtttgatcttcccagagctacctgggccagagggagtagctaagacaacgattacacaa

SEQ ID NO: 8443 - DNA, 120 bp, Homo sapiens
ttacgaaatataacaagtcatcactggctggctctgtgtctcaggggagcaaacgctgctgggaaggcggggctacctggatggactcgaaggccaggaccccattctcccaggcattga

SEQ ID NO: 8444 - DNA, 120 bp, Homo sapiens
tggcggctgagatgctgagacaggcctcatgccacttcatctgcctgcgggtgtgcagagaagtcagcacaggggagcaaggaacgggctcagggagcgggtcttgaccctgcccccacc

SEQ ID NO: 8445 - DNA, 120 bp, Homo sapiens
caccgccacccttggagtgggcgcccgggccactgacactagcttcatctccgaggagttgttgagcagggccaccagggactccactttggtggagtcggggcggaagcaggggtggtc

SEQ ID NO: 8446 - DNA, 120 bp, Homo sapiens
tctcgaagaagggcacctcagctcctgtgcgcgactcggacagaatcacctgggaaaggggaaggggggcaccagccgagtggggagggcgcggcgcctgccagcgctggacctggggct

SEQ ID NO: 8447 - DNA, 120 bp, Homo sapiens
tcccgccaggctgctgctccagcccagcccaaagactggggacgaactggtctaagggagccagacgggggcaatgctgccacctagtggtcaatgtgaacatagggctgaaggtgcctc

SEQ ID NO: 8448 - DNA, 120 bp, Homo sapiens
ctacggactccagcccgggtgggcacctggtttctgaggcccacagaactaactggctgagaggctgcgggggcgcaggcagtgaggtggggagagttccgggttacctccttcccttga

SEQ ID NO: 8449 - DNA, 120 bp, Homo sapiens
gaccggctatgggagcagcggcaggtggggctcaggggaatcaagggacatacaggcctcctctagtttggcgatgtgcagcagggcccggttcttggtgctgctgagggttttctccag

SEQ ID NO: 8450 - DNA, 120 bp, Homo sapiens
aggcgctgaaggcacatggcaagctgcttctccccagcggctggagtgccggcctccagcccctcccgcagccgctctgcagaggctgccgtgcagcgcagcagccagtggagggcgcta

SEQ ID NO: 8451 - DNA, 120 bp, Homo sapiens
gctcggcacagtccgatgcattcctctgctttgccgtgacagctacagggaaggatgcaaaatcagactctgttcttccaatggctgaaatccgacccacatcaatgttccccagagtcc

SEQ ID NO: 8452 - DNA, 120 bp, Homo sapiens
aaacgttggaacccggagttggtctcggtctgtgtgctaggagctgcacctctgcacaaagacaaggctggaacattgtattgtgagcccccttacccctgcccttacctcagacggtca

SEQ ID NO: 8453 - DNA, 120 bp, Homo sapiens
tcccgagaaaagtcatcaaactgtggaaaggacagtggagatgctacggaatgcctccatccacccccaggtctcacatgaggcagacggtgcattcaggactcctgctcctctctcctc

SEQ ID NO: 8454 - DNA, 120 bp, Homo sapiens
tcacgggtcacagcatcagggccgtcaaggaggcggggccttgtctgtcatccccaatctagctcctgagtgtctatggtcataccttactgatggctgtgaggacagaagagtaggaca

SEQ ID NO: 8455 - DNA, 120 bp, Homo sapiens
caccgctgcactccagcccaggcaacagagcaagaccctctctcaaaaaatatgatcagtttgggaggagatggacagttggctatacgtggtgaaggaaggcagaaaaccagcacctgg

SEQ ID NO: 8456 - DNA, 120 bp, Homo sapiens
tgccggggggtggcacagtgcacactgttaagggcacgggctctgattccaagcagatgtgtaacagtcacgagtcagactgcccaagttcaaaccctggtcctaccacttgctggtcat

SEQ ID NO: 8457 - DNA, 120 bp, Homo sapiens
taccgttgttattattagctgacttggagctctggttctggtctattctctgctcaagatgaaggaaaagctttgggcctgggactcaggcacgggcggcccctcttccccaagctgcct

SEQ ID NO: 8458 - DNA, 120 bp, Homo sapiens
ctgcggccccagctgacccccgtctttctctctagcccgatgacattggccagtcacccattgtctccatgccggacggagacaaggtggacctggaagccttcagcgagtttaccaaga

SEQ ID NO: 8459 - DNA, 120 bp, Homo sapiens
ccccggccatcacccgtgtggtggactttgccaaaaaactgcccatgttctccgaggtgagtggcagaagtggggagagatgtgatgctgtgctggagggaaacctgctcccccggtcac

SEQ ID NO: 8460 - DNA, 120 bp, Homo sapiens
acacgccaaggtctggctgctctaagaaatcagccggctccaagtgctcccctccacagcccctcatccttcaagtctatgcggccacccaactccaggcagcctgaaagttctcatttt

SEQ ID NO: 8461 - DNA, 120 bp, Homo sapiens
cttcggccagcccctcgcccctcacgcccctcttccctcacagaccgctcgggcctgctgtgtgtggacaagatcgagaagagtcaggaggcgtacctgctggcgttcgagcactacgtc

SEQ ID NO: 8462 - DNA, 120 bp, Homo sapiens
caccgcaaacacaacattccgcacttctggcccaagctgctgatgaaggtgactgacctccgcatgatcggggcctgccacgccagccgcttcctccacatgaaagtcgagtgccccacc

SEQ ID NO: 8463 - DNA, 120 bp, Homo sapiens
caccgaactcttccccccactcttcctcgaggtctttgaggatcaggaagtctaaagcctcaggcggccagagggtgtgcggagctggtggggaggagcctggagagaaggggcagagct

SEQ ID NO: 8464 - DNA, 120 bp, Homo sapiens
tctcgtccttggatagattcagctcccacacacacacccgcactgcccaggtccctcctcagacctccagccctgggacagggcaaacaactgaacttgctatggaaaggacagtgtggg

SEQ ID NO: 8465 - DNA, 120 bp, Homo sapiens
gggcgggaggattgagaagggacaagccaccttgaccgtaggggaaggaggaatgtgggctgggggaagatgccctcaactcaccccctacacacacatgagagagagcccccacccagt

SEQ ID NO: 8466 - DNA, 120 bp, Homo sapiens
gaacggcttggcttggctcctcctctggaggttaaaatttatagtcattctaactgcactttggaaaccaagcaaggggagaagacaaatgaagaaaaactagacagagagaaaaataca

SEQ ID NO: 8467 - DNA, 120 bp, Homo sapiens
gagcgagcgatagagagagatgatattaagttattaactgaggctgaccagaggggaggaccccccctttaccaccccatgcactttgcgagctgccccttcttcccccacatcagagag

SEQ ID NO: 8468 - DNA, 120 bp, Homo sapiens
tgccgatcagagctgtgagttaacacaacagggtcctggccaccccccttgccataccccgccctctgtgcccctttggcaccccccaaccctagtatgtcctctgctttctgccactcg

SEQ ID NO: 8469 - DNA, 120 bp, Homo sapiens
gcccgctgagttccatctacctctcatgctggatgccagctggcccctcaccagcctgccctgctgcccacacagctcccctttaagtgcccagccctaggggcctctccccatccacct

SEQ ID NO: 8470 - DNA, 120 bp, Homo sapiens
aaccggatgctgctgcattggttgggtcgggggtaggagggctgtgcgtgagcgtctcccagaaccctccacccctttagcactctgtttccctgtttcccatctgtcttctgggctctc

SEQ ID NO: 8471 - DNA, 120 bp, Homo sapiens
gggcgggcaggtaccagaatgggggtgtttagataagtgacacttagttggggccccaggggaggggtggtcggtgctcctttttctttaaagctcttttggccagctgcccctctgccc

SEQ ID NO: 8472 - DNA, 120 bp, Homo sapiens
ccccgggaccccttcccctcttcttttctctaattcagggactttggcttgagcccctctcgccctcctggtgagggtgctctgttggtctgcacttgggtgagctgtcctcctccccct

SEQ ID NO: 8473 - DNA, 120 bp, Homo sapiens
tgccgcccactcctcaggggagagagggagagaggaggtggtcctcccatgggagcaggaggtggggtgggacagagcagaccagagggtgctgggctcagggctgcatgtcggcaggga

SEQ ID NO: 8474 - DNA, 120 bp, Homo sapiens
ccccggaagccatggggattggggcagggggtggggggaggggtgccagggcttcctgcgctttgcactattggggcaaaaatgtcttaagcagtggggaacctgccaccccaccctgac

SEQ ID NO: 8475 - DNA, 120 bp, Homo sapiens
acacggacatgcacacacggacatgggaaggcaatgctatgctgcccgtcagggcactgtccttccccaatcgttcaggtgttccaacaggggtggagggcctggaggagcacccgctgt

SEQ ID NO: 8476 - DNA, 120 bp, Homo sapiens
gaccggcaggggtgacttgaggggctcctactcctgccccacgttgacaatcagtatgtctgttatgtgcgatttttcaccccgttgtgttttgggtcaggattttaaagaaagatattt

SEQ ID NO: 8477 - DNA, 120 bp, Homo sapiens
gctcgtctattttactatatatttatgtaataaatatatgatgaaaataacccccttgggcaccccccttagacttgtgtgctgtttccctatatcctcccatctgctggcagagtaccc

SEQ ID NO: 8478 - DNA, 120 bp, Homo sapiens
ctgcggttactctggggtaatggttggggaggccttctaggatagagccgcagtcccaagtttctaccactgtgtcttgcctagcaggatggggatagaaatccattccagtgagacaag

SEQ ID NO: 8479 - DNA, 120 bp, Homo sapiens
agtcgtctcagtgtaaaaaaaaaaagtggtgggcttattttcttttcttttgtctgttgttccctcttcccctcccccagagagaaattctcaaaagaacaactcaaaaaacaaaatggc

SEQ ID NO: 8480 - DNA, 120 bp, Homo sapiens
agccgggccatcctgtgaaaatgatgttactttatttttcagtttttttcttctccttatccaggtttacatccccaccagacaccagctcctctgcccaatccaggcctctatccccca

SEQ ID NO: 8481 - DNA, 120 bp, Homo sapiens
aggcgtcatgaactttggtaatcccagttacccttatgctccaggggcactgcctcccccaccaccgcctcatctgtatcctaatacacaggtgagatggctaatgatcatgtttttcta

SEQ ID NO: 8482 - DNA, 120 bp, Homo sapiens
atacgtatgtcatacacaccctgttcagttttactaccactcccagccattagcattcctgtctctgcctggttggtgctcggtaaacaggggtggggcattgtccagagagcctcaacc

SEQ ID NO: 8483 - DNA, 120 bp, Homo sapiens
catcgagaacctgctgccactcccacaccttgtaagtctaacctggatgttctcacacttagcatggctttacgatgcacccccctcctcccccacactccttctggggcagcatatcct

SEQ ID NO: 8484 - DNA, 120 bp, Homo sapiens
agtcggcagttctggggcttgtcacctgtctccatggccctgcttccttctgctgccagctgggctcaggtgcccttgtgctcctggtctcctccccactgcctattatcccctcctcac

SEQ ID NO: 8485 - DNA, 120 bp, Homo sapiens
caccgcctccagtggcaatgctaattcacccaagaggccttcccagctcttctcacagaaggaagataaactccacatatttctgtgagtatgagaaaggtgcacactcttgggttcagc

SEQ ID NO: 8486 - DNA, 120 bp, Homo sapiens
acccggttatcccttgagccaggaatccttccccattggtaaatctctgacttacctttgcccttaatttcttctgcttagaacccaagtcccttactgtttccctcgcggtcaacccca

SEQ ID NO: 8487 - DNA, 120 bp, Homo sapiens
cagcgcgcgagttcaagcctcgtgcggcgcgggggcgagccgaggaagggtaggggcggggactgggcggggactggaggagggggcgcggtctcggttctgccaccttccccctcttca

SEQ ID NO: 8488 - DNA, 120 bp, Homo sapiens
tcacggccaggagcgcagccgccgccgccgccgccgccgcgtcctctcagccttgcgctccgcccgctgcctctgccgccgcagcgcagagccgggcgcaccggccccgcagcctgccca

SEQ ID NO: 8489 - DNA, 120 bp, Homo sapiens
cttcgggccgcgtgccggctgcagccggcatggggggttgctgagagcgagcactcctttcctctggcacctcccccggctactggccactggactctggccagcgaggctcggcccctc

SEQ ID NO: 8490 - DNA, 120 bp, Homo sapiens
tggcgcctggcacggccctctactctgctcctccagctctgagcatcgtgtcttcgccgccccccccgcccgcgcctgggatacctgggtcccccggcgacccctaggagaggggcgggg

SEQ ID NO: 8491 - DNA, 120 bp, Homo sapiens
agccgctggagaaatttctgaagaagcagacgtcgcagctggcgggccgaacggtggcgggaggtcccggcgggggtctggggagctgcggtgggcctggagggggtgggggacccggcg

SEQ ID NO: 8492 - DNA, 120 bp, Homo sapiens
gggcggcggtccagccgggggacagcggtcgttgcagcggcgtcagagcgtgtctcgcctgctgctccccgctttcctccgggagccccccgccgagccggggctggagccgccccctga

SEQ ID NO: 8493 - DNA, 120 bp, Homo sapiens
agccggcgggggtcgcggaggagccgggcagcggggggccctgctggctgcagctggaggaggtgccggggcccgggcctctcgggggaggggggcccctgcgctccccttcctcctact

SEQ ID NO: 8494 - DNA, 120 bp, Homo sapiens
tgacgagctgtccccaggcgagcccttgacttcgccgccctgggcccctctgggcgcccccgagcggcccgagcatcttctgaaccgggttctggagcggcttgctggaggggctaccag

SEQ ID NO: 8495 - DNA, 120 bp, Homo sapiens
cagcgccgcctcaggtaaggagccggtgggctcgaacacccagagcaggggctggccccggctcctcttccttgcccttggagcgtaggggtggcgccgtgccggggcttggttataggg

SEQ ID NO: 8496 - DNA, 120 bp, Homo sapiens
gtccgcggaagccggctaggggcctagcggaggtacagaccctcccgcggaagaggagagcagtactcaccttcctccctacagcagcctcaccctcgtctggagaagcagctgagcctc

SEQ ID NO: 8497 - DNA, 120 bp, Homo sapiens
cagcgcagccatgccacccgccagaggtgctttagccctgaaaaccctggggtccctgactgttcagaggcctacacagcgcaggctgacccacccagggaggcagtgccagacaggcac

SEQ ID NO: 8498 - DNA, 120 bp, Homo sapiens
atgcgttgtccttagcagtttggtgggggggatagtattctccttgggctggactcagaaggtgtctgggaggggagaggtggctgggccggcatcatggccctgcagcatccagggtgt

SEQ ID NO: 8499 - DNA, 120 bp, Homo sapiens
gaccgagggttctttaggtctagctctaggcattactctaagcccaggagggtctgaggtttgggagccccggctgaggccctaatggtgagggctttcacacttgctctcagccctcgg

SEQ ID NO: 8500 - DNA, 120 bp, Homo sapiens
tcccgcctacaccacacaccctgtgtctctatgacacattccctagggaggctgtacattggcccagagcctgctttggaaaagacagatgcccaactgtggcccccatatcagcatctc

SEQ ID NO: 8501 - DNA, 120 bp, Homo sapiens
tctcgtttcctcaccctcatccctgaagctgggggtcagagctggaggctctctgactcattgtaagaacacagcagggtagctgggcagggaggaaaagggagaagctgtctttcccct

SEQ ID NO: 8502 - DNA, 120 bp, Homo sapiens
acacgctccgctcattctcccctggggtaagactcctgaaatgtcacccatgttatctggcagcctggatccccagagtaactagtttgggaaattccaaaccagtcccaggtgaatgag

SEQ ID NO: 8503 - DNA, 120 bp, Homo sapiens
caacgtccaagcagccccctctgaccgctaggttttaccctaacactctgcttgcctcaggcatattgagaaaaggacaaagactcaggattctgggttcttattccagctccaggcaag

SEQ ID NO: 8504 - DNA, 120 bp, Homo sapiens
aggcggaggatagccagtacacagtccctgaggtgggaactgctgaatggggtacattgcagtgatagaaatcaggtcctcataatgtagagtgagtgaggaggggacaggcaggggatg

SEQ ID NO: 8505 - DNA, 120 bp, Homo sapiens
catcgccccacgtatggccatgcaggatgtagacagctgaaaatctttacctcgtgtccttgatccctatgcctgctgtgttccctgccttctctgattaataataaaattccattcatc

SEQ ID NO: 8506 - DNA, 120 bp, Homo sapiens
tgacgtcccacagcactaatcacacgctgacttgtatctcagctagctgtttatgccagtctgcccaccaacgtagtgagttccctgagggcagaggctctgtcttagtcacctctgtag

SEQ ID NO: 8507 - DNA, 120 bp, Homo sapiens
caccgttgactcattaggcttttcacttgatacccttatttccgtcactgcccttagctgtgactagttcctttggactctttggttcagcttttctttttttttttttttttttttgag

SEQ ID NO: 8508 - DNA, 120 bp, Homo sapiens
caccgagcctggcctggtttaacttttctaatttgcctggcagcatggggagggatggaggaatccatttgttatacagacttttctttttttttttaagatggagtcttgctctgttgc

SEQ ID NO: 8509 - DNA, 120 bp, Homo sapiens
caccgtgccagtcccagactttcaaccagtcctcctgtttagccccttctacactatcaccccatcttcccgaggtaccaggtgcctctaatttctgagacgttttgattcagaagttca

SEQ ID NO: 8510 - DNA, 120 bp, Homo sapiens
tttcgtgtctttttaaaataacttgcaattgaaacctgagttttagagcagcagaatgccatttgaataaaggccccagattgtagtggtaactaggatacctcttagataattttaagt

SEQ ID NO: 8511 - DNA, 120 bp, Homo sapiens
gtacgagaaaagcaagaactaaactggattcttcatttatcacgtgtaaagggtagtagttggtgtctttgtactaaggaagtctcctgtttttaaaatgtaggaatatttggagtgaaa

SEQ ID NO: 8512 - DNA, 120 bp, Homo sapiens
caccgcaccctgccaggaagcagtttttaaaagtgcattacttgagttttatcaagacttatttctgaattctgtgatgaatttgacatcaggaagatttttttttttttttgagatgga

SEQ ID NO: 8513 - DNA, 120 bp, Homo sapiens
caccgcacccagccagtccttattttatatttccacctaactcccctttgcccacgatttcagggaacctaggaggcttcctggccttgtgaccttttccttgaatctcttataattctt

SEQ ID NO: 8514 - DNA, 120 bp, Homo sapiens
tttcgtcactgctttttaagctgaatcttagctggttttcttgaactttgactttaggtgtaaaaattcaaccagacattctctccttactgtggtcagctgacatcataaccactaagg

SEQ ID NO: 8515 - DNA, 120 bp, Homo sapiens
atccgtacttcccagatgggctgaatctccgattatttgacccatcattgttattaatatggttaataaactacctatttattgattgaattgttcctcctgacttgaaatagcctgcaa

SEQ ID NO: 8516 - DNA, 120 bp, Homo sapiens
cttcgacttcctaaccctataattcattctgtcttcttgtgatggtattgctagtgtgtgtgtgtgtgtgtgtgtgtgtgtctacacacacagtcacacaaaaggatgccagacaggttc

SEQ ID NO: 8517 - DNA, 120 bp, Homo sapiens
aaacgacccactggaagaaagctgcctgtctccaacttcctagtactctgcaaagagaggtaaaggaactatggaaaatgaattagaactagaaatatgtcagcctcaggattctgactg

SEQ ID NO: 8518 - DNA, 120 bp, Homo sapiens
agacgagggaagcctggaggtacctactgagcaagctatgcccgtgccctcccacacctcctagtcatcatagaagtaatcccttgctgtgacctgggccacatggcaccatgtaaaagg

SEQ ID NO: 8519 - DNA, 120 bp, Homo sapiens
agacgaccaagcccctacccacccatctttttagccttacacagtcagtaggccactgtctgctttaggtcccaaggtttgggcccactggcccgcgaatagcttggtcgagggtacctg

SEQ ID NO: 8520 - DNA, 120 bp, Homo sapiens
ttccgtctccagccacccctgcctgccctcctgtcacagctttccatgtgctggccaggttgtggcttaacaccactgaggccaccagagatgaggcggggcgtgtgcatcaaaagtcca

SEQ ID NO: 8521 - DNA, 120 bp, Homo sapiens
cagcggaaagatcagcgtttggacggggagttcctaagctgggctctcagtccctttgggacagggttagggaacaggcaggctgggttaatttttagtcaatgcagcaaattctgcccc

SEQ ID NO: 8522 - DNA, 120 bp, Homo sapiens
ggccgcttcccatttttaatttagtactggcaaagctagcagtattggtgcctcgggtatcaggagtctttccacttaaagacagagtgctgcagagctaagtctctcctcctccccttc

SEQ ID NO: 8523 - DNA, 120 bp, Homo sapiens
gggcgtctggcatcgggtaagagctcaataaattgaagtgatgaggaagatggtgatgaagaagctgatgctgggacttagggaagcggtaggacgagggagcaaatttggggcaacatt

SEQ ID NO: 8524 - DNA, 120 bp, Homo sapiens
cagcggtcttggcttctccagctagagtctaggggaagagggaaaagacctttctagcaggacaggtgggtgaccctctggatcacagctgaaacttctggtcgggatggctgggcccac

SEQ ID NO: 8525 - DNA, 120 bp, Homo sapiens
tctcgagggccaggggctggcgttggggagaaattgtgagggtaaaatcaggcaacaggaaagaggaaatcctctggctttcgccacaaactttgcagccggtggtgccaaagccgtgtg

SEQ ID NO: 8526 - DNA, 120 bp, Homo sapiens
tggcgccttcccttcctctgctgctggagcaaagaccgaggtttcccctatagtcagatgtcaactggcttagctccaagctgggcgctgtaggaggaccaagcctacttggaagtccca

SEQ ID NO: 8527 - DNA, 120 bp, Homo sapiens
taacgttatcaagagactcaatgctataacccttacccccacaaaaacctggtgcttaggggtggatcctggggtggctcttcagtctgccagttaagcagggttgggcaaggaaaagtt

SEQ ID NO: 8528 - DNA, 120 bp, Homo sapiens
ccacggtgcagagaagctgttgaagtcagcgtgccctgccctggctctgtgtctctgaccagggcagggtcagagtgcccaagtgcatgtgggtaaggcacatgtggatgaatgtgtgtc

SEQ ID NO: 8529 - DNA, 120 bp, Homo sapiens
acacgtgattgtttgtgtacacttgcagttcttgagcctgagcctgtctgtgtgagtaggcaaatacggatttaccctgtgtccccatgagactaaggagggagctactctccctatctg

SEQ ID NO: 8530 - DNA, 120 bp, Homo sapiens
ctccgtgtagacatgaactggggataagtaggatggctagtggggaacctaacaagggagaagccaggcagtttgctggcttagcttttcgtaggtaaccctctgatgtgacatggggcc

SEQ ID NO: 8531 - DNA, 120 bp, Homo sapiens
caccgtaacaaaatcttcttccatccttggtgaattttattaataacctttggtgtggaaggttattgataaagactttctggttagattcctccttgcctggtttgcctttatccacat

SEQ ID NO: 8532 - DNA, 120 bp, Homo sapiens
gatcgctgccacgcatggaggaacctgctaactcctcaggaaaaaaaaaaccctgacgcaaaccagatgtaacctcctgtccggctgccaacatctggaatgctggcaggggctttgcac

SEQ ID NO: 8533 - DNA, 120 bp, Homo sapiens
ggccggcagcgagctgccaagcctgagcatttcagaggtggctctgatctgcagagaggtcttccaacctctttctccagctcagccctgtattctggttttgactgcttggagggagga

SEQ ID NO: 8534 - DNA, 120 bp, Homo sapiens
tcccgtctccagatccctggtgccctggttctgggcaacccctatggactttggatggagtctgaagtctaagaatgggaaacttcgaggtgggggactgaaggaatgtgtgaggctgtt

SEQ ID NO: 8535 - DNA, 120 bp, Homo sapiens
aggcggatacactaactcccacttctctcccactcagccaatggggagagccttttgggctagagttctcattgctcatggaaactctgattcaggccatttggaagagggcgagcagag

SEQ ID NO: 8536 - DNA, 120 bp, Homo sapiens
caccgaaaaaatcaggagaggcaacagggagaacgatcagatggagaggggaatggtgggagctgaatggaaaggggacaggatccagcagggggtccccctgcctgcctcagacctccc

SEQ ID NO: 8537 - DNA, 120 bp, Homo sapiens
gagcgctggcctgagtggggtgagggacaagtcaaggacttcaagaggaatattctcctgagagatccaggggagaggggaggaggtagggggctgctcttgtttcttcccgctccccag

SEQ ID NO: 8538 - DNA, 120 bp, Homo sapiens
gcacgcatgtgtgtggcagggggtggagggtccgggagcagaagctgatctctcggtgggggcctttttccaggaggttgcaggcagtctggagacgctgcattgagcctgccgcccgct

SEQ ID NO: 8539 - DNA, 120 bp, Homo sapiens
ctgcgcgggctccctcctatctagctgtgtcctggattctcagccccctccccagctccagaggcgcttccaggcttctgatttcactgggccccaactttgttggcacctgtcccgtct

SEQ ID NO: 8540 - DNA, 120 bp, Homo sapiens
ccacggcggctgccagcagcaggagataaagaacaaagtggtgttgagggttgcttcctcagccccagccactcttcacagagtcccctccttctggagcccaggccaaggcctgtgggg

SEQ ID NO: 8541 - DNA, 120 bp, Homo sapiens
gcacgctgaagattaagttttaggtttcaagtttagggaaagtatctctttccctaaggcatctttttcaacccccttgtctctagtccccttcccgatgctctaggcttgcacccttgg

SEQ ID NO: 8542 - DNA, 120 bp, Homo sapiens
gtgcgcgcgcacgcatgtgtgtgtgtgcatgcgtgtgtatgtgtgtgcatgcatagatgggagcggagtgaactaaggatatgtccttgtcagtgttcacagggtgtcaagtctgaattc

SEQ ID NO: 8543 - DNA, 120 bp, Homo sapiens
acacgtaggcccctcccccagctcctggccaaccctgcctgcctggctctgcgtagttcactgggagtgcagcgcatatttgttgaatgcgtgaatgaatgagtgtgtgttgcttgccct

SEQ ID NO: 8544 - DNA, 120 bp, Homo sapiens
aatcgagggtctcctttcctggggctgagggctccagcctggccaggactgcagcttggtggggatggggaacatgaccgggcaggactctgcctggatgggtgctgtggattgagctgt

SEQ ID NO: 8545 - DNA, 120 bp, Homo sapiens
tcccgtcaaactcgcatgctgaagctctcactcccaatgtgactatatttggagataaggcttttctgaggtaattaaggttcagtgaggccacaagggtgagattctaatcagatagga

SEQ ID NO: 8546 - DNA, 120 bp, Homo sapiens
gtgcgctttgggatgccaaaatggccatttccctgggtccctaaggcagagagcagtagctgtcaaccttggcggcttgaaaaggagtgttgtgaccacttactctcaagtaactcattc

SEQ ID NO: 8547 - DNA, 120 bp, Homo sapiens
aagcgatcagggcagatgcaaaggcacgccagaagtgtcattttctcctgcttgcctccacatggcttcgtgagtgggagtgagcagtgggctatagtaaacattccacccccaccccct

SEQ ID NO: 8548 - DNA, 120 bp, Homo sapiens
agtcgccttgatgcctgtgagcgtcatggccaagtgggggctgagaagccccccgatggccgagggagggggaacagggggttggcaggggactctgctcatgggagaggcatccacagg

SEQ ID NO: 8549 - DNA, 120 bp, Homo sapiens
ggacgcctgtgatctcagactccgggaaggagggtgtttgctgttttgtggttttcggctgtctgaactggaatgcattgtctctattaccccatccaccccctctgtgttctcatcatc

SEQ ID NO: 8550 - DNA, 120 bp, Homo sapiens
ctgcgaacgtcagagtcagaactgactcgccctcttgctctccttgagttagtcatcaagcacatcctgagggtcgcctggttctgtcctctctcctccactcccactgccctatcccgg

SEQ ID NO: 8551 - DNA, 120 bp, Homo sapiens
atccgttgagctgccagggtgatccattgagcgagcacctctgaccccatcactctcctgtgtgaggaggctctctgatggtaccctattgcttaaaaggcaaattccattttttttttt

SEQ ID NO: 8552 - DNA, 120 bp, Homo sapiens
ttccggcatttcctgaacatgccatgcgcttccacaccttcatgactgtggaccccctgctttctctgctgggaatgcctttcctctccttctctggccacaaacttctgatccatttcc

SEQ ID NO: 8553 - DNA, 120 bp, Homo sapiens
gctcggatgtcgcttcctctgttctccagactgaaagaatcattccttcagctttggccaatatgattgagaatatctctttacctccgcgtttatcctaccctaccgtgatgatttgtt

SEQ ID NO: 8554 - DNA, 120 bp, Homo sapiens
ttacgacgtaccctctgggcatgtggtaaagggggcatctgacagggtctggctgttgctcctggtggctggacaggggttgctgggagaagcagctccaggttgaacggagttctggtg

SEQ ID NO: 8555 - DNA, 120 bp, Homo sapiens
ccacgcactaggcaaggggaagcaggagtctttggtgacagaaatgtctattcccatgattgttgttgctatttccatccaggacagagtgataagccctggatgggggggtgaaagcat

SEQ ID NO: 8556 - DNA, 120 bp, Homo sapiens
gatcggggattgagctgattggggatccagcagtgctgcccagggaagacagcgtccagggggcttggagagaggcaggagttccacagggtgggatggagagagcagggagggaaggtc

SEQ ID NO: 8557 - DNA, 120 bp, Homo sapiens
gaacggtcaagaggcaggaaaatccaggccaagagagagtccaaggcgggaaggggtggagaggtgtgctggcagcccacccggaaggcctggaacgtcaagataagggtgtggagacgc

SEQ ID NO: 8558 - DNA, 120 bp, Homo sapiens
acgcggagtcacgcatggtctctctgcagcatagtccaggggagtgggtggttgtgggataagagtgccaggtggggaggaggaggtgaggagggagaaagagaaagcagttaggggagg

SEQ ID NO: 8559 - DNA, 120 bp, Homo sapiens
tgccgtgggtgggacattccttggctctgctcgctgttcccagatttctcatgattcccggcgacagagctggcatctctaatcagcctcagagaggggcagagtcttgctcaagaacac

SEQ ID NO: 8560 - DNA, 120 bp, Homo sapiens
taccgtgtaccctgcaccgtgacgggcaccaggagacaagacggcttctacactcaggagcttatcatagattgggggaatgagatattacttagagaactataaaccctgggaagtacc

SEQ ID NO: 8561 - DNA, 120 bp, Homo sapiens
aaccgttctgggccttggtttcctcaacgtgacgtggaatagcagcacccaccgctcatggtaaatggaatagctgctctggcttatttatagttgtgtttaacaaatagtttttcactt

SEQ ID NO: 8562 - DNA, 120 bp, Homo sapiens
aatcggtgccactggtggttcagcctggagggtggctgtggctgcctgtcccttttcatcttgtgcctgaaatgtttgggggaagaaggtcagtggtggctggaagcactaccgccttct

SEQ ID NO: 8563 - DNA, 120 bp, Homo sapiens
gggcgggaccgccctgtgcttgcggggagcacaggggcattgttcttactgctttgggtccaagaccttctgagctcttatgagaccactgctggggccagctcacctggggactcagtt

SEQ ID NO: 8564 - DNA, 120 bp, Homo sapiens
acccgttctttcttgccctctctctctccctctccacctccatccctgtcccctttccgtccatgcgcccacctccctggctctccctttcttctggtcccagccgctgagtggggtggg

SEQ ID NO: 8565 - DNA, 120 bp, Homo sapiens
ggccgaagagagaggtgggagatgtttgcaggtggaggacatgaacctgttttctctccaagccccttcccttcacattgttctgctgcccccaatgttaagtcaattgaattgtgtcag

SEQ ID NO: 8566 - DNA, 120 bp, Homo sapiens
tagcgttgcttgtgagcgtctggaccccttctgggtatcaatgtgtgtgctttggcgcgtgaacatggggggctattgctgtttgtgtgggtgttgcatttgtggcatgcatgtgtttgt

SEQ ID NO: 8567 - DNA, 120 bp, Homo sapiens
gaacgctctcatgagtgcacacccacaggagcaactgcagaacctgtagggcccattgcaaaatgtaaatgctgcgccccttgtttaaaaataattaagaatttcaaagtgcaggcagca

SEQ ID NO: 8568 - DNA, 120 bp, Homo sapiens
ggtcgcggcccatgaagctggtcttgtatgggggcaagttttctatttgtatgtgtatatgtgtatgctgattgtgtgactgctgtgttggtgtgtgtgtgtgtgatgtgtgcggtggtg

SEQ ID NO: 8569 - DNA, 120 bp, Homo sapiens
gcacgaaatctgaaccctttcctcaccaccccaaggacagactcccttagcagctgcctatgcctgccaccgatgcctatcaaaggagaagtgtgttttatttttggcgcccttgccgcc

SEQ ID NO: 8570 - DNA, 120 bp, Homo sapiens
gaacggtgaagtagggtgactaaagcaagaaatttggaggcagctagaactggttgaaatcacttagtagctgtgtgacattgataaagttacttaacctctctgagcctaagtttcctc

SEQ ID NO: 8571 - DNA, 120 bp, Homo sapiens
gtacgtaacaaaatcttaataaagttgctagctgtgtcaccacaggtaagttacatgagctctctaaacctgtttccttctctgttgtcataagaattcaatgaaaggttgtatagctag

SEQ ID NO: 8572 - DNA, 120 bp, Homo sapiens
tcacgggcacttagtaaatgttagcctgtctcccgcctaggttcattacccctccacctcttcaacgtctctttcctctgccccccagcctctgtgatcgctgccatcccttccatggca

SEQ ID NO: 8573 - DNA, 120 bp, Homo sapiens
tttcggtccatggtttcctcagggttcggctctgatgagcatgggtgggaggggggcaactgagaaggaggctgaggacaggacaggtgtagtccttggacgaaaatcccagttctgctt

SEQ ID NO: 8574 - DNA, 120 bp, Homo sapiens
gcccgtggggaatacacatcctggcgtttctgatttcgcacgagatcagctgagattcgcttagtctggagcagctctccacagaaaagggcctggggagctttttctgcacacagactc

SEQ ID NO: 8575 - DNA, 120 bp, Homo sapiens
tcccgtgggttggagtgctaggagggcttgcttttctgaagcctgatagggttgctcttttgagttgagggagaggcccccccccaaccttttttattctccttggagtttctctagggt

SEQ ID NO: 8576 - DNA, 120 bp, Homo sapiens
gaccgattctaaccatcttctctgcaaagaaggccatgggcccacctgtctctaagactaatagagcccccttctcctcacctgagattgggagacctggggaggctctatgtgtgtgtg

SEQ ID NO: 8577 - DNA, 120 bp, Homo sapiens
tcccgcccccagtgtatattccctaaaacccattcctgccccatcttccccctgcctttcccccatctcctttgccttaattccccccacaatccctttaggtctgtttcttttcctcca

SEQ ID NO: 8578 - DNA, 120 bp, Homo sapiens
agacggcccatcttcctttcttaaaaagatcagttgcctgatttcctttgggaccgctgccatatttcttttatatttcattcattctccagactcagtgataaggacaggaactattta

SEQ ID NO: 8579 - DNA, 120 bp, Homo sapiens
gaacggtgcctgccggagagaacgagacagcgtgggatgagggcgggtgccacggtggatgtgcagggatgttcccgtgagcccagcagggtctggtgggaagagctctggttaggagcc

SEQ ID NO: 8580 - DNA, 120 bp, Homo sapiens
gcacgagttgactcaccatgcaatggatggaaaggccagattcactcatctctaaattgccttccagcttgaattataaattctgtggggatggaaatgggctaaggaattgaatttggt

SEQ ID NO: 8581 - DNA, 120 bp, Homo sapiens
taccgtttcttaaacatctcctaaagattaccaacaacacatatgtaagtttttctaagcattttacatatatggattcgttgccttccacaacaatcctaggacataggtaccattagt

SEQ ID NO: 8582 - DNA, 120 bp, Homo sapiens
ctccgtgagagagggaacatgtgtctttcttcttgaccctcctttagaacttggtggagttttccagggggcttacaaaagacctcagctttagggggaaaatccacctgggggtcaagg

SEQ ID NO: 8583 - DNA, 120 bp, Homo sapiens
caacgtgagcccaagtgccataaactccgtgaatggatgatgggccatgggggtgggggcgaggactcctcagcagctgtgtccctggaaggaagcgcagctctcatctcccactctccc

SEQ ID NO: 8584 - DNA, 120 bp, Homo sapiens
tcccgccctctccccccacctctctgcctctctcttcctcgcatctcttccggcagatcccaatcagcaggactcagctgctggagctttttttagccgtctgcagggtcgggtgaaggt

SEQ ID NO: 8585 - DNA, 120 bp, Homo sapiens
ctgcgcacagcgatggacgggtttgtgcagggcagggagctgggctggaggacctgcctcacgaggctcatggttctatcaccaggaaccagattcagcagctcagcgacggtgggtttc

SEQ ID NO: 8586 - DNA, 120 bp, Homo sapiens
caccgcatcttgtctctatctctttttcacacccaggttctggattcatcactgtcctgcttgggaacatggtgaggacaaaatgatgtccaggagccttttctttggccattgctagcc

SEQ ID NO: 8587 - DNA, 120 bp, Homo sapiens
agacgaaaagtcagtggcaacccctcttccctttcctgggcatggctgcagcctgggagccctgaaggaggctgctgcctttggcccagccatggttacggcccaaggccttagacccgg

SEQ ID NO: 8588 - DNA, 120 bp, Homo sapiens
tcccggcctctatgaagtgcactctgcatcatccagtcctgccttcccttctccccttgaaccttgttcctgttttataattctccctcccctagcctcactgcctctgcagcccacagc

SEQ ID NO: 8589 - DNA, 120 bp, Homo sapiens
ctccggggggcctctgggatggggttttgggaacagtgcccagcttggggcctgcctctggcctgagcttctggaaagctgcccctctggcctccagacctggggatgagccgaattctg

SEQ ID NO: 8590 - DNA, 120 bp, Homo sapiens
ctgcgagttacagtttcttctaactttggcacttggtgaggcacactttctgtctgtttctggatggagaaacagaactttgtaaagtgagggtctttgttcctgccgagttcaggcctg

SEQ ID NO: 8591 - DNA, 120 bp, Homo sapiens
ggccggatgggtctctatttcaccaaagaaaacgggggctgcgagggaagcctttgggtgaaggttggaaagagacaactttggggcgataggatagtaacaagatcgccagatccaggg

SEQ ID NO: 8592 - DNA, 120 bp, Homo sapiens
acacgtgcacaaaacccagtaacattttttgctttttgcagctcttctctctctaagaactcagagtccatatttctgtctcctgggcagggagattggaggtgggatagggaaggtggt

SEQ ID NO: 8593 - DNA, 120 bp, Homo sapiens
aggcgggcttatgtctgggtcttgtatcttctagcaaatgcccagctcctccactaaacccctgacttgggaggccgtgtggagaagggaacagagctttccttggcagagaacctcacc

SEQ ID NO: 8594 - DNA, 120 bp, Homo sapiens
gcacgcttttcattggtttccctgtaggagacaaggcgagaaagttattgcttggcagggacaagtctttgttattaaagaaagcagtggagggggagacgctgttgggaactttcctcc

SEQ ID NO: 8595 - DNA, 120 bp, Homo sapiens
gcccggcatcactgtcctcacctccttcttgtcctcctccactcccaggtcctggaaagaagcagcatcagaatgcagggcagcccctcccaccccctgtcttggcccatctgggctgct

SEQ ID NO: 8596 - DNA, 120 bp, Homo sapiens
aggcggcaaagctatgaggtcgtggggtaggtgcacacgtttccagccctgctttggtgctggtagccactggcccaggagcattttcctggcatccaggtgagtgcgcagccacacgtg

SEQ ID NO: 8597 - DNA, 120 bp, Homo sapiens
aagcgacgtgttctggaagtcaggaggcttcctggggtctgagcagctgatggggaccccggtgtagcacaaggcccagatgtgctcagtctggttttgtggctgagcctggggcccagc

SEQ ID NO: 8598 - DNA, 120 bp, Homo sapiens
gggcggcagtagccctcttcccgtatcctgaccctcaggtcccagctaggtagggcctggcccactggagagtcagtaactgcgatgccacaagtgaaggcaggcccttggcagctccaa

SEQ ID NO: 8599 - DNA, 120 bp, Homo sapiens
tagcgccaggaaatgcgtgggaacctgtttaaggcaccttctcctggaggctggggaagcagtgagagcccagcgcttccgtgtccttggccacagcaccacctgctggaagcctccctg

SEQ ID NO: 8600 - DNA, 120 bp, Homo sapiens
ccccggaaattgtgtaaagccagggattctgggcttgggagttcctccgggaaggagagactgcatcgggctacataaataaataggtatttctcccgccttgagcaaatagtcctgcac

SEQ ID NO: 8601 - DNA, 120 bp, Homo sapiens
aaccggccctgaggatgaagcccctgatgcttggcctggcagtccagtcctccgctgtccactcaaagagggcttcctagctgcattttctattctggggacaggcagccgctgtcccct

SEQ ID NO: 8602 - DNA, 120 bp, Homo sapiens
cctcgttcccagcctgcgctcgggcatttgtagtcctgctgcgattggaccctgttgcaacagagctccccaccgctcattcccctttttcactgaattaccccttagctcctgagttta

SEQ ID NO: 8603 - DNA, 120 bp, Homo sapiens
ccacgtttacgcccaaccacactcttcacggttcaacgctccacccgccctccactgactcatctagaggtcgagtctcgaggtttctttaaaacacgtaagtgtctttcggttactcta

SEQ ID NO: 8604 - DNA, 120 bp, Homo sapiens
gcccgctctgactgtcagggagaaatgagaaacctcaaagttttgataagtcacaacgggtgagatctgaggagcaagaactgtgtttctgttgaactctgttgataaccccttctcccg

SEQ ID NO: 8605 - DNA, 120 bp, Homo sapiens
cagcgcagatctgcgtggcttcaagtctggccgtcttccatgctgccattagagttctgtccaccttggctctcctccccgacaggattcccagagggcccgaagtcagttacttaaatg

SEQ ID NO: 8606 - DNA, 120 bp, Homo sapiens
aaacgaaaccaaaccataaatttcccgaaccttctctggttggccctgtttttgttccaaagcagaaaagggcaaagtacaggagggggctggggcagagagagtgcaaacacatgggta

SEQ ID NO: 8607 - DNA, 120 bp, Homo sapiens
aagcgcagaagggatctaagctcctaaacaccctggccctgtgcacaggcacttctgggccaaggatggaagagaaagagaaagaaaaatgggacactgttcttccctgctccggggttc

SEQ ID NO: 8608 - DNA, 120 bp, Homo sapiens
aggcggaggtgggggccgggtgggtatgcagccaggacctgggtgtgggacatggaatggagaagctattcagaggcatctggatccagtgctgcctctactgaggaggagctgaggtct

SEQ ID NO: 8609 - DNA, 120 bp, Homo sapiens
ctgcgtttcctcattagtatggaacagtgaacccagatggtctccggagttgcttcctgcggcgatgccttatgatgtgaagtaatagctctcccttccccaccgcagaagtggtttgtg

SEQ ID NO: 8610 - DNA, 120 bp, Homo sapiens
ccacgagtcctccaaggctcctgtgtgcgcatgcagccttgccaggcccagagcagaatgttgggggaaagtcctggagctcagtgggggaatggctgggccggggtccactcccgtttc

SEQ ID NO: 8611 - DNA, 120 bp, Homo sapiens
aggcgggggagtggggaagagagggaagggagagcccccgcaggaagtacatgaatgagtgggttactgctgcgggcaactgggactccatcctgctgggcatcctctgagagtttatgt

SEQ ID NO: 8612 - DNA, 120 bp, Homo sapiens
tgccgcaggcaccaggaggcacttgtctaagaacaacaacaacaataacaaaaagctgctgagaaaggagggcaggggaacaaaacaacacaagacatttcctttttctccctctagcca

SEQ ID NO: 8613 - DNA, 120 bp, Homo sapiens
ccccgccacatcccctgatcatgggtctcagagaacacatccttatttgcatttagataaaagcagatcacccacattcactcatttctctatttttaaaagtgcccagattgctcaaag

SEQ ID NO: 8614 - DNA, 120 bp, Homo sapiens
aggcgcctcagtcgtatctttctgcagcttccgttctcagctcctcacatgggggaggtagcgcactccgaggtcaactccatgtcaaaggtgagggactctggagggacagacagggaa

SEQ ID NO: 8615 - DNA, 120 bp, Homo sapiens
ccacgcccccagcccttcagaggacagggcccaggctaccactgctatccaatctcctgccccttaaggcccagggatggtcagaaaagccagatttaccctcctccctggaggaccctg

SEQ ID NO: 8616 - DNA, 120 bp, Homo sapiens
cctcgggaagggtcctttctcattcccaccttaactgattcccagagctccatgtttacagaagctctaaggctgtcctgagatcttctgcccttgatctactgtttaattcaggagccc

SEQ ID NO: 8617 - DNA, 120 bp, Homo sapiens
ccccgagacacacgtggccaccaagcatttgagatttggtttgtccaaactgagctgtgctgtggctgtcaaaagcccactggattttaaaggcttagtatgaaaaaaaagaataaaaaa

SEQ ID NO: 8618 - DNA, 120 bp, Homo sapiens
ctccgaacctctccctcaagccataaggaaatgctatgtgggcttccagtagagaaggaagagagaagagtcttgggaggataatctaacctgagaccctcataccataatactcttgtg

SEQ ID NO: 8619 - DNA, 120 bp, Homo sapiens
catcgtcctgaaggcacccattttaaaataacacagggacacccccacacccgtcaccacactcacatggagtccctcagggcacactcctctcagcaaggcaaggcaaattactcaagt

SEQ ID NO: 8620 - DNA, 120 bp, Homo sapiens
aaacgctgacatcgctgggcaggaaaggacctggcctcccagcccacaggaagggcgatggtaatggaggatgcagcctcagactgggaggtgggaccttgaaagcaaaatgagtcaaaa

SEQ ID NO: 8621 - DNA, 120 bp, Homo sapiens
agccgtgggaccccaacgtcctctgcagaaggaacaaagagccgtgtggcaggggctgataaacagatctcccaactgaagcacacatgcaaagggagataggtggcagacaggaagtga

SEQ ID NO: 8622 - DNA, 120 bp, Homo sapiens
caacggtcaattagctccaactccctcttccaagccccattctgccccatctcaagaaatccctcagaaggaattcctaggaaaaagtgggagggaagttggtaggtttctgtgtgtgtg

SEQ ID NO: 8623 - DNA, 120 bp, Homo sapiens
ctgcgctccagcctgggtgacagagctagaccccatctctaaagaaggagcaagagcttaacaaacctaattccctctaaattaaaagtaacaaacatgatttgtcaattactgagtgca

SEQ ID NO: 8624 - DNA, 120 bp, Homo sapiens
agacgggagctggatgggcctgggtgcaaaaccctgcctgacatttattagctatttgtctttgggaatggtatttcactaccaaatgggctttctcttcagtaaaacagggaactctct

SEQ ID NO: 8625 - DNA, 120 bp, Homo sapiens
caccgcgcccggctgctcctgtttttaagagatgtgcctttaccctgatccccctcttgtggaaccccaggaccccagacatctgtctgatgagtctgtgccctggtccaggaaatgccc

SEQ ID NO: 8626 - DNA, 120 bp, Homo sapiens
caacgtctcagcctacccaaggcatgtcctaggtgtaggctgctctctggtggccagatagggaaggactcattcatcctttggcaaggtgggctgcgatctgagctgggctgtgtgata

SEQ ID NO: 8627 - DNA, 120 bp, Homo sapiens
agacgggcagagacaaagcaatcctggggtattctggagcacataagcagaggggtaggctagccaggagcaaaagatgagatgggctggagagcacgcagagagcccagccaacttgct

SEQ ID NO: 8628 - DNA, 120 bp, Homo sapiens
agccgcagttctgggggcccgcccagatcagggctgtgctgggagctgtgccccgtggccgcctcctggttctggacctgtttgctgagagccagcctgtgtatacccgcactgcctcct

SEQ ID NO: 8629 - DNA, 120 bp, Homo sapiens
gaacggaggcccagaagctgcccgcctcttccccaactccaccatggtaggcacgggcatggcccccgagggcatcagccagaacgaagtggtctattccctcatggctgagctgggctg

SEQ ID NO: 8630 - DNA, 120 bp, Homo sapiens
tggcgaaaggacccagtgccagatttggcagcctgggtgaccagctttgccgcccggcggtatggggtctcccacccggacgcaggggcagcgtggaggctactgctccggagtgtgtac

SEQ ID NO: 8631 - DNA, 120 bp, Homo sapiens
ctccggggaggcctgcaggggccacaatcgtagcccgctggtcaggcggccgtccctacagatgaataccagcatctggtacaaccgatctgatgtgtttgaggcctggcggctgctgct

SEQ ID NO: 8632 - DNA, 120 bp, Homo sapiens
ccccgccttccgctacgacctgctggacctcactcggcaggcagtgcaggagctggtcagcttgtactatgaggaggcaagaagcgcctacctgagcaaggagctggcctccctgttgag

SEQ ID NO: 8633 - DNA, 120 bp, Homo sapiens
aggcgtcctggcctatgagctgctgccggcactggacgaggtgctggctagtgacagccgcttcttgctgggcagctggctagagcaggcccgagcagcggcagtcagtgaggccgaggc

SEQ ID NO: 8634 - DNA, 120 bp, Homo sapiens
ggccgatttctacgagcagaacagccgctaccagctgaccttgtgggggccagaaggcaacatcctggactatgccaacaagcagctggcggggttggtggccaactactacacccctcg

SEQ ID NO: 8635 - DNA, 120 bp, Homo sapiens
tggcggcttttcctggaggcgctggttgacagtgtggcccagggcatccctttccaacagcaccagtttgacaaaaatgtcttccaactggagcaggccttcgttctcagcaagcagagg

SEQ ID NO: 8636 - DNA, 120 bp, Homo sapiens
agccgcgaggagacactgtggacctggccaagaagatcttcctcaaatattacccccgctgggtggccggctcttggtgatagattcgccaccactgggccttgttttccgctaattcca

SEQ ID NO: 8637 - DNA, 120 bp, Homo sapiens
ccacggcctgctggtggggtctgacctggggggattggagggaaatgacctgccctccaccaccacccaaagtgtgggattaaagtactgttttctttccacttaaactgatgagtcccc

SEQ ID NO: 8638 - DNA, 120 bp, Homo sapiens
ccacgcttgggaggactcagggctatagcatggccctggggtgggacctgttctcccatcccttgcctcacgtccctgtttttgtttgtttgtttgtttgtgacggagccttggtctgtt

SEQ ID NO: 8639 - DNA, 120 bp, Homo sapiens
ccccgacttccacttttgaggacccacccagtatgtcagacctatgggcttctccttttcgccccaaattgcgtaagtggaaagaatgacaccatgacacttacattgtctctctctctg

SEQ ID NO: 8640 - DNA, 120 bp, Homo sapiens
ccacggacactgaagtctagccgctgcagagctggcttcagccgcacatatgctcgatcccacagtcggtggtacacagcaaggggccacatcatgacagtgacaactgtgaggaggcat

SEQ ID NO: 8641 - DNA, 120 bp, Homo sapiens
tagcgctgctattggtccttagggcttggacacaaagtgtggaacagatctgcccaagtctgccagtcatcttcaccagtctcccctacacatgaaggagtctttgagggcagggacttc

SEQ ID NO: 8642 - DNA, 120 bp, Homo sapiens
atgcgaggttttgatatacaaaagccacaggcataagtacttagttcttccagccccaagcaagctgagtacatgccaacaggaagtaactaaatttacaaaactatgctccaagtggga

SEQ ID NO: 8643 - DNA, 120 bp, Homo sapiens
gcacgagtgctggtgctgagtaggggatcacaagctggcacaagtagcgaggctgctgtatgtgagtggccagctggcccacctccaggccataagcaacccccaggccctcttttggag

SEQ ID NO: 8644 - DNA, 120 bp, Homo sapiens
gcacgtaaagccctgagcaggagaaaacaccaggtagtccagaataaaagttatgtctggttagtactacagccaccaacccagaggggtgaatacatgccctggggggaaaaatggagc

SEQ ID NO: 8645 - DNA, 120 bp, Homo sapiens
cttcggtgctaacttcagaaccagatccctcccccaaggctatttccagatcacccatcaccccaaaccagggcagcccctccctgttcttggccagcctgcaaaccccaaagtgtgtca

SEQ ID NO: 8646 - DNA, 120 bp, Homo sapiens
ccccgctgagagacaaggactgctgcagaaacagaaagcctggaggctggccagtgctcaagcctggaataggaacttctctgcaactaaataaaagaaaattagctgtttaaagctaat

SEQ ID NO: 8647 - DNA, 120 bp, Homo sapiens
acacggacatctatatcaggaagctcataggcaaaaatagagctgtgtaaacgaatctgaaacttagaagctgtaactttggaaagtgagacgtgaagaggtggcgagcacacacggtgg

SEQ ID NO: 8648 - DNA, 120 bp, Homo sapiens
gcacgtggcgagcagagacactggacaaagagttggtgggtcagtccattaagccttatcctggtctctaccagttgcaaacattctagatctccctagtaaatgggctcctcagtggag

SEQ ID NO: 8649 - DNA, 120 bp, Homo sapiens
gtgcgtgtgtgtgtgtgtgtgtgtgtgtgtgtgtgtgtatacaggtgagatcccaaagatctgaattgtcccttttcttcttttcagttttggtggcctttctgctgctggggctggtgg

SEQ ID NO: 8650 - DNA, 120 bp, Homo sapiens
catcgctataagggctcctaccataccaatgagcccaaggctgcccacgagtaccatcctggcagcaaacctcccctacccacttcaggccctgcccaggtccccacccctacagcagct

SEQ ID NO: 8651 - DNA, 120 bp, Homo sapiens
ccccgggatcagaacctaccccagatcctggaggagtccaggtctgaatgagtcagaagggcttctgggaccaattccagctcctgacattcccccagtcctgcctctcccccatcctat

SEQ ID NO: 8652 - DNA, 120 bp, Homo sapiens
ggccgagcctcactgcctaaaccaatgcccttctcatccctgtttccccaggctcctggctgtttatctgccccaaaggagaagcctcatggggttgacataggtcctttctgccatctc

SEQ ID NO: 8653 - DNA, 120 bp, Homo sapiens
ctccgctgcttcacttgctttagccaaagccataaaaaacctgcaacgtagagaaaataatgcagataccctgactagccagccctctactcctccaaccttttccaagatatgcaatgg

SEQ ID NO: 8654 - DNA, 120 bp, Homo sapiens
gaccgttttcttaaatcctttttaatttccttatattttagcataatcttcttggctttaacatgctgtatctttgaccactggccccagcgaagccttagggaagaccgctctgctctg

SEQ ID NO: 8655 - DNA, 120 bp, Homo sapiens
tcacgtgttctagtccttctgggacgggcgagttctaagtgtactttcgtcccctgctggtcctcaggccactggtagaaagggaaggagatgatgctcctcagaatccaaacagagctc

SEQ ID NO: 8656 - DNA, 120 bp, Homo sapiens
cttcggacagtgacccattggcctgttgcgcccctcccttgtaatgcccacagagatatcaaacagcaattttcagaggggacacagcagactgaggaaaggctgggccacagacagtcc

SEQ ID NO: 8657 - DNA, 120 bp, Homo sapiens
gcacgaaggtcaccagaaactggggctgctgcccaggacttggtggggcccgttgaagtgccagacccctccctgaacacttagaggtgaaggcagctccaaagcagttgagatctggac

SEQ ID NO: 8658 - DNA, 120 bp, Homo sapiens
ctccggacactttgtcctctgatcgcaaaatcctagctgtctgtcttacatacttagctcctgacccctagttgcttagggatcataataatgaattcaattcagcaagtaagaacaggc

SEQ ID NO: 8659 - DNA, 120 bp, Homo sapiens
gcccgcaataaacccttgtccatggctgttataagtttaaactctgagtctccaaaccaaaatatcagaaagggcttccagtctttgttaattacaaaataaataattccagcaggaagg

SEQ ID NO: 8660 - DNA, 120 bp, Homo sapiens
gatcgggtggacagttaacgagctgtgcttcctttttggccattagggtcctcaactgtgaaaatgaaatggcagaacaagagaaaatggtaacagctttcaaatactgagtactaacta

SEQ ID NO: 8661 - DNA, 120 bp, Homo sapiens
actcggccgtaacagccgaggcttggtgcggggagtggactgcccctatcaagccacgatggtggacatccatatattagtgggcaaaggggcagtccagctgcttccaggggctgtgtg

SEQ ID NO: 8662 - DNA, 120 bp, Homo sapiens
cttcgaaggcaccacaattaccttcaaaatcatttctatggtggtttggccagctcagcccttgtggtcaggtctgtgtcatctgtgggcaactatgactacatttgggactttgtgttg

SEQ ID NO: 8663 - DNA, 120 bp, Homo sapiens
gggcgggtccatgccacgggttatatcaacacagctttcctgaaagggggagaggagggcctcctctttgggaaccgtgtgggggaaagagtgctgggaacggtgcacacacatgccttc

SEQ ID NO: 8664 - DNA, 120 bp, Homo sapiens
gggcggggtcaggtggggtggagggaagggaagggaatctcccaggtcaagctgaaataacaagtggcaagagcagggtgttccaacaccacagctctagtggcaacagggcagggactg

SEQ ID NO: 8665 - DNA, 120 bp, Homo sapiens
ccccgcccagcccctctgacttgctatgattgtgaaactagtttaaatgtaatggctgggcatgattgccttagcctcaagtgacactgggtgggtgaactggcccaatggggctggagt

SEQ ID NO: 8666 - DNA, 120 bp, Homo sapiens
agccgaggtcggaagaagtctgtccagagtcttcagggtgggggtcgacctggggcttaggaaggagagggtagcaaagctggggttgctccccaggatagggccactcctcatcgggag

SEQ ID NO: 8667 - DNA, 120 bp, Homo sapiens
tggcgggagatgggacaggaaatgactgcccaagtataatgcaacataaactagtatttcttgtgaaatgttttcttatcctcaagtctaaagacatggcacgtgcgtgcctgcgtgtgt

SEQ ID NO: 8668 - DNA, 120 bp, Homo sapiens
gttcgcagtggtgtggagggtaggaaggactaatagcatgattgaaatgatcatattaactagattactctttgacatacttggattttgacttgtcttctgattggaagtttttcttca

SEQ ID NO: 8669 - DNA, 120 bp, Homo sapiens
tagcgtgtgcagcatgggctgctgctgtgggccagagaggctgtgtcaggcaccagctcacaggatggctgcagaggcaccagcttcagtgcagtgcctcccgtgccaggtaccttcata

SEQ ID NO: 8670 - DNA, 120 bp, Homo sapiens
tctcgttgaacttacagtccagacctgcagaaagtgtatgaccaagtgctgagttaggcagtgcaggttatggatgctgtagaattccaaggaactcccagacaaaggtatgaatgtgct

SEQ ID NO: 8671 - DNA, 120 bp, Homo sapiens
gttcgaaatcctaaaggcacaaaagaacttgtgtctggtcatggttgcataattctgtgaatgtaccaaacaccatggaaaccattgaattatgtactttaaatgggcgaatgatacagt

SEQ ID NO: 8672 - DNA, 120 bp, Homo sapiens
ctgcggaatacagtgttctggcagtgacagaggcacgaaggctcgtggttctgtgaatgccccaatggttggagcatggggtgagggtggcagaatggcaaaggctgattgggggtgggg

SEQ ID NO: 8673 - DNA, 120 bp, Homo sapiens
atgcgaggcagtgtgtacttcatctgtaagcagtgatgatccagacctttaagctgcatgaaaaacaatgtgacaataatttaaagacacccaaatctccttccaacatcccgttgtcat

SEQ ID NO: 8674 - DNA, 120 bp, Homo sapiens
atgcgtttacctagttaggtaagcacagtctaaatacacttttgtattctactttttccatttaatattaatcataagcatctttacaggttgtcatgtaatactcaaatggattttttt

SEQ ID NO: 8675 - DNA, 120 bp, Homo sapiens
agtcgatagtaaacaaatcattccccattgggcaattgggttggttccaatttgctatcaagtggaagaatgacccagttggatcttggctttggacaatggcttttacatggccaactc

SEQ ID NO: 8676 - DNA, 120 bp, Homo sapiens
ggccgtgagtaagcaccccatctgaacccatttcttcatctggaaagtgataatgtatttaaatcactcaaaagctttttaggccttggtagatttctctgacactggaaggtccaacca

SEQ ID NO: 8677 - DNA, 120 bp, Homo sapiens
gcacgctagactctccctgctcctctccctgtctctctggcctgctggctggagatcaggcaccaccaggcagacaggcgctggcgggacaggcggctgtttactgctagtagagtactg

SEQ ID NO: 8678 - DNA, 120 bp, Homo sapiens
ggacgaataactgactgtacaacacgggcgttttggttgggatggaatttcccctgcttttaaagaaagagttgattaaaggactgcatggccagagccggtggggaggaaaacgtggga

SEQ ID NO: 8679 - DNA, 120 bp, Homo sapiens
ttgcgacaggttctgtgtgaggagctttcactagagaattatgggggcttctctgactcatggtgcccctcaaatcaggctgggttctggctgccctggtgtttaaaaggtattcagagg

SEQ ID NO: 8680 - DNA, 120 bp, Homo sapiens
ctacgttcaaaggactgccactactcagaatatcaaagctgaaaagagggtgagggtccctgggtctcattttacagttgacaaaagcaaaccccagagactccagtgatttggccaagg

SEQ ID NO: 8681 - DNA, 120 bp, Homo sapiens
atccggtgatgcccatggcgggggtacagtttcctgggctgcctgctggaggcttgagagtgtttctgagagtctgctaaggaaaaggaaggagcactttctgccccctgcccacctcct

SEQ ID NO: 8682 - DNA, 120 bp, Homo sapiens
tcccgtccacaaccaggctgagcaacagctgggcaattgatgacttggtttctttccctccttctttagtcggtctcaattattccaaagaatccttgagttgaagcaaggagggacagc

SEQ ID NO: 8683 - DNA, 120 bp, Homo sapiens
cagcggtttgggcttagctcaagtcacacttcccttctctcctcaaatagcccttctttgcctctgggatacagaccaggaccaaggggaaagaaagccttttaaaaatagtcctggcca

SEQ ID NO: 8684 - DNA, 120 bp, Homo sapiens
gtgcgccatcaacaaagtttaactcctggcaggacggatgaaatttgacagcaaaaatgttttctaactgcaaaggtggtttggcactgcaaagggttgattaagaatgggagaagaggt

SEQ ID NO: 8685 - DNA, 120 bp, Homo sapiens
gttcgtggaaacaggttacttcctggagggaacaacagcttcttttgggaagggggctaaggaagagcgaggtgaagaagaggaagggcagttcgtgcttcccataaaggttctggtgac

SEQ ID NO: 8686 - DNA, 120 bp, Homo sapiens
atgcggcaaatgacttcaggttttcttctgtgcacaaaatgtgcagcccatcctgagacacgctccacgcttcccctacctgctcagttcaaggtcctaaagctgaactttctcactgtg

SEQ ID NO: 8687 - DNA, 120 bp, Homo sapiens
tggcgaacaatgattaacccgcctctccctccacctgtttttctcaacatgtttttctaaaacataaactgggtcactcacttagaaggtgacagcagttgatctggccagtttcccatg

SEQ ID NO: 8688 - DNA, 120 bp, Homo sapiens
tctcgtctgcaaataaacttgttcgagtgaatgagtcaaccttgccctgggagaatgtgccagggccctgggcccagctgcacttactcatcagcagaccagactgtacttcctggcatc

SEQ ID NO: 8689 - DNA, 120 bp, Homo sapiens
taacgaatcttctctaccgaggacaaaataatagggaactcactgatatttctacaaaggaaatcaaaatatttcatcccaaactatggctcccaatataataagtactttttttgttcg

SEQ ID NO: 8690 - DNA, 120 bp, Homo sapiens
taccgcacctcacctggtctccttcacctcattccacaaagcacagccaatgtcatcttggttcctccaatgcaacacactccagccctcctccgagcttgggcttttacacacccccct

SEQ ID NO: 8691 - DNA, 120 bp, Homo sapiens
aaacgtcactttgtgattatttggatcatgtccgtcttccccactagactaggccccatgagtgcagctccatgcctgctttgctcactcttgcacttaaaccctgtgcctagccctggc

SEQ ID NO: 8692 - DNA, 120 bp, Homo sapiens
gttcggaggcactcccaacgtgaaattagaaggttggaaactcagaggacgggacaggcttagatagaaacattggcctcttcccaggtaagttctccccaggaggtggggagcaaactc

SEQ ID NO: 8693 - DNA, 120 bp, Homo sapiens
tagcgtgaaccaaatcctgcttcaaccccatgggctttcagtgtaggactttttctttttgttggtgatcacacaccctactggtggcttaaccaattacattgcctcagcccctgtgac

SEQ ID NO: 8694 - DNA, 120 bp, Homo sapiens
tatcgtagctaccatggcaagtgacagagttcaacagacttggtcatgaaaatggaatcaaaatttatggctgatttctttcttccctgacataaagttgggtaacagtgagaacaaaaa

SEQ ID NO: 8695 - DNA, 120 bp, Homo sapiens
tcggagatgccttcctcctaggtgggagtgaggaacactcctactcccctcccctacttccaggtcccattttcagtgcccaagatccccctggtattccgaggacacacccagcaggac

SEQ ID NO: 8696 - DNA, 120 bp, Homo sapiens
acccggaagtgcctaagtctttagtttccaatttgcggatccactgccctctgcttgcgggctctgctctgatcacctttgatgaccccaaaggtaagctcatggggagcctcaggaggg

SEQ ID NO: 8697 - DNA, 120 bp, Homo sapiens
acacgatcaacatggaggagtgccggctgcgggtgcaggtccagcccttggagctgcccatggtcaccaccatccaggtgatggtatgacagaatcctggggcatgcaaagcatgccatg

SEQ ID NO: 8698 - DNA, 120 bp, Homo sapiens
ggccggagggtgttggtcactggatttcctgccagcctcaggctgagtgaggaggagctgctggacaagctagagatcttctttggcaagactaggaacggaggtggcgatgtggacgtt

SEQ ID NO: 8699 - DNA, 120 bp, Homo sapiens
gttcgggagctactgccagggagtgtcatgctggggtttgctagggatggaggtgagggctatgcaggcctcctgcaggggagagggtatagggtgtgcaagattacggtgcagggagag

SEQ ID NO: 8700 - DNA, 120 bp, Homo sapiens
cagcgtctgtgccaaatcggccagttcacagtgccactgggtgggcagcaagtccctctgagagtctctccgtatgtgaacggggagatccagaaggctgaggtaagcaggaggggtgaa

SEQ ID NO: 8701 - DNA, 120 bp, Homo sapiens
tcccgacctcatacccccatggggcactgcctgccctacccccagcccccagcccttctcccatgagcctttgccatctcctggctccttttccagatcaggtcgcagccagttccccgc

SEQ ID NO: 8702 - DNA, 120 bp, Homo sapiens
gctcggtactggtgctcaacattcctgatatcttggatggcccggagctgcatgacgtcctggagatccacttccagaagcccacccgcgggggcggggaggtagaggccctgacagtcg

SEQ ID NO: 8703 - DNA, 120 bp, Homo sapiens
ccccgccaaggttctcacactggcctgggcttgggtgcccatataggaggtctgtatgttcaccaacagtgcggaggggtcacacattgcaaaacactgcccagaacagtaaaaagagcc

SEQ ID NO: 8704 - DNA, 120 bp, Homo sapiens
aaacgtgatttgggcatggaaagaggcagggggcaggaagcagcccagatcttctgctggcagcactagccttccaggagctcaccttccctccactctcagaggcaacaagcaggaccc

SEQ ID NO: 8705 - DNA, 120 bp, Homo sapiens
aatcgcacttcacacatttaggcctcatttagacaatgaggaggctgagcctgtccctccacctcccattgcaatggttggggcaataaccctccctaatcctagctcagtgagtagagg

SEQ ID NO: 8706 - DNA, 120 bp, Homo sapiens
ccccgcctttctcctcaaccaccatagagacgggacatggcacagaccacgatgagggcacctgtttttgccctgcctccccaggaggcttggggctgccccacccaatggcacatacac

SEQ ID NO: 8707 - DNA, 120 bp, Homo sapiens
ccccgccgccacacacacacaagcacaggttttcgttgctaaggcactgagaacaaatccagagaactcagtgaagggtgggggctctgtatccttcccagagttgtgacctaggggagt

SEQ ID NO: 8708 - DNA, 120 bp, Homo sapiens
tcccgccctgttggaagaggcagccttggttaagaatggcagaaaacctggagatggaagaagcccaattgtgcttaagaagttggggacagaggacgagattgggaactggtcaagccc

SEQ ID NO: 8709 - DNA, 120 bp, Homo sapiens
aggcgggcactggtcagcccaggctgaagggacactagggagagacaggtacatgctggactcacagagattggccccatatcctgagctgacgtttcaattctttggggaggtggcggg

SEQ ID NO: 8710 - DNA, 120 bp, Homo sapiens
ggacgggaggaaagatgaggcagaggtgaaagcacatggaacacaacaggggggactggctaaccttggcacaaaagcagcacagcaggcccggggaaagggtgggggcaggaagcagcc

SEQ ID NO: 8711 - DNA, 120 bp, Homo sapiens
agccggcctccctctgaccctccctgtcgccttggcagggcccagacatccaaatggtcacttcccaacctcttcagaggtcaggaagcggggaggggcaggggagagcggtcatcacca

SEQ ID NO: 8712 - DNA, 120 bp, Homo sapiens
cttcgggggagggagggcagagcattatgacagaggctgaaatgcaagtctggtggccaacagaacgtagcttcccaacttctcccttcgctggtctctagggtctcacagccacttgcc

SEQ ID NO: 8713 - DNA, 120 bp, Homo sapiens
atgcggctcccagtgctatccaaccctcatccaacaagagccagtgtgatgcaggcagccctcctcttccccaggaatctgccccttgggaccccagccttcatgagtcctacccaagcc

SEQ ID NO: 8714 - DNA, 120 bp, Homo sapiens
tctcgaagggccagactgagtcaatgtggggcttgatgtggccctggttgtacagagccaggaggcgggccaccacaccactgaccagctccacctcaccatccaggtagcccaggtgga

SEQ ID NO: 8715 - DNA, 120 bp, Homo sapiens
gcccggttggcctgcagcagctgcagagctgtcacgctgaactgattccaccatgtccgggccagggccatcaggttccgtttggggcccgtcagcaggttggccattcctgaaggacaa

SEQ ID NO: 8716 - DNA, 120 bp, Homo sapiens
agtcgggaggatctctctccagatcttgattcctaccagtcccttaaacaattgcttacattttcctgatcctccagacattcaggatcagcccctctacacctccccaatccctgctct

SEQ ID NO: 8717 - DNA, 120 bp, Homo sapiens
attcgttgctttaattttctccttgttacaggcagagttacaggctgttcaagaaaaccaggcatcactgtagtggaaggggttgccggctcagccattttccagtagtctttgataagt

SEQ ID NO: 8718 - DNA, 120 bp, Homo sapiens
cctcgcagccttcagaggacaccttctgggcagtttggctccttctgctccaaccaccccaacattgattcctttctttttctcctgcatatttttgaggtgatactttgttgatgattc

SEQ ID NO: 8719 - DNA, 120 bp, Homo sapiens
ttgcggggtggaaaagtgggaggacatcttaaagtcagaggtcaaagcaacgtgtattaactccatcatcaggtagcactcttaacctgggccaggcaccatgaggccagggcctgaact

SEQ ID NO: 8720 - DNA, 120 bp, Homo sapiens
tcccgcctgcctttactactaacaccgagactcatcaactcactggcaggtagacagggagctggcatgggcccttgggaagtcaagctgtaggtgaggatgaactggaaggctttgaca

SEQ ID NO: 8721 - DNA, 120 bp, Homo sapiens
aatcgatcccaagcactctccttccattgaagggtctgactctctgcctttgtgaacacagggttttagagaagtaaacttagggaaaccagctattctcttgaggccaagccactctgt

SEQ ID NO: 8722 - DNA, 120 bp, Homo sapiens
tctcgggtcaccacaggtgcctcacacatctgcccaattgctggagacagagaacacaagcagagattagtgtcaattcattctcctggactaggctctaatcaatcgactccagggtcc

SEQ ID NO: 8723 - DNA, 120 bp, Homo sapiens
aagcgatcaattctctcgtaagaaggcttagaaggggttcatgttcttccccaaagaaatttagagtcctctagctattatctatcaaccaaataaaaatcaataggcagcaaaagaaat

SEQ ID NO: 8724 - DNA, 120 bp, Homo sapiens
ttacgtgttgcacaatactgccatgaaggtcaggccatctttctttcatgttgcctcactccatactgccacagggcactgaaaaaaggcaggctagagaagctaatgacatcctccccc

SEQ ID NO: 8725 - DNA, 120 bp, Homo sapiens
ctccgccaggatcattagcaattctgaactgattaattgctgaaatcccagccttgaaactgttcagttagaagagcaatgctgaactgctgaaaagatcatcttaatatgggcttcaga

SEQ ID NO: 8726 - DNA, 120 bp, Homo sapiens
cttcgcttgtttaaagacaacatgtacccaagccacttgtagtctaatctgcagctcagaattgcctttgccaagaaagattagaccattttagccatctctaaaaagctgaacttgcaa

SEQ ID NO: 8727 - DNA, 120 bp, Homo sapiens
gaacgctaattttcaatgaataaataaggaattctggacgtgcaggcaagtgatcaagagccattgaaacagacacaggtaagagctttcagagcaaattgctggtctggacatgggatt

SEQ ID NO: 8728 - DNA, 120 bp, Homo sapiens
catcgccttatttcatcatcctttaaaaaatgctttatttctctggcagatttcattggaatcagaattttctttcatttagtagctgttggccttgtgtccacctttctgtggcactca

SEQ ID NO: 8729 - DNA, 120 bp, Homo sapiens
gttcgggctgcggcctatctgtaccccagctattccagaggctgaggcaggagggtggatggatgctgggaggtggatgctgcagtgagcagtgattgcaccactgcactccagcctggg

SEQ ID NO: 8730 - DNA, 120 bp, Homo sapiens
agtcgccatcttggcagggatcattgaccctgatctatcatcgggaggaagaagagctgatcttatgcagggagggcaggtggactatgtgtggactctggtgatctgtttgggtgccag

SEQ ID NO: 8731 - DNA, 120 bp, Homo sapiens
tcccggtacccagggaaaccaccagcatcggcagaggtgatagctggggaggagcggggatttggacgagagacacaggatgagtaccgggggcagccctgtgatcaacaactgctgcaa

SEQ ID NO: 8732 - DNA, 120 bp, Homo sapiens
ggccgtttgttcgactcactagtcttctgtggctctatgcggtactaaagagcagaagacagaagatacaaaaaccacaaaaattagccgggcgtggtgctgcgcgtcaataatcccagc

SEQ ID NO: 8733 - DNA, 120 bp, Homo sapiens
tgacgtttaggatgtcatggattgtgagaggcaccattattttatgtacccctcagaaagaaaggaagaaaggagaaaaaaaaaaaagatgctgacatttaaacagctgtagtgcttttt

SEQ ID NO: 8734 - DNA, 120 bp, Homo sapiens
gagcggaacctccgtctgaaaaaaaaaaaaaaaaaaaaaaaaaaaaaattgggagaattttgctcccactgccgtcaaaatcccacgtgtatttcacacttaacagcgcagctccattag

SEQ ID NO: 8735 - DNA, 120 bp, Homo sapiens
tagcggctgccatactacaccgtgctgggctgtagaatggggatgacaagacagggcggcggagattgggttggcgtgaagcgagggaaacactcggccgcaggacaaaactaaaacagc

SEQ ID NO: 8736 - DNA, 120 bp, Homo sapiens
caccgaaagactcagtagtccacgtgaatatcttgattatgttgtagctgagataatgtagggtccacccctaccgggtctctgggttttctcttcgcgtgtgtgcggagacgagagatc

SEQ ID NO: 8737 - DNA, 120 bp, Homo sapiens
ttccgaggaagaggcactaccacaagaccatggagccctcaagcagccgttatccgggcatgacagagggctcatactcttgtcttctggttacctctcacattgtcccctctacttctt

SEQ ID NO: 8738 - DNA, 120 bp, Homo sapiens
gtccgacgggaggtgtagcggaaggtcttgggccccgtcactcttgggcttccctggttattttggcatctggtttgggtgcagatggctgctgtaaggtacatggatgtgctttggtca

SEQ ID NO: 8739 - DNA, 120 bp, Homo sapiens
gcacggggactcaacatggctcagcatcgctcttgtgcaggcactggtgctcagaaagagagtgaagctactgacccctgtaagggagaatgactgtctgacaggtggatagaggggagc

SEQ ID NO: 8740 - DNA, 120 bp, Homo sapiens
ccccgttattaaaaactaaaaatgccatatccaaaagctgtttaataggagtctagggacacatagtcacatagtgtgtttttgtttttttttttttagacacagtctcgctctgtcacc

SEQ ID NO: 8741 - DNA, 120 bp, Homo sapiens
cttcgggagctgacaaaggaacctgaataacttcatccactaagactccgcttttcttcaccaatcaggcggtgacaaatacatccaccagggggcagcatctacttatttctagcccct

SEQ ID NO: 8742 - DNA, 120 bp, Homo sapiens
tttcgcacatttttgccccacactcatacttagcgataggttgggttttctcaattttgttcatgaggaaacagaactgggatttgaaaaatgggccttcgtgattgccgagctggtaac

SEQ ID NO: 8743 - DNA, 120 bp, Homo sapiens
ctccgtggcgtccattcccccaccccaccccctactcctgcagactcctctttccctcgtttgttcacgaagacaagtacttggttaagatgctgcagagacaaggatgttctcagccac

SEQ ID NO: 8744 - DNA, 120 bp, Homo sapiens
cagcggctggtgctagggaggcctgggctggattgagccagcctggccctggtgactaagccatgagttttccagctctgggaatggtagctcttctcacgagaggggcagaagtagtag

SEQ ID NO: 8745 - DNA, 120 bp, Homo sapiens
tgtcgagccctccagccaccccctgccaccttttgtgcaaacacacaatccccagagcaggttcagcgttcacaccctgcttctccccaattctgtctcctcttctccggaatcagatga

SEQ ID NO: 8746 - DNA, 120 bp, Homo sapiens
tgccggcaacccccacttctggggaaggtttcctaaagaacttgcttcttcctacccagcgctgccagaagctcagatttggtcccctccccatccctgtagctggcaggattggggtga

SEQ ID NO: 8747 - DNA, 120 bp, Homo sapiens
ccccgtgggtgcagcgagagcttctgcaacttcagccgagggagattccccaagtgacagcactgcctccgcccccacttacattttgatctaatttctgcatgtgatatcggaactgat

SEQ ID NO: 8748 - DNA, 120 bp, Homo sapiens
ccacgaattcaagaagcggatagaaatgctcacagtttgggatgtagctttgtgtagtgtggcccagggcgagataatccaagtttaagtgcctcctctgcccccttattagctgtgtca

SEQ ID NO: 8749 - DNA, 120 bp, Homo sapiens
aaccgcatggaatggaggaaggagtttactgagcatctgctctgccctggcactgtggcaactgttttttcatagttttcttttctgtaaaatgtagttgatactatacctgctctttgt

SEQ ID NO: 8750 - DNA, 120 bp, Homo sapiens
gtgcggctgattattcaccataccccatctaagttcggtgtagacacacagctgggagtgtagtatttccttctgaacccatgcccctagatgcatgtgtcatcttgaaatgtacaacac

SEQ ID NO: 8751 - DNA, 120 bp, Homo sapiens
aagcgctgggattacagttgagagccactgtcctctgcactgaggaggctccttacctggcggaacatcaggcaggtcttgccaggccaggtttcggaacttacggaaagctggtctgga

SEQ ID NO: 8752 - DNA, 120 bp, Homo sapiens
ttacgttgctgcttctcctgtccttatgttattagtaagttctgaagtgatgtaaatgctagaactactgtagaactgtatgccagacactaagagagactatgtaacattccaggatat

SEQ ID NO: 8753 - DNA, 120 bp, Homo sapiens
gtccgagggagaggaatataggccaggcaatctgctggctgcagatccctgccccttcattaagctgagtgcctcctgattctgtctgagtattcgcctttgtaagcccaggccagtaat

SEQ ID NO: 8754 - DNA, 120 bp, Homo sapiens
gttcgttatcttttctggctcaggtggaggaaaaagaaggatccccattctgtgggtgttccttgaccatctctctacgctagagctgaggtcacttctctgctatgacaacatagctgg

SEQ ID NO: 8755 - DNA, 120 bp, Homo sapiens
ccccgcgagaaccaagctcaggagttgcctgcctctgcacacatgctgagtgtgctgtttgtgtatatggcaggaccgtccctatggggcatgtgtgagctccgcagctgggtcaggctc

SEQ ID NO: 8756 - DNA, 120 bp, Homo sapiens
cctcggtccaggtttacttcatcccgcctggacgtgatttggctttgactgtctctcctgcagcccaaagcacttcctccctgtggttgctgtagctgtctcattggagcagtgcctctc

SEQ ID NO: 8757 - DNA, 120 bp, Homo sapiens
cttcgtgtgtgtactcggccttcagggtttccaccgatttttacaccttcttcccaccacgatagcttggctttaatgtggaattaaattatatatttttaaaacctgtttttaaaattt

SEQ ID NO: 8758 - DNA, 120 bp, Homo sapiens
agtcgaggggcatcccttcctgcaagggatggtctcaggttggtgctgggccaacctgagacatgaacagagttgggctggcccaacctcagcacagctgcagtttctatttaacaggag

SEQ ID NO: 8759 - DNA, 120 bp, Homo sapiens
caccggtttttacctgagcatgtctcctgggcagcggtttacatagcagctggctctagaaccacccattctgcccctcccacctgttgtcacatctcagtcatacgtcctccataggtg

SEQ ID NO: 8760 - DNA, 120 bp, Homo sapiens
ccccggaagatctaatctccactggccagaatccagggcctgctctagcctctctctgtaccatctggcctgggagcctttctcctttgccccattctccagacaaacacttgtccccaa

SEQ ID NO: 8761 - DNA, 120 bp, Homo sapiens
acccgcccacaggggcagggagactgctgctggaagcaggcccaaagtgcacaaggggcgcctgtccaggttatcaagtaccccctgtccattatttctggatcctcacacagtaatgct

SEQ ID NO: 8762 - DNA, 120 bp, Homo sapiens
aagcgccagggcctggccccaaaccagtcagctctgcttcaagaccagagctctttctacccccaggtctgttcccacatggcagcaaagaggacacaggagaactaatgggagaagtgg

SEQ ID NO: 8763 - DNA, 120 bp, Homo sapiens
ctccgcctgcctctgggaacacagagcaccaagaactgacaaaccgggaccctccagggccacagcgtggggcagagtccaggcttctgtctccccgcagtgggagatctggggagctca

SEQ ID NO: 8764 - DNA, 120 bp, Homo sapiens
aagcgccttctctgtcccccagaacagaacaaactcttgttctctgtggttggggaaaaggtgtggggggcttggacctaggaagaagctgagctgaattcctccagggcccaggtgaaa

SEQ ID NO: 8765 - DNA, 120 bp, Homo sapiens
ctccggtgagcagctcagagtctgggctagggcaactggtaggacagtggggatctgccccagagacatctgtgggtttcagatgaaggtttccccaacaccagattcatttatatgtac

SEQ ID NO: 8766 - DNA, 120 bp, Homo sapiens
ctgcggcagggggaacagccgctgggggctagtaagagtagccacccttggggccaaatggctgggcggggccagccagctctgggaggtaggcggggctctcatccaagtgggacaaag

SEQ ID NO: 8767 - DNA, 120 bp, Homo sapiens
ggccggtcaaactcagccttgagagctggacgctgattgtccgggaaggccaaagagaagagggcctcgggctcacacacaaacttgtacacgtaacgctcaccagccacctatggggag

SEQ ID NO: 8768 - DNA, 120 bp, Homo sapiens
agccgcccagcctttgtatggggtaaggtgggggagtggggaatgtggcccttctaccagtacaggcagatgctcggggcatttctctcccatgctggttcctgagaagctgactctccc

SEQ ID NO: 8769 - DNA, 120 bp, Homo sapiens
tatcggagcgagcggctcagcttgtcgtaattcatggctggccggttcttctggatgccccagagcctggcgacctgggaacaaaacagttttggggtagagatgctaccttggcagagg

SEQ ID NO: 8770 - DNA, 120 bp, Homo sapiens
gcacgtgccaccatttcccaggttctcccacctccaggctgtaaactttggaaaggagggctgggaacatccgagaggcccacctcctcaggctcaatgagcttgaactccattccccgg

SEQ ID NO: 8771 - DNA, 120 bp, Homo sapiens
gcccgtccaggcaatgaaatgggcatttgttgggtcatccagcaaggccaccagaaattgccacagctgcagggcaccccggcgctggtagggcggcccctctcgaaatgcaccgacccc

SEQ ID NO: 8772 - DNA, 120 bp, Homo sapiens
acacgaaaataggaggtgtggggtttgtgtcttttggtcccccaagcaaccgcctcccacccgagggatttctcgaaggggtctccccaggtacttttctatgggtcccaccctcttgca

SEQ ID NO: 8773 - DNA, 120 bp, Homo sapiens
aaacgtgatgtgactcctgcagggacacagcgtgataagaccttgaccctcccatcaacagtcacttctctgaccttcaaatttctcagggacaacgcagacatcatctgggaatggtcg

SEQ ID NO: 8774 - DNA, 120 bp, Homo sapiens
caccgatgagaccccagagagtccagagggactcctggccagggagaccctcccccatggcagcgctccctcccccaacatggagggcttggcaggggaaggggggctgccttacccatg

SEQ ID NO: 8775 - DNA, 120 bp, Homo sapiens
ccccgtcacctggagagggcccagagaagccctctgtgtggaggtacattgatgcgcacccggtgacatctgtgggggaagaaggggtgatgtgagaagtggcttggggtggagctcgag

SEQ ID NO: 8776 - DNA, 120 bp, Homo sapiens
ctgcggctgaggccatggaaggcagcagcgggggctgggcaagctgttctgaagggcccaagctgccagggagcagctgtttcctgcgagttcagggggaggagggagggtgagatgaac

SEQ ID NO: 8777 - DNA, 120 bp, Homo sapiens
gaacgtccggggaaagagttcggtgtccacgcctaagactccctcagaatggacaaaaatgtccggtcagcaggtcaggttcccagccctgtgcacgcgcgcgtgtgtgtgtgtgtgtgt

SEQ ID NO: 8778 - DNA, 120 bp, Homo sapiens
gagcgtgcgcctgcatgcacctggggaagaggcagtgggcactgggccttgttttttcaggtctaacagagcacattccacttcgtttcattccattccataggataggaaccttcccac

SEQ ID NO: 8779 - DNA, 120 bp, Homo sapiens
catcgggaaggcggctgtgtgaagccacccgttcaagttccaaccccttcccgccctccccccactgcactcccacctatgaatgagaagatggtgaaacatgacacctccgggaggagg

SEQ ID NO: 8780 - DNA, 120 bp, Homo sapiens
aggcgggagggtgggctcattcatgcctccattttgtgaatggaattcctgactccattcaggagtagctggggggaggggcaggagttcaagggcatgtaacacaatcccctccggtct

SEQ ID NO: 8781 - DNA, 120 bp, Homo sapiens
cagcggcaagagtgcctccctcctcctctccccagctcactgccaagcctggctcaggcttatgccctggatttgaggacaggagcaccatccggttcttagttggacagcctggggggt

SEQ ID NO: 8782 - DNA, 120 bp, Homo sapiens
gaacggttgtgggcaccacaaaaagggaaattctaaagttctagctagctctgggcctactctaataaactcagatctagggctactaatgtaacaaaagccaggaggaaagaagaaaag

SEQ ID NO: 8783 - DNA, 120 bp, Homo sapiens
cttcggcccttgaggctttgaactatagctatttatgaacacaggtgagtgcatctcactccagtcaacagccaggtggaactagaatttaaagaagtccctacttcctctgcccttgcc

SEQ ID NO: 8784 - DNA, 120 bp, Homo sapiens
tgacgcattccggccccacccctggggcctcattaactgctactttccattgaggtaatgggctgggggtatctcttgctggcgtcactggtgctggagagcagagaaccctcagcatca

SEQ ID NO: 8785 - DNA, 120 bp, Homo sapiens
cctcgggcctgacagtttaaccagggacccctccaggcccggaatccaggaggaggcttcctccagcacacagaccacaccccaaaagaggtggtgccatcctcttcccagagccaggag

SEQ ID NO: 8786 - DNA, 120 bp, Homo sapiens
cctcgcgttcctggagagcaggagaatttttaattaccatgtttcgtcttaagtgtacaccactctctttatttatttgttaacttggctgagtcttggctgccaagccagtgtgccagg

SEQ ID NO: 8787 - DNA, 120 bp, Homo sapiens
tcccggtactaagatggagtttatctgtctggggacgaggcagatgattaaggagggggtgggaaaagtgccaagacagcataatgcccagagagagagaaagaattttagggactctcc

SEQ ID NO: 8788 - DNA, 120 bp, Homo sapiens
gctcggtcaccctcttcccaggatccagtcatagggtgaagggggtagaggcattctccagagcttctgctccattgtgtcaccgctgtcccttaccctgcccccaccctggcagcctct

SEQ ID NO: 8789 - DNA, 120 bp, Homo sapiens
tgccgaggcaccagtgtacatgcactcggacgcatattcagggatgcacacaccctaattccttttacttcactcttgcagcagcaagacagcacagggtgaaatgtgccctccatgcat

SEQ ID NO: 8790 - DNA, 120 bp, Homo sapiens
tggcggaggagggtcgcggtttgtctctcttgctctttaccttcagagtcgaggggcggcagggagcccgggtccatgagcttccccagcgggccgatcagcgcttcgcgcaagctccca

SEQ ID NO: 8791 - DNA, 120 bp, Homo sapiens
ttccgggcgatttctgcgagaagcggggagaatgcccgcgagtcaccctgaggcgcttagtctgggggacgaggttggggtcctcgggtgactcaggggcggggcagcccaggactccgc

SEQ ID NO: 8792 - DNA, 120 bp, Homo sapiens
ctgcggggaggggggctgtggtgagagtaggggctgggtgcggggcggggcgggcgtggaggccggcgcggcgctcacgctgctgaaggtgtagggcacttgctggtccaagtatccggc

SEQ ID NO: 8793 - DNA, 120 bp, Homo sapiens
ctccgctccatccggccgctccctccggccgcacggccggggccccaagcgggggccgagacctggtgggggagggggctgcgttcgcacaccgtccagggagggctgcgatgggggcgg

SEQ ID NO: 8794 - DNA, 120 bp, Homo sapiens
tgccgaggtgctgtattttggggtagcatgtcctgaactccatcaccatcttgtttgcccctttaggatctgccagcaagattttgagcaaaatcctaatctctggcctcattttagagc

SEQ ID NO: 8795 - DNA, 120 bp, Homo sapiens
ggtcggaggtcgcaggagcagcggctgcctggggatcaggctcaaggttctggaatgatggaaaaacctggcctgacgcttttcctcagcggacccttcactggctaacaggagccagct

SEQ ID NO: 8796 - DNA, 120 bp, Homo sapiens
gagcgaacacagaggcgctgtaaccggcgcagatcccagcttcctctgaaatttccaggcctcttttttcctgtcggattccagacagatgaaattttcctggccccggcccattcctgg

SEQ ID NO: 8797 - DNA, 120 bp, Homo sapiens
tggcggggagcggtgggattttcctgattttcctgatcgacacgctgctgccctggtaaaatggggctccgtttccaaggctaaaaatagctctggggtgcttgcctgagttctccccat

SEQ ID NO: 8798 - DNA, 120 bp, Homo sapiens
catcgcaagttgctgcttcgtattgtaaatattcatatctgtctatgattattatttcatcgagaagggctgtggacgtgcagatgcgggccgctgggggcctcggtggtctgaagtgac

SEQ ID NO: 8799 - DNA, 120 bp, Homo sapiens
atgcgggggcctgtgcattcctcaaagcctccatcatccaaggagcccccaattaatttcaatacaaacaccggatatggcctcccccgcgcctttgcagccataacacatgaggtcatg

SEQ ID NO: 8800 - DNA, 120 bp, Homo sapiens
acccgaggagttgcagagtgagatggggaggcttctaggccccaggggaggcctggggtatctgccctgcctggtttaggcgaggctgtttactgcaatggggtctacggcacacccaca

SEQ ID NO: 8801 - DNA, 120 bp, Homo sapiens
tctcgccttccttcactcagaaactgaaatctctgattcccgatgtctcttcccagccactctccccatctctagccacttggctgccaacccaccacccacccctgtggttctttgcaa

SEQ ID NO: 8802 - DNA, 120 bp, Homo sapiens
ctccgtgctcttgcatacacagcttcattcacctggggcatctttttacctcttcatcaggctccttctggaagattcacctcaggagtttcttccttcaggaagcatttcctgatcact

SEQ ID NO: 8803 - DNA, 120 bp, Homo sapiens
ccccgtaaagaggcctcttccctacagttgagaagatggccccaataactctagacctactgcacaccagcctagtaacacctgtggctgggtgggctgggatatcatagatggcagaac

SEQ ID NO: 8804 - DNA, 120 bp, Homo sapiens
catcggtgtacttcctctcacgccacagattccagggctgaggcccccacccctaacactcaggcccctctagctctactctgagatgtgatacatacactccctgggaattttctggac

SEQ ID NO: 8805 - DNA, 120 bp, Homo sapiens
tcccgtccccactgctgagaacctgtccttcccgatgatgtcatacctggcacatgggccttagctagaactagcagctgcgggtcacccactgcaggccgctcctggcaggggagcagt

SEQ ID NO: 8806 - DNA, 120 bp, Homo sapiens
aagcgttggagaaaggattttgaatttgtcccaagaaaataattcaaaagaagaaaagcactacaggcaagaaggtgtccactggtatggtagtgacactaatcaccaacaacctagaag

SEQ ID NO: 8807 - DNA, 120 bp, Homo sapiens
ctccgcctgcctcctcacgattaccctgtgagctgggtaggcacttggtccaagtttacacaatgagtgagtagccgagctagactttaagcctgagctctctcaactacgccactatga

SEQ ID NO: 8808 - DNA, 120 bp, Homo sapiens
agacgggctctcatcaagtctttctccaaaccctgtgagatggatattattttaaagatgaagaaactgaggctcagagtggataaattatttgcccagatcacaaatgtgttttaggtt

SEQ ID NO: 8809 - DNA, 120 bp, Homo sapiens
tttcggagccctctgctgacagttctctgtcttcttgttctttggagagagcagccagctgcagcccagatgtggagacccggctggccgcaaaggagttaggtgggtgggaatagccta

SEQ ID NO: 8810 - DNA, 120 bp, Homo sapiens
ctccgtggggcgggagatgtgctcatcctgaaaacagttcctgccttgtgaggtggccacttggaggatggaatcagcggacagggtgctcagtaatctccctccccttcgcctcacacc

SEQ ID NO: 8811 - DNA, 120 bp, Homo sapiens
caacgcacacacctacaggctcatagatgtgtgcacacacaggtacacacacacgcacatacacatgtgtacacatatgtgcgtacattcacacctccaaggagcagccatgagcttccc

SEQ ID NO: 8812 - DNA, 120 bp, Homo sapiens
ctgcgttaagcccctcaggagaggaggaaaggaagctgcgtgtcatatatcatttctctccaaacaggcagtgtcctctctgcccaaagcaggggtgggggtggtcggcggccatgaact

SEQ ID NO: 8813 - DNA, 120 bp, Homo sapiens
agacggagcctgctgtcaggagcgctgtctaatttcctcccgactgccggcccggatccccccaacaaagaggggcattgtgtcctgcccccacccctggcatctgctccacagagatcc

SEQ ID NO: 8814 - DNA, 120 bp, Homo sapiens
atccggcaggggatgcacagaggggatttgtgggatgaaggccccgcatcctgtgccacagcccccagaagggccacagattcttgagtagaaagagcctggtcctgactgaggggtccc

SEQ ID NO: 8815 - DNA, 120 bp, Homo sapiens
cctcggccactccagtgtccccaccagcagtcttctcgagtaatagcttctcctcatgcctgtcagggaagaggtgtgtgaacgggagcagctgaggatgaaagggcatttgaaggggcc

SEQ ID NO: 8816 - DNA, 120 bp, Homo sapiens
taccggcttctggagggggacttgcctgcttggcaggcctgcagggcacctcgctgtggagaagagacagttgtgcctggtttttctgtactctagatctttcacgggctggtcatgttg

SEQ ID NO: 8817 - DNA, 120 bp, Homo sapiens
ggacgggtcaagcttaacaatgggctgagcgccctagggacttcctggggccttcactttctggttccttcctgaagaggctgctcctccccagctgcccctgggtgaagatctgagcga

SEQ ID NO: 8818 - DNA, 120 bp, Homo sapiens
aatcggtattgtaagatgtgcttaggggctgtcatgtgtggccacagtgtgaaaagttctgttctgggttaacgcatcagaagcaaatctggatctggcatcctccaagcccttgacttt

SEQ ID NO: 8819 - DNA, 120 bp, Homo sapiens
ccacgatcccctactgcctctcagcagcacttcttttttggtatagcttggcgctttgaaaacgttttgcccatagtatctgtttaacctttgtactcaaggcagaacaaggtattagaa

SEQ ID NO: 8820 - DNA, 120 bp, Homo sapiens
aatcggtccagggaagatgggtggtttgctaaaagtcacgcagcaaatgagtagaaaagcaggtactgaagcctaggcctcctccgggctccatgcttgtgctgacactgtgttgcagcc

SEQ ID NO: 8821 - DNA, 120 bp, Homo sapiens
caccgtgcgaggcattctgtagaccttaccccattttcctggggacagtctgaccgtctccactcaccctacctaggacttaacacatagttagaactcaagtaatatttttgtggagtg

SEQ ID NO: 8822 - DNA, 120 bp, Homo sapiens
gggcgtggaacagatgaggacgcaggcactgccattcaaagaggagaggtctcccggacagggctggcctgggcaggcccagggagggtggggctggagcagggacttgaaaaagggaga

SEQ ID NO: 8823 - DNA, 120 bp, Homo sapiens
gctcggcctgttcagccataaaatcaggataatggtggctgtgcctccttagagtagaatgagaatcagagcagaacaagggaaagctgcagtgacttgtcaggtgtcaaccttcagcat

SEQ ID NO: 8824 - DNA, 120 bp, Homo sapiens
gcccggcctttgtcaagtcacttcctcatttgcaaactgggagagtttggatgaaactattgaatgaaattattttgggggtttctttctggctctcacagtcctcgcatgctcaccatg

SEQ ID NO: 8825 - DNA, 120 bp, Homo sapiens
tctcgttctttggttaggacaggaaggtcaggggtgaggccaatacaagaggtagccgccacagctgatgctggaaatgacaatagttctttcctagactcatatttgtcccctctccct

SEQ ID NO: 8826 - DNA, 120 bp, Homo sapiens
atacgccggttgctccccctcatggctggtctcatttgccttcttcatttttagacacattccaaacttttcagcaaattatagtgtttgccaactggccgtctggggcccaggagagat

SEQ ID NO: 8827 - DNA, 120 bp, Homo sapiens
tagcgatgctgggatgctgccatcccagagcagcctggtaagaaacggagccagagtgcctgggagtggcgtcctgcaccctggggagaggccagggccctggagcagggtggcaaagct

SEQ ID NO: 8828 - DNA, 120 bp, Homo sapiens
gcccgtggcaaggaccactggcacatcccctgcctgcctgggccctggggtctgtgcccataccccacacggggggctgcttccgtgctccttggagagacgatggtgctgtggggccac

SEQ ID NO: 8829 - DNA, 120 bp, Homo sapiens
actcgttcattcctcagaatctgcatcctggttttgtcactacctggagttgtaaagataccaccaagctcaccttgtggtgtgagccttgattttccccatctgtgtaaagggtggatc

SEQ ID NO: 8830 - DNA, 120 bp, Homo sapiens
ccccgggtgcagcctggcaggagttggtatatagatcgcccagctcccagggcccctgggtgggatgatggaggcgtgtgttctacaggggaagaagtagttccccaagttcccagcagg

SEQ ID NO: 8831 - DNA, 120 bp, Homo sapiens
attcgaggccattcagaacataggcttaacccacctccccagcaaaacccaccaccatcctcccctcaaagccccaccacatagcccttaacgtgctcctctccagagtgccagggagcc

SEQ ID NO: 8832 - DNA, 120 bp, Homo sapiens
actcgtctttaccttcttcaggcctcagttccaacacccccattctgtgacaccctctagggtgactgtaactctttgtacagaatcttggcaaagcacttatcacatagcaatgaaaga

SEQ ID NO: 8833 - DNA, 120 bp, Homo sapiens
ccacgtcaaatcctgtttagaaagaggcaggatacaaacaaatgcatcactttgtgacggaattaaagtcctccactgggcacagattactaggatcagatctatgatctgttcgcaaat

SEQ ID NO: 8834 - DNA, 120 bp, Homo sapiens
cagcgagctgcatctctcaagctgagagagggcaccgcggacccacctccccataccttgctctcctttaagcgatcttcctcctgggtggctgggatgatttttagggtgatggatccc

SEQ ID NO: 8835 - DNA, 120 bp, Homo sapiens
aaacgaaagagaacagaagcttctcgcctaccaggtctaaccctccaagagttcaactcctacttctcaggcctaaaaactgatgttcagaaagtcagacttgcagcctcccctgaggcc

SEQ ID NO: 8836 - DNA, 120 bp, Homo sapiens
ccccgaccccccaagacccaacccaaagggagcctccagactggagtgcagagaggagggggggaaatgggagtcgggcttccactatgcaggaggggggacccctatctcatgaggccc

SEQ ID NO: 8837 - DNA, 120 bp, Homo sapiens
gcacgtggacctcaaaaagtcctccttaggaagaggagaaggagagtcatgactgattcattccgcaaacatggagccagcccgcagcgccgagccccggtgccactaagaggcgtaaga

SEQ ID NO: 8838 - DNA, 120 bp, Homo sapiens
gagcggccccgggccctccagcctccgccccgccccgccccgccacgccacgccggactcaccctcgggctgctccccgcaggaggccgagcaccgactcccgctcgctctccgaaggaa

SEQ ID NO: 8839 - DNA, 120 bp, Homo sapiens
aggcgcggcgcggggaggaggcgcggcgcggggaggaggcgggggaggagcggaggccgccctccgcgtctggcaccgccgcaccctccgggccgggctccgctagccggcgtcgtaccc

SEQ ID NO: 8840 - DNA, 120 bp, Homo sapiens
acccgctcccgctctcccgctccctgagtcccctgcctgtgtccccccgcaccctggcacacagccagacttcccttccgcccgcgcaacccaccctccgcgagtggaggggtggacacc

SEQ ID NO: 8841 - DNA, 120 bp, Homo sapiens
attcgattttgcaaacatttattgagcgccctccaggtgccaggcgctgtgccaggggccggggcttcaaagacgaccaaggcacagatcctgggtttgaagatctccagaggtggggcg

SEQ ID NO: 8842 - DNA, 120 bp, Homo sapiens
ggccggtcggatgcgagggcaactcgctgtaacaatgcaacgcgctgggaaagatttatcggtgcacgctgccctggggacgcggagcaggggaggagaagtcaggctggagaggagggg

SEQ ID NO: 8843 - DNA, 120 bp, Homo sapiens
gcccggctgcaggggagtgaggctacatagcagaggcgagcagcatccaggggctttactggaaaaagagctctgaaatggccatgacgataactgacttatattgtgctgtctccatgc

SEQ ID NO: 8844 - DNA, 120 bp, Homo sapiens
ggccggctccagcctctgctccgcccacctgctagggcaaggcctgagatggacgggcctggcgttcctgatctgaggacccatgggagcagccaggcccgggtcagaatatgggcttcc

SEQ ID NO: 8845 - DNA, 120 bp, Homo sapiens
ggccgtggtctcctcatctgatggataatggattgctcagacccatcatctcaagaatgtttcatgtgtcccttgttattcgacgaatctttggcgtgtccaactttgctgtctcttggc

SEQ ID NO: 8846 - DNA, 120 bp, Homo sapiens
tcccggcacctccctgccttgcccacccctcccacgtttccctcatcttgcttgggcttggctgggctagcagaccatccctgctgccaagaacaggctgttctgaccaagtctctgtta

SEQ ID NO: 8847 - DNA, 120 bp, Homo sapiens
ggccgggacccagaggacgctgtgatcaaccttgcagggcccatggggtctctcaccatccccgagccctctcccagcctctacacagagatccagtatctaagccaagtatggacagaa

SEQ ID NO: 8848 - DNA, 120 bp, Homo sapiens
ccccgcatctacccaccttccccattcacagccataggcctagcccatttcacctgggaagccagagcttttgacctcacatcctctttttttccggtccagaaaattcctgaatagctt

SEQ ID NO: 8849 - DNA, 120 bp, Homo sapiens
ctgcgccagaacccagcctggggccttgagggcaccccgggggagggatggattggggtcatgagaggccatgaatcaaagcctgggagttctggggagttgttaggtcctgtgcctctg

SEQ ID NO: 8850 - DNA, 120 bp, Homo sapiens
ggacggagggctggaacttgtggaaaaggctgggtggacgcagcagctacctggggaccacccctcacacctcccaccccttcatctgggttctgctctccaaaccccactgttgtcttt

SEQ ID NO: 8851 - DNA, 120 bp, Homo sapiens
ctgcggaggaaaaggaagccccttcccaggcccctgagggggacgtgatctcgatgcctcccctccacacatctgaggaggagctgggcttctcgaagtttgtctcagcgtagggcagga

SEQ ID NO: 8852 - DNA, 120 bp, Homo sapiens
caccgattcccgaaagctttccacctcagcctcagagtccagctgcccggactccagggctctccccaccctccccaggctctcctcttgcatgttccagcctgacctagaagcgtttgt

SEQ ID NO: 8853 - DNA, 120 bp, Homo sapiens
gagcggtggccttgctcttccggctggagactgggacatccctgataggttcacatccctgggcagagtaccaggctgctgaccctcagcagggccagacaaggctcagtggatctggtc

SEQ ID NO: 8854 - DNA, 120 bp, Homo sapiens
cctcgacccagtggaagctggatgggcaggggtgaggaagggtacttgacaactgacttaaataagctgaagctagctgcatcccaacagctccagttggccacacctgttgccaaggag

SEQ ID NO: 8855 - DNA, 120 bp, Homo sapiens
gcacgctctgacctggggccggaatgctgcagcaccaggcatggccagcagagggacccctgcgctcagagcgccgcaaaccctccacctcctgggaaggcgcagcaagacataggaagg

SEQ ID NO: 8856 - DNA, 120 bp, Homo sapiens
aggcgctgcctgctccctgacgctgactcagccctccagccagccttcccgcctctggctttctcctacccttcagctttcccccagctgtaagcaacccaagctcacctggcccacctc

SEQ ID NO: 8857 - DNA, 120 bp, Homo sapiens
cctcgggaactctctctggccagcactctgtctctgcagagtgggctgagccgggggccttgagtcagaagcacatgtatcccaggctaggtgtgtgcctggctcactctgagactttgg

SEQ ID NO: 8858 - DNA, 120 bp, Homo sapiens
ccacgtcctgcctcactgataactggagcaggcccctgtccctccccaacaccacctccttctctctgtcagctcaggcctgtcccccaccaccctaggcagctatcagacccctccccc

SEQ ID NO: 8859 - DNA, 120 bp, Homo sapiens
tgccgaaacccgggggaggtgagagaggaggagacccagtgtactggaagggaactccgaaggaattaaaggaatgggcgggactaggggggagaaggaggggccccccggtgggcgggg

SEQ ID NO: 8860 - DNA, 120 bp, Homo sapiens
gggcgggaccataagggaggtgttcgaccgggagagatgggcggggcttaggtgggtgggccgggtcagcggcgggagacagacttcaaggagcgaggcaagactaacggaagtgggtgg

SEQ ID NO: 8861 - DNA, 120 bp, Homo sapiens
aggcgacaggaggaacttggggcacaatctctgcctggggaaagcatctccttgaatgaaaatcacagacaaatctatgcagaccactgaaatcatttcactgtggaggtctcccaaaga

SEQ ID NO: 8862 - DNA, 120 bp, Homo sapiens
agacggaaattgtcccaccagcgcctgtcctacctgcagtccccaccaggctgcgcaaacggccctccagccagactagcccctccccatcctcctccagggtccgggaccctgttcaag

SEQ ID NO: 8863 - DNA, 120 bp, Homo sapiens
gaacgccgagcgaatgctacgggtgcgcagcctggacaagctggaccagggccgtctagtggacctggtcaacgccagcttcggcaagaagctcagggacgactacctggcctcgctgcg

SEQ ID NO: 8864 - DNA, 120 bp, Homo sapiens
gcacggtgcctgtgatgcccagcacagtggcagtctcagccaggcaaagctgggcctccacaccactcagcactgcccctgacagcctttcgggcccagcgcaagtcaggatgcccaggt

SEQ ID NO: 8865 - DNA, 120 bp, Homo sapiens
ctacgacactcaagtgccgcaggtgacccaactttccgaaggctcactgcaggtcagtcacgtgtccaggggttatccaacaacagcagccgcatgcctgctgtccggatgcctgccact

SEQ ID NO: 8866 - DNA, 120 bp, Homo sapiens
agtcggttacccaggagagagaaggcccagtgctcctaaggttgcaaacgcctcggcctccagctcactgatgtcattcccagctacagagaggacttccaagcccggcacagtggtcag

SEQ ID NO: 8867 - DNA, 120 bp, Homo sapiens
acccgctgcagctggttcccagccagcgagagccagtgtaggtggaagaggcccccaaagacccctgcggccagttcagccagctggttgtggctcaggttgagctgctccaggcccccc

SEQ ID NO: 8868 - DNA, 120 bp, Homo sapiens
aggcgccacaggctggtggggtccagggaagtgagtaggttgtgagagaggtccaggcagagcagagagcccagggtagccgagaagtctgtgggcagatgggccagctggttatggctg

SEQ ID NO: 8869 - DNA, 120 bp, Homo sapiens
tcccgcaggatattgagagaaagcagcaacacccgcagtccccaaaagccctggaggcgccagccggcagatggctgagattattgtggctcagctccaggagccagactccatcaggca

SEQ ID NO: 8870 - DNA, 120 bp, Homo sapiens
ccacgctgcctgaggtagggcaggtgcatggtattgggcatgctgccaccagactcctgagaaagactgatgccaccatgactatagccattgtgagggaggtgtggccacacccacccc

SEQ ID NO: 8871 - DNA, 120 bp, Homo sapiens
ccccgtccttgctgcatgaagggctggggtgaggatggcatcaagcactcatggctgctgagaccttcaggcctcactcctccgcctgggaccctggcaagcacagtgatgctaggggag

SEQ ID NO: 8872 - DNA, 120 bp, Homo sapiens
attcggggtctcaccatttgctgggtgcccaaacatcaactcaaagacaccctgtctccacctcccatgattttaaatgttacctaagcttctggcaagaaccctcttggcctgagaccc

SEQ ID NO: 8873 - DNA, 120 bp, Homo sapiens
attcggatccccctcccttaaccacctctcattccttcttcctgctggatgaggagcaatcagggaagatggcctgtaatcctctgcacctccttcctcccaccccacactgcagctcac

SEQ ID NO: 8874 - DNA, 120 bp, Homo sapiens
tcccgaaggaagaggagcaggatcatcaatggcacacggcagctgcagcaaagccacaccaacagccagagtcatgctcaggagagactgtgcctcctcatagttaccactgctctgcat

SEQ ID NO: 8875 - DNA, 120 bp, Homo sapiens
tctcgtaactacagcaatgatcactgagagtacaagcttctcactgactttctagagggacccaggagaaactctgccttccccggcccccaaacatgcactcaattgctctcatgcagc

SEQ ID NO: 8876 - DNA, 120 bp, Homo sapiens
aggcgaaaattaagatttatcagctgttgtgctagagcctccagtttaaaaattaatacataccacaccttcacagaccacaatctgagactctaaaaactcttacagaacattatctgt

SEQ ID NO: 8877 - DNA, 120 bp, Homo sapiens
aaacgctgtccacctttaactttagctaaaggcaaccctgtcctgcttttgagaaaaacgaagagtctgaattctacgtcatgtctgttccttcactgccctctggtggaaccatccaca

SEQ ID NO: 8878 - DNA, 120 bp, Homo sapiens
tctcgtaacttctaccctgtcaatccctatcacctctccagcacatttctgatccctaccccacactactggttgctagagattccagaggtacaaatttgtttgagtgtaagacaaaac

SEQ ID NO: 8879 - DNA, 120 bp, Homo sapiens
aggcgtgagccaccacgcctggctccaagcatagttttatagcagaggaagtaaaccaagtgtctaattctttgtttataaaattaagcactttctcaaggcttaggtttgactatgaaa

SEQ ID NO: 8880 - DNA, 120 bp, Homo sapiens
aggcgtgagcacagaaggccagctcacgctgtcatttcagcctccccgggtaagagagggaagaatggcaaaaccctgcagtgatctgaagccagagctcctttttcacaggatctctag

SEQ ID NO: 8881 - DNA, 120 bp, Homo sapiens
gggcgggggcggggtgggggcgggatgagtcaggcccggagggctcggctgtgtccgcaatgaatggagtgccagctaggcgcgaggcagacagtagtaacagcgggggcgtgtgtgtac

SEQ ID NO: 8882 - DNA, 120 bp, Homo sapiens
acacgagtgtgtattggggatgaggagtgagctaaggacaggcagcatgaccagctggatagatccctgtttagataacaggccagacaccagaaagtggtctccttgagatggttgttg

SEQ ID NO: 8883 - DNA, 120 bp, Homo sapiens
tttcgtctctaaaaaaataaaagctcccctctgccctgggcctattccccattcttgacacccatgagccccggtccccctgctcagtcctgatcaatcccacgctcacatcctggcttc

SEQ ID NO: 8884 - DNA, 120 bp, Homo sapiens
ggccgttgatgtggcaattaacacaccaaatgggtgccaacagggttcatcaaggctgcatttatagaggcatctttctctgaggacctccaggctttgctttgtatgatctaattcctc

SEQ ID NO: 8885 - DNA, 120 bp, Homo sapiens
tgccggaaaaagcccaggctgctgccacccacttgggcgggcgggtggatggatgtttgctctggcagagaacagggaccttcgttcaatgcactacacataagaggcccgcctgccatg

SEQ ID NO: 8886 - DNA, 120 bp, Homo sapiens
cagcgtgcccctgagtccttcaggagtgcagattgggcagtggctggaactataagagtcaggcaatgggttgctgaagagacctctcagagcaggtgaccttaggggtagatcctcagg

SEQ ID NO: 8887 - DNA, 120 bp, Homo sapiens
gaacggttgtggggagccgtgcgtgatgaggatgcctaccctacgtgagtggcatggggccaaaccaaggaattgggggcttagttgaaaagggcaggccaggtgcagtggctcacacct

SEQ ID NO: 8888 - DNA, 120 bp, Homo sapiens
ttccggcagcggagcagaagggatatggccagaggaagaaacaccaggtgaaagactgagttgatccaggtttaaggcattacatcgaggggctgaacttgagacagtccctgaaaatgt

SEQ ID NO: 8889 - DNA, 120 bp, Homo sapiens
cagcgggagaagggccaggaggagccccagatgcagaggggacagaccagccctgcctgcaggccgctgtgcactgagtgagctcagggtgagcagagcttttgagccctccccttcccc

SEQ ID NO: 8890 - DNA, 120 bp, Homo sapiens
tcacggcttcattcctccccctagaggctcctggaagcacagctgctttctcctaagagtgaacaggtctgtggcttaaacatcttaggtccattcccagagtttccagctcaacccctt

SEQ ID NO: 8891 - DNA, 120 bp, Homo sapiens
cctcggccactgagccacccagccttggtgtcaatgtgggcagcctcatggtgcctgtctttgtggtgctgttgggtgtggtctggtacttccgaatcaattaccgccaattcttcacag

SEQ ID NO: 8892 - DNA, 120 bp, Homo sapiens
caccgtcttcttcagcttcctagtatttgggatgtatggacgataaggacataggaagaaaatgaaaggcatggtctttctcctttacggcctccccacttttcctggccagagctgggc

SEQ ID NO: 8893 - DNA, 120 bp, Homo sapiens
ggccggggagggaggggtggaaaggatgtgatggaaatctcctccataggacacaggaggcaagtatgcggcctccccttctcatccacaggagtacagatgtccctcccgtgcgagcac

SEQ ID NO: 8894 - DNA, 120 bp, Homo sapiens
ctccgtagggagcctggagtatccttccatttctcagccaaatactcatcttttgagactgaaatcacactggcgggaatgaagattgtgccagccttctcttatgggcacctagccgcc

SEQ ID NO: 8895 - DNA, 120 bp, Homo sapiens
ttgcgctgcccccaggaaaatggtaatgagagtaggtaggccggggctaccaacgggagatgcagtttatttacaccagcagccatgggggcagagggaatacacagcgtttacaaagtt

SEQ ID NO: 8896 - DNA, 120 bp, Homo sapiens
cagcgtgagccccacccccctcccccaatgaccccagcatgcggtaatgccaggcgggtggcccctgggcatgcgggggggagtgatgcatggaaggaaaagccaccggccatggaaatt

SEQ ID NO: 8897 - DNA, 120 bp, Homo sapiens
aagcggctagaggcctgctgagatcctcctctccctctggcctcctctcggagggagactacggagggccaagaatagagaagcccaggccccgggatttattctaactcctgccaaaat

SEQ ID NO: 8898 - DNA, 120 bp, Homo sapiens
aagcgctaaggaagggaaacagggcacgctttggaggcaggagcgctgagaggaactgaagccagtcaaggtgaagggggtggaagcagcagttgggaacctgggctgccccggtagggc

SEQ ID NO: 8899 - DNA, 120 bp, Homo sapiens
tggcggcagttctggacgcccacctcagcagacagcactctgtgcctgcctacccctgggactgggggcatttgataagattctgcacacagacaggacatgcccagccttgcccctcag

SEQ ID NO: 8900 - DNA, 120 bp, Homo sapiens
tcacgtgggttcagctggcttagtctcaccctctgccagatccaggaggaagtgagaatccattacagtgggcctgtctcagctcctgtttgctttggccacagcgtgatggtgtcttgc

SEQ ID NO: 8901 - DNA, 120 bp, Homo sapiens
tcccgcctggcatggctgctaaggcagctggcattctgctcctgcttatcatgctggctgagacttcctgctgctgctgcttcccctttctcagatggatggggtcctattttattatca

SEQ ID NO: 8902 - DNA, 120 bp, Homo sapiens
gtacgccaggaaaagaaatgagacagagagccagaaaaaacaggcactaaccctagatctttaaaggacttgctttgctttccacacttctttcctcatgctttctgaggacagtagtag

SEQ ID NO: 8903 - DNA, 120 bp, Homo sapiens
tagcgggagtaaaggggaagggagccccttgctgaaggtcaccccacaccagccagagcccacggttggagagtcttggaggagagtcttggaggaaacatgattatcaggtgcctgatg

SEQ ID NO: 8904 - DNA, 120 bp, Homo sapiens
cctcgaattgaaataccactgcatgctgtaattaagctaagtgacatgccagctgtaaaggcaagggttgtgaatgattacattcagttcatgtaatcatacaggatgagtgtggggagg

SEQ ID NO: 8905 - DNA, 120 bp, Homo sapiens
catcgcaagagaaccctgggtcccatttcccagcccttcctgggttctgactgggccctcaggaatgagaactgtaacagcagaagagcatctggggtttgcttgctcttccagtcccca

SEQ ID NO: 8906 - DNA, 120 bp, Homo sapiens
caccgccacccccaccaccatccccatccccctcgctggcgcagacattctggcccagctctgcagccaggtcagggtgactcagagggctggctgctgcctccccgccgtggaccctgc

SEQ ID NO: 8907 - DNA, 120 bp, Homo sapiens
agccgacttccctctctggcttctctcacaccagtcaacagatttcttcttaggcagaggaggaaacaagaggtgacttgatgcccaacaactttgccaagtcctccggtctatcctgat

SEQ ID NO: 8908 - DNA, 120 bp, Homo sapiens
aaacgagactccagcccattcactgtaatgaactattgtaaaaatgtgtcattgctgctgaaatgtgttacaagtttgaattgttttgttttttttttctttttcctgccccttgcagag

SEQ ID NO: 8909 - DNA, 120 bp, Homo sapiens
ccccgacccagaagccccaataaaactcaggacctccttgccaagtaaagtattttaaaacaatgtaggtggatttacaacactgaatttctctggcagtcaaggagaaaattctgtctt

SEQ ID NO: 8910 - DNA, 120 bp, Homo sapiens
ctccgatgtggctaccccagatgccggtctatgttggcgtcttgggcttcctgggggctttggtacacgaggttcctgaagatgcctgggcctggctcatggatggatccacttacttaa

SEQ ID NO: 8911 - DNA, 120 bp, Homo sapiens
attcggctcaatgggcagagtggcaggctgtggcacttgtccttgttaacatgaccccacccggccaatgtagcctgttacccctacccccacttcatgacccatgtgaatgcccctcag

SEQ ID NO: 8912 - DNA, 120 bp, Homo sapiens
ctgcgctgcccaggtgaggaccatagctccctggatacaccatcacacatgtaattcatgtacaattcaggactgggccccaaaaccaggcctagtggttccagcacctgaggccaagaa

SEQ ID NO: 8913 - DNA, 120 bp, Homo sapiens
taccggatcctgttagtcctggcgatggactacatagacctcttcgtaagagtactgctgggcgttgactgcagcagacactgtgtccataccctatagaggctgtagcaacctgccaca

SEQ ID NO: 8914 - DNA, 120 bp, Homo sapiens
aaacgcgaaaacagaagccaccttttcaccaccttgccttgcgttagcctcacacttttggtgacctcactagcttagagcccgcagcgcttctatttctccacctccaccctgcagccc

SEQ ID NO: 8915 - DNA, 120 bp, Homo sapiens
ccccgcttcgcctgctttctcctccttcccttcccacctctgagcatgctctgaggctgtccttcctcctgaggcaagtcctagaccggcccctaacctccttaaccaagatgctttgtg

SEQ ID NO: 8916 - DNA, 120 bp, Homo sapiens
ttacgaagttctcctagctcactcttcatccactcattcaataaaaatgtccttgctcaccaagctgtgccacttagtacttggggcgtggccacctctaatgcctctgttcaagcttct

SEQ ID NO: 8917 - DNA, 120 bp, Homo sapiens
gcccgccttggcctcccaacgtgcctcgctgagatgggtggattctggggtccagctcttgagcagttccctgacacactgaaggagcttcctgtgccacacttacagcctttctgcttt

SEQ ID NO: 8918 - DNA, 120 bp, Homo sapiens
agacgaagagctgcccctgccactggacctgcctcctcctccacccctggatggagatgaattggggctgcctccacccccaccaggatttgggcctgatgagcccagctgggtgcctgc

SEQ ID NO: 8919 - DNA, 120 bp, Homo sapiens
caccggatcccacttcctctgttgccctgatccccattctcctccctctgcaaaggtgtgaatctatcccccgggccccccacacaatttttctgacgaactgacagaactggggagagg

SEQ ID NO: 8920 - DNA, 120 bp, Homo sapiens
gaccgtgcatccccatggtggtggggggtgagggggagagggcaagaggcattatctcacggcaccctcttctcttgccctgcagtggtgacactgtacccatacaccagccagaaggac

SEQ ID NO: 8921 - DNA, 120 bp, Homo sapiens
actcgccgctactccgatggctggtgcgagggcgtcagctcagaggggactggattcttccctgggaactatgtggagcccagctgctgacagcccagggctctctgggcagctgatgtc

SEQ ID NO: 8922 - DNA, 120 bp, Homo sapiens
catcggagggagaaggggtcctggggagagagaatttatccagaggcctgctgcagatggggaagagctggaaaccaagaagtttgtcaacagaggacccctactccatgcaggacaggg

SEQ ID NO: 8923 - DNA, 120 bp, Homo sapiens
gaacgatctccatgacttaagcggggctctccgagagcacctcactgtcaactctgagactgtcgcgagagagatctcagtcatttcttcccccttcacctcctttatagttgtaaaaca

SEQ ID NO: 8924 - DNA, 120 bp, Homo sapiens
tttcgctggttctgcttaaaaacatggctttctgttccatggggggtgggggggatgcgtggaaggcccagcccgcgagggtgactttggtgaagtccctggtctcttgctgcatagacg

SEQ ID NO: 8925 - DNA, 120 bp, Homo sapiens
ttgcggccaggagaatttcaggatcctgggttccctccacagtagactggaggaggggcggtcacgcagcccgaggcaacaagttacagcggcgggagatgttccttctctcacctgccg

SEQ ID NO: 8926 - DNA, 120 bp, Homo sapiens
ttgcgcgccaccccgcgatgggtcagactccagaactcaaccgtgcacagtggagtgggggaggcagccgaggtgggttaactgaatagatagggacggctctgagcccccttccccaag

SEQ ID NO: 8927 - DNA, 120 bp, Homo sapiens
cctcgcggtaggtggctcgcaggctctccgggagccgctggcccggcgcggcgcgcacgatcgaatcgtcgctgttttcgtccacgatagtctcgtcgaagtcgaaggtcaggaggaagc

SEQ ID NO: 8928 - DNA, 120 bp, Homo sapiens
aagcgcggcgcgccctgcgcggccatcctgccgtcctgggagcaggggggagagcagcaggaggaggaggaggagggggcaagcgagagggggcgcggcaggagcccgcccgggagaggc

SEQ ID NO: 8929 - DNA, 120 bp, Homo sapiens
tagcgggccacggccagaggcgctggcacatccaacacctgaggaggacccaagtctggttaagctgggaggagtacccaatgccaccacctctatccccagccttccctgactactcca

SEQ ID NO: 8930 - DNA, 120 bp, Homo sapiens
gcacgttcaggaaggacgagtcgccccacggcggggaaccggcgaccggcggcagccccagcccaaccccggccacgcctcgttaggcgccacgtcccgtccccgggcgcccggagcact

SEQ ID NO: 8931 - DNA, 120 bp, Homo sapiens
ccccgccggcccctgcccgccgctcgctgtaggagggagccttctgcgtcggctcccgacactcgctcactggggcgcgggcacttgagagtaggcaacctgggggccccagaaggggat

SEQ ID NO: 8932 - DNA, 120 bp, Homo sapiens
ctccgacagcttcagccgggcgtcccctcagctgccttagctggcgtctgagagcgactcctccgtccagggctgacagttcccttgccccttaagagccaatcggagaatcataggatc

SEQ ID NO: 8933 - DNA, 120 bp, Homo sapiens
agccgggtctaagagctcatgagtcaccctgtgtgctttgctgatgaggaaaccgaggcccagagacgggggctgacttattcgagccacgtttgtgtctcctagccctgtgccctttct

SEQ ID NO: 8934 - DNA, 120 bp, Homo sapiens
gtgcgtgtgtgtgtgtgtgtgtgtgtgcgcgcgcgccaagagtggcttggctacattagggaaatgccagaaaaatggaaggtttctaataaaagctgctctccacgggcccagagtgtg

SEQ ID NO: 8935 - DNA, 120 bp, Homo sapiens
ggccgcctggcagctccagacttcactccacccacactccccacacacatacagacaatggcatttttttctatggcatctggaaggggcagaaatgcccagagacctggtttgatccca

SEQ ID NO: 8936 - DNA, 120 bp, Homo sapiens
aaacgcagcaccagttcacctctatcgaagtaaattcaagtgctgattgtcagaaatgatgacaacacctgagaaaaatatcacacctaaaatggtagcacaagacctaagacttcacaa

SEQ ID NO: 8937 - DNA, 120 bp, Homo sapiens
cttcgttaggcttcagacattcaaaaacaaaatcacatcagtagcattactaatcaactttttttttctacagacttgaaaagtattttcttaccacactacgagattacttcccatact

SEQ ID NO: 8938 - DNA, 120 bp, Homo sapiens
tcacgaatcagatcttgagaccacagctgcagaaagtaggtgctgtttcccttgagtaggagctgctgatctgaaacctcctaagggaagggtgtctgaagaagagtgttggagaaacta

SEQ ID NO: 8939 - DNA, 120 bp, Homo sapiens
aaccgtatatgttatatgatcagctgctctatgatgtgtgggtgtttaactaggtaagtgactggtttagaagaggttctgcaatactaaatcaaggaagcacactgtcctctgagattt

SEQ ID NO: 8940 - DNA, 120 bp, Homo sapiens
acggcagacaaagttgccctgtgtctcggcaccctagcacttgtatgaaactctcttgtgttatgctcaaatgtggtcgcttagttgtttgtatcctccataagatatcagttcctgagc

SEQ ID NO: 8941 - DNA, 120 bp, Homo sapiens
actcgggcctgtattctactgatctctacagcctcctgttcccagccccctcctggcttgctgtggtgtcagcctgtctgtgaaggactgttccactggtataaggtgttaggtacgact

SEQ ID NO: 8942 - DNA, 120 bp, Homo sapiens
agccgtgggcttatcagctcacttaccctcactacactgccatgaggtcacctattgttagccccgttttacagatgaggaaactgaaacacagcaaattacgtgttagtcccaggtcat

SEQ ID NO: 8943 - DNA, 120 bp, Homo sapiens
agtcgaacacagccaccctagatccagagccctagtattagcctctgggcatacagacaacactgtgacgcctcactcagccttctcactgtccccgcttcctctgacaagagtggctgc

SEQ ID NO: 8944 - DNA, 120 bp, Homo sapiens
tcacgaatgccccaccatgcttggaggaggccctctgctcatccactcatctcctggcctgaaactctttgaggggatctgaatcctggtattagtgagtcgaaaccatttctctgggag

SEQ ID NO: 8945 - DNA, 120 bp, Homo sapiens
tctcgaccccatgctatgcctaccaacccggcaggcacctggagggtgtccacacctacttcacctgatcagcttctggccactcagaacatctccttctctggggctttttctctattc

SEQ ID NO: 8946 - DNA, 120 bp, Homo sapiens
ttccgccttgcctccccacacttccttcctgttcttatttctctttacaagactgggtatttttaacctgaggtttccacttatctcttcttgtctgattgggactgggctgggcagggg

SEQ ID NO: 8947 - DNA, 120 bp, Homo sapiens
gtccgcatccgacactctaggcccagactttgccccgactctacccatctttgtggagctatggagctcccctcctctacttctggagtataaccttaaactggccttgggttgaagctt

SEQ ID NO: 8948 - DNA, 120 bp, Homo sapiens
acacgtccctggaacagccaccaggatcatccctcagtccactttcatgatccacattataaacatggatgcctttctgagggattatgggccttcagagctgctctttcatctgcctca

SEQ ID NO: 8949 - DNA, 120 bp, Homo sapiens
ctccgtcctcacctgtgggtctccaaccctcatgtgtcccacgcttctctgcactccaggtgcttaatagagaaacttttatttgaagtccgtacagctgcaaagtggagataattgggg

SEQ ID NO: 8950 - DNA, 120 bp, Homo sapiens
gctcgtcccgggctcagccccttctcccctccctcacaagtcggactcacgcacgcactctcctcgcccaaagtgcacatcatggagcagaggaggactgcagagatgcccagaaacgag

SEQ ID NO: 8951 - DNA, 120 bp, Homo sapiens
tgccgccccctccattctcacctgcttccactctgacctccacatgaattccccaaccacacatactgcgcatgagctcctctgccccgcccgctttccaagatccacgcttcctattgg

SEQ ID NO: 8952 - DNA, 120 bp, Homo sapiens
gagcgctgtgagttctgggaagggtggcttagaacctcaccctggttctgcggctcttagcagatgaactacaactcccaaaaggctatgcagcggcgggcccgcggagaaaagcgtttt

SEQ ID NO: 8953 - DNA, 120 bp, Homo sapiens
caacgcgaggatgttgccgcaaagccttttgggggctgtagttttctggggctaaatgcacgtgcctatcctgtacagaggctaagactgccgcaaggagagccttagggctccgggaaa

SEQ ID NO: 8954 - DNA, 120 bp, Homo sapiens
gggcgtccagctggtggcaaaaattagtaggggcaagttcatggctgatgaagaggacaggtggaactctggaggaagtcgtggtgaaatcaccggcaggctgagaccctttgggggaaa

SEQ ID NO: 8955 - DNA, 120 bp, Homo sapiens
aaacgaagggccgtcttccttccaaagccctgtctgcaaacgtcctcagagttgtgagacgttgattaccagacccagagagaaccatctgtgctgaaaaactgagaccaaccgagagga

SEQ ID NO: 8956 - DNA, 120 bp, Homo sapiens
tgacgcagttctctggtgcagccaccttctagagcttttggtgcacttctgaggctcccctccacctcttctgtttcgaggaccttggtgggctttgatggagacagaaccaagaaccca

SEQ ID NO: 8957 - DNA, 120 bp, Homo sapiens
cagcgccaaggtccaggcctttgtgaggtgctggtgcaggggtcgcacacccagctgccaatcaagtgaagggagggaggaaaatgaacatctaagacctcaagctggaagaagtctcag

SEQ ID NO: 8958 - DNA, 120 bp, Homo sapiens
gctcggccagctgctggagggacgctgcaggggaaggaggcagggtgattaagagctctggttgtcagggctggggccagggggcacgccccctgggtgacattttctcgcattgtgtcc

SEQ ID NO: 8959 - DNA, 120 bp, Homo sapiens
aaacgagtcttatttgaggagctggatgggggagggggccggggggctgaagcgaccgagtggaatcgtggctccagggaacagcgattactcatcaaaggccagggcagcccacgtctt

SEQ ID NO: 8960 - DNA, 120 bp, Homo sapiens
ctccgcagcccgcccgtgcctggccacaggcccccagccctagacatccccctgacggcccccaaagagcagggctggggtgggagagacctgggatcgtgtgtgggcacagagccggga

SEQ ID NO: 8961 - DNA, 120 bp, Homo sapiens
aggcgcggtgggggcaggggtgaccagggcaggcttcctggaggatgggagtgtggaaatgcacaggacagaggggaggcgcaagaaggagaacggctgcaggctaagggggaaaaaaag

SEQ ID NO: 8962 - DNA, 120 bp, Homo sapiens
ctccggagaccagggggtgagtgcagggggacggggagggggcagaacttctaaggtgtcaactcagcccccggatggagtgtcctggagtgcttgggggaaggggccgcttcctgctac

SEQ ID NO: 8963 - DNA, 120 bp, Homo sapiens
atccgctgcagcccccagagcccccagcagctgcgcagaacagctgtccggctgagggcgctgagcggctggaatggcacttcctgccccccactgatctctggctgcccaagggtgtgc

SEQ ID NO: 8964 - DNA, 120 bp, Homo sapiens
gtgcgttgcaggggaagggggaagaggatgtgaaagggctttgggctcaagtcagaaacctgggctaagatggtgtgctttcctcctcctgctctgtgtgaccgcggggctgagactggc

SEQ ID NO: 8965 - DNA, 120 bp, Homo sapiens
tgccgcctcccaacctcaaaggctgttcccagactggttccctgcaggcagaggagcatctctcccatcagatctggatttggttcttcctctagctgaactcccagccatccacttggt

SEQ ID NO: 8966 - DNA, 120 bp, Homo sapiens
acacggaagacaggtaagcttcccggcaggtgcctgttcaatctcctgattgtgctgaaggggcctcatgcatgccagctaaaaacccataggctggcatgtaatagagttggggggagc

SEQ ID NO: 8967 - DNA, 120 bp, Homo sapiens
ggccgagctaggtctctgatatgctcttgccttctgtgggcttccactccctcctctgctagaggaggggacaagtttggatggcaggagttggcctgggtgatccctggagcccggtcc

SEQ ID NO: 8968 - DNA, 120 bp, Homo sapiens
caacgcaggtctagcctctgctcgggaagatgaaggaaaggggcaggcgccctgctccctggctgcgctaaggggtcactggcggggtcttttctcacggtgaacctgtctggagggtgg

SEQ ID NO: 8969 - DNA, 120 bp, Homo sapiens
ggacggggcaggtgggagggcccgtgtcagggagcgtccaatgccctcgcgccatgcaaatggcacgcaaatgacccgcatgcggccctgcccaccgcagcttcccggggcgagggtctt

SEQ ID NO: 8970 - DNA, 120 bp, Homo sapiens
cttcgcagcggttctgaatagaaagggcgctggggacgggggaggccgtccagagagaagcagcactccccaccctgccagggccaggaccccacttttgtggaagggaggagcgagtcg

SEQ ID NO: 8971 - DNA, 120 bp, Homo sapiens
catcgctgggctcttgtctgagctaattggctgggccagcgactgattcatggcagggagccgggctctcggggacccccgtgtccctcccccgcgcctcccgcccaggaaaggctgcgt

SEQ ID NO: 8972 - DNA, 120 bp, Homo sapiens
atccgttccaagggaccgctgcccggcatccatcacggctgacagactggggatcggggtgggggaggggacgccgacacggagctgccatcggatgcgacggaccccaccgagcacccc

SEQ ID NO: 8973 - DNA, 120 bp, Homo sapiens
ccacggagcggcttccgcgggcagcctggggcctgggcggggtcctagggagtgacactggggacatccaggcaggtgtgagtggtgagaggtggcctccgagagtgtggggagatggga

SEQ ID NO: 8974 - DNA, 120 bp, Homo sapiens
ggccgctaatgtctccaccccacatctgggccgaggcagggcatgaaagcacacacccaccaggctggagggggagggcagctgtccaccctgactgtcagaaatagagcagactctggg

SEQ ID NO: 8975 - DNA, 120 bp, Homo sapiens
ctccgcagagggagccctggacttgcaacagcaggggatgaatggagaatgcagcccgcagcgaggcaccaccagcctctccgtggctccagccaaaagctcaggcgtcatctctactcc

SEQ ID NO: 8976 - DNA, 120 bp, Homo sapiens
cagcgacagtcagttgtcagtaaagactcctggctctgattctaaactaaacatagaatcaggctcttctctctgtgtccactgccgccagcagctctcagccagacactgcaacagcac

SEQ ID NO: 8977 - DNA, 120 bp, Homo sapiens
gcacgggtctgctctcccctcctggcttccacgctggcacctgcaatccattctctgcacgacagcaggaaggatcttttagatataaatcagacctcgtcactctgctactcaaaaccc

SEQ ID NO: 8978 - DNA, 120 bp, Homo sapiens
ccccgggcccacagcatccgggacggacgcgcagtagcgcgggccgggaactgggtaccagggcgggatgggtgagaggctctaagggacaaggcagggagaagcgcagcggggtgcggg

SEQ ID NO: 8979 - DNA, 120 bp, Homo sapiens
caccggccgcgccatggacgggccgcgcctgctgctgttgctgcttctgggggtgagtgttagccggagggggcccgctccctttcccgggatcagaactccgagaagagccgggcgccg

SEQ ID NO: 8980 - DNA, 120 bp, Homo sapiens
tgccgggaccacgaaggagggtctagggttcccggagcgcagaggcgactctccagggtggagatgagggcaagaccggagcacggatgccggtcctcaggtaccgcagggggcggtggg

SEQ ID NO: 8981 - DNA, 120 bp, Homo sapiens
ctccgatgcccaggttcttcggaagaggacactcgaatgccgggatcccgaagggactttcccctcagcatctcggtctctggagagtcgtgggacagaaccaaggcgagagaaggaggg

SEQ ID NO: 8982 - DNA, 120 bp, Homo sapiens
ggacggggactagagatgagaggggcgagctgggctggggcggggagcccgggacgacgggatggaacaatggaggaggtcggagggactggaggcagaggggacccggcaaggacaatg

SEQ ID NO: 8983 - DNA, 120 bp, Homo sapiens
gaccggccagacaatgggggggaggggcgtcggagggagaggttggggagcgggagagaggttgagaagtgggttagggagggcagaagaggggcgacggcgagggcggcagagagatgg

SEQ ID NO: 8984 - DNA, 120 bp, Homo sapiens
gagcggggcgcggaccctgaagtggtcggggtcccgcctgcccgctgagggacagtgagacgagaagagagagcagaggcttggacatttccagcgcctgtccccgcgctcctgctcgcg

SEQ ID NO: 8985 - DNA, 120 bp, Homo sapiens
tcccggaattggggctgcggatctaaggctgggaggggagtgcccacttcgccggggcgaacccgctcccggggttcccccacggccggcgggctcctccgacgcgcgtgttctcacggc

SEQ ID NO: 8986 - DNA, 120 bp, Homo sapiens
cagcgcagcggatcgcgagggacggagcgggtgtgcccctacccgggctggcggtggctacgtctcggggtgcagagcgccggggcgcactaggcggggacccttcctggccgcgcgcag

SEQ ID NO: 8987 - DNA, 120 bp, Homo sapiens
ctacgcaggcgggaggcggcaggcagggggcgctgcggggcgaggcaagtgcagtccgccgctgcctgcctgcgagtctggggctgcgcgccgctccccacctagctgcgcgacccgagc

SEQ ID NO: 8988 - DNA, 120 bp, Homo sapiens
gagcgccgcgcccaccgcgctccgtgggctcccgcgcctcgaagggtcgggatccggtctgagcctctcctggctctcggtgcaagccgctgggcacctaacgagacgggggcgcccgga

SEQ ID NO: 8989 - DNA, 120 bp, Homo sapiens
ggacgcctcggattctgtagcgcggtatcccgggccaccgactcggcaaaggtcggcgggtcctccgggtggtccgacgagattgtcagatgtggcctgctttatggccatgaaccgaat

SEQ ID NO: 8990 - DNA, 120 bp, Homo sapiens
caacggaggaggcgtcttcactctccccgccagcatctttcatcagagcactgcgccccaaattccggctttacagatacggagactgaggctctgagagtttaaacgacttggccaaga

SEQ ID NO: 8991 - DNA, 120 bp, Homo sapiens
agtcgtggctagactccccgacctgattcccagctcggtactcccccaccttttcagggggcagccgctgtcccagctcggggtcacggctgcgtttcccagcagggcggggggggttga

SEQ ID NO: 8992 - DNA, 120 bp, Homo sapiens
gtccgtcggcggtagagcctgcgggtgaggtgggcagagattctgtccgggtgcgggccccagcccgaaagctcagccccagttccctggagctgtcaggacctgtggctgcgtccgggg

SEQ ID NO: 8993 - DNA, 120 bp, Homo sapiens
gagcgaccgcgggcacgtctgctgactaacgccgctggttagagacgctgctcagacgcgggtgggcgagcgtagaccaggagagcggggaggagggaccggatcccagaggggcaacga

SEQ ID NO: 8994 - DNA, 120 bp, Homo sapiens
ctccgggtctgggcaagagcgagggtccccgcgcgaagacccaaggaaggaggggagctgggcgtggaggacctgggcgcttgggaaggtgtaccccgacaggaacctgccgtctgcagc

SEQ ID NO: 8995 - DNA, 120 bp, Homo sapiens
ctgcggctcccgcctccgcctcggcgcgcggctgctcggtctgggatggctgtgcgcggtccgagtttcttcctgggccgcggtgagagagagagggctgaaaccagagcgcgtcccggc

SEQ ID NO: 8996 - DNA, 120 bp, Homo sapiens
cggcgggtcggctggcgggccgcgccggtaatggaggcactttgtcattcagacgtctgtaaccagagccgccgggctggctaatgcgcctaatagggatggaacgagggcagcaaatgg

SEQ ID NO: 8997 - DNA, 120 bp, Homo sapiens
gggcgtgcgtgagcggccgggctgagctgggtggatggtggatggggaggcagctccgcgggggacgggcccctaccgcactgttccagcccagtctggctcaagcgcctcgcttcttcc

SEQ ID NO: 8998 - DNA, 120 bp, Homo sapiens
cagcgtaccatactttccccgcatttacttacgtttcaggtgtcaacatggtgactcacccaccctcagggcagaagggctacccgctgccccagtgaaattcggtttgaatagggataa

SEQ ID NO: 8999 - DNA, 120 bp, Homo sapiens
gcccggaaatggctgtcaggacctgccaagggcttagtaggttggaatgctagtggacgtggccacatctggatctcatccccccgcccccgtcagaggggattggagagatgagggcag

SEQ ID NO: 9000 - DNA, 120 bp, Homo sapiens
tgccgcctctggtctggccacgccttgctaccctcccagccttcccctaccatgctctgatctcggtgatggtctcattcattgggcacccggacatgtacactccttcaccctctggct

SEQ ID NO: 9001 - DNA, 120 bp, Homo sapiens
ggacggagacggggaagggtggtttgggtgacagatggcagcccctcactgctggcagccagatggattctagattcacatctgggggctttgcccctcagaaggtgctgaaaacgggcc

SEQ ID NO: 9002 - DNA, 120 bp, Homo sapiens
aggcgtgggaagtgaggagggacggggtaggcaacattgcccagacaagtatccccaggccgtccagagcccacaacccctagcactgcccctggctgtgtggcagaatggaaaatccca

SEQ ID NO: 9003 - DNA, 120 bp, Homo sapiens
ccccgccagctgaggcattgagctggacctgcctcatgggccccttctccactggctctctgcttcctgaccaaggagggttggggctacctgatgctgtcatctctggttggcaggatc

SEQ ID NO: 9004 - DNA, 120 bp, Homo sapiens
ccccgcacccctcctttccacccaagcctagagcctgagacatgaggtcaaaaagtcggggagtgctctcagggaggtggtgtgggggaagcacctctctgaccagacctgtgtaccctc

SEQ ID NO: 9005 - DNA, 120 bp, Homo sapiens
tggcgaagctgaaggagatgcagctctgtgggcccacaggccttgctctttagcatcatgacatcatgcacgcaatcccagctgtgcataacagctgggcacaagagcacctggagccag

SEQ ID NO: 9006 - DNA, 120 bp, Homo sapiens
gggcggggacacaggaagaacacggcagtgggttagagctaaaagggaggagtgggggaagtgggtcctcactcctgtggccttttctcccagagatccctggccgttggattacacggt

SEQ ID NO: 9007 - DNA, 120 bp, Homo sapiens
tgacggaggcctctacagcagcctgcccccagccaagcgggaggaggtggagaagcttctcaacggctctgcgggggacacctggcggcacctggcgggcgagctgggctaccagcccga

SEQ ID NO: 9008 - DNA, 120 bp, Homo sapiens
ccccgttcgcgccctgcttgcaagctgggccacccaggacagcgccacactggacgccctcctggccgccctgcgccgcatccagcgagccgacctcgtggagagtctgtgcagtgagtc

SEQ ID NO: 9009 - DNA, 120 bp, Homo sapiens
ccccggtgtgagcccaaccggggagcccccgccccgccccacattccgacaaccgatgctccagccaacccctgtggagcccgcacccccaccctttggggggggcccgcctggcagaac

SEQ ID NO: 9010 - DNA, 120 bp, Homo sapiens
gcccgtgtggccccttcacttctgaccacacttcctgtccagagagagaagtgcccctgctgcctccccaaccctgcccctgccccgtcaccatctcaggccacctgcccccttctccca

SEQ ID NO: 9011 - DNA, 120 bp, Homo sapiens
aatcgaggaaccagagccatggactctacactgtgaacttggggaacaagggtggcatcccagtggcctcaaccctccctcagcccctcttgccccccaccccagcctaagatgaagagg

SEQ ID NO: 9012 - DNA, 120 bp, Homo sapiens
gatcggaggcttgtcagagctgggaggggttttcgaagctcagcccacccccctcattttggatataggtcagtgaggcccagggagaggccatgattcgcccaaagccagacagcaacg

SEQ ID NO: 9013 - DNA, 120 bp, Homo sapiens
caccgccttctctaaatgaggggcctcaggtttgcctgagggcgaggggagggtggcaggtgaccttctgggaaatggcttgaagccaagtcagctttgccttccacgctgtctccagac

SEQ ID NO: 9014 - DNA, 120 bp, Homo sapiens
acccgtggagatgggatgcttgcctagggcctggtccatgatggagtcaggtttggggttcgtggaaagggtgctgcttccctctgcctgtccctctcaggcatgcctgtgtgacatcag

SEQ ID NO: 9015 - DNA, 120 bp, Homo sapiens
tcccgacatggacccggagctaacactggcccctagaatcagcctaggggtcagggaccaaggacccctcaccttgcaacacacagacacacgcacacacacacacaggaggagaaatct

SEQ ID NO: 9016 - DNA, 120 bp, Homo sapiens
gcccggggcagctgccagagaagcatcggagggaattgaggtctgctcggccgtcttcactcgcccccgggtttggcgggccaaggactgccgaccgaggctggagctggcgtctgtctt

SEQ ID NO: 9017 - DNA, 120 bp, Homo sapiens
acacgtggaggaatgctcccccatcctccccttccctgcaaacatggggttggctgggcccagaaggttgtgatgaagaaaagtgggccagtgtgggaatgcggcaagaaggaattgact

SEQ ID NO: 9018 - DNA, 120 bp, Homo sapiens
cttcgactgtgacctgtggggatttctcccagctctagacaaccctgcaaaggactgttttttcctgagcttggccagaagggggccatgaggcctcagtggactttccaccccctccct

SEQ ID NO: 9019 - DNA, 120 bp, Homo sapiens
gtgcgctgacaaccaccgctccccagcccagggttcccccagccctgtggaagggactaggagcactgtagtaaatggcaattctttgacctcaacctgtgatgaggggaggaaactcac

SEQ ID NO: 9020 - DNA, 120 bp, Homo sapiens
gggcggtgattggctgaaagccagggcgggacagaagaagctgccagaatcacatcacattaggttcatgcaaaagccacctcagcagctctgggtacccagcccccacttcctggggta

SEQ ID NO: 9021 - DNA, 120 bp, Homo sapiens
gcacgtgcccagagactgccacatgcctatcaggctggggcctgcctcacgcctctccagggaggttgccagaagccctggagctgggtaaaccccaacagtgactcaggtgaggggtgg

SEQ ID NO: 9022 - DNA, 120 bp, Homo sapiens
gggcgggaacatggcaggctggcagcaccagaaacaggctgggcgccctgtctgggagcacggtaatgtcccccttcgcaggaggagagtctgcttggcagactggcatagacactgcct

SEQ ID NO: 9023 - DNA, 120 bp, Homo sapiens
caccgtccagtccaggaggcgggatctgccctctcagcttgcagcaaggagcaagtagagggattcatagcctgattccctggactttgggtgcagagtctgggagaagaggccctgcac

SEQ ID NO: 9024 - DNA, 120 bp, Homo sapiens
atgcgagggggctgggagctaaccagagtcactaagcagctgaaccaagcaacacagctccctgttccctggggcctcctgagacggcggatgacatttgcccagcatttgaaagtttac

SEQ ID NO: 9025 - DNA, 120 bp, Homo sapiens
aagcgccgctgtgcgccagaaaccgggagcggaaagggtctgcgccccagcaggcgagtgagcagagcgcgcggcgggcgcggcggggcctcaccttctcccgggccaagcgcccacagg

SEQ ID NO: 9026 - DNA, 120 bp, Homo sapiens
aggcgccccgagtgcccaccaggtggcgcgctgacgccactcgcctcccacgcgccacacccgcttggtctcttcatcgccccctgcggagctggcgtggaccgcagcgacttgggtcca

SEQ ID NO: 9027 - DNA, 120 bp, Homo sapiens
agccgacaggtggccgagggggcagccactgacctggtgccaggtgtccctggctccctgccaggtgccctgcagtctagcggccctgctcaggccctgctttcttcccttgcttctcac

SEQ ID NO: 9028 - DNA, 120 bp, Homo sapiens
tagcgagaaggagccccgcacgaccccttcccgccagtgcttcactggggacagagcactttctaccggctacgtgccgtctcacactcgccacgtcctcaccccaggaggcgggcagga

SEQ ID NO: 9029 - DNA, 120 bp, Homo sapiens
taccgcccaagaaggggagagactgcccccagatcaccctggccacagagagcgaggcccccaatccaggctgccggactccagctgccacgccctccccactccaccagagcacaagca

SEQ ID NO: 9030 - DNA, 120 bp, Homo sapiens
gagcgctcacagccaggagaaggtcccttctggcgggtgaggtcctgtgagaggcagggggatagacatgttgacctctcaggccagaggagggtgcgctctgggatgtcagtggcaaca

SEQ ID NO: 9031 - DNA, 120 bp, Homo sapiens
cctcgccccctgctcctgtcctccccgtctttcctcatcccttcctatgcggcctccccaggctttgctctgctctctacaagctcccaatactcacctcagatgactctccgggctcac

SEQ ID NO: 9032 - DNA, 120 bp, Homo sapiens
tctcggacccaccctccacgcagctgccagaatggtctttccagagatcttcctaaagtgcaaatccgagccgtgtttaaacctcataatcaaaacagaaacaaagacaccttaaccaca

SEQ ID NO: 9033 - DNA, 120 bp, Homo sapiens
acccgtaaagccctgcatggtctggcccctgccacctctctggcggtgttgtgtccctctccccccactcactaagctcagctcccttcagctcctccaaagcaccaagttcttcctagg

SEQ ID NO: 9034 - DNA, 120 bp, Homo sapiens
tcacggtctcagcaggtgcagcccctctgtccagctcttcatcctttagatcccagctgaaaggtcacattcttgcagaggcattccctgacccctcccaggtaaattaggatccctcct

SEQ ID NO: 9035 - DNA, 120 bp, Homo sapiens
ccccgtacctcttgccaacacatctcagagcttatgttttcatgtgctcagttatttaatgtctgtctctcccatagcccaaattctccatgcaaataggactgcagtctcccctgtcca

SEQ ID NO: 9036 - DNA, 120 bp, Homo sapiens
gaccggacataaaagtagacacttggtaagtatttgtggaacaaatgaatctttcatctcgtcctcatcagaaccccattcccaggctttctttcatctctggcctttgcaagagttgct

SEQ ID NO: 9037 - DNA, 120 bp, Homo sapiens
acacgtcatttaagattaatctctctgcaatctgtccatcgccccctcatttgaattagggtttccctccaggcccccttggaaccctatacatagcactctatcctaacactttaaaat

SEQ ID NO: 9038 - DNA, 120 bp, Homo sapiens
tgtcgcgttgttttccttccggcagcactggggaagcatggaggaaggaagcagtgtagataggattcttccaagggtgagagggaagcaggtgaaagcatcagaggtgctcagcaaaag

SEQ ID NO: 9039 - DNA, 120 bp, Homo sapiens
ccacgctgggagtagctggagggcccaaggttgggtacagttgttgtcaaacctcagccaaacctagtggtcacttttctgtctctcccttgccaggtcactctgctgtggctcattccc

SEQ ID NO: 9040 - DNA, 120 bp, Homo sapiens
cctcggttcctgtctaccaactaaggctccctggggatgggaccccagaatctgcatgatgcacactccgcactgtgtccactctgcttggcaccttgagcgtgagaaccccacttctcc

SEQ ID NO: 9041 - DNA, 120 bp, Homo sapiens
cttcgggatcagccccacctgtcctcctagcccctggctccctgttcctccctggaatcctctgggggttcttttcctctgaccaccttaccttaaatgccagggtgcccagtgctcctc

SEQ ID NO: 9042 - DNA, 120 bp, Homo sapiens
ggccgacagcacccagacttgacatggcgaaagctgaccctcccaccctcaccacagaccccatccctctcctcccatctatggtacccacctcatcaactagccagcctgttgctcaag

SEQ ID NO: 9043 - DNA, 120 bp, Homo sapiens
tcccgctctgtgctccctgaacagcaaactgcttccagttccagcctccagacctttagtcattcagtgccctctgccaggaatagcccttgccagacaggctcttcctcacaactgcag

SEQ ID NO: 9044 - DNA, 120 bp, Homo sapiens
actcggttgcattccctctgttccttggcccagcatctcacttgtgcaagcaccagcccttccagtgcactgagtggtttcatctgtgtaccaccctctggacctctacctgtaaacaaa

SEQ ID NO: 9045 - DNA, 120 bp, Homo sapiens
aaacgaggctcagagaatgcaggcaactaaaggatttttatttagggacccagagagctgtccaacaggcacactctccaggcaaggggaccctcctgccttaccttgccctgagtcctg

SEQ ID NO: 9046 - DNA, 120 bp, Homo sapiens
taccgataacccagtgccctccctctctcctcacccagcctcatcaccttcgcctggcagatcagtttctctaggcttggatggccccatgatcccttgctggtaccccctgtgaatgcg

SEQ ID NO: 9047 - DNA, 120 bp, Homo sapiens
cctcgggtacacacagggcctggctagtaaatctggttgactcacagatgaactcaatacagtttctattgtgggaatctttcacagggacagggagaaagagaagggaaaagacagagg

SEQ ID NO: 9048 - DNA, 120 bp, Homo sapiens
ccacgctggcttgggtaaatagagggtagacggggcatgagtgtggaaaggtatataatgcccccatttcccagtcttggcagctcccaggcctgggagaggagggggcctgctgccact

SEQ ID NO: 9049 - DNA, 120 bp, Homo sapiens
ctacgaaaataggggagaaataaatggaagcttctatgttccagaagagaagaatgggggcaaaaaaagaaaaaagaagagaagctaaataagatagtgtagggaagatgggctcgattt

SEQ ID NO: 9050 - DNA, 120 bp, Homo sapiens
tgacggagcggagggtcttagtaagaagtgtgttacttgaaggttcacacaatttcctgttaggtcttatggtcttaagagaagtatacggtgattgttacccttccctgggcggtgaag

SEQ ID NO: 9051 - DNA, 120 bp, Homo sapiens
acccgagtttgtgcttccttgggtgaatggcattcagctccacttagtgtagtgcagcggactagagatagaaaatagggagctgacatgaccctcgcactagtttgctgcacaatgtta

SEQ ID NO: 9052 - DNA, 120 bp, Homo sapiens
acacgcctgattttgtctgaaagtgaactcaatgtagggcacattataaacaagaccacccattcatcattttcagagtccacaatctaatttcatttaaacattcaacaacaggaatac

SEQ ID NO: 9053 - DNA, 120 bp, Homo sapiens
tctcggtcttccaccataggagtccctcttgtggcctctgggagcaccagaatccctatgaaacaactgtatttattgtatcaggatgagaatgagaagtgcctcagtcaaaggctgagt

SEQ ID NO: 9054 - DNA, 120 bp, Homo sapiens
tgacgaatggggcactggggtactagaacctagatttctatctggacatcaacttcataaaagcctctaaacaatatgaaaatactaatcaaaccaataacaaacaaaatgtaaatatga

SEQ ID NO: 9055 - DNA, 120 bp, Homo sapiens
ccacgcaaccgtcttgcaacgctgaatgctactaagtccacagagagccttggaacagaaacaagtctcactaggcataagcccaagtatgagaagcaacactcagcacctgtggccaac

SEQ ID NO: 9056 - DNA, 120 bp, Homo sapiens
gttcgatggtaagaaaccgatggcatcagcagaacccagcagacgttaccctgttcaacatctcctcgtttctaaagtgtcatctcacttcccatctaagtcaaggcacatctaaactta

SEQ ID NO: 9057 - DNA, 120 bp, Homo sapiens
gagcgagcgagctggaacttggcctcggatttaaccacaggataagagactgccaagtgagggcaggccaactggcttccaaatcaagactgtgaagacaggggttggagcagctggaat

SEQ ID NO: 9058 - DNA, 120 bp, Homo sapiens
tgacgtttcccatctccaacctgttgttgtttttttttccttccattatctcactgaccaacagttgctttcaactgctagcaagcctctggcatatttatatttttcacttcttaaagg

SEQ ID NO: 9059 - DNA, 120 bp, Homo sapiens
acacgcacatagcattggacacgagagcaacccaatgaacctgtagattgggaggtgacacagtgtgggccctgctttgggaacagcttccaggagccctgctgtctcccaggcctatgt

SEQ ID NO: 9060 - DNA, 120 bp, Homo sapiens
acacgcgtcctggtgccaggtggctggtgagtctgttcagccaggaaggctgggagcccatgagcaaaaccccaggggtttgaaaaaaaaaaaaagcccctgacagtgccaggctgtctt

SEQ ID NO: 9061 - DNA, 120 bp, Homo sapiens
tcacggacaaaacactccagactcctagagtttacacaaccgatttttcagccagaatgatcaagaaatgtagatcctaaattctacaatgatgtggtgactgtacctgccccactgcaa

SEQ ID NO: 9062 - DNA, 120 bp, Homo sapiens
attcggaatgccccagaaataatccagtaaccagtaacaagtaactggttcctggtgtcactgaggttgctcaattacctattctcttgacttcagagttcacacaaaagcagggaaaaa

SEQ ID NO: 9063 - DNA, 120 bp, Homo sapiens
aatcgggaacagggtgcaggaaaaggaaactggatgcatggacaacctactgtagctccctcacatttggagctaatcgtaacagcttcgccagactctacccaggacctggaaggggac

SEQ ID NO: 9064 - DNA, 120 bp, Homo sapiens
gcccgaatccccagtgatctggaagggtatgagaggtcttatccccatctgtagcctggtgcaatgaagctcctattatactgtggggaccatacctcccacctgagatgtgatcctatc

SEQ ID NO: 9065 - DNA, 120 bp, Homo sapiens
aaacgattgtagatgtccttggaagcactgtgtggaagaattttaaacagcttctcctttttaatatgcacttcctcttcggttttaattattttgttcctacattttccctttcaattt

SEQ ID NO: 9066 - DNA, 120 bp, Homo sapiens
tgccgggagtgcgaggtgggtgggatcgagcagggtggaagtagcaggaattgaagcagggaaaatcgactccggtgggatcctgaagggctttttgtgctgcgctaagaaggtaactgt

SEQ ID NO: 9067 - DNA, 120 bp, Homo sapiens
ccccgggccatcagggaaattaaaaaatttttggccctgaacaaaaaagcacctggaaggcttgtgcacagaactgcaagtcgtgatgtatctgagagtgccttccttttcctaggaaga

SEQ ID NO: 9068 - DNA, 120 bp, Homo sapiens
ttgcgttgtttgcttgaaattcaactgcagccaagcatcctgtattcttatttgttaaatctgacaattctaggtagtgtgtagtggggtcaggagaaaactggaaatgaaattggacag

SEQ ID NO: 9069 - DNA, 120 bp, Homo sapiens
tctcgtattttgcagtggctcttagttgtgtggttctatttgggaaatcacttttaattgagtcccgtgattatggtgatcctgtgtatggactccttcgtgaatatgaagagaactgtg

SEQ ID NO: 9070 - DNA, 120 bp, Homo sapiens
tttcggggagtccccagccttcatgtaagagtaacacattccctctagggctgtggtctgactgtggcagttcttgggttctgagtaggaggaaatggcgtcttgtcggtaaccccagct

SEQ ID NO: 9071 - DNA, 120 bp, Homo sapiens
tcacgggggagtcaggcatattcagaccaaaaacccacctgtcctcgcaggctcatactgccacagagtggaaggcactgaatgaagtcacgcttcatcccaagtccctcttcgctcccc

SEQ ID NO: 9072 - DNA, 120 bp, Homo sapiens
tcccgcccttcctgccaatgccaggcatagcccactggctcccactctgaggaccatgtctgtcagaaactggctctcaccagctggtggcaaccctccagaatatattctggacattct

SEQ ID NO: 9073 - DNA, 120 bp, Homo sapiens
acacgctgggggcagatctcagcaggcatgcctggagtctcattacagccctttctggaaagctctctaagcctccatagcctgctgtcctccaggccttatagagggaaggtagaagca

SEQ ID NO: 9074 - DNA, 120 bp, Homo sapiens
ggccgggggatgtggcttccagaatctcttaaagtatccaaattacagaaaatctcatttcaggttgcttctgtctctgtcagacaagcatgtttatgtgacattcagctctgctggact

SEQ ID NO: 9075 - DNA, 120 bp, Homo sapiens
cttcgttgttatccctgcatttctgagatgcaataatgtgttttcctgtctccctattagactgtgaagtccctagagtgtaagttctagtcctacttaactttgaactcccagcatgtt

SEQ ID NO: 9076 - DNA, 120 bp, Homo sapiens
aagcgtttttgagacaaccggttgaaaatggtagaaggaagaggtagagggaattggtctggtagctgggaagatgtctcttaaaacaggcccagatgacaactgcttgcacttgcaggt

SEQ ID NO: 9077 - DNA, 120 bp, Homo sapiens
ccccggccctagtaacatgctctaaccacctaaccaatccacaggagaagacagtttcgaagacccataaatctagtagggaagaagctaattgatgcaactttcagggtgaaaaaaaag

SEQ ID NO: 9078 - DNA, 120 bp, Homo sapiens
cagcgacacctgggtccccagagagtgagatgagcacaagtgaggcagggcttgaaaggctgggcggggggtggcaaggcagccgttcaggaaggaggccgggctcccatctggagagcc

SEQ ID NO: 9079 - DNA, 120 bp, Homo sapiens
ttgcgatttccaactctaaaggcagcagtgggcaggtggctctgctccatactccgccttttccctctgctgccactcagacaactcgacagtggctgtgccaggactcagccaccatga

SEQ ID NO: 9080 - DNA, 120 bp, Homo sapiens
ttccgccagcatccctttcaacaggcagaagctggcatggtgacaccttggcacagcaaaggatggcagaggactgcaatgcttcagcagctggaggaggcaggggaataggagggatta

SEQ ID NO: 9081 - DNA, 120 bp, Homo sapiens
acccgtcctctaatgggaccagctctaacgggacaagcctcacccatcggaacagaagccattagcacaattctgcgatctcacagagttcctccctataatcctcaggttcttggagga

SEQ ID NO: 9082 - DNA, 120 bp, Homo sapiens
aatcgcccactcaaccatgctaaccacacccgtgagaggagcagcctgggtaatgaacatccagctctgcctcttccctccctcttttatttaccatagactgctccagggcatgaagaa

SEQ ID NO: 9083 - DNA, 120 bp, Homo sapiens
cggacaaaacagccttggtgggtagaggggtggagggagtagaaagaaaggtagggggcaaaactgcccaggtctcccccccgctacacacacacacacacacacacacacacacacaca

SEQ ID NO: 9084 - DNA, 120 bp, Homo sapiens
acacgctcgtacacaaacgatggttggaatgagacagccatattaagcaggtcaagaatctgggaacgtacaacttctgggacacagggagaagaatgcagggagctgggcatttgcacc

SEQ ID NO: 9085 - DNA, 120 bp, Homo sapiens
ccacggtaaaagccgttaaacttagtccagcgggctgagatgaaatcagttccaggaggtggcataaagggaagcgcacgtgaagtggtggagaatggaactccagcgcagttgagaggg

SEQ ID NO: 9086 - DNA, 120 bp, Homo sapiens
acacggctgcacggggctctactccatgcccctccccctccccgtgcaatagtccagcgcccaccgactcctgctcccagcgccagccatccgcacggggcgcccccaccacgcgccact

SEQ ID NO: 9087 - DNA, 120 bp, Homo sapiens
tcacgcctcgctcccaccccctgcatcttccactcaccccacacgacacctctgcccacttttcggttacgcccccaaagccagcctccatctgccaggtccctcccctcacctccggga

SEQ ID NO: 9088 - DNA, 120 bp, Homo sapiens
acccgactccccgcacactccgtcccagcggtgctccccacgtttcacggctcctcgctcttgctccctccgccctcatagactctgaacgccccctttctcttccctcgcccccatcca

SEQ ID NO: 9089 - DNA, 120 bp, Homo sapiens
ccccgtccccctcccgcggtcacgcgccccccctcccccaatggctccttccacggcacccgctccaggcccggctcacctgcacggccacccccgtcccggcgctggtgcggctgctgc

SEQ ID NO: 9090 - DNA, 120 bp, Homo sapiens
tcacgtgacgtcaggctgagctggagagtgggcgcggcgctgggtgtaggttggagtcaaacactagtgaaataatttttgggggcgggagtagggagcagtgtcaaactttacacagtt

SEQ ID NO: 9091 - DNA, 120 bp, Homo sapiens
aagcgataccttcaaaaagtattacatttaatttaacctaaaaaacattagttttaaatccttataggatctcagtgctacttacaagctccaaactaagatcctacaaattaatgcaag

SEQ ID NO: 9092 - DNA, 120 bp, Homo sapiens
tggcgaccttgcctcgtgtgacacttacatctgtctttctccacgtttccaagtccctacttggtgttgatccaaccttaaaaaaacaattgctagcctgtaaattaaattgggactctg

SEQ ID NO: 9093 - DNA, 120 bp, Homo sapiens
ctccgaaaagtgctgggactacaggcgtgagctaccgcgcccagcctctcctcaccactttcatccatgccatgtacacattctgtttacaatctcaccctttttcagtagtatgtgatc

SEQ ID NO: 9094 - DNA, 120 bp, Homo sapiens
tagcgattttcaaaatgtggttatttgactgtttagctttggtggttatttatatccccagctgcagaggcagggagctgtgcctgagcctgctgggatctgtccaataacttctcccag

SEQ ID NO: 9095 - DNA, 120 bp, Homo sapiens
catcgccccaagcgccgtcgcttccatgaaagctacaacttcaatatgaagtgtcctacaccaggctgtaactctctaggtcagtgtgccctagcttcatgacatcctttgttctgtggt

SEQ ID NO: 9096 - DNA, 120 bp, Homo sapiens
acacgatctgctactaatagtaaatgcacttgggatttgctttccctagcagtaaactgttgagggatgtggtttgtggctatggaatgtttttccctgtgatacaggctgtctgtaaag

SEQ ID NO: 9097 - DNA, 120 bp, Homo sapiens
aatcggacctcagctggttttgcctcagcactttctttcacaaaattatgtgtgactgcctcctccagactgtttcctgctgataggggcagtttaatagccttcttcctgtgtggtatc

SEQ ID NO: 9098 - DNA, 120 bp, Homo sapiens
cagcgatgagaaatgtccctggtgccaaaacatcagtttgcccctaacctcttgtgcaatacctttaagtccaggtcatgttgttaccatttgggggtttgcggatttgtttacttgtgc

SEQ ID NO: 9099 - DNA, 120 bp, Homo sapiens
cctcgacaagtcatgttcattccaagaaaccagtctttgttcttaattggacatttgtttctgcaaacagcttaccatacattcaattccaaagttatcagaaacctacactcttatctc

SEQ ID NO: 9100 - DNA, 120 bp, Homo sapiens
gcacgtgctatttccaataaggtctatttttttctacagtgagggctgaacttgtgacttgttttgactaataggatatggaagtgatattttggcagcttccacttttgctcttgaaaa

SEQ ID NO: 9101 - DNA, 120 bp, Homo sapiens
acacgtttccaaacgagaagcttgggctaaattactgaatggtgagagacgatgcataggagaaccaaggtgctctagtcacagcactaaaagcccagacttgtgtctcttgaaggtttc

SEQ ID NO: 9102 - DNA, 120 bp, Homo sapiens
ccccgccagactcccagctgaacgcaccctcatgagtggcccttgctggtaccacatgacactaaagacatctagctgagtcctgttaacccagagaattatgagaatactgttttaacc

SEQ ID NO: 9103 - DNA, 120 bp, Homo sapiens
acacgttttggaatggtttgatacatggcaatggagaagtgaaacaaggggacttcggaaactaaagggctggaattcagtttgccttgtaggttgattggaagccagatgtgcctagag

SEQ ID NO: 9104 - DNA, 120 bp, Homo sapiens
cttcgctgtcagtcaaattgcttctgagataactggctggccttggaattcttagccacctccttaagcggatcaggaaaactgaagaatatccttctgtatgtatgtatgtatttattg

SEQ ID NO: 9105 - DNA, 120 bp, Homo sapiens
agtcgagcaggtgttctttcaggggtgctagggaggcgaggggtccagaagtctgcagctccggtggaagaggttaggcactagggaaggcagactggagctcagtgtctgtgacctgcc

SEQ ID NO: 9106 - DNA, 120 bp, Homo sapiens
tgccggggcgcccactgcccgctcacttgagctgtgacctttccccaacctgattgatttatctactttcatgcctggtcccctgaaaccatttggggacgtggcctctgctagaaagtg

SEQ ID NO: 9107 - DNA, 120 bp, Homo sapiens
taacgatcaacgattagagctttgcaaacagtgagggaatgggggatgttccaaggtctggaaaactaggcatcagtccctgtggtttcagctggccctgaggggcaggggtgggggcag

SEQ ID NO: 9108 - DNA, 120 bp, Homo sapiens
tagcgatttcaatcttgggaccacctccttgcactcgactgcctcccctgggggcctccccatgatggcttgtggggagcctgtctgtctagctgcccagcccccatcttgcagactggc

SEQ ID NO: 9109 - DNA, 120 bp, Homo sapiens
cagcggctcttgcctaccttctgtgaacaggcttctcttgcccaggaggccctggaacgtgtgttccagctgatatgctggtggtgggagagagaagtggtagaggagagaggcagcaga

SEQ ID NO: 9110 - DNA, 120 bp, Homo sapiens
gggcgagggccggggccagggctggggccttgcaaatgggatcatttctctgtcatcccgagaggcgaggaaacaccgtggactgattaatttattcactagttcattcgttgattccct

SEQ ID NO: 9111 - DNA, 120 bp, Homo sapiens
aaacgcctggtggtgcttctaacaggcagaaactgctgggaactggagatacagaggcgacagcagacctgatgcctgcctgttggggggcttccagtctggggacaccagccagctatg

SEQ ID NO: 9112 - DNA, 120 bp, Homo sapiens
ggtcgcactaggccatggagacaagctctgtctgtgtacggcaggcagtcagggaaggagagctggttaggatggggctaggagtcaggtcagtgaggcaggcctgaaggatgcggtgag

SEQ ID NO: 9113 - DNA, 120 bp, Homo sapiens
agtcgcattaggggactagacttggtcctgagagcgctgagggagtggagggtacaggttggttacttttctttctttctttttttttgaatggagtctcgctcttgtcgcccagcctgg

SEQ ID NO: 9114 - DNA, 120 bp, Homo sapiens
tcccgtggctccatttctaagcgcctccgaggacctcatcgtggcccaggaccgcaagccaaggccaccccagtgtccttaccatcctgggaatgggaggagtcaggcccagccttgtcc

SEQ ID NO: 9115 - DNA, 120 bp, Homo sapiens
cttcgcctttctctgggggagagaatccaaatctcagttcccagcctgcccggctcgctccgtcgaccccacgtccactcgccctgcctcgccgggcgaacgcagtgctagcgcgccacc

SEQ ID NO: 9116 - DNA, 120 bp, Homo sapiens
cctcgtggttccttcgagctctgcagctccccgagcccggcgcccggccaagcctcggggaggggtttcctccgaagaccctgcctggcagagcagtgtacagggggctgtatgcccctt

SEQ ID NO: 9117 - DNA, 120 bp, Homo sapiens
actcgcgcagcaggcttccggcagtccaaagggctttgagagctgcagttggcagaaacagagggcacggtccgcggactgaggggcaggggtgagtgcccgcttggtctgggccactcc

SEQ ID NO: 9118 - DNA, 120 bp, Homo sapiens
tcccggaggccgccgcgtgggaaaggtgggggcgggggcgggcgaggggagcgctatctgtctgtctatctccgcgtccccccagcgcccagcgcccgccgctccgagcccgtggcgggg

SEQ ID NO: 9119 - DNA, 120 bp, Homo sapiens
gggcgagttgccacccgctccgggtgccctctgttctgctgccaagagggcgccaagagagcctgcggcgttgggggcaggaagggcactgggcgggccggctccctcccaggatgggag

SEQ ID NO: 9120 - DNA, 120 bp, Homo sapiens
gagcgggggaggcgttcagggcctgctttggagctccccctgccccgccccgcagactgtgccctctgttttcgctaactgcagctgcctcagagaacagacagcgtggggcgagccctt

SEQ ID NO: 9121 - DNA, 120 bp, Homo sapiens
aaccgagatcaagaagtggcaggcgactcagagctgggagtctacctccctccctcctcaggccctcacagaagcctcactcttctttcctcactcctaccccaagccttggctcctgag

SEQ ID NO: 9122 - DNA, 120 bp, Homo sapiens
tctcgaaatggttcatagttcatagaaactgcaacagtaggaacttaaataagcaattaaaccattgtttgctattgtgaggttgacacatgttcccctacccccattgcatgacatgct

SEQ ID NO: 9123 - DNA, 120 bp, Homo sapiens
tcccgtggacccctggctgaggctcagacatgctgggcagagtcaggacagcgggaagcatggggcaggcactgggctgcagggtaggggaaggccccaagggtctcgtcaggccggcag

SEQ ID NO: 9124 - DNA, 120 bp, Homo sapiens
gaccggagccaccaactgctgggcgggcacctgttagcttaggatggcgaggtagccggaggatgcagtgggaccacagccacccaccccaccttgcccgggccaacaagacgagcaggt

SEQ ID NO: 9125 - DNA, 120 bp, Homo sapiens
ggccgagtcctgcctctggtggaggggtgacgtggggcggcctgtgtcaggggcctctgggagtctggtaggagggagaaagggcagtgccagccaatgccaaggtcacagtccattgcc

SEQ ID NO: 9126 - DNA, 120 bp, Homo sapiens
gaccgagcactggtgggctgaccctgctttctccattgccttggggagtggcgccatctagtggtgattgtaagaaagagcctgcttagctccactgggaagacccggaagtgggtcacc

SEQ ID NO: 9127 - DNA, 120 bp, Homo sapiens
tgccgggcagtgttgacgccatgctggctgcacctccatgcagcatattacttgagtatctcctttgtttcagactccaatctgaactcagtccgaggcaaacaggacaagacccctggg

SEQ ID NO: 9128 - DNA, 120 bp, Homo sapiens
gcccggcagagctgctcttgggcttcaagaccctcctggttcctcccccatgcagggccatccctggggtctcaacctagctttctctgtttccttggagggagcatcgggaatgaaagg

SEQ ID NO: 9129 - DNA, 120 bp, Homo sapiens
aggcggcaggcagccaggggcacagggtggggcggaggaagggccccaggtccggttcatttcctggcaccgttgtttgctgcatgcccctggcttctggtggctgtttccaccacgccc

SEQ ID NO: 9130 - DNA, 120 bp, Homo sapiens
cctcggcctccgtcatctctccgctggggccattctcggagcccagcagatctgggggagaattctgctcctcgcactgcgcatgaccttgggcatgtcactttgccagtctgggccttt

SEQ ID NO: 9131 - DNA, 120 bp, Homo sapiens
aaacgactatccctttttctctgcctgcctctcccaatttcccccactcttccaggatgcccacttccccctgcctccccatccctgtgttggagtctcagtctgagccctaggtagagc

SEQ ID NO: 9132 - DNA, 120 bp, Homo sapiens
ccacggggacatcgtaagtgttttaatggaccagaggaggttcaatttgaccacatcattgatctccatccaagcagaacactgtagtagcagccattggcagggtggagaaagagggtc

SEQ ID NO: 9133 - DNA, 120 bp, Homo sapiens
cagcggggatgagcccctggagcagagcactcgggtgccccaagtgctggtgcctgaggaacttccaatcaggaacttggattcagcaactgaattcacggggccagaacttgggagggt

SEQ ID NO: 9134 - DNA, 120 bp, Homo sapiens
cctcggcagatgcagttattagtggtcatggttcatctgtggtcatagaaatggagtttctactcagctggggagaggttctaggcagagtcactgggcaaggtgagaattcctggttct

SEQ ID NO: 9135 - DNA, 120 bp, Homo sapiens
ggacggggagggaaagtcccaggtttggcctcagcatgtgtgactttgaagcttcatcctgggcaagccacatggcatctctgagcctcagcttcctcatgtgtaaaagggggacccatt

SEQ ID NO: 9136 - DNA, 120 bp, Homo sapiens
tgccgggcagcaacacctccagcccacagaggatgtaattgtggtgtggcttcttgggcaaggtagtaataaatcatgataataacaaaagcaaacacctccaaaggctggctgtgtccc

SEQ ID NO: 9137 - DNA, 120 bp, Homo sapiens
ctacgcgtattaactcatttcatcttcgcaaccttatgaggtagtctttgctatcatcccattttctagatgagaaactgaggttcagagaggtgaagaaccttatctgagatcacccag

SEQ ID NO: 9138 - DNA, 120 bp, Homo sapiens
attcgaacccagctgttggatttggagactggattcttgaagggaaaggagggagcctgcactctgggcagtgatgtggagtcagagatttccaagttcatggtgcaagtctgtgggaga

SEQ ID NO: 9139 - DNA, 120 bp, Homo sapiens
agccggtgttgttagagacggaaagggacaaccccggctcctctccaggcgtggagtctgtggggatgtgcttccagaaaatgcagggttaagcaggagctgcagagtagaatcaaatga

SEQ ID NO: 9140 - DNA, 120 bp, Homo sapiens
aggcgatatggccggcaccttcgcacaaacctcccttgcccgtcagcaaggtgtgtggaccccatacagggggtgtggcttgggtgcccaggacctgctaaagccacacgagctctccaa

SEQ ID NO: 9141 - DNA, 120 bp, Homo sapiens
acccgtcagccgctccttgcatgaccgagcaggaccgaccacttactgcgcatgtactcgaggcatcatcttttctgtacacccaggcccatgaggtgcttactcccatgaaccccattt

SEQ ID NO: 9142 - DNA, 120 bp, Homo sapiens
acccgagggactcggtggcctctttagggcacaatcagcagcggaacccaaacctgcctggctcagaggctccggaggcgggacaccgccacctctcccccaagtgcagcgagcaccctc

SEQ ID NO: 9143 - DNA, 120 bp, Homo sapiens
atacgagtgcacagggcacaccctcgcacacacccacaggcatgcacatgccacatgcacacaattacacacactcccccgctggctcagcaccccctctgctcccacacagggctgcag

SEQ ID NO: 9144 - DNA, 120 bp, Homo sapiens
tcccgcccccaccgcccattatcagccccacactctcagcaagcctcctggcttctgcctgcatccacccctcctccttctcattcctggggctctggactggctctggagccctggaaa

SEQ ID NO: 9145 - DNA, 120 bp, Homo sapiens
ctccggatctcaccaagggactcctgggggccttgattactgcagaggtcagcaggcccagagaccccagcctccctgcaggtcctggggaggggtgggggcaatgcctctcccgcctgt

SEQ ID NO: 9146 - DNA, 120 bp, Homo sapiens
cagcgccactcgtccccaatctcccttcttaggatcaagaaccggcccaaggttgacatttggtgcaccaggcccctgaggggcttcagggcaaggccagggacctcggggaaaatcctc

SEQ ID NO: 9147 - DNA, 120 bp, Homo sapiens
aggcgctgcccgctgtcactccatgccggtgccctttgctccacttcagtggccacgtgaccaggccccattcctgccctctagggttgttgagcagccacaaaaggggtggtgccagca

SEQ ID NO: 9148 - DNA, 120 bp, Homo sapiens
acccgcttcatccccacctgcctcctgggaaggggcctcaggccccactctgcagtgggtctcctccccctcctctccccacctgcccctagcactgcctgtgtgcgggccctctctccc

SEQ ID NO: 9149 - DNA, 120 bp, Homo sapiens
gtgcgtttagggagcaagggattcggagccacataggcctggatgagagaatctcagctctgtgtgttaacttcctcatctgtaaaatgggtccagcagtagcgcccacctctggggttc

SEQ ID NO: 9150 - DNA, 120 bp, Homo sapiens
tctcgtggaccttacatttttggtgctagggagattgcggaatggagccttcagccaattaacaagtaaataaacaagaccatctcagatcatgacaagtgatgggaaggaaataaaatg

SEQ ID NO: 9151 - DNA, 120 bp, Homo sapiens
tctcgccagccccttgctggacaggtcagggctggctccccacccctgattcagttctagcctggaggaagggaacaagggtgtggaaagcagggcccaagaattgaatgcatcacttcc

SEQ ID NO: 9152 - DNA, 120 bp, Homo sapiens
tctcgctgggcagccatgtactcagaactttgtgggagggggtgcctcctttgggtaaggtggttgagcagtgacctcctgacggtttcctgacccttggtcttgacttgccctgtagca

SEQ ID NO: 9153 - DNA, 120 bp, Homo sapiens
agccgattcacatggtctacgtcccctcccacctctaccacatgctctttgagctcttcaaggtgaggaggctgggagccggtgctttgcggggagcgtgagtagggctggcttctccca

SEQ ID NO: 9154 - DNA, 120 bp, Homo sapiens
ctgcgaggggaaggaagggtctggttgaaatgggagggtggacaccgagaggagattgcagttgtccagggggcaacctgctggtgtttccagcccctggggctgagctgggggagggag

SEQ ID NO: 9155 - DNA, 120 bp, Homo sapiens
gcccgagggcataaagctggtgaggagccggtcagggttacagacagacggtctagctctgttggtaagcattaagcatgctacaccctctctgaagcagagatgggaaggaattttgag

SEQ ID NO: 9156 - DNA, 120 bp, Homo sapiens
ggacgcagctacctcagcagtgaggaaaacaggcaggggttggtgtggggagtagagggtagggaggttggggagtaggggcagaaaagcccagggaagggagagctcgtttccgtcagg

SEQ ID NO: 9157 - DNA, 120 bp, Homo sapiens
gtccgaggcctccgggaagtggcctgttgaaccaggacaatcttgtgactatgagtgaggacagaattaacagcctttagggtctgagggtatcctaggggatttataggagtttggggg

SEQ ID NO: 9158 - DNA, 120 bp, Homo sapiens
caccgtctttgccaagtctactaggatggctcctgagccgctccctgccctttgtcccttccaaagaaccaatgggcagaagagcgtgccaagggtggcacaggcaggtaagactgttgc

SEQ ID NO: 9159 - DNA, 120 bp, Homo sapiens
gggcgtgtggccaggatgggggtagccaggatgggggtagccaggatgggactcagccctaagcctttggtcttctccctctcagccagtctcatctgtactcatagcttcaaggaccaa

SEQ ID NO: 9160 - DNA, 120 bp, Homo sapiens
acccgctctgccatcttcctgtccacgccacagtggcctttctccatccacttgtgaccccctccctacatcacagcctggtgtggtctttctagacctttcctgtgcttcgaaatggct

SEQ ID NO: 9161 - DNA, 120 bp, Homo sapiens
ccacgtggtctgcaaggcctcatttgcatgctcttcttgccctccctatgcaaatgcagccaagcccctttcctgactactcccctaattcctcctcaccagagtgcaactcaagcttca

SEQ ID NO: 9162 - DNA, 120 bp, Homo sapiens
aaacgcttttacagtggcccctccttaccttccccagcccctattccagcgcctaagggtgagattagatgtgactgtgccttccatgtctgcctcccccatccatctccccaggagccc

SEQ ID NO: 9163 - DNA, 120 bp, Homo sapiens
gaccggggtggtgggggtgtggcttggcctgggttggaggccctgtttgctctgggtgctgacaagggaggagcggggaaggtcaccaagggcctgagtcagagggagaggcccagcaag

SEQ ID NO: 9164 - DNA, 120 bp, Homo sapiens
cgcacaacaccttgccgttgtcgcagacgcagatccggcagggctcgggtttccacacgtctcggtcatggtacctgaggccgttctgtacgcaggtgattggtgggactgggacaggcg

SEQ ID NO: 9165 - DNA, 120 bp, Homo sapiens
gggcgttgtcagtagtgactgcaacccccagcttaaccacctttcccccgggtctaagaggcacacttggatttttcacttcccgcccctccccccgttcttctttcctcaaatccttaa

SEQ ID NO: 9166 - DNA, 120 bp, Homo sapiens
gctcgcctgctcctcatcagcgcgggtgacagcgccgaggcgcctggccagggaggctgtaactctttccagttctcaggaatttaaacaaagctttagtccgcggtggcttccaactcc

SEQ ID NO: 9167 - DNA, 120 bp, Homo sapiens
tggcgctgaagccaagtgaaataaaaaccacagggtgagagggggagggcggggggagaataggaggggccccatcgggagggcaggctcgtggggagtggcttgcgtggtagagacagg

SEQ ID NO: 9168 - DNA, 120 bp, Homo sapiens
gggcgagggaggagagaagggaggtccagccctcatcccgcccccattccctgggcaggtggggtggcgggggcggggctaggagaatgggagcggctgattggaagggaggccccccca

SEQ ID NO: 9169 - DNA, 120 bp, Homo sapiens
gcccgctctcggggccatccccagtcccccaaagccagccaatgcctccaggtcacttttagccaaagaaccaaaaagtccgcaaatagtccagaagttagctaaccactcccaccgcgc

SEQ ID NO: 9170 - DNA, 120 bp, Homo sapiens
tagcggctccccagacggccactaggtgtcgggcaacgctaagcaatggggccggggcggggccgacctcaccggcccgactacctctttaagaggcttgggctgccccatccctggctt

SEQ ID NO: 9171 - DNA, 120 bp, Homo sapiens
gtccgcacccagcaataacccgggtcttcccgctccggctcctgccccagtaagcgttggaccgggagacgcagtgctcagcatcggtcagcagggggcgcaaggaccccgccccgccga

SEQ ID NO: 9172 - DNA, 120 bp, Homo sapiens
gtccgcgccaaagtttctcatcctccacccgcccacgctccgcaccccctccgcggctgcccagcacccccacggccccagcaacactctagcccgcagagagggcaatctttccttatg

SEQ ID NO: 9173 - DNA, 120 bp, Homo sapiens
ccacggccttcctgattgcttctacatcttgggcttcaaatgccccgctcggcgcccccatcccatcttcgacgtgctttcctcactctgcacccagatccccacttccccggttgcgcg

SEQ ID NO: 9174 - DNA, 120 bp, Homo sapiens
gctcgggattctctcttgcaccaactcacgccgcgctccaccctcacctcccgctcccggggcgcgttcaaccccaacctcgccccagggtgagctccctcctgtctcagggcgccgagg

SEQ ID NO: 9175 - DNA, 120 bp, Homo sapiens
tcccgagtctccggatcatccacgtctcgttttaagccgcggcccccgggaccaagcgcaaggcgcgatatagagtatccttgcactcccaaaagtttgggacttactgtcttcgtcttg

SEQ ID NO: 9176 - DNA, 120 bp, Homo sapiens
cctcgacttggccttcctcttggccgtgcgtcaggagggcggtggccgctaagaggagcaggagccggaggtccacaaagctgaacatgtctagaccctagacatgtagactctttgtgg

SEQ ID NO: 9177 - DNA, 120 bp, Homo sapiens
tagcgtccgctcatgcgtggcctcacactccgcgtgcctcctgctccgaccccgaggagaaactcccgtctgctccgacgactggcccgggccccttttatactgtcctgatggagagca

SEQ ID NO: 9178 - DNA, 120 bp, Homo sapiens
cctcggagagggggagccggccgcccgtgccccagccaatcagagctgcctggcccggcccccaatttgggagttggaatggagagggggaggaggagggaagggagtccaccccacatc

SEQ ID NO: 9179 - DNA, 120 bp, Homo sapiens
cttcgcagctctgcctccccagccccccagcccagcctgggccagaggtgctgtggtaggggtgcagctgggtcctcagaatggcgtgggctaaccagtgggtaggggtgcccctctgct

SEQ ID NO: 9180 - DNA, 120 bp, Homo sapiens
gtccgagagaggggagagcagtctttaggaagaaagaggtctgtgatttctgaattcttgtttggtctgaatccagaaccatctgtcagagccaccaaacatttgctgccatttctaatg

SEQ ID NO: 9181 - DNA, 120 bp, Homo sapiens
gtacgaataaggaataagaaaagaaactgacaggatatgaaaactccttatggctcctactgtcacacagggcgcagacgtactggcggaaattttcagaaggtatcatcaccctccctg

SEQ ID NO: 9182 - DNA, 120 bp, Homo sapiens
tcccgttgctgccgaggctgcattccatggcagataaagaaatcccatagggaatccagggaggcccctaggatcctgtgagccctgcttgtccagcgcagccctgctgtgttagctgag

SEQ ID NO: 9183 - DNA, 120 bp, Homo sapiens
agacgagaacccagaagctcagagagcttctccccaaagccacccagcttggaggggagaggctaggagaggacccagaaactttttatgctccttgccccaaagactctttcccccaga

SEQ ID NO: 9184 - DNA, 120 bp, Homo sapiens
gctcgggtttacttaggactcaggtccagacgcctgcttacattgtctcaatctttacaacggtcttcacaatgagatacatgggtcattagctctgctttacagatgaggaaaccgagg

SEQ ID NO: 9185 - DNA, 120 bp, Homo sapiens
ggtcgcattgcaaatgaatggcgacttctgcttcaaactgaggtctggcagctaagtgtgggcttttaactctccgctgcaaaatggccatcaaatggggttctcccttaatatctctcc

SEQ ID NO: 9186 - DNA, 120 bp, Homo sapiens
ccccgagcgccgtctccttcctcctgccttgcagtctctgcaaactcctgccacagcctcccagctcctctccctgcccctccctcctagggcccaagtctttctccgaaaggcagcagc

SEQ ID NO: 9187 - DNA, 120 bp, Homo sapiens
ccccgctctgcctcctgcgccgtggtcccctcccactggggaggacccgagctccccagtcacccccaggccctgccgctcaggactagctaacgtgctctcactgccttccggccttcc

SEQ ID NO: 9188 - DNA, 120 bp, Homo sapiens
ctccgtcccccagcgctcccctcctgagccccgaggccccgggcatcctgcccagcgcagaccctgccctgctctgcttggaacaggcccctctccacctaccatcccaccccccgctct

SEQ ID NO: 9189 - DNA, 120 bp, Homo sapiens
aggcgtttctggctacacttctcttcaaaaactcccttgggtccctggccgtcccgctctgctgcagggtctctcccagcgccccgctctgcctggctgcccactcccatcccaccctcc

SEQ ID NO: 9190 - DNA, 120 bp, Homo sapiens
tggcgcacagaaggagcagtgcagtcgcgctatgagagcttggcctgcgggctcagacttccagttcaaatcccagccgctccttctcccagcggtgtgactgtggacaagttacttccc

SEQ ID NO: 9191 - DNA, 120 bp, Homo sapiens
ttccgtgcctgagtttcctcatctctaaaatggggatcatagatcttgttcataagattgtgagaacctaaagtaggtagaacagtgcctggtggaagtaagcatgtagcatgtattaga

SEQ ID NO: 9192 - DNA, 120 bp, Homo sapiens
ccccgctcactcgagggaggtttcaaaacccaaggggtggattctgtcttccaccacatcccccataccagagaagctgtgccatctcctagctctagctcagaaattctaaaactcaag

SEQ ID NO: 9193 - DNA, 120 bp, Homo sapiens
gcccgccacatagctgtgtgactttggacaggttgctttacgtctctgagccttaatttttactcttgtgaaatgggaataatcccagcctcacctcccccatagggttgtcccagtgct

SEQ ID NO: 9194 - DNA, 120 bp, Homo sapiens
ctccgggctgggtagcaaactgttaggtggcgccgattgggaataagcctgggcccaagctttgtccaaagtcactcaaagacttctgcttggtcactgtctccctgccacccgctcttg

SEQ ID NO: 9195 - DNA, 120 bp, Homo sapiens
gcccgcagaacgcccactggatcctgatgcccagaggccctgccaagtctgactgccagccacagctctccccacccctttcccactctcaactccagcccagctgaattaggaatttcc

SEQ ID NO: 9196 - DNA, 120 bp, Homo sapiens
tatcggctaaaataagatcaagaagactcagtttctctacctcttcttttgcttttctctgaaatagcttttcttcttggacagcttggctctgtgcggtggtctcacccagctgcctca

SEQ ID NO: 9197 - DNA, 120 bp, Homo sapiens
caccgcccacccctcctcattccgggctgagtcatccccacatctggaacctctgcacatctggaagagctgaagcctgtgcaagcagctccacgtagacaccccctcccccctgctcca

SEQ ID NO: 9198 - DNA, 120 bp, Homo sapiens
cctcggttacctagcagcaggcactgctgggccagccttggggaccaggattgcccacaggtctctccccagtagcagtaacagtggcgtcttggtgcccaccgcagtaagcaggcaggg

SEQ ID NO: 9199 - DNA, 120 bp, Homo sapiens
ccacgaacctcgcagacacatcaaagcccgcagggaaggggcccttccgtagaggaaacctacagtcctggaggcctgacaacctgactccgggcacaggaccaccctgtcccactcagc

SEQ ID NO: 9200 - DNA, 120 bp, Homo sapiens
ggtcgggcacagctgcctggagtggacaggcagaaaaggacatttctacccaggggccctgccgcctcaccccactcgttcagtgctgccacagaatgaggttttgcccccatgaggggg

SEQ ID NO: 9201 - DNA, 120 bp, Homo sapiens
gtgcgccaccctttcagccccagcctggaagagaagtcgtgctcagttgtggggggatccagcttcctcccccaggctctgatgttctgcagaagacccctccacatggacaagagggaa

SEQ ID NO: 9202 - DNA, 120 bp, Homo sapiens
gagcggcctgtttcatcctcatcatggcctatatgatgagggaggtactgttatccaactcctccctctccttcctgttgagagaggcccagagaagttccatttctcgtctaaggtcac

SEQ ID NO: 9203 - DNA, 120 bp, Homo sapiens
acacgacacaatactgcccctacaggcagagccgggctagagcagagcattctgctggctttgaaaagagatcccagcctagtgccatcagccattacagatattagtgtccaccaaagt

SEQ ID NO: 9204 - DNA, 120 bp, Homo sapiens
aggcgaggccacccaccctgagtgatcctccatccagagcagtggagcagggctccccaggcccgaggtgagtgccacctgtgctgggtgtggcgtcttgagcgctgcatggttctgatc

SEQ ID NO: 9205 - DNA, 120 bp, Homo sapiens
gtgcgacctggccttcccgctctccaggccctggttgcctcctctgagaagggcgtaagtgggccggctggcctcggaggcccctccttccagctgggccccggcaggatgcacaatcag

SEQ ID NO: 9206 - DNA, 120 bp, Homo sapiens
cagcgagcgtttatgaagacatttcgaagtggctgctcttgggaaaccccagatggaatttggtgttgaatctagggggccgctgactacatgaggcctctgggtttctgtgctcgtgta

SEQ ID NO: 9207 - DNA, 120 bp, Homo sapiens
acacgctgccctcctggtgctaggtgacgtgccaaacagaagatgctggccttgtccaggaccctccttcctctagaacagcccttctctgctcagtctaggggggtccatggtgctccc

SEQ ID NO: 9208 - DNA, 120 bp, Homo sapiens
atccgagggccctggggccatgatgaatgctaacaggccctggtgttcttggcctggcctgggaccacccacttccaggctcctcatcttgtccccatctgcaggaaggaacgtagggca

SEQ ID NO: 9209 - DNA, 120 bp, Homo sapiens
agccgaggggctcaagagcccttcagactctgcctggtgagtcaagtgctaaggacctcacttcttcattggaagatgtggggtgggggtggagtttgttcctaggacattgtagcgatg

SEQ ID NO: 9210 - DNA, 120 bp, Homo sapiens
caacgactcaagaggtggaggctccagcactctcaggacgaggtccccctgccaaggtccacctgcaggggaggaggggagacggcggccccttcccttctccaagctcacagtcacttc

SEQ ID NO: 9211 - DNA, 120 bp, Homo sapiens
cctcggatcaggagactagaagattatcttcttaaggggcaaaaagggctaggaggtaatgggaaatagagacagggaaagggagagagagagcagggagacagcataagaaacagaccg

SEQ ID NO: 9212 - DNA, 120 bp, Homo sapiens
aaccgagaaaaacagacgcctccgccgaggcagacagaggtgaacagagagaggagaaacagacgggagaacagagggaaaggctgggaactcgagagaaactgggtgcggacagatggg

SEQ ID NO: 9213 - DNA, 120 bp, Homo sapiens
aaccgaaacagaaaaacagaggctgggagaaacggggagagacacagaggggttaaatataagacagagaacatgactgggagagatgagggagaagggtgagaggcagagagcaaggaa

SEQ ID NO: 9214 - DNA, 120 bp, Homo sapiens
aaacgcccacgacgtcgggggtgtttttcaggggtcaagacagattggcgacacagcaggaggcgcccaaggacatgacgttgagcctctcagggtcccccttggccgggccagggagca

SEQ ID NO: 9215 - DNA, 120 bp, Homo sapiens
cagcgccccacgctccatcaccccctctccccctcccgcggtcctggctgcactgctcctgcctcgccctcgcccagcgcccccagcccacaagccccggccgcgcccctcccggctccc

SEQ ID NO: 9216 - DNA, 120 bp, Homo sapiens
ctccggcttgggcgacagagcaagactccgtctctaaaaaaagaaaggcagggcagtgtggcagctgcctggggcgagcctttgggattaatcagaaaggtgctgccagtgacctcaggt

SEQ ID NO: 9217 - DNA, 120 bp, Homo sapiens
aaacgatccctatcccaccagagtgggcgatgccctcgagtggaaattttaaaataccgttcactggccccaaagggtttctgtggagtgttttcacagaaaacgcatacatcgcaaagt

SEQ ID NO: 9218 - DNA, 120 bp, Homo sapiens
gtgcggccatgggcttggcagcaacttcaacgcagccggcgactctgatgtgcttccctgaagtcagcagctgcagtcagctgaaattacaaaagcaaatcacaccaggggatgctgctc

SEQ ID NO: 9219 - DNA, 120 bp, Homo sapiens
acccgcatctcccagtcctccagccctggccttaatagcctgtgagtgcaaacgaggccatgttatcactgatgcccaaccacaaagtgctttgcagcaccccaggcgcacagccgcgcc

SEQ ID NO: 9220 - DNA, 120 bp, Homo sapiens
gtccgagcctcctccacagccagccacttcccacgtgctccctcataaggggcccagcactgccgtggattctggaaccatgcagcactcgaggcctctgctgatgccgtgggccagctg

SEQ ID NO: 9221 - DNA, 120 bp, Homo sapiens
ggccgtgaaacaactttctgtagagatctggaggtagaggaacagagggacaagggccctgggcagctccataccacccactgtcacttggactttgaggggcagagaggtgtccagagt

SEQ ID NO: 9222 - DNA, 120 bp, Homo sapiens
agacgcttcatggcgatggtcatccagggttgaagaccactctgtggagggcatcagctgtccagtcaaagttaatccctggccaatccaggccagtttcttttcagtgagtcaaagtga

SEQ ID NO: 9223 - DNA, 120 bp, Homo sapiens
ccccggggccctgggcattctgttctcagagtgctttctcctgcattatctcctctgatgcacaaacaccggggaggcttgattaactgggaatggctttagttgttttagcctctctat

SEQ ID NO: 9224 - DNA, 120 bp, Homo sapiens
tcacgctcaagatcataaagaggcccagcatggactccttctcatgacccaagtggagccagagttcccagataagggcaaaggtcacctcaggccaggctccactctcagccacccctt

SEQ ID NO: 9225 - DNA, 120 bp, Homo sapiens
ggccgaggcagtgtggacctggaacaggtataaactgtgctactctttggtgcccagtgccacttttcctagccaggaccagagctatcaccttctctgtcccgcagctctgcccaggtc

SEQ ID NO: 9226 - DNA, 120 bp, Homo sapiens
ttacgtgtccggcccccaaccctgtgcagaaggtcaaggcagaggcgccgaggagggatgggaggatgcctcctgtgagatggggtacaactggtgttccttctgaagctgacatctggc

SEQ ID NO: 9227 - DNA, 120 bp, Homo sapiens
tggcgccagcgggcccgcagggggctcacccgcgacaccctttgttctggctgcctccccaaccccgcggggccctctgctccagctggcatgcctcaaggacgcttcgcgcctgctcct

SEQ ID NO: 9228 - DNA, 120 bp, Homo sapiens
ccccggctcgcaagtagcggggccagcacgtgacccgagggggcaggggatggatggatcttgaccttgccatctggcccctcacggatgtgctgctggctctccctctaggaaatcaac

SEQ ID NO: 9229 - DNA, 120 bp, Homo sapiens
cggaggagggcaaagggcagttagcagtctggagacagtgagtcacgccagtcttctctgtggagagacacctggggtcttgggccaaggattgacaatagtggtcttgcctttgcccct

SEQ ID NO: 9230 - DNA, 120 bp, Homo sapiens
tcacggagcccatgggcacgatgcttgcatcctgggggagcccttggtcccacgcctactgagctgcaatggacttgagaatgcagtgaattgtgtctgtgtggattgggcagggccatc

SEQ ID NO: 9231 - DNA, 120 bp, Homo sapiens
agacgggaaaaacagcagaggaggggtggaaggcccaacaggaagaggtggctgctgctcacagttgggggtttggaagcactggagatggccctagggggccttttgtggggccagggc

SEQ ID NO: 9232 - DNA, 120 bp, Homo sapiens
ggtcgagactggcagcagacagggattagggtagggatgtgacaaggcgaggaagggaggtggcagagctgctcaccttggagatagccagagggacagggaacctggggacgggggatg

SEQ ID NO: 9233 - DNA, 120 bp, Homo sapiens
gtccgggatgcttttcagggggttgtgggacagcttcagctcctccaccacccgtagcttgctcagggcagctgaggggtagctggacagctggttcctgtccacgtggaatttggcgag

SEQ ID NO: 9234 - DNA, 120 bp, Homo sapiens
ccacgtcgtccagggccccgggctgcagggagctcaacgcgttttccgacaggtagagccagcgcaggtccttggctccctggaaggcgcctgcgcgcagctcacggatcttgttgttgt

SEQ ID NO: 9235 - DNA, 120 bp, Homo sapiens
cagcggggagagcaacccccggggcagctcagtgaccttgttgtggtccaggtagaggtaggtcagctcggtcaggtcgtcgaaggcacctgcgcgcagcacgcggatgtcgttatggga

SEQ ID NO: 9236 - DNA, 120 bp, Homo sapiens
ggccgcggaaggcaccggcggccacctcgcggatctggcagtgctgcaggtgcaatgacacgaggttcggcatggcccggaacgaattggcagccagcaccgggaagttgttgcgctgta

SEQ ID NO: 9237 - DNA, 120 bp, Homo sapiens
tgtcgcagatgacgtgctgcaggtcgctgtggcagtggcagttctgggggcaggcggccagcgccggcagcagaccagccaggaggccgaggctgagcaagagcattgggcggaccatgg

SEQ ID NO: 9238 - DNA, 120 bp, Homo sapiens
ggacgcctggggccggggctgggggcagcagcggcggcggggcgcgggcagcggcgagtcctaggcgctcgggtctgccgccctctttatacggtggccctgaccgcagccggcagccga

SEQ ID NO: 9239 - DNA, 120 bp, Homo sapiens
tcccgtgacattcgcgcacttccctgaggacactgtggagcagaaggcagaaagcgtgggcagaattatgcctcacacggaggtgagcccctgaccaagactccaaagtcccacctcccg

SEQ ID NO: 9240 - DNA, 120 bp, Homo sapiens
catcggttgctttcagtgagagagtcaaatggctcactcaggatgcctagagccccccagcagcaggggtgtgctaggcctggcccggagtgttctctgtgggctaagcatgaaagggga

SEQ ID NO: 9241 - DNA, 120 bp, Homo sapiens
gagcggctgccagctgaacttctccgcggcctcccttcctgtctgaggtgtgtttttgccaagcccactgtctgtttcagggcagccagggtagcctcaaagaggagccagagcacagag

SEQ ID NO: 9242 - DNA, 120 bp, Homo sapiens
gctcgcctctcgctttagcagagttcttcttcttgcttggcgtaaacacttcatttcccaagcagcctatccctttggggcggtccctttgcccctcaaaggttgccccagagtgcacct

SEQ ID NO: 9243 - DNA, 120 bp, Homo sapiens
tcccgcccctgggggatcgctgcccccgtgcacaagcagctgcttcccctggggctgaccgctgtcctggcgtgaatctgccctgccctcccgccagagcaaccatgtacccagggattg

SEQ ID NO: 9244 - DNA, 120 bp, Homo sapiens
tcccgtgtgtgctacagctgcactgccactgtcactaagatgcccacctggaagggaaacaggggcaggcatcactcaccccatttcacggacacagacactgaggcacacagaggctca

SEQ ID NO: 9245 - DNA, 120 bp, Homo sapiens
gcacggtggccgtggctcttttctctaccaggctttcagactctgtctctcctgttcacatggtgttgccatgccaccctgtttggcttatttgctgcttaatgggaagtaagaggagac

SEQ ID NO: 9246 - DNA, 120 bp, Homo sapiens
gcacggtttataattcttcagctggctctgcagtccacaaacctctttctttgcagcagctgcctgcccactctgtttcctcagccctcccagcctgggactcagctcttctttcatgcc

SEQ ID NO: 9247 - DNA, 120 bp, Homo sapiens
ggtcgactctagcctttgtctcccttctctggatggggataagcagagccagggggcctcattccaggcagttgggttggggggttgggggcaggcaaagctctctccatttccaaggac

SEQ ID NO: 9248 - DNA, 120 bp, Homo sapiens
gcccggatcatgaacatggaggcagggacgctggcaaagctgaacacgcccggggagctgtgcatccgagggtactgcgtcatgctgggctactggggtgagcctcagaagacagaggaa

SEQ ID NO: 9249 - DNA, 120 bp, Homo sapiens
gggcggggtggaggctctggccgctgaggggaggctggaggtcttgaggctgagccgggaacattaacctggcaccgtgaggatgtgggtatcaagatgacccctcacatgctggagtct

SEQ ID NO: 9250 - DNA, 120 bp, Homo sapiens
atacggtggggatgatcatacatagcacagaagaaagcaactgggtcatcaccctacaccagcagctgcaaaatctgagtccagattcagtcactcatttgttagctcagcaaattctta

SEQ ID NO: 9251 - DNA, 120 bp, Homo sapiens
ccccgcctgcctcagagaatgttgccaccttccacctgggcctccccagtgacctctctgttcacagtctcctttcttccctttcttagctctctggtgatgaattctactctgacgtgg

SEQ ID NO: 9252 - DNA, 120 bp, Homo sapiens
gtacgtggctcggagcctgagccaccgggtgtgtgtccatggtggcaggcaggcctggctgtgggaggggttggggcctccactgccctgtgggccggggccagccaactctcccctccc

SEQ ID NO: 9253 - DNA, 120 bp, Homo sapiens
gtccggaggcttctatagcgcagaagatgcagactcgcccccagagcggggccagcggcccaaagagggcgcctactatgtgtggacggtcaaagaggttcagcagctcctcccggagcc

SEQ ID NO: 9254 - DNA, 120 bp, Homo sapiens
caccgagccgctgacctcaggccagctcctcatgaagcactacggcctcacagaggctggtaacatcagccccagtcaggtgaggacttctggggtcacctgacgggccctggtgcctgc

SEQ ID NO: 9255 - DNA, 120 bp, Homo sapiens
aggcgtgtgagctcgcagacaaaggccattctcctcaggaccccaagggggagctgcagggccagaatgtgctgaccgtccggtactcgctggagctgactgctgcccgctttggcttgg

SEQ ID NO: 9256 - DNA, 120 bp, Homo sapiens
ggccgtgcggaccttgctcaattcagggctggagaagctcttccaggcccggaagcatcggcccaagccgcacctggacagcaagatgctggctgcctggaatggtggggcagcacacct

SEQ ID NO: 9257 - DNA, 120 bp, Homo sapiens
gaccgagcctgtctgtaggatcccccttcacaaagcccctgtctttccggcagcggctaaatgctcactctcccttgattagcgttattattctcagttgacaaaagaggcttaaggagc

SEQ ID NO: 9258 - DNA, 120 bp, Homo sapiens
acccgcccaaggtcacgcgcaagggctgggaaccccgccatgtctggctttggagcccaagatcttagggatcacccatggctccagggaggtgttggggcctaaggtgatagggtggac

SEQ ID NO: 9259 - DNA, 120 bp, Homo sapiens
aagcggcacatgtttgatgtggccagtggccgcctgatgcggacctgctacaccggccctggggggactgtggagcacaggttgggggctgggtagaccgggagggcccgtctccccaac

SEQ ID NO: 9260 - DNA, 120 bp, Homo sapiens
tcacgactaagacatttcttttggggtatccatctagccccagcctcgaaaggatggaagcagggcctccttgcaggaggtcatgttgtccatttgtctgctttcatacaagctggtcca

SEQ ID NO: 9261 - DNA, 120 bp, Homo sapiens
tttcgtttggaacatctgttgggttggaagtccttccccaaatctatctgagtccttcttgctgcagagaaagccttcctgtgacctcatcctttcccctaaatgttgggaaatgctcct

SEQ ID NO: 9262 - DNA, 120 bp, Homo sapiens
tgacggggtgggggaagcagggggaggagctgtccctctgaggcctttgggaatcggctgtgccaggcatcctcagccctccagctaagcaacacagagagccaaaagaggctactagag

SEQ ID NO: 9263 - DNA, 120 bp, Homo sapiens
aaccgggagactggatggaattgctcccttcacacggtcacacatagccacacatggtcactgggaccagagtcagctctgtctgggcagccaggccctcagtgcaagccaccagcccat

SEQ ID NO: 9264 - DNA, 120 bp, Homo sapiens
gggcggggaccaggtcctggcccacctcaccccccacctcgcgggttggaggcacaacaaggagattccggcggcggctgatgtcaggggcgcagaatgagaacaagatgtggtggaggg

SEQ ID NO: 9265 - DNA, 120 bp, Homo sapiens
ccccggagctgggagtggagcccctttccgctagagcccagtgccgcgggtgcctcctacccgatctccattcgatgcagggtgcttaagattgggttggggagttttatgctggatttt

SEQ ID NO: 9266 - DNA, 120 bp, Homo sapiens
gcccgcgaaagtcttgaggggacagtaatactgtcagtgtgttcactaaggaggactcgggtccaccaccccagcgtagactccgcagataggtttggggaatgcaagccccacattcca

SEQ ID NO: 9267 - DNA, 120 bp, Homo sapiens
aagcgccacttgacagacgcctggccccaagctccctggcgggtcctgccaccgggggaaggaaaggtggaggggaggtgttgctgccatctcaggtctggacagcttctctgggctcct

SEQ ID NO: 9268 - DNA, 120 bp, Homo sapiens
tgccgccctcactctctgcagctctgctgcctctagtgcgcaaagcagggatgagcttgtggcccccccacccccatcctctacaccttgtgggtctttaggaagctcccctcatcacat

SEQ ID NO: 9269 - DNA, 120 bp, Homo sapiens
ttccgagcaactctcctctctgcccctaatcatttaccccttccacgaatgggaaaaagcatcaacctctatgtcctccttctcaagggtcccaggggaggtagagagagctcttctctc

SEQ ID NO: 9270 - DNA, 120 bp, Homo sapiens
tctcgcctgccctatctccaggtgctagtggagggtctggaggcagactccttcactgagtggtctggacgggggcaagtgttgaggcctggcatgggggaggagaggtgggaggacagc

SEQ ID NO: 9271 - DNA, 120 bp, Homo sapiens
tgccgactcccgctccctggcagaccggacttggaagtacagagtggggggatccacttagccaggtggggtctgagcccagggctttatatgcattgatcctggccccgccccacctcc

SEQ ID NO: 9272 - DNA, 120 bp, Homo sapiens
tcacgccggagacactaatggccctgtgtgaccgggctaaccaggtcaggtggcagtgcccccactcacaatccacggagctacgacttacttgagatctgctggagcaacgggctccat

SEQ ID NO: 9273 - DNA, 120 bp, Homo sapiens
ccacgacagccactccccctctgcatagctggctgtctgcctgcctgctggccctgactctgcccccaggcctgcctttgaacagtctgaaagtttatctctctctgagtaactgttgtc

SEQ ID NO: 9274 - DNA, 120 bp, Homo sapiens
ccccgaggctcccaaatgccgctcacctgctagtcagaagccccttgttccgagtcttttcacctcccatccaagctggctgcacaaactagggccattaggatacatttgggtgtcctc

SEQ ID NO: 9275 - DNA, 120 bp, Homo sapiens
cagcgagacagtgagaagcaaggagaggtgtctgatggaatgagtgcctcatttgaatgtttcattaacccatactttttgagcagctactatggacttggcctctgccctccaggccag

SEQ ID NO: 9276 - DNA, 120 bp, Homo sapiens
ccccgtgccacaccacctagacccttggctggggagactccacaaacccttaggcattcaagtgctgcctctctcccaactaagcctttctctgtgtgttcacccctcaccttttctccc

SEQ ID NO: 9277 - DNA, 120 bp, Homo sapiens
tcccggacttgctgcctggataatttattttggcactgaagcatttaaggcctcttgtggttattcagccgttttgtgtgtgtacaacgtgtttctagcagacactgagctcctgggagg

SEQ ID NO: 9278 - DNA, 120 bp, Homo sapiens
aggcggggcgtgtggctggcatgtttttgcagctcctttaatgcctggtgcattgctaggcacttcatattgaaagcgaggtcactagtgagctggaatggcagatgagacagggttcgt

SEQ ID NO: 9279 - DNA, 120 bp, Homo sapiens
attcgtccttctgaggactctagggtgcatcctcagtcccagtcccagactcgggtagggagcatgaaaggaattacctctggtgtttcacatttggccagagaggttgagaatcttgct

SEQ ID NO: 9280 - DNA, 120 bp, Homo sapiens
acccgggtgtcccgggctcaggctgaggctccaggtgtctcctcaactgtgacaacccttcctgggtgtctgcgtgtcttccttctgcctatcaccatgtgtgtgactgggaatgcgtgc

SEQ ID NO: 9281 - DNA, 120 bp, Homo sapiens
tgacgttgtgtggggcttgacgaccgggtgtgcctgtgaggccttggcgatcgccctctgacatccgccagcattgtcatgctgctggcctgggcccgctaggcttgcattgtagcctag

SEQ ID NO: 9282 - DNA, 120 bp, Homo sapiens
gaccgggccccctggccccttctgaaggcagctcctgccagccacggttccctcagaaaaattcccgtgcaactctgtggagggaaatggaaaacaccgcgggcctattcccctcccctc

SEQ ID NO: 9283 - DNA, 120 bp, Homo sapiens
agccgccaaggcagtctggaggtgcccagcacagatggccccctccccagcactcagccctttcagcaaacaccttgttaacttgagtgcagctgagcggcctggttgctaggcaacagc

SEQ ID NO: 9284 - DNA, 120 bp, Homo sapiens
gagcgcagcctggccctggggcggcctggtcactctggccctgctgggggcctgggactgccccagtgtgagggctcaacaaggcccacgcagccacaccctccccaaccttcgcagtat

SEQ ID NO: 9285 - DNA, 120 bp, Homo sapiens
atgcggtgtcttgggctgggatgcttcaggcctggggtgggatggagaaaggactttaagaacatcccctctccatgggagtgggcagtgactgtggccccggagtgcccatgggagggg

SEQ ID NO: 9286 - DNA, 120 bp, Homo sapiens
cttcgatgcccatggcctggacaactccaaggcacctgccctctcctgggtaaggtttcagggggccccacggtctggcaggggagtctggttttgctgttgtggtggcctgggattttt

SEQ ID NO: 9287 - DNA, 120 bp, Homo sapiens
cagcgccctgaatccctgtgtatttatcattcacacacttaattaaatgaacaggcagcaggccctgtgtgaggccattaattgatactaaataacatcagagccatcatctcagcatta

SEQ ID NO: 9288 - DNA, 120 bp, Homo sapiens
aaacggagcagctggatctgttctgatctgaagggacttaagctgagagcatgagacgttatgaggcctgacttggctccgtgttgactctgactttcgtccattcctttccttgcttcc

SEQ ID NO: 9289 - DNA, 120 bp, Homo sapiens
ctccgaaccggtgagaggagagtggtgttctgagccacagactcgggttccaggcccagatccacctcttactctgtatgatttggggcagtttccgcaacttctccaaatctcgggttt

SEQ ID NO: 9290 - DNA, 120 bp, Homo sapiens
tggcgatcctggaacccacttcctaccttgcaaggaagccagctggtgttaaggaggcagtttcccatgccaggcacacccttaatgaatggtggctgttattattaggattatgggggg

SEQ ID NO: 9291 - DNA, 120 bp, Homo sapiens
cggagtcacagggtaaggcaggggcgctggctgcactccagccttggctgcctcccgcctgaggccctgctgtagagctctctgtcaccatgtcactgtctccacgtctctctcaccatc

SEQ ID NO: 9292 - DNA, 120 bp, Homo sapiens
gcccgccacctctctagagatctgcgcctgcctcctggccacccagggagggactcagtccacagatgccagggaactagatggccttcctccctgccctgccccagcctgtgcctgggg

SEQ ID NO: 9293 - DNA, 120 bp, Homo sapiens
ggacgtgggacgcagatcacagcactgcagtgcagatcctctcccccttgggctaagtggctgtgggggcggggagctctggtcacagacaggggtgtgactgtccacagagctgcaggg

SEQ ID NO: 9294 - DNA, 120 bp, Homo sapiens
gtgcgtgtatgagaggggcgtgatctacattgttgtggagggtgggggtcgttttctgagtcaaatgttagaagcaggttttgacttgtgtatgcagagcagacctggcccaagggtggg

SEQ ID NO: 9295 - DNA, 120 bp, Homo sapiens
tggcgggcaacccctgcctcccctctcttgcaggaacgcatcttcctgaccctctccaattacatcttcaccgcagtctttctggctgaaatgacagtgaaggtgatgggggctggtgtt

SEQ ID NO: 9296 - DNA, 120 bp, Homo sapiens
cagcgcagggagggcggccgatgacgtggcggtggtccccaggtggtggcactgggctggtgcttcggggagcaggcgtacctgcggagcagttggaacgtgctggacgggctgttggtg

SEQ ID NO: 9297 - DNA, 120 bp, Homo sapiens
atccgtccgtcctcatgcccttatgccatgggtgggccgagactaagtgagaagacagaggccaggaaggatgtgagagacacagcaggcgcccaggcccctttgtttctggggcatccc

SEQ ID NO: 9298 - DNA, 120 bp, Homo sapiens
atgcgtctgcacctgtctccctctctcccgggctccagggctcccatctgcctggtacagcgtaatctccgcgcctctctctctctctcagtcacggcccacgtctctctaagtgtcttt

SEQ ID NO: 9299 - DNA, 120 bp, Homo sapiens
aatcgtcttccttccgccgataagatgggtgcggtggcctgagttttcctttggtgtgttcacatgtgagtaccaccaaatgagtgaggggttgccgtgcccctgcctcccctctgccct

SEQ ID NO: 9300 - DNA, 120 bp, Homo sapiens
cctcggcctgggagtggcactctgaggcggggggagagtgtgggagttgcagacgagggtggaggtgggagggggcctgtgttccctgtgaagagcgggagctgctccaggatgtggggg

SEQ ID NO: 9301 - DNA, 120 bp, Homo sapiens
tgccgttctccacgtccccaaccctcactatcagcacccccaaggccttctgctcggctcagggtaggggtccgggttcggcttccctgtggatatctgcagctgagcaggtgcagtgtc

SEQ ID NO: 9302 - DNA, 120 bp, Homo sapiens
caccgtcccactcctgctccatcctccccacccccacctcacagtcaggcagatggaattcttttggcaggcggcacttgtggcccctgcctgcccagctggctccccttctggggtctg

SEQ ID NO: 9303 - DNA, 120 bp, Homo sapiens
caacgcaggagaagcggacatctgttctgatgaccggctgcctgcccctcccggtgcctccctgccccgtgaccctgaccagctagccacattgcttgtcttcctcaagtgccctgtgcc

SEQ ID NO: 9304 - DNA, 120 bp, Homo sapiens
cttcgggctggacattcagagccagccacccaatgggctcagcgcaccccacccataggcagagtgaggtgggagctgaggggaagccgcccctgaggggccctgcccagcgcacctggt

SEQ ID NO: 9305 - DNA, 120 bp, Homo sapiens
gtccggccagtgaccaatgtcgtgtttcgttcttttagatctaatgctggacgatgtaattgcttccggcagctcagccagcgctgcgtcaggtactgcgtctggggtgtgggctcatgc

SEQ ID NO: 9306 - DNA, 120 bp, Homo sapiens
atgcgtgtggggacatgctcttcactccctccccgtggctcattgattctatcctcttggggtgaaagggtgagggtccctggggcccccaagagggcaggggctgaagcgctgggctct

SEQ ID NO: 9307 - DNA, 120 bp, Homo sapiens
tcccgcaggcctgcgccaaactggacgggaggcgagggcctgaggcctctctgccgacgccctttggagagcccaccttcccagcaagggcttccttggccggccaagctccccacctcc

SEQ ID NO: 9308 - DNA, 120 bp, Homo sapiens
caccggtcgattattagagctgcaaatctctcctgtctccttttgtctgaggggagactttgatccaagggagcaggatgagaggagcagagaggggaaggatttgttttaaaaatgtaa

SEQ ID NO: 9309 - DNA, 120 bp, Homo sapiens
tcacggtggctgcgtcatcgctacaaacagcaggaattgggaatcaaaggcctgagttggccacgagcttcttccaaaaaaagccaaagatttgggagtgacttgggtccttattttcaa

SEQ ID NO: 9310 - DNA, 120 bp, Homo sapiens
ggccgtcatgccacctttcggaactttggcatggccttcctaaccctcttccgagtctccacaggtgacaattggaatggcattatgaaggtaagggcccagggttggcctaggctccag

SEQ ID NO: 9311 - DNA, 120 bp, Homo sapiens
ccccgtgctagaacactctggaactccctctcccaggaacatgctctgactcacacttgtagtgctcctctgcccccaaacactccctcctcctccccttccttcccatcctccaatgct

SEQ ID NO: 9312 - DNA, 120 bp, Homo sapiens
ctccgggactgtgaccaggagtccacctgctacaacacggtcatctcgcctatctactttgtgtccttcgtgctgacggcccagttcgtgctagtcaacgtggtgatcgccgtgctgatg

SEQ ID NO: 9313 - DNA, 120 bp, Homo sapiens
ggccgagctagaggctgagctggagctggagatgaagaccctcagcccccagccccactcgccactgggcagccccttcctctggcctggggtcgagggccccgacagccccgacagccc

SEQ ID NO: 9314 - DNA, 120 bp, Homo sapiens
cagcggcccacgcgagatcagcctcccacttttccctggagcaccccacggtgagcagacacccaccccagccgtgagaggagctggggcaggagaagggtgtggagggtggtgggcggg

SEQ ID NO: 9315 - DNA, 120 bp, Homo sapiens
aagcgggcagcacacaaaccctaggctcctcctggaggctcccgccctccgtcctggatgctgagcgagcagtcactgcccctccccagggatggctgcccacactcaccccacagggcc

SEQ ID NO: 9316 - DNA, 120 bp, Homo sapiens
agacgggccagcttagccatgccctgctcctccagcctggtctggcctccccttcctgactcataggttcaaggctaagttttctgtttccttcctgtttctttcttacccttgcccaac

SEQ ID NO: 9317 - DNA, 120 bp, Homo sapiens
taccgctctctctctctccccccgccgtgggctctgctcattttccatctcccatctctccttcctccttcgccttccctcttccccaccccctcctctttttctctttgttgctgtgtg

SEQ ID NO: 9318 - DNA, 120 bp, Homo sapiens
ccacgacacttcccatcactgccctctgacccctgctcccctgcctctccggctccccttacgggctggctccccaggacaggcagctgtttgacaccatatccctgctgatccagggct

SEQ ID NO: 9319 - DNA, 120 bp, Homo sapiens
ggacgagctggcaggcccagggggccagccctctgccttcccttctgcccccagcctgggaggctccgacccacaggttactgtgcccctgtgctgtgccctctcccctgaccgtgctgg

SEQ ID NO: 9320 - DNA, 120 bp, Homo sapiens
ccacgctgtgccatgcttctggggaagctgggagtgttcctgcccactgggtatctgtagaaagtgcagccttggagcctcagttgagtgcaagaggcagtcaggggttcttctagactg

SEQ ID NO: 9321 - DNA, 120 bp, Homo sapiens
gcccgctgccaagctgcagtctctctatctgctcgtgtccagcacacacttgccagtcctcagtttggtggctttttaagccatggagcccactgggcatggtgagtgctgtcaggagcc

SEQ ID NO: 9322 - DNA, 120 bp, Homo sapiens
cagcgccacatggccctctcccccagtcccatttaattccaggtcttctgctttctgggctgttcctgccctcctcccctccccttgatcccctcaccacgacccactaccacgtgagag

SEQ ID NO: 9323 - DNA, 120 bp, Homo sapiens
acccggagtggagacaggtgtcagctgcagatagaaaagccgagtcctccagaggcccttttgggtggtggggcaggcaggttcttaggaagcctttagcctgatcccagaaaaatggac

SEQ ID NO: 9324 - DNA, 120 bp, Homo sapiens
ttccgaggcctccccttcctgaaagaggctcacagggaaaggttgtgggagaagaggacacgatgggaaggtgatggggttctgggagggacggtccaactgtcccctagcatcctgtgg

SEQ ID NO: 9325 - DNA, 120 bp, Homo sapiens
acccgagtgcgcccacttcaggctaacgggagaacatctcccagagcccaagttggagagggcgggcgggctgcaggcaggcggaggagggcccacgaggggagaagccagaatctgggg

SEQ ID NO: 9326 - DNA, 120 bp, Homo sapiens
agccgagagaataggcagaaaacagccgtcagattggtggcattgtcgccggcgccccccgtgccgctctgtctgtgccgggaggagagacagtgctttgctggcctttcttcatttttt

SEQ ID NO: 9327 - DNA, 120 bp, Homo sapiens
agtcgcaagccctcggtcctcccgctccctccctgggtggtggtagtgtgggaggggctggggaggctcctggggtatctttagaatgcgtttctgtgtctcctcgctttgtcagtgttt

SEQ ID NO: 9328 - DNA, 120 bp, Homo sapiens
tgccgcagcctctctgatcagagcagggggttgaagtgggtgcggggaggcactgtcagcttgtttggggaaagggtggggagagagaagggatgcctttttcccgcccccctgtgcttc

SEQ ID NO: 9329 - DNA, 120 bp, Homo sapiens
cttcgtgaaaagggggaagtggggactgagagagagcgcgtgtgtgcgtgtgcacgcgcgtgtgcgctgtcctggtttctcatgcctgatcatctctctccctgtctagatccctctagc

SEQ ID NO: 9330 - DNA, 120 bp, Homo sapiens
tgacgtcagagattgtgtctgaaccgtcctgctctctagctctgacggatgactctttgcctgatgacatgcacacactcttacttagtgccctggagagcaatgtacatacacactgcc

SEQ ID NO: 9331 - DNA, 120 bp, Homo sapiens
tcccggccacccccggggctggactggctgcagggctccagatcggcccagggagggtcctggggccgcctcctctcagtttgctgccaggctccacccagaggcatcaactgtcaggac

SEQ ID NO: 9332 - DNA, 120 bp, Homo sapiens
cctcggtggcccacgctttgctggcacaaggtcttcaggttccccactggggacaaagagattagataagtttaaattggggccttgccctgaagggtataggagcagcggcagccatta

SEQ ID NO: 9333 - DNA, 120 bp, Homo sapiens
ggtcggaggtagaaccccagtctctggtctttccttcctcaccaaccagagctgcctcccaattcttctccccactttggactgagctatggggcacaaggcaggttttaagtgtcttca

SEQ ID NO: 9334 - DNA, 120 bp, Homo sapiens
tgccgggattacaggcgtgagccaccgcgcccggccccagagcccacctgtgataaggccacagcccatgccatgtgtgtgtcctgaggcatgagcgtggacacatgagaatctcaatcc

SEQ ID NO: 9335 - DNA, 120 bp, Homo sapiens
tggcgacacagcccctgccccctgaagctcacagtctaatagtggagacatgcctgccatcagatcattgcagcctcagctcacagctgccagacacctatgtgtggagggcagcaggga

SEQ ID NO: 9336 - DNA, 120 bp, Homo sapiens
ggtcggttttacttggggacagagactgtcacacactgtgtcacagagaacctgagtccgtaaaatcgagggattcttgccaatcaggaagggtattcagagccaaaggggaagtctagg

SEQ ID NO: 9337 - DNA, 120 bp, Homo sapiens
aggcggggaggcgtgaaggagccagctcagtgagcagagatggcctggcttctctcatatcccaggaggcaggggctgcagagagagcgattcttgcaggcttaggggagaccagagcat

SEQ ID NO: 9338 - DNA, 120 bp, Homo sapiens
gagcggctaccaggacctctgcttaggatagtcctgctgtgcctggtggtggtgggcagggggcacagccagcttgacaggagggctagtccatgctggagaggagactgctgggctgag

SEQ ID NO: 9339 - DNA, 120 bp, Homo sapiens
ggacgttcagggtctgggcagccgggaagacctgctggcagaggtgagtgggccctccccgcccctggcccgggcctactctttctggggccagtcaagtacccaggcacagcagcactc

SEQ ID NO: 9340 - DNA, 120 bp, Homo sapiens
tcccgcagccacagcaagatctccaagcacatgaccccgccagccccttgcccaggcccagaacccaactggggcaagggccctccagagaccagaagcagcttagagttggacacggag

SEQ ID NO: 9341 - DNA, 120 bp, Homo sapiens
tggcggccaggaggagcccccatccccacgggacctgaagaagtgctacagcgtggaggcccagagctgccagcgccggcctacgtcctggctggatgagcagaggagacactctatcgc

SEQ ID NO: 9342 - DNA, 120 bp, Homo sapiens
cgccgtcagctgcctggacagcggctcccaaccccacctgggcacagacccctctaaccttgggggccagcctcttggggggcctgggagccggcccaagaaaaaactcagcccgcctag

SEQ ID NO: 9343 - DNA, 120 bp, Homo sapiens
gcacggatttgccacacttctggctggatgcgtgacctgagctgtctggacttcagcctcctgccttgggggcgggcttagctgactggcattacaggcactgtccgatggggacctcgt

SEQ ID NO: 9344 - DNA, 120 bp, Homo sapiens
gcccgcaatggaattaaaccgtgtcaacggagtgggctgtgcttcctgaggatgagagtccagggctgggcgtccagaggcaacctcctggtggaggtggtagggtcagaggccaggtgc

SEQ ID NO: 9345 - DNA, 120 bp, Homo sapiens
gggcggtgatgagcgagcgctcaagatgtttacatgcactgctgctgctgcctgcctagcgggagccagtggaggagggaggtgtgaaggtggccaggggcaggcagacaggaagagggg

SEQ ID NO: 9346 - DNA, 120 bp, Homo sapiens
tggcgtggcccaggccacctgtctggtgctactgcagacaatattctcttgtctgaaatcttggtgccaagaggtggtgaccatgggtccagccagcctgtcacctagccacctcccaaa

SEQ ID NO: 9347 - DNA, 120 bp, Homo sapiens
cctcgcccccagggccttcaaaccccaggattggattgggtttttgaaacctcagtggcaacgctcgctcacaaaccgtctgatccggtcaactgggagctgggggcaccaggctgccgg

SEQ ID NO: 9348 - DNA, 120 bp, Homo sapiens
gggcgcttttccaaagtagtcacattcacgttcatacaaatatgcacacgtgttccccgcatggcaaactcagaggcttagagaggcccccagcctcccacctggtgggccaccagcttt

SEQ ID NO: 9349 - DNA, 120 bp, Homo sapiens
aggcgcttgtccaagagctggccaagggtagctctgcaatcactgtgggttcccaggctccacccttccgcagcataacgctgcccttgaaccccatggtacctgttcttttccccatcc

SEQ ID NO: 9350 - DNA, 120 bp, Homo sapiens
tcccgccttcttctctcttcctctcctctaaccctgccctacctaaacctcacccactttccaaacagctttcactcctatctccaccctagtccccacctgccacagcctggtgcccca

SEQ ID NO: 9351 - DNA, 120 bp, Homo sapiens
gcccgtggagtggggctggcaacagcagtgcaatgagggcatcagacaccaggtggcggcacagggcaccctcacctggtgccacctggtgcccctcctgcaaagggaccaagccaggga

SEQ ID NO: 9352 - DNA, 120 bp, Homo sapiens
caccgatggacaccttctagggacaggtgccctgtataacctcagaaggaggaagcaggcctgcagggcccagtgaaggactttgtgtatggagaagcccaaacaggaatccccgccatc

SEQ ID NO: 9353 - DNA, 120 bp, Homo sapiens
ccacggtgttcaatatcccttggctaaagctaggagactcagggctaatccaggacaatggttgccaggagggaaacgaactctcaaagcaagttgagttgtggcctggagtcccactcc

SEQ ID NO: 9354 - DNA, 120 bp, Homo sapiens
ctgcgaactgtggcccacagagctaattaattcttcttgctttgaaaactccagaattgggcacagcagccagcactctcccctgcatgccaaatcagatcaagtgcaggttggcggcag

SEQ ID NO: 9355 - DNA, 120 bp, Homo sapiens
gggcgtgggagctgcagcctggtttgggggtgctccaagcctccaaggagccgcaaggggctaaaaggaatcaggcagtgcttggaggggaagctttgctattccacaccctgcccctct

SEQ ID NO: 9356 - DNA, 120 bp, Homo sapiens
cttcggagcatttcctgtgcctgggtctccccattgcccccattctgctttcttctctctgctgtcatgcttgctctgagctgtaccttgcaattattttatctttccatctccttgcca

SEQ ID NO: 9357 - DNA, 120 bp, Homo sapiens
tgacgccgggttcccctgggacactcactgcgggggaggcaccgcacatgctccatccatcctgcctggagcagcagtcagttggggagggaggatggggcttgggccatgaaggctggg

SEQ ID NO: 9358 - DNA, 120 bp, Homo sapiens
ctccgttttacagagggagctcagattaaaggtgcttctctgtggtcattaaaggggtgtccagggcttgtgaatcccaatctctaagtcttttcctattttgagtatttgtacatatat

SEQ ID NO: 9359 - DNA, 120 bp, Homo sapiens
gtacgcacacacgcaggcacgtggggtgttacccaagagttcgtgctgtgcacgtgtgtgcacaggtgtataagtctggagctatgctcttgggctgtgtttagaatgggctgaaggcgt

SEQ ID NO: 9360 - DNA, 120 bp, Homo sapiens
atccgagatggtgcaacttctctgccactgcccttctttcccagtcccacaggaacttcatgtattattcagcatggacaggccacttgccaccagggtccagaggttgtgcctttgcct

SEQ ID NO: 9361 - DNA, 120 bp, Homo sapiens
gaccgtggcaggtttgtggtgcctgggatgccaaacagaaaatcaagagggtagttgtgcccaagcttcaggcacaagggctcattgttcctgggtagcctcctgaaccctgagagctta

SEQ ID NO: 9362 - DNA, 120 bp, Homo sapiens
cagcgagtccaacccctcagtgtagagctggggaaactgaggccaagggagtgaaggtcacaggacaatcaaagacagagtgctgggctgggaaaccggaccccggggctgtggttacag

SEQ ID NO: 9363 - DNA, 120 bp, Homo sapiens
gcccgcgcacttctccttgatgctcgtgagctatacacacctcctctgaggatgcaggctcagtgggagtcagctcatctacattatgaagccctcgtgagatctctgcttggatacctt

SEQ ID NO: 9364 - DNA, 120 bp, Homo sapiens
gcccggaagtacctgaactaggagtgaaaatgcaaggagggggtggggtgttcaggcccctctgggccgctcatttaatctaccaagatgctcagtagctcatccttatagcttcagttt

SEQ ID NO: 9365 - DNA, 120 bp, Homo sapiens
ccccggaagagggaggagaaagaaaaatggggttagaagaaaatgtcagacgtgggaagacctgcagggaaagagctggtagggctgtcgggccagtggctcccatttcagctgtttgct

SEQ ID NO: 9366 - DNA, 120 bp, Homo sapiens
gtacgcctgggagcccagcttcctgaagcaggtggagggcatcaggcagggtgagctccagctgctgcgcacggcggcctacctccacaccacaaccaccttcacctggatgtgcagccc

SEQ ID NO: 9367 - DNA, 120 bp, Homo sapiens
ccacgctgctcaggtgaccctgatcaccctctgggtgtacgtgtacgtggacccaaacaatgtgctggacgccgagaaggcctttgtgtctgtgtccttgtttaatatcttaagacttcc

SEQ ID NO: 9368 - DNA, 120 bp, Homo sapiens
ggtcgggtgtctggaaacctgagttctgtagatagcctcctcttaccaacctggactttctctttgggcagtgggagccatggaagactcagtcgtgggagggaccccagtgctagtgtc

SEQ ID NO: 9369 - DNA, 120 bp, Homo sapiens
gggcgagggtaggggttgggggttgggaaagtacagtctctagggctgactcacatcctcccgtaggccagtgtgtctctgaaacggatccagcaattcctgagccaagaggaacttgac

SEQ ID NO: 9370 - DNA, 120 bp, Homo sapiens
cttcggtcaggacgccgtggaccctggctgggcctgcttctgcccctgagtccgcactgctgcctctcactgaggacagttgtcggtgttggtgtcagattgtgtcagtaatcgtagtaa

SEQ ID NO: 9371 - DNA, 120 bp, Homo sapiens
tgacgaccttgtaaggagatcaccagtgctctgggactgaacccatctgctgggtcctggggtagctctgttgactgccctctgctgaaaaggagtcaggttgcacctctagggtccagg

SEQ ID NO: 9372 - DNA, 120 bp, Homo sapiens
ggacgcaggtgattgcattttatcagcatctttctcacaggccaccctccagcaaggtagacatgggtcagccctgccaactttggaatgaatcatttctttcaaataactagcgactga

SEQ ID NO: 9373 - DNA, 120 bp, Homo sapiens
tgacgttcggggcagtctgaaaaatgaattatgggctctcacgatttttatttgtccatggtggcataggtggtatttatctctcttgtccttgctctcccccacttttggagcctttgt

SEQ ID NO: 9374 - DNA, 120 bp, Homo sapiens
ctccgagaccgttaccaagagcaacctgccgagggagtcggcgcagagctccgtactttcccagcctgaattagattcctcccaaacttctccatctttccaccagcaccccgtgggccc

SEQ ID NO: 9375 - DNA, 120 bp, Homo sapiens
ctccgcaaacgcagtaacaaggcggcctgcagttcaggcgcagagcgagcatcgccgctttaatgataacaagctgttggcctcccctctgagatgaatccatctcacagatgtttgtct

SEQ ID NO: 9376 - DNA, 120 bp, Homo sapiens
aatcgtattgcactatagctttggtgattatgctcgactggagactattacaataaaagaagtttgaacttgttccatttttataccccacccccttctcccctgttctgaggtataatt

SEQ ID NO: 9377 - DNA, 120 bp, Homo sapiens
tgtcggtggagctgcagctgatagcctggcttcctccacaggttaatgtgttttggctccatcagcgcttttaatgtccacgcttaatggccccgtggcagtcccctcaccctctgtcaa

SEQ ID NO: 9378 - DNA, 120 bp, Homo sapiens
aagcgcatgttgacactgagaggtcatgtgattactttgacggagtatctccagctgtagatagttacagcttgtgtgtgtatgtagggcgtgaacatggggcgtgtggaaggcctgatg

SEQ ID NO: 9379 - DNA, 120 bp, Homo sapiens
ggacggagtagatcagaaggagaggtttttcctgaaggtggcaacagtaagagacaaggcctgggaatgtagaaccttctagactactggtggacttcctctctgcctctctccctctgt

SEQ ID NO: 9380 - DNA, 120 bp, Homo sapiens
aatcgtatttagtgatagtaaataccaggtattttaaataataactctcattaattgcatctccactgtgtactaggtactacacgaactgcttttattagtagataaatggggccaggt

SEQ ID NO: 9381 - DNA, 120 bp, Homo sapiens
ttacgaatgggtgagtcagcctggctgtggatgcatcattggtggcagggcaccatgggtttctttctttgtccagaaatagacactggtctctggactggtgacacttcaggaggctcc

SEQ ID NO: 9382 - DNA, 120 bp, Homo sapiens
gtgcgtgtatagcagccttctatgaggaactaaaggggccacctcatcttggcctctagataggactctattctttaatgagtccttcagatatgtgggttcgagtcccatagggagaga

SEQ ID NO: 9383 - DNA, 120 bp, Homo sapiens
cttcgccattcgagttagatttaagtatatgcttttaacctgggccacacacagtaatagaagaagcccgacagaaatgtaaagacctgctaatttcctttgtgatcttgggcctcgtct

SEQ ID NO: 9384 - DNA, 120 bp, Homo sapiens
tttcggctttgtagacattggatgagatttcagatctcttccagccctgtagctgcattctattctgttggccagcgcctgctcatgcctttccacaattgaagtgtctgttgcgtggat

SEQ ID NO: 9385 - DNA, 120 bp, Homo sapiens
gagcgttctctctgccttggggcttaacagaggcacagaagagcctgtgtctggctcagagtgggaattctgacttgcggtttccctctttcagtctttttcttcttcttctggagatcc

SEQ ID NO: 9386 - DNA, 120 bp, Homo sapiens
tctcggggtgcctgtggcctctgtgcctgatgactctagggcaggggtctgatgactccaggacagccagtgtcatccctttgcttgcagatgaggtggcttagaaccaagagggaggag

SEQ ID NO: 9387 - DNA, 120 bp, Homo sapiens
agtcggacacctgatctgctttgcaattttatgaggtccaacttctgatcctcagcgaggccccatttccttcctggggcagggttagtcatccggccctgcaggaggtggggcaggact

SEQ ID NO: 9388 - DNA, 120 bp, Homo sapiens
tggcggagtgcactactctcacatttaatcctgcccggtatcctgaagaggggagggccagggttgtaggtgagttgcatggagttattctggaatattccacaactacagttgggactc

SEQ ID NO: 9389 - DNA, 120 bp, Homo sapiens
aaacgaaaagacatactagaaaaaattaaatacataagtaaacagagaactaacaaatcctctcatctcatcaccatgagataacccacagtaacattttggtgtaggcttccagaggtc

SEQ ID NO: 9390 - DNA, 120 bp, Homo sapiens
ctacggttgtgtacacttttatataaatgagatcatatgtggtgtttgccagatggccttttctggtcagtagtatgtcagaggcatttttccatgtgattgtaccctacatggtcatat

SEQ ID NO: 9391 - DNA, 120 bp, Homo sapiens
tatcgatgcactatgattgacttacgcaaacccttagttaggatcatttaggttgtttgcagtatcattatgatcattgtttggtattatagccagttctggcaggaccgcccttgtgca

SEQ ID NO: 9392 - DNA, 120 bp, Homo sapiens
atacgttttacaatttgctatttattgccaaactgccccacagggaggttgtactaatttacatttctaccagttaaggcagcataagagtgagcttgagcttttggtcttaggattttt

SEQ ID NO: 9393 - DNA, 120 bp, Homo sapiens
gaccgggggttgtgtttctgtttcagattgtcatcttgaaacaaaaatggtggcaaataaaatgttttcaagtggatgtgtttagtcgtgatttttaatgggtttttgatcattgttcct

SEQ ID NO: 9394 - DNA, 120 bp, Homo sapiens
taccggttttgtcctagacaggatatagctgaagacaaatactgactttttccttcatctaatacatttggcaattacgtcttgccttgtgaaagcattaccattgttatttaaattttg

SEQ ID NO: 9395 - DNA, 120 bp, Homo sapiens
taacgttcagcttgttgcctgtttatctcttccctcctgctgctcttgtgtgcgtcctcacggcacatggggcagtgccctacactcagtagtcacccagtacccattttgggatttttc

SEQ ID NO: 9396 - DNA, 120 bp, Homo sapiens
tgccgtgacagtgtccccatcctcgtgcaggtgatgaatgggtgtccatacagccttggaaatgcacaggcctggggcacaggcctttttcctctcctgttgttaccttttacatctgca

SEQ ID NO: 9397 - DNA, 120 bp, Homo sapiens
cagcgtgggccttgctttgctaagctgagtgttagaaggcatgggaaatgaaagttgagaggttcaagagcctggggcagaggagcccctgggtctgggcagcccatgctcgccgaggag

SEQ ID NO: 9398 - DNA, 120 bp, Homo sapiens
tgccgcttgctgtgggcattccaatgaaaccactcccttgaatatgacagcggttaatcattaatatcataaaagttttagaattggagggactgaggagagcatctagttctgcccaag

SEQ ID NO: 9399 - DNA, 120 bp, Homo sapiens
agccgagacttggatggtaggtcaagtgtctgttgaatatcagcagaaatattttccatcttcctgatgaggagggaatttcaggaagaacatttttggtgtctcatttcttgggattgc

SEQ ID NO: 9400 - DNA, 120 bp, Homo sapiens
aatcgtgatgcatatttttgggcagtaaccttacttttggatttattttattccccatcctaactcatttcttcgtctatttttatcgtgttgtagctatttttgtaagacacctccaat

SEQ ID NO: 9401 - DNA, 120 bp, Homo sapiens
actcgaattccaattgaaggagggacttgacagtgggactgtcattcctggggatgatggttggcaataggatggattgggggttgaattattggggacatgcctggagggactggggag

SEQ ID NO: 9402 - DNA, 120 bp, Homo sapiens
cagcgggttgccaggtagaattccaatgttcactgcaatgaacttttcttcaaacttttgtccttggctctcttttcttccgtatgggacagggatgcatttttggtggcttgttaacaa

SEQ ID NO: 9403 - DNA, 120 bp, Homo sapiens
agacgcacgcagaaagccgtgcacatgcacccgtgtaattacaaagtgccacaggtgctgtgaaaagaaagcacagtgtgtcctacaagagagaaggggaccttatttggattgggtggt

SEQ ID NO: 9404 - DNA, 120 bp, Homo sapiens
cagcgcctgggagacagtgcaccagtagaggtggggtggggcaggtggtttagcccgagctggggtgcctggctggggacgtgcccagaggagtagggtgtgcggaaggcaggatggggt

SEQ ID NO: 9405 - DNA, 120 bp, Homo sapiens
ccccgaggaatagcctccccccagggggagttcagtaacgggtaccatttctcagaaggggctggccgcagagataagaccacagtgccaagggggccataaattgttacctgtgccctt

SEQ ID NO: 9406 - DNA, 120 bp, Homo sapiens
ctccgtgacaaggaggggtggcaagcaggaaggtcaggcctgttttgaaagccacagttcagttaagaaaataaaacactccctctaaggaatttttaaaaatacagtattttaggaggg

SEQ ID NO: 9407 - DNA, 120 bp, Homo sapiens
agtcggaggagcagagcagacccatggcaatcccagtctgaccggagcctagggcctgagggttgcaggtctcccataggaattttttttttttttgagactgcgtttgtttcattcttg

SEQ ID NO: 9408 - DNA, 120 bp, Homo sapiens
gggcgtttttcatagaaattccatgatggatgttttccccaggatgcactgccagtgtcccaaagagagacttatcagttaaacctgcctggctccagaggagtcgccgcagacttcctg

SEQ ID NO: 9409 - DNA, 120 bp, Homo sapiens
ccccgagccaggaatgcgtttgtgaaatttttaggagatgatcccagaaaagcttccttcggtcaccaagccgcgtgtttgtgtctggagatgaagtgtgtgaaggaagatgtttgctcc

SEQ ID NO: 9410 - DNA, 120 bp, Homo sapiens
gtccgatgctggggtttgaaggtgaaagttgactttacctcctgtagtgacaaagttctgtgtcagcctgaatttcaatttcctgggacttttgtctgtctacagctcaacatggtatcc

SEQ ID NO: 9411 - DNA, 120 bp, Homo sapiens
gggcggtgggggggggtgcatttaatcatttattctttttagtaggtttaattgtataaagattataatgcatacaaacgtctgtaattaggggagttggttctattagacaatgtttta

SEQ ID NO: 9412 - DNA, 120 bp, Homo sapiens
gcacgccttgaagctttggactttattgtgtagctacactcacatatgctttgatgcaaggttgctatgtaaaagttgcctccaaaaatccatgcgctgcaaagagattgaccgtcaccc

SEQ ID NO: 9413 - DNA, 120 bp, Homo sapiens
gttcggatttgaagagagaaggcctgaattctctcatttttgcagttataataataaatacttttctttaatacctagaacatgccaggagctgagcaaagtgtattttgtacttcatct

SEQ ID NO: 9414 - DNA, 120 bp, Homo sapiens
ttacgtgttcctcttaccagcccatgagggtggttctgtcatcaccctcgtcttacaggtgaggacttggagaggttcaggttctgccttcagtgccacagctgagaggtggggaactgg

SEQ ID NO: 9415 - DNA, 120 bp, Homo sapiens
caccgcacgcacccagcctctctgtacttttgaatactaaggtgatcagtggacatctgaggtgcttgatccagtgttgccaacacatattcaacagatatgcagtaactgtgtattgag

SEQ ID NO: 9416 - DNA, 120 bp, Homo sapiens
aaacgcctagggagggctccctgttctcacagaggtcccagttgagtgggacactcacagtcttgctgagtaacagatgctcacttttggtttttggatggacagatggtgggaacgtgg

SEQ ID NO: 9417 - DNA, 120 bp, Homo sapiens
ctgcgaatgatccacagagatctggggcttaattattgtcgcttgtgtcatttcggcataatatgggtagttactggagcagagtagaagtgcgggagggccagcctgtcaatcacccgg

SEQ ID NO: 9418 - DNA, 120 bp, Homo sapiens
tagcgccacgccagccgtgtgccctacagagccacaggaatggatccctttggccatctgtggctatgtggtactttcagttttcttaatgttttaatgactcccctgtcctacctccag

SEQ ID NO: 9419 - DNA, 120 bp, Homo sapiens
tgtcgaaccttccaggaggctgatgaacggtctcatacactgatggcattttctcagcccggtgaggccgccaccaccttccagagcctaattgttttgacaagcgaaggaggcaagcta

SEQ ID NO: 9420 - DNA, 120 bp, Homo sapiens
ccccgtgtgctccgggaggacagagcacgcaggaggcgggagtgttgcgggcagcccttccccatccctggctccagcgcattcattctcctcccaggctccagtcaagtctgagggtga

SEQ ID NO: 9421 - DNA, 120 bp, Homo sapiens
ccacgtataaagcgaggaaagggaacaggactttggcaggcagctgtgtgtggcaggaagtgaaccaggaaggtgctgggtgtagtcttctcccaccctccagcagtgctggggagctgc

SEQ ID NO: 9422 - DNA, 120 bp, Homo sapiens
ctgcgcttgtttgggaacagagaggttcaggaatgtcgggtctttgtcaaggttacatggctggaaaatcaaaaagacagctacgtctctctatgtctgaaggccatgtttttcagctag

SEQ ID NO: 9423 - DNA, 120 bp, Homo sapiens
gggcgccaccccaagacaactgaaacatgctttctgaaggagcaagcagcttgggctgtgcatgtaacaagtcaccaggtgtgactgatgcacacgcaggtagttgggggccgctgcact

SEQ ID NO: 9424 - DNA, 120 bp, Homo sapiens
gtccggacaagctgatgacagcgtcagccctggtgttcccatagatgcctaggtattagtttgaacaccacatgtcctcagatattcttcataccaagagagctggtccttggtacatta

SEQ ID NO: 9425 - DNA, 120 bp, Homo sapiens
ccccgctacccttaaaaagtaaatatctatcaccacttgccttcctattgctacgatgatttaaaagaagagttggttttaattagaataaacatggtatttttcttgctgcaacaaggc

SEQ ID NO: 9426 - DNA, 120 bp, Homo sapiens
aagcgttcccagtcctatccaggagtaattaaaaaatacagctgacgcttgttctcttgcttgtttttaaatgagtagctaagtatctgtcaagatgatgagcacctaggccgctgacgg

SEQ ID NO: 9427 - DNA, 120 bp, Homo sapiens
acacgaaagctgttgttttgaactgtgaggtacctggctaccccaggcacatgcattttgtggttggtggagatcatctctccgaccccagtaccaaaatgtgggatggaaggccaggcc

SEQ ID NO: 9428 - DNA, 120 bp, Homo sapiens
tgccgcgcggggagctcagcttctctgcagtacacagcatgttttgaggatcgttgggtagaattaggttggctttgttgggggaaatcccctagttgcaattcactttttaattagttc

SEQ ID NO: 9429 - DNA, 120 bp, Homo sapiens
tgtcgttttgagaatgtcacagaaatggagtcatacagtatgtaatacagccttgatactgactttttcacttggtatgatccctctggtcagttgtgcaccagttgtgtaccagctgta

SEQ ID NO: 9430 - DNA, 120 bp, Homo sapiens
atgcgacccattgcatcacagtacatcaagccgggtacacttacaaagttaaacctcactcatccgtactgatttcacaactttgtagttatcaatacaaagtctgttatcccattatgc

SEQ ID NO: 9431 - DNA, 120 bp, Homo sapiens
tgccggggctggaatgcattctggtaatagcatagggtagtcatttgccacaggccaaatgctttcctgcgtgttgtatcaatagtttctacttttcaatgctggggtgaaggttaacag

SEQ ID NO: 9432 - DNA, 120 bp, Homo sapiens
tcacgtgttccttttacacacaaggaagctgagctgctttggaaagccatgcccaagatcatgcgtaagtggaaatggagtgggatttgaacccaggatgtgtgatggcatgccaagttt

SEQ ID NO: 9433 - DNA, 120 bp, Homo sapiens
acccgctgaattgcttacagccagtttgctcctctagaaaatgagtggactggactcatatcctttttatcctctctgccttgaagagtttatgatcctccctgaacaagaagtaacttt

SEQ ID NO: 9434 - DNA, 120 bp, Homo sapiens
tttcggaattcaaaagtagcaaattagaattcctctaaaaacagtcggtagttcagaccttccctcattttgctaatttttgacagggtctttgggtcaggaccaggactgggaaaccca

SEQ ID NO: 9435 - DNA, 120 bp, Homo sapiens
ccccgccaaaaaaaatcatctcccactgaaaagatctttggactttacagtggttattctcacaagccctggacattgtctgcacacatagacaccaaacttttgacttttccaaagaca

SEQ ID NO: 9436 - DNA, 120 bp, Homo sapiens
gtccgcagtagcctcctcacctcattcctccctgtcactatcccaggcctttgctgaagagtcagggagcagtctccgctccctcctggcagagccgccacgccaatccagctgcctggg

SEQ ID NO: 9437 - DNA, 120 bp, Homo sapiens
acccgatggtcatctgcctgcccgcagactccaggcaggtttgctggcagtgtagccgggtggggtcatggagatgctggcaggaatgacccccctgtggggggcgcggagggagcagtg

SEQ ID NO: 9438 - DNA, 120 bp, Homo sapiens
cagcgctgaaaacctgctccaagtagtggtttcttgatggagttttggaaccttatctgcggctggtaaccattccttgagaacttgttggagaaaggcgagtgagcatcttaagaaggc

SEQ ID NO: 9439 - DNA, 120 bp, Homo sapiens
gggcggggggccagcatgcccgcaccctgcacagccaggtgcgacactcaaagattaatggatgatttgggtttttttttttttttaacctaaatggatgcaccttagggtctttttttg

SEQ ID NO: 9440 - DNA, 120 bp, Homo sapiens
ccacgcccagccctcttagggtcttttaaaagtaacaaggtgacctaggaattcactgcatgacttgttttacctctccctgtcctgaatcttatcccatcatgatagttggtaaagcac

SEQ ID NO: 9441 - DNA, 120 bp, Homo sapiens
atgcgccatggcccctggccttggggaacactcaccgttgacccagcaggtggttggcactcagacagtcattgctgcccaaaccaccagcagcaaagacagagcagaattaaacagagc

SEQ ID NO: 9442 - DNA, 120 bp, Homo sapiens
ttccgttgatcgggttgcctaggaacaggcagcaggttttcataagacaatgcagtagattgtcaccgatagggctattaggaagtgagctggttagcggtattattccccttgctggtg

SEQ ID NO: 9443 - DNA, 120 bp, Homo sapiens
gtgcgagacacgcccatcttcctaggcttggggcaggttcatgcaaatgagatttctcagcctgctcctctggagtcctgaagccagttttcacccctgggcttaggagagaaacctaaa

SEQ ID NO: 9444 - DNA, 120 bp, Homo sapiens
tctcgttgaagccttgtaggaaagccaggaagaaagcaggtataattgcattgtatttgtcacctaagtgcagggagaaactggctgctctgccacttcccaccctccctgagggaaggt

SEQ ID NO: 9445 - DNA, 120 bp, Homo sapiens
ccacgaaataaatacgaaggaaggcgccagtatgcatgtgtccatttaaggcatctgagccctggcctttgctgttcttccttccttctttctccgtcgggttgctgagctcaacatccc

SEQ ID NO: 9446 - DNA, 120 bp, Homo sapiens
gaacggctactagtagacacttagcaatttctgctacatacctgagagaggaaacattgcaggtcccagggactgtgagtagttcagtgcacagggagcttgcagaagcatcttgggtgg

SEQ ID NO: 9447 - DNA, 120 bp, Homo sapiens
gcacgtgaagtacttggagatgatttcacatacagaagtgatgtggtcgaacttccatagtgagtcagaggggtttggagaagtgggaggccatgagggtgagtctggaggattgtccct

SEQ ID NO: 9448 - DNA, 120 bp, Homo sapiens
ctgcgtggggctggctggtggttctttgagccctgcagttctatgcagttctatggccctaaccgccaaaaggcctctgggccaatattttggcaaccaacagtagcctcagccacagag

SEQ ID NO: 9449 - DNA, 120 bp, Homo sapiens
actcggggtggccaggaggccaagctaacgtgtcatggcttggtgcccaaacctccctcccaggatactgtgtgcaaacggcaggggcagcacagctccccaggcagggagacccttccc

SEQ ID NO: 9450 - DNA, 120 bp, Homo sapiens
caacggaaaacaggtttgctctcgggtcctgatgctgactgatgagcactggattcctggagcactggcttcagaatgatgttgaggccaagtcctagctcagcagaaaggacggctgtg

SEQ ID NO: 9451 - DNA, 120 bp, Homo sapiens
tagcgatgtggccgattgctgtaccaggaaggactcacggcctgtctgccatgtagcttgccttctatattcctgtccaatgatggttcttcggcgccaggtgattttccatcactctaa

SEQ ID NO: 9452 - DNA, 120 bp, Homo sapiens
atacgtgggggagtggggagggttggtgtctgaggagagggatctgctagctcagggatatcctgttcctctggagggaagccgctgtagtccattgtctgtagggctgcttgcaaggta

SEQ ID NO: 9453 - DNA, 120 bp, Homo sapiens
gtccgtcttagcctgaggggtagggcttggatgtggaaatcagagtgaaggggtccaagttctcaggaggtggaggagctggcgttagcaaggtgaccgagagagaagccttggccatag

SEQ ID NO: 9454 - DNA, 120 bp, Homo sapiens
caccggggggagcaacttcagagcccttccatccaccccctcctctagcccacccaagtggcagagacctctgcggtcagtccccactcaggagaggcgagaccccggggtgcgctcagg

SEQ ID NO: 9455 - DNA, 120 bp, Homo sapiens
tggcgtctcctgtgtcctgctctttctggcctagttcagtgagagcacagagttcccctccccaggctctgtaatcttgtctgcggaggcgattccaggcttgcctggacggcccctcat

SEQ ID NO: 9456 - DNA, 120 bp, Homo sapiens
cagcgagcaatggctggtttcttgctagtagggacacagatcttgaaatatcaagacaggctagtcagtttcccaggtaggctgccataagcatggactcgtgcgtccagggaccccagc

SEQ ID NO: 9457 - DNA, 120 bp, Homo sapiens
cctcgtctctggggattaccccttcccagattagatccacagccagatttcaaatcacaagcgagctccctcatggccagcccactcctgcgccacctggccctgtgtatacttggggcc

SEQ ID NO: 9458 - DNA, 120 bp, Homo sapiens
gaccgaccgcggcacgaggctcgtcggggctgtggatatgttgccacgttcctccctcggcgtggaaaatcaggagttgactctattcccagatgaaagcagagcacggtgcctaatagg

SEQ ID NO: 9459 - DNA, 120 bp, Homo sapiens
aaacgtttgcagaaatgaattggagcaatctgaattgacgagaattgtgggtttcacttccgatcagctttctgtgcctcttgaagctcctctgcataaataaacggaaatgtgactaag

SEQ ID NO: 9460 - DNA, 120 bp, Homo sapiens
gagcgctcagctccccatggcaaagcccagagccccgtgtcctcaggcaggaagccaggatactgagttcttgcccttagcttgccaggaaaataaggccatctctaggcctcggtttcc

SEQ ID NO: 9461 - DNA, 120 bp, Homo sapiens
agtcggaccgggaatgatctagtgctttagaaaaggttagtgtcatgaccaaggaaggcaacccggcccaaggagcagagggccccgccagctatggcaggatggcagcagctacagtga

SEQ ID NO: 9462 - DNA, 120 bp, Homo sapiens
cctcgtcctctgtggactgaggccccgtgcccaccagatctcattttcctccactccccacctgcttaggtccctgtaccaccagccttgcaaagtccccattaagtctgctagcaggaa

SEQ ID NO: 9463 - DNA, 120 bp, Homo sapiens
acacgtgaaaggctgcaacttaaaaaacaaagcaacaacgaaaaacagaaaattactcagcatgtgaaattctaggcaaagagcagtgccaggcctgaggttcgggtagctggtgccttc

SEQ ID NO: 9464 - DNA, 120 bp, Homo sapiens
caacgtcactcaggagacagaagtggtggagcatctaggggagggaacttaagatcacagatgttcatctaatcactgagctagtgatggggccaaagtaggaaacctggagtttttcag

SEQ ID NO: 9465 - DNA, 120 bp, Homo sapiens
agtcggagcgctcaagacttgagcgtttgctgtcctggttggcagaggtgagggccactggactggggtctaggatcctgctgtggcggattcattgaaaaagcccacgtgacatgaagc

SEQ ID NO: 9466 - DNA, 120 bp, Homo sapiens
catcggaacagggaactctggaaggatcaatggtcagaacattcgtagtttgtcctgacactcattggtggtagatgagagagtggctcaaaatcagaaattgccattgttatgagaagt

SEQ ID NO: 9467 - DNA, 120 bp, Homo sapiens
tgacgctgaaccaagtgtccttgtagggctgggggccagcgtcggagcccttgtaatgtgtcagccattcttgatgctagctgtctggccagcactgcagcaaaatgcacatcatcccca

SEQ ID NO: 9468 - DNA, 120 bp, Homo sapiens
ccacgcccaggtccttgagctcagctagaagaccctagagcagacacagccaatgcctggttccaacctagaggggtccaaagcacaggtcccccaccttcttcctggaagagtgagcca

SEQ ID NO: 9469 - DNA, 120 bp, Homo sapiens
ccacggcctcctttagcccaggcccagcttaccattagccagttgtctctccttgggcagttgatctgtgtgcagcctgtcctgggaccccagtcccataaatagagcccctttgctgtc

SEQ ID NO: 9470 - DNA, 120 bp, Homo sapiens
tttcgtttttgattttttttattagttacaactccaaaacacctgttgtccagtaaaacatttcacacctcccctgcctgttcttagattgtatgtatctgtgggactgaactaaatgca

SEQ ID NO: 9471 - DNA, 120 bp, Homo sapiens
caccgtagtagatgtactggtagccgtagctgtagttgtagtacatgcattgttgagttgatattacagggtctttgacggctcggcacagcacggccgtctgaaggatagtgcggggac

SEQ ID NO: 9472 - DNA, 120 bp, Homo sapiens
ccccgttcccccagtccagaactgggtcaccaccctcagctctagccttcctcactgaggtctctgttgatatcgtccaattatagtgcaaaaatggagccaggattggaaggagtctta

SEQ ID NO: 9473 - DNA, 120 bp, Homo sapiens
gcccgctgctgacctcagcttcattcattttccaagggctttcagaccaaacctgttgaggataaaatacatcagctctaatcaataattttgtaatagaaatactgtgcacttgataaa

SEQ ID NO: 9474 - DNA, 120 bp, Homo sapiens
ggtcgttgctcttgtgtgggctcaggagctcaggcccagctgtctggagcaggggtggaaagtgtggtggtgtccttcatagctccataagggcgcgcagagcacaacagagaggggtct

SEQ ID NO: 9475 - DNA, 120 bp, Homo sapiens
gaccggtgcatgcctggcttctggcctcatacccagctctattctctgcacaccagtcctgaatagctacagtgctcaaccgaattttggcgcgcccgcttccccggcaggctccaaccc

SEQ ID NO: 9476 - DNA, 120 bp, Homo sapiens
acccggcgcggcccggaggcttcccgggggccaacagcccaggacctgtcgccgatctctacggccctgccagccaggactccggagtggggaattacataagtgcggccagcccacagc

SEQ ID NO: 9477 - DNA, 120 bp, Homo sapiens
agccgggctcgggcttcggccacggcatagctgtaagtacctgccttcccctgccctcctgcctcctccttcctgaccagctccttgtggcctgtgggtgtgccaggaaagcccaacatc

SEQ ID NO: 9478 - DNA, 120 bp, Homo sapiens
catcgggggcagaggagaggacagagggtccccatcaacatcacaccagctcctgagggctgaagcctccgtcgtcttagaggtgtcctgggtgcctctcgtgtggctgtgtgatggagc

SEQ ID NO: 9479 - DNA, 120 bp, Homo sapiens
gtccggttcagatcaccactccatcaccttcacacagtgcatccttgagccacttcgataacccgtctgaatctcatttccctggctgcaaaaccagaatctctatgctttcctcaaaag

SEQ ID NO: 9480 - DNA, 120 bp, Homo sapiens
attcgaaacagtgtcccacgctggcacgtaatagggcctcagtagtggccaccttccttgatccccgctttctggacactgtcatgtgggctgggacctgagagctgggaaatgtcccag

SEQ ID NO: 9481 - DNA, 120 bp, Homo sapiens
cagcgctggagcccgggaggtggtgtggggatccaagccctctcccaggcagtttcctttgctaatgtttcttacagtttccaggttccaagtaagttcccatttgcgttccttagctgc

SEQ ID NO: 9482 - DNA, 120 bp, Homo sapiens
tcccggtgtgtgtgagcatgaatgtgcctgagcccacttgctcgctgtcccttccattttggaaacagaaaattggccaacctttgccctagccagcctcagcattttggaggcagtttg

SEQ ID NO: 9483 - DNA, 120 bp, Homo sapiens
gtgcgtctgcagtcccaggccacgttcctgtcagactccgcttctgagtgacagctggcaagccctgacttgggggccacgctgcggagaacaaaacatgtgcagacagtctagggcacc

SEQ ID NO: 9484 - DNA, 120 bp, Homo sapiens
ctccgctcccaagccagtatcacttaagtcagtagtctgatgaatctaatcccttcggatcaactgtggtaccaaatccagaataatattattcacctgagagctgctcaatttagggga

SEQ ID NO: 9485 - DNA, 120 bp, Homo sapiens
tcacggctgtcacacttgctcacctccctgtctctggcttgctcactgttaccacacattgccacactctcccacagacaccctctcagcaggattctgccctcccaccttcctgtcact

SEQ ID NO: 9486 - DNA, 120 bp, Homo sapiens
aatcgacaggcactggaccagcctcttaggctgaggacagaccggatcttcctgtctccaccctctctctgagcaggaacagctctgcctgttcctggttggatgtgaacaaaggtcaat

SEQ ID NO: 9487 - DNA, 120 bp, Homo sapiens
atccgctgtcaaggaccctcctccctcccttgcccactttctgtgcccgcacgctgtggggcaccagagtgttccaacagggagcacctttcctcggtggctccctggcccatccctgcc

SEQ ID NO: 9488 - DNA, 120 bp, Homo sapiens
gcccgtttttcctttgatctctgtcttgctctgaatatccctacaaaagccttttgtgtgaagtgcagggtgcgccttccgtggctgcttgctgggccttccgctgtcttgggtttattg

SEQ ID NO: 9489 - DNA, 120 bp, Homo sapiens
tcacgtgtttcaaaattcaaaagatacaaggagtaaagttcccttctctctccacccctcagcagcatagttcctctcctcagaggcaattgttctcttcagtttcttgtaaaagattct

SEQ ID NO: 9490 - DNA, 120 bp, Homo sapiens
ttgcgctctgcctccctcaagtctgagagatacttccacgtgctaagccttcgttcagtgttataaagggtataatattataccctttccctcaagattcttatcacttccagttggctg

SEQ ID NO: 9491 - DNA, 120 bp, Homo sapiens
tgccgatgtcctttgccaaccctccaaaggtggatgggggccaaggagcaccccccacggaagaggggatggggcacatggccgcatcagccagcctggctgtcctgctgccctcgccac

SEQ ID NO: 9492 - DNA, 120 bp, Homo sapiens
aggcgagccagcccatagcatcccagctcagcaatcatcgctgattaaaaactagttacaaagcaatgaagatgaaatcctgcattaaccaaatgaccccatccatggccaagcccagat

SEQ ID NO: 9493 - DNA, 120 bp, Homo sapiens
tgtcggcaaacgttaacggctgtttgaatttctgggagatttacggggtagtgacagcatttggctggatgggactctggctttttgcttcattcccagatgtgcctgtgtgtttatggg

SEQ ID NO: 9494 - DNA, 120 bp, Homo sapiens
gctcggctgtgcttttatgtgggtttaatctgaatatgccggcttgtgtaaagtagaaatgtattgtattgccaattttcagagaacctgaattagctcagctattctgaacataattta

SEQ ID NO: 9495 - DNA, 120 bp, Homo sapiens
tctcgcactaatcagagtcatggtcatgaatatcagaacttgatattgaagaagcataaaagtgctcatcaaagaattaggtgacggaaatggcaggaaacagcataagtggatgcttct

SEQ ID NO: 9496 - DNA, 120 bp, Homo sapiens
ccccgacccagcccctgcctcccggtccaggccccaccaatgagtcactccttgctggggtgggacagctgctgccagaggccattcctcacccgatcccagccaggcaaagtgactgac

SEQ ID NO: 9497 - DNA, 120 bp, Homo sapiens
tgacgcaaggtcacccagcagacagttggtggagcagggagagctgtgagcattgcattgctgtgagcatagcattgtaggttcttttctgacacttcagcatcccagaagggtaggccg

SEQ ID NO: 9498 - DNA, 120 bp, Homo sapiens
tcccgggcaccctggctttcccgctgacatgatgacacctactggtcttagcaaaaacagcaacttcttgattccactacctaagagctagatggggattgaggagctgataaaaacagc

SEQ ID NO: 9499 - DNA, 120 bp, Homo sapiens
ccacggggaatggtggaagtcataaccagatctgcaaaagaaaagtagtaaaagtcacatggaatagcactttttccatttccatggtgctttttaatgacgttgaagtttgcttctcag

SEQ ID NO: 9500 - DNA, 120 bp, Homo sapiens
ggacggtatttccacaagagcacagcagagactagaagcaagtgaatgctgtcagcagaagaccccaggcttggtggcctcccaagccttcagggcagcatcctcagcagggcaacttaa

SEQ ID NO: 9501 - DNA, 120 bp, Homo sapiens
atacgaggaaactaagaaagccaatcactttgtccccttaaaggtctcaagaaaaaggagttctaacatctccaggccttgaacccactgtcagatgggtttctctgtacctggcctatt

SEQ ID NO: 9502 - DNA, 120 bp, Homo sapiens
ctgcgggaccctgcccatggcttgccagcaaaagccagatggtttccccaggaccccaccccatcctatgccttcatctgtctctgcaaatgaaataagccttggtccttttggggattg

SEQ ID NO: 9503 - DNA, 120 bp, Homo sapiens
tcccgtgagttagaaccacatccttgggccccttctaactacatcactgactagaggggtggggctcccacagttggctgaggccgatcacaggccccttcctgggactggggctgggtc

SEQ ID NO: 9504 - DNA, 120 bp, Homo sapiens
ggacgggcaaccaactgtgtcttccacaaagagtaattagatctaaggaaaagactcggtgaaagaaccatgcaaaatcctcccaaatgaactactaatgtgagctcacaggcagagtgg

SEQ ID NO: 9505 - DNA, 120 bp, Homo sapiens
acccggtgcctcctatggcctgggcaaggatactgtgatacaaccggtgtcttctcagatgtcctcataaaatgtcttccatccatccttccattcattcatccatccatccattattcc

SEQ ID NO: 9506 - DNA, 120 bp, Homo sapiens
cagcgctcccacaagagaattccagcagccacgcctgcacctcatcccatcttagggcaaaactccccttctgcttggaaaagacacacgataggcaggggcttatgctttccaccaggg

SEQ ID NO: 9507 - DNA, 120 bp, Homo sapiens
gcacgttgggactccagaggtcacgtgggcctggggtttaaccctgcaatgccgacacatgcacgcatgcacacaaatacaaaaccacaagtggaattcctagtaccctgcccagcctgc

SEQ ID NO: 9508 - DNA, 120 bp, Homo sapiens
caccggcatccactgatctgctccctgctgggctgttggagctaaggagggacaagtttgtctcccacccacttccagggctgtgtccttggcttcgatgaccttacaaaggctctcacc

SEQ ID NO: 9509 - DNA, 120 bp, Homo sapiens
actcggggctcgtagaaccaaatgaagaatttgtaagctttcagccacctgaaattgtggcgctttcccccaccccatgcacttaataagagctgacagcctgcattgttctgccacgac

SEQ ID NO: 9510 - DNA, 120 bp, Homo sapiens
gtacgctgcagcccagtgatagggcgagagcagcagggggacaaaggcagcacagccgaggaggggcagagcgaggggtgaaacataaagactgagggctggggggggcgactcctaatc

SEQ ID NO: 9511 - DNA, 120 bp, Homo sapiens
ccccgggaacggcagcccactgacagtggagaccaggagctccagatggctttttgtctcaataaaataaaaaatgtaatctgacaggctctgggatgggactcagggaaacaaaagtca

SEQ ID NO: 9512 - DNA, 120 bp, Homo sapiens
cagcggagcagggagcgggagtgggccgggttaaaggtatcagagtctgagaaagacaaaaagaagtggctgtctctttgagcaattatgggctttgcaaatgacatttaattccagagg

SEQ ID NO: 9513 - DNA, 120 bp, Homo sapiens
cctcggaagaaaggtgataactttgccaattacccacgggtgtgggctctttgtgtccacactcttctccccaccccaagtcattaggggatgatataaagatacagggcttcctggtgc

SEQ ID NO: 9514 - DNA, 120 bp, Homo sapiens
gaccgaaaagtgatgagctccatcgaattgcacagacgtcctgtaggagaccagctgccgtattaatgtggcttctcagaggggaacacacccccacctgcttcaccaggagcacacaga

SEQ ID NO: 9515 - DNA, 120 bp, Homo sapiens
tgtcgctttttattaagtaatctctgcctttcagatcactgcatgttttcttcccaaaggtctttgttgctgtgtaggcccagcacacagcaggttcccaataaatattaaacagcggat

SEQ ID NO: 9516 - DNA, 120 bp, Homo sapiens
tcccgggcactgagccttcccttttcccatctgaaaatggagcccctgcccatgctatgggagtcagcctgtggctgctggcagtagtggcaaagccacccccttgtccctgatgtcaca

SEQ ID NO: 9517 - DNA, 120 bp, Homo sapiens
cagcgggaagccagatccgagaaggcaatgggctccgggagggcagaggaggtcacctgagctgcagagaaggggcagggccatttcgccccactgggcgggagccagcaggagctgatg

SEQ ID NO: 9518 - DNA, 120 bp, Homo sapiens
cctcgtatgcactgaatattccagaaataaccctgagcacgcctagggtttccactgagcacctgggaaaggagaggctttgaagaacaatcctgcatttcctgcagaattttctaggag

SEQ ID NO: 9519 - DNA, 120 bp, Homo sapiens
ctccggaggccatcgtcttggaatctacactgcttccaggttgaaggccagtagcatcaccaccagccccacagccatgttcttctttcctgcatctttatttcgcgtaacagtagaagg

SEQ ID NO: 9520 - DNA, 120 bp, Homo sapiens
attcgggttttgcaccccaaaacatacttggtgctaatattattttccccgtgtcaaaaacagggaaatcattcatttgttcacttgacaaatatacttccaaaaatctattaggttcca

SEQ ID NO: 9521 - DNA, 120 bp, Homo sapiens
cagcgtcaggatttgaatccagtccttttgactgagacttagagaggaaagaggtcagagcccttcccctgtaacccacctgggtggcacccttagctctgtgctcctctggcctcacat

SEQ ID NO: 9522 - DNA, 120 bp, Homo sapiens
acccgaccccaccatgcttagtgtttaggtatcatctcgggagctcagctgcctggattcatatgcaggtactaccacctcttactgagggtagatgttgagtaaggactttaacatctc

SEQ ID NO: 9523 - DNA, 120 bp, Homo sapiens
aaacgcacgtagtaatactgatttcatataattgttgtgaaggattcggtaaagtaccctaggagtgtgtggcacacaataaacactcgataaagagctaccatcttcataccacacctt

SEQ ID NO: 9524 - DNA, 120 bp, Homo sapiens
gaacggacggaggcagagactccaccttcaggccaaagagcctctggtgggggtcatcttgcccttttccatattccaacttttatctgctttctggatttttttttttttaaagggagg

SEQ ID NO: 9525 - DNA, 120 bp, Homo sapiens
gaacgcctggctacaaaaggggctgtaattggctgctgcctataggggccccaggtccttcctccaattgcaaggcagcaactccgaagttctaagtcccatggaaagtggcagtggttg

SEQ ID NO: 9526 - DNA, 120 bp, Homo sapiens
ctgcgactcattttaccctttcatttggggcagagaagaaagggaaaagtgtgtaaatcaatagaactggaagtggtgtctatcccgtgtgttgcgtggctaagcaaggcacccagcccc

SEQ ID NO: 9527 - DNA, 120 bp, Homo sapiens
tatcgatgcactgatgggcaccgagagccaatctgagcctgggtcccatcaccccacccctgtataagccacaggaagcttcctgaagctgtcaaagggcgctcaaatgagtgtcccact

SEQ ID NO: 9528 - DNA, 120 bp, Homo sapiens
caccgaggcacttgttaagtgaaaaaaacaggttaatcactatgtcaccacttgtcaatcacaccaaactgaggttagacctggaggtgttaatacttatctatcaccaatctcctctaa

SEQ ID NO: 9529 - DNA, 120 bp, Homo sapiens
cttcgaaattcaacatgctccagacaatagagaccagaagaaacagtcaaagaacctataagctactctgcagtggtaatccagcaaccacctagttactctaagagctcacaatacaaa

SEQ ID NO: 9530 - DNA, 120 bp, Homo sapiens
cagcgctgaaaccaagtttaaataacttacttaaaaaaaccactccagatttaagtatttaatagtaccttactgcagcaatacacacatacacactcacatacatgcaataacacaatc

SEQ ID NO: 9531 - DNA, 120 bp, Homo sapiens
agtcgttaacgttaagttttcacttgactctactaaaaggtttggttgaaacaaaatctgctatgaagcaacctggaaggcatctgtgaaggcagcccatagcaaacacctgtcagttgt

SEQ ID NO: 9532 - DNA, 120 bp, Homo sapiens
agccgcaatgaaaccaaaatttcaccatggatcaggttcttgacatttatgagtagttactctcttggttctgatactttcaaaattctccatactgataaacatttaggaaatgatgga

SEQ ID NO: 9533 - DNA, 120 bp, Homo sapiens
ctgcgctggttattaaaagctctacacatggacaacagctgtactcagcatctactctttaagctgtgaataacacatcaagcttacctgctgctgtccacaaatactacttgaagcact

SEQ ID NO: 9534 - DNA, 120 bp, Homo sapiens
cctcgtatttctgcagcttcctctttcttcccacctctcctttcactttctcccctttcattcagaaatgaatgctcagagagcagatggcaagtagtcaacccaagccagtgaaaacac

SEQ ID NO: 9535 - DNA, 120 bp, Homo sapiens
acacgttatccctgtcttttagcagttcatactttaaaggagaaaggcatcatatacttattcctcacatatgaaaagatattttcaggccaatttatttataatatgggacaaaatgat

SEQ ID NO: 9536 - DNA, 120 bp, Homo sapiens
ttccgtggcctcctacatagcacatctagtgaaactgattctgaagcctgatgaagccccatgtatgttctatacactttagctgaggtgttaactctaatcagttaagaaaagcacatg

SEQ ID NO: 9537 - DNA, 120 bp, Homo sapiens
tcccgagagaactgagaaaattcaggtaaacttgactattagagggtaggtttggagtttgttccagtgatctccttaaaaatggcttaggagtttgagataaaactcctgtgggaaaca

SEQ ID NO: 9538 - DNA, 120 bp, Homo sapiens
actcgatatatcaaatggacagcactcagagacagctcagatacagccccacgttcaggctgtggtgagaattccaacccagaaagatgtagtgaagatttccaaaggccagccaggaca

SEQ ID NO: 9539 - DNA, 120 bp, Homo sapiens
gtgcgtaacgagcactgggaaaggaaatttttaaagggctatttgctcatttgttttcatataagtgatagttttgacactgtagattaccaactagggttgctgaatacaaaaactgat

SEQ ID NO: 9540 - DNA, 120 bp, Homo sapiens
ccccgaggcctcccaactggaaaaagcaggctggctttaaaaagcaacgtgatagtaaaacaagaatttctcaccacaagatctggattcaagttctgggcctgcccctttaacatctct

SEQ ID NO: 9541 - DNA, 120 bp, Homo sapiens
ccacgaccctgtgctgcgggcaggctatggtccaggagggacactgggtccttgaagatacaggttctctgttcttcccagctgggctccaggagtcacatcaggagccagagaagggca

SEQ ID NO: 9542 - DNA, 120 bp, Homo sapiens
ctgcgggacgtttccatttggcagagaaagtgtggtcccttaggggctctcaatccaatccgacaggagagacaagagctctgcacacatggagtccaagaaagatggaggaaagaagac

SEQ ID NO: 9543 - DNA, 120 bp, Homo sapiens
tcccgatcctggccacagacccagaggtcccaaccatcttgggaactgccctggactctggcaagagttagggtgagacccagaccccccaagttctctcctacacatctacaaggcccc

SEQ ID NO: 9544 - DNA, 120 bp, Homo sapiens
gtgcgccaggcgatcagagctgactcctctcccttttcccttggaggtgttgatagtaacagcagcgatgagctgccaagttggcaggagaacagagcgactgtgcactgcggatggagg

SEQ ID NO: 9545 - DNA, 120 bp, Homo sapiens
gggcgggaagcagcaagccggcagagggctgggccagaacgacagtttgtttatcctgaaattgaaagggtccctccagtctcagccaccagcatcttgcaggagggagggtgacttcct

SEQ ID NO: 9546 - DNA, 120 bp, Homo sapiens
agtcgggtgggtggaagggatcttttggttgggcctgaagccatcagccagcctggccccagaggcaggacagagacccacctttgttcctgctgttgaggtggctgtggagtttctaaa

SEQ ID NO: 9547 - DNA, 120 bp, Homo sapiens
aaacgaacctgggaccttgggcaagtatttgaatcctttgagcctcggagattaagaacatttactttaaagctttgtgtgaggattcaataaagtagtgacggcaaaaatttgtttcct

SEQ ID NO: 9548 - DNA, 120 bp, Homo sapiens
ggccggggtgaagggaggagctggcctctgggttgccctcaagagctcaccagctcctcacatcgcctctgctttttccgggcttcctgctccaggctctcgcatttcttccgcttcttg

SEQ ID NO: 9549 - DNA, 120 bp, Homo sapiens
ctccgattcctgaggggtcagaaccaagtgctcctcatgagggaaggtacatctgcccacagcaggctgcctccagcccttgacctaggacttaccagctgctgcaccctctgctctttc

SEQ ID NO: 9550 - DNA, 120 bp, Homo sapiens
tcacgggtaggttgtccgcatcctcctggggcgtggcctggaaatgcccaggggcaaggggctggcacctgagaacagggccccagggcagcctgccccagcccagcctgcccagagcag

SEQ ID NO: 9551 - DNA, 120 bp, Homo sapiens
ccacgtgtgccctgggagatgggtcctttatccaggccaaagctttccctttttagcttccagcagcagccctgctctgcactcaataactgtcctgggtgtccttcagcgactggcaga

SEQ ID NO: 9552 - DNA, 120 bp, Homo sapiens
ccccggggatgtggtgttccccaagataggggttctgtatcatccaaatctgggcttggcctagagcagcgcaagtccagccagacccttctcctggcttcccccaagcccaccctacca

SEQ ID NO: 9553 - DNA, 120 bp, Homo sapiens
ttccgattatccgtgcaaactttgggggaggacaggtcttgatgggagggtgcatctcccttccagggccagccagggagacaaaatctgagcaagaagcctccccccacccggaggtct

SEQ ID NO: 9554 - DNA, 120 bp, Homo sapiens
tggcgagaagccagacccttaagttctgggggtcctaagcgggtccctggccctcgagacaggggctgcctaagccccccgctcagtgagggttgcctgtacctggagccggggcggacg

SEQ ID NO: 9555 - DNA, 120 bp, Homo sapiens
caccgccgcccccgggtagctggggccaggcctggccagccaggcgggcgctgacgggggcgtccccgctctacggcggcggcgggaggaggcggcgcgggctgggccccgggcggctgc

SEQ ID NO: 9556 - DNA, 120 bp, Homo sapiens
ttgcggccgggccgtaccactggcagcgcggcaggggcggccggccaggccccgctgggcgcaggcctatggagggcggaaccctggagcccccaggggagggcacggcgcaggtacgag

SEQ ID NO: 9557 - DNA, 120 bp, Homo sapiens
gcacgggaggcttggaggtggaccctgcccaggacgggaaagctccccagcccctgggagtgcgcacaccaccactgagtccttggggttctgagcacggtgcaggggagatcccggtgg

SEQ ID NO: 9558 - DNA, 120 bp, Homo sapiens
ggtcgttccccccacccatctgcacgcacccacacacctgcccttgcgccggcgctcacctctcccggggccccgggagcaggcgcccctgctctggcctggagagcagggcccgggggc

SEQ ID NO: 9559 - DNA, 120 bp, Homo sapiens
ggacggcgggagcgggagcgtctcccgctggttgcgcagcgcgatctgcctctgcagccgcagcacctcccgctgggactcgcgcagcagccgatcgaagtcccgcacgtggagccactg

SEQ ID NO: 9560 - DNA, 120 bp, Homo sapiens
gcccgccccatgccatcccctgcagagcccttcgccttgctggaggggctccgatgcgcgagactgtgcacaccctcccatgggtacatgcctggttacatgtgcatgcgtatgtggcca

SEQ ID NO: 9561 - DNA, 120 bp, Homo sapiens
tcccgcgagcccctatgcggtcattctcagtaacttatttcttgggtgctctcaatgtgcccagcactgtgctaaataccttgtgaacatcccttcacacaggggatgtgtggatgcata

SEQ ID NO: 9562 - DNA, 120 bp, Homo sapiens
caccggcaaacagcctcaagcctggagcacagaaatgcccaggtctgggactcatggctccacccccttctcccctctcccacctgggccgttgccaggggaacctactcccagcaacct

SEQ ID NO: 9563 - DNA, 120 bp, Homo sapiens
ttgcgtctcattaacatcttgtctgcatcccacaacaggcagatggccctgtgcagggctgagctggaagaggtgaccagggcctcctcgcaccttgcccaccagagtgagcctggcctg

SEQ ID NO: 9564 - DNA, 120 bp, Homo sapiens
tcccgctgcaaggcagcaatctgcttgtccttggccagcagtgcactggctgtctcactgaggtcccgggctcgctggcgggctagggccttccgacacaactccaagctggtccccggc

SEQ ID NO: 9565 - DNA, 120 bp, Homo sapiens
ggccggggcaagggggcactcacctagccagaggaggggtaaggccaatggtcacctgagggctggggcacttctcccactcctcatctcctcccaaaggaggagttagcatgaaaacct

SEQ ID NO: 9566 - DNA, 120 bp, Homo sapiens
tgccgccagcaccagcacgtggtaatccagaatcctgctccctgcctgctcaggaacctccccatccagctcttctctgccccctgcagctccagaaacctttggcctccttgcctggcc

SEQ ID NO: 9567 - DNA, 120 bp, Homo sapiens
gaccgtgactcccaagcttcagacagccctcaggcccagccctggctcccctcttccttggtcacccagcctccgcccagcagcctcctttcctcaccaccctcaggttcgtttcctgca

SEQ ID NO: 9568 - DNA, 120 bp, Homo sapiens
tttcgggccctctcctccaggcgcttggcaatgaccgccagctcggcgttcttcctcttcagcctccgcaccttctcttctgtctcagggaagctgctcttcctctgacaaggggtcagg

SEQ ID NO: 9569 - DNA, 120 bp, Homo sapiens
gaacgcagcaccccagtctccaagcctcaccagcatctggttttcctccttaaggatggcacagcgctgccgcagctcccccagggccctcagcagctccagattgggcctgtccccaaa

SEQ ID NO: 9570 - DNA, 120 bp, Homo sapiens
gaccgaggacagcacctcagaaacccacgtcacccagccagagccttccctgtggaagcatccaccatccatggtccaaggagacatggagatgaaacggtttcccctatgtcccaggcc

SEQ ID NO: 9571 - DNA, 120 bp, Homo sapiens
atgcgagctcgagctcccactcccatccctccagactcccctgccctcccccaaagtcctgttccttccctcttctacaggagcctgctcacacccaccccaaccctgcctcagcccagc

SEQ ID NO: 9572 - DNA, 120 bp, Homo sapiens
ggacggggcagcagcagggccagatctagacagacaggcaaagagggtcagaaggacagacaaatgacgaaagaaatggagcccctcagatttctgctcgatgaagagaggacagatagc

SEQ ID NO: 9573 - DNA, 120 bp, Homo sapiens
gcccggtagttctcataatgtgtctcccgtgtcacatccttcaggtcctgcatgtgggtacgtaccagcattgtcctcagcttcacaaagtcgcagtgccctgggttttccactgcatag

SEQ ID NO: 9574 - DNA, 120 bp, Homo sapiens
ccacgatgccccaggggtagagtcgaccccgaactcgccgccctctggcctctactacagtgttgctgccaattactgcaaatgggatgctttcctggaagaggttaggggtgcctgtca

SEQ ID NO: 9575 - DNA, 120 bp, Homo sapiens
tatcgtcatcttctctgcttcattctaggaagccagggtcctttcccaccctgatagcctgaatatagaattctactccctttttctacccggaagaaataagataggaatgggatgccc

SEQ ID NO: 9576 - DNA, 120 bp, Homo sapiens
gcccgaatgatagggggttgtggtaaatccagcttttctttcggcaggtagcctagagggtgcctggagtttaaacaaagttccaccatttttcccttttgcctattcttcctcaccttt

SEQ ID NO: 9577 - DNA, 120 bp, Homo sapiens
gtgcggcacctaaaatgttgctagtgaaaggaaaaagggtgacagtttattcggcatctactatgtaatcaactctgtgctacatgttttcacacttcacatgtgtttgtttttaaggct

SEQ ID NO: 9578 - DNA, 120 bp, Homo sapiens
ttccgcctcagcctcttctttcttatgtccctaccccattatagaatcatagggcagaattggaaggaacattaaaaatcatctattccaatcctttccctcttactttataaaggagga

SEQ ID NO: 9579 - DNA, 120 bp, Homo sapiens
ccacggaacttagctctaagccaagaatattggggtctaatctctttctaatcactgtaccacaggcctaacatgaggcatgctgggtgaaataaaagctgaagactgactttgagccat

SEQ ID NO: 9580 - DNA, 120 bp, Homo sapiens
attcggagagctctgagagaacttggcctgggcacaagtcccatgccaacttggctattatctcactgcctgaaagtcccttgccctctctgggcctctgtttcccccactgaaagagaa

SEQ ID NO: 9581 - DNA, 120 bp, Homo sapiens
gagcgactctgtctcaaaaaaaaaaaaaaaaaaaaaaatcttcacatatgcatctggccagtggtcacaacaggctaatttagagacaatgctatgatcttagtggtacaatacaaaata

SEQ ID NO: 9582 - DNA, 120 bp, Homo sapiens
tagcggtagctgcatatttgtcagaaattgaagcctctttgggtggcagttctccccccaactcccaataactcaaattcagaaatatatcttacacagcaaaatctgttattaaaatta

SEQ ID NO: 9583 - DNA, 120 bp, Homo sapiens
aaacgatgatgtctattgtggcagctgaacaaagtgagacttacagaactggaactgctgccctgacagcaactgaagcagaaagagaagaaaggagcttacaaccaggacactcaaact

SEQ ID NO: 9584 - DNA, 120 bp, Homo sapiens
gtccgtctatgatccaattccaatcagtctgacaagtcactctgatccagcacgattatcctatgcacatgttttttaaagaacaaaaaaggaagtttcgagttggtatgtgtgtttttt

SEQ ID NO: 9585 - DNA, 120 bp, Homo sapiens
gggcgattataaccaacagtgtgtcatggaaatgcaaaatgactacagagcaattgacagcagcatcttctgtattctctccatattaaacctgttctttttttttttttgagacggagt

SEQ ID NO: 9586 - DNA, 120 bp, Homo sapiens
actcgtccctgcctaacagatgagaaaactacatgatttgcttaagaatcaatgacaggcctggactcctctaaggctcttagaacagaaaaagaagtcaaaagacttgcaaatgaaaat

SEQ ID NO: 9587 - DNA, 120 bp, Homo sapiens
gtgcgagttcagtgcgtcacagatctcctaagtgagacagatctgagatttaaacacttgagcagatgataaagcagcaaactgcttaatggttgatgtggaatcttatgattaggcttt

SEQ ID NO: 9588 - DNA, 120 bp, Homo sapiens
agccgcacagggcatttgagcatctgatgtggttcaagtttggtaaactagtttagagatgctgtgctatttgtggtgagaatgcagtgtgactgggaatgatttatgaagaaggtatta

SEQ ID NO: 9589 - DNA, 120 bp, Homo sapiens
gtacgtgggtggtttccatggtacaagacaacaactttcacagagagagggcacttcagcttgagctaattgggcatgacatgttccagtgttctggtgtgtaaacacagataccctaat

SEQ ID NO: 9590 - DNA, 120 bp, Homo sapiens
ccacgttaacttagtccgccaggagatgttcccccatgatcctgctgaggccctgtgcagggccttccgggtcactgatgagcggtttgtgcagaaagcagccagggaggtatgcccctt

SEQ ID NO: 9591 - DNA, 120 bp, Homo sapiens
ccccgatcctgagtcatctcattagcatacactagcaaggcccaccataaataactcctaacacttgaggaatgccaaggatttagagggcacttcccaggaactaggacaaaggccaga

SEQ ID NO: 9592 - DNA, 120 bp, Homo sapiens
aaacgtttacaagagtctaatcaccctaaactagaaataacccaaatgggcaaatgaatgaacagtggtatatccacacagtggactactactgctcagcaataaaaaagaaggaggtgc

SEQ ID NO: 9593 - DNA, 120 bp, Homo sapiens
gaccggatcctagaacagaaaaagaacatttgtgaaataactggtgcgatctgaacaaattctgtagtttggtaaacaatattgcaaccaggattaacttcttagttttgatcactgttc

SEQ ID NO: 9594 - DNA, 120 bp, Homo sapiens
atacggaaactcttgcacaattttttcaactcttttgcaaacctgaaattatctcaaaattaaaagctaaaaaaaaagaataatctttaggttttaaattattaggtatcagaatgttgg

SEQ ID NO: 9595 - DNA, 120 bp, Homo sapiens
acacgttcacagacaacacaagcattaatgtatctctagccctaagaaaactctattcaggagagattttccaggaatgaacttgagataaaatactaaatacagaagcaaggtaacagc

SEQ ID NO: 9596 - DNA, 120 bp, Homo sapiens
cagcggtgttcccgacatcaccaaggaactcagagcagctttagtatataaggtggcttggaaacgagggggaaactactttcctgtcctaaaagcaaacaggtctgaactaaaagctat

SEQ ID NO: 9597 - DNA, 120 bp, Homo sapiens
gatcgatgctaggcatcactcctcgccattagactaaacacaaactaatcaaatgtttggatcttctctacactactaatgaggcaatgagtagaaaagaaggggtttctggtcccaatt

SEQ ID NO: 9598 - DNA, 120 bp, Homo sapiens
acacggaagagtgaacaatattcactaagtaaaatacagcagatgagatgtctctcacatgtatatttaattattcatgctttttcaatagtctcttagtcaactttcagtgtaatttcc

SEQ ID NO: 9599 - DNA, 120 bp, Homo sapiens
tcacgttcatgtaagccactgtgcaacatgaatgaatctttaaatgtgttgacactgaaatcaatgtacaactaatgaaaataaagaagaaaagggggctttaaaatatttgttgcacta

SEQ ID NO: 9600 - DNA, 120 bp, Homo sapiens
agtcgtatagtaagaggcagaaaaaaatgaaagaattttaaataatcttacacgtgtctacagggccaggaacgtaatgaatccatgttaacttaatttcatttaaaattacatttgtag

SEQ ID NO: 9601 - DNA, 120 bp, Homo sapiens
ccccgtctctgcccagtaagtagcactcattaggtgcaaccaagccaaatattactggctgtgtttttttagtactcaccataatagttaaccaaagaatgttgtctcacaaatgacaat

SEQ ID NO: 9602 - DNA, 120 bp, Homo sapiens
gagcggaaaaagtagaagtagcagcagcagaagaagaagaaagagaagcggcagcggtggttttagtaatctgtgtaaaatgacatcatgtgctgcaccttcatccgggggctgtgtcat

SEQ ID NO: 9603 - DNA, 120 bp, Homo sapiens
agtcgtgaaacccgcccacactggtatgctcttcctgctcctcattctcagtgtcacattcaatgtcactgtcgctactcattcctggcaggaaggaaggagaacatgtttctgaaaaga

SEQ ID NO: 9604 - DNA, 120 bp, Homo sapiens
ctccgtatctgctaaactgagattcctattgaattttacatggaatgccaagaattcaacaaactaaacactaacaaaacaaagacaaaagtaaccgcacaaacctcgattctctttagc

SEQ ID NO: 9605 - DNA, 120 bp, Homo sapiens
ccccgcacctcctccagcttctacccacttcattgtgaaacttcttttaaagaagttgtgcatttgtgctctggtccctgacctcattcactcttctgctacactactccatgggaatag

SEQ ID NO: 9606 - DNA, 120 bp, Homo sapiens
tcacgtgtctatgacattttactaggatatctagcaggtgtctcaaattaaacatgtttaaaaaagaatacccaactttctgcccttacctcctcccaagccccataacctgcttcttat

SEQ ID NO: 9607 - DNA, 120 bp, Homo sapiens
taccgaagaaagatgtaaggtaagaatcaaaattctggcgtgcatcctgctttcagatgctttgacaatactattgcactgctagctgtaaagtacagtagtgcaataaagtcagagcat

SEQ ID NO: 9608 - DNA, 120 bp, Homo sapiens
attcgttagcagtaataagtaggaaaggaacacaaaagcatcttgcatcggttgaagcttcagtgagaaacgaatttaaagtagggttgccattttggacagaaaaacatccaaaaccaa

SEQ ID NO: 9609 - DNA, 120 bp, Homo sapiens
attcgaacagaaacatgcatagatgtagaaaggaattttgtaaatatgccctaagccttaatagtaattagaatgggtattgttaatactttaggattggtattaacaaaaccagttata

SEQ ID NO: 9610 - DNA, 120 bp, Homo sapiens
aaacgccatgtaaaacaagccctttgaataaaagtatcaaagaaaacaaatgaaaagtaaaataataagtttctcaatctctacatactcaatctatcactctggaatctaaaccactaa

SEQ ID NO: 9611 - DNA, 120 bp, Homo sapiens
aaacggtccaattcaactacttagtcggattgagcctactaaggaaatgggctcatacaaaggacagctgaaatataagtgtcttggtgtcaaatcctgggccacataactaaaatatta

SEQ ID NO: 9612 - DNA, 120 bp, Homo sapiens
taacgctggtagccaagtttcaggttttaaagacaactgtttaaaagataagtgtttaactttctgaattggaagttattacaaacaagaaaaatatttaaaaaatttaaggtattaaca

SEQ ID NO: 9613 - DNA, 120 bp, Homo sapiens
agacggaatccaggtccacccacctctagatcctgcactcttaaccgctgggcaacactgctgcccacctctctcattgggcgggcacaggtctctctgtgctctctgctctaggctcag

SEQ ID NO: 9614 - DNA, 120 bp, Homo sapiens
tgccgccaccaccatttagtgcctccagccagggctgctttcattcttcacagatgttgggacaggctatggctacttagtcacgttcctaccctcccgtccttaaagttagcacaaggt

SEQ ID NO: 9615 - DNA, 120 bp, Homo sapiens
gcacgggatgagagtggaggtggtgaggagagaattgggttagatggagtctcgggacgcagagtaagttcgcctccttcctccttgcttggagagggagggaggggccttatcacatgt

SEQ ID NO: 9616 - DNA, 120 bp, Homo sapiens
ttccgtggctcggcatgtggtggtccagccttgcttccacatcattcctcacgttcctttgtggcttaacaagagcgtcccatctcccgcccctccatcctggtggcactcagaaggttc

SEQ ID NO: 9617 - DNA, 120 bp, Homo sapiens
tggcggcaaatcttcctttaatttccactgtgatggattattagttcacttaaaatggtgtttaatttgcacatgtgccctgaggcttttaaatattaagctcatttgatgactgttgga

SEQ ID NO: 9618 - DNA, 120 bp, Homo sapiens
caccgcatctggcttttccttttttcttcttaggaaaggagtccctctctaggatgcctgtttattcatatttaagagcaatggggagcagagtgaccctgccacagcaaaatgtaaggc

SEQ ID NO: 9619 - DNA, 120 bp, Homo sapiens
agacggatgggtctggtgctctttgtgctccccagcgggcagctaaggctgtggactctagcagcatttggcctgggggaagcctactgcttgttttcccctgcctgtctttcctatttc

SEQ ID NO: 9620 - DNA, 120 bp, Homo sapiens
tttcgtcctatctcctgtgatggccagacctaactgaggcaaagccgagagaattatttcccacttccatttccttcaagtgttgctataatgttcactgtaaactgattttacatcttt

SEQ ID NO: 9621 - DNA, 120 bp, Homo sapiens
gggcgacatcatacattggcccccaaaggtctgaatcccttcaacagtcagatagctcacatataattggtcgctttgcatgaggagcttccttggctcagggctgcagaagagaagtgc

SEQ ID NO: 9622 - DNA, 120 bp, Homo sapiens
tggcggcctcagtgactgttttggtgggaaggattccagggaagatggcagtttcgccttagaagatttggttccagggaggtttagaggaaaaagaggacgatgatttgcaggctttct

SEQ ID NO: 9623 - DNA, 120 bp, Homo sapiens
agacgtagtccagccaggaagatctgattttgtttgtcttccttccccatctccctaaataatttttaattttatcttcaaagcatgacgcaggtgttaattaacactgcctgctctcct

SEQ ID NO: 9624 - DNA, 120 bp, Homo sapiens
gtgcggaagccttaggcaggtgagccacagagaagcagagggagtcttagacctcgtggccctgccctcagacctttactgggacttgctgctcacttagttaccttgggagccacctca

SEQ ID NO: 9625 - DNA, 120 bp, Homo sapiens
aagcgttggactcttgacatctggaaatagatgagaaacccaggtgtgactgttggatgtggtgaacctctagaggctgaactttcccttctcctttaaccactcaccttggttggctca

SEQ ID NO: 9626 - DNA, 120 bp, Homo sapiens
cagcgagactggagtctccagtggtttctttctcattcattgggtatcttgggcatgataccaggaacagagaagtgggtcatttgatcctgtcagtgttgccttcttcatgggtggcag

SEQ ID NO: 9627 - DNA, 120 bp, Homo sapiens
ctgcgtgagggttcttctgccgaagacatcaccagtgtgtggagcctgccacacccacccgctgccaaaccacggcctttacctgtgtcttccggtgtttcccgtgcgacccatcctgtg

SEQ ID NO: 9628 - DNA, 120 bp, Homo sapiens
cctcgtgggctgccccagagttcaccccacactcagcagcaccaatggtgaagatgacaagatcgaagactttccaggcatatctgccctcctgccaccggacctacagctgcattcact

SEQ ID NO: 9629 - DNA, 120 bp, Homo sapiens
ccccggggagggcgcttagtgctcctgaagttgcagaggtttacaagctctcaagaatatttgtactccatctttgtacagggagggctgacccacgtgaccgtctcactcaactgagaa

SEQ ID NO: 9630 - DNA, 120 bp, Homo sapiens
tggcggacgaagagtgaagagtgctccctgctcagaaggtgaattctgataaagcaggggaatgtcttgtaagaggggttccttagcaagatgagagagccaccaggaagttgtgagact

SEQ ID NO: 9631 - DNA, 120 bp, Homo sapiens
ggccgttagggctcatacatgaggtaatatggcatgacatttgatcatgatcagaagaatggaaccctgtttttcctgaggtgcttaggcagctgctttctaaagttggggctgggggat

SEQ ID NO: 9632 - DNA, 120 bp, Homo sapiens
gagcgttctcaggggaactgcttccctcctggccctagattcccaggggaagagaaacaggttttactaggctgcatgacaaagagaaagagataatgggagacttttcccttacaaaag

SEQ ID NO: 9633 - DNA, 120 bp, Homo sapiens
tcacgccattaaagtaaaaaaaaaaaccaacccatctttacgcagaccgagacgaagttttttgttttgtttttaaatgtgttcctcatctgtttacaagacctgctggaaaaggtggct

SEQ ID NO: 9634 - DNA, 120 bp, Homo sapiens
aatcgggcctgaggaccgaacctcttgttctagccttactccagggtctaaggtgaccacagagcttgaagcgtacagccccttagagtcctatcctctggccagacttgtgaatctgcc

SEQ ID NO: 9635 - DNA, 120 bp, Homo sapiens
cttcgaattttggggaaccccttgagtctggaagtttgaatgtgtggaggtgtcagtgagagaagagaggagttggtctcttggacgttggaattgggtttgcaaagttgtaggggaatt

SEQ ID NO: 9636 - DNA, 120 bp, Homo sapiens
atgcggatgaagaagctgaaactcataaaacttgtccaagatgtcaaatcagaggttcagagaagagtgattactttgagtgggtgttcaggagggattgctggaggagatggttctttg

SEQ ID NO: 9637 - DNA, 120 bp, Homo sapiens
catcgcctgaatatgcaggtatgggtgtttcagggctctgtgccttagccaagagtgtccgttctccttcacctccctcctcctacacctccctcctctttctcctgagctctttcttat

SEQ ID NO: 9638 - DNA, 120 bp, Homo sapiens
tctcggggtcagaacctgacccatggcaagagctcagtaaatgataaatgaatagatggaggttgagccttggagaagacaagtaatgagaaaaaaaaatactttgttggcctcatgtcc

SEQ ID NO: 9639 - DNA, 120 bp, Homo sapiens
ggccggtacacagatggggtgcattagagcttgatgatttaaagggttgggtgaaatgcctgactgtggggagagctgagggagctgtggctggcattgcacaaagcttcctttatttca

SEQ ID NO: 9640 - DNA, 120 bp, Homo sapiens
ccccggcgttaaataatctatagattcttatgcaggtctgcctaatggaaagatcattgccccagcctcctccttggaaaataggcctttcttttcatttttccctccctcttccattta

SEQ ID NO: 9641 - DNA, 120 bp, Homo sapiens
attcgtttggtgcaaaaaaaaaaaaaaaagtgagtgctttcattatgaagaaggggatacaaaggtctgagtgtgaccagcagtgaactgggactaggactagaacttcaggctcccttc

SEQ ID NO: 9642 - DNA, 120 bp, Homo sapiens
gaacgtttcaatctatgaatttggggaggcattcagaccatagcagatgtctctagcagccagcacctagtgtatgctcgtgatgtgctatcccagcaacagtcctgtggagtgggcatg

SEQ ID NO: 9643 - DNA, 120 bp, Homo sapiens
aagcgggcaattgcaactccctgttgatgagtttttctctaaatttaaagagagaattcagttgcagaattccagtggctttggtgtagccatgaggtttggaatacggccaagtgaagg

SEQ ID NO: 9644 - DNA, 120 bp, Homo sapiens
ccacgggaggaggggccttaagaaagccatccttctgcccctcggctttttacccccatctcaaaggttcctagacaggtgtgtgacagtctttttaaaatcataagcatatacagtggc

SEQ ID NO: 9645 - DNA, 120 bp, Homo sapiens
agacgaatagagtcaggaagttcttcctttataattaacccaagtctctctcatttccgtctgtgtcctcttgttcttactgcagagaagatggaataaatccccttcagtctttcctct

SEQ ID NO: 9646 - DNA, 120 bp, Homo sapiens
actcgggttctaattctggaagtttttaactttgttctttatcatcacccctctcactttctccgtatgcatccccaaggctgaaatcttaaacaggatctagggctgttttgtttgggt

SEQ ID NO: 9647 - DNA, 120 bp, Homo sapiens
agacgacactccaagggcaaaggttttactaatcctcctttgtatctctacctacacacttctgatgccttctcactgagacgcctaaaaggagttaaaatgtatagtgcctggagcaaa

SEQ ID NO: 9648 - DNA, 120 bp, Homo sapiens
gaccgacagtagatttatggttgccagaggctgggggcacgggagacaggctggctgctaatggtgtgtgatttctttttggagtgtgaaaatgttctggaaatagtggtgatagttgcg

SEQ ID NO: 9649 - DNA, 120 bp, Homo sapiens
ccacggccagccctaacttatcttttacacaaatcaggtgtgagtgagagctattttattatgcctgttttacagactagaaaattgtggctcagagaggttaatgagcttgttcaaggt

SEQ ID NO: 9650 - DNA, 120 bp, Homo sapiens
gtacgtttatggaaagaagaaaggtagggggacatcagctagaaaaatcatccttgaattttacgctaatcctctctggtggtcttcagtacagcaaaatgcactcatcatccctgcact

SEQ ID NO: 9651 - DNA, 120 bp, Homo sapiens
taacgtgctggagaggaggaggcccaatgctgtcaaattcactcacctccccagcttcccctggacgtgtctgcctcaaattctgagccacttcgccagagcaaggccacgcaagcaaag

SEQ ID NO: 9652 - DNA, 120 bp, Homo sapiens
agtcgaatcggggatgttttatttatggctttaataatgaagcctcttggggaaattttagtttcccattcccagaagcgaaaatgcgtctacagaatgttcttaaaatttattactgtt

SEQ ID NO: 9653 - DNA, 120 bp, Homo sapiens
agacgagacatacccaaggttcagatttcatttcgttttagatctcaatgatattagaaaagaaatagtttactggcgagaattctcagccatctgagagaggaggctggagggaaaaga

SEQ ID NO: 9654 - DNA, 120 bp, Homo sapiens
agccgctgacctcctggagcccttgctgtaggagggaccgctttgggagtttttgtttaacaagggagagtgggtagtcatcctgcaaagaaaaggtcagcgttctctcagaagtaactg

SEQ ID NO: 9655 - DNA, 120 bp, Homo sapiens
tggcgtgccctgggagtcacctcctggcaaggactgtgttgctcaggctgccaaggtcctcccagcttctcaccagcttcccagctgccctgcccgtgctgtgtaccctctgggtttcct

SEQ ID NO: 9656 - DNA, 120 bp, Homo sapiens
gggcggccatggagggtgggggcagggtgaccaaaacaggcagaaagggaaaaaacaagaagacaaggtccagggtcctcacccaaccccgccagaaggaaagctcgtgaaggcagcctt

SEQ ID NO: 9657 - DNA, 120 bp, Homo sapiens
aatcgcagctctcctgcctggctacttcccctggacaataacaaccccagacttcttgctacagaggaagtgtggctgcccacagttggtgtggcaactgcacagcctccacagttggat

SEQ ID NO: 9658 - DNA, 120 bp, Homo sapiens
taacgttaatcccttttgattcccaaagccttaaagtgtcagaaccaaaccacctagccccattgtacagatgagaacaccaaggcccagagagcacaggcacttggctaaagtcacaca

SEQ ID NO: 9659 - DNA, 120 bp, Homo sapiens
gaacgaggaaggagcagccagcagccacaaaaggcttcaaagggcttgggcctccgccaaactggctgtgcacagcccagtggagcctgcgcccaccctgcggccaaggccattcattct

SEQ ID NO: 9660 - DNA, 120 bp, Homo sapiens
aggcgcgagctctgggaatgtgtcccgcctcctgctacagccccagcaggcaggaggcaaagcaggccaaccccaacctgcctgcagcctggagcaggattatgaatcagatgtggctct

SEQ ID NO: 9661 - DNA, 120 bp, Homo sapiens
cagcgcaggatccacgtgggtgatgatttttttcctgtaggtccctcctgacggcagaagccacctacagcttgaagtcttctttggcgaagggaaaagacaggagagagagagggaaag

SEQ ID NO: 9662 - DNA, 120 bp, Homo sapiens
tggcgcaggtggcattttggggggaaacagggttatgcactgtgggagattcgattcggagccaggggctgagcctaaggctgggatctgtgtggctgagatctgtgctcacttcgaggt

SEQ ID NO: 9663 - DNA, 120 bp, Homo sapiens
ttccgtgcttgcctggacggctcttgcgccctgggatctgtaaaccccaagggtggtgcgccctggggtcgccatgcccctcagattctttacagggcacctcccatccggcacctggag

SEQ ID NO: 9664 - DNA, 120 bp, Homo sapiens
gtgcgcgcgccccgggagagctgtgctccccgcgaaatccgtgcgctccagctcagggctcccgggatcggtgcccgttagtgggcacaggacgccgggtgtccgaagggctgcctggag

SEQ ID NO: 9665 - DNA, 120 bp, Homo sapiens
tggcgggcatcagaatgacgagtggcagcagcaggagcggggtgacgaacaagatcacgaaggacttgaacttggagacatagctcagcgccgaggccatcgcgcgggagggagactggc

SEQ ID NO: 9666 - DNA, 120 bp, Homo sapiens
aatcgtctgcttcccagtgggcagcctcaaaagattcattccttttcaaagggggtgcaagaggttgctagaatgaattgaacatttctctgtgagagatcgaaggctgaggtcaaagtt

SEQ ID NO: 9667 - DNA, 120 bp, Homo sapiens
ttgcggagatgattaggttttggcgtagggccgtgaaggcctgtacatatggtatttctgaccatttgccctgccaggaaacagctgctgcaagactgaaaagaaaaggactcaggtccc

SEQ ID NO: 9668 - DNA, 120 bp, Homo sapiens
aaccgggtggtggtgatcaggcgcttccacacggaaccctttcagtttccctggagagtggccccaaccacaaacctgcggttgcctccatgcctaggcactgtccaccgagagtcccga

SEQ ID NO: 9669 - DNA, 120 bp, Homo sapiens
gcgaaccccttctgcctgcagggtaataaatgaataggacactaattcaatgtgtgattgaccaagagcaaagcaacagaggtacctgtctgtgattttcatcattgctgggctgagtca

SEQ ID NO: 9670 - DNA, 120 bp, Homo sapiens
agccgtcactggttttggcttgaggaccacatttcactttaatatttctgaatcagattggtgcttcctatcggttctgccttaatgctccagctatcatctcaatagcttatataaagt

SEQ ID NO: 9671 - DNA, 120 bp, Homo sapiens
atccgaaatgcagcctttccaggactgtatctcttgagcctccatcaaaactgccttgtcataaagtagaagaaactagcatgttaataagaagaagagaaatctgtccaacttctaata

SEQ ID NO: 9672 - DNA, 120 bp, Homo sapiens
caacggctcctgggctcaagtgctcatttgacacagcccatgccacccaacttcaattttgcctgggctacatttcttttggaggcactacagatttttttttttaacacacacacacgc

SEQ ID NO: 9673 - DNA, 120 bp, Homo sapiens
gcacgcacacacacacaccattttttttcaaggaggcaggggcatccagccaaataaactacgttaagcagtgggttccattttaggtgttgacagtgtataataaatccaggcctacct

SEQ ID NO: 9674 - DNA, 120 bp, Homo sapiens
gaacgttataaaatgagtgaaatggcatgagctggttgccaggccaaccagacaaacacaataaacaggcagcagtgacaggagtaagttacaccatctctccggtctgaaatatatcac

SEQ ID NO: 9675 - DNA, 120 bp, Homo sapiens
cctcgcggccctcaccttgtttctcccctggggaaaaagcttcttgggtatccatggatacacaggaataccccacgtctttccactttgtggaacgtgagtgtccacaagactcaaata

SEQ ID NO: 9676 - DNA, 120 bp, Homo sapiens
caacgcaatgtagtctgttgtcttcccagtttgaactttcagaatgttgttatttttctcttcctataaggtcaggctgcatgttctgctcttttcccccatgcttttcacacatcctct

SEQ ID NO: 9677 - DNA, 120 bp, Homo sapiens
attcgtagaactccagctcaggaatggcattctggtacttcggagttggcaccaaaagacaagacagtcttgccaacaccacctacccaagcaactgaatttagaaagagaattccctgc

SEQ ID NO: 9678 - DNA, 120 bp, Homo sapiens
cctcgaaccccaggggcagaggatagttgtaggcagatctgtgagctcaggtccttacctgacaggggagggcccaggagccccccgaggctcatcagcatcatcaccagccctgtggcc

SEQ ID NO: 9679 - DNA, 120 bp, Homo sapiens
ctccgacgcccaccagcccggggagtacaccgaaaaccagcggggcgtaactccccgcgctcagcccataggccacagccgcggccagcaggggacccccccagctctcttcgccgccca

SEQ ID NO: 9680 - DNA, 120 bp, Homo sapiens
ccacgggcaccagccccaccacccacagccccagcccagtcagagccccgaatacggccagcagccgcgggaggggcacccagccttggtctgccagccacccgcagaccagccgggcgc

SEQ ID NO: 9681 - DNA, 120 bp, Homo sapiens
gaacgtactccaagacaatgcttctcaaactggaaggtgcataagaaagagctggagcctcggtaaaacatcggtttttcactcattaaatttggggtggggccttgagatcctgaactt

SEQ ID NO: 9682 - DNA, 120 bp, Homo sapiens
gcccgcatcccccatcgcagccacggccaccaccagcgctgctccgtatccccccaggccccggtctaaagcgtggggagccaagtgcacgtaaggaacgaagtacccgcccccaaccag

SEQ ID NO: 9683 - DNA, 120 bp, Homo sapiens
tagcgtgcgtgcgcgcacacacacacacacacacacacacacacacacacacacaaaacctcataagctttcattctttcaaggactggtttactctgtatctttttgctctttttcctg

SEQ ID NO: 9684 - DNA, 120 bp, Homo sapiens
tcccggggagttactggtgtgggtacaaggcattgttggggacacaatagaattctaaggtatgagctctaccttcaaggaactaactatgaacttaaagagaaaggacagacatgcata

SEQ ID NO: 9685 - DNA, 120 bp, Homo sapiens
aagcgaataaatctgagacatccaggaaaaagagtatccttcgatggcgccctctggctgtagctctgctaaaatattacagaaaactctgctagcttgaccaactaactttctttgaga

SEQ ID NO: 9686 - DNA, 120 bp, Homo sapiens
aaccggagagagaggatgaagtatagccaccagactttcccccatttgtgcacgtctctcagccacagcaagtgtgaacaaaaggaaattctattaagcagctccctaagattgagctcc

SEQ ID NO: 9687 - DNA, 120 bp, Homo sapiens
gcccggcgtgtgaacagactcaggccgagggcagctaggggactacgcggtggggctggggggtctccaggaaggaccaggggtagcagcagggcgccacagggggtgaggtggagggtg

SEQ ID NO: 9688 - DNA, 120 bp, Homo sapiens
tggcgtgagttctgtaagcagcacataaaccatggacattcacatggaaatgaggttaattacacagcatagatgcatctaatgattgcacctgcagtgccacaacaacctccctttaac

SEQ ID NO: 9689 - DNA, 120 bp, Homo sapiens
attcgtttccacagttagagtttaaaaatctgtaatgatccccaacagaatagaggtgcagggggtgagagtgaggaaggagaggattcttccggttcagatgtccgtccccagccacct

SEQ ID NO: 9690 - DNA, 120 bp, Homo sapiens
tcccgggagccttgggcacagacatggagccacaataagctattgccagtcctggtgtttggcttccccctcaccccccttctggcttagagtttctcatctgtcaagattcattaacat

SEQ ID NO: 9691 - DNA, 120 bp, Homo sapiens
actcgggagaactgatggtgtagttccagatcaaaggccagcaggctcgagactgaggaagagccattatttcaactggaatcccaaggcaggaaaaaactaatgacccagcttgaaggc

SEQ ID NO: 9692 - DNA, 120 bp, Homo sapiens
aatcggccttactcagtctatcaatttaattgttacacttgtccaaaaacaccttcacagaaagactcagaacaatgtttgatcagttacctgggctcctcatagaccagtcaagttgac

SEQ ID NO: 9693 - DNA, 120 bp, Homo sapiens
gtccgcaaatctcagaaggatttcttgggagcagtgctactgagggaagctcaaaagattgtttctgatcctttcatctaccattctccatcaccaaattgacgaaactctctgtcttat

SEQ ID NO: 9694 - DNA, 120 bp, Homo sapiens
gatcgcgccgaggaggagcagagcgccccgccagccgaaagtatcgagaagaagctgcaaggcgggcgccaggagcagcgaggaggccccgttgccggtgagcgccagccccaccgccaa

SEQ ID NO: 9695 - DNA, 120 bp, Homo sapiens
actcgacggcgggagaagtaacgcgagagggtgcctagggcgggggcgaacaccagggcccaaccaaagcctgcgaatgaataggaggggatgggggccggcactggggacgcccgcccc

SEQ ID NO: 9696 - DNA, 120 bp, Homo sapiens
gcccggctctccgcaccaggcccccgcctcgttcgctaccccagatcccaacaagctcctgtcacctccttcaccctgaatgacccgggcatcccacttccctcaccagcgaggaggccc

SEQ ID NO: 9697 - DNA, 120 bp, Homo sapiens
ggccgaggtagagatgcagcagatcgctggcgaaagccgagaagacgaagcccagcgaggcgaggacgcccccaaccatcaccacggggcgggccccccagcgcgtgctcagggcgctgc

SEQ ID NO: 9698 - DNA, 120 bp, Homo sapiens
ccacggggcctgaaagggggcggagtcaacggaagacacgcccccgggcccccaaactctctccaacacttctcattggctgtttgcctccctcgaactaatggttcttctccttgacct

SEQ ID NO: 9699 - DNA, 120 bp, Homo sapiens
agccggttgccctttctcaggttgtcgggtaatcaggtgggtctcccatccctccactcacggctcctcctccccgttcctgtctcccgcctcagggcccccctcactggctgcctgctg

SEQ ID NO: 9700 - DNA, 120 bp, Homo sapiens
gcacggccagggccagggcgctgatccacgcagtgtcctgggcgcttcggtcaaagtgctcggcaaggtcagggaaggcaaggcccagcgagcgcagcagcccgtaggacagcccgttta

SEQ ID NO: 9701 - DNA, 120 bp, Homo sapiens
tatcgcgaaggctgcggccgccaccacccagccccagcccccatccgggggtccggcgggctggggggtcatcgccgtctgcggggtggggaaacatctgtgagagaagcctccacgcct

SEQ ID NO: 9702 - DNA, 120 bp, Homo sapiens
ttccgctggggagctggcatccctgagatccagcctctggctgctcgcccggggtgggcccgtcactccgagcgcgatggcgcggggcggagggagccggagcctggcctagggctggaa

SEQ ID NO: 9703 - DNA, 120 bp, Homo sapiens
tcccgggtccgcgcgaggtacggggacggggacagccagatccccaggcccgaggttccccgtcccacgcacactccttcccccttacccgacctctccgggcggtgcggggaggggaag

SEQ ID NO: 9704 - DNA, 120 bp, Homo sapiens
gcccggctttctctctgcttcccaggcgggcgggggccccgaaggggagcgagggcagcgatggagcccaacttggacgggctctctcggtaaacagagatcaccacaggggcctgagcc

SEQ ID NO: 9705 - DNA, 120 bp, Homo sapiens
ggacgcggggtgtacggagggcgggggcgagctgaaacagccaatccggcaagccgcgcgtgaggccagacgccagtcccacggggattgaattatgtacacacacaacccccaggcccg

SEQ ID NO: 9706 - DNA, 120 bp, Homo sapiens
gagcggcgagaaatgaatgcagaggggccctgccctactcacacgcatgcacctgccgcctgctgcgcgcaggggagacacgtggattgcaaaccccagcgagcccagggtccaccgcca

SEQ ID NO: 9707 - DNA, 120 bp, Homo sapiens
caacgcgtggaaatagggatggtccccaaaacctgaggggatgagtagttttgttctcaggaacgttgccgaggaccaggtaaatctcggatatcaatcagatcacagacctccaccaag

SEQ ID NO: 9708 - DNA, 120 bp, Homo sapiens
taccgttccaaaccatctcccctctctcccttttgccagcctcccatcagccactgtcttctctgctctgtggacatgcctagctttttctcactccttaatttttgcatatgtcatgct

SEQ ID NO: 9709 - DNA, 120 bp, Homo sapiens
aaacgtcctgttgttcatgaaggtcctgacagacacaccttaggaaagtggccccaccggtttccccagcctggagtgctgttatgaaagccaccagggaggcggagccagcaggtcctc

SEQ ID NO: 9710 - DNA, 120 bp, Homo sapiens
taccggggagggcagggatcccgcttcctgagaaggctgctgaagactctgctccaagctaaacgaatcactgtctccccatggtgacgcagaaatgcaggacagtcagagcgaagaccg

SEQ ID NO: 9711 - DNA, 120 bp, Homo sapiens
ctccgcatctgggagttgtgctaagtgatgctgcgcaccttcgcaggatgcttacgaagccagaagggtatcccagagcctgggactagggctgtgaaagagcacattcctcttctacct

SEQ ID NO: 9712 - DNA, 120 bp, Homo sapiens
acccggacacagattcatcttctactcttctgctttgctctgtgccctgggaggtagactcctttggactggatcccttgtcaaataggttctgggtgcttccagccaatgggaggtact

SEQ ID NO: 9713 - DNA, 120 bp, Homo sapiens
tcacggaggtaaaatagcacagagattaggagaatggactcccaagctagatttcttgaggttgaatgccagctctactgtagggtctagccctacggggcttggcgggtgttttccccg

SEQ ID NO: 9714 - DNA, 120 bp, Homo sapiens
ttccgttcatctcgagcagtagctgcattcctccacaattcctgccaggtattctgttcatctggggttgcagctctaacttggctcgaataaaagcaattcttcctttaattccttcca

SEQ ID NO: 9715 - DNA, 120 bp, Homo sapiens
tgtcgcattcctatttgccttgacattcacaaggagtattttctcatattattcctctttgaaataaaatttgagattgacactgcgtcatctcttcaatcttagttatctagagtgact

SEQ ID NO: 9716 - DNA, 120 bp, Homo sapiens
aaacgtcacctctactacaaattctgctctgtcttcaccctactcctattgtcatgatcaccctagacgaacattttctgtgttaggtcatttgtgcatctctataaggaagtacctgag

SEQ ID NO: 9717 - DNA, 120 bp, Homo sapiens
ttacgatcatggcggaaggtgaagggggagcaggcacattacatggtgacagcaggggcaagagagaagagggaaaggtgccatacatttaaacacccagatttcacaagaattcattga

SEQ ID NO: 9718 - DNA, 120 bp, Homo sapiens
acacgtaggaagaaagatggaagggagagaagggatctttttcctaatgtagctgctggtctatcctttagacaagagaaaatctcacattgatgtgttcttggcttcctggggctcata

SEQ ID NO: 9719 - DNA, 120 bp, Homo sapiens
gcccgatcagctgagcttcttcccagtccctgccccactttgagtatgcttaatgtatggagcctgtcaccaactgaatgccctaatttaacgtaatcccactccaagcattccagcttc

SEQ ID NO: 9720 - DNA, 120 bp, Homo sapiens
aagcgaactcctgaaagccaaaaggtgattctagatggcaagagtcaggccacagaggagagaaaagattttttgaatttcaaaggtttgactttcaacaccaacagccaacgtttccag

SEQ ID NO: 9721 - DNA, 120 bp, Homo sapiens
catcggtgtggttcattgtaaaagggatcagagctctgtccactgatagggtcgaacttctgggaacaaggatgattgaatgtgcatggggttggggttgaacagagcagaaggggttgt

SEQ ID NO: 9722 - DNA, 120 bp, Homo sapiens
agacgcccttgcagcagcaggcaccagtgacagaaggcagggatgacagctggtgtgtgggcaaagggagccgaagaaaaactctgaatctcccatcaccccaaagagcagcaagagagt

SEQ ID NO: 9723 - DNA, 120 bp, Homo sapiens
atgcggcaggggggatgcagggtgacctgtgtgaccaggagcctgcagaacagaaagaagtgtggacagctcaggggaggaagagagagaaggagaagcagacacctgcaaggagaaggc

SEQ ID NO: 9724 - DNA, 120 bp, Homo sapiens
gggcgaagagggaaaggagagaatccagaattgaccgaggccaaaaaggacagaaaatctagcagtgactggtgattcagagtcggccaggtggttttctgctgttagcgataatgtgtg

SEQ ID NO: 9725 - DNA, 120 bp, Homo sapiens
tcccgtgtgagccctggggttgtggaataccatgtctgctccttggcaacctccttccctccacccacctcccagcaccaggagctgagattacatcagtggaagagcagctgtggttcc

SEQ ID NO: 9726 - DNA, 120 bp, Homo sapiens
tagcgatggccaggggatgggagcacagaggaagaagcccagagttacagagggacttagaaccacaggaagttcctttttctacagggaatggggcagcctaccctgaaagaagtcatt

SEQ ID NO: 9727 - DNA, 120 bp, Homo sapiens
caccgcgcctggccgaatttgacttttctagattccacatataagtaagatcatggctcatttgaaggatgagtagattctaaaccaggggaagatggggactaccaaggtgatcgtgaa

SEQ ID NO: 9728 - DNA, 120 bp, Homo sapiens
atccgggtcagggacagaggagtgaactcggaccgtgaaggcaaagctgagcagagtgccagccacaggcggatggtgcagtcacctgaaatgtgtcccatcatctgagtcgtccctcat

SEQ ID NO: 9729 - DNA, 120 bp, Homo sapiens
acacgcctgtgtgttaggaaagccatcaacactcttgcagagccatatacctgccctccagggacctgaaactattccattataccagaaactctgtagaatgtaaatccagaggcctga

SEQ ID NO: 9730 - DNA, 120 bp, Homo sapiens
aaacgctgtatatttttcagaaagtacaaagtggaagccattaattccatggattcaccaaatgaatggattgtttcatctgcataaatgaactgtcagaaacaatggccacgcagcact

SEQ ID NO: 9731 - DNA, 120 bp, Homo sapiens
aggcgaggcttcttttgtgatgccttctcttacttagccacacaaccttcctagaaactccttagcacacttcctcacacttcacatggaccacaattgtacacatcatttcttaatcag

SEQ ID NO: 9732 - DNA, 120 bp, Homo sapiens
agacgttactgaggttaattagaatgagagttcagccttaaatttaaaatgtaaatggggatggagacagaaagatattaaggatacagttaatccattaatatacaaatacacacatac

SEQ ID NO: 9733 - DNA, 120 bp, Homo sapiens
tttcgtttattcatttgtttttgtttgtttatatttgggctatctgctatgagatttcttgagacctttgctaactagaactttcaaagaccaaggaatacaaaaagcagtatttaatgt

SEQ ID NO: 9734 - DNA, 120 bp, Homo sapiens
tctcgttacatttaccaaacttcattgtatcaatttaggatgcaagaagacttcagacgctgctctcaaaatcaccagcagtgaagtagatagcagacacagaaagaacaagtaatggcc

SEQ ID NO: 9735 - DNA, 120 bp, Homo sapiens
agccgaggaccacttttgccagcaatctcatctgcagcattccagtagcccctgccagacctggcaagggtattgagaggcaccctcctttttttcaagaagcagggctctggacagaat

SEQ ID NO: 9736 - DNA, 120 bp, Homo sapiens
aaacgtgggtgctttctcaaattcctcacaagaaaacattgatacttagtgttctatatctatactcggtcttagaaatgaatatcccagtttggttcgcctgcagaacagcttttacca

SEQ ID NO: 9737 - DNA, 120 bp, Homo sapiens
tctcggagcttcctcatttttaccatctgggagcagggctggatcagaggtacaatctgctgttgctcctctaccctacacttcctttcacttcctgcctctacatttcccagaattgtt

SEQ ID NO: 9738 - DNA, 120 bp, Homo sapiens
catcgcacctctgatcctagagaagcccagtctgttctcttgctcaatcctggcctgagtccctggcatcagcatcctctgggtcccagtcattcggctgctcagctgtggcctcgctcg

SEQ ID NO: 9739 - DNA, 120 bp, Homo sapiens
actcggaaggagggaagggggtgccagagaatagaacttcttggccctaataggacgggagaagccaaggaaaagagcaaattttattgagtaatctgtgataggattatgccagacatt

SEQ ID NO: 9740 - DNA, 120 bp, Homo sapiens
tgacggactaaaggctcagagcccaagatcactcacagcttgtaaggagacagtttggcaccctgctctggctctcagcacaggcgctgtcttcatgaacaggattccatttcatcccat

SEQ ID NO: 9741 - DNA, 120 bp, Homo sapiens
ccacgcgcacatccctttcagtaggaaggaaactgagtatcttacaaggtggagaaggagaagaaatacattttaggttatattttgtatgtacatggggttgtgttctgctatgtgctt

SEQ ID NO: 9742 - DNA, 120 bp, Homo sapiens
aaacggatgagtttcaaagcactggtttggaccgctggaaacagataatcaacagatgatagaaacataccctttttggggggtggtttttgttgtttttttttttcttccagatcttgt

SEQ ID NO: 9743 - DNA, 120 bp, Homo sapiens
acacgcccacccagaactaattagacattagattagtgtcaactgattgatttaaagcagctctctctcctttccctctcctccaccccccagcaatgcaaggatagggttggtctacaa

SEQ ID NO: 9744 - DNA, 120 bp, Homo sapiens
cctcggtccaatttgttgaattaagttagagagagtgtttgtgatgtttgaaagaaaattatttgcaatttaacctaggagagttctgagtacatttggctacaatttagataccatttt

SEQ ID NO: 9745 - DNA, 120 bp, Homo sapiens
agccgggaacattcaacgttgtcttaatggattaagcagagacaaggctgcaaggagcaaattaaaaatgaaatagttacagctgttggaactggcattgggcagagagaggtaaaaagg

SEQ ID NO: 9746 - DNA, 120 bp, Homo sapiens
atgcgtgcctacaaaacggtaagagtgagccctcgcctccttagccactgcacacttcagttgctgcttaagcctgtagaggggcccaaatagttgtatttcaactaaaaagtgaacata

SEQ ID NO: 9747 - DNA, 120 bp, Homo sapiens
tcccgccccaagaagtgctataagagcagcagaaatgtataagaaagatactaccagccaatggaactccagcagtcttcatataaggacactcttccatctcatggcttggagagggct

SEQ ID NO: 9748 - DNA, 120 bp, Homo sapiens
caacggccaaacagtagaattggcattcctgtgagtcattgtgcatatttttagagctctttacagctttcaaggctatatgtattatctctttgatttcccacaacatccctagaagac

SEQ ID NO: 9749 - DNA, 120 bp, Homo sapiens
atacgtacttaaccccggcactgtacttttccccaaacaataccctgtcctccttctatatccccttcctctgaattgcctttctttttttcacctaactccatctggtgaatacatttg

SEQ ID NO: 9750 - DNA, 120 bp, Homo sapiens
gctcgtacaattattctttgtctcttgctgctgcaatgacaggttgctgacaatatgaactgtgtctgtctcatttgttaaggcgtcttcttctgggtctaaatgtgggagatgctaaat

SEQ ID NO: 9751 - DNA, 120 bp, Homo sapiens
ctgcggagggcacattttatactctgccttggaatgagcacatgacatcaagccagttgggtcaaaaacgtgttccattcttgcctgtgtgcctgatcctcaccaccaataccaagagag

SEQ ID NO: 9752 - DNA, 120 bp, Homo sapiens
aggcgtgagtcaccacgccggccgatttttttcttaacactcagcaccactgtctgtctgtcggaggactgccttcacgccgctacagaaggcaggaagtcacagaatggatgatagccc

SEQ ID NO: 9753 - DNA, 120 bp, Homo sapiens
gcccgtgactgttgcgttctgaggtgtgagtactccagctcccctgttcctaatgggggcaactctgagatgtgacctacactgtttccaatgctccccagtgggattgagatagttaca

SEQ ID NO: 9754 - DNA, 120 bp, Homo sapiens
cttcgagcacttcctgatgaattcctttcccaagaaccaagctctcacagcgagcttcaattgcatgcacgcttgccttccttcccttcctcttcctgattccccattctcctgtccact

SEQ ID NO: 9755 - DNA, 120 bp, Homo sapiens
tctcggggactgactgagagaagccaggactggagtcctgggaggttctgttcctcctttctgtttcttttcctcttctcagtactcctcaagggctgggtcaagggagagaagaatgca

SEQ ID NO: 9756 - DNA, 120 bp, Homo sapiens
cagcgctgccatctgtgctagtgtggcagtcgaggaggtcttcacagcaagcatccgacactggctttcatgaggtctattgggggtgtccagagacccccgcaggatcttttgtgaccc

SEQ ID NO: 9757 - DNA, 120 bp, Homo sapiens
agccgttcaccaccagttcctgcccagatgaaaactgtacacccaccgcctcttacagcctcgctctgccatgcagtcctcttgggcagggtccttcctagctggctcaagcctgacatc

SEQ ID NO: 9758 - DNA, 120 bp, Homo sapiens
agtcgcctcggctcacgggttctctgacattatgctgccagactaccaagtgcagcctgattgactggtggacggggcaactccagcccagatgtttgtcttcagacttctcctgtcaag

SEQ ID NO: 9759 - DNA, 120 bp, Homo sapiens
tgccgtcacagaaggaatggcctcatcatcctccctgcccatggtgctgagtgccagcagactaatgatcagacagttacccatcagaaaggcaggtgagacactgatgcacaatccttg

SEQ ID NO: 9760 - DNA, 120 bp, Homo sapiens
caacgcaatactcagaattactgtcttttcctctgaattagaattcttctacctacaaaatgacgtgctttttagtattttgattcaaatcagtcatgatcatgctggatgttgtagggt

SEQ ID NO: 9761 - DNA, 120 bp, Homo sapiens
ggacgccaagtcaagtggctagagaagagtgatgttgttaaagtgtatgattcattaagtcttgtctgcgtgtcagatgttcagcatttggtgctattgcctccaatttaaatcattttt

SEQ ID NO: 9762 - DNA, 120 bp, Homo sapiens
tgccgaaaaaggtgctgaaaggcacctcactctgttcccgcacttgaaaaacactgtctgcctgtgcactgtggtaaaactttgcattttggctagacaccctgtgtggagctgtgctga

SEQ ID NO: 9763 - DNA, 120 bp, Homo sapiens
acacgggggaccccgcgagagctgcctctggagccattctttcctgcattttcccatcacccttctgtttcagccaccacttggcaaaaaccagctaagtggtgactgtgaaatgaattc

SEQ ID NO: 9764 - DNA, 120 bp, Homo sapiens
gcccgagagaaagggcacaagattaacaggtcactgagccagccagggcgaggagccaggaggacacccaccgagagaggcagggaaacggttaataactcaaggtgacaaattaagctg

SEQ ID NO: 9765 - DNA, 120 bp, Homo sapiens
agtcggaaaccgggaaggcgctgtcacttttactgtatttttccacacgtatttttattttattttttaatttggaaatgttcgtggggagctggaaaatgcaggctggagaactcctgg

SEQ ID NO: 9766 - DNA, 120 bp, Homo sapiens
agccgctccctatgagctccagccaccgggggcagtgggtctcctagtggtcgtcccccttctctgtcctccgccccccaccccgtggagacattctcacctcctctcgttttcaccgcc

SEQ ID NO: 9767 - DNA, 120 bp, Homo sapiens
cagcgtgcaacctcctgccaagttacactaacagtgttctccgtccaccagccacaccagcctccttgttgctgaacccagcagctgcttaacaggcggcagatggagaaagggctggaa

SEQ ID NO: 9768 - DNA, 120 bp, Homo sapiens
gcacgagggaaaccttgggtggagaggcagaggagaaataaaatgctctgcacctatcccagtcggtatgtggcaaggatctggctttctcagtgccccacatttgaacaactagcccgt

SEQ ID NO: 9769 - DNA, 120 bp, Homo sapiens
gaacgggtaggcttaagatgtttaaaatgatcatgggccccgttttgggaaaagtgaaggagattaggacgaactgtgacaaatatattctgaggtttacctgccccttggatctaagaa

SEQ ID NO: 9770 - DNA, 120 bp, Homo sapiens
ttccgaaacttaaaaaggatctccactcctcagtgtggacttgtgtgcagccaaggcctccagagactgcagaaccaccagtctctggaaacgtctccttcgtcgtcctggctgacggca

SEQ ID NO: 9771 - DNA, 120 bp, Homo sapiens
ttccgacacacaaagcactttaaattatccatggaaacctttgtgaccacagacttagaacacagctatgaccaagtgtcagaaacagggaaggcatccgcgaatgtccagctatgtggc

SEQ ID NO: 9772 - DNA, 120 bp, Homo sapiens
agtcggatagcacgcagccaggcctctcctagccgttcaagaaatgtttgtggaatgaatgtgcactgcttgtttaaagagcacgctgtcattgttagaacacactggacgcttcccaag

SEQ ID NO: 9773 - DNA, 120 bp, Homo sapiens
ctacgtcatggttttctgcaagtcataaccaccccctctgtgttttgctctcttttttccttaaaggagcatatagcaaccctcttcccacctgttctgcatgagcaagttttcagcacc

SEQ ID NO: 9774 - DNA, 120 bp, Homo sapiens
cttcgagcagaagtgaagttggagtggcaaatcccagagacaggagaagggaataggtgagtttgtattctatcctctgcccagactgtgcagtccacttggctgaggatcctataataa

SEQ ID NO: 9775 - DNA, 120 bp, Homo sapiens
ttccggaaccacaatgttcagcccactcagtgtttggccaatgccactctctcctcccccagaacatttctttgctcctggaaaatcatctggaaactgtcatcaccactgtgctggttg

SEQ ID NO: 9776 - DNA, 120 bp, Homo sapiens
aagcgtaccacacactacaaggcatttctgggcttggaccaagaaggggcgagggcggagaaagaagatggcccagtcaaagggcaacacagcatcagcagggctcctggggccaagagg

SEQ ID NO: 9777 - DNA, 120 bp, Homo sapiens
ctgcgctttacctgcctccaaagcaccttgatggagccgcaaggatgggaggcagctttctgtgacctgtgagtcgtctcagggaaatagaaggggaatccatgaaagaggcagcaagag

SEQ ID NO: 9778 - DNA, 120 bp, Homo sapiens
tcacgtggacagaggctggattctgcgggaaaccagacctggagacaacagcagagatgaaatcttgtctccttcagaagtttaggcacattgtcagccctcaggcaatattcactgaat

SEQ ID NO: 9779 - DNA, 120 bp, Homo sapiens
tgacgttgggctaaatgggagagacatgacaagtgacagggaaagacaggatggaaaggacatggtgtctccaccacgttgtacttcctctacccagaactctactctgtcatctggagt

SEQ ID NO: 9780 - DNA, 120 bp, Homo sapiens
cctcgtgttcgtccatactttgcaaatttgcaagcacccgcaacagcctgctttgccgcccatgatacagcatatatttaatatagttggggttcaaactaatgctctactgggagctcc

SEQ ID NO: 9781 - DNA, 120 bp, Homo sapiens
aggcgtggggatggggtgaacgcctgggtggaatatctgagcaaacctactctgcctttctgtccaatcatacggtagaaagcataccttccaggtacagtatcaacccctccgtcaggg

SEQ ID NO: 9782 - DNA, 120 bp, Homo sapiens
ttgcgagctttagggggaccccaaaggggaccagtttctgtaatacagttgatgccttctgtctgtgttctgtcaggattccctcacattttagccaacctggaaactagggaagaaaaa

SEQ ID NO: 9783 - DNA, 120 bp, Homo sapiens
tctcgtgggggtaaacacatgtgatccaaaagatagtgacaggaacactgttatattttccgggtcttaatgatttggaaggggaatactgtcccctctcctaggccagtccaaatttca

SEQ ID NO: 9784 - DNA, 120 bp, Homo sapiens
atccggaaaacaaaaggctgaagacagaaaaagaagacatttactattccacttcttccttttacatcagtgagagaaagggccttgggagaaagatggcacagagagaaacaaaagaaa

SEQ ID NO: 9785 - DNA, 120 bp, Homo sapiens
ccccgagggcagcctgtctctcctgcagcctttgcagtcagcgacaggcatcatgaaattaatttgaaataaacaatgacaaagcaggaagctcaacgggtccctgagttgctttgggcc

SEQ ID NO: 9786 - DNA, 120 bp, Homo sapiens
ccccgaagcccctgggctgtttaacaaagccgtgggtccgcctaccccaagcactttttgtgacgtcacagctccgaggaccatccgggggctttactctcgcggaagcccaaaagttgg

SEQ ID NO: 9787 - DNA, 120 bp, Homo sapiens
tcccggggggcgggaggccctcgggacaggacgcgctgtccccggagtccggagctcaggccagtggcagtcgacccagcccccgagactccctcacgccgctccaaaaccaaaacggag

SEQ ID NO: 9788 - DNA, 120 bp, Homo sapiens
acacgaagctgggtgaagccgtagcttgcaggagccagggagatgcgctctgcccgggacttcccgggtcctgttgagacggaaaggatcgcagggaagacaggataattggtctttaac

SEQ ID NO: 9789 - DNA, 120 bp, Homo sapiens
gaccgttaccttcgaaattgcaccttacaagcatgtcctctatttccgtggcttgatggggacactttctctgattaagatccggaataatcacccacccaatgggatctcttagaggga

SEQ ID NO: 9790 - DNA, 120 bp, Homo sapiens
aagcgctggttagaatccctccaggctgagatgcaatcatcgccattgagcctgccctcccctagggaaaccccacaaaaccatcctgagaatctcagccctctttggtcggtacctgag

SEQ ID NO: 9791 - DNA, 120 bp, Homo sapiens
gatcgaaggggaggagcagttgctcgtgcggaggaagctcttggggccgaagtggccccggccgagtatgtcgcaaaggaggcaccactgcgttgagcgcttactgtatctttactttta

SEQ ID NO: 9792 - DNA, 120 bp, Homo sapiens
gggcgttagggggaagagatggcctaggaaattttccgcagggcgttctagggatgagttgagggaagccgcatgacgcgcggctccccggtgccacagctaaggacagatattttcgca

SEQ ID NO: 9793 - DNA, 120 bp, Homo sapiens
gcacgctccctttgggagcgctgtccctttgggactggggccttccactcccacccctcctttttccctgatcggctccgcagctccacgacaagccagctggtctggtctctgacttgg

SEQ ID NO: 9794 - DNA, 120 bp, Homo sapiens
ctccggtccgtacccccggggcgccctgctgtgttacagccgcccgacgcccccagacccggccaggtcaccagggcagattggaggttcgcgccccctcacccgacacctcccgtccac

SEQ ID NO: 9795 - DNA, 120 bp, Homo sapiens
tttcgaaaacaggaaagggaagaaaactgaaacgggcctcttggtctgcagttttagcggagtcgggattccacagccctgagtggcacatgccggtcaacttcccaaagtcgggctccc

SEQ ID NO: 9796 - DNA, 120 bp, Homo sapiens
tcccgtgtggggagaaatacacacgcaggaatgcacaagcatcgcgtgttcgcaactgtcgctgggaggtctggcggctgtgatgggacatgcactcactcgggcaacacgtccacaggt

SEQ ID NO: 9797 - DNA, 120 bp, Homo sapiens
attcgatcagtcaacagatatttattgcgcacctacgacgctatctggtactttccttttccccttagctgttgctgtccagcccagcgccagtccagagacgggcttaccggccgctcc

SEQ ID NO: 9798 - DNA, 120 bp, Homo sapiens
actcgtgtccggcgtgaagagcggacgataaacactctccaagcccagcgaaatgtactaattacaggagcggctgggagcccgcgacacggggacctgtccctccagggataggagtct

SEQ ID NO: 9799 - DNA, 120 bp, Homo sapiens
acccggcctggggaactggaatagacaaggggtaaccccttctcccatcacctctaatgagaacattgtccggggctgagatatttgggggacgccgctgctcaccccaccaaactttcc

SEQ ID NO: 9800 - DNA, 120 bp, Homo sapiens
aagcgtccctaccgaaaacggatttaaacaccgtccccacttttgctaaggaagtttggatagggaggttgtggtccttaattcgccaggtaaaaggaaccccatcagctcgcatccctc

SEQ ID NO: 9801 - DNA, 120 bp, Homo sapiens
ttgcgagaaactcgccctgcgccagcaactctgggctccggtctcagctcccgcgtagacgcggaggagagattggcggcccccgctggggaaattgagcccggcgccggtccgggacgt

SEQ ID NO: 9802 - DNA, 120 bp, Homo sapiens
cctcggtttcccgagggcttccctggggagccactcgcacctctgtgtctccgctcccggcggcagacctcgcggcgcttgctcaagagcgggtatccgaaagcacgtcccgaacacgga

SEQ ID NO: 9803 - DNA, 120 bp, Homo sapiens
tggcgtgttttgcttaaaataatttttgagatttctcaatgtcattgcatgtatcagtagtttattcttttctcttcctaactagtactccattgcatgaacttacaagaatgtgtttat

SEQ ID NO: 9804 - DNA, 120 bp, Homo sapiens
ttacgaaaaattgccaaagcattttccaaagtgcttaaatcattttacactcccacaagcagggaatgagagttacagttcctctacatcaacactcccatctgttgtcagttttcgtat

SEQ ID NO: 9805 - DNA, 120 bp, Homo sapiens
ttgcgacacccacttttgtgggtgtaaaatggtatctcgtgctttcactttacatttccaacactcttcttcctcattgccctatccagttcccttgcacactgtttggccttacagaat

SEQ ID NO: 9806 - DNA, 120 bp, Homo sapiens
attcgagagacatcagatctgatgaccctgatactcttttggaacccagatgtttatttcctttctttagataggaggagttcagatatccgtttttcttttgacttttcatttttgcac

SEQ ID NO: 9807 - DNA, 120 bp, Homo sapiens
ggacgtgccaagctctgtgaagaagctgattatgctggtcctctaggtccagctggtgacaaataaggctgggaattcaggagtgtctaatgtgagactttcaggctcacttacaggcag

SEQ ID NO: 9808 - DNA, 120 bp, Homo sapiens
agacggcaggaacacaacctgagccaacagcataacagacatcagccatgcatagtagtcaatcaatagacatgagaccaaataaaatccagcttctggctagagaccagagcccacagc

SEQ ID NO: 9809 - DNA, 120 bp, Homo sapiens
aaccgtcctcatgggcatacagtgtggaaagaactgacatgctcaggtctatccagccgcattgcccaggaagtcataatcgtcaagacgaccaatgtttcttgctcatctactacctga

SEQ ID NO: 9810 - DNA, 120 bp, Homo sapiens
aaccgaagggagggctacgtccattcaactccaagccaagacaaagaggaaacggcctggatggctgtggactagctaagagctaaagaaaggacagaccccctcagggaccttgggctg

SEQ ID NO: 9811 - DNA, 120 bp, Homo sapiens
caccgtcacttggttctccctattcacttaataatacatttaattccacccaccagccactcctccccgtgctttatacacactgccttctcaccctgaagagcgtcctctgataagacc

SEQ ID NO: 9812 - DNA, 120 bp, Homo sapiens
catcgaaataccatttggggatatttaaaaacaatctactgaatctttctagaactaaattttgttctccctttatcatctaattaaatcttcccaccactgcaaaaaatcctcctaatc

SEQ ID NO: 9813 - DNA, 120 bp, Homo sapiens
ccccggccttgtgtaatgtcatcaaatgggagtggagagaggcaaggaaagagagcgggctgaagttgaagatccaagttcagatagttccatggagcttttcagagccgaggctggagg

SEQ ID NO: 9814 - DNA, 120 bp, Homo sapiens
gttcgtgttgaccagatggaattgtctccagcagagcatactgaaccagtatccacaaagctgggcacagacctgagcttcccggcttcagctactttcttttgtgtgtgtgttggggtt

SEQ ID NO: 9815 - DNA, 120 bp, Homo sapiens
gcacggggggaaaatggggtggatgtgcaaacagtgcagatggccctggaagtcgatggccctgcaagtcaactgcccatcctccttctggcagaagtcccatctcagcctgggctcatc

SEQ ID NO: 9816 - DNA, 120 bp, Homo sapiens
ctgcgggggaacaatagcaacggccccaccagtcccatcaaccccaaggccgcgtccccttgcttctgggcagtagccagtaatgtgatccttcaaggcagtgccaaaccccctgttggg

SEQ ID NO: 9817 - DNA, 120 bp, Homo sapiens
gatcggattgaggtccctgcagcttgaaatttgatttgatctttgatctctgcttgcacagctgcaatggttattatgctccataaagtgtcccggagcccttccttgctcacctgccct

SEQ ID NO: 9818 - DNA, 120 bp, Homo sapiens
aaccggtttcagcaattaacagaagtaaaacattaaaaagcatgaggcaaagtacatttgcatgctaatagccccttctgtagtgctgggaagctgtgttttacaacaaagcagataact

SEQ ID NO: 9819 - DNA, 120 bp, Homo sapiens
cctcgcttgggtaggggaagaaagagaaagagacttaaaagttttgaatgtctttagggatagcaagaggaaagtggaaagactcaccagggggtgaaaaagaaagcttccctagaaaat

SEQ ID NO: 9820 - DNA, 120 bp, Homo sapiens
acacggacttacacaaacatggttataacatacaaccagaatggaggaggggcaccgtgaggattgaaggaggcaaggtaagcaggtgctgagctctgagcttcacactatctggactgg

SEQ ID NO: 9821 - DNA, 120 bp, Homo sapiens
actcgatgacttctactactactaccattactattactatttccttctctgaccccttttttccctttggcttaaacgtcttactagaattactcaggagatcataaagagagagctacc

SEQ ID NO: 9822 - DNA, 120 bp, Homo sapiens
taccgcagctgcaaagttataagcccataaataaagtttatggttaaactggcctgacctggctttgcccctaggtacagaagcagtatcttgtcattagtatgcagaatacatcagcct

SEQ ID NO: 9823 - DNA, 120 bp, Homo sapiens
gggcggggagttggggagccaaagtgaggggcagacagaaaaagagcaggggagggaggagatgagccagggctgctaagaggagtttctctactgcaacccaacaggcggccactggct

SEQ ID NO: 9824 - DNA, 120 bp, Homo sapiens
tcccgcttttttgttgcttatttttgcctctgtcttgttttgatggtttgttcttcagtccaaagaaaggactggattttgctctcccacaccacacagagggctcttggaaaagctgat

SEQ ID NO: 9825 - DNA, 120 bp, Homo sapiens
ggtcgttttcaatacctccatcctcagcagaccactgagtgggggggatgctcagctcgctgccatctccgctgaggagtacataggagaaaacacaaggacgaaggggcatgcaggaaa

SEQ ID NO: 9826 - DNA, 120 bp, Homo sapiens
gggcgccttggaaagctgttgccacgatcatcgcagagccttgccagggaaggctggtggcagggaagggcaggaagatgcaaaagagggcctaagcaccactcggagaccgcccatccc

SEQ ID NO: 9827 - DNA, 120 bp, Homo sapiens
ggccgtttgcccagctgctgctcagagggtgatgagttgctttttatctgacagtggatctcccctttgcccagagaaactattaggaacccaaccagctggaagactttctcagcagtg

SEQ ID NO: 9828 - DNA, 120 bp, Homo sapiens
caccgcaccctagggaatctcacccttgacatttttttttttaaataagcaacttgatttgctccaatttccctaaggatcaaagtagaaaagagttcacttttggcttccaggaccata

SEQ ID NO: 9829 - DNA, 120 bp, Homo sapiens
aatcggttagagcctaggaaggaccagaggagaaggttttccctcttctttatcccctctccccacaaaagaacaagtgccactagttccttaagtgaggagcatcctgggagttccatg

SEQ ID NO: 9830 - DNA, 120 bp, Homo sapiens
aaacggggtttattatcagagctggcaaagaagtcgagtgtctcaaaaaataggggtcaaaatgctttttaaaggtaattatagaaactctttgtttcttagctgtctctgcgccataga

SEQ ID NO: 9831 - DNA, 120 bp, Homo sapiens
gcccgtgccatagcccttgacatcagagctgggggtcagagcagcactgaataaaatccctcactgttggtccatggcttctgacaagctagttctctattgccattcacccactggggg

SEQ ID NO: 9832 - DNA, 120 bp, Homo sapiens
acccgaccttggctcctatggggctgccagccagcatcagttcaggctgcatagaagccccttacctgactgaccaggcaggccaggaagaatcccctttcccttgcattctcacaaggc

SEQ ID NO: 9833 - DNA, 120 bp, Homo sapiens
aggcgcccccgccaccaaccccatgtcttcatgtcacttgaccctggctgctgccttcctagcagtcaggaggctctggaagatggaggagtggaaggaggcgtgggaaggtggagggct

SEQ ID NO: 9834 - DNA, 120 bp, Homo sapiens
ggacggcaggacctggagaggacccttctaacagttcaacttggccctgttccacggggcaggctgcccgcacttggggctccatctgtggcctgttcccatgcaaccttggccttctcc

SEQ ID NO: 9835 - DNA, 120 bp, Homo sapiens
ccccgcaggcaaatcagggcatgtccagaaacgattacaatcagccgcactaccctgagagctgccccagagcccagccagggcagaaaacacactgttcttccattttatgaatgagca

SEQ ID NO: 9836 - DNA, 120 bp, Homo sapiens
agccgtatgctttctataaatgtctgcgtaaatcatcggtgtgcattcccctcttggcacaagaaaaacccaatccagactgcacaggcagcttcttctccaggagggaggcccaggggc

SEQ ID NO: 9837 - DNA, 120 bp, Homo sapiens
ggccgttctctccatttcttctgggctctagggagctgcctcctgggctggtctctggttctgcagagaaagctcttgctcggacaatgattcggccccaaaggggcaacagctcacctt

SEQ ID NO: 9838 - DNA, 120 bp, Homo sapiens
gcacggccattggaaaggtctctgtgccactggcattttatgtaaaagctccatgtccacttaactaataagtaatcattaatattacccctggcccatgtaaccaactgttaaactgac

SEQ ID NO: 9839 - DNA, 120 bp, Homo sapiens
agtcgtgggcaccatgaccaacattaaagccaagtctgaactgttcacttaaatgactcaggctgatttatacatcgtgccttgcatttaaccagaatggtgggtattttatatcaaaat

SEQ ID NO: 9840 - DNA, 120 bp, Homo sapiens
tcccggccttaattatctggatcatagtgttaccttcttggtgaaaatgcattcccaaaaactgggaaatggatggaaaatctggtgttcaaaataatgtattaatgagcacgtttgact

SEQ ID NO: 9841 - DNA, 120 bp, Homo sapiens
ttccgggtctgcagatagcacctgctccctgtaaccccttgcagaaggacagaggggccaatagagaggggcaggtaaggagccacctggacaatggctgcatcgaggccgcctgggata

SEQ ID NO: 9842 - DNA, 120 bp, Homo sapiens
agacgcaccaggatacccatctcgccatgtggcaccatggactgacttggagcaggttaacttcactgcttgattttttattttttttcagttcactgtttggctttgattcctagatcc

SEQ ID NO: 9843 - DNA, 120 bp, Homo sapiens
gcacgtggtaagtgctcctaaaagatggctattgtcatcttcgttattcttcccttcagctgtctaacctctgtgcctgtggacaggaggttctagtctccccgctttcccactcatcag

SEQ ID NO: 9844 - DNA, 120 bp, Homo sapiens
tgtcggttgcaagcccagcgatctcagcagagccagctctcagcaagtccatttccacctgaactgccaaggtgtgcagtcccaggccaggcctgcgggctgtcacgtttagcatttggt

SEQ ID NO: 9845 - DNA, 120 bp, Homo sapiens
cctcgcctgcccctaaggacgctctcagccaccctgctgcctctgtcaggccctaactcgttcggccggcttgccttggtaccggggcttatccaaacatcttcatcgcttttcataaat

SEQ ID NO: 9846 - DNA, 120 bp, Homo sapiens
agccgcaccatcaggaggaagggcaggaggggcttgtgactgaagtgtggggaagagaagctttaattagcctccttgcttcgcggggtcacccgcagttcaaccgccctgcctccgcat

SEQ ID NO: 9847 - DNA, 120 bp, Homo sapiens
tcacgtagtgggaagccagccctgccgcgatctcgccacgctgcacacagcctgcatggctggcctctgctccccgtgtccagggatgggttcctgcccctggctgtgtgctgggcagga

SEQ ID NO: 9848 - DNA, 120 bp, Homo sapiens
agccgctttgcccccatctcccaactcacagtacaatactgctgcagcaaaaccccaaccttggttccatgagcaaactcactttgcagagagtgccaagcctctctgtcagaatgcaaa

SEQ ID NO: 9849 - DNA, 120 bp, Homo sapiens
ctccgtgataacgaggttaaaagagcactgggcttcaagtcgagcttaccgacattctgaattctgctgccttttagttgtgcagccttggaaaagtttcctcatcctcaaaaataacag

SEQ ID NO: 9850 - DNA, 120 bp, Homo sapiens
acacgtattcctagccgtccagcccactaggcgtgtggcaacatcttgcccaaaatatcaggctcagagactgattctttccacacttgtttattcacttaactcggccactgccctgaa

SEQ ID NO: 9851 - DNA, 120 bp, Homo sapiens
actcggtgagggttgtacgggaagccaaacacagcccttcccagatccctgccttgtactttacatcagcttcaaattccctagataatcaaatagccaaattcatttgataacagcatt

SEQ ID NO: 9852 - DNA, 120 bp, Homo sapiens
tagcgcctaggagaagtccttggctgtttctgggctgcccagaggggcaataaacagtgagaccctagggtttactctccgactaggactgtcttgggcaaatgactatggatttcttag

SEQ ID NO: 9853 - DNA, 120 bp, Homo sapiens
aaacggaaactctcatccttcgatttggttcataaacggacccatcggagaggagcccctcacccagtgctcagcctagtgctgacccattaacatgcaatgagtgttagaccagaggag

SEQ ID NO: 9854 - DNA, 120 bp, Homo sapiens
gatcgaagagaaagagacacagtcttagattccccaagaggtcccagcccacgcactcatgattatgattatagctggcatgtatgcgttatccaggccttccgagcacattctcatgca

SEQ ID NO: 9855 - DNA, 120 bp, Homo sapiens
taacgcagatgggagcatgcgcctggaaggccaccctgctgcacagcacactgactgagcaagaacaaagaccgtaaatgaagaaggatgtttgcattctgctcctcgcttgcctgaaaa

SEQ ID NO: 9856 - DNA, 120 bp, Homo sapiens
tttcgttttgctgctgtgatagggaactgtgtgtgttctgatggttcaatggggaaatgaggatcgatcatgagtgattttcccgaaatgcaacctgtgcaggtcttgccttcctcaagc

SEQ ID NO: 9857 - DNA, 120 bp, Homo sapiens
ctgcgaggagaagtcgtcactagtggggaattccagcaggtgacccaatcgagacagctgggcaggctcctggagctgatggcttgggaaggagggagtcagaagtggcaggcccatgga

SEQ ID NO: 9858 - DNA, 120 bp, Homo sapiens
gtccgcggatgaccgggatcacaaaacaatgacactgacttgtcgtggggatggtatgaacagacatgaggaaggattggagaagatctctgttgctgacagaggacagggaccagtcag

SEQ ID NO: 9859 - DNA, 120 bp, Homo sapiens
gagcgtaggagcaggagcagtgaggtatctctggaagcagcaggcaggacctgggctggaatggctttgtgagattctattctgcagcctcggcagcctgagtcttacagccccaattct

SEQ ID NO: 9860 - DNA, 120 bp, Homo sapiens
aatcgttctgctggtcagtgacctgccggcatccacctgtcagtgtactcctatgcccgtgcgttcccctcgacgtccagccacttctgtgtctgcccgctagggtctcagggcttttat

SEQ ID NO: 9861 - DNA, 120 bp, Homo sapiens
caacggggcgtggattctcttaaaggtgagtgtgcaggcagggggagggcggaaagatgggggcaaggggtggtgtgtcataaaatgtcctgaggacataaactttgcagggcccagccc

SEQ ID NO: 9862 - DNA, 120 bp, Homo sapiens
actcgctgcttgcgttcattagcacggaggccgcagaccccctcggcagaccctgcctatgcctgccctgggctcctggaggactcctgctgggggccggagggctgcctggcgccgctg

SEQ ID NO: 9863 - DNA, 120 bp, Homo sapiens
gggcgagcaacttcagggatggagccaggccagcgccggctccccacacatggtcattacctcccgaaaacccaggagttattacaattaaaacacgttgcaggggggagtgagggctgg

SEQ ID NO: 9864 - DNA, 120 bp, Homo sapiens
caacgcagccaggctgggcctaccctgtgattatttcaatgggaacagcaggatgggggctgagtggggctgggatagggggtgctggagacccatgtacccagctgcatgggtgagagc

SEQ ID NO: 9865 - DNA, 120 bp, Homo sapiens
aaacgctccccagggtgattcctgccggctgtcctgttctctgtaattgctacttatcccgtgaaacactgagtagatggccctctgtcctccagggagttcaaaccccagacctctgtg

SEQ ID NO: 9866 - DNA, 120 bp, Homo sapiens
ccccgctctcccggcttcatgggtggaaatggcccggcctggtttcctatcagttcaactctggccgttcagagccgcaggtcaaacccaaccatccctttttctaggtggcctcgaagc

SEQ ID NO: 9867 - DNA, 120 bp, Homo sapiens
tggcgggagaggcaggagagctgggggagtgaaaacgttttggaagtaggcccatgataatgagcaagatggaatctgtgcctgggacacctccaggcaccagcacgggattggggtctc

SEQ ID NO: 9868 - DNA, 120 bp, Homo sapiens
ctacggaatgggaatcccggtctggcagagctacagggcctgcgaaagagaaaacagtaattagttctccatctttctgcttgtctcagcagccccgagcatgtttggcagacgggcgag

SEQ ID NO: 9869 - DNA, 120 bp, Homo sapiens
ttccgggggtagttcttggcaaattcccacatccccagtctcatttcctctggaactaccttagggagtctaatagcagagagaggcctagaaacaccagacccagtacaccagaagttt

SEQ ID NO: 9870 - DNA, 120 bp, Homo sapiens
gagcgttccatgtggaaggttaactggaccggaggcaaggccccctcagaacccaaagctggagatctctgagctgcctaagcccagccaggagatgacatttaggaacattctcttcct

SEQ ID NO: 9871 - DNA, 120 bp, Homo sapiens
cagcgcctcccgccaggggattccgccaaccaccgctccctgcaatcggggttaccagtgatgattcttcccccagcatcaccctacggtgtcttggcagcctgcctccttcacagactg

SEQ ID NO: 9872 - DNA, 120 bp, Homo sapiens
tgacggggaaaggcaccaaagggcccgagggaagcccatcatgactgaagaggaaatagaacaagtgaccctgtgtcttagtcagcttgcactgccattgcaaaacaccacggactgaat

SEQ ID NO: 9873 - DNA, 120 bp, Homo sapiens
tatcgtggggaccccaccctcacaacctcatctaaatgtaattatctcccaaaggccccacctccaaatatcatcacactgtggagtagggcttccacctatgaatccggggtggggagg

SEQ ID NO: 9874 - DNA, 120 bp, Homo sapiens
ccgccccacccacccatggaaaagtactggcatctcagcggctgggtttcttccaggaggccctgctggggatgtgtcagtgcccccaacccgaagcccacagggaaatctcaccccact

SEQ ID NO: 9875 - DNA, 120 bp, Homo sapiens
atccgagagctcacagcttggctgggacgctgcccactgtggaaaatggaacgtgaagatctggtacagtgagggtggtgggggagggaagccctgaccccacccagcctgcgtaagagc

SEQ ID NO: 9876 - DNA, 120 bp, Homo sapiens
tggcgatggggccggcggacacacggcctcgtgcttttcatgcgatgacacacctgactggccaggcacacctggacgtcggggcaggccaagctttccaacagtcactcactgttcctt

SEQ ID NO: 9877 - DNA, 120 bp, Homo sapiens
ccacgctcctcacagacaggggggtttttctccttcttggtaggccacgcctcccccgggcacatactgcctctgtccgagggtttcgtccaagccctgggctctgaccacaaaaagcgc

SEQ ID NO: 9878 - DNA, 120 bp, Homo sapiens
tggcgggctcacctcagacgtgaggtaccagagagccaaaccgtctgctaaaaggacatccccagcacatttctccctaggcagagggtctgtggctggcggccacaaacagcacatcct

SEQ ID NO: 9879 - DNA, 120 bp, Homo sapiens
gctcggggtgctcccgtctgacccaaagcaaactgggtaaatccctggtaaaaaccaagttgttgaacacagggcttcaggtcttggcccattcggtgtggccattcccactccaatgtc

SEQ ID NO: 9880 - DNA, 120 bp, Homo sapiens
cagcgcccacaggcacccagaggctgcgtgcaccctggtggtccctgtcgaagcggtcacggctcaccgccagacacccttggtccttacagctctggctctgccagccacagacatctt

SEQ ID NO: 9881 - DNA, 120 bp, Homo sapiens
caccgccatcctgggacccagggtccacaaggagaatattttcttaaagtaactccctgatttgcgggggtttacctgccgtaggggaaattttttaaaaaaagaaaaggaaagcattag

SEQ ID NO: 9882 - DNA, 120 bp, Homo sapiens
acccgcctgaatttgaggtttggcacaaataccaagacagggctggccaagagaaaggtgtggcccggtgaaggacatgtccaggagtccagcaactgtaaacttgaatcccaaccctaa

SEQ ID NO: 9883 - DNA, 120 bp, Homo sapiens
cctcgcctaactcccagccaggactgccagtgactcactcatctctcttgccttggtggcaccatccagtaaaagacaggacttctgacctcactggggagcaggaagattagctcatgt

SEQ ID NO: 9884 - DNA, 120 bp, Homo sapiens
aagcgctttgaagattaaaaagcctgtgcctaaagggggctattattattataactacctgtgaaaaaagagaaaaaagattcccatctaggtctaatattagctctcatacagagccag

SEQ ID NO: 9885 - DNA, 120 bp, Homo sapiens
cttcgtggcagctcatacttgtgcccctggcactaagacggtgcttcccaaagtttgggatggggaacatcatgggggggtgcatgggttggttttagagggtgggcagacagcacagaa

SEQ ID NO: 9886 - DNA, 120 bp, Homo sapiens
ctacggagaggttacaacaccgcagttcagaacagcaccacttcccctccccatccctgacatttcccaggcctttctggttttctcagtgcctgtgtaaatgtggtccctggtcccaga

SEQ ID NO: 9887 - DNA, 120 bp, Homo sapiens
agacgcctgattcattcattctccatgtttgatgacacaggaaacccctgagaatgaaggaatcaggggtataacaggccctaaacaaagccaagatgagccatgtttgtccccgagaga

SEQ ID NO: 9888 - DNA, 120 bp, Homo sapiens
ggacgaggcaggttttataatctgattaaaatcgcctgtcggcagttttccgctctcctgctcaccctaaatctacaaagaagctccactcctggaatcccacacaggtaaaccccgtga

SEQ ID NO: 9889 - DNA, 120 bp, Homo sapiens
tctcgtggcgccaaagagtttgggacaatgtaggtgtccatcactgggggaatggacaggtctgtctggatcagaagctagcaaactttctctgtccagggccagatactatttaggctt

SEQ ID NO: 9890 - DNA, 120 bp, Homo sapiens
tagcgcccagcacttagtaggcactcagtgaatatctgttgggtgaatggacgagcagctgccacgttcatctgtacacgtcacccaacaatgtgtgtgcctcgtctttcagggctagag

SEQ ID NO: 9891 - DNA, 120 bp, Homo sapiens
agccgtaaaaataagctaatgagcatttccagggggccaacgagcgccagaatgctaaagaccaaggtggttggttcagaagaatttctggaatgggcatcctggctttcagaagctcca

SEQ ID NO: 9892 - DNA, 120 bp, Homo sapiens
ccccggccctggggcccagcatcacggcccctgaggctatttcctggtcagacccaaggcatacacaagaccccttctgaggttttccgtgccacctctccgggcggctctggcaggtcg

SEQ ID NO: 9893 - DNA, 120 bp, Homo sapiens
agtcgccatgtggttgtggttgcccgctccaaacacagccctgcagccccctcctcaccggcgccacctccaccgccagtccacacacgtccccaccctttcttcccccagccgcacctc

SEQ ID NO: 9894 - DNA, 120 bp, Homo sapiens
acacggcagctccagggctgctgccacccctcacattgacacgtttcctaatcctctggcaaacgcagagcaagtccacagaaccctgctgtcaccacctcggagccaaacttagtctca

SEQ ID NO: 9895 - DNA, 120 bp, Homo sapiens
ccacgccattctccctgcccctccaataatcacaaatcccactattagaaggtaaagttttaagaggtcatttcatctatccctctgtctttgggtaggactgtcttcaaaatacacatt

SEQ ID NO: 9896 - DNA, 120 bp, Homo sapiens
ctacgccttcgacaagcaacattaaacatacaaccaaacaccatctgtacctgtctccgtgctgactggggacactcccctagaccacactgacagcctcctcctccccacccacaccat

SEQ ID NO: 9897 - DNA, 120 bp, Homo sapiens
acacgagttgatgagttttccattttaaagaatagggacgagcaaagcactccctctcctgtgtttgaaagtttacttgcagcttcagcaggcaaagggctttttttaatataataaaaa

SEQ ID NO: 9898 - DNA, 120 bp, Homo sapiens
atccgcccgctctaggcaatttttaatgcacaaataaatccgcacctgacgtgctgacagattattatgcagtgtggcagccaacaaaagtaaacacaggggcaagttttaacctcttgc

SEQ ID NO: 9899 - DNA, 120 bp, Homo sapiens
agacgaagggaggggatagagaggaacagcagcaccacatcacattccccaagcaccctgccttccatcctgtttatactgtggccataagatccacaggcttctgccctccgtcgatcc

SEQ ID NO: 9900 - DNA, 120 bp, Homo sapiens
agccggcagagctggctgtgcagatgtaatgcccagccaggtgcttctcccagctctgcccaatgtgaaagagtcaggacagttactagagagctagagggtaatcgggcaacttccaaa

SEQ ID NO: 9901 - DNA, 120 bp, Homo sapiens
caccgtggataaaacagagtccatttcatagcagacaggggtaaacctcaaaaggtatttgcacgggatcgaggaaggatttcatctctatccaaggattccaatctatcttgtaggaag

SEQ ID NO: 9902 - DNA, 120 bp, Homo sapiens
caacggaaacagccactgagccctgccaattccttctcaatacccgtttttgtgttcgattggataggaaccgttttgggggcctgagaaaagcagaagggttgaaccttacttcataat

SEQ ID NO: 9903 - DNA, 120 bp, Homo sapiens
tgacgtgcttcagtcaacagaatgcggcagaaagtgatgctgtaccagttctaggcctaagccttctgccgtgtattagtctgttctcatgctgctaataaagacacacctgtgattggg

SEQ ID NO: 9904 - DNA, 120 bp, Homo sapiens
ctgcgctggagagggcggggtcgccccagtcacctgagcaaggaaacccccaagcccaaggaaaagagagggagcagagaggaggggaagctgcaaagcccactgccccgcccagagcca

SEQ ID NO: 9905 - DNA, 120 bp, Homo sapiens
cagcggagcccagttccccaaccaattctctagcagaatgaagccttatgagtaaccactgaccagatgagcagaacaaccacccagccaggcctagaccaaaccccagaatcatggaca

SEQ ID NO: 9906 - DNA, 120 bp, Homo sapiens
ccacgaggccatgggttgtgctggagtgccctggtgatccatgccaacaatgggatcatgcaaagctctgtgcacaggcaaatatatgtctatccttggtgatgggtagtgtgaacataa

SEQ ID NO: 9907 - DNA, 120 bp, Homo sapiens
aaacggatgcagagctatcaatctgattttaatggactctagagaagcgtatccaaagcttacttattcctgcaaaccttcccagaaacttgtaaccttcaatgtcaggaaatgttctca

SEQ ID NO: 9908 - DNA, 120 bp, Homo sapiens
tgtcgctggtccaaggactacactttgcatggctgcctcattttgcagataaggaaactgaagtgcaaagcgaggaaggctctaccaccaacatcagagccttaggcttgattgcacaga

SEQ ID NO: 9909 - DNA, 120 bp, Homo sapiens
ccacgggtgattctgatgcacagtgggtttgagattattcatctagaatacaagggaggcagtgaccccacaagagtaagactcaaaaatattagctcaccagtatttattaagagggtt

SEQ ID NO: 9910 - DNA, 120 bp, Homo sapiens
aggcgggagggaactgctgactgacaggtgacaagatggcagcttccagactgacggcaatgttcaatggtatcctggtttggatggtggttccgtggatgtgtacatacgtaaaaattc

SEQ ID NO: 9911 - DNA, 120 bp, Homo sapiens
aagcgcacacatacatacatacatacataatttttaaattgccacaggtttatgttgtgcccaactggagccaagttggttgtaaaaaggggccccaatcacagtgagttcattcacctg

SEQ ID NO: 9912 - DNA, 120 bp, Homo sapiens
ctccgaatccgccacacggttatggaagctggctccaccgacgagccctctggataaaggagaataatggaaactcagtccgaggagcttatttcccgtttggaggggttttgcaaggca

SEQ ID NO: 9913 - DNA, 120 bp, Homo sapiens
aatcgtgctgaaatctgtcactcaagagcttctatgaggttgtctcattcctgcattacagaataacatggaacaaagattctcttgccatggcagcctttcagacaccaaaattagttg

SEQ ID NO: 9914 - DNA, 120 bp, Homo sapiens
aagcggcatccagacagaagcacttaggtggggggcctaagaagtcaccccagatcttcccacctgcctcggcagctgtctcctccttttctctccactccacccccagccccgccttcc

SEQ ID NO: 9915 - DNA, 120 bp, Homo sapiens
catcggatgccctgagtcacatcttctagctcctgtgttctctccacctccagcagtgaggattctacacacatgtgcacacatacatgcacacacaagcacccgcaaaacatacatcct

SEQ ID NO: 9916 - DNA, 120 bp, Homo sapiens
agtcgcttgacagtcacattcatgtgtgcacctgatccggcgctggctccaaagcccatgttctttcccacacgccccactgtgcccctccgagactggaaccgtagagagcgaccacct

SEQ ID NO: 9917 - DNA, 120 bp, Homo sapiens
ctccgggaggggtctctgtccatgggtccatggtcccagatgctggagtgagagcttcatttgaaagccgatacacggaataaccacgaggtggcgacagaccccagcaatatccaggag

SEQ ID NO: 9918 - DNA, 120 bp, Homo sapiens
gcccgcgggcccagaggagctgcctgagctcaggtgctgctcttcgcctgacttccctgctgggcacagctggttataaggagttaatgcctttgccctggccacgatttttgtgaggac

SEQ ID NO: 9919 - DNA, 120 bp, Homo sapiens
aagcgagccacttccctcaagcaccgttataactctggaggtctatctgttaggaacaatgcagattgtgccttcgccggcctttggcagaaaccggcagagctctttacataggaccac

SEQ ID NO: 9920 - DNA, 120 bp, Homo sapiens
acacgcccaaacacgcacacaacacagacacacataacgcagacacacacaacatatacacactcatacacccagacacacagagacgcacaagactcagacgcgcacacacacactcat

SEQ ID NO: 9921 - DNA, 120 bp, Homo sapiens
acacgggcttaccatgacaagcctagaagaggtcctaatgaacaggtgccctgctatctactcaggctacgaaagaaaagactagagattcctccaaactacagactcgattcatgggag

SEQ ID NO: 9922 - DNA, 120 bp, Homo sapiens
atccgctaggaaagtcatgtgggcaaagctgcaatgttttctctctccgttcctgagagtttggtttttccaatggtcaaagtgaatgttcaggatctactgccttaaaaaccttctcta

SEQ ID NO: 9923 - DNA, 120 bp, Homo sapiens
gagcgaatgcctcagatcacaggatatgcatatcagttggttaaaatatgcagatacacttggtatcgatatccaaaaatatcaaagggaggtttgcacaaggagagagccaaagcactg

SEQ ID NO: 9924 - DNA, 120 bp, Homo sapiens
acacgctgttctttagtggaatagttactccagagcttccaagaaatttcagaaggtgtgagccagtccattcaattttcaaacaattcgaagagtgagtcctcatgcctataatcacgt

SEQ ID NO: 9925 - DNA, 120 bp, Homo sapiens
gatcgtcagagctcagacctttctttccatgtcacgagatgatccagtttttttctccatcctcttcttctcccctcaataataaatgataaaaagcattcattgagcacttactaaatg

SEQ ID NO: 9926 - DNA, 120 bp, Homo sapiens
tcacgcagccctttccgccatcttcctccttccttcctcctggcttcatcaaatggactcatccttctttgcctccaggggacatctcatctcttgagtccctacattctaactcttact

SEQ ID NO: 9927 - DNA, 120 bp, Homo sapiens
caccgaatccagggtgctggttctagccttcttagttttgttctctgcagtttcttttcccaaaatccccttttcccatggcttttgccattgtgtgccaggcacgaggtctctgcccac

SEQ ID NO: 9928 - DNA, 120 bp, Homo sapiens
aaacggagccttggagttccctagagaaaggaggtgtcatagtaggctatctggccatcttgcaggtgaaccccaaaagagtggcttggtagttttttctcaaagaaattccacaaagag

SEQ ID NO: 9929 - DNA, 120 bp, Homo sapiens
ctacggtcttgcttgagtgtgaatcacaattcttgccttgtacaggaggatcaaatcaggcaggaatgcaaccacatcagtcacctggaaggaacgcaggcatccgcagaggagggggtg

SEQ ID NO: 9930 - DNA, 120 bp, Homo sapiens
gcccgaacatcggttaagtggtgagtgaattgactgggatgaaactgatgaggatggtagtaacgatgctctaaagcacccgagttttcccccagttccctcagggaagccccactctga

SEQ ID NO: 9931 - DNA, 120 bp, Homo sapiens
gaccgccactcccaaatccctgtcccagattctttccttttccgagggcatctagaggacaagcaccttctgatcggaatgttttccaaatactcaacatctggaaggagctgttacaaa

SEQ ID NO: 9932 - DNA, 120 bp, Homo sapiens
agccgggaaatgggctggcaataaaacagggccagaccctgccgagctgggaatggcagtggggagagggtgggtgagaggagcagcgcggaacaggctgggaggaggacctgtgagagc

SEQ ID NO: 9933 - DNA, 120 bp, Homo sapiens
ctccgagaggggtgtccgggcagcatgggacaatggagagtgaccattgcatatccagcgctttctatgtgctttctctgtagtgtcttatttatgtaaaagaaagtttcagcagtggtc

SEQ ID NO: 9934 - DNA, 120 bp, Homo sapiens
aagcgtggtgggaaagatggaagaattcactcaacagtataacatttttcaggtcttgacagagaaggcagaaaaaccttccctgctggagtgttaaaaggtgacaacgccccaaccctg

SEQ ID NO: 9935 - DNA, 120 bp, Homo sapiens
gcacgcccttgggggcttatgggacctataagaacagatgattcttcccgtctgttctgccacaaccaagcaacgctctgcccttccttgtatgccccctggccccaaggcagtctgaaa

SEQ ID NO: 9936 - DNA, 120 bp, Homo sapiens
agtcgcttcccaaaagccagaaagccatatgctgtttatttccaaaagtatctggaaatcaattcaggcagctcttgcagaatttcagaatctcggggctggaacgaatctcaggagccc

SEQ ID NO: 9937 - DNA, 120 bp, Homo sapiens
gcccgattgcaaatgggcagtggatggaccacctgctttagactccacgagggggcttgttaaacatgcagagtcctaggctgagccctggaaccacctggtgagcggggatggggagtt

SEQ ID NO: 9938 - DNA, 120 bp, Homo sapiens
acacggctgtttttttccattcttaaacatatctaaggctgcatgcatttccctcagcattcagaaaggctttctcaactttctttttttatatctaatcttagctttctgagcatcctc

SEQ ID NO: 9939 - DNA, 120 bp, Homo sapiens
agtcgtcggaaaagaagggaaaggcagagatgaggaagaccttcccttatctcctgcctttgggaacaataagctgacttcttggtgtgtcctggtcctttttacaactggagcagatag

SEQ ID NO: 9940 - DNA, 120 bp, Homo sapiens
ccacgggccattccttgggccatgtctgcttctctaagcctggccctggggaacaaaacttagatcttgatcatccagcatagctctggcatgctgagcgtgtgatacacctgtctctac

SEQ ID NO: 9941 - DNA, 120 bp, Homo sapiens
taccgtcaggcaaacgagtgggttcacaggcagaggcctgccctgccaaacaatgctcccctttgtccccgcccagggctcaggagccgcaaggaagccaaatccatcagcacttgtcag

SEQ ID NO: 9942 - DNA, 120 bp, Homo sapiens
ccccggcaaagccccaggcttccagcaggcagcattaactgacacgcaatgtgtcagtcagccttctaaaagccaggggtggggatccgtgccagggggccactgagctctcattcccag

SEQ ID NO: 9943 - DNA, 120 bp, Homo sapiens
ggccgcagagactccgacacatcattttcataaaaacagcccaaggagagcattgcattaggaaaaatcatttcccgtattggcagcgggctcttctgatggctttagcaaataccatac

SEQ ID NO: 9944 - DNA, 120 bp, Homo sapiens
caccgaagcagtgcagtgcgcgcccttggctcatgtgcccgaccgcatacgggacagaccagggatgagggagactggaagtatgaattcccaaatcagactccctacaaatgcaacacc

SEQ ID NO: 9945 - DNA, 120 bp, Homo sapiens
caccgcctgcaaagggtcgcccctccttcgtagccagcaaggtggcaggctttacagaagcaaggggattttgtgaccaaaaagaacctggaagcggcctccatggatgctgccaaggtt

SEQ ID NO: 9946 - DNA, 120 bp, Homo sapiens
gttcggtcacctcctccctgcctccaccctcccaccacgtgactgccagtcaccaggccaggaatatcacaagcgtcttccttgggcaaacaaccgttcctctgcagacacctagactga

SEQ ID NO: 9947 - DNA, 120 bp, Homo sapiens
actcgacacagagggaggggacagaagacgagtgtgtgttcaaagtctgcagtcccctggggaggggtcactggcaccatctgccttcgctaccggggcaaggcaagttcagagctacaa

SEQ ID NO: 9948 - DNA, 120 bp, Homo sapiens
cctcggtctcattccctaggcttccctacaagcctaattatgggcatgaaatgagctagtgaatgagttttcagaaaagcaaacgttcccttagaaatacaaaatatttgagccaaataa

SEQ ID NO: 9949 - DNA, 120 bp, Homo sapiens
tctcgtagaaaactctttagctaaagacagagccaaaaaaccaaagtgcagctcaaagtcagatgtgctcttagacaggtcccccgagagagctgggaatcctgggactccatcacttac

SEQ ID NO: 9950 - DNA, 120 bp, Homo sapiens
ttacgatgattatccgtaggctccctggacagctcatgagtcaagagactgggttcccgtaacccactcccttgcccggaggcacctgggctcaccataccagaggtcagcagcacattt

SEQ ID NO: 9951 - DNA, 120 bp, Homo sapiens
gctcgtgggacaggcagacaatttacaaggtaagtaacacatcataaaattgagcagcaaacactaatgagcctacaagccaggacagaggacctttctctccgaccagggaaactgaca

SEQ ID NO: 9952 - DNA, 120 bp, Homo sapiens
aggcgtgccctgctagcaccgaccacagtgaccaaggataacgcatcgtgctttcctctagaccccaagaagcaactgtaaaccttgggaggctttcaagagactccccagatcaaggga

SEQ ID NO: 9953 - DNA, 120 bp, Homo sapiens
tatcgcggccaccactatcatccacccccatgattatgactttggtgagtctctctcctgcttcaaatcacagatgtggtccctgactgaggctcactctgtttgcagaaggggactacg

SEQ ID NO: 9954 - DNA, 120 bp, Homo sapiens
gggcgtgtcttgccaactctgtagtgttcctaaagaattctcaattctcaaagaacactctggcaaagaaagaatgggaaacacattgcaagcttaaagggcagtggcaaaacaaataat

SEQ ID NO: 9955 - DNA, 120 bp, Homo sapiens
caacgtgtagtcaaggtttagaaccactgctctagggccgggctctatccaatatggtagccatgggttatgtgtggccgttgagcacctgaaatatggtgaatccaaattgagatgtgc

SEQ ID NO: 9956 - DNA, 120 bp, Homo sapiens
tgtcgtacggcttacgcttccctgacttgagtacccattcactttttcccccaacacttcagaaagatttacagaaaatgcacagatggcacctcacaactgaataatctcctaaagtaa

SEQ ID NO: 9957 - DNA, 120 bp, Homo sapiens
gaccgatgaaattcaccaataataatagtgatgacaaagttcactagtgaagagtatctataactgcatcagaccaatctggttcaacttttatgtaacaaagctgtgagctgcttttca

SEQ ID NO: 9958 - DNA, 120 bp, Homo sapiens
ccacggtattggcctctgtgtgcatcgggcagcaagcccactgatgcttggtaacatttcaacttcctcccccagaacatactgcatatttaaatggggaaattaacaattagtaagaga

SEQ ID NO: 9959 - DNA, 120 bp, Homo sapiens
taccgttaagtgcaaaaacatatgatacagaacaatgggtcaggtgtgattatagaaacatgataattctgaaaggatgcacaagaaactagaaacgatgtttgtgtctgagatgggggg

SEQ ID NO: 9960 - DNA, 120 bp, Homo sapiens
tcacgtttgcaatactatttatgtgagccgggaagcaagagcttattacaagtaacaagccctcagatgcagcaacgctctgcaaccagccacatcacaccaacacgggtttccctttta

SEQ ID NO: 9961 - DNA, 120 bp, Homo sapiens
caccgggaattgcccagaagactgtcattttatgcttatttaaaaagtggctggaggactggctaagaaaatggcaatccaggagtgcctgggtcaaagggccagtggatcctggggtca

SEQ ID NO: 9962 - DNA, 120 bp, Homo sapiens
cttcgagctggccgcatgggcactgtgtcctcagagcctggctcatgggctccctgccttgtcttccccttgcacggcacctccgctgggtgtctggggctctgggtgtccccaccactc

SEQ ID NO: 9963 - DNA, 120 bp, Homo sapiens
gatcgcagcagcaccttccttatgcggccggatgttacatcggagaggctgactgtcctgcctctgaatcacccagacctcttgtttctccaattccctgctttctgatcagtctctgct

SEQ ID NO: 9964 - DNA, 120 bp, Homo sapiens
atacgagtgacccagaaggaagacgataaaatgcaaataaccactcatttactatgaccatctctgatgatagatttgggaacggttgagaacttgaactaaaatgagatttctggtagc

SEQ ID NO: 9965 - DNA, 120 bp, Homo sapiens
cagcgccccccgattttaatgaaaatctcagccctttatttccaaaaccctctggactgggaatgcattttctcccacttcccatccagatggaaagcaaacataaaatccacaggagag

SEQ ID NO: 9966 - DNA, 120 bp, Homo sapiens
ctccgtctcaaaaaaaaaaagaaaaaagaaaaaaagaaatgtctctgttaggtctcaggattatatattgtaaccaatgttacaaagggacaggagtggtgggaatttctaacatggtgc

SEQ ID NO: 9967 - DNA, 120 bp, Homo sapiens
acacgccatcagtaccatgctgtggtgtgttgtgagtcacagcttgcgttaggataagattacccggttgggcctgacctagtcccaggagccctgaaaagcagaaagctgtgtccagtg

SEQ ID NO: 9968 - DNA, 120 bp, Homo sapiens
attcgaaagtgagaaagtgcctgagccatgactggctgaagaagcagggagccacatgggaaggaatgtggacggccccaaggagtggagagaggccctggctaatagccagaaaggaca

SEQ ID NO: 9969 - DNA, 120 bp, Homo sapiens
tcccgcagccctgctgtatcctgccagcagacaggagcttggaagggactccgaaatccagatgagaacacgaccggctgacccacccacgtgctcccaaccctctgacctatggagttt

SEQ ID NO: 9970 - DNA, 120 bp, Homo sapiens
gagcgtgtccccaggccctagttcatgcagataaaacctgtcttggatatcagaggcaaggggagaacacccccacccctggtgagatacaccagggacaagtttagatgaaccacctga

SEQ ID NO: 9971 - DNA, 120 bp, Homo sapiens
aaacggtagtgatattatccaaagggtaacggctcccaaagtgaatgaatgcttcctattcaataaagcagtaaagtaccgaggtggcctggagagcacggccagccaccagctgcctgg

SEQ ID NO: 9972 - DNA, 120 bp, Homo sapiens
gagcgaaggtgcccaggagaccgactgcatcggcacctgttcccaggagcctctcccacccacaaagccacaggaatagcaaccagcagtgagtcaccgggtcaccagagaaaaaccagc

SEQ ID NO: 9973 - DNA, 120 bp, Homo sapiens
ctccgagcaagcttctctatcattggattcctagccagggtggtcgttgagaatcttccaggccgtcctccagcctgcgaacgcaggggaagtacggggaggttctagtgagaatctggg

SEQ ID NO: 9974 - DNA, 120 bp, Homo sapiens
ctccggagggcacagaagcattaaacagtcatgactgaatttatcctcccaccatttgcacaaaatgggagggaaaggatttcagtctctgtggagccttgagatgcctggaggttaaag

SEQ ID NO: 9975 - DNA, 120 bp, Homo sapiens
ctgcggctcctccaccatcttgcttggagagactccggggtctttcttgttttagccactatgtttcaggtctcaattattctcagtcaaatctaatcctcatagatatggatcaccaaa

SEQ ID NO: 9976 - DNA, 120 bp, Homo sapiens
ttccggtagagtccccctcagtccataaggcagaacggtgatgccaaaccctttaacagccccagggcagttggccccagacacacagttcctgttgtaagcttgaacagctttgcttga

SEQ ID NO: 9977 - DNA, 120 bp, Homo sapiens
acacgcatggccagtccatctgctaccaacagaatgtatttcttaaaagcacagctctgatcctgtccccttctcaaaaacgtctccagaaacttccccatcaacctagagaacagagca

SEQ ID NO: 9978 - DNA, 120 bp, Homo sapiens
tcacgtacgggcctcaacctacctctctggcatcacctcccaaccaaacgaataactatgttgccaacagccctgtattttccactcttatgcttccaattttctgttccctctgcctgt

SEQ ID NO: 9979 - DNA, 120 bp, Homo sapiens
taacgcatttccttcccctaccccgtcttccccactcccatccttacttgtcaaaactcaacctatccctcccacccaagctcatccatgaagaagtcctaattccccaactagaagtaa

SEQ ID NO: 9980 - DNA, 120 bp, Homo sapiens
ttacgttcttaacaaccacatgctgacccgcctcataatgacaggcaaatgtgacttctctccccagccgaccttgagctccttgcagggagggattatatcttgcttctttgcctgctc

SEQ ID NO: 9981 - DNA, 120 bp, Homo sapiens
gcccgagttcccagctgcaggctgaccagtatcccatgaccgactggaaaatgaacctgaaagtatgacaaatgcccccaacccaggctggtaacaagatcagcagtcttgagaaccaac

SEQ ID NO: 9982 - DNA, 120 bp, Homo sapiens
gcccgctccctaggctcagagacctcctccccatcttcttggtgaaatgtcagcaacctcccccttcccagagcatcccacaacatcctagaatccccaccctgaccccacagtgtcccc

SEQ ID NO: 9983 - DNA, 120 bp, Homo sapiens
ccccggccgaagctgccctcttaactgtgatattatcctgctacactgaacaaagaaacgacccccacaacgcaaccttcaccccaagaattatttgtagcaactaccatcattgggaac

SEQ ID NO: 9984 - DNA, 120 bp, Homo sapiens
agtcgggaggagatccctgggtccttaatgggaatatagaatgagggaatccagaggttgtcaggtcagctaagttcctctggctagaagccaccaggcctattttaaccagccacctgt

SEQ ID NO: 9985 - DNA, 120 bp, Homo sapiens
ggccgttaagtgagaggtgaataagggacaaggacgtcaccacctcatccagctctgcttctccaagcattctctaggggctatttcctaatacgcacatctccccatacaaagcctggc

SEQ ID NO: 9986 - DNA, 120 bp, Homo sapiens
cgccgtcattgctggaaatgcaggcggctccagccttcgtgccgccggccgcgcccactaaccgctggacctcttctgtccggcgccgtgttctgccgagggccaggggcgcccaggtgt

SEQ ID NO: 9987 - DNA, 120 bp, Homo sapiens
aagcgggcaggtccccgcccctcccgacagcgcggccttcctgctcccgccccgccctctccgctcaaggatccgcccggggcgccggggtttcggtgaaactgccctggatagggggaa

SEQ ID NO: 9988 - DNA, 120 bp, Homo sapiens
cagcgaagagaagccgagacggtggtccgaagccccgcgcggcgcacatgccagccggcgtccctgctctgagcccgctatcgaggccaccgggtttgtggcttcggctaatcggccgat

SEQ ID NO: 9989 - DNA, 120 bp, Homo sapiens
aggcggcggcccactctgaccagccgcaccgcccttcggccctcggcgcgccccgtgccccgcgccccggggccgtttctgtctgagaaaaggacgggagatgacggaggccatggcctg

SEQ ID NO: 9990 - DNA, 120 bp, Homo sapiens
gcccgggaatggaggaggggatggccccggcctaagcaccgctgctccgagccggggacgaggctgggttgggggaggaagaggaacgtgggcgaccgaggtgcgcgcccacgtgcagcc

SEQ ID NO: 9991 - DNA, 120 bp, Homo sapiens
agccgccggaaccccggcccgctcccgcccagccccgccgcccccagccgaccacttcctcgccctgcagctccccggcaacccagggcccccagccgtggggcctcggctctcccacgc

SEQ ID NO: 9992 - DNA, 120 bp, Homo sapiens
acgcgcgccaccccgccacctcggtcaagggcgcgtccgccccgtcggtcccgcggccttaccggacagggcgagcaccgagtcgtacattttgcagctcatcatccccgtgctctgcgt

SEQ ID NO: 9993 - DNA, 120 bp, Homo sapiens
taccgaccgctgcagctctgatgtctaccgccctagactggctttggggtctctcacgtctgtatgccgggggctgtggtctccggccaggcgtcaagctccagcggactcgaggccttt

SEQ ID NO: 9994 - DNA, 120 bp, Homo sapiens
atgcggtttcctctgccgaaaacgcgccttcgtgtctccaggtggctctctccaagcagcagcttacgtgccactcttcgccatcacaccattccttatttttctaatggcatttttgaa

SEQ ID NO: 9995 - DNA, 120 bp, Homo sapiens
ggacgcctgcagcagtgcctggtacaacgtacacgttcaatatttatcgaatacatgaacggcccccattccacagatgagaggactgaggggcagtgcgaggcttgtaccaggtttctc

SEQ ID NO: 9996 - DNA, 120 bp, Homo sapiens
tctcgggagcctgggaagattaagaaaatgggccgggcgcggtggctcacgcctgtaatcccagaaaaacgaggctccagcagtatctcctccctagggccgcctcccccaccagggagg

SEQ ID NO: 9997 - DNA, 120 bp, Homo sapiens
ggacgcgggtgcgcgttgtatttttagccagggcagcgcgccccggggcagcacacgtgcccccaggcgctgctgggcaagccccacgtgcgcttcccaagggctggcgtcctccgcgtc

SEQ ID NO: 9998 - DNA, 120 bp, Homo sapiens
cttcgccgccagctgcccgcagcagccgcagtcgcctctcccggtcccggcgcgccctctgccggccgctcccggaggccgccggattccgcttcctcgctgaccctccacttgctatct

SEQ ID NO: 9999 - DNA, 120 bp, Homo sapiens
tatcgcccgccgcacccctccggccctttcagagttgaagattcggatttccggggcatcgggcacagtggacagaaaaagagaagagacaagaaaacaactaagtagcaagacgaggcc

SEQ ID NO: 10000 - DNA, 120 bp, Homo sapiens
ggccgtgaagcatacaagaatgaccactggccttagactgttaaggaccgacttacccgtgcctagccctgagctcaagaaattggagaagcctaagaccaagactggggaaggcaggca

SEQ ID NO: 10001 - DNA, 120 bp, Homo sapiens
agacgagatgagaaaaggggagggcgaatcatgaagaccccagtggctgcgcttgggccctctccatccgagcccctggaaatctctccccacccctcccagtactcactgcactttgga

SEQ ID NO: 10002 - DNA, 120 bp, Homo sapiens
ctccgccccagcatattgaagggagggggaaagcagcacaggagggggctgctcctcccgaggaggtgcacagttctcgccaggctcctcgaaccctaccccaggttctcccttcaaagg

SEQ ID NO: 10003 - DNA, 120 bp, Homo sapiens
ggacggcagctcaggatggaggcagtacctgggaggagaactgggtcaggatagccctttttattcctccacagccccccaggctcagcccaccttgcatgggcctactcgccagtacct

SEQ ID NO: 10004 - DNA, 120 bp, Homo sapiens
cctcggtccagcactctccgtacagcggcaacattgctcccgtgatatgccatgtgccacttcttggttagtgtcccagcctccaggcggggattcactctaggaggtggacaagcgggg

SEQ ID NO: 10005 - DNA, 120 bp, Homo sapiens
caacgaaggccactgactccccagtggaggagcttcacgaggctcttccttagacaggaagtccctggcacttcctggcttttccttagacaggaagttctattacttcttccatgcacc

SEQ ID NO: 10006 - DNA, 120 bp, Homo sapiens
ccccgtttctccagggggaaaacagtaggggaaaggcatgaccttgcccatatgtacctgaggttgaacctgcaccagccaaagggcagtgcatattcccggggaggctcccctctgcgc

SEQ ID NO: 10007 - DNA, 120 bp, Homo sapiens
cctcgtctcctcgcagcttccggcaagactcacagtagcacaggcttcgctttggcggaggcatgaaataatcttctgcgggacagtgagtagcaggcttggtgctgtggctcccacctc

SEQ ID NO: 10008 - DNA, 120 bp, Homo sapiens
tggcggactgtgggactcaccgggaagcagcaggagttcttggaagcgagagcaaagggcatggtactcgcagctctttagaggactagcggcaggtggtggaccccagcacacactctc

SEQ ID NO: 10009 - DNA, 120 bp, Homo sapiens
caccgtccaccatgtctgctttctccatgtccccttgggttccagcacttttcccactggcagcccctggctcagggttcacgattgtcacctgcaggggagagggtagtcagacagagc

SEQ ID NO: 10010 - DNA, 120 bp, Homo sapiens
tcccgcagggccctgccaggagactggcgatcagagaggctctacttgcatggctgaggctgggcaggaggaaggtggggacatgaaagttgagagactgaccggttggagatgacgatg

SEQ ID NO: 10011 - DNA, 120 bp, Homo sapiens
tggcgtcattaaactcgctgcgacagttgtggcggagggcggtgcggcccccgttagtgatgactgcgttactgccgtgcagctgatggaagcgcaggtcagagcccccggcccctgagg

SEQ ID NO: 10012 - DNA, 120 bp, Homo sapiens
ggacggagagcttggagacacctggttgttcccctcagggagtggttcaggaactggagccacctctgtaaaagtggacatcacccatcaggtctctaggtgtctctcagacctcccaag

SEQ ID NO: 10013 - DNA, 120 bp, Homo sapiens
gcccggccctcacccacgtcgtccacaatggtggcctgggccgcctggccatagagatcgacgacagcatagacgcccgggggcacgttccaggcagcagggccctgagtcatcccattg

SEQ ID NO: 10014 - DNA, 120 bp, Homo sapiens
tcccgtcctcccgccgtaccacgcccaccgtgtcccctgccttggaagaagggggtgctggagtgaggagtcaggcagagttcctgccggggctggtcctgcatcagccccgcggtgttt

SEQ ID NO: 10015 - DNA, 120 bp, Homo sapiens
gcccgctgcggccgccaggcggcgcacccactttcccaccttgaggcggtccagattgtgcccgtattcatccaggatggtcgtcccattgtgcatcaccccattcccagtcatcatcca

SEQ ID NO: 10016 - DNA, 120 bp, Homo sapiens
tgtcgatacggatctggcattgagggacagaagggagaagcagggaatgtaaatgcagaaagggaccttcagcccttggttcttccccagggcccaccctcctagcaccaagggtcaatc

SEQ ID NO: 10017 - DNA, 120 bp, Homo sapiens
aggcgccaaccagaccacaggactttgcacacctcaaacatctcattgtcccgaagggggcgattggtcatgacaaccccattgttgaattcatccaggggccgccggcgctcagccgtc

SEQ ID NO: 10018 - DNA, 120 bp, Homo sapiens
tcccgcacttttcatgaaagagcagggcatcgttggaagtgagaatgggcgaggtggcagcaccgctagatcccaggccttcccctgccggtggggagctcaggttcacattcaggagcc

SEQ ID NO: 10019 - DNA, 120 bp, Homo sapiens
gctcggaagttgggatgaggctctacacccccagacctggtgcctctctccctaccccttctcctgagggccctcccttgtccacctcacttcccactccccttcccagggcctccccaa

SEQ ID NO: 10020 - DNA, 120 bp, Homo sapiens
atgcgactcaaggctgttaggaaacgtctccggccgggcctgcgctggggacaccatgaaggctggggaccaggtgggatgggaggggaataagggttcagtccctgcttcacggcccat

SEQ ID NO: 10021 - DNA, 120 bp, Homo sapiens
ttccgtccccaccccaccaccactgccctagctgtgttctcaccttcatctgcagaggtcccctgttcagccaaggcagagtcttcagtgggggccaagggctcgaggggaggtgtgggg

SEQ ID NO: 10022 - DNA, 120 bp, Homo sapiens
gcacggtgatctgggtgcacttgccataaaggtccacgacggcccagacacgagggggcaggcctgtggcagccacaccgcaatcccgcccattcacccagagccgaagctccccagcaa

SEQ ID NO: 10023 - DNA, 120 bp, Homo sapiens
gtgcgctccacgcccacgcggtccccttcaccaagctggtccaggtcctgaccatactcctccaacacagagcgtccatctctcagcacagagcagcccgacactacccacgagcccccc

SEQ ID NO: 10024 - DNA, 120 bp, Homo sapiens
gcccgtggcactgcttggaaagtccagcacactggggtccagcgctgtcaccccaatctcaatggagccgctccaggagttgacctgggataggggtattggacagaggcttagaatggg

SEQ ID NO: 10025 - DNA, 120 bp, Homo sapiens
ctccgtcttggtaattatttgggctttcctttagcaactctgctctctactcagtgtttactaaaccactcctttccaagccaagcacaaattccttggttccaacctcctgcctcctct

SEQ ID NO: 10026 - DNA, 120 bp, Homo sapiens
cggcacctccctgagccagaggggggcctcaagtgtctgatcccagagggtgctgtttgcagaggggagctgctgggttcaggctgcttcggtgtggtgcaccgagggctgtggacgctg

SEQ ID NO: 10027 - DNA, 120 bp, Homo sapiens
gcccgcttcatccaggccagctgccccctctgttcttcatgcccgcaatgcctaaaggcgcttccccccacctccaggtcccagtggctgtcaagtccctccgggtaggtcccgaaggcc

SEQ ID NO: 10028 - DNA, 120 bp, Homo sapiens
gcccgatgggcacagaactgggggacttcctgcgagaggtatcggtcatgatgaacttggagcacccacacgtgctgcgtctgcacggccttgtactgggccagcctctgcagatggtga

SEQ ID NO: 10029 - DNA, 120 bp, Homo sapiens
agccgctggttcccgggacagccgtgcggcaggagcgtgggcggccagggtccaatgggtccggctcacgcggcgcggtgttccctcctgcaggtgatggagctggcgccactgggctcc

SEQ ID NO: 10030 - DNA, 120 bp, Homo sapiens
gcacgcgcgcctaacggccccggccccgacacccccgctgctcgtggccctgctctgcctcttcctgcggcagctggcgggagccatggcgtacctgggggcccgcgggctggtgcaccg

SEQ ID NO: 10031 - DNA, 120 bp, Homo sapiens
cctcgctacgcgcaacctactgctggcgtcgccgcgcaccatcaaggtggctgacttcgggctggtgcggcctctgggcggtgcccggggccgctacgtcatgggcgggccccgccctat

SEQ ID NO: 10032 - DNA, 120 bp, Homo sapiens
ctacgcctggtgagagcgggtccgcgggcggtcgggctctgagccgggcggatccggagggcagcagccgagggagatcggagggggccgggcttctgagggaggcttggaccagaaggg

SEQ ID NO: 10033 - DNA, 120 bp, Homo sapiens
actcgggggtgctccgtggagggtgggcctccaaggagcacgtgtcccgcccctttcagctccacttccttcggcaggtgtgccccagagagcctgcgccacggagccttctcgtctgcc

SEQ ID NO: 10034 - DNA, 120 bp, Homo sapiens
cctcggacgtgtggatgtttggggtgacgctgtgggagatgttctccgggggcgaggaaccctgggccggggtcccaccgtacctcatcctgcagcggctggaggacagagcccggctgc

SEQ ID NO: 10035 - DNA, 120 bp, Homo sapiens
cctcgccttgcgctgctgggccccccaccctgccgaccggcctagcttttcccacctggaggggctgctgcaagaggtgggaacccccgacctcaccagatacacagtccctcttccctc

SEQ ID NO: 10036 - DNA, 120 bp, Homo sapiens
attcgctctcccagggttccatgcgaagactaacacatctagatgtctgtgctgggctctgggactcagctctgagcaaaacagatgcagtccctacctgcagggagatcagagccctgg

SEQ ID NO: 10037 - DNA, 120 bp, Homo sapiens
caccgaccagggtgccatgtggagtggaggcccaaggcctgagtcggaggagacaccaggaccctcccagcagctccagctccagttctagcctcgggagcttgctcttcccagggacag

SEQ ID NO: 10038 - DNA, 120 bp, Homo sapiens
gtgcgggggtgctgggggttccctggatccagcagatgccctaaggagggccactgcccacccccagcctctacggggtttcttggaaagtctgcattggagaagtgccgcggggaaggc

SEQ ID NO: 10039 - DNA, 120 bp, Homo sapiens
atccggtcttgccccccagggatgggagtgacatgtcccctgagctccaggccagtcctcagcaggcctgggagctgggcgctgctgcttccggtctgactgtgtccttgtccctgaccc

SEQ ID NO: 10040 - DNA, 120 bp, Homo sapiens
atccgtgaccctgggaagaagcctgtgatgctgtttctccatggcggctcctacatggaggggaccggaaacatgttcgatggctcagtcctggctgcctatggcaacgtcattgtagcc

SEQ ID NO: 10041 - DNA, 120 bp, Homo sapiens
ccacgctcaactaccgtcttggggtgctcggtgagggtgggcagccaactctggggctcgggggagtctgggaggtgggcctggtgggcagggttcctccacatccagcagaatggcttc

SEQ ID NO: 10042 - DNA, 120 bp, Homo sapiens
ccacgcatcctgatgctgcctggaagcttattttcccgtggccaggacgcatttctctgagtggaaacaggttcttgcatgtggatgtgtgtttccccaggcagacggcccctctcttcc

SEQ ID NO: 10043 - DNA, 120 bp, Homo sapiens
ccccgagggaggcccggcccttgctcccgagttggggggagggggtgtggcaacgtgccccccgcagaggccacgcatgtttgaccaaagccctcattgtggtccgaggacagccttttc

SEQ ID NO: 10044 - DNA, 120 bp, Homo sapiens
atccgtgccaaactgggtaggtggatttgagcggaaagactcccaaaatgtgccaagaatttcccagtcccaggcagggcaggggaaactaagggcaagcaggatacagggcgagggatg

SEQ ID NO: 10045 - DNA, 120 bp, Homo sapiens
tcccgcctgtgccccttctcctcaccatgtctcccccaccctgcctcagttctccgttccccttcatctccgtccccctctttgaagctgtccccatctcagtgtcagaccagccttctc

SEQ ID NO: 10046 - DNA, 120 bp, Homo sapiens
ccacgccccctccttgtctgaaagaaaggagccttgaatggtggagggaggcagtggggagaaaggtctcaccggacaggttgggagaatgaggtcagcggtgctggggaacagatggag

SEQ ID NO: 10047 - DNA, 120 bp, Homo sapiens
ccccggagggccttgggcttgggcatttgggaaaagaatgatgtctggaagggcttaagggacacagtggacgaggggagagtcctcatctgctggcattttgtggggtgttagtgccaa

SEQ ID NO: 10048 - DNA, 120 bp, Homo sapiens
ccacggactccaatgcccagctcctctccccaaaacaatcccgacaatcccttatccctaccccaaccctttgcggctctgtacacatttttaaacctggcaaaagatgaagagaatatt

SEQ ID NO: 10049 - DNA, 120 bp, Homo sapiens
gggcggtctctaaagaaacaagccctggggaagtgacgagggaggaggggtcttttcagtgaccagctctgaggtctgagaggaagggggagtgtgtgctggggtctggttgccatggta

SEQ ID NO: 10050 - DNA, 120 bp, Homo sapiens
acccgtgtctatgccgagactggagcctggtgtcgttctataatggaaggacaaaggctgatgggggcagatgtcaaacaggccagaggcccagtgggctggtgtaggcagctagctcag

SEQ ID NO: 10051 - DNA, 120 bp, Homo sapiens
aggcgagagggtcagccacgggtccaggactcagggtagccccttggcacactggaagggagtggcctggcaccattgtgacccgttcactcccaagaccctcagggacaggcaggcagt

SEQ ID NO: 10052 - DNA, 120 bp, Homo sapiens
tgtcggcacggtgggctgggggcgtaagggccccggtggtcctagggaccccatggccatggttgagcggccgaggcccgagtgggcctcgtatcacaactgcaacagcaacagctgcca

SEQ ID NO: 10053 - DNA, 120 bp, Homo sapiens
tgccggccagggcctacctgggatcactgtgtcttcccccacctagctctggagccgattccgtggtgtcttataccaagtgttccatgataccatttgtgagaaaggtaagaggtctgg

SEQ ID NO: 10054 - DNA, 120 bp, Homo sapiens
gctcgcccctctcagacaacatagctgtgtggctgcccttcctgggccctgcctctccatgcctgtaggagctggcctccccactagtctcacctctcccccatccacagaagctcccaa

SEQ ID NO: 10055 - DNA, 120 bp, Homo sapiens
cttcggtgcaccatggaccctgtgatgatgactgtgtccccgcccccagctcaccgccatcgccgtcgaggctctcccacacgctgtgctcactgcccagtagcttgggctcctgacact

SEQ ID NO: 10056 - DNA, 120 bp, Homo sapiens
tgacgagaagcctcatcagtacccagccatctgctcctaccactgggatgtccctgaggactgggaaggcttccaacacactcaggggacctgggttccctggtctcaggatgccccaga

SEQ ID NO: 10057 - DNA, 120 bp, Homo sapiens
cgtgagccaccgcgacaggcccaacccactaaagagctcttaggtctgtgtggctgcatttccttgtgtagctcgtttgtggaagaatatgcacgcacatactcacgcgcgggaatgggc

SEQ ID NO: 10058 - DNA, 120 bp, Homo sapiens
atacgcctcttctactctgcagatcttcattcacaaacttccgctgtacctgcgtctaaaaaggcccaaacccgagagagacctgatgccggagccccctcactgttcttctccaggaag

SEQ ID NO: 10059 - DNA, 120 bp, Homo sapiens
tagcggcaccctggctcccacagctctgttcccacaggccctccctgccaggtgggcagcctggactacaggcacagatgtagctctcatctcccttccttgtccctctctgcagaccga

SEQ ID NO: 10060 - DNA, 120 bp, Homo sapiens
ggacgctgctccatgggccagtgtgtgtgtgagcctggttggacaggcccaagctgtgactgtcccctcagcaatgccacctgcatcgacagcaatggggtaggcctgggcataagacag

SEQ ID NO: 10061 - DNA, 120 bp, Homo sapiens
ggacgtggccactgtgagtgtggccgctgccactgccaccagcagtcgctctacacggacaccatctgcgagatcaactactcggcggtgaggctaagacctacgaggtgtgggcgtggg

SEQ ID NO: 10062 - DNA, 120 bp, Homo sapiens
gagcgggggtctggcagaggcccacccaacacagtgcctgtctgccccgcctttccccgccaagatccacccgggcctctgcgaggacctacgctcctgcgtgcagtgccaggcgtgggg

SEQ ID NO: 10063 - DNA, 120 bp, Homo sapiens
caccggcgagaagaaggggcgcacgtgtgaggaatgcaacttcaaggtcaagatggtggacgagcttaagagaggtaggggcaggggctgagggttggggttgctgagagcctaggcagc

SEQ ID NO: 10064 - DNA, 120 bp, Homo sapiens
cagcgggcatccaacggggcaagggtgtcatcacctggacgggggcttgcagtctgggctaaggtcacacagtccggacaggaactccagagctgggagggaccacagaacccagataga

SEQ ID NO: 10065 - DNA, 120 bp, Homo sapiens
caccgaatcccagaaaagggtaaaagcctgagcaggaggcacagaacccaggcggtgggacacagtctggcccaggaagggaccaagagtcttggtgggaggcacctgacttgggcaggg

SEQ ID NO: 10066 - DNA, 120 bp, Homo sapiens
tcacgctgtggagacacgcagcctcccctcctcgagatcagatacgttttctggaccctgagttcctgggtgatgtccaggtcagggaagtgggggaggtaggtttctaggctctgatgc

SEQ ID NO: 10067 - DNA, 120 bp, Homo sapiens
acccgttcctgtgcctggtgagagcacggctttgcaaggacttccactcttccccaggaggccctgccgtgggtgaggcagatcgcagagtaggggccccctcaccagaccctgggtcct

SEQ ID NO: 10068 - DNA, 120 bp, Homo sapiens
gggcggaggggtgtggctggggtgccctgctgactggctgtgggtacagccgaggaggtggtggtgcgctgctccttccgggacgaggatgacgactgcacctacagctacaccatggaa

SEQ ID NO: 10069 - DNA, 120 bp, Homo sapiens
tgacggcgcccctgggcccaacagcactgtcctggtgcacaagaagaagggtgagctggtggggccgggcgcagggagggggcgtgtggccagagctcggtggggaggacaggcaccacc

SEQ ID NO: 10070 - DNA, 120 bp, Homo sapiens
ctccgggctccttctggtggctcatccccctgctcctcctcctcctgccgctcctggccctgctactgctgctatgctggaagtactgtgcctgctgcaaggtgagcacccagggtgcct

SEQ ID NO: 10071 - DNA, 120 bp, Homo sapiens
ccccgcctgagttctcatctccccagggtccccaaccccttcctgggtccccacctccccagggtccccatcccaacagggtccccatcctccaccacggtccccacctccccagtgtcc

SEQ ID NO: 10072 - DNA, 120 bp, Homo sapiens
gcccgtagagtccagctgtctggattctggtcccagctctgtgaccttgggcaaattacttaatctctccatgcctcagttccctcatctgtaaaatgaagatcatagaattgacctcag

SEQ ID NO: 10073 - DNA, 120 bp, Homo sapiens
cctcgacccaggcaagaccacaccattgtggacacagtgctgatggcgccccgctcggccaagccggccctgctgaagcttacagagaagcaggtggaacagagggccttccacgacctc

SEQ ID NO: 10074 - DNA, 120 bp, Homo sapiens
ccccggctactacaccctcactgcagaccagggtaggagggcgggtccgctgtgccactgcctcgcacctcccgcctgtgtggccctgtgacccacctctgaccacctccgaacccccac

SEQ ID NO: 10075 - DNA, 120 bp, Homo sapiens
tcccggaggctttccttgcccagcgcccgggccacttcttcacattggcgccgccgcacagggtactcgctggaggccagggagtggcggacattagagttggtgatgagcacggccagc

SEQ ID NO: 10076 - DNA, 120 bp, Homo sapiens
gtccgagagtggcaccaggctggtctccaaggacctggggtggagttacaatgggggagatgacgaggccaagcgtgtgcttgctgcgccaggcagtgggcacactcccacccaggagct

SEQ ID NO: 10077 - DNA, 120 bp, Homo sapiens
gggcgggaggggacgaggggagcgagcccaacctgcagtcaatgagcagcgcgtggcctttctgtcccataagtgagatgaactggtccatgatgccacagggcatccctgcgaagctgt

SEQ ID NO: 10078 - DNA, 120 bp, Homo sapiens
gctcggcctgctgacacacctgggcgcgggcagctattgtgcccgagtctgcagtacagggtgaggtggggaggctagggctggtggaagcagcagtggcttcaatgacactccagggag

SEQ ID NO: 10079 - DNA, 120 bp, Homo sapiens
gtacgtggccacttccaaggatgctgagctggacaggccaccccccaggggcactgagctgaccaccactgcactgaagccagggaggggggcagctgcaggggaaagaacaggtgatgg

SEQ ID NO: 10080 - DNA, 120 bp, Homo sapiens
aggcgtggccttgttcccagtcaggcactcttctcttgctatcctgcatcctaaacctgctggccggccccaactgctgccttgatacctgtccacagctgcccaccctacatggaacct

SEQ ID NO: 10081 - DNA, 120 bp, Homo sapiens
acacgcggacagaaactaccttatgtagctgcagacagcagagtggaaggttacttatataggtcacaacccagggtatcctgacagggttcacattggcaggggtagttgcctgagatt

SEQ ID NO: 10082 - DNA, 120 bp, Homo sapiens
gcacgcttggaggcacagacctggccatgcccgtgagtggagagtcactgggggatccctttgggagggctggtgggacctgtggccccagaacggaggctgtcagtgacaatggggagt

SEQ ID NO: 10083 - DNA, 120 bp, Homo sapiens
ggccgggaacacagggcaagagatgactaagccagcgcactcatgctggaggaaggggagcctgcccggccttccctcagggcctgagcctgacttgcctgtgctctgccctccagatct

SEQ ID NO: 10084 - DNA, 120 bp, Homo sapiens
caacgacatgcagcagtcgggcagctgtccccgaggacccttctgcgcctttgcccacgtagaacgtatgctgttcccattgccccggggcagtgccctctcccacccctccctcgcctg

SEQ ID NO: 10085 - DNA, 120 bp, Homo sapiens
ggccggggatggcccctggcagtatgccctgcacaggagttctggcctgccagcagcaggccttgtccccactggaagctccattcccccacctttctggaagtagccttgaaggcctag

SEQ ID NO: 10086 - DNA, 120 bp, Homo sapiens
gtccgcctggttgagcactcatggttccagggagggttgaggcactgtgcctcccatggctgacttggcaaatcccaccagccaccccatgtcatacccatgacagacatcactaatgga

SEQ ID NO: 10087 - DNA, 120 bp, Homo sapiens
gggcgacaagagggaaactccagctcaaaaaaaaaaaagaaaagaaaagaaaaataggatctatgaacctgagccttcgtgcacatgtggcaagcatcagtgagaacttcctttcagatg

SEQ ID NO: 10088 - DNA, 120 bp, Homo sapiens
aaacgaggtcccgtgggagggcagaggatgggggagaggagcagcctggggacaggccgaagtccctattggacactgcagccacctgcattactgtgcttgggccctgcaggcaaacca

SEQ ID NO: 10089 - DNA, 120 bp, Homo sapiens
agccgcaccaccattccacccttgtctccgaatcacccacctgcctgaggtcctagcagtacacaagctgaccccagcccagaaatgcactcccctgggctccctccgcctcccactcag

SEQ ID NO: 10090 - DNA, 120 bp, Homo sapiens
tgacgtgagttgccctcaacatagatttgtccttatcagcgcgtagttttgctgagttgaaggctatggcattgggaagcggggctggggttagggaccgggtccaaattcaaatgccca

SEQ ID NO: 10091 - DNA, 120 bp, Homo sapiens
agacgaaagcaactgaagtgggcccaatggcagccatgatgggcagaggcacacacatcgctccgctctgtccactcaaaaaagcagcaaaggctgggcgcggtggcacgcgcctataat

SEQ ID NO: 10092 - DNA, 120 bp, Homo sapiens
gagcgggcctgggccggctggtgctggtgcccgtgcctctgaagggagctcagggtagctggttctgcaagggttggaaaaagtagaaactggattcagctgctgctaaagaactgcagc

SEQ ID NO: 10093 - DNA, 120 bp, Homo sapiens
aggcgtgagccacagcgcccagctcctttagcgactctttaccccaagtagggaacttggacttttctagacctgaaatgggaagttgacgtcattccctaagtcccttgtctgaggaat

SEQ ID NO: 10094 - DNA, 120 bp, Homo sapiens
cagcgtggcttccttctgcaggatctgagggagactctgtcctgggcgtctgtcccagcttctggtactggctggcaattcttggcgttccttggcttgtagctgtaagatgcgctctaa

SEQ ID NO: 10095 - DNA, 120 bp, Homo sapiens
atccgaatacgtctttttcagggaacaggattcaacctataacagtgcataagtaaggaaatgttggagagaggcccaggcccaaatgtgctagaggtcatgcatgtcccccggtgttcc

SEQ ID NO: 10096 - DNA, 120 bp, Homo sapiens
caccgggtctgcattcctgcctctgtttccccagctctctaggcttggggggtgggaaaataccctcaggtcccctgagaccagactagaaatgttcagaaggcacttcatgagttcaga

SEQ ID NO: 10097 - DNA, 120 bp, Homo sapiens
ctgcgatcacggtgacagcacagtcagggttccagtgagagctgcttcctgggttgtagatggctgccttcccactgtgtcctcacatggccaagagacagccagagagcctttggggcc

SEQ ID NO: 10098 - DNA, 120 bp, Homo sapiens
ctccgcccacctgaagaccccacctcctaggaccatcaccttaggggtcaggatctcaacacatcaattctgagggtacacacacattcagactgttgcaactccaagtgccaaaagagc

SEQ ID NO: 10099 - DNA, 120 bp, Homo sapiens
gagcggtgcaatctgctcctgggggctccatgggaaaggctggggaactgtggaagtggcatttgagctgggctttcacagactgccaggactcaggcgggcagagactggggtgggaaa

SEQ ID NO: 10100 - DNA, 120 bp, Homo sapiens
ttccgggcagagggagtagcagagggagccggcctgggtgtgtctgatttggcaggagggtgggtaatgagttccatacattggtttccaccaagagcactagagcacttgatcaggact

SEQ ID NO: 10101 - DNA, 120 bp, Homo sapiens
gagcggttgggaggcccaggcatcagtgccaccctgctccgtggctttggtgcccaggctgcctgggtttggtgaggccacaaacctgcctggttctggaaggagggggtgcctttccgg

SEQ ID NO: 10102 - DNA, 120 bp, Homo sapiens
cacgtgcatacgaacatgcacacacacacgtgctcacagcacacacaggcacttccttgcacacgcacacacaggggcacacatacacgaacggcctccttactctgccagagtttcctc

SEQ ID NO: 10103 - DNA, 120 bp, Homo sapiens
gaccggtgccaggggacctggggcctctagggggcaaagcagtgttaagggaatggttggagaggtcacgatgtgtgggccctgacccgcctccacccccccagcgggaggggcagctgg

SEQ ID NO: 10104 - DNA, 120 bp, Homo sapiens
ccacgggggctaagtccacaggcttggctggtgccccagggtggctcccctcttccaagaggaggccacacagccggcttagcaactgcttcaggtcacccagctgttggtcttcatccc

SEQ ID NO: 10105 - DNA, 120 bp, Homo sapiens
ctgcgattcctgagccccagggagaacaagtaagcctgggcctgaggggcagggaagcaagtccgccacctatgccctgagccctcgcacctgcaggaaggtctgctcatccacctgctc

SEQ ID NO: 10106 - DNA, 120 bp, Homo sapiens
tcccggatcctgcagccatggcgagccacagcctccaaatggacccgcagccgctgctcctcgtctcgagcctgtgccagcgcctgcgtcttggccacctcgatgctcctcagtgctgtc

SEQ ID NO: 10107 - DNA, 120 bp, Homo sapiens
tgtcgtgtgctgtatttccagggcctgtagcaggctgctgaacttgccggagacccaggaggccaagatgcaggccgagttctgggcgggaacaggaggggcttcagggtggccagggcc

SEQ ID NO: 10108 - DNA, 120 bp, Homo sapiens
tcccgggaacctccccaggacccctgtgcccagctccctgctcagccccgctccctgctgcctggtgttccagggaccagctggtggccgccccaggatgcagtgtgaggccatggtggg

SEQ ID NO: 10109 - DNA, 120 bp, Homo sapiens
gggcgggcaggcacaggcctcgtacctggatctggctgctttgcttgcgcagctctagtagctggccttcggcctgggtggcctgctgctgggtaacctccaggctggctctcagctggg

SEQ ID NO: 10110 - DNA, 120 bp, Homo sapiens
gtgcgggcccacgggacaagcaacaagagaaggccaggattggctgtgatgtcctttctcagacaaccaaccatgcctgcagacaccaggcagcccctccccacgccaccccaggccagc

SEQ ID NO: 10111 - DNA, 120 bp, Homo sapiens
caccggcctcggtctaacccagggagagttggggccgtgccccgggggggtccagacaaagtccttcctaatctgcagcagggtggtgcctgagcagagcggaagccttgggctcaggac

SEQ ID NO: 10112 - DNA, 120 bp, Homo sapiens
aagcgataatgctggctcaggaggcctcgcagggaggaccccaaacactaaagccgttggtccctgtctcactgcagaggggtcagtggcccaggaggccctggggcttgagaagctgac

SEQ ID NO: 10113 - DNA, 120 bp, Homo sapiens
atccggccagtccctggccctagttttgagactgagaggggaggaagggacccctattcggttgcgctccctgagtcccttgggaatcaaaacaccgtgctctcatgagagcaggacaaa

SEQ ID NO: 10114 - DNA, 120 bp, Homo sapiens
ccacgcaggtcccaggggctccattcccagcacctggtcaaaagcttcaccaccttgtttctgctcctcccgcaatgcactgagatggggaccattactatccccacatcacagaggagg

SEQ ID NO: 10115 - DNA, 120 bp, Homo sapiens
aaacgggctcagagaagttgataatttggtcaaagtcctcagatcttcctaagcccagagctcctccgggcccccagcctccagcatttcacacaggaacacaggaggccggagggcagg

SEQ ID NO: 10116 - DNA, 120 bp, Homo sapiens
tgtcgctcccttcctccacatggccctcatctaccggcctccaactcaaacttccgtgcctagctcagtcttctgcacccgcccatgagcagtacatctcgtctcatcctcctcggcggc

SEQ ID NO: 10117 - DNA, 120 bp, Homo sapiens
tcccgcaacactctggagcccttttccttcacctcatctcagccgctcctgtgaactcaccctggccctgtcaccagctctaaaatctccattctaggcatcgattcttccttctctgac

SEQ ID NO: 10118 - DNA, 120 bp, Homo sapiens
cttcgtgccctctcctgttccagccacctctgtctcagtcctcccacctcaccgacccccagccgtgcactctcccatccctccctgcccatcaggcctcctggccaccccttcccttcc

SEQ ID NO: 10119 - DNA, 120 bp, Homo sapiens
cagcgtccctgcgccatcctccatccacgccttagccccaggcctcctctgtccccgaatgattccacatcctgtcttcgctgctgaaatgggttttgtcaagggcacggaccacctcca

SEQ ID NO: 10120 - DNA, 120 bp, Homo sapiens
gacgggagggggccaaagaggggggctgcctaaggcagggcccagaccccacagtgtgggcctctggagctgtgtctttactcttgctgccgatcaatcccatgctctgaaatgcgcaca

SEQ ID NO: 10121 - DNA, 120 bp, Homo sapiens
taccggtccaggtagcgcaggggctgccggtgggggaagcgcttctgcttggggtggtaagggggcggccgcacgaactcaaacaccggctcccgcatgtctgcaagaagagtgaggggt

SEQ ID NO: 10122 - DNA, 120 bp, Homo sapiens
gagcgccacgctgatgtgggcagctggcagctcacctggcctgggacctgagcaagaggcttgatcagaccaagaacagtgagactctcggctccaagactgccagacacagctgggcat

SEQ ID NO: 10123 - DNA, 120 bp, Homo sapiens
gcccggccacagggtggccacttggcatgtgtgccagcagttaagccctctggtgcccactctctcctccagctccgggctcctgtggggaggcattcttctccctgctgaggcagatgg

SEQ ID NO: 10124 - DNA, 120 bp, Homo sapiens
tcccgggagccgtaagctaccaggcgcccatgtgttcctgatgaggcgaggctttgccgtctcaggaaattgccctgtttgtacaaaagctccgctgccagacccttggaccgaagttga

SEQ ID NO: 10125 - DNA, 120 bp, Homo sapiens
cttcgcccactgagcaaagcagaggcaccctcctccagctgggcctagaggagcacagtctggcggactgggggttcaagggaccagcctccttccgttgtctacaggtataggattggc

SEQ ID NO: 10126 - DNA, 120 bp, Homo sapiens
tggcgggtagaggctgtggcccaggaatctgcagggccaccaggaggaggctcttttggctgtgagtctgcctggcaagtccgataaaaagaactgaaatgccaaggtcagcctagagag

SEQ ID NO: 10127 - DNA, 120 bp, Homo sapiens
ttacggggaaggtttagaggaagcaactaccaaaactccaaaaaacagaaaacaaccaaatcttgtgtgtgttaagagagcaggcaggattcctcatactaaatggcaagaaagagaaca

SEQ ID NO: 10128 - DNA, 120 bp, Homo sapiens
tctcgtgcatgagccatccctgcattccagaagtctgcagcccagccagtcttactcaggaactggtaggcccaagggctctgggcctctctgccacctttaagataatagctgtcctta

SEQ ID NO: 10129 - DNA, 120 bp, Homo sapiens
tctcggctctgcgcagacagtgggatcagacaccagaggcaggagagtgacggatggaaagataaggagggaagattcctgaatcagcgtcctggataaggtggtttgaccccaggactg

SEQ ID NO: 10130 - DNA, 120 bp, Homo sapiens
atgcggggcctgtgaaggaagtgaccagcccagtcagggcttctggaacatctaagagggtggttggctgcagcttctgaggctggctggcatggggtcaaaatctaagaggctggtaag

SEQ ID NO: 10131 - DNA, 120 bp, Homo sapiens
ccacggcgggggcgcctgcaggcaaaaccggcggcagaactgcctggtcctatgtgccaagggatgggctccgaggggatcagagctctgaattgttgcaggaggcggacgtcagggctc

SEQ ID NO: 10132 - DNA, 120 bp, Homo sapiens
ttccgaggagcagcggcttctccccttggcccaggcctgacagacaggcacgcactcccatctggagagaggcaaggagacctaggcccaaaagagagagagtggagagagaggcgcata

SEQ ID NO: 10133 - DNA, 120 bp, Homo sapiens
atccggggaccgctgcgaaggcagtgtcagcggctgccctcgggctgggctgcggtactcaccggccagcggcccgtgcttgtcgttcaaggcctcggacaggtgcttaactcggaaatc

SEQ ID NO: 10134 - DNA, 120 bp, Homo sapiens
gctcgtgacctggcgagatgtcggccgcacaaacacaagcagcgtttatccaggggccaggcaggccgccccttggggtacagggaagaagcccttcatctccaggagggggacgtcaga

SEQ ID NO: 10135 - DNA, 120 bp, Homo sapiens
catcggagagggccctgagcccctcctctacctcaagccaccttgggaacagccgtttcaagcctgacttcagtgagcacccaggaccgtccttagctgctcatttccccgagcctggag

SEQ ID NO: 10136 - DNA, 120 bp, Homo sapiens
aagcggagaaggaccaaggaggggctgaagagctgatgcttggccccaggggggttccccacctcgctgtatttggggaaagccccagtttgcctgtcctctgctgcacacactcccctt

SEQ ID NO: 10137 - DNA, 120 bp, Homo sapiens
ggccgggaggcctcggccagctggggcctgccactgctggtctgagcgtgaaagggctgccccaagacaaataactttttctgagttcacacaggagacaaggacagagacagggaaggg

SEQ ID NO: 10138 - DNA, 120 bp, Homo sapiens
ggccgagggctgcgaaactgtccctgtgcccgctgaagcccgagtggcatcggggacctgccgttcccaccctgctcccctcagggtttctcccgaggccctcctgggggaggctctgcc

SEQ ID NO: 10139 - DNA, 120 bp, Homo sapiens
gtgcgtggacacacagtggaggaggaagggacaggaggggaacacagggtgattaccttccagaggaatgaggttagagcccccctttttcccatctagaccatgctgggaatactgttt

SEQ ID NO: 10140 - DNA, 120 bp, Homo sapiens
ttacggatcgtccctgtcaccagagccacacagagaggagataagaagacctaggaaatgagtgagagaaaacagcagcggccctccacctgccccccaggccccgcacccagctcccca

SEQ ID NO: 10141 - DNA, 120 bp, Homo sapiens
agacgctggggacaaggatgaaggaaaggagtcatttccttctccaaatggagccttgattctactaccgaccctccttgttctggatttcagctcatttctgaaaggacagagggtaat

SEQ ID NO: 10142 - DNA, 120 bp, Homo sapiens
aggcgagggctcaggtcggaggagcccgtgacaaagctcgcatacccagagggcacaaccagggtgggagagcctggggggcaccctgaagccagcaggcccccagcccagccccaaact

SEQ ID NO: 10143 - DNA, 120 bp, Homo sapiens
ctccgagcatgctcagtgttgggacgtacgccaaacagcagccagcaggaagccaccctgactgaacttccgggggagcgctgtgcccaaggcggacggctcagagacccagaggcagcc

SEQ ID NO: 10144 - DNA, 120 bp, Homo sapiens
aagcgacaagaaaaaatccaaaagtcaagaaggggttaacagaagccaccacacagagcgcctggagggtgtgcacggaaggagagggcacatgctcttggcatgggggagaaaaacaat

SEQ ID NO: 10145 - DNA, 120 bp, Homo sapiens
agccgcctgggtcagcctcctttgtgggaatgagacatctcgggccagaagacgtcgggaaatcaactcgcatctcaagcagacaagtgcagctgccttgttaacaaaatgtataggggc

SEQ ID NO: 10146 - DNA, 120 bp, Homo sapiens
acccgggatgcctcccacccccacagtctatctgagcacagtgaggctgctgtgtcctggcagctccccagaaagctgagggagaaaggggcagtgtctggaggctcactgcttacacct

SEQ ID NO: 10147 - DNA, 120 bp, Homo sapiens
tcccgaagtgctaggattacaggcgtgagccaccatacttggcccataattagctcctaataaccaaggcctggctcacgtctcccttgctcatgctctccccttcagcgagtgcggctt

SEQ ID NO: 10148 - DNA, 120 bp, Homo sapiens
agacgcaggtgcacgccggcaggatgtgggtcgccgatgtggatctagcagccgccaaacccgtcaggctcccaattgcctccagggatgctgaggtcggtgcttcaccacctgggaggc

SEQ ID NO: 10149 - DNA, 120 bp, Homo sapiens
aaccgacatccccagagcctgactccctagagcctgacatcggtcctgagcccaccagttcctgacaactctgaaaccccacagctggagttttcctctagtgtctctggcccaaggatg

SEQ ID NO: 10150 - DNA, 120 bp, Homo sapiens
cagcgggcactcttaaggcagtgcaaatagggctctggggcttctgggggacctgtcagggagccaggcagaagaggaagcaagcacagactggctggggcccaagcatcctagcagcct

SEQ ID NO: 10151 - DNA, 120 bp, Homo sapiens
ctgcgcccacaggctgggctggcagtccccatttgcagcaggttttggctggtgggcaggatttccacactggagggagaaggccccaggcaccagctccctaatgctctactccctgag

SEQ ID NO: 10152 - DNA, 120 bp, Homo sapiens
gagcgggtgctcttgtggaacagacacctcactctctgaggggcatgagcaggcagggactggagaaaccaagggtgtaagtaagctctacccaaagcttgttgtcataagcaggtgcca

SEQ ID NO: 10153 - DNA, 120 bp, Homo sapiens
ccccggcttctccagctttctttttcagtgcaatctcagcagccccaccccagaacatcccagcacatcatcgagctgcgggcagcatctctcagtggccagacatagccgggcttgcca

SEQ ID NO: 10154 - DNA, 120 bp, Homo sapiens
tgccggggagaaagaacagacagatgacgagatgttcacccaggacagcaacacccaccggccccggcctctcatcatggtgcccctttccacaagtcactcgctcgcactggagcccaa

SEQ ID NO: 10155 - DNA, 120 bp, Homo sapiens
ttccgagaggatgctctggggtttctttcctttctggatcaactgggaaagtgaaattctccccatccagctctcagctacacgtcacttcagatcaccctgcctttctggaaggtgaag

SEQ ID NO: 10156 - DNA, 120 bp, Homo sapiens
gggcgacgtgtgtgtgagggaggaggcctaggcaggggctctgcctcaggcgggattcgctgagcacctgtgttactcccctactccaaagaagctgtgtaaccccaggctctgctagct

SEQ ID NO: 10157 - DNA, 120 bp, Homo sapiens
gctcgacaggggaggagctgggagggcctgtcccctgtccccctagcccagccttagcccctattaccggaggcctccgctttctagaaccccgggaggggcttcgtggacgtggctgtg

SEQ ID NO: 10158 - DNA, 120 bp, Homo sapiens
tgccgcaggggggcgccctcctcccgccgtgctcgggggtcgaaccccgagcgctccgggagggcttaagcaggcggggaggtgaggcgagcccgggccgggccgggccaggccgggccg

SEQ ID NO: 10159 - DNA, 120 bp, Homo sapiens
ccgcgagggggcgccccacaccacccttggcctccaccgcgctcgcgcagctggaacctccgagaaggcccagggtgcagaggaagggagaggcccaggggccagggtcatgggtgggga

SEQ ID NO: 10160 - DNA, 120 bp, Homo sapiens
gaacgggggcaggagggggcgctgaagagggagggaacgtggagatggaggggaggcaaacaacgagggggcatccagagggtcccgggaacgcgacctgggggttggacaggaaaccag

SEQ ID NO: 10161 - DNA, 120 bp, Homo sapiens
ggtcggggcagcctgctgggggcgtctcgtgccccccaccctccattcctctgaaccagtccggaaggggggttcggctggcaagccgcggtggcgtcagcctctggcacccgctgctgc

SEQ ID NO: 10162 - DNA, 120 bp, Homo sapiens
gcccggcccgtggctccaggcaaccggggacgctgcgggggctgcgctgggcagcgggtgcgggtgcgggcgccccccatcgcgggcccaggcgttcccccagcaggcccaggagccccc

SEQ ID NO: 10163 - DNA, 120 bp, Homo sapiens
ccacgggtccaggtgcgcccctgaggcctggctcccctggggccgcgtgcccggaacgtgactcagcgctttctccgtgccgggctgcggtggggagcgggacggaggcgagtggcgctg

SEQ ID NO: 10164 - DNA, 120 bp, Homo sapiens
ccccgcacaggcccccgccaggcgggatctttcccgggtcgggcaggttcgttcatttgttcacgaactcagcgtcagcgaggcaggaagcgggaagagagaggagaccccggataagaa

SEQ ID NO: 10165 - DNA, 120 bp, Homo sapiens
gtgcgctgcaggcctgggtcatccaggccacaggagaggcacagggctgcggcctgggttgggggaacagccacagctgtggggcgtttcaaggaggccgaggcacaggcgtatggactg

SEQ ID NO: 10166 - DNA, 120 bp, Homo sapiens
aaccggccttatggaaggaaagctgggaagtagggagggggccgggggtgtcggagaggacagctgagtgtggcgggagcggaggcagagcggccctggggccccggcgtcagctgaggt

SEQ ID NO: 10167 - DNA, 120 bp, Homo sapiens
cctcggaggggtgggctgcctggcagcagtggcctgggggccgcaaatgaggagggtgcagtgccttgggcagtaaattagaagacacaggctgctggctgggggcgggagggcacaggg

SEQ ID NO: 10168 - DNA, 120 bp, Homo sapiens
gcccgggagcaggccgagagctaggtttccaccgttccccgccaaccccaaactgaggaccgatggatcctgcccctgcggtgggaaaccaggaggcctctttccctgactggatagctg

SEQ ID NO: 10169 - DNA, 120 bp, Homo sapiens
ccacgcgagcgcctcccaggtgtgtgcgtgcccagcaagcttggacggggtgaagcattggcagggaggacagtgctggcacggagtgaacacgaactttcataccaagtctagagaaca

SEQ ID NO: 10170 - DNA, 120 bp, Homo sapiens
gagcgggaaggcagggagtgaagcagcccctgggccccagcagctccagtccaggcctaactggcaggaggctggccccgtggtcaacgctccctcctccacgctcaggcaggaaggggg

SEQ ID NO: 10171 - DNA, 120 bp, Homo sapiens
ctgcgcaggagaagcaggggaactgatactgcctcttttggtctcactgaaaatgaagaggcctgggcagtgtctttagaacaaactaaatagaaaatgactcaagaaagccctttgaag

SEQ ID NO: 10172 - DNA, 120 bp, Homo sapiens
ggtcgtgtggctccaacgcctccagccacgtcgctgagcgagtaaagcactggacccgtgatgtggctgttctgaagctgaagtgagtcttcgttcagggaatgtttaagaggattcaaa

SEQ ID NO: 10173 - DNA, 120 bp, Homo sapiens
gggcgtcaagcttgcatctggtgccctgcatgcttggatacaacatcctcctgggactgggctgctgtgtctgtcctgaagtaagcctgaatctgagaataacttaaatcccaaacatct

SEQ ID NO: 10174 - DNA, 120 bp, Homo sapiens
aggcgtttgctgacgaaggctctgtgtgttacgtgagcaactcctctttggcttttgaccctggtgctcatcagcttccttttaccagcacatcacatcggcaaagcgccacctggtgac

SEQ ID NO: 10175 - DNA, 120 bp, Homo sapiens
tgacgaaagatgaaattgccagaccatgcccaaatgcaggccagaagggtgcacgtgcattcacatacacatgggcacacacgcatttagtctgtgtgtgtgtgtgtgtgtgtgtgtgtg

SEQ ID NO: 10176 - DNA, 120 bp, Homo sapiens
ttgcggttaccttaggctagaggtaacaacaggaaaggagcagaaggggagcttctgggggtgctggccatgtgctacttcttcatctgaatgctggccacagcggagggctcactttgt

SEQ ID NO: 10177 - DNA, 120 bp, Homo sapiens
ggccgaagtatgtacgggagtgtagtcatgtgctggcgtcccaaccttccccaactccctccccaggtctctgtacccctgctgtggagagttttggctacaaacagccatagctacccc

SEQ ID NO: 10178 - DNA, 120 bp, Homo sapiens
tcccgtgggaccaggccaaaatgggtcttggccaagaccgcactcatgtttggttttgctccactgccccatctgtcttcctcatctctagagagcattccctcaataaacagctttcac

SEQ ID NO: 10179 - DNA, 120 bp, Homo sapiens
aaccggttgatatcagatgttgtctatggatggaatttgggggtggatcacccacagccagatggcaatgaggacccatcactgaggtgggtggaaagtggatggtccccagcatgctgc

SEQ ID NO: 10180 - DNA, 120 bp, Homo sapiens
acacggggctgtataatatccaggcgattttgatgtcttggtacaggaggtacaggagaaacagttacagtaaggactgtgaaactgggtgactgctattaagaggactgtttcattgaa

SEQ ID NO: 10181 - DNA, 120 bp, Homo sapiens
cagcggttttctctaaacatccctggaaggcaaggggcaaagccaggtatttctatcacattgaagctcttcttctgcaacttgggtctaagggagaaaggagaagggtgggggaagtac

SEQ ID NO: 10182 - DNA, 120 bp, Homo sapiens
gtacggggacaagtaatttttaggtgagcttgtccctttggacttttcattttgttcatgttgctgtcctggtttcagcccagatgtgccatttccacccttgtaacacatgcaatgatt

SEQ ID NO: 10183 - DNA, 120 bp, Homo sapiens
gcccgatccctcttttagtcctcgacatgtggcttcggtggattgaagccaaaaccaccagcggagaatgtcacatcctgctccagatcagtgggctaggctaacgtcgacagaatagtc

SEQ ID NO: 10184 - DNA, 120 bp, Homo sapiens
atccgcaatcaggctttcatattttgctttttgctgagtgtgaattcctcattgttaatttcgtcctccactctgggctgccaataaagaagagttgttcaaatggatgcagactccagt

SEQ ID NO: 10185 - DNA, 120 bp, Homo sapiens
gggcgcacccacggagatggggctgagacctggcctgggcagctgggggcctcttggggcactggtacatgttcgtagtcccagctgcccaggaagctagggcagaaggatcacttaacc

SEQ ID NO: 10186 - DNA, 120 bp, Homo sapiens
caacgtttatttgggatcgggcatgacaatgggaatatgtgtgccatagtaaactatgtgtgtatccaactaggtaaaggaggacgaacgtttttagaggaagattgagggggattacac

SEQ ID NO: 10187 - DNA, 120 bp, Homo sapiens
taccgtttctctttataagaccagactgactcttgaggttccagaccagctggatacctcctgccagaacgaagacagctgtgcctccacaaaatgacattttgcatctacaaccctatt

SEQ ID NO: 10188 - DNA, 120 bp, Homo sapiens
aaccgggccagtttcggcatgaattatagaaagatctcctctgtactagaaactagaagacaaagggtggcataagtagagatttggcatgaaatattgtccaggaacaaacaggacaag

SEQ ID NO: 10189 - DNA, 120 bp, Homo sapiens
ccacgttgcgccactccaacttgaactttggaaaaatatgaggcctttccctgttttcattctccaaacaagcctcagcaagctgggactgagtgatctttatttctaaaaataatacca

SEQ ID NO: 10190 - DNA, 120 bp, Homo sapiens
cctcgacctcacctatgcctcggtttcagtagctcttggtgggagtctttggaggcatttgagggggtctgaaatgcccgaacatcattgaagactttggttcaagtggaaaccctcaag

SEQ ID NO: 10191 - DNA, 120 bp, Homo sapiens
caccgcagaagctcctgccaaatgacatgcttccttgcccctatggccggattcatagctgcactggcaagatggggtggaagagacagaaacggagcaaggaaaaaggccagggctgta

SEQ ID NO: 10192 - DNA, 120 bp, Homo sapiens
ggtcgagtccagagtatgggaatcccagtcctgcggattacgggactgggagtgggggtaccctctcagagcaatatggcatgaggccacctcctggagtcagcagaacgtgtcacccag

SEQ ID NO: 10193 - DNA, 120 bp, Homo sapiens
agccgcttaggagaccgcctctcatcagcaggcctgagcagctgtcccttggccacaccaaatcagtagagccctggttctcagtcagtggcaagtgtgtcccgcaggggcatttggcaa

SEQ ID NO: 10194 - DNA, 120 bp, Homo sapiens
gtccggagacatttttggttgtcacaacttgggggctgctactggcatctggtgagcagaagccagggacgctgaggaacagtgcactgacaggcccctgccgcagagaatgagccagcc

SEQ ID NO: 10195 - DNA, 120 bp, Homo sapiens
cagcgccaccacccatcaggccctgcgggaatcacatctgctttcaatttctctccttcctgccgcagcctcacagaatcagcacagggatggggcggtgggggaagagacgtgccgtgt

SEQ ID NO: 10196 - DNA, 120 bp, Homo sapiens
cctcgtggggaatcttatgctcagtggaaatggagatttcgaacaaacagagctggtggtgtttatcagagaaaattaaaccttttgttaatgttcactttaacaggacatgtgtccttc

SEQ ID NO: 10197 - DNA, 120 bp, Homo sapiens
catcgcttagcccggggccggcacaaaacaagagctggataaacgttagccgcttgtattgagagggaagtgagccggtggtggtgctgcatgcctgtagtcccaactgcttgggaagtg

SEQ ID NO: 10198 - DNA, 120 bp, Homo sapiens
ttacggtgaactaagactgcgccactgcactctagcctgggcgacacagcatgaactgctcttcaaaaggcggtggggattctaactcctgtccctggaatctgggttggtctcagtgac

SEQ ID NO: 10199 - DNA, 120 bp, Homo sapiens
cttcggcctgggtctcctggactgactactcctgggacattccctcctggagccctgccgccatgtcacacaaggggccacactctggccagcagccccagctgagctgacagctgacag

SEQ ID NO: 10200 - DNA, 120 bp, Homo sapiens
cagcgcctgttatcatcgccatggtaaggagctgtctcagatgtttagccccgctgacgctgcaaccaccggagactccaagtgaggaccacccagctgagacccatcagccggcagccc

SEQ ID NO: 10201 - DNA, 120 bp, Homo sapiens
acacgagtcggacaccgttatgagcccaagttccagactgtgcatagagccaactcctaagccaggtagccttgacctgagagcttcccagcacctccttccccttccccactgacccat

SEQ ID NO: 10202 - DNA, 120 bp, Homo sapiens
acacggtcaggttcttagaaacctaacccatattgggaaataacagtgcggcgagaggtggaggcagcaggaaaattctaggctaacatcctagctggccaccagggtgcggtctcaaag

SEQ ID NO: 10203 - DNA, 120 bp, Homo sapiens
ctgcgcccgtgaactctgcctgaactcatatattttaatatacacatagagcaggtagtgacatatttagatgtgtgtatacatataatacatatgtatttcctagtgtgtcccaaaaga

SEQ ID NO: 10204 - DNA, 120 bp, Homo sapiens
tggcgcagggggaactgtgaatggaggccaaagctggtggatttcagtttgacaaatgacaggttatagacataatctgggactacgttcccacaaaatacaatcacttaaagggggtaa

SEQ ID NO: 10205 - DNA, 120 bp, Homo sapiens
ctgcggcgggcctgccaagaacacgtgggcatgaggcaacaccaggaagacccaggctgagggtcaaattactgaatgtatcactgttcagggcatggaagacaaagaaaggctgggaag

SEQ ID NO: 10206 - DNA, 120 bp, Homo sapiens
aagcgattccagattggagagaaaatgaagagatgacaactcaatgcaagatgtgttcctgaattgggtcctggatccgcaaagaagaaaagagtagtgttgggacaactgcatgtggtc

SEQ ID NO: 10207 - DNA, 120 bp, Homo sapiens
caacgttgatttcccaatctgggggttatatggtggttgcacaggaggctgtcctcatttttggaaaacacacaagaggtgtgtgtattccggggtgggtgacagggcatcacatctata

SEQ ID NO: 10208 - DNA, 120 bp, Homo sapiens
gaccggagggggatctcggggaaaaggagggagggaaggtgatggagcaaacgaagtgaaatcttaacagctgaggaacctggatggagggacacaggaatttacaacttttggtaagtt

SEQ ID NO: 10209 - DNA, 120 bp, Homo sapiens
gcacgtcctgacctcatgtctaaatggcttacttgaaagcagcgaaaacaaggctacaggagccagctggctgctgtgctccgccttctgacccaggaaggctgtgcttggcaagagcac

SEQ ID NO: 10210 - DNA, 120 bp, Homo sapiens
gcacggaggaggctgtagcccagaggtcgtgccgccgagagaaccagagggcccagaaaggatgatgagaagacagggccggctcacccagatgtgctgcaggtccttgctgttgacggg

SEQ ID NO: 10211 - DNA, 120 bp, Homo sapiens
tgccgatgagcttgacggcacagtcgatgttgacgtcgatcaccgtgccacactgactgtcctgggggaggggaggagacatgcaagtcccgtggtgcagcagccctggtcaccagggga

SEQ ID NO: 10212 - DNA, 120 bp, Homo sapiens
cagcgcaccccctgcagagctggccagttctcccacatgcagagtgcgaggtgggcaggctcaagtccctaaggtggctgcccccaggcccggggctggggtggggacgcaggactcacg

SEQ ID NO: 10213 - DNA, 120 bp, Homo sapiens
gatcgcatgtgccggaccacatctcggggcaccacagaacggtcctctagtttcagctgtaaaagaaaatacaggtgtgagagaatggactctgaagccaccacagaatacagttttctt

SEQ ID NO: 10214 - DNA, 120 bp, Homo sapiens
aagcgtcacatccacactgctaagtgcacaaatcctaagcgtttggctagcagtatcttcacagaccgcacacacctccgaccagcacccagacccacaggcagagcgcgtcacgcccac

SEQ ID NO: 10215 - DNA, 120 bp, Homo sapiens
tgccggaggtagccttcctcacactgaacagtgcagctcaatgacagatcacataaggctgcactttaatgaaggatttaacagcccattctacagagagcaaaacatttgctttgcgtt

SEQ ID NO: 10216 - DNA, 120 bp, Homo sapiens
ctgcggtgggtcaccctgaagcctggctatcaccggacaccatgttctaatctgggttatcctcctgaccagctgcggcctgcaccttatctgctgcgcttggagccctgcaggctgcta

SEQ ID NO: 10217 - DNA, 120 bp, Homo sapiens
gcccggccaactgcacgagcacctgattgtctctttacgcacagctggcagcggccactgcctcctgctgctccatcgcccaaaagcccaggcacgtgatgctcccaccaggccagcctg

SEQ ID NO: 10218 - DNA, 120 bp, Homo sapiens
ctgcgtcttttttagctggttcctcaaacctggggcagctcctctatggttcttcactgggtcataatcatggatgggtctctgtgtgtgtccacctccgagaccccaaaccacatggct

SEQ ID NO: 10219 - DNA, 120 bp, Homo sapiens
ctccgtggtggcctctcttgacctgggggcactgagaggtcaccaccaagaaaggagaactgagtcgccgaaaaaggaagatactggctcaaggtcacttaaatgctggcaatgacaact

SEQ ID NO: 10220 - DNA, 120 bp, Homo sapiens
gcccgagatggacacaggatctgcactgctgggtggggcggagaggcaggtgctggcgagagaagagctaaggggtgcaggatggggtgtgagctggagggcagggggtagtcagagcca

SEQ ID NO: 10221 - DNA, 120 bp, Homo sapiens
tcccgagggaatgccagcaccaagtgccaaggcctgggcagccctgggaatgggtggagccaaggtcaatagcagagagctttgtagttgagatgtttggtagggcaacctcctgaatat

SEQ ID NO: 10222 - DNA, 120 bp, Homo sapiens
gaacgtacttaaagtgcacaaattggtagcttgaattcccaccccctccccccacataagaggtgggcttgtccaagactccgagggacagagggagaatcgctggtgcccagccagtcg

SEQ ID NO: 10223 - DNA, 120 bp, Homo sapiens
catcgtccgtacaaagttagcgttacttttaaaaatgaagaccgtgatataaactggtaaaaaacgggcctgatgcgcctcgagcactccctgggagcaggccctggggtggctccgccc

SEQ ID NO: 10224 - DNA, 120 bp, Homo sapiens
tgtcgttctacctgaggtctacttgtgtctccccccttgttctctgcccccagaccatggccaaagcctttcccacaatgtcccatctgagagccttatggatgggctcacagggcagag

SEQ ID NO: 10225 - DNA, 120 bp, Homo sapiens
ccacgtccccagcaagggcacgctccagtagtagtgggggagaaggcaccagcagaggcagcgctgaggacctgggaagaaaaggaccctgccccaggagatggtctcagcaaggagcgg

SEQ ID NO: 10226 - DNA, 120 bp, Homo sapiens
cctcgggtcagctgagccgagctcctatcccaacccccagtcccggccacagggccaccctggcctggtcacatggctcgcctgggctccctgttctgccccgtcaactcatctcaaacc

SEQ ID NO: 10227 - DNA, 120 bp, Homo sapiens
agacgagcctccaagcatctctctcctagcttaaaaccttttgatagctttccactggccttgggacaaattccagaatcaccccctcttgctggctgcaaagctttgcctgaccgacca

SEQ ID NO: 10228 - DNA, 120 bp, Homo sapiens
cgtgcccggccttgcctcctgaccttttaacaaggctgacctcccccaacccccacaaaaccccagttccagtttccagccctgcgttcctgatgaaccaggtgaggaacccacagcaat

SEQ ID NO: 10229 - DNA, 120 bp, Homo sapiens
ctgcgtccagaaccggggatgggggacagaggtgagggaaggtggcaggaagagactgcacgagtgtgcacaggtacagcaagaacgggtctgtttaatgacacagctgggtctggttac

SEQ ID NO: 10230 - DNA, 120 bp, Homo sapiens
ggacgggcggttgcacagatgaggatgaggatgaagatgaggatgaggatgggccaggaggggacacagcaggagccacagcagcaaaacatccttgaagacgacacacgtgaccaaggg

SEQ ID NO: 10231 - DNA, 120 bp, Homo sapiens
acacggggggcccccctggcaagcctgacgcagatgaatagacagggccgactgccggccaggaggagggtggggtggggaaagccctcggccctcggagctgagggtgagacccaggca

SEQ ID NO: 10232 - DNA, 120 bp, Homo sapiens
tcccgccgacctgctgcccagcagcccggatcccccggggctgccctggtggccaaggcaggtggagctagcggtcgaggtttctggactgaggcccctcccccagtgcggtcatcccac

SEQ ID NO: 10233 - DNA, 120 bp, Homo sapiens
tgccgccaagccgggttgccccagccctgcccctccaggcccaggtcctctgcgctgctgtgggatttcctctttgccagaacactctgttctctgcacaaccggaacccctccctgccc

SEQ ID NO: 10234 - DNA, 120 bp, Homo sapiens
gtgcgtgatactctagatggtgatgtggagacctgcatgctggccgggctgatagaaacggggctggtttattccctaagggactcctagacctgtcccgcttcctgccagccgctcagc

SEQ ID NO: 10235 - DNA, 120 bp, Homo sapiens
caacgcctcctccacccccaccaatgtggcaacttctccaggttgggggtgtggaagtgcagctgcctccttcctgccctgcaggctcataagggctgagggtgctggcctggcgcagtg

SEQ ID NO: 10236 - DNA, 120 bp, Homo sapiens
tgacgggcccaggatctgagaagggaccttcaggagcccttatccccctttcttccccttcccccactgaccaggccctggacagagacaggaggagagaaaaaggaaagcaaggccctg

SEQ ID NO: 10237 - DNA, 120 bp, Homo sapiens
actcggactgcccagacatggccctggcctcggtgtttcgtttctcccttggcatctgccctaccctggtccccttcctggggaggttcaatggtgttccatgatgtggacggtgagcac

SEQ ID NO: 10238 - DNA, 120 bp, Homo sapiens
ccacgtatccgcacaggtacctggcaggggttgggacacaaaacctccaaggtcctgaggaccctgcctcgcttcttcatggtgacccatgagtgtgccagacgcatgcaaggccggtgg

SEQ ID NO: 10239 - DNA, 120 bp, Homo sapiens
acacggctgacggcaccctccgaggacgcagtctggcacatctgcggctctgctacccacaatgtgcttgtgtgggtgccagcacctgtggggattggtggttccgagcgtctgaggccc

SEQ ID NO: 10240 - DNA, 120 bp, Homo sapiens
tcccgactgtgtttctgggcttgggggctgctgagatagctgccccatcctcaggagcgctcctctaactccttagaagtgcttcctgctctttttcctccaaaatctgcttctgagttg

SEQ ID NO: 10241 - DNA, 120 bp, Homo sapiens
ggtcggtcccaggcttgggagaggccacagggagaagaagctggagatggagcaggcctggtagtcaaggatgcactaaagctgcccttccagagcgaggcttcaccccatctgcacatg

SEQ ID NO: 10242 - DNA, 120 bp, Homo sapiens
gaccgctttcctctgccaagaagaggggcttgagggtgagcatggtctggggctcctctgcctgcacccccagggaccagcacgtgtggaaagagagcatggatttgtagctagagtcag

SEQ ID NO: 10243 - DNA, 120 bp, Homo sapiens
tttcgagacttggacacatcacctctataaggatggtgtgtgtgctctaagcctaggtgtgtgaagaacggggcgctctgtgtttgtgggtctcttgggggcatgtagtgcctgaatgac

SEQ ID NO: 10244 - DNA, 120 bp, Homo sapiens
gggcgctcctgctggcccgtgccctccagcgggaagggggcagctgggaacactggaccccccgggctctcctctttctcaacctctgctctttgctctctgttcttccaagaggctttg

SEQ ID NO: 10245 - DNA, 120 bp, Homo sapiens
tcccgcaagccgctgagctggagacagggttctgctcctctttgtcccgcttcttggctgagcctcggttttcccatctctaaaatggggagcccctgctatactacctttgaaaggcca

SEQ ID NO: 10246 - DNA, 120 bp, Homo sapiens
ggccgagcaaggagttctgaggccggggagaggagggggaccgaggtgctctcctgcatctggttcctagatcctggtgaacaccgcgccggagccagggaaggctcaacccaggcttcg

SEQ ID NO: 10247 - DNA, 120 bp, Homo sapiens
aggcgccccacgccgcctgctccgccgacctcggaccggccccattcgcggctggggaggtggcgctggagctcggacccgggcccagccctcctctgcccggagccgctgccgccctcc

SEQ ID NO: 10248 - DNA, 120 bp, Homo sapiens
gcccggccgggccgggcgacacctacctcaccaggatggccacccccacgtcctcgcagttggcatagagccgggcccacatagcctgcaccgccttcctctccgcctcggacagctcct

SEQ ID NO: 10249 - DNA, 120 bp, Homo sapiens
cctcgctccgctccctgcgctcgatctccatctcgcctggcactttctccatgagcagctccaagcccagcccggctttgctcggcggcggcggtggcggggcgcggggcgcggggcgcg

SEQ ID NO: 10250 - DNA, 120 bp, Homo sapiens
caccgcacccgcctaagaaggtgcttttgaggtgacaacagtgttctaaatcttaactgggattgtggttacatgggtctatacacttattggactactgaaccatacattgtaaatggt

SEQ ID NO: 10251 - DNA, 120 bp, Homo sapiens
acacgagaataaagatgatttagagagttagaaacaaaacaagaatgaagaatgatgcttgttttgctcaccatctagcagaaaagccagacatacaaataatcatcaaacagtgggatg

SEQ ID NO: 10252 - DNA, 120 bp, Homo sapiens
acacgaactcccatttatcaagtgcttaccttgcgccaggcgctgtgctaagtgccccgaagcactgatttaacgaagtcccgtgatgtttggatgatcctcctcctcctcctcatttta

SEQ ID NO: 10253 - DNA, 120 bp, Homo sapiens
ccacgatgaaacagctcgggaattgttgcagcgtctcagtcaaaacttcgcaggaagtatttaagtacaagctggaatttgcagagcagagaagagaatgcagtgaagggactttcaagg

SEQ ID NO: 10254 - DNA, 120 bp, Homo sapiens
tatcgtcttcaaattcatttatttttatttttaaaaaatcaatttttgagtaatactctagaggcagtggctctgccaagcagggaagtcaaatgcatcgctttttttcctgtacactgt

SEQ ID NO: 10255 - DNA, 120 bp, Homo sapiens
caacgccatctattctcaatgcgtagggtctgtgttatatttctcctcttccagaaagttaaagctcggtgaaacttaaagcagtgatcccaggtttttaaatttttatatttttacttt

SEQ ID NO: 10256 - DNA, 120 bp, Homo sapiens
tcacggtcctaagaactctcaggaaaaaatcctctatattttcatgacaggttttctaggtgggtgaattaaagtctctggagttaagcaaaaacggtccactgtcatagcgtaattttt

SEQ ID NO: 10257 - DNA, 120 bp, Homo sapiens
gatcgcagtgccttcacttatgagttcctttaacctttctgcaccttgacttcctcagctgtgaaatgggaaggtgggggggtgggggataatgacagggctgtcatgagaatcagatga

SEQ ID NO: 10258 - DNA, 120 bp, Homo sapiens
tgacgccatgatatgaggatgaaggtttattacctggtgacatcatcctgttggtgacaaggtggtgatacatctctaatgggacttccctcagtggcaggcaggctgccaagcaactaa

SEQ ID NO: 10259 - DNA, 120 bp, Homo sapiens
ctgcgttttatatgatttctctacccagccaaaaaaaaaaaaatggtccatcatgtacgcagttatctagtcttaagttatattctggcttttttctcccactttattatggagcagaag

SEQ ID NO: 10260 - DNA, 120 bp, Homo sapiens
gagcgtgtgtgtttgcctttgacctggactgctgtctgatcttgctgaacactccaccgacatttcctaaagttgctcagtgccaatccagcaaagcagtccattttcccttggccaaga

SEQ ID NO: 10261 - DNA, 120 bp, Homo sapiens
cctcgatgaaaatcttgaattcaccccagtgccctctgttggcaagggaaggtgaagattgaaaagttaaaaaagcttttggccacttgagaggatcagggccgcaactcttgaagaagc

SEQ ID NO: 10262 - DNA, 120 bp, Homo sapiens
cagcgctggtacagctgaaggatgccggccttgtgcaggtccctccacagggcagcttccagggacagatcgtggtttgcataaaatatcaatggcttcatttttcgttcgaaatagtgg

SEQ ID NO: 10263 - DNA, 120 bp, Homo sapiens
ggtcggaaaatttccagtagttgcttgtgatgaatccataggcactgacctgggcaaggatagtcgctggattagtatttgttgagcgtctagtgtgtacagacacttgggtgaagtgac

SEQ ID NO: 10264 - DNA, 120 bp, Homo sapiens
agtcgtggagaggcatttggcccccagctctccataccagctttagcatgggtcacggcctctccttgaaagctgctgcttggcccctgcctccatgagcttcacgtgggtcatatccca

SEQ ID NO: 10265 - DNA, 120 bp, Homo sapiens
taacggtgatttcaaagtagttgcatgtgggaggctaaacctgctgccctaccccagctctaggatgtccccataaaagaatgtccctatttggcccagtatgttgaggactttggcttt

SEQ ID NO: 10266 - DNA, 120 bp, Homo sapiens
gtccggagccaaggcaaggctggcccaggacctgtccttcaaaggccccagggttgtgggcaaggaagtgagcagtaccagcagcactcttggaactggggattccacgaacagaggcca

SEQ ID NO: 10267 - DNA, 120 bp, Homo sapiens
ctccgaggtaagggatatcaggggatcctgttgggttctgttatcctgtgttctgccggcatgggcttctggaagagaaggcctcttacctggtcacaggtatgcaaagctgtcagcagc

SEQ ID NO: 10268 - DNA, 120 bp, Homo sapiens
ccccggtactaggcatatataggtctccaaaatgtgtgttaatcaactttgatttcaagaacctggaagcaaaaagagacatttcagctcactagcttgatggctatcatcacacttcac

SEQ ID NO: 10269 - DNA, 120 bp, Homo sapiens
attcggtccaagtggactaaatacaaagatctttgagaccttaggtaaggttgggggagggggtggtgagaaaggaaccacaggttcccccttttggcaacagcttgttttcaccccaag

SEQ ID NO: 10270 - DNA, 120 bp, Homo sapiens
tcacgtgtgagggacagggagctcagaccctgtgaccggacccacacagtccaagagtgaggccagggtgtgaccacgggctctgccctcaggcctgagttcacatcgagctgtgccagg

SEQ ID NO: 10271 - DNA, 120 bp, Homo sapiens
ggccgatcacctgacctctcagagcctgtcttcctctgtagcacgggactaattagaggggcttcatttgcctccccacatccacacacccctctccaactgctccctgccctgggattc

SEQ ID NO: 10272 - DNA, 120 bp, Homo sapiens
attcgagcctctggtccacagcagggtttctcagtctcagtgctgttgacacttggggccaggtgcttcttgtgatgttcagcagcatccctggcctctacccactgatggcacttgccg

SEQ ID NO: 10273 - DNA, 120 bp, Homo sapiens
agacgaggaccatatgcacatccacattgagaacccctggcaggagggagggaagggggttgaggctggtccccgggttccttccggcaccttgtgttggctgtgtttgggcctgaaggt

SEQ ID NO: 10274 - DNA, 120 bp, Homo sapiens
tgacggcgccactgctgctgtgcaccttatggtcccagctcccagtctgtgcctttgtataaacctccttgagttatcctgagtttcctgtccatttcctggtgactgacatatatcacc

SEQ ID NO: 10275 - DNA, 120 bp, Homo sapiens
actcgggacagtggagctctggttatcggtcagtgcgtggggctcgtgcgagggcgctgactggatgtgggtgggtgtgtaaaagggggaaggaaggggacgctgttcttcaggcacccc

SEQ ID NO: 10276 - DNA, 120 bp, Homo sapiens
ctccgtacctttctgtcaggtagctgatgaagtccggatgtagcagcttgaatttactggcagaggcttctggtccaaaataggcgtgcggcctaggacccatgatagaagtggacagag

SEQ ID NO: 10277 - DNA, 120 bp, Homo sapiens
aagcgaaatcgttttgcggcttcttcagtcaccggaaccaccacctgctagaggccggctcccaggttctcctcgtgggacacccaggaaagtgcctagggaggaggagggagtggagcg

SEQ ID NO: 10278 - DNA, 120 bp, Homo sapiens
ggacgcggcgcggggaggagaacgcggatggagccaggagtcacccctctttccctcgggcgcccgcctcttcgcggatcgcgcccgcactgggcttatccagacacggcgagcggaagc

SEQ ID NO: 10279 - DNA, 120 bp, Homo sapiens
agccggggagaagggagcgggcgcggggcggacagagaccgcagcgggcgggaaaggcgactggccgcggcccgacggagggtccccgcgaagttggaaaccggagacttgggcccctgc

SEQ ID NO: 10280 - DNA, 120 bp, Homo sapiens
tgacgttaccgagggagagttcccgacaaaaaaggaagtttttatctgcttcggggacccagccagatttcgacaatagaaagtgtacttatcaggccggggaggacttcaccaacaagg

SEQ ID NO: 10281 - DNA, 120 bp, Homo sapiens
caccggggcgggtcgccagtgcacaggggcgaggtcttccttggacccaggcaaaggccgcggggtccgggcagcgcgaggtcaaggctgggagagggttctggcgacaaagggccgcgg

SEQ ID NO: 10282 - DNA, 120 bp, Homo sapiens
ggccgagtcctcgctgagagctgccccagaggggtccacgcggaggttgggctgagggctgcgggccgccggggagccctgggctggggaccctccccgcgccctggtcgcccctgcgcc

SEQ ID NO: 10283 - DNA, 120 bp, Homo sapiens
tcccgctctgcgctcggcagcccctacctggctccggccgctggccccgggtaccgctgcaccgccgagaagtacagggcaaagaggagccccgagcaggcagccgtgagcaggagcagc

SEQ ID NO: 10284 - DNA, 120 bp, Homo sapiens
gaacgacccgcgcgggagccccatacagccccggcccgcgagcgccccgtccgctgacgtcccaggcagaagggagagaaccgggtgggccgggtggcacttgcggaggcggccgtcttg

SEQ ID NO: 10285 - DNA, 120 bp, Homo sapiens
ccccgccctgcccgccgggtgcctgcggcgcctgcccgcccggcagctccctctcggccccggctgagtggccagaggctgccgcaccctcgggagctgggcggcgggtcccccggggct

SEQ ID NO: 10286 - DNA, 120 bp, Homo sapiens
tgtcgtcccggcgcccagagcgcgcgctcctttggccctgccccctgcccgggggacttcggcagcggccactcctgccactgcgctctctccagagcccagccccgggaggccgccagt

SEQ ID NO: 10287 - DNA, 120 bp, Homo sapiens
tctcgggttgggcagggcgctttcctcgcgccgtccggggctagctaggcgcgggtagacgccgccacctgctgcgctggctgcgctctgccctctgcgggcccggcactcggcctctag

SEQ ID NO: 10288 - DNA, 120 bp, Homo sapiens
tggcgggtgggcggcggccgggaggagatgtgcccggctccctccaaaggaccctcagatctgtcagtctgcggacgccaggacagctgggagggggcgggcagggtggaggagcaaaac

SEQ ID NO: 10289 - DNA, 120 bp, Homo sapiens
acccgacagctcagtctctgggctggcggtagaggggggaaaagggggtgaggtggggagcttgccgtgatgggtttcgtgggggagctaaggctgtcagcgcttatttggtaaccatcc

SEQ ID NO: 10290 - DNA, 120 bp, Homo sapiens
agacgcgtgggtatatttatacattcacaaatgcccccagccagaagtgatgtgtgtctccacgcccagctaagcactgtgatgaatgattctgctctggttgtctaaatggtgtctgcc

SEQ ID NO: 10291 - DNA, 120 bp, Homo sapiens
cagcgcttgtggccctgaactaaggcattccaggcactggttcccagagggtcgatgtgaatcccagttccggagcgtggtggccccatcacaaaccacctacagaatggagatatccaa

SEQ ID NO: 10292 - DNA, 120 bp, Homo sapiens
ggacgacagagggagactccatctcaatgaagaaaaaaaaaagaaaaaaaaagaaaaatcactaatgtggtttattgctggactttattaaaacctcccttagagatcagtgcttcaacc

SEQ ID NO: 10293 - DNA, 120 bp, Homo sapiens
gaccgtagtgtagccctttctgtttttggaaatgttgagattagtgtaaaaatgtatcccattctctttctaacctcactacctggcctcagactggtgaaggcttggaaaaaccaattt

SEQ ID NO: 10294 - DNA, 120 bp, Homo sapiens
cgggaaaagtgggagaggaacaggttgggggaggaaaatgaagagttcttttctcttctggtttccctgccctcccattcaaaggccaggaaatttctacagctaggcaggatgattggc

SEQ ID NO: 10295 - DNA, 120 bp, Homo sapiens
tgccgctttgaaggcccaactggaaaatctttactagaaagccatgttgcagacctgttaggttttagctacagaaaagcaatcaactatagaacatgctaacagaagtgaaaattaggc

SEQ ID NO: 10296 - DNA, 120 bp, Homo sapiens
ctccgtctcaaaaaaataaaacaaaactgaaaatcatggcagaggaatcaagtgccccaaaactacttctgtgtgcatagcaattaactgccagttacgatacatggccctttaatattg

SEQ ID NO: 10297 - DNA, 120 bp, Homo sapiens
ttacggtacattttatacaaacccagaaagactgactctatgcttatttaaaaatgcaagaatataatgaaaaagtactaagattcccaattatttgcagttccaagtataattgtgaaa

SEQ ID NO: 10298 - DNA, 120 bp, Homo sapiens
tgtcggcaaagctgccaaatgaataacctgccacatctgcaggtggtaggactaacatggggtcatatatcttgggatcttctggctctaccaccacaagatattatccttgcatctgat

SEQ ID NO: 10299 - DNA, 120 bp, Homo sapiens
ctccggcattccttaatttcagtcctcaaaatcaagagcttacaccctcagggatcttcttgcagtagagggaagggtggtgacgtacagtgaaaaacatgttggccttcttcatactga

SEQ ID NO: 10300 - DNA, 120 bp, Homo sapiens
atgcgatacataatttaagaatagaatacatctgaagcaaaacagaaaaggcatgactttaaaagaacaactttttttttttaagtgctgactggtcacttgaagctttactctacaaat

SEQ ID NO: 10301 - DNA, 120 bp, Homo sapiens
atacgtattacaagtacttggattgttccttagtcattaaataggatataaattaggttgagaagggggtatcacaacctcaagaaaagtgccacttaaagcattgcttttaggtgttca

SEQ ID NO: 10302 - DNA, 120 bp, Homo sapiens
tcacgactttccaagctgcaatttcctcatctgttaggttgaatgttgagaacttcccggtaggattgttatgagcattaactgcgtgtttactttgtgctgtgtcttgttctaagtgta

SEQ ID NO: 10303 - DNA, 120 bp, Homo sapiens
aagcgcctgcccatcatgggttctccagtgttcgttctgatgtctcctccattgtctgaccttcctcccttaccccgaagaaccgaaacatgcagatcctgagcttgcccacaatctagg

SEQ ID NO: 10304 - DNA, 120 bp, Homo sapiens
aggcgacgcaccatcacctattttgactcgcagcgtaccctaaaccgccgctgccctaaggtttgagggggtaggagagagatgggcaaaatgtggggcggtgcagtggcaaggcattgc

SEQ ID NO: 10305 - DNA, 120 bp, Homo sapiens
gggcgacctgggcatggtgtctgccagcactgtacccaccatactgtgttcaattgagaaacttagggcatcactttcttttcccccatccacatagcatattgccaagtatctacaggc

SEQ ID NO: 10306 - DNA, 120 bp, Homo sapiens
aggcggtaaagaaagaccgactggatttccaccagggctggaaaggttacttcaaaatggtgagtttcctgagggaggggtatagggtgttggtggggacagtggtagaaggcagaaatt

SEQ ID NO: 10307 - DNA, 120 bp, Homo sapiens
ggtcgggaggctgttatgcatcccctcatttggctcatagtcagttgtggagcaggaagtaatctgttttagaacaccaaaacactggcttcactggttctcttctggacttctccatcc

SEQ ID NO: 10308 - DNA, 120 bp, Homo sapiens
tgccgcccatccctgtttttaaggaactgccaagttggggaggtggatgaggggttctgtaactgtgagctggcgttcttctagaaatactgctcagcctttgtagcattctctcttcct

SEQ ID NO: 10309 - DNA, 120 bp, Homo sapiens
aatcgtctcctaaatttggagcttctgtgtctttgttctacaaatagcacagacttgtggcagccctcttctatgcctgagggatataggcgtgaacaagacagataagtccttgttctt

SEQ ID NO: 10310 - DNA, 120 bp, Homo sapiens
cctcgtaccccagaccccaagcccataaatgggaagggagacatgggagtcccttcccaagaaactccagttcctttcctctcttgcctcttcccactcacttccctttggtttttcata

SEQ ID NO: 10311 - DNA, 120 bp, Homo sapiens
ccccgtgcagggagcaggaaatcagtgctgggggtggtgggcggacaataggatcactgcctgccagatcttcaaacttttatatatatatatatatatatatatatatatatatatata

SEQ ID NO: 10312 - DNA, 120 bp, Homo sapiens
ctccgtctcaaaaacaaaacaaaacacaaaaaaaccccaaccaaccaaccaaaaaaactacaataatacaacatgcaaccttgaaggtttgatatagaaatctgtgctcacgtttttctg

SEQ ID NO: 10313 - DNA, 120 bp, Homo sapiens
gtccgtatagcatgtgtgtatgtctgtgtatccgggagctattgctgtgtaactcagcgcctcaacacacagaggcctataacagcaaacatgtattgtctcatttattactatgggtca

SEQ ID NO: 10314 - DNA, 120 bp, Homo sapiens
gaacgatcaaattctaagcttgctccctggttgctggcagaactttctttgctggctgttgatcaaggactgccctcagtttcctgctgcagaagcctctttgtaaagcagctatggcag

SEQ ID NO: 10315 - DNA, 120 bp, Homo sapiens
ttccgcaagggcatggataccaggaggtaaggaccattggggccatgcgggaggctgctgcctcgtctctactggttaggggagtgtacacatgctggcaagagagacatgggattttgg

SEQ ID NO: 10316 - DNA, 120 bp, Homo sapiens
ctgcggtgttggacagcgcctcctaggaggctgttaatacctgtgccgtgcctttgtagagcatctgccgctgtcttctgcatttctgttccctgcgctgacacctcccctgagccccca

SEQ ID NO: 10317 - DNA, 120 bp, Homo sapiens
gcacgtgaaaattctctgatcccaccttccccatcgcagagaacggcacctgccactgctcagcctccagattcaggagttgcatttgtttccttctttctcctgccctgagccagtcac

SEQ ID NO: 10318 - DNA, 120 bp, Homo sapiens
gctcgtccctccagacatatcccaacctacacttccctccacccccactgcctcagcccactccggatcaggctggccctcccagctctctgcctccccactcctgtcccgtgtccccca

SEQ ID NO: 10319 - DNA, 120 bp, Homo sapiens
acccggctacagcacaaatcccagcacctcgctccctgcacccctaactgcaaccagaatccatcccagctgctctgtggtctggcctgcccagccctcccaccccatctcctccttccc

SEQ ID NO: 10320 - DNA, 120 bp, Homo sapiens
gcacgtcgtcttccttgtagagagcacgcagcccctccagaccagagctggacttccacagggagcatcagcccctccagaccagagctctgttctcatcactgtgttcctggtaaaaca

SEQ ID NO: 10321 - DNA, 120 bp, Homo sapiens
ccccgccctcttgttccctctctgtctctctctatttctgtctcttttctcctctctccctctgtttctcccccgactctctctctgcctctctgtctctcccactctctgcttctctct

SEQ ID NO: 10322 - DNA, 120 bp, Homo sapiens
ccccggttccggtcttttgggtgaagggtagaaggaagacaaaagctggaattcctgagcaagggaagtcatcactacccccacgctggagttgtgactgcccatgctgtggcccctggg

SEQ ID NO: 10323 - DNA, 120 bp, Homo sapiens
ccacgcaagggggttccactctgctccttactggacctgaccccaccccctccagcagcgtcctccggaagggactagtttccccttgtacccagtgggtccagggcacctggatcagtc

SEQ ID NO: 10324 - DNA, 120 bp, Homo sapiens
ttgcgctgttcgtggggagaggggccgagtgccctgaccagtcggagctggaccggccagtgctcctctggtagagggtggggggatcacttggggtgggctttggctgggggaacctgg

SEQ ID NO: 10325 - DNA, 120 bp, Homo sapiens
cttcgctcggacgcggcttcggcccgcagagggttcgtggcccggacgcggcgagagctgggcccaggacggtgcgtccggcctcgcccgcggctgctcgcaccaacaagtttgaacaat

SEQ ID NO: 10326 - DNA, 120 bp, Homo sapiens
caccgtcaaccccgatgggaagataatggtcagaagatgcctggtcaccctgagaccctttcggtaaagttccctcctggttggttttttccccaggggggcgccgggtggaggtgggcg

SEQ ID NO: 10327 - DNA, 120 bp, Homo sapiens
ggtcggttcctgcgaacgttcaagtcctggtggcagagggggcggttcacacttcaacccctggtgatgaccagtggggctgggctgggggaacggatggcgttggggttcggggtgcgg

SEQ ID NO: 10328 - DNA, 120 bp, Homo sapiens
attcggggacctgtcccgagttgggcagggttggagaggactcggggtgcagaggtaagaatgggggcagaaaacccccaggtcgtggtcctgggcccagaaagttgccccagcctgcgc

SEQ ID NO: 10329 - DNA, 120 bp, Homo sapiens
gcgcgccccttcccagcccctcagggtccttcctcaccccgcggacggtcccatccgggtggcaaagttagtgtgcggcgccttggagctccccctccggtccctcccgtcccgcccgtc

SEQ ID NO: 10330 - DNA, 120 bp, Homo sapiens
ggtcggctaccccccaacccctccgcctgtgccaccctctccccagcctttggtggcactgctctcctccccgcggggctcgggcctggctccgacgagagggtcccgagattagagcga

SEQ ID NO: 10331 - DNA, 120 bp, Homo sapiens
actcgctcatcccaggattcgcccccgatcgcaggcgtcggagaggcgggggcaggggcggcgctgcagggctacggggcggctggagccgaggctgcggcggagcgtggtgggcgggcg

SEQ ID NO: 10332 - DNA, 120 bp, Homo sapiens
tggcgaaggcgacacgcttcgggcggccaacacctgggggcccaggccaggcagggctggggccgcgcgggactcactggacccagccaggggcccccagggcccagcggtgccggggca

SEQ ID NO: 10333 - DNA, 120 bp, Homo sapiens
atccgcggaaccggcccgcagcggggtggggagggggcgctgcccagtggacgcccggcggggcccgagtgtcaccccgtgggtagctgggcagcgaggaagctgggggagtgaccgccc

SEQ ID NO: 10334 - DNA, 120 bp, Homo sapiens
ccccggcgcgggggccggactcgggacgtggccacaggtgggctccgggcgcgggaaggagcccgagaaggcggagcttgcaggggccctgaactcttgccctccaggtctcggcccagc

SEQ ID NO: 10335 - DNA, 120 bp, Homo sapiens
tgccggctccagacggggatgggggcggggagacggtggctcacctggagcccgcctcccagcacaccgggcctgtctgctgggccgaggaggcaaccccaggggacggcaggggtcagg

SEQ ID NO: 10336 - DNA, 120 bp, Homo sapiens
ctgcggtccgggggtccgggaggcccggagagctggtgcaggccgtgggtggtgatgggggcgtcgggagcccatgggaagcagggcgggaagcaggcgtctctggaaagggccttgctc

SEQ ID NO: 10337 - DNA, 120 bp, Homo sapiens
gaacgctggagggtcctcgccccttccgaccccatccctgtcccgccctccgggccgctgggtgtttcctggcgcgattggaagcagccgcgagaccccagcaccacggacagtgctcgc

SEQ ID NO: 10338 - DNA, 120 bp, Homo sapiens
tcgcgacccagggctgcttccctgtctggtcctgccctggttttctttcaggcccttatctgaaggcaggattgggggtggaggtgcatgggtccccaaagttgtgtaacttcaccccag

SEQ ID NO: 10339 - DNA, 120 bp, Homo sapiens
gcccggagacccgcagccatcagtgagtcccttcagttgaggtggggggcaggctgcaatcatagcaccccagcttattcatcctcaaaggcaggctggggtcctgttccctgtggtttt

SEQ ID NO: 10340 - DNA, 120 bp, Homo sapiens
tgacgtggggctctctccagggagcctgactccacacaagatggggttcctcaccctgatctggggttggtgggagggcgcccctctcagctctaccagttcatcaagtcctctgatagg

SEQ ID NO: 10341 - DNA, 120 bp, Homo sapiens
gtccgtggtgcaggctgatgaccctgggcgtgcctgcctaggggagatgtgtgttggggggagcctgggcatgggccgtgtggctctgccctggacatcttaccatctagtggtggaagt

SEQ ID NO: 10342 - DNA, 120 bp, Homo sapiens
gcccggcattggcatttctaaggagtctcaggtgatgctgactgctcgtctggggactgcactttcaggactgcagctgttaatgaaccagctctgcctggaggctagagcccgcctgcc

SEQ ID NO: 10343 - DNA, 120 bp, Homo sapiens
gtgcgtcattctgccttgtggtttctcgtgtggctcgaggccagcatcttgtagttgagctctctttatcctatagtgggggggccctcctgggtctggagctcagcccccatcctttca

SEQ ID NO: 10344 - DNA, 120 bp, Homo sapiens
attcgtaaaacatttgtgcagccggtacgtggtggagcgtcagggcacgatggcccttcctgccctcctgacccgcctccttcctctccgcaggctttttgtcctgggcatcggcttctt

SEQ ID NO: 10345 - DNA, 120 bp, Homo sapiens
tgacgtctctgggaggccagttctcggcccggcgcctgggggactcgccattcaccatccgcacagaaggtaccttggtggggcaaggggagtgtgagatgagtgagggcgtttgtgggt

SEQ ID NO: 10346 - DNA, 120 bp, Homo sapiens
ggccgccctgtaggtggatgtgagtggagggggcctgggcttgggccgtatgaccctccatgcactttggctctggtctggctgtggtcatcaggtttcctctggcctggattctcaggc

SEQ ID NO: 10347 - DNA, 120 bp, Homo sapiens
gaacgggcctggccatgggcttaaatgtcttatctctgagctcttgggacacagctccctcccaggccccatcactccttgcccacacgatatttgcaaggcagtggaatggagatcaga

SEQ ID NO: 10348 - DNA, 120 bp, Homo sapiens
gggcgtctggtgggtctgggcttgcatccttgtcatcacctaccagctgtgtgcctttggctgagtcacctggcttccctacagagaaggacagcagtgaccttctgcagaggttggatt

SEQ ID NO: 10349 - DNA, 120 bp, Homo sapiens
acacgtggacattacccagcatggttggtgccacatggcacaagagtgaccagctgggagccctcctcctgaagctgggcccagccccacctcatctcacctaaggaggggtgggggtca

SEQ ID NO: 10350 - DNA, 120 bp, Homo sapiens
tcccgtctgtaaatgagaggatctatttgtatctcccagcgtcccagctttccttatttatatggaaatatggagggaacgtgtgcctgttctgagttgtatcactggggcctcacatta

SEQ ID NO: 10351 - DNA, 120 bp, Homo sapiens
aagcgatgtcagcttgctctgctgacagtcccggggccagtggtggcttttaggggagtgggtcactgggggagagtcggcctgacctgcttccctcctgggtacccaccccctgcctag

SEQ ID NO: 10352 - DNA, 120 bp, Homo sapiens
gttcgttctatagctgttgtgttgcatcccaaagaatggagagtcctcagtcctacttttctcatctttcccctagtaaagctgccccaggtgtttaaaatcctgggagccaagagtgct

SEQ ID NO: 10353 - DNA, 120 bp, Homo sapiens
agacgatcaccatctgcttcctggtcatgcactacagaggacagactgtgaaaggtgctggggacttacccaagagcaggctgtgtggttcctgggaaccctgctgggaactcaggtctg

SEQ ID NO: 10354 - DNA, 120 bp, Homo sapiens
tggcggtggggttgggacattgtagaatgcatggcttcttcagaaggccttgtctgtgtccccagtgcagtcctgggggatgggattgaggccccaggctcagggccctagaaaagatgt

SEQ ID NO: 10355 - DNA, 120 bp, Homo sapiens
gggcgtctggcatcatgcccagggcatcacgtgggaacctgctggcctggaatgcactttgtgccacacactttcttggatgtactttcttccttcttcctttctaaagtgggggcattg

SEQ ID NO: 10356 - DNA, 120 bp, Homo sapiens
tggcggggtcagtgacagatgtgaggccagggtggaggcagaactgtgagctcccaggcacattccctgctggggcctctctgatacataaatgcaggcctttcctcacagtggagatgt

SEQ ID NO: 10357 - DNA, 120 bp, Homo sapiens
tggcgctggagcgtgctgcaagtccaagagccaggttttggcagggcagggctggggcctcctgaggctgcaagggagtctctgcctcaggcctctctctgggttcctggtggtttccta

SEQ ID NO: 10358 - DNA, 120 bp, Homo sapiens
gagcgtgtctgtgtccagatttcccctccctataaggacctattggattagggcccaccctaatgccctcacgttaactccattacctctgtaaggaccccaactccaaataaggtcata

SEQ ID NO: 10359 - DNA, 120 bp, Homo sapiens
cagcgagcaaccgcgagcccttcagggagaggcagaagcacccagggcctcacctctcagccctgggagccgttctgtgggagcagcaccaggttaatttgaaaacaggtcaatgggatg

SEQ ID NO: 10360 - DNA, 120 bp, Homo sapiens
ctgcgacagaaatgtctcccttggctggcgaaatgacctgcgtgggaggcggtgggacaaagacgcggcttgtacatttgttgtagtttattcgcagatgttcacggcagatgtcctggc

SEQ ID NO: 10361 - DNA, 120 bp, Homo sapiens
ggacggatgagccggtcccgctctgctcctcgggtctcggtgtttcaattaactggctcactggagtgacgtttggggcaatgtgcaggatctacatctggctttgctgctgcaagatgc

SEQ ID NO: 10362 - DNA, 120 bp, Homo sapiens
ttccggggtgagggaggtggcacgagggagccgtgcgctctgtgatgagactgcagcaaggtgatgtcagccagtccccgcccgcgccccgccgtgtgcggagggaagaagccaaaccct

SEQ ID NO: 10363 - DNA, 120 bp, Homo sapiens
agccgctgcatcctgagacggcctcgtgcatgtgcaggtccagggtgggcgttttaaagttaagcctttcccttcctgctttcctagcatcagctgtgctcatcaattttatttgcacaa

SEQ ID NO: 10364 - DNA, 120 bp, Homo sapiens
atgcgcatgccggagaaaaagcctggagccagaacagaacaccaccaagaaggccggaccccgggctccagaggctgctgtgagggaaccctgctccccactctgcccaacggcccagcc

SEQ ID NO: 10365 - DNA, 120 bp, Homo sapiens
aatcggattaagcagcctgccttggctctcagcttctacaggaacagctccagctctgagcagccctgcctagcctgtgctgtgactcagggtataggagtggcccaactccctctacca

SEQ ID NO: 10366 - DNA, 120 bp, Homo sapiens
catcgctggcccagccgggttcactgagagctctcatgcccagaaccggccctcagccctgccagtgtggggggatgtaatgctttccaatgagtcaggaaggatccagaagggatcctc

SEQ ID NO: 10367 - DNA, 120 bp, Homo sapiens
catcgtcctgtcccagaccatgaaagctgtcccaggtgctcctcctactgggtctgcctgggtccccagcccctccaggccaggcccctctcttctccaggggtcccttggacagcaggt

SEQ ID NO: 10368 - DNA, 120 bp, Homo sapiens
agccgtaacacatttccttacccaggctgggatgggatgggccagagaaggggagcaggcaggactaggctgggggcagcccctaccccgccccagcccttctgcccaagtgaccaacgc

SEQ ID NO: 10369 - DNA, 120 bp, Homo sapiens
tgacggtgctgtgtggtccctgccaggctgcaggtgccctgtgacagcaccgagtcggagatgaaccacctgtacccggcgttcgcccagcctggccaggagtgctacctgcagaaggag

SEQ ID NO: 10370 - DNA, 120 bp, Homo sapiens
ctgcgccggctccaacaccaagtaccgccggctctgcccctgccgcgacttccgcaagggccaggtggccttgtgccagggctgtctgtgaatccgcctctgccgccctgcctggcaccc

SEQ ID NO: 10371 - DNA, 120 bp, Homo sapiens
ccacgctggctctctcctgccgcgggagaaagcaccagcaggttctgagccctggctgcttgtcctcctcgcaacccccccaggccggagcttccttccttagccgggaagctggcagag

SEQ ID NO: 10372 - DNA, 120 bp, Homo sapiens
agccgtgcccgggaataggaggaggcagcatgccgagcccctgggacctcccaggcaggctccggttctctcctggggactcacagaagcatcgtggccaagcaggtgtcggactgctca

SEQ ID NO: 10373 - DNA, 120 bp, Homo sapiens
gtccgcatggcccaggagcaggtggtcggaggcccctggctttgtgcaaggccggatctgggccaggtggcgaaaggggcccagtcgttcttgggcccaggatggggcctctagacttgc

SEQ ID NO: 10374 - DNA, 120 bp, Homo sapiens
ccacggtccctgaagggtccaaggaggggccctccccatggccctggagagtgggcctgggtggtacctgctccaggcagggaaactgggggctcgcccttctcctgtgaggggagccag

SEQ ID NO: 10375 - DNA, 120 bp, Homo sapiens
agccgaggggtcctgtttgtgcctccccttagtcccttccctcccgatttcccgattcccccaccctccctctacacttgaggaccacagttgggggtgtagggaccacccagaccctgg

SEQ ID NO: 10376 - DNA, 120 bp, Homo sapiens
atacgccttctcatccaccagacaaggttggtcccctccccagggggaccttgtcaccccccttcatacacacccctggttctactccaaaaccttccccgtgcctcccacccacttatc

SEQ ID NO: 10377 - DNA, 120 bp, Homo sapiens
ccccgtcttccacagtgatgaggccccagaaatggggggtacaggatgggaggagggatagcaggggaggccccctgaacggtcaaatctgggtgggtcgaggagcaccccccaccaaca

SEQ ID NO: 10378 - DNA, 120 bp, Homo sapiens
ttccgaccatctccgtagtctcaccttttccagatcatcaggtagttggagccctacagtttgtagccttctcagattggctcctttccccctagtacctcgtaacatgcatctaacatt

SEQ ID NO: 10379 - DNA, 120 bp, Homo sapiens
tgtcggctggggagctcagcaggggatttgggctgggggccatggttcccatccatgtaggcctttccaaggactcttgtgcttccgtgcagcatggtggctgggttccaagagtgaaca

SEQ ID NO: 10380 - DNA, 120 bp, Homo sapiens
gctcgtggaatgggatatagtgttgcctctatctttggaaaatataatctgccaaagatgcagcttggtcttccagcatttctggactgttgtcctcatccggtccaagatgggtcccct

SEQ ID NO: 10381 - DNA, 120 bp, Homo sapiens
taccggtttattgtaaaggattttacaaagagtagagatgaagagatgcgtagggtgaggtatgaagggggcggaggacacggaacttccgtgccctccctggacggccacctcccagga

SEQ ID NO: 10382 - DNA, 120 bp, Homo sapiens
cctcggctggctccaagacagtcctgaagttcaagggcaggagaaataacatgagtgggaggctggtaacaagttctgtccctcacagccagggaagctgaagggcagcagagaggacgg

SEQ ID NO: 10383 - DNA, 120 bp, Homo sapiens
tggcggggctggaggccgagcagctagacctggggacctgccttccctgtgctctggccctgcagctgccccagctgccttggctgacttagaaggctcccaaagaccctgtatgttccc

SEQ ID NO: 10384 - DNA, 120 bp, Homo sapiens
gtccgtagggtttaggtttgtccacccctttctgcccgaccacactggctcctccaagtatcggcctagcactctctaaaagggaatcacgtattcccttaaagggggcggggccctctt

SEQ ID NO: 10385 - DNA, 120 bp, Homo sapiens
gcccgactcagaagggaagatggggtgaaagccccgtcacggtcctcgcgagagccccgagctcctcaccaggctggcacctggcaccccaacctgctgcttcggaacttcctcttagtt

SEQ ID NO: 10386 - DNA, 120 bp, Homo sapiens
agccgcgctgtctccaggggcaaggagctgccgcccctcctagcaggagagcacagtaaggctcaagcggtccctggctcccagcctgccgccacccaagattggaaaccccaaacctgg

SEQ ID NO: 10387 - DNA, 120 bp, Homo sapiens
caccgcggctgctggggggtggctgtccttgggcagaacaacacagaagatgctgtgggttgaattgtgttccccccaaaagatgcattgaaggcacccctggtgcctgtgaataggatc

SEQ ID NO: 10388 - DNA, 120 bp, Homo sapiens
acccggggacacacagggaagaaatccctgtgaagacagaggcagagatcagagccatgcagctgcgccagcaaacactaaggcctgctggtgaccgccggaagctgggagggcaaagat

SEQ ID NO: 10389 - DNA, 120 bp, Homo sapiens
tggcgccttcagagggaatacggccctgctggcaccctgatgctggacttctggcctctagaactgtgaggaaatacgctcccgcggttttaagccacagccggtggtaagtgactataa

SEQ ID NO: 10390 - DNA, 120 bp, Homo sapiens
ccacgcatcccgagtcgggaggtaaacggccccctagccaggccgctggctccagcatgcagcccgctttgtcttttcgcagaaaagcaaagtgtttgctgaaaaaaggcatcgaaggaa

SEQ ID NO: 10391 - DNA, 120 bp, Homo sapiens
ctccgccccaaataaacacccacaacacagaccttcagggcacctggggtgcagaatccaggcgcttacagcaggagaagggggtggtccccaagcctgacttttcaggttgattctgcg

SEQ ID NO: 10392 - DNA, 120 bp, Homo sapiens
ctccgagtcagcctgagatcatctccctctgagtctcagctaaaaatagtccaggctccgacgtctgcatatatttgaatattgggctcaagagaccgtgattctggggaaacggtgcag

SEQ ID NO: 10393 - DNA, 120 bp, Homo sapiens
gagcgtgaagccaacagagcacgttctccccattaaactctcagctcccacagctgcccaggcctgaccaccagcgcctcttccttagagacccttcgtggggtgtcttctccagtctgg

SEQ ID NO: 10394 - DNA, 120 bp, Homo sapiens
ccccggccttgtctcaagctggacttagacaccctcactttcccctctcttttccctctccccatcaccatccgttcagcaaacattctcccaggagcagtgcttggtaaggcactaggc

SEQ ID NO: 10395 - DNA, 120 bp, Homo sapiens
gcccggagggtacagtctcctgtctagtagtggctgtgtcctgagcccctgtgtccagggctggggcctgctgaggactcaagtgggcttcctgaatctgctggtgcctgattttaatca

SEQ ID NO: 10396 - DNA, 120 bp, Homo sapiens
gaccgctctgccaatatctctgatcttccttctcccatagtgacagaccctctcccaatctccctgtgctggggatgggtgtttttgctctgtccttccacggagaccgcagaactgaag

SEQ ID NO: 10397 - DNA, 120 bp, Homo sapiens
tctcgattctgcatgtccatcccccaggccacacctctcatctccgtggaggagtcagagtccaagccctggaccccaggaccaggaagcctcggcctgcgctggccacactcacgcagc

SEQ ID NO: 10398 - DNA, 120 bp, Homo sapiens
caccgtctggttttcagctcctggttcactccggcccttgggcttcccctccttcctgcaaactcatctctgccttaagctggatgtggatgcttgtggttgttcctttcctttcctttc

SEQ ID NO: 10399 - DNA, 120 bp, Homo sapiens
attcggagggtgggggaacctgtgtcccagtcctaggaggctccctacaaggtgacaggtcctgaaaagggatggctggacaggccatgatgaccccaggagctctggcctcagaagccc

SEQ ID NO: 10400 - DNA, 120 bp, Homo sapiens
ccacggtaagtggctatttctgtagtaggatcactgtacactctgtggtgggtttgatatctgcactcagggaagcgctgatagaatattaacaaaaattgtggctagcatctattgagc

SEQ ID NO: 10401 - DNA, 120 bp, Homo sapiens
aggcgtgagccaccgcgcctggcccctattgagcaattcctaagttccagatactgttgcaaaggctatacccagatcatctcatttactcctaagtccctacaaggaaggtaatttcat

SEQ ID NO: 10402 - DNA, 120 bp, Homo sapiens
gagcggcttgagtttttcttcatccctgggtttatctgaagctgagctctgccagcggacgtggcccgtagccgtctgccttaagaactggcctggactccccaaacaccacccttcctc

SEQ ID NO: 10403 - DNA, 120 bp, Homo sapiens
tcccgaggctccccagccccacttacaccctgaaggcggatcccttgactcccgagaggctggcggtggagtgcgcggcaggaccgcagggctgatctctccagctgggctgggctttgg

SEQ ID NO: 10404 - DNA, 120 bp, Homo sapiens
ctccggatttgtcctttggggttgatggagatttatttatttaaacacacagctgacacttgtgcctcttgttttcggagagtcggggacaggatataaacatatttggaaagaagccgg

SEQ ID NO: 10405 - DNA, 120 bp, Homo sapiens
tgacgaaccaggggcctcggaggttctggataattctcttattctggtccagtgctgaccacacaggtttatttttcccttgctcagagatgatgggaggagaatcagagaaacaatggt

SEQ ID NO: 10406 - DNA, 120 bp, Homo sapiens
tgccgacctcaggcttcctgtgagggtcaggacatccatcattgttcctctacaaattaatagactggcccatccctggttgctacggcaactgcccccagtgcttttgtgatcgtaaaa

SEQ ID NO: 10407 - DNA, 120 bp, Homo sapiens
aaacggattgaggaaggaaattaccagaaggcccagcacctctgaacaggtctttgtttccaggagatgggcctgatgagaggctgagaagccactaccgaagccactaccggaaaggac

SEQ ID NO: 10408 - DNA, 120 bp, Homo sapiens
ggccggacggtcgaccagctttgcctgtttcataccaagactccagaattcagttgcaaaggaaaactccctatcctgagtgccttcctttttatacaaaaaacaaaaacagaggccggg

SEQ ID NO: 10409 - DNA, 120 bp, Homo sapiens
tcccgtccgcaccccaaatacccaccgctagcatttggctgtaaacctttccagtcctgtctctctgggtaactgccttgttggctcctgacgtcattgctttttctcccctgccctttc

SEQ ID NO: 10410 - DNA, 120 bp, Homo sapiens
tgtcgatgggaggaggtccattgtccctcacccctggatgcaaacattagcaaatgcatggccccagctccttctcttaggtaatagctcgtggccacgctgggttgcaaacacagtctt

SEQ ID NO: 10411 - DNA, 120 bp, Homo sapiens
tgccgccccaaaatgtgcaccttttggcatcaggctgttgagctgcgggcagttaagaagaagcaggtgcaggaagctctgcactccctctgtttgcctaaaagcaggacatagatttgt

SEQ ID NO: 10412 - DNA, 120 bp, Homo sapiens
ccacggagcaaagctgagccactgaagacacctttgcacccttgtgggcctgaggccagctccagaggcatccacaagaacaggtttccccagccagcctgcacccgccagctctgtgcc

SEQ ID NO: 10413 - DNA, 120 bp, Homo sapiens
cagcgatcccaaggagcatgtcctacaagtgtagaccgaaccccgggagaaggagaggggaacagggctctggacctgcggggcggggtttcctccatattgcctcccttacgatgcagt

SEQ ID NO: 10414 - DNA, 120 bp, Homo sapiens
gaccgccgtccacaccccaccccctccaaaacccagtatcagttatcagagatgggctagatcagtgatggcagaaggggtgtgaagtattgctcagatggatccctgcctgacattatt

SEQ ID NO: 10415 - DNA, 120 bp, Homo sapiens
catcggcacactgggtttggcctcaggctgttccctgaggctggcacagaaccctggggcagccctggcctcggtgcttcctggggagcagatcccattactaaggagaccacccacact

SEQ ID NO: 10416 - DNA, 120 bp, Homo sapiens
acccgcagcagcattctcgccacccccagggtccatagttcagttacacaaggagcttaggctttatcctatcccaaactgtgccctggcctggttggctgcggaagaacaaagacggga

SEQ ID NO: 10417 - DNA, 120 bp, Homo sapiens
gaacgtaatgagtcaccatgccatcactctcccggagacctcccaggtgggggacgcctgacttgggttcattcattcattcggcaaatatttatcaaatgcttacgatgtatctcgccc

SEQ ID NO: 10418 - DNA, 120 bp, Homo sapiens
attcgaggccctggagacagagcagtgaccaaagagattaataatctcttttgagaagccgacatcctagtgggagaaaatagacagtaaacctagtgagtgaatcatacaatacaacgg

SEQ ID NO: 10419 - DNA, 120 bp, Homo sapiens
tgacggcaggccctttccaggcaagctgccaagtgctggcccctgtaacgtgttcagctgaggattcatcccaggccaggaatatgggtgcaagagagtggggtgtagggtcgggagatg

SEQ ID NO: 10420 - DNA, 120 bp, Homo sapiens
tgacgaaccgaatgaggttgaaatgatgctgtgtgacttcgagtctactttatgaaaggcctttcacttggctgtctctctctttgtgtgtgtgtgtgtgtgtgtgtgtgtctaatatgt

SEQ ID NO: 10421 - DNA, 120 bp, Homo sapiens
gcacgtgaccgccgagcacttaaaatgtggctagtgcaactaagcaactgaatttttagttttacttaattttaaccctcccctctctcccctccccgctcctctttctttcttttttga

SEQ ID NO: 10422 - DNA, 120 bp, Homo sapiens
acacgggcctggatgcggcgactccaggcctccgtgttccagggttgtcccaggggacgttggcccctctgcattttgggactgccctgagtgtgggctgaaggtggagacagttcaggg

SEQ ID NO: 10423 - DNA, 120 bp, Homo sapiens
tctcggctgaaatcagaggccagcaagcacctgctgcctctccccaagacacaccatccaaccctccggcccagccttcccctgccctctctggacgtgccaggcctctgtgccgtcccc

SEQ ID NO: 10424 - DNA, 120 bp, Homo sapiens
ctccgtcctctgcaacctgtagccatctgcacaggcctctgccaccaggataagaaccatttgggagacactcactatgtgccaagcacagctcagcggtctatgatgggatccatctaa

SEQ ID NO: 10425 - DNA, 120 bp, Homo sapiens
aagcgcaggaggcaagatttaaagcgactcctggtctgacctcagctgacacagagcccttaacgggcagcgctggaatcactggtgcgatgtccatctctcccctggacaacaagcctc

SEQ ID NO: 10426 - DNA, 120 bp, Homo sapiens
gcccgtccacattcctagcacccagtgctgtgcgggtgcgtggtgtgcactcagatgggaaggtgtgcacacaggccgacagatggagtccaagctcttatgcctttcaaactctcactc

SEQ ID NO: 10427 - DNA, 120 bp, Homo sapiens
aggcggccgccggcaaaaatagccagctcatttgaatagaagggcaggaggaaaagacaagaacccaacttcagacaaatggaaattttcaaaagaggaaggcagcggccaagcccggcg

SEQ ID NO: 10428 - DNA, 120 bp, Homo sapiens
gcacgattaactgaagccgcagccccagtcaatataatagtgggcgcattatcagttttgccacaaaccattattcattatctctgggttgtgttggctcaccctcagccggctggagcg

SEQ ID NO: 10429 - DNA, 120 bp, Homo sapiens
cgccgcggcttctcctgcagccagctatattgtaatcagtcacattacagagaaacgttcctggaggaaatcgtgccatcgcctggcgtgtcagctgctcgcagatcggaataggaatgt

SEQ ID NO: 10430 - DNA, 120 bp, Homo sapiens
gtgcgagttaatttatagaaaaattaaacatcatttggagccgagcaagggagatgagcgggggactggcttggtttcagacaatatttaaatggcctcggggtattgattctgcaggaa

SEQ ID NO: 10431 - DNA, 120 bp, Homo sapiens
tcacggtggttaataaatgtttgtccaaaatcccccaactcagtctagacgtgcacaatgaagacttagaaagcaaaatatagctccaaattgcaagcgtttctttggcgtaatgagtct

SEQ ID NO: 10432 - DNA, 120 bp, Homo sapiens
ggacgctgggagcagctaggggtgggggtgggggtgagagagcagaagtcaccaactaagaagacagatcccgagtcccctccatgggccaagcaaggtgctggggctgccaggatgggg

SEQ ID NO: 10433 - DNA, 120 bp, Homo sapiens
ccacgcaatccctgaccttgagggaaagaggagacagggcaaaaatgcacctaaccaaggccaaggtctgactggagcagctagggagatgccctgatcccttcctcttcaccctgtggg

SEQ ID NO: 10434 - DNA, 120 bp, Homo sapiens
cagcgcagagtgaaccagaggggctgtgaggggcagcctttgtagtaacaaaagggtgagctgccctctgattggcttgtttgaataatgctactggctggcagggaggtgagaccgtta

SEQ ID NO: 10435 - DNA, 120 bp, Homo sapiens
acacgtggggcgtagccaatctagctgatgcgggaaccaggtaagcagcctttcctgctgggtgggggggcgtgcctggtgagaacaggaggcctcacagctactaggcccattcggggc

SEQ ID NO: 10436 - DNA, 120 bp, Homo sapiens
tatcgtacttgatgacatgtcttctgggttcaaatccctatatatattgtccttctgagtgacgctccaggtacaatcgaatttttctgggcaagtatctttgcttacatgtgtaaaggt

SEQ ID NO: 10437 - DNA, 120 bp, Homo sapiens
tcacgcctggctacagatggtgctttcaatattagcaatggataattaaatatgtggttaagaagttgtatttaaggttaaaaatcactatgaggctgggtgtggtggctcaaacctgta

SEQ ID NO: 10438 - DNA, 120 bp, Homo sapiens
caccgtgggacacaagccctgtatcagaaaaggtatagaaattaaagaacagttaagtcaagattttgaatttctctcttcgtccactagaggatgtaatccaacaccagactgtgttct

SEQ ID NO: 10439 - DNA, 120 bp, Homo sapiens
gagcgagactccgtctcaaaaaaaagaaggaatgggagtgcgataggaagagctctgtgaacactggagtcagactgttgggtttggattctctgctctgaaagtcacttatcctctctg

SEQ ID NO: 10440 - DNA, 120 bp, Homo sapiens
ctgcgaaatgggctgtgatgaagatcatcgtgatgcttgtgaagtgcctagcacagggcctgggcctgatacaactggtagaaaatagagggaactgtgttcgttcttcaaggaaactgt

SEQ ID NO: 10441 - DNA, 120 bp, Homo sapiens
gatcggtaggggttaaacacgcagaactctttgtgcctcggtctccctgatatggaataataaactcaggttgccagaatcatagcggttccttgcatgctcctggaattgctaagaggc

SEQ ID NO: 10442 - DNA, 120 bp, Homo sapiens
aaacgaatggtttttttcaacaggctgtataaataggctcttattacatcatgttttcatgtgacggatttaacatacactagaaggagactgtttgctttatgtacttctccaaattgc

SEQ ID NO: 10443 - DNA, 120 bp, Homo sapiens
aatcgaagctctgtccccatgaaacactcattccccattcttcctttccccagcccctggcagccaccattctttctgtccctataaatttgactactctcggtacctcttatgggtaga

SEQ ID NO: 10444 - DNA, 120 bp, Homo sapiens
ttgcgtaacttggtagttacttgaccttttgtgtaactgggttttttcacttagcctaatgtcttcaaggttcacccatgttgtagctttagtttttgggtagtacttgaccttttgtgt

SEQ ID NO: 10445 - DNA, 120 bp, Homo sapiens
acacgtttctcttttaaaaggagggtttgtacatgactcaggcttcatgaaggatttctttgccatagagattttgctttactttcatgaatccaaatcagctgggtccttaaattggtt

SEQ ID NO: 10446 - DNA, 120 bp, Homo sapiens
gcacgccggcagcgtggccacgttctcagcagcgcacggaccggtaggagctggggactctctgtgtgttaaacgaaggtagtccaggtgaagttcagcataggctggagggtggaacac

SEQ ID NO: 10447 - DNA, 120 bp, Homo sapiens
ggtcgctggatgtagtgacctttccttgtcacaggcttaacaccccaggtggcacggataccttgaagagccatgctgtttcctaagagaaaacgtggaatttggaagagattttgaagt

SEQ ID NO: 10448 - DNA, 120 bp, Homo sapiens
gtacgaatggaagaagctccgatgggttgatgcagaatatctcacagccctcccggtgttggcccattccctgtctgttgtgtggtatgatgtgtgttgaaatggctccttgatcaaaag

SEQ ID NO: 10449 - DNA, 120 bp, Homo sapiens
tgacgtcagccagagtgggttggcctgtctgcttagtctgtgcgggccgcaggagcccagggctgcagatcgtttgcttgtttttgcctcccctccccacccagatgactctgtgttctt

SEQ ID NO: 10450 - DNA, 120 bp, Homo sapiens
gcacgtcgaggacagcacactgtggctttgcttgccggctcactgagcatatctgagagagcttttcgtgcattatcagtcagccttaattgcagtttcaggccttggtcctaccacact

SEQ ID NO: 10451 - DNA, 120 bp, Homo sapiens
atgcgccacttgtggagacctggtgtgaaagcgctgctgcggatcatcgaggtggtggaggccaactaccctgagacactgggccgccttctcatcctgcgggcgcccagggtatttcct

SEQ ID NO: 10452 - DNA, 120 bp, Homo sapiens
ggacgctggtgggttgagatgctttttgcagtaactgtgagccatttggaaagcagataacatgcattcatatacacgtgtctgtgacctaaagtcttaacttcttaggaaaaaaaacaa

SEQ ID NO: 10453 - DNA, 120 bp, Homo sapiens
gcccgtttgctactttttcttggctgggttttggttatttatagatatcttggggattttccgatttctgtaagtctaatggagcaaggagggtgttcctgtattccttttttgctgtca

SEQ ID NO: 10454 - DNA, 120 bp, Homo sapiens
gggcgttccgtgttcctgtgcatgccatatgtctgtcctgtagcatcacgagtgacctgaagcaggaggggcctgcagcggaatctcccttctcagctaggacaaggttcgtggcccaga

SEQ ID NO: 10455 - DNA, 120 bp, Homo sapiens
ggccgggagctgactgcggcctgcttcctgccgtggtggcacctgggtcagccatctgccagtggcttctgctggggtgtcttcctgagtggctcacctggtgcttgcagggcaggtgga

SEQ ID NO: 10456 - DNA, 120 bp, Homo sapiens
taacgtcttgaggattgtctgtattcatttcttaccgggagggcaggctccagggaccgagtccttgttccttgtttgttaggcactatcgctcttgtccatgtttcaagaacttggggt

SEQ ID NO: 10457 - DNA, 120 bp, Homo sapiens
tttcgtgtgaatcgggggcatctgtagacatccacatggtaaaaacctccgttctgctttgggtattaaataaagcacagatccgagatggcaacaaactgaaaggaaggctgaagcgga

SEQ ID NO: 10458 - DNA, 120 bp, Homo sapiens
ccccgtgacagctgcccctaccaagtcctgtgctccctcttacctcttccctgggatgacagtggtcactttccccatgttttggatggggcctgcttgtccccaacgtcctttagcacg

SEQ ID NO: 10459 - DNA, 120 bp, Homo sapiens
ggccggttaccttccaggtgcgttagagtggctcctctaaccagccctgcagggatcttattagatcttattagagtggctcctctaaccacccctgcaggggggaagtgaggagccgca

SEQ ID NO: 10460 - DNA, 120 bp, Homo sapiens
tcacggccaggacttgtacccgagcccgacacgggcggacccaggtgtgcggggatccagcccaggtgtgccggtggcggccgcccccacggaaccacctggcccgctcggggacccagg

SEQ ID NO: 10461 - DNA, 120 bp, Homo sapiens
tggcgttggcccggcgtgaaaggtcaccctgcacccccgcacccaggtgaggcgggcgcgggatcccggttgccacaggcatcggagcggccgggagcgggggcagggggaggcaatgag

SEQ ID NO: 10462 - DNA, 120 bp, Homo sapiens
tcccggggagggggctcgcaggggccgcatcggacgcctgggccggcggggcagagggaggcgccctgctctccggtccctccctttgcctccctcccgccccgggcgccgcctgcggga

SEQ ID NO: 10463 - DNA, 120 bp, Homo sapiens
agccgactcgttccaggggaggcagcgccacctgctggagtgtgcgcgtctgcgcaccgggccgggttccgcaggtcctggggctgcgcccgagacccccgaccgagtcttcggcgcctc

SEQ ID NO: 10464 - DNA, 120 bp, Homo sapiens
cagcgcttccccggcgtcttgggctgcgaggggccctttccgcagggcgatgttttagcagttctgggaggaagggcccactgccgttgccctctgaggaccgaggccgagagcctggag

SEQ ID NO: 10465 - DNA, 120 bp, Homo sapiens
gggcgtggagaagggtctgaccgccggctctggtcctcgggctcttggcgacagcgacctccctcctcctccgggcgatggtgacgggcgctctcagagtggcggccacactaggcgcag

SEQ ID NO: 10466 - DNA, 120 bp, Homo sapiens
ggccgtcttccaagtgtgtggtcctctcagacctatggagttggtgctgttctggctccctcttaaagagcgggaaactgagacacagagaagtcccaccgccgggggtcggggtgggga

SEQ ID NO: 10467 - DNA, 120 bp, Homo sapiens
tgtcgcctcctccaggaagccctccctccccctccatgtgagggtgggcgctcctgctatatgtgggcctaccggccctctgcgggctggatcatcacagtctgttcacttgtctgcctc

SEQ ID NO: 10468 - DNA, 120 bp, Homo sapiens
tgacgtgggctcccaaggatcatttgtgtctgtcttgttcacctgccctttgtagtgaaccaaacctttaagtgcacattttaaaattgatttccaagggggctgagagctatggaggaa

SEQ ID NO: 10469 - DNA, 120 bp, Homo sapiens
acggggccactgggaacccatgatgttggttaccaatgtgattggaggttcggaacgacggacgtgtggccctgaagtgggaaacagaaaagctgaagggcgagacctgggagggagccc

SEQ ID NO: 10470 - DNA, 120 bp, Homo sapiens
ccccgcggactccagagacccaaccttccttccctgcgctccggccggacgttctccctgcccctgtggccgagcctggtaagttcgcagcaaacaggagtttggggctttacaagcctc

SEQ ID NO: 10471 - DNA, 120 bp, Homo sapiens
gctcgcagctcggccacagggctctgttccaggggcattggccactggcttccagtacctgttcagcctcccagctccttgttgcctggaatctccaccactgatcagcgtgtaaacacc

SEQ ID NO: 10472 - DNA, 120 bp, Homo sapiens
acacgggggcaggggggtccaggaaggcaacttttgggggatagggtgggaagaaagagggacctcagaggccagttcttccccatcctactctatttcctcctgtaaccatgggaaatg

SEQ ID NO: 10473 - DNA, 120 bp, Homo sapiens
gcccgatcctgtatggggtgcggatggggcacacagatgaatcagacccggccccctctttgtgccaattcataagcacttcatccacggctcagccctgtgaaagagctcctcgggccc

SEQ ID NO: 10474 - DNA, 120 bp, Homo sapiens
ttccggtcttgcctccaggtgacgattcagcacacaggaaggtggccctgcccagggccaagctctctctcagttggcacctggccaggtgagggggctgctccctgtcacagaatagga

SEQ ID NO: 10475 - DNA, 120 bp, Homo sapiens
gcccgtggggcctcataggcacacagcatggggcggcagactgggcctcctgaccgtcagcgctgtgaggccgatcttcttgcccactgcggaggctcagcccctcccctgccctccagg

SEQ ID NO: 10476 - DNA, 120 bp, Homo sapiens
acccgggtcacctgtgggcagaggcctcactcacacccccggcctctcatgttgccatccagctctgtcctgctctccctcccccagtgggggtttaagctcctcgtgggctgcctcccc

SEQ ID NO: 10477 - DNA, 120 bp, Homo sapiens
ccccgaccccggcgccctctgtctccacggaagcctgtcatttccgaggcctgagtcaccactggctggttgcagccgggtcagcgtgccacccggcacgaggcacagacatgagctact

SEQ ID NO: 10478 - DNA, 120 bp, Homo sapiens
ggacgttgccagtgaataagtctttcagggcagaggcagggtggagaagaaccactcctctattcccttaccctcccacaccaggaatcgctgggctccctgtgaccagggactttccca

SEQ ID NO: 10479 - DNA, 120 bp, Homo sapiens
gcccgacgtgcctactcagtgcagacacggtgcccgacgtgcctactcagtgcagacacggtgcccgacgtgcctactcagtgcagacagggtgcccgacgtgcctgctcagtgcagaca

SEQ ID NO: 10480 - DNA, 120 bp, Homo sapiens
gcccgacgtgcctgctcagtgcagacagggtgcccgacgtgcctgctcagtgcagacagggtgcccgacgtgcctgctcagtgcagacagggtgcccgacgtgtctgctcagtgcagaca

SEQ ID NO: 10481 - DNA, 120 bp, Homo sapiens
tgacgtgtcaatgttggacatctcaaaaggtggcatacggtcccagcagagagctgcagtggggttacgggcacagaccgggaagcatgctgctgccaggaactgaatttgggctcccct

SEQ ID NO: 10482 - DNA, 120 bp, Homo sapiens
aaacgagggctcatatcagaggggcttgctggaggcaagttttgaggaatagagatgggactgtgaagggactcaagccaggatagggggccccccgagcacccctggcaaaggagcctc

SEQ ID NO: 10483 - DNA, 120 bp, Homo sapiens
actcgagtcctggccccaggcagaagtggggagctttcttgggagggcttggccacctcggctggggctgggtgcagagaggcagcagccctgcccctggagccttctgaagggtggctg

SEQ ID NO: 10484 - DNA, 120 bp, Homo sapiens
cagcgtttcccagggaagggtgctcgaagttgccatgcaacaccaggagggtaggttcaggtgggaggctcatgaagggctcgctgcctggatggcactgaaccacaaggaccagcagct

SEQ ID NO: 10485 - DNA, 120 bp, Homo sapiens
agccgctcgtggccagaggtcccttcctgggaacagcagtggcggcagcggctgcgctgagcctggcaatttgttcaagagcaggggatgctcaggctgcgctcgcccccttcttatgaa

SEQ ID NO: 10486 - DNA, 120 bp, Homo sapiens
gaacggtttgctttgcgtcttctctgtgccaagggctgccaggcaccagatgcccattttaggaaatcagaaaaataaacagtgtaaataaaacaaaaactccacccaagaaatctgaga

SEQ ID NO: 10487 - DNA, 120 bp, Homo sapiens
caccgtttctccacccccatgctgggtttggagagagtgggccagcatgtttcctacggataagaggccctggggtatttaacctggatggaacctcttctattttccttttgcctggtg

SEQ ID NO: 10488 - DNA, 120 bp, Homo sapiens
tgtcgccggcatcccctgcagagatgtctcagccagaagtgactccatcctcaggaacgtgtgtcctgttctttgctgggcggcccctccttaccccccattgtttccacagtggggtgt

SEQ ID NO: 10489 - DNA, 120 bp, Homo sapiens
ccccggacagcagaatgtcccagtagtgcactgatggtgtgtgcgtggggatgtgtggaacaggggatagtgaccccgtgtgcgttatatgcagtgcggcttccagtcgggtgtgtgaag

SEQ ID NO: 10490 - DNA, 120 bp, Homo sapiens
catcgtggaagtgagctcagctggggctggagggtccaggctcactgtatgccactcagcagccttgggagtggggttcatcctcctccccgctcctctcccctcctggtcctgggcagc

SEQ ID NO: 10491 - DNA, 120 bp, Homo sapiens
caccggagctgcactctgggccatctctcctggtcttaaggaggctgtcatttctgggaggcagatgctggcccttccatccttgcttcctggagatctgcgccgaggtctgcctttctg

SEQ ID NO: 10492 - DNA, 120 bp, Homo sapiens
tcacggacatggctggggcaggctgggggtgctggaggtgaattccgcagctgtgcgaccttgggcagtttgcccagccctgggcctcgcttcctcctctatgaaatggggcgggagcac

SEQ ID NO: 10493 - DNA, 120 bp, Homo sapiens
aatcggagctaaggtacagctcacagcctgccgtcagaccctcgcaagcagaagtgggtgtccctgctcagcgtcctccggtccctccttcaaggctcagctttgtcctcatctcctcca

SEQ ID NO: 10494 - DNA, 120 bp, Homo sapiens
agacgcctcctaagtctgccttccagaggtggatgcagtgcccgtggactgtgcaccaccaggcctggacagtggagagggtggctttttacagggagtgggagtggaggggatgccgtg

SEQ ID NO: 10495 - DNA, 120 bp, Homo sapiens
cagcgctgtggttaagaggggctccgcccatcgcagtcatgttgggcactaaccactggacagcccagccgctgctgtgtttctggggagcttttctccggctccgcatctgatctgcct

SEQ ID NO: 10496 - DNA, 120 bp, Homo sapiens
ccccggcggttgcttccctctgctcagactggctggttctgtgctgtcagcacttggcagccacgatcacagctcagcttggaagcctaaggcataatttgctgaatcccaaagctgcaa

SEQ ID NO: 10497 - DNA, 120 bp, Homo sapiens
ttgcgtgggactgcctgctgacacacggggtcctccctctgtgggcctctgtgggctctggcccgagacaccctttcctcatcttcttggcttctttctttctccctgcctcccttttgc

SEQ ID NO: 10498 - DNA, 120 bp, Homo sapiens
agacgccccagcatctccggcctccccatttgacactccccagacgactgtctgccatcccatcctcccagcccagcttctctgtagatccacatctggccaatctcctatgtctgggac

SEQ ID NO: 10499 - DNA, 120 bp, Homo sapiens
ggacgaaggctcttctcgaggttgtgtttgggactgggccagggatgacatttctggcaaaagcttaaatgacaccatgatcaacgctttggtcagctcacacactttctttccttttaa

SEQ ID NO: 10500 - DNA, 120 bp, Homo sapiens
ctacggcagatacagaacattgacatcattgcggagagttctatgggggggcgctggtttagatcatcttcacgttggatccacaaattcattgtttatccagtgaacggttactgggca

SEQ ID NO: 10501 - DNA, 120 bp, Homo sapiens
acccgctctcgggggagtcttccgttggctgcagagaagcttaaactcaggggacctggggcaaactctgcaagggcccttggcctctgcacccccagacctccctcgctctgcaggggc

SEQ ID NO: 10502 - DNA, 120 bp, Homo sapiens
agtcgggggccccctctaggaatggagcgccagctccagctcctgtcaggctacagcccagatggttggctgagcacgagcatgtgagagtggaattgggcccaaccgggctgcttctcc

SEQ ID NO: 10503 - DNA, 120 bp, Homo sapiens
ccccgttgtcttggtttccttccacgctgacctggaaggactcctaaagcaacaggcctgcccaggcggtttgcaccagtaaaccctgcagcggccccaagggcagagatagctggattg

SEQ ID NO: 10504 - DNA, 120 bp, Homo sapiens
atccgtcttgcttgggaggctgtaggcgggccaggctggggccagcctggagggtcttggctggctctgctggcaggtacagtagcagggtcagcaggagggagtccaggacggagctcc

SEQ ID NO: 10505 - DNA, 120 bp, Homo sapiens
tgtcgctcttgttttgtgccagatgctgttctcagcactttacaaatattgatgcatgtttgtttcatgacaaccctgtgaagtaggtagtgttaccccgttttatagatgaggaaacag

SEQ ID NO: 10506 - DNA, 120 bp, Homo sapiens
aggcgtagagggataaagggacttgcccaaggtctgtctctaccttacacgcacatgaacgctcactcatgcggcaggcgctagtttccctctgatgtgagtcaggccttgagctggttg

SEQ ID NO: 10507 - DNA, 120 bp, Homo sapiens
gaacgacccctcactcttggaggctgccggagcccctcctgcctgcatgcggccgctgccgggtggacaggcctgcttgtgggttgaggctcccagcagctggggtggatcatttctcct

SEQ ID NO: 10508 - DNA, 120 bp, Homo sapiens
cagcgtcctcctgaggccaattccctgcctcccccagcgcaggcgcgaagccatctttgcttgtgtgtttgccacagacagtggagggcggtgcaatcgtgacgcctgcttgttgcactt

SEQ ID NO: 10509 - DNA, 120 bp, Homo sapiens
ttgcgtccttgaggacgttgacccctggccggtgctgggcgcttgctcttcagtcatcttgccctgacctggcgtggcaggcccgagcactgctcttttacaaggaaacaggctcagagg

SEQ ID NO: 10510 - DNA, 120 bp, Homo sapiens
gcccgggctcccccagccaataattggctgagccaggatttccatccagctctgtgactccagaagtccaagttcttcccatcacgtcagggccaggaaaggattagaatgcttttctac

SEQ ID NO: 10511 - DNA, 120 bp, Homo sapiens
ctacgtgccgattatttggatgatctgtgcagcttagctcgttgtagttgctcaataaaaatgtggaatgaatgggcctatatgtcccattgtgtgactcagagccaatgactctggctg

SEQ ID NO: 10512 - DNA, 120 bp, Homo sapiens
ttccgtggcccagcatctccctttggggtgtgtgaccttggaagcagtgactctctccatcccaccttgaatggtgtctgcgccgcagcaggggagcagctggggattgccagcgcctgt

SEQ ID NO: 10513 - DNA, 120 bp, Homo sapiens
gtgcgccagatcccgtcttggatgtgtgggtgattgtcagccacatgtgtgtgaagggctgtgcgtgtaggatttgtgcaaatgtgcccctccctgctgccagcccatgggaggctgtca

SEQ ID NO: 10514 - DNA, 120 bp, Homo sapiens
tcacgtggctgcaggcacagcccccaagtggatggggatcgtgggctgaatgtgcatcagatgctcctgcttcttggtgggtggagaccctcaacccatgcaccgtggctgccgcatctg

SEQ ID NO: 10515 - DNA, 120 bp, Homo sapiens
tcacgtttggaagaggcgacactgtgtctcagcctcattcatttctccatcctacagacactgcctggtgcccagcccgcaccgcgaggcttcctaagcagctctgggcaccgtgcacct

SEQ ID NO: 10516 - DNA, 120 bp, Homo sapiens
acccggtggggactccgggctgagctcctgtggctgtggaaccttggtggtttattgtggtggctgagaacagggacgtggggttggacgggttgagtgtaactcccagtggctccgtga

SEQ ID NO: 10517 - DNA, 120 bp, Homo sapiens
ctccgcttcctgatggaaaaatgggggccaggggggagcgaccttgaaggtattcgtgggaaccaagcgaggtgataaatgtagtgtccttggtagagaactggacacagagtccacccc

SEQ ID NO: 10518 - DNA, 120 bp, Homo sapiens
aggcgctgagcagcctcaggagacacaaccctaggaaaaggctcatgcaggctggctgtcatgacggactgttggtgggagaggggaaggcgccgtggtaggggaagctttggaaacatc

SEQ ID NO: 10519 - DNA, 120 bp, Homo sapiens
tgtcggccagacgtccagaagcatcaacctggtggctgggctgtggggggacctctctggacaggcagacaaggtgtcggaggaaggggctgacactcactcagtgtctgtcatgcactg

SEQ ID NO: 10520 - DNA, 120 bp, Homo sapiens
ccacgccacctgtggaatcttccaggtgtgggggcagatggggaagcaagggggcttgaagacacatgcgctcattaaatgtccttaaatcccaagaagaagaacaaggacacatccaca

SEQ ID NO: 10521 - DNA, 120 bp, Homo sapiens
caccgtccatctatccctccttcgcctggccatgaatccattttatttttattttttggtgcatttcaaagtaatttcaggtcatcctgattatctctggaatcactgtcagaaattccc

SEQ ID NO: 10522 - DNA, 120 bp, Homo sapiens
ccacggggtctgcacccaggagtctgacacagagcccaggcctcagcacctggcgatgttttgggggtgtgagcagcccagcctactctgggcacgtgtttacttgctgttccttctgcc

SEQ ID NO: 10523 - DNA, 120 bp, Homo sapiens
gggcgagggacatatcttgaagctccccacagcaagcaaacagttttgacttagactgcatatttacttggggcaggtgtggtttcaaaaagggtcaagccaaaaaaaattggggcagga

SEQ ID NO: 10524 - DNA, 120 bp, Homo sapiens
tagcgaagaggcagaattaaggcagctaggggtgaggccacaggcagtaggcccggctcattcttccctctctctctaccgtccctttcccacacactctgcagaaggtggtgttgtctt

SEQ ID NO: 10525 - DNA, 120 bp, Homo sapiens
ggtcggggccagggctggatctgcccctggtcttgggactccctcttcagctgaagctgagtatgtccagggtggtcttgagccaagggtcgaagatgaaggcccttgccctgcctccct

SEQ ID NO: 10526 - DNA, 120 bp, Homo sapiens
gggcgtctcttcctgggggctttaccaggtaagagagaatgatgttcaagttcatgagcacaacattggaaacagctcaagggaggcggcacattttgaggggaaggaaacctctgggag

SEQ ID NO: 10527 - DNA, 120 bp, Homo sapiens
atccgagccaccttaatgctctaatgccacctttgcactacctccctctaggagaagactcttccacctctttttgcctgaatggcctttgggcacaaggtcagaggctggatgtggacc

SEQ ID NO: 10528 - DNA, 120 bp, Homo sapiens
ggccggttgttgaccgttaactggcacactactggaggagggaggttcagactgattcgcagagagactagaggtagaaacgcaccatggtttggatgctgagggtgagggaaagagagg

SEQ ID NO: 10529 - DNA, 120 bp, Homo sapiens
gcccggagacttggcttgagcaactaggtggatggtagcaccgtttcctaagatgaggggctgtgggaacttgaggggctgtggaaggctctgccactgacggacccagggctcggcagc

SEQ ID NO: 10530 - DNA, 120 bp, Homo sapiens
ccacgcagagataagaccatctgggccctgcccttgggaagtctctgtctatgaggacacagcctgccacctaatggggtgtcccgtctggagcctcagtgttgctgggagaaagcccct

SEQ ID NO: 10531 - DNA, 120 bp, Homo sapiens
cttcgctctccgagcctcttttgcttccctgccagctgagcctctccatggaggctgtgcctggaggggggtcatggatatggatgtgtgcgccaaacgctgcttcctcgtggatttcct

SEQ ID NO: 10532 - DNA, 120 bp, Homo sapiens
ctccgttcccacgctttgtaagcttcatttccccggggcctgacctgtggggtttctctccagacctgctccttcccatttccagaaaggcgtgcaggggtttcctatggctctcttccc

SEQ ID NO: 10533 - DNA, 120 bp, Homo sapiens
ggacgggtgggctacccacagggtttgtgattgcttagacatctttgctgtatgaagctttgacctcaaggcatgatgcagatgggaataaggcacgagtttctcctggctgctgtaaca

SEQ ID NO: 10534 - DNA, 120 bp, Homo sapiens
ctccggtctctgcctctgtcttcacaaggcctttttctgtgtctctgtactttcttttctgtctcttagaaggacacagcattgaatttagggcccaccttatcttgagatccttgccta

SEQ ID NO: 10535 - DNA, 120 bp, Homo sapiens
tgacgcttcccattaaagctccacctaagaaccccctttgaaagttactgattattcatttattcaacaaatattcactgtgcactagcaatgtaccaggcactgtgccaagtattgagt

SEQ ID NO: 10536 - DNA, 120 bp, Homo sapiens
caccggcccactgtaggtctcgttgtgcactgaagacgcaggcggtccctttggccaggcctgcagtcggtcttgccttcttttgtgaccgtggaagaatgcaccttgctggatgcacag

SEQ ID NO: 10537 - DNA, 120 bp, Homo sapiens
tgccggcgtgcatcttctctgcccagtgccccttctgggactgtgtgtccaggccctgaggccctagaaaaggggggtggagggcctcctcactatcctgtagcaatgaggcctcattaa

SEQ ID NO: 10538 - DNA, 120 bp, Homo sapiens
gctcgggatatgattaaagggctagagaaagatgatttaggctgagaaagaggaggccaaggagcaactggattgtccttgaatgtggaaaaggtaattatgacttgaagggtggtgccc

SEQ ID NO: 10539 - DNA, 120 bp, Homo sapiens
atacgagggtgaacttcctggctgggagtatggccaagccctgatttgggtttcctgaaagagctcggggaacctccttacctggaggtttctaggcctggtcatgtggctctgagtgat

SEQ ID NO: 10540 - DNA, 120 bp, Homo sapiens
agccggtgggctctgagcacagtcacgaaggcatgcgcactttctggctgctctcctgccattgtcccttgggttcccattttggtgaggcgtgcaccctggcggcgctccccagggaac

SEQ ID NO: 10541 - DNA, 120 bp, Homo sapiens
gtgcgtggagatggagaatgtacaattggctgaccctgtgctaatctggtggaactccatgccagccctgggaaagaacaattgcatgggtgtgtccacactcaccaggtgctttttaga

SEQ ID NO: 10542 - DNA, 120 bp, Homo sapiens
actcgagaataatgctgtggcttaggatggctgttgtgccggacccggcatcttcccaggggggctgtgttgttgggctgagtttcttaggtactggacccccaaatccccaaatacggc

SEQ ID NO: 10543 - DNA, 120 bp, Homo sapiens
cggcgtggacaggtggcccagtaggggctggactatccgataggcccaggtgctggagttcagacaagacataccctggcctggcgtggaagatacggggtgctattaatggcagcaatg

SEQ ID NO: 10544 - DNA, 120 bp, Homo sapiens
aggcgtgagccgccgcgcccggccacacgtttctgttcttgaacaggtggctccctgaccctgggtgtggttactccaagaccttgctctggtggggcacaattctggccccaggtaggg

SEQ ID NO: 10545 - DNA, 120 bp, Homo sapiens
gggcgaccgtataacttactgtcccttgggggacacgttagtgaaagggacccttgaatgactacggtgggacaacagatgtgagctgggtttgtcccaggaaggctggatgtatgggcc

SEQ ID NO: 10546 - DNA, 120 bp, Homo sapiens
tatcgatggttttattccctgaacatgctaagtgatccccatgtagtataagcatctcagaaggcaggaaaatgtaatgaacaacacccaccgccattcattccatccagagatcgttat

SEQ ID NO: 10547 - DNA, 120 bp, Homo sapiens
gcccgggtgtgagtgtgtgtgtgcgtgcaaactgcacatgtgtgtatgaaatggaattaggatctttgtatacatcttgtgtcctgctatttttacttaatattctcggcatttctcatc

SEQ ID NO: 10548 - DNA, 120 bp, Homo sapiens
ctgcgggacagatttccctgcctgagcctcctggttgcccataccctggcctcccaaagcccagcctgaagccttaggcaccctacaacctgcttcctctagcagcctgccctgtctctt

SEQ ID NO: 10549 - DNA, 120 bp, Homo sapiens
tgccgatgttcctgaaactttcctgcctctccttacctcttggccagagagagactggagaccctgtgggaacccccgaggggagggagaaggccgctgtttgaacggaggtggtctttc

SEQ ID NO: 10550 - DNA, 120 bp, Homo sapiens
aggcgggtcacacttgcaggcccagcctcctgctgtggcagcgcttggggtgtcggctgcctcctgggcacgagttgggagctgagggaggcgctttcaggaccggagtggcaacccagc

SEQ ID NO: 10551 - DNA, 120 bp, Homo sapiens
gcccgtggtcagcagcagccgccgcagggaccccggcgctgtacctgtgccccagctgacccctcccgcttccctagggtgggccggggatggtggtctgttgcccagcccaggaagaag

SEQ ID NO: 10552 - DNA, 120 bp, Homo sapiens
ggccgtaatcagcagcagccacctcaggggaccccagcgctgtacctgcgacccagctgacccctcccccttccccagggctggctgggaatggtggtctgttgcccagcctaggaggaa

SEQ ID NO: 10553 - DNA, 120 bp, Homo sapiens
tcccggtccctcccccggtgctggtctaactgcaggcctgccttaggccgtgccggcacctgctgactgacgcttagcggatgctgataggagagggctgggatggggaagcagcaagtc

SEQ ID NO: 10554 - DNA, 120 bp, Homo sapiens
tcccggtcactgtgggctcgggttacagatggttgaggcacctcctggccatccccaggaagcaaggccccacgcagcctccgactcacccactgcccgtgtgtatttcaggaggctgca

SEQ ID NO: 10555 - DNA, 120 bp, Homo sapiens
tgtcgctgcaaaaccacccattgggtgcggtggtcttctggtggggggcatggctggggaggatgcggtggaggagaagccagctccgtggttggggggagggcggactatccgtttcct

SEQ ID NO: 10556 - DNA, 120 bp, Homo sapiens
tcccgtgtctcctgggagggcgacagcctggtcaggctgcagggcaggactggaatgcagacccctgcttggccatgctgttgcctggctgctctgtctggggaccttctgttcaggaag

SEQ ID NO: 10557 - DNA, 120 bp, Homo sapiens
aagcgggccggacagcccggctcagtgattggaagctcagctccccatgttcagtccagcaggaagtttgcctcctcggaacacttgcgtgcttctgcatgtgtcttcttggctggtggt

SEQ ID NO: 10558 - DNA, 120 bp, Homo sapiens
gcccggcgtccgcacagggtctgctggtgggtggctgaggctgcggtgaggtctccatggctccctcgtcctgcacatccttcccttgttgtgttgtctcgctagcatatgagcccgtac

SEQ ID NO: 10559 - DNA, 120 bp, Homo sapiens
tgccgactctcccaggcccggctcacctctcaggagaggactgtggcctgggttgtgctggcatcagagcccggctgtgtgggtttacacagtcactggacacccggctcgagggtgaag

SEQ ID NO: 10560 - DNA, 120 bp, Homo sapiens
cctcgggggctgcttggcagggatattgccgggaggtagcccaggcactgctgaatctcagactggagagcctcgtgcctgggtgggaggggccccatgtgcagaccctgctggtctctc

SEQ ID NO: 10561 - DNA, 120 bp, Homo sapiens
ctccggagagacccctgaccggcctcccatcctctccccagggcagagcggcttgggtaaatccaccttaatcaacaccctcttcaaatccaaaatcagccggaagtcggtgcagcccac

SEQ ID NO: 10562 - DNA, 120 bp, Homo sapiens
gagcgcatccccaagaccatcgagatcaagtccatcacgcacggtcagtggccgggagtgggctgggggtgcaggacgcccctgccttcctggagcacaggggttgggggtcaagaccat

SEQ ID NO: 10563 - DNA, 120 bp, Homo sapiens
gggcgggctgggggtgcaggactcctctgccttcctggagcacagagtggggggtcaagaccatcacacacagtcagtggccgggagtgggctggggatgcaggacgcccctgccttcct

SEQ ID NO: 10564 - DNA, 120 bp, Homo sapiens
acacggtcagtggctggggatgggctggggatgtgggatacccatgccttcctggagcactggtgcggtgtgagggtgcccgagtcaggcaatcccaggtccccaagacggggactcgct

SEQ ID NO: 10565 - DNA, 120 bp, Homo sapiens
tcccggacccctgtgggccccgtcacactgagctccccacagacaactgagttttccaccaaaagtctgacaggcaaggggctcccaggggaaccgtcaccggcctgtgccggagttggc

SEQ ID NO: 10566 - DNA, 120 bp, Homo sapiens
tcccggtgtctccttggttgtcatcgctgcctacctggggttgccccggggtcagtcaggtgtggggtgtctgtgagggtcttccgtctcccctctgactctgcgtccgtggctctgtgc

SEQ ID NO: 10567 - DNA, 120 bp, Homo sapiens
aggcgtccggatgaagctgacagtgattgacacaccagggttcggggaccacatcaacaacgagaactggtgaggcccctccagggggaggagcactagcgggggcttcagggctccctg

SEQ ID NO: 10568 - DNA, 120 bp, Homo sapiens
tcccggcccgcgggggtgcagggcccacctcctgggacctgacatgctgccaaagccgcacgtctcaggggcctgaaaattctggaccaaagcagaattacctggggaatcttgctgtcc

SEQ ID NO: 10569 - DNA, 120 bp, Homo sapiens
gcccggggaggctggtttgggaggccgagggtaaggctgtggcatctccgctcagcaagccagacctcccagggcatgcatttcattggaaggtggggtgttgggctctgagtcctggga

SEQ ID NO: 10570 - DNA, 120 bp, Homo sapiens
gcacgacctgcttggggagggcatctcatgtgcctgctgactcgtccccatcccccacgcagctggcagcccatcatgaagttcatcaatgaccagtacgagaaatacctgcaggaggag

SEQ ID NO: 10571 - DNA, 120 bp, Homo sapiens
aaccgcaagaagcgcatcccggacacccgcgtccactgctgcctctacttcatccccgccaccggccactcgtacgtccctgcagtgtcggcgtcctcatgccgggtgccctgggttccc

SEQ ID NO: 10572 - DNA, 120 bp, Homo sapiens
aaccgaggtgcctgggctgcggcaccacatctgcctcggtgggtgtgggtggggcctgtaacctactccgtcctggggccaggtgtcagggaccttcccagcatgtgcaggggaagacag

SEQ ID NO: 10573 - DNA, 120 bp, Homo sapiens
tgccggaggctacacacgggctgtggtctgtgcctgggcaggcgagcagccgctcactgggatgtttctgttgcacgtacccatgtcgggctgctggcagggagctgagaggttactgca

SEQ ID NO: 10574 - DNA, 120 bp, Homo sapiens
aggcggggcccctgctggaactggggactgtgacgagggttttttaggaagggtttcaggaggggaggtctcggtaaccctgagtactttcttggggctgtgatgagcaggagaagagag

SEQ ID NO: 10575 - DNA, 120 bp, Homo sapiens
ggacgatgaccttaagcccctggggagttgcagcgtcgctcaggacagcaggtgcacctgcagctgcccctcttccctccaggaggcacaggagttggaggtgattggtgtcacagcccc

SEQ ID NO: 10576 - DNA, 120 bp, Homo sapiens
gcccggggacacagccaggtggagagaacgtgcgatcggagcccaggggctgggctagaggcctgctttgctgtgtgtgcttgggcctggggttaacggttggagcctcagtgagctcat

SEQ ID NO: 10577 - DNA, 120 bp, Homo sapiens
ccccggggcgggatgaattctgacccaagccaagagccaccgtggggccagcgcccacctgcaccaggttctatatccgccatcacattagctcccccgagagccctgaagggtgggccg

SEQ ID NO: 10578 - DNA, 120 bp, Homo sapiens
ccgcgcctgctccttttccgggtccactgagcggctctggagcccgggtttgtgtttagccgaggctctccccgctgcaccctctgccttctgctcccagcagggcgctgcagcatcgtc

SEQ ID NO: 10579 - DNA, 120 bp, Homo sapiens
gtccggttttaacagggtgaggcggctcccacagacatgtgatgcagaaagtcctcgacacccccagccagctctccgtgggtccagtccagggccctgccccacggcgcccactgctgc

SEQ ID NO: 10580 - DNA, 120 bp, Homo sapiens
attcggagaagttgcagctgattcaatgctgagagcccatcagagaaaacatcttccttccctttcaaagaggacagctatgcataatcagaatacaaaggggtataaataattaaagcg

SEQ ID NO: 10581 - DNA, 120 bp, Homo sapiens
ggtcgctgcacgggagctgtgcacgctcctcaggacgctcaccgcctcctcttcgggcaccaggggtggcggcatcggcctgatcagccagtcctggcacgtagagcagtgccacggcct

SEQ ID NO: 10582 - DNA, 120 bp, Homo sapiens
gcccgggaccagaaggaaatgtaagtcctctgaaggaaacggccacacggaggagccagcagcagtctctcccagcagatgagctgggaggtggggacccagtctcaggcaggtgagtgg

SEQ ID NO: 10583 - DNA, 120 bp, Homo sapiens
caccgagagtgagcgagggctgccagcacactgtcacctctcagcagcatacaagggccacctgggaagtggccactgaatctgggctcaggctataggccccctctcttgatcttcaag

SEQ ID NO: 10584 - DNA, 120 bp, Homo sapiens
gctcgggctgcgagcagccattttggaacatgtgaaacggattttaaattccctctttgcagtttgagaagatggcggcctgaaccggagtccttcttcccctcctccctctccgctgct

SEQ ID NO: 10585 - DNA, 120 bp, Homo sapiens
ccccgcaacgttcctcgtctgtaatggtgccagaggctttaaatcttgcagaagccacatctgctgcctgcaggtaaacctccctggctgagcccactgcgcacgcctccacgttctgga

SEQ ID NO: 10586 - DNA, 120 bp, Homo sapiens
ttccggcagcatctctcctcccggtcatttgcatagcacaacctctccctccaccccctcctgtctcccacgtggatcttcatgtaattaattaatatcgcgttcatcagagcttaattc

SEQ ID NO: 10587 - DNA, 120 bp, Homo sapiens
ctccggcttttctggtctgggagcaaatataatgagcctccatgaaaatattgaatcgcttcccgcagtctccacacctcagagcactggcatgtttactgtggtaagccacccctgtgt

SEQ ID NO: 10588 - DNA, 120 bp, Homo sapiens
tcacggcctgctttcctacaggggtagccatgctgggggcctctctggagcctctcctaggagtgcattcagcagggcagaggctcggagctcttcccgggggtacattcagcagtggca

SEQ ID NO: 10589 - DNA, 120 bp, Homo sapiens
aatcgccctatagaacaaggagaaaaggaaaggtgggcccttcacggtatatattttgctctttgattggaacgaaatgaactcagtgtaacgtccaggctgttgtgggggctgggttgt

SEQ ID NO: 10590 - DNA, 120 bp, Homo sapiens
ggccgcgtctgagttcggggcatccacactggcacgctgttttgctcggagctgggacataacacgtgggctgtgtgagcgctcttgggggctggaaacccaaggggccgatcaagggtt

SEQ ID NO: 10591 - DNA, 120 bp, Homo sapiens
gaacgcgtccctggggccttcaccctgtcgtgaacaaagcacgactattttgtaaagggaagatcaaagagccagaagtcgcggatgagtgtgtggcaggtggggactcagagtgacagt

SEQ ID NO: 10592 - DNA, 120 bp, Homo sapiens
atgcggtgtgtcccgtggtcgccccagaggcggatgggccaggccgctgcacataccctgggaggaggcaggtggggagggaacccgaggaccctgcctatgttcacccctctgttcctc

SEQ ID NO: 10593 - DNA, 120 bp, Homo sapiens
ccccgaccccctctcgtggtcgccagggtaggggtgggaggaatctggaagccacgtgcgatgctcggagctgcgtcctctgtcctggggcgtgggtccgcgagcgccgcgcagcctccc

SEQ ID NO: 10594 - DNA, 120 bp, Homo sapiens
tcccggaccgccctgagctgctgcgcccggcgctgctcctccttccccagctccgcgccttcccctcgcgatccccctcctgcctcttcggtcctggaagcgtcccaagatggggtgggg

SEQ ID NO: 10595 - DNA, 120 bp, Homo sapiens
gcccgggggcagtgccgccaggaagtgggacggggactctggcgcccctccaggctgctgcgcgcgggctggggaccgtgcaccgctttgcgcgccagacgatgcatcttctggaacggc

SEQ ID NO: 10596 - DNA, 120 bp, Homo sapiens
atgcggggtgtgaagtggcggcgggcagaggggctcgcaggggctgggatccgcgtgcccctctctgcctcggtgcggagcacgatgtgcccgggcgggggcgaggacgtccgggagggg

SEQ ID NO: 10597 - DNA, 120 bp, Homo sapiens
ctgcgcacgctcgcggggccgtcgcagatgggcggtttggaggcgctgcagtccctgggaaatgggagcctccgtcctgttctctctgctgcttggctgggctgggctgggcagggcagg

SEQ ID NO: 10598 - DNA, 120 bp, Homo sapiens
ctccgcgctggctgttccgggggcccgggagggcagagctgtcagaaggtctgtctggcatcattaggggagctgtctgtctctctatccctggctggcgtggcccggcaggaggcgagg

SEQ ID NO: 10599 - DNA, 120 bp, Homo sapiens
acccggggcagttgcacagagtggccatcgggtgtcagtgtggaattagaagccctgcctgcgttccttcgctcagctgcttggctttgagttagatgctcctggaagctgggcccgcag

SEQ ID NO: 10600 - DNA, 120 bp, Homo sapiens
gaacggggatggagccgtgaggattctcccttaatttaatggccccgtccactgagctgagaacatggctgtgatcctcagcttgggcagttcctattgtattgaggctttggagtgctt

SEQ ID NO: 10601 - DNA, 120 bp, Homo sapiens
ttccgtggccaaggcacatcaagggctcagccaggtggagacccgcgatttgggcccgtggggtggagctgatccctgggcgacctccagtccacaggccatggcccagagggcaggaga

SEQ ID NO: 10602 - DNA, 120 bp, Homo sapiens
tttcgtggcccctcaaccaggcctgggatggctgttttgtctgagcacaccagtcttgcccaagtctgaatgttcagccctccttgtgcccaagatcctctgcaggggaagagaaaaaga

SEQ ID NO: 10603 - DNA, 120 bp, Homo sapiens
gagcgagagcgagcacgcccgggagctgggcgcccgggagctgggtgcccgggagctgggcgcatgcacacttagcatgtcctctgcgtacccagtgcagccgctgttaaaaatagaact

SEQ ID NO: 10604 - DNA, 120 bp, Homo sapiens
tttcgagtgtaagacataataacatgttcatcatggaaaataattagcggtggagtggggccgggatggcctgctgcctgcctgcctggctcccccctgcagccgagagggaggggtggg

SEQ ID NO: 10605 - DNA, 120 bp, Homo sapiens
gggcgccagggcttgatgtggttttcactgggagagttggtgacttacgactaatactcaccctgccacccagcccctcccttagcctgactggccagccaggccctctcccaggcatgg

SEQ ID NO: 10606 - DNA, 120 bp, Homo sapiens
ccccgagccccctccactctgtcctgggccagcctctcctttttggctcctccaagtgggcagtaattggctgggctccagctgggagcctgggttatggttgacacacatttctcactt

SEQ ID NO: 10607 - DNA, 120 bp, Homo sapiens
tgccgagtgcgggcagccgctgcgcaccttcacaccgtttccttggaaaccaaattgctttggcagcattccacggacacacacacacacacacactctcatgcacatgtgtgccccacg

SEQ ID NO: 10608 - DNA, 120 bp, Homo sapiens
aagcgtctcctagaagagccggcgtctgctgaggtagcagattgagcaagatgtttatgggcacttagatgggaaaatggctcctgagggtgtgaggagagcagccagctcatgaaatga

SEQ ID NO: 10609 - DNA, 120 bp, Homo sapiens
ggacggggctctggaagcctcccagcatcctcggagggggctttggtccagatccgtgtccctgggggcgaggtgggctgtgcaggaagggcctctgcagctgctgcgcccctgcccacc

SEQ ID NO: 10610 - DNA, 120 bp, Homo sapiens
gcacgccccaggtagaaaacatcgtagcaggaaatacttgggaaaaggctgtcctcgccctgattgggggatgtccaccgtcacccgctccagtcctgggaagctcattcctcctgctca

SEQ ID NO: 10611 - DNA, 120 bp, Homo sapiens
tgccgccctccacaggcagcttgcagcccacgctggccggtgcaggggataaaggcctgtgcaggagataaaggctgggatgccaagagtcaactggagcaaccttcctcacctcctccc

SEQ ID NO: 10612 - DNA, 120 bp, Homo sapiens
gcacgcggatctccatctctgactcagctccccaatgtccttcagctaaccgtgaccttccttacttccatcccttcttccgtaatcctttaaacagctgctatgtgctgagcactgtca

SEQ ID NO: 10613 - DNA, 120 bp, Homo sapiens
gagcgtgtgttctggtcagcacaggtggaaaagaaacagtaaaaaaaaaaaaagagggcaagaagtgcccccgcagggttgaaataggtgctgtgctagcaattgccaggggtaggggct

SEQ ID NO: 10614 - DNA, 120 bp, Homo sapiens
aggcggagaatgggagtgtttcagggatgcaggtatgagcctggtcctagcacgcatctctaggtggggacagactcctctcagccaccccattgcccagtgatagttcctttgcactga

SEQ ID NO: 10615 - DNA, 120 bp, Homo sapiens
tttcgactgccctttcatggtaacgttggttcaagggaatcctgtgattccccaaatgtggggagcaaatcgagtcaccatgagtcacctccccaggctgatgtcttctctggcacatgt

SEQ ID NO: 10616 - DNA, 120 bp, Homo sapiens
ccacgggggagccaggatgggtctccttcctcactccatctgctcgctgggtcttggtctcaggtgcctcttcccttcactgcctgtcttttattcctctgtctaccctctcctcataca

SEQ ID NO: 10617 - DNA, 120 bp, Homo sapiens
gcccgtgggaacagcacaggtgaggggatggctccaggcagccaagcacgtggaaggtgagcctggcccccagagaggctgtggcccttctgtctccacccacctgtgggcaccacgagg

SEQ ID NO: 10618 - DNA, 120 bp, Homo sapiens
tggcgtccatggaggaaagggtgaaactctcggtggtgctggggtcccaggcagcacgggaccttcgtggatgggatggcggacattctgctacctgctccgttccccgggatcacacct

SEQ ID NO: 10619 - DNA, 120 bp, Homo sapiens
tgccgactccactgtggactggattttgagaagcctcctcctggagggctgtcacgttcccgcggggcctctcctgccctgcaaaggctgtgtggggccttctgtgcatggcgcgtgggg

SEQ ID NO: 10620 - DNA, 120 bp, Homo sapiens
tggcgcctggggccacaaggcagagatcagctgaacctgcagcttctgctgccctgcccaccagcccccatgttcaccccaccctgattacgatcttctccagtgcctagtgatgccctt

SEQ ID NO: 10621 - DNA, 120 bp, Homo sapiens
gggcggcctggaaggacccacatggaacagtgggcgggggacagtgccgggacccctggctctggcagtccaccagatccggtgggctagagggccctgcgtgtggtggccacaccgccc

SEQ ID NO: 10622 - DNA, 120 bp, Homo sapiens
aggcgggcagataagtttggccttgatctttaacctcctgatccttgcccaaggaaattgtaggagcccccaaagccagaataaacttctccctcttcttctggatgggcccatccactg

SEQ ID NO: 10623 - DNA, 120 bp, Homo sapiens
ctgcggccagccatatctttattattttaagcaaaaaaactaaagctctggccccgtctagaacaagaaccagaggagaggcttatagagttgtgtaagccttggggggcagtgagagaa

SEQ ID NO: 10624 - DNA, 120 bp, Homo sapiens
ccccgaccttccaccctctctggacagaagtggctgctgagggtctagagagtgccctctctccttgcattaaccccatgcagagtgagtccccgcaattaacgctgccaccccctgaaa

SEQ ID NO: 10625 - DNA, 120 bp, Homo sapiens
gagcggggttcgggtgtggaaaatcttcccggatcttcatctgcggcggcccctgccccacccccactgcccctagccatgggagcccgaataatccttgcgaagagaggataattaatt

SEQ ID NO: 10626 - DNA, 120 bp, Homo sapiens
cctcggccctttgacaagggagaggaggggaggcgggaggggaggcgagggccgagcggggccgcgaaggaggctgttggaataatccccatctcagggcaacatctttccagccctaat

SEQ ID NO: 10627 - DNA, 120 bp, Homo sapiens
ctccggggcattatccctgcatgcgttgtcgatggcggccaggaaaagggcgaggccaactttatttctgaatttggactgacttaaagaagtggcatcacatttgaagggcacccaatc

SEQ ID NO: 10628 - DNA, 120 bp, Homo sapiens
aatcgctccgttgccctcgctgcatgaaattgtatctgcttgccacttcctatctcgccgggcgcagctgggctgtaagtcattggtgataacattctttattatgccgtcgtgtttatg

SEQ ID NO: 10629 - DNA, 120 bp, Homo sapiens
catcggggaggagggggaagggggagcaaatgttagttgccagggcaacgatggggctattttgggcatcggattttgcggatgatgaaaaccattttcctgcaacggttggactctccc

SEQ ID NO: 10630 - DNA, 120 bp, Homo sapiens
aggcgataaatgcacagtgaatatttaggaaggggatggcttaatttcttaattaaaaattatgatcttttcctctctgcctcctttaaaaacggataaaaaaaatcgaagggtgttgag

SEQ ID NO: 10631 - DNA, 120 bp, Homo sapiens
aggcgagctttcgttctggtggaaggagatgtgtgaataatgcactcactttactgatgcctgccacctcccccatcaggctcatccaccgcctttcacctacgccgacttaactctgat

SEQ ID NO: 10632 - DNA, 120 bp, Homo sapiens
ccccgagccccagacctcagcctaatctcaaaacctccaggtgtttataagcaagctgaattccaatgagtctcggggcaacttggcttccgacgagatggctggaagatggctccatct

SEQ ID NO: 10633 - DNA, 120 bp, Homo sapiens
ggacgatgccctcctcctgcccctccatctgagacacaggcttcccggaggagggattcgccctctgcaggcactgggctgcttatgtaagcctggtcagctccacacccaaaaggaggc

SEQ ID NO: 10634 - DNA, 120 bp, Homo sapiens
aggcgaggctggtgcccgtctggatttgtgactgtgtcccgccatcccacgtgctgtgtctgtttccatagggtggaggagctaatgggtttcaaccttgcctcctccctgctgtttcct

SEQ ID NO: 10635 - DNA, 120 bp, Homo sapiens
gaccggcagccacaaccgcagcgtcacctggggatttgtggaaaatgcaaaatgtaggggtcccactccagacttgctgaatcagaactagaggcaggttctaaggaagcccctgcaggt

SEQ ID NO: 10636 - DNA, 120 bp, Homo sapiens
aaccgctgtgttaaagacagatggtgcccaggtatgcattatcctgcccccttgcctgccacacgccctgcctcatagcctgcaggtgctcgataagtgggtgtggaatgaatggatctg

SEQ ID NO: 10637 - DNA, 120 bp, Homo sapiens
tcccgccagctcccagccactgtccttcctccccaggaaccttccgctgtgttttttgcaaagtcaggctctcctaactctctctcacaccccttcctgttcaggctccaactttctctg

SEQ ID NO: 10638 - DNA, 120 bp, Homo sapiens
gctcgctgtccacaggactgtccaagtaaaggttcccctcaacaccaccccttccctcaaccccgtcccaggtcaccactcagaatgacagcgctaaccctttctaccctgctcaaatcc

SEQ ID NO: 10639 - DNA, 120 bp, Homo sapiens
aagcgttaaactctcaatcctcttcaaagctcattagccagagaaagctacacatcaaattgattttaattctccgggttctggctaacgcaatgacttcaggccacaggcggggagggc

SEQ ID NO: 10640 - DNA, 120 bp, Homo sapiens
ctgcgcagtcccagggccaggacgcagggcgagccttgtgctccccaggggcaggatgggggcggagggatggaggaggtgctgagcccacagcagtctcccttcccagggccctaccca

SEQ ID NO: 10641 - DNA, 120 bp, Homo sapiens
tcccgccactcataaagagcctgaaagatggaaaggatctctctcttattcttgtaatatactttgcccagaattcatgatgaaatacattttctccagaacgttttatgcagttaatgg

SEQ ID NO: 10642 - DNA, 120 bp, Homo sapiens
aaccgactgttgtcagaccattctcagtgcctcccctaaccccagtatttgtgctgaagatggtgggaactcaatttgcccttccagaatatcgcagagcctggccccagcctgagcaat

SEQ ID NO: 10643 - DNA, 120 bp, Homo sapiens
agccgcctgccttggggccggaattttccatggcagtaaatccatctcttctgagaggtggtggcacagaggacatgagcgaggtgccagcgtcagtgcggtgtttactgcacagataga

SEQ ID NO: 10644 - DNA, 120 bp, Homo sapiens
ctacgaaggtcactagaatgtcagggaatttatggatgttttatagtacatcgtgctggcgagcaagataacaggattctgttcctctgcacccagtgccgagagacacccagagtggga

SEQ ID NO: 10645 - DNA, 120 bp, Homo sapiens
ccccgcctgctccaccccgcccaatcctgctcatttatgctcgtgtgtattctatttgtccgtgtgcatgtagaacatatgttactccaggcaggggaggggaggttcaagtgtgcagaa

SEQ ID NO: 10646 - DNA, 120 bp, Homo sapiens
tcacgaatctgtttctgcttctactgttagggctaattatttcttggttttacgtaagagatgctgtcttaattaaagctggtaaggtcctgggtagattatagttctagattctagcat

SEQ ID NO: 10647 - DNA, 120 bp, Homo sapiens
gaccgtttgctgaatgtgctttcatgttattagagttttgggggaaagattttgaatgttacctcttgtgcatctcagaggagagctgagtttggctggcttctctgggagtggtcccta

SEQ ID NO: 10648 - DNA, 120 bp, Homo sapiens
agccgcctgcttcctattgttgacacacacttctgccttcttacgggtttcttctgcccaggcactggttggatcctctcgaatttaagtcatgtgtttattcattcatttgcccaacat

SEQ ID NO: 10649 - DNA, 120 bp, Homo sapiens
tgacgtggctctgggggacacagatgggaacaacacaaagccagtacccaaggagtttctatctcataaggcactggaaccactgttgctaagtcacagccagcaagtcccggcaactgc

SEQ ID NO: 10650 - DNA, 120 bp, Homo sapiens
ggacgcttccccagctacaagtaccaggccaggagcccaagctctgccatggtactgttcctcttggcatttcccttctctccttttagcttcagccacgctatctgtaaaagcattttg

SEQ ID NO: 10651 - DNA, 120 bp, Homo sapiens
gtacggggttggcatggaggggaatttggagatgacggaacattacagggaacaaaagtccatggaaacaaacaaccgggggcagggaaaccttcatggtaggatgccaaggaataaata

SEQ ID NO: 10652 - DNA, 120 bp, Homo sapiens
catcgccccgcatgccgtatttcaaacaaagaatacacaacaaagggccggccggcgcggggatttgtcagaattcggcggtgggagagatttatctaagctgagtggaggggcctgtga

SEQ ID NO: 10653 - DNA, 120 bp, Homo sapiens
aggcggctgttgaagacgaacaaagagatgcttgtgattatcattatttaatataatggccttaaactgttaggagggggaattaagtggcacaagagaattgttttttattccaggaga

SEQ ID NO: 10654 - DNA, 120 bp, Homo sapiens
aggcggagggagggagaggctggagagatttctgagatgaagtaggagagtgagcgagcctgcagaggcagcaggcggtaaacaagaaacgctcccctcccctctcccttctcctcctcc

SEQ ID NO: 10655 - DNA, 120 bp, Homo sapiens
ttgcgccaggaaggggttgggcagaaagagtccaagaaaggaggacggggcctggagcagtgtcaaagccgggatcaggatgcggcagggctagcagcttccccaggctggggggccagg

SEQ ID NO: 10656 - DNA, 120 bp, Homo sapiens
gcacgggggacgggtgggtgtgtgctgccccggggcagtgagggtctgggaaatggaggctggtaaggtcctttcactggcgtccccaagaaggtggactgtgagccctcctgccagggt

SEQ ID NO: 10657 - DNA, 120 bp, Homo sapiens
agacggggggacagtgggggcgggaggagatggctggcctggcagctttgctgcagggttgacctaggatgtctcccacctgggttgaggcttgtccaggtgcctaccgcttcccagagc

SEQ ID NO: 10658 - DNA, 120 bp, Homo sapiens
taccgtgccctgctcccacctcctgttaacaaggatatagtcattctcagcctgcaatctctgtatggggaaggacacccccttggcccccacccttccccacctgatacacggctccat

SEQ ID NO: 10659 - DNA, 120 bp, Homo sapiens
caccgctcacctgcccattctcttcggacactcctcagccctgcattacaaacccctcacgaatggcccgtctcggcttctttaatctcatctcttaacaaccactccctcttccccaaa

SEQ ID NO: 10660 - DNA, 120 bp, Homo sapiens
tcccgtgcagactttaagtcatcctattttaattcacatcacctcatttgcattctcatagcacttacattgtctgatacttttccttgtttattttatctgtttcctctaatagcatat

SEQ ID NO: 10661 - DNA, 120 bp, Homo sapiens
gagcgagaaagagcaaggggcagcccctgtgtggaccagcatcttgcacgaagttatgcaactatcatcgcaccttctcccagacaagctttcaaaggctttgccatgttttcttttgtt

SEQ ID NO: 10662 - DNA, 120 bp, Homo sapiens
agccggagcccgtgttgagttttctgccccagaaggactgcaccaatggcgtgaggtcctcagttcaattccagagatgttggggcttgggttggggagggaggtgaatcccagagggag

SEQ ID NO: 10663 - DNA, 120 bp, Homo sapiens
ctccggtcagcgtgtgtttcctgagcccacagagagtggggacgaaggagaggagctgggccttcccttgctctccacgcgccacgtccaccttgaatgtcggcttcagctctggtggtg

SEQ ID NO: 10664 - DNA, 120 bp, Homo sapiens
gggcgccagactccagcatccctgatgatcaccagggcgagaaagggcagggaggaacggagggaggtgtgggtgagctgatataaaaaggtttttatgatactagagtcttcgtgtctg

SEQ ID NO: 10665 - DNA, 120 bp, Homo sapiens
tggcgggctccctggtccagcagcagtgggtatggcatattggtcctgaaaccaggcgttgagaggtgggaccaggcaggagccaatggggcggctgagcttggtgtgaagtcaagtggg

SEQ ID NO: 10666 - DNA, 120 bp, Homo sapiens
gggcggcaggggtcagggtgagcggggctgagcaggagctgggtcagactgttgggtgtgaccgtgtgagactgtgcagacagtgacagggcgcctgtcgcccacactccacactgtttg

SEQ ID NO: 10667 - DNA, 120 bp, Homo sapiens
ctccgctccccggggctccccaggaggcagacaacccagttgccagagtcaaggacacacataaaagagtaaaggtgttgaaaaatacagtcgtcacctttgatattgctgttccatgcg

SEQ ID NO: 10668 - DNA, 120 bp, Homo sapiens
gggcgcggcgagggtcttattcattcagcggctgtcgctgggcttgtttctccatttgtctgctctgtctttgggggtgggggacgagtgtgtcatttgaagcagtgactcctccctcct

SEQ ID NO: 10669 - DNA, 120 bp, Homo sapiens
ggacgaaaggcctggggaggcttgagagggagaggaatgtcacccctgcccagaggtgctgaaagccagggctcttacacccgaaaaggcaactcctcccttcccccaggataattggaa

SEQ ID NO: 10670 - DNA, 120 bp, Homo sapiens
ctgcgcagcgccggtttggggttgtaggtacgccccttcttctcccagccccgcttctccccccagccatctaggaaagacccaagtgtatcccctaaactcttgtttttcactaacccc

SEQ ID NO: 10671 - DNA, 120 bp, Homo sapiens
agtcgtgacgatcagctccgccgcactttgtaaagcgccaagccttcaaggttattattattctctccaaacctgccgggagcagcggtgttgttttgggatggaggaggaggctgcggg

SEQ ID NO: 10672 - DNA, 120 bp, Homo sapiens
gagcgaaaggggtgggttcctcggggtggagagggcgagagcctttctggattcgagagaggaagattccagcagcttgggcgatcggagggcaggaggggagccgggcagaactcagcc

SEQ ID NO: 10673 - DNA, 120 bp, Homo sapiens
agccggagccagaggctcggagagacaaagggggcgtgacagcccgcgccgggggctgaggcggggcggcgggcgggaggtgcgcgaggtgagggaggtgtggggggcgtgggccgcggg

SEQ ID NO: 10674 - DNA, 120 bp, Homo sapiens
tgccgcccgctccgcctcgagctccagctccggtttttccctccaccatcctctgcccctccccgcctctcctttaactcccccctcctgggctcgggactggtttcctcccttagcccg

SEQ ID NO: 10675 - DNA, 120 bp, Homo sapiens
cagcgaggctggggctccggctcggcgcccccttcctcgctccctggtccggcgccccatgccgcccccgcccggtccccggctcccccagtcccccacttaggcgggctcacagatccc

SEQ ID NO: 10676 - DNA, 120 bp, Homo sapiens
tcccggggtgctggcgcgtgggccgggggcgcgtagggcgcctgcagacggcccctggaagggctctggtggggctgagcgctctgccgcgggggcgcgggcacagcaggaagcaggtcc

SEQ ID NO: 10677 - DNA, 120 bp, Homo sapiens
gtccgcgtgggcgctgggggcatcagctaccggggtggtccgggctgaagagccaggcagccaaggcagccaccccggggggtgggcgactttgggggagttggtgccccgccccccagg

SEQ ID NO: 10678 - DNA, 120 bp, Homo sapiens
tggcggggtcatggggcccccccattctgggccggggggcgtgcgagtcggggccctgctgctgctgggggttttggggctggtgtctgggctcagcctggagcctgtctactggaactc

SEQ ID NO: 10679 - DNA, 120 bp, Homo sapiens
actcggcgaataagaggtgagtggcctgcggctggggagatcccagaccctagggcagtgggtagggaagctctgggggcttggaggcgggcttctgtgggcagggaggaggcgggaggg

SEQ ID NO: 10680 - DNA, 120 bp, Homo sapiens
ctccgggtcccacgcagagctggatgcgggtggtgctatggatgtcaggagtttggagaccccaaaggggcaaggagaagaaagttcatgggtagccgggagggcagtgaggtgggtatt

SEQ ID NO: 10681 - DNA, 120 bp, Homo sapiens
ctgcgtcgggggctgggcttggagggagcctggttactgtcagctctcaggagagagctgcagattaggtgctgcgagtcgctgaggggaaggcagggcagggtgcctccctcccccaga

SEQ ID NO: 10682 - DNA, 120 bp, Homo sapiens
ctgcgcatccgagatgggaggcaagggggttccgtttgggggctctggggacaacttccccaaggctccttgactctcttcacagtctgtctcccaactcttccccacagccagagggtc

SEQ ID NO: 10683 - DNA, 120 bp, Homo sapiens
gaacgatttcccagccagaacatattcctgccttcctggcttgccggcatcttgctggaagaagcctggagccccctgaaccctccttccttcccttttgcatctggaggactccattgc

SEQ ID NO: 10684 - DNA, 120 bp, Homo sapiens
tcccgttttgtccagtggccaatagcaagatatgaaccggtcgggacatgtatggacttggtctgatgctgaatgggccacttgggaccggaagtgacttgctccagacaagaggtgacc

SEQ ID NO: 10685 - DNA, 120 bp, Homo sapiens
gcccggacagaaatggcctgggaagtagcagaagcagtgcagcaggaactggaagtgccttcatccaggacaggaagtagcacttctgaaacaggaagtggtctggctggaactccaagt

SEQ ID NO: 10686 - DNA, 120 bp, Homo sapiens
gggcgggaagaacttcctttcaggaggaagctggaacttactgactgtaagaggttagaggtggaccgagaaggacttttcccagtcttcagtggcacttcccaagatctcccttccctt

SEQ ID NO: 10687 - DNA, 120 bp, Homo sapiens
tcccgagtaacccagatggctgtcttgttcattccatcctacatttctgactcctttcagactcaacacagttcccttcttagtgaccaaaatggtggcctactggctggtctagctgac

SEQ ID NO: 10688 - DNA, 120 bp, Homo sapiens
ctgcgtgtgccctggctccctgtatacccataaccgaggctcttctcccccaaaaagcccaggtgcccagtcccctagacttagccccattctccaaccacaaaagcagccgtcaggagc

SEQ ID NO: 10689 - DNA, 120 bp, Homo sapiens
gagcgagtcagcaggggtcacaacctctgccctccctgcccctcccctgactttaggtcccctcccgctgtctcccatctgtctggaggtcaaggggtccctcttcctctcttctgtcca

SEQ ID NO: 10690 - DNA, 120 bp, Homo sapiens
ccccgtctgagcaagatgcctgggtcttgagaggtgcgggcaccgcaggaggggagttgaaagctgggaggccaggtactgggctgtctggaatttactcttgccttctgagcccacact

SEQ ID NO: 10691 - DNA, 120 bp, Homo sapiens
gcccgaagtggggaggctcgtagggggtggaaaggctggtccttgccccttagtgggggttggttgtcatggcaacatccccttctctacacaatgggaagcccccctcagcctcccgcg

SEQ ID NO: 10692 - DNA, 120 bp, Homo sapiens
agccgacagccccatcgctggctatcagcctcagggacttggcaaccgtcactatggcaacccagagcccagcaacagggcccactgagaaagggaggggtccaagactggggcagggtg

SEQ ID NO: 10693 - DNA, 120 bp, Homo sapiens
agacgtggggataaatagtctccgtgacagacaagcacctcgccaaagcagccaagacatcataacatgctgagagacaggaagacacctggggacagatgcacagccagggagaggaac

SEQ ID NO: 10694 - DNA, 120 bp, Homo sapiens
cagcgcctgggacacgccccctcagagcgctggcatccagagactccccgcagccccgctcgaatagcacaagaccaacagcctttcacatgtgtagtgacttgggtgtctggagctatt

SEQ ID NO: 10695 - DNA, 120 bp, Homo sapiens
ccacgcagaataacacaggccgtcctatttgctttgtggggacaaatacacacacatattcctagagtaacaactgcaacaaaacaactacagcaaaacgactacaggcacaggaagaca

SEQ ID NO: 10696 - DNA, 120 bp, Homo sapiens
gttcgttcactcgctcagcagcatgttaaatgctactttgtttcaggcaccggttcaggcgctgggaggacagggtgagtaaggccaggtccccgctttcacaaagtccacatttaggtg

SEQ ID NO: 10697 - DNA, 120 bp, Homo sapiens
ccacgcactgttctaagttctttacatttattaactcgtttaatatgggtgtgtgcacacacacaccctataaggtgaatactgttacccccattttaaagataggaaatgagatacaga

SEQ ID NO: 10698 - DNA, 120 bp, Homo sapiens
ttccgaatgtcacacttcctgcctctttgcctttcctttcctccgactctactgaaatttttatctccaatatcacaagctcatcaccaaatgcaatcatcaccaccctctaaaatctgc

SEQ ID NO: 10699 - DNA, 120 bp, Homo sapiens
tgccgtgtcactgcgcttcacccactcacccctgcttaaactattttagtagcttttcattgcgcttagttgagatcaaaatcctttttgctcaccctgtgaaaagcacatggaccagta

SEQ ID NO: 10700 - DNA, 120 bp, Homo sapiens
tcacgcatgggtgcctttcatcattattaatcctccttggccacttggggcagctgtcacagtcgactgtccctttccctggctccctgacacatcactcctgctttccccgctgtcttt

SEQ ID NO: 10701 - DNA, 120 bp, Homo sapiens
cttcggtgtttctttttcctctgcctgtgaccagattgcaatacttactccttaacctaaggactaagaggggagggccaaagaggggagggacccttggtcctggcccagcgtttctca

SEQ ID NO: 10702 - DNA, 120 bp, Homo sapiens
actcgtttcacacttttttgtcccaacccccaagactcagaatgtgattacgtttagaggcaggatatttttttagaaagcgtcttggccaggcatggtggctcaggccgggtgtgatgg

SEQ ID NO: 10703 - DNA, 120 bp, Homo sapiens
taccgtcagtgcctggctcctagggagcattcagtaactggtgactgtcattagtaacgttgtctcacctaccttactgctgaacttggggcttttctcagcaccatggatcacccgtgt

SEQ ID NO: 10704 - DNA, 120 bp, Homo sapiens
gtccgcacaagagttgagcaccccaccccagagcagaaccagcatggtctgactctttcacactccgtcctacggaagcccatcttcagggcccatggaacttactagtaaaatgcagag

SEQ ID NO: 10705 - DNA, 120 bp, Homo sapiens
caccgtgcctggcctgtatttcttttttaatgcttttttaaacctgttctttccccgctttttttaaacttctttttatttatttttttaaatggctgtttttcctaataggacatattc

SEQ ID NO: 10706 - DNA, 120 bp, Homo sapiens
gtccgagttttctgcttctatatttacaggcccctaattgctaagaagaatcctaagatcccaatgtctaagatgatgaccatccttggggccaaatggagagagttcagtgccaacaac

SEQ ID NO: 10707 - DNA, 120 bp, Homo sapiens
tggcggcggcagcggcagcagcagcagcagctgtagctgagcaggtgtcagctgctgtctcgtcggccacccccatagcaccctccggaccccccgcccttccaccaccccctgctgctg

SEQ ID NO: 10708 - DNA, 120 bp, Homo sapiens
atccgaagagccaaaaccaaagagggcaaaggtagggaactctcttccaacaactgtcatctcaccttccaaactgcatgtcttcacattagagtctggaactctcgccttcccagccct

SEQ ID NO: 10709 - DNA, 120 bp, Homo sapiens
ccccgactcctcattcaggtccaggccataagaggcggagtaagagcccccgagtgcctgatggacgcaagaagcttcggggaaagaaaatggcaccactcaaaataaaactagggcttc

SEQ ID NO: 10710 - DNA, 120 bp, Homo sapiens
gctcggtgagtgacccgtccctgtctactaaacacctgggggccaaggatccagagacagggatccgtgagggccaaggatccagagacagggatccgtgagggatggcggaacaggaag

SEQ ID NO: 10711 - DNA, 120 bp, Homo sapiens
gggcgtagaatgaagtctgcctcactgacggccacggggctatgggcagtatgtttttcagagcgacgaaggtcctgaaccagaggctgaggaatcagacctggacagtggcagtgtcca

SEQ ID NO: 10712 - DNA, 120 bp, Homo sapiens
ggccggcctgatggccctgtccgcaccaagaaactaaagagaggccggccaggaaggaagaagaagaagggtaaggagtgttgactgtgtgtgatcctgtcagtgggccgtcctctcatt

SEQ ID NO: 10713 - DNA, 120 bp, Homo sapiens
caccggggtatatgacagtcctgggctgtcctgcagtggccggggaggaggaggttgatggctacgagacggatcaccaggattactgtgaggtgtgccagcagggtggggaaattattc

SEQ ID NO: 10714 - DNA, 120 bp, Homo sapiens
cctcgtgcctaccacctcgtctgccttgatcctgagcttgaccgggctccagagggcaaatggagctgccctcactgtgtgagtacctaatgccagcatctgatggccctgaggaaccca

SEQ ID NO: 10715 - DNA, 120 bp, Homo sapiens
gtccgagtgtctaggatcctaatgtattcctttctcccacaatcaacatttctgaaactggagtgtccttttccttagttcccaccagtcttctctgcacttctaggattcaggtgtcct

SEQ ID NO: 10716 - DNA, 120 bp, Homo sapiens
atacgaagaggagggagaggaagaaggggagaaggaggaggaggatgatcacatggagtactgccgcgtatgcaaggacggcggggagctcctgtgctgtgacgcgtgcatctcctccta

SEQ ID NO: 10717 - DNA, 120 bp, Homo sapiens
ttccggggtcagaaataaatctcttctgggaggagagaaggcccttcttcagcagccttctttcctgaggcagctctatgggcagcttctccccggccactcccctgacccacccgccac

SEQ ID NO: 10718 - DNA, 120 bp, Homo sapiens
agccgggctcatcggattggccaggccaacaaagtgatgatttaccggtttgtgactcgcgcgtcagtggaagagcgaatcacacaagtggccaagagaaagatgatgctgacacacctg

SEQ ID NO: 10719 - DNA, 120 bp, Homo sapiens
gtgcggcctgggctgggctccaaggcaggctccatgtccaagcaggagcttgacgacattctcaaatttggcactgaagagctattcaaggatgaaaacgagggtgagaaccttttctgc

SEQ ID NO: 10720 - DNA, 120 bp, Homo sapiens
tcccggggaaaaagccttctctagggctcctgtgaaaaggacgcagagtagaagctttcccatcagcctttctaaactttggaacccaaagttcccgtttgttttccctctcaccagggg

SEQ ID NO: 10721 - DNA, 120 bp, Homo sapiens
catcgctcggctgttggaccggaaccaggatgcaactgaggacactgacgtgcagaacatgaatgagtatctcagctccttcaaggtggcacagtacgtcgtgcgggaagaagacaaggt

SEQ ID NO: 10722 - DNA, 120 bp, Homo sapiens
cttcgtctaataggtgagactggacttcagagagaaacgtaggcacagacagtactggtaaacacagaagggtaccttctgagacagtgcaggagaaacactgtcagagggattagagga

SEQ ID NO: 10723 - DNA, 120 bp, Homo sapiens
ccccgctcttcttgtccttgtgggtttatgccttttttatccctttattgtaattttagtggggtttggggagggtgaagagataaatagatctgcttaatccgtcctgtttaattcagt

SEQ ID NO: 10724 - DNA, 120 bp, Homo sapiens
agacgccacacaccccagagttgagaggtttggggtcagtgtcctcattcccagtggttccttgagggccatgccactcacctcttccaccccgcccccatccctggtgaatgccatcat

SEQ ID NO: 10725 - DNA, 120 bp, Homo sapiens
gagcgccccgaactcctcgtgtcacatgcttctcctctacctccttcagccatgacgtcacaggaccaaacccccactgtgtcatctcccagagctgcctcccctctgaagtcactaatt

SEQ ID NO: 10726 - DNA, 120 bp, Homo sapiens
caacggccagctaagaggtcccttctcctgtgtggagctgatcccgtagtctatgctctgcatcccttgtcgcgcccccacctcccgatggtgcattccatctgccttacgttgtcacct

SEQ ID NO: 10727 - DNA, 120 bp, Homo sapiens
agccgtgcccactcccctcctgcaagaaactgacccgtgacccgctccttcctaggtgaacccccatgacccctttcctcgactcccctctgagatacccctcttttcttcaggattgtt

SEQ ID NO: 10728 - DNA, 120 bp, Homo sapiens
tcacgcatgctctgctgtgatcccttcagtggcaaaatggggggtggcctaagtggttcccaaggcccctgtgcacctgacagctgggtggcttgtggccctcacccccaggagccctga

SEQ ID NO: 10729 - DNA, 120 bp, Homo sapiens
ctccgcttcccagtgtctctcagggacccaggaaggaggatctgggattgatgcccgaccccagaggaagtggagttctgttccaccagagcagggtttgtcacatggcctgagggggca

SEQ ID NO: 10730 - DNA, 120 bp, Homo sapiens
caccgcgcctgacctttgcagcaattatcaatgccctgtcctggcaagtccccagttgaagttgcctttgtgaaactctgaccttccagagcctgggccttggcacatttgactcttggt

SEQ ID NO: 10731 - DNA, 120 bp, Homo sapiens
atacgacagtgagagggaattccggaactgaaccttcactacaccaagtgtggttggtgggccagggtcggcactgcctgtgagctcattagaaatgaaggatctcagggccccacccca

SEQ ID NO: 10732 - DNA, 120 bp, Homo sapiens
aagcgcagattcacatctctggccttggacctgactgtgtggatagagctctcagcctcctgtctcttccctcccgtacccgaccctgcagcccttccccttccttccctctctccctgc

SEQ ID NO: 10733 - DNA, 120 bp, Homo sapiens
tttcggctgcctcaaggaagagtccaggattaggtgcagagggattagctgggacaggcttaggcagggctcctcccggaagcagaggcggatgagccagagggcagacccagtttaagg

SEQ ID NO: 10734 - DNA, 120 bp, Homo sapiens
agtcggttatccagtctcagggctctgctgactcaagtcctccccaccctgttcctgtggcctgggcaactcccagcgcatgagagcaccggggcctggcttggtcactgggcatccccc

SEQ ID NO: 10735 - DNA, 120 bp, Homo sapiens
gggcggggcagagggagcatgacggggagagtgaggaggaaagaggaaaggaaggccagggtgggaggaaggatcagctaaatctgagggaagaagaaggaaaggagagggactattgca

SEQ ID NO: 10736 - DNA, 120 bp, Homo sapiens
aaccggaaaaatcatctagtaataaaactacaaacagaccaaatatatataatattatatatgtataaataacagctggctatttacagggggacacacacacggacacacacacacacg

SEQ ID NO: 10737 - DNA, 120 bp, Homo sapiens
gagcgagactccgtctcaacaacaacaacaaaaaagaatatgcatagggaaggttggaacaggtcccagaatctgagctcctgtggggactgctgaggagtcagggcacagagcctactg

SEQ ID NO: 10738 - DNA, 120 bp, Homo sapiens
ttgcggacaggatattggatagtcaccgagtctccagaaaagctggagaatcgagcctataaaacaggcaggagtgtgggaggtaacacagtccaagctaccaccaaaaacactccgcag

SEQ ID NO: 10739 - DNA, 120 bp, Homo sapiens
caccgtagattcacacgaccttcacccccccgccactgggtgtcctggtcagcatgacaacaaagcccacagtgacaggaatgctcacaacagatgctgctgcttgtactgctgacagtg

SEQ ID NO: 10740 - DNA, 120 bp, Homo sapiens
gtccggggacattgtgtctgtttggttgatcctaggtcatgtaattagatcagtagttgggaaagtgaatctttggcttgttcaacttctgcagttggaccagggctgtctccagactag

SEQ ID NO: 10741 - DNA, 120 bp, Homo sapiens
tggcggcttccctgatggtgctgcaaggagcaagtgcatgtctgtctctgtcctctcaactactctggagcattcttctcatgctgggggcgatccccactcctctgaccactgtccgcc

SEQ ID NO: 10742 - DNA, 120 bp, Homo sapiens
aaccgtttctccctgaaatttgtatgttgaagcctttactcccaatgtggctgtatttggagatagggctttttaggaggtaattagggttaaatcacgtcataagggtgggagccctat

SEQ ID NO: 10743 - DNA, 120 bp, Homo sapiens
atccgataggattagtggttctttataagagacaccagagctgtttctttctctctgcaaacatgcactgaagaaaggccgtgtgaggacatagctagatggcagctgtctttgagctag

SEQ ID NO: 10744 - DNA, 120 bp, Homo sapiens
aaacggaatcagccagaacctggatcttgaatttcttgcctccagaattgtgagaaaaataattctgttatttaaggcgcccagtctatggacttttgcaatggcagcctgagcagacca

SEQ ID NO: 10745 - DNA, 120 bp, Homo sapiens
acacggtgtgggtgagaatttaacctggttattgtaagcatctaggattttagggttgcttattaccttagcattactgagactgctgatggacacaacttctttggctaaagggaagat

SEQ ID NO: 10746 - DNA, 120 bp, Homo sapiens
tcccgatccgcagacctcaatttgaattacaatcagacagcaaggcttgaagaggctggcaatattccatcagagagaacaataaatgtatgaagtctgaataatgaaggaaacatttac

SEQ ID NO: 10747 - DNA, 120 bp, Homo sapiens
cttcgttcctcaatatagattagaatttacagtagttccctcactatctggtatttccttattatcagtagttctctcattatcaagaaatccaagatcaaggtatctggtggttttgct

SEQ ID NO: 10748 - DNA, 120 bp, Homo sapiens
tctcggtaggggaccactctctagggtgaagcctggtcagtgccatagaaactgtccttggtatttctgagaattctgggtccatgcttggttagctgagaaacttgtcagacaccatat

SEQ ID NO: 10749 - DNA, 120 bp, Homo sapiens
aaacgacacaaggcctgggggctttcaggcagcttttgggatctgctacataaaatgccaggacttgaagacaagtgactctcactcacatgaatactgcctttgcaggccaaagagcaa

SEQ ID NO: 10750 - DNA, 120 bp, Homo sapiens
agtcgccgacataatgctctttatctcaagatatttcaacatctatttcctaaaaacaaggacattctcttacataaccacagtacaatcctcaagaccaggaaattaactttgatacaa

SEQ ID NO: 10751 - DNA, 120 bp, Homo sapiens
ggccgctgccctagatgctaccttaaatgtaaaatattaaaaaaaccttgactaattttttctccttagcacttgttactgctggcatactcagggttctttgtcttttttttttttctt

SEQ ID NO: 10752 - DNA, 120 bp, Homo sapiens
aatcgggctaaaattgcttaataagcttagactggtaagaaacactccatttcttttcagccccgtcatttcattagtctagtttgggagtaggtaaacctggcgccaccttgtctgtat

SEQ ID NO: 10753 - DNA, 120 bp, Homo sapiens
tcacgtggtcgggatgagagccaaggatgatagtgaagcctgaagcttggggaagtcaggaaaaccgtgaggttccagatcagcaggaagtccacagttaagggagccttctgggaagaa

SEQ ID NO: 10754 - DNA, 120 bp, Homo sapiens
tgccgaagtggttgcttctgagggctgctaggtggcctctgaccaggaggagactagaaaagggtcctggcctgggcatctggaggcagctgtggccccgacttccccatcagtggctca

SEQ ID NO: 10755 - DNA, 120 bp, Homo sapiens
ttacggtgcacttgaaaatgccagaatcccatcctcaacctgcttgaggagccatctcctagttgctgcttttgtacacccccgtggcccaggtgccagattcttcttggcatccaatgg

SEQ ID NO: 10756 - DNA, 120 bp, Homo sapiens
ttccgggcactgtctgcagtacaggtttaggggcttgcctgccactgtgatgtgtgaggccaggaatctgaggttcacacgtgctgagagctgcaggcatttgtggggcctgcctggttg

SEQ ID NO: 10757 - DNA, 120 bp, Homo sapiens
taccgtggcaaataggatatggccttggccccagaagaggcacaggcctgtgaccttgggagagtgggaaggatgatttcaaacttgcaaatgtgttgaagctcaaaaatcagacctaac

SEQ ID NO: 10758 - DNA, 120 bp, Homo sapiens
tgtcgtcgaagtaggacagtgtgcaacagggagaaatgacatttgtcagagcctttctcctggggctcttggtctctgtatgcgtggttggaatttaaactccacatatgtactctgagt

SEQ ID NO: 10759 - DNA, 120 bp, Homo sapiens
ccccgtcagtgtacgaaacagctgtctctgcagggagtgtgtgtcggcattttttttttttaaggagaacctctctccatgagtctgtatttagctccctggagccgtctgatgagtagg

SEQ ID NO: 10760 - DNA, 120 bp, Homo sapiens
tgtcgtagttggctttatctcccaaattgctagtgggacaaattttcctaggaagcgtttcaaggtggaaaggctgaagtggctcctgagagaggttccaggctgcacactccctccccc

SEQ ID NO: 10761 - DNA, 120 bp, Homo sapiens
gcgttgcttgctaaacaatttttaaaaggttatttttctccaccttattaagatattcgtgtattaatacattatatttggaaaatgtaaggagatttggaaaatgattaaaaaaggata

SEQ ID NO: 10762 - DNA, 120 bp, Homo sapiens
cttcgtgggtccagcgcacaccaccctcaactgtgctccgtgttgctaggccccaagggtgggggtgggaagggaaggccaggttgcctgactgaatgaatgaagttggggagggttcgg

SEQ ID NO: 10763 - DNA, 120 bp, Homo sapiens
gagcgggagggagggtatagctgcccacgctgcaatcagggcaggcctgacccacagttcaaagtcctgcggaacattccctgtgtacttagaaaagggggcctggatgcagacgctgaa

SEQ ID NO: 10764 - DNA, 120 bp, Homo sapiens
actcgggtgcagcgtgcagtacctttgtcttcccttcactttctattcagtatctcctgtgcccaccctacacccagccagtatctcatgactgccagcaatatccagaaactatactag

SEQ ID NO: 10765 - DNA, 120 bp, Homo sapiens
tcacgaagcacacattctagtggaggaagcaggagctttacagttcagtccaggcctcactgaacttgcttcctgacctgctctccccgccctcctgtgtctcgggtactgggagtgccc

SEQ ID NO: 10766 - DNA, 120 bp, Homo sapiens
ccacgttagctgaaacatcagaatcgggagggccctgaattccactggtcagttgtgccaccagctcattctccaccagttcctttgctcacgcgcttcccagggaggcacttcctcgcg

SEQ ID NO: 10767 - DNA, 120 bp, Homo sapiens
aaacgatgaaatgctaatgccaggttttccagtaacatgagtttttttggaggtgatagtttgggaatactttcatcaacttaaccctggtgatgatccacttaacctagaaatggacag

SEQ ID NO: 10768 - DNA, 120 bp, Homo sapiens
aaccggagactaattcttaaacttggctgcacattgtaatcactttggaaaatgaaaaataaatacataaaattagacaaaacatgcccaaattccatccccagagaatgacagcaaatt

SEQ ID NO: 10769 - DNA, 120 bp, Homo sapiens
aaacgtttgtgggctcagaaacatcagctttactcaaaacaaaagctctccctccatagacttgacagtcagctctccgggaacaggggagagaaaacaaacccagttaagtgttcacag

SEQ ID NO: 10770 - DNA, 120 bp, Homo sapiens
ctccgcatttcaaatggaatttgaatctttggaggttagagttcatttactttttggcagaacagcacttcctgtttctaagagaaaggccccagaatacttctttaatgtcaaaggctg

SEQ ID NO: 10771 - DNA, 120 bp, Homo sapiens
aatcggatgcaagtgaatgagaaacacatggattaagtttccattaacattcacatgggtttcataattaagagaaaatgcctgaccaaaggaagtgttttgagttttacctaattgaaa

SEQ ID NO: 10772 - DNA, 120 bp, Homo sapiens
ttccgaacatgataagtgccggagattactcatccctaaccaaaaccacctaagcaaatcagacgcataaactgagaccaaagctataaactgcattctctcaaaaaccaacaacactca

SEQ ID NO: 10773 - DNA, 120 bp, Homo sapiens
ttacgtctctgggagagacaaatagaacaaatgactcatttactgggcctcctgcttttcttcactcaagggttccttagaaaaatgtacctgtctgagtggaagtgactggacatgtga

SEQ ID NO: 10774 - DNA, 120 bp, Homo sapiens
gcccggcctgttgcctgcaggaggagctgacttggagcagggttctttggcagcagggcaatgctagagcacaggaaacttggcttcctcccagcacatccctggcagaaaactcactgt

SEQ ID NO: 10775 - DNA, 120 bp, Homo sapiens
cttcggctaagatgtgggaggtcctgggaaagaaaccagggactttaatatcaaaaggaaaattggctagaagaaatgacagagccattggaaatgaaactgaaggaatctcagcttggg

SEQ ID NO: 10776 - DNA, 120 bp, Homo sapiens
tgccgtttgaaattatatttctataggcccatcctaagttaatataataaatatttctctaaatacttcatgaatgtctcagttacatcctaggacaaattatcttccccaggtaactgc

SEQ ID NO: 10777 - DNA, 120 bp, Homo sapiens
tctcgtctcaccttgattccccacttacctcaatgctactattaaaatcaaatgttaagcctttgaagaagtcttcctcacttatatcagtgaactttaatgcagaaatcttcataaaac

SEQ ID NO: 10778 - DNA, 120 bp, Homo sapiens
tttcgctagcattcaaatcccattttttccccatttgctctataaaacaagacaatcagactaagggaatagtcattccagttttacatagttgtcgtgtgcatgataatctgatgtgta

SEQ ID NO: 10779 - DNA, 120 bp, Homo sapiens
aaccgtaacatttaaaattgtactgtatctcacaaaatgccccctatcagcagagagtcaccccagatgctaggtcagcaaggtgaattagggaccacagaattgctttgaccacaacca

SEQ ID NO: 10780 - DNA, 120 bp, Homo sapiens
gagcggacagatattccaggaactgtgtgggatgacactcttggcctcagctccccattttagccacatttgaaatacctagaactatatctcaagatagcctctgagctaagttgttat

SEQ ID NO: 10781 - DNA, 120 bp, Homo sapiens
aagcgtcaatgtcatcatcttacaaacgagggtactgacacttggataattgtcccaccatcagagagtcagttacagcgaagtccatctgatgatataccccctctttcttctgtacca

SEQ ID NO: 10782 - DNA, 120 bp, Homo sapiens
taacgagctaataaaaccaaatatgtagggccctgaataaggcatccattaaactctcacatttactaagtattcattcctttcccttctctcagctcttcatcttactcccaaagaaac

SEQ ID NO: 10783 - DNA, 120 bp, Homo sapiens
ttccggggctttcatgttttttgctgtaaaagtaaaggattggaaaaaacagttattgcctaaactggtcaaactcagcatcattaagacagctttggctgaaaacttccaagggtggac

SEQ ID NO: 10784 - DNA, 120 bp, Homo sapiens
ctgcggcagccagtccaacttagaactgccatccagtgtgttggaaacactagccttttccagctctaacaggcaatggtttcatttttctctctgcttctcacatggaaagtgtttatt

SEQ ID NO: 10785 - DNA, 120 bp, Homo sapiens
aagcgtaaaaaaagtcgtgcatccctcaatcacttccattcctgactggcagaagtagacttaccaataatgacattacagcacagtgaagcagtgagctgcttccagaaggctgccctt

SEQ ID NO: 10786 - DNA, 120 bp, Homo sapiens
attcgatgtccacttgatataacaatagaaaatacaaaagctgaatggatcatgcaagagattcaaagcccatggaaaaatttgaactcaaagctggcggaattatatggcatatgtttt

SEQ ID NO: 10787 - DNA, 120 bp, Homo sapiens
attcgctgccctaaaaagagaatacattgtcctgattaggtaccacttttcctaaagccactgattgttcccaaatatagctttctccccattggaacacaccagaataatgttttggaa

SEQ ID NO: 10788 - DNA, 120 bp, Homo sapiens
catcgggatgatttcaaagctgaaatgtgcagtggactttggtgctcatatctgaagttctcaggctggtcattttcacccaagaagctggatgctctttgtggactttatgggaaagaa

SEQ ID NO: 10789 - DNA, 120 bp, Homo sapiens
tttcgtaagcaacacaccagcatctaatcctgaaatcaccttctggatctatttttataagttgtaccactctttgaagcagtggacatggagtggcctctgggaagcaggtcctacact

SEQ ID NO: 10790 - DNA, 120 bp, Homo sapiens
gaacgaccttttctgcagggcagcagggagcattggacatgtcagctgaaagtgtgagggaaagaaccttggccttggagatggggagccctgggcaccggctctgcctctgtgactcac

SEQ ID NO: 10791 - DNA, 120 bp, Homo sapiens
attcggccagcatactttacctccctgcttctcagcttctacatgttcaaaaaaaagaaaagaaaagaaaagaaaagaaaaagatgaagaagaaaaacaaagcagcattttccctctgag

SEQ ID NO: 10792 - DNA, 120 bp, Homo sapiens
gaacgctcattactataaacagatttttgacctctgtttggacccactgttccgtcatcaaattgtttccttttagcccgaaatgtcaaaagatctaaaatcatgggagcaagggtcaga

SEQ ID NO: 10793 - DNA, 120 bp, Homo sapiens
actcgtgttccgtaaatatattttgggaatatttggttatccctcaaccccgtcttctatttttctctttttttcttcctgtgtttgggattctctgggggtttaaaacatgtagcttgg

SEQ ID NO: 10794 - DNA, 120 bp, Homo sapiens
aaacgtttcctgacagttggaaaatcagggataacagcagcccctccttgttgatgtcactgtggtgaggttgaagttgtccgttggacacttaggacagccctttgcttagtatgtcct

SEQ ID NO: 10795 - DNA, 120 bp, Homo sapiens
ctgcggaccatccataggagcttccttagttgaggcacagagtgggcacacagtgatctgcagtggtgctgggcacttgggaggcctgggctgtgttgaattatgttagctggggggcag

SEQ ID NO: 10796 - DNA, 120 bp, Homo sapiens
atacggatttatttagagatagttcaaaggtcttttatctctgtggtcatttatctgccaaaccgggattactgctgagcacaaaggatgactcaaaatgaaagtttcaaagcagtgtca

SEQ ID NO: 10797 - DNA, 120 bp, Homo sapiens
tggcggctgctactcttccagcatttgcaaagtcggcccctcttcctcatcgttgcaattttacatcctcaaaaagtcctctcattgctacattgctagttgacccgcagttatatttcc

SEQ ID NO: 10798 - DNA, 120 bp, Homo sapiens
atccgtttttgccttttcctaccacatctttgacttttctgattcctgcaagtttaagttaaaaacatcctaccttcaagctacaaaatgcagcacatcccaggacatccctcacctgct

SEQ ID NO: 10799 - DNA, 120 bp, Homo sapiens
aaccgctaaggatagtcaaggtggagaacacagggtggggtctcagagtctgaggccttggttcaggttcctgataacattaaatatagaaaatacacagcacaaggccttgaagccatg

SEQ ID NO: 10800 - DNA, 120 bp, Homo sapiens
acacgcgcacgcacacacacacacatatccttatatgctccataacctgaagttgagtgactgactgcaattaaacagacattggtctagttcctgtttctgccacccgacaaacacgtg

SEQ ID NO: 10801 - DNA, 120 bp, Homo sapiens
aaacgggcataattctaattgcctggtccacgtgaagacagtatgaaatacaatattctcaatattctgtgtctgttcagagtagactctccctaagaagcatcatagtaattctgattg

SEQ ID NO: 10802 - DNA, 120 bp, Homo sapiens
agacgatcacataccctcgttatgagtcctgaattggttgaactttgtgactaaatatgatattcttggaatttagcttactgctccttgaagctgagcagggctatgcaattgtatttt

SEQ ID NO: 10803 - DNA, 120 bp, Homo sapiens
ctacgacttgactgcagacgccctaaacccctgatgtcttctgcatgtacgatcaaaaattcctagctccgggaacttgctgtgctgagcagacatccagtaaaggaggaaacccaaagc

SEQ ID NO: 10804 - DNA, 120 bp, Homo sapiens
tcccgacggatatataagtgaagacgttagtcaaaacaagacgttagtgctatttctcacccttgcaatggacaggagcagccatattgtatgttgcatttatttagacccttctgccga

SEQ ID NO: 10805 - DNA, 120 bp, Homo sapiens
tctcgattttacccatagtggtccatgagccgtgagcactgtcttcctgttttatatcaggaggtatgttttcaatcagcagacctttatggctctgcagttgcccccaagaattgtggc

SEQ ID NO: 10806 - DNA, 120 bp, Homo sapiens
tggcgtctgcgaagctttcctgcgaaggtgatacgttcaacatgtaaagcataatccctccctgaaaccttaaattatctaaactgaaagagctttccgggtctaactggcttttctcag

SEQ ID NO: 10807 - DNA, 120 bp, Homo sapiens
tttcgttcctatttaaagttagtttcacctttcagttccctcctccatcttagccttacagagtttcagttccccaaacagtgtgtgtggggtgagctggggagagaagctttataattc

SEQ ID NO: 10808 - DNA, 120 bp, Homo sapiens
tgacgtctgcatcctatcctgtaccaattaaaccagaaaatcaagaggtgatttttaggtatttctttcaagctccccaggtgatttgtatgtgtggccaggttgggaacttctggcctg

SEQ ID NO: 10809 - DNA, 120 bp, Homo sapiens
ttacgtgggtgcactgcagaggcctgaaatgtgtctgtacttgaagatgctcagcttaacctataaattatcagccaggacctgtttagaagcccagttctgccttggttacccaagatc

SEQ ID NO: 10810 - DNA, 120 bp, Homo sapiens
gaacggagaagggagtaggatggatattgtgcttttagtaaacggagtctgtcccaacctgtgtgcatagtaaactcactcctcccacattcctgaaatttagcaaaaccaaccatgaca

SEQ ID NO: 10811 - DNA, 120 bp, Homo sapiens
gcccggggctgctttgctggccccgggagagtcagaagtcattgtgtgacaagctgtgtgatccaattcactggacaaacccaggaatgatgtcatttacccagatctattctttaaacc

SEQ ID NO: 10812 - DNA, 120 bp, Homo sapiens
gttcgtcaagaagtactattcagttttttttctctgctgggtaccttgaaagataaaaggcaactctaagatactgcttccaaagtattagcaccacatggactctcgtttacaaagatt

SEQ ID NO: 10813 - DNA, 120 bp, Homo sapiens
tgccgtcacactgaggtgctgcaaaccctcacaaactgagaaccttactcctttagttaacatgggcagccttatccccagaaaatgtaaaacttcactgtgctttttcaagtatattcc

SEQ ID NO: 10814 - DNA, 120 bp, Homo sapiens
tctcgaagaggcccttgggtgcggtgcattttatcaatatcatcaaactaagccagccttcaaaggtttgtgaaggaggcagcgtcgtgtttgacagtctctctactgtgtcctctttgc

SEQ ID NO: 10815 - DNA, 120 bp, Homo sapiens
atacgtctaagaatctcattttagagtttagggatccaccttgtctggctgctcaatgtttctttcccataggaagatgctgaggcccctaaaggtcaagtggtttgtttgtgaagttca

SEQ ID NO: 10816 - DNA, 120 bp, Homo sapiens
acacggccaagccagagcaaagctgtgacttccagaccaactctgtgtccacttggcaacctgttctctgtacctaggaatgaattagttaaatgtggcagacttcctagaagcatttgc

SEQ ID NO: 10817 - DNA, 120 bp, Homo sapiens
atccggcaactaatcacgtgaagcatttggccacggacaacgatcctgtccattggaacgatactttgaacttttcagagtgcattcagaaacatcatttccttactctctataagcttt

SEQ ID NO: 10818 - DNA, 120 bp, Homo sapiens
aagcgaatcaggaaagtttgatccacaaacactgaattgtatatcagctttttataaacacactgcagtcaaatttccattattttctttgcttaacctgctgccttcattttattagag

SEQ ID NO: 10819 - DNA, 120 bp, Homo sapiens
caacgttattgctgcccaagaaaaaatgtcagattgtttaaagccatagaatggaaaaactggaagtgcccttaggcccagccaggccaagctagtgctggagctcagagctgcagagtc

SEQ ID NO: 10820 - DNA, 120 bp, Homo sapiens
cttcgtcatggtttttgatgcttctcaatactagtctgggaaattctaggcttacacaggtatataattgtctatttggcagctgagaaaaaggactccacagtgatgaacttaccgagg

SEQ ID NO: 10821 - DNA, 120 bp, Homo sapiens
ccacgtaagagccaaggatacaagtccctgttcaaggtgggcagtctttgctatgcactccttttttcagctgacactgtccatataaggcaagtagaaagtgtgaactgagcacagaat

SEQ ID NO: 10822 - DNA, 120 bp, Homo sapiens
tagcgtgcaccaggatgcctgtgagacaggtgagctggaagcccttacttgctgcatgtcagtttccttatttgtaaaacgaaaaggtggtgagtcttacttggtggtttttgaacagtg

SEQ ID NO: 10823 - DNA, 120 bp, Homo sapiens
gcccgactttgtggttctctgatacagttactgagtgagttgtctttctttcatcttcttcccttgtctatgtgcaaggggttcaatgctctgatgcctccccatccacccccagcagga

SEQ ID NO: 10824 - DNA, 120 bp, Homo sapiens
cctcgagttgttgatttctgagtcctcagcatttccctcaccctctccagcttgtcctcaagcctgccagtgtctgtttcatgcagcaaaggctgtgaggtgccctggagctctgtgtcc

SEQ ID NO: 10825 - DNA, 120 bp, Homo sapiens
gcccgtgcatggcagggctctgggatactgggcttcaaggggatgactctactactcaccatgacttttgggactcccgggagccaggtttggagaaggaaatagaaggggaaaggaagc

SEQ ID NO: 10826 - DNA, 120 bp, Homo sapiens
cagcgagcttgtgtctcacctagaaaagcctcctagtgctcatgtgcccttaaatggacttgttcaccatggccctcccacagcatgccgccctcggtttgtattttggagggcttagta

SEQ ID NO: 10827 - DNA, 120 bp, Homo sapiens
attcgacctaggctcaatgtacatggaaaacatttttcttataaaagtgagccacaccttttaaactgccatgaatttcacaaacaatcaactcttgggaatggggagagaggtgggagg

SEQ ID NO: 10828 - DNA, 120 bp, Homo sapiens
aagcgtgctaagctaagtttggtatcgaaagttttccaccagaactgtgtgcccaatatggaatgtcattgactgttccctcacatgttagctgttttaggagatagttctgctgagggc

SEQ ID NO: 10829 - DNA, 120 bp, Homo sapiens
gcccgataagatatcatctccccagaccactaggatgggaggcagaggctgtgatgtgtgcttcgcctgtcttgcggcttgccttatccatctctgtctggatggagtaagtgctcagtt

SEQ ID NO: 10830 - DNA, 120 bp, Homo sapiens
aagcgcattgtaatgggatatagctatcagccaaggctggaggaggccttgttctctggacctcttagaaagcactccttctgggtcctccctgccccttctctgcagcccagctgagtg

SEQ ID NO: 10831 - DNA, 120 bp, Homo sapiens
gggcgtaagtgagcaggccccacctttcaactgctagggtgaaatccacccttctgacagtctcatggccttctccaaaggcagagttaattgaaaagtgaaacaattaggagatgggga

SEQ ID NO: 10832 - DNA, 120 bp, Homo sapiens
gcacgtaaggcatttcagtgttccagtttcattaggagccatcatcaaatgacagattagtagtgtattgtcttttgtgtgcagctgtatattttgccatggtaataggcacctcatcca

SEQ ID NO: 10833 - DNA, 120 bp, Homo sapiens
tatcgagagctttctgggtgcttggctttgtagtaggccttagggataagatgataagtctctgacctcaaagtacttatagtctaggaaaaggagacagaaaagtacacaaataaatgc

SEQ ID NO: 10834 - DNA, 120 bp, Homo sapiens
gaccgtgtttgcagacatgttgcaatacatagatcattgatctcactattgacaaaatgaaatacctgtcgtaaaatgtatgcttcttcattcattcagtggatgtttattgagtgccta

SEQ ID NO: 10835 - DNA, 120 bp, Homo sapiens
agacgaggcagcagaacagctagtgtccccttggctgtggagcaggacatggtgcctcacgtggagctggctttcacagatgaacgaacaggagactggggaggcaattgccaccgtgtg

SEQ ID NO: 10836 - DNA, 120 bp, Homo sapiens
agtcgtgttctcacatgggaggatgcaggaagaagtgtgttccctcccagccgccaactgtacccacagggcaccggaaggagtttcactctcagcactgggccctgcagccaacctcac

SEQ ID NO: 10837 - DNA, 120 bp, Homo sapiens
caacgcagtgtacgccaggttagcagcttagccttggagaaatggcctccatctcggatgcctgtggcccaaagcatggagcggagctgcgtttccccatggtgggaagataatgactgc

SEQ ID NO: 10838 - DNA, 120 bp, Homo sapiens
ctgcgctggtttttatggggcattatataacctcaacgagtggttcagcagtagcagtggctttaagagggtatggaagattgtaacatgcttgttgttttttgttcgagggattttttt

SEQ ID NO: 10839 - DNA, 120 bp, Homo sapiens
ccacgaaggatgctaggaaaatccggttgcctcagcccagtgggaatttgctctcaaacaaacaaaggcctgtttgtagagctggagtccatttagacacagacacagaccatttaggat

SEQ ID NO: 10840 - DNA, 120 bp, Homo sapiens
tgacggttgtggttgacagacaaaactcacccaccatgtttctttctgctgtgtttttaaatttactttcaggaaaaggcatgtggtgtccaagacacttgggaatacacagatgtgttt

SEQ ID NO: 10841 - DNA, 120 bp, Homo sapiens
gttcggcagaaaaaaaaaaattctgaattctgagacagtacagcaaaatgaatcattgagcattgggactcaaattctccaaggtgggagggctgtggaaagccagtgcctgctgtacaa

SEQ ID NO: 10842 - DNA, 120 bp, Homo sapiens
aatcggtttcagcccaggccatctagttaggactggtttagtttgtgggccacagacttcctctagctctgacctgccaccctgcaggaaagaagcaaaggaggaggaatctgtgctggt

SEQ ID NO: 10843 - DNA, 120 bp, Homo sapiens
cagcgcatttcaatttaagcccatacagccagagacaggttcatgtagaatggaataaattaataaatatgctgttgtttaactgggaaagtgctctggcctagggacggcttgctgaat

SEQ ID NO: 10844 - DNA, 120 bp, Homo sapiens
catcgagggaactcaatgtctgattcttgacagggtcaagaaacaaggaccgtatggcattgtttagtggttaagactttgtagccaggttgcatgcattcaaaatctgaccctaccacc

SEQ ID NO: 10845 - DNA, 120 bp, Homo sapiens
cgaagttagttaggatggcagagatcgagcaattagttggccagcaacctgtcatccaaattgcaaccctccagtcaggcatttggtagtgtccaccctaaatgccttttaaatattcaa

SEQ ID NO: 10846 - DNA, 120 bp, Homo sapiens
ctacgatagccctctgaggtaggaggtttgttacacttttaaaaaataaggaaactgaagctttaagaggttaaatcatttaaacaaggtcaaatacctagttaagtgacaaagctggga

SEQ ID NO: 10847 - DNA, 120 bp, Homo sapiens
gaccgtctggctccaggggcatggccttatccaccagctgaaaacttcttttcttataagtggcatatttcccaattactgactaacgtatttggattttgatccttacacagaatgctt

SEQ ID NO: 10848 - DNA, 120 bp, Homo sapiens
caccgagggctcttcatcttcactgtacacttctgtaaacttcccactactcttctctggatgacctaaagaccttctcagacacagttactattaaaatacttcccttttatcttaact

SEQ ID NO: 10849 - DNA, 120 bp, Homo sapiens
actcgtcagtcttgctacaatgtaatggcaggctgtccattagctctgcgcacaatgcagtggttggaaccaacacagacatcatccaaatcagacttactttggaccactctggagcca

SEQ ID NO: 10850 - DNA, 120 bp, Homo sapiens
ggccgatttctaaatccaacacccttcctgagaagattagagagctgccctggggcactaactgtttggtggcctagcccacttcagagctcacacacataaacatgctcacacttaaca

SEQ ID NO: 10851 - DNA, 120 bp, Homo sapiens
ctccgccttgattgaagcacaagatattccagctgtatctgccctgaaatgcaccccaactccaggcagttcagccttcctcaacatctttccacctccccttaggaacattcaaacagc

SEQ ID NO: 10852 - DNA, 120 bp, Homo sapiens
caacggggtgttactatgagtcaggtgtttgtatacttttctaatctttaaaattcatatgcaagatatacatcattagctccattttataagtcaaggtgatgaggcatggagaggtta

SEQ ID NO: 10853 - DNA, 120 bp, Homo sapiens
tgacggatgcagataacccaggtgaataggcagggagggagccaggggaataaatattctccaacttctttccattctctgtctcctctctctcactgcaaggttcctcattaactgaac

SEQ ID NO: 10854 - DNA, 120 bp, Homo sapiens
cagcgttttcctcatctttatatttcacagaacaatgtctgtcatattataaactaacaatttaagaatgcaataataccctgtctttctttccctttctgttctgtctccaagatgaga

SEQ ID NO: 10855 - DNA, 120 bp, Homo sapiens
ctccgcccccaccacagtttgcgtggcgcgagtggagaacacgctagaatgggattccctctggtaaagactccatgttccttgcccttttgcagttggcctggaggctgggaacaggga

SEQ ID NO: 10856 - DNA, 120 bp, Homo sapiens
attcggggtcaaaaacaggtgaaggtgaagagcagtatagtcagagaagacatcctggaagaagttgaatttgtgtttgtgacagtcttgtgggttctatcccaccaacccttctcagca

SEQ ID NO: 10857 - DNA, 120 bp, Homo sapiens
tctcggtgaaaataagaggtcaccaaggagtggggtgtgggggaccgtaagccatcctcaggggcctgacctgggtttccgtttgcagcagcctggagggggccacgttcttcctgcgcc

SEQ ID NO: 10858 - DNA, 120 bp, Homo sapiens
agccgcccacatttactccgattgattccagctgcacagtgcctggctggcctggccttctgcattagtaatgctgtgtgaagggaaaggaataccagcacacttgctcccctacccatc

SEQ ID NO: 10859 - DNA, 120 bp, Homo sapiens
ccccgaacacactgtgctaccctttctctttctctgcatcttttccggctctgcatttatatccacccagactttctccctctcccaggggcttgctgtagcaccctgctgttttctctt

SEQ ID NO: 10860 - DNA, 120 bp, Homo sapiens
gagcgcatttgtgtgtgtttagcagctttgtccggggctccattgtccagcattcaagagcagatccctactttgccagagaatcacagacaaatagtcaatttgctttaaaagaccctt

SEQ ID NO: 10861 - DNA, 120 bp, Homo sapiens
ggccgtggtttcagaaagtgattgcctgtcatctcaagatgttagagtcaacagcaggtctgctcaggaccacatgtttattttccacagtggcatgtgctaggtcacgtggtgtccatt

SEQ ID NO: 10862 - DNA, 120 bp, Homo sapiens
gagcgagtaagagtaagaaaaaaaaaagagacaattctttctttctctcccataaaggttgcgtggtaataatgaggaatgatgagtgagcatgaaggaactaaacatgttattgggaac

SEQ ID NO: 10863 - DNA, 120 bp, Homo sapiens
ttacgcagaagctcagccgttttctcctaacctcccagtgtgggaacccaggaaccatgccagtgtcctcagaggcaagaggggacgatattagaaaatcctgacagcaaagggcagtaa

SEQ ID NO: 10864 - DNA, 120 bp, Homo sapiens
actcgttggcatgttagggatcttcccgtctgctttgtggacgttcctccccctgccacaagaatgaatcccccctcagcacatttcaagcctacataggagtcacggtgacgaatcaat

SEQ ID NO: 10865 - DNA, 120 bp, Homo sapiens
aatcgaattgtcgttgtgctattctgggtttctccgggggcggttgggggggtggggaacgctttggagaaaaccacaaactggccaacatcctctctctccttcaaagttctcctccca

SEQ ID NO: 10866 - DNA, 120 bp, Homo sapiens
tggcggagacagtgtatgcactgtattagagcatttttttcctccatataatggcaccaattaaattaccttgcagcccgaccttaatctggcaggaatgattattccatgaaacagtta

SEQ ID NO: 10867 - DNA, 120 bp, Homo sapiens
ttgcggcaacccctgtcaaagtcacattgatatgctaatccctatagctggcagaatcacttcataaagagagacattgaaaattgaattatttcaatttcagtacctaggaatctagtg

SEQ ID NO: 10868 - DNA, 120 bp, Homo sapiens
gggcgttgccatggaaactgcttgactcatggcagttgtgttagtgacgaagtcattagcagtgtgaaatgtactttgaggttgtcaagtgtaacactccgggaatatttcagtggtatt

SEQ ID NO: 10869 - DNA, 120 bp, Homo sapiens
tcacgcatgatctcattatggtgcaagaaaggagtgggttgtgggggcagttgtacccagaccagatgaatctccattacaccattcacttactattctttctccttaaatagggtcccc

SEQ ID NO: 10870 - DNA, 120 bp, Homo sapiens
taacgtttgattgtatattaatatcattctaattatgaaaatggaaagttaaataaagatacccaatttaaatctctcctatactcagccttctctatgattctctgggagagaaggaaa

SEQ ID NO: 10871 - DNA, 120 bp, Homo sapiens
attcggtaagaaagatacagcattcagcctgggttctgaataggcaatgttcaccggaagatagctcagctcctaatacataaagcagtagggtacattcaagctccacagtaactgctg

SEQ ID NO: 10872 - DNA, 120 bp, Homo sapiens
cttcgacacagattagctcccaggaaaagccaggggtgcacacacacatgtgcgcatgcacacacacaaacatccctctttatcggttttgtttttgtttttgtttttttattttttcga

SEQ ID NO: 10873 - DNA, 120 bp, Homo sapiens
caccgtgcccggcacatccgtcttactttaaaatgcagttgaggaaaaggcagcaacaccaagtcctctccactccccatttcttgtctcaagtcctggcctgagagaggcagaaagttt

SEQ ID NO: 10874 - DNA, 120 bp, Homo sapiens
tgtcgtgtcttggcctgttctctgagactgtccccattggtgctgatgcttgtggctggggtgaagacatgcaagggggtgatattttagttatttggctggtaattaggtttgtggttt

SEQ ID NO: 10875 - DNA, 120 bp, Homo sapiens
gtccgtctcagggcaaggtctaggtttgacctgggtatatttcaaaagacaaggctatcacgagaaaggaaaaaaacaagactgaccatcctgtctggcctcactctgttcttcatcaca

SEQ ID NO: 10876 - DNA, 120 bp, Homo sapiens
ccacgtgcattgattacttttgcagccacactctctaatgtgcttaggtggccagtgattaatgacgcttggacagcagcctggttgctttgttgtgacagatgatgcctcgcccacttt

SEQ ID NO: 10877 - DNA, 120 bp, Homo sapiens
tcccgctactggggcttcatttctatgaaaaagaaaggaccccaaaaccactccctgctcctataggccacttctgtcgggctgctccttctggaagcagtacctccttgggttcagatg

SEQ ID NO: 10878 - DNA, 120 bp, Homo sapiens
aaccggtatagcacagagaaaggaaggtgaactttgaatatcagatccaaacctgacttctaacacttttagttgcatggccttgggcaagttaataaacatctgcaaaatggaagcaag

SEQ ID NO: 10879 - DNA, 120 bp, Homo sapiens
atccgggattcttcccaattttcctgccagttgtttggatttctctcaggtcccctttttatagggctggtttgagctgaaatggaagagtgggctgaggtggaagataagctgagaaga

SEQ ID NO: 10880 - DNA, 120 bp, Homo sapiens
ccccgtctagcgtttgttccagagtggctccccagggcaatggttcctgctccagcacccctcctcctcctctgcctctctgcatcagccagttaatgtctaaccctgtggtgcctcctt

SEQ ID NO: 10881 - DNA, 120 bp, Homo sapiens
ccccggacaggcccaggctgcattcctcagtgccctgggctctcaagggcacacctctgtgatcaggtgcttatctccaggtgttcgcctaaagggaggtcatgaaaaatcaacaccaat

SEQ ID NO: 10882 - DNA, 120 bp, Homo sapiens
catcgcctctcctctcaaaccaggcagcagcctggagagcacaaattatggcaagctgcttccagcccattatgtctgtgctgccaccaaatggggcagggtgtcctggcatggcacggg

SEQ ID NO: 10883 - DNA, 120 bp, Homo sapiens
caccggcaagggcttctgtccaactgatgaaatgataggggctcagctttctggacagaaacagagcttccctcacctatatggtaaagttcacatttcttagcttggaattcaagtctc

SEQ ID NO: 10884 - DNA, 120 bp, Homo sapiens
agacgagctgtactcagctccggacttctgcccaacctaccctcacctcctcccttcccagtaaaagctcctctgattggttttttatttctccagattcactgtcttcatcaacatata

SEQ ID NO: 10885 - DNA, 120 bp, Homo sapiens
agtcgtgcatccctatggacgcttcagtgggcaatgatgattttctgggcctacgacacatccctcctcaaagaaaaacagaaagagactcaagggtcttctatttctttgtgtccccat

SEQ ID NO: 10886 - DNA, 120 bp, Homo sapiens
aggcgctcatgatccttatcttttagaagccaacaattttaaaaatatgctacagagagaaagggcaattgaaatgacaagaactaacagctcagtattttgaaaacatcagggctctga

SEQ ID NO: 10887 - DNA, 120 bp, Homo sapiens
cctcgcttccaatatttaagtctttaaaaacattgaaataaaatgcaatggacaggacccgtatccgtcagttcttgttctcttcccctgaaactgggtagcacatcttgtcgttcctgt

SEQ ID NO: 10888 - DNA, 120 bp, Homo sapiens
ttgcgtaataaacccttaatagaagagactgggtttcattcatcccccagtagccacaggacagaatgcagtgttttttgttataagggggtggccttctgctaaaggaatgagtgagct

SEQ ID NO: 10889 - DNA, 120 bp, Homo sapiens
tctcggccagggctgctcggcttctcggcttctccctgttttacagtctgagatttcaggtaagattttgcttgaagaaagtcttgcagtaatttttttttttaaatcttgaaaaccact

SEQ ID NO: 10890 - DNA, 120 bp, Homo sapiens
acacggctcaggcccatcttttccccgggagcaccacttgaccacttttccaagaaccgctttagactatgaatcactggtgatatggttgggctctgtgttcccacccaaatctcatat

SEQ ID NO: 10891 - DNA, 120 bp, Homo sapiens
attcgcatccagcccaactcccctggtcttagagatgaagaaatctactaaaaattacagacaaagtgacatgcccagagtcacacaactagatggtggatgtaaagactcattctcttt

SEQ ID NO: 10892 - DNA, 120 bp, Homo sapiens
tgacgaatgtctagcccccacttcaaccacccctcagagttttttcttcccccaagagaccccagaaggagaatcagccacaagggaagattcaggcaggcctccggaatgagggctggt

SEQ ID NO: 10893 - DNA, 120 bp, Homo sapiens
ctccgtgggagaccaggctggtgagctcagaggcctgtttttcccttaacagatgcaagaaaagagccggaaaaggtcagagataaatgcagccctcactttgttctgcatattcaaaag

SEQ ID NO: 10894 - DNA, 120 bp, Homo sapiens
atacggacatgacagggtaaccactgagaaaatttttgcaggtttgcaaaatagcagtgcttaggagcagggcgcccagaaagagtgcacttcacgcgggacccatcagtctggtgggag

SEQ ID NO: 10895 - DNA, 120 bp, Homo sapiens
gagcgactggaacactgtcatcagagcggctggaattggaaacggtccaagacctcatcatggctgacatccccgcgcataatcagaaattcctttcaattatgtgggaaaagtctcttt

SEQ ID NO: 10896 - DNA, 120 bp, Homo sapiens
cagcgtgggagcaagatccgattgccaatagcttggttaggagaagacaggccagagaggcgggctgatggaataatctgttgtaccccaaggcaaaacaaagcaacacccccaaaggtg

SEQ ID NO: 10897 - DNA, 120 bp, Homo sapiens
catcgctctacctcagtttccactaaaaggacccaaccagccttttgagccataattcccacgatctccttctgttcaccaaactggactatctcctgttctccaaaccttgttaaacct

SEQ ID NO: 10898 - DNA, 120 bp, Homo sapiens
gaacgtgtaccaatgtttaagtacaataatattcattgcagccctgtttataatagcaaaacaaaataaccaaaatgtgcagcaacaaaagattgagtaaattatggtacagacatatta

SEQ ID NO: 10899 - DNA, 120 bp, Homo sapiens
acacgggcatttctgtagggcagacagttgatgacatggcagttggctccatggcagaaagcaagccagagaataagagagcatgagcaagaagatagagtcttcttgtaacctaatctt

SEQ ID NO: 10900 - DNA, 120 bp, Homo sapiens
gttcggtgagatgtgcacaactcaccgaaggacacagagggctcagggcccacctccatcttgtgggcttcatgatgaagacagagcttttcccacagattcatctgcctctggttagct

SEQ ID NO: 10901 - DNA, 120 bp, Homo sapiens
tcccgaagtaacttctcatgagacgcggccctggctgattgagtttggcaggaattccgagacattccaatatctgcacaaagggcagaccctcgccccagccaggctgacctcagcctc

SEQ ID NO: 10902 - DNA, 120 bp, Homo sapiens
ttacgcctctaggtctccaaagcaagccctgttgtgggtaacccttggaagtgacatgctgttttctgatgggaattaaaaggtctagagtggccaaaaggcttctcagcaggagggttt

SEQ ID NO: 10903 - DNA, 120 bp, Homo sapiens
cttcgattatgtcctcttgtctattttttatcccatgaacctaaaggtagtttcccaggaggcaagaaccacagcttctcctcctctggtctagttcactgtcagcaccagtggatagat

SEQ ID NO: 10904 - DNA, 120 bp, Homo sapiens
gcacgagttggcatcaaaacctgcccttatgaggctgttgagccagaagagatcttggaagtcacttaatccagctctctgatttcccagagaaagaaactgatgcccaggaaggtgaag

SEQ ID NO: 10905 - DNA, 120 bp, Homo sapiens
tcacggtctgctatatcggtgttgaaaaaaacgcagagggcacaaacctcttcatctcattgcaatcctcatagccatcctagaagtcagaaacagatgccaccgctatccccatttcat

SEQ ID NO: 10906 - DNA, 120 bp, Homo sapiens
gggcgctagggcagcagggagatgattgaaaatgccggattgaccctttttttaatccttgaaaaggggaatgctgaggtgaggatgatcatggaaagactgtcattcagagaagaattc

SEQ ID NO: 10907 - DNA, 120 bp, Homo sapiens
gcacgagaagagggaaaagtaagatcactaagcgcctactatgtgccaggaaccaagtcagcaatttcactgtcctgagaagcctacgttgcccttcggagacatggaggcccacgcggc

SEQ ID NO: 10908 - DNA, 120 bp, Homo sapiens
ccccgagtggcagagcagggaggcaggagcagccccacctcacagcctgtgctccttccggatgcggagacttgctctccacagggccattggtgctgcatgtctcgccccctaccccaa

SEQ ID NO: 10909 - DNA, 120 bp, Homo sapiens
catcgtgtgccaggcatttccaagcactggaatcacatactttttggggtgcatgtcaactttgttttccttcttataggccctgcagacctattcatatctgagatcttgcatgctagc

SEQ ID NO: 10910 - DNA, 120 bp, Homo sapiens
aaacgctctctctctctttgacagagttgacagtgtttaaagaatgacaggatacattttttagaaacatagaaaaatggagttttaacaatatatattcagagatggcttgtagttgac

SEQ ID NO: 10911 - DNA, 120 bp, Homo sapiens
ttccggttctgagcctgcctcccatcccgcctgttgcctttgctgggcctactctttaccaagtgcagagccaagggctgaggatttctgtctcccattgggacgtagggggtgaatgag

SEQ ID NO: 10912 - DNA, 120 bp, Homo sapiens
agacgggtcagaatggatgacgtcaaaggcatctcttaatttagtgccactttttagggttctttatttagatggagaaatgactacagctggagtcagagcagtcatttgtgggagggc

SEQ ID NO: 10913 - DNA, 120 bp, Homo sapiens
tgacgtctctaaagcaatgccagctgttgggcagagattccaagcagtggctgcacctgcttcctctccctcctttgtgtcactgagaacaggcttgccttttctctagggtaggggtgg

SEQ ID NO: 10914 - DNA, 120 bp, Homo sapiens
agtcgccttcccagtaacaggggtgataacagcaagtccctcgcatctttttttgtgagcattaagttaggtaatgtatgaaaagcactgagaacagatcttggcacataacagctactc

SEQ ID NO: 10915 - DNA, 120 bp, Homo sapiens
atacggttagggttgtagttggttgattctgtgccgagtgaacttgccatgactgtctgtggggaggggagctgccatcagaagggagggacagagcccctgggtggctggggcagatgt

SEQ ID NO: 10916 - DNA, 120 bp, Homo sapiens
ggccgcagtagtccagttggggaaagtgcccagggagtgcaagcagcaggaagacactctggtggcagtggtagtggtggccagaagtgggcatgacagtgggggtgtcagctctgtctc

SEQ ID NO: 10917 - DNA, 120 bp, Homo sapiens
gggcgtagggagctgacatagcatggccctgtctggagaagcctggccttaggatatttcttgacattaaatattttctatgattacctgagtctcaaaaagacatccaccttacccaca

SEQ ID NO: 10918 - DNA, 120 bp, Homo sapiens
tagcgccacaggctggggtggcaaactatgcaggcatcccagtgcccgccagccccccagagctgtggctctgcaactgcatgtgtttacggagtcaccactgctacccgggagcagctc

SEQ ID NO: 10919 - DNA, 120 bp, Homo sapiens
acccgacataataatttctttgacctccaccacatgagtttctgaaaagaacaaaacagcatcattccctggcatttacagtttaaacctttcctattcaagtttctaacaaaaaaagcc

SEQ ID NO: 10920 - DNA, 120 bp, Homo sapiens
ggccgtgattaaaattcataggcttgctgcagagaacagatgcagaagcaattttaggccagtcatatcccaggtctgcaaaattaatttgacaggtttgcattaaagcactgatcaata

SEQ ID NO: 10921 - DNA, 120 bp, Homo sapiens
gagcggcagaggctaactgagaaaaaataagtgaccggagtgttaccagacgagaaaaaatgaatctttgagactttttttccctctaagcttgcacctacatcagaagtcctgacctca

SEQ ID NO: 10922 - DNA, 120 bp, Homo sapiens
gatcggctgcagttaacatgacaaaaggcccagcagatagaccatctcagcctaccagggaacaatcacccggatacactaaatgtttgacggagtgactggactgcagaattagtcttg

SEQ ID NO: 10923 - DNA, 120 bp, Homo sapiens
ttccgaggtcggccaccagcccggtcttactgaatcctccccctccctcccctaaagccatttgcagagactcaacttttcctaaattttctcccacggatggtgtagggatgtggtccg

SEQ ID NO: 10924 - DNA, 120 bp, Homo sapiens
tcacgcagcactttaaaatggaagcaccaacgctggcatcagcagagtccttcaaagaatttgattcagtggaggccaactcaacaaaatagaaagccccagatggacagccattggctg

SEQ ID NO: 10925 - DNA, 120 bp, Homo sapiens
ccacgctgcccagtttggggattccaagcaggagggcccgggagtagctgtcccactgacttgaatgcacttcaagccctctcttgtttccctagggccgagctctcttagcctcccagc

SEQ ID NO: 10926 - DNA, 120 bp, Homo sapiens
cctcggcctggtggcctctggcctggccaggggcatgcggatggcagtggcattccagcaagggtgagatcaccacccatcgccctggagaacaggctgccaggggaggtgtctgcgtca

SEQ ID NO: 10927 - DNA, 120 bp, Homo sapiens
ctgcgggctccctccatggctgccacttcccatcacctccctctggagaggcagagtgagcaggctgcttttctcttcttttgcttcactgtgggcccccttctggcccctgggaggaga

SEQ ID NO: 10928 - DNA, 120 bp, Homo sapiens
ttccgttgatacagaggggtgtggaagagtagggaaggggaagcaataaataaaataatgctgatgtaagaggcttggtttgagccaagctgcctgggagagacccagagtctagagcta

SEQ ID NO: 10929 - DNA, 120 bp, Homo sapiens
aaacgaggatcttaatctgctgggagtgcagatccctctgaggctagaggcaaaaccgtgagaacatgaattctagagcagaaggctgacgcctttccttggatgctaccgtcaggtccc

SEQ ID NO: 10930 - DNA, 120 bp, Homo sapiens
tcacgtaggcctgcaccctgcagctctgagggcccagcccctaggaaagggagggcagtagttccatgtgcttctcagaagagctggtgccaacagggtccctttgaagttcctgcttag

SEQ ID NO: 10931 - DNA, 120 bp, Homo sapiens
gcccgtccccgtcctccttatagcctcatggtgcctggtgccataagatggagtgacgcaaatgttcaggctggggaggaagtgttgggtccagtgtctgaggtcagccacatcacagag

SEQ ID NO: 10932 - DNA, 120 bp, Homo sapiens
ctgcgggcaggagatggcagggaccatgggacccagcagagtgaggggtgctgaggggtctcagagcagagagactcccttgttctgaccctctccagctgactgcaggtccgcgagcct

SEQ ID NO: 10933 - DNA, 120 bp, Homo sapiens
gcccggacgctcctccatgtgcttttctgccccactactaacttcagtccacatcacagcctccgagagtggggcttctggggccatcccctctgtgctctccgcaagcaccattctgcg

SEQ ID NO: 10934 - DNA, 120 bp, Homo sapiens
acccgaagcttccgctccctagccctgtgctcttcccctctccagtccatctcggccgggagtcgggtctctgccagcccagcgctcggaatggagctttgtggggctggggaagcaacc

SEQ ID NO: 10935 - DNA, 120 bp, Homo sapiens
caccggtagccagctttctgcctctgtggccagaagactggggtatgccaatgggaggaactcagccctaggcaggagctttccctaatggagacatttgtgggaatgggggcaaggggt

SEQ ID NO: 10936 - DNA, 120 bp, Homo sapiens
tgacgtgcattggagctggaggtggtgccgggcacactccaagaactagatcagttcccttccctggtctgggccttagtttcctgatctctaaaatgcgggttgggctgcatccttggg

SEQ ID NO: 10937 - DNA, 120 bp, Homo sapiens
cagcgtgagtttagctggaatatgttctagctggaatctcaagagctgagctcttagttacttctctgtaggaatggaggtctggcagttccacttaaaacttcccaaggcccccttgtc

SEQ ID NO: 10938 - DNA, 120 bp, Homo sapiens
gtacgctgccccacactctgggcaactctgcatctttgaacacctgcaggtatgaactggactgccggtcccccagtgcacagcccaccacattacagggtggatgccctgtaaaccctg

SEQ ID NO: 10939 - DNA, 120 bp, Homo sapiens
ccccgtgtgtgcatgtcttgtgcttggacactgatgctctatccttagggccctcccagaaggccaagcccagagccagggtgccccttcctcccagccctcttcctcccagccctcctc

SEQ ID NO: 10940 - DNA, 120 bp, Homo sapiens
gcacgtggcatggagttctggtacctgctttgatgagaacctgtgggatgctctttcgtactctgcacaacacacaacactgaatgtagatagagaggaggctcactgcgcgtttggtga

SEQ ID NO: 10941 - DNA, 120 bp, Homo sapiens
ctccgactacaaatccaacatgctcccctctggccctggtccccttgtctgccatctcgttccatctctctgcatcagggacagccaaggacatatgcacccaagcctcggtctacatgc

SEQ ID NO: 10942 - DNA, 120 bp, Homo sapiens
catcgtcgggaaagtcatgtgagtcctcatgagctcattcccagaatcaaagaaaagggctgtggggccttggcctgaggtctgtggcctccagaaaggctcccaatcaggataatgctt

SEQ ID NO: 10943 - DNA, 120 bp, Homo sapiens
acccgatggtttgagacacactcttcctgctaccactgctaatgccattacattatcttaatagggttcccagagctgccaggagtgggaggactacaaagaaaatagagggaagacaaa

SEQ ID NO: 10944 - DNA, 120 bp, Homo sapiens
attcggctggcactggaggaggcaggtggagactaaaaggcacagccttcggggttcagcggaactggaaagcgtgccttgtcagagagtgactgcggtgcagaggtcgtccatccccac

SEQ ID NO: 10945 - DNA, 120 bp, Homo sapiens
ggacggtgtgctctatgggacctctgctgtctctgggccagtctgttttcattttgcagtttcttgccttcactactgtccccatcaggcatggctggggcatctctgggagccaggctg

SEQ ID NO: 10946 - DNA, 120 bp, Homo sapiens
aggcggaagatgcacaggctttcacagggcccagggccaggcccagttggcagtgatggctgcagatggggcaaaaaggtgtgcgggggccacctggacctgggatgtccgtgggcaggg

SEQ ID NO: 10947 - DNA, 120 bp, Homo sapiens
aaacgaatgagaaaaatgagtcacatccaggctgcagagggcacagagatgagccacccagatggggaccccagctgctgggagcaaggtcagcattcagccctcagctcaggacagccc

SEQ ID NO: 10948 - DNA, 120 bp, Homo sapiens
tcacgccttccaagaaccgcacattcagcgactatgcagggcgtcagaggcctgggcgttttggcccaagctgggacaaacttgaagaggccctttcagccccagaggtccctgtggggt

SEQ ID NO: 10949 - DNA, 120 bp, Homo sapiens
ctccggggttcctggcctaggaggggcagcctgtggtcatgcaagctttcctgttctgtgttccatgcacacacaagccaagctaccattgtggggcagctcttatcccatggggggaac

SEQ ID NO: 10950 - DNA, 120 bp, Homo sapiens
gtgcggatgaagtggaaggaggcccactctagctgatccccttccaagcaaggcctagatggagggggccttccaaatggaacaaaagggaaaatgacagaagagagcaagcatttctat

SEQ ID NO: 10951 - DNA, 120 bp, Homo sapiens
ccacgctatttttttttttttttgctaagtcatgagaagtgcagcaagttaaaaatcaaacaaaaattaacaagcacacacacacaagatggaaaataaatcctccgtggaagttactat

SEQ ID NO: 10952 - DNA, 120 bp, Homo sapiens
acccgattcccctccctctattcatctccacagttcccagccaaaggaaaataaactgaacagctctctccctggcccaacctgtagggctgcctggctgagcaagggctgagcaaacaa

SEQ ID NO: 10953 - DNA, 120 bp, Homo sapiens
tcacggcccttatcaagctgataatctcaatattgggggaaaatgcctttattctggcagcacgacatcaaggtagtatgcaatatgatcttgtgacctcaaacccaggatttttttttt

SEQ ID NO: 10954 - DNA, 120 bp, Homo sapiens
gtgcgggagtggaggcaggagggggagtcactggggaaagccagcagctggcctggttcagagggttcactcagtagttaagaaaacaggagggggtctatgaggtagagccagtttatg

SEQ ID NO: 10955 - DNA, 120 bp, Homo sapiens
gagcgggatgtgggagggaagctgtagggaggggtgcacagagttgaggtgcccagcccagcttacccccaggcggctcctcctagccagggttccagtccccggactggaaggagtgtc

SEQ ID NO: 10956 - DNA, 120 bp, Homo sapiens
caccggctgggtcctgcagtggacagtgaatgccactcctccctccccctaatcactgtgtgtgtgtgccctgctgggacacacccttcagaatggctctgggcacaaagtggggagccc

SEQ ID NO: 10957 - DNA, 120 bp, Homo sapiens
ccccgccccaccacccctccagcctccctcggtgccagctgcctcctgggaacaggaacataaagcagtcttagtgaagtgggtggggagagagggcaaggggaggctcccaaagccacc

SEQ ID NO: 10958 - DNA, 120 bp, Homo sapiens
ccccgccttcccggttcaggtcagccagagcacgtggaagcccgctggcttcacacggcaagcctgccctgactttcacagctggctccaaactcaacaactcactcatgttccagtgag

SEQ ID NO: 10959 - DNA, 120 bp, Homo sapiens
ggacgaaagctcctacttcaaccaccgagcatggctcagaaagctaaacagaagcacataagcaaacatgctactgtcttaacttgaaacctcagcagggcctagtcatctgctggggtt

SEQ ID NO: 10960 - DNA, 120 bp, Homo sapiens
acacgccataggagaaaccttgtgtttgttaatgggggcacttgccgcagcgctgagagcatatctcagagatgactcccctggctgctcctgctctgctttgctcccctccccagcagg

SEQ ID NO: 10961 - DNA, 120 bp, Homo sapiens
aggcgcgtggagtcatctctgagcatcctgcctcgtcagtgtggagacagaagcagaatgaagccccttggtccagggacccatcgtgggggtgcctctgggaagcccagcaagcattta

SEQ ID NO: 10962 - DNA, 120 bp, Homo sapiens
tcacgtacattttattttttctagactcaggcaagtactcctggattccccaccctaccccctgcccagacagccaggggaggagggatctctcacaccagcttctaagtcatcctgcag

SEQ ID NO: 10963 - DNA, 120 bp, Homo sapiens
ttgcgggggttgtctgaactaaaatctagaaaggggctaaagaaggactccactttcatagctggggggaggtgtggttaggccagtgaaccctggtgagaactaagtgcagcaaggtga

SEQ ID NO: 10964 - DNA, 120 bp, Homo sapiens
caacgctgcagaggcagggacaggcccagcatcaccagggcagtgagttaccaggtctggctggagcagatgacatatgcagagaggatcaggaaatacagccaggagggcagctgagga

SEQ ID NO: 10965 - DNA, 120 bp, Homo sapiens
gcccgccagctgactctgggcttgagtctttggatagctgtggggaagggagaacagatgaggaggagtgggtgctggagtgcagcattttgttcgggccctgcagagacacatctggga

SEQ ID NO: 10966 - DNA, 120 bp, Homo sapiens
ctgcgtaccagcctctgattcagagaagtaggagtgagtttctaggagctaaagccctggcaaatatactatggtaggggccctcttagctgtctggactagtgagctacctgaaagatt

SEQ ID NO: 10967 - DNA, 120 bp, Homo sapiens
ggccgccccacctggaggatgcttccagcgtctccctgaatgaacaggttgccattaagcaagttagatggggcaggaagcatgctcaatggcatggctcccgagctggggagacaggac

SEQ ID NO: 10968 - DNA, 120 bp, Homo sapiens
gtgcgggcctcagttcctcatgggagaggcagactacgagactgattgctggttctgaccacagatgattttgttaagggtgagccctgagagcaaatcccttcccaagcctgcctctgg

SEQ ID NO: 10969 - DNA, 120 bp, Homo sapiens
ctgcggatgggtggggcacatcctcttgggcctctctgtctctcacccctgcatcctcctccccagtaggacccctcctcactgctccacccaccagcctgagagtggctgccaagggtg

SEQ ID NO: 10970 - DNA, 120 bp, Homo sapiens
tgccgcccccctgcctgcccacaacccttccctgcatgccaggagtcaggaggctctgagtagaagcaaaaaccagaggcctttcagctcagagggagtctctctctctctgtctctctc

SEQ ID NO: 10971 - DNA, 120 bp, Homo sapiens
actcgtgctcatacacactcgtacatgaacacacccccatgcacccttacgcccccacttgtgcaggtgtgcacaccctctcatacacaaacacactctcactttagactttaacatcaa

SEQ ID NO: 10972 - DNA, 120 bp, Homo sapiens
cctcgaaccatctggaaacataagcacggcaggattgtgcgaggctggaggtgaagacagccggggtcatgggaagggaggcggaaaaacaagacagtgccagatcccagtcaaaacagc

SEQ ID NO: 10973 - DNA, 120 bp, Homo sapiens
gttcgtcccgctcaaatctcatcaaaatgccaagattccccctgccacgtgcccgcccaggcagcttgccccagaccccgacattctgcctgagctgtgtgccaccagccttcctgcccc

SEQ ID NO: 10974 - DNA, 120 bp, Homo sapiens
ccacgtggatctttctgtcctctgggcccccagtacacttgcaagtagcaccactcacgtggcaccagcacgagcaactcgtgtgggcagggagatgctggtgcagcctccttgcaatca

SEQ ID NO: 10975 - DNA, 120 bp, Homo sapiens
actcgtccagacatcagagttaaggattagagaaaacagaactgtctcttctttttctcaaaggaatagaggaccttaaaaaatgtacttaatgaatgcatgcagctgagcattctggtg

SEQ ID NO: 10976 - DNA, 120 bp, Homo sapiens
tcccgaaaatgaccttcctgacctccttcctggcctctctccacaaccttccacagcagtcctgagagggtcagctatctcgctcttgacactgggaactgtgtctattcatgtccctgt

SEQ ID NO: 10977 - DNA, 120 bp, Homo sapiens
aaacggctagtgacattaaaatctggtgcaatatttgggtaaaatatttagcaaaacacatcaagacctataaagatatctgtactctataacctagtaatcccactgttgggacttcat

SEQ ID NO: 10978 - DNA, 120 bp, Homo sapiens
gtgcgtgggtgacatctctacagtcaattaatgagccagtcttcataagatattacattagccagcctggctaacatcaattacagtcagaagctgagctgtaatcatggggcgaataag

SEQ ID NO: 10979 - DNA, 120 bp, Homo sapiens
actcgccgcatgtcactccccacagctggctctgtgtcactgcacatcctcacagatgcagctaggcttgcctgcctactctgggaagccagagccccactccccaggcttggcttgatg

SEQ ID NO: 10980 - DNA, 120 bp, Homo sapiens
acacgatccaggtttcagagaggtggaaatagctttccaatgtgctggaaagcagtgctttggaaacctggctgcaggggttcggttaagggaggctgggaagggctaccaccaagtcac

SEQ ID NO: 10981 - DNA, 120 bp, Homo sapiens
acccggccagctcccaccaaatggtctgctcacatggggaatggtgactaactacatgttcatgtggtggacactcccccaaaaggactgtgcctgggagtcagccaaaagggcagcctg

SEQ ID NO: 10982 - DNA, 120 bp, Homo sapiens
tgtcgtctcaatcaacccccacgaccacaagcgaagtggaaggacaggggtcccaagtccttggctgcagatgagaaagtaaaagacagaatggttatgccacttgggaaggtcacggtg

SEQ ID NO: 10983 - DNA, 120 bp, Homo sapiens
acacgggagttcaagtcttggttcatctcggattttcgcttaagctgggcaagttatttatgctctctgagccagtttgctcatctctagaacagggattgtaacggaacataccccaga

SEQ ID NO: 10984 - DNA, 120 bp, Homo sapiens
agacgcgtgtcaacttgctgtaccatgtgattctgcactgggcccttttgctaaaacgacatcattgagacacttgcacaacgtaatgagggtctgaggattatgaagcagcagcaaatc

SEQ ID NO: 10985 - DNA, 120 bp, Homo sapiens
tctcgtttataggaaatgcacactaaataatattctgggatgatggagcgtcagtttggcaatttactcgcaaatggttcaggggtgagggaaggctccttgtactgcatttgtgccttt

SEQ ID NO: 10986 - DNA, 120 bp, Homo sapiens
ggtcgatggagctaggacccaccaacacccaggcctccgatcccacaactcatgctcttcccactgactccacggcagggaggaaggcatccaggaggcgactgagaaggactattgcaa

SEQ ID NO: 10987 - DNA, 120 bp, Homo sapiens
ccccggatgttggaaatgagggtgccaaataacctgcaatgcctccacaatctcacccagccaagacttgacctgcattctagcactatagagaaacagactttgttttgttcataattt

SEQ ID NO: 10988 - DNA, 120 bp, Homo sapiens
cctcgtacacgctcaataaatgatagctactgatattttttacaaagggaaggaaggagacttaaagcacccacaggaccatggatggctcctgttactccaggccatgcctgtagcttc

SEQ ID NO: 10989 - DNA, 120 bp, Homo sapiens
agccgtactagaagggctccctttcagggccgccaaagctactgaggggtagcaggactctgtgcggggagagggtgggcaatggcttctgtaaggtgaagaggtttgcagccttccagt

SEQ ID NO: 10990 - DNA, 120 bp, Homo sapiens
aggcgtgccctgctctttgattcgcttgctgcagggtagaccctaattatcctggggagctaagcagaactgctcccctgtggtgtttttgagggtcattaagagtgtgggggttgggga

SEQ ID NO: 10991 - DNA, 120 bp, Homo sapiens
tgccgcaggcgcccgtcccctgggcctgcatcctcttcctggcaaggcctcgccatctcactttgggaagatttggctgcccagacaccctcccactatgcttaggtggctgtagccagg

SEQ ID NO: 10992 - DNA, 120 bp, Homo sapiens
gcccgcggaaagccacccctcctgccacctccctagtccaagagtgccctcctcctcttccacataggtgttatgtgctgcggagacagtgaacgaaagtcaaaattcctggccccaagc

SEQ ID NO: 10993 - DNA, 120 bp, Homo sapiens
caccgtgggagtcattagcacgaatgcggtgtttacctccctggggaagggcaagcaagctgctggcgtggttcagcatgcaccttcccctgggagcccggagagcacattagcagaggc

SEQ ID NO: 10994 - DNA, 120 bp, Homo sapiens
gtgcgtgtgcacatgccagcctggaatttgaaattaatcacctgcggaaggcacaatgggcagatgggagggagttgtgggaaaggcgttgaaccagcagccgaagcagctactaaattt

SEQ ID NO: 10995 - DNA, 120 bp, Homo sapiens
ccccgttcctaggtgagtttttttctgtttctagcttggctcccattataacacaagcctccaaatgttgatccccttgacaggtgccccaggccagctcctctggtgccagtgctggga

SEQ ID NO: 10996 - DNA, 120 bp, Homo sapiens
tgccgctcctacaatgctgggtgcagcccagagcgaggccatttgtgaggatttgccaggctctctagcagctgagatggacctggcgctcagctgccctccacccacacggtaaggtcc

SEQ ID NO: 10997 - DNA, 120 bp, Homo sapiens
aaccgtgagctctgatttctgcctactgcaagctggctgcagtacactggagagaatatttccctgcttggggcatcctgcttctgcttgaaaaataggaggtgagagggcacacaccag

SEQ ID NO: 10998 - DNA, 120 bp, Homo sapiens
taacgtcttgttaaacacagagcacccagccatgccccggagtcttcggtaggtccagggtgggcctgggaatatgcattctgatgagtccccaggtaaagctgctgtggcccaggggcc

SEQ ID NO: 10999 - DNA, 120 bp, Homo sapiens
ttccgtggggcttgcacagatgatgtttctagcttactcagcatgattttgtggaggtggaggtagcagtccctggtggcctcttcgtggggtgctccttccagaatgtttcctctgcgt

SEQ ID NO: 11000 - DNA, 120 bp, Homo sapiens
aggcgggatccagtggcgttgggcgctagaagcctctcccttccccggcagacccagaacgcctggccttctaggacccaagcccaagaggactcaggctaagattgtttttagctgagg

SEQ ID NO: 11001 - DNA, 120 bp, Homo sapiens
acccgctgccacacacaagcaactcttggtggtcaaattcaattcaacaaaactttacaaagctcattttactggcctggctcactttggggctgaaatggtttcagaggcctagagcag

SEQ ID NO: 11002 - DNA, 120 bp, Homo sapiens
caacgcagctgaaagagcccctcactgtccgcattggcttctcctcctccctcagcccagcagcagcaggaggggggcagtcgcaggcgagtggggaagagataggggtcaggtggggga

SEQ ID NO: 11003 - DNA, 120 bp, Homo sapiens
ggacggagttttgcattggcccaattagagactggctaggatcccgggctcggtcatctccatagcataaatccctcccttccactggtacctcacagtcagtgtccaacaggggagcta

SEQ ID NO: 11004 - DNA, 120 bp, Homo sapiens
gcccgtggcctgggcctcaccaaccacctgccatgcccatgcgccttggtctcagcacctgcccaacctctcaccaccccccaccacctgctcaggccccctggatggctgccaggcagg

SEQ ID NO: 11005 - DNA, 120 bp, Homo sapiens
actcgggagcctctagtggtccccgctaaccctcaccaccaagcctaaggctgagtcctagcatttcaagaggctcttctctcctcatctccttttttattttcctttaagatgtctcct

SEQ ID NO: 11006 - DNA, 120 bp, Homo sapiens
ctacgtccaagacttccaaaaaaagtctactgttagaacaagcagcctttctgtctttcctcatgcttaaaagggccagtgagagaaagacttttttctttgtgtgtgtgtctgtgtgtg

SEQ ID NO: 11007 - DNA, 120 bp, Homo sapiens
tgccgagggaaggggctgtcacccaagtgcacaggcctggaaaggcaaactgcttcgctggatttttgttcagaacacatttgggagtgcatctgcctcaaagctcaggggtttcttgtc

SEQ ID NO: 11008 - DNA, 120 bp, Homo sapiens
ctccgctgctctggggagtctgagatgggggcatatttcacttggcaactcaggctggcagcaatagcattctctttgtggggtgacctatcaacccacttgtcctctacatctcggcct

SEQ ID NO: 11009 - DNA, 120 bp, Homo sapiens
aatcgacaacagaaatggagggattcctggcccctgccagtcagtactctgtgatacctctgatccagattccccacccctccaacaaaacccaggggtaggcatctcttcctcatgttc

SEQ ID NO: 11010 - DNA, 120 bp, Homo sapiens
gcccgtggtgggagctgcttgagggcacatgacttgtcttgctcagcaccaaatctcccagtgcccagcacacagtaccatcgcaagtgcttagtaaatatctgctgaatgaagaaataa

SEQ ID NO: 11011 - DNA, 120 bp, Homo sapiens
actcggtaagagggggttgctactgtcatctaatgggtaagacgccagggatgctgctcaatgtcctacaatggacaggacagtcttgatacaacagatgagaaaactgaggttcagaga

SEQ ID NO: 11012 - DNA, 120 bp, Homo sapiens
ccccgatctgattccagaaacaaaacgtctccccaaatgtcctgtgtccctgatgcctttgctctgaggatgccaggtcgagagcttgtttgcaaagtacagggaggcaccagtgttttt

SEQ ID NO: 11013 - DNA, 120 bp, Homo sapiens
ccacgtgccaagctttacacatggcatctcagtgaaacctcacagcagcctcgatgtgacatatactattaccatctccagcttataggcaatacaagtcaacgtcccaggtcctgcagc

SEQ ID NO: 11014 - DNA, 120 bp, Homo sapiens
gctcgcccgacattcagcagacctttcccctctgctggaggacccctgcctccttcctcaccccctgcccatctcaggggccctactgaggcgcatgcgcactagctatagcccagccct

SEQ ID NO: 11015 - DNA, 120 bp, Homo sapiens
agtcgccacacatgccctcagctccaaggcttccaggccctctagatggggaaactgagggctgaggtggacttgtgacccatggaggcctagctgtttgtcttctgctctctgccaccc

SEQ ID NO: 11016 - DNA, 120 bp, Homo sapiens
tcccggctggtcagggaggcaagttccacacagccccttgcagacccatgctgccctagaccttgaatcagtgctggcatggcgacaggctgttcctcacactaggagggtcgcatctgc

SEQ ID NO: 11017 - DNA, 120 bp, Homo sapiens
ctgcggcccacgtcctccctctggtccagcccagctcacaggagcccaacactgggcttgggcccaaagcctccacagtgttcacttatttgcctgaacttggccctgctgcatacaccc

SEQ ID NO: 11018 - DNA, 120 bp, Homo sapiens
gggcgattgttctcaacagcatctattgtttgctgaatcctgtgcccagccctcaggctccgcaccactttcattggttcctaatattcaaagagtctctccccaagaagggcactcctg

SEQ ID NO: 11019 - DNA, 120 bp, Homo sapiens
ccccgccgtcttctgggtccctggtatggaggggccccaagcaggccccttcttcccagaaccaacatgtcacaggttccagcctgttcccctcccctggcaaccaagcccaagggctca

SEQ ID NO: 11020 - DNA, 120 bp, Homo sapiens
ggtcgctttctcctaccataaattttgtgtcaattaacgagtattcatgaacgatgccagaatgcctctgtgtgtgtgtgtgtgtgtgtgtgtgtgtaaccttgatttgtaaccaaatca

SEQ ID NO: 11021 - DNA, 120 bp, Homo sapiens
gcccggtctgctgggcagcctgctcaggctggtcacagtggcctggtctctctgtctcttcgtggaaaagattaggaaggctggatggcctgggacctgaatcaggccagttccactcga

SEQ ID NO: 11022 - DNA, 120 bp, Homo sapiens
ccacgtctgctccatgacccacccccgaatcaccatcatcccagctcctgatgccctgtggttccaggaacaaccacactgtactaagcgcagtgttcaaattctcaggaccccaccagc

SEQ ID NO: 11023 - DNA, 120 bp, Homo sapiens
tctcgatcccagctttggccctagtgccaaagctctgggggtacaatgccccacaacctggcattgctaagccacagtacttggagaagaatcgctggagatgagagagggcagggccct

SEQ ID NO: 11024 - DNA, 120 bp, Homo sapiens
ctccgtctcttctctgaccccttattggaggaggaggggggcacccaaacagcaaatcaattaaaagttactgctaccacccagatgtccatacatgaggttaaattaattgtctgatta

SEQ ID NO: 11025 - DNA, 120 bp, Homo sapiens
tcccggccacaactgtcatcgttcactgtgaggactttgctcctctgtttagggtctgttgtacctacttctcctctctctggcactcagtgcaagggagagcttggctttctgccccat

SEQ ID NO: 11026 - DNA, 120 bp, Homo sapiens
attcgttggctttctgctccacaccagctggcaaaggctgaaagggaaggcctctaagtaagaatcccagcagggtgaattctctgtgctggtcccttaaatcagagggcaagactggtc

SEQ ID NO: 11027 - DNA, 120 bp, Homo sapiens
ttccgtgcttgagctccaatcctttcaggattgctaagtggtaagaactgcctgaaaatcagtgagtgttacagctctttcagaactcttctagcagtttttccagcttttaccagaatc

SEQ ID NO: 11028 - DNA, 120 bp, Homo sapiens
agccgagggagggaagtgctttgcaagaaacctataaaggagaaaaatgggtatttggtgacctccatgttgcctttctgacctcttcctccaatgcccacgctagggtcattctggcag

SEQ ID NO: 11029 - DNA, 120 bp, Homo sapiens
gaccgcgatccagtctcagctctactgctgaccagtgagtgtccctagacctcttacttcagctccagggacagtatttggttgtgtacatatagaagatactggccaggatgacctcag

SEQ ID NO: 11030 - DNA, 120 bp, Homo sapiens
attcgcttcagcactgtctattagtgagaactggaagtggttttcactaaatatgctgataactatgctttttgatgtgacaataccttggcatttgtgaactcttaataaccagggagg

SEQ ID NO: 11031 - DNA, 120 bp, Homo sapiens
tcacgttaatgagttcttgagttctgtcctgtgagatttctggggtgtacctcactttgtgcaaatgggagagtagtatctgacaaaaagtacacacggtggctctagaaaatccttgta

SEQ ID NO: 11032 - DNA, 120 bp, Homo sapiens
catcgtttctcagccttttggataagataaaagtgtggaaaatccttgtgtcctaaattcccctagggcagctggcactccaagaagccctgcaggatgctgcacacaggctggggttca

SEQ ID NO: 11033 - DNA, 120 bp, Homo sapiens
ctccggtaccctccctgcaggatgctgcacacaggccggggttcactccggtaccctccctgcaggatgctgcacacaggccggggttcactcctgtaccctccctgcaggatgctgcac

SEQ ID NO: 11034 - DNA, 120 bp, Homo sapiens
ctccggtaccctccctgcaggatgctgcacacaggccggggttcactcctgtaccctccctgtaggatgctgcacacaggccggggttcactccggtaccctccctgtaggatgccgcac

SEQ ID NO: 11035 - DNA, 120 bp, Homo sapiens
ccccgccccagcctcagccagctggtccttccgcgcccaagttcccacagcctgctatgagagggaggacaactgcccaccctcggtgggggcagggaacaaaaatgccctggtgacagc

SEQ ID NO: 11036 - DNA, 120 bp, Homo sapiens
caccgcccctgctggagaggggtgagaggccggtaatattactagggggtctcttataccctggtcagcccaggaagcccaagttgcgtgctgagaatgttaattcagtgggaaaagtta

SEQ ID NO: 11037 - DNA, 120 bp, Homo sapiens
ggacgggaaatataccacattcgctggcaagcatggatttagaaagtaccagataaagaggccatgatgggcttggggtgtgggggtggcatttctgatctcaagccctaccaggccttg

SEQ ID NO: 11038 - DNA, 120 bp, Homo sapiens
gagcgggagccaccggaccaaggagaatgaaggactgagagtttccacctctcacgcagttttgtacctagtttcaacacccgggtatctggcccgctctgggaataatgatttctttca

SEQ ID NO: 11039 - DNA, 120 bp, Homo sapiens
ggacgacctaccgaggtgtttctacctcgctgccctggattcctcaaccccgccaatgaagaacagggccaagccaccggacttctcggagcctctctcccaggtctgggcacagtatat

SEQ ID NO: 11040 - DNA, 120 bp, Homo sapiens
ctccggctctagccttgcgcatggtccagcgagacttcccatacaggcagcgcacgccacccacccccagctcccctcggccttgcgcccgcgccgcggaaggttgggtaccagcctcca

SEQ ID NO: 11041 - DNA, 120 bp, Homo sapiens
taacgggagctgccgcttcgcttttctttggctcctcctggccttcatcctagtaaaaccagacaagcaaccggaaaaacaaagcagcacagcggccagagacaattcgctttcaacgga

SEQ ID NO: 11042 - DNA, 120 bp, Homo sapiens
agacgtacacaccttgagagaagacgcacgcagttcccgtgcgtgtcgctgggaacagacctcgcactaccccgcgcggcgacaggcaccgggccaggctcggcttcacttgtccgaggc

SEQ ID NO: 11043 - DNA, 120 bp, Homo sapiens
gtgcgtgcgcccatttcccccagcttcccgacttgacagcagcaaggatctttgagtcctgcatgagcgacacctcgggcaaggactgtactctgctcagatctcatcgagaggtgctgg

SEQ ID NO: 11044 - DNA, 120 bp, Homo sapiens
cagcgcgaagtgagactgcaaaagtcccaggaaaacgtcactcaccaaaacgctcccgcgccttccaggcagaagtgcggtaaaacttttggcagaaaccacctgtggctgccgacgggc

SEQ ID NO: 11045 - DNA, 120 bp, Homo sapiens
gcccgccccgctcgggcccgcaggcgccgccgagccccgggccgcacgcgcccgcagaagttcctttccagccccgcgcgccacttcgctccgggccgcggtgccagccaggaggcgcgg

SEQ ID NO: 11046 - DNA, 120 bp, Homo sapiens
tagcgccagactcctggaacaccgtgagctcatgtgcctggcctgcctggcctgcctggcaccagccactcaaagaggctgtaacttcttctttcagccaaggaaaacccagaggctggg

SEQ ID NO: 11047 - DNA, 120 bp, Homo sapiens
acccgctaagaaatggaagacaaaatagagctacaaaataaatgtctcttcatttctcccttctgtggataactctgagaactggcttctccttgaaattctagagaaaatccaccatgc

SEQ ID NO: 11048 - DNA, 120 bp, Homo sapiens
ccacgcttatttccctgttcttatgccttgcaaatacagtgtcagcactttaatccttgcttaaagctctgcatccaagagtgattctagaaaacaattatcaggatggaattatgagtt

SEQ ID NO: 11049 - DNA, 120 bp, Homo sapiens
catcggtaaaatagggaatttggtctaggctgggggttggcaaactacaacttgcagactaactccagcccaatgcctgtttttctaaatgaaagttttactggaacacagtcatgcctg

SEQ ID NO: 11050 - DNA, 120 bp, Homo sapiens
tcacgtacatctacggttgcttttggctggttacaaaaaaaagaacatatggctcacaaggcctaacatatttactgtctggccatttacagaaaacacttgctcacccctgatctaaaa

SEQ ID NO: 11051 - DNA, 120 bp, Homo sapiens
tatcggaggtaaagatgagtcctctctttttataactgaggaaactccggctcagagaggtaaattaaattgcccaagattacacagctagtaggagctagaagcagaatctggcctggg

SEQ ID NO: 11052 - DNA, 120 bp, Homo sapiens
atacgtggggtgtgtgtcatcctggaggagaaatttgatctggccccggaagaagaaggtgttgatgaggtagataaagaagagtgattggaagctggatgcagtggctcacacctgtaa

SEQ ID NO: 11053 - DNA, 120 bp, Homo sapiens
gtgcgggaagtgagccgtctcggaggtagccaacatgtggctgaagcagtctttaaggacaagagcccttgcgtctggatcaggaaggctgccctggactgcactaagaggcatttgggc

SEQ ID NO: 11054 - DNA, 120 bp, Homo sapiens
aaacggcagcctccagccaggtctggctcagcccacagagctgctggggtcagagcagctttaaaacactacgtgcagggcttggaaggccagcagagcacgggacatccctgtgtttca

SEQ ID NO: 11055 - DNA, 120 bp, Homo sapiens
gggcggagcttgagaggggtgtggttaggtcaggtcagcggacaagggccatatccagccacccacgctggccattcgcagtgtgccatcactgtgcggggacgggaaggcagcacactg

SEQ ID NO: 11056 - DNA, 120 bp, Homo sapiens
ggccgcctctgtatcaggtgctgtcctgggccctctgacacccctggtggctggtgtcattacccagggggaaggcagtcgcatccccagcagtgcttggccatacaggtcaccttccac

SEQ ID NO: 11057 - DNA, 120 bp, Homo sapiens
ccacggagtggagtctggtgtcaccgggcaccctcaggtctgatttgcagtcatctcaccaggtctcacctcctctcagcaagacctcccctcacctcttctttcctgaaactgtcttcc

SEQ ID NO: 11058 - DNA, 120 bp, Homo sapiens
tgccggggcggcttcctgctgtcactctgaagagggagggtctctgttcctgccgctcttcagttcagacagatgccagctgcccggagttgcacccatttggggataaatttatttttc

SEQ ID NO: 11059 - DNA, 120 bp, Homo sapiens
aaacgagtgcataatattgcattaaaaaaggaaacaaaattaatgtcttaaaacgaccatccttttattatttgctcagagttctgcactttgggcaggagttttagggggtagagagtg

SEQ ID NO: 11060 - DNA, 120 bp, Homo sapiens
ggccgcttgggaccctccattcttctctgcgtggtgtctgtgtgtggttagcttgggcctcctttcagcatggtgttgttggctttattgaaaggtgactggcttccctcagaacagaaa

SEQ ID NO: 11061 - DNA, 120 bp, Homo sapiens
acccggagtcacttgcgctacgtttctgagcatccagccacacactgggaagtgtggcgactatctcgtcccctaggagtgtggtgtgaaatgctgggacactcgatcaatgttagctct

SEQ ID NO: 11062 - DNA, 120 bp, Homo sapiens
ggtcgggcagccagtgaccccttccacctcatttctttctttttgttgcctgcacaggactggagagctagcatgagtatctgtcctgcaagagcttattaagccctgcttatacacgtg

SEQ ID NO: 11063 - DNA, 120 bp, Homo sapiens
tatcggtcatagcaaggcagggagggacagcagacgggaaggagttaaagttctccacaaggaaaagtgtgattaagtggcaaagggaatggtttggaaataagtgctgggggctttcag

SEQ ID NO: 11064 - DNA, 120 bp, Homo sapiens
aagcggggcagaccttctgtctgaggagagtgagtagacccagaaggatgatgggtttggagttgggtggagagggacccttattggacagggaggatgtcactgtattctccctgaggg

SEQ ID NO: 11065 - DNA, 120 bp, Homo sapiens
cgtgaggtgtgggtcacactggttcaccttgtgggtggatttagctggcctttgaggttgaaagttctcagcattgtatttgtaagacctgtatcattaataaacattttgctagtcttg

SEQ ID NO: 11066 - DNA, 120 bp, Homo sapiens
tcacggaagcatcacttttattctttcactttttgtcattttcccctttggaaactaagcttgttcgtgctctgggacgtgcggtcatgcgtccctcactgctgggttgagctggtaggc

SEQ ID NO: 11067 - DNA, 120 bp, Homo sapiens
aggcgagtgcctcgtgctgctgtttttctgattgctctggaagttcattgttgctctggccctcctgacctgtgtctggcctttgcccatgtgcagagtttgtggatcagcatttcaggg

SEQ ID NO: 11068 - DNA, 120 bp, Homo sapiens
gtgcgggggcgtggtggtatgcgagtccatagccgtggaagtttgggacccaagcctcatgaggcagaagcctggctctggggctccatatttagtctggaatccagcctcagctgctgc

SEQ ID NO: 11069 - DNA, 120 bp, Homo sapiens
gcccggagccagagctaggacagcagggcctgctgtgcagcgcagctggtgcccaaggggcatggaccttgctgggcctgcccggaactggcctgcccctgcctttgtgtcaaccaggag

SEQ ID NO: 11070 - DNA, 120 bp, Homo sapiens
cctcggagtgacatagtccagtgcaccctttctgcagagaagaaagactggggtggcccagggcggtgacttgcccaaggtcacacagttaatggcagagccactagatttgggcttctg

SEQ ID NO: 11071 - DNA, 120 bp, Homo sapiens
ggccgttatcagggtgggactccctccaggcaccaccttcgccagagaccagaagaggatggccacaccctcgggagcacgcaaattgggaaaaagcagacatccatttcggatgacttc

SEQ ID NO: 11072 - DNA, 120 bp, Homo sapiens
ccccgcccccaccactgagacctgcttattatgttagtcatttaccccatagtgtgaatatcagtcctctcccagaggaacttggacaacagccatggagtgagagttggagtcagccag

SEQ ID NO: 11073 - DNA, 120 bp, Homo sapiens
ttacgggacatgttgcaaggtgcatatggactgaaacaggcagatctcagaaatggaggaagcccctgggacctgctctctcaggaagggaaggccagggagagctatttccaaaccaac

SEQ ID NO: 11074 - DNA, 120 bp, Homo sapiens
gcacgtctcagctcctgtctagtgactgatccatctcccttgtccatggagactggctgacccatctcatgttctatagctcagatctactcaggaggcagtccgatggcctcactcatt

SEQ ID NO: 11075 - DNA, 120 bp, Homo sapiens
caccgctccaggcaatggctgcccacaaggacagaacaggctggcctggagctctgagcaggacacatgggagaagacagactcagcatcaagaaaaggtcaacaccagcctggcaggtc

SEQ ID NO: 11076 - DNA, 120 bp, Homo sapiens
ccccgaggcatgcaatagatgcgccccatcattgcttgcttctagggagctcccagggtggggagctggggctgacacaggaagtaacaagagtgacttggcgctggggagactgaggcc

SEQ ID NO: 11077 - DNA, 120 bp, Homo sapiens
tggcggtggcgatgagctccgaagcctgtgtctgtatgtgcttcatttgtgtgtcactccccatgggcacctttgtaactgttgtgtttttaattttctgtcagttggagcaagcagatg

SEQ ID NO: 11078 - DNA, 120 bp, Homo sapiens
attcgccttggtatcccaaggtctagcacagtgcctggcagacactgaggaagtgacaggcgtttgttgcgctttgagtcaaggacagagccagagcaaaggctactgggtgagctgaag

SEQ ID NO: 11079 - DNA, 120 bp, Homo sapiens
tctcggtgtccccagctctgttcttggcttgtcactataaatcagactggaatgctggggtttttcctggcagtctctccatcccctctcctgaatagtgctggatgagatagacaaatt

SEQ ID NO: 11080 - DNA, 120 bp, Homo sapiens
aggcgcctccttgctctctcagccacgtagacactgtgtttccttaggccactgctctcctacgtgttgggtagacacatttccaatttggatgatggtcctttcaggctttggtctggc

SEQ ID NO: 11081 - DNA, 120 bp, Homo sapiens
cttcgacttcatgcatttctgaactttcccatttcccaggggttggggacctggggctcctgcacatggaggcctctgcttcctcctgcttttctttggcaaacaccaacatggttgaat

SEQ ID NO: 11082 - DNA, 120 bp, Homo sapiens
ggccgcagactgtcggggaagtacattctcgctggagtcttgaaggggagtgtgggctggactggggctggagggacgcggttggcagtgagcaggctcccatggcttcctcggggagag

SEQ ID NO: 11083 - DNA, 120 bp, Homo sapiens
gcccgaaagccagcagccagctctgcctataatagtcaccaggagctgcttgctggagagcaacctgggagcacagtgctttgcagcaccaggtgacatgggaagcggccacaggaaggt

SEQ ID NO: 11084 - DNA, 120 bp, Homo sapiens
agacgccagtggctgtgatgagtggatttagcagcaggagagcagggacaacactctgggccccattgcccaccacagctccgatgccacctccactgcagacttgctgttctgctggga

SEQ ID NO: 11085 - DNA, 120 bp, Homo sapiens
ggacgagtggacagacctgtgagccccaaggctgctgatcttacggtcaccaagcaagccccctgcagccccacctgggccccctgcagcgggcctgggttccacaggaggctggacccc

SEQ ID NO: 11086 - DNA, 120 bp, Homo sapiens
gtgcgggcctcgaatgatggattccctgagaagtgctggtaggccctggagcagatgcatttcatctggtttgcaggtcactgaactcatccctgaggattggaggaggaggtaatgccc

SEQ ID NO: 11087 - DNA, 120 bp, Homo sapiens
cctcgcagttcttaaaaggattggctaaattgatagctcctcatgccgtttgtcactgggtgggcaggaaaggatactgagaaggctgggatggctccactgattgtctctagcctgtgg

SEQ ID NO: 11088 - DNA, 120 bp, Homo sapiens
aaccgaccatctcaggctgccccacggtgttcacagaaaccccttccagaacactagtttcctaaggaagctacagagtgctgggctgagagcagcaagggatggggaggaaggggagga

SEQ ID NO: 11089 - DNA, 120 bp, Homo sapiens
aggcgaaggggagtttgtttgcgtctagggtggggaggggacgctagtgtggagagaggcacctttttgtcaaagaacatgggtgattttcatttttgtccttaaaaatagccaggctaa

SEQ ID NO: 11090 - DNA, 120 bp, Homo sapiens
ggccgttgtgacaagcacggactgtgattggctgcagcaggaggtggggagtccctgggctggcggccgagtctggatgaggttgtttaacagagatgcagacccaggaagagagcctgc

SEQ ID NO: 11091 - DNA, 120 bp, Homo sapiens
tggcggccctgggtcctctctgggaagcacaggcgaaggagctctggggcaggtcctgctgcagcccgggccctctgtgtcctccagaaagccgtgcccacaccggccctcccctccagc

SEQ ID NO: 11092 - DNA, 120 bp, Homo sapiens
gcccgcccctgtggtgccctttacagcaaagtgcaacctcagcatttttcctactcctgctgcttgccttttagttcctcctcatccatcacctggcagggaatcggagcagagccggga

SEQ ID NO: 11093 - DNA, 120 bp, Homo sapiens
aggcgtgtcttttgtgttcttctaccttccctcttttccttttccttctgcctctggttccatcctttcttgactttcactgatcattaaaacataaattcctggctggctctctcagct

SEQ ID NO: 11094 - DNA, 120 bp, Homo sapiens
actcgtcttgccttaaaaatgtgttggaacttttctaggtggataccccaaagaataaacagggactcagagggatcgttgtacactcatattcaaagcagcattattcacaacagcaaa

SEQ ID NO: 11095 - DNA, 120 bp, Homo sapiens
ccacgcttgggcagtgctggcacatactgcatgctgggtcaatatctcctattgtcatcatctttattcttggcccttttaggagtctgacctcccctgagctggggatgtctctgaggc

SEQ ID NO: 11096 - DNA, 120 bp, Homo sapiens
tcacgaaggattcagcagtgtttaagtgctaagaacaacccactgaaaaggatgattgtttttgataaggcttctcagaaccttggcatttcagcaaccgggggggcagggcctggatgc

SEQ ID NO: 11097 - DNA, 120 bp, Homo sapiens
gtgcgaagaaatatttaatgaatgactctgggtcccaaggctaggacgaggggtgaatgggcaggaagatacaacaaggaagtggagccacggttcccaccatcgaaaggggagagagtt

SEQ ID NO: 11098 - DNA, 120 bp, Homo sapiens
tgccgaggtcacacagtttattgacgcaaaaagaaaacgcatgtttaaagaagatggtgaaaatctcttgcagtatatgtcaggagcactgagcttccagctctgggggacccagggggt

SEQ ID NO: 11099 - DNA, 120 bp, Homo sapiens
gcccgctatctcctgtgggagagaggtcactacaggaaatagaagtgagaactgcaagaggccggctctgctactgtaagtcacccacacagatagcaagttcagggcagagcgaggtga

SEQ ID NO: 11100 - DNA, 120 bp, Homo sapiens
attcggagagggcaagaggggagcaaggcccagttgacaggccatggtcaggagcaaaggggattacggggatgggacaggaaaggcatggggagaagcacccagggccatggcggccct

SEQ ID NO: 11101 - DNA, 120 bp, Homo sapiens
cttcgactccataagccctccacctctcctccaggctctcattacctcctgcctcctgtctgtggcggctggagtgcctggccccttctgcttggaggctggactgtccagccttcccgg

SEQ ID NO: 11102 - DNA, 120 bp, Homo sapiens
gctcgctctctctgtctctctctggaagagagattggtttcctcttccagttactatctgagttctttcactatacattcgttagtttgcctgttcctgaacataattggttctcttttg

SEQ ID NO: 11103 - DNA, 120 bp, Homo sapiens
ctgcggtgtgatactccaatatgtgaacataccacggtttatttatcgaatcagctgatgacaggcatgtgggtggtctccagtttggagctgtaatggcggatgctgctgtatacgctt

SEQ ID NO: 11104 - DNA, 120 bp, Homo sapiens
catcgggcacatttctgtgtgtttatacctgggagtgaatttctgggtcatacggcgtgcacacgttcagctcaggtggatgtggaagtattgttttaaagagtgtgacgatggaaacca

SEQ ID NO: 11105 - DNA, 120 bp, Homo sapiens
gtgcggtcaggggttggagaatttgccagggagctcaccagccagagagcagagaaaccaaatcatagaagctgcattgagtaaagaggtttctgtctctggggtgggtcacatagggaa

SEQ ID NO: 11106 - DNA, 120 bp, Homo sapiens
gatcggctcgactcagagaaatccagttgctggtgtagccttggtcggtgggggcttctggggagtaggactgaactgtgaaggaaggcagcctccatgggctccccagtgggcctggct

SEQ ID NO: 11107 - DNA, 120 bp, Homo sapiens
gagcgggaagaaggggagcacatggctgttctgtaagcctcaagtgcctctgccaaatcttcctctttccttcacttgctcacttaactcatcttcatggacaagtgctctgccctagcc

SEQ ID NO: 11108 - DNA, 120 bp, Homo sapiens
ccacgagaggcacagcctagtagaggaaatgagacatgcacagattaccacatgcattcaaagctgcaaatgcccgagcaagtgctggtgccttgcccaggtcacagtccctgaagggca

SEQ ID NO: 11109 - DNA, 120 bp, Homo sapiens
gggcgtgaatgtgtggctgagtacaaagcagagggcgccatgggcccccacactgaatgcctgttgatctcctgggagccctagcttatctctcagtgggttacacacagagcgcatgcc

SEQ ID NO: 11110 - DNA, 120 bp, Homo sapiens
aggcgtctggccaagctcctctccagccaaagccaaggcccctattcctggtgactccatctggctgtgtttccacaactggcaatgaatccaggggtgagtctcactgcagtgctgacc

SEQ ID NO: 11111 - DNA, 120 bp, Homo sapiens
cctcgccaggatcggtggctgtatggtggtgtgctcccactagagggcaccagcgcaccactctgcaggctccagcctggtgcttgctgtgggaagtcccctggtcccagcgccagcagc

SEQ ID NO: 11112 - DNA, 120 bp, Homo sapiens
aggcgtcttcaccggccatgcctcctggtcagcgctgcacatgcacactgtcctgaaaatgaccccactcaatgcccaggcccttcctccctgcagcaagtgggaggatggcgaggtgca

SEQ ID NO: 11113 - DNA, 120 bp, Homo sapiens
gcccgcccctccctgggacccctgggaacacactgcttccaggagggcagcagcacggggctgcaggggaacacccactggggtggggctgggggagttacaaagtgttggcttccgccc

SEQ ID NO: 11114 - DNA, 120 bp, Homo sapiens
agccgcataatctgtaatccatagtctaagccgagttaatttactaagttctgaattaacttgactaagttccaagttaacttgaccaagttccatgtgaaggcaagggatgaaatccga

SEQ ID NO: 11115 - DNA, 120 bp, Homo sapiens
ccccggcaccccctcccccaggacccctttactctgaggtgtgacttggggagcaatttctccatgtgtgtgaagtcggcgcgaccagtgtgagaaagacggtctaacgggcatgttgtc

SEQ ID NO: 11116 - DNA, 120 bp, Homo sapiens
tcccgggcacagggccctcggcgccctgcggaaatgccacctccttatatcacacagtggcctggtgcttttgtgtcatatacaataccccattgaaagacgttgtttgttgaattatcc

SEQ ID NO: 11117 - DNA, 120 bp, Homo sapiens
ggacgtattttggtcattatccttgaattctcccagacaaacattatgtctgctgtctttggtctgacagtaggaactacataacccactgacttctcgttttgcctttctcttaggaaa

SEQ ID NO: 11118 - DNA, 120 bp, Homo sapiens
ggccgttaatcattagatggctcagacctagcagggccggctcccctgcccccacattgctggccttgtccagagcgtgtgactcaggagccctttgctgtgaaaggggcttagtgccca

SEQ ID NO: 11119 - DNA, 120 bp, Homo sapiens
ggacgccacccggtcaagtgggatttctggccttagggatgtgcccaaagcattccccattgagggtccccagaaggctcaggggacggaaagtggctttctggcctcctgagcctgtgt

SEQ ID NO: 11120 - DNA, 120 bp, Homo sapiens
acacgggagatggctaaaggaagggacagttccttcctcgttcttctgcttggccctggatgataacagagagatcctccccactacctctctaaagaatccgagggacaaatgagcttt

SEQ ID NO: 11121 - DNA, 120 bp, Homo sapiens
ggccgataaggaatggcctggcagccccagcaggtggcgctgctgctatttagtaatgggggtcctgggcgggaggccggggccgcggctggggctgccccacactggggttgaagcctc

SEQ ID NO: 11122 - DNA, 120 bp, Homo sapiens
agccgggttcccagacctccagatgagaaggagtaactttattgttccctagggctgtgttagctgttgccaagtcttctggaaacttctaggacatgctaactcacaggcgtgaggatt

SEQ ID NO: 11123 - DNA, 120 bp, Homo sapiens
ccccgagacacccaggagcagagtcctgaaaaccatgccccacctcgcctccccaggccctgtgcaccggcgactgttgctccatgtcacccgtggtcccacggaggtgaggtctgacct

SEQ ID NO: 11124 - DNA, 120 bp, Homo sapiens
ttacgttgcaaagctgtgctaagagtcaaaatacaataaaccagttcatataatgacagggatttttgaacttaaaaaacactctgcagatgtgatgtggcctcatgaagtggtagtcac

SEQ ID NO: 11125 - DNA, 120 bp, Homo sapiens
ctgcgcttggagatggtccaacagcttccttctgtgggtttcttggcgggtgggagatggagggcagggactgttggctttccccagctcctcctgagactgagacctaaagggtgactg

SEQ ID NO: 11126 - DNA, 120 bp, Homo sapiens
cctcgagaggggagactgtatgtagggagagcagttgggggtggccctggacgtcttgggacctgaccaaatagggactcagccgaatgctctccagcaaggaaatgcaggatggaagga

SEQ ID NO: 11127 - DNA, 120 bp, Homo sapiens
agccgtgggacagggcctgactgagcctatgccctcctcctggagaccaagagggagttcccaggatctccctccaggcaccagggaagaagttttgttatttgttagggacaaaggcta

SEQ ID NO: 11128 - DNA, 120 bp, Homo sapiens
gcccggtacacagtgagcaggccccaggctggcctgagtggccctgtcgacggatgcccagaggcagacccaccctgcacacgtccacccgctttgatgaatggggccacacagcccgca

SEQ ID NO: 11129 - DNA, 120 bp, Homo sapiens
tgccgtccctgtccttcagcagtttccagggtctggtttaatcctcccactccctgagccaatttggcgatgcccttgatgacttgggccaggcctggttgattgagattgcttgccggt

SEQ ID NO: 11130 - DNA, 120 bp, Homo sapiens
agccgccggggcttgggggaagaggaaggtgtcgccaagggtgtgaagcatccattattcctttattagccaatgtcccatttctggtctcattctccttcctggcagcggtgagtttag

SEQ ID NO: 11131 - DNA, 120 bp, Homo sapiens
gggcggagaagcccagttattttagtttccccctgcttctgtcactgggagcagtggtggtggagggggcggggacggacagggctacgtgctctccagcaggcatttgtgaatgggcct

SEQ ID NO: 11132 - DNA, 120 bp, Homo sapiens
cctcggctcccaggctgacccgccggcaggcggcccccccaggacacactgactcttactggctggaaggcgtttttccagcattgcagcggccaggcaggaggaagctttcctctggcc

SEQ ID NO: 11133 - DNA, 120 bp, Homo sapiens
caccgtcagttgcttgcctccacttcccaggctgggccagggatctggaggcagccgatggccaaacaaaccaagtgagtgagtggccattgggtccctgtcctttgcaaggggctacct

SEQ ID NO: 11134 - DNA, 120 bp, Homo sapiens
actcgtagcctgccagggctggaaaagacccagaacttccacctacaaccccattacagacgaggaaactgagagacccagaaaggcaaacttctcattgccttgcttaaaaatccttca

SEQ ID NO: 11135 - DNA, 120 bp, Homo sapiens
ccccggcttctttcctgtgactccgagtctgtctgtgctctcagcttggtgactgattgccaagcccctgatccagcagcaccagttgccttcagtgtccttcccacctcatccacctgc

SEQ ID NO: 11136 - DNA, 120 bp, Homo sapiens
agtcgtctgaggggcctgggaaaatctctgcttggattcagaccttacaaagattcagaccctacacaagagccaccagggcaaaagtgctctgggactcaaggataaggctctattgtc

SEQ ID NO: 11137 - DNA, 120 bp, Homo sapiens
gtccgacaccacctctgagacagcactggtacgctgttggagctccatcaatcacagaaccagagaatcgttgctgaaattgccagagcaaatgtgaagccgactgtgtgcaaaggtgag

SEQ ID NO: 11138 - DNA, 120 bp, Homo sapiens
agccgcctgagtcccgctgtcctttgccgttactaagaaatgtggcccccacccccagtggtagcccagtcccagaaggtctcatataaagtacaagctgtccttgccttttgccaattc

SEQ ID NO: 11139 - DNA, 120 bp, Homo sapiens
ccacgcattctgcagttcctgaaaaccgcttgtgtagaacttctggtagctttaatctccttacttgggagttcctgctcatttctggaaatgtttaaataagcaagtctacccttaagg

SEQ ID NO: 11140 - DNA, 120 bp, Homo sapiens
gcacggttttgtcagctgctcctcctctcaagaacactaaggcctgaagggcaagggctctgggtgcatccttattacctggaagtgctccttttccagcagatcacctgcaaggattcc

SEQ ID NO: 11141 - DNA, 120 bp, Homo sapiens
taccgacatgttgtcacctcagcccctgatgtggaggataaagctgggtatacttgcgatggggctggtgaagaagagagggtcagatgagggcaggctcaggtataggggtgccaagga

SEQ ID NO: 11142 - DNA, 120 bp, Homo sapiens
acacgtccttctaaacaaggaaggcaaggctcccagtggggaagtgctgggccagaggccacacagctcactcagccactgacttggggcccagggtcccttggtcgctggtcttcccac

SEQ ID NO: 11143 - DNA, 120 bp, Homo sapiens
atccgaatgattggtccttgtacaaggctcacaggacatctgtttaataatgtattctagaatttcctagagatcagcatcaagtaggtgtctttgaaaaggcttcatcactaaagcatc

SEQ ID NO: 11144 - DNA, 120 bp, Homo sapiens
ggccgaggttcccggggccccactcctcagccccgccatgccggggcacagagaggtgggggcacagagaggtgagggctcttccgaaagatgcggtggtgtttgggggccttcagacac

SEQ ID NO: 11145 - DNA, 120 bp, Homo sapiens
tcccgcactggcagttgtaccctgtcctcattgttctctgttctgcatactgggctgtgtgtcaggcctgtggcttcctttttcatccctgaaggaggccactagccacatggcgacttt

SEQ ID NO: 11146 - DNA, 120 bp, Homo sapiens
ggccgagtcacctcctggggttgttcaaagcatgcagaagcagcagcccgctctcattttaagtggatttcacatgctgcagcttgaattgaaggcttgggtcactaagtcattttctag

SEQ ID NO: 11147 - DNA, 120 bp, Homo sapiens
gatcgaagctgcagtatgctttgtaacctaatcttggaagtgacatgccatattctaccatattctgttggtcacatagactaaccttggtacagtgtgggaggggactttacagggata

SEQ ID NO: 11148 - DNA, 120 bp, Homo sapiens
tgacgctctttgggtgtatctccttaagtacagcacctcaggtacagttcactcttgatctgtaggcctgagatttaaggaggcaagttagctgcacacacacacacacacacacacaca

SEQ ID NO: 11149 - DNA, 120 bp, Homo sapiens
acacgtagccaacatacaattgtgggacaggcatagggtaacagccttagatacacttattcaagaagaggggaaacaagaagcacatagacattgttggtccatagcagttctgaaatc

SEQ ID NO: 11150 - DNA, 120 bp, Homo sapiens
ctccgccctctgcattcagggtctttcatgagattgcagcaagtcatgagcccagtgaatactctgggctcttggttctgcctctgagtcatccttccttttctatgaaaggtagcatgt

SEQ ID NO: 11151 - DNA, 120 bp, Homo sapiens
ctccgctgggcttctgctgagggacaatgcccttaagcttcttagaagctctgttgtttgactgagaagatctttaacatctcttaaaatctttacagagcttttggtctgactgaatag

SEQ ID NO: 11152 - DNA, 120 bp, Homo sapiens
caccgctgaactttctaagatcttgacaaagacttcatagccacaccctccacctcatctttggactatgctttcctgagagtgcctggatttgatctttacgcagaagtcatttcctaa

SEQ ID NO: 11153 - DNA, 120 bp, Homo sapiens
ctccggcccactgcccagtaccaaagccactctcacattgcagagtttcactatggcagcaccctacttccaagtacccaaagctgtattagttatctcttgctgtgtaacaaattactc

SEQ ID NO: 11154 - DNA, 120 bp, Homo sapiens
tgacggtcaagcatccagaagctatatagctggggagttctggctcagggtctctcgtgagattgtggtcaggctgttggccaggattgcggtcatctgacacttgactcagatgggact

SEQ ID NO: 11155 - DNA, 120 bp, Homo sapiens
tcacggatgtggttgctggcaggccttggctcctcactggctgttggctggaggcttcatttccttgcaacgtgggcctctctgtagggtgctcatgacagagtgagtggcctgtgaagg

SEQ ID NO: 11156 - DNA, 120 bp, Homo sapiens
aaccgtgatgtggcaagggactaaacaagagtttgagtgtcaggaggtggggaccactgggagccacctttatctgttttgagttccttcctgtaccattgctttttccccccactttaa

SEQ ID NO: 11157 - DNA, 120 bp, Homo sapiens
caccggtagctttgaatgggttgagggtttttgtgtgttctgattcaacttcaaacctctctacaaatgccctcctcatcctgtcctcccctctgcgcttccatccttcctgcccatggc

SEQ ID NO: 11158 - DNA, 120 bp, Homo sapiens
ccacgggagacctcaggattcggggtacccaggagtagccagtgatgcctcaggggtaacagaagaacctggaaggctgtaggaaaaatagaagcctgtttcccctgcttcactgaggtt

SEQ ID NO: 11159 - DNA, 120 bp, Homo sapiens
ccccgagaaggcagaaggggaccagcagggcagtgcacacccaggagacagctcttaccttgatgacggggctgaccagccggacactgccctgcttggaccttttttatgcccaccaca

SEQ ID NO: 11160 - DNA, 120 bp, Homo sapiens
agccgtccccttctatgggagccacagcttgaagctaaaacaagagcccaaagcatcttcaggtgtaagaagaggtctctttctttcttgttctcggcagcccatccttccccagctcct

SEQ ID NO: 11161 - DNA, 120 bp, Homo sapiens
gctcgcagcattgcctctcctccagacaatatggcctggccagtgtgacctgctcctgtatgccctccagccctccccagccatgccacggagggacagagctgtccagatcccagccag

SEQ ID NO: 11162 - DNA, 120 bp, Homo sapiens
attcgcgttttcaatagaggccgtggtgtgccttgcagatatttgatctacatcaccataatcagacaagattgggcatgttcagggtggtgtggctgtagacaacatcaccatcatcag

SEQ ID NO: 11163 - DNA, 120 bp, Homo sapiens
gagcgttattttgagaggcatcgggggcctggttgcctggactttcatcattagtgcatgcttatttgggttaaaaattcataatccctgtggtcccttccaaagcgtagctgccctggg

SEQ ID NO: 11164 - DNA, 120 bp, Homo sapiens
actcggacacctctgtcactaactttttcaagtttgtggattatagataagggaggaggcgaggaggggccgagagggaagtgggaaactgtgtgggagggggtgggtgctcagagtgga

SEQ ID NO: 11165 - DNA, 120 bp, Homo sapiens
ccgcctctaagaggctgaacctgccacaggaaccgtagcaatgccagaggaggcaccttctgcattcgggcctccttggttcacacgcagacagcgagagcaccatgcccagagtcctga

SEQ ID NO: 11166 - DNA, 120 bp, Homo sapiens
tcccgagtgagtgatgacagcagcagcgggatcaacttattgagccttgctctgtgtcagagccaaggcgcagctcatttaaccctcagaagccagtgcaatagactttatcatcattat

SEQ ID NO: 11167 - DNA, 120 bp, Homo sapiens
catcggggcttcacggagatgggagcagcacacccaggacttggcccctccaccagtctatcactcagcagcccagagagccactctggtggttttgcccattacacattttaaattatt

SEQ ID NO: 11168 - DNA, 120 bp, Homo sapiens
acacgtaagtggtaataattctgcacatatgcctcagggtgctctggccggatctgcaagcctcattcatctggtcagagttctcgtgtggcagctcctgcagcttgcagagcttcacaa

SEQ ID NO: 11169 - DNA, 120 bp, Homo sapiens
ccccgggctggaggcagacagagcccaacacccatctgactctgtgtccacacggagccaaggccctcctcactcacgtcgtgcaatttggacagaagcacttcctaaaaactctcgggt

SEQ ID NO: 11170 - DNA, 120 bp, Homo sapiens
ccacgtaccgtgggatatttatgcatccggtccacacacgttcattgaacacctacaacgagccaagtcccattccaggggacatgaagatggctcagaaaacaggattcctgccttcag

SEQ ID NO: 11171 - DNA, 120 bp, Homo sapiens
agtcggaatgaggagtcccgggggctgtggtggaggggacagccagggaagcctccctaaagagggaatgtgggagcaggaaggtgaaagaaggaaagttggggccaaataaaaaataaa

SEQ ID NO: 11172 - DNA, 120 bp, Homo sapiens
gcccgggagaagaatgcctgggattgactcctggctgctgggctcccacagctccccatggtctgtccctcccacatgtatccagcttctcaaggaaaagaaacttcctgctagcagtaa

SEQ ID NO: 11173 - DNA, 120 bp, Homo sapiens
tagcgtttggatgggcaaatttccctaggccattcattttccaagagggagcccgaaatgaaggtgagtttgcagcgattggtaggggctgcccatctccctcaggaagtgtaaaaaata

SEQ ID NO: 11174 - DNA, 120 bp, Homo sapiens
cctcgactacccccaaccccaccctccagcagcatctccctgtggtggtttgcgctgctgggtggtgtgggggtgttttttcccctttgcctgtatacagctgtttttggcttggccact

SEQ ID NO: 11175 - DNA, 120 bp, Homo sapiens
ctgcgctccaccatgccagagctcatgtggttatcccgagtgggaagaatttcccagaatgccttgagaaacctgagacactgaatggctttcagggcttattgatgtggccggtgcagg

SEQ ID NO: 11176 - DNA, 120 bp, Homo sapiens
gtacgtcaataaatagttttaggcaggaaacggggcttaaatggtagccttaaagtttggggaaaggcactaggggttgctgggaggtagcctgccaatcagatgagaacctagagccaa

SEQ ID NO: 11177 - DNA, 120 bp, Homo sapiens
tttcggttggcagaaaggactccttgttccagaggaaaagctggcaacctataacatgtgtcaagaggagacacacaggctgggttttggtggcctctgggcggggcatgttcacacccc

SEQ ID NO: 11178 - DNA, 120 bp, Homo sapiens
tctcgtgagaatcactgctgactggcagattaccagaagaattccactgtcctaatgcaaaaaatcaaggaaaagggtcacaacctgccagtttcttttaaaatagctgtttttctgatt

SEQ ID NO: 11179 - DNA, 120 bp, Homo sapiens
ttccgctattgagagacaactcctgtgaaacactatttctcctctttctttttaaaaaaaactctattcatggatgagattatatggtaaatgcaatttcagttttgcttttttcattta

SEQ ID NO: 11180 - DNA, 120 bp, Homo sapiens
tgccgttggtcatgcccaggtaaggattagccaggccttcctcctccactcctctcctctttgcctggtgcaggaacaaccagctaggagtcaggaaatctgagttctggtgctggctct

SEQ ID NO: 11181 - DNA, 120 bp, Homo sapiens
caccgcacatagatgccatctgtgagtgtgtcccctgcttagtccacatcacctgccatcagcctgctgagagggcgccggggcccagtgggacaccctgggaaattgtcagctactagt

SEQ ID NO: 11182 - DNA, 120 bp, Homo sapiens
catcgcataaggagcggggaagggcaggaaactgaggcagccagggtttgacagcaaagcctgcactgcctggcctgggggcaaaggagtgaggtccagaggttacgagctgccaaggac

SEQ ID NO: 11183 - DNA, 120 bp, Homo sapiens
tcccggggcctcccatacacacattggtaaagggaggaacaacagcctcatggtctcggatccaaatcctcatccctgtgctcacgagagcccctccctagagcaagggagcactggtgc

SEQ ID NO: 11184 - DNA, 120 bp, Homo sapiens
gggcgagaagggggctgtctaaggcccatcaagcatttagcaggggcctggcacacatccccactcagaggacaccgagaccactgttcatgtcacatccggggttcaaattctcagtgc

SEQ ID NO: 11185 - DNA, 120 bp, Homo sapiens
agtcgctgattctacaggcaagttactatgggaactataactttgaatttcctggctctggggctgtgaaaatcacaacctgaaccttccgttgatgtgggtttctcgattaatttcctg

SEQ ID NO: 11186 - DNA, 120 bp, Homo sapiens
gagcggaaaatgcctttgcaggcagctagctccctccacggagacacttatcacaccctgcccccacagccagcaaggtcaagtccaggcctcaggtgggtggaggtaggggccagaagc

SEQ ID NO: 11187 - DNA, 120 bp, Homo sapiens
gaacggagacctagacataattggcccttttcttgatgactcgtcattaccataggcacagtccctgggctgtcctccaggtttggctgtaggtacaggtccaggtcccgcagaggcaca

SEQ ID NO: 11188 - DNA, 120 bp, Homo sapiens
tcccggagggtactcctgacgtgtaggtggcaaccatcctagagccctgcaggtgtggttcttctgactctgcctcattcttccccctgtcccctttgtctccactgtcagcatgtgtgc

SEQ ID NO: 11189 - DNA, 120 bp, Homo sapiens
ctccgccaccacggcctttacccgtcactatcttttcttctttgtttccctctctcctgccctacaattctttccacaccttcagcttgtccccccacagccctggctcatccaccggcc

SEQ ID NO: 11190 - DNA, 120 bp, Homo sapiens
tcccgccaatcacagccctctgcaaacctcccactttggctccctcatggctgcccctgtggccacctccagtcgctaccaaaggaaggaggctcctccaggcaggggctgggctgagct

SEQ ID NO: 11191 - DNA, 120 bp, Homo sapiens
gcccggcttggatggacactgcacccctcactagcaaggcaagatgttgggattgccagtgctcatccctccctgcacagcgaggctgccccatgagttctcagcaccccctttccctcc

SEQ ID NO: 11192 - DNA, 120 bp, Homo sapiens
gcccgtggcccttcccccagggactccaggagactcccaccaggctgcctttctccctggctgctgtggggcctcccacagccacagcctgactggagcaccttggtttctccctgaggg

SEQ ID NO: 11193 - DNA, 120 bp, Homo sapiens
gggcgtgcccacaacaagtctccgccagagacaataggacaggaatgcattcgcttccgaacaaacactgtgtgggctcgcacaattgccttggattcttgtccaagaaacacattttgc

SEQ ID NO: 11194 - DNA, 120 bp, Homo sapiens
tgccgttcgagggcacgggaggcttgcctgccccagcccgcccacatccccgtcagtgccagagactctgatgagtgggctgctcctcccccgaccccagggcctctgacccccaggtag

SEQ ID NO: 11195 - DNA, 120 bp, Homo sapiens
gctcgtcttccagaggtgacagcagaggagagggacagtcctgcccacacagagggtgcctgctcctaccaatgccttttttttttttttttttttttttgagacagagtcttactctgt

SEQ ID NO: 11196 - DNA, 120 bp, Homo sapiens
ctacgcaggaggctgaggacagaggattgctcgagcctaagagtttgaggttacagtgagctgtgatcaagatgtatacaatgtggagtgattcaaccacactcattgacatattcatca

SEQ ID NO: 11197 - DNA, 120 bp, Homo sapiens
taccgccatctgatagagatgtttattggtttgttttctgcatttccaccgccccggagctgcatttccaccgccctggagcagggcctggtctgtcttgttctctgcagtgaactgtgc

SEQ ID NO: 11198 - DNA, 120 bp, Homo sapiens
tggcgcaggcgctcggcaggtacttgtgactttgtctcttttgttttggtagatctgtgctgctttcgaagtgccacctcggcatctctctacagtgtgatcaaggagacctggcatctg

SEQ ID NO: 11199 - DNA, 120 bp, Homo sapiens
tctcgagtttgccagcaacagaaccgtctctgcgtccaacatctcctaagcgggacagtagcgtgggctgtggcatgctaggaagatcactctggccagttgtgtacaagataaattgca

SEQ ID NO: 11200 - DNA, 120 bp, Homo sapiens
tgacgcatcaggacgcgggacagtcctccatgagggaagcaacaaaacctcacctttgagtaaggccagggacctggaaaagtgggactaaaatgtctccaggacgttttaccaggaaaa

SEQ ID NO: 11201 - DNA, 120 bp, Homo sapiens
gttcgtgcagacgagctagatgtggggtccctgagagtcgtgatgatcgacatggcaggaggggacggcattgagaagagcagaagcttgacaataactatttggggaggaaaatattgg

SEQ ID NO: 11202 - DNA, 120 bp, Homo sapiens
gtccgtggggcttggtgagcttctcggaagccacgcccagagagggtttcaggcactcggtgtcagcacaccagtgctgctggggcttcaagagagagtgaatcagaaaactgggacata

SEQ ID NO: 11203 - DNA, 120 bp, Homo sapiens
gcacgggcaactccatagagacatagaatcggggggagttgccagaggctggagtgaggaggaacagggaatggctgctagtgggtatgggtttgtatggggagtgatgaaaatgttcag

SEQ ID NO: 11204 - DNA, 120 bp, Homo sapiens
agtcgggggaagcatggactgtagcacggcaggactgagcgctgagcagcccagccatggccctagttaggaaacagttccagcccctgagtaagtccacaggtttgtgggtttgaaagt

SEQ ID NO: 11205 - DNA, 120 bp, Homo sapiens
atacgtctctaagctaatttcatttccctgaggacttctgctgaccagttgttaacactggatgatcccagcgcactcactgctgcaggctttctcttcagtggcctcttgaatcacggt

SEQ ID NO: 11206 - DNA, 120 bp, Homo sapiens
cccgaaagcacacctcttgggaggtgccactcctgtccctaagctgtggcccctgctaatggagactcttcctctgggctctccctttagcgcctggctttggcccagtccctgggcaga

SEQ ID NO: 11207 - DNA, 120 bp, Homo sapiens
agacgaggacctgggcctggcagctgtcataagcatactcaggtggcttccgcctggctgcaaaggcctcactgaggagctcagaggccagaagcactgggagccagatggcagtcttgg

SEQ ID NO: 11208 - DNA, 120 bp, Homo sapiens
gaccgagacggggactgagattctatagagagggcctggggggcactggccaggggtgtgctggtccaggaataggggctccttcccagtgggcttttcaagattatctagggctctcct

SEQ ID NO: 11209 - DNA, 120 bp, Homo sapiens
gcccgtgctggaagcagatgcagtagctgcctctgccctggactggctgccagccagacagctccaagcgccagccagagcagctgtgtttgccgcgctaaggaggctggcccctgagag

SEQ ID NO: 11210 - DNA, 120 bp, Homo sapiens
gcccgattcatcacacagcactttctcccctctgcagccctttagcacacattatctggttacggtctcaccagagccccgtgaaagaagtaaatacaatgcttatatccatttcaaatc

SEQ ID NO: 11211 - DNA, 120 bp, Homo sapiens
gttcgatccttacgacagcgctgccaggtgacatgtttttgacaccattgtaaagaagggagacaggctcacagaagcagagtaacaatcccatgtcatgggacctgtaggcacaaagac

SEQ ID NO: 11212 - DNA, 120 bp, Homo sapiens
cctcgaattgctgccttcttagtcctaagatgggactggtgggtgggtatggggaccaggctgaggacccaggccacctttgtgcctgagtcccctgatccaggcctgtggagtgcaggt

SEQ ID NO: 11213 - DNA, 120 bp, Homo sapiens
ttccggaagaccatccttaggagctgaactgaaagaaggcctctcagaggggccacagcctccttctccctgtgctagagacaagtccctaatagccatctatgctcaatgggactcaat

SEQ ID NO: 11214 - DNA, 120 bp, Homo sapiens
tctcgggagcctggaagcctttttctgccccattcctgacatcatgccacctacacatcagacacaaggcacccggcccactccatcacctccagttcccagaaatgtgcagggagctca

SEQ ID NO: 11215 - DNA, 120 bp, Homo sapiens
atacgacacaaaggcatctcaaaggcaaacaaaatgggtgggagggaggctcatggcccaggcgcgtcatcagtgcagtcctgttcagccagggcaaggctcagccgggtgcagcttaga

SEQ ID NO: 11216 - DNA, 120 bp, Homo sapiens
tgtcgccagattggaaagggggctcagggtccgtgttgcctagctactgccatgtcactgtgtgactaacaagccccaaatctcaggaactgcaacacagaggttcactgttcctgatca

SEQ ID NO: 11217 - DNA, 120 bp, Homo sapiens
atccgtgtggaccagaggcagtgggagaggggaggatgggcggcctggcctgagaactgcatggcttgccagctccctcctgctttagcagggccggcctcccgggggaggggctgccat

SEQ ID NO: 11218 - DNA, 120 bp, Homo sapiens
acccgctggctctctccagctggcgggaggcgtctcgggcgttggttcccaggcaaggtcagcagggcccatccatcaccgtggcctccctgctccccatcaacccacctgccgcgcact

SEQ ID NO: 11219 - DNA, 120 bp, Homo sapiens
gcccgacctccccaactccatccgagcctccccacatgaggcccagcctgggaacagtcccagagggccccccgaactgtgacatctacaggttgggtcacccctcgtgcctatttcctg

SEQ ID NO: 11220 - DNA, 120 bp, Homo sapiens
cagcggcattaacatagaatcaatgaagcccaattacgcctggtttcagcgcagccgcccctcctgcttgcccctttttcctggccacttcttattcctgcagggtctcaggcaccctaa

SEQ ID NO: 11221 - DNA, 120 bp, Homo sapiens
tgccggcctccccctctctgccctgccagcagctccagatcccagaaagccctgctggggccctgctgtgtctcagtttccccagtgtctgccactcattgcttgttgaatgaatgtgtg

SEQ ID NO: 11222 - DNA, 120 bp, Homo sapiens
gggcgtggggtggtgaacagtggccttgggtctgggtggggggcacgccacagggttgagacacttagtttccagacccaaaactacttgtagttaggcatcgggtatgtgccgcagaag

SEQ ID NO: 11223 - DNA, 120 bp, Homo sapiens
ttccgagtctgcgtagaatgtagccttgggaaccatcggggcagcgtgcctctcctcacagggggctaggaaccatgttttcattttttcccaccagtaaccctgtaaggcagacctgcc

SEQ ID NO: 11224 - DNA, 120 bp, Homo sapiens
actcggtgagaatgtggttgagtcaggatttgaaccccaggtctcacctcactccaaagccattcctctttctcctgagcctcattgccttctgcctcaaatacagtcctcctacttctg

SEQ ID NO: 11225 - DNA, 120 bp, Homo sapiens
ccccgcttgctggcctaatagcagagcttaacacacaggatgggagcaggcagtgctgagctggttttctaagtccgggaaaaacctgatgtcaccagggcaggcaggggagaggctgag

SEQ ID NO: 11226 - DNA, 120 bp, Homo sapiens
ccccggcagcccttgggaagcccatctcagggagatccaggagcagatggccaaaaaagaaagacgctacaatggcaggggctggcaggaagggaataagacaaggatgaaaataattgg

SEQ ID NO: 11227 - DNA, 120 bp, Homo sapiens
gttcggccactagcaggctcgctgctcagaagcctgtggacaggcccgtgtccttgatgagggagaggaggggcaggggctttcccaggctggggacagagccgtgctcctggcagctgc

SEQ ID NO: 11228 - DNA, 120 bp, Homo sapiens
agccgccagcttgcccaggtactgcctctgccccactgagcgtgtccaaggggcaggagagacaccgcttgggactgcaaacctctctgctggggacatccataagagacacaaaacaaa

SEQ ID NO: 11229 - DNA, 120 bp, Homo sapiens
gcacgttgtctccccatctgccgctcctgcacacgcgtgcacacacagccgcacactcacactcacacacactcctgacaagtgaaatgatgaccgccccccttcatacactgtgtttgg

SEQ ID NO: 11230 - DNA, 120 bp, Homo sapiens
tgccgatcatacctgccccttcttccaaaaaaacccccaacaattcttttcataagctatttctcaaagagcgaaacaaaacagaacacaaacgaggacgagaagaagaaaaccaaccaa

SEQ ID NO: 11231 - DNA, 120 bp, Homo sapiens
aaacgaccaaagagtttgcatgaaaagcaagcactcaggaggaaaatattagcagcaaagtagtttgaagtgtggcctgctcagctcacgctctgtcccctccgcacgcggctaccggct

SEQ ID NO: 11232 - DNA, 120 bp, Homo sapiens
gcacgggcagctgctgatgaactggcgggtgtagcactggccccagcccttcacaaagctgatctgcacggtaaagcccgtccacggctgctgcataaactcgtggtcattgggccgctg

SEQ ID NO: 11233 - DNA, 120 bp, Homo sapiens
gtacgccttctcgtagtcgaaagccttgatggagaaaccggggaacaccttgtgtaccaacagcgtcctggagtccgggttgtccagtgtggcggacttgatgaagatggggtaactgct

SEQ ID NO: 11234 - DNA, 120 bp, Homo sapiens
ctgcggttgtacacccacacaccatccacctcccgcgtcagctggatgccgcagccgattttgctccgcaccttctgcaccagctgactcttgttgtccgaattgagctgtccgaggcaa

SEQ ID NO: 11235 - DNA, 120 bp, Homo sapiens
tctcgtcttctcctcccagtatgccaccacgcaccagtgtgaccgatccccaggctccagaagaagttgggaatctagaaaacacattggcagagagggttagtggggacaggcattggt

SEQ ID NO: 11236 - DNA, 120 bp, Homo sapiens
acccgcccccccactgcacccagtcaccagctcatctctcaggacgagacagaaagaaggaggcggtgaggctagtcctggacttgcccaggctcttacagccctttgaccaggaccctg

SEQ ID NO: 11237 - DNA, 120 bp, Homo sapiens
aagcgctgggtgctgcttctctccaggcccctgcccatcaggagtccagtacaccagcatctgtgcccacctggccaacaaagcctcttctctgcagagcacagatgcaaagggaccctt

SEQ ID NO: 11238 - DNA, 120 bp, Homo sapiens
caacgtcctggagttacagatctttcaactggatggaaccttgaaggccagctcctccagccccttgtcatcctgatgagaaaaccaggacccagaaagcctgctgctggagtaccaggg

SEQ ID NO: 11239 - DNA, 120 bp, Homo sapiens
atgcgatggtctctgggtgcctgtcacccagctctcaaatcagtgccgtggtcatgaggaacctatctggtaaaaataaaaatgagggtggcttgggacaaaaacatctatattcctaat

SEQ ID NO: 11240 - DNA, 120 bp, Homo sapiens
ggccgaagtgcagagctgcaattcaagcccagaatattgcctggtgtgagctgtggacacaggcctctaaagccaccaagcccactgttcctctccaaagtgtccttcagaacacacttt

SEQ ID NO: 11241 - DNA, 120 bp, Homo sapiens
ctacgatgtacccacttgccccagcaccagtctgtccactgtaaataagcacaagtcctttcctactttgttcacaatacatactcttaaaaaatcatcatcaccgtcatcatcaaaccc

SEQ ID NO: 11242 - DNA, 120 bp, Homo sapiens
caacgtctgctcccagctcctgcgggagacaacacctgggccagcagacctgccagcctcacctggcatccatccacagggtcagtgcttatgctgggcctggctccacctatgaaggga

SEQ ID NO: 11243 - DNA, 120 bp, Homo sapiens
ctccgcatccctagaattgatctcacctctcttgtgacaggccagtgcatgctggcttgtgctagtgtggctcacatgtgcatctcagccagactgcaggcacagtgaaggcagacaccc

SEQ ID NO: 11244 - DNA, 120 bp, Homo sapiens
aatcgcggtgttatttaaatcattgtcctaaggtgacttcactgaacaacaacactcatttagatgtgtaagttctggtctgttaaaaatcatcactctgcagcagcagcagaatgtagg

SEQ ID NO: 11245 - DNA, 120 bp, Homo sapiens
tgtcgacctcacaggcagaaagttccaggttctgaataagtagtcatcaaatgacacaagccagtgcttagggaaggatggtaaacttctgttgcaagtcccaagcctctcggggcctac

SEQ ID NO: 11246 - DNA, 120 bp, Homo sapiens
agccgcaggtgccaaaggacccactgccaacaaggaaatgagggcagtggatcacacaccctggtgaaactgaggaggagcagagaatgaaacaggaaactggagacagcatgacttcag

SEQ ID NO: 11247 - DNA, 120 bp, Homo sapiens
cttcgaaataaaatatttgctttaacatttactccacaatataacttgcttatatccaacatcctccatcaagcaggtcagtttgtctacttacttaggggtatacttcaacaacagtta

SEQ ID NO: 11248 - DNA, 120 bp, Homo sapiens
cttcggctcacaaatgggagtgattttgttgctaaaaacatccctcctctctcagacccctcaggcctgagcccatagaagaggtctctggcttatataataccaccaccacatagtacg

SEQ ID NO: 11249 - DNA, 120 bp, Homo sapiens
tcacgatctggctttacacagtaagcacttactgtatgaaaggagcaaagtcagtgctgggcagtcccatctcctcctgaaactgtgctcctgcactgccagatttcacatggaagtgaa

SEQ ID NO: 11250 - DNA, 120 bp, Homo sapiens
caccggcctgatgaaaatggcctttttattagtgactcagcctccttcactcaatgcaatcaagcaaatgtttgccaaatgattgcaactcagtaggatacaactgcccatccacccgcc

SEQ ID NO: 11251 - DNA, 120 bp, Homo sapiens
tgccgctgcagaaaaacaaatcttagataggaccgcatgtgtccaacctgaagcccaatgagagttgcagaaagaggttgtcacagcctttagtaacttaaagtcagtgtctttctggtg

SEQ ID NO: 11252 - DNA, 120 bp, Homo sapiens
cttcggctctttgagcactccagttcagatttttcccctgcctcactggcttccagcctccagtcccagctcctgaaaacctaaccggcttcagtgaaagaactgaaagctgagctttta

SEQ ID NO: 11253 - DNA, 120 bp, Homo sapiens
tgccgttccagggccaggactgtcacagagttcacgccctggctcccacctcctcccctcctcccccagaggccgtcgcccatccctgatcgctgcacaggtggcccctggtgggctcgg

SEQ ID NO: 11254 - DNA, 120 bp, Homo sapiens
ctgcggccccacccccagccaggtgacagcctccgcggccaccttcctgagcatgaactcatcccggccctgctcccctccaggaggaatgggagagttgaataattcctcaaacttaga

SEQ ID NO: 11255 - DNA, 120 bp, Homo sapiens
ccacggagccgaagggctcccacatgggctagacagccgcgtgtgatcgccaggtaaggacgcggaagtgactgttcctacccagcccagacctgttggcccgggcgggtgtcccgggaa

SEQ ID NO: 11256 - DNA, 120 bp, Homo sapiens
aatcgcatacccacgcaacgcgcgtggacaccacacgcacacacaactctgcatggaggcgtgtgcataggcactgttaaacgtgttttggccacccaagaagacgaacaggaaaaccag

SEQ ID NO: 11257 - DNA, 120 bp, Homo sapiens
actcgaggggtcccgggcggctgcagcgctgccgcgagctcccctggaagcggtggcttgtccctaactttaaccacagcaactgctgcggaacgcgggcgtctccgcccgggctgcacc

SEQ ID NO: 11258 - DNA, 120 bp, Homo sapiens
tcccgattcggagcacccagcctcacacatcccttctgaccttgaaggcatcctgaaactcacaccctgctcccggttcgactttactccaaccccctccccgcagtcactgaagccctc

SEQ ID NO: 11259 - DNA, 120 bp, Homo sapiens
ggccgcgtcaaaacatccatccccagcaaattcacaatgctcttccctggggtctccggagataacggcgcacccctctacccattgcttaccctcactccatccagccgccgcgccctc

SEQ ID NO: 11260 - DNA, 120 bp, Homo sapiens
tcacgccaggttgtctcctccctctccaccaagtccagaacccccacctctcccaagtccagggttccctgttgtgggtatgcgggaggaaaggacgcctcggaggcgcgccctcgagag

SEQ ID NO: 11261 - DNA, 120 bp, Homo sapiens
agccggcgccgcagagcccctggggtggggtccacggcggggacaggggacagcagcgggagcaccgcgggggcccgtcccgcgcacggcgctcagagctggcagggtcgccctgccgtt

SEQ ID NO: 11262 - DNA, 120 bp, Homo sapiens
gttcggggaactcggttggagccgagcccaggcaacgaaagtgaggggcgcggcggggagggggcgacagccctggcttggtgctgagccgtggcgctgcggaacctctaggagccgggt

SEQ ID NO: 11263 - DNA, 120 bp, Homo sapiens
ggccggtcagtgcgggcgttcccggaaccgccaaactttctccgccaaccgaagttagggactccgaggacagtgacgaggaggacaccgcggaggggggtctcccgtcacctcccgcct

SEQ ID NO: 11264 - DNA, 120 bp, Homo sapiens
gagcgaccttatcttccttctttcaaaattcaacccactgcatcaggcgacacccgttcccctcgagaaggccccgggtgggggccgaagtgggataggccaggcctggagtgcggagag

SEQ ID NO: 11265 - DNA, 120 bp, Homo sapiens
gagcgagtttcggatcacaaagctgggtaacggccagttcagagcccagatcttctgcctcccagccctgtgtccctcttgggacatacacaccccttcacaaggggactgaccttctgg

SEQ ID NO: 11266 - DNA, 120 bp, Homo sapiens
gatcgcggtctaggtgggtgggctaggcctgggggcgggtaaagaaggaaaattctcagggtcttgcacgctcccccaactcctgcgtttaccaggatcaccacgtttagagtggagccc

SEQ ID NO: 11267 - DNA, 120 bp, Homo sapiens
ttccgcagcaaggggtcaaacggctggccttatgcgtatttttgtctttcctgggtgcgcccggagctaagaagggaaaccgtggcggttagagaccagaagtaggctctgtcactatgg

SEQ ID NO: 11268 - DNA, 120 bp, Homo sapiens
aaccgaggacgctggggctcgtgccctcctattggggctgagttgctgagtctgcgcagttttcatctcatgtcggtcacgcccccagctgcgctgcacgctggctctcgggttcagccc

SEQ ID NO: 11269 - DNA, 120 bp, Homo sapiens
gcccgaaaagtggagactgaggaaataggtggtggtgaatacaacattctttctcatgagacactcaccgtgtggttggagaaattacgtaaaaaaaaacaatttcagtttttaaaaagt

SEQ ID NO: 11270 - DNA, 120 bp, Homo sapiens
aatcgagacagcaccttctgaaggataaataatttaccagtgtaatgtgtaggaataacggatgctgtggggcacccggttctacttccagactcaagaatgtgttcctccagttgcagg

SEQ ID NO: 11271 - DNA, 120 bp, Homo sapiens
aagcgttgctagcagaaagccttcaattgtaagtcctcttctgagttgcctaagccaaagagagttacacactgaaggtcacgcccgtttcctggacagttcacatccaatgacgcatca

SEQ ID NO: 11272 - DNA, 120 bp, Homo sapiens
gcacgcactgctagaaccacactgtgttctaggtggaaatcgccagcccagacctaccctggccctgtctggctcttaggcccttcagcaacaatacatgtgccccaagcctcttgcttt

SEQ ID NO: 11273 - DNA, 120 bp, Homo sapiens
ttccgaatacatatctctgggtgtcagagatacttgtaacatcctattacagtagttctgggaaatggactttttcttcagggcaagaagaaaactaaatttttttaataagttggaata

SEQ ID NO: 11274 - DNA, 120 bp, Homo sapiens
ccacgtgtaccttagtgcaagattagaagatcataatggaagcctctcccagcttcactcttgtccttctggaaatcccatcctgagggaaggatgaggtgagtcgtggcatgatggcta

SEQ ID NO: 11275 - DNA, 120 bp, Homo sapiens
caacgaagggagctttggaatctgcctttaaggagtttctgtgctatactccagaagaaaacttaacgttcagtttttaggtacaaacagctatgtttggacaaataactatgtcagatg

SEQ ID NO: 11276 - DNA, 120 bp, Homo sapiens
atccgaactgtcctccagagtaaggactctcccctctgccgctacatcagtgagcccacgtttacaatctaaaaattatcctgaagccaagtctatctaaggacatgaattaaggattct

SEQ ID NO: 11277 - DNA, 120 bp, Homo sapiens
acacgtagacacacacatggcttagacagttcatgtcaaaatagactgaaattagcaacttggacttttaaaatagtctctcttacttacggaaacaagtggcagtgatgggctgctgaa

SEQ ID NO: 11278 - DNA, 120 bp, Homo sapiens
taacgtactatggccaaatgatgggaatcagatgtagcttcccttttcttgccacttttatcaaggagatagaaaataaaattggagcaagtggaataaacaacgctttagtccctgaag

SEQ ID NO: 11279 - DNA, 120 bp, Homo sapiens
caccgaaaaagtcagggacctattatcctaatacagggagtaagggtgttagtaacaataatccaatctgacatagagagtcaattctagaaaatataggtgggtgagcttcatgctgat

SEQ ID NO: 11280 - DNA, 120 bp, Homo sapiens
gtgcgcctgacagaagaattactcaaccctgactgttctttatttctcaatgggtgatctggcaacagtctaaacaaacacaaaatttagaacccctttaaaccttcctagtagttcatt

SEQ ID NO: 11281 - DNA, 120 bp, Homo sapiens
gaacggtggatctcagactccagcatgcatcagaatcacctggaggtgatcacttgttaaaatgcgcatcgctgggtcccacctccagagtttctcatgctggaagtctgggagagagac

SEQ ID NO: 11282 - DNA, 120 bp, Homo sapiens
tgccggtccaggagtcacactagagaactactggtttagttgatgcagccatgcctattcgatgagaattccctgattaaaccagagggaaaaaagaagtcttgtgtttgggaatattgt

SEQ ID NO: 11283 - DNA, 120 bp, Homo sapiens
gggcgacagagagagactgtcttaaaaaaaaaaaaagaagaagaaaatcatattctgtgctgtatgttattagagaaattgtttttttaagggcaaaaccagcctaaataagtttgctga

SEQ ID NO: 11284 - DNA, 120 bp, Homo sapiens
ccacgtgaacaatctgaaaaagcactgtagtcagaatgttctgtgactatgtcataccttttattttttccccccaaacttagctatctaattatgtggctaattgcagctgaatgaaac

SEQ ID NO: 11285 - DNA, 120 bp, Homo sapiens
actcgcttgttacacactccttccttatccctaactattctctgaggttaatgaaggtcctgataactgcagtctctaacttagcatatcatcctaaacctactacctgcacacatagga

SEQ ID NO: 11286 - DNA, 120 bp, Homo sapiens
agtcgcagcgcaactatgtactaatggcagccaacactcattacccttcataccaccatcactgtgcaaacccttagtgcattttccaatatgatcccacaatccttcatttttatgttt

SEQ ID NO: 11287 - DNA, 120 bp, Homo sapiens
ccacgctaaaattcgacagcgaattcttgcaacaattattaagcgtctggaattgtattagggtctgggggtagaggtgggggacgaagcgggaataactgcagtacacagcagacccta

SEQ ID NO: 11288 - DNA, 120 bp, Homo sapiens
aaacgcaggtctcactcggaaggctttgggagttgggagaggagaaggctcatgggcagctaaagccaccagtgacctcattatgcaatatttaggttatcagacttttctatgcctaga

SEQ ID NO: 11289 - DNA, 120 bp, Homo sapiens
cagcgcctcaaccattccaacgggacgcaccgcgttcagtgacgaccctcatcggtgcccacagctctgggctcgctgaaggcaccacagaagcaccagttattaccagtgttagggtcc

SEQ ID NO: 11290 - DNA, 120 bp, Homo sapiens
acgcagaatctgcctgtttaatgtgtatcttcatgtggccatgaactgagataccatctctatgcatgagatcactctggcccatcaacatttactttctgcttatactcacccagggat

SEQ ID NO: 11291 - DNA, 120 bp, Homo sapiens
tagcgctgaggtgctatctagtgttcctaagcccagggaggctgtgatgtgcctcacagagaagatgtgtgtgttagataagctttgatcagacatacggttggctgtgagttcaatgtt

SEQ ID NO: 11292 - DNA, 120 bp, Homo sapiens
taacgaatcaacaatattctggtacatccagaaaaaggaagaggaaattcactaacaatgtccatgagaccactccattgttgccatcagaggctggcaggaacatgaccatattagaat

SEQ ID NO: 11293 - DNA, 120 bp, Homo sapiens
tagcgtctcctaagtgtgaggcatcattcaaacccttcctgaactttgtggctttctgctcagtccaggaccgtgtgcttgctctgtcctgcaaactcattttgtaccagcatcttccca

SEQ ID NO: 11294 - DNA, 120 bp, Homo sapiens
aaacgtggaaaagttgtctgattagaatgtgttttcagacagatactaaacacagtaggaaataatacaactttatcagcaagataaatacaatctttatcagcaaggaacacttcagag

SEQ ID NO: 11295 - DNA, 120 bp, Homo sapiens
gcacgtgtgggtggccgtgagaaaggcacagtgggggagctgctggcttgatctcctaggtatgggccctactgtggttagaggcttccaaatggggccccagagtgtcaaacctaccaa

SEQ ID NO: 11296 - DNA, 120 bp, Homo sapiens
tgccgttgaggggaaaaggtggcatttcaggtggccttgggttaggtcccctggggcggcggcctcctctttgctggcaaaagccacgtatttctctccaaatttcacgtggctgggagt

SEQ ID NO: 11297 - DNA, 120 bp, Homo sapiens
taccgtgggcattctgtggattgcagactctgtgtttcttctcttcagtgaggggaggccaattttctttttgttgctgtttgatttccaaataattagatttgcaaagttcttttgtgt

SEQ ID NO: 11298 - DNA, 120 bp, Homo sapiens
gcccgtctcaaatgtcaagacgctgctcctgatctttcccttccaaatgagtcatccagcatcccctctgcctgtagtatttccctcaaccttgtctcttgcattctttcatgttctgtc

SEQ ID NO: 11299 - DNA, 120 bp, Homo sapiens
tctcgttatggaattttgtgagttatattatacacctctggactttaatcattccttaaggacagagactgagtctggtttaatttttttttttttttttttttgagacagagtctcact

SEQ ID NO: 11300 - DNA, 120 bp, Homo sapiens
ctgcgcctggcctgattttttttatatataccgctgtgctaaaaacacaatgctataaaaacacaatgctattttgtttttgttttaattgtctcttggactgatggagtaatttactaa

SEQ ID NO: 11301 - DNA, 120 bp, Homo sapiens
tgccgaggtcacactccagctcccatgtctctgtatggcagggaagaatcagcacagctcttgtctcctctgctgaggggaacagctggtttgtggcataagagagatggaaaggacaca

SEQ ID NO: 11302 - DNA, 120 bp, Homo sapiens
tctcgtggagtctagagactttgcgaaggcactggggaatcccttttgctggaaatttttaggcaaaagtgacatgtgtctgtctggaatggttgcctggaaacaagtctgcctgggagt

SEQ ID NO: 11303 - DNA, 120 bp, Homo sapiens
cctcgctggacccagtaagagtgcctgggccctggcctgttgtggcagaagggtttgaagaggtcccacatcctgtagcagtgcgcattcatcccagttgatgtataaacatcataacaa

SEQ ID NO: 11304 - DNA, 120 bp, Homo sapiens
tggcgcagagactgttctagtgcctgcatccctagcatatttgacaacactgtgggctctgagggcttgattcttctcaggggacctctctttgctcagtggcttcccaccgcagccact

SEQ ID NO: 11305 - DNA, 120 bp, Homo sapiens
tcacgtgattgcccctcagtctgtgtgtggcctacgtcctaacctcctttcttataaggacgtctgtcatattagattggggcctaccccgatgacttcattttaccttaagaacctctt

SEQ ID NO: 11306 - DNA, 120 bp, Homo sapiens
cagcgtatgaatttggaggatacaagtcagtctaacaagtgggttttgtgcaccttaagggcatcatgcatgtaaaggtcctgacttggttaatgctgggtccttcccctctctccactg

SEQ ID NO: 11307 - DNA, 120 bp, Homo sapiens
atgcgatgctaggttggcaacatgcgagtgagcattgggtggaatctgtctgtttggcagctatttctagagtggaaaaaatctctgcctcattttagattgcttatggcatggtttaca

SEQ ID NO: 11308 - DNA, 120 bp, Homo sapiens
ggacgtgagcttgcctttcaaaagtgaatttatccttctgcctgagtaaggcagcacgtctttccccttgcagctgaatagctgaggcatcagcacttttaatacaaacaacaacaggca

SEQ ID NO: 11309 - DNA, 120 bp, Homo sapiens
agccgctgcaccctgaaggtttccgtatttactgccgggtgtcactttctcttctgggagaccacctatccaaagtcacagtaggttagaggtgaacgacccaagaggagccaagggagt

SEQ ID NO: 11310 - DNA, 120 bp, Homo sapiens
tttcggagagagatgaagttctggaaggaataactgagagtcagtagcagcagcagcatcagcagcatcctaatcctattagcagctgctgttgacggactggctgctccctgccaggca

SEQ ID NO: 11311 - DNA, 120 bp, Homo sapiens
gggcgccctggtaccccaggctcaaaatggccttgctgtttcagaaacctggggaatggagaaaaacacagctaaaccttggcctgtgggtggaagtgagcagccttgaagacataaagt

SEQ ID NO: 11312 - DNA, 120 bp, Homo sapiens
ccacgcctagtttagaacccaggctctaccttctagggtgtgatcttgaggaagtcatttcaactctctgcaaaatggaaggaagcggaggagaatgggcacctgcagggcacctactgt

SEQ ID NO: 11313 - DNA, 120 bp, Homo sapiens
ccacgcactgtgctgagttgattaatctactgagaatagttccgcctacctcacagtgtaactaatgaaacttcaacttaaacgttgttgaatgtgtatgactatgcccagcacctagga

SEQ ID NO: 11314 - DNA, 120 bp, Homo sapiens
tagcgcagttggactgtgtgcctggggaacaaggcagggattggtgccagagacaaagaaagatcccgttagcaatgggagcgtgaggtcagagtcaaggccaccgatgcacatgggctc

SEQ ID NO: 11315 - DNA, 120 bp, Homo sapiens
ctccgactgagtgccagctccagatgcttggcagaggctctcaggagtgctgttttagaaggactttgattctcctggctcatcaggagagagtcatgactgattatcaatgtctgccat

SEQ ID NO: 11316 - DNA, 120 bp, Homo sapiens
atacggcacacatctgccattgctggtcgaaagcaagataatacggactcctgtggctacaagccaaggatctttgagcatccctgccatgggctaaccctgcaggtagaaagtaagtgg

SEQ ID NO: 11317 - DNA, 120 bp, Homo sapiens
attcggcaggaaaactcaggtctgaacactgagctgccagaggactttctgcattcccatgatggcttattaaatgtgggctcacagagttatctcccaattcagggaaggcacagtggc

SEQ ID NO: 11318 - DNA, 120 bp, Homo sapiens
atccggctgggatcacttcccttcagaacacagcccaaacaaagcaagccccaaatagggcctcaccttatttagccactgaagtcataattgcactgatttagattttgaaagaggcca

SEQ ID NO: 11319 - DNA, 120 bp, Homo sapiens
agtcgtttaaaatcagaaggatttacacacctgctacacatgccccctggcacacttgtggaccagaagctggactcagccttcagcctgggcaggggcctttgtgcagctggtgctatg

SEQ ID NO: 11320 - DNA, 120 bp, Homo sapiens
gcccgtggccaccggctcccagacttcccacgcagggacccagatgctccccttccccagctttgctgatgtggtgctggagttccgacgaggcagccggaatttctctccgtgctattt

SEQ ID NO: 11321 - DNA, 120 bp, Homo sapiens
tatcgctgagaggcatgggaaggctttgttctccctggctggttacgtaattttcaaaaggaaaacagagcaaagcctgaacgctcctggagtttgctctttggggaggagggaactccc

SEQ ID NO: 11322 - DNA, 120 bp, Homo sapiens
aggcgtgttctttagaaaaccgtattgagggaaacacaacccagggtgggtggcatcactgcctcccagggaccttaagatgtttgcagtcaccacaggctcacacgtcccagggggaga

SEQ ID NO: 11323 - DNA, 120 bp, Homo sapiens
gctcgggtcggttggtgtcctgctggctggtgtttgtgaagggtcatcccaggtcctgggctgggagtggtgctgggcatgagagaggaacaggcatagggactgtagcccaaggttggc

SEQ ID NO: 11324 - DNA, 120 bp, Homo sapiens
ggacgatatcaacctcacaggggtgttgtaagacccaactgaaataatcaggtgaagccgttggcctctggtaaaccctcaggacatgcagttccaccatcttcatcatgtcctctttac

SEQ ID NO: 11325 - DNA, 120 bp, Homo sapiens
ttgcggagcaaggcacatcagccataccacagaattgcagaactagaagggactttaggccagattaggtagcttttggagagctgggccctgagggcatcaaatttgcatatgagctga

SEQ ID NO: 11326 - DNA, 120 bp, Homo sapiens
tgtcgccttgaggggcaacaggaagactgagtccaagaggaaggagacagtgcagtgcaggaggagccagaaaagggccgggtcccaacacacttcaggacctgcttgtgaatgagctag

SEQ ID NO: 11327 - DNA, 120 bp, Homo sapiens
ccacggagtctagagcagaggtccacgaactacagcccacaagcctaatctggcccagcacctatttttgtaaataaagttttactgaaatgcagccatgctcatttgttcaggtatatt

SEQ ID NO: 11328 - DNA, 120 bp, Homo sapiens
gctcgttatagaaaaagtttgccaatgcctggtctagaggactccattcacatagaccacagtgactcattaggatcatgagccttggagtcagactgactgcgatgtgaatggtgccac

SEQ ID NO: 11329 - DNA, 120 bp, Homo sapiens
tagcggctcctcgggagaagggcttcctgtaagtttcagagtgttcaggagaggggaagaaagcagtgtctgtgaaatgtcagcaccttgctggggagatagttcctgtggaaagtcgaa

SEQ ID NO: 11330 - DNA, 120 bp, Homo sapiens
gttcgggaggatctgagcagatggggaggtaagtctaaatttagactttccaaagctgatttgtaaaccaaagccccaggaatcccagaaagggacagttggcacacgccatctcatctc

SEQ ID NO: 11331 - DNA, 120 bp, Homo sapiens
ctccgcatgttaaaaggctggatgagtgagagaataattaattggcctcaactaagctgttacctgagagtcagtgagaaagcagttgagagctgaaactccattgttcagagtcctgag

SEQ ID NO: 11332 - DNA, 120 bp, Homo sapiens
ttacgatgcccagccatggaatcgtggggaccttggctgctcttgtgagagttccatgcattcctcttgctgggtgtcattcaagcacgattgaacgagtgacctttccatctcagacag

SEQ ID NO: 11333 - DNA, 120 bp, Homo sapiens
attcggagcagctctgaaccaccacctttgagctgagaatggttgggctttgccctgagaagctgcaccacaccaagagctgccataaccactcccctgcccaggtggacacatccagat

SEQ ID NO: 11334 - DNA, 120 bp, Homo sapiens
agacggtgagctctagctgaattagaagacaaccacatttcaccgaagtgctttttaaaaagaagcccaactccattgctcccactttcctgctgtttaaaagtaaggagaagtacatta

SEQ ID NO: 11335 - DNA, 120 bp, Homo sapiens
ttacgctaaatgaaataagccagatgcaaaaggacaaagcctgtatgattctgcttctgtgaggtccctagagccatcaaacccatacagatagaaaggagcatggtggttgccagaggc

SEQ ID NO: 11336 - DNA, 120 bp, Homo sapiens
aaccgtatgcttaacagttaaaatggtgaactttatggtatgtgtattttattacaattaaattttttatggcaattttattataatttttttaaagtcaaagaaagtgaccacacaggg

SEQ ID NO: 11337 - DNA, 120 bp, Homo sapiens
aaacgatttcttcacccatgtttactttagctgcgtaatagaacgtgccagatgatttcccagtgattgcgatgtgagccaggctttgtgatgtgttccctccctcaatttgagagagtc

SEQ ID NO: 11338 - DNA, 120 bp, Homo sapiens
tcacgtgcctcatatgtacattggcacaaataagaattatgccttcagagggagatgactacagaagagaggctgtatatgtctgcttcagcgggacctctgggaggatgttgttcttct

SEQ ID NO: 11339 - DNA, 120 bp, Homo sapiens
gctcggtttgagaaatctgcctggcctgtaagtaaagcaaatcataatttcttagggcaggccagtatcataaagaccatctaggaacttgctggtccaagtgtggtcatctgaaccgca

SEQ ID NO: 11340 - DNA, 120 bp, Homo sapiens
ctgcgcttaaccagtcgaggtcctcaagggatctgagagcaccccaaagtttgagaagccaagctttagggtctccaccaggaagacggttttggcacatctctccacgagactgtctgt

SEQ ID NO: 11341 - DNA, 120 bp, Homo sapiens
gtgcgaggcagtggagccctctattcaggtcaaaggagctacatctgcacagcctggggttgaattccagctgtgccacttataggctgtgtgagtatggacaggctgcttacactctct

SEQ ID NO: 11342 - DNA, 120 bp, Homo sapiens
tctcggctgtccccagagcctcagagaacaagcttagctcctcttctacatgacagccttgcaaatgtctacaggcagctctcacgcccaccccttccatgtcctccagactgaaattgc

SEQ ID NO: 11343 - DNA, 120 bp, Homo sapiens
caccgttggtagaggaccatggtgaggccagtctccacacgctctggctgcagcatgagccccgtgggcctgcctccttgccacctgtcctctgcctggattccatgcccctacagaact

SEQ ID NO: 11344 - DNA, 120 bp, Homo sapiens
ctccgggcctcatatccggtcctcctggctgacctctcttctcagtgcttgcagccccgccctgtcctcctaaccatgctgtcttggcctcagcctccctgtgagtgctctccccacctc

SEQ ID NO: 11345 - DNA, 120 bp, Homo sapiens
caccgtctcccctcagctctgttgagttgaggccatcctttctcccatgccctgtacacagagcgggatagagcctctgcatcctccttgctcaccattgcttgcctgctattaacaaag

SEQ ID NO: 11346 - DNA, 120 bp, Homo sapiens
tcccgtgccagcacctcatctcatctcccatcatcccccacactgaggctgttggcacctacgtcatggcctccctctccacaattggtcccacatcattctggctgtgaggctgatgtg

SEQ ID NO: 11347 - DNA, 120 bp, Homo sapiens
aagcgagtatcagagtggcagacgctggggagctgagtgtccagggaatggaaaagggcacgaaagctggaaggcctgagaagtacccacccacctccttgcttgatcatgactgcagtg

SEQ ID NO: 11348 - DNA, 120 bp, Homo sapiens
gagcgtgttttctcttggcaatcagcttacaggaggcatggccagcactcatggcctgcattggtaggcctaggctcctggggctaccccacacttccatgttgggaagggagggggaga

SEQ ID NO: 11349 - DNA, 120 bp, Homo sapiens
ttccgtattttccagccaattcaaggcaggggagaaaggaggaacaggtgggagggaggtctcgccctggactctgactcaaagactcttcccaccctagccatagccactaaaccctgg

SEQ ID NO: 11350 - DNA, 120 bp, Homo sapiens
ccacgatctgggtcataggtgcctggctgcctccattctcccagccttgaaccctcagctcacagggctgtgctccagctgcccttccaacaggctgacaaccttcaggccagacggaga

SEQ ID NO: 11351 - DNA, 120 bp, Homo sapiens
agacgagactgtataatccacagtctattggcctctcatcttcaggctcactgtctgtggtcacgagatggtcgcaatcgctttcaggttctcatgcagaagtgtccaacgaagaaaggt

SEQ ID NO: 11352 - DNA, 120 bp, Homo sapiens
ccccggaagtccttccaggagattcctgtccctgtttgattgaatcacatggcctccccttattgcaagagaggcagggaaggcaacagctggtgtgacatggaaaggaccttctttcag

SEQ ID NO: 11353 - DNA, 120 bp, Homo sapiens
tgacgtctgtcacaaagaatcactcacggatgattaggacataaatccccaaggtggaattattccatcagcttctctcaaagccactcttccccactcctagaagcaaaggaagtcaag

SEQ ID NO: 11354 - DNA, 120 bp, Homo sapiens
tcccggagccttcatctgccaacacacttgactccttataatactcattccaagtataaataatcatcctcattccacaaggggtgggggagctaggtctgcctccagggctgtctgcca

SEQ ID NO: 11355 - DNA, 120 bp, Homo sapiens
ttccgccccaggccatggattcccagggaggccccactggctgcctcccatatgacaccattgatctcgggcaggagcagacaagtgaaagaggctcattctctgcccccacccccgctg

SEQ ID NO: 11356 - DNA, 120 bp, Homo sapiens
cttcggtcagtattcacatgtgcttagggccacacagggaactgtgggggcacctgggagagccctcatcctaggctggatgactggaagactggaatcccatgggaattcatggcaagg

SEQ ID NO: 11357 - DNA, 120 bp, Homo sapiens
atacggtggccagtggttgtctgggtgtgggaggtgagttgagtttctgagacaaagactgaagcttcttatgaatgaaaactatgcctcaccgattcccagcagtcagcgtgatgcctg

SEQ ID NO: 11358 - DNA, 120 bp, Homo sapiens
gctcgataaataactatttatggaatgagggaataaatgaatgtttgagtccatcctgtcccaccaaagtgcccctgcaaacctggcatagcctggcctgccttccttctcccaaggatc

SEQ ID NO: 11359 - DNA, 120 bp, Homo sapiens
ctgcgtcctcctgggaggccagtgaccttctgaatccatcgatttcctcaatcactgatgaattttcttgcaaagagatacagggctggtgtgaggggcaggttaatggtgcaggctgag

SEQ ID NO: 11360 - DNA, 120 bp, Homo sapiens
ccacgagggagctcctcggagggatgggcagcctgggccttgagctcagctccatttctccctctccatgtgggctgtaacatgaggagccaagtcatgatttaagcggacctccagaga

SEQ ID NO: 11361 - DNA, 120 bp, Homo sapiens
ttgcgctgagataacccagggcagagctccaagagcagagctcccagggcacccacccctgctcaagggaagggccaccagtgcctgtgtgcagagctgctatctgctgaattttggcat

SEQ ID NO: 11362 - DNA, 120 bp, Homo sapiens
tctcgcacaaggcttctgagtgtcccttcccttccccaggttcccactgcccagaactcccccttgatccagacatgaaaggactactgcttggcagagcaggggaattcagcctggttg

SEQ ID NO: 11363 - DNA, 120 bp, Homo sapiens
attcggacccaggagctctgggctgtggagaccctgtcccacccctcgactgcagcattcccctttctcactaaggctttttactgctgcacctggcactccagcctcagggcttcctca

SEQ ID NO: 11364 - DNA, 120 bp, Homo sapiens
ctccgtcccattccagcagccccttaagccatgacaaagggaagttggtatataaatatcccagcttccctgccccgcaaggggaaccacctctgagtgtggcccacactgtctctggag

SEQ ID NO: 11365 - DNA, 120 bp, Homo sapiens
cagcgttgggtagaagatgtatttttaaacaatttctgcctaggcacgtaatgatctcttagatcttttcctgttctgacgttcttagatcaggcagctaaacatttgggcatcaccatc

SEQ ID NO: 11366 - DNA, 120 bp, Homo sapiens
agtcgagggctcaagcagctaggactccgagggggcctaactgggagtcccactgccgggggaatgtgacagctagttacataagtgacagatgagcaatttctcctttttagtcatttg

SEQ ID NO: 11367 - DNA, 120 bp, Homo sapiens
gggcgacgctgctatttttggacaggtttgctggcttgttgttgtcaattgttgttttcaagcattgccaacaaatagagattaatgaagactctgtcttctgccacccctggggcagcc

SEQ ID NO: 11368 - DNA, 120 bp, Homo sapiens
ctgcggcagcttccccttcctccagagagcctggaggcaaagaacattggctcagggagagtcatcctatactttctgcgactgtggcatagggttgtgccaggaaaaactgtcacagga

SEQ ID NO: 11369 - DNA, 120 bp, Homo sapiens
aagcgggggtgataacacaaagtccacagggttgctatgaagactacagataatgtatgtttggcacttggaatagagcagccaagggtcagcgtcttcacacactcttcctcctggaaa

SEQ ID NO: 11370 - DNA, 120 bp, Homo sapiens
cagcgtcactgggaggcgggcagtgctgaggccttcctgtgcctctccagtcacactctgtgggctacagctgccaggtctatcccacacagccgaatctgcctctccttggtctatctg

SEQ ID NO: 11371 - DNA, 120 bp, Homo sapiens
acccgcacaaggaagggagggctccgccagagctgatggcctgcctgtctgcccatctgcccttcatttgctcttggctagctgacttcactctccatggctgcagagcagtcgaacggg

SEQ ID NO: 11372 - DNA, 120 bp, Homo sapiens
ctgcgtcaatgcaaggtgctatggggcccccaagcagatccaccagggcaggggttctcagccctggctgtacttagaatcacctgggggatcttcaaaacatgcttaatcaggtcccca

SEQ ID NO: 11373 - DNA, 120 bp, Homo sapiens
taacgtcgcttactctaggctcctctgcattccagctgcccatcacatccttgccaaatatccctagaacaccatccccattgagtcattccttagctcaaacacctagaatggtggctc

SEQ ID NO: 11374 - DNA, 120 bp, Homo sapiens
ctccgtgggacctctacaatatcagtctatagttcactatcagcttttcaagtttcttcataattgagcttcctccaggagactttctccttctggatggcaaagctggtcttgctgacc

SEQ ID NO: 11375 - DNA, 120 bp, Homo sapiens
acacggagtaggtagtgagtaaattacagccaaatgcatggagaaacattgaagcccatggagtaggtgacatctcccattgcattataattactgatgtaatgtaatgagtggtacaga

SEQ ID NO: 11376 - DNA, 120 bp, Homo sapiens
cctcgcccccagtttttttccacaggattttcagagggttagaagtcttttatttttgttgttgttgtttccacagggttagaagtcttttatttttgttgttgttgttatttttatttt

SEQ ID NO: 11377 - DNA, 120 bp, Homo sapiens
agccggctatattttaacatacgcattttaccagcttcccttttacaaatcccatatcagtgatttatgcactctgaaatgaggctgagaaacatggacatggctaagtgcatacctctg

SEQ ID NO: 11378 - DNA, 120 bp, Homo sapiens
tttcgtgttatggtgaaatatgtggaaatcttatttcctctactagattgtaaagtccttggtgacaggaattacatctttggacatcatgtctagccagacacagttagccatgtatcc

SEQ ID NO: 11379 - DNA, 120 bp, Homo sapiens
agacgtctccatctctccaaataaccccagatgccttagctcattatccaaagcctgcttttgcctttgatttcccagtaccccaatggaaaagtatagatgtaactctgtaacatctct

SEQ ID NO: 11380 - DNA, 120 bp, Homo sapiens
gagcgcatcacaccttctctctccatcatcctcctacctataaatgtagcaacgtccacagccttgccactgctttccctcccctcaacagagaagccactgtcccttctgcccaaggcc

SEQ ID NO: 11381 - DNA, 120 bp, Homo sapiens
gagcggtctcagttttccaggagtaaactctcatgcttccaaccctacctatatgccagtgacatccaagtccatttgtccaatgcagacctttcttctgagctttagaaacatttcttc

SEQ ID NO: 11382 - DNA, 120 bp, Homo sapiens
aggcgctggggacctggcttgtttttgttttgcttctcctgggcaaggcaggtgcacactacatgctcagtgcgaactgaaacacaaagtgctgggtggccgctcagcggacggtactcc

SEQ ID NO: 11383 - DNA, 120 bp, Homo sapiens
ggccgaggggggctggcctgctacccaactgatcctggtggggggaccagctgctcaccatgcctccaccagaggaaaaaatagcagttcagtctttggaaaaaactagcgactcacacg

SEQ ID NO: 11384 - DNA, 120 bp, Homo sapiens
agacgctctaaaaaacagaaacacctgcttcagaattatggcaggaaatgagatttcagaaatgccacaagaagctggtgtcgcagctgcccctacctcgtattcccccagccttcgccc

SEQ ID NO: 11385 - DNA, 120 bp, Homo sapiens
gcccgccagctggggctgcccacagggaaagccccttggcccactgcctgtggtagccgctggatagggcctggcatgtggggtcagggcccagtgccgcctgcctggggctgtctagca

SEQ ID NO: 11386 - DNA, 120 bp, Homo sapiens
ctgcgggcgagactccacactcctgtgtctgagcctcttgagtggtaacagaaactcagggtggactagtcacggaggaaagggggatatgtggtctcctgcgagccccctggactgagc

SEQ ID NO: 11387 - DNA, 120 bp, Homo sapiens
caccgtctcaaggctgtgtttgcccttgaaacccaggtaggaggtggacaggtctggagcacactccctcagcactggtttctggtccctttgtagatgagataaagcgacttcttcaag

SEQ ID NO: 11388 - DNA, 120 bp, Homo sapiens
tagcgcgcccttagaacacccttagaaagtggatccagatctgggaaagaagaccaaggactcatacttaggtgtctttctatgttgttaatggaagagtaaactaaggatgtccctcta

SEQ ID NO: 11389 - DNA, 120 bp, Homo sapiens
ccccgtgagacagcatccccacaaccctttctaaggcctgaaggtgatggttctgaagtcctctggttccttcctggaacaagggtcaaataggaaaaccacagaaaaatgagacttcca

SEQ ID NO: 11390 - DNA, 120 bp, Homo sapiens
gcccgggcctgggtgactgtaaagcaggccctcaggacacagtggtctggctgcctggcagcaagatctctagagaaaacctgggaagtgcaagagacagctttgtaaaggggtcctcgg

SEQ ID NO: 11391 - DNA, 120 bp, Homo sapiens
ccccgactgtggcatttcaattggaatgtgaggaagcagcacccagcaggggtgaagaacatgcacatcagaatggccgaatgccattctttgtctcattgtgtaaccctgggcaagttc

SEQ ID NO: 11392 - DNA, 120 bp, Homo sapiens
tgtcggatctggcagcaactttaaactcctgcagccgtccccggaagcagaaccaaccctcttctcaattggtacacttttagcagctataagtcaagggtatgttagagacactgggat

SEQ ID NO: 11393 - DNA, 120 bp, Homo sapiens
acacggatcaacaaatattgactaacttcttacaagttattgtaccaaacatatggggaatacaaggaaatataagtcatgcactagaccacaaaagactcataatctaggtggcagaat

SEQ ID NO: 11394 - DNA, 120 bp, Homo sapiens
gcacgagggcatggaaggcaaggatctaataattcagtggatgccagagaaacatattgtaggcattttgagaagatataattaaaaaaaaaagatagtaaagtcttgacggaagtagtg

SEQ ID NO: 11395 - DNA, 120 bp, Homo sapiens
tagcggttaagtcccagcctcgctacatatgaacaatgcattacttaatgatttaacttctttgaacttcagtttcccttccgtacaagggagattatatctgcgagcagagttgtgaaa

SEQ ID NO: 11396 - DNA, 120 bp, Homo sapiens
aaccggggctggaactggctgtactggctatgaccaagccagcagaaatgatgaagccagctgggcatggtggtgcacacctgtaatcctaggtactcaagaggctgaggctgaaggatt

SEQ ID NO: 11397 - DNA, 120 bp, Homo sapiens
gggcgttgtggctaactaagccaggctagcccttgaaagcagaagggaaatctttcagaacacatgagcaacagctagggtgaaggagaaggccaaaggtgcttgtagaaggtgagtgag

SEQ ID NO: 11398 - DNA, 120 bp, Homo sapiens
gcacggttctttgggccaaatcatgcacaagtggctcatgggtcatgagcttcctgcagtacacacaaccccgagccatccatggaaaagacccatcttcgtgacccttagcatgaaaga

SEQ ID NO: 11399 - DNA, 120 bp, Homo sapiens
tctcggtggagatgagaaactagagagatgagatcatcatccaagactactttgttcttgagcatttactgaacttgaaaagatatattctgtcagttgtttttcctcttggctctcagc

SEQ ID NO: 11400 - DNA, 120 bp, Homo sapiens
cagcgtgccttgggggctgaatgttgatctgagcagtgtttaatttcctggaattctcaccatataaaattatagcaggctgcctctacacaagaggggtgaggggattgacaccatctg

SEQ ID NO: 11401 - DNA, 120 bp, Homo sapiens
gttcgggccacactgagtaacaggtgaagaggaaaaaatgaaaacatttaggatctctgcaatgctggtcccacctgggtgggaaaaaccaggattttcctctctccagggctgagagcc

SEQ ID NO: 11402 - DNA, 120 bp, Homo sapiens
tgccgggttttttttttttttctttttacagaaacttacaggacacgtgccttcctctctcccctccttccctgctgttttcccagctgccaggaactccacctccgtgtccactctctt

SEQ ID NO: 11403 - DNA, 120 bp, Homo sapiens
aaacgaaactcaagttattgggctttgaaatatcctagctcaattcacatgcgtcctgtttaaatccgtggtgtgttacctcggcttattcggatttaggaaatgctccatcatcctgtt

SEQ ID NO: 11404 - DNA, 120 bp, Homo sapiens
cagcgcctaaaataagaggcagatgccaggccacttacgcaaaagggactcccttggcagcatcctgcttgtagttaagaatgatcccactagatggagctccacttaaggtccgaccag

SEQ ID NO: 11405 - DNA, 120 bp, Homo sapiens
cttcgcgtttgacttaattttcagattagacagaacttcctactgcttccctcattaataagatcatccacgatcaaattccttctacctccctccctcaaggtacaaaatgagcttgca

SEQ ID NO: 11406 - DNA, 120 bp, Homo sapiens
tcccgtgcacagcttagatctccggaacatccaacccttctgactatcataagaattcttactgatttcattattgactggattaaatagatttaaaagacagaaatctcacaggttttt

SEQ ID NO: 11407 - DNA, 120 bp, Homo sapiens
tttcgctatgaaggaacccaccaataacacatccctgtcatctctcaagcccagctcttgctggggaagaagagggttctttctggggtctccctctggctccctgtgtactcttttatc

SEQ ID NO: 11408 - DNA, 120 bp, Homo sapiens
aagcggagtccttgttccctttcagctactaattagctttgggatcctggcgaaaatgacttttccttctgcttcctcattaaaaacaaaacaaggccaggcgtggtggctcactcctgt

SEQ ID NO: 11409 - DNA, 120 bp, Homo sapiens
aaccgctgctccctccctcaggcgtggccgcaggcagttccttgtccccatcccggggacattgctgactttttagctggtttccttgtttggcatcctcagaaccattaggccctggag

SEQ ID NO: 11410 - DNA, 120 bp, Homo sapiens
gcccgcctcatgcaaacattcttattttttatggcactgccctcagagtgtgcaggaatgagttctaaaggacaactctggctcggcccaaggccatgcttccattccatacaccccctc

SEQ ID NO: 11411 - DNA, 120 bp, Homo sapiens
tgacgcaggatggggtagaatcattattcccattttagagatggggaagctgagatgccaaagcttggaatgaaccacccaaggtgatacagcagccctttggggcagaactggaactag

SEQ ID NO: 11412 - DNA, 120 bp, Homo sapiens
tcccggttacacaactgatatcgggcacgtactcagctagagagtataaatagacccagtgccttgccactgagaatttatgattcaaaaatcacaaggttttacattgagtaaccagat

SEQ ID NO: 11413 - DNA, 120 bp, Homo sapiens
gcacgttgcgactctatcacagctctgcccacttggcccagatgagcctcagaatcttccctaatccagcactctgcccagacacgtatctgacaggggatttcagctagtgagccaaat

SEQ ID NO: 11414 - DNA, 120 bp, Homo sapiens
attcgatttgctgtccctgccacacatttcaggctgcttattccaggaaatgtgaaattccggttgtttgccctttcagggagctgcagcctggtaaccttactcttctctccattcaca

SEQ ID NO: 11415 - DNA, 120 bp, Homo sapiens
caacgagctgctgggaagtgctaagcacagcttaaaacagaagttacacacctgaggtctgtaaaacctcggcagaagtggccgcagttgactgtggaaattatttcattggtaaagcac

SEQ ID NO: 11416 - DNA, 120 bp, Homo sapiens
catcgccttgagaatcgcagctgtcttgaagatctttcctatttctgggaggactgagtcttgaaggtggagtcaaatcgtttggaaatgatttatgtggacatttcggccggggtgagt

SEQ ID NO: 11417 - DNA, 120 bp, Homo sapiens
gagcgccagccacaccctttacccttcctaggacgtccaagtcgcatacccattaagttagtccgtcttaaaggtcaacatggggtaagtccgggattaggacctgaaaggagccatgag

SEQ ID NO: 11418 - DNA, 120 bp, Homo sapiens
ggacgcacagagacacggagaaggccacgtggcgacggaggcagagaccggagggatgccgctccaagcccaggcgtgccgaggaagaggcaggggacgattttaccctgggaccttcgg

SEQ ID NO: 11419 - DNA, 120 bp, Homo sapiens
tcccgtccctgtctcctgtccccgctccatggctgctttatcacactatggagtcccactctgaggatgacgattgcttgtaccctgtctgagccaccttgggccactcagctgtcctca

SEQ ID NO: 11420 - DNA, 120 bp, Homo sapiens
ctgcgagagctcacttacaccaacaaggtaagcatggtagccccaaggccctggtccagtggaggagccaagatctgatgacctccaagaccccctcaagccctgaagttctgtatttaa

SEQ ID NO: 11421 - DNA, 120 bp, Homo sapiens
gaacgtcagtggctgcagcaaggtcatgcagctcacactgctggttaagagtttctttcaagtgtaacgtaggaaaatgtacaacatttattggttttacttttgataatactggctcat

SEQ ID NO: 11422 - DNA, 120 bp, Homo sapiens
aaacgtagtcacgacatctctacatcttcttctctttaggggaggagaccagctgttaaaggatgaggggctctggggtcccagggctgagaggcaggtgtcagctcggggtggagggaa

SEQ ID NO: 11423 - DNA, 120 bp, Homo sapiens
cctcgccccttcagatgaccctgtgcagagagaggacaggccagggcggacaaccttgtctttccctggatgctcattaacgtattggcttgctcaggttggattcctagggtcagaata

SEQ ID NO: 11424 - DNA, 120 bp, Homo sapiens
taccgctgcttacagatacagctgttgtgcttgtccatgcaaaatttccctaattcctaaacgctgtcctctgttgaaaaatgtaagccccctgaattggaacatgggtacacatcacct

SEQ ID NO: 11425 - DNA, 120 bp, Homo sapiens
acacgtgtggggaccggagacccttcacgcagtcacctccgcctgcagagaatgcgggccttggtcaccagaagctctcaatcccatgatccggttttgctctctgaaatttggcggtgg

SEQ ID NO: 11426 - DNA, 120 bp, Homo sapiens
agccgctgtgaaaaaggcctccaccagcctctcaccagaagagattgctcattggaacgcaatgccacctggtgggggacgaggacagtgcgagcaagcagatgttatttcctactgacc

SEQ ID NO: 11427 - DNA, 120 bp, Homo sapiens
aaacgtaagagagggaacatttggggttggaagcctgtgcccaaaaccttaaagagtgcaggcagctggccataaaagcagcttgagcaaacccctcattcagccgttgaaatgtgtgtg

SEQ ID NO: 11428 - DNA, 120 bp, Homo sapiens
ctgcgtgcatttggtcatcacagctgtgaagtggggtgggaatgtttcccctcgttttctaggagagaaattttgggttcagtgagacgaagtgctgcagacaggcccatggtgatgctc

SEQ ID NO: 11429 - DNA, 120 bp, Homo sapiens
caccggtcagtgtcacaggggccgccgctgccttagtgcagggagcccagtccctccaccgccgtccctgcagcctgcagacagggcccacctgccgcctactccccggctccagcagct

SEQ ID NO: 11430 - DNA, 120 bp, Homo sapiens
gagcgggaaagccactcgccagcgcctgctctgaggctgctgtccttgcacgttcacacgtgggagaagcgactttctttctctttcttcagttccaaggagcccattagtggcctgtga

SEQ ID NO: 11431 - DNA, 120 bp, Homo sapiens
tgacgggctcaggtattgttcccctcaagacccactgggcctgccgctgccagggctcacattcctgccccggcgacaggatcgggtcaggctgtgtcctgaaccccacgccccaccggc

SEQ ID NO: 11432 - DNA, 120 bp, Homo sapiens
cggcgcctgcacacacgcgcccctctccacctccccttctcagtctcctgccctgggcgctccttgagaccaccaccaggacgtccaactctaaagccacagagacccgggcttcctggg

SEQ ID NO: 11433 - DNA, 120 bp, Homo sapiens
cagcgcattcctgcaggcgcaggattaagacgggaaacccagaaaggagtctctcctcattgcaaacagagataagccttcggggagagttgcacacaggagtgcgagtggccacccctc

SEQ ID NO: 11434 - DNA, 120 bp, Homo sapiens
cagcggcctctctgccaccaccagccacacgacttggggaggacagctggggcctccctgttcccctgtccgcagcagtcagggcctgcctgttcatacccaggttatcacgtgaaacca

SEQ ID NO: 11435 - DNA, 120 bp, Homo sapiens
ctgcgtcctggtcacatggccttcttcctgtgtgtgtccctttgtgtcctctcttcttcttgtaaagatgccagtcatattggatttagggcctaccttcatccaatataacttcatctt

SEQ ID NO: 11436 - DNA, 120 bp, Homo sapiens
tcacgttctgaggttctgggtggacatgaattcttgggggacattattcaactcagcatatatgctgtgcagaaaaataaagcagcgttggggaaagagcatgggggtggtgccatttaa

SEQ ID NO: 11437 - DNA, 120 bp, Homo sapiens
agccggaagggtgaagacgttggaggggaggtgcccagaagaagagtccctgttgccttgtagaccaaggtggggattttagagttagccaccttccaggaaatttgtgagggtgaagtg

SEQ ID NO: 11438 - DNA, 120 bp, Homo sapiens
taccgagcttaaactaggcacatgggaagtatgagttctcttcctccttgctcatcatcccagctctaagacagcatgttaaaacatttttctctggcttaggtttgtctaagttcaact

SEQ ID NO: 11439 - DNA, 120 bp, Homo sapiens
gtgcggtcggagaggaatcccttttcctccgctccatcctcacccctgctcgtctctgaagactctcagcagacactggagaggaacacggctacatactagaagagtctctcctgtctt

SEQ ID NO: 11440 - DNA, 120 bp, Homo sapiens
tgccgtgggacacatgtggctcacaggtgtgttttgtttggtaggcacaattggaaatactttaaagttaattgccatgagttagacattgtaaagttcccttaagaatcaagatttctt

SEQ ID NO: 11441 - DNA, 120 bp, Homo sapiens
gggcgcatgcccgcacctggtgcgagcacactcctcatacaggcttcctgcctggtcccagaggcctgctgggtttgtgaaccctgacttagaggaacagagattacctttatttgtgtg

SEQ ID NO: 11442 - DNA, 120 bp, Homo sapiens
ctccggtggaactcgggaggaagcagggcgctaccaaaaagcaggggaagatcacccagtgcttttcctataggttgagtaggccctggacatctgctgtcttcagccctggactctacc

SEQ ID NO: 11443 - DNA, 120 bp, Homo sapiens
tcccgtgcagcaagtcatgcgaacacctcattcagccttttgcagcctgtactgaactgctgtcgctcatcgcacccttgttttgggatggaaggaactccgagactgctacacagctac

SEQ ID NO: 11444 - DNA, 120 bp, Homo sapiens
cttcgtgacttttcccagtagcaccagagatttttttttctatggggcagacctagattctgtctcttcagttggtaaacgcttaaatgctcaaatagtttctgtcttaaaaatcaagct

SEQ ID NO: 11445 - DNA, 120 bp, Homo sapiens
tctcgctttgagcatttaactcggtatcaggccctaaatcatagtattatgatatctcagtatatggaaaggagacaatatcagatcaggaaaattaattttccaacaggaatggggaag

SEQ ID NO: 11446 - DNA, 120 bp, Homo sapiens
aaccgagattccttcagcttttcaaaagtgccacaatgttatttggccttctctcagttaatgaacagtgggaaatgtgcttacattggcttaagagagccaaaaccgcaattcctgcaa

SEQ ID NO: 11447 - DNA, 120 bp, Homo sapiens
ttccgtacatgaaaagttacggcccatatatggcaaaacccaattcagtttttgagcgctttaaatgaaatgattgaacagtttggagcatgacttgcctgtggcataggcgtgaaatct

SEQ ID NO: 11448 - DNA, 120 bp, Homo sapiens
tgacgtgaggctcaagtcatcttagggctcctaggagaggatgagaatccattagcacctctatatctggggagaggggtgttgccaagaaggcctgttttgtaagtttgttttcattga

SEQ ID NO: 11449 - DNA, 120 bp, Homo sapiens
aaacggaaccagacatgacctgtgaggcaggaagtacagcatgaacttttattgaaaacagctcaacagtgatatcattggctgacgatggaggaggctattttatatctctctggaata

SEQ ID NO: 11450 - DNA, 120 bp, Homo sapiens
ttacgtctatttttcctcctggatcatgtaaaaatgccttaagcctgtagggaattagagtaacatttctaaagtaaaagttacaactgacccagctttaaactggcagacatgagttac

SEQ ID NO: 11451 - DNA, 120 bp, Homo sapiens
ccccggcatcttcctctctagatataaatgaacttgtgcagaatgggacatgtgaatcactgtgtctgatccatcattggcagcccttggcctgtcacatctcacatgttttaaataatc

SEQ ID NO: 11452 - DNA, 120 bp, Homo sapiens
atgcgtttagattgattttagtcgttcattttgaaaccaatgctgcttaacttttgtcggagcattgaagagttagtgactgatatactaagattttgccctgtggatggatggattact

SEQ ID NO: 11453 - DNA, 120 bp, Homo sapiens
tttcgggtaagagggaattttgtaatgaaaggtagcaattatgatagaatttgaaggatgaaaagtcttttgacatgtgaaggagatggtcagaaagattattatgcttatagaggcaga

SEQ ID NO: 11454 - DNA, 120 bp, Homo sapiens
atccggttataattagcattttcattcagtactagagtcttgtcctgtttcccaggtctgttactggatggtcttctaccactgagtgaattgaaagttaatagcttcctcttttcacaa

SEQ ID NO: 11455 - DNA, 120 bp, Homo sapiens
ggccgaagaaagcagtttccctgtttgtcatgctgtgatgtagtatgcctgatgtctttgaatcagggactctggttcgttttcttccagggaataaactgtcctctgctggaattgggg

SEQ ID NO: 11456 - DNA, 120 bp, Homo sapiens
tatcggagtaactggtgaagctgctgttttgctgctctttgtaaaaaactaggctttataccagtttctctttctttttattttaagacgggctcttgctctgtcgcccaggctggagtg

SEQ ID NO: 11457 - DNA, 120 bp, Homo sapiens
atccgtgcactgctaagcctcccagatgatggcaggtgctcactgggaacaaggctggtggactccttggcccttggaacagaagggcatacgtaagttcatgtggattcattttagaag

SEQ ID NO: 11458 - DNA, 120 bp, Homo sapiens
ggacgacaggaaaagcactgtaccaagaaactgagaagatgtgagagttcagttacaggccaatggagtttgggggtgtggacaacagtgtgaaagccaaaaggagttgagtcatgcctt

SEQ ID NO: 11459 - DNA, 120 bp, Homo sapiens
gtccgaaaggaacatggggcaaaaggtgttccttcctttcctcatccaggaaagacagcctctctcatgcattttagaaattatttggcttccttatgtaactattatggcacatgcagg

SEQ ID NO: 11460 - DNA, 120 bp, Homo sapiens
actcgtggttaatctttcagatgtgatacagcctgcataacaataagagcaacagtaaatggatagcaaagaggtaggaaattagaatgcatgatgtatttcaatctctgaagaagatct

SEQ ID NO: 11461 - DNA, 120 bp, Homo sapiens
gttcgttctggtggaaggatgaaatgtagactattaaaccaatttaaattgtctcctgctgaaacattgtgaggttttaggaagaatggcttaagtgaatgggtattgaatttaattttc

SEQ ID NO: 11462 - DNA, 120 bp, Homo sapiens
aagcgaggcaatagacgtacataaaatgtgtgtttagtgctcttagcacagagctaaggcacaatcatgattgtctgccaagatgcacacccctctccatataagcagggatcagtgggg

SEQ ID NO: 11463 - DNA, 120 bp, Homo sapiens
acacggctgcaaatgtcaactagtcctcccatccatgcttctctctctgagggatgggtaggctgaaacccccaatagcccagccaaaagacaccccaaatttgtcagggcactggcaat

SEQ ID NO: 11464 - DNA, 120 bp, Homo sapiens
ggccgggctctgaatccctttagtaatcaacagagttttgtgtggcaaaatctgaaccagactaagcccctgatcatttgtcctgtctggacctgaagccatcctgggaaaccggaggat

SEQ ID NO: 11465 - DNA, 120 bp, Homo sapiens
ttacgtagaacaatgtcatttctagagtgagatgagctaaactagcagctcttggcccaaagcctcagcatagagatgctgttgccatcccagggggctgagaagggcatgggacttgga

SEQ ID NO: 11466 - DNA, 120 bp, Homo sapiens
ccccgagcctcatttacttcatccatagccataaaattcattattgtgaagattaacgtaggtcactcaaagccatttgtaaattggatacagaaagtgagctcgtggcagaacaaacac

SEQ ID NO: 11467 - DNA, 120 bp, Homo sapiens
ctccgcacctactcaacctgcccttcccccaagaagttctgctgagcctgccgttttgcagaagcaatttcctctcttagctttctgatctgaggatagtccgtaatttctataggaatt

SEQ ID NO: 11468 - DNA, 120 bp, Homo sapiens
agacgaccagaggtcaaaggctgtttctagacatctatgcaaacgtagagaccactgggtatgtcctgatcctagattccaccaagagggctggagactcattggcaatactatctgtga

SEQ ID NO: 11469 - DNA, 120 bp, Homo sapiens
ctgcggccacacagaatctatgacatgcaaccgtcaggtgagagagaacgccaggagaaagagaaaggacatgaaggaggaagtggggtagacagacacttgtcttgcagaaagagcgct

SEQ ID NO: 11470 - DNA, 120 bp, Homo sapiens
agccgcactggcggctgggagtggtggccggcagagcacacgcaaggaagtgaggacttttttctacctgaataaagcagctggtgaggaagtgactccatttccccccttatcatcggc

SEQ ID NO: 11471 - DNA, 120 bp, Homo sapiens
gctcggcaggatttcctccacagccacattgtgctgaatgagtctagagggttccgtctgcagagcagtgtggctttggcagctgcatgcttgcttctgtcccctgtgactcttcctccc

SEQ ID NO: 11472 - DNA, 120 bp, Homo sapiens
tcccgcaccctccctttactcccaaaatattgtttccgggtttgggggaaaaggaaagggaaaaaaataacccttgagcatataactgaaggacacacagctgcctgggccggagatggt

SEQ ID NO: 11473 - DNA, 120 bp, Homo sapiens
gcacgggagcgtgagaagcacaaggatttgccttcctccaggctggcgaaggctgctccccaaagccatctccagtgcctgggggttgatcttggaggaactctgggtccagggggaggg

SEQ ID NO: 11474 - DNA, 120 bp, Homo sapiens
attcgtgaaacctaatctccatgtcatttggatgtaacaagaaacctgctggagacatggcaggagatgaaaaacccaaacaaaacaaaaacaaaacttgcccgcttaccacagttggtc

SEQ ID NO: 11475 - DNA, 120 bp, Homo sapiens
caccgtgtggggtaaggagcctagaacgttcagttatgttctcaagtcgtcacagcttcaccttacccaagatatctaacatctctgagcctcaacttattcatctataagaataagagg

SEQ ID NO: 11476 - DNA, 120 bp, Homo sapiens
ggacgctacaacatcaaccacaaaggctggggtgagaacgacacgggctcatgatgccaaacgtctggtggaggtcggcacagggcgggcagaggtggcaaatggcagtgtcctttgtcc

SEQ ID NO: 11477 - DNA, 120 bp, Homo sapiens
gctcgggacagcagggccacagcacgtctcctggcctccagggacagtcaacttgaggaggcgacaaatctcatttgcaaaggtgagaaactgtacagcaagtcaacagtatcggatgag

SEQ ID NO: 11478 - DNA, 120 bp, Homo sapiens
tcacgagacaggacgtgattgatgtcgggtgggcgtggaatgtgctgtgcattgcgtggggagggcccttagtgggggtgagcttggtgggaaaaggagggtctcggagggtccagctgc

SEQ ID NO: 11479 - DNA, 120 bp, Homo sapiens
gggcgcggtaaagagactgccgttgttgcctttaggctgttctgctgctctctgcttccccctgttggcttgggagggaagagtagggctgttggctgagacggacgttagagcgagcag

SEQ ID NO: 11480 - DNA, 120 bp, Homo sapiens
aaccggcaatgcagcgaccaggagcaggtggtggagcggggaagagagagggagggctgcttggccagatgccaggcactctgccaattgcaggccctgcagatcttgccccgagctcag

SEQ ID NO: 11481 - DNA, 120 bp, Homo sapiens
tgtcgcaccctctcccttcctggggccctcactcatgttctccttggaggttagaggcccatcctccctctcccaggacccttccccgcctccccagccagtgtgggccattggtgtgac

SEQ ID NO: 11482 - DNA, 120 bp, Homo sapiens
ggacggcatcagacgggctggcaggggaggggggtgttcaaagaggagaagaaagcaagagccaacatagagtcttgcccagcaatagcatggaagggagtggcagcccattgtccctca

SEQ ID NO: 11483 - DNA, 120 bp, Homo sapiens
tcccgtttgtgtcaatctagtgctttcaacttacaaactattagtaggctttagaacttagatcaattgacattctgggtcaggtaattctttgttgtggggaggacgggctgccctgtg

SEQ ID NO: 11484 - DNA, 120 bp, Homo sapiens
ccacgacatgccagcggaaacccttgtctagtgtgaaaacccgaaatgtctccaggccgtgccaaatgtcccctggaaggcaaagtcatccccatggagaaccactgccttagattattg

SEQ ID NO: 11485 - DNA, 120 bp, Homo sapiens
gaacgtcccaccctggcgtccacctcccccgtccacctgatgtttacgtaaacagaaacagaagcttctttcagaagccaaggaatctcctcccaagtccagacgttgtgggttgggggt

SEQ ID NO: 11486 - DNA, 120 bp, Homo sapiens
aaacgcttgcccaggaggcgtctctctggtggaggagtaaaccttggagaatttgccctccgttttcttccctcgctttcttctccattttctctcccaggagctagctggtgagtagct

SEQ ID NO: 11487 - DNA, 120 bp, Homo sapiens
taccgcagctactcatgtgaacatgaatctggggccaccctttttcaaatttcaacagcaagtcctggaactaaacaagaaagcctttgcacaaataaacaattaagttaattgtgggtc

SEQ ID NO: 11488 - DNA, 120 bp, Homo sapiens
tcccgaggaattaagtatgcatctggggttaggcttctgggctgagcctcttgtgtaaaaaaccagaaggcaagaaactgaaggaatatggtcaaagtcccttattttaaaatcaaggac

SEQ ID NO: 11489 - DNA, 120 bp, Homo sapiens
tcccggagaggtgaactgcctgtcagcacggaaaacaggaccagacataatcatggtaccttgttccaagtgaagttacctaatgctcccttcccatccaaacaaggatttgggatatgc

SEQ ID NO: 11490 - DNA, 120 bp, Homo sapiens
tgccgcccaggagggtggtcccaaaggggatcctcagaggatgcatcactaagtatttctgtaccccaggaggtggcttatttcatggaaacccttcacctggggctgttcatagaacca

SEQ ID NO: 11491 - DNA, 120 bp, Homo sapiens
gcacgcggcagttgaaaaggggcacctacgccttgctctgtgacattgttttcagtgaaaattagcgttcgctgttttcagcgttaaccttaaactccagctggctttatctcctctcac

SEQ ID NO: 11492 - DNA, 120 bp, Homo sapiens
taacgcagtgcactgtgtaaaggtcacacctgtgtttatacgccatatgccatcaaaataccatgaagagaacactatgtggtctctatcagaagatcaaaagagaaggggtgagaagca

SEQ ID NO: 11493 - DNA, 120 bp, Homo sapiens
caccgcgtaagggattttgccaattcccaacctcgggagatcacccaccacctggctgtggtccgccgctgaacaggaaagcactccgagatgccaagagactaaaaggctcgtaactgt

SEQ ID NO: 11494 - DNA, 120 bp, Homo sapiens
aagcgcgtctcaggggagggcggggcgctgtgtaatcgagcctcccatgcgcaaggcggatacaaacggtttatggatgtgggcgaaggttctcagagcaaagaatgtccatttccatca

SEQ ID NO: 11495 - DNA, 120 bp, Homo sapiens
gaacgattgtaaaacaagggctgagaatctcccaaacaagattttagaattttatccaaacagctgcagttcacctttgaggagccccagactcacttgggtctgatggatgttgcaaca

SEQ ID NO: 11496 - DNA, 120 bp, Homo sapiens
aatcggagtagaaaacaaaactccctccccttcccacccccaacctccctgctttgttgtgaaattgtcactgcgcctttgaggagtgattaaaatcccagccatgaccaatttaaaggg

SEQ ID NO: 11497 - DNA, 120 bp, Homo sapiens
atgcgctcagtaaggctgctggagtggagggaaaagaaaaggtgtctgagttctctagacatgggcagaaaaggagagaatttgagacaggctgagagaaagctgctccggttggcagca

SEQ ID NO: 11498 - DNA, 120 bp, Homo sapiens
caccgtacattccagcccccgaaaaggccatcctgagtccctctagggcccctggggctctcatctcatcccaaatatttggaactgtctgtgcctgctataatacacaagagccccttc

SEQ ID NO: 11499 - DNA, 120 bp, Homo sapiens
taacgataccaaaggagttctaatcctatgggcttggttcccagaaagccctatgttgcggtgcggaaggcaggtaaggaggcgaaggttcccaactccacctaggggagggagcatatc

SEQ ID NO: 11500 - DNA, 120 bp, Homo sapiens
ttccgatcaagccctctcatcctcattcctacggtggggatgataatagtacctaactcgccggtgagagttcttatgacgatgaaatgagttgccaggtattatagtgtttagaatgca

SEQ ID NO: 11501 - DNA, 120 bp, Homo sapiens
gctcgatttcattgctgttgtaagtgtccttattctctgattgatcattcatttagctttctcttttctcactcaatgagacttctgcagtattgtgatgaatgtcttatagctatccct

SEQ ID NO: 11502 - DNA, 120 bp, Homo sapiens
ctacgcaatctatcaattaagcactatgcttcacctgattaggaaacccttacctttcggcatcattccttcttccctttcattttcctcccttcttctcccttccaaacccactacaca

SEQ ID NO: 11503 - DNA, 120 bp, Homo sapiens
tgacggcttatggaaaatgtgttttagccataggaacactgatgtcctatagccaagttgcttttctgaatcagacaccagctccctagccaaatggggaagagcagggaagggagatat

SEQ ID NO: 11504 - DNA, 120 bp, Homo sapiens
aaacggaaaacaaacggcttgctccgattccccggctctatgggggctgctgagcagcactgcttcccctggagagagaaggtggaggcagaagctgtccgcccaccccaccccagaccg

SEQ ID NO: 11505 - DNA, 120 bp, Homo sapiens
tggcgttttccactttcccaggctgaccacggcaacgtgaatgcttcgctgccagccagctgagtactgcccttggtgagaactctgcctcggagaagcagggggaactgaagctgcatt

SEQ ID NO: 11506 - DNA, 120 bp, Homo sapiens
tcccgggcctctcagggctcctacggtagctgctcctatgggcagacacatcccttttcctattatagttacagcaaaaacaataagcagtaaatccaccaagggtcctgtgggctccca

SEQ ID NO: 11507 - DNA, 120 bp, Homo sapiens
aaacgtgtcagtgtacagacgctttgattcattgtgatccaaggggcttttcatgcctttaaaaacaaatattaatgtggagaagatgctttgtttcaccatgcactctcatggctcacg

SEQ ID NO: 11508 - DNA, 120 bp, Homo sapiens
cgacggaggccccaaatgtaaagctttcaggacaagcaagtgcaacatgcaagacagaccagtcatttttacctctgccaccagaaatgaaaaagcgttttctccttgtttggctgcagg

SEQ ID NO: 11509 - DNA, 120 bp, Homo sapiens
gcacgcctcgcatacccctctttcctatgttgaggtgggacagtcactgaaatcattagaaagagcaactaggaggtgcaaaacaagccctggaaggcagtaaagctctgtgagcaacac

SEQ ID NO: 11510 - DNA, 120 bp, Homo sapiens
agacgtgcaccactgaaagcactgcctcaaagaaacactgggattttgcacaccaaaaaaagattccaatgtgattctggcttgattcgttttgcagtgcagtcaacataacaaatctac

SEQ ID NO: 11511 - DNA, 120 bp, Homo sapiens
ctacgatccatgttaggataaattaatttaaaagtttctattcaattgtggttttccttcttctaacagttggcacattctgagaactgccttttgttagacacattcagggggaggatg

SEQ ID NO: 11512 - DNA, 120 bp, Homo sapiens
tcacgttgaagaaggcggcagcaggaggcttccaaaagaacctcccagcttcaagattctctgactcgagatgagacgccatgccaaccaccagattttatgctttctctctctcagatg

SEQ ID NO: 11513 - DNA, 120 bp, Homo sapiens
ccacgtcatcatgaaactgaaatgtttaccaaataatcaaagcccaagacaaagaaaccgaaaggcattctgtaaggcaaagtaccagccagtacttccaataaaataatttattgagag

SEQ ID NO: 11514 - DNA, 120 bp, Homo sapiens
caacgttctccttccaatgatccccaatagttcacccacatttcccaaaagcatcaaatcttgtcttgacaacctggcaagtgctgaccgccaaatgacaggcctcctccttatgatgtt

SEQ ID NO: 11515 - DNA, 120 bp, Homo sapiens
ccacgtgtctgtgggcaaatggctttatcagtgttgagcctcagtttccttaagtaaaatgctaaggttagacaaagtgatctttagaaaccttttgatctctggcaatccatgaccctt

SEQ ID NO: 11516 - DNA, 120 bp, Homo sapiens
ttacggtattttgtcacagcagccctagaaaactagtacaaatggtactaccatatattatttaaagatatgaaggtagccacccaaagaactttcaacaaagctgggagggttcaaagg

SEQ ID NO: 11517 - DNA, 120 bp, Homo sapiens
tggcgttgccctccggtcccccagatccctatacacggtctccggcttcagggggagcagagccgagttgggagggcattggcctggacctcaaagtagcctaaatgtcttggcacgttt

SEQ ID NO: 11518 - DNA, 120 bp, Homo sapiens
ttacgggtttgcgtcatcgatgatggtgattttctctattgacttggatgattaagaaccgactaaagggaaaacagagaacagtggtgagcttgtcactggcttcctttgtagataaaa

SEQ ID NO: 11519 - DNA, 120 bp, Homo sapiens
cttcgcactgtggtgcaggctgtgacttccctggccgtcagaagtcccatgccctttgctcactctaagaagaatgttcacattgagccctgcagcctgtaatgtggcaaaatgttgctg

SEQ ID NO: 11520 - DNA, 120 bp, Homo sapiens
aagcgggcagcgtgtaagtgtcccaagcatggccccgagagaaaagcagaatgcaaaaggcaaacgcagtttgcatgcacgcagggcttcgctgaggtctatttgtacccggctccccat

SEQ ID NO: 11521 - DNA, 120 bp, Homo sapiens
tgccgttggttggcactgaagcagtgccaggtgggtgaaagctgaatgaaatgtctaacagctatcatatggatgaacacgcaggaagcagaacaaaggagcagcattttatcagcagca

SEQ ID NO: 11522 - DNA, 120 bp, Homo sapiens
aaccgtttgcttttattttcatcctggccttcagtttccctgggtaacaccttccagccatcccagtggttaccttacccacctacgtggttatcagacgtctagactcagccaggtgtt

SEQ ID NO: 11523 - DNA, 120 bp, Homo sapiens
cctcggaatggacttccaaaggcaggtgggaattacgccaatgagaaagcaagtcacaattcaaatactcgctgtatgtgggaatctatattgaacagaaagaataaaatgactccattt

SEQ ID NO: 11524 - DNA, 120 bp, Homo sapiens
ctccgtttttgcttttaaaacatcacctctcaacatattgtgaggaagaccaaacccttagactcagatgttccagaaacctgatctattagttgtgttttgaacacgtctggctacttt

SEQ ID NO: 11525 - DNA, 120 bp, Homo sapiens
acacgcacacacacagcaatgtatcatttgaaaacggaggcatagttccctagcaacataaccaaaaacatggcaatatcttttggatctccaagttctggatttattatgtaaattgtt

SEQ ID NO: 11526 - DNA, 120 bp, Homo sapiens
gcacgccctggtcagcaggggcggacgatagcacagacagcaaagggccaaccaggccagaacagtgccttaatccctaggaataaacataacccaacttcttaagggtcaggttcgtta

SEQ ID NO: 11527 - DNA, 120 bp, Homo sapiens
caccgtgcaggtacgtaagaagttcctccttctgcttcccccttgctcaaaggcaaactggagctaaagtcatggggaagcatagcaccacttcctcttgttttcaagttcatcctgttt

SEQ ID NO: 11528 - DNA, 120 bp, Homo sapiens
atgcgggagacttcaacccagctgacagatgctatttctctctgtccctgctgacccaggctggggagacagcatatttcagacaggatgccctcccaagagttgtgatgcaaccctgga

SEQ ID NO: 11529 - DNA, 120 bp, Homo sapiens
cagcggctaagacactggccattacaggaggtatgttgaatttacacatatttaacaatagcagacacttaatattctcgtgtcttttattgtttaacctacatagagcattttaaattg

SEQ ID NO: 11530 - DNA, 120 bp, Homo sapiens
taccgtcttttcctgcctgtgaaactctaccagtttggtaataaaacaaaccactaatttagttgtttattattcttagcctaaagatgtttgcgtggctagctgagtacaaatgtactg

SEQ ID NO: 11531 - DNA, 120 bp, Homo sapiens
ctgcgcttcttctttttaaagttttaaacaaataatcactgaacaaaatcagccaggaatgatcttctgctcatgggaaccgtatcccaacccagaaccacacgcagaagagtgcagggc

SEQ ID NO: 11532 - DNA, 120 bp, Homo sapiens
cctcgaggtctgttatctcaccaaataactttccctatgtggtgaaaaactggttaaatcacttttccagcgatcccggaattttcagttcaattctatccctcctaagtcaccagggcc

SEQ ID NO: 11533 - DNA, 120 bp, Homo sapiens
ccccgaggattcttcctgcttcctagttttaggtagatcaagagcacttttaaaataaacttggcgtttgtttcctattccaatggaaaatctgactggagactccacagcgacagcaaa

SEQ ID NO: 11534 - DNA, 120 bp, Homo sapiens
atccggcttttgtcactctaactgcagcaggtcagcacacagggtaccagtgtgtccctgagcgcgctgacgaatggatatggtgctggcagccttggcctgggggcacttctgaggagc

SEQ ID NO: 11535 - DNA, 120 bp, Homo sapiens
gagcgcatcatcaaccacctctgcctccccactaagaagtctaagaataccccaaaataggggtgcagtggttgaggagaaaagagaggaagtcacgtatacttttgcaggctttcatgc

SEQ ID NO: 11536 - DNA, 120 bp, Homo sapiens
atgcgccagacccagcctctgcagtgcttatgtggcaatgcttaagcagctcccagcactcgacagggtactttaaacaacttcattagtttgaaattttaaatccaaaaaaagctacct

SEQ ID NO: 11537 - DNA, 120 bp, Homo sapiens
caccgccaggctagtaggtgaagcatcttatttttaaatggcaagggggaaccttgagtaaatatttggttgcaatgtattccaggggtggggggtttggacggagaggaaccactggtt

SEQ ID NO: 11538 - DNA, 120 bp, Homo sapiens
tcccgctgggcccaggtcaggcctacacagctctggctacagactgtgagaatcctggaaggctccaggggctggctcccaccatgctccactccagcaagggcagacgccaggaaaaaa

SEQ ID NO: 11539 - DNA, 120 bp, Homo sapiens
cagcgcactcacacgtaccatgctagctgggatctgcactctggtaatagaaagggggggcttgcgcacagaaggaaatgggttcatgttggcaccacccaggtgctcagcaaatggaca

SEQ ID NO: 11540 - DNA, 120 bp, Homo sapiens
aaccgtcgttgaagaaaggcaatgaaagaaccctcttcaccaatgtcttgaatgaatggttcttcagccatgacacatcgtactgaggaatggcttaacagttctccttgattctgggag

SEQ ID NO: 11541 - DNA, 120 bp, Homo sapiens
aagcgctctcccaccacgcattagggaaggagctcaggagctctctgccaactgcagtaggcacgggcccagagacagaagatttctgtggtctgggcacccttcctgctgctgcaggtg

SEQ ID NO: 11542 - DNA, 120 bp, Homo sapiens
tagcgacggctctcatgtcacaacctggtggccgctggaccctcactttggttggagggtgtgtccccacaggggaagttcacaagagccaagctgggctctgagcttcatgcaacgtgc

SEQ ID NO: 11543 - DNA, 120 bp, Homo sapiens
agacgacctcacccctggctggactcagccccgggacaacactcccaccccgcagagcccagccaggttctcagtggccccaagatagcacacaagcagctgggatgggaaaacaaggtt

SEQ ID NO: 11544 - DNA, 120 bp, Homo sapiens
actcgtacttctcttttttggggctgtgaagggagggtggagtgctgcaacagaataacaattttcagcataggaaaatccccaatatgcaggttgtcacctgcttgatctattttcctc

SEQ ID NO: 11545 - DNA, 120 bp, Homo sapiens
gaacgaccagcaagaaacagtgtatgtgttgtggtagtgtgagtgtgggttttcaaatgggtacattcctagaagacgggacagcaggctctgaggaggcagctttgtggaagagactgg

SEQ ID NO: 11546 - DNA, 120 bp, Homo sapiens
caacgtgaaaagtcccatttcaaaatctaaagtaagattccaaaatagaacatgttttaacagagtatgtaaatttatggaaacacttcctcacccggctcctgatcttttataggtacc

SEQ ID NO: 11547 - DNA, 120 bp, Homo sapiens
cagcgccttattttgtgatcacagagaatgcaattaatactttggctgccttggtatgtagaccaaaccttctgccacagtgttttgcagtgctgttgtccagggcagctctgccaatct

SEQ ID NO: 11548 - DNA, 120 bp, Homo sapiens
aaacgatgccagacttctcggtgctaagcaaagtataatgaggcggaagaggtggctggaaccctcagtgagggaatgtgctcctgggatgattctctacaaaatacaaagctatctcaa

SEQ ID NO: 11549 - DNA, 120 bp, Homo sapiens
acacgggaaaccagtgcgcctgtccacggcacagaatccaaatctactcttcccttctcctgagatcaaactctagaactaagaggtcacatgtaaagctgttaaaagaacaaaaatact

SEQ ID NO: 11550 - DNA, 120 bp, Homo sapiens
gcccgaataataatttcccttcctttttggcttccttatgaaataccacgaagctctactctaaaaagtcataacatgttgtgcccagggaagatgttgaattgaaattttttaatatgt

SEQ ID NO: 11551 - DNA, 120 bp, Homo sapiens
tttcgcgtttaagtttcttttaagaaagtagtttcctggcccatgctgaaactcccttagccctgcaaataacacaagggcatcctgttcaaatgttattatggaaacactgtgctgttc

SEQ ID NO: 11552 - DNA, 120 bp, Homo sapiens
atacgccctggttgctgaaggtgggtttgtttttaagtagaataaaatgtacagctgaatataaaaacagatacatcctcatcttgtaaacctgagtgacatgtcattccacctctggac

SEQ ID NO: 11553 - DNA, 120 bp, Homo sapiens
aaccgcagactttccccacctttttattaaggtattaggcaggttacaatttgacagtgagatcatttctctggaaccaggaaggcactgtgggtttgtttttccaacgcacactctgac

SEQ ID NO: 11554 - DNA, 120 bp, Homo sapiens
ttccgcatctataaatccacttcctgccctcagggagaggttattgaggttaaataatctcctatccctaaaagtgttaaatccagggtctggcacatattggggttcaataaatattca

SEQ ID NO: 11555 - DNA, 120 bp, Homo sapiens
agccgaccacaaaattaggtccactctgagtggtgaaaaacaaaagattctaacattctagcaaactggtaaaccatacacaaattatagaatacaaagaatgcagccgatgcaaattct

SEQ ID NO: 11556 - DNA, 120 bp, Homo sapiens
tcacgcccactgggaacatggcacacactggagattccagtccaaggactttggaatgtcaacttagctctttacaaacacaactaagtttttcagggaaaaagacttacattggttttc

SEQ ID NO: 11557 - DNA, 120 bp, Homo sapiens
taccgattgatgatgcccttggtcttctgtggagtctattcttctaatcgggttgttctccaattttagtgtacaacgggcttgtttcaggggagcttgtttgggatgcagactgtcaag

SEQ ID NO: 11558 - DNA, 120 bp, Homo sapiens
ctccggttccaacaagctgctcaagccaggaaacggtggtcctggggactcctggaccttcagcttgagaaacactgaaggggtaccatttaccaccacatcctactggattacaaacgc

SEQ ID NO: 11559 - DNA, 120 bp, Homo sapiens
tttcgccctggttccttcagtgaagcacagttttgagggctttaaggggagcttcaaggggaaggagaagcacgcacaggcctgcaagcagaagatccaggccagccatcctggaaagtg

SEQ ID NO: 11560 - DNA, 120 bp, Homo sapiens
agtcgtgaaagtgagatgtctttgtgggttccattccagcacaattagggtgtgggacagcccatccaccgggcattgccagggcatgcagcttcacggcccagccatgctcataaatag

SEQ ID NO: 11561 - DNA, 120 bp, Homo sapiens
gatcggggccaggtagtaaggcagatgagccagaaactcgcttccacttgtttttgagatagtgacttataaaaaccttgtctcccccagccttgccctctgctgtgcatagaccagaga

SEQ ID NO: 11562 - DNA, 120 bp, Homo sapiens
caacgagtggtcattaggcagcccacataaagactgacatcgactgcccagaaactcacgtctgtgctgcccctctgccttctctctcatggtaaagaaggatgctggctccaaagctaa

SEQ ID NO: 11563 - DNA, 120 bp, Homo sapiens
ttacggctgcattgccaaaggttaaaacagagcttttcagaacagcttcctcatgaggaaggaacacagatagctggggttgggagaaaccagtccagtcgcttcctagattggtattct

SEQ ID NO: 11564 - DNA, 120 bp, Homo sapiens
tctcgctatgccatccaaccaaatgactctcccagtctctggctggatacctccagtggctagtcacctcaccatttacatattattttatttattcatgcaacaacgagcacttactga

SEQ ID NO: 11565 - DNA, 120 bp, Homo sapiens
tatcgttctaagaacaaagcataaggttaagattctagtttcctgaaactcttggtcaaataatttgctaaaatctgaatatactaaaccacatctacatcttcttttaatctaccaatc

SEQ ID NO: 11566 - DNA, 120 bp, Homo sapiens
gcccggccactgcttctcctcatccctgttgcctgaccattctctgtgcccccgactctgccccacatccatcctactattacttcttcccttctccctggcctcaacctcaaacagaaa

SEQ ID NO: 11567 - DNA, 120 bp, Homo sapiens
cctcgagtgaaagatgaggttgtggaggaccccgggacttgcctgcacatactactctgccttccaacatctgcagaccctagtataagctctggagaggtcttatgatgtgaggatagt

SEQ ID NO: 11568 - DNA, 120 bp, Homo sapiens
acacgcatgcacacgtatgaacccagttgcacacacaccctatgatccaggcctatcacgctccattcccatggggccttccttgctctgtattcttccaaccaaccatatgacccagat

SEQ ID NO: 11569 - DNA, 120 bp, Homo sapiens
ctgcgttctgaacaaatgaagatccacaaaggaaggctttctgttttcttcgcttctattccgccagcacctggcacagtgcccagctgcccgtgagctctctcacagtgtttgttgaag

SEQ ID NO: 11570 - DNA, 120 bp, Homo sapiens
tgtcgggcagctccattgtttttttgcccctgatttcatacaacttcaggaaagacttctccctttccttagaaacacaccacagtgatggaaccaaacccaggtccttcttcctcactt

SEQ ID NO: 11571 - DNA, 120 bp, Homo sapiens
ccccgagtgggcatgggcagcccctcctgcagggcccatataaggaggaggctgactctggggtaaaacattctctgttctactgtcagcttgatccacttttcatctggtgtattctat

SEQ ID NO: 11572 - DNA, 120 bp, Homo sapiens
agccgactctgagacaaagattgatgtgcaactcatttatttgggaggtattcaagggagcaccaggaaggaagtgggggagtgtgacgggaagctatgggaaggaagccaatctaggct

SEQ ID NO: 11573 - DNA, 120 bp, Homo sapiens
tcacgctgctggaggttgctgggggacagcgtgaacgtgcctctgatttggtccacacaaaggaaaggaagctgttatttatttaacaattcctgttgttcaggaacccacttagtgcaa

SEQ ID NO: 11574 - DNA, 120 bp, Homo sapiens
gcccgaatgtggacagaggaggatgcattcaggctcactttgcatcggggtgtctgtgagtggaagggaggcagtgggccagacccaggcaggtgtgaacacgtgtctgtgtgttcggct

SEQ ID NO: 11575 - DNA, 120 bp, Homo sapiens
atgcgtgtgtgtgcgccaatgcactggcggatgggaaattgtgcatccacagtgaagctgtgtgtatgtgtgtgaaggggaggctctgtgagctttggatggggctggagctgcagttga

SEQ ID NO: 11576 - DNA, 120 bp, Homo sapiens
agacgaatcctggttcataaattccaatttttttttttttatatctgcctcactgccaggcccctataaatattcatgagtttcctgccttggaatatttgagtagtcagaaggaggagc

SEQ ID NO: 11577 - DNA, 120 bp, Homo sapiens
agccgggaggagaggggacaacgaagggtccccagtggcgctgggagctcacacgggtcgggaggacaggggtctctctggttttgccttctcttccctctgggctcccctcttccaagc

SEQ ID NO: 11578 - DNA, 120 bp, Homo sapiens
agacggggaaggcgctgggctggtggagacatctaccagcacctattattcttcttccccagtgtctgtggaaaaataccacccactccgggggcagagaaggtgtctgcactgttttct

SEQ ID NO: 11579 - DNA, 120 bp, Homo sapiens
gggcgggcactgtggcctcctgccctgcctcaaggaaggaaacaggtcatgagaatgggtgcccgtgagaaggaataaagtgcgtgcatgtggacgtgtctacaggagtgagtaactgtt

SEQ ID NO: 11580 - DNA, 120 bp, Homo sapiens
caacgaagaaaaaaagaggcaagccagtgtgcagtgccacagtcttccctcagcaaccgcagaagggcatgttgggctgggtgcagtggctcacacttgtaatcccagcactttggtagg

SEQ ID NO: 11581 - DNA, 120 bp, Homo sapiens
gcccgtcacgtgtttgtaaatttcaccctccgggggcatttcccacgttgcaggtgggacggggacgaatggttgggggagaggaataggaggaaggcctggtagcagagaggggaaatg

SEQ ID NO: 11582 - DNA, 120 bp, Homo sapiens
gaacgccccctccctaaaaactcaagagtcaacagggaaactgaggcagaatctgaaattggaagttggaggaggggtcaatgccaggacaagaggggtgaggcatagatggagacgggg

SEQ ID NO: 11583 - DNA, 120 bp, Homo sapiens
gaccgagaatcaggcaagaggccaatggaaatggccacgtgggtgggcttggcctcaaaaaggggcgtctcgttttcactctccccgggcgccccatttccccaccagtcctcccgctgg

SEQ ID NO: 11584 - DNA, 120 bp, Homo sapiens
ccccgcctccgccacacctggaagagtttctcttcgctccctgtttcaatagcccaagatgaaagaccacatcccccgagagaatcaaaatattaacaccgcctccacgcgaagccattt

SEQ ID NO: 11585 - DNA, 120 bp, Homo sapiens
agtcgtctttcctccccacagcccctctagggattcggatatatgtaggcagaggtggaggaggggggcgggcaaataagtcagattggaaagaaatcgggcataaaatatgcgaggcca

SEQ ID NO: 11586 - DNA, 120 bp, Homo sapiens
attcgatgccgttggtcgttgactggtatggttagtggccctctgggtgtcctgatggcattgtggtttgtgtcctgttgaaccgggatctgtgctgccgtcaacatcctggttctgcca

SEQ ID NO: 11587 - DNA, 120 bp, Homo sapiens
atccgcttctcaaggatctattgtggcaaaatggatgaactggggactcagggtctggcactgggcacaggtcattctccatgacaggaagcagggaggcagggcgttggatcttgccat

SEQ ID NO: 11588 - DNA, 120 bp, Homo sapiens
gtacgggagtttggaacatgacctgcagccgtggcaggggtgacaagagaaaagcctgactttgagggtccttggttctgatatataattgtgtgtgagtgtccccatcaaagttgtggc

SEQ ID NO: 11589 - DNA, 120 bp, Homo sapiens
atccgccccgcgcctgaccacagccatctctgtataaagccacaggcggcccccactctggccaccccactccacccctggctggaacactgggtgtcagtaattgctcagggagcacta

SEQ ID NO: 11590 - DNA, 120 bp, Homo sapiens
ttccgggcagccgcctgggtgctggcactaatgttgaataaacacaaggagcttagcaaggcccagaattcccttctcacacctttgtcaattaacgtttcatttatggggttgggtttc

SEQ ID NO: 11591 - DNA, 120 bp, Homo sapiens
taacgagctttgggctcattaaagagtcctcattaaactctataaatcgtccctcctttccaaaacgcctgcactgggatgggaatggagttgcaaaaccgagacaggccgacctgcatt

SEQ ID NO: 11592 - DNA, 120 bp, Homo sapiens
aaacgcctggctgtgtactgtgggcagacgcctcccctctctgaacctgtttccttcctgtaaaatgcaagcaaacagacatgggggcatgggggcaagcgccctgtggctcatgcctat

SEQ ID NO: 11593 - DNA, 120 bp, Homo sapiens
ccccggtcatgactcaccgacttccctttctctcctatgggtcccaggggaccgggaaatccaatagatccctgagtggagagaattagaaagaagacatgagggtgaggagtgagtggt

SEQ ID NO: 11594 - DNA, 120 bp, Homo sapiens
ttgcgttgaaatgacccttattgacttatttattcaatgcctgttttcccccactgtgacatagctcattggtcttattccccactgcctggcacacggtgagtgctttttaatatttgt

SEQ ID NO: 11595 - DNA, 120 bp, Homo sapiens
tcccgcctcaaagcccatttcaggctccctctactctcccttcccatctgggggttccatggtctctatactctttttttgtttgttttatttttaagagacagagtctcactttgtcac

SEQ ID NO: 11596 - DNA, 120 bp, Homo sapiens
aggcggaagcagatgtgccagggaacaaagatgagacccacagggcctgtgcctcttggtaatatcttctgtgacaggcttctgtgggctctctgtatcctgacaatatcccttatgtga

SEQ ID NO: 11597 - DNA, 120 bp, Homo sapiens
ctccgggctggcttagggaatgttgcagtctatcactatccagagctaacagaggggtcttggtgggaagattttcctggcaacagagttgaaggaagaagacttgaggaggtcgcggta

SEQ ID NO: 11598 - DNA, 120 bp, Homo sapiens
gaccggggagtccctggagacagaaaaagaagatgagagaaggcataagaaagaagcggtgagtgtggaggttgggaagcctggtcacggtctaaggtcttaactgaccactcccatgcc

SEQ ID NO: 11599 - DNA, 120 bp, Homo sapiens
tcccggagggcctggttctcctggaggaccctggggagaaagtggggtttcagtgaagctaagaggggtcatggtgttggggcgttagtgaaattgacttggggggggtcagtcatggaa

SEQ ID NO: 11600 - DNA, 120 bp, Homo sapiens
aatcggggtcagagtgtcagaagggtcagaggtcaaagggcacagggcacataccacattgcctttggcaccaggagcaccatcaattccagtcacaccctaggggaaaagaggatgtga

SEQ ID NO: 11601 - DNA, 120 bp, Homo sapiens
caccgggcgacccgtggggccaggagagcctctggggccaagcagtcctcgtggaccctgcaagggagcaggcgaattatttccacatcacctctgtgtggccatgtgagctctaggggt

SEQ ID NO: 11602 - DNA, 120 bp, Homo sapiens
caccggctccccagcctggccagtgggccctggaggtccctctgctccctgtggaaaagcgtcattacttgggaacaggaaggtacaaccctcggagagccacctcccctcatctgggca

SEQ ID NO: 11603 - DNA, 120 bp, Homo sapiens
cgggcttggatgaaggacccccattcccactcttcctaggtcagaaccctcattttccagactcctcggaggcctgtttcagcctctgtttcctcttgcctccaatctccttctctcccc

SEQ ID NO: 11604 - DNA, 120 bp, Homo sapiens
acccgccttccccaacccatcaccccagcccccatctctaattgcctgttttgtggctaggctgtcattaagagaaatctgggttgcagtcccctggggctgagatctgggctcccaggc

SEQ ID NO: 11605 - DNA, 120 bp, Homo sapiens
gcccggccctgagccacacgcccaggcagcctcgtccacgcccacagtaaccctccccagggagctcacctgcaaatgctcccatgggcccctggccaccctctgcccgcaacctggctc

SEQ ID NO: 11606 - DNA, 120 bp, Homo sapiens
actcgcatgccctgggtggtccagtcccctacactccatgaccctgtccctgacccaggctccccagcaggcacccacatgctccagccccacggccttcccacacgctctccagctgcc

SEQ ID NO: 11607 - DNA, 120 bp, Homo sapiens
ctccgggtcagcccacacacggctgcacccacaggagcacctcccccagcctggggccgtgctcaccgcctcctccaggaagcttcctggatgttctggccgaggctctcagggcacccc

SEQ ID NO: 11608 - DNA, 120 bp, Homo sapiens
actcggccactgggtgggcctttcctttcctgtctccccacagacctggagtgccaggagcagcctgcccgctctctgggtatttgactgacccacagaccgacggacacacaagcccgc

SEQ ID NO: 11609 - DNA, 120 bp, Homo sapiens
ccgcggagccacactctcctcccaggtgggacacagagccctcagccccagccaggaaacactacctggggctcccctttgtccacccggggtgcttcctgcctccaggccaccggggcc

SEQ ID NO: 11610 - DNA, 120 bp, Homo sapiens
ccccgtctttaatcgtcacgaccccacaagaggagccccattactccctgtggctaggcgcgggcccctgcccatgtccaggggtgctgagtcgagaccccttcaccctgtgggcatcca

SEQ ID NO: 11611 - DNA, 120 bp, Homo sapiens
aaccgcacaggtgcaggcacccagtgccccaagatggacagtctctgccacactgggctcagggccatgaaggccagcagaggtggatactgaggctggatggaggtctcccgagggccc

SEQ ID NO: 11612 - DNA, 120 bp, Homo sapiens
tgccgcctcctctctccccagcacctggcactgcctggcatttcctaaagccacccaggcatggatgagggaccggggggctccatgctggctcagagctgggagatcctggcatttcct

SEQ ID NO: 11613 - DNA, 120 bp, Homo sapiens
ccccggaagccaggcaggcaggaagcagaggagccttctggaactcaaggcagcctctgaaatcaggcagttccagcctgcactttgcagataagtaaaagtgaaggcagcagggtcaga

SEQ ID NO: 11614 - DNA, 120 bp, Homo sapiens
agacggggaactccagctctggcccagccccatctgaccacctgtgagtggtattggcctggagatggagccgggtaggcttgatccctttccaaaccgggacatggtgggaccagggcc

SEQ ID NO: 11615 - DNA, 120 bp, Homo sapiens
aggcgacagggatgcacctcccaaggaggctgagctccgtcgggggaacctggcctggcacccagcacacaccctccacaagcctaaggacacagtggctccatcctgttcccaggctac

SEQ ID NO: 11616 - DNA, 120 bp, Homo sapiens
ccacgtccacagaccagcctccgtccacagtttcaggccccgtctgtggaccccagagccgggaaaggccgcctgcctgcgtaacccttcacagccctgctcaggtgcctactgaggcga

SEQ ID NO: 11617 - DNA, 120 bp, Homo sapiens
gcacggatctggaggctggggggccttccgtgaagtggcagcaggctgggacccacacccaggtccgcaggacggccaaggtccagctccacttgccgagcccaaaaaagcagccagctc

SEQ ID NO: 11618 - DNA, 120 bp, Homo sapiens
taccggctcttggtgctcatggtttaattgatctgtgccccagcctcctctgtagagtagggataataacaacacatccaacagtatctaacttactgactcctctcaccaaccctgtaa

SEQ ID NO: 11619 - DNA, 120 bp, Homo sapiens
taacgtagggactgtcacagagcaacattctcttatcccaaacccagaccaggacacgttccagaattcagaataacacggctggatttagacacagtgacacagggagggttatgtata

SEQ ID NO: 11620 - DNA, 120 bp, Homo sapiens
cttcggcctcagcctcccaagtagctagaactccaggtgcaagctaccgcacccagtaagaatcctattctcttttggactgacaaactcctactcatccaacaaagccccagctccaat

SEQ ID NO: 11621 - DNA, 120 bp, Homo sapiens
gggcgggggttgtgatgcgagacccacggacaggaccgggacctgaccctccaggaccttccagctggaggggggtgtcgtccccgcccaccccctcccccgacgcccactgggcacctg

SEQ ID NO: 11622 - DNA, 120 bp, Homo sapiens
gcacgctctgagggcaccggccctgccagccccaacagccacctgcccggcggcactccagggccggcagactggagggagaattcctgcttccccgctgtgagcccctgcaagccttca

SEQ ID NO: 11623 - DNA, 120 bp, Homo sapiens
aaccgaggtccaggcagcccagagcacgaaggctggtggagagctggccacgtgtcctgagctacggtcagtcagaaggctgaaggtgagtcatcccagacaccgtgctcagtgccaggc

SEQ ID NO: 11624 - DNA, 120 bp, Homo sapiens
gctcgacttgcctaagctaggaatcagatctgcagaaacccaagtcccatagcgtgtgctgggtagagccgcctactcctcgtggggcctttgagcaggcagacagctctctgttgggga

SEQ ID NO: 11625 - DNA, 120 bp, Homo sapiens
ccacggaagaagttcatcagaacccaaatctgatcatgttagctcctccctacctcaccgaatcccctgaatggcttctcagggctcttagggtaaacccaaccctaccttctccgctgc

SEQ ID NO: 11626 - DNA, 120 bp, Homo sapiens
agccgccatattgtaaggatgctcaaacagccctgcagggaggcccataggaagagaaaccaatttatcagccaggtgagtgagccatattggaagtagctgcactccagcccccatcag

SEQ ID NO: 11627 - DNA, 120 bp, Homo sapiens
agacgcctaacagagctgctcccaaattcccagcccacagaaaccacaggatataatgcatgggtgttgttctgagccactggggtttgaggcttgttgttaatgcagccatagatatgt

SEQ ID NO: 11628 - DNA, 120 bp, Homo sapiens
gggcgacagaggaagaccttgtctctaaaaaccaaaacaaagaaactaaaaataagcattcggatttgttagggggcgacaagggaggcactccaggatctgtggactccccactttgtt

SEQ ID NO: 11629 - DNA, 120 bp, Homo sapiens
ggacgggacctggtttaagggggtaggggagaggaccctggtctagggggtaagggacacaaatacctaatctgaggggtttcggggggacatggccctgccctggggaatctaaactgg

SEQ ID NO: 11630 - DNA, 120 bp, Homo sapiens
tatcgagtgggatcagcgcgggccggggagagccacgggcaggggcggggtggggttcatggtatggctttcctgattggcgccgccgccaccacgcggcagctctgattggatgttaag

SEQ ID NO: 11631 - DNA, 120 bp, Homo sapiens
gagcgagaactcatctccaaaataacttaccacgctggagtgagaccacgaatggtggggaggggagggtcccacggacatattgagggacgtggatacgcagaagaggtatccatgtgg

SEQ ID NO: 11632 - DNA, 120 bp, Homo sapiens
agccgggaaggggtgatcagatggtccacagggaatatcacaaactcgaattctgacgatgttctggtagtcacccagccagatgagcgcatggagttgggggtggggggtgtcaaagct

SEQ ID NO: 11633 - DNA, 120 bp, Homo sapiens
gcccggaagcggagtcaaaagcatcaccctcggtcccttgttctcgcgtggatgtcagggcccccacccaccgagcagaaggcggactcaggggcgctccagggtggctcgagctcacac

SEQ ID NO: 11634 - DNA, 120 bp, Homo sapiens
acacgctgagtagacacgtgcccgctgcaccctgggtaaatacagacccggagccgagcggattctaatttagacgcccgcgaacgctgcgcgcacgcacacgtgtcctcggctcgctgg

SEQ ID NO: 11635 - DNA, 120 bp, Homo sapiens
tttcgtcccgccccctccgtcgcgtgcgggagctgacccggaggggtgcttagaggtatggctccgcggggtcaaaaggagaaggatcagtgagagaggcatccccacaccctcccctag

SEQ ID NO: 11636 - DNA, 120 bp, Homo sapiens
ccccgccctaaggggcgctggtgggaggagctaaatgtgggggcggggctcggagtccagcttattatcatggcatctcagccagggctggggtaggggtttgggaagggcaacccagca

SEQ ID NO: 11637 - DNA, 120 bp, Homo sapiens
ccccgatcccagagtcgcggccggggatgacgcgagagagcgtggtcgcccccagaaggccctgggccatcatgccggcctccacgtagaccccaggggtcgctcactcctgccagctcg

SEQ ID NO: 11638 - DNA, 120 bp, Homo sapiens
tagcgcacgctcgcctcccgcccccccgccgcctctgccgccgccccctccttggaaaccaagttaccaacgttaaaccaatccccaagcgcaactctgcctcccccacaccccacccgc

SEQ ID NO: 11639 - DNA, 120 bp, Homo sapiens
cgccgcgccgcgcggagccgtcctctagcccagctcctcggctcgcgctctcctcgcctcctgtgctttccccgccgcggcgatgccagggccttcgccagggctgcgccgggcgctact

SEQ ID NO: 11640 - DNA, 120 bp, Homo sapiens
actcggcctctgggctgctctgggcctggggctcttcggcctctcaggtaagagccccgctctggttcggggtggacagggcgggggcggagtccctggacctgagaaacggcctcctgt

SEQ ID NO: 11641 - DNA, 120 bp, Homo sapiens
cctcgcctcgctcccacgcctctgcccccacctcgagcctgagtcttctccccttccccctcctccccaacacacacccgagccccagcttcctgactcctcgatagcccctacccgctt

SEQ ID NO: 11642 - DNA, 120 bp, Homo sapiens
cttcgagatcctaggtgttcttccgcacccaacccttcgccctggagacccagtgtctctcctgtccgctccccgggtacctccttacgctgtgctgtgcaccatggtccacggactggc

SEQ ID NO: 11643 - DNA, 120 bp, Homo sapiens
actcgcggtccgcgaagactccatctctccaactaccctgactcagaggcgctgttcccgctccacccagagccctggcaaccgggtccctcagctgttcccgcggttccttccatgagc

SEQ ID NO: 11644 - DNA, 120 bp, Homo sapiens
ttgcgtcccggctccgtgttcttcaccgggtgtagggtccttcctgatccttgacccagcctcgtctctcctttgcccttgccgcaaacgcactctcctcgtatcccggcattctgccag

SEQ ID NO: 11645 - DNA, 120 bp, Homo sapiens
tcccgggtccccttctctcagccttgctgtgttcatccaagaacccacctttcctctcctctacgccctccccccatgctttcccgccgctccatcggcgctttggagaccatggctctc

SEQ ID NO: 11646 - DNA, 120 bp, Homo sapiens
ccacgtcccagagacaccctcgaggtttagactctgggagtgcgcctttaaaccggaggcctgggcaggacgcgggacgcctgggttctttccctggctgcagcctctcctcctcctccc

SEQ ID NO: 11647 - DNA, 120 bp, Homo sapiens
ccccgccctctgagaacccttgactcgacataggggcgctaagatgtcagggagttggctccccaggctcagcccgcgtttccctgggcagcggtctcgcaggagcccttctgggcggac

SEQ ID NO: 11648 - DNA, 120 bp, Homo sapiens
cctcgcgtggcgttcgtggagcgcgggggctcgctgtggctgaattgcagcaccaactgccctcggccggagcgcggtggcctggagacctcgctgcgccgaaacgggacccagaggggt

SEQ ID NO: 11649 - DNA, 120 bp, Homo sapiens
ttgcgttggttggcgcggcagctggtggacattcgcgagccggagactcagcccgtctgcttcttccgctgcgcgcggcgcacactacaggcgcgtgggctcattcgcactttccgtgag

SEQ ID NO: 11650 - DNA, 120 bp, Homo sapiens
ccacgcgcgtactccactactctccctccctcccaggccccgccccctgggtcccagggtcctccccttcaggccccaccttctgttccaagtcccggtgttcaaagagctgcggactct

SEQ ID NO: 11651 - DNA, 120 bp, Homo sapiens
gagcgaccagatcgcgtagagctgatgccgctgcctccctggcagccggtgggcgagaacttcaccctgagctgtagggtccccggcgccgggccccgtgcgagcctcacgctgaccctg

SEQ ID NO: 11652 - DNA, 120 bp, Homo sapiens
ctgcggggcgcccaggagctgatccgccgcagcttcgccggtgaaccaccccgagcgcggggcgcggtgctcacagccacggtactggctcggagggaggaccatggagccaatttctcg

SEQ ID NO: 11653 - DNA, 120 bp, Homo sapiens
tgtcgcgccgagctggacctgcggccgcacggactgggactgtttgaaaacagctcggcccccagagagctccgaaccttctgtgagtgggtgtggggaggagatggggacccagtgggg

SEQ ID NO: 11654 - DNA, 120 bp, Homo sapiens
ggtcggtcggtgtttaggaggtttagaggtagatacatctgaatgctgaccccgacttcaaccctcgccggctgagctgtttccccctccgtgccttgaggatgataatacgataagata

SEQ ID NO: 11655 - DNA, 120 bp, Homo sapiens
gagcgctcggagttagttcaaacttggttcttcgacccctagccctgtctccggatgccccgcgcctcgctgctccccggctcttggaagttggctcggaaaggcccgtgagctgcactc

SEQ ID NO: 11656 - DNA, 120 bp, Homo sapiens
ggacggactgtttccagcctcagaggccagggtctacctcgcactgggggaccagaatctgagtcctgatgtcaccctcgaaggggacgcattcgtggccactgccacagccacagctag

SEQ ID NO: 11657 - DNA, 120 bp, Homo sapiens
tcccgcctgctgaaagatgcctctgacttggggcttttgacttcaggcccgggagacacattttggctggattagggagatcttaaaagggggtaggggacacagcaggggctaaggaga

SEQ ID NO: 11658 - DNA, 120 bp, Homo sapiens
ttacgtgtgtctggtgcatgtgtcctgtgtgggctgtatctgtgtgtgactcagctacgtgtcagcatatccctgtcgacgtgtgtctctgctgatgtgtctgtcagcacgcacggctgt

SEQ ID NO: 11659 - DNA, 120 bp, Homo sapiens
atgcgcacgtgtgtgcacgcccctcacaaccccaacgagaaaacacctgtccaccttcctgggctggcacaggggcacaggaggcgggatcccaaatcacaggctttttctctcggcata

SEQ ID NO: 11660 - DNA, 120 bp, Homo sapiens
gagcgtctcctgagggggcctcggccaaggctgactggagaaggggctggtgacccctagcaggctctgccacctgaggcctgggtcttcccccgggatccttgaatctggagatggcag

SEQ ID NO: 11661 - DNA, 120 bp, Homo sapiens
ggccggctctttccccaatcctcctaggagagctgcttctgcccattctcccactggtgaaacggaggcagaagcagcagctcagcagggtgaagctgggtttaaccttcctgaatgggg

SEQ ID NO: 11662 - DNA, 120 bp, Homo sapiens
cagcgagtgccgtatttcttgtacctagggttgggggacaagaaactgccatttaggatgcagtgggggcccggaaaccgccacaaggaaaccacttttcccaagaggtaggtgttttgc

SEQ ID NO: 11663 - DNA, 120 bp, Homo sapiens
acacgtggtccccaaacacctgtctgtacgggggcagcacacatatagccttgacagcaggcacggccacaggcctcacaaggtgaaatggccacttccccctcccctggcatcacaggt

SEQ ID NO: 11664 - DNA, 120 bp, Homo sapiens
tcacgacttggcagcacacaggacagccacacactcccctgcacctgatgatgacataagtaccgacaacttcacgccctcaggcccacaagtcacacacaggaccccgctgagatggtg

SEQ ID NO: 11665 - DNA, 120 bp, Homo sapiens
agccgcctgcagaggtggaagcatccaacatacgcctgaatggtcaccagcgtcagggtaacacacagtcccatgaaaatcaccagttctgtgcaatgacaacctcaacacacaatgaca

SEQ ID NO: 11666 - DNA, 120 bp, Homo sapiens
agacgtgcacctacacacacaccctgcacagcccctagggctcacagtctagttggcacccttggcggtggcccccagcgccccccacccagcactcacagcaggggtccgtggatccca

SEQ ID NO: 11667 - DNA, 120 bp, Homo sapiens
tcccggatgctcatcaccagccgtgggggagccacctcgtggcacaggtagtggctggagtcggccgtcaggcggaaatagccgtccaccagcgacacgaaggacagcgccgcagcccgg

SEQ ID NO: 11668 - DNA, 120 bp, Homo sapiens
gggcgcatcaggtgggtgtcctcccaggccatgatgggccctagcccagcccctaccctgggcctcaccaggcacttgttgtcctgccggtggatgctgacacagtgctctttcagcacc

SEQ ID NO: 11669 - DNA, 120 bp, Homo sapiens
ccacgtgggtgatgtcccggaagtcacagaagtaggcccacagtggctcccgcggcctgtctgccggctggccgactgccttgtgagccttggccttcttcccaaacaggctggcttggg

SEQ ID NO: 11670 - DNA, 120 bp, Homo sapiens
gcccgtttatacctcctgcactttcccctggggagagactggagccagaagggccaggcaccaacctaggttgacctcccaagtcccagtgtcacaggtgggatggggacccaccccaaa

SEQ ID NO: 11671 - DNA, 120 bp, Homo sapiens
agccggacccttagggaaggcagagagaagaatcctgaccccctcacacccaggtgccagtccccagatgaaggggttccctggaggtgcagaccccagaaataaggtccccagggggta

SEQ ID NO: 11672 - DNA, 120 bp, Homo sapiens
tagcggacaggtgccccagagccatgtggggagagggctcaggtcagccaccctcagaggctagggtcaaggatgaacacagaaacccaccccagcccaacctgaacccccagggcggaa

SEQ ID NO: 11673 - DNA, 120 bp, Homo sapiens
gggcgccttgctcacctcctccttgttcacctcctcctctactggccaccactggatgccaccagtgcctgtcaccagcacctcgtgggttgggggcccagcagcagactcagggccagg

SEQ ID NO: 11674 - DNA, 120 bp, Homo sapiens
ccacgtagactcgggtttctgtttcactgtgggcctgtgcacccttcagtgtctgtgctgaggtccaaagctgggactgatgggtgggctgtagctggcatcagtgccagggtcctcccc

SEQ ID NO: 11675 - DNA, 120 bp, Homo sapiens
taccgcaaaaggagtccagcgagctcccccgatttgggtcaaaggaatccccagagagagggcactgcccacccccaaccggagatgtcatccaaacctcccctccagacctgaagatgt

SEQ ID NO: 11676 - DNA, 120 bp, Homo sapiens
agacggctgagtcacggcacagccacgatctgtcaagaggcagatggagagggaggaagaggaggactttggtggtgggggtggggagctgtctgaactggggacggggccaacatacgg

SEQ ID NO: 11677 - DNA, 120 bp, Homo sapiens
ctgcgtcccccctccctgggccctaaaacttccccatcgaggtgggggcacagtgtggccccaggagcaggtggaggcagccgagctggggtatccgtctggtcgctggtctctgtctcc

SEQ ID NO: 11678 - DNA, 120 bp, Homo sapiens
cctcgcctcccccttgtccctggcgctcccaagtccctggatgtgggttgggagcgggtctccccgcgcgccctctgctggacgacgaggaaggcacagcctgggtgtgcgctccgagcg

SEQ ID NO: 11679 - DNA, 120 bp, Homo sapiens
gcgcggacctgctccagggacgccgccagtcccggagcaaagcaaagtcgccgccaccgtcgcggcgcccggtattattattttatgcttattgagcgtcctggagagcgggcgccaggc

SEQ ID NO: 11680 - DNA, 120 bp, Homo sapiens
ggccggctgaccgcaggctgcgtgtggggtcctcgccctcccgggcttgggaccaggccgctttccccatgcgccagcccctgccacacgctgcggggactgtcgtctggaggacaggga

SEQ ID NO: 11681 - DNA, 120 bp, Homo sapiens
ggccgaaaagttgcagccgtggagttcccgtcccgcctctgcgcgcttgcccggcaggccggtgaaccccagcatccttggctctgcgcttcctgcccgggaaacagagaccatgggact

SEQ ID NO: 11682 - DNA, 120 bp, Homo sapiens
gcccgctgactcgctgtgtgacttggggtcagtgcttgtgcctctcggagcctcagtttcctcatcagtcaaacggggctgaaaaataagaactgtccacccccagggctgtggtgaggc

SEQ ID NO: 11683 - DNA, 120 bp, Homo sapiens
tgacgtaggtgctgggcagccaggagctggtgttctgagaaagtacttcctcaaatgacatcagcagagagaaagggggcgtcccccaaaccgcaaacccggctggtggggaaggtgccc

SEQ ID NO: 11684 - DNA, 120 bp, Homo sapiens
ggacgggacaagcatcattgggctggaaggaaactcatccataaagggcttgtgtagcctcatggctaaaattcctgtctctgaagccagacagctgggtccataatccagctctgatct

SEQ ID NO: 11685 - DNA, 120 bp, Homo sapiens
ccccgtctctgaaatgggcctagtaaaaaccgtattcccaagggctgatctgacgaactggcaaaacaattcagggaagctaagggcattgaaaccttggtcggtgaacaaaaatgcatt

SEQ ID NO: 11686 - DNA, 120 bp, Homo sapiens
ggcgttcctgcccgagcccctggccccgcgcgcgccccgccgcccgcgttcgccgccctcctcgcccgtcttcttcgccagcccgtccccaactttccgcagacgccttcggcttctccg

SEQ ID NO: 11687 - DNA, 120 bp, Homo sapiens
ggccgccaggcttgggctggggctgggtaagtgcagcgctggtggccgtgggttcaagtcgcccctggccacctggcgcactccagggtctagggttcgtggctcactctctccagcctc

SEQ ID NO: 11688 - DNA, 120 bp, Homo sapiens
cagcgatcaaaatcatccctgaccgccagggttgccctggagacctctgatagggcatgcagtagacgtttaataaatgttgcatccttcccacttcctgtgcaaacctgaagctgcggt

SEQ ID NO: 11689 - DNA, 120 bp, Homo sapiens
tcacgctttggaggagtgagggcgacctgccatccaggtcatgtgttcatcctggggtatgtgttcagttctgtcagcctcagtctactggcctgtgaaatggggccagtcatgccttct

SEQ ID NO: 11690 - DNA, 120 bp, Homo sapiens
ttgcggtgaggcttggtgtcactcctagtaccgggccacagagggcaaatggaagttccctttctggccagacggggtgggctgcgggggcttgaagtctgggagtgacaggccccgagg

SEQ ID NO: 11691 - DNA, 120 bp, Homo sapiens
acacgcacacacacgggtgcacacacagagctccgcagcctcctcctgggacccttgccctgcccccctcccatgggcacggaccccccaccgcctccacccactgccgcgggggggccc

SEQ ID NO: 11692 - DNA, 120 bp, Homo sapiens
gcccgttggggcccagggctggcgggccatgtaaccagggctgctgctgggagcgcggaggggaagggagcccccagccctgctgggccggcccaggcccctccgcggctcccccttcca

SEQ ID NO: 11693 - DNA, 120 bp, Homo sapiens
gcccggcaccccctccccagtggttgttaaccccgggactccccaagcccagcctctgtgtgcagcagccccaggcgggctaagtctccaagatgcccttggtggatttcttctgcgaga

SEQ ID NO: 11694 - DNA, 120 bp, Homo sapiens
gggcgggcatcctggtgagctgggcccccggtgtgggcttgtgtgtgcagctgtgcacgtgtgtggcctggagatgaagccttgtgactgtctctgtgtgtggcccagggctgggcgtgg

SEQ ID NO: 11695 - DNA, 120 bp, Homo sapiens
tggcgggcagctgggggtgtgtgactctccctgggggtggactgcgggtccctcactgggtgtgactgtgtcagtgcctggatgtgtgtgtgtgtgtctgcgatggtgtgtgtctgcctg

SEQ ID NO: 11696 - DNA, 120 bp, Homo sapiens
gaccgccttattttgcatgccctttgatctgtgtgtctgggctgtgtgacgctgtgtaggactgagagcctgtgattgtgtgtgtggttgtgtgagattttgtgggtccatcttgtgtgg

SEQ ID NO: 11697 - DNA, 120 bp, Homo sapiens
caccgggaggagggagcaccccgtccaagcctgggccatgcaggctcacccctcctgccaagtgtccctcctgcttccctggacagagtctgctcctgcttttggggtgctgtggcagag

SEQ ID NO: 11698 - DNA, 120 bp, Homo sapiens
gcccggttttgggtatactctgttcatctgtgcatctgtccacccttctggggttgggggagagtgggctatgatgagaacccccctccccctcccctgggtgatcaaactgggatttcc

SEQ ID NO: 11699 - DNA, 120 bp, Homo sapiens
ccccggccaaacctttttgtcccccagagcttggctaccacgttccctttttccaaactgagctggaggccaggagccaggacccccaggattggggtccatgtctgggaacacttgggt

SEQ ID NO: 11700 - DNA, 120 bp, Homo sapiens
ctccggcttgccccccttttccccagctcagcagctggttggagggggagttgctaaggagactcccatcgccatggcgacgggattctcctgcttccctattggctccctgttaggcag

SEQ ID NO: 11701 - DNA, 120 bp, Homo sapiens
attcggagctggcgctcatgtacaacgatgagtcggtgctcgagaatcaccacctggccgtgggcttcaagctgctgcaggaggacaactgcgacatcttccagaacctcagcaagcgcc

SEQ ID NO: 11702 - DNA, 120 bp, Homo sapiens
cagcggcagagcctacgcaagatggtcatcgacatggtgggcggggctggggcgggacggagcgggaaaggaagcctaggagtcgagggctttggggaggagtgggtctgagtcccagag

SEQ ID NO: 11703 - DNA, 120 bp, Homo sapiens
cagcgtcgttcctagtctcttcggcagaccccagcgtcgtccttcttttcctgagaatatcctgacaccagtcgcccgttccagaaggggacacttggcgtcatccctttttttctgagt

SEQ ID NO: 11704 - DNA, 120 bp, Homo sapiens
agtcgtcctcacttcctgagggggatcctggcgtcatccgcccttcttgaggggaccctgctgtcactaccctgtcctgatggccagcaccgcattgtcctttcttcccgcgggaaaccc

SEQ ID NO: 11705 - DNA, 120 bp, Homo sapiens
acccggacatcatcccctctttctggcggggacccccatgccattatcccctcctgaggagaccccagagccagagccgtccccccttcctcaaggctccccagcgttgtttcttcttcc

SEQ ID NO: 11706 - DNA, 120 bp, Homo sapiens
tcccgagaaggggcctggtgctgttccccgtttccagagtgtttcctatcgttgtcctccccacactcagaaggcatctgtcatcccccctttttctgagatcagtcccttcctcctttc

SEQ ID NO: 11707 - DNA, 120 bp, Homo sapiens
ggccgacccctgcaaacgcttctgtggcacccatagatagaaggcccaaagacccccctgtgctcccttgcccccaattgagcagacgggaaggcaaaagactcagctcaccccatgaag

SEQ ID NO: 11708 - DNA, 120 bp, Homo sapiens
ctacggggagaaagatgccctacatataaaaatgcgatgggcaaagattacaaactggtttcaaataccagccctaagtcaaagaggagtgtgtttcagaagaagagccctttctggccc

SEQ ID NO: 11709 - DNA, 120 bp, Homo sapiens
ccccggtttcaggcctccagcccagagccagggtgaaagacactagttagtctgttctttattttccttggaaaattacagggttacttatcaacaaaataactgtccatccggtgggga

SEQ ID NO: 11710 - DNA, 120 bp, Homo sapiens
atccggtggcttctatgtacaggcccatccctgggaaccacatttccagagggggcctccccctgaggcccccattggccccctcccaggtatccaagaataaatcacatggtgacagct

SEQ ID NO: 11711 - DNA, 120 bp, Homo sapiens
tgccggcatgggtgagtgggacccaggcctattacccggccagagggtttgggggcctctctcctggaagcctgctctttccacaccccctttcccagccaggctgtcttggacactccc

SEQ ID NO: 11712 - DNA, 120 bp, Homo sapiens
tcccggggctccgctgaggggcacatgattcccgctttggacttcttttgagatgtcattttaacactgaggcatcctggcctcccttcccggaagatgggttatttgcagtgctgtctt

SEQ ID NO: 11713 - DNA, 120 bp, Homo sapiens
tcccggtttttgtacaaaaacaatgatactccccattggactgtatttttgcccaagaaacaaaagtgcctcaacaggtacagttctgctggtcaatctgcttccggcagggctccatgg

SEQ ID NO: 11714 - DNA, 120 bp, Homo sapiens
ccacgcccaccccactccggcccgatgtcattcgggtcacctcgctccaggtgtctgtatctgggtcgtaacactccacactgtccaggaacgtgtgaccatcatagcctcctgcgggaa

SEQ ID NO: 11715 - DNA, 120 bp, Homo sapiens
tggcgttctcacgccttcagagctagcgtagatggaaaagctgtgtgattgttgagaaatggcttcccctctctatgcctcagtttcctcacttaggaagggcagagagagacctggaca

SEQ ID NO: 11716 - DNA, 120 bp, Homo sapiens
caacgtctggcctttgttgatctggccggtagcccagggagggacagtgccctccccgcggtctcgaaatgagccccaggcatctgccgtcttccacctctgcctcagtttccccatctg

SEQ ID NO: 11717 - DNA, 120 bp, Homo sapiens
ctccgactctccccagcagacctccttgaggcccgccgcccgcgggcccacgagtgcctgggtgaggctctgcgtgtcatgcatcagatcatctccaagtacccgctgctgaacaccgtg

SEQ ID NO: 11718 - DNA, 120 bp, Homo sapiens
agacgctcaccgcagccggcaccctcattgccaaggtcaaaggtcagcctgctggaacagggctgcgagggctctctgcctagaagggcatcctggaggaggggatgtttgaagtgggtt

SEQ ID NO: 11719 - DNA, 120 bp, Homo sapiens
ctccggtcagttcttgcagggatggtcacctcccagagtgggcccacctccttgtccttatctctgcttcccagccttccattatgagagcaacaatgatctggagaaacaggagttcga

SEQ ID NO: 11720 - DNA, 120 bp, Homo sapiens
agacgattgctgtggccttcagtagcacgtgagcacgggagcctgtggggcagggcaagggagcgtggggggcccgggtgtctctcgatggtgacctcgctggccctgcagagtgtccga

SEQ ID NO: 11721 - DNA, 120 bp, Homo sapiens
actcgagccaggtgagtggggtgggccagggccacctgtgtccagcttctggaggccagccgggttcaggtctgcagggcccagacagtcaccctgcttcccctgtgcgccttggtttcc

SEQ ID NO: 11722 - DNA, 120 bp, Homo sapiens
aaccgtcccctgaagggtgggcactgcccagggccccgcatggggctggtctcacctgcgtctccgtcctacagtccatggaaagcctgtatggaccgggcagtgagggcacgcctccca

SEQ ID NO: 11723 - DNA, 120 bp, Homo sapiens
tgacgccggtaagcccccacccagcggcaggcaggcatttgaggggtgggccattgcgcgggtcgggccaggctgagcaggcccccgttccctgcaggctgcctgcccgccgaggaggtg

SEQ ID NO: 11724 - DNA, 120 bp, Homo sapiens
ggacgtgctgctacagcgctgtgaggggggcgtggatgccgcactgctgtatgccaagaacatggccaagtacatgaaggacctcatcagctacctggagaagcggacgacgctgggtga

SEQ ID NO: 11725 - DNA, 120 bp, Homo sapiens
ctccggcccgcagagatggagtttgccaagggcctgcagaagatcgctcacaactgcagacagagcgtcatgcaggaggtgggggccccgcgggcacggggcgggggtccctgggcccgg

SEQ ID NO: 11726 - DNA, 120 bp, Homo sapiens
taacgggggtggctgcagggaccagggagctggtggctgggggtgctggggccgccctgcctccatccctccccacccagtgagccggtgccccacccacagccccacatgccgctcctg

SEQ ID NO: 11727 - DNA, 120 bp, Homo sapiens
actcgctggccctggagcaggacctggagttcggccacagcatggtgcaggcggtgggcaccttgcagacccagaccttcatgcaggtgcgtggtgcccgggagggcgggctgggcgggg

SEQ ID NO: 11728 - DNA, 120 bp, Homo sapiens
caccggggtacccactcacggcccgtctcgccccagcccctgaccctgcggcggcttgaacacgagaagcgcaggaaggagatcaaggaggcctggcaccgtgcccagaggaagctggtg

SEQ ID NO: 11729 - DNA, 120 bp, Homo sapiens
aggcgggcgggcgggggcgggcgggggcgggcagcgggcctcggcgcaggcgcagtcccagccccagccccatagcgagggccctgcggcgagctccgcacacgccccggcctcctgcgc

SEQ ID NO: 11730 - DNA, 120 bp, Homo sapiens
atgcgcggcctcgcaggctgggccgccccccccaacgccaagccgggtcggagatgctccagccccgtcgcccccagctctgcctggaaggacccaggagcccggcgctcactgctgtcc

SEQ ID NO: 11731 - DNA, 120 bp, Homo sapiens
agccgtgcctccctcggttgtaagcagctggtctccgggttgagggagactgatggtctctcaggactgggaaagcgccatgctcctgcatgtattctttttttttttttttttgatacg

SEQ ID NO: 11732 - DNA, 120 bp, Homo sapiens
gagcgaccctacttcatgtcgcccgagctgagagacatcctgttgaaggggagtgcggaggaggggaagcgggcagaagccgaggagtagagagtgagggagactggcgtgggggccagg

SEQ ID NO: 11733 - DNA, 120 bp, Homo sapiens
aagcgggggggttcctggcctgcgagtgtggggatcctgtgtgtccctcggagcccactacagtctgcccctctctggtcccagtgtgtctgctttctaaccctctgaggcttctctgtg

SEQ ID NO: 11734 - DNA, 120 bp, Homo sapiens
agacgtgagccaccgcacccacccggcctcctgcctgtattctcttcccacttcgcttttgggttatttcaaagacgccggcgcctttttgtttgtttctttgcttgttttgagataagg

SEQ ID NO: 11735 - DNA, 120 bp, Homo sapiens
acacggtctgcagtgaaacgcaccctcctagctccttccagcacataccggcaaacacatatctgccctgttttgtacacacgaggacagctcacctcatgccctgttctgctcctgatt

SEQ ID NO: 11736 - DNA, 120 bp, Homo sapiens
acccgatatcagtcagcatgaagcagcctgaaccccttttttcggctgtgcagggctcagctgaggagattgagtaggttatttcatggacgtcttgggagtggctgagctgttgctgtt

SEQ ID NO: 11737 - DNA, 120 bp, Homo sapiens
ttacgaacaccattgctatgacaagcttgtgcccctgtctcaaggatgcctgagggatcagtgcccaaaatagaactgctgggtcaaggggcgtgcgtgtatgagctaccctcccaggcc

SEQ ID NO: 11738 - DNA, 120 bp, Homo sapiens
cctcggcctcccaaagcactgggagtacaggtgtgacccatggcgcctggcggtctcctagtaattggatgagtccgtttgtttgtgtgcgaatctgatggtgcaggttgtgaggtgtgg

SEQ ID NO: 11739 - DNA, 120 bp, Homo sapiens
ccccgagcccacaggtttttgactaagtgctcttcctgccaacctgtgggcgcctggcttcctgcctgggcggcttctctgttctcgtctgtgaggagggaagtgaaagcaaaagagccc

SEQ ID NO: 11740 - DNA, 120 bp, Homo sapiens
gcccggagacgctcccgtgggggctggtgtgcgtgtctgcagaggctgccgtgtgagcctctgtgcagagcttggctgcacctcagcttcccgggctgcagagtgggcacacaggacacc

SEQ ID NO: 11741 - DNA, 120 bp, Homo sapiens
atccgaggatagggttggaactggcctcctggctcccacacccacagcaagaggcggagtccaacctgcgcaaggccaagcagggttacgtgcagcgctgcgaggaccacgacaaggctc

SEQ ID NO: 11742 - DNA, 120 bp, Homo sapiens
gctcgcttcctcgtggccaaggcggaggaggagcaggctggcagcgcgccgggagcaggcagcacggccaccaagaccctggacaagcggcggcggctggaggaggaggccaagaacaag

SEQ ID NO: 11743 - DNA, 120 bp, Homo sapiens
gagcgcgccgctcctcatagggcgcttgcgcaggctccgctccctgagcggccgctttcctggtctccaggcaacgcgtacggcgctgtccactgtgctgaagccgcacaccaagcgccg

SEQ ID NO: 11744 - DNA, 120 bp, Homo sapiens
tcacggcgcccccagctctcctaagtgggcggtgccaacaccctaaagcagggaccactaagcctcctttgcgccctatccccagtttatctcttggtaataggtagagcccacttccct

SEQ ID NO: 11745 - DNA, 120 bp, Homo sapiens
cctcgctgagcttcagttgaaccaactcaaagcgggggtaaatagtagcaggtctttggtagaattgttgacaagtacatatgagatgatgtcagtaaatctccatcccagccatgtagt

SEQ ID NO: 11746 - DNA, 120 bp, Homo sapiens
gcccgtttttctagagaagggcgtggggctgggagtttgacccacgtggggccagcaccacctgtcagaggcagctggccgagtgccgcatctagttatgggacacctgtgttgtctgtc

SEQ ID NO: 11747 - DNA, 120 bp, Homo sapiens
gtccggaaactccagtttttagaccatcagatcttgtgaaacccacgtactatcatgagaacagcccaggaaagacgcacctccaggattcaaccatcctccaccagctccctcccacaa

SEQ ID NO: 11748 - DNA, 120 bp, Homo sapiens
ccccgccatctgtctccctttcttagaatcccgagttgtgtccaacgattcggactcggacctagaggaggcctccgagctgctgtcctcatcggaggccagtgccctgggccacctcag

SEQ ID NO: 11749 - DNA, 120 bp, Homo sapiens
gagcgaggccagcctagaggtggcttctggcagccacagcggcagtgaggagcagctggaggccacagcccgggaggacggggacggggacgaggacggcccggcccagcagctctcagg

SEQ ID NO: 11750 - DNA, 120 bp, Homo sapiens
caacgtgctgcaggccccactgccccccatgaggctccgtggcgggcggatgacactgggctcctgcagggaaaggcagccggaattcgtgtgagctggggtggggctgggaccacaggt

SEQ ID NO: 11751 - DNA, 120 bp, Homo sapiens
gcacgtcccctgcaccacggcatagcttaggtgcgccgtcctggggtcgctgccgagagcgcctggacttcgacgtcccaccagcgggcgcctcctcccagaggcttccaggagcacgag

SEQ ID NO: 11752 - DNA, 120 bp, Homo sapiens
atgcgtgtgtatgatgcggaattcaaagatgtcggaaaacatgcagtggctccttccccaccaggccccagccgccccgggtcctgttttgtttccctttggttgtcttagtcacaaagt

SEQ ID NO: 11753 - DNA, 120 bp, Homo sapiens
agccgtggatgggggcggagctggggtttggtgcagtttccagggtgcagtacagcagggcctgaatactggccctggactcccttttccagaacaccaggtgtggccacctggggctca

SEQ ID NO: 11754 - DNA, 120 bp, Homo sapiens
tctcggaagccaccgtgtggttctttcacaggcacgtttattttgctgaaataaaaagtttttaatcgggtgttttctgtggcagctgcaagcttagaagattttctgtggcagctgcaa

SEQ ID NO: 11755 - DNA, 120 bp, Homo sapiens
ccccgtggcgtggccctgggcctccccctaggggagggatgtgtgaggaagggaaccccccgccacggggccccgcgaggtgggagcccgggtggtcttcaccacaggctgtgcagacgg

SEQ ID NO: 11756 - DNA, 120 bp, Homo sapiens
gcacgtggcgtgacaggcctagtgcctggcaggcaggtccctcgggctctttgtcatcctcaggagtgtggctcgaagacaggtagcatcccaggcctggagagctgactgtgctgcctg

SEQ ID NO: 11757 - DNA, 120 bp, Homo sapiens
gctcgtcccccagagccttgcaagtgtctgtagggcgctcccctctgtcttgcctcctcccactctctggctcttctctatccggcctgccctcaggttgtgaccatccacctcccaaac

SEQ ID NO: 11758 - DNA, 120 bp, Homo sapiens
cagcgctccatcgcccagatgcgatcttaggtcccatctagctgttactctgctccctgagacatggtcccctcttagtcagaacgggaacttcagtcctaacccagatagctgatgtga

SEQ ID NO: 11759 - DNA, 120 bp, Homo sapiens
gatcgtctatttcccttcgagttgacacccctgggcccctctagtcagatccttctactgaaccctcactgcagaatgtgagcaggaaggggccccagggagggcacagctgtggccccc

SEQ ID NO: 11760 - DNA, 120 bp, Homo sapiens
acacggttagcacagagccaggccctcagcccccgtgggagcagttgatctgcagaggtgagactttgctagaaagacatccttgactctggaatgacttgtggagaggtggaattggat

SEQ ID NO: 11761 - DNA, 120 bp, Homo sapiens
agtcgtgtcaaactcaaatgttcccttgggactttgccggcacttggaaagtccagcatcaaaatctggcccaggaatcatgtttacgtgaggtttcccaaagcctgcagcagcagaggt

SEQ ID NO: 11762 - DNA, 120 bp, Homo sapiens
taacggccagcatttgttgagtatttgccgtgtgccaggctcacccttatgaccaccctgtgagatcagggctgtgaccatcttcattcgacatgtcggaaactggggtccaggcctgtg

SEQ ID NO: 11763 - DNA, 120 bp, Homo sapiens
tgacgttctggctttcccaggtgatgtgacctggaagtttcagggccaactggaccccaggtggcttgcagctgccagctgatgctctttcctggtggcagcctctgacctctgacctct

SEQ ID NO: 11764 - DNA, 120 bp, Homo sapiens
ctacggaccatcggtgtcatcaccaagcttgacctgatggacgagggcaccgacgccagggacgtcttggagaacaagttgctcccgttgagaagaggtgtggctttgggggtgctgggg

SEQ ID NO: 11765 - DNA, 120 bp, Homo sapiens
caccgtaactccttctttcttttccctttgagctatgtatctttttcttctgatttgtatgcattcgtttttcaagtgcacaattaacacctgctggtttctgaaacattagaaaacaag

SEQ ID NO: 11766 - DNA, 120 bp, Homo sapiens
acccgcagccacacttcccccagacagccactggtgaatctgcagctcccagctccccagggtttataactttaattaatttttttattactttctattatgagccttcccttccctttt

SEQ ID NO: 11767 - DNA, 120 bp, Homo sapiens
ttgcgcgaccacagtgtccccagcgctccgggttgccagggaatttctgcttgagcccctctgttcttagtctggaaaagcccacatttgctgcttaagcttcttcgattagaaaaggga

SEQ ID NO: 11768 - DNA, 120 bp, Homo sapiens
aaacgctcgtcctagagccaggtgtcatggacatgaatgttagaggactccgcacaccttggctgtctgtctgtgcaatgacaaccccccgtggcccttctgtaactacaccccagaccg

SEQ ID NO: 11769 - DNA, 120 bp, Homo sapiens
atccgaagcagcttccggggcaaatgcgggcgcaggctcccccatgcatggactaatcagatgactctcgtttcttctcttctctctgtctcctgtcctgcgtgtgtggcctgcactgtc

SEQ ID NO: 11770 - DNA, 120 bp, Homo sapiens
ctccgcatgacccaggacggggctcttcacccccgacatggcctttgaagccattgtgaaaaaacagattgtaaaactcaaagagccgagtttgaagtgtgttgatctcgtggtctcaga

SEQ ID NO: 11771 - DNA, 120 bp, Homo sapiens
ccacggtcataaaaaagtgtgccgagaaggtaacaggttttgttctcatctccgcatttgtccccgtcctccccctccatgtgttagtctcaacccgagcatctggaaaattcagcctcg

SEQ ID NO: 11772 - DNA, 120 bp, Homo sapiens
gggcggtcagcctttgttgttgccaaacgcattgcatttactaagcagtgccctttcctggaacccctagagaaaggggtttcccagccagcaccaaaacagcaaaacacaggaaacaca

SEQ ID NO: 11773 - DNA, 120 bp, Homo sapiens
ccccgactcgtggacttgacccacactgcagaagatgggactcccctgtgcatgaggtctggttaagttggtgctgcagatgaagcctggggaggtgggggcatttggcgagtgtgtgcc

SEQ ID NO: 11774 - DNA, 120 bp, Homo sapiens
tatcgaggctgatggcccagatacccgccttaccattctagaacagacgctactcactcacgctggcgaggcccttcagggttcctgctctcacccagtgctgggcaagaggggggtgcc

SEQ ID NO: 11775 - DNA, 120 bp, Homo sapiens
ccccggtcactggctggaaaagcagctctgctctcctgctgtctccggtccacggtgcccccactcttctgctcttagctcccagctggactcactgggggccaggagcaaggtgtgggc

SEQ ID NO: 11776 - DNA, 120 bp, Homo sapiens
gctcggtgggccccctcatatctcattccccacccccctccgcattttctacctgtgtggttcatgttgcttcccgtgccacgaggaccccgccaatgcgaccactctgcttgttccccc

SEQ ID NO: 11777 - DNA, 120 bp, Homo sapiens
ccccggttgcgagaggagacagagcgaatcgtcaccacttacatccgggaacgggaggggagaacgaaggaccaggtactggccttttgtcttctttattgggtataatttacatgcagt

SEQ ID NO: 11778 - DNA, 120 bp, Homo sapiens
gagcggttccgtcacctcctaaaatccctgtccctatcatgctgacagctgcatatggcaaagtaacccttacctcaatcaagatacagagcggttccgtcacctcctaaaacccctgtc

SEQ ID NO: 11779 - DNA, 120 bp, Homo sapiens
ttgcgccactgcactcatcttaggcaacaccttctcacacttccccttagaaactccgggattctagtgacatctggaagtaacctgcgctttagtaagtcggctgagatgagggcctag

SEQ ID NO: 11780 - DNA, 120 bp, Homo sapiens
ttccgtgtgcccaggccgtttcccttgcgcagctctgtgtgtgcagggggcttctctctgcctctacctgtggctgctcacttggtccccagggagagaacggccacattcgcctcttcc

SEQ ID NO: 11781 - DNA, 120 bp, Homo sapiens
ccccggcatcttgtccacgtgaaccctgtctgttctttggtttcagtgcccagcagaggagcacgcagctgaacaagaagagagccatccccaatcaggtagcacacccctctgcagtct

SEQ ID NO: 11782 - DNA, 120 bp, Homo sapiens
tcccgctctaccctgggggcgggaggacgctaagtgacagctaagcccccgtgatggagctcggcctgtgtaaagccccaccccacagcctcagtaccaggccatctgctctctctagag

SEQ ID NO: 11783 - DNA, 120 bp, Homo sapiens
ccccggcccccacagcctcacaccacaggatgggaccagtatgatcctgagaggctcccagagatgtccagccttgaccaagaccgtctgtccacccagcctcacagaaacctggcaggg

SEQ ID NO: 11784 - DNA, 120 bp, Homo sapiens
gggcgacagaatgaaaccctatctcttaaaaaaaaaaaatgacagggaccgaaacagatgtgacttcaggctgacaatgtttgaggatcggagaaagaagaatcaggctgcggggggctt

SEQ ID NO: 11785 - DNA, 120 bp, Homo sapiens
tctcgaccttcggctcctcaggaccaccagagaaggagatgtcaggaccccttcttgtcccccagctgggccataagacgtcccaggtctctgcacacccgtggaattcctcccttcccc

SEQ ID NO: 11786 - DNA, 120 bp, Homo sapiens
acacgggtcaaggtgttcccaggcctctatggagtggaatccttcaagctggggacctctggatcccatggttggatggctggggggtggagcgtgtctgaattcaccaaatttgaagca

SEQ ID NO: 11787 - DNA, 120 bp, Homo sapiens
gggcgggccattgcactccagcctgggtgacagagggagaccaaaactgagtcagtgttcccaagcagtgtgtgaagctgattctctgtcagccacgtgccagatgggttgggtcccagg

SEQ ID NO: 11788 - DNA, 120 bp, Homo sapiens
tctcggtggctccttctctcgaccctttgccttgagccggagcactgtggggacacaggaaccaagactggtgttttgtgccaatgccacactactgtgtgcccgtgggtcttgggccgg

SEQ ID NO: 11789 - DNA, 120 bp, Homo sapiens
gttcgtcctcatggctacacagtgaaccatgtgttattttatttttctagacactaaagctgaggtgtcgggaggtgatggtcccttgcttgcaggtggcagagctcaggttcaaacctg

SEQ ID NO: 11790 - DNA, 120 bp, Homo sapiens
gctcgtttgggaggcctcccttgctggaatgcaggtcagggagccccgatgcccttgggctgactgccccacgtccatcacacccactgagggccgtggggtgggtgcagggcttgttct

SEQ ID NO: 11791 - DNA, 120 bp, Homo sapiens
gtccgccagcctccagctgggtcacagaagaggctcagggcctgttcccactcccctcccccagccagcagggtccaaaaggatgttgggggggtggtccccagtccggcctgcccactc

SEQ ID NO: 11792 - DNA, 120 bp, Homo sapiens
ttgcgtagacgccggccctcccgcccccagccttcgccattgccttttgtctggctatctttcatgtacaagggagaaattcaagccactcaggagggtgtaacatgaaaagtcagtctc

SEQ ID NO: 11793 - DNA, 120 bp, Homo sapiens
ctccgcactgcccgtgacctgtggtttctcaggcacatacaagcgcgcacgcataaatctctcctccaacctgctgggcttcaagttatgcacgttcacacaatggcaaaggagggtgcg

SEQ ID NO: 11794 - DNA, 120 bp, Homo sapiens
tcccggaggcagcactgaagtcactttattgtgtttccagacaagccccatgaatgcagtgtgcactgcccctcctccctctgtcccttccccgcccatctgtacacctgtggtgcgtag

SEQ ID NO: 11795 - DNA, 120 bp, Homo sapiens
ttacgttgtggctcgatcatttaacatgtcagtgtgtaccgatggaaattgatctcttttaatttgccacatcttcatttattcattctttgattaattgatggatatttaggttttctg

SEQ ID NO: 11796 - DNA, 120 bp, Homo sapiens
ggccggaagtttttgatcagttgctcagacatagttctgatgtgctggggaagtgcccgttcagggccatggctgcagggctcctggacacccagctccggtgctggagtggggttggga

SEQ ID NO: 11797 - DNA, 120 bp, Homo sapiens
attcgcccagaggccagggctgcgccagaggagcccagggtgacctcatggtcctcagatacccggggctgggcagcacagtggaacagctgctccagagcttctccgaggacgacatcg

SEQ ID NO: 11798 - DNA, 120 bp, Homo sapiens
atccgactcaggttacggcaggagagggaggccaggccgggttagggttctggggtttgggattctcttccgaggctggcattgatctgttgctgatgatggtaacagcagctgctcttg

SEQ ID NO: 11799 - DNA, 120 bp, Homo sapiens
tgcgatcagggcatgtacaagtcagtgagagtaagcagaatcacacgctgctcccctcagtactgagctgaggacgtggagtcgctccacggctctccactttgtgctgcaagtcggcca

SEQ ID NO: 11800 - DNA, 120 bp, Homo sapiens
gggcgatactgctggggatggctttgcatcactcccgggctgttgggatcccctttactgtcactctgcacgtgtctgagctttcaatccggaaatgaatttgcggatgctggtggcacc

SEQ ID NO: 11801 - DNA, 120 bp, Homo sapiens
acccgcgttcctgtttcactgcagcctgactctagaggcagcattttcaggaggagaggccattctaacaagcctctgtgaaaccccgtgcttctaaaaagcagacttgccttattcggg

SEQ ID NO: 11802 - DNA, 120 bp, Homo sapiens
ttccgttgacaaagttagcgctgctttgagttggagccgttcctggaggctgtgacggcatcgcatgatttgatggaagggagaggggagaagttctaatgctcagtgtaaagtacgatt

SEQ ID NO: 11803 - DNA, 120 bp, Homo sapiens
gctcgttggcttgtccaccttcagagagggaaaagatggtttgccctcaatgacctggatctttttctctttttcctctgagacagcgtctcgcccttttgcccaggctagagtgcagtg

SEQ ID NO: 11804 - DNA, 120 bp, Homo sapiens
aggcgtgctggattgtattttgctgtcagtttcagtttatttgacttagaataaagaccttcaagtgaggaagaagctataggtccctgaatatcacaggatctatgaagtatgtggcag

SEQ ID NO: 11805 - DNA, 120 bp, Homo sapiens
gagcgccaaggagccagtgcctccccctgccctggccgtgcccacgttgctgggcttcccacctatggaggtagctgcaggcgcatcctccctgcagacatacccatggaccagaggctt

SEQ ID NO: 11806 - DNA, 120 bp, Homo sapiens
gagcggagccttttgcctgacttacaggagtgagaacagcatgttcttggggagtaaacccaaaccccaggcccctcagctgccctggaaacccacccggcagctgctgggggccgcctt

SEQ ID NO: 11807 - DNA, 120 bp, Homo sapiens
gtccgtgtgtggggaggggtcactcaacacacaaccggcctacaaagcctgctgccccagctgctctggagcccagtgctctgcaacccctgcccctcccaggaagacccccaccagccc

SEQ ID NO: 11808 - DNA, 120 bp, Homo sapiens
ccccggaagaaggtggggacccctccagggtatccctggggcacaggcactttgttctcagtctggctcaggatggtggtgaggacacagtgcagggcccgggtgccatactagggggag

SEQ ID NO: 11809 - DNA, 120 bp, Homo sapiens
ccacggagcgtgcgtgtgcgtgtgcgtgtgtgtgcctttcgctgccgtgtgggtccccatccaccgcagccgtgccgggaccaccagctcattcccacggacgccgccgctcgcctctga

SEQ ID NO: 11810 - DNA, 120 bp, Homo sapiens
gctcggccgccgcccaccccggcccctcctcagcggcactgacagtttgcaatcttataggaggaagacgaggtgcccgacgacgagaccgtcaaccagatgatcgcccggcacgaggag

SEQ ID NO: 11811 - DNA, 120 bp, Homo sapiens
aagcgctgcaggctggatggggcagttcaggcatcccactctgctgccaccaggagcaaagcagacgtcctagtgcccatggtggtatccctagcaggtcagggagccagggacagctca

SEQ ID NO: 11812 - DNA, 120 bp, Homo sapiens
agtcgcagagcccccttgcccctgggtgggaaacaggaaataagccacccaagcaggggccccttggcccgcaggcctcatgcctccaccaacgctgggccacgcagctgctgcccccct

SEQ ID NO: 11813 - DNA, 120 bp, Homo sapiens
tttcgagtttcctctgcctcctgaggcagagcctctagtcagggtctgacggagccaggccaggtcagccactgaaaaatcgagagctactgtttaactctcgcagcagcgtggagcccc

SEQ ID NO: 11814 - DNA, 120 bp, Homo sapiens
ccacgggcagagaaaggcccttctgaactctcggtgttctggctctagcgtgcccctggtgcctgcatgctgatgcctctcccgttgcctccctgcccaccagcgcatggacctggaccg

SEQ ID NO: 11815 - DNA, 120 bp, Homo sapiens
aggcgcgaggaggcccgcaaccccaagcggaagccgcgcctcatggaggaggacgagctcccctcgtggatcatcaaggacgacgcggaggtggagcggctgacctgtgaggaggaggag

SEQ ID NO: 11816 - DNA, 120 bp, Homo sapiens
gttcggccgtggctcccgccaccgcaaggaggtggactacagcgactcactgacggagaagcagtggctcaaggtacatgctggagaggcccagcagctgccgcaggccagcgccaggca

SEQ ID NO: 11817 - DNA, 120 bp, Homo sapiens
gagcgagactctatctcttaataacgacaacaagaacaagatatttgtgcacctggatccagccatgcctgaagctgtcatcagttacgtaataacacatttccttttcactgcttgaac

SEQ ID NO: 11818 - DNA, 120 bp, Homo sapiens
ctccgagattgattcctgccacttactgaataaacagggaggtttctgcctggtaaaccaacagccttggggaactttcccccaaatacctcccactttctggatactgacaaagtggca

SEQ ID NO: 11819 - DNA, 120 bp, Homo sapiens
ctgcgaccgcttacctgctgctccatcgcagcttcgctctgtgatgctaatcttcttcaccatatggacgttgctggtagctgcagcgggcactgggcacattgtctccaccacctcctg

SEQ ID NO: 11820 - DNA, 120 bp, Homo sapiens
ctgcggaacacaggtgggctctcaggcctaccaggcattgccagggccctcagccctgtgccgtaaggctccaggctctgggcccgctgtgcgggggcgccagcggctgtgctggccacc

SEQ ID NO: 11821 - DNA, 120 bp, Homo sapiens
tcccgtggcccttctaccacccggactgtatccacgcggaccgggctgtccggcggtggccaggcctggggctgggggtcagcctgccgggcctgagctgcctgcagctcctgcagcgcc

SEQ ID NO: 11822 - DNA, 120 bp, Homo sapiens
cagcgaccttggcggcgagggcagcctccccatcaggcatgcccaagtcccgttctcgaacccaggtgcccacactccgggtctccagtgccactgggtcctctgggggatcggggaggt

SEQ ID NO: 11823 - DNA, 120 bp, Homo sapiens
gctcgctgcgaccccggcccgctgtggggtggcccaggaacttctggctcttaagttgtactgtgagctgccgcttttcctcctggagcaccgagagcttcacctggagcacagggatca

SEQ ID NO: 11824 - DNA, 120 bp, Homo sapiens
tgccgcagcttccgcagggcacccgccatctgctcccgcacgtgggccaggtgcccggcactgggaggcaccggtgtggacagtcctgaactccgtggtgtcgggggtggcaaccccacg

SEQ ID NO: 11825 - DNA, 120 bp, Homo sapiens
tgtcgagccggccgcactgggggtcagggagcccaggccggtgggtgtggccgcctggtcctcgagacggcgacgggcatccagcagcgtgcgctccacccgcggattgaagccaccgcg

SEQ ID NO: 11826 - DNA, 120 bp, Homo sapiens
ccacggccgcagtaggaataggctgagtggcggctgtccccactggcattggagcacagcgactcagtggacgtccaccaggagccagggccacggggcagcgagctcaggcgggggcgg

SEQ ID NO: 11827 - DNA, 120 bp, Homo sapiens
cggcgctgcactgccacgcgtcgcagcgtgtggcccttctcgatgtcatccacgtacttgaggaagtccaggtccaggcggtagccatagggggtctccacggagtagggtggatcgggg

SEQ ID NO: 11828 - DNA, 120 bp, Homo sapiens
tgccgaagagatgggagcccacctggtactcaaccgcgtctgctctcagaccctccagagcagggctatgcctccccttcagactcccggcgctaggctatgtcgcctctcaaatccccc

SEQ ID NO: 11829 - DNA, 120 bp, Homo sapiens
cctcggcttagactaccccctttttccggtaagactctgcctcccccttcagaccctcccagggcaggactctgcctcctccctcagacctctaattgttgggctgtgtcccaccctcaa

SEQ ID NO: 11830 - DNA, 120 bp, Homo sapiens
ccccggggcagggccctcttccctgagtcccctgacctgggaagggagcaggcacgtgcaggacctgggccatcttcttttctacagatgctccttggaagtcacttgagggactgcgag

SEQ ID NO: 11831 - DNA, 120 bp, Homo sapiens
caccggctgaggcttacctggggaaagagaaccacggcgccgggagttaggagtctgtagggggaggggaggagatgaggccagccccctccacagctggttcacccagccccccaaccc

SEQ ID NO: 11832 - DNA, 120 bp, Homo sapiens
agacgcacacccagcctggctgcggaagggccccccccgaccccctcccccccgcaggtctggaacaaagaaaccaaacctcactgcctgcttgcacatctgtccaggccctggacaggc

SEQ ID NO: 11833 - DNA, 120 bp, Homo sapiens
gcccggagctggccacacggaaggatgggggttgaggcgctaaggggttggggaagaagggaacctcgtcttcctgcaaggatctgaggagacagagacgcagggggacaaagagaggca

SEQ ID NO: 11834 - DNA, 120 bp, Homo sapiens
tggcgaaggggacccccagtgaccccaaagctgagagctgggtcaggcctggactgggtcggggggaaggggtagggaaagttggggaggcagctaggagtgaagcctttcccctttatg

SEQ ID NO: 11835 - DNA, 120 bp, Homo sapiens
tgccgggctacacagaacttcctgcccgcctaggatgcgtccgggcccaggggcgcagtagggatagagggccgggtggaggcccaggaagtcctgggggtggaggggaggaagtaagag

SEQ ID NO: 11836 - DNA, 120 bp, Homo sapiens
gggcgcctggaggctgcaaaagggagggacagtcagagcctctcactaaacccccctcagccttggaggccggccagggctcttttgtccccaatataacccatctgaacttggctggtc

SEQ ID NO: 11837 - DNA, 120 bp, Homo sapiens
ggccggcaggtaccttgggaggatgggccaggtagggcacctgctgggcatgaaggcagggctggggctccaggggcacctgagcttgtccttgttctcccgtcctgtcttgctttgtct

SEQ ID NO: 11838 - DNA, 120 bp, Homo sapiens
ccacgtctctctgtgtctctccacgtctctgtctctctgcgtctctctccacgtctctgtccttctgcgtctctctccgtgtctctctccctgtctttccacgtctctgtcttcgcttct

SEQ ID NO: 11839 - DNA, 120 bp, Homo sapiens
catcgttgggtctctgatgcccctggcacagtaggtgctctcagtgtaggtttgttgagtggctgagtgagagtgatacttcttgtgtatggggtgtgccacgcaccagtcacaggacgt

SEQ ID NO: 11840 - DNA, 120 bp, Homo sapiens
agtcgccgcagcagggacgacgggcgcctcatgtcagccaggaacttgaagaggtcctcgtcactgagtcgctcagcctcctacatgggacccactcccgtcagcctgggccagggggct

SEQ ID NO: 11841 - DNA, 120 bp, Homo sapiens
cagcggggagtgggagagtccctggccccagggtaggacacctgcttaaagaagtttgtgacagttagcgtggctggacggaagccagagaagctgcaggcgtcgtccccactactcgcc

SEQ ID NO: 11842 - DNA, 120 bp, Homo sapiens
gcccggtcctggggcccccgacggcggcggtctgtccaggctggccggcgctctaggggagggaatgacaatgacaaaagggggaccaagatgaaacagggagactcaggggcggcacag

SEQ ID NO: 11843 - DNA, 120 bp, Homo sapiens
gttcggccagcagagggcgcaccccctcgccccgtagccccgccccaggcctgtcagcaccaccctttagccccgccccaagcctgttagccccgcctcctcaccgccctccgagtcaga

SEQ ID NO: 11844 - DNA, 120 bp, Homo sapiens
tcccggtccagctgcccagcgctgctcacgatgttggccaagtgcacggccgtccaggcgaagggcatgcggtagcggcccaggcgggtgcagaactgctcggccgccaggcgcagcttc

SEQ ID NO: 11845 - DNA, 120 bp, Homo sapiens
ccccgtcccctgccagctcagcatcctagccctgctgagtcagggatctgttgcccctagtccagcctccacacgcttaccttggctgtgtccacttctttcaacaccatgtaaggctca

SEQ ID NO: 11846 - DNA, 120 bp, Homo sapiens
ctgcggggcagatgaatgaatccagtgaggcgctgcccgaacgctctgttcccccgtgctggctccccagcctcctggacccctcatgggccctcggacactcctaacatatgaaggcct

SEQ ID NO: 11847 - DNA, 120 bp, Homo sapiens
tcccgctgtccttgggatcaagggttagtgttggcctgcctggtggctactccctcccattcttcagatctacccctaacctccaagcctacctttagctggtgatattttccctaaatt

SEQ ID NO: 11848 - DNA, 120 bp, Homo sapiens
cttcgctccctcatctctctccctcttttttgcccaatgccagtaactgtgggggctccgtggtgccggatgggccgaggcatctgacccctgctgaaacgcatctgcagaacagtcaat

SEQ ID NO: 11849 - DNA, 120 bp, Homo sapiens
aagcgcttttctgagccgtgagctcatcctgagcttcccagaagcccccgggctgccaggcagagagtgttgttaccggacagctgcgttcccaatggtccctgcagccccatggggacc

SEQ ID NO: 11850 - DNA, 120 bp, Homo sapiens
acccgggatggatgcccggcaggtggagaggtcctcacaggacaggtggtgggcaagggggcagcacctggggaatggggatgggctgtgggtgccgagagccccaggagcccagcagag

SEQ ID NO: 11851 - DNA, 120 bp, Homo sapiens
agacgcaagggatctgggtgatgtcaggaagggtgaaggagcacccccaccccaggaacaggcggcaagggatgggcgaggggcagtgaggcgagcaggacctggggaatgtcctgtgta

SEQ ID NO: 11852 - DNA, 120 bp, Homo sapiens
tcccgcatctcaagcagcccccaccctcccatcccccttccctgtcttcttgtccctacagcacttgtcactgacaggtaatctactcgatcaggcttctggtctctctccgccactata

SEQ ID NO: 11853 - DNA, 120 bp, Homo sapiens
ccccggggagaggatacctgagcttctgaacgcacccttgtcgcaaagaccccccgccaactgggggcgaggcttttcagccccagagagtctgatatacccctcccaggctgtgactct

SEQ ID NO: 11854 - DNA, 120 bp, Homo sapiens
ccacggaaatggatcccccagcgcctggggcctgtcccctcccccgtctgcccaccagctggttctgtccccagcccccactccctccattcaatcacccatccatccccagcgcggtcc

SEQ ID NO: 11855 - DNA, 120 bp, Homo sapiens
gcccgtgacgggagagcctgaagcagaaggtgggggggcgtccacagctgtcccccttccccccccccgacagctgggcactggaccctggagggggaagggcacgggaaactcctcgag

SEQ ID NO: 11856 - DNA, 120 bp, Homo sapiens
aaacgccaccaaggagcccatctctgtccccaaatctcagagcctggagcctccctgccccaaaccaggcactgaggaaggaacagaaagtccggcccaccccgatctccgagagcgcgg

SEQ ID NO: 11857 - DNA, 120 bp, Homo sapiens
ggccgagaggcggacggggagcgcagggagttcagggggcgcccgtcatccgcatccccacgccacctcctccgggaagccctccggacacacccccgcgcgtcacggaggcagaacggc

SEQ ID NO: 11858 - DNA, 120 bp, Homo sapiens
agccgccatcgcgctcccagccccgacgcgactcccatctgggacccccgccgggacccccgcggccctccccgccttctcccgctcccagccccggccggaggaagctggcgggacccg

SEQ ID NO: 11859 - DNA, 120 bp, Homo sapiens
ggccgaggcggaaaggggttgaattgggggcgcccgggcggggagggtcgcaccgccccggggcggagccgggccacgtgggggaggtgggagggggccccgcggccacactacctgttg

SEQ ID NO: 11860 - DNA, 120 bp, Homo sapiens
gggcggggcggggccggcgcgggggcggggcccttccgggtggcccgggccgctccgtgctgcccctgcaggccggaggggtcgcctggagtcctgggggctggggaaactgaggctggg

SEQ ID NO: 11861 - DNA, 120 bp, Homo sapiens
aagcggttgtctctaaagtctcactgggtctccatcagacctggctgtgtgacccaggataaattgctcaacttctctgagccccagtttccttgtttgctccctgagagttcgtggttg

SEQ ID NO: 11862 - DNA, 120 bp, Homo sapiens
gtccgctattgataccatcagtgtggcaagagcaaccagtcccacagcagggagatagcttccttgtggagagggagtctgcctgggcctcccaaactgagaggtgtcgggggtgatggt

SEQ ID NO: 11863 - DNA, 120 bp, Homo sapiens
ctacgtggagaattgaggagcaagagcatgcaaggcacatccatgcaacaggcatccgcggagcatctaccatctgcaggcgccgactcaccccgggaggtggaatcatcatcccgggtc

SEQ ID NO: 11864 - DNA, 120 bp, Homo sapiens
ttccgtctcaaaaaaaaaaaaaaaaatcacataacactggagtcgtaggactcgaacccacgtctgtcaacttcagggaactctctcctgtggtttttcagatgcatttcggcaattggt

SEQ ID NO: 11865 - DNA, 120 bp, Homo sapiens
tcccgagagacgtggattggagttctggcttggccacacagctggactgcgtgacctggacctctctgggcctcagtttcctcatctacaaagtgggcgcagcaacctcagtgctccact

SEQ ID NO: 11866 - DNA, 120 bp, Homo sapiens
gcacggggccagtgaggtggcgtcaggagagcacaaaaccaagggagacactgacgtgttggattgttttttctgctgtttccggagccggggaaggaagccagaagccaacacagggtg

SEQ ID NO: 11867 - DNA, 120 bp, Homo sapiens
gtccggacatgtgtgcattgtccaaggaacttgcttctttttaaaatactttatttttagagatggtgtctcactatgttacccagcctggtctccgactcctggcctcacgcgattctc

SEQ ID NO: 11868 - DNA, 120 bp, Homo sapiens
ggacgagcaggagggatgctttgttttttaactgacagatttattgcttagagtcgtgtaaatgacagaagatacagcagacagaggagagtttccacccccgcccagagcagtttcccc

SEQ ID NO: 11869 - DNA, 120 bp, Homo sapiens
ccgcgtctctacaaaaaaaaaaaaaaaaaaaaaaagcaagtatcttgcatttgcaattcgtcggatgcctgcaaagttccgtgggtgtgtgatgtaggaatctggggcacgggaagttat

SEQ ID NO: 11870 - DNA, 120 bp, Homo sapiens
cttcgccccagcgtgtgcagccggtgtggcccaggtgtaagctggggtggggtggggggaggacctgccagctggataagctggatagagcccctgattaaggcttgggtgttgactttg

SEQ ID NO: 11871 - DNA, 120 bp, Homo sapiens
gggcgcctgccgcccaccaactcatgccaaatacaaccccttctctgagttccaaggggaaggggttttctatgtacagggcccaggtttagagtccagttctaccccctaaatgggtac

SEQ ID NO: 11872 - DNA, 120 bp, Homo sapiens
ccacggaggcaggagtgagagtccttatacccaaggaaacgatcccagccacttaattaacacaaccccaccaccacgaccactgccgcccacccttggtctttccaggcaatctgtccc

SEQ ID NO: 11873 - DNA, 120 bp, Homo sapiens
ccacggctaggctccttgaatctgcccacactccaacatgctgcttcatccgagtccaaggtgctccctcaaccctcataacctctcccaggcctcagtttccccagctgtctatggccg

SEQ ID NO: 11874 - DNA, 120 bp, Homo sapiens
ctgcgggaaccgcacggagaggctgcagaaggcctggatgcaggcggggcagaggcagagacagccctggcacagctatttctcaactgcctttggggcttttttccattttaaaccagg

SEQ ID NO: 11875 - DNA, 120 bp, Homo sapiens
aaccggccccaccccgtgttccaggagaacgagtttaaggaggggaagagaagaggcaggaaacctttccccacgcagggcagggccgcaaggctggggcccccacctcccccagcctta

SEQ ID NO: 11876 - DNA, 120 bp, Homo sapiens
agtcggtcccgcctctttctaaccatctgccgaccctccctcaagcctggccccggagggctcgcctctgttccccttcactagatttggggcgccccagccaatgcaggtggactcagg

SEQ ID NO: 11877 - DNA, 120 bp, Homo sapiens
caacgcctgtccccagctgggctctctgccccgcccgcgccccatcagcgcttcccaagtgcccagctgggtgggggcgagggcagaggcgttccccgcagccccgcctttgttccccag

SEQ ID NO: 11878 - DNA, 120 bp, Homo sapiens
ccccgtaccccacagacctgctcggatgcggaggggccgggtgggctgcgctccttcccaggggtgacctcgcgtagggggcgccgcctgcaggggttccgcctgtgaactcgctgcggc

SEQ ID NO: 11879 - DNA, 120 bp, Homo sapiens
ggccgcgaccccgaccccgcagccgcagaagccagcagcctgcagccacccggatcccgcgcgggctccgcccagaaggcggaggaagggccgttcccggagcgggggatgggggaggac

SEQ ID NO: 11880 - DNA, 120 bp, Homo sapiens
ggacgaagaggggccgagtcttgggcggggctttcagagagcgggtgggaggggctggaagctgcaccaagcgtctagagcccgtcctagccaagcaacatctcattttcccagctgctt

SEQ ID NO: 11881 - DNA, 120 bp, Homo sapiens
atacgcacggctgttaaaagcatagagtcttgggcctggttcgagtcccagctccaccactttctagtcttgtggctttggacgcgttacttaacctctttgagcctcagtttccccatc

SEQ ID NO: 11882 - DNA, 120 bp, Homo sapiens
atccgtcaagtagctcatagcgagagtacccaacctcacagagttgtgggaggattctgatctgagttagtgtttgtcaagtgcagtgccggccttaaagtaggctaggccaggcgcggt

SEQ ID NO: 11883 - DNA, 120 bp, Homo sapiens
caacgtgttgggattacaggcatgagccacggtgcccagctctgtctgcaactgaagatattatttcccttcttcatttgtttttggtgctagagcctggtgttttttggtaaggccaca

SEQ ID NO: 11884 - DNA, 120 bp, Homo sapiens
tgtcgtgttgcaagcttcctttcacttgggtctgggcaagctcaggcctgattttcctcaggatgtgttctcagtgtggagctgtggaatcagagggaagcgccatgttttgacccagat

SEQ ID NO: 11885 - DNA, 120 bp, Homo sapiens
tggcggggctgagccagggctccgagggtagatggcctggattgggccccaggctacacctctcactggctaggtgattatgggcaggtcccttcacccacagaaaggtcagggacccct

SEQ ID NO: 11886 - DNA, 120 bp, Homo sapiens
agccgggtctcctgggacatgcgggatgtcctggggtgacctaagactctctagaggaaataccagctgtttttattctgtttgtagaggaccaagctggagcttggtatacagtgggaa

SEQ ID NO: 11887 - DNA, 120 bp, Homo sapiens
agccgctgttgtggctgctttccgctctgcttaggttagagtagcgacagacaaaggagggacttttgggacagaggctcggtccccttctgtccggctggcccctcttcctgggagcag

SEQ ID NO: 11888 - DNA, 120 bp, Homo sapiens
gaccggtctccctccctgtatcctccccatctcccagcatccttggccatgaagtctcattcctgccagccctgccccgacatgcctctgccaggtcctaaacctaaagtctcagtggtc

SEQ ID NO: 11889 - DNA, 120 bp, Homo sapiens
ggtcgctctcctctccccaaccccacctcccacctctgaccgtctgcgcactccatctgcgtctccccagaatctgcctctgctccgtgcttcttcctcagtccccagcctgggccagcc

SEQ ID NO: 11890 - DNA, 120 bp, Homo sapiens
cctcgcccccacctctgtcccaacagtggcctgacagggctgccctctgccacctgggttcccacctccctgctccagccccaccagtggccctcctgcctctgcactccccaccttgtc

SEQ ID NO: 11891 - DNA, 120 bp, Homo sapiens
tcccggtctcccccaacacaaccaggcttcaaccattcaccttgctcttcgtctgttctcccctggtaagggcagggacctttgtctcctccacagtcgtgtcctcagggtccagcatgg

SEQ ID NO: 11892 - DNA, 120 bp, Homo sapiens
aggcgcttggtggcaaacgaccctgtggggtgcgggggctgatgggagccggtgggtgggcagggggtgacagaggtggcttctttacagagcagctggctgctgccaaggcccaacagg

SEQ ID NO: 11893 - DNA, 120 bp, Homo sapiens
tggcggctgatgccttcaaggagctggatgatgacatggacgggacgtgagtgtcccctagttggagctgcccacctttccgtgggcctgggtttccctccccgccaccctcgcctctag

SEQ ID NO: 11894 - DNA, 120 bp, Homo sapiens
ccccggcgtggggtccaggctgatcccaagccccgtgtgaccccgcctcttactcgtggatggccaggtccaggatgccctgggcgaggagatagggggaccaccctctccccaggagct

SEQ ID NO: 11895 - DNA, 120 bp, Homo sapiens
gatcggatggcttttcccagccccactacgctctggggaaagccagacctgggttcgaatcctggctgtgcctctgagcttgctgggttacctggtggagggtggacttttgggggctga

SEQ ID NO: 11896 - DNA, 120 bp, Homo sapiens
acacggggagcctaggagatgtcaggtgccaaggagcagggggcttcagagggaccgaatgggcaagggtgggggtgggctttgctgggtgggggaccaaggcagatggcagcttcaatg

SEQ ID NO: 11897 - DNA, 120 bp, Homo sapiens
tgccgggtcctggggtggaaggaggtgccacctgggtgagttggtagagaggtcatcggacatttgggggtccaggtatctcccagtcccaccccttactttgagctcctttggggtcat

SEQ ID NO: 11898 - DNA, 120 bp, Homo sapiens
ccacgcccccgcagggtctcggtgactgagctgcagactcacccggagctggacacagatggggatggggcgttgtcagaagcggaagctcaggtacccccggctgccccttggttgggg

SEQ ID NO: 11899 - DNA, 120 bp, Homo sapiens
ggccgcttcccgcctggcaggacccgggatggagccaggtcgcgctggagcccgtttccccgcacctgcccccactctacccgctgttgagcacccaatccccttcctcccccacccctg

SEQ ID NO: 11900 - DNA, 120 bp, Homo sapiens
cctcgtcccctgtctgtctcctttcctatcctcctccttccccgtggcccctggcttctggcctcccttctctgcccacccctgggtttctccctctccatctgcagcctgggccttggc

SEQ ID NO: 11901 - DNA, 120 bp, Homo sapiens
gtacgtccgtttgtccatctgcttctctctttctgtctcagtgcccccaaccactccagcccctggtctcctcctcccctcccacgggcctgtgctgccccctcctggccgcagtgcctc

SEQ ID NO: 11902 - DNA, 120 bp, Homo sapiens
tggcgtggccctggcctggtcatcagggcccggggcccagccctcccgtgcctggcaccgcagcccgggtgccggggtggccgagatgggggacacgtggtggcctagatcttgacacca

SEQ ID NO: 11903 - DNA, 120 bp, Homo sapiens
agacgccacctctttctacgaccgcgtctgggccgccatcagggacaagtaccggtccgaggtcagtggaggagaagggaggggacttggtcctcccaccacactgcccccaccccgcct

SEQ ID NO: 11904 - DNA, 120 bp, Homo sapiens
caccgagaccccccgaccccagctgtcggtcctccctgcaggccccgcaggaggggcagagacaccgaggctgccccttgggctgtggtgtgagcctgagggtgtgggtggaccctgagt

SEQ ID NO: 11905 - DNA, 120 bp, Homo sapiens
caccgaccgcactgctcacccgccaggcactgcccaccgaccttccagcaccttctgcccctgacttgacggagcccaaggaggagcagccgccagtgccctcgtcgcccacagaggagg

SEQ ID NO: 11906 - DNA, 120 bp, Homo sapiens
ttccgaggtgcagggggagcagcccaaggtccgtgtttgggggagaagtggagacagagagggtgggggaagggctactcactgaccctgcccctgccccaggaggccccaccgccactg

SEQ ID NO: 11907 - DNA, 120 bp, Homo sapiens
ccccgcagccggccagccctgctgaggaagacaaaatgccgccctacgacgagcagacgcaggccttcatcgatggtgagggtgggcgggggccaggctcctcgggtgggcccagcgttt

SEQ ID NO: 11908 - DNA, 120 bp, Homo sapiens
ggacgggaaaggagtgtggggctgggcctttgggcccatccaccccaccctgggcctggcggggagtgccggggtcttgctgccggggaggcccagtcctggtgggggaggctcagggct

SEQ ID NO: 11909 - DNA, 120 bp, Homo sapiens
cctcggcccagggggaggctgagccccggggacaggggtgtcctttggcctcaagtgttgtgggggggggggctgcctccagcccaccgtgacgccaaggtggaacgaggtatcgtgtgt

SEQ ID NO: 11910 - DNA, 120 bp, Homo sapiens
gtgcgctgcgtgtgcacgcctgtgttcgtgggcgccaaggagaccgctgggggtccaggagagatctctgcagagaacctgggggccagggcgagggggccgagagggtgagggagcgtc

SEQ ID NO: 11911 - DNA, 120 bp, Homo sapiens
ctgcgtgttcctgggtggtgtttgtgtttctccgtgacctggtgtccaaatttgatgtccaaatatctatcgctacattcacgtgtgcacgtggacaggtggatggattcgtgtgcccac

SEQ ID NO: 11912 - DNA, 120 bp, Homo sapiens
ccccgtccataaaacagggacaacacaagctctgttctcatcgggttgcagaaaaataagggtgtctagcacacagcaaagactcatgaaatatttggtgttattacagatgggaaactg

SEQ ID NO: 11913 - DNA, 120 bp, Homo sapiens
ccacgtgcccaaaagagaaaggggccaccagagctggaacccagatgacgccaaaatcttttaacaccaagaatgccaatcgtcgcggccagcacacattgagggcctgctgtatatgag

SEQ ID NO: 11914 - DNA, 120 bp, Homo sapiens
gtgcgcaccctcccggcatccctcccttcggcaggaatggggttcagggagggttgcaagcttgggggcacccggcctggggccatctggctggcagggggctcaccggaaacgctgggt

SEQ ID NO: 11915 - DNA, 120 bp, Homo sapiens
ctgcgtagcgccgggcggatgactggtagaggtgggtgagcagcgcctgccccgtcttctgacttgggttgttcgcgaacttgactgtgatgggctcagctgcgcccagcggcttctgcc

SEQ ID NO: 11916 - DNA, 120 bp, Homo sapiens
cttcggcctcaatcctcttgtcaaagcggatgaatcccacaccccgagagacacctgccagggggcagggatgtccatcacgacgaccctgtcccctcctgtgtaaccccacttctccct

SEQ ID NO: 11917 - DNA, 120 bp, Homo sapiens
ggtcggtttccccacgttggtcccacctgactgcctttgcccagcgcccccgccaggtgcaccctccctgactgcctgacctgtgacctggtccaccaggatgcgggacgtgatgatgcg

SEQ ID NO: 11918 - DNA, 120 bp, Homo sapiens
ggccgtactgggagaagagctgctccatctctttctggctcatggtcttggggagcccgctgacgtacaggttagcatcccggatggatgctgaactgggtctggcataggacacctggg

SEQ ID NO: 11919 - DNA, 120 bp, Homo sapiens
agccgaaagagttactggctgcccccctcccatggtgtccccaacctgagcagagtgaagaggtgactgggtggttcagacccaggttcttgaggcctagcctgctaatctggccaccac

SEQ ID NO: 11920 - DNA, 120 bp, Homo sapiens
acccgttctccctcccatttgtgccagagcttagcgggaccagtatctcgtttcctctgtggctgagccggctgagctgataatggggatcagattgatggaagccacacccgccctgcc

SEQ ID NO: 11921 - DNA, 120 bp, Homo sapiens
cttcggcgactggccccagacagagatgggggggtggcaaagtcagggaggaggagggcagataaaagatggagggttagggaagcttcccattctctccagtgcttcttctaagtctcc

SEQ ID NO: 11922 - DNA, 120 bp, Homo sapiens
ccccgacttttggtttctctctccctctttcttcctctgtttccctctcttctccactgtcctgccctctctctgaaccgttctgtgtccctggcctcatcactctctcttcctcttttc

SEQ ID NO: 11923 - DNA, 120 bp, Homo sapiens
catcgcacatacatctgacgtatgggttttgcagtgaacacacctgaggccacttttttcttaaaacctcctgtgtctgacccccacggcccccagctgcggcccctggccccagtcaca

SEQ ID NO: 11924 - DNA, 120 bp, Homo sapiens
taccggcgacaatagggcattgagtggctatgcatggtgaggctgggctaccacgtggtgctgactgagcctcctacttctgggcccttcttcaatgcagggtcctcctggtcttaattt

SEQ ID NO: 11925 - DNA, 120 bp, Homo sapiens
gggcggaatgcagatcatgggatggggcagccgagaggccactgcacgctgagagcctggccgacacttggtgggacggtcgttggcgggggcgcccacccggaacacctctcgcccccg

SEQ ID NO: 11926 - DNA, 120 bp, Homo sapiens
cctcggccagctgggatgccacctgctccgagatgccagccagcgcaggctcagccctggtgaccgccccaccctcagccctgacaggacgcctggcagtgtgccctacgctccttctcc

SEQ ID NO: 11927 - DNA, 120 bp, Homo sapiens
tgccgaacccctgaggctgccggcagccccctcaccactcaccggggccaactgagcctccctcactgagtccctgccccgtgggatgggaaggagagaggcagggaccgcgaaggtggg

SEQ ID NO: 11928 - DNA, 120 bp, Homo sapiens
aaacgaagcctggaaaggcagaaggcaagagaatgcaactgggagccagagaaaatcgaaaaggaggtagcggccagcttagccagggctcaggagagcatcacagcctatgaagccata

SEQ ID NO: 11929 - DNA, 120 bp, Homo sapiens
aggcggccgtttcgctgtgggggccgagccctgccccagcaggcctgcccccgccccagctgccaagccagggctcctgggccctcagccagccctgcctgggactggccttgggcacag

SEQ ID NO: 11930 - DNA, 120 bp, Homo sapiens
ggacgcaaagagggcaaggccacgaaggactcagcctggcccatcgtgtccctgctctgccccagtgccagagccagagccagagccactgtggctgctattctgtttgtgatgctagcc

SEQ ID NO: 11931 - DNA, 120 bp, Homo sapiens
gctcgtaagaagcccccagaaatgggcggccccctatgtgccctcgccctgcagacctacctttgtcactgtcagggtctgagtcgctgaggggcttcaggggcgaatgcaggtcctgga

SEQ ID NO: 11932 - DNA, 120 bp, Homo sapiens
tagcggtggccagcttcgcactgccacacggccgtggtgtacaggccaaaagtggggtctagctccgccaggtgcggctcgtacgggcagcggtgcttgtggtcctcgtaccagatcacc

SEQ ID NO: 11933 - DNA, 120 bp, Homo sapiens
ccacgttcttcaggcagttcacgttgcgtcgccgccctatggacacagggccgaggagtgggtataagggacagggctcagcccatggtgacatggctgcctgaaccaccggggctttat

SEQ ID NO: 11934 - DNA, 120 bp, Homo sapiens
taacggggactgttctattggcaaagtcatgtaaacagtggagcctggtgcacagtaggtgcataataattgttagctgcttgttaattgttctcatcttcatcaaacgcctagaccagc

SEQ ID NO: 11935 - DNA, 120 bp, Homo sapiens
cagcgcagtcctcaggcccaggactcccaggctcccgccctaaccaccccctacagccgcaagggggcgcctgtgaatgcccgagtcaagtctgttccctcctctgctcagaatccactg

SEQ ID NO: 11936 - DNA, 120 bp, Homo sapiens
cttcggcccacaaggcccactgtgacttgtcacctccccgccctcacccacttggtgactgcactccactccagccacatggcctcctcgctgttcctggagcgggctaggtgtggccct

SEQ ID NO: 11937 - DNA, 120 bp, Homo sapiens
agccgaccttaactttgctgtctgttttctccaggtagtacctagatgccatctgtggccatttgtttacatgtgccctgtctgtctctcccaccagaatgtcagctcctcaagagcagg

SEQ ID NO: 11938 - DNA, 120 bp, Homo sapiens
gaacgctgcatagcgggcgggcatggtggagccggaccgcctgggtttgaatcctggctctgccccttccaagctgggtagctccaggcaagtgacttggcttctctgagccccaggtgc

SEQ ID NO: 11939 - DNA, 120 bp, Homo sapiens
ctgcgggccacaaggccaagacaggatctggtaagtgacgatttggaggctggtcctgaggtgcaagagggagtgccagggacagagagggcaccggggtgactacagtccctccagact

SEQ ID NO: 11940 - DNA, 120 bp, Homo sapiens
acccgcacctgtgggtggggccttatttgcatacagggtctttgcacacgtggttggttacaatgaggatgctggagggggtggtctgtgtccctgttaacaactcatgtccttaagaga

SEQ ID NO: 11941 - DNA, 120 bp, Homo sapiens
aggcgtctggaccgcagtggctccaggctgccaaccacgggcagaggccaccgctcccgagcttggaccctgccacgcgcaggcacaggccaggcggcgccggggaagcctgggggcccc

SEQ ID NO: 11942 - DNA, 120 bp, Homo sapiens
gaccggcccagcaccgcctgacatttctcaagcatgctgggggacggcccctcaatttaggatgaggacgaggtgggcccggcaggagggcaggagccggggtccagggcgagcaagttc

SEQ ID NO: 11943 - DNA, 120 bp, Homo sapiens
ccccgccccacgaggaacggcagtggccccggttgcctggaggtggaaggggcactgcagcctcaccgccccataccccaggagcccacgtgcttctctcacagggaaaggtgtactggc

SEQ ID NO: 11944 - DNA, 120 bp, Homo sapiens
cagcgccctgaggacggggtcggaacccagcgcccaggaagctcccctccccccgaccaaggacctccctccaggtgggtcctctggaaactcaggcccgcggccatcacggcccctctc

SEQ ID NO: 11945 - DNA, 120 bp, Homo sapiens
ggccgtgggggcttcacactgcaccccgatttcgagggaagcccctgcccatggcttccggggccttccggaggggccaaggggctggtgccatgggagggaaagttcccaagctcggag

SEQ ID NO: 11946 - DNA, 120 bp, Homo sapiens
cttcgtgaggagggagcttgcagagcaggatgccaagataggccggtgcagagcagggctttgactttccccaaaacacacagacaaacacgtgtgagtgtgggttttatttttattttt

SEQ ID NO: 11947 - DNA, 120 bp, Homo sapiens
acccgagattccagaccccagatcccagaccccagcccagagggaggcccggtgagggagtggaaaggagattccacgacacaaatgcttatgcggaaacagcctccaggccgggctgcg

SEQ ID NO: 11948 - DNA, 120 bp, Homo sapiens
ctccgagcgggcctcactgctacctggcggttaaaggcctgtccgcctggacagggtggtgcggctttctgtggcagccaagcagcttccacgcggcttctgctgctgtgaggagcccgc

SEQ ID NO: 11949 - DNA, 120 bp, Homo sapiens
gagcgagaccgcaactgcacgcgcacacacacacacacacacacacacacacacacgctaaaagccacacacgctaaaaaccttttaacatgctgagcttgagcctgtggtcccctctaa

SEQ ID NO: 11950 - DNA, 120 bp, Homo sapiens
catcgctggcgccaatacaaggaagccactgttcctggggagggtggcacaagagactccaagacaagccagctgttcagggccgggtggagcctaagagcctaggaactggtgatttta

SEQ ID NO: 11951 - DNA, 120 bp, Homo sapiens
cctcgatccagatgacagactgcagggcagagaagtggggacaggcacttctgagtagaggaacactgtgtgaaggctcagggcagctgtccgtcccctggcaggtgagggagagaggag

SEQ ID NO: 11952 - DNA, 120 bp, Homo sapiens
ctgcggtgtgagccataatctggatgaagacaaagtcacagccaggacagggctgttggggtagagatggcagagggtgagagagacagaggagacatggcggcagagtgagtgagtgtg

SEQ ID NO: 11953 - DNA, 120 bp, Homo sapiens
tgacgagagaaggaaagtccaggatgactcccaaggttgtggcggggacatagtggctagagggacaaggtggcatcattctctgatgtctaacacataggaaggacagggttttggaga

SEQ ID NO: 11954 - DNA, 120 bp, Homo sapiens
aaacggcagcagttaccactgagcccaactcccctgcgaggcacggtgctcagggcactgtgtttgccatccctgagcctcctatggcgcctcctccaacacacacacacacgactgctg

SEQ ID NO: 11955 - DNA, 120 bp, Homo sapiens
catcgttccactgtgacggggaggtcagcagcctgccagtgtcttccagaataaacagtggagtttcattcattatctgctgatcacttcctatgtaatacccccaactctttctttttt

SEQ ID NO: 11956 - DNA, 120 bp, Homo sapiens
acacgtctttttctcctgagcagacgttaagctaaatccccactcactccagacttccggtcctttgaaatggaggtgcccttgtgtgtcttcaatccatgtggagggtagtctggccca

SEQ ID NO: 11957 - DNA, 120 bp, Homo sapiens
aggcgtgagccaccacgcccagccaacacccccaactcttaactgtgatgcttccagttcactgagtaaatagaagcaatccaaagacagctcctaggaccaactcattcagccattcac

SEQ ID NO: 11958 - DNA, 120 bp, Homo sapiens
cagcggcctcaggccacaaggtctccccacctggctccttggggagtgccaagcgttgccagcagccgggctatgctgatcccagacaagtggctcgaccggtcaccactgtccttgagc

SEQ ID NO: 11959 - DNA, 120 bp, Homo sapiens
atccgagccctgagggcatcaggtcctggaggaggaggaagagtcccttctggcttcgggctgggcttgaggacggcagctccaagaccgcttagagcgagacttcagcgctgactgctg

SEQ ID NO: 11960 - DNA, 120 bp, Homo sapiens
ctacgcaccctgtcctgacaatggccgcacagttaggcgctgctccacgcctggaggagggaactgagggcccgaaatcacagaagcaggaactccaggttcgccagtgcggcctgatcc

SEQ ID NO: 11961 - DNA, 120 bp, Homo sapiens
aaacgtagctgctgacaacgacacccacgcgccctctctgggcccagcaggtcagaggtccaggtgggctggctgctccacggccacggctccaaggccaaggtcaaggcactgctgtcc

SEQ ID NO: 11962 - DNA, 120 bp, Homo sapiens
ctccgggagagtccgcgcctgagctcggccgggggcgggattctgctccctgtggccactgggctgaggccccacttccctgctttcggggagccacgtcccccatcacgccatccctcc

SEQ ID NO: 11963 - DNA, 120 bp, Homo sapiens
ccacgcatgaggacatttgtgacgatgccgggacccgaggaatccaggacgacccctctgcagagcccctgtgccccgggaggcaccacacccacggctccagggggtgggggggacggt

SEQ ID NO: 11964 - DNA, 120 bp, Homo sapiens
cagcgccaggccatgaggtctcagcctgcggtcaggccgcgtgcacggaaacccaggctcctgaacggccagccaggagcaaagccggccactgagtacgggagcaggctccggggacac

SEQ ID NO: 11965 - DNA, 120 bp, Homo sapiens
acacgctcccactccttttaggggcccagaggctgtggatgaggagctcgagtatccccctctcagtgtaacctccccacccctcccacatcctccaagtggggcaggagccgcctcacc

SEQ ID NO: 11966 - DNA, 120 bp, Homo sapiens
cagcggagacttgtgggcaggaatgtggccagggtttctagatcatctggtttttcaagagaagccacaagtctgcgtttgagggtggcagcccctggtgttccaaagtcggcaagcaat

SEQ ID NO: 11967 - DNA, 120 bp, Homo sapiens
ccccggggcagcgttgggtgcccagacctcagggccaccccgagagctcctgcatccacctgggggctcgcagctcccccaagctcctggcgggtagcagtcattccaggatctgataaa

SEQ ID NO: 11968 - DNA, 120 bp, Homo sapiens
ccccgaaaatgccccggtcagcccagccacacccgggcaacaccgacagccattctccaccagggccccagcgcccagctgagtgagacccacccggtagcttccggggctgggcccctg

SEQ ID NO: 11969 - DNA, 120 bp, Homo sapiens
tgccgccctgagaagctcctcaccgtcccccgtggccttggaacccccctcacacccatgggttccaggcaccctggcggctgtctgtccccacgaagcctggccctctcacagcgtagg

SEQ ID NO: 11970 - DNA, 120 bp, Homo sapiens
ctgcggtcaccagcgtgggtcccgcgacccattccacccggcccctgggcaccggaagccaggcggcgagcgcagcagaccccagaggcagctttcctcagtttacctgacatgcaaagg

SEQ ID NO: 11971 - DNA, 120 bp, Homo sapiens
agacgcctcctcactccaggctggacgggcagccgacggcggtccggggccatggcgggcagggactttctccgtgaccctccctggctgcccctccccagcaagtgagtcagttccaga

SEQ ID NO: 11972 - DNA, 120 bp, Homo sapiens
ctgcgggaaccccttggtgccctaattctcaggacacacaagctgcacaaggctgcacaagctggcttagggaaggggggcgcggtctgtgagagggcgagctgtaccaagatggccctg

SEQ ID NO: 11973 - DNA, 120 bp, Homo sapiens
aaacgtttactgcccgccaggcccgaaggctcaccggctccccctccccacgccccagcacccagggccttggccccaggagcccacagcggcagagactcccaggaaacgcgagtgagc

SEQ ID NO: 11974 - DNA, 120 bp, Homo sapiens
caccggaggctctgagaggctggtgggctctagagtagaactgccggtccctgagcctttattccctgaggaggaagtggatcattagtgaggatgatgcagtttctccgagggctgtcc

SEQ ID NO: 11975 - DNA, 120 bp, Homo sapiens
tcccgggagccctccccttgggtcatgtgagccctggacttccctggagcaggacacgggattggggtgggggtgggaggatctgggcacacgtgtgcagcagcctcggcccacacagcc

SEQ ID NO: 11976 - DNA, 120 bp, Homo sapiens
ctccgggtggacctgcaggggcctgtttgtgctgtaggcttgacacgtccaggtatctctgtgtgtctgtgtatctcagtgtgagtgtgtgtgtgtgtgcacacttgagaggctgtggct

SEQ ID NO: 11977 - DNA, 120 bp, Homo sapiens
ctgcgtgcagctgagcatgcctacctgggcctcggctctgtacctgatggtgttgctgcagacatgtatgctgagcctgcgaggcctgtgtggcttgtctgcgatgcacgcctgtgttct

SEQ ID NO: 11978 - DNA, 120 bp, Homo sapiens
tcacgtggcactgggtgggaatccctatggatggagttttgtgtgtgtccatgtgtgtgtgcctgggttgcatctctaggatgggttgcgtgtctggtgtgggagctgtgtttgacaaca

SEQ ID NO: 11979 - DNA, 120 bp, Homo sapiens
ctccgcgtgtgtccccgtcctccccctgccctctctccatcccacacataaacaccaacgggcttcccttttccaggaagtcctgcccacaccctcccctccccccagactcccattcct

SEQ ID NO: 11980 - DNA, 120 bp, Homo sapiens
tagcgcgcgtgaccacagacctctgaccctcatagtctcagcagctgtctgcaggccctccacgggaccgcagcctgggagggcaggaggccctgcacctgcggccggtctgacctgctc

SEQ ID NO: 11981 - DNA, 120 bp, Homo sapiens
ctccgtgctgggcgccgccgcgacacgtcccgcggacattcaggagtcccttcagtccctgcgagcgcggacccgggagagagctctcattcaacgctgaggccactggctcacagatct

SEQ ID NO: 11982 - DNA, 120 bp, Homo sapiens
agccgccttccggaacctggcgcacatcactttcaaaacgcagcggggcctggaaccaaggccaaggccgcctctttcggtttcacttggacgcttgttcttgctggggatggaggtcaa

SEQ ID NO: 11983 - DNA, 120 bp, Homo sapiens
ccccgggtcaccctgcgaagtgcttggtcccccccattcccagccctgcagcagcaacaaacgggaaggaagtgggtgacgaggacaggcagagacccctcccacggggccgcccgcatc

SEQ ID NO: 11984 - DNA, 120 bp, Homo sapiens
tgccgtcgcggggcgggcgttgcggccggtgcccagctgcagatccgcaggcgatcgcactcctggcggccccagctttaagcaggcagcggccgatccgccctgctcgagggctcaggg

SEQ ID NO: 11985 - DNA, 120 bp, Homo sapiens
ccccggcggggagggcgggcgcctcggcctccccgccccggaaccctgcaccgcccagagccgccacgcctcccggctgtaggctccgcatctgtaaaatgggccgatgaaccccaaggg

SEQ ID NO: 11986 - DNA, 120 bp, Homo sapiens
ggtcggctcagacccacggactgcagctgcagctgggctagaaggggtggccaggggagccgatttcatccttttccttcctccacgccaaccaggagcctccatctgcctgggaccctt

SEQ ID NO: 11987 - DNA, 120 bp, Homo sapiens
agccgcagaaccacagcactgggtggggtttcagccctggggccaagctcttgtgaggtctgtcatcatcttctcctgttgttttgtttttttgtttgtttgtttgtttggttttttttt

SEQ ID NO: 11988 - DNA, 120 bp, Homo sapiens
ctccgggaagcacgggcacgagtcacaaagcaggtcactgagacagcggcaccaggcccgccagtccgatctgctgaccccagccagggcccagcactcccatgccctgcactgcacgag

SEQ ID NO: 11989 - DNA, 120 bp, Homo sapiens
gtgcgttcttggctatctctctctggtctcctccagggtgctgaataagctcttctctctccattcacccaggagaactctcttctgctgattttctgtggagctagatcaggctgtgac

SEQ ID NO: 11990 - DNA, 120 bp, Homo sapiens
gcccgggacagtgcctgcaggggagatgactcggcaatgactctctgggcccctcctcccaccccatcactcatggggttgtccagggcaagaggcccaggggaatccgcaggagagcca

SEQ ID NO: 11991 - DNA, 120 bp, Homo sapiens
ccacgagtgagttcctcctgttgccaatacatccaggtcctgttctccgctgctgtctctacccaatcccttcccttccttcctcctgccaatcctgctttccctgtttcttgctcctct

SEQ ID NO: 11992 - DNA, 120 bp, Homo sapiens
ctccgcattgcttgactgtctcagatacactctggcctcagggtcttggcactttctgttctccctgcctggaagggtcttccttagtcagatactgaggtcacccattgtgttcaagtt

SEQ ID NO: 11993 - DNA, 120 bp, Homo sapiens
gcacgagtgcggccccaggctgaggcctccgtgggactgagcttcagggccacgctgccatgctgagctctcacggggcctccgcctggaccaccaggcaccctcaggctgactggcccc

SEQ ID NO: 11994 - DNA, 120 bp, Homo sapiens
gtccggagcatatgactcaacggtttcaacgtattctaaggcagaccaccacagcttctaattccaaaacattccgctcccccaaaacacagccgtgtccccaacagcagtcactccccc

SEQ ID NO: 11995 - DNA, 120 bp, Homo sapiens
ccccgcctctacagcccctgcaaccacacgcccacttctcttctgtggactggcctgctctggacacgtgaccacacgtctaccccccatctgtggactgccctgctctgcacacgtcac

SEQ ID NO: 11996 - DNA, 120 bp, Homo sapiens
gaacggagtcacgtgccgtggccttttgcgtctggcgtctctccgcaagcacgtctccgcagagcatccatgccgggcgcacagacgacagatctaatctccgcctcctcacggggccca

SEQ ID NO: 11997 - DNA, 120 bp, Homo sapiens
gggcgagagctgatggggcccacgcatccgaaatccccgtcttggccagaaccccaggtttgccttcgcccgcagggctgagccctctcctgagtcctgggccctgtgacgggtgaccac

SEQ ID NO: 11998 - DNA, 120 bp, Homo sapiens
ccacggggctggcagtctgctcttcgtcccagcccgagggtgcaggtgccggccaacctcccgggggttgggggcgagagtgcagaggcgaggggcaaggctgagagtccacccacactg

SEQ ID NO: 11999 - DNA, 120 bp, Homo sapiens
tgccgggcggacagcgggcaggccaggacgagaaccaggttggggtgacctcgcttttaggcttcaacccggcagctggacacacccagccctccccgtgtgctgtctgaccacacagcc

SEQ ID NO: 12000 - DNA, 120 bp, Homo sapiens
cctcggctgtggaaaaagtgactggaggtattccaggcctgcccgcaacaaatcacacacacatgcacacagggacaggccacacacgtgcacacaacacacgcacacatacaaaacaca

SEQ ID NO: 12001 - DNA, 120 bp, Homo sapiens
acacgtgcacaagacatgcacaagcaggggtgcatgagaacacgcagcacgcacacaacacacacaacggacacgtgcataacggacacaggtgcacaggcaacatgcgggcacacacaa

SEQ ID NO: 12002 - DNA, 120 bp, Homo sapiens
tgccgggggtggggcatgctgccagcctgggcggaccttgtgggcttggtcgctgccagcttttctgctgctgaaccttctattccgcccaccgcttgcttggtcgcgcggtttcggctt

SEQ ID NO: 12003 - DNA, 120 bp, Homo sapiens
tgtcgccagcagcctcatgccaaattcctgattcctggaggacagagcccccctcctgctccaaggccaggagatggcgccactggacagtgagtctgggattcctagcacacacttgtg

SEQ ID NO: 12004 - DNA, 120 bp, Homo sapiens
agtcgggtcactgcactgggaggaagcccgcctgccaagggctgtgtctggaacctgttcatcgcgctccactcagcacagtgagatcgcctcttctgttactcggtctccagggggcgg

SEQ ID NO: 12005 - DNA, 120 bp, Homo sapiens
agccgtatccaatcagggccatggggtggggtcgtgagaactgtggatcaggcgcactgcagggaggtgggtgcgcggcatcttcacccctctaaatgcggctcctactctgtagctgac

SEQ ID NO: 12006 - DNA, 120 bp, Homo sapiens
agacgtgtctgtagcatcctctgtcacactgggacccgtactggcagcaggagccgtagggaggactgggacacctggaagccaggaattggtgagtgtgcggggctgagggtcccgaga

SEQ ID NO: 12007 - DNA, 120 bp, Homo sapiens
aaccggcaggaatagaccgtggcgggacccgggcctcttcgtagttgactctgggttctgagacccaagtccccctggcgcacctcggccctggttcctctcaggccgcagggtggggct

SEQ ID NO: 12008 - DNA, 120 bp, Homo sapiens
ctgcgacggcagccgagacccctagccgtccggtccagtccctgtgcaactgactgtggccccaggcccagcgccctctctggtcagctccgcgcccgctgccccagtcacgcccgctgc

SEQ ID NO: 12009 - DNA, 120 bp, Homo sapiens
ctccgtgtctccccagattgtacgggggccactagagggtcatgggggaaatcctgcctcgagtatggggttcgtgtgagaggagctgtaggctgtggggtccccagttccctctttctc

SEQ ID NO: 12010 - DNA, 120 bp, Homo sapiens
ccccgccatgctcccggcttggctgtgttcggcccagggctgggccgtgtcataaagagttttgcagtgtatctgcagggtggatgcttgctgcgctcgggctggagcctgagggggctt

SEQ ID NO: 12011 - DNA, 120 bp, Homo sapiens
cagcgggaagtggtgggcaggggccggcctgagaaggggggtacgccaggcaggttgggatgtgaggacccagtgcacagggtccacccccgggcccgagggtcccagaatagtgggggc

SEQ ID NO: 12012 - DNA, 120 bp, Homo sapiens
ccccgagagcacagtgtatgggggtccccggggggtacagtgtctgggggccccccaggaggatgcagcatgtgggggccccccaggagggtacagcgtgtgtggggcccccaggatcac

SEQ ID NO: 12013 - DNA, 120 bp, Homo sapiens
ccacgaccatcgcgtctggtctgttggaacgggaggtgctgctgggtaccctggtcactagggtgtgctgggaggtgggggcccctcatggtgcccatccttggggcctggctgcaattt

SEQ ID NO: 12014 - DNA, 120 bp, Homo sapiens
agacgggcagccaggcaaatcccaggcaggagggccagttagggcagggccagcccaggcaggttgcgagagtccctactgggacgtggaccacacgctgacccccacggccgcccctgc

SEQ ID NO: 12015 - DNA, 120 bp, Homo sapiens
ctccgggagtcacgttttcccagcctcccagtggacgtgggagccgcaggggatggactggacgcggttgagtccagctcagcccctgctccaggctagggctctctgcccacccatgct

SEQ ID NO: 12016 - DNA, 120 bp, Homo sapiens
agacgtgagggtcacccgccataccagggctgccccaggaaccctgctctgccccagccccacgccccattcccatcccaccgacgtgggccctgggcttcagggaagttgcccttgggt

SEQ ID NO: 12017 - DNA, 120 bp, Homo sapiens
ggccggagtggtcacagcagcttctgagaggagtctgcccagccttgggagcatgggcggggcgggggtgggagagggcctgggaccacagcagaacccttcaggcctcggactccacca

SEQ ID NO: 12018 - DNA, 120 bp, Homo sapiens
cagcgccatcctcggggggcccctcctccccacccaccgccctacccttacccagtctctccctgcttccctcctctggtccatgctggagaggtggccccagtgagtccgcctctggga

SEQ ID NO: 12019 - DNA, 120 bp, Homo sapiens
tgccgctggaggcaggcgagcgcgtgtccacggggcctggagagcgctccctgggccgcctaggggggggcgaaggggggcaagggcccacaggtccacccctagcacctccatctactg

SEQ ID NO: 12020 - DNA, 120 bp, Homo sapiens
tgccgagagcagggggcgggctggccagaaaggggcgggggtgcgggaaggccacggcgtcgcccgcccgggcaatgtactggatgaagtcctcctggggggcatccccctcctcctgct

SEQ ID NO: 12021 - DNA, 120 bp, Homo sapiens
ctccgtgctctcactggctgcccgctgccgctggaagtggtgccgcttgggggaacctgcgcacgggatgtgccgtaagcgtcagccggcatgtgcctccacccgctccacacacacaca

SEQ ID NO: 12022 - DNA, 120 bp, Homo sapiens
ccccgccacacacacacaatgcctgtgcccccccgccacacacaacgcctgtggacccccaccacacacacacaacgtgtgccccccacacatacaacgcctgggccccccccacacaca

SEQ ID NO: 12023 - DNA, 120 bp, Homo sapiens
gaacgcctgtggcccccatacacacacatagaacgcctgtgccccccaccacagaacgcctgtggccccctcacacacacacgcctgtgccccccccacagaacgcctgtgcacccccca

SEQ ID NO: 12024 - DNA, 120 bp, Homo sapiens
ggccgggcacgccaagaccccaggctcacggccccttgtcctgtgcttgggtgcagccgccacactctgctccgaaagtgctcacctccgggagtggccgtccccctccctaaaagagcc

SEQ ID NO: 12025 - DNA, 120 bp, Homo sapiens
agacggagccgcccgggaagcttctccagcctgtctgggctacagagccttgtgtggctagaacccaaggccctcactccaggggtgctgagagagcctgtccagagggcctgcctcagc

SEQ ID NO: 12026 - DNA, 120 bp, Homo sapiens
tcacgccctccactgaagagacacccggccagccctgggccttcgacctgggacgtctgtagtggggtcaggggatgagacctggagctcagaacagacgggctgagctccctggaggag

SEQ ID NO: 12027 - DNA, 120 bp, Homo sapiens
ggacgctagagcactgggtgggacagacctttctggaagagcaagattttaacaggaagaaaaagtggaaggacttcccagcaggacccagcctgaacaaaggtcaggtggtgtggcccg

SEQ ID NO: 12028 - DNA, 120 bp, Homo sapiens
ccgcgtggcccgctggggaatcgggggaggagggcacgcaggagacacaggacagagcccaccacgtctcagagctgtgggacggtggtgggtccggtccccaccccaccttgctggggc

SEQ ID NO: 12029 - DNA, 120 bp, Homo sapiens
tcacggtccctgccaggagtttgggtaatgcctcacacagggaccttcgggtccaagggctgttggtgcttgccctgcagttccctctcctgcactgggcctggtgaatgacactaattc

SEQ ID NO: 12030 - DNA, 120 bp, Homo sapiens
agacgtacaacacgatctgggcatcgccagcaaagtccagccagcgtttgatgacagcctaccctccacaagctcagagtctggtgagggaggctgtggcatgaataagggcaaaaacag

SEQ ID NO: 12031 - DNA, 120 bp, Homo sapiens
actcggcgttccctgaacagatcagaccccgggtctttgcacaagctgtgcccccgggcagcggccctcccctgcctgcaggattcgtgcgtggagactgatttgctgtcggccggggct

SEQ ID NO: 12032 - DNA, 120 bp, Homo sapiens
catcggtccacctactatgctcccggcacccttagggctgaggtgtagggacttactccatccccagggaacagcgtgggtccggagaggcgactcccaggagggccccagggaggtcgc

SEQ ID NO: 12033 - DNA, 120 bp, Homo sapiens
gcccgagcagctttggactttggccagcgcccctctgaaactctgccccggcccccgcagggagactggagttggccgagcccgatttgggacgcgtgcgtcggggttggtgaggctgcg

SEQ ID NO: 12034 - DNA, 120 bp, Homo sapiens
tagcgctggaaccgggcaggtgagaggcccgggacccagggccgggccgggtggagcgcgtgggggcgcgggaggcagggtgcgcccccgcccctcggagaccccaggccgggccacgcg

SEQ ID NO: 12035 - DNA, 120 bp, Homo sapiens
agccgaggccctgaaagacggtgactcacccaaggccacccggaagttgggcagagtccagggtgtcccacctggggccggcccgggggaagccagggacagccctgggaggggcaggaa

SEQ ID NO: 12036 - DNA, 120 bp, Homo sapiens
ggccgacggcagctgcactctgtaccagggccacccacgcccacggtgacggaagcccaggtggggctgaccctgcccggcccatctttttcctattttgcttcatttctagggccctgc

SEQ ID NO: 12037 - DNA, 120 bp, Homo sapiens
tcccggggactgatttcccttcaggtcccacccaggtcctgagcaggaggaaaagctccagtcctcagtcaggggggacatctcttccgtccctggaaaagccaggtgtgggtgctgtca

SEQ ID NO: 12038 - DNA, 120 bp, Homo sapiens
ggacgggcggcctcagccccacgctgggcttcaggacccgggctgcctgctcatccggccagcctgggcctccccgggagcttctccaccctggaagagagatgcagacgggtgcaggcg

SEQ ID NO: 12039 - DNA, 120 bp, Homo sapiens
ccacggggtcctggctgccggccacaccactgcctcagtttccagtcctggaaggcagcccagcccacccccaccccagttttgggtgagattcctaattagtcgcttagctattagcgt

SEQ ID NO: 12040 - DNA, 120 bp, Homo sapiens
gcccgattggagctaattagctccaggccgcttgctggaagctggtgacagccaggaggcccgggtgggcaggaggggagccctgctgggtgagcctctgcctggggcctggagggctgc

SEQ ID NO: 12041 - DNA, 120 bp, Homo sapiens
aggcgtggactttggcacccgcaggttgagtgagtgtggggggaaggtgtggcccggcagagggaacccggaggagtaaaaactgccaccgctgctctgtctgggaaaaatcccaaatca

SEQ ID NO: 12042 - DNA, 120 bp, Homo sapiens
tgccgctccggggaggatttgcatatcgaggcttcatcactaatggaggaagcgaaggctttgtctgcctctccccaggtgcggttttggggtgggggccccctcccccctgcaggcgcc

SEQ ID NO: 12043 - DNA, 120 bp, Homo sapiens
caacgcgcccacctcgggcttgcccgccaacttggaaccgggaatgccaacacagcaaggccgctgctattttagagacgcaaagggaaaaatacggccccactccggcaggcagagccg

SEQ ID NO: 12044 - DNA, 120 bp, Homo sapiens
cctcgcctcttgacctttttaattcactcattattgagcaccactgtatgcagggcctgtgtagggccctggggaggggacagaggaggccaacatcaggatccgggattcagacagcaa

SEQ ID NO: 12045 - DNA, 120 bp, Homo sapiens
gggcgagaaggagccaggtttctcatggagcagccaatgcaaagggctgggggccacctggagcctggtgtgtccttcgggcagctggtgtggctggagcaggggatgccaagcctgctg

SEQ ID NO: 12046 - DNA, 120 bp, Homo sapiens
ggccgcagggaggagtttggtttttctcctgagggcactggggagccacagcagagtttagagcagaagaaggacacaatttgtgccctgtgcccgtggtgagcggcgagcagggagggc

SEQ ID NO: 12047 - DNA, 120 bp, Homo sapiens
aggcgggtaaggacctcagagcggaattctgccacagtgaagctttggaggaaatctttcttccttttctcttcttttcccatcacgggttgagaaattggagggaggggcattgctggg

SEQ ID NO: 12048 - DNA, 120 bp, Homo sapiens
gcccgcgtgtgcggggggttctggggcctgctgcctgcctgagccagccccttttcccgccagaggcctctcgtcagtccccgggggggcccagtggtgaccttgggcctcggggaacat

SEQ ID NO: 12049 - DNA, 120 bp, Homo sapiens
cctcggcaagtgcccgggggatccgccctccggtccccgtgccagtttccacagcgggacaggggggtcccgggggccgggagtccgcagccccgaagacctacgctgccgccagccaca

SEQ ID NO: 12050 - DNA, 120 bp, Homo sapiens
gtccgaccctcctgggtcccactttacagatggaggaactgaggcggtgactctaatcttcgcccggcctgagtcgcggggctggaacccgcagcgtttgccgattcccagggcccgagc

SEQ ID NO: 12051 - DNA, 120 bp, Homo sapiens
gagcgctccggcgagtgtgtgtgtaacgccctctccctggacgcctcgagtttaggaaacggcggagccgcccggattgaaattctcggcccgtgcacgcccggcggagaaatccatgac

SEQ ID NO: 12052 - DNA, 120 bp, Homo sapiens
tgacgcattgtttagacagacgcctttaaaccgcgccgcggcggggggcggcggccgggggcgcctgcgcggggaaggtcaccctttttttctgcacaaaggtcagccgtagaccgttgc

SEQ ID NO: 12053 - DNA, 120 bp, Homo sapiens
caacggccggcgtaaagatggaggcttaaggagaacagacagttcccctcccgaagatgccccgtgcaaagggcccggccgtgggcttgggaggctcagggggtgtgaggagctgagcgc

SEQ ID NO: 12054 - DNA, 120 bp, Homo sapiens
cgccggagcagagagagcggagagtggggcgctgggatggctctgggaggccaggaaggaatgcgggggcctggggggcagatcttggctcaggccctgccaggctgtcttcaaaccaat

SEQ ID NO: 12055 - DNA, 120 bp, Homo sapiens
caacgtctgcccttcagggtaggcatctccaggctggtctggtgtgggaaccgctgtgttaaacatgcagactccagccaggcgccgtggctcacaccaacggggcacagtggctcacac

SEQ ID NO: 12056 - DNA, 120 bp, Homo sapiens
caacggggcacagtggctcacacccgccgggcacggtggttcacaccagccgggcacggtggctcacaccagccgggcacagtggctcacacccgccgggcacagtggttcacaccagcc

SEQ ID NO: 12057 - DNA, 120 bp, Homo sapiens
agccgggcacagtggctcaaacccgctgggcacagtggctcacaccaacagggcacagtggcccacgccagccgggcacggtggctcacgctaacagggcagagtggttcacgctagccg

SEQ ID NO: 12058 - DNA, 120 bp, Homo sapiens
atgcgtttgacaaggcgaggaggctgagacgtgcattaggcactcagccgcccccgccgcccatggagggcgcgactgctgctccctcttgggggtgatccgtcatttcatccacggggg

SEQ ID NO: 12059 - DNA, 120 bp, Homo sapiens
cagcgttgatttctgagctgagatgtggcgaccaggcccggagcagggctgtattcacagtcgtcgaggggtctgccggccgtggccctgctatggaaccttgggtggggctggggaaca

SEQ ID NO: 12060 - DNA, 120 bp, Homo sapiens
gagcgagactccgtctcaaaaaaaaacaacaacaaaaaaagacaggccctcctgccaaggagaacgccagctgccggccgcagtcatttgtctgtcacttggatgcatgcagagcggggt

SEQ ID NO: 12061 - DNA, 120 bp, Homo sapiens
ctccggagggtggctggtgccggaacctgctgccacttacagggccctggtccccgtggatgctccagcttctccttagagctcccggctaagatggacccgcaagtgtgttttgttgtt

SEQ ID NO: 12062 - DNA, 120 bp, Homo sapiens
ggacgctgctcagcaccctgcagcgcctaggacagccccacctcagagaacagtctggccccgacgtccacagggccgagtgggagagactctgctctgaaccgaatggactctgttaaa

SEQ ID NO: 12063 - DNA, 120 bp, Homo sapiens
gggcgacagggcgagactctgtaccagaaaaaaccgccaccaaaaaaaaaacttaaaatttttgagaaatgctcttgtgggtttgggtcttgccttttcttctctgcttttagtgatctg

SEQ ID NO: 12064 - DNA, 120 bp, Homo sapiens
tcccgcactgtgtgtgagtggaccgcagcgcgcagccacatgccctggctgccatgggccagaccgcctccacctcccccgcccgcctggcctgtcctgagtgcatttccctgcactgtg

SEQ ID NO: 12065 - DNA, 120 bp, Homo sapiens
tgtcgtcactgcacagccagtcaccgcggtctcagtcatcggcgcggatggctatgctggggtcccagggtggccgcagcagtcagggtcactgtgggagccctggggtggagtgacaaa

SEQ ID NO: 12066 - DNA, 120 bp, Homo sapiens
aaccgcattgtcctgtgcccgccatggcagaagcgcagcctttgtatggaggcccaaccgcgctcccgtctggagaagcggcttccggggtgtggctgccgggtcggctctggtccacag

SEQ ID NO: 12067 - DNA, 120 bp, Homo sapiens
gcacggtgccggggctgcaggttgttgagggctgtgactccgtggggctcagccaggctccagcagggtcagacgtgctgttaagagcaaagccacagacgatgacttgtccattctcag

SEQ ID NO: 12068 - DNA, 120 bp, Homo sapiens
gcccggtggcctgggagctgctttctccccactggctgggctgcatctggccctggctggaggccttgctttgaggggctgtgaccctcttcccccaggccctccccagccgacgacagc

SEQ ID NO: 12069 - DNA, 120 bp, Homo sapiens
caccggagaggagatcggaacacgattgtctcagatgcagggcgctgtgcgggacgaagccgcaaggactctcgtatcgggcccttgggactcgggaggtgccagaggcggcggctgctc

SEQ ID NO: 12070 - DNA, 120 bp, Homo sapiens
cctcggtgttcactgacctttgtttcacttgcctctgctcgactccgagagcaggaaacccggccgtggcctggcagctccgcctcccatgcccgcacgctggggtctgtcttgtctgga

SEQ ID NO: 12071 - DNA, 120 bp, Homo sapiens
agccgagatcacgccactgcactccagccggaatgacgatgagcacctgtgttgcagcatagccctgcccagcaggtggaaccagaatgtgccagaggcccccttgtgcgtcccaccccg

SEQ ID NO: 12072 - DNA, 120 bp, Homo sapiens
ggccgctgggacaggccctgcctgggtgcttccctcagtaatggggggtcgtgggtgctctgggttgtcagccgggcagttgagtgggagtcaggggtgctgacctcacaggcacggcca

SEQ ID NO: 12073 - DNA, 120 bp, Homo sapiens
ttccggggccctgaggatgccagcatgggtggtcctgggctcgccctctccacagcatggctggcgttcctcgactgccgccggagccccgggaagacaggcttgaccccgtgcacacac

SEQ ID NO: 12074 - DNA, 120 bp, Homo sapiens
acacgcagggagacgccaggagccctgccctcagaagcctgcacgctttgcctctcttctggcagctagctaaccctgcatccccacctgagcctgtccctggcactgaggacactggac

SEQ ID NO: 12075 - DNA, 120 bp, Homo sapiens
tcccgcctctaccatcgagatgaccacagatgtccccagacgtggcctggtgctccgtggaaaactgctgtccacaaaccatggcgtccttcccctgacccccgccccttccctctctgg

SEQ ID NO: 12076 - DNA, 120 bp, Homo sapiens
cagcgggtgtctcagaacctgggtgcgtgcttctgccagccccccaaccacctggcccacactccccaacccccttcactgagccgcagagacccccatgtccctgccaatgctttttcc

SEQ ID NO: 12077 - DNA, 120 bp, Homo sapiens
ccacggtaggcaggcttggaggtggcgctcatgtgggacaggggacagagtcctgttcttggccaccctgtgctgcgtgcggcattagctcatgcgcagagagcccagccctgagtcccg

SEQ ID NO: 12078 - DNA, 120 bp, Homo sapiens
aagcgagaggcacatcctggtgcctctcaaaagtggaggaacaggctctgactttggattccgcttccctggaaagggcgttgatttgttcagcgttctgcacggttcaggtcaccccgg

SEQ ID NO: 12079 - DNA, 120 bp, Homo sapiens
tggcgtcttcccctgcagtgcagaccaatggggcaagttgcgagtgtggactgtactcctccctccttgcagactgagctcctccctccctggggaccgcgctcctccctccctgcggac

SEQ ID NO: 12080 - DNA, 120 bp, Homo sapiens
ctgcgctcctccctccttggggaccgtgctcctccctccctccctgcggaccgcgctcctccctccctggggaccgcgctcctccctccctgcggaccgcgctcggccctccctggggac

SEQ ID NO: 12081 - DNA, 120 bp, Homo sapiens
gaccgcgcccctccctcccagcggaccgcgctcctccctccctggggacctcgctcctccctccctccctgcggactgtgctgctccctccctgcggactgtgcttctccctcccttgga

SEQ ID NO: 12082 - DNA, 120 bp, Homo sapiens
ggccgccctttcccaggccctgcagtggccttgtcctttctcacctgtttccactcctgctgtccccgttgggccctgggcttcgtcctcttgctcaagccctttgttctgaacctgcgt

SEQ ID NO: 12083 - DNA, 120 bp, Homo sapiens
agccgggactgggggatccccagcaaagagctctggcttggggctcagaaagagggtcatcgggtcctcgtgggatgcccgggctctgggccacctcccctccctccgcccagcctccct

SEQ ID NO: 12084 - DNA, 120 bp, Homo sapiens
ctccgtccagggcagccccgggccctgctccccactgctaagtgtgtctgctgagcgctggcccccattgagtcctgagggctggggccgggggccgggttagtgaggtcagcgtcttgt

SEQ ID NO: 12085 - DNA, 120 bp, Homo sapiens
gtccgagaggtccctgtgacagcccgggatgagccacgggtggagggcagtggggccttgcccaggggaggaccccactcttcctgcagggacctcccctgcgccggctcccagtccctg

SEQ ID NO: 12086 - DNA, 120 bp, Homo sapiens
ctgcgcccacccagggctgtcagcctccaccttcagaggccggcccgggaaacccttccaaagccgagccggctgcgctgtgcacgcggtcacgcgggctccggctgcgggaagcgagac

SEQ ID NO: 12087 - DNA, 120 bp, Homo sapiens
ctacggccgaggccctgctctacggcatcctgcagctgcagaggaagatcaagcgggagcggaggctgcagatctggtaccgcaggtagcgccgccgccgccgccgccggagcctgtcgc

SEQ ID NO: 12088 - DNA, 120 bp, Homo sapiens
cgccgtcctgtccccagcctgcttgtgtcccgtgaggttgtcaataaacctgccctcgggctgccgcctcccagtgtggtgtgtgggtgaaaggagccggggacgtggggggatcacaga

SEQ ID NO: 12089 - DNA, 120 bp, Homo sapiens
ctgcggcgtgccgcccttgggctgggggcggttggagcagagccgggggcagagacgggcactgtgcctgccagcagggtcctttcccgctgctctgcgaagaccctggggtggacatcg

SEQ ID NO: 12090 - DNA, 120 bp, Homo sapiens
tcccgagcgtggaaggccgcacacccatccttcctgggagggccctgactcagtctccctctatgccctaaggcaggctgagcaaagcccgtctgagcctgccccggggttcagagtgtg

SEQ ID NO: 12091 - DNA, 120 bp, Homo sapiens
ctgcgtgtggacttgggcaggtcgccactgccctctggcccatttccaggcggtggcatgggctggttagctgagggctggggccagggagatggggaggtggcacctggtccaaaccaa

SEQ ID NO: 12092 - DNA, 120 bp, Homo sapiens
tttcggggaaccctgactccaccccaccagccccttcatccgtcgaagtccaggcctcatcagggacgtgcattcattcagcaaacgtcccatcttcctgtgttcagcgccagatgccgc

SEQ ID NO: 12093 - DNA, 120 bp, Homo sapiens
cgccggtgctgggacctcgctctgcaggcccaccctgcatgcctgctgcacaccagggacagttctggggatcggcagttatgacgggccaggctgggatggggcccgggagactggggc

SEQ ID NO: 12094 - DNA, 120 bp, Homo sapiens
gggcgggggtggggaagaggcacccagcccagccgggtcaagcagcctggaagcaggacatgctggggtggggacagggcgtcagccagcggaacagcagccctgggccagagtgcagag

SEQ ID NO: 12095 - DNA, 120 bp, Homo sapiens
agccggccttctctcagggcaaggaggtcagtggagggggcgagcaggacggccccaggaagatgggcgggctgcacacatgtggatgcagggggcaaagtgggaggcatggggtgacca

SEQ ID NO: 12096 - DNA, 120 bp, Homo sapiens
acccgggatgttcctggggctgggcaggtggggctgcccctgcaatgggcccagcaggggcgatgcctcctgagaggaaaccacatctggaaatgggaggcttggggaacggggctgtca

SEQ ID NO: 12097 - DNA, 120 bp, Homo sapiens
ccacgcccctcctggggcgggaggaggggagctcagggtgtgctggggcgggcagagaagtgggttcctgcctggggtgggcaaagatccttgtcccacccacaccccggccgtggtgct

SEQ ID NO: 12098 - DNA, 120 bp, Homo sapiens
tagcggcagtcggccggtgggaccagcgccatcacctccgtacggatgttctccctccggaagccggcctccagcagcgcgggcacctgcgtctcctggtcggggatggcaccaggtcac

SEQ ID NO: 12099 - DNA, 120 bp, Homo sapiens
tcacgtgcaccctggcgcccacccctcattgaagagtgtttacagatggcaaggcccgggtgggcggctgcagctcccgtgggcacgtggcagggcagccctggaagcccaggtgtgaac

SEQ ID NO: 12100 - DNA, 120 bp, Homo sapiens
gaacgggaatctccagctccccagtgcgggcagcagcttcccggctgtcctggaaccccagccccacactcgagccacccccgggcacctactccacagttctccagaccttgccagtgt

SEQ ID NO: 12101 - DNA, 120 bp, Homo sapiens
tggcgggtggagccaaagaatcacaccagaaaaagaacacaggccactagttcccattttggaagaaaagctgccccaggggccacaggcacccagccggctctcacaacagcagcccag

SEQ ID NO: 12102 - DNA, 120 bp, Homo sapiens
ggccgcctccaccaggcagagggaacagcgagacaagcactgctgaaccagcaaagacagccaggtggaggcagctggagggaggggaacacgcagggcttaggctgaaccacagggcac

SEQ ID NO: 12103 - DNA, 120 bp, Homo sapiens
gggcgcacctcaaacatgatggtgatgtctgagtacttggacttcatcagctccccccaggaggtgaggttgcagtaggtgaggacgccccccggcttcagcaggcgaaaggcgtggttc

SEQ ID NO: 12104 - DNA, 120 bp, Homo sapiens
ggacggaggtgggggtgtgggcagaggggcttccccgagggcctcccgcatcccagcaagtcagagagaaccaccttgatgaagttgaactggtgtgtgtgccaggtctcctccgagagt

SEQ ID NO: 12105 - DNA, 120 bp, Homo sapiens
gtacgtgtcgtacaggatccctgcacggagaacagaagcccacgcggtcagggccgggctcagcgcctcacccagcctcacccggctcatcccccagcgggtggaggtgcagtgagacgg

SEQ ID NO: 12106 - DNA, 120 bp, Homo sapiens
ggccgtgggtagaggtggggctcccacacaggcttgagaaccccgagatcgcctccagggcccctccgtgagcatgcccatccccggtgctccgccatcccacagccaggcccacaccca

SEQ ID NO: 12107 - DNA, 120 bp, Homo sapiens
atacgtcccctcacccctcaccatcaaagtgaccgtcaggcagggtgggtgccacatcctcccacaggcctttcaaggggatgaccttgcagaggggaaaagaaaaagagaggacagggt

SEQ ID NO: 12108 - DNA, 120 bp, Homo sapiens
gagcggccagggggactcccgagagagaagaccacctcctccacctctgacagccccaggcccccaacccccaggaagcagtgccctcaccccaaggagtgggggtcctggagggcctgc

SEQ ID NO: 12109 - DNA, 120 bp, Homo sapiens
ctgcgggcagaggggcaccttgtgtgtctgccgtggggcccagtcccggagccgctggaagacgccgtcattgcactcgatgatccaatgctcatcaatgggcgcctcctgcacctttga

SEQ ID NO: 12110 - DNA, 120 bp, Homo sapiens
tgacgctgcgatggccatgccaaagcccacctccaggacccggccccctgggcagacacagggcgcctggcatcactaggtggggcgggcttaggaggctgcctggaggaggggcacagg

SEQ ID NO: 12111 - DNA, 120 bp, Homo sapiens
gggcgcagggctgggctgggggtctgcctggaggggggcgtgcagagcagggctggagaggctgcctggaggagggggtgtggggcaatgctggggaggctgcctggaggagggggtgcg

SEQ ID NO: 12112 - DNA, 120 bp, Homo sapiens
ggacgggagggcaccctgggccagcatggacagaggcgggcggaacacagtagtcctgagcgggaacagcgtgggccctggccagcggccagagagaggatgaccagccagggaggccga

SEQ ID NO: 12113 - DNA, 120 bp, Homo sapiens
agacggccgcttttggggccaggcctgtggggaggcgagagccttggactttgagcccagcccacgctgtttgtcccgggtcccttatctctcgggttagttacttttctctccccctcc

SEQ ID NO: 12114 - DNA, 120 bp, Homo sapiens
atccgaaagttggatttgcaagagtggccaggcaagacctggacttgagactatctgggaggggaaggactggtccccagtgggccacacatgggccccccgctcaatcctgattggcac

SEQ ID NO: 12115 - DNA, 120 bp, Homo sapiens
ggacgtgcccattttcagggtgggaacactgaggcccgacccctggacggggcctgtgtggggccagggagtcctttcttagcagcccttagcgtctgacgccaggcaggccagggccac

SEQ ID NO: 12116 - DNA, 120 bp, Homo sapiens
ttccgggacttcccggaggcttctgtctgtagaccagggagaaggtgttcgccggtggctcctgagtggtagtaaaagacacatggacacaggaagctttagcgttagaagctgctctca

SEQ ID NO: 12117 - DNA, 120 bp, Homo sapiens
ggccgcgcccatcatgaggcagctagctgggaacaagccccagggggccctccctgaggaaagcataataggaatgggtgctgggcctcacttcgcttttgcagagctttactggcaccc

SEQ ID NO: 12118 - DNA, 120 bp, Homo sapiens
agacgctgaaaatttactgtctggacctttacgggaagtttcctgtccataaaagccctccctgcacacgcccctgctggctagcacgtggctgctaatgggtacttcccttggttttct

SEQ ID NO: 12119 - DNA, 120 bp, Homo sapiens
tggcgtctcccactgagcgtgacatcctcaaggtgcacctacgccatagtctgtttgtttcagagcctcattccttttgagacagacagggtcttgctctgttgcccatgctggagtgca

SEQ ID NO: 12120 - DNA, 120 bp, Homo sapiens
ctgcgtgacatcccatcgtgtgcacagggcacgctgggctgacccacttgtcctcctatggatgctctagctgccccccactcctggctctgtgaatcgtgctgtggtgaacctggatgt

SEQ ID NO: 12121 - DNA, 120 bp, Homo sapiens
gtacgcgtttcaggctggaagttttctgagatatgtccctaactcacttccccaaagggtgtctccactgacccactcctgctctgagaacagtcacatttgcctctgttgtctttgaag

SEQ ID NO: 12122 - DNA, 120 bp, Homo sapiens
aggcgccatctccccgttgatttcccccttttgtaatggggaagcggggcgagtgaagagggtgggtgtggccgtcacccatccctacagccctgtctgtgctggggatgctgctctcca

SEQ ID NO: 12123 - DNA, 120 bp, Homo sapiens
acccgggacccgctgaacctggcgctgcgccgctacgcgggcatgaccctcaccaacctcacctttggggacgttgccaacaaggtgcccgggggcagtgggtgggctggcactttcctc

SEQ ID NO: 12124 - DNA, 120 bp, Homo sapiens
cctcgaaacagccctgagagctggggccacttgtccccaacttacagacgggtagactgaggcccagagagtgcggtgtggggggacgggagcgcgtgctgaacctccccacctggcggt

SEQ ID NO: 12125 - DNA, 120 bp, Homo sapiens
tcacgcccaccctgttgctgcctctgcagaaaatggccctcattgtagagggggcctcagggccccgaggctgggtgtctgcccctgtctgggcctcagtttcccgacctgagcatgggg

SEQ ID NO: 12126 - DNA, 120 bp, Homo sapiens
aaccgtccccggtagtggtcaggatcagcaggggtctgagtttgcagctgcagcacacagacggggctgggaggtgaggggcacagtctcccttgtgtcccaaccccgtgaccccggctg

SEQ ID NO: 12127 - DNA, 120 bp, Homo sapiens
gtgcgcgccgcggctgcatggaggccatcgtggcccagctggcctccgacagtgaggagctccaccaggtacagggcggggtgctgggaaagccttccagggtgtccctgataggcagag

SEQ ID NO: 12128 - DNA, 120 bp, Homo sapiens
cagcggtgtggtgggctggcaggggtgtcccgtccgactctctgcagactcacatttgctggggggtttggggggcctggaccctagtcccaccacacttgcccctcaccccacccaggt

SEQ ID NO: 12129 - DNA, 120 bp, Homo sapiens
cttcggaacttgtcctggagggccgacatcaacagcaagaaggtgctgagggaggcgggcagcgtgactgccctggtgcagtgtgtcctgcgggccaccaaggtgggcacccggtgggcg

SEQ ID NO: 12130 - DNA, 120 bp, Homo sapiens
tggcggcagcgggcgagctctccgacttgggaggaaatcaagttgaacagctcactgcttagcgggtggtccagcctcagaccggctggggctcactcctcatgtcactgctctttgaaa

SEQ ID NO: 12131 - DNA, 120 bp, Homo sapiens
tgccggcagaccacctgagcaaggttcccgagaagctggcggctgccccgctgtctgtggccagcaaggcactgcagaaactggcggcgcaagaggggccactctcgctgtcccgatgca

SEQ ID NO: 12132 - DNA, 120 bp, Homo sapiens
cctcgctgtcctcggccggccgcccaggccccagcgagggtggtgacctggatgacagtgactcctccctggaggggctggaggaggccggccccagcgaggctgagctggacagcacgt

SEQ ID NO: 12133 - DNA, 120 bp, Homo sapiens
tggcgggcgcccggggccacctcgctgcccgtagccattccggctccccggcgtaaccgaggccggggcctgggggtggaagacgccacgccgtccagctcgtcggagaactacgtgcag

SEQ ID NO: 12134 - DNA, 120 bp, Homo sapiens
caccgcttgtgctgagccgctgcagctctgtgagctcgctgggcagcttcgagagcccgtccatcgccagctccatccccagtgaaccttgcagcgggcagggcagcggcaccatcagcc

SEQ ID NO: 12135 - DNA, 120 bp, Homo sapiens
tagcgagctgcccgacagccccggacagaccatgcctcccagccggagcaagacgccaccgctggcgcccgcgccacagggtccccccgaggccacccagttcagcctgcagtgggagag

SEQ ID NO: 12136 - DNA, 120 bp, Homo sapiens
ctacgtgaagcgcttcctggacatcgccgactgccgggagcgctgccggctgccatctgagctggacgcaggcagcgtgcgctttaccgtggagaagccagacgagaacttctcgtgcgc

SEQ ID NO: 12137 - DNA, 120 bp, Homo sapiens
cagcgcgctggccttgcacgagcactacgtgcagcaggacgtggagctgcggctgctgccctcggcctgccccgagcgcggcgggggcgccgggggcgccggcctccactttgcagggca

SEQ ID NO: 12138 - DNA, 120 bp, Homo sapiens
caccggcacaaggcgggaggcgccggccgcagcgcggagcagtctcggggcgcgggcaagaacagagcagggctggagctgcccctgggccggcccccgagcgcccccgcagacaaggac

SEQ ID NO: 12139 - DNA, 120 bp, Homo sapiens
ggacggctcaaagcccggccggacccgcggggacggggcgctccagtcgctgtgcctcacgacgcccactgaggaggccgtgtactgcttctacggcaacgactcggacgaggagccccc

SEQ ID NO: 12140 - DNA, 120 bp, Homo sapiens
ccccggcggccgcgcccacgccaacccaccggcgcacatcggccatccctcgcgcttttacgcgggagcgtccgcagggccggaaggaggcccctgccccgtccaaggctgcaccagctg

SEQ ID NO: 12141 - DNA, 120 bp, Homo sapiens
ccccgccgcccgcccggacccagcccagcctcattgctgacgagaccccgccctgctactccctgagctcctccgccagctccctcagcgagcccgagccctcggagccgccggccgtcc

SEQ ID NO: 12142 - DNA, 120 bp, Homo sapiens
ccacgaggccgggagcccgcggtcaccaaggacccgggcccaggaggcggacgcgacagctcgcccagcccgcgggccgcggaggagcttctgcagcggtgcatcagctcggccctgccc

SEQ ID NO: 12143 - DNA, 120 bp, Homo sapiens
aggcgccggccccccgtgtctggcctgcggcgccgcaagccccgagccacccggctggatgagcggcccgcagaggggtcccgggaacgcggcgaggaggcagcgggctcggaccgggcc

SEQ ID NO: 12144 - DNA, 120 bp, Homo sapiens
ctccgacctggatagcgtggagtggcgcgccatccaggagggcgccaattcaattgtcacgtggctgcaccaggcagcagctgccacgcgggaggcctcgtccgagtccgactccatcct

SEQ ID NO: 12145 - DNA, 120 bp, Homo sapiens
cttcgtatccgggctgtcagtgggatccaccctacagccccccaagcacaggaagggacgacaggcggagggagaaatgggcagtgcccggcggccagagaaaaggggcgcagcctcagt

SEQ ID NO: 12146 - DNA, 120 bp, Homo sapiens
cagcgggagcccccgttcccctgcaggccccgagaagccacgtggcacacagaagaccacgcccggggtgccagctgtgctccggggacgaacagtgatctacgtccccagcccggcacc

SEQ ID NO: 12147 - DNA, 120 bp, Homo sapiens
ccccgtgcccagcccaaagggacccccggcccccgcgccacaccgcggaaggtggcgcccccttgcctggcacagcccgcggctccagccaaagtcccgagccccgggcagcagcggtcg

SEQ ID NO: 12148 - DNA, 120 bp, Homo sapiens
gccgacccggcagagggcagagcccgccagcgttgccagggtgcagcatggggtcctcccttgctgatctgggagccgccccgggtccccagagggtcacacgtgggagaggctgccccg

SEQ ID NO: 12149 - DNA, 120 bp, Homo sapiens
cgacgtggccaccgctgagctcacaggctgtggtcacagaaagtctggtctgggtgagatgacaaatttgggagatggaggtggcaaggaagggggcgtgtgactgtctgagcagaaacc

SEQ ID NO: 12150 - DNA, 120 bp, Homo sapiens
ccacgcgtgcgtcggggcaggggagggaactggcgcctccccctccccttactccatcctgccctaacccagacggtggcgctgggtggagacctcacagctagaaggcctctaggacct

SEQ ID NO: 12151 - DNA, 120 bp, Homo sapiens
agacggagctggagctcaattcattggtgctgcgtctgctttgacacgtgctggcccccaaaactccacccacatcaagacgccaaggggccaaggaatcggggctccaggagtgatccc

SEQ ID NO: 12152 - DNA, 120 bp, Homo sapiens
cagcgaggctagagggacaggaagcctgaagggcgggctctgggggacaccgaaggttggcaggcactgaaatgcagattcgtgggccatgtccccagaattccaactcggagggcttga

SEQ ID NO: 12153 - DNA, 120 bp, Homo sapiens
aatcggggtgaccaccccagagtctggccctgacctgtcccacacccccaacccacagcagccaagtctccccctaccagggccccacgcagcacacacaccagcgggcatcactcatcc

SEQ ID NO: 12154 - DNA, 120 bp, Homo sapiens
gcccgtccagggtcctggctgcaatgaccgtgcactacgacttaccaatgaaaccacaagtcctggtgtgggagccgaggccaccagcccaggctggatgggtttgccatggcaggaagg

SEQ ID NO: 12155 - DNA, 120 bp, Homo sapiens
cctcgcgcgccccagggcccgaggtcccgctccccaatttcccctagagatccgggtcgcccccaagcgaggtctcttgctccacgcccgcttccttgtgccagggacccccacctccct

SEQ ID NO: 12156 - DNA, 120 bp, Homo sapiens
aggcgtggggtcctctccaagtccccctcgcgatcccactggacttcgaagtcaggctcctgcccgcccaccgcctctgtgccagggtccaacccccgccccacggtgcaccccccaggg

SEQ ID NO: 12157 - DNA, 120 bp, Homo sapiens
tcccggctttgggatcaggccacctcctccacgccacctcctccgccccacccaaggccacagacccggtctctgtgcccccagccagagacctctctaccacagtggtgcttccatggc

SEQ ID NO: 12158 - DNA, 120 bp, Homo sapiens
tggcgagggcaggctcacaccagccagaaccctccatgtggagccccaccctcttctggggtgcctttccccgcaacgggcgttgtccacctctaaagccacccttgccgggcgcggtgg

SEQ ID NO: 12159 - DNA, 120 bp, Homo sapiens
acacgtggaagtccgcttcagcacatcaagagattaaggaaatgcaaattagggtggctttgcgctaccctttcatacccagtcagctagcaaagttgagggacctgaacagtcaaaatc

SEQ ID NO: 12160 - DNA, 120 bp, Homo sapiens
aagcgtgatgttggaatgacctacagccccacgcccgggccagggccaacggcacactcacaatgggaccccagccgctcacaccacacatgtaccccacacacaacataagccagcaaa

SEQ ID NO: 12161 - DNA, 120 bp, Homo sapiens
cagcgtgtaaagaacacgctagtgggacgccgtgttcatgaagctcaagaacaataattgcaaaacatgtggcttaagggtacacagtgccccaaatgaatgcggccactctgcattcag

SEQ ID NO: 12162 - DNA, 120 bp, Homo sapiens
acccgggcttggggagtccaggaatcagtcagggctcacatggagcaaaccagctgccatcccctgagacccccgtaccctgagggggagcctcagaaatgcacccgctccccacagtga

SEQ ID NO: 12163 - DNA, 120 bp, Homo sapiens
aatcggccaacgccagccaccaggaccagcccaggcctcagcacacgaagtgaaggacaggaaggaaacagaggggagcctatgggtgaaagactaagcttggggctgcccctggaaact

SEQ ID NO: 12164 - DNA, 120 bp, Homo sapiens
agccgctgcggtgagatgccctggcctaggagtgatagaatcaaggtacttggaaagtctgcctggaaagcaggcaggattcctgggctggtggaaggcacagggccaggacagcgccca

SEQ ID NO: 12165 - DNA, 120 bp, Homo sapiens
ttacggagttcccagccccagtgtcacccacagctcgggccagaaatcccagagccaccctgccttctctcaccctcaagtcctgtccatcacaaatcctgtgggccccgccttcaggag

SEQ ID NO: 12166 - DNA, 120 bp, Homo sapiens
tcccggtgccactcatagtctgtcctccaagcagccaccagagggtatctgtgagcacctgggtcaggtcccatccctcctcagccctccacggctgccacctttctcatggccaaatcc

SEQ ID NO: 12167 - DNA, 120 bp, Homo sapiens
gaccggcaccacctcaggctgttctgcaggctcccccgccccgccccctgccctccctgctcatccacaccagaaacttctttcaaatcgcatccttctatttcggtgcctttgtgttaa

SEQ ID NO: 12168 - DNA, 120 bp, Homo sapiens
ccccggggagtattggtgtttaattgctgtctgatttgcataattatgcatattaatctccaagtctaatgaatattcatgcgcctcatttagattttgttttctaatcaaaaatttcca

SEQ ID NO: 12169 - DNA, 120 bp, Homo sapiens
acacggcattcgctgccaggtctgggccatctgcaccccaagatcctggtcctgcacgtgggccctggtgaacagggcagctgctgaggccagggtgggctggctgtgtaggggtgggca

SEQ ID NO: 12170 - DNA, 120 bp, Homo sapiens
cagcgccggcaccctctgggtctcagtttgcctctataccacctgcatgttgtctggtcccctccggccatagccagtaccccaggaggtgcagagacccccaactgagcaaacgggagg

SEQ ID NO: 12171 - DNA, 120 bp, Homo sapiens
gatcgcccccgaagttcactccaacaggcctgtgccagaggcactgcggcctcaatctgccctttgggggaaccctccctcacccagccttggcctcctcctagaaatgacaaaaataag

SEQ ID NO: 12172 - DNA, 120 bp, Homo sapiens
caccgattaatgatgcattttaataacccaccatgaatattcataatgcatccattgctcctgttctaattaaaatgtactaatagaataagacactgctgtcagagtgtggttttctgt

SEQ ID NO: 12173 - DNA, 120 bp, Homo sapiens
caccgcagagttttacccgggaagggcaccttcctgccctgggccagcctggctgcctcgggagaggcctgcgagtggacggcgcaggggcgctggggagagggccccaggagcggccca

SEQ ID NO: 12174 - DNA, 120 bp, Homo sapiens
tcacggggtgtggaagccgcccacctgcctgggctgccgtgaggataacaatgaaagatgctgcttcagagaggccatccgtagccaaggaatgctccaggctggtggtttcccagtccc

SEQ ID NO: 12175 - DNA, 120 bp, Homo sapiens
tcccggtccctgttgggtcccctcctgagagggaccggggactggtctttgcctggtggctcgttggcaaatgggagagggaggcttcaaaaggcgcttagtaaataccgggtaggactg

SEQ ID NO: 12176 - DNA, 120 bp, Homo sapiens
gcccgtttgtccatgtactatcaacggctgcttttgctgcaacagtagagttgaatcaattccaatagagaccatctgtcctgcacagccaacaatattcactccttggtcctttccgga

SEQ ID NO: 12177 - DNA, 120 bp, Homo sapiens
aatcgacagacttcagtaccaggagtggggttaccatgccgggcaggcaaaactattggtggacacgggccctgaacacagccctgtgtaccgcccctgccaaaccctcaggcacaccac

SEQ ID NO: 12178 - DNA, 120 bp, Homo sapiens
gtccggcctcccgagccccctctgcccacctccctccagctgcgctggccacctcctcgctgctgcttggacaccgttttctccctgtgacctcagggtctgtgcccaggatgtccctcg

SEQ ID NO: 12179 - DNA, 120 bp, Homo sapiens
ggccgggagccgttcctccccactctcaggcccctttgccggtgtatcatcagtttatcgttcctcccactctcaggcccctgtttctcccccttgcgcctgtggggcttgcctggctct

SEQ ID NO: 12180 - DNA, 120 bp, Homo sapiens
ccccgggcccagcctggccgccccacacctccagcatccatctggggcctgacacacagtaggtgctccataaatgcacaggctaagttggggggttccccatcttacaggtgaggaaac

SEQ ID NO: 12181 - DNA, 120 bp, Homo sapiens
ctccgaagagggcggcctgacaggcatctgggagccccggcccaggcgaaggtatttcctcctggcccagggcgccgtggggtcccggggcagctggtggggccgccaaagggtggccgt

SEQ ID NO: 12182 - DNA, 120 bp, Homo sapiens
tggcggtggcagctggggctctggcagtgggggagggtgggcgggaggcagcagctggtggctggccccaggccagctggagcctgtgcagagggagggcgctgggtcggctcacgctgc

SEQ ID NO: 12183 - DNA, 120 bp, Homo sapiens
ctgcgtatctctttctgtccctctgtctctgtcagtctctctgtgtctgtgtgtgtctccatctctctctgtctccatctctctcgttgtctctctgtttctctttatctctttctgtct

SEQ ID NO: 12184 - DNA, 120 bp, Homo sapiens
tgtcgacttcctctgtgggtgaggtggggactcccgcaggaggcggggtggccgcaccacctgctttcctcccgccagctgcaccacctcgtgagcgatgacgtctgcctgaaggtggtg

SEQ ID NO: 12185 - DNA, 120 bp, Homo sapiens
gaacgagaagaagcggggtgccgctggtgggaacctgtcctcccgctgcgtccgcgctgctagggagaccagctaccagtggaaggctgagcgctgcatggccgacgagaactgcttcaa

SEQ ID NO: 12186 - DNA, 120 bp, Homo sapiens
acacgccgggaggcccggccgctcactccgctctggactcagtcctgggtggaccctggttcagcggctgggacaccggccctgctgcagagcccatgaggtacctttgacctgcaggaa

SEQ ID NO: 12187 - DNA, 120 bp, Homo sapiens
aggcgggaggcgggtggccttgcgagcctgcgctgtgccggctgggctgtgccggcagtggaggctgtcagcgttcctgctccgcaggtgatgttcctgcagcgcaaagggcaggtgatc

SEQ ID NO: 12188 - DNA, 120 bp, Homo sapiens
catcgagctcctggacaccgaggaggcccagacggaggaccctgtggaggtccaggtgaggccctggccccagtctgtgccacgcataccagggagcgcctgagggcagcagcatggggc

SEQ ID NO: 12189 - DNA, 120 bp, Homo sapiens
aagcgcaggccgcgcagcatccagagaccctccctctgcaggccacaggctctccttgaggcctggtgggtggggttgcctccctccctgctcccccaccaggctctcttctgtgccccc

SEQ ID NO: 12190 - DNA, 120 bp, Homo sapiens
aagcggttgtgtcccagggcaggaggggaaccaagccacctctccctggcccccgactcccactcagggcatcccgtggctgtgacctctgcacctcttgtgtcagggctgcatcctgtt

SEQ ID NO: 12191 - DNA, 120 bp, Homo sapiens
ttgcggggacagatgtttcctgctcacctcccgcatcctggtgacagtgaggcattgacccgtgtgtgtccccagggtggtcattggggcctgcagctcccggcacctgccaacaggtcc

SEQ ID NO: 12192 - DNA, 120 bp, Homo sapiens
gcccgtgtgtcccctgggcaagagtgaagtgaggcactcatacaggggtgccttgtgagtatggggtcagccgaggatgctgaggggctctcgaggttcagccagagtccctgacgctgg

SEQ ID NO: 12193 - DNA, 120 bp, Homo sapiens
agtcggggggtgacttcaggaaaggcccagagcccgtgatgggcgtggggattggggtgaggacagggctgtcgtgagaacagtggctgcagatgtgagcggctggcaggaagtggccac

SEQ ID NO: 12194 - DNA, 120 bp, Homo sapiens
aaccgcagatgcttcctgggctggtcagggaccgggggtgctggctgcagctgggacccccccccctgcatcttgctggcctggcacctgggtccctgggaggcgccacactggatatag

SEQ ID NO: 12195 - DNA, 120 bp, Homo sapiens
ccacgtggggcagcccggtctccataacccacactccagtcctcccacgggctggctggcaagcggccctggtgggtctgcgggggcaggggcagccttcctggtttatctctaccggcg

SEQ ID NO: 12196 - DNA, 120 bp, Homo sapiens
gcgcgatctgctcgtccgcctcggctccagaagctggggctcagggtccggcgaggcaggaagcctgaggccacagcccagagcagcctgagtgcagtcatgtgggggcgactgctcctg

SEQ ID NO: 12197 - DNA, 120 bp, Homo sapiens
tggcggcacccagacccccagcgtctacgacgagagcgggagcaccggaggtggtgatggtgagtggtcctggctttggggtgcagagatggggttacatcagagatggagctgggggcc

SEQ ID NO: 12198 - DNA, 120 bp, Homo sapiens
gcccggagctggggagggggaggccgggaagttgcgggcttcagcccagcccactctgtatcccgtctctgaccccatagggctgggctattcccttgagtgtcatgtccagctgtttcc

SEQ ID NO: 12199 - DNA, 120 bp, Homo sapiens
tctcgtcacctgccgaggcaggggctgactgaggtcccctctctctcccagacagcacgccctcaatcctgcctgccccccgcggctacccaggccaagtctgtgccaatgacagtgaca

SEQ ID NO: 12200 - DNA, 120 bp, Homo sapiens
tcccggacagctcacgggcactgcttctgggctgggtgcccaccaggctggtgcccgccctctatgggctggtcctggtggtggggctgccggccaatgggctggcgctgtgggtgctgg

SEQ ID NO: 12201 - DNA, 120 bp, Homo sapiens
ccacgcaggcacctcggctgccctccaccatgctgctgatgaacctcgcggctgctgacctcctgctggccctggcgctgcccccgcggatcgcctaccacctgcgtggccagcgctggc

SEQ ID NO: 12202 - DNA, 120 bp, Homo sapiens
cttcggggaggccgcctgccgcctggccacggccgcactctatggtcacatgtatggctcagtgctgctgctggccgccgtcagcctggatcgctacctggccctggtgcacccgctgcg

SEQ ID NO: 12203 - DNA, 120 bp, Homo sapiens
tgcgcccagtccccaccacagtgaccacaccctcactggctcggccctgcccccagtatactgaccattccccagccacttcccttccgcacttaccactcccccagccacgcccctccc

SEQ ID NO: 12204 - DNA, 120 bp, Homo sapiens
ccccgctgaccgctcctccagccccgcctcccccgtacaggcagagcgcccgcccacctctatgctgcgttctcctgactttacgttggcccctcctctgccaagcccccaggggagccc

SEQ ID NO: 12205 - DNA, 120 bp, Homo sapiens
tggcgtccgagggtgggagtcggggtgtggcaggccgcggtggggggcggcagtggctccgcgcactcacccgggccccgggcaggggcgcgctccacttcgttgcacgcgggtccggcg

SEQ ID NO: 12206 - DNA, 120 bp, Homo sapiens
tcccgggcgagtgggctgtgggtgctgacgttgtagaagcgagtggcctcgaaggctacgggacgagggtggcgggtgaccaagtgcaggcgcgacgggtcagggaccgggccgggccgg

SEQ ID NO: 12207 - DNA, 120 bp, Homo sapiens
aaacgaaaagaataagaaaagaaaagaaaagaaaagaaaagaaaagaaaacaaaactgaggcccagacacgattcagccccagtaggcaccctggcaagctctgccttctgggcaagcag

SEQ ID NO: 12208 - DNA, 120 bp, Homo sapiens
gcccgcctcggctccgccagcagcatctgtcctggagaagacgccagctcagtaccagaaatgttccggacacaacctggaccgggcagaagctgaggagccaccaggctgccagcagtt

SEQ ID NO: 12209 - DNA, 120 bp, Homo sapiens
ctgcggagggggctcgccaccctctaactccctgggggtggcctcgtccagccccgcaggaggcctctgtctattggagctaagcctggagacggccactccggccaatggcctgtccaa

SEQ ID NO: 12210 - DNA, 120 bp, Homo sapiens
tgccgaggtgaggtaggcaggtataggtaacccccaaatgaagtagacaacccccaagatgaagtgaacaggtgtagacagcccctggtagacaggggcatggtcctccagataagacgg

SEQ ID NO: 12211 - DNA, 120 bp, Homo sapiens
agacgacataggtggtagacagcccccaggtgagggggacaggcataaatagcccccaagtgaagtggacaggcatagaaaacccccaggtgaggtggacatgtgtagaaatcccccagg

SEQ ID NO: 12212 - DNA, 120 bp, Homo sapiens
aggcggacaggcgtagaaatcccccaggtgagttggacaggcgtggaaatctcccaggtgaggtggacaggtgtagaaagcccacaggtgaggtggacagacgtagaaagcccacaggtg

SEQ ID NO: 12213 - DNA, 120 bp, Homo sapiens
agacgtagaaagcccaaagctgaggtggacaggtgtagaaatcccccagctgaggctgacaggtgtagaaatcctacaggtgaggcagacatgtgtagaaatcccccaggtgaggaggac

SEQ ID NO: 12214 - DNA, 120 bp, Homo sapiens
tgccggtacctctcactgcaactccgggaggctggtacaaatgctcctatcccaggtcagccctggacccggaggccagagacaaaaagaccccagctgggcttccagctccccagggga

SEQ ID NO: 12215 - DNA, 120 bp, Homo sapiens
tgccgaaaggaaaatatttacgtggtttgtaagttgagctatccccctgcagaagtgatcaaaaggacagtaaagatggaaagtccgtgttgtcgtgatgcaggctgtgccaagccacgc

SEQ ID NO: 12216 - DNA, 120 bp, Homo sapiens
aggcgtgatcctggaggactcttcagggagctgatggacgtgacctgccgacccttttgttttctgaaatcaccaaacatctgctgagtgagctgcttcctggacccttttgggaatgtt

SEQ ID NO: 12217 - DNA, 120 bp, Homo sapiens
ccacgaccaatgccataaacacatccatcatctgaaaagtgtcctcaggcctcttggcatccctccccactccacatccccaagcagccaccgatcagctttctgtcttcataggtcaat

SEQ ID NO: 12218 - DNA, 120 bp, Homo sapiens
caccgtgttgtgcaacgaccagctctatctgattccagaacattttcatccccttaaaaggaaacgcggtccccatgagcagtcactccctattccccctcccggagtccctggcaacca

SEQ ID NO: 12219 - DNA, 120 bp, Homo sapiens
ttgcgtctggcttctctcagcttcatgtttttggggttcatccatgttgtagcacggagcagtggttccttcctttttatggctgaatcatactccgttgtgtggatggaccacgttttg

SEQ ID NO: 12220 - DNA, 120 bp, Homo sapiens
tgccgatggacatggggttgtttccacctttcggctattgtgaatagagctgcagtggacattggtgtacaaggaattgagtcgctgctttctattcttttgggtctatacctgggagca

SEQ ID NO: 12221 - DNA, 120 bp, Homo sapiens
ctgcgaagccaactggtcaggatgcaactgcctcttggaaagagagtttgttactcacagttcccgaaagaagaggatgcaatgccatggaaggccacagggggaagcactgggactcat

SEQ ID NO: 12222 - DNA, 120 bp, Homo sapiens
gagcggggagaggcaggaaactttattgtgattttcatgcatcagaatgtgctaggcagagtaagctggcttaggattggcttgtttgaattatttcaatgggctctggggcataggggc

SEQ ID NO: 12223 - DNA, 120 bp, Homo sapiens
caacgggacatttctagggggaccagcagggtggaaggaagccagcaaggcgtacggcaggcctgggggttaaggggatggcgaagcattgtcggggagggggctgcctagtttcactgt

SEQ ID NO: 12224 - DNA, 120 bp, Homo sapiens
cctcgatgtgccactgtgggtgagtcttgtggccacagggctacagaggtgaccacacagcacccatcattgcagggattgtaggacaaggtgcatccacatgtctcagaacaacgcaac

SEQ ID NO: 12225 - DNA, 120 bp, Homo sapiens
catcgccacctggtgagggccaggggcagcgtgtggcctcaggggtctgcacctctgggtgtgggatctgcctttttttcatttttattttattttttgtagagatgggggtctcactgt

SEQ ID NO: 12226 - DNA, 120 bp, Homo sapiens
taccgagcagatagtgcagagagttcccatgtacccctcccacgcccaggttctcacattatttatattttgcattcgtgtggtgtgttggttgcacctgactcaactctacgttggtac

SEQ ID NO: 12227 - DNA, 120 bp, Homo sapiens
ccacgccagcaaggtttcatttcctttggtatctaccaggggttggcaaactacagcccatgagttaaatctgccagtgcctatctctacaaataaagttttattggtgcataaccatgc

SEQ ID NO: 12228 - DNA, 120 bp, Homo sapiens
cttcggctgtaggtgtttagtaggttatatactactaataggtgtgttaatatgtaaccactaataggctatacctatacaaatagatgtagctggccaggtgcggtggctcacgcctgt

SEQ ID NO: 12229 - DNA, 120 bp, Homo sapiens
gagcgagactccattgcaaaaaaaaaaaaaaaaagattctaaaaagaaaaagtcagtcttggcaggtggtgactcatcaaacgctgcctccgcccatgttcctctggagcctaccccaca

SEQ ID NO: 12230 - DNA, 120 bp, Homo sapiens
ggacgaggcccagccccaggaggccctaggagcctccgactggcagacttgtagccgaacacagtgccttcagcgatgtaaggccagggtgaggccaaagggcagaacaggggcttggag

SEQ ID NO: 12231 - DNA, 120 bp, Homo sapiens
ggtcggggaggagtggggccatgacaggagctcagcctggaggagggcgcatcaacacgaggtcttccctggaattaaaggcaatagttcaaggacacagctcagccacactgcagcctc

SEQ ID NO: 12232 - DNA, 120 bp, Homo sapiens
tctcgggacactacagatccctcacagtcactcgacaaacacacatgggtcgtgcccagtgctcactggagactctgccctccccaggtcacagtctgatcacttcaaaggagaactggg

SEQ ID NO: 12233 - DNA, 120 bp, Homo sapiens
ggtcgtggagtaggaattctggggtcctgagccctgctctcacaccagctccagacagggcacagcctgtgagagcaactgagggggctcagtgacgagggcttggggtgtctgccccat

SEQ ID NO: 12234 - DNA, 120 bp, Homo sapiens
gggcgccaggctggttagaaagtaagagtccaggagtccctgtctaggtccagccaccaccccccacccccagctcctggggacaaggaggagcatctaataaaccttttggagcctcct

SEQ ID NO: 12235 - DNA, 120 bp, Homo sapiens
ggccggtctgggtccctgcagaggctacagtgcagggaagggttgggggggacctacagtaaggaggggtcccaggggggctgccataggtcctcagtaaacattagccgccatcagtag

SEQ ID NO: 12236 - DNA, 120 bp, Homo sapiens
aagcggggaggccctgctgctggcttgggcacgtctgcagtgaccaggtgggtgagaaaagggaaactgaggcatgaagaggaagagagttggccatgtgcctgcctggcttgtgccggg

SEQ ID NO: 12237 - DNA, 120 bp, Homo sapiens
gggcgggatggcagggctgactgggctggttgccagcagactaattaatgagctttaatgagctggcatgccccatctcatcacctccgtgaactccaggtcaactctgtgtagagcaaa

SEQ ID NO: 12238 - DNA, 120 bp, Homo sapiens
caccggaggggaacgcgagcagaagccaggggcgaacagagctaagcggagaagccagggcatgggttgaagcccgctccaaggggtccctgagtctgagtcaactgtcaaatggggata

SEQ ID NO: 12239 - DNA, 120 bp, Homo sapiens
acccgcacaatgcccaccccaaggaatgaggaagtaaacaaagtcactctggtcctcagccctgaaggccccacacctacgctcttccgagaggaccacccaacccctatgcaagctgga

SEQ ID NO: 12240 - DNA, 120 bp, Homo sapiens
tgccgttgcctcttgcagggatgagacaggtggccccaccctgagaggtggtgagctccccatcctgggtcagcccccaagcaggaaggtccaggccttattcttcaaatgtccccagaa

SEQ ID NO: 12241 - DNA, 120 bp, Homo sapiens
tggcgactgccccactgagcctcggtttcctcatctgaaaatgggaggtcagatattgccctatcatatgggatggactgggtcagaggggttcacgggggacagtgccaagacccagag

SEQ ID NO: 12242 - DNA, 120 bp, Homo sapiens
agccggagaacccaacttaggaaagctgaggatctgcgcccactcccccgtaccccccctccaccactgcctgggtcctgcagcaccagccactgagcccctgggaagaggccccactag

SEQ ID NO: 12243 - DNA, 120 bp, Homo sapiens
cagcggctgggtggtgggagggtccagggcagccgggtggaaacggcctggcctggggcggccctgcaggcaggcagaggcccagctcaggggcccctgacctcaggggaggccctgaac

SEQ ID NO: 12244 - DNA, 120 bp, Homo sapiens
cagcgagaccctgctcaatccatttgaagctcagaatggaatggtgatttcaccaggtcacacaactgacacagcacaaacctgtcagctccaagcaaggccccccccacccaaaattgc

SEQ ID NO: 12245 - DNA, 120 bp, Homo sapiens
aggcggttttccagcagcaagaatgaggccaaagtctagtggcccactttgtgctggaggagggagcaaggcagctctgccacacatggccacaccaggccagccctgacccgggacctg

SEQ ID NO: 12246 - DNA, 120 bp, Homo sapiens
cctcgcaggtgaagacaccgtaatgcttgccgctcgacttgtccccgcacaccacgcagtccacctgcagccccggccgctcctcgtcgcccggctcggcgtcgctggcggcaccggggg

SEQ ID NO: 12247 - DNA, 120 bp, Homo sapiens
gggcgaggccgagtcgtcctcggccgcgcgcgggtagccgcccgccttgtccacgccgttcgtgtcgccgccggggccgccccagccgccggtcaccatggccatagccccagggcagcg

SEQ ID NO: 12248 - DNA, 120 bp, Homo sapiens
aggcgcgtggggggcaagcggggcgccgggatcgggggactcaccctccctgggcgccccgccggagcaccgtgcccagacacacgccgaatccggttcctaactccgctgctttggacg

SEQ ID NO: 12249 - DNA, 120 bp, Homo sapiens
acgcgcctcgacgcgaggcccccagcgctcagccacaaaatacagcctggcacgcgcagcgctcctcgcccacctcacgggcaggcccagcgcgtctccaccccaccgcgggctctgtcg

SEQ ID NO: 12250 - DNA, 120 bp, Homo sapiens
ggccgcgtgcgcccccagccgcctgcacctgcttgctggccgcccccgaccccagattccctccgcgcatgcgccctcagctcggcgcgccaggcccccagcacagccacgctgcccacc

SEQ ID NO: 12251 - DNA, 120 bp, Homo sapiens
ccccggcgaggacccacgggctcgccacctgcccgtactttggcccgggccgcgagcaggaggccccggagggagaggaggagcaggcggaaccgcagggccgcgagcgggaccagcacc

SEQ ID NO: 12252 - DNA, 120 bp, Homo sapiens
caccgcctgcagctgccgctcgaggctctgggacagggacaggacgagcaggagctgtgaagggaccgacggacagatggacggacagatggggggacgacaggcagagagaggacgcac

SEQ ID NO: 12253 - DNA, 120 bp, Homo sapiens
agacgacggacaacggacggacagacaggagagaaggatggaggaggggagggaggggctggagagcccttggaccccttgtgccgggtctggcccctcgctggccgccatgggggcagg

SEQ ID NO: 12254 - DNA, 120 bp, Homo sapiens
tgccgctggggcgggggtctcacctctttcaagcgctccatgtccttgaggtagaaaccgatgtagaagaggctcaggtacgagttgacaaactggaactgcaggaaggaggcaggcggt

SEQ ID NO: 12255 - DNA, 120 bp, Homo sapiens
acccgactccttggagccttccttgtgccccatacagacggcacagcttccccgttgtccccctgcctgtccgatggtggtgactcaccaggacaactttgatgatgaggtgcttctcat

SEQ ID NO: 12256 - DNA, 120 bp, Homo sapiens
aggcgctctccagccggtaattttctaggggccaagggggggagtgagggggcagccgcggtccccccaagggtggcagggatcccaaggggcagtggagaccttcctcccagagacccc

SEQ ID NO: 12257 - DNA, 120 bp, Homo sapiens
ggtcgtacccatgtcattgagccagatggctagcttcttgtagccctcggcactcacactgacaagcagggccagcatgaccttaggcaggaatcgggcgagacggggcaaccccttcac

SEQ ID NO: 12258 - DNA, 120 bp, Homo sapiens
tcacgctcagcaccagctcctgcgggagaagggggttcagggctcatcccagctgcagggctcagcccaaggtggagctaggtaccaaggacagggcgggtgagggtatggggggtcacc

SEQ ID NO: 12259 - DNA, 120 bp, Homo sapiens
agacgaggcacgccaggcacagggggaggctcacaagcagctggaagagcagccgcttccagggcgggtagtagaactcctcggcccgcgtgatggggctgatacgtcgcacgccctgat

SEQ ID NO: 12260 - DNA, 120 bp, Homo sapiens
gaccgggcccagcatgagctcagaggggccacctctgccttctgcacccctccctatcctcagaactcaatttccctccatcatgcggaggtgaccctctcaggtcacccacctagggca

SEQ ID NO: 12261 - DNA, 120 bp, Homo sapiens
gcccgcctcggtttggcataccctctttgatgaaacaatcctgtttcacacctctctgcctttgctcctgcagtgccccccaccatttacctttgtcctgtctccatgaccctggactca

SEQ ID NO: 12262 - DNA, 120 bp, Homo sapiens
gggcgtggctcctccacggcttccccaggtgagtccagcgtcccccacttatatgccagctcagcccctctccgcttccattcctctaggaacagcgtcgaccagatcacgttgaagagg

SEQ ID NO: 12263 - DNA, 120 bp, Homo sapiens
ccacgcaggaaacatcccggcttgtctgtgagtggcagagaagagttgagtcattgtttgtgccagtccagaaaggagggcgcctctggatcccccagaccttgcagggtccctgcccag

SEQ ID NO: 12264 - DNA, 120 bp, Homo sapiens
acccgaagacagctgggtataccatagccgacgtgtagaagcccagccaggcgaagtacatggcaattttcacaccaaagtaatcacagatgtcatctgccaggggacaagtgggtctca

SEQ ID NO: 12265 - DNA, 120 bp, Homo sapiens
gcccgccccagcctggaatcccaagagagtccactcccttctccatccttaggttccaattccaggatccccctattaaatcaacaatgccccccccccaccacaattccacgcccaaag

SEQ ID NO: 12266 - DNA, 120 bp, Homo sapiens
ggccgaaagaatgcagccctgcgcaagcattggtcgcgccctccccgtccatccgaccccgccctcgggccagcccctcactcacaggcgttcgcgcagcgccgcctcccgggccgcaca

SEQ ID NO: 12267 - DNA, 120 bp, Homo sapiens
tagcgggggtgtgataacagctgcttcccagtcaattggaatgtccacacaaattagaaactgaaacagtatctccatcaactcagagaaaacagtaaaaagaaaataggcggtgagatt

SEQ ID NO: 12268 - DNA, 120 bp, Homo sapiens
caccggggaaagtaagcttgtaatcagtgctgtcaggatgaaattcagcagactggttccgtggacaaggggtcacatagagcttgtaaacctaaggttacgtatctttgtttacgggag

SEQ ID NO: 12269 - DNA, 120 bp, Homo sapiens
ttacgtatgaacaatttgtgagggtgatcatctggagatgtgtgagggctttttttttttttctttttgtaggcatctgggtaagctacaatgcttaaccacttaacacaatcaggaagc

SEQ ID NO: 12270 - DNA, 120 bp, Homo sapiens
attcgggaaaggaacttcagtgttgtgtggctcagtctccagacctaactttccctttggtacagacgcggtggtacatgcctgtaatcccaacacttaggcaggaggatcactcgagcc

SEQ ID NO: 12271 - DNA, 120 bp, Homo sapiens
ccacgtgtaaactcattgcaaccctcataactgcttggggctggacaaaggcatcacacccattttcacacccatcttgggacccggttgccctgtgcccactactctggggcccctctc

SEQ ID NO: 12272 - DNA, 120 bp, Homo sapiens
acccgtcctctccatctgtctacttttttccatgccccccatctggacctgtgccagcccctcctcgggctcctcctgctccccccactctctcctccacccacgatggcccagctcctg

SEQ ID NO: 12273 - DNA, 120 bp, Homo sapiens
ccccgtactcactcctcctcagccccccaaactcttcaaacccatacactccttccggcctcagggccctcacatgtgctgtgcctgggcactcttccatagctcgcccccacagctctt

SEQ ID NO: 12274 - DNA, 120 bp, Homo sapiens
tctcggatcacacttcacctccctagacaggatcccccaacccccctggctgcattaccatcagcccctctatgccccttgaccctattatatccctcgtgacacctaacaccaccaaca

SEQ ID NO: 12275 - DNA, 120 bp, Homo sapiens
ttgcgtgtttccttcctgccagcctgtgaactcatgcgaactgggctggctttgcctgggtccacatgcagcatgcttccccatgcctgtaccctgggggatttaggtcccagcctctgc

SEQ ID NO: 12276 - DNA, 120 bp, Homo sapiens
tcccggctccccctccccctgcaggtactaccgcatggcagccttcggccaccacgcctaccgcatgcaggcggctgacgtgctctatgactgcctgcccctgtaccactcggcaggtac

SEQ ID NO: 12277 - DNA, 120 bp, Homo sapiens
ctacggcctgggtagggaatggtgggtgggggcgggggaccccttaccaaggccaccctctgcaggaaacatcatcggcgtggggcagtgtctcatctatgggctgacagtcgtcctccg

SEQ ID NO: 12278 - DNA, 120 bp, Homo sapiens
tctcggccagccgcttctgggacgactgcatcaagtacaactgcacggtcaggccctgccctgttctgtctagaccccgcccctcccagccaggcctcaccccctcccaatcaggcccca

SEQ ID NO: 12279 - DNA, 120 bp, Homo sapiens
tcccggtgaggccccgtacctcccagcaaagccccacctcctcctggtcaggtcccgtcctctcccagccaggccccgccccccgaccaggctctattcccttaactcccttatgtgcgc

SEQ ID NO: 12280 - DNA, 120 bp, Homo sapiens
tggcgcaacctgctcccccgtctctaggggtggggtggggagcggggcttaaggaatggctgttcaggatggggacagagagggcaagtagtgtttcctgagtacctgctctgtgtccag

SEQ ID NO: 12281 - DNA, 120 bp, Homo sapiens
ccacgtgtaaactcaatgcaatcctataactttggagggtggacccattttgcagctggggaaactaaggcttgtaatgcggctaggattgggcccagggtgcctgagctccttaaggca

SEQ ID NO: 12282 - DNA, 120 bp, Homo sapiens
gggcgatgagtctggggcttccaggtgaggaacgcgtgaggcggaggtggaggcatctgctgtcccggagaggagagcaggcagaggttaagaacaggaattcttctttcccctccacag

SEQ ID NO: 12283 - DNA, 120 bp, Homo sapiens
aggcgggaggtacaggaaacaggtatggagcccggagggaatagcaaggctgactgggaaggattgggtgagaggttgtccagggactgtggcaagttggcagatgcagattggacagat

SEQ ID NO: 12284 - DNA, 120 bp, Homo sapiens
tgtcgccttttgtgtctggtaagcattgtttttaagtgacagtgatatctcagtgtcatcaggaatctgggcagtggctcaattctgtctcacaatgtcaaaaatgtgttttttcttatt

SEQ ID NO: 12285 - DNA, 120 bp, Homo sapiens
tggcggtggtgtctgctgatcatattggtttagtcatcagctatttagtcagtaccttctcaggggcacagctgggggcacaggggatgcctctcagtgacgtttgagctgagactgaag

SEQ ID NO: 12286 - DNA, 120 bp, Homo sapiens
cagcggagatggagggagaggaggcagcaggggcggcagggccagatccagttggccacaggaagaaatgtgggtttcatcctgtgtgtgagcgggaagccccgagcacatttgcagctg

SEQ ID NO: 12287 - DNA, 120 bp, Homo sapiens
ggccgggatgcctgggttcaaatcaaattctgccacttcccagctctgtgatctcgttccagttccttaccatctgtgagcctcggtttctccatctgtaaagtggcggggggggagtca

SEQ ID NO: 12288 - DNA, 120 bp, Homo sapiens
ttccgaagcccaactggagatgagaactcttaaaggcaccgtggggcacctggtggatgaccccaggaagctcttgcggggcttgagaatgtgtggcagggagggaagatgtcctgcagg

SEQ ID NO: 12289 - DNA, 120 bp, Homo sapiens
ctccgtgggcacctggggctcagtccagacgcagcgcagcctagtgggtgcacctgggagtggtctgcccaggggtgacgctccggccagcccaggctcagccagggggctctgggtgac

SEQ ID NO: 12290 - DNA, 120 bp, Homo sapiens
ctgcggggtgccagctctcctgctagtcctgccctgtgtgcctgctgaggctcagacagggatgtggtatctccaggaagctgcttggcagaatcgagggaccacgaaggggtgcgggta

SEQ ID NO: 12291 - DNA, 120 bp, Homo sapiens
gaacgagtcctaggagtcaatgtggtccctaatggagtgtggacgattctgcagccatcatcatccttaggctgttccgctcataggattagctccctgggtggggcggtctcggggtct

SEQ ID NO: 12292 - DNA, 120 bp, Homo sapiens
atccgggctccccaccgcctgccggtcccatcacccacttcctcaccccgtcccccaggtggttcagtacatcggggagatctgccgctacctgctgaagcagccggtgcgcgaggcgga

SEQ ID NO: 12293 - DNA, 120 bp, Homo sapiens
aggcgacaccgcgtgcgcctggcggtggggaacgggctgcgtcctgccatctgggaggagttcacggagcgcttcggcgtacgccaaatcggggagttctacggcgccaccgagtgcaac

SEQ ID NO: 12294 - DNA, 120 bp, Homo sapiens
ggacggcaaggtgcacaccggcagggccccggggcaggtctcggagttcagggaagaccactgtctcctcttcctggggcccctgggatacataaaacagcctggactggcgcggaaggc

SEQ ID NO: 12295 - DNA, 120 bp, Homo sapiens
ctccgccaaggcgcacgcagggcggggtgtaaggggagttcctgggactcccggtgcaccaccagagggacaatcctgcagcctgcacagatagtcatgtgactgtggtccttgggtcag

SEQ ID NO: 12296 - DNA, 120 bp, Homo sapiens
gtgcgccctggcaagtgcctcagcctttctgagcctcagtttctgcgtgtggagattagcaaggagaatagggctctgtgtaccgtgctgttattttgttgttgttgtttgagacagagt

SEQ ID NO: 12297 - DNA, 120 bp, Homo sapiens
ctccgcttgcatgaatctccctctcctttcccaagcccctcccatccaaggccaagaacagaccgtaataatgatcataaagcaaatgtcggctgggcacagtggctcacacctgtaatc

SEQ ID NO: 12298 - DNA, 120 bp, Homo sapiens
agacgaggctgcagcgagagggctttgacccacgccagacctcagaccggctcttcttcctggacctgaagcagggccactacctgcccttaaatgaggcagtctacactcgcatctgct

SEQ ID NO: 12299 - DNA, 120 bp, Homo sapiens
gctcgggcgccttcgccctctgaagctgttcctctactggccacaaactctgggcctggtgggagaggccagcttgagccagacagcgctgcccaggggtggccgcctagtacacaccca

SEQ ID NO: 12300 - DNA, 120 bp, Homo sapiens
ggccgagctgtacctggcacggcccatcctggactgagaaactggaacctcagaggaacccgtgcctctctgctgccttggtgcccctgtgtctgcctcctctccctgcttttcagcctc

SEQ ID NO: 12301 - DNA, 120 bp, Homo sapiens
tgccgagagtggaacacgcgtgtcctgggagctgcatcttgtgtagggtccagctgcttttggggactgcaggaatcatctcccctgggccctggactcggactggggcctccccacctc

SEQ ID NO: 12302 - DNA, 120 bp, Homo sapiens
tctcggctgtgccttacggagccccgatccaggcctcctgtggctgttgggttccagatgctgcagctccatgtgacttccaagcaggccctccgccctccctgctgaatggaggagccg

SEQ ID NO: 12303 - DNA, 120 bp, Homo sapiens
ccccgttcctgtcacatttccccagccccaccttcccctcctgatgccctgaaagcttccggaattgactgtgaccacttggatgtcaccactgtcagcccctgccttgatgtccccatt

SEQ ID NO: 12304 - DNA, 120 bp, Homo sapiens
ctgcgtggctgcccagccagctgcctcctgtcctgggaggaggcctcctgggtgtcctcatctggtgtgtctactggagggtcccacaggagaggcagcagaggggtcaggggaggtctc

SEQ ID NO: 12305 - DNA, 120 bp, Homo sapiens
tgccgggggttggcctctcaagcctcaggggttctagcctgttgaatataccccacctggtggtggcccctccgatgtccccactgatggctctgacaccgtgttggtggcgatgtccca

SEQ ID NO: 12306 - DNA, 120 bp, Homo sapiens
ggacggcccagacatccctactggcttcgctggtggctcatctcgaacatccacgccagcctttctggggccggccacccaggccgcctgtccgtctgtcctccctccagcagcaccccc

SEQ ID NO: 12307 - DNA, 120 bp, Homo sapiens
caccgtggcgtctcatgtgaactttcctgggcactgtggttttatttcctaattgatttaagaaataaacctgaagaccgtctggtgcctgctgggagcccattcattgagtgtccctat

SEQ ID NO: 12308 - DNA, 120 bp, Homo sapiens
ctacggatttgtcaatggaatgtcacactatatggcgtttcgtgtctggtttctctcactcagcattgagttttcagggttcattacagcctggatcagtgcttccttcctttgtatggc

SEQ ID NO: 12309 - DNA, 120 bp, Homo sapiens
ttccgttgtctgggtggaccacgttatgttgatctcctcatccgttgatggacacacttcagtcacttccaccttttttggctgttgagactttttttttgagacagagtgttgctctgt

SEQ ID NO: 12310 - DNA, 120 bp, Homo sapiens
gaccggatggggtgtgtaacatgaccacagggcttgtcctaagacccagccacctcccctctgcaactgaaggttgccatgtggaaatggtattctcacgttgccaggggatactggaat

SEQ ID NO: 12311 - DNA, 120 bp, Homo sapiens
gtccggctcctcttccctaagcctcagctccttcctgcagcctctcttggctagaggggaatggtctccgttggggtcctcaggcagtgggggaccggctggagggctgtaccctctgat

SEQ ID NO: 12312 - DNA, 120 bp, Homo sapiens
tgccgaggtccaggttgaggacatccatgatttttcatcactggggctcccagtgggagaggggtctcagagggaaaaggggacaggaaagggggccgagagtggcgagggggttctcag

SEQ ID NO: 12313 - DNA, 120 bp, Homo sapiens
gttcgcggtgagggaggggattcgggaagggggatgggcgcagaggggagggtggtatcgggggagaggcttggaggaggaagggggctcagagaaggaacccagtctctctccctgtct

SEQ ID NO: 12314 - DNA, 120 bp, Homo sapiens
ccccggtcagtaaatggtccctgagtcaccgtcttcgtcgtcacatcccgccacctccccgcctgcgccgggttgctgtatcagggtcagcggggcggaagcgccacccttccccagcgg

SEQ ID NO: 12315 - DNA, 120 bp, Homo sapiens
cttcgggtcacacgcatgaggctatttatagcgtgggcgcgcggagggcgtgggaggcgcgccggcggacaggggggcggggatgaggggggtgcccactgctgtccccagcgacgagcg

SEQ ID NO: 12316 - DNA, 120 bp, Homo sapiens
caccgcgtcatgcggcctcaaaggtctttggggcccccagaagcgctgactgatgaatgtagtggccgtacccggggaggctgaggcaggagttcaggctgcgggacacccctgcagcct

SEQ ID NO: 12317 - DNA, 120 bp, Homo sapiens
ccacgtcggaacctcctccagtgccacctttaagagcccggctacttagagcagggggagaggtcagtagggggtctggacattcaagttctcctcccattccgtcctcaggcctaggcg

SEQ ID NO: 12318 - DNA, 120 bp, Homo sapiens
ggtcgcctaggggtctccttcacttccctactcccctaactccataggcctggaggctaggggatggaggagttgacctttgactctagggacccttcttccaccacccccagccccgtc

SEQ ID NO: 12319 - DNA, 120 bp, Homo sapiens
aaacgagcttagagaaagtaggcccctgtccctttaagaacacccgcgtccacgccggcccagcccggccggatttgcactcggaagctgccgcggcggggagcgggcgggcggggcagg

SEQ ID NO: 12320 - DNA, 120 bp, Homo sapiens
aatcggccgagggggaggggagggaggaggaggggcggcgggggcggttcccggctccccggcctgcccaccctgtgtccaggcagcaggagttcagcacacgcacgcttcctgtcgccc

SEQ ID NO: 12321 - DNA, 120 bp, Homo sapiens
gcccgaggtctcccgaagcctgcagtctcaggcttggcagacacaccccttcccccaccccagccttcttgaaatgggtgggagtgacggggggaccccagtccttaagaaccaggggtt

SEQ ID NO: 12322 - DNA, 120 bp, Homo sapiens
aggcgtggaacggcggtccacatccacccctgccgcccaaggtctcccagagtttgatttctcaaacgggagtgcccagaacgcctgggttcggttgggctggcttccccacgaccccag

SEQ ID NO: 12323 - DNA, 120 bp, Homo sapiens
ccacgtctccctccctcctccaaccccaacgcagagcgtgggcctgggcgtgggcctctgtgcagatggcgttctggccccaaaatagctccccccccacctcacgtctccctccctccc

SEQ ID NO: 12324 - DNA, 120 bp, Homo sapiens
tgccgagaaggccctgaaacgtgtttgggagaaccggagggggcagggagcgggaagaccttctggacattcctccaaccccctcactcgggaggccaaagagttaactggaaaagcgcc

SEQ ID NO: 12325 - DNA, 120 bp, Homo sapiens
ggacgctgggaggggtctcctgtctccacactccccccactccagtcctctttacacctagggctgggagagtcctagaactcgtggatgccctgatggccaagcccctctacctatatc

SEQ ID NO: 12326 - DNA, 120 bp, Homo sapiens
ccacggcttggagaaccctcccaccgcactctccttcgaatttccagccgggtccgcgtccatgaggacccgtaacccagcccacaacaccagaccccttccaagcacccctgcaggctt

SEQ ID NO: 12327 - DNA, 120 bp, Homo sapiens
taccgagcccagactcttcctcactgaccctctaaaaacctggtctacacagacgccccagtctagatcgtttccgggtagaaccccggatacccgtccacgtccacacgggcctccgcg

SEQ ID NO: 12328 - DNA, 120 bp, Homo sapiens
agccgcgtccacacgacccctccagcagcggccaccaggacccccgagagccctgccgcgtctacacggatcaccccctccggggcccagctgcgtcgacaagggctacccctctcaaaa

SEQ ID NO: 12329 - DNA, 120 bp, Homo sapiens
actcgggtcaccccccaggaaccccctgggagccgcatccacgcggaccccgaccccagcccgcgtccacacgggtcccccgacccccagcctcgcctcctacctccaacgcaaagcaga

SEQ ID NO: 12330 - DNA, 120 bp, Homo sapiens
ctccgagctcgcaggtgggccggaggcggccgggccggctctgtcgggtcgggctcagcggccgctgggctggggcatctcccggctgcagcccgcgcttggctcacgccggggcccggc

SEQ ID NO: 12331 - DNA, 120 bp, Homo sapiens
ggccgccaccggccatcttggttcagcaccgggggcgcggacagcgcctgacgtggcgctgatgcggggcgggcaggcggagcccagggacgcctgatggggcgggggcgctgcgggctg

SEQ ID NO: 12332 - DNA, 120 bp, Homo sapiens
gggcgttaaagggcctggctccgggaaggggcgcctcgccccacacctcctcgttgcagggggacaaggggcgacggcggcccccaagcaggtttcctcctgtgcagaccctcacctgca

SEQ ID NO: 12333 - DNA, 120 bp, Homo sapiens
gcacgtgcccccgccacccatgcatggacattcctgccctggtaacctgggcaaacgcctccctgcaatactcaagcaagtacaggcaaatgcaagctcttgtgtgtacgcccggcacca

SEQ ID NO: 12334 - DNA, 120 bp, Homo sapiens
caccgggcagatggtcctgttctctgagtatctctcttcctctgtctctacgtctctgtctctctaactctactgcctggtctctttctctccctgggtctctgttcctctgactctgtc

SEQ ID NO: 12335 - DNA, 120 bp, Homo sapiens
gggcggtgccttgtttactgcagtgtggacttgagcaccaaaaacacatcatcgcccctgcacgtgatgcagtcatatcacccccattgcatttccgtatctctcccatgataaccctct

SEQ ID NO: 12336 - DNA, 120 bp, Homo sapiens
gggcgagtgaaacacaaagaagcaacagcccatggtgtgaggtgtggggaggtggcacgcgcaccccgagggctcagaggaagccttttagcgctgccgccttgggggttaaaggaggct

SEQ ID NO: 12337 - DNA, 120 bp, Homo sapiens
gaccggcagaggcaaaggcctggtttgctggaggaactgagagaagggtgacattgacgcccccgcaaagggggaagagtgtgggaggcagctgcctggaggcctcactgagcagctggg

SEQ ID NO: 12338 - DNA, 120 bp, Homo sapiens
agacgcaggggaagcgggcttaaagtggacttgggagaggcccgccagtggaagaggggtgggggtgggggtgccaggtcctggtggggcgtggccagagctcatttctgggaagatgtc

SEQ ID NO: 12339 - DNA, 120 bp, Homo sapiens
gggcgtggtggagccctgcctggtatggtacctcctccaggtagccctccttgctacctcttagtccactgcctggacccttcctgactccctctcttaaaagtgtcctggccaggcatg

SEQ ID NO: 12340 - DNA, 120 bp, Homo sapiens
ggacggtgatatctgtgtccagctctgtctctctagactggggactcctgcagggccaggcccgaggctgaatcaactcagggaccctgacattgttctagtctgggtgagcaagtagga

SEQ ID NO: 12341 - DNA, 120 bp, Homo sapiens
attcgctcaggcccgaacaagtccctacagccaaggggatggacttctgctccttggccacgcccccgttgctaagcaactatgatgttctctccatcctttctcaatctctattcccat

SEQ ID NO: 12342 - DNA, 120 bp, Homo sapiens
gggcgagaaaaatcatggctttgaggtcctgtaccacagcgtgaagcaggggcccatctccaccaaggagctggcggacttcatccgggagaggtgaggtccccaagccccatccaccag

SEQ ID NO: 12343 - DNA, 120 bp, Homo sapiens
ccacgcccaccatcctgtagtcacgcccacctaatggctacgccctgcatggtcaggggctagaaccctggggattccaggaaccagaggggctcgaaaatcctggaaatgaccgattct

SEQ ID NO: 12344 - DNA, 120 bp, Homo sapiens
gatcgggcactttctctggggtgggcccgacctccctgaactgagaccttaatagaaaggggcaggccatggggatgtctgagggacagagacccgggcaagtggctcagccagtgcgaa

SEQ ID NO: 12345 - DNA, 120 bp, Homo sapiens
aggcgtggcatgtttacggaagagtgaggaggctggcctggctgcagggcttgggcaacgtggaaaggaagtaggaggggagatggcagggtgaggcctcaggggcctgacacacaaatg

SEQ ID NO: 12346 - DNA, 120 bp, Homo sapiens
ccccgatggcatttgcagttttctttgtggctgctatgaggcaaaagttctgtggggcaggcagaagtggaggcagcaggaggagaaggtggagggaggctggatggggcttctgctgag

SEQ ID NO: 12347 - DNA, 120 bp, Homo sapiens
ccggaccccgccccttgatccctgccccgcttcgcagcctcccagctctcggagcctcactctgcctcttagtcttgcctcgttccagcgcccacccacccactcctcaacccctcccat

SEQ ID NO: 12348 - DNA, 120 bp, Homo sapiens
tcccgggtcgctcagcccaacccttcactcagtttgcccctcccattcccgcagtctcctccctcactaagccccgcccctcattaagcctcgcccacttccccaagtctttcgttttgg

SEQ ID NO: 12349 - DNA, 120 bp, Homo sapiens
ctccgccccacatcccctaccactctccggcccctccccgagccccgcccccacgttggccccgcccagcgggggagtccgccctcacctcctgttctccctgggtccaggcgatgccgc

SEQ ID NO: 12350 - DNA, 120 bp, Homo sapiens
cgccgtcaccagccacgcggagcagccccagcccgtcgtggccaccaagggccccagggaggcccacgtggaaggtctcggcggccccggctggatccagccgctccaggtccatgatgt

SEQ ID NO: 12351 - DNA, 120 bp, Homo sapiens
gagcgagtgccggtctgcctggcaggcggccacgcggcgcagggctctgcgcaccgtcctccgaatacgcctccgcgtcacgaagctcaggccctggatcaggtcgcgcaggcttggggg

SEQ ID NO: 12352 - DNA, 120 bp, Homo sapiens
agccggccctcagcgtcgggaggggtccccgcggggacacacacaaacccaggctttagcccaggggctggggtgcggccctagttggggcaccaggcacacacagactctcattcaggg

SEQ ID NO: 12353 - DNA, 120 bp, Homo sapiens
gaccggacctcagagtaggggagggccattggcgcccacaggtcggacagggaccccacaggccttttagctgggggaggtcaggtgtctgtccagctggagcctgggggtggagagggc

SEQ ID NO: 12354 - DNA, 120 bp, Homo sapiens
gttcgtgggaggccctgggtcataggaacaccctgaaagcttgcaggagaactccatggtgggagcccggcaaagccccgatggagcccacgttgctcactcccaagcagaggccgtccc

SEQ ID NO: 12355 - DNA, 120 bp, Homo sapiens
tcccggccgctgggcctgctctcgcgccatccgggccaggtccaacacggccaggctgagacactcaccctgctccttgagactgaggcccacggggaggcgcccactcaccaggtcact

SEQ ID NO: 12356 - DNA, 120 bp, Homo sapiens
ctgcggtgctggggggccgccacagggagcatcagctgaggccacccaacttcaagccctgttgttaacctgcagacccccccaatcctgggctgacccccacccctggactgccacagg

SEQ ID NO: 12357 - DNA, 120 bp, Homo sapiens
agacgaggccccacctgattgcatgccagtcctcatgttgccccttggacccccaaccccctgggtcaaaccccaggcagaaccccacctgggcaaagaggtgctccaggactggcaggt

SEQ ID NO: 12358 - DNA, 120 bp, Homo sapiens
ttgcgtagcccgaagcggtggcacttctccagcccaaaccaattggggaagtaaaagctgtgaggagaggagagaaccctgggatgaaagtgcaacccagcctcagtaggagtgacatta

SEQ ID NO: 12359 - DNA, 120 bp, Homo sapiens
gggcgagggacagattctgcggaggcctcacagagcccagcttgtacctttaacttgctgtgtgaccttgggcaagtgacccaccctctctggtctgtttcctcatctgagaaatgggta

SEQ ID NO: 12360 - DNA, 120 bp, Homo sapiens
cctcgaaatgcaaggagatgataaaattgtacaatccctgggggctggggggcacttcctaccgaatcctgtacagcaggacttgggtgctggcatcctccacggagaagatgtggctcg

SEQ ID NO: 12361 - DNA, 120 bp, Homo sapiens
ctccggtaaaataggactaaaaaccgcgcccaaccccaggctatctggagaatcaaggagatggtacctgggaagggtacgtggggaagggcttggcccacatgaccatattagggtctt

SEQ ID NO: 12362 - DNA, 120 bp, Homo sapiens
ggtcggggaccaatggtaatcgatccgagggaagaagccgacgggagggccagccagacacgactgggcacacagggcctcggacgccaggcaaaggagtggggcttcaccccaggacga

SEQ ID NO: 12363 - DNA, 120 bp, Homo sapiens
ccccggtggggttatgagcagggcagagagccgatcagagcggcgcgtggcaggctcttccgggcgcctgcagagggacaactggtggacaagagtgaggatgaaactcaggacaggagc

SEQ ID NO: 12364 - DNA, 120 bp, Homo sapiens
ggtcgtcagccctcgggcacaaagacaaggtgatgacgtttgttccctgttacagaaaggcccttactcccttcggctcctagccccggccccggccccggccccgcccccacccccgcc

SEQ ID NO: 12365 - DNA, 120 bp, Homo sapiens
ctgcgagggtgggggttgctgtgccagaaagtcaggatcttcgagtccgagcttaaggtttccagatttagaaaaaaaaaataaaaaaacagggcgcccacttaaacttgactttcagat

SEQ ID NO: 12366 - DNA, 120 bp, Homo sapiens
aaacgagcaattttttattataagtatgtcccattccgtgtcctctactttatcccgcagccctaatctgggctattgtcgttcccccccaccccccaatttacacaccatctgtcccta

SEQ ID NO: 12367 - DNA, 120 bp, Homo sapiens
tttcgaaagctgtgcggaccctcgcggaagacgcctttgtctcccgcctgcctagcgccccacagcccggcatgtggggtgtacccccgggccccgtcatcccctcccccagccatctgc

SEQ ID NO: 12368 - DNA, 120 bp, Homo sapiens
tgccgtcctcctggccttgaacaacagcctgaagtcgagtccgggctaggcaggggaaagcgcaaaggtgcagcacgcaccctcggggattttctcagcgctcctcaccccccacgacct

SEQ ID NO: 12369 - DNA, 120 bp, Homo sapiens
gcacgtagtaggtgctcatgaaaaaaaacatttgagggtgattttagggaggcaagtgcaggtgagggagtgttgcatttctcgacacggacaactgcgtcctcatcccatggggacata

SEQ ID NO: 12370 - DNA, 120 bp, Homo sapiens
cagcgtctcccccaacacttccccaacttgccacgttcgcttcttttacttattcgccatcggaacggtggaacatttgcgcctccggcctggcttctgctcaaccggccaggagctcgg

SEQ ID NO: 12371 - DNA, 120 bp, Homo sapiens
ctgcggatcattttccccaggggcatattattccggaaacgggctaagcggtcccgggttggggacacgtcggctcctgtgtttttagtttcgctggcctaggtgacccccctgcagaag

SEQ ID NO: 12372 - DNA, 120 bp, Homo sapiens
agacggctgtggatctgctgtgccgtgtcttggaggcatttctagggcggctagctgggcaaagggtggtgctgtccctttatttggagctaggtagctcctggggtggtgctgggtcgg

SEQ ID NO: 12373 - DNA, 120 bp, Homo sapiens
gagcggccctctcctcccatcagctaggaccaagttgcacctggcccctcattcccaggggcggagagaggagaagatgaaagagcaagcaagttcacaccagggcttgagggcagtgag

SEQ ID NO: 12374 - DNA, 120 bp, Homo sapiens
catcgcctggctcaacgagataactaggccgtggctggtgcatgaatgaccagcttgggcccacgcacgagaagggtatgaggaggtgctggtcagacccgggttcgagtcctgactctg

SEQ ID NO: 12375 - DNA, 120 bp, Homo sapiens
tcccgcctgagggatcacactggagtctttggcaggactcatcctttctaccctgttgtctggctggggaaactaaggcctgagaaggaaaggggctgtccttcagggtgagaacccagg

SEQ ID NO: 12376 - DNA, 120 bp, Homo sapiens
ggacggtatacactcagctccaaaaccctccttgcaccccagtctgccctagacaccacctcctgatggcctcatccctggtcaagggcgggagttgggagatggctagatggggagcgg

SEQ ID NO: 12377 - DNA, 120 bp, Homo sapiens
ggccgcgctgcatgacttgctgaacggcacagggacccctcgaggaacaaggttgcacaccagctttcagccaccatgactgtggggagtggctggaccaagggctgacctccccgactg

SEQ ID NO: 12378 - DNA, 120 bp, Homo sapiens
aggcgggggcctttcggatatcacatgggacagaggaagagcccggctggaatctgacttacctggaccgctgtccttgtgaggcattgaatgcccagtgcagtatccgagagactgttt

SEQ ID NO: 12379 - DNA, 120 bp, Homo sapiens
aggcgtccttgcggaaagggcattttagctgaggctttggagtacgaataggagctcagcaggcagacgaatgaggaataaaggtcagagaaggtcagagctgagtgacgtttggaatcc

SEQ ID NO: 12380 - DNA, 120 bp, Homo sapiens
ccccgtttattgtagaactgggggttcagagggcaggtgcctcagagttgaggccacacagtgaggtctggtgggtgaaaggacccaggaacgaggcgttcaggaaagcaggttgtcaga

SEQ ID NO: 12381 - DNA, 120 bp, Homo sapiens
agccgctccagcctttgaagactttgaaagccagagattcctggcgcaggcttggacttcctgggagctcctccaagtacccaggggcatcagagctgcctgggtgttacatggcccagg

SEQ ID NO: 12382 - DNA, 120 bp, Homo sapiens
aaacgatgaagaattcaagacagtgacagcattacgtcacccctggggacagaggtcagcctaaggtgacacacggggactactgtgcttccggaggctccctgtgtcctggaggagaaa

SEQ ID NO: 12383 - DNA, 120 bp, Homo sapiens
ccccggcctgggactcagcatttctgatatgccttaagaattcattctgttttgtacaattattttttaaaagtaaacgtgtggagaaagaatccgggcttcttggtttatttccgcccc

SEQ ID NO: 12384 - DNA, 120 bp, Homo sapiens
ccccgatctggctgctgagggaactgggactgccatccctggtcactatcttggagactaaattcctggccaaggaaggcaaaggggctcatgattgagaaggggaaactgaggcccagg

SEQ ID NO: 12385 - DNA, 120 bp, Homo sapiens
caccgcctatcggagtctcagaggctggcgggggctgaacagtggaggacaagcagagaactctatcctcagagagtggggagcagggggctggggctgggaggagccgcctgagtacgg

SEQ ID NO: 12386 - DNA, 120 bp, Homo sapiens
tcacgctctgaaattactacttagatgttcatttgtttgtctgaccctctgtgggcagggccagatccaggctctgacccccgccccagcatgcagcaggcatgagggtggttgactaag

SEQ ID NO: 12387 - DNA, 120 bp, Homo sapiens
cgcttctcaaagtgctttttctcatggtgggaagggggaaggtgcccccttggacatctagggaaactgaggctccaagcgatggcgtgggaggaagaggctgagggctctgcccctccc

SEQ ID NO: 12388 - DNA, 120 bp, Homo sapiens
tagcgatgtattaatatgagttcatatgtattaatacctccttgggtcgtcgctgcaccactgtacaccctcagctcagccctacgacgacctggggaggttggggctgtcaggcgccca

SEQ ID NO: 12389 - DNA, 120 bp, Homo sapiens
tcccggaaagccactctccagaggtcgcctagctgggattcgatctgcgccctcaaccagctctcttacggcacaaggcgctgccaaccagcagtgtgacctggggggagggcacccttg

SEQ ID NO: 12390 - DNA, 120 bp, Homo sapiens
aggcgtcggggacagcagaagcctaagtttgaagccacacagggactacatgaccccgggcagccaccctttgacttctctgggcctcagtgtccccattataagaaaagaaaaacagga

SEQ ID NO: 12391 - DNA, 120 bp, Homo sapiens
caacgaacatttatggagcgcctgctgtgtgcctggctctggagaggcagcggagtgttctgcaacctctggagctgccctcctagaaaccccaacctgttgggggaggtagacgccaga

SEQ ID NO: 12392 - DNA, 120 bp, Homo sapiens
cagcggtgaccccacggagtgatcagttgtgataagggactcacagcaagtgaaggaggcgcctgacccagtcattgctgggagccctggggtagaggaggcagccaagggtggcgaggc

SEQ ID NO: 12393 - DNA, 120 bp, Homo sapiens
cagcggggggcggtatttagggaaatgaaagaggttgacagaagctggaacctagggaggactgagcaggtggggtgggggtcggggactgaggttagctccgggcgggttgagggggtg

SEQ ID NO: 12394 - DNA, 120 bp, Homo sapiens
ggccggcgggtctccaacctggagccgcaccggtagctgcgggactgcgaactcagcaggtgatgggaagccaggtcgggagtggtcagggaaggcacgggctgagctgcagatcagaga

SEQ ID NO: 12395 - DNA, 120 bp, Homo sapiens
acccggtctctggccgcgcgggggtggggcagaactggaggcgctgaggccagaggcaagagtgggggacttgggcggaaaggagggggcggggcgggattggcgagcagcgtggtgttg

SEQ ID NO: 12396 - DNA, 120 bp, Homo sapiens
tcccgcctccagccccagttagatgccaacccgcccgcagcctcttaaaatagagaaaccgcctccgggtaggcgaatgggggtgctgctgacgtcaagaagtggggcctgttccatggt

SEQ ID NO: 12397 - DNA, 120 bp, Homo sapiens
gtccgggtttcacaaagtataggtgacagagtcagacaggatttgaacccacgcagttccggcttcctctccaaaccaacccagcacaggcgtccctccacgaaggtggagggatgagca

SEQ ID NO: 12398 - DNA, 120 bp, Homo sapiens
gcacggattccccgactgaatgagggcattccgggcagaggccacagcacgtgcaaaggcccagaggcatgtagcctttcttacctgtttatatggggaaacaagaacttgaacctattt

SEQ ID NO: 12399 - DNA, 120 bp, Homo sapiens
aggcggctgagggccatgcgcgggagggccaaggcattaagactgaccttccacagtacatcattgggcagctgggcctggccaaggaccccctggagggtaagccgggatgggaagagg

SEQ ID NO: 12400 - DNA, 120 bp, Homo sapiens
gagcgagactccatgtcaaataaataaattaaataatcatactaataaaaaataaagctgaggaaactgaggctccaggcagataaggctgagcagggaatcaaacccaggtgtacctaa

SEQ ID NO: 12401 - DNA, 120 bp, Homo sapiens
attcgctaggggctgcccctctgccaaggcctggggcaagaacatattggaccctccacctgggctgcaccctgagctgaggaagatgttaggagctgacacccagggggcctgtgtctc

SEQ ID NO: 12402 - DNA, 120 bp, Homo sapiens
tcccgtcttcacaggctcaaggctcagagcctaagtttgatcatgactgagcacttcagagccagggcagcccactggcccttctagaaggttcctaagtcattgcttcatccagcctcc

SEQ ID NO: 12403 - DNA, 120 bp, Homo sapiens
tcccggatgtggcttcatgacagtgtcatgagagctggtcaggggaggcactgcatccccagcctggggtgagaactctagaggcctcaggaaattgctgggtgatgcagggtgaggcag

SEQ ID NO: 12404 - DNA, 120 bp, Homo sapiens
cctcgaagaagaacagcccccagcacctgagtccccagaggtgagtagcagaggctgggggacccccgctcatcttgttctttccagagtggaccaggcacccgcagaaagggctgggtt

SEQ ID NO: 12405 - DNA, 120 bp, Homo sapiens
tgccgaggtcttgcatgtagcttaattagcatcggtgactttggaggcaaggtgacggcacgtgggactgccctgccttggaagtcgggtgggggcagtgctggaggggcactggacagg

SEQ ID NO: 12406 - DNA, 120 bp, Homo sapiens
ggacgtgtaagaatttcccaggaggagggcacagctgtgagcaaaaaagtacagaaagtcagaagctgagttggagaagtttggacaggggaggaggtagcatcgggcaccaggaccagt

SEQ ID NO: 12407 - DNA, 120 bp, Homo sapiens
aggcgttaacagaaacaaaaaaatgaggggtgtgggtcagggttccccagcagagctgggcgagccaccctgggttcaggctgccctgagccaggtcagctctgccctcttgtggcaacc

SEQ ID NO: 12408 - DNA, 120 bp, Homo sapiens
aaccggagatattgtacccagaaccctctctcctcagccagaccctgcctcccaccggacaggcccactgtgggctcagcacccacacaactgcacaagcccacctttcctgttccttct

SEQ ID NO: 12409 - DNA, 120 bp, Homo sapiens
aggcgcccggcagaagaaaatcaacgagtggctggggattaaaaatgagactgaggagtgagtgaccgtctggagggaggcagggagggcttcccagaggagggggccatttggggtggg

SEQ ID NO: 12410 - DNA, 120 bp, Homo sapiens
gagcggccacagggcgtgcaaatccggatcccgggcgcggagggttaaggactgggcccgggttttcttggggcgggggaggctgtttttctttctgctctaaacttagccgggagcggc

SEQ ID NO: 12411 - DNA, 120 bp, Homo sapiens
cggcggggtcaggctgtggttccatgacgcgggcggtgcgggggtagagccccccggctgtgggaacggcgcggctgcccattggccaggggggtaaactgagccagggaggctcggact

SEQ ID NO: 12412 - DNA, 120 bp, Homo sapiens
gttcgggtctggcctgcgcggggccggccctcgttcatcctcacttctgagtacccgcgacgcgccctcgacgtccctgcgctgtctctagcgccttcaaaagggaatgtgcttcgctag

SEQ ID NO: 12413 - DNA, 120 bp, Homo sapiens
ccccgaggtcgctctccaggacacggaacccccactctcccactccctggttgaaatggaaccaccaggaaccacggtcataccttctccctccaaccccagctatgaccttggagaggg

SEQ ID NO: 12414 - DNA, 120 bp, Homo sapiens
ttgcgtctccaacacagggcctgccacccagtaggtgcttaaatgccttctcaacaaaatgcttagaccctcccatacccctgtgatccatctggggctgtggggaagcacattccccca

SEQ ID NO: 12415 - DNA, 120 bp, Homo sapiens
ggacgccgaggctccgggaggcaccacggcttgctcaataccacacagcaggttggccttggggcctggccttgaactcagtttcgctgggcttccccctggggtgaacccctaccctca

SEQ ID NO: 12416 - DNA, 120 bp, Homo sapiens
ccacgtatgtgtgactgcagcgcatacgatgcgcagaacgacgtgtgtgtgcacacacacgtgcacagggacacccaatccaccgctcctgcctcccagagccaagcgggggcttcccct

SEQ ID NO: 12417 - DNA, 120 bp, Homo sapiens
agccggggcgggagaaggggctcctgggtcacctgagaacagctccaacccctctgggctgtgggaaccatctaccccagatgcctcccaggctgctggagggccaggctgggggcgaga

SEQ ID NO: 12418 - DNA, 120 bp, Homo sapiens
ggacgcaagaaagccaagctccagagcagggaagtaacccatccaaggccactcagcctggactgaaatctgggatgctggtccagctgacttggttctccctccaacctaaggagggct

SEQ ID NO: 12419 - DNA, 120 bp, Homo sapiens
ccccggcctccccaacctggtctgagatttcagggggtttcagaagaagctgacctttgagaaggctctggggccaggatgtctgagttacttgatgctggaggggtggggcaaggaggg

SEQ ID NO: 12420 - DNA, 120 bp, Homo sapiens
ggacgtgaggagtatttttaggtgctgaatgcagccctgaaatatttccacggccactcccgagagcgagctgggtgactatttcggtgcctggttccagtggaggcggggcaggggtga

SEQ ID NO: 12421 - DNA, 120 bp, Homo sapiens
ggccgcagaggccaggcccaggctgggaggcggctcgaagggcaggatcgcaggcctgcaaggtgaacggtcactggcctggggccaggcttcctaagccagcctccagggcacagagga

SEQ ID NO: 12422 - DNA, 120 bp, Homo sapiens
cagcggcctttctattccccatggcactggccaatccagaggggccactgcctgggtgccctgggacaatgagctgctcacgccaaccccatagttgtaaagatggagggtcccccgtga

SEQ ID NO: 12423 - DNA, 120 bp, Homo sapiens
aggcgagatgccatcttagattatttcaagcatttattgagcacttgctgtataccaggccagtcctaaaatgattactggcatcctcccttcatgcaatctgcccaataacccccatga

SEQ ID NO: 12424 - DNA, 120 bp, Homo sapiens
ccccgaccagggaggaaactgaggcacggtagggttaagccctccaggcacctaactatgtgcctcaaatcctgtccctcagctgatgttacaatcaggggagtgagttttaaagcagca

SEQ ID NO: 12425 - DNA, 120 bp, Homo sapiens
agccgatcttgcttaccccccacaccctattcccaaccaattttggggtcctgactgtgcctgagctgggagaaggtcaatggatccttcaggtttaaggaggcagtggaaagaggaggt

SEQ ID NO: 12426 - DNA, 120 bp, Homo sapiens
tgacgatgccaccctatgggtgagttccggagctgcctggcacacattcatgatagataaacaatggttggctgagcatactggctcaggcctgtaatcccagcactttgggaggctaag

SEQ ID NO: 12427 - DNA, 120 bp, Homo sapiens
cctcggaggtgctgggttggaagtggctttggaaacccacggggctgagcggcaaggctgagtgggagctcggggaatcctcgccctcactcgaagtctccttgagaagaggctgatgct

SEQ ID NO: 12428 - DNA, 120 bp, Homo sapiens
tctcgtcaaagtgaggcctgctacagcacagcccgcacgacgcttcccgtcacactcagatgccacgaccccatcgtgcagaagagctcgcagaggccgagggaggttcaggaggcaaca

SEQ ID NO: 12429 - DNA, 120 bp, Homo sapiens
taacgcccagcaggaggaggccggggccttcctagcgagctctgccccacagaaagccaagcaagacgccttcattccggggtacggtctccagagggacagaggccggccactggcacc

SEQ ID NO: 12430 - DNA, 120 bp, Homo sapiens
agacggtaaagctgcacagggctctggggggagcgctctggggagcggctcaggcactgcaagagtccccggaacccctcccagcaggcacgcttgtccccgctgaccccagccccagcg

SEQ ID NO: 12431 - DNA, 120 bp, Homo sapiens
ggacggtgcttctcagggtctctgcctctccctacaggcagagcgccagctcagccatccctctcgaaaacacaaaaacaggcccagcacagtggctcacgcttgtaatcccagcacttt

SEQ ID NO: 12432 - DNA, 120 bp, Homo sapiens
aggcggaggttacaggaagctaagatggagccactgcactccaacagcctagacgacagagccagattccgttgcaaaaaaaaaaaaaaaaagcagcagcagcaaagaaaacacaaaaac

SEQ ID NO: 12433 - DNA, 120 bp, Homo sapiens
aggcggggccgccagaccggcatcctcatcctcaggactactgccccaagctagatctctgtctgtggggttgtccccagcactgaagggtgctgagcagtgcccctggcctctgccctc

SEQ ID NO: 12434 - DNA, 120 bp, Homo sapiens
aaccgccctgtcgggatcagtcactgctctactgaagacctaagcaaagaatcctaaaatatgaataccaaaaccagcctcgactggcacggcccacgcctggaggcagctccgggccca

SEQ ID NO: 12435 - DNA, 120 bp, Homo sapiens
aggcgctccggaagtcaggtgaggacctcagaaccttgggaaaagcccccccaaaaaaacagaatccaacctcatctgtgaggcagggtcccagccatggctcaagcacagcaagcccgg

SEQ ID NO: 12436 - DNA, 120 bp, Homo sapiens
gcccggcaagcggcctggtgccggactcggcaaaggaagccacacttctcctctggctcttccgtattctctgatgtttctaaaacaaacatttccccaggccagaaaatagtaccttca

SEQ ID NO: 12437 - DNA, 120 bp, Homo sapiens
acccgtggcaacacggacaggcccccaggccctgggaacccagcgcttttcccatcgccatccacctgggggagagctgccagcacaatcctgccagcatctgcaagaaggcggctgctc

SEQ ID NO: 12438 - DNA, 120 bp, Homo sapiens
tcacggggcagcagagccacccactctgtggtaggagtgtgggggagggctcctcctcctcgaggccagggcaaagcttcaaccccccgcccggagggtcccagctccccgggcccagag

SEQ ID NO: 12439 - DNA, 120 bp, Homo sapiens
agccgcagctgggcgaagcttcaacccccagcccggagggtcccagctccccgggcccagagccgcagctgggcaaagcttcaaccccccgcccggagggtcccagctccccagggccca

SEQ ID NO: 12440 - DNA, 120 bp, Homo sapiens
ccccgcccggagggtcccagctccccagggcccagagccgcagctggactcgcaggctcgccggcgagggctgaaaaagaaacggcctcagcaccaccgctggttgtcaccactggggtc

SEQ ID NO: 12441 - DNA, 120 bp, Homo sapiens
ggacgctgctcaacatcctacaacgcaaaggacagcccaccagacgacaatctggcccccagtgtccctagcaccaaccgtccctccagcaagctccatagctgccactccaggccaggc

SEQ ID NO: 12442 - DNA, 120 bp, Homo sapiens
aggcggccccggtggcccgattgcccacctgccacccgctggtaaaatcacccccgggtcctcatacgccctggtcaggcctggggaaccaaaagacaatactgctggctgcgggggttc

SEQ ID NO: 12443 - DNA, 120 bp, Homo sapiens
ggacgcggctcactgaggatgaaaagtcggaccgaggagagcacacactgtcacgtctctgaaggtgacacaggtggtcagacggtgccttcactgccccacggaaagccggctgtctcc

SEQ ID NO: 12444 - DNA, 120 bp, Homo sapiens
ggacgcagccagcgggagctcctgaccctcctgagaggccagaggaaatgaaggcaagccatcctctgcagcgaggcgccattcttggcctccttctcccttctcgcctgactcggggcc

SEQ ID NO: 12445 - DNA, 120 bp, Homo sapiens
ttccgaggagagctggcaagccctaacagatcagtaggatcccagggctcacctgcctagcaggggtatgggaggctgtcaccgacaccggagagccaggcctgcttcaggcccatcctt

SEQ ID NO: 12446 - DNA, 120 bp, Homo sapiens
aaacggcagaggaggcaggcagggccccggcccacccacatccaacccagcactgccagttaccagccacgcgtacacaggtgagcagcctcccggcgctgggcctcagtttcctcatct

SEQ ID NO: 12447 - DNA, 120 bp, Homo sapiens
gtccgcccagtactgctgtggtagtggccaagtcaagaggtagggaccccagagcccatgtgaggggccacatctgaagagccagaaggaggaggacccctgcctgacccgactctgcta

SEQ ID NO: 12448 - DNA, 120 bp, Homo sapiens
acacggtgggtgggcttcagtagatactgggtacacagtgggtgggcttcagggctccccatgtacctggggctgctccctgagcgcctctaccccaggactcctgccctctacagatgc

SEQ ID NO: 12449 - DNA, 120 bp, Homo sapiens
agtcgcctggagccccagctgggacgccgccaacagccccacccagaaccactggcaccgggctgccagatcctgaacccgactgcgggatccccgagggcaggagctgtgcgccccgca

SEQ ID NO: 12450 - DNA, 120 bp, Homo sapiens
acacgtctgccgctcactttgcagtataggatggccccttccccaggcctgggactgtcctgctggggcctgagtcagcctgtggcgcagcactagcatcccctcaacgtggtgccctca

SEQ ID NO: 12451 - DNA, 120 bp, Homo sapiens
gcacgttcctgccggagctgtgaagccctgagctggggcccaccgcacctctggagagccctggactttcctgcaatcctccccggaagggttccctctcctggaagacagtgtcctgcc

SEQ ID NO: 12452 - DNA, 120 bp, Homo sapiens
gtgcggggcagtgggcagaggcctgggttctgaggtcagatgggaggaaggtgggatctagccctgcccactccacatagacaaccgaggcccctcacctaccaccaggctgcagccaag

SEQ ID NO: 12453 - DNA, 120 bp, Homo sapiens
gagcggccactggggggatagtaacgctcattcccaactcacaaggctgggatagaacgtgcccctctaggccggggatgcacatccctgcgtcccagggctacacggtgcccgccgtaa

SEQ ID NO: 12454 - DNA, 120 bp, Homo sapiens
ggtcgccaatgacccgctgagcctgtgacccagggcccaggagcaccagccaccttcctgttcccgtcgcagctccgccaagcctcccaaccctgcctgccttggtgccctcatcagatg

SEQ ID NO: 12455 - DNA, 120 bp, Homo sapiens
acacgttcctcgataagcctccgtttccccaccggcagcaaatagctcacagggtcaccatgcagcgcgtgtccagcacagagcatggccccacaggtgctccagggctagctgagggct

SEQ ID NO: 12456 - DNA, 120 bp, Homo sapiens
cagcgttcctgtctatctcctctctggaggccgctgccctgtgcaccctaaaatccccttgagaagacatggcaaaggctagatcacgccagcctcttcaaatctcataggaaactgggt

SEQ ID NO: 12457 - DNA, 120 bp, Homo sapiens
tcacggaggcggaaacagagggtcagagaaacctcaccgcaaggaagatggatcctgccttctgcggggggaggcagtcttctaccagacagtaacaagaagccctaccaccccaccaga

SEQ ID NO: 12458 - DNA, 120 bp, Homo sapiens
acacgccatggtaagaggcaggcagctgcctttttcccataggaacggggggcagacaggaagacgacatcaccaaagggaccctcaaaaataagcctttgggaaacaaatgagccattt

SEQ ID NO: 12459 - DNA, 120 bp, Homo sapiens
ctccgcagccccagcctctatcctgaggcctctgggagctgcgtgacggccagcatggggtgctgatcatggtcaaggaggcaggtctttgccaggttgccccatgcagccacccatcct

SEQ ID NO: 12460 - DNA, 120 bp, Homo sapiens
atccggattaaatttcccttccctgggcacaagtgcctcatgagggcccggggctgctggttgggagggaaagcatccccgtttttgcagtgaggaggccggccgagggctggggttcca

SEQ ID NO: 12461 - DNA, 120 bp, Homo sapiens
aggcgctgcccagtgcccacgtctggaaagctaattcccgggtggacgctgaacatacctgctgagagactctgtcccctggtttccaggacagttgtcacaagctgagtggggggggac

SEQ ID NO: 12462 - DNA, 120 bp, Homo sapiens
ccccgctgtgcctcccccagttacccacagaagtgcctgcctctccagcgctcacagaacacacaaaaagggacaggaattggtcactgggtagtggccgtggctcctgacgatccagac

SEQ ID NO: 12463 - DNA, 120 bp, Homo sapiens
cagcgtctggcccaagccattcagaggtggggtctggggcctgggggttttgtgtcgtgacactttgtctcaaggagattccacatagggatttgaattaggctttctgcttgccaaggc

SEQ ID NO: 12464 - DNA, 120 bp, Homo sapiens
ggccgggcaagcctcccctgagcctttggaagccgagttcactctctgcctgcccaggggagcaccggcttggttctgggggctcctctaacatctcaggtttttatcttgtcttaaatt

SEQ ID NO: 12465 - DNA, 120 bp, Homo sapiens
tgccgccgaaggagggcccggtccctccaggctcagtgtggcttctccctgacccccgccctagaacttttgccagtgccttttctgaaactcctgtgtcccgggccccccaggcggaga

SEQ ID NO: 12466 - DNA, 120 bp, Homo sapiens
tgccggattctgcctggggctgggctctaggagaccccaaatttgacaccacagaaagcaaataaaacacttgaaatacgcatacatttcctgtgtgtccttttgtggggctggagttca

SEQ ID NO: 12467 - DNA, 120 bp, Homo sapiens
gcccggggatagaggggaccccgtgtcactgggtttctattctcggtggtgctgggcccagggcagctggtgaccatgtgctgagtgagcgagaggaggggaattctgcctccagtggtc

SEQ ID NO: 12468 - DNA, 120 bp, Homo sapiens
acccgcggacctttgttccaacacacagggaggttgaggaacttgcctgtggtaacacaggcactggggtttgagcgatgatctgcatcaacctccagggcatacaaaatccccatcatg

SEQ ID NO: 12469 - DNA, 120 bp, Homo sapiens
tcacggccagggagagtaggggtgggaatgtgaacccaggcgggcttctctggagcggagggccttgaagaacacaaatggacatgttcattccctacgcctgtcctcagcaggaatgaa

SEQ ID NO: 12470 - DNA, 120 bp, Homo sapiens
ccccgtgggttgggggaacttcttggactcacagaggactgagggttcttgcacccccagtggaggtattcatatctgggtggtctttcccatagggtcgactcttattattgttattta

SEQ ID NO: 12471 - DNA, 120 bp, Homo sapiens
cctcggcctcccaaagctctggaattccaggcatgagccaccatacccgtccctttgctgtcttgagccttagtttacccatttctcgtggggcttttgtggcaattcaatgagattctg

SEQ ID NO: 12472 - DNA, 120 bp, Homo sapiens
ccccgtggctgtcccagtcattcaggaagtgtccactgtgggctgagccctggactggggacacagcaaggatcaggcagctgggagtacagcctggaggtccccccttgggatgagggc

SEQ ID NO: 12473 - DNA, 120 bp, Homo sapiens
ggccgccagaaactgggtttacaggtcataagggggggaagtttgtcccatatatgggaactcacttaattcttaccccaacacactatgatgggggctgtaattctccctcattttact

SEQ ID NO: 12474 - DNA, 120 bp, Homo sapiens
cgctccgtgttcgccgtccacagcactatgactttgtccagccccgcgctagaccggaagtctcggatgtccctgcggatctgctccagctgtgggttggatggtgagggtgtggggagg

SEQ ID NO: 12475 - DNA, 120 bp, Homo sapiens
tctcggactcacagaggcctgggctactcagttccccgggtgtcaagtgaggcctggattcgcggggtggggcaaaaagagggaaccaagtggcgaagaacaggtggcaggaagcaaggg

SEQ ID NO: 12476 - DNA, 120 bp, Homo sapiens
atgcgggatgggacagcacctgctgcgcacgcgagcctgggatgaggttgtccgcgcgcgcgctctggttggccgcgatgaattcggggatgtaaacagaaggccggggccgcagggcct

SEQ ID NO: 12477 - DNA, 120 bp, Homo sapiens
ctgcggcctcagttccccacaaggctctgggcctccggcccccagtgctggcctggcacattgactgcaagtggcaccgggcactccagacaggcagggagaggaccaggtgcaggaaca

SEQ ID NO: 12478 - DNA, 120 bp, Homo sapiens
cctcgacaccccatgagggtgaggcgggtgtggggccagtacttagagccccggcaacgccctcctgcctgggcacctacctggggtgtctgctggggctccgggggtggcatgggtggc

SEQ ID NO: 12479 - DNA, 120 bp, Homo sapiens
gcccggggcttgtcctcagccgccctctccttgtctttgtgcttcttggacttcttcttgggcttgctgcgcgaggggctgccgtgtggcctgctgggctgggcacagtccgtcagcagg

SEQ ID NO: 12480 - DNA, 120 bp, Homo sapiens
ggccgaggcgcacagtgggggctggggcagccgcctctccgtgctcacagtctcggccgctgtggcccaggtcattgctgacatcggccagggggtcgtgggccctcgggggctccagcc

SEQ ID NO: 12481 - DNA, 120 bp, Homo sapiens
agccgcgggggcaggtgagtgctggagctgagggtgtccgtgctggctggtgggcccggggtgggcagcaaggcctcacggccattgggcacgcccagcttcccgttgacggcaggctga

SEQ ID NO: 12482 - DNA, 120 bp, Homo sapiens
gtgcgatatccggggtttcttgttggctagggggtcgatgaaatcaggaggctgcagccgcttctggagaggagcagagatcattttagaggggagcacagagtggctgagcagcaacag

SEQ ID NO: 12483 - DNA, 120 bp, Homo sapiens
caacgccgcctgcaaggcccacgctggccacatgggggcgcccgagcaccaagtcaggtcccaggtgccgctcagggtggcctcagctggggcccatcagcctgctgggatcgatgcagg

SEQ ID NO: 12484 - DNA, 120 bp, Homo sapiens
gagcgggccacccctggggactggtctaaagcgctgctgtgctcagcatgcttccccagtgataactgtgacacaggagcaggaagcccagggttgagcccacatcagggagccgccccc

SEQ ID NO: 12485 - DNA, 120 bp, Homo sapiens
ccccgtcccaggttccgcactgtgacactggggtgctgcggccacactggcaggaatctgcccccaaccccaacccgacagcttcccccttggtccctgggcggagggaggcggctcaac

SEQ ID NO: 12486 - DNA, 120 bp, Homo sapiens
gggcgaggccgagcgcccacgctcgcctggggggctggaggcagcagggtctccaaggaggctgccagtgctctgtggctggcacagcttcctgcgaaggagaggcagggctaggtcaga

SEQ ID NO: 12487 - DNA, 120 bp, Homo sapiens
gcccggtggagatgcctcaaggaagggacccccctcctcccaaatccagagcagggccaaggggtcacaggagcctgggcctgaggccatcctgcccccgacttcacccaaaggaggact

SEQ ID NO: 12488 - DNA, 120 bp, Homo sapiens
taccggagagaccagggacacacgctagggtgctggaccctgcttttaaagacagctgttcatcctgttcagaacgctcactgcagaaactgtccaaaatgcagaagagaacggagggcc

SEQ ID NO: 12489 - DNA, 120 bp, Homo sapiens
gggcggcagagtggccaccagcttgactaggtgatgcagctggggaagaagggaagaaacaccccagtgcatgccccttctcccgctccatgtgatctgggcaagtggaatcccccaccc

SEQ ID NO: 12490 - DNA, 120 bp, Homo sapiens
ccccgccagcaaccctgcagcttatgggtatcctctctgacccaactgttcaattcccgggggctgtgccatctcagggcagcctagcgcccctccaggccctgcagagagacttaagtc

SEQ ID NO: 12491 - DNA, 120 bp, Homo sapiens
ggccgtggccattctgccagccagtgacacccagagcccatctccctaacaaatgggctaggctacagaccactgcaggtgtcacttccctggtggcctgagaggagagccatgtggaca

SEQ ID NO: 12492 - DNA, 120 bp, Homo sapiens
tctcgttcatacaagaaactggaaacacgctgctgggatgagggaagctcaagtttgtgagaggctctgtggtggccaggtgcacaggtgacatggtgacccagaatgagccagccaggg

SEQ ID NO: 12493 - DNA, 120 bp, Homo sapiens
acacgtccagggaaaccaaaaagagtggctgtgggaacctgagcctggcctgggtggctctcccgccctcctctgtcatctctttaacccccactgccccctgtggtcctggcctgaggc

SEQ ID NO: 12494 - DNA, 120 bp, Homo sapiens
tcacgtgcagccctgtcccaggaaaaccccagctccacccaggttggcaggactcattctgtcaccctggcttcaggggagatgccactcagcagagagctggcagtgagaccaggccac

SEQ ID NO: 12495 - DNA, 120 bp, Homo sapiens
tggcggggagtaggggctgcatgaaggggggtgacacaggcctcaaagctgatgctcgggagagtgtcgtgctgctggcgaaaaggggaagacacacagagggcatggcggttggcgtcc

SEQ ID NO: 12496 - DNA, 120 bp, Homo sapiens
tcccggagccagacaccgaggttctcacaggccctgcctcccctagcacacgaagcgctatggagccctctgattaacgggctgttttgctgctggttaatggttaccagcccgggaccg

SEQ ID NO: 12497 - DNA, 120 bp, Homo sapiens
cagcgggatgggagcagcccaggaatgcggccactttcttcgcactagccaagagcttgcccgggttctgggacaaggtttgaaacgcagcccctgctcagccttctgaatggggtcttg

SEQ ID NO: 12498 - DNA, 120 bp, Homo sapiens
ccacgtaccagtgggctgccatggggccctcagatggcccacgcacagcaggtctgggtatgtctgaggtcagtcccggctccaggttatagggtgtggggaggagttgccataaaccta

SEQ ID NO: 12499 - DNA, 120 bp, Homo sapiens
aggcgcttccgcagggcccaaaggcccgctctgcccttcccgctgacctgaccatggccaccagggggcgttgcttccaccaccgctcaagtccctgccagagtccgttcatctcttccc

SEQ ID NO: 12500 - DNA, 120 bp, Homo sapiens
gggcgatgctggctgactggatccatgaaggaacaccatccagggggcgttccgacaacgatgagcccagtgcaggctctgtggcaggctgccggcagcatggcccaggaccaagagccc

SEQ ID NO: 12501 - DNA, 120 bp, Homo sapiens
attcggtgacctggaagcttcctcatccgtcatggtgacgctgcttacagaggtctcctgcacgggacagctccccactgccctatgtgcaaggacggccattcctgcatggctcagcct

SEQ ID NO: 12502 - DNA, 120 bp, Homo sapiens
aaacgtagcatttccttccatttgaaacataagcaataagctacagtggtatcagcactatctgtgcctctgacgtgctgttagtgcatccaacgatggctgtgctgctatctggaaatg

SEQ ID NO: 12503 - DNA, 120 bp, Homo sapiens
actcgctactcaatctcattattaatgtgttaaaagagtcaatctgttactgggtcacatatttcttttgagcgactgataactctcctgacacacaagtgtgccctctcctcctctctg

SEQ ID NO: 12504 - DNA, 120 bp, Homo sapiens
aagcggcatggccttgggtggatgagtgagcctctctgagcctcagttttctcttctggaaaaatggggccgtgaagtcccactggccaggctgcgatgacaccaggaaaagctaggaca

SEQ ID NO: 12505 - DNA, 120 bp, Homo sapiens
ctccgagaccagaccacaagggtgaccgagaaggaaagatggagcttatcccatggagacaagccacttctacaagtccagggatttgtctgagataataaaggaatggggctggggatc

SEQ ID NO: 12506 - DNA, 120 bp, Homo sapiens
ggccgctgtcaccacagtggcccaccaggccagggggaagctgtgcccacaccttccagaaaagatgggctctgtgctgcggccctgaggggcttgccctgggccctgggcagcataaca

SEQ ID NO: 12507 - DNA, 120 bp, Homo sapiens
tgccgcacttgggaggagagagtgacatgaacatggtgtactctcaacctctgacccataccggcaacccgacaggcaaggcacgcagaacgactgcagccagacggccccacactccac

SEQ ID NO: 12508 - DNA, 120 bp, Homo sapiens
agacgcctggaagggaggcgtgtgtccagctgtctccacctggactcccaaggctcagttggccctgcctcaggccctgccccagaagtgcccagctccctaacaggggctagggaagaa

SEQ ID NO: 12509 - DNA, 120 bp, Homo sapiens
gcccgggaaaggcctgctgggtcactgaccactcctcatagctctttgctctcttgtctgcacacacagatgtccaccagtggggacaatcctgaagacaattgaaaggtgatctaacct

SEQ ID NO: 12510 - DNA, 120 bp, Homo sapiens
ctacgagggcacagtaaagtgagttcatggcctcttgtcccaagcaggtagacagaaacaacaatcagtaccagaaatccatccaaggacaggcaggtccacacagaccagaggccccca

SEQ ID NO: 12511 - DNA, 120 bp, Homo sapiens
cctcgtctgaaaaaacaaaagcagacttccgttcaacagcatgtgaacctcaccttgcacacctaggagttcgttaccctcctcagctcagagattagagggaactctccccacagagat

SEQ ID NO: 12512 - DNA, 120 bp, Homo sapiens
ttgcggtctccccatctgaagaacggtgagaaggactgaccacagccctccatcaccagcagctcaatttgtccaaagaggagcaagccaagcggggctgagctgccttccctggcctca

SEQ ID NO: 12513 - DNA, 120 bp, Homo sapiens
aatcgcagcctcatactccaggctccactcacagacacatgggcatgccaggccgtggcctgtgctgggtcacctgcctcacctcacctcatcgctctatgtagcctcactacgggacag

SEQ ID NO: 12514 - DNA, 120 bp, Homo sapiens
atccggacatccccagaaccaagcatagtgccaagaacacaaaaatgcccgaagaatactgacctgtcaggctccacgatgcacagaaggtgcagcattaaaacataaagtgttcaggga

SEQ ID NO: 12515 - DNA, 120 bp, Homo sapiens
agacgcaaaaccatatgattgtgccactatgacaacacggtacacccaggcgagacagaggagggtgcaaaggtgtcaacagaaattacctggggcaatgagaacagacttgctaatttt

SEQ ID NO: 12516 - DNA, 120 bp, Homo sapiens
agccgtgtctccacttggtcaggagggtccagccctggaggatataattagcatcagactctggggcccactgccaggtcagatggaggcgggaggtctctaggacgcttttatctggga

SEQ ID NO: 12517 - DNA, 120 bp, Homo sapiens
caacggggagcaagaccctaaaacaaaggacacagaagaggccaaacccaaaatgtgcagtatcaatcacaagtctgtgccctgccaggtgccttaaacaaggctgatgccccctgagaa

SEQ ID NO: 12518 - DNA, 120 bp, Homo sapiens
cttcgagcccagggctacgtggagcagagaggcaatcctgtttgtcaggctggcgggttcctccctcaaggtctcccagtcgggatgtcacaatccgggtgtgatgtcaaaactgcttca

SEQ ID NO: 12519 - DNA, 120 bp, Homo sapiens
ctacggccttggccgtgagtcaacagaggggtgggtttccgagtgagcgctgcctgctgtttacacacaatcacagccacggcaaccagctgaaagcacagtcaagggtcacgatgccga

SEQ ID NO: 12520 - DNA, 120 bp, Homo sapiens
gctcgggcccacagactcaagctggcttgtcctcttctagcaccttctgggagaatccacccagaaccaccaaatgctcaccttgaaacacacaggcaaaccataccctggtgcaccagt

SEQ ID NO: 12521 - DNA, 120 bp, Homo sapiens
cagcggccacagtccttcagaggtggcagagcccaggccatgacacttggattctgagttctcagctacttcccagctgggagatcctgcctggtgattcagcctcctccagagtctcca

SEQ ID NO: 12522 - DNA, 120 bp, Homo sapiens
ccacggggaagatgggatgaaatgcagtactgtgggtggcacagccagcactggcggggtggggcaccctccacaggtgtaggtgcccatcacctttccactttcttgggggagggggtc

SEQ ID NO: 12523 - DNA, 120 bp, Homo sapiens
aaccggaggaatctgctcagtcactcacgtcaccaaggttcgggcctcttggggacgcggaaagttgcatttaagtgaggctcaggaccccagtgtgactccccttcaggtcaagacccc

SEQ ID NO: 12524 - DNA, 120 bp, Homo sapiens
agccgagcacccttggacaggtgatgccgcctctcagagcctcatctgtccctgtcgtgaagggggaccataaacttcctctcccggcaagtggtcaagatgatgtgcacccatgggaag

SEQ ID NO: 12525 - DNA, 120 bp, Homo sapiens
caccgggaagggaagataagtcgggcctctggggccctgctgtgagaatggatcacaggctgaagtaaggctcctcctgccaccggtgccaagggtgacatccacacagcccacccactt

SEQ ID NO: 12526 - DNA, 120 bp, Homo sapiens
gggcgacagggcaagaccctgtctcaaaaaaaaaaaaggaaagaaaaactgcacaaagtccaaggtagagtgagaaggccagcagctatgtgtactgctgcgcctttaccttccaccacg

SEQ ID NO: 12527 - DNA, 120 bp, Homo sapiens
ctccgtctcaaaaaaaaaaaaaagaaattaaaaataaaagccctctccacaagttgcaattggcaaactatataaccacagcatcgaggaatacaaaactctggcttctgggtgatagag

SEQ ID NO: 12528 - DNA, 120 bp, Homo sapiens
acacgggtcagtatcgcgcagcctgtgcgactcctgcctctcctctgagcttcatcctgaccatctgcgaaatggggataaacacccccatctatgcactctcaccttgggggctgctgg

SEQ ID NO: 12529 - DNA, 120 bp, Homo sapiens
tgacgggcagggcagctctggggttgctgaatgacccatcctgaagccttagttacagaagtgaacctgagggcctgaggaggagtgacgtgcccaaaggcatacagaaacctccctccc

SEQ ID NO: 12530 - DNA, 120 bp, Homo sapiens
aggcgtgagccactgtgctcagcctatttacttctttatgggttcatcttctgcctcctacatcactcaagactgggctcactgggagggcagggctgcatcggctgtgaccccagtacc

SEQ ID NO: 12531 - DNA, 120 bp, Homo sapiens
caacgcaggtcacagaggaatgacccaacaagggtgtctgggatggctgggaaagaaccccgcttgccatgcagaggccttggggctgctctgcccagtaaccaaccccttaccctatcc

SEQ ID NO: 12532 - DNA, 120 bp, Homo sapiens
ccacgtagctgaagaccagactcaccacagctctgtctctgagcttcaatttcctcttctgtcctagagccctgcccctccctccattttcatcctgagctgcacacagacctggtagtg

SEQ ID NO: 12533 - DNA, 120 bp, Homo sapiens
tggcgtcatggcaacggtagcacagggttgccacagcaacttggttccctagtgacaggcctgagtttcttagcccaggggtggcaatccgccaggaagaaatggggagagggtgtcccc

SEQ ID NO: 12534 - DNA, 120 bp, Homo sapiens
gtgcgaagaggagacttcaggtccctgttgggctccatgcagctcctggcacactctccctcctcagggcccccatgcaggctgttccctccgcctggaggctgttccctcttcgctccg

SEQ ID NO: 12535 - DNA, 120 bp, Homo sapiens
atgcgctaggcgtctcggtcacagctgtgtcccacacaccaaggaggctgctctcaatacatctttgtcgacactctccatccttgctccgccttgcccacttcttccaagccagtgcgg

SEQ ID NO: 12536 - DNA, 120 bp, Homo sapiens
atacgggaacattgcacaatgttctggaatgtcctggaacattctagaacattctgtccccttcttttactgaagctgggacatcatcacctcttcagggaggctctccctgatcttctg

SEQ ID NO: 12537 - DNA, 120 bp, Homo sapiens
gatcgctctcagctcattgccttcaaggcagttattgccatctgaaatggccttggtcattgatcaattatatatctcagatttgtctttcccatcagaatgtacctttcagaatatctt

SEQ ID NO: 12538 - DNA, 120 bp, Homo sapiens
ccccgcagcacggccgacaagaacggggccctcaagtgcaccttctcggcacccagccacagcaccagcctcctgcagggcctggccaccctccgcgctcagggccagctcctcgatgtt

SEQ ID NO: 12539 - DNA, 120 bp, Homo sapiens
ggtcgtcctggctgcctgcagcgactacttcaggtaagtgctggccccaggcagctggaaggggcggctgcctgttgggacagggacagggcagatggcacccactttctaaagggggcc

SEQ ID NO: 12540 - DNA, 120 bp, Homo sapiens
ccccgcctcaaccttttccagcctttcagaggagtcggcagtgggctgggctttggctcaggggcgcagaggcagcaggaagcgtggccaggactttcaccctggcgttttttgttgttg

SEQ ID NO: 12541 - DNA, 120 bp, Homo sapiens
gcccggaccaaccttggcactttggaagagccttcagccccctattctcatcatggccggccaaactatgaactgggctgcccagagcaggccacttatcagttgcaggttagcagagaa

SEQ ID NO: 12542 - DNA, 120 bp, Homo sapiens
tcccggacggccttcccagaagggaggccctgggatatcacacacacatggatctccataagttgctgtgcctgcatgcctggcgctcctgtgtggcagccatcggggctggggtaacac

SEQ ID NO: 12543 - DNA, 120 bp, Homo sapiens
catcgagacaaaagccgagttccctggggacttaccagaacattccagccccacccccgacctgagctcccccaaagagaacccttccccactggaggcatggccccttcaggggagcag

SEQ ID NO: 12544 - DNA, 120 bp, Homo sapiens
gggcgccggcccagggcggggggcgctgctgtatctaaccggatcgattgtgcataaccgtctaggccggttcgtggaatgttcgtggggccccctgcccctccctcagcctccccccgc

SEQ ID NO: 12545 - DNA, 120 bp, Homo sapiens
tttcgtattgtaaactttaaacatgaaaaagctgtttttaatttagcagaaactggcttgaatcttcactttgtgaacgtttgtgtccttcagaggcagaatatgcctgcgcacactcgc

SEQ ID NO: 12546 - DNA, 120 bp, Homo sapiens
tcacgtgggtgtctgggtgcgagatgacacgggctagtaccagggagggggctgacgatgggccctggaagtcgagctgctgggaagtgatcatgggagtgatgaggcaggcagaggaaa

SEQ ID NO: 12547 - DNA, 120 bp, Homo sapiens
tggcgggcgcagcctccaactagtgacccctcctctgggcttggtccttccctgcatcgtgtgtgtctgctgggcactccaaatgtggtgcctggccccgctagcccagaatgcggcctg

SEQ ID NO: 12548 - DNA, 120 bp, Homo sapiens
caccgggtccccagggcctgcagcaggtgccacctggggcctggctaggagttcaggggcctgggtgaagcctttgggacagggctgtgagggcactcaaggggtaccaggtgggccccg

SEQ ID NO: 12549 - DNA, 120 bp, Homo sapiens
tctcgcctttgtcttagccgtcctggggggaggcagcgtcgaaagagctgctcagagaggcgggttcagcccagaccccaagcaagccctgtgtcagcaggcagatgccgttttcaaaaa

SEQ ID NO: 12550 - DNA, 120 bp, Homo sapiens
ttccgcctcgaccggaggtggctcctggcagatcgccccgcggtgctcagaatcccagaggcctgcgggcggctgacccggggcgagcagggctgggcctcctctgccgtgtctgggatc

SEQ ID NO: 12551 - DNA, 120 bp, Homo sapiens
gtccggcacctgtcagaaaccaggcctgacattttcaagatgggcacaggcccgctccgggaaggccccaggcccgtccatgtgggcagcgtcggcgtcgggcttcttgcctgggaccca

SEQ ID NO: 12552 - DNA, 120 bp, Homo sapiens
ggccgctcttggggagggagaccctgtttcaagtggccagcatccccgccagtggtttgcattattcaattggtgataagatttaaaattaaactgcaaaggatctgttcccccagctac

SEQ ID NO: 12553 - DNA, 120 bp, Homo sapiens
tcccggctggggaaagagcctggattgtaactgaggcccctcctgtcttcccttagtgcctcaatttaccagcttgcaaaataagggtacagctgtgtctccctgctcttaggactgctg

SEQ ID NO: 12554 - DNA, 120 bp, Homo sapiens
gggcgcttggccagctggcagggctggagtctcttttgtggggagggaggcccctgtgagccagctgtgtgcgctcagcccccgagggacccttcacacgtcccagccgccacctacaag

SEQ ID NO: 12555 - DNA, 120 bp, Homo sapiens
aaacgtgctcacggcagaccctctgttcagctgggtctggaaatttggcagcagcaaccatgcctgataaaaggcattccgaggcaggcctggtgtttgtatatgtggttctgtatttac

SEQ ID NO: 12556 - DNA, 120 bp, Homo sapiens
ccacgtgcccctgatgctctcatcatcattccctatcgcttcccaagctcggcagatgtttactgaggaactctggtggaccagccatgcagcgaggggtcagctcagctcttctcatca

SEQ ID NO: 12557 - DNA, 120 bp, Homo sapiens
aaacgtggggacccacggcatggagggactgaggcaaaaacaaagttgacagccagaatgaactcagaatgggccaaagacctaaatgcaagagctagaagtgtaaaactcctgtaagaa

SEQ ID NO: 12558 - DNA, 120 bp, Homo sapiens
tggcgaggcgtccgggcagaaaatcctcccccacaacacgcacaggtgatggcgacgggcttctgagcaaaatgcgtgagatctggggctctttgctgggcccttggaggagcacaggag

SEQ ID NO: 12559 - DNA, 120 bp, Homo sapiens
ctccgacatcacttggagctttgggggtacctgtcagagacttggatgccccagggctgggcagaggcctgagggctcttgtccctgtctcccttctcacactggcatcagcccctcctg

SEQ ID NO: 12560 - DNA, 120 bp, Homo sapiens
ccccggggagcgggggatcctgagcatggcactggatcgaggcgcacgccagctcctgcaggcctcgttttgaagccgaggtctcaactgcagggagcagatggcgtgtcccctgggagt

SEQ ID NO: 12561 - DNA, 120 bp, Homo sapiens
gggcggtgacagggctgtggggccggctctgggcagcatgggcaggtgcggcctcacagtagaggcctggagcccttaggggaagagtcctgctctggctgttgatggtaagtggctcca

SEQ ID NO: 12562 - DNA, 120 bp, Homo sapiens
ttccgttccctcgatgaccgtatttcacccctggtggcccatctcagaccctatgagctcccagtcctgggccttggcacctgctgttcctcctcccctgcaaggctccccagtgctgtg

SEQ ID NO: 12563 - DNA, 120 bp, Homo sapiens
ccacggccgcacagtggctcaggctgaagctcccacagtcaccacttgcctggagatctaatgcttgctgcccgctctgggctgtgggctcgtgtgagcagtgcccatctggctggctgg

SEQ ID NO: 12564 - DNA, 120 bp, Homo sapiens
tgccgtggtggggcgggagctgggctggctgagcgggtgggtgcctgagccttggttggttttcagctgttgacccagctgggcttcacgccagcagcaggggttccagccagcgtggac

SEQ ID NO: 12565 - DNA, 120 bp, Homo sapiens
agtcggcacacatccccgcctgcggctgctgggacgcttggagatccctccaaggcccaggcctcctgccttcattccagggtccctctgccttcatcagccttcccagaactccatctt

SEQ ID NO: 12566 - DNA, 120 bp, Homo sapiens
ccccgagttatggggctgcagggtcaaggggtgcgaatccccggggtcctggtcagctcccaggatccaggatccaggtacatcctgtgcattcgctgggctggagaaagtgttcgctcc

SEQ ID NO: 12567 - DNA, 120 bp, Homo sapiens
gggcggccccttggaggaggctcagtgctgggcagcggtgggcccagggggaagagccttctggtacaggcagcacccgtgcaaaggcccggaggtagcgactggtggctccgggaggaa

SEQ ID NO: 12568 - DNA, 120 bp, Homo sapiens
cgagactccatctcaaaaaaacaaacaaacaacaacaacaacaaaaaagaaaagcagagtccccactcagtgtccactcctggcccaggggctgtgctccgaagcctgagtgcctccagc

SEQ ID NO: 12569 - DNA, 120 bp, Homo sapiens
ccccgcatcccaggtttcctgtggcccggggacatagtgtaaacaaagctgcttcagggagttcttgcccctgatgtctggcctcctgggagctggcagctcagcccgtgtagaaagcac

SEQ ID NO: 12570 - DNA, 120 bp, Homo sapiens
acacgtcgtgtgtccctctcacacccgcctgtagcactcactctaggtcggggacacaggtccaggaggggtcacagcctttagggccatatagtcagtgagaggtgaatgtagcacagg

SEQ ID NO: 12571 - DNA, 120 bp, Homo sapiens
tcacgggaggccacaggcgacctatgcccaggtaggtgtggggtgggagctgtaggacccccaccctacaccccctccctctgccacagcccggagctggcctgtttcatctggtgtgac

SEQ ID NO: 12572 - DNA, 120 bp, Homo sapiens
cagcggccaccaagggctcccagcacagaccctgggcctcacccccaggccctcgagagccacccaataacacacaaggttaatcttaccatcggctccacttcagctcacaggaaacag

SEQ ID NO: 12573 - DNA, 120 bp, Homo sapiens
gggcgaggtgctcagccgggcaggtggccagttcccgggctttacttccgcctccggtgtccagggccccctaggaagctggggcggtggggcagccagctctccacgcactgccaggag

SEQ ID NO: 12574 - DNA, 120 bp, Homo sapiens
gaacgagtcggccttgttgtgtacacagtgtccaccctagcaaccgcccctgccgggccagagtggacaaccacccctccttcctgcctgcccagccccacctctcctcacggtggctgc

SEQ ID NO: 12575 - DNA, 120 bp, Homo sapiens
cctcgggtcgtgccacatgggtcaggggcctctgttactggcaaatcagcatcagccacatgaaggggaggaggccagcttccagccctgttcagagtcagcgtgacccatcagggagct

SEQ ID NO: 12576 - DNA, 120 bp, Homo sapiens
ccccgatgccatcagggagtgggaagcagggatgcagctgagatgaaggcgctcagctgggcccagcccccaagaggctgggaaggaccatgaggaaggaacatggggctcaggaccctc

SEQ ID NO: 12577 - DNA, 120 bp, Homo sapiens
tgccgtcgggatcacaagtcccacgctttgaaggccatcaccacgcttctgagacagcttcctccgattcaggccagtgggaagccgcctggcctgccaagtcacagcctctggccgtga

SEQ ID NO: 12578 - DNA, 120 bp, Homo sapiens
gcccgccagtgcctctcttgcccattcactgactgaccgaatcagcagcaaggcagccagctccccaggttcacggtcatgggtttctgcatggtgcattgccccgcctggggagccgtc

SEQ ID NO: 12579 - DNA, 120 bp, Homo sapiens
tcccggcacctcgggtttctgattctgccatttttggtggagggacacctggtttccttaagcatctgggtcatgaggtcctgcaaacttctgcacttaggctgtcaatcccaccacttg

SEQ ID NO: 12580 - DNA, 120 bp, Homo sapiens
acggtgcgcctcctccggcatacagagtgcgggccatcactgatgctgggcgtgttctttgtcacagcccttcctggccaggttttctcccctcctgcccttctctccctttcctgtttc

SEQ ID NO: 12581 - DNA, 120 bp, Homo sapiens
tgtcgcccgaggcccacagcccggggggaggtcccacgcatcccgcctttggggccaggcaaggcagcagcgtctcaaagtctcggttctttgcattttcagcccagcggatttctgggg

SEQ ID NO: 12582 - DNA, 120 bp, Homo sapiens
cagcggctcctgtctctctggtaaatgagcccccaggctgaggccgcggcgtccccggcgccagcctgcaagaccccgacccgtgtgcgggcgctggggatccctgagctccccaagcgg

SEQ ID NO: 12583 - DNA, 120 bp, Homo sapiens
ggccgcccctgcggctcccagggaggtggaggtgtcccgtccgccaaatggaaatggatccactccgcacccccatctcgggaagtgcgtatggtcgcgtcgagaggccctggggactct

SEQ ID NO: 12584 - DNA, 120 bp, Homo sapiens
agccgcgcatccccatctggggtccagcagagcagaatcccagcatgtgccccaaagctgcatggtccgtccctatatacacacacacacaaacacacacacacacacacacatacacac

SEQ ID NO: 12585 - DNA, 120 bp, Homo sapiens
acacgtgtgcacgcatctcccaaaccaggccagcaggcaggacgtggcgagcccgggtgtggccagcccccgcttcattctgcctctgacttggctttggctgcctcagtttccctctgg

SEQ ID NO: 12586 - DNA, 120 bp, Homo sapiens
catcgtcacaggcccacgtctcccatgcccacagccttttgggggcaagagccacggaaagacccaaaccagcagagttcatgctggatcgaagaaagacttgggggtccccagggctgg

SEQ ID NO: 12587 - DNA, 120 bp, Homo sapiens
ggccgaggctgggacaaagcagcaatcctagccatggacaggcttctggagaggagactcactttagtatcagagtctcattttgcccggctgcccagagaaggcataagggctcagggg

SEQ ID NO: 12588 - DNA, 120 bp, Homo sapiens
ggccggactgggggattggctgcatccaaagctggcagagcctgctgatctcaccccagtcagatggcaagtgggcaacacagggtcagggcgggctcctggcagccccgggggcatgag

SEQ ID NO: 12589 - DNA, 120 bp, Homo sapiens
ggccgggcatgtagcagggcctggggagggccagcctggtgccagccccaggtgctgggaggaagccccatccagccaagcagtgggccatggctccggaaggcgcctgtacttggctct

SEQ ID NO: 12590 - DNA, 120 bp, Homo sapiens
ctgcgggggagggtgtgtgggggccgcgtctcaatcaagagcagccctgggctccacaaggaagcctcccaggaactcgcgcttggccaggtgggccccgaaacagtcctgggctggaag

SEQ ID NO: 12591 - DNA, 120 bp, Homo sapiens
tgacgtaggtgggggtaggaggccgtccaggcccggagagagagggcggaggcctgtctgcacctggtgagactggggaggagggctgcctaggccggctacatccctggcacccggcgg

SEQ ID NO: 12592 - DNA, 120 bp, Homo sapiens
gggcgctggccccgagcttgtgccgctctgcctggcctgtgcatgccagctgcactgcacgcccctgccaccctggctcccgggaccccagctcacaccccctccctaccccccagtgct

SEQ ID NO: 12593 - DNA, 120 bp, Homo sapiens
gagcgatggccgagggtgctccagagtggggggccctgcgatcagactctggggccagcgctggggccacagctggtaaccattgtttggatttctctctctctgtttccatctcctcct

SEQ ID NO: 12594 - DNA, 120 bp, Homo sapiens
cctcgggcctggacaccagccggaccacccggcaccatgggctggtggacagggtgtaccgggagcgtggccggctcggctccccacaccgccggcccctgtcagtggacaaacacggac

SEQ ID NO: 12595 - DNA, 120 bp, Homo sapiens
ggacggcagatatccttttcaccagaggatgagggtgggggccaggccctgtcggtgccggcaggaccccaagtttacccagcaggttctgacagggctgcctgcttccagctctgggga

SEQ ID NO: 12596 - DNA, 120 bp, Homo sapiens
taccgtctggccgaggtgtgcagaggctctgccatccaggtttgtgtaagttgccctgtgatcctcatgcacagccatgaaatcgccggacaacgcgttttttcagaagtcacccccatt

SEQ ID NO: 12597 - DNA, 120 bp, Homo sapiens
gatcgttcttatttctatcttactcagagaggagaagagacagtctgaggtcacacagccagaattagaactgaggcatgcaagaccctcaagcccttcatacccgccctctctgtcctt

SEQ ID NO: 12598 - DNA, 120 bp, Homo sapiens
tttcgctggcccgagcccctcattaactgggatgtcttctcggcccaggacctcctggccagagcatctggccggcgccccagccagccccacaccaggccccgtggttccaggagcccg

SEQ ID NO: 12599 - DNA, 120 bp, Homo sapiens
ggacgggtgcctgcatgatggggccccggggcccttcctggcagacgtctgctcagccaggagacgtgtgggcgccccggctccctgcctcccgcccccaccgttgcctgcctttgtgaa

SEQ ID NO: 12600 - DNA, 120 bp, Homo sapiens
agccgccctgccctgggcgggccgggctgtaggcccccagtctgcggaattcatcagggcggcaggggagggcagcttggcgacctctgcatcctcagcctgccttgaactgggagagac

SEQ ID NO: 12601 - DNA, 120 bp, Homo sapiens
agacgtactggaggcatctctctagaaggaacaaaaggcaggggtgggatggggggctctgagctttgaagtccaggagacgccccccgactggccgtgtgacctttggcaggtgccacc

SEQ ID NO: 12602 - DNA, 120 bp, Homo sapiens
gtgcgtgcaggtagcacgtgcccatgcaccccagccaggcgggctggaggggcctctgtggggtgctgctccccatgagcacctgtccctaggctcgcacaggtgctgcatcacacagca

SEQ ID NO: 12603 - DNA, 120 bp, Homo sapiens
ggccgaggggctgtctggggtgctgggactggcagtgggagatttggtgccgtccctaggggagctcccatcactcctccctggcccttaattttgtgccaccttgtgttctgccatgac

SEQ ID NO: 12604 - DNA, 120 bp, Homo sapiens
tcccgctgcctgaccccgtggtggggttaggtggcctatgggggccatgccagggactgttggccatgtcatttgaggtgctggtacttgggagtggcatgaggagccccagtggctgtg

SEQ ID NO: 12605 - DNA, 120 bp, Homo sapiens
atgcgctgtctgcctttgctgaacatagaagaggcgccttcagtgagggtgtggcctcggttgccaagggtatctcagtgttcagtttctacttcatcctcaggagagggctgccttgaa

SEQ ID NO: 12606 - DNA, 120 bp, Homo sapiens
cttcgtagtgtttgatgagccttacactgtggtgggtctggcatcatgaagctgtcctcagggcacactgctgtcagtctgtaaaagtcaccctgctccttgtggtcctcagtcatggga

SEQ ID NO: 12607 - DNA, 120 bp, Homo sapiens
aggcgggggttagaccagctgtgtgggggaccggggggtgtagaaggccaccagtggcccttttttggccaggtaggtttgctagagaagagtgaaatccagtcagaacaagggaaactg

SEQ ID NO: 12608 - DNA, 120 bp, Homo sapiens
catcgaggctggttcttctgcactgagtcctggaagctgcagcctcactcaggtgacactgcgttctgctgcaggttgggcccgaaggcatcctgcagaacggggctgtggacgacagtg

SEQ ID NO: 12609 - DNA, 120 bp, Homo sapiens
cttcgaggaagatgaagaagacacctattacacgaaggacctccccatacacgcctgcaggtgagctgagctcagctgggcctgggcatgtgctggacaggtgggtgcctctggcatggg

SEQ ID NO: 12610 - DNA, 120 bp, Homo sapiens
tggcgcccttgtgctgtgactctgggtggcggtgtcctcgggagtaaggaaattgctcaggccatgtgcacagccaaggcctgttaccggtcaggaggtgggctcagcaacctccgacac

SEQ ID NO: 12611 - DNA, 120 bp, Homo sapiens
ctgcgcactcactcatagaaagaatttgtcatggcattgggtgagcatctggggtgggagggtgagtggagcagctgagataccctcacaaagcagttgctgcagggttctggggcatcc

SEQ ID NO: 12612 - DNA, 120 bp, Homo sapiens
tcccgctgccttggccgtgcctggagaattggatgtgaagacagtagttagtggatagacctgcatgttgacaaatttagaattctcatctcgagtgggatcgtcccttgttgaggctta

SEQ ID NO: 12613 - DNA, 120 bp, Homo sapiens
ctccgaggaccggccctgcccatccctggcgttcactcctcagcttcctcccatggggtgggcggcttccctcctctccctgatttgtggggtgtttctcttttgcacctgatgcgttaa

SEQ ID NO: 12614 - DNA, 120 bp, Homo sapiens
taccggcctaggtcagcctgaggttggtttgtcctggccgcggcagctcctgcgcccctccattgtggagggcgcccttccgtctgccctgcgtcactgggctgggcctggccccgctct

SEQ ID NO: 12615 - DNA, 120 bp, Homo sapiens
gttcgggggctcttgggtcctggggcgctgcaacccctcattttctttccttggggtgcagatgaattggggtggcagggaaccgagcccacagtggccagcccctgcggccccaggtca

SEQ ID NO: 12616 - DNA, 120 bp, Homo sapiens
ggccggcctggacagagctgcccagaacggtctgcggccgggtccacatgagtctaggtgcctctgagggcactgggacggcggtggcctgcacctgcccagcccagtgaggtccctggc

SEQ ID NO: 12617 - DNA, 120 bp, Homo sapiens
tcccggggccctccccagggaactggccctgggcccagaccagatggaggaccccgaaaagaacagggcaggtagcagcctgaggctagggctggggaaggggatgggagctgacgggga

SEQ ID NO: 12618 - DNA, 120 bp, Homo sapiens
cctcgttggcgcccgggagccatccttggcgtgtgacccggagccggcactcgccccctgggacggaatcgtggctgcgtgggttgggtggaggctgggtgaggatcagcgtcccttcgt

SEQ ID NO: 12619 - DNA, 120 bp, Homo sapiens
tttcgctgtggccctcaggcaacagggcaggcccccaacccccaggcctgcgtgggcactgtgggtgcccagcctttacgtcctcgcttccttccaggccccggccttgtctggcttccc

SEQ ID NO: 12620 - DNA, 120 bp, Homo sapiens
gttcggagagccccagaagaggccgggctcttcctccttggtgatggacgggtgctgggccctgaccgagtggtgaccgcctccagggagtgatctgcgccctcggaagctgctgagtct

SEQ ID NO: 12621 - DNA, 120 bp, Homo sapiens
tggcggctcttgtttgtgggggcagggggagctgggcacccgccctgtgcccacggaacacagcccagggtggcggccctgcctgtcctctgactgccctcctgctgctgctgctgctgc

SEQ ID NO: 12622 - DNA, 120 bp, Homo sapiens
ctgcgagggcctcaggcgcaggcggtgactctcggggccactcctgaggtgggggatgtgggctagcggccaccgtgggcggcaggtgtgcaagcagtgctcccgttttccactgggctg

SEQ ID NO: 12623 - DNA, 120 bp, Homo sapiens
caccggctgtgggtcagcgccccccactgaggctcaggctgaggcgaggctccgcggggtgggcgtgtgccagggtgaggctccgcggggtgggcgtgtgcctgggcgaggctccgcgag

SEQ ID NO: 12624 - DNA, 120 bp, Homo sapiens
agtcgggggcagcgcccaggtcaggggcttctccgtccatgtcaggcttagggtgggtgtggctgggccctccctctgctgtccgcccacgaccccctcagaggggctgtcgtgagatgc

SEQ ID NO: 12625 - DNA, 120 bp, Homo sapiens
aggcgggatccagccctgagggtgcagggagtgctcagcggacccccgtgccactgctgtcaccggaggaggctgctgctcggctccgggctccatctgcaaagccgggtgtgcatctgt

SEQ ID NO: 12626 - DNA, 120 bp, Homo sapiens
tcccggccggccctgaggccgggcacagggaggccagtgctcatccagggggccagagagaaagtagcaaccccaacctgcctgggccacaacagccaagaccactgtatcagaacagac

SEQ ID NO: 12627 - DNA, 120 bp, Homo sapiens
agacgccagcggggcagcctgctcgttggccgggcggagcagggtcggcacacagcccgggctggccttcaccccagctcccgacagcgttgggtccctgagtgcagggcctgccccttt

SEQ ID NO: 12628 - DNA, 120 bp, Homo sapiens
tgccgagaggccctgcgggagccaggacctgagaggtgatggtcaccacccagacgaggggccgggggtcgcacaaggaggcttccagggggatgccaggagcagtggggccctagaccc

SEQ ID NO: 12629 - DNA, 120 bp, Homo sapiens
cagcgctcacgtcacaggttctgggggttggggcttgtcatctgtgcaggtgcagctgggatggggatttggtgctttttgttctgcaaaagccagaacgcatgtagctgagccaagatc

SEQ ID NO: 12630 - DNA, 120 bp, Homo sapiens
ccacgcatcctagccggcaaggccactctgtactcagacccggcagctgtggctgtggcacaggcgcttaccctgcggcattggccctttcagtggttggtgttgaccctccacagaggg

SEQ ID NO: 12631 - DNA, 120 bp, Homo sapiens
tggcggttacagactccagcatcgggacacggggccgtgggtcatacccacatccgtgggggctgtgagacagccgtccagaagcttctgtctccgggccaggaggacaccccagagagc

SEQ ID NO: 12632 - DNA, 120 bp, Homo sapiens
gctcgttccggaatttagggctcagcctcgatgaacctggccaggcggcggttgatgggttaattcagttaatcacacatcactcagggtttctcagcagaaggaactgaccaagccaat

SEQ ID NO: 12633 - DNA, 120 bp, Homo sapiens
ccacgccgcaaggagcccgatgttaagttgtgaatgactttcatggcccatgtgcacgctgggcgaagccccggctttaacggcaggtgcctgcccggcactcagctcgtgggaggtctt

SEQ ID NO: 12634 - DNA, 120 bp, Homo sapiens
gcccggagctggcgtcaggtggctggagtgactgttctgtggtgatgatactgctgtgtgccactcccagcttcaccatgtaaaaggccgcacctggcccacctggctccgtcccttctg

SEQ ID NO: 12635 - DNA, 120 bp, Homo sapiens
tcccgggtcggggtctgattgcccgggcaggcgtgaggagcagggccgaggactgagcctctcattggccaggggtgccttccctggggtgggggtgcctgaagatgaccatcaggcctg

SEQ ID NO: 12636 - DNA, 120 bp, Homo sapiens
ggccgttcccagtctgtgattagctgggccagggagctgaatcatccccggaaatgtggttaaatttattgctggtgctgccggagctcctgcgggagggcatttggcgtctgttgctgg

SEQ ID NO: 12637 - DNA, 120 bp, Homo sapiens
gtccggggaacccaggtgcacccccagtcagtgtctgtcgtggtgggaatcagggtccctgggaaagagcgcaggatgggcaggtccgagaggccacggcagtggatcggcctcacgtgg

SEQ ID NO: 12638 - DNA, 120 bp, Homo sapiens
aggcggtgcccatggcacccatggcaggcactcagcccgatgaggttgtcagatgagggaaacaggcccacgcagtggtcatgatgtggctgcatcttcaagagcggccgcccaggggcg

SEQ ID NO: 12639 - DNA, 120 bp, Homo sapiens
tggcggcctggaccccaggcatgttttgtggccctgcttcccacctcctgcctcactttacccacctgttaaatgaggatgaatggtagttgccactcgtgggcagaagggttcagcagg

SEQ ID NO: 12640 - DNA, 120 bp, Homo sapiens
atgcggcagaagtgtgtgtcctatgagtcaagcagcttctcccaggcgagggcagctgttggggtcactgttggctgtttctgtgttcccattggttgcacccagggccccaggaggccg

SEQ ID NO: 12641 - DNA, 120 bp, Homo sapiens
acccgaaccagatcccaccccagcccttggggaggctgctgggattccacctctgcgcagaggctgggcttgggccacgaagcctcactgccggtccgacggcctgtggctcaggaggcc

SEQ ID NO: 12642 - DNA, 120 bp, Homo sapiens
gcccgggctccgtttctcagccaagagactgagcttttcccaacaggagctgtggcctcccaaccccgtgtgtgtgtgcacgctcagacacacgtgcagacacatgcagacatgtacaca

SEQ ID NO: 12643 - DNA, 120 bp, Homo sapiens
caccgttctggaggctggtgagccccagattgagggtggcgtctggcaaagaccttcttgccatgtcatggcaagaaggcatggtggaaggcaggacggcacagaccggagggggctgga

SEQ ID NO: 12644 - DNA, 120 bp, Homo sapiens
attcgccctttagtcaggaacccactcccctgctgatggcattcactcatccacgagggcagcgactcagatcctctctctaggccccagccccagccccagcagtgctggattggggac

SEQ ID NO: 12645 - DNA, 120 bp, Homo sapiens
tgacgtctgtgctgcttcttcctcccttgtcacggtcacacctccctcactcacctgtgggacagcctcactgggcgtggccgtggtgtgtgccgtgaggtgtggagggtgccgtctccc

SEQ ID NO: 12646 - DNA, 120 bp, Homo sapiens
tcccggcttgagcgctgagtttgtccccgtggctcaccttgtttctgtcaggttggtttcagcgttgctggggcaaggctgagggtaaacatgagcgactccaaggccagggagccctgt

SEQ ID NO: 12647 - DNA, 120 bp, Homo sapiens
ccccgcactccggccattggagctgtggcgtcctccctcctgtgtgtcccccggaacctcctgagcctctctggagctgttctctgccaggccccgtgggctctcctgccctctgcatgc

SEQ ID NO: 12648 - DNA, 120 bp, Homo sapiens
catcgcgagtactgccggaggaggcccctttggctttcagagcccagagcgcccgacctcctccaggagtctgcagatccacaggcctcagatgctgccacacccacccagcacacaccc

SEQ ID NO: 12649 - DNA, 120 bp, Homo sapiens
acacgccagccgcacacagcggtggggttcaggcgaaggtttcttccacagtgcagagtagaagagccgggaaggaccccatcaccatcagatgcatcagagcttcaaaggcccgcccat

SEQ ID NO: 12650 - DNA, 120 bp, Homo sapiens
agacgctgccaagagcatgaggccagccaggctggggaggacgttggcgagcatccgcctgcccgtcagggagccacagctggatgatacatcgacagacagcagagggacggtgtagca

SEQ ID NO: 12651 - DNA, 120 bp, Homo sapiens
aggcgagggcttgtcctcctcagcctgggggagcgcagctcagtgcttggtggtcagcacgtgactgacactttgccggagaaggggacggctgcccgcaggaagagctacacagccgtg

SEQ ID NO: 12652 - DNA, 120 bp, Homo sapiens
gttcgccggaactccgctctggagagtcagaactggagacgggagggcgtgcctcaagggcagatgggcaaaccaaaccccatcctccctgtgagccgcggcacagcaccaggcgggcac

SEQ ID NO: 12653 - DNA, 120 bp, Homo sapiens
acacgcagcacgacacggcgaggagcccaccgcaggggcagccttttgggcggggaaggggggatgaatccactgtgaatcccacctccgaagggcagcgcaggaaggacacgcaaatgc

SEQ ID NO: 12654 - DNA, 120 bp, Homo sapiens
gaccggtggatggtagctgtgaggatggaccgtgtggcaggtttagttctggggcctcggcaatgagtgttgggtgtttggggcacggctcctgttgttttacgaggagaatttcctaat

SEQ ID NO: 12655 - DNA, 120 bp, Homo sapiens
taacgtgttacactggggagaacgtaggaggggagcccatttgttctgaaaacgcggggaccagccctggtccccggctcaggactggaggggttgccctggtccctggctcaggactgg

SEQ ID NO: 12656 - DNA, 120 bp, Homo sapiens
tcccgggctcagggctgcagggaggcacctggtcttccctcgtcctcacgatcctgcaccctcaagatgccacgttgttgaggctgtttagggaacttgacaagctgattggaaactgtg

SEQ ID NO: 12657 - DNA, 120 bp, Homo sapiens
atgcggacagggcagtgccagaaggagccccagcgattcctgtgctgcaaggcacgcccaggacggggcactagccgggggaagaggctctcagggcccaggtgggaccccagcctcaga

SEQ ID NO: 12658 - DNA, 120 bp, Homo sapiens
caccgggctttgggactttgaatccaccttagcagggtttccaaacccattgtctccacggccaccctgccagtccagctgcagcagggcggaacaaagtggaggcctctttcttgcttt

SEQ ID NO: 12659 - DNA, 120 bp, Homo sapiens
tcccgactggactcagggcccggtggccacttttagacacgggtcttcccggctgtaggacggacagccggaatgccacacactgtttccacccccgctcaacaccgatcccaaggcgct

SEQ ID NO: 12660 - DNA, 120 bp, Homo sapiens
gggcgcggcgcgggcccaccttgacggcgtactcctggctggtgatcaggttgatgcaggtctgcactcgggcatgagcgccctcccccagcacatcttcctgcagctggtagacgtctg

SEQ ID NO: 12661 - DNA, 120 bp, Homo sapiens
tgccgggcagcggggcgggcgtgagagggaccctggcttttccccgctcccggctcccccaatgcccgccatccccgctcaccttcaaacctgcccgagaagctgtcggtggcccggccg

SEQ ID NO: 12662 - DNA, 120 bp, Homo sapiens
aggcggttcccgatccccgctctttgcctaacaggagcctgtcccttcccagcgccgtggtgccctctaggggcgaggtgcagcagcacagcgctgacgggcacagggctaagggtccac

SEQ ID NO: 12663 - DNA, 120 bp, Homo sapiens
gcccgggctgcccctctctgccatgctgctgaggtgcaaaataccaaattcgtgagccaaagctggtcttccgttaggctccggactcacgacgtttcacgctggaagggaccccggaga

SEQ ID NO: 12664 - DNA, 120 bp, Homo sapiens
tatcgagggcttagcatactgtcctaattctcctgatagtcttttcttctgtttttagattgacatatgactcacatcccacacgttttaaccttttcagttacagttcaggagtacagt

SEQ ID NO: 12665 - DNA, 120 bp, Homo sapiens
gcacggccttgggtggagatgctggggaccgaggccaccacggggtgggggactccctggcctgtgactgcccgagccccaggcctggatggtgctggggaccgaggccccctcccaagg

SEQ ID NO: 12666 - DNA, 120 bp, Homo sapiens
gcccgaatcagttaccttgtccccaaattatccatcctttcatccatccttccacctccccatccacccagccacatatcaaatcatccattcatacatacatacatctacccacccatc

SEQ ID NO: 12667 - DNA, 120 bp, Homo sapiens
gtacgaacccaaccgtgctgctctagacatgggccctgggatgatcacccaacctctgtgtcccggctctgcctgtcccctgggctctccaggaacaggtctgtgctggaaacgcctctt

SEQ ID NO: 12668 - DNA, 120 bp, Homo sapiens
ggccgaggctgcttttactagacatccactctcagttgggggtcctccaggccctgcacacccacccaccatgagagggaatgtcaccgcttggcctttgggattcagaaaaacctggtg

SEQ ID NO: 12669 - DNA, 120 bp, Homo sapiens
cctcggtccacacagcatcccacaccacaaggcacctctggacaggaggcagtgcgagcaagaggggacaggggcagtaactcggggtgcactgcctggtggggacactgtctccctagc

SEQ ID NO: 12670 - DNA, 120 bp, Homo sapiens
ggacgaaacaggcgtggggcagagggcacggctcgcgggagttgcagagcgagttcaccctgctactgcttctgcggggcactcatttttagaagtacacttacgtggcccccaaaataa

SEQ ID NO: 12671 - DNA, 120 bp, Homo sapiens
tcacgctgccaaggagagcaggcaagggcaggtgacaccgctgtcaatcagagcatttccagccctcacacctgtgagtcatctggctcccaggaacattctctgttccagtaaggcctg

SEQ ID NO: 12672 - DNA, 120 bp, Homo sapiens
ctgcgcctgtgagaagcgcttggctgaatcctaggaagggggacttgggccgacagccccctccaacctgcgcagcctcaggacactcaaaccacagctgcaaacactgccagccagaca

SEQ ID NO: 12673 - DNA, 120 bp, Homo sapiens
tcccgcggccaccactttgagacagcgactccctgtgacaagaaaactctgaaaccaggcgaggcagggccctctgtcagatgatcactggggaagacgctatggacagacaggaacttc

SEQ ID NO: 12674 - DNA, 120 bp, Homo sapiens
tgccgtgggccctgacagtgagcaggaggaaaggggtctcacagaagcaggaccccgatatgagggagcaggcccagcaccccttcctcccgcccccagcccctatccagagagcaggct

SEQ ID NO: 12675 - DNA, 120 bp, Homo sapiens
tctcgcttcagatgcgtagaacccagtgcttccggctgcaccctgcaacatcccgcagcagtctgtgggggtccgcaggaagaagactcccccgtgagggggagctctgtggagcggcac

SEQ ID NO: 12676 - DNA, 120 bp, Homo sapiens
tgacggcagccactagccactcggctgtgggcacccgacatgtggctggcgggaaggagctgtgcagagcacagaacatacaggaaacgaccaggtgtgctgcactcgccccacacacgc

SEQ ID NO: 12677 - DNA, 120 bp, Homo sapiens
ggccgtggccaccataaagttattttggtaggaaatgtttatcaactcttggcaaaggctgtcagaggccggacagaattggaaactccggttgtggaaagtgggattggcatgtgtgga

SEQ ID NO: 12678 - DNA, 120 bp, Homo sapiens
gcccgcgctagtgatcgctctttttatagcgggcggctgacggccagaagtccgcgttcctgcctgaggctgctgggagggcctgggcggccttaggctgcttggcagctctgtttagat

SEQ ID NO: 12679 - DNA, 120 bp, Homo sapiens
ctgcgttagcaatttcgccctggcagctcctgggtctcggaggagggtcttgtgggtggagaggggcagggctgtctctggaatgcttgcttggaagtgttttgtttttctttgacaagg

SEQ ID NO: 12680 - DNA, 120 bp, Homo sapiens
tgtcgtgagcttaggtgagcccctctccacagagagtcaagcccagagggccacgcggctgcactttacctggctctccggcctcactggcatgtgggagggactcttgtctggggtcag

SEQ ID NO: 12681 - DNA, 120 bp, Homo sapiens
cagcggtctcagcctcagtaaacctcgagatcctgtgcccctccctcgagccctgcccattccctggtcagcaccctggtgccccacaggcagacaagcgtgttgctggcagggtcctgc

SEQ ID NO: 12682 - DNA, 120 bp, Homo sapiens
ctgcgtgccgacctgctgctgtggatttcacgccacctgcctcgcatgtcggggcctctcgccaccccccctcattgggcgtgatggtgtgctgggcccttccctggtttagtatgaaga

SEQ ID NO: 12683 - DNA, 120 bp, Homo sapiens
cagcgtgcagatcaacagccgcatggcagggtccacagggaggggcctgcagggccctgcacagagctctgtgtccgtggagttggggagcactaaccccaaagctctgcaccctgtgct

SEQ ID NO: 12684 - DNA, 120 bp, Homo sapiens
tttcgggttttcacggaggcttctcggagacttgcttgatgattgcctccatctccagtcccctctttctaagcttcttaccgcagcttgggctttacctcacccaggagccccccacaa

SEQ ID NO: 12685 - DNA, 120 bp, Homo sapiens
agtcgcttccttacaacagaagacactcctgtcacctagaagttcccagggatcaggagctttgttaggaactagagtcccctcggatgagtgggtgttgtcgggctgagccctttcaca

SEQ ID NO: 12686 - DNA, 120 bp, Homo sapiens
cagcgagcgtgtcagacgctgtgctcacggcgcccctccacgtgggtgtgtggcgtccttcctcttcgcgtgggatgggcttagccaaggctggaaggacatcagggacaggctgggcag

SEQ ID NO: 12687 - DNA, 120 bp, Homo sapiens
cttcgttggagctggcagggccacctgagggaccgagccattagggcttcagaccaaggacagccccagctcctctgagcacctgcatttgcacagcctgccagggaagagtctcttccc

SEQ ID NO: 12688 - DNA, 120 bp, Homo sapiens
ctgcggggaaggcgggaggcagcaggccggctctgtgggttcctccggcccgcatggtgcctgctggccctctgcaccacctgggctccttccacccccgtgtccttcgtcctccggagg

SEQ ID NO: 12689 - DNA, 120 bp, Homo sapiens
ggccgtgctcccggggctgtcggcaggctcttgttcttggtgtttgctcctcttaagttctcttgctttatcctatgcagctgctggttaaggaaaacatgaacttggcctgtggagcac

SEQ ID NO: 12690 - DNA, 120 bp, Homo sapiens
ccccgtagcaggcttgcccccaccccggaagcccctctgagcccaggcctggctgggccgcgtggccggtgtttcttgtggctcacgtgccccacagacagtgggcactccctggagcac

SEQ ID NO: 12691 - DNA, 120 bp, Homo sapiens
ccccgatgctgttgggttgtgggcacttaggtaatgagggtttgccttgcggccagggcaaggagggcagagttgctgcggggggactgagtctcactgtggaccctgctgtgccgtgtc

SEQ ID NO: 12692 - DNA, 120 bp, Homo sapiens
tgacgtgacacactgctgacgtgacacactgctgacatgacacactgctgacgtgtgaatgagttggagctttggaaggacacgctcacagagcagtgtgggtgggggtgaggcatcttc

SEQ ID NO: 12693 - DNA, 120 bp, Homo sapiens
gcccgggcagaggcctggtggtccctgggagaccccagccgttcacctgcctctggcgatggtggctgtccccagccagggcaaggaagaccctctaaggccggccccagggtttcccac

SEQ ID NO: 12694 - DNA, 120 bp, Homo sapiens
cctcgagccctctttctctcctcacgcctccagcacacgtggacctcggctttgcgcgggagcctgggcaggtccagactgcctcagggctcagtgcttccctgcaccggactctcggcc

SEQ ID NO: 12695 - DNA, 120 bp, Homo sapiens
ggccggccacctcgcttgtgtgtcaaacctgaaatctcctgcatcagggcggaaagcgaggcttctgccagaagggtcttggccagctggctggtggctgtccaggcagggaccacacct

SEQ ID NO: 12696 - DNA, 120 bp, Homo sapiens
atgcggctggctcctgcccgcatgaccagggccttcccttgcctttttcagcttcgagagcatgcagaggctctgcgacaagtacaaccgtgccatcgacagcatccaccagctggtagg

SEQ ID NO: 12697 - DNA, 120 bp, Homo sapiens
tcccggacccctccagaccccttatgtcaccgcctcggggcacagagctccccttagagcccctggggattggaatgtgcagcgtggggggacgatgggctgtgggtgagtggtgtgggg

SEQ ID NO: 12698 - DNA, 120 bp, Homo sapiens
tgccgaggctgggctgtgtgctgtggccgtgtgccaaagcagagccgtccgtggtttgtgtgctgaggcagggccctgagggttgtggtgtctgcacacgcctctgcagccctgggttgg

SEQ ID NO: 12699 - DNA, 120 bp, Homo sapiens
gcccggtgtgggtcccctcaggcatgtctgtccttgagcgtgtcttcaggaagcatgagaggcagggcgtgggccctccctgtgggccctcagtcacctgccctggcccttagtcacctg

SEQ ID NO: 12700 - DNA, 120 bp, Homo sapiens
gaacgcccagctcctgggtgcggctcagcagctcctcagccactgccaggcccagaaggaggagatcaggaggctgtttcagcaaaaattggatgaggtagtggaccccagagggcaggt

SEQ ID NO: 12701 - DNA, 120 bp, Homo sapiens
gggcgcaggctggggtggtccatgtccgtcggtatggcttcctgtggcttcctgtctatgcctctgtccagctgtgtcccaggggctgggctgcaggggtggtcatgcctgggggcttac

SEQ ID NO: 12702 - DNA, 120 bp, Homo sapiens
ccccgccccatgtccccagctgggtgtgaaggcgctgacctacaacgacctgattcaagcgcagaaggagatctccgcccataaccagcagctgcgggagcagtcggagcagctggagca

SEQ ID NO: 12703 - DNA, 120 bp, Homo sapiens
aaccgcgcgctccgcggccagagcttgcagctggtgggtgccgcggcgcaaggacagggacgtggaaccagaggggccctgcctgggcgggtgtgtcctctgtgcgggtgggaggctctg

SEQ ID NO: 12704 - DNA, 120 bp, Homo sapiens
gcccgcctctgttgtggggtttgttcccagacgaattgcgccacctgtgaaagcttgtcgagcgcgtcacagcaggcaggcctgggcccctcggctggatggtttctcagcggccctggg

SEQ ID NO: 12705 - DNA, 120 bp, Homo sapiens
gctcgaggtgtggggtcatgcgagcatcccaccatcgtggtgtgggtgctggagctgcctcatctgtccgtggggggccccagtctccgcgtgttccgcatcctcagcctgctattccag

SEQ ID NO: 12706 - DNA, 120 bp, Homo sapiens
aaacggggtctgtgccctaagcacacatgctgttggctgaggcaggcccagggaaccctgccctgagagtgtggggtgtgctgggcaggcagccagccagtcgcaactgtcccatcccta

SEQ ID NO: 12707 - DNA, 120 bp, Homo sapiens
gctcgctgcgaggagctgcagctggactgggccacgctgtcgctggagaagctgttgaaggagaagcaggccctgaagagccagatctcggagaagcagaggcactgcctggagctgcag

SEQ ID NO: 12708 - DNA, 120 bp, Homo sapiens
ctgcgcgcgaggctgcactccgtggtgtccgagcctctcccatcagcctccctgtgacgtcgttgagcctagggtggttgcggttgcagcagcctaggaagaaggtggaggaggacagtt

SEQ ID NO: 12709 - DNA, 120 bp, Homo sapiens
ggccgcaggctgcccgtgtggatgactctgcctcactctagccctcagctctcgggggcatctcgggattgcttggctgaatgcgcagcgctaacctaggatttcctgatttcctggctg

SEQ ID NO: 12710 - DNA, 120 bp, Homo sapiens
ccccggcggcctcccccagccagctgcaggcctcaacactcactgtttccagctgggttctgggtctcctggggcacctgctgcccctgacacacagggttttctctctgcagaggagca

SEQ ID NO: 12711 - DNA, 120 bp, Homo sapiens
tcccgtgctgcagccccgtgacccctcgtccacacttgaaaagcagattggtgctaatgcccacggtgctgggagcagaagccttgccctggcccccgcaggtaacgcccctcctgtgcc

SEQ ID NO: 12712 - DNA, 120 bp, Homo sapiens
aaccgccacgcctcattactgacaccctttcctgcatcccacgagctgggatgcggatcgggctcagctgcagccatctcggcctcatacctgggtctcccgacactgacacctcctgct

SEQ ID NO: 12713 - DNA, 120 bp, Homo sapiens
gcccgtgaggtcggccccagtgctctcgggggctcctgtactcacagctgggaggcccctgactcaggatcggctccacacacagcagtgcccaatggcacacgaccgtgggcctccgtg

SEQ ID NO: 12714 - DNA, 120 bp, Homo sapiens
tagcggcatggtttctggttccttgagaaggtgccgcctgagcagtctctgctgttagcccagtttctgcagagagccagagaggatgccactttggcttttgttgacactgcaggcctg

SEQ ID NO: 12715 - DNA, 120 bp, Homo sapiens
agccgcagagacagcatgtcagcgggcatggctgtgtgccagcaaaactgtacttaaaacagcagaggacatgagacccccaggctggtttgctggccccaggttgagatgcggtatgat

SEQ ID NO: 12716 - DNA, 120 bp, Homo sapiens
tcacggttggccacgtgagggccctggagaggccaccgaagcccgggcagttctgccctcgcagggctgggttgtgcccttggggtgaggtctgctctgcgagaggcagtgacagtttca

SEQ ID NO: 12717 - DNA, 120 bp, Homo sapiens
aagcgccttgctgcgcccctgcactgaggcctcattggcagaagcagggaggccgccctttgtccccgggtggtcatggaagtgcaccactcatcgtgggctgggaagcatggctgcggc

SEQ ID NO: 12718 - DNA, 120 bp, Homo sapiens
aggcggccatagcttggagtatccaagctgagttgtcttctgagaacaggagggagggaggccacgcagccatgggctttcctcatggtgtctctgagatcacggggccagagggcaact

SEQ ID NO: 12719 - DNA, 120 bp, Homo sapiens
cagcggggagcccgcaccaggaggcttcttgggaggcagcgtctcagccgggacctgcagggcacaggcagcccagatgggcgggaggaggcacagggtcagccctgagccttgagcttg

SEQ ID NO: 12720 - DNA, 120 bp, Homo sapiens
ggccgttttcagactcccaaccccttccccacttccccgcctctcctggagcccacagagctcctagggggtggtgctcccacagcaaggctttctctttggccatcctgtgtcccctga

SEQ ID NO: 12721 - DNA, 120 bp, Homo sapiens
tcccggcaggcttctcctacgctggctcggtggccatcagcggggccttggcgggcagcccggcctctctcacacctggagccgagccggccaccttggatgagtcctccagctctggga

SEQ ID NO: 12722 - DNA, 120 bp, Homo sapiens
caccgtggggtcccgcagctccacgccacagcaccccctgctgctggcacagccccggaactcgcttcctgcctctcccgcccaccagctctcctccagtccccggcttggtggggccgc

SEQ ID NO: 12723 - DNA, 120 bp, Homo sapiens
ctgcgcggtggctcactccagacactgaactgtccttcctttggcagagaagacggccacagggctcggcagaagttccgggggtcctgaggagggaagagggagagagccagggagacc

SEQ ID NO: 12724 - DNA, 120 bp, Homo sapiens
ggtcgcgagaggagggactacaggacgggcaccagccatggagtggcctgagtgtgttgggttccagctgcccgcagctgggttcctgcggtgacgccgcaggactgaggccagccctgg

SEQ ID NO: 12725 - DNA, 120 bp, Homo sapiens
gggcgaggctcacggggtgccaggccagggggctgggagctctagctcctagagcagtctccagggctccatccgcaccaggcccaggtcactcatgacgggtggcgtggcttggtgctg

SEQ ID NO: 12726 - DNA, 120 bp, Homo sapiens
aggcgcccagcatgtagcaggcacggtgccggctgcagaggtcctggagagccagggtggctggctggatgcctctggtcggggctgtctggccagtagcctcggatgccctcataggga

SEQ ID NO: 12727 - DNA, 120 bp, Homo sapiens
tcccggcggggtcgagaggcaagctctgtgccctgcgtgttgaggcccccttgctggacacggctgatggccacactgccctgtggtcatggcccacagccgaggggctttcagctgctc

SEQ ID NO: 12728 - DNA, 120 bp, Homo sapiens
agacggtgcccacctttgagaccagaaggaagttggaagcaggagtgattttgatgatgtgaggccttcagggaatgtcctgttcactcctcccccaagaggctgtggagactgtggccg

SEQ ID NO: 12729 - DNA, 120 bp, Homo sapiens
acccgtgccctccagggacatggcgtgcctggcggcgtagtgcaaaggtgccctctgcttgcccctggccttctgcctcaggggcccctgggacacaggccttcctgggcgagtccaaag

SEQ ID NO: 12730 - DNA, 120 bp, Homo sapiens
caccgggcaaggagaggaggactgggagccaggagccaaggcggaggctgtggccagggctggtcagcctggcgggtcaatgcgggcacctgcgggctggacaagctatgctgggtctct

SEQ ID NO: 12731 - DNA, 120 bp, Homo sapiens
actcggctgtgtgtctcctttggaggaaggctggagcttggccggcgtgtccaggtgtcaggctccctggtctgtcacggggcacgcccgtcgtctgttgtggttagaggagctggcact

SEQ ID NO: 12732 - DNA, 120 bp, Homo sapiens
tggcgtgtgtgctcgtgggaggcctcggtccccagcctgggtgagtgttgggctcccccaggcgcgatggtaacctcaggccgctcttcccgctgtgcccttctgcaggtaactaggatt

SEQ ID NO: 12733 - DNA, 120 bp, Homo sapiens
ctccggggcgtgggttgcgcccttgcatgtgaaggggcctgcgcggtgacgcagctggccatgtgctgcgcgatggtgctgtgaggacggcgcgggcacgttgaacaagtgcatttactt

SEQ ID NO: 12734 - DNA, 120 bp, Homo sapiens
tctcggctgtccatggctcgcagcatgccctgcgatgcggggcaggcctgtcgtgggtcccttggtgtttctgtacaggagagagtcacactaatgagtggcagtattttatagagatgt

SEQ ID NO: 12735 - DNA, 120 bp, Homo sapiens
gcccgcggcgcacccgcagccagggcccgagcgctcggagccagggaccaagcggtgctccgcggccgcgcagctcaggcccgggcccccagagcagcgcctgcagcgcgccccgcgtcc

SEQ ID NO: 12736 - DNA, 120 bp, Homo sapiens
gtccgggacgccgagggccgcaagcgggtcagctgtgctgccaggagctccaggcccgcggccaaaggcgtggtcgagggcgcagcaaggctgagcagcgctcggaggaggctgcccagc

SEQ ID NO: 12737 - DNA, 120 bp, Homo sapiens
ctgcggcgcgtgggggcccggggatcccgggggtccagggggctgcagacagacgcggccaaagtcagtgaggagcaggcgtgggggccccgtcgtcgcacagccccgaggtgccaccag

SEQ ID NO: 12738 - DNA, 120 bp, Homo sapiens
ctccggccgcaactcgactagggccgcgccccacgcctccaggaacttcagggccgcgctcagctgcagcagcagcagggccacagcccacacgaactcctccggcggctgcgtgcaggc

SEQ ID NO: 12739 - DNA, 120 bp, Homo sapiens
atacggatgctctgtgaaccctaacctggccgagaatgcaccccctcctgtctttgataggctaaaggcacttggatatcaattctggggggcccttggggttgtcatggtaagcagagt

SEQ ID NO: 12740 - DNA, 120 bp, Homo sapiens
tggcggttggggttgcacgaacttcagccctcactcatgtcgagccccctgggccatctgtacatcgtggtgctggcctgggccctcccggccacagctcagggagaacgggctgttgtc

SEQ ID NO: 12741 - DNA, 120 bp, Homo sapiens
gatcgatctcagagcagtcttcagggatccaggatccaagtcaagccatcaagctcatctgcaggcctggcctctgaatacagggtaataggtttgaccctcagacccattttacagatg

SEQ ID NO: 12742 - DNA, 120 bp, Homo sapiens
agccgggcaggagcagagctgcttttgagcccttcccgcaaagtcctggagggtctgtcctaacctcttggttggcagccaagcccctttctggctgaggttttggcccaacagtggttc

SEQ ID NO: 12743 - DNA, 120 bp, Homo sapiens
tcccggtctggtgcctgaatccttctgcaaaacctcagctcctgcttgtttgccccccgtgacaggatgcccaccatctgcagagcaaccgggcggtgacctcagggaagctcttccttg

SEQ ID NO: 12744 - DNA, 120 bp, Homo sapiens
agtcggcctgtgaccccagctttggtcctggatctgccccacctctgcaggtgcagagacccagcttcctccatcaccttctcccgaggacccgggtccaggcctccctgcagggtgaag

SEQ ID NO: 12745 - DNA, 120 bp, Homo sapiens
cagcgtaaccccggccacgcggagccaaccccagctccacccttcctctcccacaggccagagtcctccctcgctctgggcctcccgccactgccaggcctccgtcccccaccccgaact

SEQ ID NO: 12746 - DNA, 120 bp, Homo sapiens
agccgggctccagttcgcccccaacattcaacgcgctcctcctgttctggcattggtgtccccagctgccaaatggaactggagtagggggaggatcaggccagcccctgcaaaccgcgg

SEQ ID NO: 12747 - DNA, 120 bp, Homo sapiens
ggccgtgtgggccacagggtgccggtcacagctgctggctcgggctgcctgggtggaggcagcttcggtaatgagtccatgtgtggctgaactgcggccggtcagctctactcacaggca

SEQ ID NO: 12748 - DNA, 120 bp, Homo sapiens
catcgtgagacagtcttgttttgatccctttctagctatttaaaagtcataaaaacaattctcagctcaaaagcagcagcaaaacaggcggcggcacgtgtacgcggtgggaccaccagc

SEQ ID NO: 12749 - DNA, 120 bp, Homo sapiens
atgcgtgggtgccagggccagggatgggacaggcagtgatggctgatggggacagggcttcctgtaggggagacagagtgctccgctctgacagcggtgatgactgcgctgcctgacctg

SEQ ID NO: 12750 - DNA, 120 bp, Homo sapiens
tcacggaatacaaaagaacaaatcccagccctgctgcttagggcttgcggggagcaggcaacagagatgctctgagacccaggtgcaaaggcttcgggggctgagacggtctctgtggct

SEQ ID NO: 12751 - DNA, 120 bp, Homo sapiens
ccacgctgcctgccccacccctcaagcttcgccgccttgggccacaacttgccaacttaggttagggctctctgacccggtggtgatctctgccatctgatcctgctccgcagtgtctgg

SEQ ID NO: 12752 - DNA, 120 bp, Homo sapiens
agccgaggcccagcagcagctccacctctgcgctcactgaggggcgtcccgcagccaccccctccctgctctccttcttacccctgtcatctttcaggtgcttcctccagacaccaaccc

SEQ ID NO: 12753 - DNA, 120 bp, Homo sapiens
ttacggtgctgccctctgcacgcccacgccaatctcaggaagcaggcaccaccaatctcgggaagcaggcaccaccaatctcgggaagcaggcaccccgggcattattctgcctgcctgt

SEQ ID NO: 12754 - DNA, 120 bp, Homo sapiens
ggccgagagcccgtccacggctgctccacacacaccgagggccgccctgtgcggtggtgcgggggagggtctgcaaactacgacccccaggtgaacctgcccgccgctcctctctgtaag

SEQ ID NO: 12755 - DNA, 120 bp, Homo sapiens
tctcgctggcccaccaccacactcgcccgctcaggcgctgaccagggtggctctcctgctctgctggcatagctcagtggttgtgacagagaccatctgggctgcaaagctaaagatatt

SEQ ID NO: 12756 - DNA, 120 bp, Homo sapiens
tgccgtctggccttctacagagaaggtctgcccgcctgcatacaagcttccgtccacctccacaggcttcagcttccacctccacggctccctctctctttgctcaagtccctcccctgc

SEQ ID NO: 12757 - DNA, 120 bp, Homo sapiens
gcccgccctcctcacggggagagatgtgagcactgaggtaggtaggtctctaacatggagccaaggtgcccctcctctggagtgtgggctagggcctgtgactctgacgggacaagatgt

SEQ ID NO: 12758 - DNA, 120 bp, Homo sapiens
ctgcgcttaggttatgtggcaaagacaaggaactttgcagctgtaattagagcccctgaatcagctgactgagccaatcaagagagaaacaccctgggtgggcctgactgcatcaggtga

SEQ ID NO: 12759 - DNA, 120 bp, Homo sapiens
ggccggtcccaagggtggtgggcagtgggatgaggccgggagctggtgggcttggctctgactgccccgtgccccccaggatccccaacaacagcctgccctacttccacaagcgcccgc

SEQ ID NO: 12760 - DNA, 120 bp, Homo sapiens
gcccgtatgctgctcctggcgctcttctgcgtggccgtcagcgtggtgtggggcgtcttccgcaacgaggaccagtaagtgctgcttcccccgggccccggcgggcagcggagtcctcgg

SEQ ID NO: 12761 - DNA, 120 bp, Homo sapiens
ggccgccccagcctggagctgcttcagcaccgcgtgatgaagagccctggccccgggctgctctgacagggctgcgagggcgtttcacctggggtttgtccgggtgtcatgggaaccctg

SEQ ID NO: 12762 - DNA, 120 bp, Homo sapiens
atccgggaggagaggccggagcccctgtggccaggagccacgtcctccagcctggatgggactcctttgtggggcatcgctgcccagggccacagtctgtcccccgctgtccctttcctg

SEQ ID NO: 12763 - DNA, 120 bp, Homo sapiens
ccacgtgcacgccgcaggttcgaggcccagggtgtgggcaccagggcacccggtcctcttggtcatgactgctgcggcttctgagcagtggtggaggtggggcaggcactgctcccccca

SEQ ID NO: 12764 - DNA, 120 bp, Homo sapiens
ccacgctcacctcccacgtggcctggacttgtggctgcctcccgctggccgggcctcccccatgaggccgagtgcctggtgccgtgttgggaggacagagctggcccgtccccgcccggt

SEQ ID NO: 12765 - DNA, 120 bp, Homo sapiens
caccgctgtcgctgataccatctggcacttcctcccagccttcctgaggcagccaagtacgcttggctttggtgtgtattggagccacggcacgtttaactggcagaaggaagatgtgaa

SEQ ID NO: 12766 - DNA, 120 bp, Homo sapiens
aagcgagacgccctatttaagaaataatataaaatcagaaaaaataactggccgcagttctctgggtgcttgaagtacgtggcgcctggaattggctgtaccagcgtctcccatggaggc

SEQ ID NO: 12767 - DNA, 120 bp, Homo sapiens
agccgccccgccctggagatgtttttatcccattttcaaatgaagcctttgatgtttgagacgctgaggaacgctggggaactcgtccagcaagtgacaggcagagcctgcattgggggc

SEQ ID NO: 12768 - DNA, 120 bp, Homo sapiens
cagcggggaggggactctggggcttcgtggggccaggagagagccgaagttgcggctggctgcaggggccgtggccttgtgcaggaggcagttctgtgctttgccccagggcaccaaccg

SEQ ID NO: 12769 - DNA, 120 bp, Homo sapiens
acccgtgagaaggtgtgtcttctgactgcagggtctcaggttgccatgggtcaaggtgttgcgcggagcggatagggctcgaggcatcccgcggccgggtgagggtcctggaggacattg

SEQ ID NO: 12770 - DNA, 120 bp, Homo sapiens
tcccgtctttgcagctgcccatggtcctgaaggtgcccaggctgaactcctcacctctggccctgtgtgaccggcccttctccctcctgggtttcggagacattttggtgccaggtactg

SEQ ID NO: 12771 - DNA, 120 bp, Homo sapiens
aggcgggtggagcacacgggtccacgctgtggggcagggccccgggcggctgaggtttgcctttgggagtgagtggcccgcacaccgtcggctggagataaagccctgagggtcagagtc

SEQ ID NO: 12772 - DNA, 120 bp, Homo sapiens
agtcgggcaggttggggccgttgaggcctgggtgcctgggcagcgagggcattgcctgggtggggtagggaccccctttgttcctagggagcggggaaggccccccgattgcagacagcc

SEQ ID NO: 12773 - DNA, 120 bp, Homo sapiens
gctcggggttgtgcaggggtccttgctggggcctggatcccgggtcccagtgagctcatgttgctgcagaaggcagagactgtaccctcgcagcctcagtgtccccagggtcctgccagg

SEQ ID NO: 12774 - DNA, 120 bp, Homo sapiens
tcccgagcgagcgtgtggcctgtctgtgaaatgacagcagccaccaggcagcgagaggcccacggcgcccacaggtgctcaggtgcccgcccgctcccaggaagcccctgctctgaggct

SEQ ID NO: 12775 - DNA, 120 bp, Homo sapiens
gtacggggccgcgggagagaaatcccggaccctgggactatgcagcccgtgagggccccagtcccgacccgtccattccactgacctccacccggcaccgccactcccacccggggagtg

SEQ ID NO: 12776 - DNA, 120 bp, Homo sapiens
tggcgccagattttaaaaatctcagcctaacggctgtggctggctcccagcccggaatgcgagcctggagcccggattccggaacctggatctggaggagcccggattccagagcctggt

SEQ ID NO: 12777 - DNA, 120 bp, Homo sapiens
gctcggattccggagcctggatctcggggagcccggattccggaacctggatctgagggagctcggattccggagcctggatctccaggagcccggattccggaacctggatctcaggga

SEQ ID NO: 12778 - DNA, 120 bp, Homo sapiens
caccgcgtccggcattcgagtggctttcgaggtcactacagtaggggaggtgtacggagcactttctatgccaagcccattctaggtccttgttttgggtaaacatttccacaacctgac

SEQ ID NO: 12779 - DNA, 120 bp, Homo sapiens
tgacggctgcaggtgggatttgaaccaggcaaacgtgacctcagacagagcctctccttctccctctctctgcgaggcatagtcccagacctgccagcctcttgctgtgcacagtttccc

SEQ ID NO: 12780 - DNA, 120 bp, Homo sapiens
cttcgccgtagcctccgctgccacctggcgtggtgatcccacctcctcccaccccaggcctgtcttacaaatgtctgcaagttcaaatgatgactcagctccatcccgaaacctctcctt

SEQ ID NO: 12781 - DNA, 120 bp, Homo sapiens
gctcgttttgttcatctttgcagaaaaacatgatgtcagagcccagccgctgccaatcacttcctggctacatccggagtgacacgcagacccctccccgcagcccccaaagcccgtctc

SEQ ID NO: 12782 - DNA, 120 bp, Homo sapiens
tcccggctctccctcttgcttactctgttccacccccagggcctccttgggattcctcaaatgcaacaggtgaggtcctgcgtcagggccttttcaaacactgtgcctgctgcctgggac

SEQ ID NO: 12783 - DNA, 120 bp, Homo sapiens
tcccgggacccccttctctctgcagaccaccgccaagagcccagccctcagagccccagaactccctgcagcttcccagctctaggccttggcccctgtgatctccacctcgtggtcggg

SEQ ID NO: 12784 - DNA, 120 bp, Homo sapiens
ctccggggaggcgagggaggaaccagggtgggtctccttggaggaagcagagagtcacggagtcttgcagagagaggctcagagccctgcacgtcactttctccagcccccaccccagag

SEQ ID NO: 12785 - DNA, 120 bp, Homo sapiens
ccccggacatgtaggtcacgcgacccacagctttacagatccctagggatccaggagggacccccgagacccagaacgacccatagccacacagtgggaaggccaaggacctgctcccca

SEQ ID NO: 12786 - DNA, 120 bp, Homo sapiens
ggacgctgggccagggagaccgcaggcacacgggacagccacaccagagctgcatctggagaaggggtggggggtttcctctcgccgctcctcgctattctttccctacattgttccgtt

SEQ ID NO: 12787 - DNA, 120 bp, Homo sapiens
ttccgtgctcccagttcccaccccactccctccacccggacgccggcggttcccaggccccggagccggggtgcattgggggtgggggtggggtagagtgaggggcctcgtgaagagcgc

SEQ ID NO: 12788 - DNA, 120 bp, Homo sapiens
ctgcgggccaagaccctcttgcgcatgtgacgagagcgcacgagtgtgggagcttcggcctgcgctcacaggcgtgtgcgtggggaagtgtttgggccgccgtgtacacagcaggcacgc

SEQ ID NO: 12789 - DNA, 120 bp, Homo sapiens
aaacgcttcttggatggctccatgcgagggaagggagggagggcagagttcaggccctacagggaggaaaagggaggggcggaggcctggctttaggtttgaatctccgcggcttactag

SEQ ID NO: 12790 - DNA, 120 bp, Homo sapiens
aagcgtgactcagtttccctcgtccataaaagggaaagccgaatcgccctcccacgtgtcgaggtgaaactagacagtgcactaaggcacttagcaaaacgcgctgccttgagaaccctt

SEQ ID NO: 12791 - DNA, 120 bp, Homo sapiens
ttacgccttccttccttccacctcaccccctggccagacactctgggggtggagaggggcgctgacccaggccccagacgcccctcccgtccgccctccctagcaggcaggagtcccggc

SEQ ID NO: 12792 - DNA, 120 bp, Homo sapiens
tcccgttccttaaattggataattggagacagaggcgggtgctcgagacggagaaatccccaagtgggcgaaaggcaaggggcctgtcctagtttccctgcactgggggcccccaccctc

SEQ ID NO: 12793 - DNA, 120 bp, Homo sapiens
cctcgccagcgctccctccggtgcgccctgggcgcgcagtctgtgcgctcgggagcccccagcgccggctgtcgaccccctccagagcccggcggtgccagcctccctctgttgcccgcc

SEQ ID NO: 12794 - DNA, 120 bp, Homo sapiens
aggcgcggtgtctgcggccgccccggcaggaggggttggggggtccgggccggcggcagctccggcggcgtctccctcctccaagcccctggcggcgggcggccgggccgagggcggggc

SEQ ID NO: 12795 - DNA, 120 bp, Homo sapiens
gggcgtctgcacagaccctccttttgtgagcggcgccttccccgggcggcctggcgcgcagggctcgggcactgcgccagggcccggaatagcctccctgcccggccgcccgccccacgc

SEQ ID NO: 12796 - DNA, 120 bp, Homo sapiens
ccccggcggagccgcctgacctgcccggtcgggcgcagaagagcctggggccgcggtggcacaggaaccgggtgcgtgctcagctgcacggggctgcagccgctactctccgctgggccg

SEQ ID NO: 12797 - DNA, 120 bp, Homo sapiens
ggacgcgtgcagccgggcctactgtgcgcagcccgtcttttgtgtgaaaacgcccgctgtgtgcagatctccgtcttcgtgcagggcctactgtgcgccgcaccccccttccatgcaaag

SEQ ID NO: 12798 - DNA, 120 bp, Homo sapiens
gtgcggcccctctcctgcgtgcaaacgcctgctgtgtgtgacccttttcttgcatgcaaggcctactgtgtgcagagccctaccttcttgcagtgcctacagggtgcagcccctctcctg

SEQ ID NO: 12799 - DNA, 120 bp, Homo sapiens
tgccgccgatcttcctccccagcctctgatggggattctaggggctgctggggcccctgcaattgttttggcatgagtgtgcatacctgtgtgtttgtgtgttgggtgcacatgctttat

SEQ ID NO: 12800 - DNA, 120 bp, Homo sapiens
caccgcgcccggcctcactgagcatgttttgaaggcgagtgcgttcctcttgactgctgaactttcattctatgaaccgacctccgttgacctgttcccctctgaatggaggggtatttg

SEQ ID NO: 12801 - DNA, 120 bp, Homo sapiens
ctacgtgcatttacctcctggtctctgtgtgctcctaagttgtgtatttctttcagatagtaccaagagaagtgaggttgctgggtccccgtaaccttatagggtaaatactattattac

SEQ ID NO: 12802 - DNA, 120 bp, Homo sapiens
gatcgggagaatagacgccgccaggcctcctgtctctcgctttcacacaaaggcacatacggcagacacggacccccatcactcatccatcactttcccatcactcaccgcagaccctcc

SEQ ID NO: 12803 - DNA, 120 bp, Homo sapiens
ccacgcagaaacccagggctcccccacggtgcacgcagcacccaggctgcccgccctccacccagggccgcgtcacgcccgacacccccggaacagacgcctatgaggcctgcagctcca

SEQ ID NO: 12804 - DNA, 120 bp, Homo sapiens
agacgggctgcagacacacagcgatttgttcatctttccagccaccccgtctggtcctgacagtaattagctcccagactggtggggagacggtgaacagcctgagagtcatcgcccacg

SEQ ID NO: 12805 - DNA, 120 bp, Homo sapiens
ccacgcccacaggccacgggcaccgggagagagggtgaatgagtgtgtgtgtgtgtgtgagtgtgtgtgtccggaatctgtactctccagccagggctccccatcctcctgcaaagggcc

SEQ ID NO: 12806 - DNA, 120 bp, Homo sapiens
caccgtgcacgggtacccacggcgccttccaaggggaacgtgcacaggcatacccactgttcattccacgaaggatcgtgcacacgcatgcctacctttgcatttcacgcgggattgtgc

SEQ ID NO: 12807 - DNA, 120 bp, Homo sapiens
acacgcatgtccaccgtgccttccacgcgggatcgtgcacacgcatgtccacgaactcctgcacacctacacccaccaggcctgcccatgcgatgcgtccctgcagacccactgtggacg

SEQ ID NO: 12808 - DNA, 120 bp, Homo sapiens
tgtcggcgtcctgcgcatcccgcgtgagtggagtgtgcactcgtggagggggcgactgagtgcggggcaagcgcaagcgcaagcacactgggctcgcggagggtggagagaggccgtgcg

SEQ ID NO: 12809 - DNA, 120 bp, Homo sapiens
gcgcgttcccggggctggcgcggaggtggggtcagcggcgcgggagaacgccccgccccgctaccgccagcccggaagacccacggcggcgggcgctggcgtcacgggtttccactgggg

SEQ ID NO: 12810 - DNA, 120 bp, Homo sapiens
ccccggcgccggggccgggattccctggcgcaggaacgcccgtgacggcggcgcctgcctgcgtcggccacgctgggaggtttgagcctggggatgacatcagcccctgcgtttctggag

SEQ ID NO: 12811 - DNA, 120 bp, Homo sapiens
gcccgggcgggacggggacttggagaaagcagtgacacccactttcgttgactgccaacccgtgcagagcgcttagtgcgtgtccgaccgtgagctgagcgctgtgatgcgggtgctgtt

SEQ ID NO: 12812 - DNA, 120 bp, Homo sapiens
ggccggcgcactgcccgccccgccgggcccccagagtgagggcccggggctgggagcagccttttcccagcgccctctgcagtgtagagtcccaccagcttgtctcccgctctctcctgc

SEQ ID NO: 12813 - DNA, 120 bp, Homo sapiens
agccggctcagagagggtctgcgggtgtcctggcaccacccagcaagttgggtgctgcagccagctctgtccatacagttggtctctgcccagctgcggtggccaggggcggtgcctgag

SEQ ID NO: 12814 - DNA, 120 bp, Homo sapiens
gggcgcccgggcggcccggtggggtgtgcccagccgctgccttcctgctgacgccggtgccaagggatctaaatatagcctgggaggaggcaagggctatttttaacgcgagtggcttgg

SEQ ID NO: 12815 - DNA, 120 bp, Homo sapiens
tcccgggtcaggagccctttggtccaggattttggggaggggcaggggcgagggggagccaggggccccacacccgcctgggcctgcccctctgcccacacctggccctggaagactcta

SEQ ID NO: 12816 - DNA, 120 bp, Homo sapiens
ggacgaagggccgtagagggagggcagggtgggggggctgtcgcaggtcacctttcttaaacgccacctcctctctagctgccgaccagccctggccttttgttgggcccagagactgct

SEQ ID NO: 12817 - DNA, 120 bp, Homo sapiens
agccggttcggggattcctccactcaggctggccgccctgcctctcctcctcctcctcctcctcctagtcgtcttcctcctcccggcagacccaagggcggcctccttcatggagggcag

SEQ ID NO: 12818 - DNA, 120 bp, Homo sapiens
agccgcctcgcctggccagtacctctgcatcccagatcctctgtcctcctttggaccccaaggatacctgggacctgggcccttcaaacggccaggagcctgtgggacagctttggggtc

SEQ ID NO: 12819 - DNA, 120 bp, Homo sapiens
agccgggggacgctcatgcccacagagtgagcccgccggctgcggcctgtgatgactcggacctggcctgctttctagacttctatttgggaagcggccctcctggacgacagaaatagc

SEQ ID NO: 12820 - DNA, 120 bp, Homo sapiens
ccccgaaaatagctggcattgtggctccagcacgtggcaccttggcaccaccccccatgcccactgcgctgggctggtgagccccaagatcgtcgccgttgaggttctgtggttctggtc

SEQ ID NO: 12821 - DNA, 120 bp, Homo sapiens
ggtcgccgcgttggagctggggatgtaaaacctcaggcgggactgggagtggggacgggtcaaatcctggctccccccgaggcccgacattcaaaggggcggtgggggcccctcctcaac

SEQ ID NO: 12822 - DNA, 120 bp, Homo sapiens
caccgccctccgcccgggctgggggctggcacccactcgtaaaaggaaaaccacttcaaccagggctttctctcttttcagcccgaaggaatgctttgaatgctcaggtctgtcctcagc

SEQ ID NO: 12823 - DNA, 120 bp, Homo sapiens
cctcgtgggaggcagacccctcccctactggttggatcccggccagcagcagcgtgatggggtctgggagggctcagagctgcgctggagggagactcaccggccgatcagaaccacctg

SEQ ID NO: 12824 - DNA, 120 bp, Homo sapiens
ggacgactctgtccgcctccccgctgggagcaaagcaagggccggtcaccccttcctaataaattcccgtggccaataatgacaagctggtgacaggtgctggagagctgagttctgagt

SEQ ID NO: 12825 - DNA, 120 bp, Homo sapiens
atacgtggggtgatggctgattttatgggtgcactagggcgggccatggtgccccagggtttggttaaatgtttttttgtttttgttttttttctgagatggagtctcaccctgtcgctt

SEQ ID NO: 12826 - DNA, 120 bp, Homo sapiens
gtgcgtgggcccctgctcgggggtgggtgggctgaatccaggtgtcctgggctgtaaagccaagaagcagacagcaggcctggggtggttggagattttgcggggaccctgggggcgctg

SEQ ID NO: 12827 - DNA, 120 bp, Homo sapiens
gaacgaaggcagccccaagccagcaggaggaaggaaattgtaaagatcagagcagcgataaacgagacagagatgagaaaaactggcgagtcgacgaaaccaaaagttggttctttgaaa

SEQ ID NO: 12828 - DNA, 120 bp, Homo sapiens
tagcggggctgaccaaaagcaaaaccaaaaaaaaaaaaaaaaagaggaaataagatgcagataactacacgcagaaacgaaaggaggacattactaccaactgtatggaaataaaaggca

SEQ ID NO: 12829 - DNA, 120 bp, Homo sapiens
ccacgcaacaccacatccggctaatttttggccccagacgtcacccgatgtcccccaggggctaggatcagccgcaggttaggacccctgggttggaggtttcaccacggagagttgcgg

SEQ ID NO: 12830 - DNA, 120 bp, Homo sapiens
cggcggcaagaagacaccaggaggaagtgacctgcacacaatcaccagatcgtccctgagcatctggctctagggtctctgcctggaccgaagcattcccaggtgcagacccaggggtct

SEQ ID NO: 12831 - DNA, 120 bp, Homo sapiens
ctccgacctcacctgcgtaccctgcgttgcttcctctgccggggaagctcacccacgttctcaggtcctgggcggaagggcagagggctccccgggcacaatgtcttctgatgagaatca

SEQ ID NO: 12832 - DNA, 120 bp, Homo sapiens
tagcgcctgggatggcagaggctctggccggtgaggacaacagccggcgtcagctcgggggtcggtacgcaggcggccaccttgtaacggccacaaacgggcttcaaaggggaggcaggc

SEQ ID NO: 12833 - DNA, 120 bp, Homo sapiens
acccgggcctcatgcagttcacaaaaagctgtaactcgaggcagcatcacaccgaccgtggaagcatggaagggagggggacgctgtctcagcctccaggagctacctggcaggctgagg

SEQ ID NO: 12834 - DNA, 120 bp, Homo sapiens
aaacggcctgttgtggtgtaaaaggtccccgggtacaatttgtgcagcagaaatacggcacttcacaggctgcttagaaacctagcaagtcccttgagcacaaactattttcctaagctt

SEQ ID NO: 12835 - DNA, 120 bp, Homo sapiens
gggcgtgagagggtggccggggactggtgacaatgttgtttgtgcactgggagagtccggctgaattgcaactggcctttacatcctaatcagctccctgaggacaacccgaaagacatc

SEQ ID NO: 12836 - DNA, 120 bp, Homo sapiens
gcacgacgcggctctctgcaaagcgacaggtagtaaacagaccttaacgcacgtcatgaggtttgtttttcttttaaaagtcaacagctggtgaatcgcacagggccgggcagggcggtc

SEQ ID NO: 12837 - DNA, 120 bp, Homo sapiens
gcccgttcccccggctgggaaaaaagcaggagcccagggcggcggcagctggacgcgggccccgtggaactttctcccgtcagtcaggggccgtatttcttagccatcctcctctgacct

SEQ ID NO: 12838 - DNA, 120 bp, Homo sapiens
aaccgcctgctgacgcatctaaccttggcccgttccgtgggaactccagactcagggtgaccaaccccagctgggttacccagggttgtcctggttggagtggctccaagtcctcagacc

SEQ ID NO: 12839 - DNA, 120 bp, Homo sapiens
caccgcagaccccaccaggtggtcatctttctggggaaactggcttcttttcctccccgactcccttgctttgtcttcgtggtggcacctctcttcccaggtgctcaggtgtgacatcag

SEQ ID NO: 12840 - DNA, 120 bp, Homo sapiens
tcacggaaaaagaaagcttatgaaacactgacttctgtaatcacgttttcagttgaaagaaatggaaactgatctaacttccagctcacctcaagctggaaagaagtctagtttctagaa

SEQ ID NO: 12841 - DNA, 120 bp, Homo sapiens
aagcgctgggattacaggtgtgagccacagtgcctggcttctatcttagcagttttgacctagtggtcccccaccaaaagggtctcagagaccaacccctgggtgtccctggaccacact

SEQ ID NO: 12842 - DNA, 120 bp, Homo sapiens
atgcgatccaagatggtaataaacctgctcaagtcctcaaagctgaaaagtacggctgaaggagaataaaaaagagaaacataaagcagttgtggtggtgtgtgcctgtgctcccagcta

SEQ ID NO: 12843 - DNA, 120 bp, Homo sapiens
gcccggggtacagctgggatgcctgttgtccctaaaaaccatggggcacaagtaggtaaaccctagagtaggtaactcctcaattcagctcaaccactatctgaccagcctccagttacc

SEQ ID NO: 12844 - DNA, 120 bp, Homo sapiens
ccacggcgcggctcgtgcctattgcagatacatgtacatgcttgcaatatacgtgtctgtctcccctgctctacaatgagctccccaggaacaaggactgggcaattttttttggcttcc

SEQ ID NO: 12845 - DNA, 120 bp, Homo sapiens
gggcgacagagcgagactccgtctcaaaacaacaacagaaaaagcagcactgaggactgggctgcgggctgcgtcctctgcaggccctggctcccctgtacccaccccctcctgcacgct

SEQ ID NO: 12846 - DNA, 120 bp, Homo sapiens
gggcgctggggaggagctgccagcagacaggaatgcgctgtgcagaagcagcaggttctgccagctcctcccgagcctgcagggaaatgcaggcagatctgtggcctcgcacaggcggac

SEQ ID NO: 12847 - DNA, 120 bp, Homo sapiens
agacgggcagcagggatctccaaccgggccccggagcacgaaccactacgcaatcgtcacagcatgtgctaccttccgtggtgttctgggaatctaaatcaatcccatacgctggacagc

SEQ ID NO: 12848 - DNA, 120 bp, Homo sapiens
aaacggaagccaatctcgggctgggcagagggccacccggccctcccctcaccaccacccctcccttttccttcaatcagaattgccttttataggcaggttgatagttcacagctggaa

SEQ ID NO: 12849 - DNA, 120 bp, Homo sapiens
aggcgtgagccgccgtgcccggcctaaagctgtgttctttctgttccacaggctgcagagagggagctgatgccagaatgagggggaacccccggagcttctcgcatcgggtgggaccgg

SEQ ID NO: 12850 - DNA, 120 bp, Homo sapiens
atccggtgagaccgcggtggctctctggggctgaaaattccaagcagagtagcccgaggaatccagccatccccgagggttcagaaatgcaaatcagggctgtgtattcacagcctggac

SEQ ID NO: 12851 - DNA, 120 bp, Homo sapiens
gatcgaccaaaaactatgcagggctcacccttgcggggcggcggctaaatttaggaaaccaaccatctggagaatgcaggcatcagaagcccctgcagctaggaggatcatttcagttca

SEQ ID NO: 12852 - DNA, 120 bp, Homo sapiens
tagcgtgttcaagctggaaaggatttcagagattgtgtcacctagatttattttacagaaggaggaactaagcgtttaagggagaagtgcctgttcttttattattattattattatttt

SEQ ID NO: 12853 - DNA, 120 bp, Homo sapiens
aagcggcctcagggacccaggtggcccctgggatacgtttctcccaggccaggtttggtttcagtcggcctgagcgtgcagacacctgtctcctgggcactaaacttgacactttcagtt

SEQ ID NO: 12854 - DNA, 120 bp, Homo sapiens
aggcggtggggacgagggggcgggtgggagggggggaacgggctcacgtgccaggctcggggggggggaagcgtcctcaacattctcagaaaggaccacgcccggcaccggccttggatg

SEQ ID NO: 12855 - DNA, 120 bp, Homo sapiens
gctcgggggtgactgaagacatctgggatacagtcagtatgcactgcctgcacctccatccccacctgcacccacctgaacccaactacgcacacctgcgcccatctgcacctccgtccc

SEQ ID NO: 12856 - DNA, 120 bp, Homo sapiens
ctgcgcccacctgcacttccgtccccacctgcacctctgtccccacctgcacctccaactccacttgtcctcacctgcacccacctgcacacccactgcacccccgtccctacctgcacc

SEQ ID NO: 12857 - DNA, 120 bp, Homo sapiens
ccccgcatctccagccccctgccggctccaggcccggggccaggaaactccgtgggcctcctctgccccctcgtggccgccagcggtaacagcagccctctgcaaatcgagcttcagagg

SEQ ID NO: 12858 - DNA, 120 bp, Homo sapiens
ccccgcccccgagcccggcccgtctttgctgttgtcgttgttgttttgccctggggcctgcagaaggataggagcaggggatcacggtgctggttttgtcatcaggacaggcagccacgg

SEQ ID NO: 12859 - DNA, 120 bp, Homo sapiens
tggcggcgcacctgctctcctggagaggctgccacccagaggtcagagacccccgcaggcgcctgcacccctcacagcctcgctctcctccccgtccgtccttgtagggaggtgagtttc

SEQ ID NO: 12860 - DNA, 120 bp, Homo sapiens
gcccgcaggagccaaagccgcactcgcccagcccagcgcccagcaaacaggaggtgctcaatgaatgactagcaacattattaaaagatcaggaaaagcccgcatcccacgccacccttt

SEQ ID NO: 12861 - DNA, 120 bp, Homo sapiens
agccggcaccacacctgctcaccactaattccgtcccctctactggggcctccccttgcgtgtgtggacatcagagcctgatgattctctggggtggggccgtcctgggcaccatagggt

SEQ ID NO: 12862 - DNA, 120 bp, Homo sapiens
aatcggaacaaaatacaggtgatttttttataatcttaaaatttggaagagatccataaaaaaaacaaaggagatgctcatgtataacaaacatttaaaatcctggccaggtgcggtggc

SEQ ID NO: 12863 - DNA, 120 bp, Homo sapiens
acacgctcaggaaaatatttgcagagttcaaacaaacgtttataaactgttcaaacaaatcaatgcgcctgagacgccggaacagaaaggtcagcaaagaccccagcctggcagcccaca

SEQ ID NO: 12864 - DNA, 120 bp, Homo sapiens
gaacggtcggattcaccggccaccaaggacacccaaacaaaacaaagatgagcgcccctacttgccagcttggcaaagatttcacagctgcggctgggagggtggggaacgagcgctcca

SEQ ID NO: 12865 - DNA, 120 bp, Homo sapiens
cccgtgtcccctcctcactcagccctcctatccacaggtgactcacagtccccttggcaccacccaggcgctgtccctggcctcgcccatggctaaccttggcaggcatccccaacagag

SEQ ID NO: 12866 - DNA, 120 bp, Homo sapiens
aggcgaggggacagctctcgcctgcctcggcgagcccgggttccagaagatgtgcccagcaccctgggccccccaccgccgggtctgggacacagatgctctcctccaaacctcccattc

SEQ ID NO: 12867 - DNA, 120 bp, Homo sapiens
cctcgctgtggcgggggcggggccgtgtcttttgagactctgcatatgcacgagggggtgagtttgagtgaggcggtctccatgcagaggaaggtctttatttaggaagccaggtggggg

SEQ ID NO: 12868 - DNA, 120 bp, Homo sapiens
gggcggggccggctggggaggagaggcggagaggaaagacgagcttctgcagatttcaaacctgtcatttcttttctgacgcataccctcccctcccgcttcatgacaagctctgttccc

SEQ ID NO: 12869 - DNA, 120 bp, Homo sapiens
ccccgggttcccagagcagcctcctagacacgatccgaaacagcacgggtccccctcccaacccccaggcactatggacattagagctgggtcactctctggggtggggccatcctgggc

SEQ ID NO: 12870 - DNA, 120 bp, Homo sapiens
tcacgacagtcacagatgtccccagacattgcctgatgtcccctggggaacagaatcatccccagaaagacctcctcagttagggggttccacagatccccaagagactgtgtcccatga

SEQ ID NO: 12871 - DNA, 120 bp, Homo sapiens
cggtgtgacccaccaaaaatctgcaaccacgaagaccaggaaatgccagcagtgccgagcaggagaggtcgcttgacggtaaagaagcagggagcgttatttagcaaaccaggctggtta

SEQ ID NO: 12872 - DNA, 120 bp, Homo sapiens
tgtcgcggcccctctgcagaggacagttctgaaggacagcgatgacctaaattggctcctatgagggactgctgggggaaatatttccccaggatcctataagatacaaagaaaaacata

SEQ ID NO: 12873 - DNA, 120 bp, Homo sapiens
agacgagggaaatttggacacagacccacacagggaagggggccgtgtgaggatggaggcagagactggagcgatgtcaccagcccaggggcgccaagaaccgccggccacttgccagat

SEQ ID NO: 12874 - DNA, 120 bp, Homo sapiens
ccccgggagcttctgggccgggaacggccctgcccacaccttcgtctcagacttctggcttctagaactgccagaaaatccatttctgtggttttgagccatgcaggttgaagtcatttt

SEQ ID NO: 12875 - DNA, 120 bp, Homo sapiens
gggcgccctcaaatatccaaacttcaccccacagagaccctcccctaggcacccacatcctggcatgttcagacaccctcctcgtgaacatgcacagcccccaaggcaccagatagacat

SEQ ID NO: 12876 - DNA, 120 bp, Homo sapiens
catcgcgcccagcctctttggtggttttcaggaacagctagttagttattctgcagatggaggttcaggagcttgcaccacttcctagacccggctggaggagttgggtgtaattttcag

SEQ ID NO: 12877 - DNA, 120 bp, Homo sapiens
agccgggcgggtgcaagactcaaagagatgtgtggcagagagaagctgttcagacagcttctggggttgccaggaagaaacaagccacttgctccgatctgcacattccctccctgtcca

SEQ ID NO: 12878 - DNA, 120 bp, Homo sapiens
tcccgattcccagagaatctcaaagcaaggcattctcctggccgtgatccggctctcagctctaaagggactccatatctttactgcagacccaaatctgtgtcaccacagaggaaaaac

SEQ ID NO: 12879 - DNA, 120 bp, Homo sapiens
aaacggccgcttaattacacttgcatatatgctcgcaagaattcttccagggagcaggatctgggaacgtcctctggagacagggccttccaggagacgctgagctcggtgttggagcat

SEQ ID NO: 12880 - DNA, 120 bp, Homo sapiens
aaccgtggttctcaaccaggggtccttctggtccccaggggatgctaggtggtgtctgggggcatttgtgactgttatgactcagggatgctcctggcgtggagtgggtggaggccaggg

SEQ ID NO: 12881 - DNA, 120 bp, Homo sapiens
gaacgacccagccctgaatgccaagggggagagactctgccttaattatttggaaaaatattgtatctgctccctgttgacaccagacactagaaaaaattcccgatggggtggatggca

SEQ ID NO: 12882 - DNA, 120 bp, Homo sapiens
ggacgctgctcagcaccctacagtgcccaggatggccccacctcagagaacgatctggccccaaggtccacagtgacagagagtgataaccgctgccataatctataggactgaccatag

SEQ ID NO: 12883 - DNA, 120 bp, Homo sapiens
tggcggtggccgacgccaacactgtcacagcaagaaacaagagagtgggtgtgactgtggtcacttccatctcagggcacatgctacattgaggaagtaaaacctggggggagcgagata

SEQ ID NO: 12884 - DNA, 120 bp, Homo sapiens
gcacggagtcaaaaaagtaacagaggaaaagccacggaatgcaaacttccagggatgacatggttgccacacagtgggcaggtgggtcacacccactgtacacaggtcacacttggctct

SEQ ID NO: 12885 - DNA, 120 bp, Homo sapiens
atacggtttcagtttccccatccacaacacagggagaagaatcagataaggtgtccagtctcggagggtcctgggcagcaggcagcgcctccaagatcatcacctccaaccctgattctg

SEQ ID NO: 12886 - DNA, 120 bp, Homo sapiens
caacgccaggtctacaccccatgccaacagaatcccttccctgacctttgcaccagccaacccatcctccgtcatgcagccttcgacgatcggaaaccaacagcttctcatgacggtccc

SEQ ID NO: 12887 - DNA, 120 bp, Homo sapiens
ctccgatttccagacaagcctgattcttaagccagcccagccaagctacagctcctatcccatctccccaagaacagacttcatcgttttctgaatttggtccacgcccatggtgtccgt

SEQ ID NO: 12888 - DNA, 120 bp, Homo sapiens
aggcgtgagccaccgtgcccggcccgcaccagtgctgttgatggaggccccaaagtggtagcgacacaagtgaccctggacggatgcacggatcaacgtagcgtggtccatacacacccc

SEQ ID NO: 12889 - DNA, 120 bp, Homo sapiens
ccccggagtatgattcagccttcaacagcaggcaatcctgacacaggccacgatgaggatgcactttgaggacctcagtctcagtgagagaagccaggcacagaaggacacatcctccgt

SEQ ID NO: 12890 - DNA, 120 bp, Homo sapiens
cgcgcgccctccctcggggtgggagctggggccgcttcccggggaaccccgagtgggggccaggagcccggcttgggaggagcagagtccagccgggggtggagggctttggcagaaatg

SEQ ID NO: 12891 - DNA, 120 bp, Homo sapiens
atgcggataaagggggtgcagaacgggacccctgaggccggctggggcccggtcacacgcagggcggggaatcagaggggtgcgttgtgaaatgagtaagtcgataatcaacaatcaatg

SEQ ID NO: 12892 - DNA, 120 bp, Homo sapiens
aagcgggcagaggcgggagggttcaggtcaatggggtgcacctggaggcccacccatcccaggggcctgggcaggggcgggatgggggcagaagcggactcagcgctctgtagggctggt

SEQ ID NO: 12893 - DNA, 120 bp, Homo sapiens
aggcggaggcagcccatggcagtcaggcctagggaggtggggggtgagcaaagggggctggcgctgctctgcagcggatgggtttgccgttttcggttaggaaaatgtttgtgttccccc

SEQ ID NO: 12894 - DNA, 120 bp, Homo sapiens
atgcgtctgtgtgtccacaagagaccatggttccgcctccattttggagaccgggaggccgaggttccttttggcctcatcgggcagatcccagaggagactggactttggggtctagtg

SEQ ID NO: 12895 - DNA, 120 bp, Homo sapiens
gtgcgggacagtcccaggccgcaaggctgtcagaggaaggcgccccttggtggagaggccaactctgggacccacaggggtctctccagagtcagagccatcagtgggtgagaggctggt

SEQ ID NO: 12896 - DNA, 120 bp, Homo sapiens
cctcgtaaacgcctcacgtggctttcatgcgtcctcccccacccccactggcttggttggcagtgccagtcctcagaagtgaggctgtgtgcatgtcatttgctggtggcgataggcaga

SEQ ID NO: 12897 - DNA, 120 bp, Homo sapiens
gcccgtgagactgggaaccaaggcctggacatggaggtgtccccacatgcagcagtgatgccctcggaggctcctcggacagcccctggtccccataccacgttccgtgtgaggccttag

SEQ ID NO: 12898 - DNA, 120 bp, Homo sapiens
taacgctggtggcatgaccagaggagttgtgtagtaacacaggccgagaggggcagggaccggaggtcagacggagctggatatgagcctttggccctgggacagggcgtgctggccctg

SEQ ID NO: 12899 - DNA, 120 bp, Homo sapiens
tggcgcccctgggtgacagtgtggtggtgtcggttgcaggagaactgcgctatcctcaaggagctggtgacgctgcgggcccagaagtcccgcctgctggggttccacacgcacgccgac

SEQ ID NO: 12900 - DNA, 120 bp, Homo sapiens
gggcggagacttgtggccctcgctttgtggctgactctggttctagaagtatccagctggtctcggccctcaccgtgatcctccagcttctccctgttccgggcaggggtctcaggagtc

SEQ ID NO: 12901 - DNA, 120 bp, Homo sapiens
cagcgtgaaccctgccatgtgtccgccccaggaaccaacatgcctgcaaccttcggccatctggcaggtggctacgacgcccagtactacgggtacctgtggagcgaggtgtattccatg

SEQ ID NO: 12902 - DNA, 120 bp, Homo sapiens
acacgcgcttcaagcaggagggtgtcctgaacagcaaggtacgcggggactggggacagggagggcgtcctgaacggcaaggtacgcggggactggggacagggagggcgtcctgaatgg

SEQ ID NO: 12903 - DNA, 120 bp, Homo sapiens
gtacgcggggactggggacagggagggcgtcctgaacggcaaggtacgcggggactggggacagggagggcgtcctcaacagcagggtggggccgagaaaagcacacctttggcctgggc

SEQ ID NO: 12904 - DNA, 120 bp, Homo sapiens
tgccgggtgagccatcccggccgaggcacctgctggtcttggtgcggtgctgcccacagctcctccctgggccctgcaggaagctccacactggcccctcaggcctcgggctgtgagtgc

SEQ ID NO: 12905 - DNA, 120 bp, Homo sapiens
ctccgtgtcttcccatacgagtccttccgggatctgcgtgatcggcctcagagccatgggctgagacagacccttctctggagaaggcttggcgtttgccattcatttgctcctccaacc

SEQ ID NO: 12906 - DNA, 120 bp, Homo sapiens
gtgcggccgttacgccatgtgagcctgtgcctcccgctgacttggtgtgacccaggctcgggacagccgccagagtccctcacaaggaacaggtggctaccagctttgagggccggccct

SEQ ID NO: 12907 - DNA, 120 bp, Homo sapiens
cctcggagccaccaagcaggcactcagctgctccctttatagaggtgcagaggccaggacctgggggagcaatggtccgacaagccccctgtcttcacagcccagcagggacctcccccc

SEQ ID NO: 12908 - DNA, 120 bp, Homo sapiens
gaccggccgggggctgtagaggtggagtcccccgggtgggagctgggactgtggctccctggctctgcagcctgcagtccgcgcaggctcctgcggggctctggggcgtcggggtctcct

SEQ ID NO: 12909 - DNA, 120 bp, Homo sapiens
caccggcgcctcgcagtctcatctgcctcacctgcccgtagtcccgcagtcacagggctgggctcaaacctgggcctttagggcggcccagagcgcgagcggcttccacattgtccagcc

SEQ ID NO: 12910 - DNA, 120 bp, Homo sapiens
tggcggggccgggtggccggggcatgaccctgtcgcgatagggtccccacgggagggtcgggagccggcagctcgcccagggccccaacgcccaggatggcacggtctgcccttgccctg

SEQ ID NO: 12911 - DNA, 120 bp, Homo sapiens
aaacgcccctgggtgagagacgcataagctttccgaggcccagcctgcaaggagagggagaagacgcattgactctaccctaaaggcagagaggggctgccacgctcgcactgcagtgag

SEQ ID NO: 12912 - DNA, 120 bp, Homo sapiens
cagcgccagggcctggaggcagggcaggacggcggagagggcgggatgtaagaacctgccttctgctcccacacaggaggggctggagctgctgtgaagggagaggccttggaggaggct

SEQ ID NO: 12913 - DNA, 120 bp, Homo sapiens
tgccggccgggtggaaagtcagggttacgagatgcccagaagggagtgcagcccgaccacagctcttatcgggcggaggctcacacaggttagcctccgtttccgacctccctgccccag

SEQ ID NO: 12914 - DNA, 120 bp, Homo sapiens
agacgcaggcacccccataacgacaggcgccgggcttccctcggcctggaaagctctccctggggtccccaaaacagacaccttctcttcatttagcccccgggagccctcccgccctca

SEQ ID NO: 12915 - DNA, 120 bp, Homo sapiens
actcggcctggccaccacccctggcacacagcagcaacagccaaccccatctcggctgtacctcccgctgctgtgtgacctccggcaggtgactcagcacctccctcacaggctgttgta

SEQ ID NO: 12916 - DNA, 120 bp, Homo sapiens
ccacgggctggcagacacccacagggacttcttgctgtcacctggcccaccctaaaaaagggtctccttccggaggtaagaggacttggcctctgctgtgagatggcagagaagcaggaa

SEQ ID NO: 12917 - DNA, 120 bp, Homo sapiens
acacgttggggaggagggcaccccccagagatagaattccagggccattgtctgtgcagccacagagcaaacactcggcctttgttcccgggaccctgcgggaggggggcctcgggatgc

SEQ ID NO: 12918 - DNA, 120 bp, Homo sapiens
ttccgccagtgtggcccgcaaacccgccggacaggtttggttctcctggcctcccggccccccgccaccccgttcacccgaagcctgggacccagccttcatccccagtgtctcccccgc

SEQ ID NO: 12919 - DNA, 120 bp, Homo sapiens
gcccgagccagcagggcggctgggcctccccgcacgtgcacgggttcgaatcccgccgacgcaccgggtgccaggaccgagggtcagccctctccgcgcgcagcgggagcgcccacccca

SEQ ID NO: 12920 - DNA, 120 bp, Homo sapiens
gggcggaggcgcggacgtcctgccggggtaacccgcggccgcccccacctcccgggcccgcgtgactcacctcccaggccaggcggggcgggatggaggcgcgcgcgcggcccctccgca

SEQ ID NO: 12921 - DNA, 120 bp, Homo sapiens
tgccggggcgggggatgctggccccggctccccgggcctctcgcgacccccatccccctgggcctgggacgcggggacccccgagcctgggagggcgcgcgcagtgcggggcgcggaggg

SEQ ID NO: 12922 - DNA, 120 bp, Homo sapiens
tcacgcgaggtccccgcctccagggtcctcggagggacgagggcgcgcagcctccgcgttcccctgcaaacttgcgcgcagccgggggcgtgtccgtcccgggagggtccccccaacacc

SEQ ID NO: 12923 - DNA, 120 bp, Homo sapiens
acccgggtccccaaggctcttaccgaccagtaagcacagcacgtcgagcagcacgaagacccacctccgctgcatggtccccgcgacccccgacgccggtcccagcgcgtcccgtcgcgt

SEQ ID NO: 12924 - DNA, 120 bp, Homo sapiens
tcccggcccggccgcggagtcacgtggcgcggagcccgccccgcgcggagaggaggggaggggcgggaaggggaggaggggaggggcggggagggcacgaggggagaggtgaggagggga

SEQ ID NO: 12925 - DNA, 120 bp, Homo sapiens
aatcggggactcaactaacctcattggacaggactgagaattctccctacagggggagtccgcgctgagtgtctgttaaccttcactgctgactaatggatgtcttgcttaggttgccct

SEQ ID NO: 12926 - DNA, 120 bp, Homo sapiens
ttccggcagtaccttgtgtgtcctgtgggactgtaatcaggtgtggaacctattgcaacaccgtctgagctgtggaagcttcaaattactggcaagagttctgctctaccacacacttgg

SEQ ID NO: 12927 - DNA, 120 bp, Homo sapiens
gtccgaaacccctaaagggcatagctggaatcattcctgcaagctcattacccccatgctgtgacggtcttactgatgattattttgttgtaaagcaggggccaataggctgcactgcaa

SEQ ID NO: 12928 - DNA, 120 bp, Homo sapiens
gcccgtttacaaggtcagctgtgtcaaaattgcacaagcaatatggtttatgcaaaacaccattcattccaggcatctggaatcttggtatttgccaagcagtgagtgcatcataaccag

SEQ ID NO: 12929 - DNA, 120 bp, Homo sapiens
tcccgggcagtaaaagcatcttgtacgctgccaaccagggaggacccttggaagctcattcctggtttccccgacttcaccccatgtgcctcatccctttgctaatagttggctctgttt

SEQ ID NO: 12930 - DNA, 120 bp, Homo sapiens
tctcgatgttaagtactgcagagattaatatgacttaccatctcattgcacctcctgttcccagcttccctcccatcatacaaatgaagaaagttaagcacaaggaacacagaatcttaa

SEQ ID NO: 12931 - DNA, 120 bp, Homo sapiens
ggacggtggtggcggaggggctccagagaactcgtaatgcctctggtgaggccaccgccgtcctgcatctcttgatgtgactggtgacagcccaccagggcggggaaccggttcacctcc

SEQ ID NO: 12932 - DNA, 120 bp, Homo sapiens
caccgggggccgcgctttcgactctccctgcacaggccgtgggtcgtggctccgggtgagtggaaacatttgccccgcagcgaccaccgcccctccctccccgacctcgagccacaggac

SEQ ID NO: 12933 - DNA, 120 bp, Homo sapiens
ggacggggctgggctgcgctctgggccccgcgatgcctccgggaggcacggccgccctctgctggacacgccgaggaggcgctccacgccagggtctcaacatcctcctgagaacagccc

SEQ ID NO: 12934 - DNA, 120 bp, Homo sapiens
ccccgttacatttgaatcccagaagagcaacaaaccggttttcagtatgtgtcccgaatactgcatgggacatacttacacattcgtttatctgtaatccgagcccaactgggcatcctg

SEQ ID NO: 12935 - DNA, 120 bp, Homo sapiens
aaccgagaaaacaaggaccatcagggagagagaaacagctgggtcaggtcagtgggggcccagacagcgccagtccagggcccggacatcttcaacaaagcctgggcctgggaggctgag

SEQ ID NO: 12936 - DNA, 120 bp, Homo sapiens
gaccgtggccggtccaggaccatcagttctgagcgactttctccctcccccacttccacccccacagaaattgtctcaggagggctgatctccaggcaggcccctggctaacgcctgctt

SEQ ID NO: 12937 - DNA, 120 bp, Homo sapiens
gcacggccatggactctgtccagaacagatttccatatttggttagcaggtaggaaggaggtcatcaaagaccttcacttcactgtaaaaggaaagcattaaataaacgaacacaaatga

SEQ ID NO: 12938 - DNA, 120 bp, Homo sapiens
tgccgaaaagctgaggacagtaagtttgttctagagaggtatgagctcccctgaggttagtcaagaccaagtctggtggaggcctcattagtcctaggagcctggtgtcagacaaatccg

SEQ ID NO: 12939 - DNA, 120 bp, Homo sapiens
cagcgggccctccaggtcctcctgcctgggtctgggctgcaggaagggcaggattccaccaccccacagctaacccagaggcaaagctacgctacacaagcggtgagcaggccagcccag

SEQ ID NO: 12940 - DNA, 120 bp, Homo sapiens
cctcgagaccagcacatcaacccagctgctgacaggagaggggcaagcccttcctgaggcaaaacagtatcccctctgctccttaactgtcttacccacatctagtgcaccctcagaaac

SEQ ID NO: 12941 - DNA, 120 bp, Homo sapiens
aaacgaacaaaaaaagttttggagtgtggcgcctgttgactggttgaagagtgcagggtgaagttctgggacgggggagggagaagctatgttctcatgctcatcctgctcctctctggg

SEQ ID NO: 12942 - DNA, 120 bp, Homo sapiens
aagcgatcgtcctgccttggccttccaaagtgctggcattgcagacatgaaccacggcacccagcaaggtagtttgcttgtgtaaaacaaaaactccaaagtatttggaatgcaaatgcc

SEQ ID NO: 12943 - DNA, 120 bp, Homo sapiens
ctacgagcccctttggatattggggggtgcccagcaccatcaggggttgcgggggtggagtccaacattctccctcttcagcacccccctagagaaaggcagctggcccaggactgggaa

SEQ ID NO: 12944 - DNA, 120 bp, Homo sapiens
tgtcgaatcattaatattaatcagaattacacagaaccctagggctgcacatccattatctgctctgagcgcacaacagcacagggaggagggagagaggagggaggagggacagagaag

SEQ ID NO: 12945 - DNA, 120 bp, Homo sapiens
ttcgcatccttgtcttgcgtctgtctcggcttcccatgacaccatcgcacaaacagtgacagccacgcaacaccggcacccgcgagagagtggatgggacgactgtggggtcagggagga

SEQ ID NO: 12946 - DNA, 120 bp, Homo sapiens
caacggagctgacccatccccttgtaaggtttttcccgcagtgggaggtgggcacttaagatggaatgggagccccaacctctggcggttgccatggtaacctgccaggaagggaggcct

SEQ ID NO: 12947 - DNA, 120 bp, Homo sapiens
aaccgggaggggaggcctagaaaccgacatactcttccctggtaagtgtaggggaggggtctggagaagatttggggtgaggggagctgcaaaaggagctgaatttctaatgccctgggg

SEQ ID NO: 12948 - DNA, 120 bp, Homo sapiens
ttccggggacaacatctcagcttggggccggtgtgtctctaagcgcctctggaagggctcaacacatgcaggcctgagtccagcctagctggctgggctttcactatgtttatttccatg

SEQ ID NO: 12949 - DNA, 120 bp, Homo sapiens
gcccggctggctgatttctcatcactgccctctgcatcatggggtagcgtctgcttcggggcccccgggatgaataaagtgagtttcaaggccctcccctcctccttaccaggatgagct

SEQ ID NO: 12950 - DNA, 120 bp, Homo sapiens
cagcggtgagccaaggctagaggccaaggaggctggactgtccaccaggtcccgacgggcaggaatgcagatgggtacctttccgcagggggtggtagccgggctggggggctctgaggg

SEQ ID NO: 12951 - DNA, 120 bp, Homo sapiens
tgacgttgagcagagttgaaatgagagggaaagaagagtcccttctctatcctcctcccgactcccaccccaatctctagaatgggtacccatgacccaccatgggaagattatgaaatc

SEQ ID NO: 12952 - DNA, 120 bp, Homo sapiens
ccacggggtcccagaggaggaagcgggggctctgcctggaagggccccctctactctccccagagaggcagggcaggtaggaagtgtccagaggccctggcccgacagagactcccatca

SEQ ID NO: 12953 - DNA, 120 bp, Homo sapiens
aggcgaggggtcctccctgtctccccattcccagagctgggaggaccctcctagagagcctgaaatcccaacctgcccaatgtacagacggggaagacgaggttcggagtggggcaggga

SEQ ID NO: 12954 - DNA, 120 bp, Homo sapiens
caccgtgactcaaagccctgcccgcctctcccctcaccctggcatcataagtgccctcaccatgacataatgtcgctgcatttccgtcttctcgctggccagcttctcacattctagctt

SEQ ID NO: 12955 - DNA, 120 bp, Homo sapiens
acccgccccatgtgggccggcttccaaagtgagaggctggatctccccctcccgacttccttacagacctccccccacctcctgtcccagtccctccccgccccttcctgggctccaaat

SEQ ID NO: 12956 - DNA, 120 bp, Homo sapiens
ctgcgcttccacctggaggcctttgtcgcgccccccctccaaccgggagcccctcctccccgccctataccccggaggcctcgccccgccccggcgcccaggtgaactcccgcggcccct

SEQ ID NO: 12957 - DNA, 120 bp, Homo sapiens
gggcggcccccctcacctgtggtattgagcctgaagaaactggaattcttctttgatgcggtcgcagatctccaagatcgagaacttgaagggctggccggactggagcggggtctgggg

SEQ ID NO: 12958 - DNA, 120 bp, Homo sapiens
ccacgagggtcgagaggcgctccgtctgggtccgtgatacccaagcctggcacacagtaggcgcccaataaatacaggaatgaaaggcccgctgctgccccaggttggtttttcttcccc

SEQ ID NO: 12959 - DNA, 120 bp, Homo sapiens
ccacggtcacacagccacgcgctccagctgggagctctgtggctgcctttgcggggggccccgagtcccagggttgggcaggcctagggcagggtcgcccgccccctcctcccgcggtgc

SEQ ID NO: 12960 - DNA, 120 bp, Homo sapiens
ctgcgggggaacccaccattagccacgcgggcccggcccagcgtgttccccgacaggcccgggcaggcccagcaggggagtgaggggattgcggggagtagggggagcgcagggagcgtg

SEQ ID NO: 12961 - DNA, 120 bp, Homo sapiens
gaccgcccctccccgggacccgagaagggggtgtaggagggaagaggagggggaggaggagagaatggaggaggaaacggagggacaaagggggaggcggcaaaggggaggggaggggag

SEQ ID NO: 12962 - DNA, 120 bp, Homo sapiens
gtgcggagattataggcgtgagccactgtgcccagccgagaaaagcctgtttcttgactttgagccaaatagacatgacccctggagaaactgaggactggagagtcgaggcggccaccc

SEQ ID NO: 12963 - DNA, 120 bp, Homo sapiens
ccccgacctgcccccatggctctccagtgtgcaggtggcacctgctaggtggagttggaggcgttggagacagccctttggggagatgggaggtgacacccccgccccttctccgtgctc

SEQ ID NO: 12964 - DNA, 120 bp, Homo sapiens
ctccggccttctcctctgctcccatttcctctttctgggccccaaccaagccactccttccctttttgctgccgcttgctcgatcaagtcctgcctgcaccgacccctacccccgccctc

SEQ ID NO: 12965 - DNA, 120 bp, Homo sapiens
gcacgccaaccctggaggcagaagcagtcccatcccctctcccatcgctggttggggcccatgctggtgcccccaggagccagacgagatgctgggcaagcctccagcccccacctccca

SEQ ID NO: 12966 - DNA, 120 bp, Homo sapiens
tagcggggggctgagctggtgtctttgaacctctagtcccaggctcttgaagactccagcatcagtatcccggacccagggccggtttggcaggtgcgcgaactgggctgtcccagaggg

SEQ ID NO: 12967 - DNA, 120 bp, Homo sapiens
ggtcgattctgtctccccagtgtctctcaaatatgtcctctcctctccagctccatgacagccacattggtccagccccacggttgctcacctgaaccaacgcagtccccactgccctgg

SEQ ID NO: 12968 - DNA, 120 bp, Homo sapiens
aatcgatgaatggggtgggtgggtggataaaagtttaggagtgaaggtagaggctgggaaatcatggggaagtctgggccaaggaagtgatttttaggtgtggcccaggagtgagacgaa

SEQ ID NO: 12969 - DNA, 120 bp, Homo sapiens
acccgagatgagaggtgatgcccacagttcccaactggtcagttgctgatcccactcccgtctcagtctccagagccccctctcgacggctgcttaccctgtctggctctggatgtgggg

SEQ ID NO: 12970 - DNA, 120 bp, Homo sapiens
tcccggtttcccctcctgtgcaatggggcaagtcccttcttgcttgaggccctgggccgggcccgtccaaagcctctgttctgggacttcctgagtaacggttgcatccccagggaaatg

SEQ ID NO: 12971 - DNA, 120 bp, Homo sapiens
tgacgcacagatggttatcagcgacccacatttctcagaagagagagaacaggaaggtgggggcagggttcaggcttttgttacggtgcgtggggctgagtcacagatggaggggaggac

SEQ ID NO: 12972 - DNA, 120 bp, Homo sapiens
ggacgtgtgctctgggaacagccctcattcccatctgtgtggccactggacatgcccatggccagccagagcacaggagccccatagcacagatgggaaaactgagttttggagatgttt

SEQ ID NO: 12973 - DNA, 120 bp, Homo sapiens
ctccgccgggtcgcccagccagcaccagggcacatctcagatctgtccaacctgctcccctctaatatgggggtagaaagcaggcagcccagcacagtagaagcttgggaaagtccccgc

SEQ ID NO: 12974 - DNA, 120 bp, Homo sapiens
gaacgggcctgtgtgtgcccagcatggctatgaacttgacccttcagccttttgtggtcagattgcagcaacccaagacacagacctacagcatttgtttggtcaggaccccagacacac

SEQ ID NO: 12975 - DNA, 120 bp, Homo sapiens
tttcggccttcaacacctgagccctcacgggacatctgtgcccctcatgggacacctgtgtcctcgcagtacacttgtgacccttccaggacaccttactggtagaattagtgtagctgc

SEQ ID NO: 12976 - DNA, 120 bp, Homo sapiens
aggcgggaggaggctcccagcagggacttatcctgggtcctactcacacttctggggcctgcattatttcccaaatcaccccacaccccaaggccttctggatggggacgagtggggggt

SEQ ID NO: 12977 - DNA, 120 bp, Homo sapiens
atccgtgacagatgatgtccaagcccctacatgccccagaccccagggcaaggctgagcctccctcctcagaccccagggcaaggctgagcatccccactcagacctcagggtagggcct

SEQ ID NO: 12978 - DNA, 120 bp, Homo sapiens
cctcgcctcctcccttggaccccaggacagggcctcacctctcccctcagaccccaaggcagggcctcgcctcccccctcagactcaggacagggccatgcctccccactcagaccccaa

SEQ ID NO: 12979 - DNA, 120 bp, Homo sapiens
ccccgctcaaacctcagggcagggcatacctccctcctcagacccagggcagggtgtgtctcccctctcagaccacagcacagggcctcgcatccctcctcagaccccaggacaaggctg

SEQ ID NO: 12980 - DNA, 120 bp, Homo sapiens
ctccgctcagaccccagggtaaggtcatgcctcccctctcagaacctagggcaaggccaaccctcccccctcagaccccaggcaggtccaagcttccccctcagacgccagggcagagcc

SEQ ID NO: 12981 - DNA, 120 bp, Homo sapiens
agacgccagagcagggtgtgtctcccacttagacccacagccacctcacctcaggctgagtcaccgtgagccgttgtcagcagggccatggggatggggtgagcaagtccctacttttcc

SEQ ID NO: 12982 - DNA, 120 bp, Homo sapiens
gggcgcctggccccgagaccctaccagcttgtccctgggggtctctctccctggacctgtgtgtcctcccatgggcagaaagttggcctcaggccgcctttgtgggcctcagttttccct

SEQ ID NO: 12983 - DNA, 120 bp, Homo sapiens
caacgcaccgggctctctgggcctcagtttcctcttctgtaacgcatcaggccctgtttcggggatcaagtcggatgagtcagtgctcaagggcatgcaggcacttgacatttattaggc

SEQ ID NO: 12984 - DNA, 120 bp, Homo sapiens
gagcgccggtggagcatgtggggagacctcagtggagccgacgggtgcttcgggggtgatcagggctggtggggaggagtcgtccggctggaaaggggtggcccatcccgagtggggact

SEQ ID NO: 12985 - DNA, 120 bp, Homo sapiens
ctccgtgactgacggctccggggctccctgcgggtctccggctttcgaggacaggaagaaggcagccagggcaggggtgggggtcctcacagccagggcagccccagcgcgttggctcca

SEQ ID NO: 12986 - DNA, 120 bp, Homo sapiens
aatcggtaactacaaaggaagacgggttgggggcgcccggctcggggggacgcgcccgcctcgcctgcctcgggtggcggagaggctcccgtcgctgcccaccccctggccccaccacct

SEQ ID NO: 12987 - DNA, 120 bp, Homo sapiens
ctccgcgtggatcagcattctctcctccatttctctgccctccccctcccccgcctccaccttgggctcaagttgaaactggccgagcctcttagcaatgtgttggggtctcaggcccaa

SEQ ID NO: 12988 - DNA, 120 bp, Homo sapiens
ggacgtgtccatctgggcagagcccaaattctggggtggacagggaggaggagggaggcgtgggcggcctcaggcctgtctgcctccctcccactggattctccctccgatggcatcccg

SEQ ID NO: 12989 - DNA, 120 bp, Homo sapiens
gtccggcaattgtatccccagcccttggttcccatcatgggcccagcgtctgaattggggtggctttgacagccttccggtcaggtgttggggactgggggtgccacttcaaaggccttg

SEQ ID NO: 12990 - DNA, 120 bp, Homo sapiens
ccccggccctccccctcccatcctccaggaagaccctggagaggccttggggaaggaccggggcccatgacctattttacacccactttttccccagcgctgcgtgcccggtaagcatga

SEQ ID NO: 12991 - DNA, 120 bp, Homo sapiens
atgcggcccccataagtcaatatctggagtccagaggtgataggtgggcttttcccacacgcccccacccctgggtacacccaaagcacccatttctagaaagattcccgtgggaatggg

SEQ ID NO: 12992 - DNA, 120 bp, Homo sapiens
aaacggttgcattgaaaggccgctggttgagctctaggtcggagagacaggtgggggtgcagggactggagcatcctggtgactcttcttcatctttttttttttttccttcttattttt

SEQ ID NO: 12993 - DNA, 120 bp, Homo sapiens
gcacgggagaagtgaggggtgaaggaggggctggggctgggttttcacctggccctgagcctcagtttccctgctgtcaacagagcaggaccatgacgcatccccagttctttttttaca

SEQ ID NO: 12994 - DNA, 120 bp, Homo sapiens
cctcgggggtatttcccatttgcgggctttccttggagggtgagaattgagaagccgtgtgcacgacagccggcaatcaccctccactttttaggggtcccaggtccgtctgtgtgtgag

SEQ ID NO: 12995 - DNA, 120 bp, Homo sapiens
cctcgtgtcgaaaatgggtccagtaccctcggggaagtgaatccccacctgcgtggggcctggctggacttcacctggtctttgcctgcaggtgcttggcacgaaggggtgggggggtgt

SEQ ID NO: 12996 - DNA, 120 bp, Homo sapiens
ttgcgtttggggctcagctgtgtgacttctggctagtgactgcccctctctgggccctctctgggccttggctgaagggaggtggaatggtgaatgggaagtcaggatttttggggagag

SEQ ID NO: 12997 - DNA, 120 bp, Homo sapiens
tggcgtggtttagtgtgcctgttcagagtggcagggccttggggatatggaccccaggcctggagagaaatccctttccctggatgcccggcggggcccatgagactgggcacaggagat

SEQ ID NO: 12998 - DNA, 120 bp, Homo sapiens
acccggctcctggtacaagcccggagggggtcagctggtaccacctctagcccttccttggtgtccaggctgcagggacttgtttgatttccccatggaacccatcgccatggaggtggg

SEQ ID NO: 12999 - DNA, 120 bp, Homo sapiens
ctccgagtgacagcgcatttctgggaaactgagggcttgagagacataccctgggtcccacatttaccggagctaggcccccattaccccccctgccttcctcccaggccaggagaagca

SEQ ID NO: 13000 - DNA, 120 bp, Homo sapiens
gcccgtgacacctgacagccacagctggcctggccgaaggtggcgtgggggcagccagattcctagaggccgtgctgagactcagagaaaggcaggaggcctcatccaggagcggggcag

SEQ ID NO: 13001 - DNA, 120 bp, Homo sapiens
atgcgtcgaggtggtcttccgaaagagggcaggccctggggcgctgggtttgtttttaagagagagagagagagagagatgaggacacagagagagagagagagacacgcagggaaagag

SEQ ID NO: 13002 - DNA, 120 bp, Homo sapiens
ctccgcatccagagagcggggacctcccccaggaaggacccccaccccaggccaggggctcaggccaagaactggaggctgggattggggctcccgctggcccccctgcagttcctgccc

SEQ ID NO: 13003 - DNA, 120 bp, Homo sapiens
ccccggggaccctccctccaaggcaggcacctctggagctgtggctgcccctgtctatggatggtggctgcctgggtgcccaccctgccaggggaaggtgcccacggtggtactggtccg

SEQ ID NO: 13004 - DNA, 120 bp, Homo sapiens
cgccgctgccactgggccccccgtttatggtaatcgcatatacatttgcatgttaatgacaatatttgtcttaaagcggaggttgcgctgggggacggtgcaggtggggggggggcccgg

SEQ ID NO: 13005 - DNA, 120 bp, Homo sapiens
cggcgggggcccgggtgggggcccgcggtttccatgggagcaccagctgccggctcgactcgggagggggggaggaggaggctgtagcaggctgagctctgaggcgtgagattccgcgtg

SEQ ID NO: 13006 - DNA, 120 bp, Homo sapiens
tgacgcaccagctccagggagaaggcgggctgggcggcctggcggggggaccgcgggagcagttggcacccctggtggtggcggggacagcggcagggggctgggggtggctggcagggt

SEQ ID NO: 13007 - DNA, 120 bp, Homo sapiens
cctcgttttcccctgctgcatattctctcctttatttaacagactttcataaggccccggagcctcacacctgtgactgtgacatcgtttctgcacctccctccccccgccccccgcttc

SEQ ID NO: 13008 - DNA, 120 bp, Homo sapiens
cttcgttttcaaaatgtagaccatatatagctaagattaaacctgtagcaaccagcccctagatgtcattgttgctgctgaaatatcaactcttgagtcttggaatttttacatctgaag

SEQ ID NO: 13009 - DNA, 120 bp, Homo sapiens
tttcggtttttcaaagccaagtccaaagtcttctggacttcttaaccaaaatgcaactaaatcttagggtgttagcacacattcagttgccaacaaaatccgcattcaggaaaaataggc

SEQ ID NO: 13010 - DNA, 120 bp, Homo sapiens
ccacgtagtcgtatgtgacattcctaacgtgctcacatcaaattccacgacataagctgattatggagtcgctgggcgattctgcccttcttcttttcgtgtgttgtctgacttctgtgc

SEQ ID NO: 13011 - DNA, 120 bp, Homo sapiens
catcggtgtctggagctcagagccgtctgtgccttgcgaacagcagcttccaatcaagggcgcgtggaagagcagaagcgcccaccctgtttccaacaagccattgaatgcgacatattc

SEQ ID NO: 13012 - DNA, 120 bp, Homo sapiens
attcggttctttaaacttttcaatggccctgtaaggtaggtatgaagtaactgaggcacagagaggtacagtaacttgcccaggacacacagctagtgagtgctaacaggttttgaagca

SEQ ID NO: 13013 - DNA, 120 bp, Homo sapiens
gggcgtcctggcttcataacaccccactctcaagagaactaactcattccaagaaccagtccagtcttggaagagcaggaactcacccaccaccgagagaaaaacaccaacatcccattc

SEQ ID NO: 13014 - DNA, 120 bp, Homo sapiens
aaacggctttttacaaagaaagctttttatagtagtgctttataactaaattagtttcttcctttgtaatttttatagtctacctgtctacagattttaaccatattttatgactttaac

SEQ ID NO: 13015 - DNA, 120 bp, Homo sapiens
catcgctgatatttaaagccagtttgaaataacaatgcataattaaataataaactaattcaaaatgcagctataaaaagtctcgcttgcctcctgacagctttacggtgttgatgttgg

SEQ ID NO: 13016 - DNA, 120 bp, Homo sapiens
ccacggcttcaccctgtcagtggtgtgggactacagcacatggcctgcaaatgtaaccatggtgcaacgtaaccccagtgactaatccacttggctggggtgacagttgaattgaataat

SEQ ID NO: 13017 - DNA, 120 bp, Homo sapiens
ctacgaaaaagtccatactcttatacatagatttcttccaagtcaatcagtgaatatgtaaaatgagaacatttttggccctgtaaattcatagagaagttactaattggtgccatacga

SEQ ID NO: 13018 - DNA, 120 bp, Homo sapiens
aagcgattccctagaattaaaccatgtagtgcgtatatattaacataagtattttgaaaaaaggctgaaatatctctgtgtgagcagatagcccaaattgaatgctaacaaccgtatagc

SEQ ID NO: 13019 - DNA, 120 bp, Homo sapiens
actcggtgctaggatggggtgagatagagagcactgtgggagcacataggagtggaagcctaacctcattttggaagatcagggaggcttttctagaggaaatgatggttaagtagacct

SEQ ID NO: 13020 - DNA, 120 bp, Homo sapiens
agacgcaagagagcctggtgtgtgaagcgttggcagtagttcagcctggctagagagtacaaggggagaggggatgtactgggaatggtaaacagaggccagataataaagggtctgtct

SEQ ID NO: 13021 - DNA, 120 bp, Homo sapiens
cagcgatgtcatcgtattggcgtttcagaaagttgccttaggctgtgatgtggaaaatggatttggggagagcaaaactaaagtcaggaaactgctaagataatccaattcagtggattc

SEQ ID NO: 13022 - DNA, 120 bp, Homo sapiens
atacgacatagaacttaattatgatgaaaaggggaaaaatcagaaagaaaatgaaaatgaatcctacggtgaaagtcacacgggatgatgagatagtcactagaaggctacttggaattg

SEQ ID NO: 13023 - DNA, 120 bp, Homo sapiens
agccgaccactttgaggacatgtaaaccaaaacctacatgatattatagaaggaaccagccaagctaagatctgcgagaacattctaggcagaggaaacagcaagccaaaagtctctaag

SEQ ID NO: 13024 - DNA, 120 bp, Homo sapiens
agtcgtgaacagagtcagagctttttaggaagtggacttggaaggatgtcttgattcattgtgtggaagtctgttgagagagaacagttgagaggctgtcagtccaagctgcttgctctc

SEQ ID NO: 13025 - DNA, 120 bp, Homo sapiens
cagcggggtggatggatggacatgccattttctgtgacaacgagcaccgggaggagcagagctggaggatcagtaagttctgacaccagctatccaccgttaggccaaaccccacaggat

SEQ ID NO: 13026 - DNA, 120 bp, Homo sapiens
cttcgtttcacacaccagtggcacgtttggggcccccccaggcaaccctcacttctgaccagctggctacaaattctgaggttcccaccacccactcaggttcaataattcactagaaca

SEQ ID NO: 13027 - DNA, 120 bp, Homo sapiens
gaacgagccaaagggagtgacacatgcagccaagtcttcgagggtcccattggaagctttcattatcttttccccatggagtcaggcctgttaccctcctggcacatcactgtgttacac

SEQ ID NO: 13028 - DNA, 120 bp, Homo sapiens
tttcgttatgtaggcatgattgattggattattgcccacaaggctggactcaatctccagcccttttctgctccttagaagttgggctgctagcacatggctcaaagccctgactctcag

SEQ ID NO: 13029 - DNA, 120 bp, Homo sapiens
gcccgcttgtttgcatcaccttctccgcctccctgacttgcataatgcacgtctggccccattcactgcatccccactgtcaagcacactgctggacacgaggcaggtgcccagtgcatg

SEQ ID NO: 13030 - DNA, 120 bp, Homo sapiens
aatcgggggccctcaggaccaacccttcccccaactagttttctggcagacataaaaaggagctctagttcctcctatgccaagaaagagagaggcccctgctgcccagagcatttcata

SEQ ID NO: 13031 - DNA, 120 bp, Homo sapiens
caacgctgggctccctggctccacccaccatccccacagcaatcctgctgagaccggggaggagttgcctgggatagggggtagagagctaggccaacggcctccaggctatcccttagg

SEQ ID NO: 13032 - DNA, 120 bp, Homo sapiens
taccggcatagacgaagttcagagttactgcgttgaccagaaggtggggacccagaaatttcaaggcttaaccaaaaaatggtttattctagcccctttagaaagaattttttaaatcac

SEQ ID NO: 13033 - DNA, 120 bp, Homo sapiens
tcacgccactatactccagtgggagtgacagatcaagaccccatttcaaaagaaagaaagaagaaaagaaaagtcaaataaaaggcaagaatctgcctgagtggcacctactccagggca

SEQ ID NO: 13034 - DNA, 120 bp, Homo sapiens
ccacgctgccttctgtcctgatattcctctggcctgcaaatggcctgttctggaattccctgaaggcgtgccaagttccccattgatcgtgtaaccctgaaacctggcacggtgcctggc

SEQ ID NO: 13035 - DNA, 120 bp, Homo sapiens
tggcgtggagtggatggccacggcttgttggaagcatctatactaaataaattctgagaactggagcaggggtctcagcgcccttagctcggatgaaagttagttcctggggcttagaag

SEQ ID NO: 13036 - DNA, 120 bp, Homo sapiens
aggcggtagagggcgccccccacccagtggtgcaaagaggagaccccagccctgctctggaagggagtgagggattggggggaaggtctctggggcaaacagcacttagtgacagccaca

SEQ ID NO: 13037 - DNA, 120 bp, Homo sapiens
gtccgcattttacagatagggaaactgaggcatgaagcaaggccgccatctgcccaaggtcccgtggtctgtaagtggtagagccaagatttgaacctctgaagacaggggtgttggtgg

SEQ ID NO: 13038 - DNA, 120 bp, Homo sapiens
ctccgtgggctctgtggggctggaaatcacaatatctctgcatagacatgggtgacgttcccttccgtgccgtgacccctgccaggcatgttagcgggttcctcttagacagatggagaa

SEQ ID NO: 13039 - DNA, 120 bp, Homo sapiens
gctcggccagggaaataccctcagctgggaggactccaggacctgcaggcagcatcgccacccttcatatcgcccaccttgtgaggtcctagtaccccaggcctcagtttctccatctgt

SEQ ID NO: 13040 - DNA, 120 bp, Homo sapiens
ctgcgacctcggaggctggctccctggggctccgcctggctgggcatgagggcctggagtgtgtgggcaggctctggagagccaggtgatgcctgtgcctacacccacggtgccagccct

SEQ ID NO: 13041 - DNA, 120 bp, Homo sapiens
ccacgctctgtgctctcctttccctactgcgcagggccaagcttggttccacgtcttcatccaaagctgcacagcacgtgagcgggaaaagcagggccagctcagccagctccaaagccc

SEQ ID NO: 13042 - DNA, 120 bp, Homo sapiens
ccacggtgtccggaaggtttcagagaactcaggacactagctccctggcctggagccccagggcccatgggcaaaagactgcattttcctgagcctcagtttccccgtctaccccacaag

SEQ ID NO: 13043 - DNA, 120 bp, Homo sapiens
gaccgtgctggcaccttgatcttggatttctagcctctagaactgtgaaaaataaatttatgttaagttaaaaaaaaaatataaaactggaggcaggcacttaattaggaagaaaggaaa

SEQ ID NO: 13044 - DNA, 120 bp, Homo sapiens
aggcgtaaaactaagtgagagatgacacggtagggctgggccagctcccagccagagagaccttcccacgggatacaggaaggcaggtgtttttagctgcttctccagcaaagattattt

SEQ ID NO: 13045 - DNA, 120 bp, Homo sapiens
ttacgcaatccctcactcaaccaccaaactctggaaaacagaattgcttgtttataagtcagccagagcaatcaatgagaaagcacagaaaatagcatgcagtacactgcaatacacaca

SEQ ID NO: 13046 - DNA, 120 bp, Homo sapiens
agccgcctcccccgggaatcccaatccattcacacaggggtggaggggggctcgatatgagtcaacacagccataatctttagttacgagctcccttcagtctcttccagaaatctctat

SEQ ID NO: 13047 - DNA, 120 bp, Homo sapiens
aatcgtgaacatttccatgaatcaactgtatttccagaccaatgatctgcttatttcaactggtaggacacactcaacaacagttttaacagttttgcttttttttttttttttgagatg

SEQ ID NO: 13048 - DNA, 120 bp, Homo sapiens
ctccgagggtctgaatgggcagccctgagggactcacatcattcaccgtggtgtctccgtccctggtgctccaagtggggaaccttgtcctcacttggcacccattactgctgctctgcc

SEQ ID NO: 13049 - DNA, 120 bp, Homo sapiens
gagcggtacctgcagttcgactgtgtcctatggctacctccaatgcagcctttgtgtcacgggacgctggtacctgagccaaaggaggaagtgttgatcaggctaaagccaacgcccagt

SEQ ID NO: 13050 - DNA, 120 bp, Homo sapiens
tgtcgtggcaaccatccaaatggccccaggaaacaagggacatttacagtgttatagttcatcacgttgtctctcctctgagtcaccctgaaaattctgtttctgccaggggatacctcc

SEQ ID NO: 13051 - DNA, 120 bp, Homo sapiens
ccccggggcccgaggacagacataggaattcccaggccaggcctcctcctgcaattccatggcctgtgatcctctgtcccaaacgccacacataattagaagttataatcctgtaattcc

SEQ ID NO: 13052 - DNA, 120 bp, Homo sapiens
attcgtttatgggaaagtttcacttccctatttataattatgcactgtcgtatctattataaaaacgaaaatcaacaacaatctctccaccctctcagtgatccctggccaagggccaaa

SEQ ID NO: 13053 - DNA, 120 bp, Homo sapiens
tcccggctccaaagcatctttgtagcccaggccctgccgcctgcgggtatcccagggcccctgctccacaggctggggtcgcttttgagggactgagctccctgactgttatcttctggg

SEQ ID NO: 13054 - DNA, 120 bp, Homo sapiens
ctgcgaggccggcacccgccacccgccgcccgccgcccgccgcccgccgccagcccccgccaagtctcccggacaacaagacaaatccgctttggcacacagtgagacgcacaagaccgt

SEQ ID NO: 13055 - DNA, 120 bp, Homo sapiens
ctgcggtgctcacgccctcctggacgacccggagcggaggagggtgcaacgccggaggctccctcccaccagcagctctcccctgctccctgaaaagtcccacaggcggactttggaagc

SEQ ID NO: 13056 - DNA, 120 bp, Homo sapiens
gggcgacagagcgcctaaaataaatatgagaccgccaacacgcctgggatggtctgtctccacccgcgctcccaccaagcgctcttgcaacgcgcccagaggccaagggcgccagcgcag

SEQ ID NO: 13057 - DNA, 120 bp, Homo sapiens
gaacgggtcctttccccaggcaccagggatcgcaagcgaggggtggcggggggtgggaggggggagacccaagcacccctccaggtcctccgcccgcacctgcgcggagcggccacatgc

SEQ ID NO: 13058 - DNA, 120 bp, Homo sapiens
gttcggtggaatcagtgctgtgactcctggcggaatcattccttccttaggagctaagacctctaggccagcagaccatgagatgggaggaacaggaaacaaaattacctagtggctcac

SEQ ID NO: 13059 - DNA, 120 bp, Homo sapiens
gaacggtgccattccttttccattccttgattcctggaccctcgaatcctggctagaagcagcagcgccatctatcggacgctaattcggagcttatgccgccttctgaacaaccttgct

SEQ ID NO: 13060 - DNA, 120 bp, Homo sapiens
aggcgcccagattcctgagaggcttcccctgcccagcacagggtctaggggaggatgcagccttggcaggtattgagggtgagggcacagtgcccatagttggttccttttgaaccctgg

SEQ ID NO: 13061 - DNA, 120 bp, Homo sapiens
gggcggctgcctctgggaagggccttagtcacccagcagcggcttccgggaacccggtgcccagtctctgggaaacatcacaggtttttccagcgggacccccccaccctgccctggggt

SEQ ID NO: 13062 - DNA, 120 bp, Homo sapiens
ccacggtgcagacacctgctgggaacgggccaggctggctctccagggtccctgctgcccccaggctgactgccaagctacccaccgcctctgcctacccttcgtgtggggcacagagct

SEQ ID NO: 13063 - DNA, 120 bp, Homo sapiens
actcggggtttttgccacctccatgctgccgacttctgtcaccacccccctccgttcctggcccctgcctcagccaagcggtcctggatattcctccctctgtcctacccccgagacatc

SEQ ID NO: 13064 - DNA, 120 bp, Homo sapiens
gggcggccatcccaccagcgcatagcacactccctggaagactggaagattgtagatctcctgtctagtcctgttcatccactgagaactgggggctcactgaagcccaggctggcagga

SEQ ID NO: 13065 - DNA, 120 bp, Homo sapiens
ccccgcagctctgaagcccgccatccctcttcaggcactccctggccgctgcgcctccctgtggggtgggtagggggctggccctggaggccgatgacctgactttgattcccagctcgt

SEQ ID NO: 13066 - DNA, 120 bp, Homo sapiens
gcccgcctgtgtccccctttcattgtctgcacctaatggggatcgtgtttgtgcacacaccatacagcagtgacatcggttcgtatgcaaggggcctggaacagtgttgggtagatagca

SEQ ID NO: 13067 - DNA, 120 bp, Homo sapiens
ctccgtctgtgctagctactgtcatggctactattgcagtctagcccaatgctatctttgtgttctcactcctccctggccagcagcggtggctgggagaggggtccaggagagccagct

SEQ ID NO: 13068 - DNA, 120 bp, Homo sapiens
ggccggggctgggcaccctccgtgagaggcacttctagccaagggtgccatgcagcctgtggccctgtcccctctccccacgcggccttctcacctggatacatctacagccagaagcac

SEQ ID NO: 13069 - DNA, 120 bp, Homo sapiens
gcacgtgtgtctgactccagagccccactctcccttgcacaaggtctccacctctgttccctgacctcggcccccacgagaaccctgcagacccccactgtggaggatctgcgcagcgag

SEQ ID NO: 13070 - DNA, 120 bp, Homo sapiens
cagcggggtgggggccgtggggagcagcaggagccgttggtgtgagggagtggccaggccccaaaacagttagtctgtgctggtagagagaggctgggctcagggttgggccgagccaaa

SEQ ID NO: 13071 - DNA, 120 bp, Homo sapiens
ctacgttggccttgctactacttttttcggatcagctttacacatcccttttgtacagagcagcccttccagccctgcagtttattgaagggggtcggttccagctcgccacctcgggga

SEQ ID NO: 13072 - DNA, 120 bp, Homo sapiens
agtcgggccctcctccaccctgggactgtgtggttcctgggagctcaagggccacctgggtgggggcaacccgaggagaagggactgcctcttctgctccactgtgggatagaaggatca

SEQ ID NO: 13073 - DNA, 120 bp, Homo sapiens
atccgcctcatttgggcctccccagttctccaaggagtgctggcctcatggggctatactgggggagaggctttgttctggagcccaggctgcctttatgacactgggtagtccagggtc

SEQ ID NO: 13074 - DNA, 120 bp, Homo sapiens
acacgcagacacgcacacagatgcatatgggcacacgcaggcacagctatcttgtgtgagctctgcggatggaaaaggagaagctttctgtggacagggaacaatggcgacagaggaacc

SEQ ID NO: 13075 - DNA, 120 bp, Homo sapiens
agccgacttgccctttgccctggagctgcggcacctcggggttgggggaactgatggcctcacctcccccaccccctgcagcccctgctcctccccacaggagtctggccagagagttgg

SEQ ID NO: 13076 - DNA, 120 bp, Homo sapiens
cttcggactcccactcacctccaggttgggaaaactgacccccagcccagggcaggaggcaggatgtggaagggcctctagcagagctgaggtccagccggccatgtcgggggaaggacg

SEQ ID NO: 13077 - DNA, 120 bp, Homo sapiens
agccggccttcctccccaccacacaccgggaccggggcttcccctcgccacactgattaggctggaagtggggggcttccagcttcccacttctggaagaccccacctgcacccagcctg

SEQ ID NO: 13078 - DNA, 120 bp, Homo sapiens
tgccgctgttgctacagcagacaacctggggcaacgtctccggaagctggagaacgggcaggtggggcagccacaaagagggctccagcggtgtcggctgcctcggtgtgcggttcactg

SEQ ID NO: 13079 - DNA, 120 bp, Homo sapiens
tggcgcacactgaaccctcaatgaatgcagccatcagccctgctcaggctggcagggttgtgaggactggaggatccaggtcatctctgcagaccagggcaaggcctactgctggacaag

SEQ ID NO: 13080 - DNA, 120 bp, Homo sapiens
gggcgaaaagctcttaccatagtggaaaaaatattctgccgaaacggaagtcttcctcaatttagctgagtcattttcttgtggttaaggaagtccgggttacctctggcccttcccctg

SEQ ID NO: 13081 - DNA, 120 bp, Homo sapiens
tcccgccctggcagggggcatgcccatcccggcaaacctgcagggcccttgattgtaagtcaccccactcaccccgggctgcttctcaccactgtttcctgtgctgaagtgggagtccag

SEQ ID NO: 13082 - DNA, 120 bp, Homo sapiens
cagcgtgctgcagcctcccgttggtgaagtgcttcctctcttgctgtctacctgctgcttccagtctccggcgtcagctcctcctctcccaggggcagcctcacttgtctcctctatctg

SEQ ID NO: 13083 - DNA, 120 bp, Homo sapiens
gatcgccttgttgtttagtaccaaattcatgtcttcagcccagaggccaagcctgagcatcaccctctaacatctgatctctctatctgtctatttcacaggtatctcggaattaacaag

SEQ ID NO: 13084 - DNA, 120 bp, Homo sapiens
caccgttccatgcctaatctcttataatctattctctcctctttggctcaaaatagacctatcaacttcttatccccgctgccaataccctagtacaaaccactgctgtctcccacctgg

SEQ ID NO: 13085 - DNA, 120 bp, Homo sapiens
caacgatgggctaaccctaactgggctccatgcctgccttcctgttcccttaccatacattctccaaccagaggcactgttgcaaaaacataatccagtgcataacttccctttgcgctt

SEQ ID NO: 13086 - DNA, 120 bp, Homo sapiens
cttcggtctttcagtttcagcctctgtgtcagcaaagaccccttccattttgaagagaatcaaccagttgaggagcgggtggatgatagagcaagttgcccacagagacagcaaattgga

SEQ ID NO: 13087 - DNA, 120 bp, Homo sapiens
tgacgaaggatatttatttttctgactcaggactaaagggggctgagaggcccatgctgggaaaagtacttgcaatacatatggcagaggaagggttaatatcctacacgcacagacatc

SEQ ID NO: 13088 - DNA, 120 bp, Homo sapiens
tctcgctggcctttttgggttctctggcactagctggtctgtgaccttctcctgagagggcctcttcagtgtctctatgtgactgtgctaccaccaactacggccacagtctctatcact

SEQ ID NO: 13089 - DNA, 120 bp, Homo sapiens
gagcgttaacatgtccaagctcacttactatgatgactgttatcatttttaaaaggagaatgacaagtgttggtgaggatgtagagaaattgaacattcatatattgctggtagaaatgt

SEQ ID NO: 13090 - DNA, 120 bp, Homo sapiens
ccccgctgctcctgccacccaggccccaggtgtggccagcgtagcccctgagtggtcttctgggtccacttggtctcctcaggcagcacccgctcctgctgggcctagggcccaggccag

SEQ ID NO: 13091 - DNA, 120 bp, Homo sapiens
ccccgaggcctcctacccggagtgtgacagccccagggggctcccgggcctgaccgagctacaaaggcagcatcctcagagctgcctccagacaaagagcgcacttcatctgtggaacat

SEQ ID NO: 13092 - DNA, 120 bp, Homo sapiens
caccgcccccttacccttaccgctccccacctgccctggactcgagggcagctggcccgggtcctggatgcaactccccctcacaatgagaccggtgtggggaactgccacctggtgtct

SEQ ID NO: 13093 - DNA, 120 bp, Homo sapiens
ccacgggtgcgtgggcagcaaggaaacccgaagccatcctggaagacctgtgtcttccagggaaaaagggactcagggctcagcccaggcagggaaggctgaggggagtggggctgtcct

SEQ ID NO: 13094 - DNA, 120 bp, Homo sapiens
ccccgcccgctgcctggcctccacccggcaccccaacaggctctcccaggtctccctgcacccagcacagagcacaggctgaggccgtgcttgtgggaagcagaggaggagggggctggg

SEQ ID NO: 13095 - DNA, 120 bp, Homo sapiens
ccccggatgggatgcacggcctagaactccgggcctgaatcacaccacctgcttcttccaggacccagagcatctgggcagacactcagtcggcggctagggcctctggctctgctgcag

SEQ ID NO: 13096 - DNA, 120 bp, Homo sapiens
gcccgacactacccctctgcccatggggatgggacggacatattctgccagggcccaaggggagggcagggaggaagtgccagacagcctcatgtccagcaaggctttcccagggcctgc

SEQ ID NO: 13097 - DNA, 120 bp, Homo sapiens
ccccgaagccaggtgggccccctcaccctgtccacctgcaccctggcaccctccggtggcaggcagagaccagcaggacacaggcaggggcgtggagaatggggcagaggtgccagctgt

SEQ ID NO: 13098 - DNA, 120 bp, Homo sapiens
ggacgggaggggcctgggggccagcagagaggcaggatggcatgggacagatggcgtgggacagacagtgtgggacagatgacaggaggcctgctgaggcaggaggatggtggctggggc

SEQ ID NO: 13099 - DNA, 120 bp, Homo sapiens
gcccggaaggagtagggcctgtccttgctgtgcaaaggacctcagggccctctctgggcaacggcagagaagcagcctcccgctcatcctgtggtgtggaagggacaggatacgggaagg

SEQ ID NO: 13100 - DNA, 120 bp, Homo sapiens
ccccggaagcagcccaggtggacaaggctgggcctggctgagggggcggaggggcgcaggtggtgcccctttccatccatcccacctaggcacctcgggaggctgcaggcagcagacaca

SEQ ID NO: 13101 - DNA, 120 bp, Homo sapiens
gagcggaaccctcgggtccaccagccccttcacaggtcatggccaagtcacgacactgatggtgatgaccctggctggcggaggctggtctagccctaggaccagagcccaccacgtctg

SEQ ID NO: 13102 - DNA, 120 bp, Homo sapiens
tgccgctgtgcatggcccacacagcatggcaatgatcccatatcactgtcatttctaccatgtgtgtgcctccaagcacacccagccaggtgttgatggcacacacccaagcgcacacac

SEQ ID NO: 13103 - DNA, 120 bp, Homo sapiens
cctcggcaccatgtgccacgagcaggcacaccaacagtgacatgcacacccacatacagcagcactggtccccacgcagccacacccacatagacacaccaccaccactttctgcactga

SEQ ID NO: 13104 - DNA, 120 bp, Homo sapiens
gcccggtccccacatgctgtgtgtgtgcccgtgtggaggagtggccttcctgtgcttagctgctgtgctgaccagctggggacaggagggaggggacgccaagcagcccctctgcagtgg

SEQ ID NO: 13105 - DNA, 120 bp, Homo sapiens
ccccgcttacctgccgcagatgcaggtgtaggagctgtggcgcatgccgccccgggagtagcagtagtgctcgaagaggctgcagggggagagacgcgtcagggttggggcactagagca

SEQ ID NO: 13106 - DNA, 120 bp, Homo sapiens
aggcgtgagccaccgcacccggcctaaatgagataatatctatgaaaaaactaaccctttgcatgtgatgagtgctgggaactggtaggctctttgaggagtaggtcctcccaccacccc

SEQ ID NO: 13107 - DNA, 120 bp, Homo sapiens
ccccgcagacgcccctacccagcagaatgctggtttctgcatgaatgcatttgtgtggggactcccgagacagcccctgagggagccctcattcacccgggtggggcccggccctcccag

SEQ ID NO: 13108 - DNA, 120 bp, Homo sapiens
gtacgtgcctttctgagcctggcttcttttgctagacatcactttcagcgctgttcgtgtccctgactgtggcaacaatctgctcgttttcactgcccgacagttctccctgtatggaca

SEQ ID NO: 13109 - DNA, 120 bp, Homo sapiens
acccgccatacacaggcttggcatctccccagctctagactcctcccccacctcatgtgtctccggtgcacatggggcaggcaaagggggagtgtggggcgccaggcatggaatgcttgg

SEQ ID NO: 13110 - DNA, 120 bp, Homo sapiens
ggacgctgccagctgtgtaacggcgatggttctagcatctctgttttctgcttttttatcccccctggcagagaagaaactttgaagctcatcactttgtgggcctaggctggaggcatc

SEQ ID NO: 13111 - DNA, 120 bp, Homo sapiens
catcggggcacctcagtaggcccaggggctactgggcattcctccactgcaccatccctggcagggcaggcgggaatggggttctcctaatgtcaggattccccgcaggacgagggcgca

SEQ ID NO: 13112 - DNA, 120 bp, Homo sapiens
tctcgggggtgaacttcacagaaatggaaagtttatcgtgaatgaggaaagggcagtaaaacccaaccccatttactgggtggggagaaagctgccacccagggtgtccaaatcagctgg

SEQ ID NO: 13113 - DNA, 120 bp, Homo sapiens
tcacgccctttgggtggtcactgggccttgggaacggggccagaacccagccaggtggagcagcagaagcctggcacatcacacatacggtccagccctcctcggtccctgaccctccct

SEQ ID NO: 13114 - DNA, 120 bp, Homo sapiens
ggacggcctggagggaaggcagctgggtagacagcagcctccatgcccagggactcgggaaagatcaaagtgtgagccggaatgcgatgccagaggaagacgagggatggaagaggcaga

SEQ ID NO: 13115 - DNA, 120 bp, Homo sapiens
aggcgccttgttgcacctgtgatgccccccgttatggctgggctgcagttgtcaccctggccctgtgcctgggaagccaaggggaggctgagggcagctagggacagctctgtgcccacg

SEQ ID NO: 13116 - DNA, 120 bp, Homo sapiens
gggcgctggggaggccaaatgaggtggctgagacggtagctccctcatccatccggcatctccaggcagaggagagcaaaggcctggccacccgcggctgcccgaaagccaccaggatgg

SEQ ID NO: 13117 - DNA, 120 bp, Homo sapiens
cctcggctgggccggcgtctgatcccgactcaaagccacagggagcctcagctgggacgcaacctgagggcttggaaaatggaggacccagagccagttttagcagttgatgaataataa

SEQ ID NO: 13118 - DNA, 120 bp, Homo sapiens
gcccggctgaggccccagagagtgactcatcagctgcctccctgtcacttccggctgcccgggcccctcggcagggacaggtgccaggaggtgaggggcgccgagcccagacgaaggaca

SEQ ID NO: 13119 - DNA, 120 bp, Homo sapiens
cctcgttcggtcccagcagggcctgccctggtgctggggtccctgggccctgcagcacgcctctctggcctcaggtgctgcgcttgtaaagtgggagtgacagccacgctttggctgttg

SEQ ID NO: 13120 - DNA, 120 bp, Homo sapiens
gctcgtatggccgttagttctcaatcacgacaggactgggtgtcagaacctcccagggccatgggcagaggccgtgcagcccaacccacgctcccatggcgtccctggattggtcactgg

SEQ ID NO: 13121 - DNA, 120 bp, Homo sapiens
cctcggccttcccagggctgtaaacactggtggaaggtgggggcatgggagaggcatactggcctccaagaagcggtgagcagggaagggtgtgggcagctgctggaggagaatatgggt

SEQ ID NO: 13122 - DNA, 120 bp, Homo sapiens
tagcgcagcccagggctccctctgacatctctgcccccatcttggtttcagggcactgcttttggcctagaagagcagaggagaaagaagcagaggagtgggaggaggagagcggggaga

SEQ ID NO: 13123 - DNA, 120 bp, Homo sapiens
aggcgagcaggaagaagaggaggagtgagaagagaaagaagcatgggaggaagagaaggaatgagggtactcaccaggcagccttcccagcaggccccatgccctgcctaagaggcaggc

SEQ ID NO: 13124 - DNA, 120 bp, Homo sapiens
aggcgggagccgtcctcagcatctcccaatggccgagtacaggggtgcttctgcctcatcatgatgggcctggtctgagggctccagtcctgcctgggctgcaaggctgcatggctgcat

SEQ ID NO: 13125 - DNA, 120 bp, Homo sapiens
ggccgcactcgagagacccaccccactcccctgcaggggcagaggggctgggagaagaagatgtttaggtcctgccaggaaggtcctctcaccacaaattccacctttatgggaaaatca

SEQ ID NO: 13126 - DNA, 120 bp, Homo sapiens
gggcgagggcaggaagtcacagatggtcagggttggtgaggggtgaagcagagggcatttggggacaccggatgtctcgtccagatggggaaactgaggcccggagaggggcgaggcatt

SEQ ID NO: 13127 - DNA, 120 bp, Homo sapiens
cagcgctctggggtcactggcctgcccacccctgccttccgggagggccaggaagggaattggttggagagagtcagcatgcctagctctctgggtgcgaagagaggcccctggggccgg

SEQ ID NO: 13128 - DNA, 120 bp, Homo sapiens
gtccgagcaccagccatgtgatgcctcgctcacagcactagcaaggcaggcccctagtccacagggaggagggagatcttgcttaactacaagagcgttaaagtccgatgaggcagaagc

SEQ ID NO: 13129 - DNA, 120 bp, Homo sapiens
gcacggaagaggagcagcaaccaggcagagcagccagtgctccaggggccacgggagaagcaaaacaagtgggggtctctgagaacacggcccaggagcctaaagaagagacacaccacc

SEQ ID NO: 13130 - DNA, 120 bp, Homo sapiens
caccgggctccggccctcggaaaagctgtgttgcctggctctgcacactactctgaatgttagtgtctcaaaacagtcaactttttcctttcaagagtcttctaaacgatagtttaacta

SEQ ID NO: 13131 - DNA, 120 bp, Homo sapiens
ccacgaacaaatggttctctgcttgtctcgaagttcaactacttttatttgtccccaagtatttggcaggaaccagttgcatcaataaagaaatgccaattttcaacagccacacgagat

SEQ ID NO: 13132 - DNA, 120 bp, Homo sapiens
tgtcggcagacagggcgcctggaggagctgttattaacagccagaggagacacgggggcaggcctgggagacagcactccagaatcagactagattaagaagatactgtaggcaccaagc

SEQ ID NO: 13133 - DNA, 120 bp, Homo sapiens
aatcgtttagatcatgatgcgtttgatgttttatagcaagatgacaaatatctttctcaactgctaagtgcagagagcccgttggaataaatccaaccaaactgcccaccacaggtaagt

SEQ ID NO: 13134 - DNA, 120 bp, Homo sapiens
gggcggtggtgtcagaaatgcctcaggcagtgatttccaaaggcacgccccgaccgtgcagttcaggccatttttctcaaccctcgccagtttctggcacataatctcattgttggaaga

SEQ ID NO: 13135 - DNA, 120 bp, Homo sapiens
tgccggaggagagggagaagggggttctgaggggaggaagacgcgagaatctcaacgctgaagtggtttctagattctccagggcatgagtcctgaaatccccaaggcctgagttctaga

SEQ ID NO: 13136 - DNA, 120 bp, Homo sapiens
ctgcgacctctcagcacagggtggccgagagccccacagtcacatgctggcctagcagaagtgaggggtcccctgtttgcacagtgcatccaggaggaacttcggtccccagccttgaag

SEQ ID NO: 13137 - DNA, 120 bp, Homo sapiens
ccacggctgctcaccacccagaggggagggcccagcgggcatcaggaccccgcaccgagggtggtgaggcctttctgccacctctgctgatagggtcccaggaccacggctttccgatgt

SEQ ID NO: 13138 - DNA, 120 bp, Homo sapiens
atgcgccagtctccacagccatcagcaggccccacgaagggcatctagcccctcttatcttgctgggatggacagtaagaaagtaaaacagcaccagcaaagcccagccaggctccgact

SEQ ID NO: 13139 - DNA, 120 bp, Homo sapiens
gaccgccagggccctccagcaatgaactgcggtcaccttgggctggagaagtagctatggtgcacttcgccctagctgggatgcccaggagggccacctgtgccaccgtgctgcttctga

SEQ ID NO: 13140 - DNA, 120 bp, Homo sapiens
tgccggatgactgtgggtgaggagggacacagactcatggaccctggggctctgcctccacaaaacgggcttttctaacaagagggtggaattcacatgaaggaagctggctggttctgt

SEQ ID NO: 13141 - DNA, 120 bp, Homo sapiens
tcccgctgtccccctgccaagttcctgcaggtgcaggagcccgggatgcatggcagtgacaatagcatttgtgcaggcagggcaggggcgtgctagcccaggccaagtctgaggcctgtc

SEQ ID NO: 13142 - DNA, 120 bp, Homo sapiens
acacggaagccaacagaaatccacagccagagggagctgcgagaggacggtggctgagtgggtggggccaggccagtttccctcctgctcagccacccccaagatgcttcctcaccctac

SEQ ID NO: 13143 - DNA, 120 bp, Homo sapiens
gcacgaagacccacactgcccatcctccatgccacagacagagtccaaaccctcagcctgaaccacaaaggcagaggatggccttgtgcgggaggttcctgaggacgcaaactcagcttc

SEQ ID NO: 13144 - DNA, 120 bp, Homo sapiens
ccccggaacacagagcctgctgtcggagtatctaacagggatggggaggagcctcaactttggttttatcataaattacctccaggcttcaagagcagacatgcctgccggcaggtatgg

SEQ ID NO: 13145 - DNA, 120 bp, Homo sapiens
tcccggcaccttgggaggccaaggctagaggatctaaggccaaggctgagcacaggaattcgaggccagcctgggcatcacagtgataacctgtgtctacaaaacatttaaaaatcagcc

SEQ ID NO: 13146 - DNA, 120 bp, Homo sapiens
aaacgtgccaggaaatgtgggcactgcacagcctcacagagagtccccagctcatggccacgctgtgggcatcaacatgcctggaggctgctcaaacagacagggaggctgggaggcaaa

SEQ ID NO: 13147 - DNA, 120 bp, Homo sapiens
caccgtgttgaacaaaactcatttaaagggccaggaattccatctctcctggagatggatgtgcagggaatgattctattggagccaggtgggcgggaattcaacaccactgaacccgca

SEQ ID NO: 13148 - DNA, 120 bp, Homo sapiens
ctgcgagctgagtgtgcctgaaacctagccagggacgggcagacgtggggcagaggtccacctccacgctggaccagggcctggccacgcctttccttctgtctgatgctcccacatcca

SEQ ID NO: 13149 - DNA, 120 bp, Homo sapiens
tggcgcgcagtgactcaagttctcactctcccctaggagtcccacttcccatgtggctttcttgctggcgtagggttaaatgcctattcatgaggacacaaagatgagcaatgctactgg

SEQ ID NO: 13150 - DNA, 120 bp, Homo sapiens
caccgagaatttaggtcatcatctacgtatcttttctaatttgggacatgttacccaggatgtagaatcctgggacacgtctacctgtgaaccaaccacagcttcccatctcctgtgcac

SEQ ID NO: 13151 - DNA, 120 bp, Homo sapiens
ggccggggagcagaaatagacatgttacccaccgcctgattaatgcatgcaggacacttttcgttctgtgtaattaacagctctaaaaccggcagatgactcaatttaacacagtctcgc

SEQ ID NO: 13152 - DNA, 120 bp, Homo sapiens
acacggcaattgctgacacgcctgctctcccctgacgcttccagaggtacttaaccgaaacccaaggcactgagctatcaggtggtatgaaagcatctccttttatttcccaccttgcct

SEQ ID NO: 13153 - DNA, 120 bp, Homo sapiens
aggcgctccttgagagaatggaaaacaataaaacagtcacaggaaggaaatgaatgacagccgaacaaaaatgagaaagcgagtttgcctgtgctaggagaggctgcttgctgccttcca

SEQ ID NO: 13154 - DNA, 120 bp, Homo sapiens
gaccgtacgttcagtgggaccagcagtgagctgggaggatgactgacactcaggcagccccactccacgggtgccccctcagagctgcaaggagcagtgcaagagcctgggatcaacagt

SEQ ID NO: 13155 - DNA, 120 bp, Homo sapiens
gtccgtctcgaataccgcctcctccgggaagcgcccgggtccctggggtcctcgcaacgccgccctcctacccgggggtcttggcagcgaacatgcgtgtcgaccccagcccccaccgca

SEQ ID NO: 13156 - DNA, 120 bp, Homo sapiens
agccgcacacggtggggccgccagacgcgggcaggtggggccggagccagccaggagggtggagaggagctgcggcccccgcgctgaccctgactcggagcgtgcagctcgccgaccggc

SEQ ID NO: 13157 - DNA, 120 bp, Homo sapiens
cggcgctgggactccgggccaacgggaagaggcgcctacccgcggcattcagcgaccccggctgacgctctcacccgcggtccggccgggacacccatgcccctctccacgccagcggga

SEQ ID NO: 13158 - DNA, 120 bp, Homo sapiens
gagcgagggaggcgcagcactcacccggtggccgccgccatgttcgcccggcaccggcgtcacgtgaagtgcggcgtcagctgagcccctccgggtgccaatgcatggggcggggtaagg

SEQ ID NO: 13159 - DNA, 120 bp, Homo sapiens
gggcggggcagggggcggggcatggagtccttgacccacctcctccagagccaaattccacgggacgggaaggggcggtacctggggaagggcggagccccgatggggcggggctcccgg

SEQ ID NO: 13160 - DNA, 120 bp, Homo sapiens
gctcggccaggataaatgagcgggctgccggctgcagacagtaggtcgggttagcgggcagcatctgcagccttttcgtggtgggagggaggtcctgaagcagaggacatcttgattctg

SEQ ID NO: 13161 - DNA, 120 bp, Homo sapiens
ccccgatctggcgtaccagcccacccgggagaagaacacataggaataaagaaaccacgtgggaggagaggagggagactgacccaggctagggtcggggcagaggtggcgatttttgtt

SEQ ID NO: 13162 - DNA, 120 bp, Homo sapiens
ggccgtggggcaactggaggactctaaatgtgcagcgtccaggagaatgtgcgcgagagaggggcagcctaagggaagcaagggccagaccctgcggggcctccactgtggggcctatga

SEQ ID NO: 13163 - DNA, 120 bp, Homo sapiens
aggcgagaagtgggcacagccgagaagggtttaggagggagagtctgccagaaggcttactcctctgccccactgggcactggtactgggtgcagagtcctgcagagaaggtgtagggac

SEQ ID NO: 13164 - DNA, 120 bp, Homo sapiens
agacgctgccctccctactgccaacagagtcagggcattacaagcacggcccaaatgcgttgcacatgtgagctcatagaaacctcaccacagccctatgaggtcgagactatctttaag

SEQ ID NO: 13165 - DNA, 120 bp, Homo sapiens
gtgcgtgacagctcccccttggtccccatccctctgccttgcgcctgcctcccaaaggctgcccacgggtcctgctcccttttcctctttgtcccttcatcgcacagtccagatcttgcc

SEQ ID NO: 13166 - DNA, 120 bp, Homo sapiens
ctccgctcctgggtatacgctcagcagaaatgtgagccgacgtctgctggcagacacaggcgagaggtggctcatagctgcactattcaacatacccccaaactggaaactccccaaatg

SEQ ID NO: 13167 - DNA, 120 bp, Homo sapiens
gcacgacactgagtgagatcagctagacacaaaagaatctgtgttgtatgaccccatttatttaaagttaagaagaacacagaagccaggcgcggtggctcatgcctgtaatctcagcat

SEQ ID NO: 13168 - DNA, 120 bp, Homo sapiens
tcccggcaagcagtgaacggaaagggacacaggagggacttctggggtcagggatggcaggtttaactcgtctgggtggttacaggggcatatttggtttgtgaaaatgtaagaagctgt

SEQ ID NO: 13169 - DNA, 120 bp, Homo sapiens
ccccgcacgctccggctgccggccccacgctgctcgcccacagatcgcactgggttccgcttggagcgggcggaggcaccgggcccgagctgggtcggaggtcctctccgccgcctgcgc

SEQ ID NO: 13170 - DNA, 120 bp, Homo sapiens
gcgcgccccaagcagaggatccgccgcggagaaccgctcccggactggaggcgcccgcggcctcgggtgcgtccgctgcgccaggtaagtggctgcgcccctgccccacccctgttcccg

SEQ ID NO: 13171 - DNA, 120 bp, Homo sapiens
ctgcgcaggctcctggcctgcagagacgccaggaaggggtcccgagcgggccccggactgcaccgctcgccatccccgccaccgcacgcgaatgggagtccgaagctgcgggcggaggtg

SEQ ID NO: 13172 - DNA, 120 bp, Homo sapiens
gggcgcgcggggctcgggtctggttgcactttggggaccggccccggtagcgggaactttaattagactttctctccttggatctcactcgctgccgcgcttctgggaactgccgtccct

SEQ ID NO: 13173 - DNA, 120 bp, Homo sapiens
cctcgggccctcttggtccctgcggactcccgctccgcctcctggccctcggtgctgcccgcggggaggcggcgtcgggcgctgagcagcgagcgccgagggccaggcaggagcgctcgg

SEQ ID NO: 13174 - DNA, 120 bp, Homo sapiens
gggcgctggggcttcctggcgcgctcggagccggggctccggacgggttgcggcgggcagagactatgggggaagtttaagtggccttggcttcctacccagcggctccgtcgcgcgcgt

SEQ ID NO: 13175 - DNA, 120 bp, Homo sapiens
ccccgacccgcaactctccagggcaccggcctgtgagtgctggaggcgagtgtgcgtgcgtcagcgatggtgtgaaggtgtgtgcgtgcgtgtgtcgggagtgcgggagtcggagcctgg

SEQ ID NO: 13176 - DNA, 120 bp, Homo sapiens
gggcggctccagggggcggggaaatgatccgtttggccgcgggaccgagccgagctctgacggcggctgcaactccggctaccgactctgcagacccgctctggcctcgctggaggccag

SEQ ID NO: 13177 - DNA, 120 bp, Homo sapiens
agccgggccaggagggcgatcacgggttttggcagtgcccgatgctggggcttgggtctgatgtgaccccgattccttctccagtgcgggactcccgccgccctaactttcgcgtacatc

SEQ ID NO: 13178 - DNA, 120 bp, Homo sapiens
gcccgcgaccccgacccggagttgaagcggctgcggcgccctcggctgtgggcgctgctgcccggctgtctgttttaacccagaagtaggcgccgatcctggggctctctgtcctgcagt

SEQ ID NO: 13179 - DNA, 120 bp, Homo sapiens
agtcgtctccggcgtcccagaggactctgcgtccctgggccactcccgctggctcaggagccgtgatcagctccgttaaggggaacgcgcgtcccggcccctctccatctgcttggcgcg

SEQ ID NO: 13180 - DNA, 120 bp, Homo sapiens
tggcgcagcagcagagcacgtgggagaggcgttgggtgcagggaggtagtagctgctttggagtggatggtggagaggggcgggggacagaggggtaagaggcagatcaaccccctttta

SEQ ID NO: 13181 - DNA, 120 bp, Homo sapiens
gcccgaaggacccagctggctccagtgcaggagcttcctttcaccttcgttgtccttttactagcttctcttcattcgccacacattgcccaagcacctgctctgtgccaggcactgttg

SEQ ID NO: 13182 - DNA, 120 bp, Homo sapiens
ctgcggatgtcagagccgctggaaaatgtgaatagctcagtgctttctagaactgaaaggaagctggccatgccgcatcctacatccccaggtgctcttggcaggatccagcagctcagg

SEQ ID NO: 13183 - DNA, 120 bp, Homo sapiens
tgtcgagggaacttttaacccaaataattcatgttcccaccttcttccattagcaacgagataattgccaagaagtaagtgtgtatctgtgtgagtgtgcacacgcatgcgtgtctgttg

SEQ ID NO: 13184 - DNA, 120 bp, Homo sapiens
aggcgaagtgagtgtatttgcttatgcagccaaactttctgcgtgttcctctggagactgtcagaccttcgtgtctcagtaactgaaggtcaggacagtctgatctaagcttttgttttg

SEQ ID NO: 13185 - DNA, 120 bp, Homo sapiens
tccgggacccctgtgggtacagtcagtgaccatcagtgctcagccgtctgggagctcttccaaggatcagagcacccatccctgagcccctaggcagccctttgcagtctggagccccac

SEQ ID NO: 13186 - DNA, 120 bp, Homo sapiens
gagcggcctgcagtgggggtcacttcaaagaagcatcacttaagacagattcacttttgtggctctttagggtatcacagcaacagctgtgacaggcttgacagctccaggccagctcgg

SEQ ID NO: 13187 - DNA, 120 bp, Homo sapiens
tgacgtggcagccagaacaatgcatcccaaggccggctggagctggaccgatcattttcttgcagctgggccacagtggtaatgaggctgccgtcctggctgcctgactccattccaggg

SEQ ID NO: 13188 - DNA, 120 bp, Homo sapiens
ccacgtctgcccctggagggcctgtctcagggctgggccagtgggtagggagcacttttcctgtaaacaggcatgtgtcagcacattcttgcactgctataaataaatacctgagactgg

SEQ ID NO: 13189 - DNA, 120 bp, Homo sapiens
tcacggctctgcaggctggacaggaagtgtggccccagcatccacttggtttcttggcgggggggggcggtgctcaaagagcttttactcatggcagcgggcaagcgggagtgtgcgtgt

SEQ ID NO: 13190 - DNA, 120 bp, Homo sapiens
aggcggtgccacacttcacaacaaccagatctcatgagaattcattcactattacagggatggcaccaagccatgaaggatccccccatgagccaaacaccccccaccaggacccacccc

SEQ ID NO: 13191 - DNA, 120 bp, Homo sapiens
gggcggggacgaatgtccaaactacatcaagacagcccctttatggggccaccccagcctcgggctccagcctgactcacttgcttctatttgctggtaaccccacaatgggaattcacc

SEQ ID NO: 13192 - DNA, 120 bp, Homo sapiens
ccacgtgccatgtcagccagacaagaggaggcgttgacatccgtcccatttaacccaccaggcatggtgctgtgaggtcacggctgctgagagcctggggtgggatcccggtgggcccag

SEQ ID NO: 13193 - DNA, 120 bp, Homo sapiens
gcacgtctgccccccgcacctctgaccagccacccctgatcccctaattccctctcctccaactgccctctggatgtctgcacttgggagacctgtagtcaggtctcctcaaagtccaca

SEQ ID NO: 13194 - DNA, 120 bp, Homo sapiens
ccccgtttcccaccaaacccctgccagtgagtgcagagaactcgcaaagccacagcaggcggtctcagccaccgtcccgctcacaggggcccaatgccaggtcacaacactaagaatatc

SEQ ID NO: 13195 - DNA, 120 bp, Homo sapiens
tcacggaagcagccacaatcaggtactccagcattggtcctcgggaaccaccactccccacacttgggacctggtgtggctactgagtaggaccttaacatcccaagtcccaaatcccaa

SEQ ID NO: 13196 - DNA, 120 bp, Homo sapiens
cagcgttgtctctaggcgctcagtgcacatgctgttggcagatctggcggggaaaatggtgcaggcatggcctccctttacctctccagacccccaagcctggactcaagtgttcaggct

SEQ ID NO: 13197 - DNA, 120 bp, Homo sapiens
ttgcgcccagccaggaattgtttactttcaattgtgtacttgaagctctgtaaatttaacaggaagagagaccacattgcagttttccacttcgtcatgacactgaacatggattacccc

SEQ ID NO: 13198 - DNA, 120 bp, Homo sapiens
tagcgtctccatagcaaaggaagcttctgtgaaattctaatgagagacccagagaaagaggcaggcacactcccggggacacacaaaggagaggggttaggggtcagctgcatttggggt

SEQ ID NO: 13199 - DNA, 120 bp, Homo sapiens
tcccgacagcgcccaggccccacaggacaatgctgttcctggacccggagccatggccgtggaataagagctaggtcttcagggcctcctcctaggatccttcttaacacagaaatcaca

SEQ ID NO: 13200 - DNA, 120 bp, Homo sapiens
ggacgcccaagccacgctggggcccgggaggcctcccgtcctgcccgcgggagaacccaggccgcgcatccctggctggacggcgtcaccagccgtagctgggccaggcctgctgctcaa

SEQ ID NO: 13201 - DNA, 120 bp, Homo sapiens
gcccgtgtctaggatgtcaccagagctcccttttctgtgtcctggacccggttcagggcccccgaggaagctgcggtttggggcgagccgattgcaccagcagggccgggctgctgctcc

SEQ ID NO: 13202 - DNA, 120 bp, Homo sapiens
tcccggggctgacgcgggccacgccctcctggacgcggacacacccccatttccccgggcccacagagccacgcctggccctgcagccaaacagcgggaaggcagattggtacgagtagg

SEQ ID NO: 13203 - DNA, 120 bp, Homo sapiens
tctcgcccggttgccacacactgcacggagcataattgggggaggttgtgcaactgcccgggaagccggggctcgcaacgagggctctctccaagtccccatcacaggcctccggggagc

SEQ ID NO: 13204 - DNA, 120 bp, Homo sapiens
gcggtggcggtcccgactggcagagcctaacgagaacagggcctatccccaggggccccgggctggacgcagaccagatctcgcgggggtgggctgggaggcgcccgccagaggccggag

SEQ ID NO: 13205 - DNA, 120 bp, Homo sapiens
gcccgcggagcccccatgggtgggtccatccccgggcccagtgagtcacttccccaggccccggaggccttcgtggaaggtgcctccctttccggcaaagcatcctttgttctcctgctg

SEQ ID NO: 13206 - DNA, 120 bp, Homo sapiens
gagcgggctgcagaaggctgcagctgcttttttgcttcctcagttccctgccctctcaaggcccaggctctcccacctccccagacgtctggggaaacccacactgccctgcataggttg

SEQ ID NO: 13207 - DNA, 120 bp, Homo sapiens
ctccggactgcagatcctgaacgcgcatcaggagggagggagggaggtttcgatgctctcgccctggccagcaccgctctgagttgctgaactggcctcaaggcttctcttgcatcaggg

SEQ ID NO: 13208 - DNA, 120 bp, Homo sapiens
ttccggcaccaccactggcactcctccttctccctccctttagcctcccccagttcccatgcccaggtggaggaacccgtgtagaagcccagcccagggagggaattcatcaaagcacct

SEQ ID NO: 13209 - DNA, 120 bp, Homo sapiens
ttccgtgaaggactggggctctcgacacaacgctatacagtaacgctgtaatcttggggcttaatcaaaacatattccaacaacctattctggtgccacgaatgaatgtttattttaaac

SEQ ID NO: 13210 - DNA, 120 bp, Homo sapiens
ctacggcttttttttttttaagagagagaaagaagggaatttcttgaagccaaatttctccctgcccttaagcttgtctctccactcgaaagactgtgtcagacgcccaagtcgtaatta

SEQ ID NO: 13211 - DNA, 120 bp, Homo sapiens
gaccgagggggtatttgacaaagaattaacagatgtcatttcggcggcggctggcccactgctgctgggccatttgttggatggaagctgattcggctgctgtcgtaaacagagagtagt

SEQ ID NO: 13212 - DNA, 120 bp, Homo sapiens
tctcgagacacaatggagacgacccccagtccccagttttgaaagccgtctccaaggatcctgacagactttccaatagggaaataggtcatgttctttcgtggctaattctgctgaggt

SEQ ID NO: 13213 - DNA, 120 bp, Homo sapiens
aagcgagttccaggcacacttcagtaaaccagccacaccgcacaccgcagagctgcctttttccatttgaaaaatgaaagaattaaattcaaaacaaacaacttcaatttaacaccaaac

SEQ ID NO: 13214 - DNA, 120 bp, Homo sapiens
cagcgtaatggatcttaatacccatagaaaacacaaaaacaacaccattgttccccagcaaatgcagagcaacctcgcagaatttcagtgaaggagaaagaagggaaaaacaccttatta

SEQ ID NO: 13215 - DNA, 120 bp, Homo sapiens
ctgcgagccattttggtctccaaaggttttaggctgcctgaggccgtgtgtctgcagtgtttcgggaaatgacttgccttagcacgaacgctgctctgttctgcagcgacgctgcctgcc

SEQ ID NO: 13216 - DNA, 120 bp, Homo sapiens
gcccgggagcggtgccgctccatttctggttaactcttccttcccgggcctgccgctcgcaggagcagtgtgggcagggcccagggacgccactgcaacccagcttcctgcagggcagcc

SEQ ID NO: 13217 - DNA, 120 bp, Homo sapiens
agccggactggcacctctaggagcagcttctccaagaaagtggcttcagcagaacagccagctacccccaccgctctggagaatctgttctcaaaccaagctataaagcgactgtcatca

SEQ ID NO: 13218 - DNA, 120 bp, Homo sapiens
aatcggggccttgtgggccaatactggccgatccagcctctcagggtgccctgctggggacagcttcccatctctgccacaaaaccaggaaggacactcttctggttagcagggtacaag

SEQ ID NO: 13219 - DNA, 120 bp, Homo sapiens
aagcggagtccagccggatactagggcacaacttgggcctgaggacatggggtgagggaagcacagggacagaaacgttttcgccacatatctgagctgaaagatgacagagaaccactt

SEQ ID NO: 13220 - DNA, 120 bp, Homo sapiens
ttccggtctagtctgggaagaaggtcacattcaaaccgcataagctctaaatattcctcagttgctattcatgcgctgtgaatgtttgttctccctgagaaatgttttcttagttgccgg

SEQ ID NO: 13221 - DNA, 120 bp, Homo sapiens
gcccgtaggtagcacagaggctgtggatggggctcagtgcctagtgcccatcagagagcctactaagctgaccccattgcagagagtagaggcagcttccagcaaccgggctggcctgct

SEQ ID NO: 13222 - DNA, 120 bp, Homo sapiens
gctcggctgcacgggactcccagcatgttccaggtgtggcagcttgctgtggaagccacggtgccagggggacaaaaactccttgtgcaggaccagcacagtggctcatgcctgtaatcc

SEQ ID NO: 13223 - DNA, 120 bp, Homo sapiens
atccggaacccccaggggaagcagggggcttctcatccatggagaaattactgccttctttgctttattttattattattattattttgctgctaatgtttagttttagttccttttatg

SEQ ID NO: 13224 - DNA, 120 bp, Homo sapiens
ctccgggtcacaggggcccgaggcaacccggccatctgggccctcagccacttcctggcgccacccgaggcaccccaggccaagccaggcagtcaccttgaccgggctgctggggcgtct

SEQ ID NO: 13225 - DNA, 120 bp, Homo sapiens
acccgcgcactgtccctccctgttcccaccccctccctggcaggcagctgttcagctccaacaggggcctatcttaacaacgagacattttagaaaggtccttattgctggtctaatttc

SEQ ID NO: 13226 - DNA, 120 bp, Homo sapiens
cagcggtccagccacagccacaggcctcccgggcatcctgtgacccctccgaaaagtcacattcactttgctcttgagaaaggaaaaatcatgctggaggcattttatttgaaaccatgt

SEQ ID NO: 13227 - DNA, 120 bp, Homo sapiens
ttccgtccttgcaatggcttagaagccgagctggttcattttgaaagcgtgtaaaaatctgatccattcaccagtaggcagagactacaaaatgcttaaggtaaaatatgtaaatatgta

SEQ ID NO: 13228 - DNA, 120 bp, Homo sapiens
cctcgggtccctgctagcgccagcctgagacagagagcgcttcctgtcctgctgactgcagaagttaaacggaatctccactcccggattgaggaaagaaaggcgtcttcctgttgattt

SEQ ID NO: 13229 - DNA, 120 bp, Homo sapiens
tttcgcgaggctgctgaccttcgcggcgccccgactgggcccaccccgcggagctgtcggggcagcaggcgcccaggacttcctgaatccccggcccctctggcctaacctagatctccc

SEQ ID NO: 13230 - DNA, 120 bp, Homo sapiens
tcacggcgtctgccaggccctcctcgcaggctttgcagtttgctaactcgcggtgcggccttgggacagtgcctcagtttccccaagtgtagtgaagtagggctggaccgtgattctcag

SEQ ID NO: 13231 - DNA, 120 bp, Homo sapiens
acccggctggccgctttttctctatgtcccttcccaacattttagtcccagacagccctgcggaggtgcctggcaggcacctcattttgcagagggaaaccctgaggctcaaagaggtga

SEQ ID NO: 13232 - DNA, 120 bp, Homo sapiens
cagcggcaagcgggtgcacagggacacggaaccacgtggccgttcccagcggccccactcagggtacctcgctctctttgttttatggggcatctgtgatgtcctaagccgggttatttc

SEQ ID NO: 13233 - DNA, 120 bp, Homo sapiens
tcccggcaacactctgtgagatcagggctgcccctggccatcagttgacaagtggggaaactgaggcccaaaggtcccacagcaaagaaggggcagagccccgagcttatgcccagtgct

SEQ ID NO: 13234 - DNA, 120 bp, Homo sapiens
catcgctgtggcctgcatcggtaaacatttcgcagcctctgaagtcccaagggggacgcctcagaacaggcctggcccctgggctggagcagggttcctgaggttcccagtggggcccag

SEQ ID NO: 13235 - DNA, 120 bp, Homo sapiens
gaccgaggcaagggccagaggggcccaagggaagggccagaggggccgggggcacaggaagggccggaggggctgggggcacggggagggccaggcttattgttgcagcctgcaaggctg

SEQ ID NO: 13236 - DNA, 120 bp, Homo sapiens
agccgggtgcctccgcagagggaggacacaaaacaggaacccaggcaggcagggtctctcccgaaggtgcccttggcccctggccaccaccctgggatgctcctcctcctcctcggcatc

SEQ ID NO: 13237 - DNA, 120 bp, Homo sapiens
tggcggactcggggccttttctcccgggcagtgctcagccagtccccaaccctgaggctcacagaggcctggggggatcatgccagcccgatgccaggcaagacccccaccccacacctc

SEQ ID NO: 13238 - DNA, 120 bp, Homo sapiens
gcccgcttggggcctgggccaggccctttctcctggccgcctccacccgaggcctccctgcttacgcggctgcgtggggtggagggaaggtgccttggagcagcccccactgtgctttgt

SEQ ID NO: 13239 - DNA, 120 bp, Homo sapiens
aggcgacaaaggtcccgtccacaggcggttattacacagggcggggcaggcagcccccatccattcctctcctctgtcaccccaggcttcccatcccttttttttttttttttttgagtc

SEQ ID NO: 13240 - DNA, 120 bp, Homo sapiens
aggcgagtgacgtcccccatcaggcctcagcctccacatctgtgaaatgggcgcagctcctgtaagctctgcacggggcagctgtgaggaccacattaagagaggaggctagtgccttca

SEQ ID NO: 13241 - DNA, 120 bp, Homo sapiens
ggacgcagaggatcatgggacgcagagtctcttgggggtccatggaatcctctaagacagaggattttacctatgggtgatcctgaccccagaggacactgggtgacatctggggacctg

SEQ ID NO: 13242 - DNA, 120 bp, Homo sapiens
tcacgactgcagggtggtcctggcatggattgggtccagggacaccgcttagcaccctgcagtgctcaggatggccccaccctagagaatgatccggtcccaaatgtccacagggcccag

SEQ ID NO: 13243 - DNA, 120 bp, Homo sapiens
ctcgtcccatcccctccacaggcatctcgtccccggtgaagaagacagagatggacaagtcaccattcaacagcccgtccccccaggactctccccgcctctccagcttcacccagcacc

SEQ ID NO: 13244 - DNA, 120 bp, Homo sapiens
caccggcccgtcatcgccgtgcacagcggtaagcgccacgggcccctggcggggaggggcggcgggccctcctatcaggcctctcacagccggggaagtcccactggatgtctgaccatg

SEQ ID NO: 13245 - DNA, 120 bp, Homo sapiens
tgccgtagtggagagcgcccagggccttgttccagcccggctgagaggttggactcagtccctttgggcctcagtttcccccctgtataacaaaaggctgcaacctaacttcacctcact

SEQ ID NO: 13246 - DNA, 120 bp, Homo sapiens
ccggccgtctctgctggaccctgatcttggccttggccttggcggaggagactgcattccataaaaatacgaattcctgataatcacacctgcgtggggaccacgtggtcctgtgtgacc

SEQ ID NO: 13247 - DNA, 120 bp, Homo sapiens
cctcggctgctcgctgttaataccccgcgtggcagactaggaaactgaggcccagggcgacgggccacccagagtgtcagtgatagagccagaattggtgtccgggctgcgtggttctgg

SEQ ID NO: 13248 - DNA, 120 bp, Homo sapiens
tttcgcacccgtgatgagcaaactagcgcgcggaggaaccaatcggggagcttgcgaacgcgcaccagtcggagaggttttagaaacggtggccccgcgccggagagcccaaggcgggag

SEQ ID NO: 13249 - DNA, 120 bp, Homo sapiens
tttcggatgtcagggtttcgggcgcatcatgtcgcaccctgtggggtctgggtagcacccgtaggtcccagcaactgcgtgagtcgtactcatgttaacacaaggcagggagggactggg

SEQ ID NO: 13250 - DNA, 120 bp, Homo sapiens
gaacgagaccctgtctcaaaaagaaaaaaaaggttggggggcggggggcaggaagacattgattacaaaaaaaccaccaaactcagttcgagcaagacagcgtttgccagactccacagg

SEQ ID NO: 13251 - DNA, 120 bp, Homo sapiens
tttcggactttggaaccacgggccaggccgtggatgatggtggatgatggcgtgctcgcagtgaattaggaaaaacgcggagaacctgctgttaggaggcggtggcactgtttggaagga

SEQ ID NO: 13252 - DNA, 120 bp, Homo sapiens
gtccgtcgtttcgcagattgaacatttctggaacacgtgcacgttctgatcctgagggtttgaaggagacagccctaacgcctgtcttcagggcgtttagagtggaggatgggaaggcaa

SEQ ID NO: 13253 - DNA, 120 bp, Homo sapiens
actcgccacaccttaaatttgagacggataagtgccgtgaatcttcggggcgcacgatgcagagagaggataggaagcaggggtggggcgtgaagaggcaggggccaggtgggagctgtg

SEQ ID NO: 13254 - DNA, 120 bp, Homo sapiens
catcgtcccaggaatcccagggggcagcacagccggcccccggcccacgttttcggtggaaaattagagtgaacaagaacacccctgccgactcccagcccggccaaaaagacaaaacac

SEQ ID NO: 13255 - DNA, 120 bp, Homo sapiens
agacgcacacactcaggaggaaaagaaaaaacaaaggcagaagaagaagaagaagaaataaaaacccacccaagcaagaagacaaaaggtaaagacgcaacgtttccaactctcgggacg

SEQ ID NO: 13256 - DNA, 120 bp, Homo sapiens
ggccgcaggactggagggccaggccccgccacccccacgggagacccgggacagggcgtcttcctaagttattcatctcctctccgcctgctgctcgggaaggacagacgccggccgccc

SEQ ID NO: 13257 - DNA, 120 bp, Homo sapiens
gcccgcccgcgccccggaggccctggctctgtccggagaccaggtgagcacagcctggagcctgtgcccagggccgacaggcgcgacacccagcaaggccacctctccccgggcccccgc

SEQ ID NO: 13258 - DNA, 120 bp, Homo sapiens
ccgcgcctctgccggacacggaccggcccctcagcccccaccgaggacgcagccactggggggaaagggagacacagcggaccccggccgggcagcggagaccgcagaggcgggcagggt

SEQ ID NO: 13259 - DNA, 120 bp, Homo sapiens
aggcgagtggtgtcgcgggggtgcgtggcgcttgcgagccctggccaggggaggaagtgaggcccaggcacctgctgcccctcgagggggccctgcctgccgcggggcctccccacaagc

SEQ ID NO: 13260 - DNA, 120 bp, Homo sapiens
aagcgccggccgactcgctgtctcgctggggactctttcagccctcgcgcccgcccgtttgggaggagaagtctctatgcaattggccccggcccctccaccccccacccccggcatagg

SEQ ID NO: 13261 - DNA, 120 bp, Homo sapiens
cctcgcccggctcacacccccaaagggagggacccacattgcacacactgtaagaaatgcactttccgaggaaggggatgggggagcccggacacccagagctccccgagttgggggtgc

SEQ ID NO: 13262 - DNA, 120 bp, Homo sapiens
gcccgtctggagcgcccccgtcagcccctggcggtgggaggtgagagcgagtggtttaagtgcctgattaccaccacccgcccccccctttgtccagctgggacacggaatggccgcggg

SEQ ID NO: 13263 - DNA, 120 bp, Homo sapiens
catcgccgtgcccccccagagctagagagatggggcccctgcgtggcccgaggggcagagctgggcgtcacttcgcaagcgtcctgccctgccggggcgcgggggtgggctctggggaag

SEQ ID NO: 13264 - DNA, 120 bp, Homo sapiens
agccggtgcgccccccacgcctccgctgccagtgccttacattctggagcgacccccctccctggtgcctcccagcgaagggggaccgccgtttgcactttcatcgcctaccccgacgcg

SEQ ID NO: 13265 - DNA, 120 bp, Homo sapiens
ctgcgggacgtgcatcacggctgggcccccagaggagagaggaggccgacgccagcggtccccgctcggaacggggagggttttcggggggttcggcgtcgcaccttggggccccccgca

SEQ ID NO: 13266 - DNA, 120 bp, Homo sapiens
agccgtgtagggggcctcccatctgctaagcgtttttccgttgagccgctccaaaaacactaagctggggacgccaggtgcccccccaccccggctccctggccctatccacacctccac

SEQ ID NO: 13267 - DNA, 120 bp, Homo sapiens
gatcgccatctttaggggaggcctgggagggggtgttaggtgttttagggccaccgagctcaaacacaaggacccctccccggcccacccagcccagccccaactgacctccatgcctag

SEQ ID NO: 13268 - DNA, 120 bp, Homo sapiens
ccccgacccaggccaaagccagggcaggtctccgggtctcacctgctcctagcctcacccccctgcccccgaaaaccagactctcctcccaaactagcctcaggagcttggcgaacccgc

SEQ ID NO: 13269 - DNA, 120 bp, Homo sapiens
gctcgctcctaaagagaaagacccaggaccctcccccatcacccccaagagaggttcgccatcctctggcctcgagcccttggtccctccgtccgtctgtcctcggggcccgctcccccg

SEQ ID NO: 13270 - DNA, 120 bp, Homo sapiens
gagcgaaactccgtctcaagaaggcaggaaggataagactgtgattaattggatgtgaaggagagtgaagagtagaggataactcccaggtttctgccttgttcaagtaggcagatggtg

SEQ ID NO: 13271 - DNA, 120 bp, Homo sapiens
aagcgtcttttcgtgttagcagcttacagagttgcttcactttgtaatgtggtaacagatagagggagctaaaaaagtagagttctaaggaacgtccgagcaaagcactgaattttccag

SEQ ID NO: 13272 - DNA, 120 bp, Homo sapiens
cgtaccctcctctgggttcccccacttccgagcttccctcacctcaaattctgggtcatgtgtcggggcagtgtggcaggccgaggctgaactggcacctcccagcccctcaggaccaag

SEQ ID NO: 13273 - DNA, 120 bp, Homo sapiens
ctgcggctcagcgcatctgccatccccatgtgtctgcaggagtctgtgtctgtgctcaacctcttcaccaggatccggtaaacctgccgggcaggaccgtgccacaccagctgtccagag

SEQ ID NO: 13274 - DNA, 120 bp, Homo sapiens
agtcggaggaccccagctcctcagcttgcatggactctgccttcccagcgcttgtcccccgaggaaggcggctgggcgggcggggagctgggcctggaggatcctggagtctcattaaat

SEQ ID NO: 13275 - DNA, 120 bp, Homo sapiens
gcacgtggtcggggaccctcagcagcaggggctctgtctcccttcccaaagggcgagaaccacattggacggtcccggctcagaccgtctgtactcagagcgacggatgccccctgggac

SEQ ID NO: 13276 - DNA, 120 bp, Homo sapiens
ctccgtctgttcatcacctgcccaccggagccgcatgctcttcctggaactgcccacgtctgcacagaacagaccaccagacgccagggctgattggtgggggcctgagaccccggttgc

SEQ ID NO: 13277 - DNA, 120 bp, Homo sapiens
gctcggggccactggcggagccagcctgtggatccaagagacagtccccacctgggcttcacggcatccttgcagccacctctgctgtcactgctcgaagcagcagtctctctggaagca

SEQ ID NO: 13278 - DNA, 120 bp, Homo sapiens
catcgcccggcggtcagtgggcttcagatgggcctgtgcatcctggccaagcgtcaccctcacactggaggaggatgtctgctctggacttatcaccccaggagaactgaacccggacct

SEQ ID NO: 13279 - DNA, 120 bp, Homo sapiens
ccacgtcttcgtgcattcgccaacacgtgccctcacagggccagcgtcctccttccctgcgcaagacttgcgtcccccatgcctgctgggtggctgggtcctgtggaggccagcagcggt

SEQ ID NO: 13280 - DNA, 120 bp, Homo sapiens
ccccgcccccaggctgcctgtgtcttcacctgtcctgtccaccagcgccaacagccgtggggaagccaaggagacccaaggggtccaggaggtgggcgccctccatccttcgagaagctt

SEQ ID NO: 13281 - DNA, 120 bp, Homo sapiens
catcggtggggacgtggagagggtggggcgggctggggttggagggtcccacccaccaccctgctgtgcttgggaacccccactccccactccccacatcccaacatcctggtgtctgtc

SEQ ID NO: 13282 - DNA, 120 bp, Homo sapiens
tggcgtgcatgtgtacatatgtatttgtgacttttctttggatttgttttgtgtttttgttgactagtcctggaaatgtttgaggctagacggggaggggccaggacccacccactgctc

SEQ ID NO: 13283 - DNA, 120 bp, Homo sapiens
ccccgtcatttcaagcgggtcgatcttccacattcactggagagactctccccacctctgtctgggtggggcgcggacccctcactgtgcgcctgtgcagggggtgctggtgcacgtggc

SEQ ID NO: 13284 - DNA, 120 bp, Homo sapiens
acggccctgttccagggaggaggtgctcggttgacaccatcagggagggagggtgggcactgctgggctgagttcacccccagggctggccagatggggccaggagggacagagcaaggg

SEQ ID NO: 13285 - DNA, 120 bp, Homo sapiens
ggccgtggtgggagggtcccatgatgatgggccagggctcgtgtagaaatgggggaattggttccccatggcccaggacagctgagaggaggtggaggggccccaggggagtgtacgtca

SEQ ID NO: 13286 - DNA, 120 bp, Homo sapiens
ccccgcagggcgggctgcaacttttctgttgatcctggaatgtagctggtgcagtgagagggaaagagaattgaaaaactcaggctgccataggttctgcgatgagaggtgcaggaggca

SEQ ID NO: 13287 - DNA, 120 bp, Homo sapiens
ccccggggtctgggcggagagaacaggaggaatggctgggaagtggctgagggagccaggaggccggggggccgggggctgcaggggaggctgtgggggtcctggcagccaggaggcccc

SEQ ID NO: 13288 - DNA, 120 bp, Homo sapiens
gctcgctcttgcgcggtgcctgagaagagggtgaaggagctggggcaggccccatcctgggcattggagatgatgaaaccgagcagacctggcccatgtggagctggcatgggggacaca

SEQ ID NO: 13289 - DNA, 120 bp, Homo sapiens
tggcgtcacaagggtggggagggggccttggggaagggcggccttggatcagaggctcaccacaagcctggcatttcagccagggctggagaaggcagggacgcctgggtgagaggcaaa

SEQ ID NO: 13290 - DNA, 120 bp, Homo sapiens
tcccggcacccacgaatcctctccctgattctgtggattggtctgtcctggacatttcatagaagtgggatcacagcgtacccttctgtgtctggtgtctctcactgagcgtgacatcct

SEQ ID NO: 13291 - DNA, 120 bp, Homo sapiens
atccgcactgtggcctgggtcagagcttcgcacctccttgtggctgagtctcgttccagcacggtggcggcgccgtgctgatcccctcaccttcactgggtgttcggtgttctccgcctc

SEQ ID NO: 13292 - DNA, 120 bp, Homo sapiens
actcggggctcccttccagctgggcccacccccgatatatttctgtacggtgtcttcagcactgcacacatggacccaacgtttgttgagtgaataaacgaagtgctcagtggaagaaag

SEQ ID NO: 13293 - DNA, 120 bp, Homo sapiens
aggcgcttaatcccctcttactgaacaaaagaatgaatgaacgaacagcggcactcacgggcaagggtgcaggctctggatggccatgactgccagcccattggccaccttatccaagaa

SEQ ID NO: 13294 - DNA, 120 bp, Homo sapiens
agccgtacacgaacgctccgctgttctgtggagacacaggcgaggtggtcagcgtgcaccccgagatctaggacccggcctcccccaccccagcctggctaccagccctaccgtgtgggg

SEQ ID NO: 13295 - DNA, 120 bp, Homo sapiens
gaccgatgaggtcggccgtcatggccagcgaggtgacgaggatggtggcacagccagcacccagcagcacagccgctgcgtacacggccacacccagtccctccgccagcgccacccagg

SEQ ID NO: 13296 - DNA, 120 bp, Homo sapiens
aggcggcaaaggccaggatcaccaggaggcctgagaagtaggtcatctgcagggacagccccggggtcaggcccacaccactgggtgcccccaagcctggcgcttcaatccgccacccct

SEQ ID NO: 13297 - DNA, 120 bp, Homo sapiens
caccgaggctctgcagatcctccatgccagagctgtgctctctgtccacgccgtagcggctggagacgtgtggctattctgcctgagcgcaggtcagttacaacgaaagcaaacgacgga

SEQ ID NO: 13298 - DNA, 120 bp, Homo sapiens
ggtcgttggtgacgagctccgggatgaggctgaggtgggagatctgtgtggaggcccagccaaactggaagatcacgatgaacgggccgtagtagaggagggcagcccactcgggcgtgg

SEQ ID NO: 13299 - DNA, 120 bp, Homo sapiens
ggccgccccacagcccaggcaggggctgaagatgaaggggaaggacagcaggacgcagacggtgcctgtggaaggcagagtggtcagtcgcggggctgtcccgcaccagccagggctccc

SEQ ID NO: 13300 - DNA, 120 bp, Homo sapiens
agacgccccccgcatgcacacagtcacgcaggagcgagggtctgcagtcggggtcccccaggcttatggcccctggtgacaaaaggggaatctgacaccaggtgcctgggctcagcctgc

SEQ ID NO: 13301 - DNA, 120 bp, Homo sapiens
aggcgcagggggtcccccggaaacctgccccccacaggtgccccggttacagccgcagcctcccccagctcctccccctcggccactatcaagcctcccatagggcctcggggagcggga

SEQ ID NO: 13302 - DNA, 120 bp, Homo sapiens
ctccgccatcctcatcagctcctaaggtgaccactccctggaatgctggggcgtcctggcctccagggacagtcaggaaatagcacccgcccccacctgagatctgcggtggcaaggcct

SEQ ID NO: 13303 - DNA, 120 bp, Homo sapiens
ccccgcagcccacggagccctttgcgacctgccctgtcccctccgtgccctgccctgcccttccctctctcccccttctctctctgctccagccatgcaggtctcctcactgcaggacct

SEQ ID NO: 13304 - DNA, 120 bp, Homo sapiens
aggcggtcctgcccccgggcctttgcatgggcgtgcctctgcctagagctctctctcacatcttagcaagactggctccttttcacctctgggctcaacgggaatgtcacctcctcgaac

SEQ ID NO: 13305 - DNA, 120 bp, Homo sapiens
cttcggagcacccgggaattctctgtctgccggcttcctgccggctttcctctgcagacagcagcctccaaggggcctggggagacccagcatggaactcgggcatttcaatatctattt

SEQ ID NO: 13306 - DNA, 120 bp, Homo sapiens
agccgacttatggaggcaaaaaaaaaatcagagaaggcctggctgagcaagtgacatttaagcggacttgaggaagaggaagtgggccgggcgtgggggctcacgtctgtaatcccacca

SEQ ID NO: 13307 - DNA, 120 bp, Homo sapiens
gggcggtgccactgcaccgtgggatcgctgttgattgtactcccaccggggtgtcccaggagaccctcctaggcttggggcacacccagagagcgtggctgcctcctaccaccagtaaat

SEQ ID NO: 13308 - DNA, 120 bp, Homo sapiens
cttcgtcttagggtggggactgcgatggcttctccaccttcgatgttcccatcttcactgaagagttcttggaccaaaacaaaggtgagcggtaactgcgctcctgatgcgaactccgtg

SEQ ID NO: 13309 - DNA, 120 bp, Homo sapiens
gggcgtgggccaggagggccccaagactgcaggaggcggatcgggaggttccctatgagcgtccaggcgcacgctgtcgctccagaggctgatgtggagcaggaggcagagggcgcagtg

SEQ ID NO: 13310 - DNA, 120 bp, Homo sapiens
gcacgtcccgggcaaaagcccggaggtaggggaaaggggaggcgcaggctttgaccccgctccccccggcgcagcgcgtgaggcggagcttcggcgcttgcggaagatgaatgtggcctt

SEQ ID NO: 13311 - DNA, 120 bp, Homo sapiens
cttcgaggagcagaacgcggtactgcagaggcacacgcagagcatgagcagcgcgcgcgagcgtctggagcaggagctggcgctggaggagcggaggacgctggcgctgcagcagcagct

SEQ ID NO: 13312 - DNA, 120 bp, Homo sapiens
catcgcaaagctccatttccgagaacatttcctgtttgtgacaccaacagggtccccagcccacacagtgcagggcggggactcccccagccagccagactccggccagccttgttgggg

SEQ ID NO: 13313 - DNA, 120 bp, Homo sapiens
cctcgctttccccatctctctagtgggggctccccagggagcatgtacggagctccgtcacacaggggccagcagggaccagggggcgggacccgggaggtgcagctggtggttaatggt

SEQ ID NO: 13314 - DNA, 120 bp, Homo sapiens
caccgtgtgtgcacactcgagacacacagacacagccagacacacacaggcagaaacacagcagacacacaggcagaaatgtgacagacagaaacacagcaggcagacgcacagacgtgc

SEQ ID NO: 13315 - DNA, 120 bp, Homo sapiens
acacgcagatagacacacacaagcagaaacacaacagacacacagccacacacagacacatacaggcagaaacacgacagacatagacacacacagatacacacataggcacacaggcag

SEQ ID NO: 13316 - DNA, 120 bp, Homo sapiens
tctcggcagaaacaaacacacggtcacacacacaaaaccaccacacacgcacagacacagacacacaaccagggccatgcatggttcactcccagagacaagatcacacacacagccgca

SEQ ID NO: 13317 - DNA, 120 bp, Homo sapiens
actcgatccctgccacacccagggcctgggccccctccccggctgcagccccctgagtctgggacccccattcacagccatgtggccccacagagaccagagagccccccggacagaatc

SEQ ID NO: 13318 - DNA, 120 bp, Homo sapiens
ggccgcacccagacccagccgcctgggcgcccagggcaggcctcagggcaccatgccacccgccgggccacacaggggacacctggcacctggccgctgtcaccgcgggctttgcgacac

SEQ ID NO: 13319 - DNA, 120 bp, Homo sapiens
cagcgccggatgcgcccagcagcccgggctcacaccagagcagtgcatcccgccctaagccagcggggcgacctcaccttcagagacctcatctgcggggctcccacctggctggatccc

SEQ ID NO: 13320 - DNA, 120 bp, Homo sapiens
tcccgcgcccgggggtccgggcgccgtctggagctgagcaggcagatgtgcgggcgccgagggtggggcgagggctgggggcgggcagagggaggggaaggacgggctcgagcgggacct

SEQ ID NO: 13321 - DNA, 120 bp, Homo sapiens
ggacggagaggtctggacaggtggccagagggagggaggcatcacagtgagaggaaacagggcacattctgggctcaccgacagggcgccgtggggcagagggcccagcgaggcaagctc

SEQ ID NO: 13322 - DNA, 120 bp, Homo sapiens
gctcgagggtgggtggaaggtgcctcagcccctgtgggcacctgcagggcactgtgacagcaggcaggacaggaacagtggtggcctcatccctgtagaaccaaggtccagacccccatg

SEQ ID NO: 13323 - DNA, 120 bp, Homo sapiens
gggcggcagtgggacccaggtgtgtcagagtagcacagggggcctgcacccctgggtggggccgctgcccagagggcaactgctgggcaccccaggacaggtgcaggctcgccgtgacac

SEQ ID NO: 13324 - DNA, 120 bp, Homo sapiens
acccgggtgtgtgaggacggcccaggcacggggtcctgcgatcccacaagcaggaagcaaccccgggccagagctcacggtcacctccctcattcgctggaacaacccatcctctggcct

SEQ ID NO: 13325 - DNA, 120 bp, Homo sapiens
tcccgccgtgcaggcctccgaccatggggaccacaggcccctctgaggacctgccaggacggccaggctgggcagcggcactccacgacacaggctggggtggggacccggaggcggcag

SEQ ID NO: 13326 - DNA, 120 bp, Homo sapiens
ggccgaccctcagctctggtgaggctcagaccaggacccggcggacaagggtaggccgtgcaagaatcttctcctgctaaactgcagaaaggccttctgtggctgtccacagatggctgc

SEQ ID NO: 13327 - DNA, 120 bp, Homo sapiens
ctgcgacgcttggcagtagtgtgacttgctctgaccaacagaatgtgatgcaagggatggtgtgggcgtgaggaaggctggcacttctcactgtgcctctgggaacctgggccacgacac

SEQ ID NO: 13328 - DNA, 120 bp, Homo sapiens
gaccgggcggccccagctgttcctgccatcctggctgagggttggacaggcaagtgtaggacgagcttgaatttcctgccactgccgaccacagccatggaactaaccccaggtatgacc

SEQ ID NO: 13329 - DNA, 120 bp, Homo sapiens
aatcgcaagcaaatacacagttgtttgaagcttctgtctgggggtggtttgttatacaatagctgactgaaacagatctcggctcactacaacctctgcctcttgggtttaagtgattct

SEQ ID NO: 13330 - DNA, 120 bp, Homo sapiens
ctccgcacaggctgcgcctctgcctggaactctctctcccacccaaccttgttcaggtctagatcaaatgtcacctcctcagagagtcccctccctggtcaccctgcccccgctgggttt

SEQ ID NO: 13331 - DNA, 120 bp, Homo sapiens
gcccggccagggcagcgacttcatctttcccctctgcaacagtgcagacagcacgagcctggcacgtgggtaaggctgcctgcgacagtgtcctcctcccaggagttccacggagatctg

SEQ ID NO: 13332 - DNA, 120 bp, Homo sapiens
aaacggggttggatggggtcaagagcccaggggcgcaggctgcttcccgtctctaaccactgagccaccctggaacagctggagcgcaggcaggagctggccagagacgagctagcccac

SEQ ID NO: 13333 - DNA, 120 bp, Homo sapiens
cttcgccgtgtgtgtggcggggcccgcaccatatgagaaccccatggcttagtcacgcaattgtcccaacaaccctgtgacgtaggcactattactgctcccattatgcagaggcggaaa

SEQ ID NO: 13334 - DNA, 120 bp, Homo sapiens
gatcgcttgcctgatcatgcagcaaaaatgtaggggtggacgcacctgattccaggatgtcaggccccagtctgcgtcaccacagcagggacgggaggagagtgaggaggagccaggcgg

SEQ ID NO: 13335 - DNA, 120 bp, Homo sapiens
gtacggaggccccggggcaggaccgtgtctggagagctgggatcagcccgggcacagcaggaacatcctgtgcagagcacagccagcccccgcttcccctcccgggcagtcccacacctc

SEQ ID NO: 13336 - DNA, 120 bp, Homo sapiens
tcccgggcagtcccacaccccccccacgctggagcccccgcttcctctcccgggcagtcccacacctcccccatgttggagcccccaccaccccgaccagtgctgactctgtctctgcag

SEQ ID NO: 13337 - DNA, 120 bp, Homo sapiens
gcccggcccccagcacaggagaggcagagcagatgcttcggtgcctggagcagcacccacagcctcctggctgggaagtggcctctgtgtcacccactggacctcaggattcctcaaaat

SEQ ID NO: 13338 - DNA, 120 bp, Homo sapiens
agacggaacgataagaagagcctcccgctcacagcgctgcagtggtaaccacaccagtcacgcatgagcatttctttgccttataattagaggcatcaagatgagctcattgccgccccc

SEQ ID NO: 13339 - DNA, 120 bp, Homo sapiens
cagcgcacaatctcacagcactcacacacagatggggacacctgctgcctgccagggtcccttccatcccggggacagggccgaattccttccccttgaaagtgggcgggtctcaagccc

SEQ ID NO: 13340 - DNA, 120 bp, Homo sapiens
gtacgatgctggggccaggctggagggtggcagcaatgcggagagaggcctgggacaggaggccaccagggtgtgctggcacaagccagatgccgcagcagaaccgacctgctgagccca

SEQ ID NO: 13341 - DNA, 120 bp, Homo sapiens
cagcgtgaagcctctcagtgtggcagtggtttgttgcataatccacgaatcccaccacagacgcacccagagcgggaccaccacctgctgaaggtcacccggcacgtagggcccaggcag

SEQ ID NO: 13342 - DNA, 120 bp, Homo sapiens
ccccgggcggctctctccctctgagcaccaggatctggttccctgtgacccaccaggagaactcaagctcttagtgccacatggcttccaccactgtagacacgtcactcagcagtcagg

SEQ ID NO: 13343 - DNA, 120 bp, Homo sapiens
acacgtgaatcttagaaggttccaagttatttctgggtgtgggatgggggagggtctcttaatttgcaacttccatcctttggtgccgtctgaaatacatattttgtcatttttatttat

SEQ ID NO: 13344 - DNA, 120 bp, Homo sapiens
acacgcacacacatgcagatacacacatgcatacacgcacacacacgcacaggccctcagaggacaccacagaacacctgcgggacacagcaaggaaggggtgaggtggctggaggggag

SEQ ID NO: 13345 - DNA, 120 bp, Homo sapiens
gcacggtggagggacagcctggggtccacccgagtagtaggccgcccctcttccttgccccttctcccttctccctgccgggtgctccccgcagggcatagagtgatcgctttccccgca

SEQ ID NO: 13346 - DNA, 120 bp, Homo sapiens
gggcgggcaggagccaggccggtaaacaggaagctctgcgcaggcgggcggagcatccagaactccgcaggccctgaggtgttgggtcgtttcccagggccccaatgtccagggagaaag

SEQ ID NO: 13347 - DNA, 120 bp, Homo sapiens
tcccgggcgggccggggcaggaggctgtggggcgtggccagcccgcaggtggcggggccgacgggatgggtcagggtgcacagagcacacgccagcccctgggggaagcccggcccgtgc

SEQ ID NO: 13348 - DNA, 120 bp, Homo sapiens
gtgcgggctgcgggagatcctgatgggccccgagctgaggctcccgcagccagggtctgcgcgtggtccccacctccttgcgcgctccgtctccagcacagcagaggtggacgcccctcg

SEQ ID NO: 13349 - DNA, 120 bp, Homo sapiens
tcgcggctggctccccagcgtccctgtcctccaggggcgcagcgtccctccggggagtacagtgtccctgaagggaattccttccagagcctgaggttaggccgtggtgggaaacagagc

SEQ ID NO: 13350 - DNA, 120 bp, Homo sapiens
gagcggggtgccgcaggggagcccgcaggagctcctgttcctcacctgcgagggggggacggcctctggccccctgctgtgggcggggagggatctagaagaccggaaggctatttccag

SEQ ID NO: 13351 - DNA, 120 bp, Homo sapiens
aaccgaacccaatcatctcagctgtcctcctgccaacagcacaatggaacagagacaccgtccactgagcacagccaccaccagggtcccgacggccccacccagtcccactgccggctc

SEQ ID NO: 13352 - DNA, 120 bp, Homo sapiens
ccacggcccccaacgctccctacaggggctcctggggcctccctcgcagctcggccatgctgggccccggcggcccccatgctgcccttcctgcatccatcttggctgagggcagctctg

SEQ ID NO: 13353 - DNA, 120 bp, Homo sapiens
tggcgcactgctcatggtccccacctggcccagccccagcttcgcccacctgggccagtgcagtcccctctgccctggttcccctagcccacgtcccgccctcaccccatctgtcctccc

SEQ ID NO: 13354 - DNA, 120 bp, Homo sapiens
aggcgtggtcctgccccagagcctttgcacagtgcctctgccagacagctccctccacacttccacaaccccctcacttcccctggatctctgttcaagtgtggcccccgagtccccagc

SEQ ID NO: 13355 - DNA, 120 bp, Homo sapiens
ctccgccgccactctctcccctcctctgctcggctcttctccgtggcacttgtccactgcgttgcgtgttttgcttttctttgctgtctgtatgtcctggccccactcccagagttcctt

SEQ ID NO: 13356 - DNA, 120 bp, Homo sapiens
tctcgttcccccaggctcccagcacccggccacagcacacgcaggaaagcacacgtagacgatgcccgaaccacaccccactcccggaaaccttcagcagcagccctgcctgcaaagtgg

SEQ ID NO: 13357 - DNA, 120 bp, Homo sapiens
gagcggccgggcagggtgctggggtcctctcttcactcagccagaggccgggtcccctcgcacccccatgccagctcaggcacctgggggccctcatgctcgactccagcccctcccaag

SEQ ID NO: 13358 - DNA, 120 bp, Homo sapiens
tggcggggaggcaggtgcaggggctccgagctaatcccctcaggctgtaatccccatgagtactggcaccaccacgggccccgtccagctggcgcctgctggcaaatccttgcagggtct

SEQ ID NO: 13359 - DNA, 120 bp, Homo sapiens
gaccggcctggtcctgcgtgaagggacatgctgccggggccaggcggcaggcggcaggcggcagggaggcctgggccccgctcctcgttcacagccccaccctgtgtggactctccagcc

SEQ ID NO: 13360 - DNA, 120 bp, Homo sapiens
cctcggtttccccatctgtaaacaaagacccaggtcgtgcagcttcccaggggctagggcctcacccatccctgtcctgccaggcactcaggacacccgcagctcttgttccaaaaggga

SEQ ID NO: 13361 - DNA, 120 bp, Homo sapiens
cctcgccaccccagccaccagctccagggcccaggccaaaatccttccaggcccctcgtctgcctccaggcaccggtggcactcacctggacacctgccccaaccccacagagcactgcc

SEQ ID NO: 13362 - DNA, 120 bp, Homo sapiens
ccacggaccatcccccaccaggcgctgtgaatcgggctcgccgccccactcagatgcccgtgccacccgctgtcctcaggtccgaccccacgcgaccctctcccaccacgttgacttcac

SEQ ID NO: 13363 - DNA, 120 bp, Homo sapiens
ctgcggctcaagtgggtgcagcaagttcccaccccacggcctcggcgcgactattccgctgcctacatcgcctgagccacagcccacccttattcagctcgtggggacagtcacctccct

SEQ ID NO: 13364 - DNA, 120 bp, Homo sapiens
ctccgagtcctcagctgccgcaggcctggccacttgacctcccaggtgccctcaccacactcatcaccgcccaacgcagcccggctctgggctgggcaaacatcttccgtaaaggaccgg

SEQ ID NO: 13365 - DNA, 120 bp, Homo sapiens
tttcggcttcgtgggacacgtagccccaagcatggccactcagctcccagctctgccgctgcagcgtgggggccaccaaggccggcaacggaacaaatggtgtggccgttgccaataaaa

SEQ ID NO: 13366 - DNA, 120 bp, Homo sapiens
gccgaaatcgccaaggacgatgacactgggagctggcagtgccgtgggaaacgggcagcctccctcggcccctgtcggacaaggctcccgctgtagctgagctttctggaaggtgtcgcc

SEQ ID NO: 13367 - DNA, 120 bp, Homo sapiens
catcgcttctaacagtgagcggtgactccagaaaccacgggcatgggcctcagcaggggcctggaggcaccgatggtggagaggccggaaaggggtggccaaccggcacgacaatcacca

SEQ ID NO: 13368 - DNA, 120 bp, Homo sapiens
tctcgaatttctgggctcaagcaatcctcccacttggacctccaaaagtgctgggattagagaggtgggccgctgtgcccgacctaaaaagggagttttagaagctcacctccccaccac

SEQ ID NO: 13369 - DNA, 120 bp, Homo sapiens
ccacgctgggcctggggagaggaagcgggggcaggaaaaggccgacaggaagtgcactttcctggggggcggctcacggggctcttctgtcactgatctgtcctcacagaaggatttccg

SEQ ID NO: 13370 - DNA, 120 bp, Homo sapiens
acccgagccaggaaagagccactgtctagtggccgccaacccttaacccgcccccacaaccgcgccactccccagcctcctccgcatttgtgtcacagccttcagctagcgccaaaagcc

SEQ ID NO: 13371 - DNA, 120 bp, Homo sapiens
aatcgattgaaagagaaacatcagtaggtcatggccctcagttatgaccaaaaaagattacgaagggggtaaaagatgataggagtttggaaaactgccctagagactgttctggaagat

SEQ ID NO: 13372 - DNA, 120 bp, Homo sapiens
cttcgggagcacagacgtgcagtgtgttactgatgcctgtcttcgctgtggccgctggccaagaccctcgctgcccctagcctggcccggcccctcacccaccctcccaggcctggcagg

SEQ ID NO: 13373 - DNA, 120 bp, Homo sapiens
ccccgattccctacattcctaatcagtggcactgggactgtggtgactgatggacagagtcaaactgagcttctgccgtgacccaggggaaatggctcagacctgtcctttgccgccagg

SEQ ID NO: 13374 - DNA, 120 bp, Homo sapiens
acacggtgtcgcttgcccgagcaaggcccctgcagccaggctctgagcccatctgatgctgtcaccgactcgccgcctctgctgcccggagacccagctcttgtgtgacccatggaatcc

SEQ ID NO: 13375 - DNA, 120 bp, Homo sapiens
gagcgtggctgctgtggcatttcctgctcagggcagaggcggacgctgccccaggcctgggtgtggggagcgccctggggaagcgtgagggggacagtggttggaaggaagggctgggcc

SEQ ID NO: 13376 - DNA, 120 bp, Homo sapiens
ggccgcacctgggtctgtggaggggtcctcccgcatcagaggtgaggtgacagatatggtgacctgcatcctgggctcctcacaggaggagatgacaatgttggcttcagggtcggagga

SEQ ID NO: 13377 - DNA, 120 bp, Homo sapiens
cctcggtcaccatctgggaggggtaaatacaacacaaggccaccttactgcagcccagattcatgtgtaaatcagccaggatgtggttggtgtgtgtaaattaatcccgtcgggcctccc

SEQ ID NO: 13378 - DNA, 120 bp, Homo sapiens
tcccgctcagatgagttatctccatggcaattacttagacgacgtggggactttctcacttcctaagaatcacaggggttgggagctgattcacacgggcactcagtgacatgaactact

SEQ ID NO: 13379 - DNA, 120 bp, Homo sapiens
aggcggagaagtccgtcagaatcacgctcagcttttccttttgccaatgaggaaactgaggtttacagagactgtcagtcccttgtgaactatttttagatgcgccttcaatagcaaaag

SEQ ID NO: 13380 - DNA, 120 bp, Homo sapiens
gcacggatcacccgctgcaaaccagcctcgttcagtgccgagaagctccagctctgagacctggggaacttcctactcctggggctggaaagctgccgcgggccaccgacggctccaggc

SEQ ID NO: 13381 - DNA, 120 bp, Homo sapiens
tctcgtcccgaggagctgacctctgtcctggctgagagccgggccctggggaaggggatctccaatgacctgcgcttgtcaccctcttcctctcggcggccccggtcctcctcggccagt

SEQ ID NO: 13382 - DNA, 120 bp, Homo sapiens
tgtcggacaccagcttgagggcccgctctgcgtgggacacggccctctgcacggccaggagctcctgctccgtggggtagatggtggcgtgcttgcacatgacgtgccggtcgtcgctgg

SEQ ID NO: 13383 - DNA, 120 bp, Homo sapiens
ggacgccggccgccgcccgggctgtggggagaggccgcacgtgtcaagggtggtctgtggggacccttggggagtgctgggcaggcgggcaggtgggggcaggtggccgtggccagccag

SEQ ID NO: 13384 - DNA, 120 bp, Homo sapiens
ttacgaggcggcagcgtggccaggtgagaatccagtgcacacagagagccccggggtggggaacagggaagtacctcgggctgccccgatggctgcaggaagctcgggtctgagtgaagg

SEQ ID NO: 13385 - DNA, 120 bp, Homo sapiens
ggtcggcactgccgctccaccgcgggaagctgaaacaccagcctggatctctcttccatgtgctgaaatgcagtaggaacaccgcggggggcaaagacccccctgagctcagcagaggcc

SEQ ID NO: 13386 - DNA, 120 bp, Homo sapiens
acacgcggaaatgatcaactgttggggggggaatctggtcccctcagagatgccagccctggctcccggactgggactccagtcttgggggcagatggacgggctgaagatagcagagat

SEQ ID NO: 13387 - DNA, 120 bp, Homo sapiens
ctccgaggagcaggcctgggagaacagtgtagagtgtgtgtttgtacacttggggcacaaacttaccccgtgtgtgtccctaccctctgagcccttctgcccctggccagttcccagtgt

SEQ ID NO: 13388 - DNA, 120 bp, Homo sapiens
aaacgaccacatatttaagacctagaaaaggatcttaaatatcacaacactcagggccctttctccctcctcactgtcccagcagggtcccagttccctggaaacccaggtgcccaccct

SEQ ID NO: 13389 - DNA, 120 bp, Homo sapiens
tcccgccaagtctctgtcccccttccccagtcaggcctcagttccccaccaacctcggtttccgcccctccctggggtaacctcccaggtctctgtcttctctcctccaccccacatcag

SEQ ID NO: 13390 - DNA, 120 bp, Homo sapiens
actcgaatgttgctgccccctgcccagtcgggaaacttcccaggtctctgccttctcctcctccagcaatcggggattaacgcccctctgcccttcccctcctcctgcccagccagacac

SEQ ID NO: 13391 - DNA, 120 bp, Homo sapiens
aatcggggtcagctccgctctagctctccccctgtccagccagacaccctcccaggtttctgtcttctctcttacccccatcaggggccaattcctcacccctcgactgtggcttcctcc

SEQ ID NO: 13392 - DNA, 120 bp, Homo sapiens
cctcgctgatctctgttttctcctcccctacaagtaatcgggggtcagctaccctctgtccatccccctgcccggccaggcaccctcccaggtctgtgtcttctcctccccccgcaatcg

SEQ ID NO: 13393 - DNA, 120 bp, Homo sapiens
ccccggccaggcacctcccaggtctcctccctgcattgggtcagttccgtcccctcccctcctcggtcagaccacccaccccccgcccgggtctgtcccctctcgctgccctcctcgtgg

SEQ ID NO: 13394 - DNA, 120 bp, Homo sapiens
tggcgcccccatcaggggctgacccccccgaccccgcacaggcccaggcccaaacccaggccccctcccacttcaggagccccctcccgctcccgccgacagacaccgttggctgcagag

SEQ ID NO: 13395 - DNA, 120 bp, Homo sapiens
agacgtctcagccggagccccggagcccgcatcccgcccggtgcctaacctgaggccgccccgcctgcttctcccggcgccgcggcttccctcaggccggggttccaggttggggctggg

SEQ ID NO: 13396 - DNA, 120 bp, Homo sapiens
ggccgggccgggcgcacgcggcgggagaaggggtaggcggggtcccggccaggctgcaggggccgggactggcgggggctggcgcggcggggcagttacctgtactgcgggccgccgccc

SEQ ID NO: 13397 - DNA, 120 bp, Homo sapiens
ctgcgcgaagtcgaaatactgactcgtcgccatcttggcgtcttccccgagcctggcggacccgcgacgtcacccgccccgcccccgagccgcgtgccgctcgcgcctggccacgcgccc

SEQ ID NO: 13398 - DNA, 120 bp, Homo sapiens
ggccgagcgcacctgcaaatgcaagctggaggccctttctggaaggcgcgaggccagcgggagcgggaggagggtgtgtttctggtggatttcttacagctgcaaggcttctcgcccacc

SEQ ID NO: 13399 - DNA, 120 bp, Homo sapiens
acccgctgcagcagctttgtgtttgcaggacagtggcctcgctgtgccagcctggcccccacgagctacgcctttgccaacaggacacttcctccacgaggcttctgtcttcctcgtctc

SEQ ID NO: 13400 - DNA, 120 bp, Homo sapiens
agtcggctcctcggtgcaggtccagctgcggccacacataaccacctctgtctgccgcaaaacagctcacaattctgtttcttccagcccagccatcccctcccctggggactgcagaag

SEQ ID NO: 13401 - DNA, 120 bp, Homo sapiens
ctacggagctagagctgaaggcagcccggagattgctgcctcaatttctccattcattcattctgatgctatgcgccaactgtataccagtcccttatagcctcacaacccaatacaagg

SEQ ID NO: 13402 - DNA, 120 bp, Homo sapiens
agccggggaaggaagtggggtgtaggggccccacattccaagcagagagggcagcatgtgcaaaggctctgggctcagtggaagcaggttgagggactggggaaggctgcgtggggaaac

SEQ ID NO: 13403 - DNA, 120 bp, Homo sapiens
ttgcgcttgcgggtctccgccaccacctggctggggcggctgctgttgtcgaaggggtctccgggcaggatctgccagtggtcaaacacacactgggggaacgcctggccgcccgtgttg

SEQ ID NO: 13404 - DNA, 120 bp, Homo sapiens
cagcggtgaagcctgcagagggaagcgagaggctcactgggccatcgagaaggtggcagggcagaaggaaagtcctgtcaggagctcaggctagttcctcagcctgagtcaccctgcaga

SEQ ID NO: 13405 - DNA, 120 bp, Homo sapiens
caccgggcaggcactcaccaaaggactcgttgacgggcagataggccttgaccacaaacatgggggtgccggccacctgggactcctcgaacacgtggccccgcttcctgttcaaaaccc

SEQ ID NO: 13406 - DNA, 120 bp, Homo sapiens
ccccgtagatgccaccgaccacctgctctggacactgccagaagggaaagaaaacctgtcagtggccgctgggcaggacggtggcagggtcagcggtgggcgggtagacctcacctggat

SEQ ID NO: 13407 - DNA, 120 bp, Homo sapiens
aggcgtggctgggcggtcagcacactggcatagaggcagcgccgtgctgtggggatgatctggccccctccgcggtggatggcgtcggcgtgcagggtgacgtcgtggacgtcgaagcgc

SEQ ID NO: 13408 - DNA, 120 bp, Homo sapiens
ccccgcatgttctcctcacacagtgcgccctgggggagggggagagccaccgtcaagggccggacacacctcggctgcttgccctccacctgccaagtcctgcaggtctccaccaggggg

SEQ ID NO: 13409 - DNA, 120 bp, Homo sapiens
gcccgccttggccccattagggtctctgtctcgggaggcaggaccatgaggtccctctagagcctggaaacgggtgtggtctgcacatgctgagccgtgcctcacctccttggtggccca

SEQ ID NO: 13410 - DNA, 120 bp, Homo sapiens
agccggccaccacactgtccttgatctcgttgaggtactgcacacccttggtgatgtcggtgaggatgttggggccggtgccgtcgggcccaaagcaccagatcttgcgggcctcagcca

SEQ ID NO: 13411 - DNA, 120 bp, Homo sapiens
ccacgtcccactcgtacttctcggccaggtagcgcgcccgctgcttgagctcctgacgggcggacacctcgcctttatcgatgtcctcggccaggccgtcggggaagggccgcgccttca

SEQ ID NO: 13412 - DNA, 120 bp, Homo sapiens
agccggttgtgcttgttgggggacttggagaggcagagcacgttcgactcttcactgaccgtctcgcggtacgagacgaccgggtcagatttctgcaaaaagaggttaagtcccactctt

SEQ ID NO: 13413 - DNA, 120 bp, Homo sapiens
agacgcatccttaaaagcttttcctagcaaggcggacctcatacagcctggtagagccacgtcaatcagaacgaagcggagtcagtgttgcagtgccaagcgcatctcactccagacaag

SEQ ID NO: 13414 - DNA, 120 bp, Homo sapiens
ctccggcgcagaaaccacgggcttgtggaattttaagcattaacagggaagaaacgaggtctggagcaggcctgtcccaacccctccagagcatttgtgttgtttgtggacagaagacag

SEQ ID NO: 13415 - DNA, 120 bp, Homo sapiens
gaccgagatcaagtctaggcgtctgcagagcctagctcagctcagctttaaagcagagggcaggtgtccggggtggggcgtggggaaggctggtcactggcgcctcaccttgatggggat

SEQ ID NO: 13416 - DNA, 120 bp, Homo sapiens
aggcgtggtcctcctccaggtccttcaggcagatctccaggtgcagctcgccggcgcccgcgatgatatgctctcccgactcctcgatgatgcactgaaagggatgcgggtcagcaccaa

SEQ ID NO: 13417 - DNA, 120 bp, Homo sapiens
aggcggctcggaacaggcgggaccaggctcccagcttccctttagctagggaccccgccagaacaagatttcagggaaggtgctgggaaactgggaccagcacaaactcctgaagaaatg

SEQ ID NO: 13418 - DNA, 120 bp, Homo sapiens
acacgcgcagagcagcctaggagagggtggtggctgcctgggcaggagtctccatttacagccacagccaagaacccctcctttcatgaccagtcaccccaatccaccaaccacagcaac

SEQ ID NO: 13419 - DNA, 120 bp, Homo sapiens
agccgtcccccctcagggtgtctgctcccagcaggtgcactccgtgcccacctgcaccatggggtcggacttggccagccgcttcagcccctccaccagcttgggcaggtcagccgggtt

SEQ ID NO: 13420 - DNA, 120 bp, Homo sapiens
ccacggccactctgacaacagggctgacgctgaacttcatcacccgcatgttgtgcgcgtgctcgaaggtggtgatggtgcccgtcttcaccaggaactggtccacgcccacgaggccca

SEQ ID NO: 13421 - DNA, 120 bp, Homo sapiens
cctcgatgggctccacgtagcggcccatcatcaagattgttctggaagaagcagaaggcggcagcaggccgcagggatggttgtgctggaccctggagggccagggcaggtccctcccgg

SEQ ID NO: 13422 - DNA, 120 bp, Homo sapiens
ctgcgtcggggctgtcaggaaacatcctcttcagaatcactgccctcctccctgggtatgggtcgacggccgccacccacctgtgcccagggacacagatgagcaggggtgtgctgtgcc

SEQ ID NO: 13423 - DNA, 120 bp, Homo sapiens
tcccgactgaggagcccaagacttggagcagggcagggcccgcaacagtgccaaggggcctgcacatcacccagctgctcacctctggattggcttcaggtagaggtcctccttcttccc

SEQ ID NO: 13424 - DNA, 120 bp, Homo sapiens
ccccgagaagactcgtccaaaggcgtagaaccgacctttgtcggaggttggcaccattttggaaatatacatcataagagggcctttggggtcacagcttttaatgcctgagggacagag

SEQ ID NO: 13425 - DNA, 120 bp, Homo sapiens
acccgcaagctttattccagtgcagctcagccttctggaaccctgcaacccacaaccttgggcaacaggaagtcatccggctgcatctcagggcccggccaccgggaccacgtacccatg

SEQ ID NO: 13426 - DNA, 120 bp, Homo sapiens
cctcgtcgtccgggggcccctcgtacaggagctcgcagcggtacttctgggccgtcacaggggagggcaggtggatggtgatcatctgcaacaaggcgtctccggcaggcagccagcggc

SEQ ID NO: 13427 - DNA, 120 bp, Homo sapiens
cggcgcatcacagcctgcgggggcagagagcggtgcatgagacacctggggagcccaggatggccccaccccgtacacgcttcctctcttgaagccaaggaagccaaagtcaggactaac

SEQ ID NO: 13428 - DNA, 120 bp, Homo sapiens
taacgttctccaaagcacagtcccttctggaaggcggcaaaggccatgcacactcctgccaaggccctcacccacacctgtcccggatggggctggctgctgggatgtgtctccagcagc

SEQ ID NO: 13429 - DNA, 120 bp, Homo sapiens
aagcgaaaggggcagcagctgtccctgcccagctgaggacttcagcccccaggcctgggctgtcagagcatccggaaacagcagcctgtgttccctccaccccgagggctgggcccaggc

SEQ ID NO: 13430 - DNA, 120 bp, Homo sapiens
ggccgcaccttcagcaggggtttgccttctttgtccttgtcctcgctgtccagtttgatgtccagtttctctatcagttttgctgtctcctctttcttgaaattcatgatcgcatcaaac

SEQ ID NO: 13431 - DNA, 120 bp, Homo sapiens
cagcgcagggggacgcagcacgggagcaggagcaggcctggcctgcctaccacgggcccagccagctgagcggatcgggagctggaggaaacctcgtggtggagcagaggaaaaagccca

SEQ ID NO: 13432 - DNA, 120 bp, Homo sapiens
aaccgccaaagccacaagttattcaaccccctcaatgcaggagaggtcccaaggctctggctatgcagtccagatcttaagagaggagccctgactccacctcagttaggagctgtgcct

SEQ ID NO: 13433 - DNA, 120 bp, Homo sapiens
tctcgcatctgccccacaaggagacgggcccagtcagccgacaggctaccggccggagcccacagggccgagggccaatagtcgcatcggcggggtgcctggcgcagccctcactcacct

SEQ ID NO: 13434 - DNA, 120 bp, Homo sapiens
gtgcgtggcagcttcttcccttcggggctggtggctgacttgctgaacttgccgttggctgggtcaaagtacctggcaaggagaggccaagccaaatcaagttagggtctccaggggatg

SEQ ID NO: 13435 - DNA, 120 bp, Homo sapiens
ggtcgccaaggggacatgcttgggcaagacctggtgggcttgagccacgctgtgaatagcacaccacgcccctacgtcgctgccactacccccaggtgtcaggaatcccccaccatatcc

SEQ ID NO: 13436 - DNA, 120 bp, Homo sapiens
tcccgcggggctcacctgtcaccccacagcttcttcatcatgtcctctactttcttggcccgctcggcaggccccaactggccctcccccttggcggcgaacttggccacatacatctcg

SEQ ID NO: 13437 - DNA, 120 bp, Homo sapiens
acccgtggaggccagacccaaagcccacggtaccgaggacaggatcgatctggaagtgtgagaaacgagaagcagccgtgagggcccctgcgcagagcctgaagctacgggctgggcgcc

SEQ ID NO: 13438 - DNA, 120 bp, Homo sapiens
agacgcaggctttcttcagtagacatctggtcaaagtgaagaaatgatcagtcatcacgaataggggggccagcccctccaccacccagggcagcgttccctgagctcgtctcttccagc

SEQ ID NO: 13439 - DNA, 120 bp, Homo sapiens
agtcggatgaaaacattccagcccccttctctgtcacccaacattcctggcaaaaacacacttccagtccccctcagctcaactccactccccaccggctcctgcagatcccgctgcggc

SEQ ID NO: 13440 - DNA, 120 bp, Homo sapiens
ggccgtaccatgatgttgcccatggggccgctctcgccctcgccgtaggtggagatgatgacgttcacgttctccacgatgcgctggaaagtctggtagagctcctcgggctccagctgc

SEQ ID NO: 13441 - DNA, 120 bp, Homo sapiens
gggcgcggtccatcttgttcatcatcagcacaggcttgatgcgctcggcaatggcctgccgcagcactgtctccgtctgcacgcacacgcctggggacacgggggacagggcggcgctgt

SEQ ID NO: 13442 - DNA, 120 bp, Homo sapiens
tggcggctcagaacaaagaggccatccccaccctgcctctctctcccactggctctctctccatctcaggccgccaggtgaacctcctttcctggattccgtgctcttgggggactccct

SEQ ID NO: 13443 - DNA, 120 bp, Homo sapiens
cctcggtcctcagaagtttcctggagcatagcccctggccccgaagcagtggtccccatggttttaggacctgagatgccatctgtccgccctgaccctgggctgtgtccctccccaggg

SEQ ID NO: 13444 - DNA, 120 bp, Homo sapiens
ctgcgagccccatcgtgttgaagcctcctgtgcactccagccccccaagtcaggaaagatagccggcagcaccccctctgcagagcaggacgtggagggtgaggggtccctccacggagt

SEQ ID NO: 13445 - DNA, 120 bp, Homo sapiens
gtccggcatccttggccagcctcctccaggctcggggatggagggcctggctatgtacccgtgtgaccagtggggacactgaggcacagagtggcaaagttagggttctgtgtcctgggt

SEQ ID NO: 13446 - DNA, 120 bp, Homo sapiens
ccccgccccacctccctcttccctcaaagggcccttttttcaaccgcccccgaccttccctgcctgtggggacatggccaacttgagggaggaggctggggccgggcaggcctcttctag

SEQ ID NO: 13447 - DNA, 120 bp, Homo sapiens
ccacggggtgggggccgggcttaactcctcagtgaccagagcccgcagtgctgggggctgtggggtcaggcttcctctccgaaggggtctcctgctgcttcccacagccggccccaggct

SEQ ID NO: 13448 - DNA, 120 bp, Homo sapiens
ctgcgcacgtctctccatacacaaaggagggagagtttgctttaaaatcagatgggcacctgcatcccctcctagctgcccctttgccaggcttgagggtccacccgggcaccgggtagc

SEQ ID NO: 13449 - DNA, 120 bp, Homo sapiens
gagcggctggggcagccttggctcaagcaggggagctgctgggagccagcacgtggctgccaccacgtccccacgggagaaggaagagcccactgctccacaccccggctgggggtctgg

SEQ ID NO: 13450 - DNA, 120 bp, Homo sapiens
aagcgggcagagataagtggtgtttcaggccaataaggggtggtaggggcatttccaggcggaggaacgtcaggacagctggggggagtgggggggcaggctggcaccatcactctggac

SEQ ID NO: 13451 - DNA, 120 bp, Homo sapiens
ctgcgtgagtttccttctggctgtgggcctgctgcccgtcgaggggagggcggcgcctgcctccaagacttcatgtttcacatatgtttccccatgttccgtgcagcttgctggcgggca

SEQ ID NO: 13452 - DNA, 120 bp, Homo sapiens
caccgtcttttcctttaaagaagcagctacactcctgtctgcaggctgccttggggcggtgctggggctgggcggcagccgcttgctggctcacagccaggaagccccaggatccgtctc

SEQ ID NO: 13453 - DNA, 120 bp, Homo sapiens
ccccgctgtggccttggggatggtgcttcggtgacagaatgaagtcacagcaatgactctttcggtggctgtgttgcatgaaacttgccagaaaagtcccatgggtcatagtccacgcag

SEQ ID NO: 13454 - DNA, 120 bp, Homo sapiens
ctccgtgtgggggcttcggctgggtctgtgctgtgcccaggttgtggtcaaatctaatggtggttgccacccggctttctccaatccctcacggccccgagccacacagcgaagcttggg

SEQ ID NO: 13455 - DNA, 120 bp, Homo sapiens
catcgtcaggggcctgttctgggaggtggacgtcagtgccggagagaactcgaatcacagccccgcgccctgctgttcccaccctcctgacggtgtcttccgttccctccccacagtcaa

SEQ ID NO: 13456 - DNA, 120 bp, Homo sapiens
ctgcgccttgatcctgacagcgagatcgccaccaccggtgtgcgggtgtccctcatctgtccggtgagtcggggcgcggtcccctcctcgaggcctctcctgcggccggccttcccccct

SEQ ID NO: 13457 - DNA, 120 bp, Homo sapiens
tggcggccctgggcccggggcggcttggctgggccgtgagcctgcgggggcgaggctggtcttcgtcccctccgtgttcctgaggcatgagtgattggagcgagccacaggatggagctg

SEQ ID NO: 13458 - DNA, 120 bp, Homo sapiens
caccgggcaggcgggcacaacaggaggggtgccctgctcacgcagcccctcccccacagctggtgaagatgcggctctccgtgccctgccgggcagagacctgtgcccacctgcagtgct

SEQ ID NO: 13459 - DNA, 120 bp, Homo sapiens
cttcgacgccgtcttctacctgcagatgaacgagaagaagcccacctggatgtgccccgtgtgcgacaagccagccccctacgaccagctcatcatcgacgggtgagcccggggccccgg

SEQ ID NO: 13460 - DNA, 120 bp, Homo sapiens
gggcggccggagccggacatccgtggaggtctcggtggcaccccgcttcctgcagaccacatggtgccccagcaagacacagcagtgggggcacatggtcctggagctttggaaaccccg

SEQ ID NO: 13461 - DNA, 120 bp, Homo sapiens
ctgcgaaaagagccggtttctttctcgcggaacttctcagagcctttgctatgcaggtgacagccacgtagcttaggttgcagaaggtgggctccggtccaccccgctcccacgtgacct

SEQ ID NO: 13462 - DNA, 120 bp, Homo sapiens
ggtcgtgctttcacacggcgttcaccccaggacgcgcagccttgggggtgacctcctcacagaaaggcaaaggaggtggcgcctcctggagcactctggctacgccatgcccttcccttc

SEQ ID NO: 13463 - DNA, 120 bp, Homo sapiens
ccccgttgtctgtggtgcctgatgcggctcctgcccggcgccgaccgcgcccacctcgtccccagagccgccggcagggcgcgaggccacagcggcacaagctggcgccctcacaggcgg

SEQ ID NO: 13464 - DNA, 120 bp, Homo sapiens
ggccgggtccccagccctcaggcatggcctcagcggactgtgcaggtgaaggcagggctggcctgcctctggggttgtagatttcatccccaggtggacctccggttcatgcacttgtcc

SEQ ID NO: 13465 - DNA, 120 bp, Homo sapiens
gagcgtcctcagtttacagacgaggaaacaggctcagaggaggcaaccagcagctggagctaccccggctcacggggccaggctgagacttgaacccagcctgagtctgggtcccctctg

SEQ ID NO: 13466 - DNA, 120 bp, Homo sapiens
cttcgggtagagagaggagtcctttgggccgggcacgtgggctgcctgaatggctgctctgttcccagcctgacagctgtgcagccgggtgcccgccttcccccacaggcccggagtggg

SEQ ID NO: 13467 - DNA, 120 bp, Homo sapiens
tggcggcagctctcacagctccagggccaccagggctggggcaggcagctgtgtcccatgcaggccttggcctcagcagcccatgggactcggtgtagccagggaggcttcctggaggag

SEQ ID NO: 13468 - DNA, 120 bp, Homo sapiens
ccccgtcccagaccctgccttcagagtcttgttcttggccaggggagcggatagaggagcagagccagacataaacgttcccgttgctgtgtgtgtcttggggaggaggaagagaagctg

SEQ ID NO: 13469 - DNA, 120 bp, Homo sapiens
ctacgcctggggcggccctggcacggtgggctccgagcatcgcctcagagagagctcggcggggcggaggggctggcctgggtgagagcctcagaaagggtggcccagagtgggacgagg

SEQ ID NO: 13470 - DNA, 120 bp, Homo sapiens
gaacgatgccactgcgggtgcctgggagcagctgtagccttgacagtaacaggccagcctgggccctgcatggacccgtggggcagggggcctctcctcagacgccccccagccactgca

SEQ ID NO: 13471 - DNA, 120 bp, Homo sapiens
ctgcgggtggggagactgaggccctttggctaagacgggttggggagcagaaccagggcctgcctccagttggccttgtggcctcagggaactcgttcccttcccgagcctctgtttctg

SEQ ID NO: 13472 - DNA, 120 bp, Homo sapiens
ctccgagtaaaaaggccggacacagtgggggtgctctggagaggctgtggctggcatgggcgtggggagcccgcactctgctcccattgctaccctcacagcctctgcaggggctttgag

SEQ ID NO: 13473 - DNA, 120 bp, Homo sapiens
tggcgggcacacagtgcaatgtgaaagcaggtgtgcgtgcacacccacacccgcatgcccacacatccatacagtccacaccatcacacacacacacccacacacatccatacagtccat

SEQ ID NO: 13474 - DNA, 120 bp, Homo sapiens
cctcgggtttcttccttctcacactcaatagactgaagacttctttagtgtggggactggcaaactcctactcatccctcaaagccctaccttgaatgcccctctacctttcctaattcc

SEQ ID NO: 13475 - DNA, 120 bp, Homo sapiens
ctgcgcccggccatgagcagacatcttaatgaagatagaattagctgaagacctccgtatgtttcctaggtgagaggaacagccaaggtgcccagagtggctgcagttgggagccagagg

SEQ ID NO: 13476 - DNA, 120 bp, Homo sapiens
tccgagtacggccgcccgcgcccgcgcccgcgcccccgcccccgcgggaagggggtggggccgtctccccgcagcccccggaggctggtggcagggaggagcctcgccagggcccggggg

SEQ ID NO: 13477 - DNA, 120 bp, Homo sapiens
ggccggtgggagacaagcaggtggtcacggttggctgacggccacccccggcgctcacgcccgcagattccgggaagtcggactcccaagcccctgcctccgtataccggaagagggtcc

SEQ ID NO: 13478 - DNA, 120 bp, Homo sapiens
actcgctgccggcgaggagctttcccgactaacgacgacgaattaaatgacggcaacagtaataaatgcagctgggtttatgatggagcgtttcctccctgccagcctcccagcgtcctg

SEQ ID NO: 13479 - DNA, 120 bp, Homo sapiens
tggcgggtctctgactctcacacaacccagtacgcaggtcctactgcaattctcaatctgtagatgaggaaggtggggggtttccttccagaaacaaggaccgaacagctaggacagcag

SEQ ID NO: 13480 - DNA, 120 bp, Homo sapiens
aaacgtttcctgagcacccgcttgatgctggacagtgacctggccaccggggacacagctgggacggagggaggtggccccagccctggtgatgcaggggcaggatgcccacagagcgta

SEQ ID NO: 13481 - DNA, 120 bp, Homo sapiens
tgacgcccggaacaggaatacagcaggaaagcgtgagggtcggggcgaagagagaaggcacatgcgtgtgattcacggatggagaaacccatagggggcaagaccaggtccaaacccagg

SEQ ID NO: 13482 - DNA, 120 bp, Homo sapiens
ccccgacccccctcctgccagctgcttcgtgatctgccagccccggccttcactgcttccttctctccctccctccctgccctccccgcctcagtttcctcttctggaaccgagctgagc

SEQ ID NO: 13483 - DNA, 120 bp, Homo sapiens
cctcgtgcttggagccagcaagataacatatccccaggaccaacccggagccggcggacgcctggcgctttattgaattattgattgtccaggagcctcctgcattctgggaatgtcccc

SEQ ID NO: 13484 - DNA, 120 bp, Homo sapiens
gagcggctgctgccacagtggtagaagaggggtccaggagggcgagagagctgggctgaggcctccccactctccacgtacccttgcaataaggggttagagtcctgccgtccagagggg

SEQ ID NO: 13485 - DNA, 120 bp, Homo sapiens
acccggaggagctgtgaccccatctaagctttgctcacccagcaaacgttgatgagccctcatttttgtgctggggcaaccgcgacgcagccccgaagtctgacaaggaggcagacaccg

SEQ ID NO: 13486 - DNA, 120 bp, Homo sapiens
caccgccgccgcctccaggaagcctgggcaggccccaccacagactagcagggcccccgaaccccagctccagctgccatgcagaatacccttgggctgctgtccaccacccctgctggg

SEQ ID NO: 13487 - DNA, 120 bp, Homo sapiens
catcgccacgatggccccgaaacagtgctctttcagcaggcccgaggagagggggcctcaggggccacagagccaccctcctccattgcagacaaggacagcagggcctggggagggaag

SEQ ID NO: 13488 - DNA, 120 bp, Homo sapiens
aagcggacagcttgggtcctaggaaggggcagtgacgggtctcctgacatcaggccagccccaggtattgggggttcgctctccggcacccctgcccagcccaggtgggggcagagcctc

SEQ ID NO: 13489 - DNA, 120 bp, Homo sapiens
aggcgtgagccaccgcgcccgcccttctgtctatgtctttcttattcactattccagttttcttcaccttctcccttctggaaggccactcttctgggtggaggggaccagacttcagaa

SEQ ID NO: 13490 - DNA, 120 bp, Homo sapiens
tcacgttgccagatgttggggacttcctggatgaggttctgttcattgagctgcagcgggaggaagcggacaagctagtgaggcagtacaacgaggaaggccgcaaggctgggccacccc

SEQ ID NO: 13491 - DNA, 120 bp, Homo sapiens
aagcgctttgacaaccgaggtggtggtggcttccggggccgcgggggtggtggtggcttccagcgctatgaaaaccgaggaccccctggaggcaaccgtggcggcttccagaaccgaggg

SEQ ID NO: 13492 - DNA, 120 bp, Homo sapiens
cagcggtggaggaggcaactaccgaggaggtgagacatctcacacacagcactctccactttctgttcccaggttggggctgggctttgactgcttattcaatcagcaactgaagttttc

SEQ ID NO: 13493 - DNA, 120 bp, Homo sapiens
acacggagacctcagaaacgctcccactttcccactccctggacgctggttatgaagccctttgcccatttgcatatcacagtgcacattctgtcacattgctgtcatttttgtgaacct

SEQ ID NO: 13494 - DNA, 120 bp, Homo sapiens
cctcggcctggcgttcatctggtgcagccattccatttggtcaacacttctgcactggttgctaggtaattggtatcctagccccctccacagtctagcaagtgaaggggaagggctggc

SEQ ID NO: 13495 - DNA, 120 bp, Homo sapiens
ggccgccatactacgggaactacgactacgggagctactccgggaacacacagggtggcacaagtacacagtagccagtgtgacccagaggctcccggaggcccctgccggcttcctcca

SEQ ID NO: 13496 - DNA, 120 bp, Homo sapiens
cagcgcctgcctcggcccctcctctgcccccgccagatcccgtggtgctggggatggggtcatcccagggctgcctccctccagcccactgcctcccctctgaggggcttccttcccctc

SEQ ID NO: 13497 - DNA, 120 bp, Homo sapiens
atgcgcttttttttaatttttagaatttgtctttttactgtgggtgggctgttgatatttcatcaagataagcatttctttcctgagttcaggtgactgaggaagagccacaaaacaaaa

SEQ ID NO: 13498 - DNA, 120 bp, Homo sapiens
atacgatgccccagttccccataactttgcacacaagcttctgtgttcagttgaattgtaactgctttttgtatttggagagagtgactattgaacttgaaaccttttattccgggcgtc

SEQ ID NO: 13499 - DNA, 120 bp, Homo sapiens
gtccgtgttgaacaagccgtctaggtgatcctctgactcattttttcagcacacattcggggcctaccctgcaccgggccttgggatacccacagcccttgcccttgccaagcctcttcc

SEQ ID NO: 13500 - DNA, 120 bp, Homo sapiens
acccggcctaggagtaatgttctgaggtgatcttatctctggcactgcttggtcattcttaatcatttacaggaaaaagcagaagttgtaactgcatgctacgtgactcaggctacatag

SEQ ID NO: 13501 - DNA, 120 bp, Homo sapiens
cctcggcttgccagtttcctcccgcgtgaaacaggacaataaacgattatgcctcttagggttgtgctgaggaatacatgtgtatgtaagtttatttgcaaagcacttagaacagggcgc

SEQ ID NO: 13502 - DNA, 120 bp, Homo sapiens
gcacggtccttgttgctgttattattattggctattattgcgcaaaggggaagggaggcggggccaagccaggaaggccctggagaatccggggtgccccctcctccggcagagcttggg

SEQ ID NO: 13503 - DNA, 120 bp, Homo sapiens
tcacgaggaaggggctgcagttctccaaggattcccgcctgctcccagacccccgggagtcgtaggaacccgttcctggacgctgacgtcggctttcagggatccctcgccggacgccgc

SEQ ID NO: 13504 - DNA, 120 bp, Homo sapiens
ccgcggagggacagagcctgggaagccgtcgccccgccccgtccccgcccccgcgcgcagcgggcccggggcgctgagacccgcgtagagcaaagcgcaaggtcccagcgccccttggat

SEQ ID NO: 13505 - DNA, 120 bp, Homo sapiens
cctcggtggcagggtccgggcaagtgtcattgcgagggttcaggaagccccggcctgtgatcgtgagcggtgagtgagggacgtaggtgggtgggggtcacagtcccttccctgggtcct

SEQ ID NO: 13506 - DNA, 120 bp, Homo sapiens
tggcgaggaaatcggctcagtcaaggtttggaatgagcaggcaggaggcttggggaccttccagggggatcgtaggacgagaagaagaatattctttctggttgtgttgcgtgtgtacgt

SEQ ID NO: 13507 - DNA, 120 bp, Homo sapiens
gggcgaggtgtgcaaaggattctggagagctggtgcatgtgtgggagttgtgtggagtcataggtgtgtgggtggagtagggcaggggtgcctgggcctgatgagtggggcaggcatgcc

SEQ ID NO: 13508 - DNA, 120 bp, Homo sapiens
tgccggggtgcatgtgtgcgtgtgtgcacaggtgtctgtggtttgtgatgcagtggggagtagggttgtgcacggagtcaattgggataaatgtgtaagaaggttggggacctgaaaggg

SEQ ID NO: 13509 - DNA, 120 bp, Homo sapiens
cttcggggggcaggtctaggggacagaggatggggaatgtagactagagtgcagttccaggcagcactgggggtaggggatgggtgtgtgtgtgactgggaggggtgcctgggcctggat

SEQ ID NO: 13510 - DNA, 120 bp, Homo sapiens
gtcgttctgcaaagcgccctggttctgacttgacggccaacagcaggtaggggacatcagtatctgagcagctggagacttggctgccaccacctccaggcagccactgtgggaagctcc

SEQ ID NO: 13511 - DNA, 120 bp, Homo sapiens
ctccggcaggctgctgacagcaagaagcggcggaggtccttggggtaggaggcgaagtcagggatctcggtggcggcggcggccccccaagcctggcagccccccgtttcagtgctgtcc

SEQ ID NO: 13512 - DNA, 120 bp, Homo sapiens
agccgccactgctgctggttccagtaagcaaagggcagcgggatagtctggcccaggcgggtggagaggttggcaggtagggtgggctcagggttggctggcgtggggcttggcggggtg

SEQ ID NO: 13513 - DNA, 120 bp, Homo sapiens
ccccgagggctggggtaggccttgctgagccgggactcggatgtccactcgatgtacactttgaggcccaggagtgtgagcagtgctgacaggcagagaaggcacttggggcagcgcatg

SEQ ID NO: 13514 - DNA, 120 bp, Homo sapiens
acccggcccagggaaggggcggccgcgggagctacaagggagccacaggggagccacggaggccattggggtgtggggatgggcctccagagagggcccagccaggccccaggcagacag

SEQ ID NO: 13515 - DNA, 120 bp, Homo sapiens
ccccgccaacccccataacagattctctcggtcccagatcctaaacagctcccctgacccagggacctcgttggtccttattcctagacctaggagtcccccattccaatcccgtaccag

SEQ ID NO: 13516 - DNA, 120 bp, Homo sapiens
ctccgtccaaatgcttccaccttcctaaaagcccaagggtctacctcttccctgtctccatccaggacaagggaccttgccgtctatctcctccctctccctccatttattgccctcacc

SEQ ID NO: 13517 - DNA, 120 bp, Homo sapiens
gagcgggattcctagctccctggggttagaaacccagcctgcctcccgcaacaccccaaccccagggactggggaaccagggatcccatgcttttttacctctgggtctggctcccgcca

SEQ ID NO: 13518 - DNA, 120 bp, Homo sapiens
ctccgggtgccggcctcaggtcaggcctccctcagctccctctgatctgcctgccccagcccctgtgttgtcgaccggcggggcccagccctgcccagccagtccagaggggcggggagg

SEQ ID NO: 13519 - DNA, 120 bp, Homo sapiens
gagcgggagcagggagggccccaggggccggggcggggctgaggcaggagagagggagggagggagggagggaggagggcaggaggccgacctgagagatggggctctggcgtgttaggg

SEQ ID NO: 13520 - DNA, 120 bp, Homo sapiens
agacgggggctttgtgaggcctgggaggggagaaccagggccagggggtgccagggagggtggggctgaaggctgggcctgggctggggagtgttagagtgaccagggcgaggcagggtc

SEQ ID NO: 13521 - DNA, 120 bp, Homo sapiens
tggcgcccggctgcacccatggccaggaggcggcagtgaatgtgctgagtgggaagggatcggcgggcctgccagagggatgtttgttgttgctgcccagtcagggtgaggtggggggaa

SEQ ID NO: 13522 - DNA, 120 bp, Homo sapiens
gaacggggctggtgaggagaaggagagacagagacattgtggagagggaagagacggccagggagcagagagaggagaactggggtgagacaggcgatggagagagctgagggggagaga

SEQ ID NO: 13523 - DNA, 120 bp, Homo sapiens
agacgggcaagtgggaaggtggccaggagggagagggggagggaaatggagatggcgagaaagataaggggttgcggaagccctgtggggtgctcatggggaaagagaggttgagagagg

SEQ ID NO: 13524 - DNA, 120 bp, Homo sapiens
ttccgagccagacccaggcagaggcggagagggagccaaggggaagaacaggagaggaaaagactggagcttcaagggcaatagagggtgacggggtggggcccacggggaaccccggga

SEQ ID NO: 13525 - DNA, 120 bp, Homo sapiens
tctcggcacccgggctgcctgcccagcagcgtgggaatctgttcctaccttacccccaacctccggcctggagccagcctcaccccgggcccctcccctcccccagcggcactgtgactc

SEQ ID NO: 13526 - DNA, 120 bp, Homo sapiens
ccccgcaatatggggagtaatagcacctactcccccgctggatattaggaaccaaaggggggtgtacacccctctctataaggggagtcacagtgtagcaggaggagccgcggacaaaat

SEQ ID NO: 13527 - DNA, 120 bp, Homo sapiens
ctgcggaaggagttgagggtcgcagagggaggagaatctattgcagaatacacagtgcagacagaatactcaagggcatggatgaagtgtccttacaatgaaggctgagggtctgagaat

SEQ ID NO: 13528 - DNA, 120 bp, Homo sapiens
ccacggcctcccaagtccccagggatccttccctcttattccacggctcctccctcgtcagctcctgaccctgggttgctgcctcaacagcttcctcctctgtgaatttggcccaattaa

SEQ ID NO: 13529 - DNA, 120 bp, Homo sapiens
gggcgtgctctgtacttggtacctcccattgttcattgaatccatccacacagtgagggggatttgcaggctccggatcctgggcaccgtcacacaatggggagtggaccagcctggaca

SEQ ID NO: 13530 - DNA, 120 bp, Homo sapiens
gcccggcatctgcctgagggtccttcctctctgctcaggacagatgtgggttcctaaagcctttcctcaactcccctctgctgggctccccctaacacaaacctgagggagacaggaggt

SEQ ID NO: 13531 - DNA, 120 bp, Homo sapiens
gttcgaactccaaagttgtggcttttaacctggcaccctcccaaatgaccctgacctttcctagaaccagcatccagcgtgacctcaaggagcagcagccccaagcccttgcccctggtg

SEQ ID NO: 13532 - DNA, 120 bp, Homo sapiens
gtccgctcctgccagtcactgccaggcagactctgatcctttcccgggggctgcaaggaggatctcataaaacatcacacaggggaccccaactgcttgggtcagccctcacctgtgggc

SEQ ID NO: 13533 - DNA, 120 bp, Homo sapiens
ctacgccttcctggagaggggataaggctctcctcccaccctgctgctcactcctgtctctgtttccaggccgtggtccctcccacagctctgccttctcggtaagcctgtccccttcca

SEQ ID NO: 13534 - DNA, 120 bp, Homo sapiens
ccacggatgttctggtcccacaggccccaggggacccaggatcttcccctactggcatcggctgagctctgagattcaggaaactgctgtgaaaataagaacgggggtggcgagcagagg

SEQ ID NO: 13535 - DNA, 120 bp, Homo sapiens
agacgccacaccctgttctgaggagactagaggggtccaggcctcttctctgttttaacaggaattgctaaaacatgacacaaacatttactgccggatggaccacaaagcagaagtggc

SEQ ID NO: 13536 - DNA, 120 bp, Homo sapiens
ggtcgggagtccacttctgtcgcaggacccggcttccgggcccccacctctaacctccctcggatgcctgaaaaccctgcctggtcctccgggcagccgcccccctctcccacccgcgcc

SEQ ID NO: 13537 - DNA, 120 bp, Homo sapiens
cgccggcctcttggacacagcactagggtcggattcacagttgggagctccctcggctgcgggtcagaccctcccctccactccctctcgaggaccctgactccgcggccccggaactgt

SEQ ID NO: 13538 - DNA, 120 bp, Homo sapiens
actcgaggtccattttagatcaggagttccctagggactgagggaactgctctgcgactcactgctttaggtggccctctaacatcctgcaaaaccctcttgtaaccctctctgaatgtc

SEQ ID NO: 13539 - DNA, 120 bp, Homo sapiens
cagcgaatagctgacacagctcagagttactgagcggctccctcactaacaatgagtgctgacaggccacggacttggccactgtgaagagcatggctgcctggcatgtccagcctccag

SEQ ID NO: 13540 - DNA, 120 bp, Homo sapiens
agccgcttggggaagcctcctgctcgccaggccctgtggatcaccccctccctgacctcctaaggcactggaagcccattgtgcctggcaggagtcagcatggtgcagcagagagggcac

SEQ ID NO: 13541 - DNA, 120 bp, Homo sapiens
ctccgagcctgacactagctctgccggggactcactgtgtgacctgcttccttaccctcaaaagggggaaataagacaaagctcacaagggtagccgtgaggtctaaagaatgacgcttg

SEQ ID NO: 13542 - DNA, 120 bp, Homo sapiens
gcccggtgcagaacaggcaatcaataaatacttgacatacaaaggcccctctgcctctgatttggtgaaatgcaggagtggcacccccagggctacaggacaacgtccctgtctggtgct

SEQ ID NO: 13543 - DNA, 120 bp, Homo sapiens
tgccgggtgcttgctgtgtgaccctgggcaagtcgcctcccctctctgagcctcagtttccacaacttcaagatggacactgagttggcattgttgatacatgttgttggcaagggtggc

SEQ ID NO: 13544 - DNA, 120 bp, Homo sapiens
caccgacctgccctgcctcaccccacgcccccatggccccgctcactggtgtccgtggtctcgtactggctgtcccgctgcagctcaaagatgtctacttccactcgggccttggctggg

SEQ ID NO: 13545 - DNA, 120 bp, Homo sapiens
cctcgatgatcccgttgatctgctcccgggccaaggccaaggccagacgctcaccgcggccacacactgtctgatcatccaggattgcagctgaggggacacatgggttggggaccagac

SEQ ID NO: 13546 - DNA, 120 bp, Homo sapiens
atacggaccaggggtctagacacctggatctgaggttggtgggagctaggggtctggactcctgggtcctgggggaaggaggaactggaggctgggattccttgctgctgaagagagctg

SEQ ID NO: 13547 - DNA, 120 bp, Homo sapiens
tgacggactggcatgcctgggtccccagaggagccccagggcctgaggatgcaggggcagggtgcgggagggcctcacccatgcgcagtgatgagagcacctggcagctggggctggcga

SEQ ID NO: 13548 - DNA, 120 bp, Homo sapiens
agccggcatcttcctcccctcctcatggggacgcagctgccgcggcccccactcgccacctgcagggagaccccccagaccaaggggagattactatgtggtgggatggaaccccttgga

SEQ ID NO: 13549 - DNA, 120 bp, Homo sapiens
aggcgctgagtaggacaggctgcaagagagaggatgggcacagctaccaaaacaggagggaggcgtgcgaggttctcaggtaggagtgaattcctgggaccagccccacccaaataggaa

SEQ ID NO: 13550 - DNA, 120 bp, Homo sapiens
tcccgcccctgtctctgggcaggcagccgttactaggcaacagaaaccggctggagaggatgcggtggttgctaggcaaccccatcccaggcctcacttgccactttcctaacatcccca

SEQ ID NO: 13551 - DNA, 120 bp, Homo sapiens
atccgaggtctggaggagagagtatctgggagttaggaaacttcgggagagatggagagatggagaaaaagagagagaggcacacacagaaccccatagatgaatggacccagagcagta

SEQ ID NO: 13552 - DNA, 120 bp, Homo sapiens
gagcggaggaaagaggggcaggctggaggtggggaaaccaaggcacaggcgagacacaggaagagggagacagaggatggagaaaagataggaaccgactcggatacaagcaggaagagc

SEQ ID NO: 13553 - DNA, 120 bp, Homo sapiens
ccacgggaagggatgcttgggtttccatggagtagggttactgtggggggcacagaatgctgtgaagtgggcctggacaccggaccccactcagtccccatggaaggacagcttgagctg

SEQ ID NO: 13554 - DNA, 120 bp, Homo sapiens
cttcgagggaaggatagaggcacaagtccttctcaccatctcaagtggcctgcaaaacctaggctggggatcagtcccagctctgcccctgactcactgcgtgatcttgagcaagtcact

SEQ ID NO: 13555 - DNA, 120 bp, Homo sapiens
acccggaggagcgctcagagtgggaggagtgtgaagggcggagctaggagagaggcaggagtggagtgggtcatcctgagacaccagggactcctggggcaaatcagggagcagaggaca

SEQ ID NO: 13556 - DNA, 120 bp, Homo sapiens
gaccgagggagagatgggacagaaggacagggacccacaggtggcagccaaaggtgggagcagacagagaaagacagggttgaggggcagcaggtggacacagagatacacacagaaaga

SEQ ID NO: 13557 - DNA, 120 bp, Homo sapiens
ctgcggtctcagggctctcctctctctctgctcctgcccaacaaggggcaggggccacactacggctgtcaggccccaccctgatttcaatggctcgtgtccttcactgcaacactttgg

SEQ ID NO: 13558 - DNA, 120 bp, Homo sapiens
aaccgaaaaagaaatcaaaggaggaatcaaaccacccaaaagttgttaagttttccttcatctgttctttttgctttcttactcctttttttcctgtctttttttaaagctttttcagtt

SEQ ID NO: 13559 - DNA, 120 bp, Homo sapiens
tcccgtccacagaacagggcagcctcggaccccactgccagcccagaaagtccacactcatccttaacctctgctatgggctaagttgcatctaccaaaattcatacacggaagtcctaa

SEQ ID NO: 13560 - DNA, 120 bp, Homo sapiens
cctcgtctttaacttacagcctccgtaattgtgaaaatgaatttctcttatttcagccacctagtctgtggtactttgatgtggaagccctagcaaactaagcctctcacagcccctgcc

SEQ ID NO: 13561 - DNA, 120 bp, Homo sapiens
atgcgacaggcctggtctgactcatcactgggtccccagcatcacaagcccagaacgggttgtaactgctgaatgtccctctctttagcagtctctgtttcctactacttctcacccttg

SEQ ID NO: 13562 - DNA, 120 bp, Homo sapiens
aggcgtgagccaccacgcccggccataagctctgttttctatgaaaccaccaccttgatgcccccagctcccagccaggtctctctccagctccccataccctagcaccttcccttgtca

SEQ ID NO: 13563 - DNA, 120 bp, Homo sapiens
agccgggccccactatgtctcccctatcagactaggaatttttcaagggcagatctgatctcaggttcctaaacactccccagcagaagacatgtggatcagtggccccaaggtcctgat

SEQ ID NO: 13564 - DNA, 120 bp, Homo sapiens
gctcgtctcccacttgggtgaccctttccttctctactggcaaactcttgctcctctttaaggtccagctcaaatgtcacctcctctgtgaagtactctctgattccccagatggtcagt

SEQ ID NO: 13565 - DNA, 120 bp, Homo sapiens
gtacgtctttggaatgaatgaatgcattaaagaatcccctaactgaccagggcccaatcctgtctaaaacaaacccctatctctactgtcacccaacatccccaagaaaccctaacttaa

SEQ ID NO: 13566 - DNA, 120 bp, Homo sapiens
caccgtggactaaaagccaaatgacgccttaacagggactccagggcactagcaatcatagacttggagggtccatcaaatggctcggcctcagcctcagcctgagcccaggcagagatg

SEQ ID NO: 13567 - DNA, 120 bp, Homo sapiens
catcgcctatcactcaactctagaaaaatattgatgcctgttcccaccctagactctgatttcagtggtacagggtgtgacttgggcatccagatatttaaaagcccctccaggtgattc

SEQ ID NO: 13568 - DNA, 120 bp, Homo sapiens
tgtcgtccccatccctgaaggggctgctccgggcagagctgagactgacacatgggaaggtgtccagctcccggccctctctcttttcctgcacccagctgcctcccaaagaaaagggcc

SEQ ID NO: 13569 - DNA, 120 bp, Homo sapiens
catcgtctccctgcctggtgaccccaacaccctcctgtacctcctcctacccatccctgtgccccccaagaccacccatcccatggccacctttctgctcctctgcaggtttggggttag

SEQ ID NO: 13570 - DNA, 120 bp, Homo sapiens
gtgcgggcactgcggctgacatggatgaggaggaagaggagggggtcttggtgatggacgatgctgatcctgcggtggggggaatggcaggggagggggtggagagggctgggggagggg

SEQ ID NO: 13571 - DNA, 120 bp, Homo sapiens
tcccggagccatttggctgatggtcagaactgtctgtcaaggtggctctgagcccctggggacccagatgggaggagggagggggagaggtcgggggtcaggccacgtcccctcagcttg

SEQ ID NO: 13572 - DNA, 120 bp, Homo sapiens
catcggcctgacactggcgggatggcctggtactcagggaagcggggaggagaggggctgtggggatggccatgggcagaaggcgggggtgggggccgcctgcccctcctctgccctccc

SEQ ID NO: 13573 - DNA, 120 bp, Homo sapiens
cctcgggtcaaggctaaggtgattcctcaacctctcggaggctgggctgggaggagaggaggatctggacagacaaagaactggagccctggggagttgggggctggggggacgcacctg

SEQ ID NO: 13574 - DNA, 120 bp, Homo sapiens
ctacggatcccagagccatacagaccttccagcttgggcaaggtcggatgggggtggggggaaactgaggcccagagaggggagacggcccaggcccagggttctcagcgctgtcccaga

SEQ ID NO: 13575 - DNA, 120 bp, Homo sapiens
aagcgttctcctctcttaagccagtgggcaggggaggaagccagaagagaaaaagtctaaatgtgaccttgagcactggcctggcacagctgtgggaagaaacttaacgtccgtcagaaa

SEQ ID NO: 13576 - DNA, 120 bp, Homo sapiens
tagcggtggctggggaagaggccttcagacagttttccccttttgcccatggctacagtgaaggaggaggattcacactctggttggtcacaatccacccatgacactgcgtcagggcct

SEQ ID NO: 13577 - DNA, 120 bp, Homo sapiens
tctcggggagagggccgcagcgaagaagaagagggggagaataaggcgggcctcttttggagggggtgggatgggctcacacatgcccccacagcctgccaagaaggccccagatgggcc

SEQ ID NO: 13578 - DNA, 120 bp, Homo sapiens
ggccgaggactataggggtcccggctgccctcccccaaacctcccctcccttctctccctctctctttctcggctggctatcgaccggggctgtgacatggtggatcaatacggcaggga

SEQ ID NO: 13579 - DNA, 120 bp, Homo sapiens
agccggctggctggctgcctgcctctgcctctctctctctcccttgcttgccttgcttccttttcccggagccgcacccaggtcccccaccatcatgtaccccttacccaggcctctgag

SEQ ID NO: 13580 - DNA, 120 bp, Homo sapiens
agccgggagagggggtgagtatgggagtgggcaaggaagcagatggggatgggggccatagtttcaggtaagggggctgggagaaattgagggacaatttctgggagaaagcaggcatcc

SEQ ID NO: 13581 - DNA, 120 bp, Homo sapiens
tgacggacagagctctgggaggtgggcagggggcacctgtgggttcagagagacactgtcctgagcccatgaggcaggggaaggtctggggtgggtgctggagtaggctacggtgaatgg

SEQ ID NO: 13582 - DNA, 120 bp, Homo sapiens
gggcgaaccctcaggccggcctgcgcccacccccagagctgctggctgccccgcctttgggtccctgcgggtagaagttgccttggcctcaccccagggtctggcctgcacatgtgtggt

SEQ ID NO: 13583 - DNA, 120 bp, Homo sapiens
gtgcggcttcggacaggaggttccagcgagaggtctgtggtgtgcgagctgccatggacgcagggtgtgcatgtgtcctcaggctctgctgggggattctaggactgcacatacccgagc

SEQ ID NO: 13584 - DNA, 120 bp, Homo sapiens
gagcgtcttggcccgagtcatgtctgtgtgtgaacatgagttcatggatgtgtcccaggagcactgggtggctgtgtatgcacttccatgagtgtttccctgacgctaagtctctgtctg

SEQ ID NO: 13585 - DNA, 120 bp, Homo sapiens
tggcgtgcgcatgcccctgacagagtgtgtctgagcacggatgctgctgtgcgtgagcctccatgggtcccgtgtggatctgtgcctgtgcctgtgggcagctgcgtgtgcttcagggat

SEQ ID NO: 13586 - DNA, 120 bp, Homo sapiens
ctgcgcggtggtctctatgtgtactggaagcaggttctcctcatgagtgtcggagagtccatgcggtttctctgtgtgtctatgtgatgctgtgtgtccctgtgtgccgatggtcgagtg

SEQ ID NO: 13587 - DNA, 120 bp, Homo sapiens
agacggcacggtgtatgtgtgtagaggctacaaccctgagtctctgagtgggggagggtggcgaggcagcaggggctgccacggagacactggctagccggttttatcactacatcatct

SEQ ID NO: 13588 - DNA, 120 bp, Homo sapiens
ccccgagagacgacaagagaaagagaacggcagagtgagagacagaggcacacgcagagagatgcacagagaagcagagacagaagatgaaagagactggaagggacacagacaccaaaa

SEQ ID NO: 13589 - DNA, 120 bp, Homo sapiens
gcacgacagagagagacgcagagacagtgactggagagacggagagagaaacagagaaagagcacacaacagagcagaaaacccagtgatggagccacacagagagaagacgcagataaa

SEQ ID NO: 13590 - DNA, 120 bp, Homo sapiens
gaacgggggccagaggcagggagaactagaaagggggcaatgcacagagaggaacagaaaggctgagtgagagtgagagagaaaggagaccagagagataaaaggcagacggcagatagt

SEQ ID NO: 13591 - DNA, 120 bp, Homo sapiens
tcacgtccaaagtgatgtctctcacacacacacacacacacacctttctccccattccccaggccagaagtcagggatgctcaagcctttttccacgttcctctgggcccctgtgagcca

SEQ ID NO: 13592 - DNA, 120 bp, Homo sapiens
ccacggtggggaggggacagggtgaatggacagggatgatctcaggtagcttcagggaccagccagagccgactgggacctgatcacatgggtagggagagcagtacatccctccttacc

SEQ ID NO: 13593 - DNA, 120 bp, Homo sapiens
caccgccacctcaccctccacacacagtccacacacaccagggccttggccaatttcctcgtactctgccaggcatggccagcctggggggtggggggccaggtgtgaggtccttccttc

SEQ ID NO: 13594 - DNA, 120 bp, Homo sapiens
ccccgcactgttttttctttctcattgtcccctgccttcagcccggctgccttcatctttctctgatgcactctcatgcgctcagctcgcatgcacgcgccctctctttctctctgttcc

SEQ ID NO: 13595 - DNA, 120 bp, Homo sapiens
ctccgttgctctgttcccctctctgtgtttctgtcatgaggtgcatgctccctgggtctccctctccctccactcccatctggtgtattctggattcccctttcttagacaatccctctg

SEQ ID NO: 13596 - DNA, 120 bp, Homo sapiens
ggccggatctctggatctccccagcctccagatctcagtgtggctctctctggagacaaaagctaagactcaacccacaggcaacactcaacacagagatccagctcagaaaaaaaggag

SEQ ID NO: 13597 - DNA, 120 bp, Homo sapiens
cagcgtgagcccaacaaccacggggtgggggtggggcgcgcatcaagatttctaacaagcgcagctgaaaacacccagggccgttctctgaggccttctctctgcctaccagccctcacc

SEQ ID NO: 13598 - DNA, 120 bp, Homo sapiens
cttcgaagagccctgaggaacgtctctctatttgaagtcagagccgagtgcctgctctcggcacctggggctccatgcttaccaggatggtgggtacttgaccttcatttgctgtgggac

SEQ ID NO: 13599 - DNA, 120 bp, Homo sapiens
ccccgaactggctcagagatgcaagccatttttacctcctacacatctataatccccaccccatggctgacaaatattcccagtccacagctgtctccacccacccagtgacagagcaca

SEQ ID NO: 13600 - DNA, 120 bp, Homo sapiens
cagcgaggagtgcccctgcccaccacccagatcacacagctgccagttacagaccaccctataggtcccaccacacggccatagcccaccagcatcccagagctgcctctacactaaagc

SEQ ID NO: 13601 - DNA, 120 bp, Homo sapiens
atgcgccatcatttgtccagctctgagtcacatcagttgtcgagcctcccctcctcgctgaccagccatctcggccatcagcggcctcggccattagtcggctcctgcctctggcctgca

SEQ ID NO: 13602 - DNA, 120 bp, Homo sapiens
aaccgtccggaccaatggaacccttttggagtcggcctgaccttttcctcaagggattccgatgtaccctgttgtatgaccctcggcccatgcctcagggcgaccctcccctcagcacac

SEQ ID NO: 13603 - DNA, 120 bp, Homo sapiens
gaccgctggccacagtagttctggtggattgtgaggctgtgtgtttgagtatgtgtggaagtccgcttgtaggtatatgtgtatgggtggtgggatggctatagctgtgctttaagtcaa

SEQ ID NO: 13604 - DNA, 120 bp, Homo sapiens
atgcgtgtgtgtctgtgtctgtgtgtgaataaggggataggaagtcagcagctgtgcttaaagtcagagtgcctgagtatatggttgtatatatggggagatggaatgtcaggggctgcg

SEQ ID NO: 13605 - DNA, 120 bp, Homo sapiens
cttcgtgtgtgtgtgtgtgtgtgtgtgtgtgtgtgtgtgtgtgcactttaatgcaggagtgacttggtgtattggcctgggcttggcgtggggggccatgaggggccgtgtctgttttgg

SEQ ID NO: 13606 - DNA, 120 bp, Homo sapiens
gtgcggtacaggcatctgtttctcaagcagttgtgagcaagtggaatgtgcctctctcagactccgttgcttgtgtttgtgaaagtgacagatgctgcctccctggcctcactgcggcgg

SEQ ID NO: 13607 - DNA, 120 bp, Homo sapiens
ccccgggtgggggagggtccccagtctgctcttatacttgcgtgtgtgggccacagccctatactttataggatcctgagagtgtggactaaagtaacccccaaccttgttggtttctgt

SEQ ID NO: 13608 - DNA, 120 bp, Homo sapiens
gtccgtattgtccaaagtacgttgtcacgagatgcatgtgtatatgtgtatgtgtgtgtgattgcaggcataatagctccccgctgccagccagatcaagttccaacttctcagagcagc

SEQ ID NO: 13609 - DNA, 120 bp, Homo sapiens
aggcgcccagaatcctgtctaaggctgggattggttctgcttcagagtctaggcctttgttggcccatggtcagtgcctagcgatcattttcaggttaaggagtgatcataccaccattg

SEQ ID NO: 13610 - DNA, 120 bp, Homo sapiens
gcccgattacctcagggaactcactggactttatttgttcagtgattcacaccactcaataaatacctattgaatgcagggaccttgcatgtggagccaccaccttcagcctccttccga

SEQ ID NO: 13611 - DNA, 120 bp, Homo sapiens
atgcgtcagagctgggaaagctgcctgtcccgaggatctaatgaagttggggtggtgatcgagtgagggaaaatgcacctgcctcccaaggccaccatgtggatctgaaaaggtgacaca

SEQ ID NO: 13612 - DNA, 120 bp, Homo sapiens
gaacgagctcaaccatgctcatttgctggctctcccttcaggatataaagcgagacccacatccttagagccctcactgaaccacataaggcatccatccacccgacaggtcctgggaga

SEQ ID NO: 13613 - DNA, 120 bp, Homo sapiens
tagcgagtgatacataaacatcaggacgagggagagatcagtacaaatatgcactgactcccttctgcacatatgtcacccatgatggggacccccagtacccaaccccccactgaaaac

SEQ ID NO: 13614 - DNA, 120 bp, Homo sapiens
tcacgattctacacctttggctcctcactctgccaaggcttcgaggcccagcacacacagttagtccttcctgaacacatctcaccacacatgcaggccttatacacatgcatgctgccg

SEQ ID NO: 13615 - DNA, 120 bp, Homo sapiens
gagcgaagcggctgattgggtctttctctaaatccaggacctactccccaactccacaggccccaggaaggaggcagaaagtggggagtggtcatcaggccaaaggctttctctcaggat

SEQ ID NO: 13616 - DNA, 120 bp, Homo sapiens
ttccgccccaatttcctcccgttttcacttcccgctaggcatccatgtcattttcttctctgtccacacccttctcagtggggctgagtcgacagccatgagccctcacttaagatcttc

SEQ ID NO: 13617 - DNA, 120 bp, Homo sapiens
aaacggagaaaaaagaagggaaggaggtggagataagggaggtagaaaaagaaaaactaaggggtggggaggaggagaaagagcttttattgagaaaaggaagagatagaaactgaaaaa

SEQ ID NO: 13618 - DNA, 120 bp, Homo sapiens
agtcgaaggggttccccaagttacagactttgtccagagagctgaggggtgcaccgcggctccccaacctcactctggggccctggagctccgttttccacctctcctcctgcctgagat

SEQ ID NO: 13619 - DNA, 120 bp, Homo sapiens
caccgcctctgagtgccccatcccggctgctttttcctatttctcaccgtttctgctctccaaggcaccccgttcctttctctcacccctcattcccaccacccagccctttctcgttcc

SEQ ID NO: 13620 - DNA, 120 bp, Homo sapiens
cttcggagcttcagacagcatcaccgaccaatatcctcaccatcatcgtactaaaccggcccccacacctccaggaaaagagagagagagagaaaaaaaaaaaaacaggcggaaccgcca

SEQ ID NO: 13621 - DNA, 120 bp, Homo sapiens
tctcgcctcattttctccacagtcgccccttcctcaaatgcagggtcaaaatgggggtcccgcccagcccggggagcctctccgaagcgccgcagccagccgggagcagatgccacctcg

SEQ ID NO: 13622 - DNA, 120 bp, Homo sapiens
cctcgctcctttttgtgttcagtggccctggttgcgatgtgttttattttcatcgtctttttattggtattgttttttttctctttttcttttctttattttttggcccgggggcagcag

SEQ ID NO: 13623 - DNA, 120 bp, Homo sapiens
cagcggcgaagcgcccactgcctgcctctttcctcagctctgcggccgtcaggctctttctctagtctgcgctcttgactccctcctttctcttctgcctcggctctcgctcctccgctc

SEQ ID NO: 13624 - DNA, 120 bp, Homo sapiens
ctccgctcctccgtcctttcagctccgtcctcagccgactgccctctcctctctctactgcttccccctccacgcctctcctttcctcatccttcttgccccttctccctttttcctctc

SEQ ID NO: 13625 - DNA, 120 bp, Homo sapiens
ctccgtccccatttctttccatccctgccccccgcccccacgtacacctctcctttggttccctcactgccatcgagagcaagctgaccccccccatccccaaataataaaaatacccag

SEQ ID NO: 13626 - DNA, 120 bp, Homo sapiens
gaccgcctttccctgatcgtgcctcttcctttgcaagatgtcatcccacctcaatggctgtcttgagaattcagggccgagtagtgcccaccacagaccctgagaggcacatggtcgctc

SEQ ID NO: 13627 - DNA, 120 bp, Homo sapiens
agtcgagagtttgtctagttctatccctcaatggagggcagctggctgggggtcacaggtatcacaggtgaggaagagtcaagaatagcaggcctcttcttcagtcaggcctccttccac

SEQ ID NO: 13628 - DNA, 120 bp, Homo sapiens
attcggcctctctaaaaagtaagccattccatttttcagagggaaaaacaggagcccagatggggagagcctcactccagccccaccctgcctggtgagtcagcagtcagacctgctcac

SEQ ID NO: 13629 - DNA, 120 bp, Homo sapiens
taacgacctcctcgcctcgggaaagagacctgaagcctcccttggcctgttcctatcttccttgaggcaatgactccctcacctgcccagccagcctggtggctctgggaattactggct

SEQ ID NO: 13630 - DNA, 120 bp, Homo sapiens
attcgagggggagtcaccaccaggcaaccaccccctcaaaccctgccgcgcaagcccacatagctgcctgaggacccagggctggctctctaggtctgttccttctgacagcacccagca

SEQ ID NO: 13631 - DNA, 120 bp, Homo sapiens
gtgcgcgtgctttgtgggctggagaaagctctgcagatggtagaaggaagcacccccaggccaaggtctcctagaagacaggacatgccagcatctcaccagctccaacttggtcttctg

SEQ ID NO: 13632 - DNA, 120 bp, Homo sapiens
gctcggcaccacccctggcctcatgtttcattagggcacttgtcactagctgatgccgtctgctacgctggcttattttcgagttatctgtcttgcccactataacgtaaactcctggag

SEQ ID NO: 13633 - DNA, 120 bp, Homo sapiens
ctccgtgcctggaacagtgcttggcataaagatgatcctaataaaaactggatgaaggaattaacaaacccttccatggctccctcacccaccaccccctagaataaaatccaaaccaag

SEQ ID NO: 13634 - DNA, 120 bp, Homo sapiens
atccggctggggacgttgtacgcatgagtcactctgccagaatcacccttcccagctcctcttccagcttccttgagcttgttctagacatggcacctccacaaggaaactggggctggc

SEQ ID NO: 13635 - DNA, 120 bp, Homo sapiens
acccgtgccacctgtcacatcagcctggctgccacttccctcatctgtcttccctgcagcctgagagctcgaagaccatatctgatcccttctgtgtttcccaagcttgcccaactagag

SEQ ID NO: 13636 - DNA, 120 bp, Homo sapiens
aggcggtgctcattgctgtgtcctccccacatgaccaagtggaatttctcaagagcaaggtcaaagtagtctcacagcagagtccccaacccacccaacccatcgtgtctacagtcagcc

SEQ ID NO: 13637 - DNA, 120 bp, Homo sapiens
acacgacccccaggccagacctctgcctagtccttctccacagacctcacagcctcttcaagcgattaatttaatctacgtaacacatgcctagcagagcacctactagaagcccagtgc

SEQ ID NO: 13638 - DNA, 120 bp, Homo sapiens
tcacgtcaccctcctgctcaaaacccactgccagtgcctggcgcatggaataaaatccaaactgtcatccctgccgtggcccgcgaggccaagctgctccggccccagcctggctcctcc

SEQ ID NO: 13639 - DNA, 120 bp, Homo sapiens
agccgggaaccttgctgcagcactcctgccccaggcacactgcacagcaacagtgagaacaaaccctcgtacagcgtgtgccgggttgggcactgctccaggcatactgtgggtaaattt

SEQ ID NO: 13640 - DNA, 120 bp, Homo sapiens
gctcggtgccatgtggaggagataacatttccttccgcccatgccccactatctggccccagcatgttttaagtgaggataaaagtcaagttctctgtccccaccttcacagggttgtca

SEQ ID NO: 13641 - DNA, 120 bp, Homo sapiens
agacggcccattgttcaagtcctgactcttctgtcacttaagctccatggccttcccctctctgatccccagttggctcaccagttactgggaggttaatccctccctccctaagcagaa

SEQ ID NO: 13642 - DNA, 120 bp, Homo sapiens
acacgtgcagagaaagccacggtgtgagaaggttgggcacctgagccagggccttcggacagccctctgcctgagatgcagctcactcccgtcccagaacagtccccccaccggaagccc

SEQ ID NO: 13643 - DNA, 120 bp, Homo sapiens
cagcggaaacaggcagccggacagaaagcaggttttcatgccaataatttattgaacggaggtctgtacacaggcaaaccttactgtggaaactaagacatcaggagctctctccactcc

SEQ ID NO: 13644 - DNA, 120 bp, Homo sapiens
tgccgagtaaatccagccctgccctcaggaagcccccagccctgcaggaaatctggaggacagggggcatgaccagatcttcaggtgcagtgttaggggctctgtcctgcaggctcatag

SEQ ID NO: 13645 - DNA, 120 bp, Homo sapiens
tgccggtttggagcagagctgagatccaggctccagactgtttctcctgggtccccctgcatctagccccctccccatactgttccctccactccctcagctgacgatggcttcggcacc

SEQ ID NO: 13646 - DNA, 120 bp, Homo sapiens
atccgttcctcctttacccactgccgccccccactggaccctgagcccccagggcccccggatcctcctgtagcctttggcaaaggctatggttccgccccatcctcctctgcgtcctcg

SEQ ID NO: 13647 - DNA, 120 bp, Homo sapiens
cctcggcagccacctccttctcactgggctcaggaaccttcaaggcccaggagtctggtcagggcagcacagcgggccccctacggcccccaccccctggggctgggggtccagcgacac

SEQ ID NO: 13648 - DNA, 120 bp, Homo sapiens
gggcggcggagccagagtgccctccgcccccgccccatcactggcctatggggccccagcagctcccctgtcccgtcctgccgccaccatggtcaccaatgtggtgcggcctgtcagcag

SEQ ID NO: 13649 - DNA, 120 bp, Homo sapiens
catcgcctctaagcccttccccacctctggccgggctgaggcgtctccaaatgacacagcaggtgccaggactgaaatgggcactgggtctcgggtgcctgggggctccccgctgggtgt

SEQ ID NO: 13650 - DNA, 120 bp, Homo sapiens
attcggacaagaagtcggcagcagccacctcaccagccccacacttggtggctggacccctgctgggcactgtggggaaggcgcctgccactgtcactaacctactggtgggcaccccgg

SEQ ID NO: 13651 - DNA, 120 bp, Homo sapiens
ctgcgccccctgctgtccagttcattgcccagggggcccctggtggtgggaccactgcgggctcaggagcaggtgctgggagtggccccaatgggccagtacccctgggcatcctgcaac

SEQ ID NO: 13652 - DNA, 120 bp, Homo sapiens
caacggcaaagtcctggctgccactgcacccactcctggcatccccatcctgcagtctgtaccctccgccccaccccccaaaggtgagacctgggccgggcagcactaggggaggggcca

SEQ ID NO: 13653 - DNA, 120 bp, Homo sapiens
tcccgtgcaggccccgcccccgggtggctcagcccagctgctgcctgggaaggtcctagtgcctctggccgcccctagcatgtcagtgcggggtggaggggccggccagccactgccact

SEQ ID NO: 13654 - DNA, 120 bp, Homo sapiens
gcccgcccttctcagtacctgtgcagaatggtgcccagccccccagcaaggtgagggcctgcctttctctctacctgctggatgttggcccctgtaccccatcatttctttgtctttttt

SEQ ID NO: 13655 - DNA, 120 bp, Homo sapiens
ttccgtgatgtctctgtgcatcctgactctctcaagtcctcagtgtctgtaccctcctccttctctgtgtccccacctctcactgtcatcttgcccatcctgttctcaccccaagttctg

SEQ ID NO: 13656 - DNA, 120 bp, Homo sapiens
ccccggtgcctgtgagcacacccagcggcctggtgccgcccctgagcccagccacactccctggacccacctctcagcctcagaaggtcctgttgccctcctccaccaggtaattgcagc

SEQ ID NO: 13657 - DNA, 120 bp, Homo sapiens
gggcggcctggcaggcagtgctggggacccagggtggggctgaggcagtccgggccctaacttggtctcctgcttcttcttctctgtctttcagcaggccaagccccactgctggctccc

SEQ ID NO: 13658 - DNA, 120 bp, Homo sapiens
tcccggtcaggtgggcgtgtcacctgtgcccagtccccagctgccgcctgcctgtgcagcccccggaggtcctgtcataacagcattttactctggcagccctgcacccacctcctcagc

SEQ ID NO: 13659 - DNA, 120 bp, Homo sapiens
gcccgccagcccctgccactgccaccccagccccgactagccctttccccagcgccacaggtaggtgtcagatcaacccagagcagagtgagttgggggacccaggggatgggctccagt

SEQ ID NO: 13660 - DNA, 120 bp, Homo sapiens
cagcggcccagcccgaaggccccccagaaagtgaaggcagccatcgccagcattcccgtggggtcctttgaggcaggtgcctctgggcggcctggccctgcaccccggcagcctctggag

SEQ ID NO: 13661 - DNA, 120 bp, Homo sapiens
ggccgtgtgacagccttctcaaggggtctgctgggcgggctcagatccaactctttgtttctggcctttgccccagagtctgagctcagtgttcgccatctccctgcccatctccacccc

SEQ ID NO: 13662 - DNA, 120 bp, Homo sapiens
tggcgcgtccctgggcagggcctggagaatcgtggggagcctcccactcctcccagcccggccccagctccagctgtagcccctggtggcagcagcgagagcagcagtgggcgggcagcc

SEQ ID NO: 13663 - DNA, 120 bp, Homo sapiens
agccggggacaccccggagcgcaaggaggcggctggtactggcaagaaggtgaaggtgcggcccccgcccctgaagaagacctttgactctgtggacaagtgagcatgggctggggcctt

SEQ ID NO: 13664 - DNA, 120 bp, Homo sapiens
agacggtggcaggaaggccctgccgctgctgcagccttgccatgctgcctgtgccctgcacaggtacagaagccgaggacgtgcttggggagctagagtatgacaaggtgccatactcct

SEQ ID NO: 13665 - DNA, 120 bp, Homo sapiens
ctgcggcgcaccctggaccagcgccgggccctggtcatgcagctctttcaggaccatggcttcttcccgtcaggtgagcctgtctcggagtcttggggtcactcgggtgggacttatctg

SEQ ID NO: 13666 - DNA, 120 bp, Homo sapiens
gtgcgggctccagcaggggagcaccttggccctggtcttgggccagcagacgcagaagcagggagtgcagagcccggcaaacaggtgtgtagcccaggcggctcagatgcaggtaatcat

SEQ ID NO: 13667 - DNA, 120 bp, Homo sapiens
caccgatggcattggcaacgagagtgtgaagatcttgggtgagaatgaagctgggtggggagagggtggagcccagggctcaggttgggcatcaggtctgagcctggctctgagccgccc

SEQ ID NO: 13668 - DNA, 120 bp, Homo sapiens
tcacggtgacacggtgcccgggcagggcgtgctcgtggggcggctggtgggggagcagggcaggggcagggttggggggctgggtgcatcctcctccctgacggcccccaccctgctgtc

SEQ ID NO: 13669 - DNA, 120 bp, Homo sapiens
ggccgcatcagccacgcgggctccgtgaagttgtctgtctacatgaccctgtacacgctcacccatgtggtgctgctcatctacgaggcggaagtgagtccgactggcccctggccgggc

SEQ ID NO: 13670 - DNA, 120 bp, Homo sapiens
tggcgccgcctcccccttgacctgtctgctcgcccttgcccacatcctgctcctgctggctcgctctctctcccactcttcgattttctgctttcccatctgtctaagtgattcctcctc

SEQ ID NO: 13671 - DNA, 120 bp, Homo sapiens
tcccgcagcagctttctttctcctccctctgtctctcactgtctgtcacatttgtgctcaatatcgtgactaagagttcaggagtcacacagacctggattccacaccagctctcccact

SEQ ID NO: 13672 - DNA, 120 bp, Homo sapiens
tgacgacccctgtctctgggcccattttcttcttggaaaattgggaggatcttacctaccccatggagcccctctaaggctttctatcgtctgtatggctttggccaaagggcttccctc

SEQ ID NO: 13673 - DNA, 120 bp, Homo sapiens
tagcgccagactctgacccctgccccagaccttgactgctgccttcctgtgaccccttccccaggagatctccttcttcttcctggagccctaccgctcgtcgtcctgcacctcctattc

SEQ ID NO: 13674 - DNA, 120 bp, Homo sapiens
ctgcgccagggcggagcccattgcggggatgacggggctggtgggtccctgctggtgctggtgcctaccctctgcccactctgcgaggagcatcgggactgccacgcctgcacccaggtg

SEQ ID NO: 13675 - DNA, 120 bp, Homo sapiens
tagcggggagtttctcagcataggcactggagcccaggagtaggccttcaggcctgccacctccaagtgatgtcaggcagccctcgacaccctgcttcctcttgttccctgggagggttt

SEQ ID NO: 13676 - DNA, 120 bp, Homo sapiens
agccgttaagggtccaggctctaagtccctgctctgtctcaaacagagtgaggcttcctatttctctccccccaccccaccaccatccaggagctcaacagaagtcccagaattgcactt

SEQ ID NO: 13677 - DNA, 120 bp, Homo sapiens
acccggaccacacagaaggggtgctattgcctaaaggagacagtgggtgctgggcgggccgacccatgggtgtctgtggtcgaagggaggggtccagagacgcaggcagctggggaggga

SEQ ID NO: 13678 - DNA, 120 bp, Homo sapiens
agccgcaaaggggacgcggcatgcagccggcggggccggggtcggggtgccctgaagagtccagaggagtgtcccccgctctgcagccagtgagtcaggctgggtgcagggagtgggtgg

SEQ ID NO: 13679 - DNA, 120 bp, Homo sapiens
aggcgactgacctgtgaggactgcctggccaactctagccagtgcgcctggtgccagtccacccacacctgcttcctgtttgctgcctacttggcccggtacccacacgggggctgtcga

SEQ ID NO: 13680 - DNA, 120 bp, Homo sapiens
ggacgacaggtatggtccctggggcagggctaacagaggaagattccccaccggcaaggggctggggctctgacccccacccctgccatcctgcagtgtacactcggagccacggtgccg

SEQ ID NO: 13681 - DNA, 120 bp, Homo sapiens
ctgcgatggcttcctgacctgccatgagtgtctgcagagccacgagtgtggctggtgtggcaatgaggacaaccccacactgggacggtgagcccgggcaggtgggtgggcagggtgccc

SEQ ID NO: 13682 - DNA, 120 bp, Homo sapiens
gcccggctgtgtccttcctccatgaccggtcattctaatggcctctttgcttctctgccctcttgcccatcccatggccaccttcccttttccgtactgtttttctgttgtttattttac

SEQ ID NO: 13683 - DNA, 120 bp, Homo sapiens
tcccgctcttttttctccatttttcctccttttccggctctctgcgattcgttttctttctccttgtctgtttctgtctctccgctctccctttcactgcatctctgtctatgtctctct

SEQ ID NO: 13684 - DNA, 120 bp, Homo sapiens
ctgcgacttctcctggtttctctgtctctctttccaaatttgtatttgcatccctctccttccaattggcctcctctctccctgtcattgtttctatgtatggctcctgtttctatgttg

SEQ ID NO: 13685 - DNA, 120 bp, Homo sapiens
ccccgcttcttcactctcccaccctgcaggtgcctacagggggacttctcagggcccctcggtgggggtaactgctccctgtgggtgggggagggcctggggcttcccgtggccctccct

SEQ ID NO: 13686 - DNA, 120 bp, Homo sapiens
acccgccgcatcctctccgtgcagcccacctatgactggacgtgcttcagccactctctgctgaatgtgtcccccatgccggtggaatcatcacccccactgccctgccccaccccttgt

SEQ ID NO: 13687 - DNA, 120 bp, Homo sapiens
gaccgtgccaggcaagggcccgggcaggtctccctcctctctgcgctggcagggacctttcttccaccatctcctccaccctcctccttccatctccctggctctagctgcagtcgtgct

SEQ ID NO: 13688 - DNA, 120 bp, Homo sapiens
tctcgtgccaccatctctttcctccctcgttgcctcatgagggtccctgttgtgtcctccagccatgcttctgtgtgtgccactttcccaacccctggcctctgcctctccaactcttgt

SEQ ID NO: 13689 - DNA, 120 bp, Homo sapiens
tgtcgatataattcataggttcacatccacgactcttaatgcttcttccttcaacctcccaaaccttttctgcttccctcctctctctctttctctctctacttatggaacttttggtta

SEQ ID NO: 13690 - DNA, 120 bp, Homo sapiens
cctcgagctggttttgttataaggaagtgtgggtatttgatggactctgagagcaggaagtgtttctgctctgttgctctcaggccacatgacccgtaatctcagctgttctccacactt

SEQ ID NO: 13691 - DNA, 120 bp, Homo sapiens
aggcgggacctgccggccctgccacgccttttgtcgtggaaatagccacatctgcatctccaggaaggagttacaaatgtccaagggagagccaaagaagtactcactggacccagagga

SEQ ID NO: 13692 - DNA, 120 bp, Homo sapiens
tagcgacagtcagggggccagtgtggctggagcagagtgagcagtggggagaggggcaggtggtgacattggagaggcaaagggggctcatatagggcctgggcagaggaatttggattt

SEQ ID NO: 13693 - DNA, 120 bp, Homo sapiens
gtgcggggtggtgccactggtaggctgtgaggtggggagtaggatggtgcagggacttcctgaaagtcagagagaggatggatggggagaggaggcagctggaagacaggaacagggaga

SEQ ID NO: 13694 - DNA, 120 bp, Homo sapiens
tggcgggttcttctgttcactctgtactggccaagttcctactgcatgctagacactgggctggagcagtgaccaagacaggggaggcctctgccctcccggggacggacattttaaagg

SEQ ID NO: 13695 - DNA, 120 bp, Homo sapiens
gtgcgcccagtaggccagagggcacctgatgcctggctattgtggctgggatgctggtttgggcagccccgggatctctttctcatgactctagggtcacggctgggacacagggaggag

SEQ ID NO: 13696 - DNA, 120 bp, Homo sapiens
gtgcggggaggcccagagagggccagaatgactatagggtcacatggctccagatccctccctgaggggtctcaaactcaagtgacttcaggggccagacaggtaacaaagagtgaatac

SEQ ID NO: 13697 - DNA, 120 bp, Homo sapiens
gtccgataatgctgaccactggttactttaccatactataggccaggccaggggccaccaggtgccttcattgtgggcccagaggggcacggggcagggggctcacctggaagcccaggc

SEQ ID NO: 13698 - DNA, 120 bp, Homo sapiens
cagcggccatagaagcatcccttatgcagcgtgacatactcccggaggaagtcggcggtgagcccctcgtcgccctcaaagaagagtacccccggccgattggtaaccagcaggcgctgg

SEQ ID NO: 13699 - DNA, 120 bp, Homo sapiens
gggcgtagtagaccagagcgcggagctgggtgagggcagccaggtaggcctccagctcggccaggttgtggctggtgcggaagaagatgctgcggcggttggaggccacatagcgggatt

SEQ ID NO: 13700 - DNA, 120 bp, Homo sapiens
gtgcgccaggcagcagcgggctgtgtgcactaggctgcggtacccgttggccggtgtctctgggtccaggtcaaagaggtgcgccacacccagcaggcggcccagggccggctccagccc

SEQ ID NO: 13701 - DNA, 120 bp, Homo sapiens
cagcgcctgctcccgtacaccggcaaaaacgcctgacagccgctgggccgtttccccaggaccctggctcgagaagaaggctatgttgtcctccgccagagtcaccagcgactgtgtcat

SEQ ID NO: 13702 - DNA, 120 bp, Homo sapiens
gtgcgcaggtccatgttgtggatgagccttgaggctgtgggcaggtggggaggcctgttaggtggggctggatcaagccttgcttagctggggcccaggagtctgggccatagcttaccc

SEQ ID NO: 13703 - DNA, 120 bp, Homo sapiens
cctcgggagccaggagtttgggccctcagctccctcctccctcagacccaggagtccaagccccaagcccttcctcttcaggacccaggagcccctgctatcacctctttgggactcaga

SEQ ID NO: 13704 - DNA, 120 bp, Homo sapiens
atccggacattccctgagcccacacgactctgcttccctaactcattcacctctcctgtgatccaggaggctgccggtccttctttcttccttccaggaacccaagagtctagtcacctg

SEQ ID NO: 13705 - DNA, 120 bp, Homo sapiens
gtccgggtcccccatcccatctttccttcttaggccccaagtgctacccataggcccttcccctccaacaacatttgggagagttcagccccagccctcccattcccatctctcgggacc

SEQ ID NO: 13706 - DNA, 120 bp, Homo sapiens
aagcgcagctctccctgaactcaggagttcacaattctagacttcactgaagagtcattcctcatccttcaagtctggctgtggaaccccctccaaatcccagttccctccctgtttctc

SEQ ID NO: 13707 - DNA, 120 bp, Homo sapiens
ggccggccctgctcccctgcctggaacagcgatactcatcactggtgtcgaccttgagcatatccgtgcaggtcccgtgctgagagctttctgtgtgtttgctgctttagcgtgctaacc

SEQ ID NO: 13708 - DNA, 120 bp, Homo sapiens
ccccgctaggactctggaagccacatctcaaaacttgccctggactacgtctgatctccacactttccagtccccagtgatctttcctctgatatcctttcccagccattcaggctgccc

SEQ ID NO: 13709 - DNA, 120 bp, Homo sapiens
ttacgtgtttgttcatctcccccaggacaggactaggttttatggagccatgaaacttataaggtaccggggtgtggccctttaggaagaagaaatacagaattacaaatacaagattag

SEQ ID NO: 13710 - DNA, 120 bp, Homo sapiens
gagcgagactctgtcttaaaacaaaacaaaaaagattagggccttgaaaggggcctgtgtgactgaggggctctgaggcctcagggtcatttgcttggctggaagtgaatcttctgtccc

SEQ ID NO: 13711 - DNA, 120 bp, Homo sapiens
tcccggactgtcatcccccaggtggccctggggcctatcatgggacctggcacatagcaggtgctcagtggatatatgaagcaggaaggaaggcatgaagaagcagagcgagggcagagg

SEQ ID NO: 13712 - DNA, 120 bp, Homo sapiens
ggacggcccctccccagggctggcagacagatggatagacagaggcctcaggaggcagtgttaggcttgcagctgtgaaaatgggacgatgtgggctaggcacagtggctcatgcctata

SEQ ID NO: 13713 - DNA, 120 bp, Homo sapiens
ggccgcaggtgttgattcagcttcttgttgagctggaggtggctctcctggcccaggccctggctgggctacatgtctttgtctcaatgctggctcctgttgagttatagattcttttcc

SEQ ID NO: 13714 - DNA, 120 bp, Homo sapiens
gtgcgggcttctgtggggcaagaaattcctcttgtgaagcagatttttgttgggctctaggttccttctgggattcagcatcatgttgtgcaggggtctcctgctgggtgaggggtcttt

SEQ ID NO: 13715 - DNA, 120 bp, Homo sapiens
cttcgattctggctgggctatgggtgtcttttctggcccaggctctagcggggttataggcctctggtgtggttcaggttgccagtctgacctagacactgacttagaacctggctccat

SEQ ID NO: 13716 - DNA, 120 bp, Homo sapiens
tcacgggagatattgatcttccaggttctatccttctgggctcccacccagccctctctcttcacagatctctcattgattcctcatgatggcacttcctcttgggtttcactccatcct

SEQ ID NO: 13717 - DNA, 120 bp, Homo sapiens
ggccgatcacagctggcccccactaagtaatgaactctgtgcctctttctttggtgggaggattaggaataggaggaggctatgtgcctagcactctcttacaagaagggaggggcttgc

SEQ ID NO: 13718 - DNA, 120 bp, Homo sapiens
aggcgtgagttaccgtgcctggcctgcaggtttgttatacaggtaaacttgtgactcaggggtttcgtatacagactattttgtcactcgggtacttagtacccaacagttttttttttt

SEQ ID NO: 13719 - DNA, 120 bp, Homo sapiens
tctcgggcctgccatgctctgccatggaggtggagtgacatgaagtttagctgcttcacctcagtctgctcaagagtggggactgctgagagcagtgaatgggggacagtggaattgcag

SEQ ID NO: 13720 - DNA, 120 bp, Homo sapiens
aaacggggatcctgttacctgcagctgtagtcttcacgtgtcctcatcttttgtgactcccctagggccctgagctgagcaagacagacaaacaggaggaagtattaatctttctgcttc

SEQ ID NO: 13721 - DNA, 120 bp, Homo sapiens
cctcgggtgaggacatcagagagttttatgcagctcagttttggggatgttcacacactctggcctcaggaagatccagaagtgagggaaaggctctgggctgggagtgaggaggccttg

SEQ ID NO: 13722 - DNA, 120 bp, Homo sapiens
taccgacgttctttgttaccatgagaaagtcactcgctcactctggacgggagttttcttatctgtaagctgttggatttgagtgagatcatcttttgtgttctcaagttctgattctgt

SEQ ID NO: 13723 - DNA, 120 bp, Homo sapiens
ccccgaatgctgctttttctgtcacatgtgcctccctcccccaaaaggaacaagtagtgagttttatttgcatctcttcttgaatagctctgtgtttctaagggctgaagaggcccactg

SEQ ID NO: 13724 - DNA, 120 bp, Homo sapiens
ttacggtttggttagtattgtccggggagctcctgtaacacatgtgagattctgtgttctgtgataatgtcttgtatgtcactgctacttaagagtttaaggtgaagctttgtgagtgta

SEQ ID NO: 13725 - DNA, 120 bp, Homo sapiens
atgcgtgtgggtcagaatgtggatcagtggctgctgatgtgctgatgctgagaggaagtgatttaggagctgggcttgctctctttatgtttctgctttttgtgcaatgtcctggtaact

SEQ ID NO: 13726 - DNA, 120 bp, Homo sapiens
cttcgccgcctccaccacccctggggtcgagccctttcctctgtccctggtggctctggggccgtcgtgcctcccccacctcaaggcccagccttgacactgtcctgcgagccgccccct

SEQ ID NO: 13727 - DNA, 120 bp, Homo sapiens
agacgctctatgctgcttgttcatttaaccgtcttgccctcgtcggtctctttctgttccaccagcaccgaagccgaggagcgtggggatggtgcgatcctgagcacttccctatctcca

SEQ ID NO: 13728 - DNA, 120 bp, Homo sapiens
cagcgcccagttcagggtctggcaaacagtggggcagacgtccagggcagccacagatgcacacactgctggcctcgccctccacaggaagtttgcgggcttctggcccagacagctgtt

SEQ ID NO: 13729 - DNA, 120 bp, Homo sapiens
ggacgagaggggcagaggcgtcccaccgagtccctgacctgcttcagtgccgtaaagggtgggggaacagggccaggaggcgaaggccacagcgtccttccaacgttggcccttgctgga

SEQ ID NO: 13730 - DNA, 120 bp, Homo sapiens
ccacgtcatctctatgaaatgtcctacagaggcagcaagagcatgtgtgggtgccaggagccggggaatgaaggctgacacgaacaggtttcctactggggtcatgagaaattctggaat

SEQ ID NO: 13731 - DNA, 120 bp, Homo sapiens
gcacgatattatgaatgtacgaaatgctactgaactgtgaaaaatgcaacatgcaaaatgatgaataacgttatgtgaagtccacctcagtttctttaaatgatcaacacgcaaacactt

SEQ ID NO: 13732 - DNA, 120 bp, Homo sapiens
ctccgaggacaccgggcgctggcctggaacccgcagccaaggcgggacggggctttgaacccagaaccccgtcagcgaccctccccgctgcgccccccacccccgcccgccgcccaagtt

SEQ ID NO: 13733 - DNA, 120 bp, Homo sapiens
gttcgcagaaggaccgagctggagaagcttagaaattccacatcccttctttcccctatttcctagtggggaaactgaggccccgggaggcgcggccagggaaaagagaaccccagaccc

SEQ ID NO: 13734 - DNA, 120 bp, Homo sapiens
ctccgttgttgcagctagaaggtaccttagggtcacccctatttcttagtggggaaactgaggcgcggggaggggaaggggcgcggccgagggctcacagacgaagctcaaacccaggag

SEQ ID NO: 13735 - DNA, 120 bp, Homo sapiens
tgccggctcgggggtggggggggggggcggggctaggagcggagccgggcccctgctctgcggcctgtcccggcctcagtttctccggctgtaactcaggggagcgggctggagggtcgc

SEQ ID NO: 13736 - DNA, 120 bp, Homo sapiens
tcgcggcccttcttccctcacttctggggagcccagtcccgcaccagctcatctgagctctgggcctcagcctcccaggccggtcgctccatccccagcctcaacctctccgagaccggc

SEQ ID NO: 13737 - DNA, 120 bp, Homo sapiens
ggccgcaccttccctggcctcaagggtcggttccttctgcaccagaaaacggggtgtcactgtcaccccgggacccagcctcctggcccgacttggctggagctcccctgcacctgcccc

SEQ ID NO: 13738 - DNA, 120 bp, Homo sapiens
ccccgccccaagcagggctgattgccgggaacaaagggaggggccgggacgcgctggcaggtggggagggagggaggggcgaggctgcccggagcccgatcgataattcaggggatgaga

SEQ ID NO: 13739 - DNA, 120 bp, Homo sapiens
agccggcgccgcccgcggggccggggaggtgggggaggggagcgaggcgcgcggtcgcgatcggccgtctctgccgcggcgcgtgtcggactcagcccctgcgcgtccgcgggaggagca

SEQ ID NO: 13740 - DNA, 120 bp, Homo sapiens
gatcgtgggcgcgattggtcgggctggagccgcggctggacctgcgcgcggtgtgtgtgttgtgcgcagggtgtacgctgtgtctgggtgcgtgtccaggcatatgcaggggatccaggc

SEQ ID NO: 13741 - DNA, 120 bp, Homo sapiens
tggcggccctaggctgagggctgtgggctgaggagagagcagccccaccaccccctctctgcgccctgcatgcctcccaggctgcatccctcagggaggtcccggggcagtgtcgcaccc

SEQ ID NO: 13742 - DNA, 120 bp, Homo sapiens
ctccgggattagggtctttctggatgggaggtttgtaaggtggtccaggtgccatccctccctggcacacagagggctcagtcacacggcacccccggtgtgtttccttcctgtcccttg

SEQ ID NO: 13743 - DNA, 120 bp, Homo sapiens
caacgctgttcctcccaagagaagaccctcaaatgtcaatggtgtcaagatggggaaatgctgccttagtggatgggcacttattaatcgcctactgcatacagggtgagatcggcaggg

SEQ ID NO: 13744 - DNA, 120 bp, Homo sapiens
gggcgtccttggcatacagcagattactcatgcagaacggctctgctgccagctctgtgctcacaggcgccaccccacgagctgttccatgcctatcaccatggacagaggcggaggtca

SEQ ID NO: 13745 - DNA, 120 bp, Homo sapiens
ggccgccatcatacgagcaccccagccccgcccctcgacgggcaccgaggctattcccacttcacctcctttacaatttcctgcagtgaacttcccaggcagacctcctgcgcccatgaa

SEQ ID NO: 13746 - DNA, 120 bp, Homo sapiens
aaacgggcatatgtcagcctgactccacagggtcactctgaagacaagggcatctggccccttatcattcaaacatcctcttccagccttccctcactccagcaaatggcacctccagac

SEQ ID NO: 13747 - DNA, 120 bp, Homo sapiens
ggccgcttcctggatccaaagcccactcagcagctgactgctgctctccacctcacagccacggcccagtccagggccccatccccccccaacacccacccccacctcctcagggatccc

SEQ ID NO: 13748 - DNA, 120 bp, Homo sapiens
ggacgcctctcccagccccaaaaggccactctatgtcagccagagccagctcttcagacatgaccatgggaagccctacagacgcccatcctggctgccactgcgtctagcacaggctcc

SEQ ID NO: 13749 - DNA, 120 bp, Homo sapiens
ccccgacagacctccacctgcctgagttccctcaccactcccccaggcatgcaggctcaccctcgttccagtgacacggagctatgagatcatggtgggctgaaatcaacagaccagggg

SEQ ID NO: 13750 - DNA, 120 bp, Homo sapiens
ggacgctgggcagtgtccaaggacacctgtggtcgtcacgactgggggagctcctggcatggggtgagtgggggcagggatgccgctaggcaccctgcagtggccgggaccaccccacct

SEQ ID NO: 13751 - DNA, 120 bp, Homo sapiens
caacgttccatcccatgaagatgccatgatttactcagagcttctaggctgcttctagctcggaacaaccgcaaataatgctgtgaacacatgtctctcttgttttatttatttttttct

SEQ ID NO: 13752 - DNA, 120 bp, Homo sapiens
ggacgtaccccataccccttcagaattttcgaaggaccaaagaaaaagtctccctcctcctcgagaaacagcaaaaaagccccgcgccctctcacccggcgtgactgtgcaggtacgcgt

SEQ ID NO: 13753 - DNA, 120 bp, Homo sapiens
tggcgagcaaggcaggtgatggggacgccgctgagccgggggtgggcggggacggccgccagcagcacagaggacactggcccggcgcggatgccttcggggagaccctggaactgcagg

SEQ ID NO: 13754 - DNA, 120 bp, Homo sapiens
ccccgccgggccacgagcagcggaagcggaggctgcggtccccgggacccccttcaactgagcactgtggggccccggggggcaggtctgcggagagaagggagagaatgaagatggagt

SEQ ID NO: 13755 - DNA, 120 bp, Homo sapiens
ccccgcctccccgcgcggtgactccacccttcttcactagccccaccccataggcgctcacactccccacttttcctgcgatcccgttcccttttcccattaacttcctcgctaagtggg

SEQ ID NO: 13756 - DNA, 120 bp, Homo sapiens
gcccgcagccctgctgactgcccaactttcttaagaaaactgcatcttcacacaatgatatttctcttcccaaacgtaactcagccccttcctttccagctccacccacttctgccaggt

SEQ ID NO: 13757 - DNA, 120 bp, Homo sapiens
cttcgccccctcctggattgcactccgagaagcctccccttttcccagatatctccgcccttccttgtggaccccttcccctttctaagacaattctgcccgctttctaaatgacctcgc

SEQ ID NO: 13758 - DNA, 120 bp, Homo sapiens
ctccgccccccttgccaggtaacttctccctttgctgatcccacttaagcaaattagttctttccttttctaactcccactctttgccatttaactccgcttgtcgactttgtcgagtgt

SEQ ID NO: 13759 - DNA, 120 bp, Homo sapiens
gtccgccctctcagtgctgggccggcccgtcagtcctggtcatccctgccactctatttggctccttcccttatcctctttctggccccgcctcttatcctaggtgtctccgcccctccg

SEQ ID NO: 13760 - DNA, 120 bp, Homo sapiens
ccgcgctggcccgccccaccacgggtatcccagctccttcttggtgacccgccctcccgctggccctgccccacccaccggtatgctgctcctccttgctggccccgcccctttcctcta

SEQ ID NO: 13761 - DNA, 120 bp, Homo sapiens
ccccgccctcgttctggccccgcccctctcccaggcattcccctactcccgctccagcctctcacccgccactgtaaggttgagcagcgagcggcggcggcggccggtacgcgggttcgc

SEQ ID NO: 13762 - DNA, 120 bp, Homo sapiens
cgccgccaggcaggcgtaggtgcctgcgtggcccggtccgaccgcgggcagcaggaggcgcgaccccgcgggcaccgcggcctcggccgggtccgccaggctccacgtgatgtcggcggg

SEQ ID NO: 13763 - DNA, 120 bp, Homo sapiens
gggcggccgcgaggcggcggcgcagcgcaaggtcacgttactgcccgcggtgacaaagcgggcaggcgcggcgtcgcggtccgaggagaccgtgatggtcggcgggtccgggccgtctgg

SEQ ID NO: 13764 - DNA, 120 bp, Homo sapiens
ggtcgggaccgcgagtgtcagggtcacctgggacgccgctaggactcccggagactgggtccccagcccgcttctccccaaggaccccctgtccccgacccgaggcatcccccactcaca

SEQ ID NO: 13765 - DNA, 120 bp, Homo sapiens
agacgctgacgtcggcggcagcctccctgtggccgaaggggctgcggacgcggcaagtgtaccgggcgtggtcgctgcgcacagggcgcacgatgagcagctggtcgccctctgagcgca

SEQ ID NO: 13766 - DNA, 120 bp, Homo sapiens
atccggggcgtctcggctccctccgattccgccgcctccagggcgcgtccgtcccggctccagctcagctccccgcgacctggcccccaccccaggcagcgcagccggagctcggccgcc

SEQ ID NO: 13767 - DNA, 120 bp, Homo sapiens
aaccgacagctggggtaggggctctgggagagggagaatgggctcaggacccacccagtcctggagcccatctttggtccccttagagggaaccccagccgctgctccctctaagcccct

SEQ ID NO: 13768 - DNA, 120 bp, Homo sapiens
ctccgggacccaggagttcgccagaagaggctcctagcctcctcctcctccctcagacctgggagttcaggctcccaggagtctccatcccaggtccacctttgctcagacacccctgcc

SEQ ID NO: 13769 - DNA, 120 bp, Homo sapiens
caccgctcgctggtgtacaccgccatggccaccaccatggagatggctggggacaaggacaagagagatggctcagctcctcggcaggaattcgctggctcgcgatgccccagtccagtc

SEQ ID NO: 13770 - DNA, 120 bp, Homo sapiens
ctgcggtggttgagacaagcgggccgtggcctggggggaacagtgaggggaagcaggacaggaccaggaagctcacggacaccagggcccacagaacagccataatgctgaaggtctgcg

SEQ ID NO: 13771 - DNA, 120 bp, Homo sapiens
tcacgtggatgtagcctgatcgggagaagaccactgagcacccatccccgctggcaacccctctgtaggacacccattccccttacctgatatgatgtccccatgccctgttggccagag

SEQ ID NO: 13772 - DNA, 120 bp, Homo sapiens
gcccgagtgagctgagtgggtgggacccacagcctcaaaccagaaatcggtgctcaaagcaatcaggcagaacatcaggcccagggagccccccagcagggccagggaccggcagagctc

SEQ ID NO: 13773 - DNA, 120 bp, Homo sapiens
ctgcgctttgtcacatgaggctggtttggtttcacacagttcccggtagcttttcacataccctcccttcctggattgcacaggcaacgtcctccctcccctccctggggtccagttccc

SEQ ID NO: 13774 - DNA, 120 bp, Homo sapiens
ccccgcttagtgtgtgatgggggagggcactgagggtgtcagatcatcagtggtttgggcggtggtttagtacttgcctctgtcacagattctacaactcccacccatggaaccttcaac

SEQ ID NO: 13775 - DNA, 120 bp, Homo sapiens
agtcggggcttcctggaagaggtgagagagagaggcttgggggccctgaggtgggaggaagccaatcaggctagggtgtacattaagggggagggcagatgtggctggaggggacagctg

SEQ ID NO: 13776 - DNA, 120 bp, Homo sapiens
aggcgggcaggagctcagaatcctgggccccagtttggagcatatgccaagggcaggcaaacagcagagaatcacaattctgaaaggtttgcagagagtcagacatacccacatcctcat

SEQ ID NO: 13777 - DNA, 120 bp, Homo sapiens
gatcggggggcctagggggtgttgggggacataaggattttggtttagggttctccagccccccaaacgctagcctcttccatccacaccatcaggtcctggcaacacctcatctacgag

SEQ ID NO: 13778 - DNA, 120 bp, Homo sapiens
cttcggtgaaattctgagatgtgtaaagaactttccaggacattgactgagctgactcacatgggtgggggcgcctctcaaggggaagtgatttgtgctcagaacaagctgcaccagaca

SEQ ID NO: 13779 - DNA, 120 bp, Homo sapiens
gggcgccactttgagctagtagccatagctggggtaaagtcattccaacaaggatcattgttgcctattccattcattaattccacatttcctggaccccatttatttcttctttgttca

SEQ ID NO: 13780 - DNA, 120 bp, Homo sapiens
agccgaaggcatgcagaagggacagggcttgtgtccttcctgttcccctgctcagccagtcctccaggatatcaagtgtcctcagctccagctgtcctgtccccaccacaccctcaggaa

SEQ ID NO: 13781 - DNA, 120 bp, Homo sapiens
gaacgccaaggaatgggtggtcctggggctcagagaagtgggggcagctgacatccaggaaatgataagggggtgtctcctgcttataggcccagcgcacagatcaggtcaggtttcaga

SEQ ID NO: 13782 - DNA, 120 bp, Homo sapiens
ccccggcatgctttatgcccaactccctcccaggacagggaccccatcccagccctaccctgccctgcagcccctttgactttcccctgtggtcagtcctggagctggtttcttaccagt

SEQ ID NO: 13783 - DNA, 120 bp, Homo sapiens
agacgtatgtccctgcatcactctctctggtgtctctgatgctcagggtacaatccttgttctgtgggtccccaaggaggtggaatcggtcccgagtctcctcctgcactgctcgagctg

SEQ ID NO: 13784 - DNA, 120 bp, Homo sapiens
ttccggcttacatggtcccctgcccggaaccagtagccatgaactggatcggaggcagtccagccattttgggggtaggagaaggagcaaagcacagagacacacaggccctcctgcacc

SEQ ID NO: 13785 - DNA, 120 bp, Homo sapiens
caccgtcacggacttctgcattgtcagcaggtaatccttctgttccttagcccccactctcccacagagcaggggtggcagcagtagcagcagcagtagcatgtgtcgggttggaggtgc

SEQ ID NO: 13786 - DNA, 120 bp, Homo sapiens
tggcgggaaccaagagagggaagcagagcaccaaagtcacacgtgccctccgggaattttaaatgtggggaacttgaatttggggtttcctagacctgaggatgagagtcagactatgca

SEQ ID NO: 13787 - DNA, 120 bp, Homo sapiens
tggcgtgaaccaccatgcctggcctaagatgtactctttagaataaaccaataaatgaaagcaaagtgatttattgtgttctgcatgccattctagcaaattacaaagctgatgaggggg

SEQ ID NO: 13788 - DNA, 120 bp, Homo sapiens
gtgcgatctgatgctatctccagttagacagcatcagaactgaatttcattgtaggatagacagtggtgtctccagagaattggagacttgctctgtttggaaaaaagcccacacatatg

SEQ ID NO: 13789 - DNA, 120 bp, Homo sapiens
catcgtctgtgatcgcagagatattcttcaactcctggaccggagaacccaactcacgcaagatcttagtcacttgtagacctcgtctcagttatgtagggcctcagaacagaacaggct

SEQ ID NO: 13790 - DNA, 120 bp, Homo sapiens
cctcgccctgtccctacctgttctgcctctatccaggaagaaaggtcccccgtgggaccattagtcactctccccctcatgaaagcatttcctcccactctcacactcatgagctcattc

SEQ ID NO: 13791 - DNA, 120 bp, Homo sapiens
cctcgtggtgatgaagaaatgaggggagagtttcacagtctgtcctgccatcagagcagctggctttggatcccacactccctcggtgcttgctttggtaggtgtctttacctctctgat

SEQ ID NO: 13792 - DNA, 120 bp, Homo sapiens
gatcgtcactttccaaagtggtgaaaagaggatattagccatgcttttcttttaggatctggaggatcaaatgaggtcccaacatgtaaatgcttgttgtgagatctattatgtgtgtta

SEQ ID NO: 13793 - DNA, 120 bp, Homo sapiens
tgacgtgcacgtcactggattcaaggctaaccctccgtttagggtgatattatctggacacacttaactacgtctgcaaagactgttttgatgtgcacgtcactggattcaaggctaacc

SEQ ID NO: 13794 - DNA, 120 bp, Homo sapiens
ttgcgctcagccaattttattttcatttagtagatttgaggtttcattatgtttgtgcaactggtctcaaaatcctgacctcaagcgatctacccacctcggcctttcaaagtgctggaa

SEQ ID NO: 13795 - DNA, 120 bp, Homo sapiens
tctcgaaatgtgtctagttacttttctctccctgctactttctcggcttcttcttccactcttactgtctctgaaaatctctaaccatcctctactttgccatctgtttattggtttgcc

SEQ ID NO: 13796 - DNA, 120 bp, Homo sapiens
tcacgagtacattaggaattatacaatgctacctattaaaatacgtttccagacctatttaaagaaattataagactgtactaaagtgatgatgtcaataaaatagaggactagaactcc

SEQ ID NO: 13797 - DNA, 120 bp, Homo sapiens
ccacggagacacaaatgtagtagcaatatatgaaccaattgctttgtgagaaacccagtggtcatttaagaggttggaactcttaacagaagtctagtaggaaaatacaggacatctgct

SEQ ID NO: 13798 - DNA, 120 bp, Homo sapiens
gctcgggggttttgggtcgggggcaagggggtccctggctctgcctgagggtcagggaaggctttccagggaagggaccaggaaacagggtgttgaaggcggccacaggctttattttgt

SEQ ID NO: 13799 - DNA, 120 bp, Homo sapiens
ctgcggagggggcaggaattgggccaggccctgtggttgtttacaaccctggaggggctttgaaggcagctggccctgctgggcctcatccgcgtctgtgtcctcgttctgcacgtagct

SEQ ID NO: 13800 - DNA, 120 bp, Homo sapiens
ccccgcccccatgaggactttccaagcctgtggccccccaggtgggagctctttggcaccggtggttctgaggctccaagtcccctgatccgaagccatccccgagagggggtctcccag

SEQ ID NO: 13801 - DNA, 120 bp, Homo sapiens
aagcgggggtctcccagagtgaagccctcagccccgtccaggccctcggcccccagcatcttcccaccctggctgggcccagccttcgccctggatggggttttctgcccctgcccaccg

SEQ ID NO: 13802 - DNA, 120 bp, Homo sapiens
tggcgtctctcactgagtgcgacttcctcaaggtgcatccgcgccgtgggctgcgtccgagcctcgctcctgttcacggctgagtcgtgtcccattgcgtggatgggccatgctgtgtct

SEQ ID NO: 13803 - DNA, 120 bp, Homo sapiens
ggacgactctgacctcttggccacagaggactcacttgcccacaccgagggcgaccccgtcacagcctcaagtcactcccaagccccctccttgtctgtgcatccgggggcagctctgga

SEQ ID NO: 13804 - DNA, 120 bp, Homo sapiens
tggcgccatcgccgggactccagaaccgcagaagcctccccagctcacccctggaggacggccggctctctatagcaccagggctcacgtgggaacccccctcccacccaccgccacaat

SEQ ID NO: 13805 - DNA, 120 bp, Homo sapiens
gatcgcccccacctccaccctcaccctctcctggctcctgtctgtgcctgacggggttgggttttccgagagcaggtgcaccctgggctctggtggtcacagcaggggtgcgtccagtac

SEQ ID NO: 13806 - DNA, 120 bp, Homo sapiens
atgcgaggacgggtctgctgagaccgcagtgggtgttgggtggctcggggcatgggctggacagggcctgaggctgtcagccggactgggaacttggaaggtggctggggccgaccccgt

SEQ ID NO: 13807 - DNA, 120 bp, Homo sapiens
tctcggcatgttttgggcctgacaaaggctgaggctttctgctgcctgccctgcagctgcctgcacccacccacctgggcgggctgcttgggcaaggttcaggggtggtcctggctgctc

SEQ ID NO: 13808 - DNA, 120 bp, Homo sapiens
gcccgcccagcacacggaacagatgtggttgcagggctggagagcttgggggaccaggagcttagagcgtggaggttgcaagttgcaggaccagtaactgggtctggagggaggtttgca

SEQ ID NO: 13809 - DNA, 120 bp, Homo sapiens
cagcggctgtgtcagccctgcaggccgagtgtggcactgggccttctgctggtctgagcgggggtctcagggtggaggtcagcaaaagaggcttagtgggggcttagggagcctgggtgg

SEQ ID NO: 13810 - DNA, 120 bp, Homo sapiens
ttccgtgttgggcaaatccagcgttttcatgccacggaagccaagaaagggctcacggcctccggcctcacagggctacgcaaagggggagttgaataaacacggtgacgggccccgggc

SEQ ID NO: 13811 - DNA, 120 bp, Homo sapiens
gggcggcagctgctcccggcactgatcctgctgggccagcggtggacttgcagggcccacatccggagctgcccactggtcctcgtgctgcacagccttggaggatctgaggctggctca

SEQ ID NO: 13812 - DNA, 120 bp, Homo sapiens
tgccggctgccaccaggcggcgctgcacgcccacgctgagtggggcaggccctggagcccctctgcccgggcagcctgacggcccctcctcctcggctgagaccgcagagtcccaggcat

SEQ ID NO: 13813 - DNA, 120 bp, Homo sapiens
ccacgtctgcgtgcagacattgattaggcgcctgtggtatacctggagctggagggtgtgcgtggacaacaggcagaaaggtccagtgggatggaggctgccaacaggacgatggggaag

SEQ ID NO: 13814 - DNA, 120 bp, Homo sapiens
gggcgcgttggggacatcgccgggcacgcggcccaggtgggcccctggctcaggtctccccccacctccctgcctgggctctgtccatctttctgccgcaccctcagccccaggtgtggg

SEQ ID NO: 13815 - DNA, 120 bp, Homo sapiens
caccgtgcttgtggacgcctcatgctctgtaccgggtgggaggtgtgggagttacaggtcagggcagccttgggagacgggcaggtttcctggggtgcttaccggcagatggggcgcctg

SEQ ID NO: 13816 - DNA, 120 bp, Homo sapiens
gtccgtgcagggtcgtccgcccgagaaagcagcccctcacccctgggcactaacttcatcttttttctttgcacacagaaacgtaaacctgattcacaaaagtataaccactcagcatgt

SEQ ID NO: 13817 - DNA, 120 bp, Homo sapiens
gcacgtcccactctaggggctcagggcagggacagtgactcatccaaggtcccgccgtggagggcagagctgaaggagtgagaaggagctgctgacatggaactggcccgtgcggaaaga

SEQ ID NO: 13818 - DNA, 120 bp, Homo sapiens
catcgcagacgctgcagacacggaggcctggggcaggggccctcagggctgtgctcctgcagagatggagcttgcgtgtgtggctgagactgggatgccaccccctttcctaagcctctg

SEQ ID NO: 13819 - DNA, 120 bp, Homo sapiens
aggcgggctcagtgcctgccctggcctgattttgtcttcctggtcttaaactgcttttcactccaaaggccccaaaattgtataagctttcagggcgtgcgacctggacctgtcctgact

SEQ ID NO: 13820 - DNA, 120 bp, Homo sapiens
gtccgaggttggtaaatccggtaaacaatgccgagagaggctgcagggggcggggagatggggaagaccctggggagggaatggcagggcctggggaggttcagcgaggaggggtctggg

SEQ ID NO: 13821 - DNA, 120 bp, Homo sapiens
gttcggggtccagtgacccaggcacacaaaggccagactcgggcggaggagtacaagctgctggagggacccgggctttcttccaaaggcactgggagctgtgagtggttttaggccaca

SEQ ID NO: 13822 - DNA, 120 bp, Homo sapiens
gaccgatgtgactgactgaggggccaggccctggggctccatgctccctacacaagccaggtgcggtcccacctcaggaccctcgcacaggctatgccgcctgcccagagcttcctgcag

SEQ ID NO: 13823 - DNA, 120 bp, Homo sapiens
tcccgggccgcaccccctccttcaggccttctcccagcacctggccccctccccaccctgagtgtttggacaatgctcaccaccttctgctggacagtatcttacttgctactcataagg

SEQ ID NO: 13824 - DNA, 120 bp, Homo sapiens
gagcgcgtcaagtcggcgggggcctggatcatccacccgtacagcgacttcaggtaccgcctccgggagggccggtcggcgcgagggggcccggggagccgggcgcgcggggagccgtcc

SEQ ID NO: 13825 - DNA, 120 bp, Homo sapiens
gagcgcctggggagggcggggcggcgcgccgggccggtgacctcggggctcctcggtgacctcgggcgtgtccgggacccgccccggagtgaccccggcgcgcgaggctccgcctctggg

SEQ ID NO: 13826 - DNA, 120 bp, Homo sapiens
ccccgggtgaccgcggagcgcccccctcccacgcaccccgacatcctccgccctgcggcgcggcgggtggggtgggccgcagggccagggtctgagcgcagaggggcagagaggacgaat

SEQ ID NO: 13827 - DNA, 120 bp, Homo sapiens
gaacgtgggccccagagaggcggcggagcgggagggaggaggaacgaagggcgcccgggaaggacgcgccccagggaggccgggggagagggggttaagcggctcccacggcgtccaccc

SEQ ID NO: 13828 - DNA, 120 bp, Homo sapiens
acccgcgccccgcctgcgaggaggcgcgcccggggccgcgggcctggaaagcgtgcgggtccccaggctgtgtccccgggagccgctccacccgagccgcgggcggtgcgcgcatgcggc

SEQ ID NO: 13829 - DNA, 120 bp, Homo sapiens
cggcggtgggtgtgtagacgccgctgtggatccagccggctaatgcgtggaaggctcggagcagggccggcgcggggccaccgccactgatgtttgcggtcgtggttcctgggctgtgcg

SEQ ID NO: 13830 - DNA, 120 bp, Homo sapiens
ggccggagagcgagaccggcgcgtgtccccgtgggctgtgtgtgaacaggggcccgtgaccgcggcggggttcccggggcgcgagcctgtggccggagaggtgtgtctccaggagtgtgt

SEQ ID NO: 13831 - DNA, 120 bp, Homo sapiens
ttgcgtggtggtcgcgggcgtgtgcgcctccggtgggtttattttggtgggacgtgtggtttgtgtgtgttgggaccaggtggcgggcgtgcgcgtgtacgcccggggccggtgtgcacc

SEQ ID NO: 13832 - DNA, 120 bp, Homo sapiens
caccggtgggcagtagtgtgagccgcaggcaggtctcacacacgcgaccatggagggatgcgtgtgtgtttgtgtatccacgagtggggtgtgaggtggggtgtggagggtgcaggtgga

SEQ ID NO: 13833 - DNA, 120 bp, Homo sapiens
gcccgccgggctagcgaggccgggcgcgcgggacgggcgcggtttcagcaccacggacagcgcgccggacctgggaagcctgcggttttcccgcctgtctctcctcctccaggcctgggc

SEQ ID NO: 13834 - DNA, 120 bp, Homo sapiens
gggcgccccaggacagcccccacggaccctggacccccggaactgggcagggaggctgtggggttctctcttcccctggattctctgcacccctagtgcttgactggagaaactgaggcc

SEQ ID NO: 13835 - DNA, 120 bp, Homo sapiens
atgcgtcctggacagagcctggaggaaggccctggaatcctcctcccaccccaggccttcctgagaggtgaatacagctttgaccagaagcctggatttcgagacaggccaggggtggga

SEQ ID NO: 13836 - DNA, 120 bp, Homo sapiens
ccccgaaatccccagaggggctgtgtccggcccctcccaccctgcctctgtgccccaccgggagagcttggtcagcatctgggctctggcctgcgaaatgtggacagtgagcgggaagga

SEQ ID NO: 13837 - DNA, 120 bp, Homo sapiens
ggtcggcctggccccacttccagtcgggcagtggcaccccctgaccggagagggacgcggtggagagggagctgtagaacgtgcccactcccctccgtcccctccagcatgaccttcgac

SEQ ID NO: 13838 - DNA, 120 bp, Homo sapiens
caccgcagcgtgggggctggcaggtggaggcccacaccagccactccctcccctgggcagctccagcgaccccctggctgcagaggggcggtcggtggcctggggggcaggtgggcagat

SEQ ID NO: 13839 - DNA, 120 bp, Homo sapiens
tcccggggcttggggggaaggccggtggtaggagtgaagccctctcatccttccaccctccttgggcgtggtcgcctggaggcctgggcaggctgtggccccgctctgtgctctgaggca

SEQ ID NO: 13840 - DNA, 120 bp, Homo sapiens
ccccggcagatgagtgttgaagtggaactgagcaggcagggaatggggttagcggggcctgtcttcgggactaggggagtcacggcagtcagattttaaaaaaggatttcgatgttgcca

SEQ ID NO: 13841 - DNA, 120 bp, Homo sapiens
gcacggggcccctaggaccctccccaggcttgggacctgtgccagtgtggaatcagtgtggaaaaagacccccaagaatatctcaaaagctccctaagcaggcggccggaccctgctgtg

SEQ ID NO: 13842 - DNA, 120 bp, Homo sapiens
ttcgctctccctgtgcgcgccgccctgcctcgccctgctgcttcccagtgcccctctgcaccccggctcctctctgctcctctgctgtcctgtcctgtctatttttttaacgccaacctt

SEQ ID NO: 13843 - DNA, 120 bp, Homo sapiens
cctcggccgctacagtcaggttagtggccagtgagcctttgtccctgcctggggagtgctgtgccccagcgtccagccacatatgggacttgggatgtgtttggtttggacacagagcag

SEQ ID NO: 13844 - DNA, 120 bp, Homo sapiens
ccggcctgggttctgatgggggaggcgggcctggatctggggtctgagagagagtcaggccaggccctggggtctgatggagggaggcaggcccggtcctggggtctgaggctggaggga

SEQ ID NO: 13845 - DNA, 120 bp, Homo sapiens
gggcggaggtagtccttgtcccggggtctgaggggaggggcgggcccggccccggggtctgaggggagaggcagtctcagcccttcactcagcttcaagtggcgcgctcagggcagagac

SEQ ID NO: 13846 - DNA, 120 bp, Homo sapiens
gaccgcgtgatggggagcaggggaccctgggggtctgtggctgtgattaggaggagaaacggccggtggtgagaggttctctgaccctgtgacagggagggaggtccagagcctggagat

SEQ ID NO: 13847 - DNA, 120 bp, Homo sapiens
ggacgtggggcgggggctggggaggggatgcaggctgggcaggaaggggtgagttgggatcagggcaggacagggtcagtctttggacatcgggaagcccccgggctgaaggggcattgc

SEQ ID NO: 13848 - DNA, 120 bp, Homo sapiens
cctcgggcgcccccagctcctcccagtactgccgcggcaggcagggctcgggcacctgtaggacagggcggtcagggcgctgggcaccggggcccctgagctagatgccccaccgcccgt

SEQ ID NO: 13849 - DNA, 120 bp, Homo sapiens
tgacgcccggtggggcatctgtcagcccaagcatacagatgaacagactgaagcttgggtgcaaacccggctgctccagggagggagagcgcccacccaccactggccccagccaggagg

SEQ ID NO: 13850 - DNA, 120 bp, Homo sapiens
tcccgcagcgcccggcacagtgctttctcccattggtcccgcagggtcttcagggtcttccgctgcgggggatgaacgggcccggtgagccccgtggcagctggtgggacccaggctcac

SEQ ID NO: 13851 - DNA, 120 bp, Homo sapiens
ggacgggggtcaccgcagctccctgcagagacctcatggccctcaaggtccctgctgtgtgttccgggtagctcctcaccccggcctgccctctgccggcttcagcgtgcctgacgcagc

SEQ ID NO: 13852 - DNA, 120 bp, Homo sapiens
gtgcgcagaagcacaggccaagacccaacctcgggaccccacaagttttccctgagcggcagccaggctgagttcctaggccctgcatgaccagaccagggcatgagcaattcaaccgca

SEQ ID NO: 13853 - DNA, 120 bp, Homo sapiens
acacggagctcagcccctgcggcggacacgcgaccccggctcagcccctgcggcggacacgggaccccggctcagcccgtgcggtggacacgcgaccccggctcagcccctgcggcggac

SEQ ID NO: 13854 - DNA, 120 bp, Homo sapiens
cttcgggtaggacacacgcccatcctgcagggatgggggtagtgaggttgggggcttgccagagggcgacctgccctcccaggaccccgagacagcatgggtgcacgcgtttctgcgtct

SEQ ID NO: 13855 - DNA, 120 bp, Homo sapiens
tatcgctgacgcggggaaaggcgggctgcgggtaaagtcagtgccagcagtgcaaaccaaaggccttgaccctcctggcctcgacccctctagaagggacactgggcaccgtgcaggggg

SEQ ID NO: 13856 - DNA, 120 bp, Homo sapiens
gggcggtgatgctgggagctggcagagcctggggagaccgttcactgcacccccagatgttggctgttttctcctcaaactcagaactgtatgaatgtgacccatccagaaatagatgaa

SEQ ID NO: 13857 - DNA, 120 bp, Homo sapiens
tagcgctttgagaatcaaagacgcacgtccacataaaagcttgtacacaaacgttcacagctgcatgactcgcagtcgataagtagaaacagcccaacgtcccataaacggacgaacaga

SEQ ID NO: 13858 - DNA, 120 bp, Homo sapiens
agacgggcacggcgcggccatccacgcaccggagcatgactcagccctgacccaggtcgcctcccggaggcaccatgaggacgtcacgctcagtgggagatgccaaacacaaaaggtctc

SEQ ID NO: 13859 - DNA, 120 bp, Homo sapiens
tctcgcagtgtgtggtcccatttctatggaatgtccagagcagactcatccacagatggggaggggatggggagtgacggggatggggacgaggcttccttttagggtgatggaacattc

SEQ ID NO: 13860 - DNA, 120 bp, Homo sapiens
aaccgtgactacactaaaatcgctgaattacacctttaagagggttttatggcaggtgaattacacctcagtaacagacgagcccactgcgtgcacctggcagccccactcaaacgcact

SEQ ID NO: 13861 - DNA, 120 bp, Homo sapiens
ctgcggcccccgaccacctcgtccccctgagcccacaccctcagggccaagaccctcccagctctgggtcctcccatcttctcagaggaggaagggaggaattcagggcccagcccaggt

SEQ ID NO: 13862 - DNA, 120 bp, Homo sapiens
caccggggaggcccattggtctgagctgaggctccaggaacccccaaagggcagctataaggactgaagtctgccggggcccacgtgggctcaccttggcatacacgtccctgagcagct

SEQ ID NO: 13863 - DNA, 120 bp, Homo sapiens
aggcggcctgctcgagggacgggccagccccacgctgggcttccacagaccccaggggaacctcgtgaccacctcctgctagcctgcaggtctcggtgtggctgtcaggccctctggggg

SEQ ID NO: 13864 - DNA, 120 bp, Homo sapiens
caccgtcccagatcttaaaaccctgggagggacatggtggggggtgggggccctcccgacaccacctacctttcgatggtcccggcgtcctggtcctgcctccccatgcactggagggca

SEQ ID NO: 13865 - DNA, 120 bp, Homo sapiens
gaccgatgcatccccctgaggttctgacacacaagctccacctgcagaggcagccgcatggcccgccaggtgggactgtgggaggttcacgttcctctgggaggcagcttgttaaacctc

SEQ ID NO: 13866 - DNA, 120 bp, Homo sapiens
attcgagcacccgtctctctggaccctgagccaggccaggaggtgcaggtggctgagctcgctgggacccaaggcgtgaattcctcatacttgccaacaacgttgtaaggtctgcccgct

SEQ ID NO: 13867 - DNA, 120 bp, Homo sapiens
acacgcaccccaccacctccgcacctccccacccgagcctcacagaactcagcagccctaacaagctgccaccgaaacctgcagcaccacgtctccccggtcactggccgctcagaccct

SEQ ID NO: 13868 - DNA, 120 bp, Homo sapiens
acccggggtctgtgacaactccctccgtccacctctcagtacctcctctgggcttgcctccagaatctatccaggtggcccccgcctcccctgcccctctcactgtctagctcagggcct

SEQ ID NO: 13869 - DNA, 120 bp, Homo sapiens
aaccgcccactccctggctcaaccatggcctgcaagttcgcaccccgcctcagcaagacccccccagctggtggagctgccacacacacactcctaggctcccagtgtctacaccggtgg

SEQ ID NO: 13870 - DNA, 120 bp, Homo sapiens
ggacgctgagccactagctcgcagggaaaacgcggctcctgctcgtgccgcctcaggttgcatttttgccaaccaatcaatgcctaagtgttctgtatctctttaaagaagccttgttgg

SEQ ID NO: 13871 - DNA, 120 bp, Homo sapiens
gaccggttatccctccagagggctccccggcaggacaggctggtcgccatgtcttcagcctggtgctatttaaaggtgggtgccacctggggctgtggccgcagggccaggactgggctg

SEQ ID NO: 13872 - DNA, 120 bp, Homo sapiens
cagcggaggtcgccgcccctctcaggcctcggtttccccagttgtcaatgcctccacttggctgtgagtctgtgagggtcactgtgctcaccttttggggcccagcgcatggggcaggca

SEQ ID NO: 13873 - DNA, 120 bp, Homo sapiens
agccgccttgctgggtggttccccgtggggcctggggtatggctctaagggaggagcaagtgtgggtgcgaatggggccgccccattcctgccgcctccgacgtgccccgccagccggcc

SEQ ID NO: 13874 - DNA, 120 bp, Homo sapiens
caccgacaggtctacgtggctatcctccctcctgcccacctacctgcccaaacacacgtccccagtcgtcacctgcccacccacccgcgcattcccacacccttgtgggcctggctttcg

SEQ ID NO: 13875 - DNA, 120 bp, Homo sapiens
ttgcggggagagaagtcccacgagggcatgccccggagcctggctggtcccacggctgacgcacgcggcaggacctcccgtgtccatctctgtccccaagcatctccgcctctgcccctc

SEQ ID NO: 13876 - DNA, 120 bp, Homo sapiens
tctcgtctctcccggtcatcttccttgtgtctcttgactgccgccgtctttctgtctctgtctccctccgggtctctgtctccctccaggtctctgcggcccgcgtctcacactcccgcc

SEQ ID NO: 13877 - DNA, 120 bp, Homo sapiens
ccccgcaacccgaggtcctagcccgcccggggactcggctgactcacggacacgccccgcgagacaaacaacaaacgcgcggaggccgagcgcggagtcccgcacggccgcgcccctgtg

SEQ ID NO: 13878 - DNA, 120 bp, Homo sapiens
cgtcttcacggtgacctgcgcccgcgggggagtcccggaggctcctctgtgcagcctcggcctcagtttccgtggtctgtgagatgggtgcagcctgcctggtgggagggttgcactgtt

SEQ ID NO: 13879 - DNA, 120 bp, Homo sapiens
aagcgaaggctgcagcggcggacccggctcaggggcagagaagcgtccgtgtggtacaaccctgtgggtggggccacccatctgcaggtgggaaactgaggctccagaggggctggggca

SEQ ID NO: 13880 - DNA, 120 bp, Homo sapiens
tggcggaagcggcggggggctgacctccggactcctgacatcacagaatccagtcagggctgcctgagtcggggccccctctgcttcttcccagacaccccatctggcaggtgaggacaa

SEQ ID NO: 13881 - DNA, 120 bp, Homo sapiens
tggcggagctgggtccccacagggcccaggacgtcacggagcgggcgtctctgtccccagggtctgccgagcacactgaggtaggccctcagtgtttgtggaatgtcaggagcaagagga

SEQ ID NO: 13882 - DNA, 120 bp, Homo sapiens
agtcggtgtccccgccgggcggggggcactgggaagggggcccgggcccgctggctgccgcctgaatcaccaccatcagggcaggtaatcaccccctgtccttcccaccgctttcatctg

SEQ ID NO: 13883 - DNA, 120 bp, Homo sapiens
gggcgccaaggccctcattaggccgcacgtgacgagggcggacaggggactggctgggccggtccatccatggcgggcatggccaggcggggtggcctcgggccggggcagaggcctggc

SEQ ID NO: 13884 - DNA, 120 bp, Homo sapiens
ctccgctgcctgacctggaacagtctctgcctctctccaagcctcggtttccccagctggacggtgatgggggtgagggctagctgagggctctcctgcccttcgtgcattcgctggtca

SEQ ID NO: 13885 - DNA, 120 bp, Homo sapiens
aatcgggcaccttgtgggtgctgtgctccgcatgggggacccagtggtgacagagacgcccaccctcctggggctcccagagcagaggcgcgcagcagttagacacgtgaacaagggcgc

SEQ ID NO: 13886 - DNA, 120 bp, Homo sapiens
gaccgtgtcagaaaaagaaaaagaaaaagggaaaggggaaggggaagcagccaacgaccaccactgtggccctgagcttagtgtgggagcagtgtggctctgccacagtggccgtgacaa

SEQ ID NO: 13887 - DNA, 120 bp, Homo sapiens
aggcgtcggttcttggggtgtgtttggggtgtcgggattgggacgccccacgtaaacacgctgagacttcacagtcaaatctgaacccctggtttctgccggtgtcgggtctatcggggc

SEQ ID NO: 13888 - DNA, 120 bp, Homo sapiens
tgccgccgtccgcccgccagctgaccgggagcccagggccgctccatcgcctgggtgggtctctgggaatggaggggtagctcagggctcaggctctccctgcatggtgactccccaggc

SEQ ID NO: 13889 - DNA, 120 bp, Homo sapiens
ggacgtaagtcagctgtgcagctgccccgaccaccatctctcctgctgggtgcatccacaaggtcaggcagccccagaagggcctgagggagaagctgtctccctctgaggaccctggct

SEQ ID NO: 13890 - DNA, 120 bp, Homo sapiens
ccccgaatctctcctggacaagcacgaggccctgcacacgcccacgtggcctggcacagcgctcggccgctctggtccccatgtgccgagctcagcccctctgtgcatcactggctttct

SEQ ID NO: 13891 - DNA, 120 bp, Homo sapiens
tgtcgggctcccgggttcccgtctcagtccagggcacaacgcatgctcccgccacccgcactgccggctcacgacagcccgacctggccacatacacactcatctgccccagccctggcc

SEQ ID NO: 13892 - DNA, 120 bp, Homo sapiens
ccccgctgtcctgcccgcagcggccgtggggcctggtgccacagcactgtccagaaccctctctctgcagcacccactccagcgtcggggcctgtgcacgtcggccctgctgctggaacg

SEQ ID NO: 13893 - DNA, 120 bp, Homo sapiens
atccgggtgccatcgaggacgccaagggctgcgacccaactcctgcgtattgtcagggctctgggctgtctctcaggcccccggccagcccctccagggccaccgaaggccggaaccgag

SEQ ID NO: 13894 - DNA, 120 bp, Homo sapiens
tcacgaaggcaagtgacaggtggatcccggatatccagggtggaggttgagcctctgctggccgacggtgggaggggctggacctgggggtctccagccgccctcctcctccaagggcac

SEQ ID NO: 13895 - DNA, 120 bp, Homo sapiens
gaccgcttggtctcgtattaaatcggggcagctgcaggtagaaacgcctgggcaagggggcctggtgaaggagctgccccaccttctccgggggcagcacgcactgggggcccccacaga

SEQ ID NO: 13896 - DNA, 120 bp, Homo sapiens
agacggtgaatccattcacctctccgtcagagaacagatgcaggaggtacgatcacccggcatcatcaccatagcaacagctggccaggcagccagggtaggggggaccctgccagtgcc

SEQ ID NO: 13897 - DNA, 120 bp, Homo sapiens
tgccgggctccacccatgcacccctgcagcgtgatggcctcatccccgggtgggacctggcagggcagcagaggccccttcatccacggggcctgcacggggcgcatgtcctgagggccc

SEQ ID NO: 13898 - DNA, 120 bp, Homo sapiens
aggcgcatggaggggagtgggctggcgacctacaggccccagatgactgacagtgaccagggcaggcaggcccctggtgacagtgactcggcccctgtgggtggcagggccctcgggaag

SEQ ID NO: 13899 - DNA, 120 bp, Homo sapiens
aggcggcagaacctgacggttttccgttggctcggagcagacatgaggaccgctggcacctcctcagccctctctgtgctctgctgcctgccccgagtcacctgcccctcgctgacccct

SEQ ID NO: 13900 - DNA, 120 bp, Homo sapiens
ccacgaggagccacggtgggtgtctgagccagggagaagtgttatggcagctggggtaggaagtgggccgcaggggccaggctgcgggctggaagtcctaggatgagcctcgggcctgga

SEQ ID NO: 13901 - DNA, 120 bp, Homo sapiens
agccgggagaggggaggtcatcactggggtctcaggaggaggcggcgctctggaaagggtcagtgacctgttagaggtcaccctgcacagagcctctgggttagggaagacagagccggg

SEQ ID NO: 13902 - DNA, 120 bp, Homo sapiens
cctcggtttccccggagagggccggaacccacgccagccagacaatgaccctttgattcgcacagcccaggccggagtggccaagccacggcggggtcaggtcttggccaaggtcacact

SEQ ID NO: 13903 - DNA, 120 bp, Homo sapiens
agccggggagattcccgggggaaatgccagaggccaaggccaggtcgagacggcggggtgtcccccctcagtgagaacacagggtcccgtccctgccctgctccccaagccggggagatt

SEQ ID NO: 13904 - DNA, 120 bp, Homo sapiens
tcccgggggaaatgccagaggccaaggccaggtcgagacggcggggtgtcccccctcagtgagaatacagggtcccgtccctgccctgctccccaagccggggagattcccgggggaaat

SEQ ID NO: 13905 - DNA, 120 bp, Homo sapiens
agacggcggggtgtcccccctcagtgccactaaggcagaacttggcccctggccactggctgctgggggacacaggctgggcagctaaggtggaggaaagggtacaggtgtgtcttctgt

SEQ ID NO: 13906 - DNA, 120 bp, Homo sapiens
tgccgtggggctgctggacacgtccgtttccacctgcggggtgggcaatgccggcacagcgagtggccagacacaggcatgcccagcagacacccaaccgctctccaccacctcaacctt

SEQ ID NO: 13907 - DNA, 120 bp, Homo sapiens
gctcggtgagggtgtgatggggtctgccttggtcaccgtggcaccccagcaccccgcagggtccctctggccaaaagagatgttcactgatgccctagaagcaggaacagaggggctccc

SEQ ID NO: 13908 - DNA, 120 bp, Homo sapiens
ctgcgctcgccaagggcgcctgacaaatctggaggcccccatgacagaatcagctccagagtaggaaatgtgtctggctgcacgaaagccccctcgggcgcagcgcctccaggcccacgc

SEQ ID NO: 13909 - DNA, 120 bp, Homo sapiens
tgtcgctgtcatacattgttggaaacgcctctgctggaaacagtgtttgctgaatcttggagggagaggaaaaaacctagtaaacattcttgttgaggtgatctgggggaatgtctgcaa

SEQ ID NO: 13910 - DNA, 120 bp, Homo sapiens
aggcgtgcgcgcgcacacacacacacacacacacacacacacgcagtggcctccctgggggccgtggctgggcgaggcctgctgttgtccgagatgctggaaggagctgtgtctctgggt

SEQ ID NO: 13911 - DNA, 120 bp, Homo sapiens
tcccggccgcaccccgttctgtcccacacccaaccactccccacccacaggccggctccagcggccaggtggacgggtgcgcggcccgcgctgtgagcagggaaccatatccagctgagg

SEQ ID NO: 13912 - DNA, 120 bp, Homo sapiens
gggcgggtcgggaacaaggaggccgggttggggggctcagaccacacttggaccatgaaagtgaccacatgcaaatcacagaaacgggatgcagggatccacagacgtgctcctcttggg

SEQ ID NO: 13913 - DNA, 120 bp, Homo sapiens
ccccgttacctcaccgccacccctgaaactgaagacccccaaacccactttaattcctggagacggcccctcgatccacccaaaaggctgccaccacctcgaacccacacccctgtcccg

SEQ ID NO: 13914 - DNA, 120 bp, Homo sapiens
ttccgccctgggtccagccacatctccccaaatgcattctctggctccggaaggggacccgggcgctcgcccccaactgccccccgcagcggccgggcccggcgcctgcccaccccgcgc

SEQ ID NO: 13915 - DNA, 120 bp, Homo sapiens
gtcggggggcgcggcggcggcggcgggggcgagggcggtgtccggcgcaagctggagccgggaaggtctgaaggagggtcaccaagaggtcagcagagcagaggtttctaatcacaatga

SEQ ID NO: 13916 - DNA, 120 bp, Homo sapiens
gaccgctgacatttattgagcgcttagtgtctacctctcccctccctgaacctgtgccatcccgatagtgccggagctctcttcatctccgtcttccagatggggaaactgaggctcagg

SEQ ID NO: 13917 - DNA, 120 bp, Homo sapiens
agccgcgaccgtccgggtcggtcctggtgccgagaggtagtgctgggtgtcgggagccaggccctccagctggggctgagagctttcccgggtcctgggtagacggggcatggagtctca

SEQ ID NO: 13918 - DNA, 120 bp, Homo sapiens
tgccgggaggtgccaggcaggagacggccccactcctggcctcagtttcccctcctatgatgggtgccaaggtgctgcgttccacaagctggtccctggcagtgtctgtgaaccagcaag

SEQ ID NO: 13919 - DNA, 120 bp, Homo sapiens
aagcgctctgggatgggggctgtggccgttcctgcccccagggacgggggaagaaatggggggctctctggctccccaccccccatccctgcagccccaccccaccccagccctgcgcca

SEQ ID NO: 13920 - DNA, 120 bp, Homo sapiens
ccccgaaggccacgtccctggggagacagtgagctcatgcaaggggaatgttcccaagttggagtgagtaagaggcgggccaggcggtgggggggctgccaggcgcggggctccgcgtgc

SEQ ID NO: 13921 - DNA, 120 bp, Homo sapiens
cctcgccctcgggtgctgtctagacagagggcagaggcgggagaagcggctccagggcctgctgaccctgacatgcccagtgcctggtgtttggtggtgtttgaggggttgggcagggtg

SEQ ID NO: 13922 - DNA, 120 bp, Homo sapiens
gtacgggaagggacctcctggggtgggtgggggttggtggtgaggctgtgggggggggcacgtggagctcagaggggaggagacatttccagggttctggagccagggtggggacaccca

SEQ ID NO: 13923 - DNA, 120 bp, Homo sapiens
ttccgtgcgtaactactcagcaccacctgcatgcatctgtgggcgggccagaagctgggtgtcaggagtggcccaggagagcaccccgttccccggcccgcaggtggtgtttgctggctc

SEQ ID NO: 13924 - DNA, 120 bp, Homo sapiens
acccgggccgagtgctgtgcctccggcaacattgacaccgcctggtccaacctcacccacccggggaacaagatcaacctcctcggcttcttgggccttgtccactgccttccctgcaaa

SEQ ID NO: 13925 - DNA, 120 bp, Homo sapiens
agacgtctcagctcaggaccagccacaaacagtcatggtggtcgagggccgaacgtccagggactgagcccgtcacaggggtatgtaggaggctgcagggggatcccagcctcagagagg

SEQ ID NO: 13926 - DNA, 120 bp, Homo sapiens
tcccggttcccaggctccagcctcttgcagctcaggactcaggaagagaccacgtggctccagcctttgctggggctgagctctctgcctgggtggctcttcccacctggtcgataaatg

SEQ ID NO: 13927 - DNA, 120 bp, Homo sapiens
ctgcggtggggttacagctgcatgtttaacaagcatttgcctcgggaccctgttttgagaggatgcctcccacatcagactaggggctcttggttggcgagtggcacagaacgaatgaat

SEQ ID NO: 13928 - DNA, 120 bp, Homo sapiens
aggcgtgagccaccatgcctggcctgttggggcacatcttgaaggaggtgggcattagagctggggtgttgggggatgtctaggagtttgccagatggggccggtatgggagagtggatc

SEQ ID NO: 13929 - DNA, 120 bp, Homo sapiens
aggcgtgagccacggcgcctggccgcaaaaatggaacttctgcatcacaggtgactaacggtgccaggcacacagtaggtgttcaataaatcactttggactaaaagaacacagaggcca

SEQ ID NO: 13930 - DNA, 120 bp, Homo sapiens
aaacgactcacaggtcagttttattgggtgcctagtgcaggggtcagtacactacggccctcggatcagctctggccctctgcctgtttttgtaaataaagttttattgggtgcctagtg

SEQ ID NO: 13931 - DNA, 120 bp, Homo sapiens
ctccgagaggttgagaaacagacccagggtcacacagcttggagatgggtgagctgggaatcagacagacccgggacccctgatattctttaggatcttagctttgttaacctttgctaa

SEQ ID NO: 13932 - DNA, 120 bp, Homo sapiens
tgacggccttcttcagcctggggtacatcctgccgtatctttctccacagctcatccggggctactttcctttaaatctacagccattcagcaaacatcggcagaggagaaccgttttat

SEQ ID NO: 13933 - DNA, 120 bp, Homo sapiens
tcacgggaaaccaggaagctgggcccaaggcctacatgttggggaagacaggtcctgcctgtctcctgctgtggctccccagtgctctgaggacaaagcctgagctctccctgattctcc

SEQ ID NO: 13934 - DNA, 120 bp, Homo sapiens
caccgtccctctcactcactctggtcgtctggtcgctgggcctttagtgagtgtgccatgggggccctggggccgattaaattccagccccggggaccaggctcagctcccagccagggc

SEQ ID NO: 13935 - DNA, 120 bp, Homo sapiens
ctgcggttgtctccaccccaacccccggcctttgcaggcacagcgccctccaccagatactccggcaaaggaggcctggggaccctgcgagcggggccgggggtgcagggagctgtcagc

SEQ ID NO: 13936 - DNA, 120 bp, Homo sapiens
cctcgcagcggcctccccaggacccccctatcccctcgctcgccctgaaatgtgtgtccctctcggcgtctgggctctcgagaaaggcctttgcttgtctgacttcgcgagggtcccggc

SEQ ID NO: 13937 - DNA, 120 bp, Homo sapiens
aggcgctggcagctgaggagtgagcccagggaggagcaagtcatggccaagccttgattgtggctgcaggggcagcatgcagagaaatggcagagccagagggggcaggaccccacgtct

SEQ ID NO: 13938 - DNA, 120 bp, Homo sapiens
ctgcgtgtggtcagtgatgcccacagggacggggctccctggctggggagaagtagcctggtccctggatacatgagggggtggagggcgtcctctaggaggatggctgcgtggacgtct

SEQ ID NO: 13939 - DNA, 120 bp, Homo sapiens
tcccgccccagggtttcaagcagaaattcagggacagtcagagccagtcaccaggacagagcctggactgggtgggaagagggaaggggagctaggccttgggatggggaagacttagat

SEQ ID NO: 13940 - DNA, 120 bp, Homo sapiens
aggcgctgcatggtcaacagactggtggtgggacagggccaggcctgggagcccctcctgggtgggcagaggctgtgggcaatggaggcagagatgcgggaccctgaaggccggggaggg

SEQ ID NO: 13941 - DNA, 120 bp, Homo sapiens
gagcgagaagctgatgtcctcatcagtttgtattcaaacgcttccagccatggaaagtctcagggcagggccagcaggggtttcagcactccatgggggttgggaaggaccccagcccct

SEQ ID NO: 13942 - DNA, 120 bp, Homo sapiens
gcacgtatacacacacgtacacaggtatgtatacacacgtctgtatgtatatcattcttaacagcttcattaaaatacatttcacacgctacacagtctggctgcttaaagtgtacagct

SEQ ID NO: 13943 - DNA, 120 bp, Homo sapiens
caccgcgcccagcagagttgtgtatctttcaccacaattgtagaacattttcatcacccccaaaacaagccctgtccccattaggcatcccctcccgtccccctccccccagccctcggg

SEQ ID NO: 13944 - DNA, 120 bp, Homo sapiens
cctcgctcctgttcacggctgagtcatgtcccagtgcgtggacggccacattgcgtttacccacacatctgtggatggacacccgggttggtttatctgtgaatctgtagttaccccccg

SEQ ID NO: 13945 - DNA, 120 bp, Homo sapiens
gtccgggtcctactttacataagtgtaagtcgtgacagtgagtttctttaaaaagaagaggcagtgatcagatgacaggtggccctgggagtggcgggagtgtgagaagagggggccggg

SEQ ID NO: 13946 - DNA, 120 bp, Homo sapiens
aatcgactccctggggcagcaagcatttattgagcacctgctgtatgcctggtgccagggacatggcagggacaaaaatgacacagttgctgtcctagtgggaagacaagatcacgcctg

SEQ ID NO: 13947 - DNA, 120 bp, Homo sapiens
ccgagccgcccacaccgccacacgccgtaaaaagcatcgcggggacgggaggcctgtgcgcgccggggtgggcgtcgggcggggggcgtggcgctccaggggctctgcgcggctgccggg

SEQ ID NO: 13948 - DNA, 120 bp, Homo sapiens
gctcggagacccagcacctgccccgggacccccagcacctgccctgggacccccagcagcaccaggaccgccgccgccctgagcttttccacgcctttgcccgggactcagctcctccgc

SEQ ID NO: 13949 - DNA, 120 bp, Homo sapiens
gccgccctgcccggcctcagtttccccgtcggtgaaatggggctgacccggccgcaggagggagcgagcgctgggggaggcgttctcggtttgtggccgttttgatccgtgcgtcgtggt

SEQ ID NO: 13950 - DNA, 120 bp, Homo sapiens
tttcgcttaatttttccaatctgtgacgtggagcgttctgtcggcctgaccttggctacccggcgtcgggggcgggtccacacccctcccggatggaagccccttcctgggcgggcgccc

SEQ ID NO: 13951 - DNA, 120 bp, Homo sapiens
ccccggacgcccagacggggacccccctcccctcccccagccgcagcgcgggggagaaattcccgacccctcccgcccgtctaggccgccccaggcccgaagcctcggccccccccaatc

SEQ ID NO: 13952 - DNA, 120 bp, Homo sapiens
ggccgggggcgggagatgctgcgccggccccacccccgcgcgccgggcctcggcgttgccatggggacggcgcggttgccacggcgaccgcctcccgcgggcccctccatccatcaccgg

SEQ ID NO: 13953 - DNA, 120 bp, Homo sapiens
gggcggcggcgcccgggtctggggaggggcgaggggggcgcatcctgcgtgtcctggggaaaggcgagggggcgtccaggcccggggaggggcgaggggggcgccgggtctggggagggg

SEQ ID NO: 13954 - DNA, 120 bp, Homo sapiens
gggcgaggggggcgccgggtctggggaggggcaaggggggcgcatcctgcgtgtcctggggaaaggcgagggggcgcccgggcctggggagaggtgaggggggcgccgggtctggggagg

SEQ ID NO: 13955 - DNA, 120 bp, Homo sapiens
gggcgagaggggcgcccgggcctggggagagtgaagggggcgccgggtctggggaggggcgaggggggcgccgggtctggggaggggcgaggggggcgcccgtgactgcgggggccaggg

SEQ ID NO: 13956 - DNA, 120 bp, Homo sapiens
gggcgcgtcctggggaggggcctgcgccctggggctgcttcccgcgcgttccctgcccgcccgcctgacattcccccgccctggccggccgggcagggacaggctgccccagacactacc

SEQ ID NO: 13957 - DNA, 120 bp, Homo sapiens
taccgccttgtctccagcctgggaggcggccacacagccacactctgtccccgggtccggtctgagcggccacctgcctgccgggtggggacctgggcagtcggcgaccagcctgatcct

SEQ ID NO: 13958 - DNA, 120 bp, Homo sapiens
cctcgattgtgattctgacctcagcactgatcccaaccataaccctgaccccaaccttggtcctgcctcaaccccgaccctgatcctgaccctgacctcagtcttaagtcttaaccctgg

SEQ ID NO: 13959 - DNA, 120 bp, Homo sapiens
ccacgactctgacctggatccctgctgctcagtccaaggcactgcgggagcgctggctgctggaggggacgccgtcctcggcctcagagggggatgaggacctgaggaggcagatgcagg

SEQ ID NO: 13960 - DNA, 120 bp, Homo sapiens
ggacgacgagcagaagacacggctgctggaggactcggtgtccaggtgggggctgcagcgtgggtgccaccgggctgggtggggcctcgggggccgctggctcccgggagggtgtgggct

SEQ ID NO: 13961 - DNA, 120 bp, Homo sapiens
agtcgtcagtgtgctttgagggagatgcgtggaccgggcaggccaggacccaacatgctttgagggggacgcaggacgggacagatcaggttggggcatccacctgggtctggggcagct

SEQ ID NO: 13962 - DNA, 120 bp, Homo sapiens
ctgcgtggcctcaggcagggagatacccctttcccttcccaccgccctcgtttgagccagcgagggacgtggcgtcgagctcctgggtccctggagctggccagcgggggacgtgacgtc

SEQ ID NO: 13963 - DNA, 120 bp, Homo sapiens
cgtcgagctcgtgggtccctggagctgggtgttgccggcattggcctccctgggggcttcctggcgccagcccagctggcgggcaagcgctcccatggttcgaacgggatggatgcagag

SEQ ID NO: 13964 - DNA, 120 bp, Homo sapiens
gcccgcaggaagctcgggcgggggcaggaaggggacaggatggggaaagtggcaatccctgtgggggctgggaccaaaggcctggagtttccggcgggcgggaggcccaggctgtgctcg

SEQ ID NO: 13965 - DNA, 120 bp, Homo sapiens
tgacgaccaagattccaaacgtctgccctggccagggaaggtgcccagaggcgggaggccggccggatcacacggacctcgcaggcccttcccagacgctgggttctgaccccgtggggg

SEQ ID NO: 13966 - DNA, 120 bp, Homo sapiens
gcacgttgggggtgttcgggatggacttccctcctgggcagggcgtgtaaaggcatggacaggccgggtgcggtggttcacacccctgatcccagcactttgggaagccgaggcaggagg

SEQ ID NO: 13967 - DNA, 120 bp, Homo sapiens
caccggacagtcgccacagaccaggcagctgaatccccgctctacagacaaccccatcaaggctggggcagtgagacgctctgaaggccacaggcccccaggatcccaccccgtccgtct

SEQ ID NO: 13968 - DNA, 120 bp, Homo sapiens
ctgcggctgtcagcggcagtgatgggggctgcaggggctggggacagagggggatgagtttccagccaggcggcctgggagggtagctttaatccccacctcggttttgtcttagaagca

SEQ ID NO: 13969 - DNA, 120 bp, Homo sapiens
ggccgtccagggttcaggctgagccaccgtctaggtctagacgtcagtgtccatcaggacctggcgtgccctgcaagcagacatgtgctccttcgacctccgtcaaccctggagatgaag

SEQ ID NO: 13970 - DNA, 120 bp, Homo sapiens
atccggaggggcggagtggcctcgaggcggtgtgtgagtccccggggaagatgcaggggacgctgggtggccggtggcacgagtgaggctcggggtcccgcagccccccgtggtgtgggt

SEQ ID NO: 13971 - DNA, 120 bp, Homo sapiens
cctcgaggaggacaagggagggaactgaagggggccaggacacccggtagcttggctgccgggggctctgtgatatgctaagtccctcctgctcaccactaaacccaagaggaaaaggaa

SEQ ID NO: 13972 - DNA, 120 bp, Homo sapiens
aaacgccgagttctagaggacactggagacagagtgttccccagaacaaggcctgggcgcagcagcctgcagggctggggtctccactcccgggggagcgtgcagcggggcctgccatcc

SEQ ID NO: 13973 - DNA, 120 bp, Homo sapiens
ccccgccccacccccactctgcaggccgctgaccctgtggtcgggctggtgagcagatggctgctggatcactgacagcccggctcacgttccctctccctatggagacatcttcctttt

SEQ ID NO: 13974 - DNA, 120 bp, Homo sapiens
ggccgtggaggggggccagcgctctggcccacgtctgtctcccatccccatcaccacacgaggccccagcacgcctggctggcctaagtccccgcaggatgaatgggcttccggggcctg

SEQ ID NO: 13975 - DNA, 120 bp, Homo sapiens
gtgcggcttaaaacaacacaaatacactctcgtctctggaggccggaagtctgaagtgaaggtgtgcaaggtgccaggcgagtaccctcccggcctcttccagctcctggtgccgacagc

SEQ ID NO: 13976 - DNA, 120 bp, Homo sapiens
ttgcggccgcttccctcccaattctgcctctgctgccccacggcggtctcctctgcatctgtgtccaaatttcccttgtctcccgaagtcgcctgtcactgcggtggtgcccgccctaat

SEQ ID NO: 13977 - DNA, 120 bp, Homo sapiens
tcacgcaaagacagatctttgagggaactcaattcaccccaccccggggagtttgcctttgtggccggcccttccccctcagatcaaattctgcctcctcagcgaggccttcctgaccct

SEQ ID NO: 13978 - DNA, 120 bp, Homo sapiens
tcccgggcccttcctgcctttctctctggctgcggctgtttcctgcggggctggctgcagctcccggcggcgccctgtcctgtacctgtttcatgtccatcgtcggcaacccctggcttc

SEQ ID NO: 13979 - DNA, 120 bp, Homo sapiens
gcccgcaggacctcccagcaggagcagggacccagtaggccctgcgtctccgtccgaaccacaagctgctgtgggtggtcacttgacagaaagacccctgcccccccttccttatttgtt

SEQ ID NO: 13980 - DNA, 120 bp, Homo sapiens
aggcggacatccctgaactttccatataactttcatgattcaggctccacccagtttgtctgggttttcctgtcccttgtagccagtcttcccagctgcctctgccttggcctttccaac

SEQ ID NO: 13981 - DNA, 120 bp, Homo sapiens
ttccgtcacacggacggtcctccagcccctccaggtgggcaggaagggggtgtctctcctcactaatggaaggctctgaacgctgaaaaattctagaaaattcagattggaaatcggaac

SEQ ID NO: 13982 - DNA, 120 bp, Homo sapiens
gaacgtctgcgtggaaaacttcatctgcgtggctgactgggctggcccaggcactggctgggtcagccccatttctcttatgtccaactggaaggcactgcgcccagggtagggcgctgg

SEQ ID NO: 13983 - DNA, 120 bp, Homo sapiens
ccccggtccccagcccactgtgggttctgtactctggggcattcccgcccgagggtatctgagtttgcaacgctgaggggccccaagacggaaacgggattcttttttttctttcttttt

SEQ ID NO: 13984 - DNA, 120 bp, Homo sapiens
ccgtccacccgccgcgggcccgcacccctcaccagcgctcccatctcctctccgtccgcccactgcgggcccgcacccctcgccagcgctcccatctcctctccgtccacccactgcggg

SEQ ID NO: 13985 - DNA, 120 bp, Homo sapiens
acccggacaaaagccgcccccaaccacccgccagggcccactgtgttctgtctgtcacttgctttggacacccctggcatccacaaggcgccccacacatgctgagtgactgggggagat

SEQ ID NO: 13986 - DNA, 120 bp, Homo sapiens
gctcgagaggaggtcgcaggagtggggccgggagctgccctagggtctgtccctcagaggatggccagggggacggtgagacggggctcggtgtcccagcagagcttggagtctgcggcc

SEQ ID NO: 13987 - DNA, 120 bp, Homo sapiens
ggccgaggacgggggccttaaagtgggggggccttaaagtgggggggccttaaagtgggagtgcctcagccaggtgacggggtgcctgagctcccgcctcgcgagccggcactgggcact

SEQ ID NO: 13988 - DNA, 120 bp, Homo sapiens
cctcgctgccctccccagagctgcagaaaggaggagtccgtcggcacacagcaggggcaccactgtgctgggaaggcctgctggagacggaaggcgggacccctggggacagcaacagaa

SEQ ID NO: 13989 - DNA, 120 bp, Homo sapiens
aaacggcagaaacttggcccaggggctaagcaacctccagcagagagcagctggagaaacataacagggacagagtcaggcagagacacagaaacagcatgcagagacacagagaccata

SEQ ID NO: 13990 - DNA, 120 bp, Homo sapiens
acacgcagaaacaaggagagcacgcagagacagtatagagacaggcagacaacacactgaaaggcagatgcctggacagaagccaccctgacgatggccgccccatcccatccaccggcc

SEQ ID NO: 13991 - DNA, 120 bp, Homo sapiens
actcggcatccactaggtgccccataaatgctgaaggatttaaagacaggccaagaggacacaggctcccggcaccaaatcgaggtcgtgggtggggtcgggggcaccgacggcagggac

SEQ ID NO: 13992 - DNA, 120 bp, Homo sapiens
ggacgcgggcctgggcgcagagggcgtttattggacctgtccttcccagccgctgcttgtccaggttcagcgctctccgcgggtgaggcaaggaaaccgaggagacgcccgagccgggtc

SEQ ID NO: 13993 - DNA, 120 bp, Homo sapiens
gtccgcctggacccccggccgtcacggacggtcctctggatgcagatggtccagggatctgggggtcctgggagagtggtgtgtggactgcgggcccagctggacaaaggcaggggcttc

SEQ ID NO: 13994 - DNA, 120 bp, Homo sapiens
tcacgcaggcgtccggcccacggccttcaacagccctgcagggcgggctgaggttaaccgcgccgaggagagtccagggcgagcggtggctcttgcagcagccgggctcaggggcagctg

SEQ ID NO: 13995 - DNA, 120 bp, Homo sapiens
acccgccaccagagcccaccgcacaggcagttcttgatccagcgctgctcccactgcttcaccgccgtggttctgttgggcgacttgagcatggtgacacagccgcacctgcggggaggc

SEQ ID NO: 13996 - DNA, 120 bp, Homo sapiens
gagcgggttcccacttccaggcgggcctcccttacgcctgccccacttttgcttccaggcaggtctccctctgctcgccgtccctcacgcctgctccccacgtccccacctgccacaggg

SEQ ID NO: 13997 - DNA, 120 bp, Homo sapiens
ccccgccacaccaagttaactgctccacatcctgggatcctggctccaacactccctctgggacgtgctccctccaccacccttgaccgtctggagcgctgggtgggggctagaatcagc

SEQ ID NO: 13998 - DNA, 120 bp, Homo sapiens
cagcggcacatctctgggagtcagcggttccgggggcccctcacctggtgcaggccttgcattcctccgtggggcaagcgccaaggtgcagcctccgcaggtggtcgatcttgggctggc

SEQ ID NO: 13999 - DNA, 120 bp, Homo sapiens
tggcgggagaggggagaacgtgagggaggcctgggcaccacgaggccaggttccggcaggggcatctgtccacaggcgggggtggagggaatggccggcctcacaccatctgccaggtgg

SEQ ID NO: 14000 - DNA, 120 bp, Homo sapiens
gtgcgggaccacctgagacaggcccagtaaagggggcgggaccccccacacggaggagggttggtctcccaggtgcctggggagcttgaggcttagagacccagtaaaggggacggggcc

SEQ ID NO: 14001 - DNA, 120 bp, Homo sapiens
ggacgagggtcggtccgccacgtgcccggggagcctgaggtgcagggaaggtgcttgtgacgctcccatttgaggctggacagaagcaggtacatggggacttccacaccacctctgccc

SEQ ID NO: 14002 - DNA, 120 bp, Homo sapiens
acccggcctggaggtgccgggacctctgaacgacaagattctggtggcaaaagctgccctcggtggtgggtgggggacctgggtctgggtgggggtgggccggcttattctgctctcatt

SEQ ID NO: 14003 - DNA, 120 bp, Homo sapiens
tgacgtaaccgtcctctctttccatcaagtcttttcctgaaacccaaaccctcgtgtgtgactcattaggaggcccctcccacagtgagcacgaggaagaaaatgctggaggtcctagag

SEQ ID NO: 14004 - DNA, 120 bp, Homo sapiens
gggcgccttcccggaggtcccggagccaagccgggggtgccttccctggaggtcctggagccgagccggggccttccccggagcagggctgctggaggttcacttcattttcttcctttt

SEQ ID NO: 14005 - DNA, 120 bp, Homo sapiens
aaacgtgtgtctgaaacaggctgggggtctgacgggcctgggttcaaatcctgactcggccacttcctgaccgcgtgaccccagatgagtggggtgacaaggtcccaccctttccaggct

SEQ ID NO: 14006 - DNA, 120 bp, Homo sapiens
caccgtgaaatggggtgacaaggtcccacctcacagggctgctgggcagccagggtcagctcagcacacttgggttgcccaaaccccgcacattccagagaaaggccagccccgggccct

SEQ ID NO: 14007 - DNA, 120 bp, Homo sapiens
ccccgggagatcctcctgatgaggtgtctgctcagcagggccctgggccatatgctaaggcgtctctctccatccacagagggatctacggcgaggcctgacatccaggggggccagaga

SEQ ID NO: 14008 - DNA, 120 bp, Homo sapiens
gttcgtgacacagcagaagacaccactaggggatggagttaggggcacctagaaggaagcagcagtcatggccatgactggagaacatggagggaaggagccgtatggattcgggggggt

SEQ ID NO: 14009 - DNA, 120 bp, Homo sapiens
agccgtgtggattcggggggacccggggcaggacatggagggagggagccgtgtggattcggggggtcccggggcaggacatggagggagggagccgtgtggattcggggggtcccgggc

SEQ ID NO: 14010 - DNA, 120 bp, Homo sapiens
aggcggggagccgtgtggattcggggggacctggggcaggacatgcagggagggagccgtgtggattcgggggtcccggggcaggacacggaggaaggagtcctgtgtttggggaccaat

SEQ ID NO: 14011 - DNA, 120 bp, Homo sapiens
acacgcacctggcgaggccgtcgagctgcagggtggcagcactgccaggcagcgtgggcgcccggccaaactgcagacgaaggggctgcttgggctgcaggcggctaaccaggccgtcgc

SEQ ID NO: 14012 - DNA, 120 bp, Homo sapiens
cagcgcctcgtccggctcgctcgctgggccctcatcgcgacctgcggagagaggtggcggaagtctcagcacccctgactggggcaccgcccggccacccgggacgtgctgggagcccct

SEQ ID NO: 14013 - DNA, 120 bp, Homo sapiens
ccccggggttctctcaccaggtcggggccccggctctgcctgcctggctgggtgaccccagagttctctccccgtctctggcctgtcatgagactccctcattcacttaaaaagtatgtg

SEQ ID NO: 14014 - DNA, 120 bp, Homo sapiens
acccgacaaggagagacagcaaacaggtgcctggaagtggctgccatcccaaaagcacccacacagagcatggacctgtgctaggaactggggaaatagcagatatcaaggcagagccac

SEQ ID NO: 14015 - DNA, 120 bp, Homo sapiens
gtgcggaagaccaggcgcacaggaccaggtgctgggttctcagctgggagcggctctgcctctggtgggggcccctggtgatgtctggagatatttttagttgtcaccactgggggtgcc

SEQ ID NO: 14016 - DNA, 120 bp, Homo sapiens
taacgggtggaggctggggaggctgctcaacaggacacccccatcccagaggctgctccagcccccgatgtctgtggtgcctacggggagaccctggtctagagagaatgaatgaatgag

SEQ ID NO: 14017 - DNA, 120 bp, Homo sapiens
caacgtaggacaccccatctctacaaaaaatagaaacaactaaaaacaaaaatgaaacgcttggcacacagcgacggcccaaggagggagagggcgaggtctcgccatcactagcgctgt

SEQ ID NO: 14018 - DNA, 120 bp, Homo sapiens
ctacggatcccagccacgctggggtttagcctcgcagcccccgcctgggtctcacgcgtttctcggcaggctgtgccgtgaatgggattttttttttcccattttatcttcgtattggtt

SEQ ID NO: 14019 - DNA, 120 bp, Homo sapiens
ccacgtgcagctgccggctgagctcgttagatctgaggtccttcgaggacactctgggattgcaggcacataaccacaccactgcaagggacccttctggcacgtgggcctccgtatccg

SEQ ID NO: 14020 - DNA, 120 bp, Homo sapiens
ttccgacgggcgggtctctgtgtgttcatcttctgaccgtgtttgctgaggcctcacaccacagggccaccgggtgtgcatcctggtacccatcacattctgagaggatggcttagaaag

SEQ ID NO: 14021 - DNA, 120 bp, Homo sapiens
agccgtccaggggggatcaggccttacctgtggggcttaacgtgttacagaagaaacttcccaggtaaggaaggaaactgcttctctgaggtgcagctttcctggacgggcctctgggag

SEQ ID NO: 14022 - DNA, 120 bp, Homo sapiens
aggcgatgtcggccagggccacgcggccgcgcagccggcacaggctctcggtggacgtcagcacctgcccgctgggcttcagcagggacacggtgaccaggccgctgaccgtcaccgcga

SEQ ID NO: 14023 - DNA, 120 bp, Homo sapiens
tgccgccgaacagcgtgagcgacggtgagaacttgactcgggagaacttctccccgaagctggaggcgcccgactgtggagaagggagggagggaggaggggccgctcaggctcatgggg

SEQ ID NO: 14024 - DNA, 120 bp, Homo sapiens
acacgcgcacagaagaaccacgcagaagccaggagtgtgtgcacctgggttcagatcctgactcggccacctgagccgtgtgggatgtgatcccctctgaccctccgtctcctcatctgt

SEQ ID NO: 14025 - DNA, 120 bp, Homo sapiens
gaacggcacctttgctttagaggacagtggggaggattaaacgggtgaacgtgtgcgcaacgggagtcacctcccctttctgtaaagggacagacagcagcatgctcggttctgggagcc

SEQ ID NO: 14026 - DNA, 120 bp, Homo sapiens
caacgacttggctctggctctgccgtggcggcacacaggcagctggtgccaatgagccacactcacaaacccaggcgggggccgtcaggccctgggccgcactgtgcagacctgagctat

SEQ ID NO: 14027 - DNA, 120 bp, Homo sapiens
cagcggctgctgcgggcactatttgatttcaaatcaaatttgtcaagtcattattgacatacggaaacatccacccttctttcaacgtgagtcttttaaaagatggggtcttggctgcgc

SEQ ID NO: 14028 - DNA, 120 bp, Homo sapiens
caacgagagcaaaactttgtctcaaaaacaaaaaaaaaaagaacaagaaaaatgtctctacgttgtgaaaaaatgcgaggaagagaagtgtatcatacgtatcgtacggctccattctaa

SEQ ID NO: 14029 - DNA, 120 bp, Homo sapiens
tggcgacgactcatctggtgtccacaccacacgtctgtgtgggtcgcaggctggcatgtctgagactatgttaaaggagcacatgtgccttttattaatgtaattaaaaaacaaaaattt

SEQ ID NO: 14030 - DNA, 120 bp, Homo sapiens
gcccggttgacagaacaagactctgtctcaaaaaaaatgtatttggttattttaaaaagcgaggctctgactcaggccacagcggggatgcaccttgaggacatcacgctcagtaagaga

SEQ ID NO: 14031 - DNA, 120 bp, Homo sapiens
ctacgcagtgtgtgatcctgtttctatgaatgtccaggacaggcagatccagagagacaactgggtctcgggggctggggtgggggatggatcagggtgatgcaggatggggactgggtt

SEQ ID NO: 14032 - DNA, 120 bp, Homo sapiens
ccacgtcccatgtgagctccgcgcctcagcagtcccctctgcctgggacccccccgtcctctactccccatcttgctgggacccctcctcttccgtgtcaggaccacagctccacaccca

SEQ ID NO: 14033 - DNA, 120 bp, Homo sapiens
ccccgcacccccagccaaggccggatgttctgagcagaggcaggcatgggggctgcgtctcccacagagggaacagagggaggcatcgtccggttgccatggaaactgtcacctcggcaa

SEQ ID NO: 14034 - DNA, 120 bp, Homo sapiens
aggcggggcggcagagacaggtgtgagaggctcaggaccagatggggtgcctggggccggcggcgcctgcacagacgttcactacgggggtgagttctgagactgcgccccgttggaaaa

SEQ ID NO: 14035 - DNA, 120 bp, Homo sapiens
gagcgcaggggccagtagggggtctcgcctgaggtcccacgtgtggtatgtgggaggccttagagttaaatgcaaaccttccagacactgcgtccccccatcttatctctggctctggga

SEQ ID NO: 14036 - DNA, 120 bp, Homo sapiens
ccccgggccccgaagatgcagatggaggagtgtctgtgtccagcagcctggttgtgtctgcggtcaccctgcgtggggccgcatatgcagggagcttctggtgaattcaaggcagggtcc

SEQ ID NO: 14037 - DNA, 120 bp, Homo sapiens
gttcgtagcgtccccactccagcccccttccccacctccccaccaagccccactctgaggaaccaggcccctgggaccctggccactttcccaggttgagctggccaacttggggtcttg

SEQ ID NO: 14038 - DNA, 120 bp, Homo sapiens
caccggcacttactggccgagatgaggtccatgtactggcagacagcgtgcagcagaagcctctcgaagctgtggggaacgggcagtgagcgccgtgcaggggctgcagcgtggggtgtc

SEQ ID NO: 14039 - DNA, 120 bp, Homo sapiens
gtccgcccacctggccgcagcctcggagggtccgctcgcctggccgcccccccttacctgttgtctagcattgctgtgtacacggcctggggggacacggagaagaaccgaagcagccgc

SEQ ID NO: 14040 - DNA, 120 bp, Homo sapiens
cagcgtttcctggggagagcggcccggtggtcagggaactgcgggacctgtgggtggggggccagggaggtccagggcccccaggagcccacagcgctgggctcaaacatgacctctgac

SEQ ID NO: 14041 - DNA, 120 bp, Homo sapiens
ccccgcaaaccccccccttaatgtcccctgtccccagggccaggaggagagtgcggctgcagcggcccccctccagagctaatcggcctggccggagcaaatggcattaattgtggagat

SEQ ID NO: 14042 - DNA, 120 bp, Homo sapiens
caccgagaatccaagggccgagccactcagtgtggggggaataggcagccgcctgggaagcgggtggttggacagggtgggggtaagcgcgcaccgcagccaccgggcacccgggaagcg

SEQ ID NO: 14043 - DNA, 120 bp, Homo sapiens
gggcggcgtttggggggaggtaggcgcgcaccgcagccacccggcacctgggaagcgggccggtgagggggggcctcatggatggggacttttctggcaaggaaaaaccacacaaactgg

SEQ ID NO: 14044 - DNA, 120 bp, Homo sapiens
gatcggctccacccttatctcctaactccaccccacctgaaacacattctgctccaaccccacagtggcacctcctggccgctgctgcttccaagacacgatttcccgtcccgcctcgga

SEQ ID NO: 14045 - DNA, 120 bp, Homo sapiens
cttcgcacaggcggctcgggtttgctggctggctgtaacccccaccgccggcactcacagccaagcctcgttcacaggagacgctcagaaaaataaccaccaaatcaatcctcaataaaa

SEQ ID NO: 14046 - DNA, 120 bp, Homo sapiens
acacgagggctttcgcctgttttgtttggtatctgagggctcgccaccctcccctgggtctctagtgctgagctgagcactggaaatcgagtcccaccatcagatggagctggctgactt

SEQ ID NO: 14047 - DNA, 120 bp, Homo sapiens
aaccggccccagccggcccgtttacttctttgctccttaatcactagctcactaggcccacagaacaagacagggtccgccccccgcccaccgccgccccccggtcctggcctgtgaccg

SEQ ID NO: 14048 - DNA, 120 bp, Homo sapiens
cagcggcgctcactgcctgtttgttgaatgaagaactaaacttctgttgacacacctcccaagggctggttcatctgtttcccacgccactcaacaagaccactttacagacgaggaaac

SEQ ID NO: 14049 - DNA, 120 bp, Homo sapiens
cagcgggggtatctgaggcttcctggaccctgaaggctcgaggatgtgtgtccacagaagaggggggcagcccaagctggggagctgctggagtttgggggaacaggcctcccggccact

SEQ ID NO: 14050 - DNA, 120 bp, Homo sapiens
cctcgagcaaaaacacacctttcccagcactggtccctcccccaggaacccactagagacagcaagagaggaaccgacttgtgcatcaggaagccagggctcagggcggaggtgactcag

SEQ ID NO: 14051 - DNA, 120 bp, Homo sapiens
ctgcggcggcccccagcagtccccaaccccccaccaggacacagctggcaggtaaacacccagagactgacggctgagagcggaaacatgagtgtatttacatagttacataggagtcac

SEQ ID NO: 14052 - DNA, 120 bp, Homo sapiens
gtccgtgggcacaggtgggtgggcagggagtaggtggaggccgcccctcccactgccccgcaggccctggttctggccaggctcaggaagtgagctccctggggacccaggccccatgtc

SEQ ID NO: 14053 - DNA, 120 bp, Homo sapiens
ccacgctggacatagtgcccagattccatgcccagcagcctcctctgccaccctcagagacggagaacgtgagagcaagtaagaacccgccttccgggaggagccccgtctggattggat

SEQ ID NO: 14054 - DNA, 120 bp, Homo sapiens
ccccgttcccaagtcctcagggcgaatccgccaaatgtgcgagctgggcagcccacccctttcagctgctggccggaagcggaagtgggcgtccgtcgcctcgccatctcccatagctgt

SEQ ID NO: 14055 - DNA, 120 bp, Homo sapiens
tgtcgcctgcagctgagaaagggttgctgtcccagcaggccaggtccaggtgcgccccactagtgaggccggcggaatcgggagggaaggggtcaagggcacagtgcgcagccccggctg

SEQ ID NO: 14056 - DNA, 120 bp, Homo sapiens
tcccgccccagcctccggctatcgcggcgtttcttctcagaggccgccggctttggttcctcccggcactgctgggcttggggctgccattccgggcattggttcccgggaggaggcaag

SEQ ID NO: 14057 - DNA, 120 bp, Homo sapiens
gtgcgtcggcggggccttttctccactttctgtacccttctctttaaacgtcgtccccagtaggagactattttttctcaagaaaatgctctcttggacctcactttccgttgttagaag

SEQ ID NO: 14058 - DNA, 120 bp, Homo sapiens
atgcgcgttattggtttgtggagatcgtccctttttttcccctctgttatgtggatgcaccctagtgcctgatacacatttgagttcctatctgagtgggcttgtgcatgttttttcgta

SEQ ID NO: 14059 - DNA, 120 bp, Homo sapiens
gggcgttgcatgctgctggttactctgcagttttggggtcctgatggcattcttactcccatagctccactaggtattgccctggtggggattctgtagcagccccaacgtcacatttct

SEQ ID NO: 14060 - DNA, 120 bp, Homo sapiens
ggtcgggactctctgcagttgctctatccttacaacacgtctatgcttgggcctccaggcttttgatgacatcctttggaatctgggtggaagctgccaaacctccattctgcaagtctg

SEQ ID NO: 14061 - DNA, 120 bp, Homo sapiens
cctcgtaggcctctaggcctgtaatgtgaggggcaaccttgaaaatctccagaatgccttcagggtctttcttccattgttttgagtaaaagcacccggctcccttctgtgctaatctct

SEQ ID NO: 14062 - DNA, 120 bp, Homo sapiens
gaacggatggatgaggccgtccccagagggaacggatggatgaggccgtccccagagggaacggatggatgaggccgtccccagagggaacggatggatgaggccgtccccagagggaac

SEQ ID NO: 14063 - DNA, 120 bp, Homo sapiens
ggccgcctgctgctgcaggagtgagaggggcccactcagggaaagaggggttcagggggagcagccaggtgtgtacagatggctgtagccatgtggaggcgcgcgtggggaccggcaggc

SEQ ID NO: 14064 - DNA, 120 bp, Homo sapiens
ccacggttgaccgtggagcaggggagagacctggtttgatcttggtcttgacttccaagccccttggtccctccgaccttggaggctgctggaaggagagggcatctcatttaccatcct

SEQ ID NO: 14065 - DNA, 120 bp, Homo sapiens
caacgtagactaaagaaccaaacctcagagttccccggctggtctgggtgggcctggctgttggatgaattctctttttccctctgacccttcagccccgctgggtgcgtgggcgcctgg

SEQ ID NO: 14066 - DNA, 120 bp, Homo sapiens
gcccggagggggcggctgctgactcagatctattgctgctgcttctgagcatccgcagacctatatctggccttagaggaaaacatacttcttcagtttcccagaagccatattggacag

SEQ ID NO: 14067 - DNA, 120 bp, Homo sapiens
ggtcgctggaggccttacaccctcctccagggactatgataaatatcagtctacaagcaaagaaaaactttggaatttaaagccctgtgtactgtagttcttcctatatttttgacaacc

SEQ ID NO: 14068 - DNA, 120 bp, Homo sapiens
atccgtgtgaataaaacacctgccaagacgtggtaggatttaaaagtgatttggggcgggtgttttattcacgtctgcaatcccagcactttgggagacccagatgggaggattgcttga

SEQ ID NO: 14069 - DNA, 120 bp, Homo sapiens
ttacgttttgggaaaggttctgctccacctggaacaatgtcctatggactactaagcatcaagggtggacctccccaggaagctgcgcctctttaaaaccatatcttcgtttcaccaaag

SEQ ID NO: 14070 - DNA, 120 bp, Homo sapiens
catcgatcttgagcccactttaggtcttttctatggcataggaaccgaagtgggctgagacagatcccatagggtcctttgaaatgcgctttagcaacccttccccacctcctaggggta

SEQ ID NO: 14071 - DNA, 120 bp, Homo sapiens
aaccgggtatggactgcatggtagctctttccagcatcccacagcctggggtaataagtcatgcggcactctcttactgcttttcccagaagtgaaagaccgccctgtgtgtcagccccc

SEQ ID NO: 14072 - DNA, 120 bp, Homo sapiens
cagcgtctgatgccaatttttcctcatgtctctcacaacagggagaaaacttggcattctttgggaatctaacaggatgcagtgaacccaagccttttgaagagctcaccaatcagactg

SEQ ID NO: 14073 - DNA, 120 bp, Homo sapiens
tgccgttttcagacatggtccgtgacgggcagccgtgacatgaagttagaccctgcttggctcggacagaactggcgacttgtttgacctacaccaagctatccgactaataatttagat

SEQ ID NO: 14074 - DNA, 120 bp, Homo sapiens
ccacggcctccccaggcagaggtggcttgccccacccagcaaaggtggccactgcaggctgggaccgtcagatgggtcaggagcaggtctgggggtggtgtcccgatctgagccggtccc

SEQ ID NO: 14075 - DNA, 120 bp, Homo sapiens
ggtcggtggggatagtgaggagggcatgggtctgggtgtggtgggcgagggtgtctcgcccatctctgggttggacaggtgcacctggtaagtagccaggccctgaggcgtcaccgtagg

SEQ ID NO: 14076 - DNA, 120 bp, Homo sapiens
aggcggtgtgacttgaacttgggggctggaagtggaagaagaagtgagagggagcagacccgagagagattcaggaggcaggatagagaggactgggtgatggattaggtgggcaagggt

SEQ ID NO: 14077 - DNA, 120 bp, Homo sapiens
cagcgtggcccaccctgggctcgtacagggctggatttcagtgccagctgtgtggtcttcatttcctgagcctcagttgcctcatctgtagaatggggagagggtggctatgaggatcca

SEQ ID NO: 14078 - DNA, 120 bp, Homo sapiens
tggcgtgctctgcacggtggagcctcagccccagtcattggggtgtggacgatgggggagctgaggtcaagtcaaggcctctgctcacgggcagcccctgctgccaccccacagcccgta

SEQ ID NO: 14079 - DNA, 120 bp, Homo sapiens
ttccggataggaccacaggaggcctggtgggctcagcacacagatgatgaccttggcacacgacctccctctcctggtatcctcctgcctgagacggtgctggggcagatctcctcagag

SEQ ID NO: 14080 - DNA, 120 bp, Homo sapiens
ggtcgataggaggatgcagtgaggtggccccggccgaggtacactcggtaacagatcatcatgtgcagtgtcggcgcaggcattgggcacctgggcctcattttctcttccatgaagtgg

SEQ ID NO: 14081 - DNA, 120 bp, Homo sapiens
cctcgagggttcatgccgggtgatcaggagaccatgatttgggcagctcactccccagctggcagccgggctaaatctcatcagtgcccatttagatctggtgctccgcccttgccccga

SEQ ID NO: 14082 - DNA, 120 bp, Homo sapiens
agccgtgcttgtgggtatcaagggcttgagggaggtcaggccctgctgccctggggacgctgccacccagcgcctggatcccagcccagaagcccagaaccttccagaaagctgctcccg

SEQ ID NO: 14083 - DNA, 120 bp, Homo sapiens
agccgggacctccacattttctgctgaggctccttttcccagcattggctcctctgcagctgctgggccacagccagaggctgtcagagatccaagggagtcattgccagtgtccttgtc

SEQ ID NO: 14084 - DNA, 120 bp, Homo sapiens
gcccgctctccacccagatctgttgacagccacccctcacatgcccagggcctggagggtcccagcaaggctgagactatgagcagctgtcctactcacatacccatcccagcatccagg

SEQ ID NO: 14085 - DNA, 120 bp, Homo sapiens
tggcgcccttccagcctgctggccttgggccagcctctagcccctccttctggatcttggtcttctcagatctgaccctgtcacctctttccccgaccaggccccttcccctctggtgcc

SEQ ID NO: 14086 - DNA, 120 bp, Homo sapiens
cagcgtaatgatctggcaaggcagaggagacagcacgtcttgaaacatttttggggtcaaggactaccccatttgttccctcactcccacctaggtcactgatgtgcattagcttggact

SEQ ID NO: 14087 - DNA, 120 bp, Homo sapiens
tggcgagaacccacttcctggcttgtagacggctgccctctcactgtgcactcacatggcattccccaggcgcatgtgcacggagtgaaggagcacgagctctctggtgtctcttataag

SEQ ID NO: 14088 - DNA, 120 bp, Homo sapiens
taacgatccagaaaatccgtgtgatttagcgggcgtggtaatgaccgcagtccagccagccgccagcgctgagttcatgcttttaggctaatttgtgttcttgtcccctctatggggctc

SEQ ID NO: 14089 - DNA, 120 bp, Homo sapiens
tctcggctggcagcctggccacactgcatcagggcagctgggccctcacctggcactgacatctgcctcggctgctccgagccctgagaaccactccagggtcccttccccctgggcgca

SEQ ID NO: 14090 - DNA, 120 bp, Homo sapiens
ggacgttggtcagggtcctgctcggtgccgggcactatgctgcatgtcacagccactggcacaagactgtcaggcggaggggcacagggatgtcagggcagcaggtcgtggtgacatcca

SEQ ID NO: 14091 - DNA, 120 bp, Homo sapiens
tgacgtgcagccaaacagggagctatggctgtgctctcacggtggtaccatttccactgcagtcccaagcaggttagagcgtgaggccgaggggccctggggacacttggatcagtccag

SEQ ID NO: 14092 - DNA, 120 bp, Homo sapiens
gcacggccagcttgttccttttccatcatgaaccactcactctgctgacctgcaaggctgggtcctgcctgcggggagcacgcggatttggggtgaggcagctggggggtcccttggggt

SEQ ID NO: 14093 - DNA, 120 bp, Homo sapiens
ccacggttgggtgtccaggcctcccagcactggctaggtcacccagcagtgttcccgtgggtctccaacaggctccaggccagtgtatcagctatgtatgtcctgggcaagttggccggc

SEQ ID NO: 14094 - DNA, 120 bp, Homo sapiens
tcacgttggagagaagaactggtgtccctggagagtggctgccaggccttagggtacacggggcgggtgcagttcacccagagggctgccctggcttgctggggctgtcgcaccactggc

SEQ ID NO: 14095 - DNA, 120 bp, Homo sapiens
ggacgcccgtttgtgtcagagcaagaggattggggtagggcaggctttggcccatgggcaccttcctgggggtggcctggagtcaggaaggcggtagccattcctcctgacctggcacgt

SEQ ID NO: 14096 - DNA, 120 bp, Homo sapiens
ccacgtgcacacacacgcagccctccccacttggcttccgaaacgtgagtcactcagatgctactctgctgccgtcttgccccctctgctggcagccctgttcctcctaactccaccagc

SEQ ID NO: 14097 - DNA, 120 bp, Homo sapiens
ctccgcctcctggagagtcagagccgatgggctagtttgggccacacagggtggggccaccctgagttctgccagcatgcagactgtaggtggggagccgggagaagagctatgttgcct

SEQ ID NO: 14098 - DNA, 120 bp, Homo sapiens
ccacgagtgtcccttgcagagcccaccagggtgccttggaggcccatcccagtgccaggctgttcttcccagatgggacagctggggccacaggctgccgtggcagtgctgggctttctc

SEQ ID NO: 14099 - DNA, 120 bp, Homo sapiens
gcccggggggccagccccctgcctgggtcagcctctccctgcctgctgctctcctctggcccatccagcttgtatgtagattttccctcacgtgtgtgtgtgtgtgtgcatgtgtgtgtg

SEQ ID NO: 14100 - DNA, 120 bp, Homo sapiens
cagcgggagcagggatgtgagacctgcagggtggcagggctcatggatgactggcggggtgcattaagtgctcatgctcgtgaaaggcacctcttcttgggtgtgggtgaggacaggtgt

SEQ ID NO: 14101 - DNA, 120 bp, Homo sapiens
ctgcgcatgcaggtatgtgtgaggagaggggttgtggggagcatgtgcgcctgtgaggggaggctttccaactgaagtgctgcctcccccgctggccagctctggagtcctccatcctgt

SEQ ID NO: 14102 - DNA, 120 bp, Homo sapiens
gtgcgcaaggaatgggcctcaccaggttgggggacccttaccaccctgaggggtagaggccaggagggtctgggcattgggctcccaggtgccacaccggccttcggggtccagcaggtg

SEQ ID NO: 14103 - DNA, 120 bp, Homo sapiens
ccacgacccctgcccccctccgcatcaccacccaaaggctcccaaatttccctcccagcaccaatcaggacccccaaccaccaactcaagggtatcggcacaaccctgtggctggtgcca

SEQ ID NO: 14104 - DNA, 120 bp, Homo sapiens
cctcggggtctacagaaaaacatcagggagaggccaggatgggttgcagggtgtggtgtgcaggtgtcttagtggggtggggcggcagcatggggccagcagctgcccacctcctccgag

SEQ ID NO: 14105 - DNA, 120 bp, Homo sapiens
agacgagttcactaccgaagtggcccctaaatgcacggcggcggccgtagccctgcctgctatccttcatgctgtcctcgggcttcccagggcctccttaatggccctgccacccccagc

SEQ ID NO: 14106 - DNA, 120 bp, Homo sapiens
ggccgccgctcagcactggcaataaacatggtgacggatgagtgtggacgagtgtgaggctcagcgcaggcaggagccccatctgtcgcggctgccacccgccctgcctcatcctggcct

SEQ ID NO: 14107 - DNA, 120 bp, Homo sapiens
ctccgcactgagtgagggtggggagcccaggcctggcctcggggcagggcagggcggctaggccggccagctcccccttgcccgccagccagtggccgaaccccccactccctgccaccg

SEQ ID NO: 14108 - DNA, 120 bp, Homo sapiens
gggcggggtgagggtgcgcagagccgtagagggacagctgcctggggctcccagggcccggactcggctccagccgctgcaagagcccaaggtgagccaggcacgaacatccaggtcact

SEQ ID NO: 14109 - DNA, 120 bp, Homo sapiens
ccccgtgtccccccaggtgctggaggcagactcgagggccgaattgtttctagttaggccacgctcctctgttcagtcgcaaaggtgaacactcatgcggcccagccatgggccctctga

SEQ ID NO: 14110 - DNA, 120 bp, Homo sapiens
tgtcgtggggaggggatcatagcccccccatcctaagggtcccagctgcaagttctcccccgaggcttccccttgccctgggccagggggagtcacagcagctggctcttggggacatgg

SEQ ID NO: 14111 - DNA, 120 bp, Homo sapiens
gttcgtgggtccaacccggcacctggcccagcacccattgcagctgcagttaccatgacaacagggccctcccggactggagggggctcctgcagggagggggatgggagcagacatggc

SEQ ID NO: 14112 - DNA, 120 bp, Homo sapiens
tggcggggagatggggtcccccgccagtgtgggggctgtggatgtggcatgcctgacccccatcccctgttcagtcggggggctgtgggtctgatggagaagtggttattcctgcatgcc

SEQ ID NO: 14113 - DNA, 120 bp, Homo sapiens
cttcgcagctgcctgcaccacgcggccgtccggggctgaggtcggctgccctctccgcaggctgcagaacagggttagagttcaccgtggggcagggcccgaaaatcgcccggtggcctc

SEQ ID NO: 14114 - DNA, 120 bp, Homo sapiens
aggcgacacctggccgggtcggactcgacgttcttgtctccagaaaggggtcgtcccccggcgggtcggctgggagctgggcgggggcggcaggagctcacgcctcattccctgcgtttc

SEQ ID NO: 14115 - DNA, 120 bp, Homo sapiens
gcacgctgggtccttggacacaagccccctcggtgcctctccacgcccgctcccgcaccgtcatcaccctctcggcccagagctcccagacgtgctcaggcaccgcggctccaccctgcg

SEQ ID NO: 14116 - DNA, 120 bp, Homo sapiens
cgtcgtaattgccggtctgggtgcgatggaaacagtggtgacgtcatcgttcagaccccccgcccccggaggccccacagattctcagagggacggcgccgggactggggaggccaaggc

SEQ ID NO: 14117 - DNA, 120 bp, Homo sapiens
caccgacgaggccaccttctcctcccctgagcttaccagcagcctcccaattgcgtgcccaatccatccatccatcgctccctccctactacccactggctcccatctggtccacctacc

SEQ ID NO: 14118 - DNA, 120 bp, Homo sapiens
caccgtgcccggccctcccttcttgataaatctcattcttaaaaaaaaaaaaaaaaaacaaagaaaaacatcaaacaggagcccaagcatccctgcccctcctcccctggctctagtccc

SEQ ID NO: 14119 - DNA, 120 bp, Homo sapiens
agccgccggttcaacgtaattaacatcttcctacattgcctagcgtgtccgttgaagcaaataagccattttctctcgacagaggaaatattgaattgtaaaagagaagcaagatttaag

SEQ ID NO: 14120 - DNA, 120 bp, Homo sapiens
ctgcgttggacgcatctcaccggagtgttctctgcagcagtgtaattaaatgcctgggttttggctgccagatcgcagcaggcagaggtcctgagttttgcccattgggtttaagttcag

SEQ ID NO: 14121 - DNA, 120 bp, Homo sapiens
aaccgctggaatgttctggaatgtaccatgtgctagctctcccagactgggtctagcttggaaacaaagtcaagagttcttggcagtcagaagactagagaggaacagagagtgtcctac

SEQ ID NO: 14122 - DNA, 120 bp, Homo sapiens
aggcgttctccagcatagaagtctgtggtctagcagcctgtctcacctcggatgtggcagatgtactaaagaagccaacccacttttttttttttttttttttgagacagggtcttgctc

SEQ ID NO: 14123 - DNA, 120 bp, Homo sapiens
acccgccttggcctcccaaagtgctggaattataggcgtgagctatcacgacggccctgccaacccactctctctttgctgagctcttggttcagggtttaatattcctgctaatgggct

SEQ ID NO: 14124 - DNA, 120 bp, Homo sapiens
aaacgaggctaagaaaaactcatcccttaaaaacctgaacaatcagcatatggccgggccataagtttggctccaagctccttagcagccaactcagaaagggaaagctggtcatttatg

SEQ ID NO: 14125 - DNA, 120 bp, Homo sapiens
atgcggttctcagtgtcctgaaacaaaagtacaccagatgctcaggagaaagctcaattatttttggcagggatttctcccacagtcctcccaaaaaggattccacgtgatgtcaccagc

SEQ ID NO: 14126 - DNA, 120 bp, Homo sapiens
ctccgggcaatatccttacgatagaagtgactagtttcctctagatgtttcttattcctcctgggatggtagagtagggccaactggtaagagcagggtcctggagtcaggctgcctggg

SEQ ID NO: 14127 - DNA, 120 bp, Homo sapiens
attcgcttgctgtgtgacctcagcaagtggcttaacctctctgtgtctttcttagttttttcatttgtacaatggacatgatgactacctacttctctgggttgctaggaggatcaaatg

SEQ ID NO: 14128 - DNA, 120 bp, Homo sapiens
gagcgagactccgtctcaaaaaaaaaaaaacaattctgcacaacaaccatatgaggtaggaactctcggtgtgccccttatgtgggtgaggaaactgaggcctggagaggggagggggtg

SEQ ID NO: 14129 - DNA, 120 bp, Homo sapiens
tttcgttgttgttgttattgggttgtttgaattatttacataaattttaggccacagggcagaaaatactatctggtccttaatagaaaaagtttgccaacccccaatttaaaccactca

SEQ ID NO: 14130 - DNA, 120 bp, Homo sapiens
atgcggcctgtgcctaagtttgggccaatgagacagtcacataagttacatatgcaatcttcagggcatacctttataaggaagtggcttgccctccacttcctttttctcttttgaggg

SEQ ID NO: 14131 - DNA, 120 bp, Homo sapiens
gaacgacaaaaattaaagacagaaggaaactagcatcctggatgacaacaaggaacagagttgcttacctcgggactgctaaacaagagacaaacttttgttctagccactgcacattgg

SEQ ID NO: 14132 - DNA, 120 bp, Homo sapiens
tcccgatctggcctaaaaaatatctataactagggcacacccaaaatagaacatttaaagtgattagggacttgcaaaccatacaaaatggaggaagaatgcaagaaatcaaaagtattt

SEQ ID NO: 14133 - DNA, 120 bp, Homo sapiens
ttgcggatcaagaagcagttgttcccagatctctatagcaaagaatggaacaaggcagtgcctttctgtgagtctcaaaagagggtgactatgttgacggccccactgggattttcagtg

SEQ ID NO: 14134 - DNA, 120 bp, Homo sapiens
caccgtggagcagcacttcccaaaacttgttcactggggtcctcgtgcctatggaatccttctttttataactaagtttaagaaatactttttttataaaatctttggagtatgcgtgag

SEQ ID NO: 14135 - DNA, 120 bp, Homo sapiens
tggcgctgcatgcttcaatcctgaacgtcactgacttgctgtgaccatccaaataattttcctgtctctgcctctgggagggaacaggaagcgatgaagaggtcttggaacagtagtgaa

SEQ ID NO: 14136 - DNA, 120 bp, Homo sapiens
acccgcagtggtcctcttaagcttctttgatgttgctttgttgccatattagagtccattaagtcctcacccttctgtctttcaaaaaacctctgtgaaatctgtttggctggtgaagca

SEQ ID NO: 14137 - DNA, 120 bp, Homo sapiens
tttcgggcttgagttttagagacaaaggtttgccatgcttacaggctgaatgtttttccctactgaacaaactagccagcctttatttcaagctgaatcactttgttacttacggaagga

SEQ ID NO: 14138 - DNA, 120 bp, Homo sapiens
aaacgtatcttccatttatcctagacaaacaaataatctaatttcctctggcagtcaaaatatagtttcacctaagccactgatgcaggaagttaggttttatgtaacctctctaattgg

SEQ ID NO: 14139 - DNA, 120 bp, Homo sapiens
aaacgaaaatgttcatgaaaataatcagagtgatttgtgttaagtgatcctaaccttagcttgctctgggtgccagtgaaattaacctcaacaatgttggttggaagaatttttcaactt

SEQ ID NO: 14140 - DNA, 120 bp, Homo sapiens
ttacgtgtctgtagagtttatattgagggattaagaaataaggaggccaagaggaaagatgtaatgaaaataattctaataattataatctggattcacagtttaaagtattcagtcctt

SEQ ID NO: 14141 - DNA, 120 bp, Homo sapiens
caccgaggagctgtcaaagtatttggagtttcttcattgtaaggagtaagggcttccaagatggggcaggtagtccgtacagcctaccaggaacatgttgtgttttctttattttttaaa

SEQ ID NO: 14142 - DNA, 120 bp, Homo sapiens
ttccgattttccagcataaaaatccacctgtgtctgctgaatgtgtatgtatgtgctcactgtggctttagattctgtccctggggttagccctgttggccctgacaggaagggaggaag

SEQ ID NO: 14143 - DNA, 120 bp, Homo sapiens
ttccgggtgagagaagaagcggagaagggttcagtgtagccactctgggctcatagggacacttggtcactccagagtttttaatagctcccaggaggtgatattattttcagtgctcag

SEQ ID NO: 14144 - DNA, 120 bp, Homo sapiens
gcccgagcctgcttcctattttgattttttttttttttaactgatagatggtgcagcatgtctacatggttgtttgttgctaaactttatataatgtgtggtttcaattcagcttgaaaa

SEQ ID NO: 14145 - DNA, 120 bp, Homo sapiens
acacggacgtgtgtgacaaggaacaccctccttgagcacagggggagggtgaatatcagaactgaatctgacttctgacaacataggagctgaagggaccttggatgttgggtaagcagt

SEQ ID NO: 14146 - DNA, 120 bp, Homo sapiens
cagcgagatctaaaattcctagatggacttggtgttgtggaagcaagacagcagtcgggcaaaggagagacaggaagcaaatgaattctaccttgccaacaatgggaaacagacatactt

SEQ ID NO: 14147 - DNA, 120 bp, Homo sapiens
acccgaatccatccccactcaggaatcctggttacagatgctaaaagatgtctttgacagtgaacagtgggtcataagatctatttctgcctcctgtctgtgactcactggatgactcaa

SEQ ID NO: 14148 - DNA, 120 bp, Homo sapiens
ctacgtcatagcaggcattgcttcttctgccctgctccctcctggactgttcactcagggacaagccaactgccatgtcatgaggacactcaggaagctccatggagaggcactcatcag

SEQ ID NO: 14149 - DNA, 120 bp, Homo sapiens
acccgaaaccaggtctcctaacacccaaccaagtgttctttccactccatcctgctgctatctcagcatctggccacactaggggaagaaggagacaaaaggtaataagcaacctaacgt

SEQ ID NO: 14150 - DNA, 120 bp, Homo sapiens
ccacgtgaatgaaatcacaaccgagggtttccctggtgaaatattttagataaataaatgcctggttgttgaggccactgtggcttctgactcaagtgtttcttaaccagaaggtgacaa

SEQ ID NO: 14151 - DNA, 120 bp, Homo sapiens
aggcgaatgattccaggaggcttacagtggctctgaaatggcagcatacctgtccccagcacacagggagattattgtttcagaatgcctgtgttccagtaaggtcttttgttgctctga

SEQ ID NO: 14152 - DNA, 120 bp, Homo sapiens
tcacgttccaacagagatttaacatctctggcagatgatctgaacccggcccccgtaataaaatgccttggagaagagcgctggtcaactctgtgtgtggtaacaatgatgacacatggc

SEQ ID NO: 14153 - DNA, 120 bp, Homo sapiens
ttgcggatatgatgccatttatcttcccaggagctggaggagatttctttatgattatacaaatgggagatacaagtttcaggagcaaagttcttgctcaatatccagaacgggaacgaa

SEQ ID NO: 14154 - DNA, 120 bp, Homo sapiens
gagcgggaggattgcctccaagcacaatgcatcgcgtggacacaaggtgcttacttaatgtcagccctgtgggggtttacatgcattttaataaagatatttaaactgtgggcgctaaat

SEQ ID NO: 14155 - DNA, 120 bp, Homo sapiens
taacgtgcagttggaattctgcacataaattgtcatctgaggcctgtttttgcacccattcctgatctcacctctgttccctcccacctcaagtgcatcagacacaggttttgtgaagaa

SEQ ID NO: 14156 - DNA, 120 bp, Homo sapiens
acccgacccatggtcgaggatgttggtgaactccaagttgtgtcaaatccagacgatcagcagggtaggactctaaaatgacagtcttttgaagcaattattggtgtttttcaggccatc

SEQ ID NO: 14157 - DNA, 120 bp, Homo sapiens
cagcgcctcctacgaccctcacagggctcaggtgggctccgctcaccccaaggctggatacagccccctcacacacacaagcctccccttggcccaccgccccctcccccgaactgctcc

SEQ ID NO: 14158 - DNA, 120 bp, Homo sapiens
tcacgggtatctacctctatatacgacctttaacctcaagtgaaagaaaacaggaccctgggacctgcagccgctggggagtttaccccacctgtacctgctcccagaaccgccggtccc

SEQ ID NO: 14159 - DNA, 120 bp, Homo sapiens
tctcgtccctggagcagcgcgtggggaccaaattcccgcctctggcagcccctttctccccttcccgcgccagcggtgcagagccactgagcaactcccgagtgctcctaggcccagcgc

SEQ ID NO: 14160 - DNA, 120 bp, Homo sapiens
ggtcggggtgggggaataaggagggatggagcctgcagagtctcctggaaccccggcgtcctggtccttgcaggatctccccacccccactccgcattatctccaggcctctcactcccc

SEQ ID NO: 14161 - DNA, 120 bp, Homo sapiens
ggacgcgacccagtactccctcccgccccggaccctccagatatcgggacaaagaagccccgcggcagccggcgagcgtggctgccgggcactggtgcagcaggtaaataccctgggccg

SEQ ID NO: 14162 - DNA, 120 bp, Homo sapiens
ggccgccacgtcgccgaccctcccgcagctcccgccgccagggcgcgacacgccattccccctgccgcgactccccggagacgccgcagctgcgcgccagggtccagcccggcggggatc

SEQ ID NO: 14163 - DNA, 120 bp, Homo sapiens
gatcgggctcgggactcacccgctccggcgagctcgactcagctcgggctcccgcctcggctaggcagccgcctggggctgcgtcccgcgcagggtcagcgcggatcgggcaggaggcgc

SEQ ID NO: 14164 - DNA, 120 bp, Homo sapiens
gaccgacgcacggacccggggacctcgacactcgctaggaggcaagccctattcctcagccgggcgcccctcgtctcccgctctctccatggacccctctcctggcaaatcgcccgcaga

SEQ ID NO: 14165 - DNA, 120 bp, Homo sapiens
gagcgagcttggagatgcgagggaaactgaagccccaagggtgccccgtcctgggagcctggctgtctgcggggtcccccgcattccgcagtagtaatacaggagggccgggggcttcta

SEQ ID NO: 14166 - DNA, 120 bp, Homo sapiens
ctccgctccccttcgggtctctcctggctgtgcaagcgatgggccagagggctggacgaggctggctcccaatccagaatcccgagctggggagttctctctaggttctggggctcctgg

SEQ ID NO: 14167 - DNA, 120 bp, Homo sapiens
gaccggggctttggggaagggagatcgcaggacggatatccaggaagggagggggccctgggtctcccgttacctgcgcctgccgcgctgggactccgctctgggggctgcagctcgaag

SEQ ID NO: 14168 - DNA, 120 bp, Homo sapiens
ctccgacaagtctccacgtccagcccgagagggggcggccgggcccggcacagcgaggcgaggaccgcgagcgcctcctggcaccgaggcccgccggccccccacactccgctcatgccc

SEQ ID NO: 14169 - DNA, 120 bp, Homo sapiens
tgccgagcagcagctcgaacccgcgccccggccgcactggggcggggcacgacggccccaagaagaccctccctgcagcggccccctgcggctccgctctgcttttaatcacttccccgc

SEQ ID NO: 14170 - DNA, 120 bp, Homo sapiens
ccccgcccctcacgtggcatcccgcggcagctggcgagtctggcgcctcgcggccgccccctctacactcagggactggcctgagtccggggggtgggggtttcgaggcgggaagccggg

SEQ ID NO: 14171 - DNA, 120 bp, Homo sapiens
tcccgaatctcggagggtgcaaggccaggaaagagtccgggttcccactccgcattcactgcctggtgtgaccttgggcgtctctgagcctcaattttcctctccgtaaaggaggtgtaa

SEQ ID NO: 14172 - DNA, 120 bp, Homo sapiens
tcacggactccctggggatagaaagatcgtgtttgtgaaaacactgggtaaactgccacatgccacacgaatgacagagaaatagataaccccgtaacagaaagagcgacggtcaggcag

SEQ ID NO: 14173 - DNA, 120 bp, Homo sapiens
ggccgaggttcctgacgggagcagttagactggcccccgagtcccagcttcggaggtagaagaccccaagacaggcgggcgatgcgaactgcaagactttccgagctccgcaatcctgcg

SEQ ID NO: 14174 - DNA, 120 bp, Homo sapiens
gtccgcggtacccgcatgttgctatggcgacgggaggcagcggccgtctctctccatggcaacgggagggaaaagtttctggcaaacaggaatggggggtcatttcaagagggcgcaggg

SEQ ID NO: 14175 - DNA, 120 bp, Homo sapiens
gggcgctcagttccgccgacccacctccttgcttcggtgaaacagcaccagagatcatgtatctttctgctaagcataacaagaaagacagaaagctcaacgggaggattgaggctagac

SEQ ID NO: 14176 - DNA, 120 bp, Homo sapiens
gatcggctgagaggcttcgagctgcctcactcagcgctggaagtctgtgagccatggtcagggaggccgggggaccagcgccctgcaggggcctatctcgggagtctcttgatctacacc

SEQ ID NO: 14177 - DNA, 120 bp, Homo sapiens
tgtcggcggtggggccccttctgtgtggggctcgcctgaagccccagactcaggtccatttgctctcccggagctgggaaggaagctttagctgcagcccctggaggctgctgggttggt

SEQ ID NO: 14178 - DNA, 120 bp, Homo sapiens
gcccgagtggctggcgagggagaaaggtcttgcctcttaattaacacgcttattggaagtgactcgggcagtgactcacgttccggagggaggagattcggagccttagctcctggcggt

SEQ ID NO: 14179 - DNA, 120 bp, Homo sapiens
taacgatgcagtggtttcagtttccttccattgagtgagaaggaatatttaattttgaaaccagtggaggctcaggccctacgcagcaaggtagaggagacaacagcacacggccccttt

SEQ ID NO: 14180 - DNA, 120 bp, Homo sapiens
atccgtgctcccctgacacctcctgtttccaggtcgcagatgagatgaaatcctctttgtggaatactgaaaaggacttttggtctccagggtttggcattccaaacagaagtaactgaa

SEQ ID NO: 14181 - DNA, 120 bp, Homo sapiens
gtgcgtggtccagtgaacagctggggcctgcctgatgggaattctgcctgtgccagggcctgctcagctcagagggccctgggccagaaagtactgaaaagagcccacaggtccttacta

SEQ ID NO: 14182 - DNA, 120 bp, Homo sapiens
tctcgcctgaaccttgccaccacaatactaaaggtctatttacagtagtaccctttacccagcatatcatgtccagctatcaggaaaaagttacaaggcaaaaaacacagtgtggaaaga

SEQ ID NO: 14183 - DNA, 120 bp, Homo sapiens
aatcggatatagacttgtcctcaaggaacttttagtctagcatcattgatgatcacaaaaacaaatctaaacatacacattggaataagtgcaatgaaggaaagacaaccttcaattcaa

SEQ ID NO: 14184 - DNA, 120 bp, Homo sapiens
ctccggcccctcccccctcctcgggggactcttaccttaataggcaagaactgagagagggtgcgggaggcggcgccctgagtcctgtgggctgccctcaacccagccggccagtggagg

SEQ ID NO: 14185 - DNA, 120 bp, Homo sapiens
tgccgggttccactgatcggagggcttggaaggatcccaaattttcgggatcttaattatgatgtggagatgggagaaaggggaagggggcggtttttgttttgctttgtttttattaag

SEQ ID NO: 14186 - DNA, 120 bp, Homo sapiens
attcggagagcttatgcataaattcagcaaaactttgagtgcctattataggccagacatagtagcaagccccagggactcaacaatgaggagacagccaggcccagaaccacagtctct

SEQ ID NO: 14187 - DNA, 120 bp, Homo sapiens
agacggagcccaggcggaaaagatcagtccaggaagacagcatgcgcaaaagcacagagctggagagaacaaggcctccaagggagttctgagaaccgcagttagcccgagtgaagcctg

SEQ ID NO: 14188 - DNA, 120 bp, Homo sapiens
agtcggctgaccaatgtgccaaactgtcattggccccgagtgtccccacgtgcaacatggaggtaatagtactcccctcatagagttgtgaagataaatgagttagtatttgtgaagtgc

SEQ ID NO: 14189 - DNA, 120 bp, Homo sapiens
catcgtggaagggaaaaggagagatacaatctgagctcagggacatggcagtcattgtctgatctgctcaacttttcactcacagctcctagctctggaaaatagcccaaagcttttatt

SEQ ID NO: 14190 - DNA, 120 bp, Homo sapiens
gctcgtttgaaaagaggagcctggccaagccacattccccactaagggctctgaaccagaagacactgagagaaaggacagcattgggactgacgctgcaggatcacgatgttgcgggga

SEQ ID NO: 14191 - DNA, 120 bp, Homo sapiens
agccgttcagtggtaaggaagggacagaaaaaatcgttatcatgtcaatgacagaacattaggtggaaatgtacaaagtcccactatcgagggcctgagggctgctgcagatccagagcc

SEQ ID NO: 14192 - DNA, 120 bp, Homo sapiens
ctgcgtgctgctcccaccccactatgccaggccgtttggctttctctgggtgcccgggtccttgcatccttcaagaaacccccatgacaagaggaaagcttggttagtctcagtcttatg

SEQ ID NO: 14193 - DNA, 120 bp, Homo sapiens
gaacgtccctaggcacacacacatgtgagtatctcagtgtaaacgtatctgcagactccaccacaacccagaagtcctgtgagtgtggggcaagcatggcgggtagggggtggtggggag

SEQ ID NO: 14194 - DNA, 120 bp, Homo sapiens
gagcgccgagtgtggggagaccgagggatcagggaggaaagcactgcctccccttcctggagagtccagttggaagaactcatgggtcatggcagtagaaagtgctacttttagtttcct

SEQ ID NO: 14195 - DNA, 120 bp, Homo sapiens
gcccgacatgaagcagtgtgatgctgtttcagagcagaggatattggcctgaagggctgtaactctgtgctgtccccaaaggccgtttctgggcagtgtttatcttttgtctgcctgaga

SEQ ID NO: 14196 - DNA, 120 bp, Homo sapiens
catcgtgattctttgcatgcctgtaacatgtgtcatctacacgtattcttttggcacccatcacctacagttttggttacttcccttagaggcttgtgtttgtgtctgggggtgtgttac

SEQ ID NO: 14197 - DNA, 120 bp, Homo sapiens
cttcgacaagccacgaacgtccccacacttctatttcctcacctgtaaaatgggaatgatgacatctgatgataagcaaccatggccaacttatctaacagaaatgaaggtccaatgcca

SEQ ID NO: 14198 - DNA, 120 bp, Homo sapiens
ttccgaattgtagtgttcagtgagaaattgataacattttcttcttgtaaggactgtacttcatagatttttaatggctgtctcacatcgcaaccccaagataacacactgctgagcaaa

SEQ ID NO: 14199 - DNA, 120 bp, Homo sapiens
tgacggggtccttttttctaattagcatgcttcagtttactgtgtgctgtgcaggaaatagaaagcacacgtcagtgctgaggaaaggagagtgtgactaaagccttctcttaggttttg

SEQ ID NO: 14200 - DNA, 120 bp, Homo sapiens
tttcgccaccatccaggcacactggagcctgaggtggacctcccgccctgcttctcccagtatggcagtgtaaggagtggccctcagacagagactagtttcactttcataggtttggtc

SEQ ID NO: 14201 - DNA, 120 bp, Homo sapiens
tggcggaccgtgagggagccagctgtgtggctaatgtgggagggcgatgctgagaggcaggggctctgaaaagccatggtgacaggggaagagaacctctctgtgaggggtgtgtgcaca

SEQ ID NO: 14202 - DNA, 120 bp, Homo sapiens
gcccgtgtaggtttttggccaaataatgcagggtaatgaatgctctcacatcctgggtttccaggctgtgctctgctctctgcttggcttaaggtagacatgtaaccgaagattgctcct

SEQ ID NO: 14203 - DNA, 120 bp, Homo sapiens
cagcgcttactctgggtgtttgcagacaaaatgcctgttagcattttgtctggctctggagccctgagccagagacgccaacatctcttggctgggcaagtggcttcctggactgtggaa

SEQ ID NO: 14204 - DNA, 120 bp, Homo sapiens
aatcgccgctttgtgtcccagtcgtgattggaatggctggccatgcacatgctcagtggaactgagcaattgtagaacgctcagcctgcagctgtggggcgattatctgcaatcatttgc

SEQ ID NO: 14205 - DNA, 120 bp, Homo sapiens
aaacgtttgtttttgaaatatccattttcttcagccatgtcgcagtcagagggaggaagctgctccagctatggctgtgttcatcagggtgctgcaatgtttagctatcacgaaaacttg

SEQ ID NO: 14206 - DNA, 120 bp, Homo sapiens
atgcgggtcctgagggtggcatggtggaagaccccagtccattaccttaaacaaatggacacaattccaaagtcaaggaaccaagtggtttgattctgtagaagtgtagcagaaataaac

SEQ ID NO: 14207 - DNA, 120 bp, Homo sapiens
acacggttctgtgacacatggcgtacccttcccctccaagacagactctgtgaccttttggcttggatccaatcgacccttctgttgctctccccagagcttggctttgcatgctcaggc

SEQ ID NO: 14208 - DNA, 120 bp, Homo sapiens
gcacgcttcttgtagatgatatgaactggatttaagtcacaaaatctgtggctagtgcttggtaattgctcaacttaattcaacacacacttaatgagcacctgttctgtgcaggtgcac

SEQ ID NO: 14209 - DNA, 120 bp, Homo sapiens
agtcgtgaacagaacagaaaaattcttgctctcagggagcttaaattctcgtggaggtggacagaagacaaataacaaattaacaggaaatgtccgttggtgataagtgctggaagaaat

SEQ ID NO: 14210 - DNA, 120 bp, Homo sapiens
acccgggcgccgcctggcccttcgccaggaaccgggacagagctggtctgtgtgcacacctcgctcacaaaaaattgagccggccctggaggcctggggggcgagtccggttgcgcctcg

SEQ ID NO: 14211 - DNA, 120 bp, Homo sapiens
gagcgcaacaggcaggtaggagtttactttcaaaaacgccggggtggagcagaggcgcctggcgggtctctgcccaaggtgtccctgctggaggaaatctcaccgcgccggggcagcctt

SEQ ID NO: 14212 - DNA, 120 bp, Homo sapiens
cttcgccaccggcaggacctcatttccttctgcagtctttgaactgccccaagcatcgcgcctagagaagtgtgaagctttataaaaatttaaacgcgtccgtggtggcggcagcagtgg

SEQ ID NO: 14213 - DNA, 120 bp, Homo sapiens
gggcggagccgcggcctggctgctgtgtgatgagcagatgagacttggagctgaggaatctgttgctcagttttcacttctccaaaccaggtctaatgcccacgctgcgaaggtgttgtg

SEQ ID NO: 14214 - DNA, 120 bp, Homo sapiens
gagcgccttatgatgatgattgtgtagatggcccatgcattttgttaaaactcttgacctggctttggttagaaatgaatgtattcttagacacttagtccaaaagctaacaaactgtaa

SEQ ID NO: 14215 - DNA, 120 bp, Homo sapiens
aggcgcacctgggatcaagttggccgcttcaacatatatggccatataagctcgtggtggctatcgtttatgaattatttactttgaataaccactttaaaatgtgttatttcatcttca

SEQ ID NO: 14216 - DNA, 120 bp, Homo sapiens
gggcgatgccgacctcagccagcacctggtatacttggatctcgcaggctgctgctggaggttccgagtagctgcctgtaccaggcctgccccagtcaattcattagcctttcagtaaga

SEQ ID NO: 14217 - DNA, 120 bp, Homo sapiens
agacgttttatgccactgagtattttggagcccacttatcatggtaatcagggttttctgtgctgctcttcccatcctgcagatgaagagtatgaggtttggagaagtgactaatttgtt

SEQ ID NO: 14218 - DNA, 120 bp, Homo sapiens
gtgcgtgcctcctcccacagcctctgtgcagactcagacatgcacagagcatggggaggcagtggatggtctagatatgcagggcattaatttggtttgtatttttttcttcagaattta

SEQ ID NO: 14219 - DNA, 120 bp, Homo sapiens
ctacgttttgaggtgcttctttccaggtctgtttaagaaatgtagcccaagggcaagcccctcttctctgttgccatggcagtcatgtaacagttgtcaacaacactggaagtgctttcg

SEQ ID NO: 14220 - DNA, 120 bp, Homo sapiens
gcccgtccttcccaggagttcaagtttggaccagcctagactgaagcctattgaggaggtttttatgcataggtctcaagcgaatttctgtcacaactaggcgtaccttcatgtgctgtt

SEQ ID NO: 14221 - DNA, 120 bp, Homo sapiens
ggacgtgtcccctgtgtgtcagggatttgcatgggcaagcttgttgaaggggcaagaccagcttccttgactccctcgaagatatcacaagtcatgtgtcatcactgttgatgctgcaag

SEQ ID NO: 14222 - DNA, 120 bp, Homo sapiens
attcgaaaagccttcctgaaagaagccagtcctgtgttggctttgtggttccttccatatttggagggtggagaggaatcaaggcaagaggaatgctgggcacggacagtggcggaggga

SEQ ID NO: 14223 - DNA, 120 bp, Homo sapiens
tcccggggctatgactgaggccatggcatagtaattaggaatgactgatagcagtagtgagggagaatgtggaaaaaatgtaaacaaaacagcctcacctattcacacttgctgcagctt

SEQ ID NO: 14224 - DNA, 120 bp, Homo sapiens
gtacgtggcacagctcactgttaagatgcgtaatcatcatctggagtaatcaagaagacttaaatcatatatcacatagcttactctcttcaaaacgatgaagaaaggccaggcacagtg

SEQ ID NO: 14225 - DNA, 120 bp, Homo sapiens
aggcgtttatcaacttcaccctgagatctcttcagctccagcattggcttctcagcctgtggggctggccaagcccacggcaggctctgagtcatcctgttgcttctctgagagggcaga

SEQ ID NO: 14226 - DNA, 120 bp, Homo sapiens
ggacgcctgcactttccccttgtttggtatttttgagcaaagactctcactctttgggaggactgtgagagccatgcctgtgacacccagggctggcatcccacagtacccgcccccacc

SEQ ID NO: 14227 - DNA, 120 bp, Homo sapiens
ggacgccaggactttgctctgaggggctgtcaggtgggctgtggacttggcttatttggagagctggcccatttggagagcatctgctgaggccccgtgctggaaggcggtgggccggga

SEQ ID NO: 14228 - DNA, 120 bp, Homo sapiens
ctccgacccacccatcccctcacaggccccagctgaattaatgggattcccttgacccctccttgcagcctcgctgaacagaaaagcaaaacccagcaaccacaagatagttttgagttg

SEQ ID NO: 14229 - DNA, 120 bp, Homo sapiens
ggacggagttggagccacattgacttggagattgccaggtgagaccttcagggcaagcagactagacttctgcaggaagagctctcgtgacacacaaacctccacggaagtccgcctcct

SEQ ID NO: 14230 - DNA, 120 bp, Homo sapiens
ctccgtggttactcagccccacgtgttccagcatgagaacatactcactgtcatggggttcatgctccaggtaccagctaaggtctatcttcatattcccagggcttagcagacacaggc

SEQ ID NO: 14231 - DNA, 120 bp, Homo sapiens
caacgagaagtgttttgttcaattttcaaggcgctgttaaaaaaatacagcctctaaatgggaactggatacctggtcttaaaaatatacagagagcatcctgctcttctgcagtgagtt

SEQ ID NO: 14232 - DNA, 120 bp, Homo sapiens
tcccgtctgttccctctgcaggagtcagcaggcggcctgacggcatggcaggggagacatgccaggtaccatgaaatcatggggttggaatgtggagtttgggtggtgggaggatggggg

SEQ ID NO: 14233 - DNA, 120 bp, Homo sapiens
aaacgaaaggagcttgggcttcccatgggtttggacaagagacaaaccacaaagaaaacagcttctagcctagcccacaggcattcattcaaggggaagcctggagcatcaacctacaat

SEQ ID NO: 14234 - DNA, 120 bp, Homo sapiens
cgtaatgtgctgggcactgaaggtacagagaaagacatatcttgtcttcaagttgtgtacagtctaatagagtagcggataaataaatgatgtacacttaataggtgttaaagaagcaag

SEQ ID NO: 14235 - DNA, 120 bp, Homo sapiens
caccgcaagttttaaggaggagtggttatgactgtggtgtttcaacctagtctagggaaggctgcaggaaggttatacctgatggaagaaattgttttgtttggggttatgagaaagttt

SEQ ID NO: 14236 - DNA, 120 bp, Homo sapiens
ctacgaagttccttaagctattattaaaaacatgcaaactcctccttggttagacctctagtaagtcagacttctaactaagcagaactgataggcctgtcttttgatgtttaacgagtt

SEQ ID NO: 14237 - DNA, 120 bp, Homo sapiens
ccccggccccccacaacccctggccttcctctcccaccaatcccttccccttctttctttctgcatgtgtttttgatttccttacccccctgcctctcaagactgggatcatttccattc

SEQ ID NO: 14238 - DNA, 120 bp, Homo sapiens
tatcgaatatgccccaagcctgccagtggatggagagggaaaggctttggagtcagtcttgtcctctggactttttccactagccccttctctgctttctccctacaattagggagactt

SEQ ID NO: 14239 - DNA, 120 bp, Homo sapiens
agacgaggagaagagagagggctgagaggtggagagttgatagcctgggctctgggacccatacaggggaggcatggcgtgtgggctcctcataaggggcaccactctatggaagccctg

SEQ ID NO: 14240 - DNA, 120 bp, Homo sapiens
aaacgtacagtatgaagggggtagtcataaggtcagtccataaccctgccagcatcatccagatagaagtggatctgctatccctccccacacctgacttcactacctgcacacccacaa

SEQ ID NO: 14241 - DNA, 120 bp, Homo sapiens
aaccgaatgggaggcccggccctcatctgcccttctgtaacttgtctttccctgccaggcctccctcggagctcattgttgaaatctggcatccagagctatggattccccgctctgcca

SEQ ID NO: 14242 - DNA, 120 bp, Homo sapiens
tctcggtgaaggctattgtgctagtctgagcagaacgggaggtgcagggattgcagctgttccttcactgcagtgtcagtttggaaattttcccagaagacttagctggtgcctcttctt

SEQ ID NO: 14243 - DNA, 120 bp, Homo sapiens
caacgaccctcctcatctttgtcgaacccattcctcttggaccacaccaagtatagtccaaaaagaaggtgatttaggagaagtgtgaaggcaccctcagttctggcaaattcttgggta

SEQ ID NO: 14244 - DNA, 120 bp, Homo sapiens
acccggggccgggagatgagccaggaaaatagcttcatgtttgacttgagggtacaggcatctgcagaagccagcctggaagactcttcatgagcccagctgcaaggggcatcctagagc

SEQ ID NO: 14245 - DNA, 120 bp, Homo sapiens
tagcggaactaaggatgacgtggccctgtgcaaggaacttaatatctctgggcttcattctttatctgtttacctacccccaggtcctgaaagtaccacagaaatatctgtttttattca

SEQ ID NO: 14246 - DNA, 120 bp, Homo sapiens
ggccgtctgacagccctcgagagagagtttgctcagccgtggagtgggaatgagaacagtgccctctgaccacccctcgggctgctgagtgggctgtggccacctttgcagtggatccag

SEQ ID NO: 14247 - DNA, 120 bp, Homo sapiens
gtgcggatgtggttgagtgaccaaggagggctccagtttccttaaccctgtagacgtgtatctttccccatggactcttgggtgtctcacagttgggcagagattgcagggagagggcag

SEQ ID NO: 14248 - DNA, 120 bp, Homo sapiens
aagcgccgaaggaaacaaggcagggagctgggcagcagttgcttcggttacttctttctgctttgatttcctgaggctggcaaggctctgagtgccaggaaggggtaagagtagggaatt

SEQ ID NO: 14249 - DNA, 120 bp, Homo sapiens
gagcggagtggagttgagctgagttttggagaggagtttctcagggtggttaaaacatcctgggtttcctggcttgggcccagattatgcctcttctgagcccactgaagggcgagtgga

SEQ ID NO: 14250 - DNA, 120 bp, Homo sapiens
cagcgaggagcccatagtccagagctaggtgccagtggcttcctgccccctcctgtagtgctcaacaaacagtgacctcatggtagcttctctctgtccccaggaacatccctgaagaat

SEQ ID NO: 14251 - DNA, 120 bp, Homo sapiens
ccccgcagtcattgtcggcctcctgaaagaggcttccaagcaggcggatgtgaacttggtgaacgctaagctgctggtgaaagaggctggcctcaatgtgcgcccctctcccccacgctg

SEQ ID NO: 14252 - DNA, 120 bp, Homo sapiens
gcccgttctctgagcggaggcctaggtcccagccttgcatcggcctgtctacctgtgaggggtagctgcagtttcttcaactgcaaaatgaagatactgcctggccccgagtgttgctaa

SEQ ID NO: 14253 - DNA, 120 bp, Homo sapiens
tgacgagctagtgtgtttgactctgcccgacatggctgccaggccatgtttgactctgcctaactcccctcagggctcctcatgccgtagcacccgggttcttgattcacttgcaagctc

SEQ ID NO: 14254 - DNA, 120 bp, Homo sapiens
gcacggcttcccgttggcgccttcccctctggttccctgtttagatcaaagtctgtttcaaagcctgttgctcagccagtgggagctggcagaagggataggcagtagagctgccatgtc

SEQ ID NO: 14255 - DNA, 120 bp, Homo sapiens
tgccgtgcaggaggctgtgtcagagcaggaggggccagagtggagtctcctcacagccctgcctccctgcttttctttcctccctgttttcctccaagccttcgcctgtgcctggcagat

SEQ ID NO: 14256 - DNA, 120 bp, Homo sapiens
tgccgaagggcacacagcttggcccatttgccctctcccttctggtcctgaattactgagcacattatccaggctggagccctacatcctaccaatgggtgatttggccaagagaggagg

SEQ ID NO: 14257 - DNA, 120 bp, Homo sapiens
ggacgtggtgcagccaggaggtgtaacagtcaccttgccttctccacacaggtcaccacctcccacagccctgctgcaccaggggagcaaggcttcggggaatgcctcctggccgtggcc

SEQ ID NO: 14258 - DNA, 120 bp, Homo sapiens
aggcgccccttaccaggctgtgggcttggtccaaggcactacgcctgtactgcaggggctcaatggagctgtcttcaggccagaagtgcctctccgcagggacctgcccctgctcctatt

SEQ ID NO: 14259 - DNA, 120 bp, Homo sapiens
ttccggactcagacctctgaccctgcaatgctgcctaccatgattggtgaggagggccctgtagggctggctggtgtccttgaggctggggtggggtctgccctggaattgaactctacc

SEQ ID NO: 14260 - DNA, 120 bp, Homo sapiens
aggcgtcttggacctgccccagtcagctggggcttgggctgctaggggttttggcacacgtccatgtttggcggagggtgtgccttcaaaccctgaagggcctaatttcaccattctttc

SEQ ID NO: 14261 - DNA, 120 bp, Homo sapiens
atccgctcattgcacctttgatcacaaaagctttgaacttctgattctgctcccaatccctcgctcctttttcccctatcccctgtgccaaccaggagtttcttctatttccaggcctcc

SEQ ID NO: 14262 - DNA, 120 bp, Homo sapiens
aggcgtgcggctgctgtcctaccagacttcactggtgtcagatggggagacctggcacgtcatgggcatctcctccttgctgcccagcctggaagcgtggaagcagcatgtgactgaagc

SEQ ID NO: 14263 - DNA, 120 bp, Homo sapiens
gaacgcgggcctctgacactgcttacactgcactctgaccctgtagtacagcaataaccgtctaataaagagcctacccccaactccttctgcacttttgtgtggtcattatcctaaagc

SEQ ID NO: 14264 - DNA, 120 bp, Homo sapiens
gtacgctgctttgcctgtcatgtaagttttctctaaccctgtcacccaccctgcacattagtctgtgttacacccattttacagacaacagggctgacctgcacagtgccaccattaggg

SEQ ID NO: 14265 - DNA, 120 bp, Homo sapiens
tttcgctaagctctttctgtttctttgttttgttgttgtttattttttgtaaatgatgacttaaactagctcaagttggtctgttacttgaaacacaaagaaacttacttaaaactttac

SEQ ID NO: 14266 - DNA, 120 bp, Homo sapiens
gaacgcactgaaggtaactctgggtagtatatctcactttaagtacccagtgagtgactaccacaattttagctgacaaactgtaaaatatttcttccatccactcccctatccaaacac

SEQ ID NO: 14267 - DNA, 120 bp, Homo sapiens
attcgatgtgtggtcaattaatactgcaggtcttgagcagtagaaaacgacgatctgcattgatttagaaagtatgcctggagagaggtgcttaaaataaagatttccaaatcaaatttt

SEQ ID NO: 14268 - DNA, 120 bp, Homo sapiens
cttcgcaactgatcaataatttcattgcagagatgctttaactgcaccttcatttcttactaggcttcaggtataacagctcaaaatatttttcctttatatatttatctttgtatttct

SEQ ID NO: 14269 - DNA, 120 bp, Homo sapiens
cttcgaggtgtaaatagacaaacattatatctttccctaaaagactccaggagtcctccccccacttttaaacctgagctaaaggtttttaatctctttgaaacttatcctctacaagaa

SEQ ID NO: 14270 - DNA, 120 bp, Homo sapiens
gagcgtgccaggttgtgaaagaggggagaagtgtgtgagggagtgtgtagagaaagggtggagtgcggagtatttcaggcagaaagcataggcttgagttgaagagacagcatggttcat

SEQ ID NO: 14271 - DNA, 120 bp, Homo sapiens
ttgcggcaatgaaaaaaaattcttgtggttgaattataagaaatgcattaggggagtgaagagaggtgtggctggagagggagttacatgcacagccttgggactaaatccaaagacaag

SEQ ID NO: 14272 - DNA, 120 bp, Homo sapiens
cagcggcagttgtaagtgttgaccccatccacacaaacccctccattctgacacctgtggttagggcagtcatcaatattcctctcacaggtgctcccttcaaaacctggtaaatgaaga

SEQ ID NO: 14273 - DNA, 120 bp, Homo sapiens
aaacgacctgctctgttcccacagaacatggttattagaatagacccgcttcatgacttcagttcaacagctgctcacccaggactcaccatatgaaaaatccccaattctctgtcttct

SEQ ID NO: 14274 - DNA, 120 bp, Homo sapiens
aggcggcctccaagccaggtggggaagggagtgggggaggatataggaaaaatattgaacttaaagtatgaagatatggatcaagtcccaatctcaccacctgcaagctattcgtacatg

SEQ ID NO: 14275 - DNA, 120 bp, Homo sapiens
cctcgaaatatcccttaaggttcctctctctcactcaaaatacttactgggacttacattaggcactggtgatacagcagtgagtccctgcttttgtggcatttacagccttgtgagtgg

SEQ ID NO: 14276 - DNA, 120 bp, Homo sapiens
actcgatctctctgatgagtaagactaaatacagttgactagggtgtcagggaggtagcgaagcccttgtagctcaactataaggaatagaaactgtgactctaactttatattagccaa

SEQ ID NO: 14277 - DNA, 120 bp, Homo sapiens
cggcggcagcctcccattggctacgtttgtgtcacctgagctgaaccctggaactggtgccgctcgcgctcccgcgctctttgggggcgagtcttaaacaaacagcgccccgcgagtcgg

SEQ ID NO: 14278 - DNA, 120 bp, Homo sapiens
atacggttagaggaattacaggtcagattacttatagcctgtaggactttggctttgctctaagttaaatagaaagtcaatagaggattttgagcaaaggaacgaataatcaacactttt

SEQ ID NO: 14279 - DNA, 120 bp, Homo sapiens
gtacgacatgttcctagaggctgttctaagtccatttatgcaaaagtacaaaatgactttattcaagctatcactaacatcttgccacaagttacttctttattattacttagatttatt

SEQ ID NO: 14280 - DNA, 120 bp, Homo sapiens
ctgcgtcatgcagcctcttatcaattgcatcacaagacagaatggatgaaggaggcagaattgttcagtggaaagagcagaagttttatcctctattttaggatgggttcccctagaagc

SEQ ID NO: 14281 - DNA, 120 bp, Homo sapiens
agtcggacattttattctccttgcaagctgacagattagtttgtaggtttcatgaatgctgacacagagacaacacacttggatcaacaatgaagggctttattactgaaagcagtaacc

SEQ ID NO: 14282 - DNA, 120 bp, Homo sapiens
tatcgttctgggatggtatcatggttgaacatgaatgtgttatgtcttaggatttgcctgaatatatggccaacactttttttctcaatcaggtaattatttccttggatggtctactat

SEQ ID NO: 14283 - DNA, 120 bp, Homo sapiens
cctcggtgactcaacacaataaaagcttattttgcaccatggtctggtatgggacctttgggggcatctcttctccaagcagtgactttggaattctggctccttctatctgtggctctg

SEQ ID NO: 14284 - DNA, 120 bp, Homo sapiens
ccccgaaagagctggtccttcaacctgtactctggaatgagaagacctgtagagcagagccaaatagagctgaatagagtagattggagctgcagcagctgcagctaaccaacagcttcc

SEQ ID NO: 14285 - DNA, 120 bp, Homo sapiens
tgtcgggagcagcagctcaagggcaagagaaggtgttgagggaaggagggtcaaggtggctggggctggaaagtctggatgactggccatggggccacatcactcatctcccaggacctc

SEQ ID NO: 14286 - DNA, 120 bp, Homo sapiens
gcccggggccacctccctcttttgaccctgcctgcgcagcttgccttccccgctctctccaacccacagccgctgctgtcccagggcccatggtggtgggaacagcctctcccatatccc

SEQ ID NO: 14287 - DNA, 120 bp, Homo sapiens
tcacgcaataaaagcccatttacctgcagaccagctcaatccagctccagattcccagggaagaaactgaacagcccaccctggctgggctcatgctcatctgggtggagggtctcattg

SEQ ID NO: 14288 - DNA, 120 bp, Homo sapiens
caacggtggaggactgctctggctaaggggtttgctgtggactagaaagatgctcccaaaatgtgttcacctcagatgctgcgaccatccctataagctttataaaatgaacccgggaag

SEQ ID NO: 14289 - DNA, 120 bp, Homo sapiens
ccggacaccaggagagctgccacccggacagagctggccagaggcctgtgcatgggccacaaggaaagaaggcacagcctaacgtaacctggcaagcacctgtgtagcctctgtaagtgc

SEQ ID NO: 14290 - DNA, 120 bp, Homo sapiens
gcacggcgatctgggtgtttggtgacacttccatctgagagcagggcccaggtggaagaggcagctggatgcaggttagtggggccggttccacggacatttggggctgggtgggacagg

SEQ ID NO: 14291 - DNA, 120 bp, Homo sapiens
atacgactggatttggagtcccccaccactctcaccacgcaacctgaacatgttgtagtttgctgatgaacttcaaaagtggggtacccagggctcaacacagctccgtggaaccagccg

SEQ ID NO: 14292 - DNA, 120 bp, Homo sapiens
gagcggagaaaaaaggctctgtggacacatttgttgacataaccaaaggtcatattcgttaccctggacttcatgcagactcttcagtcagaatacctgcattcgtgtattttctcagtc

SEQ ID NO: 14293 - DNA, 120 bp, Homo sapiens
cttcgcctcggatgcattacttcacttctgtgcctccgtctctcagctgtgaaataggatcctaccagtaccctccaatcccaaactgagaggccgggaaaaggcaaggacgcccgtcgg

SEQ ID NO: 14294 - DNA, 120 bp, Homo sapiens
ggccggcagagggcgctgcgcacccgcgttggacggggcgcgctgccgagcatgaccgccaggggtcgctcgagcgccaccgtccaggccctgggccccggcagaacccggctggcctta

SEQ ID NO: 14295 - DNA, 120 bp, Homo sapiens
aggcgcccagcggacctgcacgcctgcggccttgggacgtgccgcctttccctgctccacactctccccgctcccttgggaggatccgagtggttgcctgcaaatccccacaccagcccg

SEQ ID NO: 14296 - DNA, 120 bp, Homo sapiens
ctgcggtggacgagggcaggtgggcaggctgggtgagattggtgggatggtgtaagcagtgatgccagccttggaaaggatggaaatgacaccgcacagagtacagcagacccaccacct

SEQ ID NO: 14297 - DNA, 120 bp, Homo sapiens
actcgatggggtcgaggccagctcctctccccagcagtgtcttctcatcagctgctcctgaggcctgtcctggcccaggacctcatgtgctcctcctggccaggtgcctgtaccatccac

SEQ ID NO: 14298 - DNA, 120 bp, Homo sapiens
actcgtatgtgtcatttcctccctctgtgacacactacttagtattcaacaagtggttgtaaaaaggttaacttcacacctgtgtgtctcatcttcccagctgtaccatgagtttttttg

SEQ ID NO: 14299 - DNA, 120 bp, Homo sapiens
gcacggccttgatgaggccttttttcccttcatcctcccacaagcaggcttgtatatccagcagcctcctgtccctctttaagcacctcaaaatagtattccttgacctcctttcatcca

SEQ ID NO: 14300 - DNA, 120 bp, Homo sapiens
caacgcagatgcatccgagatgccaaagaaaggctttcacacacaaagtgactccctgcccttggatgtgtttgcatcctcacatccttctcatccctacgttcctactactgcagtcac

SEQ ID NO: 14301 - DNA, 120 bp, Homo sapiens
agtcggccccctgccccagcatccagggaccacattggccacagtcctatttacagcttccaaagcagtcaagtacagaaagccatgtaacaaagcgtctgagaagacctatcctggtgt

SEQ ID NO: 14302 - DNA, 120 bp, Homo sapiens
tcacgcagattgtgaccgccctggggaatttactgcctaagtcattcggagagaatgggcaaatggggcataaggtggcaagtaagtgacagtgacataagttggggctccctggcccta

SEQ ID NO: 14303 - DNA, 120 bp, Homo sapiens
ctacgactggttgggagaagtggtatgaggaggtgacagaggacaaagggagagtctggtcttcctaaatccctggtggtagcgatatggaagcaggtgggaaaaatataatgaaaatat

SEQ ID NO: 14304 - DNA, 120 bp, Homo sapiens
ggtcgggagcaggagtttttgctgcctttagcatttgggaagtttgatgaatagagactgaatttgaatgtctttttggtacttaagagctggattaactacttcacatatctgagcttc

SEQ ID NO: 14305 - DNA, 120 bp, Homo sapiens
tagcgagaccctgtctcaaataatttttaaaaagaaaaactacctcttcttaagatggttgtagtatgggagatggtgtgtttaagtcttcccaccccagtgtcacagctcagggcttct

SEQ ID NO: 14306 - DNA, 120 bp, Homo sapiens
cagcggttgggggtgcccagacacatcctgaagtctaggccgtgttctgagtgtctctgccacgggcccgcctggctggctttagtccaggagcagcctggactgtgactcttgaaggct

SEQ ID NO: 14307 - DNA, 120 bp, Homo sapiens
gaccgggagcaggaggtctcagtgcatccctgaagggtcagagagccatgccgtgagaggccaggagcaggcagccattggccctccagccctcaccaaaggccaccacctcagcttgtc

SEQ ID NO: 14308 - DNA, 120 bp, Homo sapiens
gaacgagagacactggccgcattgaggggtgactttccggtcctacaaaattgtagccctctttctgctagaactggtgagacttggctaatttcggagagactttaggaaagtaagaga

SEQ ID NO: 14309 - DNA, 120 bp, Homo sapiens
ccacgttccagtttttctggctgtggcaggacctgtttgctgccaagttgttcctgtggggaaacagcagtgggcccagcaaatgtagccaccaggtcggggcacagccaccaggtggaa

SEQ ID NO: 14310 - DNA, 120 bp, Homo sapiens
ttccggttccatgtgtgcctcactgaggcaggacttccagaccctaccaggaaggctgctatccgggtcatagtgataccctgtcaggacatcgttgtttttgtcttgtttttttttgag

SEQ ID NO: 14311 - DNA, 120 bp, Homo sapiens
ccacgaccaaacaacccagaactcggaccctggtcctcgggctgccctacaggaagcacccctagtcctcttgctgctctgctagatgagacggcaggctcaggttcctccatgaggccc

SEQ ID NO: 14312 - DNA, 120 bp, Homo sapiens
ggccgtggggagtgggggccagtgcctgcagcctgccctgcctctctcacaggcccttagagcatcgccaggtgcagagctccacagctctctttcccaaggagtaatcagagggtgaga

SEQ ID NO: 14313 - DNA, 120 bp, Homo sapiens
gaacgtggagcctggtggacaggtgaaagcactgggatctttctgcccagaaaggggaaagttgcacatttatatcctagagggaagcgacagcagtgcttctccctgtgctgaggtaca

SEQ ID NO: 14314 - DNA, 120 bp, Homo sapiens
gctcgcagcctccttgacaacatcatgcaaaatgtgtcttactagcttctagtgcataaaatattggtggagctcttcgctgtgctgggccagtcaccagtgctgggcactgtgggtcaa

SEQ ID NO: 14315 - DNA, 120 bp, Homo sapiens
ggacgggcacagccctgccttcccaagctatggtttattgtggtaggatctgcctgcccagtgaagtgtgttcagctgctcctgttgctgggggaagctctgctctctgccttcggctgc

SEQ ID NO: 14316 - DNA, 120 bp, Homo sapiens
acacgctcccatgtgtctcccagtccctaacccctagtcctgctttcaataccgcaggggcttttagctgacttttctccatcttcttaaagggcaggatttcctggcagagacataacg

SEQ ID NO: 14317 - DNA, 120 bp, Homo sapiens
gaacgacatagtcagtgggcagagaacctcagaccagaaatactaagagaggtcctagctgagggccagtgggaggaattcatttaaaaatgaatgaggccgggtgctgtggctcatgcc

SEQ ID NO: 14318 - DNA, 120 bp, Homo sapiens
tcacgtgagtctttagcagcttgtggctcttgtggctgtggttttgggaactccattgtgccctggtgatagctgtccccgagaggtttggtgcaatcagccgtccatgtacccatgtac

SEQ ID NO: 14319 - DNA, 120 bp, Homo sapiens
tggcgcgatgatgggacaagtgatgctgtaggccacgatgacagtgaagacacacagcatccatgcatacatggctccaaactcgtactggaaggcctggttctgggaggaggaggtggt

SEQ ID NO: 14320 - DNA, 120 bp, Homo sapiens
atgcgtggctccccgcctcccaaggtccttcccatccctcccagcctgccctgcttcactcagtgcacccagccctcccgaggcatggtgatgcgtgtttgctagtgctcccttcgttcc

SEQ ID NO: 14321 - DNA, 120 bp, Homo sapiens
aatcgggatactagcagtgcccagctcataagggggctgagaatgaaatgaaggaatgcagcacttctcccactttcctcgcacagtgcccaccatggcagaggagaataaaagagaaag

SEQ ID NO: 14322 - DNA, 120 bp, Homo sapiens
agccgaaaatgcctttgacatctggggtttggctaagaatttatgcaaatgggtgcctacagaaaaagagtctgttggtttgagttgtatgtatgtatgtgtgcgatcaaaccgtttcaa

SEQ ID NO: 14323 - DNA, 120 bp, Homo sapiens
ccacgcctgcctggacccgggtttgagaagcacttagcccagtgcctgcactagtgggtagtcaggtaaatgctacccactagtgggggtagtgggggtgagaggccctcgggtcagtga

SEQ ID NO: 14324 - DNA, 120 bp, Homo sapiens
ctgcggtcagcagccgtcttggccatgatcatgcggaaggtatagaggatgagacctggcagccgcagcagctccatgccattgccgatgaaggccgaggcgatgacatagttcacaaag

SEQ ID NO: 14325 - DNA, 120 bp, Homo sapiens
agacgcacctggggaaaccagggcccaggtctgtgagctgagagccgctcttggagggagaggaggggcccctaggctgggcaggagcagaaagcccctgggagggctgtatactcttcc

SEQ ID NO: 14326 - DNA, 120 bp, Homo sapiens
actcgccccatccttacaggtaagcacattcttttaggaaagtcaatgccaagcctctggacctatattaagacctaatgtatagtctgtaggggctggggttgaatcccagctctgttc

SEQ ID NO: 14327 - DNA, 120 bp, Homo sapiens
caacgtctccaaacctcagtctcctcatctgtaaaatggagagaataatagtatcttcctcatagctcattgtaaagatacagtgagaaaaagatgcataaagcatttagcatagtgcct

SEQ ID NO: 14328 - DNA, 120 bp, Homo sapiens
ctacgaccgcccccacccatcccactgcagccccagcccctgtgggactttcacccagggccatggctccagaactcaacttggcaatactcactccaacctgatggaggcctccgagga

SEQ ID NO: 14329 - DNA, 120 bp, Homo sapiens
caccggaagaaaaaatctagactgaaaaacaaaggaaccccctaagagtttatttccagcattccatattgtcactacacatgctttcattttcttttgctctaaaaacaggccaaagct

SEQ ID NO: 14330 - DNA, 120 bp, Homo sapiens
gctcgagattgacttttgttctcaacgatgccacttactacggcatgacctgtcacagtctgctttaacagaaacttccttccttgagataaataaagccatgatgaggccttccctaag

SEQ ID NO: 14331 - DNA, 120 bp, Homo sapiens
gcacgccgagtggttgcgacaggcttagatattgttagaggtttgcttctgctgccaaaccgtttgcattctcctggggacagtgctctcctgatgtgactcttattctgaatttagagc

SEQ ID NO: 14332 - DNA, 120 bp, Homo sapiens
ccccgacctgcaggaagtcaaaggtgagcactcgcagtcccccaaatgctctatgtgccccagtgaggcccctgccatgtgcccactgcctgagcagctggggggttagggtgtggacaa

SEQ ID NO: 14333 - DNA, 120 bp, Homo sapiens
gagcggtcagagatatccttcttaggggcagggcctcggggctcccgggcactcacttggtccagtgagactccagcagtgtagagtagtagacaatggaggggagcagggccgagaagg

SEQ ID NO: 14334 - DNA, 120 bp, Homo sapiens
gatcgggttctaggagaaaggtccacagcagagagagtcacaggggccgtgggccacgcggctctgaggccatgacctattggtatggtcgctcagtggactcccagggtaggagtttgt

SEQ ID NO: 14335 - DNA, 120 bp, Homo sapiens
gcccggctcctcctcactgctccttggaccgtggccctcacacagcctcccacagagtcccaaaaggccaggggcccttcgacacctccagagtgggcacaaccggcctgcccccgacca

SEQ ID NO: 14336 - DNA, 120 bp, Homo sapiens
gggcgggaaggattctgccttcctgctggttctggccacattcacagaagccccttggtcatctccctccaacctacactccttgcacaccccctgcctctccccacaccaggggtccct

SEQ ID NO: 14337 - DNA, 120 bp, Homo sapiens
tgtcgcaccgtccttgccctccccccatgacatcctctgtctagacacggtcaggacacaaatctggcagctctactgtctttaggagtcccaggaacagcaatttcagcaagtgccttt

SEQ ID NO: 14338 - DNA, 120 bp, Homo sapiens
tcacgtgaccacagcacaggagtcctcccttcagacagcagaattattctggggtgtgctctccccagtgagctggctggccggttcatgccaccagcactcagctggagcccaggtcat

SEQ ID NO: 14339 - DNA, 120 bp, Homo sapiens
taacgatatgaggccagagagttctccgccccttaagaagcaataactttattcctggccaaggatgatgagttgactatgttctttggaccctttgtcacggcaaggtataattctcaa

SEQ ID NO: 14340 - DNA, 120 bp, Homo sapiens
tggcgctatcacttggaaagaaaggagtttactcctctttgatgtcctcctttgtgtctggaagcaatcaatataaaatttatttagccttatcttctgtaacaaaccaaagaggggaaa

SEQ ID NO: 14341 - DNA, 120 bp, Homo sapiens
ggccgcgggcacttactcacccttattaattccatgtaacaactgagaggcactttgagcctcttaaccaaaagcttcacatcttcagatgccaagcctccagcagcagggccacatggc

SEQ ID NO: 14342 - DNA, 120 bp, Homo sapiens
aggcggcacagaaacttgaggccacctgttcatccactgtatttttacctatttttaaaatgttcaactctcagggctggtgttagatgcttatgatgccaccaggtaagcccacaggtg

SEQ ID NO: 14343 - DNA, 120 bp, Homo sapiens
tttcgacttactgattttgaggtatcttggagacattcaaggaaaaacagggtacaattaacaagatagtggcaataggtgctgggcagcccaaaactgctggtcacttctacttactaa

SEQ ID NO: 14344 - DNA, 120 bp, Homo sapiens
gtccggtaatttgcatttctaacaagtttcctgatactgctgctgttgctcttggttggggcccaaacttccagaacaactggtctgaatgaagggctgggtccgggacctgcaagtccc

SEQ ID NO: 14345 - DNA, 120 bp, Homo sapiens
ccccggtacctcctcctaagtctggcccagcaggaaacggagcgcgggtcaaagtcctctcacagtcaaccaggagaaacctgtgtcttcctggcagggtggctgggtgctatggaaaca

SEQ ID NO: 14346 - DNA, 120 bp, Homo sapiens
aaacggaagggcagagctcagttcctggatggaagcggcacctgcatggaagcgccctcagcaacctcagggcccagacttccgggaaagtctcacagggcccctggcttgagttttgga

SEQ ID NO: 14347 - DNA, 120 bp, Homo sapiens
gcccgtgctgggctccatgcccggcttcgccagcgtctggcgccgggagcgcaggtgctccaagagtgtgtgttcaatgaattgttactgaatgctgcagaaccctgctccacgctgctt

SEQ ID NO: 14348 - DNA, 120 bp, Homo sapiens
cctcgccctggcgtttgggagcctgatgacagccctgcccgtgaaggccgcacctagggacaatgtcaggctgaggagtgagcccacgtggcgctggctccgatgctgctgccctctgtg

SEQ ID NO: 14349 - DNA, 120 bp, Homo sapiens
ctgcgcaggccgggcccagggcagggcgccctcacagcctccgtgctaggcctggccttccaccagcacctctctcctctcccagtgccaaagtccactctccttcctgctgtggggaaa

SEQ ID NO: 14350 - DNA, 120 bp, Homo sapiens
agccggagcatgcagagcagtggacactcacttccttggtcagcgtcctttgagaacagggtagaaactgagaaaaggcctaggtgtccacatcttgcactgaggtttccagggggttca

SEQ ID NO: 14351 - DNA, 120 bp, Homo sapiens
agccgatccacagggttccaggaaggaccgaggagccctccctcccccagtgtctaaactgctaacacgggttaccaaaggcgttttacacacaagactgctcaaaaccctcaaacaacg

SEQ ID NO: 14352 - DNA, 120 bp, Homo sapiens
tcccggactacaagagaggaggctcccaaaccagcaggccgggtgggagcgcacaggggagggaggagggctgcagccggaatcccagggacctgcatttcggggacaggcgggagccag

SEQ ID NO: 14353 - DNA, 120 bp, Homo sapiens
taacgtactattcatttatagttgtaacctaatataaaactatccatactgaaaagtcaataatgtctgaaatttagatggtaaaatgctaacttacatttacccacatcttcatctatt

SEQ ID NO: 14354 - DNA, 120 bp, Homo sapiens
acacgttctcaacctggctcaatctcagcctctcttgggacctcttacctctctgagcctgtttccacatctgcctacttcacattaggttgtctcgagggactgcacatgaaagtgcca

SEQ ID NO: 14355 - DNA, 120 bp, Homo sapiens
ttccggaccacagttgttccacagcatgaagatgcagcctgccacccacgagtggttcagaggatgatccaggaggctgagttggctgctgccttctttcactttggccaggagagcagt

SEQ ID NO: 14356 - DNA, 120 bp, Homo sapiens
acccgggatactgaggccctgccacccgcttgtcatcagggagaagaggcaggagctggtgccaccatctgcttctcaccaccctccatcaataccctgctggcttgactgcctgctggc

SEQ ID NO: 14357 - DNA, 120 bp, Homo sapiens
actcgagcaaaaccactctttgggattttaacaataatgactaagatttatgaagcacttattataggtcaggaaccacacgaagtactttaggagaatcagcacacacactctcaagac

SEQ ID NO: 14358 - DNA, 120 bp, Homo sapiens
actcgatttgagtgtatgcatagccattgtaactcaccatcagaaaccctacactcaggctagacttgttctgtggcttaaaactgcagcgtctcagccgggtggagtggctcataccta

SEQ ID NO: 14359 - DNA, 120 bp, Homo sapiens
cttcgttcctgaagggtctgaattttccacagtgctgtcattttttggagttgcagtgtttttggttgctgtacttccccttgcctttaccactggacatggtggcactaaagccctccc

SEQ ID NO: 14360 - DNA, 120 bp, Homo sapiens
tcccgagaatctcctgggctctagacatagtcctgcttgcctccctgtgcagcatcccactttccccttggtaatcaggatcagtcccttctgccagcaaggtcaccccctcctctgcac

SEQ ID NO: 14361 - DNA, 120 bp, Homo sapiens
agtcgatgaaaccataattgtgttgtccgctagaagcatctctcccttagggactaagacctccaaacacaagccctgtgaggggatatcagatgtggtgacagcaagaggaactactcc

SEQ ID NO: 14362 - DNA, 120 bp, Homo sapiens
ggccgggggggagacaccaggttggtctctgatttcaagcctctactgcatccgtaagatgaaaccccatcccttcaggacgctgtctcacaactggcaccatcatgagccattctactc

SEQ ID NO: 14363 - DNA, 120 bp, Homo sapiens
caccgtgctgcctgagtcatggtcccacaggaaacagaaagtacgttccatagggattttgaagagcattcaggaaaaggtggaagcaggaaaagggaactaactagggacactgaggct

SEQ ID NO: 14364 - DNA, 120 bp, Homo sapiens
cagcgtcattgagaagccattcccaatcctgggctggaggggtaggagaagggaatggtgtatgtgcatctagttgcaagtggatgatggaagaggctcttctggatagagctgtaatcc

SEQ ID NO: 14365 - DNA, 120 bp, Homo sapiens
cctcgagggatgcagccctgcctgaactgagggtgggaggaagtaaggaagacgctcctggatctccctcccctctcaccagtggtgtattggaactggcccataccggtttatgaggac

SEQ ID NO: 14366 - DNA, 120 bp, Homo sapiens
aaacggtgcaaggtaaagggtaaggaagggaacagggggttggtttggatggggcaggtggggcagagtgaaccagaccagcagggcatttggaggaccaggcaagggagtggttggcga

SEQ ID NO: 14367 - DNA, 120 bp, Homo sapiens
atgcgggcttggggaccttgatgtaggctaaagagttttggtggaacctgatgggcagtcatccttgatggtacccacaggagtggggaggggaactgctagatgtttgggctaagccct

SEQ ID NO: 14368 - DNA, 120 bp, Homo sapiens
ccacgcaaatccttcaagccagtgcggaggtgtcagtatgtgggagcaaccagtgatcccaccaccatttaacagagatgggaaccaagcccagagcagggatgtgactcacccaaggtc

SEQ ID NO: 14369 - DNA, 120 bp, Homo sapiens
ggccggccctggagcctcccatggaggcatggtgtggcattgccacctgaccagaaagcagaggtgctgccctggttccctccccacctcccattgccttcctctattgttgcctctctc

SEQ ID NO: 14370 - DNA, 120 bp, Homo sapiens
ggccgcctctgatggaaactccaagattctatgacttccctgagagctcgtctgccaggaaatgccagcctcagcctagggcaaggaggagactgaccctgggggggcaagtctgcgggc

SEQ ID NO: 14371 - DNA, 120 bp, Homo sapiens
ccccgcatgcatcggtgctgcaaggggcactcctgaggccagaggttgtgcattttccaggctggtgggtgatttgactttctctgctcattgagccaaggcccggctctggtggcaact

SEQ ID NO: 14372 - DNA, 120 bp, Homo sapiens
gcccgcgtcatgaagggcctactcatttcatcacaggcccgagccaggccaacactggcattgtagctgcctgccagagtgatccttcaatccacatgaaagcctgaaagcctctcctta

SEQ ID NO: 14373 - DNA, 120 bp, Homo sapiens
taacgctgggcagaagctcacccggatagagagcaggatcagctccagctctggaggctgccgcccatttatctgcaaattgcccagcaaaccatgaagaggctttggtcctttcttatc

SEQ ID NO: 14374 - DNA, 120 bp, Homo sapiens
gtccggcatccccagctgtgtctctggctctctcccactcctcaccatggcctaattgcagtgcccagaaaactcactcaagagcatcttggctctgatctgcagctttggaacgctcaa

SEQ ID NO: 14375 - DNA, 120 bp, Homo sapiens
agacgttttctcagcaggctgtgccagggtttctgaggtgtgtgatgttgttatggtgacccctccatccctctgtccccaagaagaggaccttattgttcaggcagcgggggtttgagt

SEQ ID NO: 14376 - DNA, 120 bp, Homo sapiens
gcccgagcacttcaaggatgaaatggtgtgtaaggcatgcgcctggtcctaaggctcacagcagaggatggcagccagcccttcacaccacaggcagagaaccacagccgagccgcaggc

SEQ ID NO: 14377 - DNA, 120 bp, Homo sapiens
gcacgcgctcttaggaggccagtatcccagggtctgtccagggaagaggagcaggggcaaggggccctccgcatcatgggcagatggtgcgagctgatgggtgtctcatgcattccgccc

SEQ ID NO: 14378 - DNA, 120 bp, Homo sapiens
tggcggatatgaagatcctcctgagccagcatgcatcttgatccacctttttttttttttttaagtggtgaggtaaacgccaccctatggtcttttgaggaaacaaatgcattggtgcca

SEQ ID NO: 14379 - DNA, 120 bp, Homo sapiens
gcacgaggaaaccaccttgtgggagaccagccccaggagacagcagctgcccacgcatgtacctgtgtgtaccctccctggtctcccttcactaggtgcctttcccagccttagccctgc

SEQ ID NO: 14380 - DNA, 120 bp, Homo sapiens
catcggctgcagggcaccgtccattccgctgacccctggctccttgccctggggatccagcttttccctttgtgagatcagaatcctatgggatttttgtgaaacaaacaaataaacaaa

SEQ ID NO: 14381 - DNA, 120 bp, Homo sapiens
acacggaatgagggattcctgatccttggtggtggttctcatctgtaagtcaggcacacctgtctcttggcgttgctgagaggatgaaacgtgattacataaagcccagcgtctggtgca

SEQ ID NO: 14382 - DNA, 120 bp, Homo sapiens
ggtcgctgcagccagggcagcactgccctctggaccactcagaagcaaaggctctttgagtgcttttgatccctctgctcccctctccacctgcagtggagtcccaggcaacaaagcagc

SEQ ID NO: 14383 - DNA, 120 bp, Homo sapiens
tcccgggacaactgaatattcatggctgattctgctctttgatgaaatgcagcttctttcaattcactcattcatttgaccaacacaggcacctaccacatgccaggcattgactggggt

SEQ ID NO: 14384 - DNA, 120 bp, Homo sapiens
gggcgaaggaagggggctcagagaaagcctccctgagggagtagtgttaggttagaacttgctgagaaaatctatcacgtgtcctcagcacttgccatcctcactaaactcccattctgg

SEQ ID NO: 14385 - DNA, 120 bp, Homo sapiens
gctcgttttttatttttattttttccctttgatgtaggtgtctcaggtccatccagtctgcaggaccagctgtggagaagccccatccttaaaattccccagtgccttctccacccaagc

SEQ ID NO: 14386 - DNA, 120 bp, Homo sapiens
tcccgcaaatgctgcaaataagattccaagaatccatgttaggacagagacctggatttctaaacaacacacttgacacaaagggcttcttggaagtagatctggttgggggagaaggag

SEQ ID NO: 14387 - DNA, 120 bp, Homo sapiens
ggccggggcacctgctctgctaatcaacagtcctgtccaggccagattgacctgaaatctcttcccgagccttgctttcaaaaagcctttgaagactgtccgtcctggagctatccaacg

SEQ ID NO: 14388 - DNA, 120 bp, Homo sapiens
tgacggccccgcgggctcttttctcaaaccagattcgttcaaaaagcccatttaccacactacactgctaaaatgctgaacatttgcagtggaaaataacggaaaatagaaacacaacaa

SEQ ID NO: 14389 - DNA, 120 bp, Homo sapiens
tcccgatggccctaaacagcatcatttttctcagtgatgccagacatttgttatggctcacaaacaggggcttgccagtaaactttatttcccagagaatgagctatacaaagagatcga

SEQ ID NO: 14390 - DNA, 120 bp, Homo sapiens
aagcgtgccagcgtgagatggatgattctgccgaggggtctctagtgagcaggtcacgcatttggcaccagatgctgcctaattgaacacctgaacacagctgaggggcttgaatcatat

SEQ ID NO: 14391 - DNA, 120 bp, Homo sapiens
atgcgaacagggcaccccgaggaggaggtaccagactacctgtctggctgagcactgatctccattccttggaagccaaacctgagacacccgggagaggtcatgtgcgtgcccgggagc

SEQ ID NO: 14392 - DNA, 120 bp, Homo sapiens
caccggcatcccacatgtgcctaagacaagtgcacatccagaagtttgcacaaatcagaaaaactcagagcaccagctccactatgcacagtctcacacttcacaccagtgggaaaggtc

SEQ ID NO: 14393 - DNA, 120 bp, Homo sapiens
caacggccggcagctgctgctgatttgtgatttgtcaagtgtgtttattgaaaaagaaagagtttgtgcttctagagtagtgaggtttcggtgggcctcattccgagggtgctgagggct

SEQ ID NO: 14394 - DNA, 120 bp, Homo sapiens
ctgcgggttcagggctgccgtcaaccctaggcggggtgggttgttcagggcctatcagcactgctccaagggcttcccaggcattttttctttgccctgaaatagtccagaggaatttgg

SEQ ID NO: 14395 - DNA, 120 bp, Homo sapiens
catcgccccatccagagtgggaattggaaccagaacgctgcctgcagcgcagctccagcctcttccttcaacacacatttaatttttttaaaaaagtttaaagcatcagtagcaggcagc

SEQ ID NO: 14396 - DNA, 120 bp, Homo sapiens
cttcgcccctgcgacgttgctctctggaggacacctcattgctccagggacagaccttgctcctggtgccaggaatgagggtggcctctcttattctctagaagtaaggataagcagaag

SEQ ID NO: 14397 - DNA, 120 bp, Homo sapiens
aaacgccgaccacactgttaagaggaggtggggtggcagacagaggtccttgtagggtccctagcaaggggaccttgctgtgcccacacacaaggggaccttgctgtgcccatgcatgtg

SEQ ID NO: 14398 - DNA, 120 bp, Homo sapiens
gcacggaaagaaaagggaagaaaaaaacaaatcctttgggtgtgaacttaggcctggctggttaggaccttccaggaggtgatgagggctggagggggaagtcagtagctttgggttggg

SEQ ID NO: 14399 - DNA, 120 bp, Homo sapiens
cttcgggtctgaaagatgaaatagaacaccaagacaaaacgggcctctctgatgagatgagtagcggaggaaacgacagatcacacaaaagctacctcggtggtcaccggcgggggctga

SEQ ID NO: 14400 - DNA, 120 bp, Homo sapiens
cgatgtaattatacatgaccaataaagtaataacactacttatctttaaaaacattaatataaccaagactacccacattgcaacaggttatcatacctggtcaacacgagaattccctg

SEQ ID NO: 14401 - DNA, 120 bp, Homo sapiens
tctcgtgtgtgctaatgaagatgtgtgagaatggagaataactcagctagtttatttcctgggcatttatgaaaaactgaattgagcgggcagcaatgaaaattgtcattctggggaatg

SEQ ID NO: 14402 - DNA, 120 bp, Homo sapiens
tcacggcctccttcagaaggtgccgtgctaacaggtagcattggaaaagaagtctggggtggggcagctggtgattggctggtgataatgtccctcagaagaacagaaagggggaaacaa

SEQ ID NO: 14403 - DNA, 120 bp, Homo sapiens
aaacgggagacagaaaataaacagaaactgcagatagcaatgaagtaagcaagtaggggccagctacgtaagtttcagggcccagtgcaaagtaaaaatgcagcgcccttgttcaaaaag

SEQ ID NO: 14404 - DNA, 120 bp, Homo sapiens
tcccgccccttgactctggccactcttaagcgtctactgccgtcctctaccaggtgctgggccaggagcagagaggtcccctcttcccacacacctgcctgggcagacccaaagcgatta

SEQ ID NO: 14405 - DNA, 120 bp, Homo sapiens
acacgcttggtatttggatctggagtgagctggattctcatgcagttgtccactttttggccctgccagcctggggtagggatggccaccacaccctgccttgggacaccagtgacgcca

SEQ ID NO: 14406 - DNA, 120 bp, Homo sapiens
cctcgtttctacctctggatatgttcactaacttaaaaacaccacttaaccctctggtttctcaaatggcatcgttctggcaaatggaaaaaaaagtcacctgtcgttattgatctccct

SEQ ID NO: 14407 - DNA, 120 bp, Homo sapiens
agccgttttcaaacatcgggacacaaactgttttgacaaccagccaatagaagttgctaatctaccactagaaagggtgaatggacagtcagggaacaagttaaagtgactttggctgtt

SEQ ID NO: 14408 - DNA, 120 bp, Homo sapiens
aagcgtggtgacctacatgaaatacttttaaaacttgttttttaagatatgcatggaaatagtagaaagactcagattcactgtccaagctaaaatgcatggtcagtgcctctgcttcca

SEQ ID NO: 14409 - DNA, 120 bp, Homo sapiens
gaacgtggacgtctctgggagccatgattctgcctaccagactttgattccagttcctgatgcagtgtgcacaccaacattgatgttgggtaagacatacacaagtctggcaggactgtg

SEQ ID NO: 14410 - DNA, 120 bp, Homo sapiens
gaacgtctaacattcctgactgtagactaaatggcagtaacattcccagtcaccatgacaaacaaaagaaccccttacatttccaaaatgccccaaggggcagtactgtctacctacccc

SEQ ID NO: 14411 - DNA, 120 bp, Homo sapiens
tgccgggtggggacccaacaaatgtgcataatggagaatgtggcacattctcagaaaagcaagctccctggtgcaactgtggtgtgaggaacaggagaatcccgggagatgggctaaagg

SEQ ID NO: 14412 - DNA, 120 bp, Homo sapiens
cgcagtgaccccgctgcgtacctgtgaccccacccctgaccaggcctgggagcctcttctgtctgaggcagccctgtgggagctggcaggaggagagacacatggaggggacttctgcgg

SEQ ID NO: 14413 - DNA, 120 bp, Homo sapiens
ccacgaggcagggcgaaggcgcgtgaagacagagccgcaggggcacaaggagcagctgcagacgctgcagggtccctgggaaactgagtcacgccttgggcacagtcactccgtggggca

SEQ ID NO: 14414 - DNA, 120 bp, Homo sapiens
cagcgtgggcactgcttctgaaggcacacctgctgctgtgggatcctgaacaacactccagttctcctgaagatctgattgtcttgatgccaaactgatttccagtgttgctttacttct

SEQ ID NO: 14415 - DNA, 120 bp, Homo sapiens
ccccggcctgtggggaccagcattgatctctgtcccttgcaacctgagacagtcaacaactggtctcagtggttcatctgaacccactttacagaggagaaaatagagtcatagaggtct

SEQ ID NO: 14416 - DNA, 120 bp, Homo sapiens
agacgtagtctgccgaccctgaagtctaaggaaagttcagcaaaccaccatggaatccttgagccaaagctagcgacaaaggatttctgtccctaggggaagcctggctttggtgtgagt

SEQ ID NO: 14417 - DNA, 120 bp, Homo sapiens
gtgcgttcccctggccaccatgctcccaatcctcatctcatctctggcccacctcttccgttcctgctgtgccaacccaacttactctttcccatatgtgagtctttgtaaaggctgttt

SEQ ID NO: 14418 - DNA, 120 bp, Homo sapiens
gcccgaattactcatcttctcacctcccctgtcccctttcccttcccccaactcactgatacttcagctgaaacatcacttcctccaggagactaccccatccgtctcccacgtgctccc

SEQ ID NO: 14419 - DNA, 120 bp, Homo sapiens
gctcggaaaagggaagcatggaggcaaactggcagagtccatccaggcattagcagtcggttgagctcaacatcatgaacgctgatttgtgccatagagcatctactatgtgctaggtgc

SEQ ID NO: 14420 - DNA, 120 bp, Homo sapiens
aagcgtctgtctgccaagaggtgggggcctggagggaaattttacagggccgtgctggagggggctatgtgctgaatgaggacattgtgcccccagaacaggccattgtttgtgattctg

SEQ ID NO: 14421 - DNA, 120 bp, Homo sapiens
agccgtgccatttccactggaatctacctcttgccatacttgttctgacccatgaccaccaaggaaagcccccggcgccctgcccctgcctgtttggttggtcatgcggacacaaatatc

SEQ ID NO: 14422 - DNA, 120 bp, Homo sapiens
ccccgcaccacagagccatggacaaaatagagtttctcggcatgcaagaccaaggtctgaaacctgggccctggtacctaccttctttagggccaggccaacttgtgagcccccttccta

SEQ ID NO: 14423 - DNA, 120 bp, Homo sapiens
gggcgggtggggtggcctctcagactgtaggctcgggagtagcccttccaagaggctgaccctgatagttgagtcaaactggtgacagaattgatgtgagagcttgacagcagacctagg

SEQ ID NO: 14424 - DNA, 120 bp, Homo sapiens
gtgcgtttgtgagtctggagttggagttgagtgagaccctgatactagggaaagagacggaaagccagactcttacttaagggcttctatcgcaggagggaagatttcttccaagagctc

SEQ ID NO: 14425 - DNA, 120 bp, Homo sapiens
ccccggagcatcagaagtaggaggctgagggtcgggaatggggagcaggggttagaactgaggaagcaggggttagaactgaggggttgctgaagacaccaccacgtttcagaactcagg

SEQ ID NO: 14426 - DNA, 120 bp, Homo sapiens
actcgcacagaggagaaggaaccggtagtctaaaatactaaaacgtgtggaattcctgcatggaggcttcctactgggagtgtaaaatttctgtgagaactgtaagaagtaagcaaacag

SEQ ID NO: 14427 - DNA, 120 bp, Homo sapiens
ccccgtggaaagtgcctcaaagtgtggtttgaggattacccgcctgagactccaaagaggtgtttgccaaaaaaggcagattcttgggccacacccggctctatggagtgggaagcgctg

SEQ ID NO: 14428 - DNA, 120 bp, Homo sapiens
gggcgcctgctctcagaactggtgccgctgaaagcttgcagagcccaaacgctgcgaggaggtcgcaccagcaagtgaggaagcagaagggatggcttcctgcgcctcccacacaatttt

SEQ ID NO: 14429 - DNA, 120 bp, Homo sapiens
atacgtttttctttggtccctagcatttttcttttaaaattttattttccttttgaaaaagaatgtgagaacaaagtctgagaacgaatgtgagaacgaatctcgaaacgtgagaaaaag

SEQ ID NO: 14430 - DNA, 120 bp, Homo sapiens
cagcgaggaagaagtgtgtgatgagcggacgtccctaatgtcggctgagagccccacgccgcgctcctgccaggagggcaggcagggcccagaggatggagagaacactgcccagtgggt

SEQ ID NO: 14431 - DNA, 120 bp, Homo sapiens
ctgcggctactgtaccttacagatgaaaaccagacattcattccctgatgcgggagggagaagggaagtaatgatgaggattggccgaaaaggtgggtggctggccatgatggaccttcc

SEQ ID NO: 14432 - DNA, 120 bp, Homo sapiens
ctgcgcattcacagccagagatggacttggcagtgggctgaaggacgctgtccactctgccaccttgggtttacctctctcatgcaggtcactgtttccactgtaataggagagtttgtt

SEQ ID NO: 14433 - DNA, 120 bp, Homo sapiens
acacgattgacttttgagctggggatatttgggcttcactgtgatcattcagcccccaggggaggagattgtaacgttagaaagagtaggatatcgttgggagagccacttagttgtgtc

SEQ ID NO: 14434 - DNA, 120 bp, Homo sapiens
tcccgatcagggcagaacatctgaatttgcctgaaccctgttctctgttttgcccattatagaattaaaaaatgtctctgtgtggactgttttcttgcagccagtcttaatcctgcttgc

SEQ ID NO: 14435 - DNA, 120 bp, Homo sapiens
gaacggaaccatcgtccctaagccctgagtgaaatcacaccagcttaaggccactgctctgccactcctcagccttttcttgtttgttatctccgggaagttttgtacactttggttgtt

SEQ ID NO: 14436 - DNA, 120 bp, Homo sapiens
gaacgtctagattgggactctctctgcagagaaccggtactgaagcaactgtcattttcagtttttgtttcatttggctttttctttagctgttcacctcattagcaaggcagcccatga

SEQ ID NO: 14437 - DNA, 120 bp, Homo sapiens
gatcggtttgtgctagtgtctggcaggtgtcctgccctccctcgttacctcctcatttgtgcctgcccaccttcccagagcctgcgtcttctcagatgcttaacacctgtttagcctctc

SEQ ID NO: 14438 - DNA, 120 bp, Homo sapiens
acacgcaaagagagtgtccctgtgcactgactcctctagctagtgatttgtcagccaaaaatgtttatttatctcctggcctgtttcctcccatatcagtatggccacatgaacagaatt

SEQ ID NO: 14439 - DNA, 120 bp, Homo sapiens
ctgcgatgttgcctggctgtggggctgcgggactgcggggctgtgggactgcgatgttgcctggctgcggggctgcgggactgcggggctgtgggactgcgatgttgcctggctgcgggg

SEQ ID NO: 14440 - DNA, 120 bp, Homo sapiens
ctgcggggctgtgggactgcgatgttgcctggctgcggggctgcagggctgcgggactgcggggctgtgggactgcgatgttgccgggctgcggggctgcgggactgcggggctgtggga

SEQ ID NO: 14441 - DNA, 120 bp, Homo sapiens
ctccgaggccggctcatcgtgcggccgctctggtctcagccctgccggccatggtcaccgtgcccagccaggtgctcttcaccctctttctgctcacccatgcctacccggaaagccagc

SEQ ID NO: 14442 - DNA, 120 bp, Homo sapiens
acccgtctccctgggctaactcccctgcctcacccatacccccacagtaccctggcgtggcccagagcatcaacagtgatgtcaacaacctcatggccgtgttgaacatgagcaacatgc

SEQ ID NO: 14443 - DNA, 120 bp, Homo sapiens
cctcgctgatgccctcctccctggcccaggcctgttccccgagcacctgatcgacgtgctgaggcgggagctggccctggagtgtgactaccagcgagaggccgcctgtgcccgcaagtt

SEQ ID NO: 14444 - DNA, 120 bp, Homo sapiens
ccccggccgggccccttgcgtgtttgcaccagggaggcagaagggaccatgttcagcagctggtgaaggcccctccagctctgaggggcagagggctggggttgcagcctgggccgaggc

SEQ ID NO: 14445 - DNA, 120 bp, Homo sapiens
ggacggtgtggagggcctgtggctagggcgtgacctccctcccctacccagggacctgctgaagggccaccccttcttctatgtgcctgagattgtggatgagctctgcagcccacatgt

SEQ ID NO: 14446 - DNA, 120 bp, Homo sapiens
ggccgaagggctcagccaggagattcggaacgaggtttgtctgtgccagcagacaggtggggccagggtggccctgctgtgtggctgtttggtgacctaatagtgtgagctggggacttg

SEQ ID NO: 14447 - DNA, 120 bp, Homo sapiens
cttcgcgctgtccacagatctgctacaacatcctggttctgtgcctgagggagctgttcgagttccacttcatgcaaacagaccccaactggtccaacttcttctatgacccccagcagc

SEQ ID NO: 14448 - DNA, 120 bp, Homo sapiens
acccgcagccaggcctgagagcttctccgaatggggcacgtgaggccctggactgccccttgtcctgggaaagtcagcagagagctcagggctctgggagtggggatcctcactgccctc

SEQ ID NO: 14449 - DNA, 120 bp, Homo sapiens
tcccggccccacacacccgcaccatggagcaccagggccaaacttctcctggtgtctctgtccccaggtggctcttttggattttggggcaacgcgggaatatgacagatccttcaccga

SEQ ID NO: 14450 - DNA, 120 bp, Homo sapiens
actcggggtagggagaatgactgggttcctgcccttgtgtccccatctgcgctgcctgcccctcaggtctggtgacagcaggcagttaggctgacagctgccaggcgtggtgtcacagca

SEQ ID NO: 14451 - DNA, 120 bp, Homo sapiens
ggccgggggccctgtgcagggagaggatgagggtggggtgggctcgggtgtggcacttggctccctgggatgtcgggagctgagcttttcatgctgcccacggtcccctcctgtgcctct

SEQ ID NO: 14452 - DNA, 120 bp, Homo sapiens
tgccgacagggacagggagactgtgcgggcgaaatccatagagatgaagttcctcaccggctacgaggtcaaggtgagcagggttgcgggggatcccctgggcctgctgacccagggccc

SEQ ID NO: 14453 - DNA, 120 bp, Homo sapiens
gcccggctccctgtgtaagaatggatgaaagcacagggggcagctgccctcaaggggcccccagagcccgggcctccttgggcacggtctgaaagctggggcccaccccggcccatgctg

SEQ ID NO: 14454 - DNA, 120 bp, Homo sapiens
gagcgtgagattttccgagtgggccagtgagttggggacttgtcgtgaagctcttgtttctgcctctcactcttgcccacttagggcttggggttgggcctcgattgagccaacgtgcag

SEQ ID NO: 14455 - DNA, 120 bp, Homo sapiens
catcgagcctccctggggggagttggaagaaaccttagaagccttttaaataaaggggaacggtctgtgctggtgccgcctgaagccacccacaaagtggcattttccgcttgctgcttg

SEQ ID NO: 14456 - DNA, 120 bp, Homo sapiens
tgccgtctcataggagtgtcatttgaggcttgtcagtatctctgagccccccttatctcagctgtaagcgctcagcgggcagcagctctctcccgcctcttccttatggccactcgcact

SEQ ID NO: 14457 - DNA, 120 bp, Homo sapiens
actcgattcctggccgccccgtccctctgaccaccttgggctgtccctggcggcagctcctctcccctgctctgctggcggcggcttccttaggttgctagttcccgtgggcagacacac

SEQ ID NO: 14458 - DNA, 120 bp, Homo sapiens
acacggctgctgggtgtgtcttgggtggactctggcaggctcagacacgcatggtgggaggccctgccagcttaggcccacggactctgttctttttggccagaacagtgttttgttaaa

SEQ ID NO: 14459 - DNA, 120 bp, Homo sapiens
ccacgaggcgggacgcatcctctgcactctgccacaggccccgccactcccttttgtatcacatcagcccagtccatgttaccctcgtgttcccggcccctgtgggtttgagtttatgcc

SEQ ID NO: 14460 - DNA, 120 bp, Homo sapiens
cagcgccccgggcactgtgggaggaacccgggctggtggagggctctggtgtctcgccgccatttatccttcctctcttgccccaggtcatggaagacgcccacttggatgccatcctca

SEQ ID NO: 14461 - DNA, 120 bp, Homo sapiens
cttcgcctctgatgagccttttgattttggcactcagagcaccaccgagaagatccacaacctgattcccgtcatgctgaggcaccgtctcgtccccccacccgaggaaacctactccct

SEQ ID NO: 14462 - DNA, 120 bp, Homo sapiens
gcccgcttcccctgcaaggccatgttcgaggaggcctacagcaactactgcaagaggcaggcccagcagtagggctgcgggccacgcccaggccggctccgcgggaactctctccctcag

SEQ ID NO: 14463 - DNA, 120 bp, Homo sapiens
tagcgaggtcgtggtgatgctctttttaactcctttgcccaataaggggggtggctgcctggagccccgtagccagcgctttccacggtttctgttgctaaatggttgtagggtgagaag

SEQ ID NO: 14464 - DNA, 120 bp, Homo sapiens
gctcggtcagtctgcctccgtgtgtcctctgaaataagcagatgaagatgaaagggcaactttgttttcttctttttcctgatgtgaatgttaagcagaagggagagagtccttactccc

SEQ ID NO: 14465 - DNA, 120 bp, Homo sapiens
atacgattgtgggattttatcatctgtgtagtaggtgtgtgtatgtgtttctagagtgagatttgtgttttctgcccttttcctctccagccgatgggctggagctgggagaggtgctga

SEQ ID NO: 14466 - DNA, 120 bp, Homo sapiens
ctgcgaggcccaggcctgtggggctggttctcacctttgacagctgaatgttcctaaagaactgctgccccacagtgagggtgggagcagcggaacagggaatgccagacacaggctcgc

SEQ ID NO: 14467 - DNA, 120 bp, Homo sapiens
aggcggggtgggacttccttcctctgtccggagaggcacaggtgtcaccagttccagccaaaggctcctcacaggcgctgtgaatttttgtacaagtcttgtaattatcgaatcaacaac

SEQ ID NO: 14468 - DNA, 120 bp, Homo sapiens
tggcgcgtgtaccctcttctgtattctggagaatgacgacccgtatcttctagctcgtggtggtggttcttttctgacctgacggtcagcaggttcagtgtcacagcccatttgcaaggg

SEQ ID NO: 14469 - DNA, 120 bp, Homo sapiens
cagcgtgaggcccttggccctgaacctggaaggctcagccccgttccctgtaagaagggaggtgggaggggtggagaacaggaggagaggttgcggtgtcactgccccagcccccgggag

SEQ ID NO: 14470 - DNA, 120 bp, Homo sapiens
gcacggctgatgccaggtctgcatcacagtgagacgtctcctctctagacatcagctgcagttgaggaccacgtcctgaaaagtggcttttcctggggccagactgattcctagataaca

SEQ ID NO: 14471 - DNA, 120 bp, Homo sapiens
ctacggacctgtgagcagttgaaagtgcatctgcagaatgcacaggcccaaaagaggctttgagaggtataggctttcagggttcttaaagaaagaaaatatagtttctgaaatttggga

SEQ ID NO: 14472 - DNA, 120 bp, Homo sapiens
tgccgagtagcagacccagtgggctccgggacaggatggagaggcctgggtggcgtccgtgaggctgcctggctagcagcggcgcccagcaccactgtcagatccctggctgaaactctt

SEQ ID NO: 14473 - DNA, 120 bp, Homo sapiens
catcgccctgcagagtaaacagcaggggaagaacccaggccagccccagccagggctctcacagtctcctcttcctcttgaacaacaagccaaacaagtcaagcagcagcatgcgggggg

SEQ ID NO: 14474 - DNA, 120 bp, Homo sapiens
ccacgaccataactgctggaacaggagaagttttctaagggaaaactggaatgtggtttgtgtgtcctaagtctgagagccggctgagaactagagccctccctgtgaagacagtgggga

SEQ ID NO: 14475 - DNA, 120 bp, Homo sapiens
ccccgtgctcacccattcacactgagacatggggcatgagaacatggcaaatcatggcttgattttcccagggtctgtgtcttcgtgtccctaacatctagtgaagggctggacaccaca

SEQ ID NO: 14476 - DNA, 120 bp, Homo sapiens
tggcggttactcataaggacaaaacactaaaccataggctagaagttagattctgagtgcattaactcctgacactccaagtgggcctttttacagagggaaaaaaaaaaaaagaggccc

SEQ ID NO: 14477 - DNA, 120 bp, Homo sapiens
aaacgaagggctggcaaactatgatggtccaagggccaaatctggcccactgcatttttgtaagttttattggggcacagccactctcgtttatgtacgtagcaggctaagactgttttt

SEQ ID NO: 14478 - DNA, 120 bp, Homo sapiens
agccggggagctgcagcaaactatatacacaaaggcacaaggatttcttaactggtcctggacagaaaagggttgccaagccctgttctaaagcactgcacagctgacactacagtaaac

SEQ ID NO: 14479 - DNA, 120 bp, Homo sapiens
aaccggaagtattctccgaataactacttagctgccaccagttcaggagttcctttaaccccacccctggaccttccctgtatgttcttagatgaaccattctaactccagaaaagcagt

SEQ ID NO: 14480 - DNA, 120 bp, Homo sapiens
gtccgtcttgtttaagtgacacaaaatcaaactgctcccacattcacactgtcagggccactcaggaaacctcacgcagccagggtttggtcttgtggaccgaagtaacagcaacagcga

SEQ ID NO: 14481 - DNA, 120 bp, Homo sapiens
acccgctgaccaacagaagagtggaccgagtctgggaagtggctcagcctgggccctcggtctctctggccgctgtttgctgccttgaggaggaagcagcccatggcggggactctgggt

SEQ ID NO: 14482 - DNA, 120 bp, Homo sapiens
tctcggcgtcaccttcgatggtggcactggagtcccccggatggtgcctgaggccagcctttgccaccaagcctgcgctggcattggaggggccctgagaacggtggcttgtccagttgg

SEQ ID NO: 14483 - DNA, 120 bp, Homo sapiens
cagcggggcaacagtcattgactccctcgataccctctacctcatggagctgaaggaggagttccaggaggccaaggcctgggtgggagagagcttccacctgaacgtggtgagtcagag

SEQ ID NO: 14484 - DNA, 120 bp, Homo sapiens
cctcggcgggggaggggggcgggggccagaagaggcccaacagccagcttcaccctgtcatctctgagacccagagatgttgagggtctctcccacggctgcacagcccagcagtctcgg

SEQ ID NO: 14485 - DNA, 120 bp, Homo sapiens
aaccggagctgccgtgcagtctgtgctgagtcccttccttaagacagccttgaggtggggacatcctccccagtctagcatcttccctggggaggggacacagccacgaccatccatccc

SEQ ID NO: 14486 - DNA, 120 bp, Homo sapiens
ggacggcccctggggctggatctatcacacacagcagctgcagcaagtggggaatggctttgtggaggggggacgtggctcatctgctgagagctgctccagccttgagcccgccctgca

SEQ ID NO: 14487 - DNA, 120 bp, Homo sapiens
ggccgggtggggtgggcgtggagtgggtggtgcatatccctttgcagacccatggccaggcctgggacctcttggtctccagccttgcaggcacacttggtcagggaccagagcctttca

SEQ ID NO: 14488 - DNA, 120 bp, Homo sapiens
ggtcgtgtgtctggatggcacaacagccttgaacaccacagcccaccatgttgatctctcagcccagactaaagcaaggcatgcatcccagaggggagctccccacggagagaggctatt

SEQ ID NO: 14489 - DNA, 120 bp, Homo sapiens
gaccgggaggggccgcatccaagcacacaccaggctccatgtgggctccgggagtgccaggtcctgctgcagacaggtctggggctggttcctgcagctcctggcagcagcgaggaccct

SEQ ID NO: 14490 - DNA, 120 bp, Homo sapiens
gaacgcaacactttaggggagcttccctggagacagagacctctggagtcctggctgccctgcgtctcttggaaaagtcattgaccctccctgagccttagattcctcaactatacaatg

SEQ ID NO: 14491 - DNA, 120 bp, Homo sapiens
aaccgcattttataacactatgaagtctgatactgatgtaaagtgaggtcacccttgtcattgttaggatgattttgaggcttgttgacatttctggttgtttgtgtgaggccaaggaag

SEQ ID NO: 14492 - DNA, 120 bp, Homo sapiens
cctcgttccctgtgtagacagtggctctttgggatacagaacgggctcaggcagctgcccacagtgccttaggagctgggggacactcaggcaggtggggcaggtgaggaaatgtccctg

SEQ ID NO: 14493 - DNA, 120 bp, Homo sapiens
actcgacctcgaaccttgactttctcatctgagaaatgggaatgatgaccctcgccacactgacctcaccgagccctgggaagctgaaggggagcggttttgcaggtgctctgtggatga

SEQ ID NO: 14494 - DNA, 120 bp, Homo sapiens
agacgatggtgtgcaaagcatgctgagggaaccctctggggcaaggagggtgacaacaggcatgtctggctgtgggcaggcctctctctgcagctcccctgtgtcctgtgttcaccctgc

SEQ ID NO: 14495 - DNA, 120 bp, Homo sapiens
gcacgggaggggttggcagcccccttctgcagctgaggaaatggggcagggaaaggctgcacatcttttctgaggtgccaaagccaggtcagtggctcaggtggggtttaccccagatct

SEQ ID NO: 14496 - DNA, 120 bp, Homo sapiens
gtgcgctccgagctgagggcccaagaaactgctgttcactgaatacgtagctgcctggctgcctggctccctccttcttagccccagcctttccctgtctgccccacagcctcctcagag

SEQ ID NO: 14497 - DNA, 120 bp, Homo sapiens
tcccggcaggttctggcgctccttggagcacaaccaggcatcgctttgctgccatcatctcagcaagggctggggaaggaagccaagcccagcatttatttggaatgctagaaattgcag

SEQ ID NO: 14498 - DNA, 120 bp, Homo sapiens
catcgtcaccttgcctggcttaccagagccggggacaggtatgggaggaatatcagtggccagggtgacctgtctcaagggcctgcatcttacaagtgtccccactgtccccctccttct

SEQ ID NO: 14499 - DNA, 120 bp, Homo sapiens
gagcggagaagcatccttgtttgaggtgaacatccgctacatcgggggactcctctcagccttctacctgacaggagaagaggtgggttggcctttcatgacccctgaactgtccaggct

SEQ ID NO: 14500 - DNA, 120 bp, Homo sapiens
ctccgaccatccctccgctccctgtttaatcagtcattgctcatcatgggcatgttgctcccaccccagacggccccccagggctgaatctatcacacaaagcagcggcagcaagaggag

SEQ ID NO: 14501 - DNA, 120 bp, Homo sapiens
tgccggcgttcaacacccccacgggaatcccaaagggcgtggtgagcttcaaaaggtagggcgccatcgcgttccccactggggctttactgcgaccatgcccaccatttgtgttttgtc

SEQ ID NO: 14502 - DNA, 120 bp, Homo sapiens
acccgttcttttatgatgtagaaactgaggcacagggagaggaccatacctaccttgggagccacagtgagtcggtggcacggtgaaagtgccagcgacttccctggacaggtgtttgtc

SEQ ID NO: 14503 - DNA, 120 bp, Homo sapiens
gggcgggggcagttcctctggacatcccacagtgctgtcttgacttgagagtcttccacaatggccccaaacactctcttcccccgctggggttccggagccagcaggcacatcacacca

SEQ ID NO: 14504 - DNA, 120 bp, Homo sapiens
ccacgaggaggtccctgaagctgctaggagatctcaggatcccagccctcccaaacaggagcctagctctcaaggagccctagccactgtccctgtgcttcatggagctacttagtagaa

SEQ ID NO: 14505 - DNA, 120 bp, Homo sapiens
ccccgggcaccctgcagctctctggggccatcctcgaggccctccaacaatcccgacgctaggaaggctgtgacgttccactgcaccagacttcccatcccatctcctgaagtgatttct

SEQ ID NO: 14506 - DNA, 120 bp, Homo sapiens
ctccgatcactgtcctggggaggttgcaccttcgtgttggcctcaagggcttcaccacctttctctggtcttgcaaaaagagggcttggcatgttcagcatcttcgtcaactgtcctccc

SEQ ID NO: 14507 - DNA, 120 bp, Homo sapiens
tctcgggggccggagaaatcccagtctcgatgccagggttgactcctcagagctggactcctggatctctgctcagatccctcttccataaacactgatcctggagagacacagccagct

SEQ ID NO: 14508 - DNA, 120 bp, Homo sapiens
ccccgggtctggggtaggacatcattgggggcatcccttcctcttctgtccccagcccttccctaggtctctcagagcagggacctgatctgacacgaatcctgacatttgtgattaagg

SEQ ID NO: 14509 - DNA, 120 bp, Homo sapiens
aagcgcgtttgcttttaggctgtttgcctgctgtccgtgccgtgtgcgcatgtacattcatgtatatttcctggcaacatccgcctttttgttcttggtaagaaagtctgttgctaaaaa

SEQ ID NO: 14510 - DNA, 120 bp, Homo sapiens
cttcggagggggcctcctggcaggagctgggctactgttgttgcacctgcccccggcagggctcgctgtgggcagccccaacaggagggggaagaacgtgggcccttcaggagagtaggt

SEQ ID NO: 14511 - DNA, 120 bp, Homo sapiens
actcgtcagggtgggaaggaccctgaggagaggccgttccctggcaggtgtgagctgcacctcctcactggtgtctgcacagaccggcctgggagactgaggcagggccagcctgacctg

SEQ ID NO: 14512 - DNA, 120 bp, Homo sapiens
tgacggtggcctgtgcaaggacctctgcagccaagctggtctttttcactcatgctctctcacacacatgcagacactctcctgccacccttatagatcataaaggcctggatacacaag

SEQ ID NO: 14513 - DNA, 120 bp, Homo sapiens
aaacgaatatccatttacacatgcatgctcccgccacacacaaatagacatgtcttcacaattgcaaacgtctggtgagaagtcactgtgtgtcaggcatcacgtgagcacgtgacatgg

SEQ ID NO: 14514 - DNA, 120 bp, Homo sapiens
taccggtaaagaaactgaggctcagagaggtgaggtaacttgcctgaggtcacacagcagcaaagcaaacttaattagaatccaggtctgtctacctccaaagttgatgattacaccata

SEQ ID NO: 14515 - DNA, 120 bp, Homo sapiens
ctccgtcccaaaaaaaaacaaaagacgtcatgaattcatctatacatcttagacctacaagaatcagtcccagagttttcagaaggtctctgttcagagacttgtttctcagccagataa

SEQ ID NO: 14516 - DNA, 120 bp, Homo sapiens
ggtcgcttaggtgtgagagtgtggacaagtcccccaggcctctggaatgtgcatgcctgttgagaagcccagctctgggaagcagaggcaggccctggtcacatggtcatggtcagctgg

SEQ ID NO: 14517 - DNA, 120 bp, Homo sapiens
ttccgtgggcactgcctctagggcctcccaagacctggcagagcccccacccccactgtctgtgtgcaaacaaggacccccttccctttcccctgcctccaacccagtttttgtgacatc

SEQ ID NO: 14518 - DNA, 120 bp, Homo sapiens
gggcgtaggaagaatggtcaaaggctgcaggaaacagatttcacttccatctgccaaagatggtccaagttgtcccaaaagggaacaatgcaagtggggcctagagaggcagcattgggg

SEQ ID NO: 14519 - DNA, 120 bp, Homo sapiens
tggcgaagcagctgaggcctttccttccaacctgaacctcccccagaaaactcaacccaggaatttcccccagggacgacctcaccccaagtggcctcccgtaaaaaccacttagagaaa

SEQ ID NO: 14520 - DNA, 120 bp, Homo sapiens
tgccgaatccaaaagtacggggagaaaatgaagcttgaattgcagattatagccacgggaagaggcagttcgataacagttgctggttttaattgcgagacctgactggataaggagata

SEQ ID NO: 14521 - DNA, 120 bp, Homo sapiens
tgccgggaagcataattttcttctcaggcagagtcagggcctgcaggtctgggcaaagtcagtcgcatatgggaaattgtttcctattaataaaatctgagccctcggcctgctaaagag

SEQ ID NO: 14522 - DNA, 120 bp, Homo sapiens
gctcgcccaaacgtctgccttcctcctcccctggccttggtgcccggggtcatctcaggtttcctgtggttttttgttggttttttttttggtgcatacgtattcttttagcacttgata

SEQ ID NO: 14523 - DNA, 120 bp, Homo sapiens
gcacgcacatcattttctcttcttgaatcttcagaacaagcctgaaggcaggacaggcaggttctgcgtagcccatttgcaaccacagaaattgcagcctagagaaacgaaggaggagtt

SEQ ID NO: 14524 - DNA, 120 bp, Homo sapiens
aaccgagcttcaggggtaacaggggagccccaagacccgtcctattgctaagagttcacatccaggataaatccaccaggctcccgatggtgcccaacacaaatgagaccaccctgaggc

SEQ ID NO: 14525 - DNA, 120 bp, Homo sapiens
tgccgaggaggggtcaccagcccctcggtgcggcacctgagtaacttgtccactgcctgaatcccacactttcttctgtgggagggaagtggcaagtccagacctccttggtaggtacag

SEQ ID NO: 14526 - DNA, 120 bp, Homo sapiens
gatcggctgatttccaggcttgtggcccagcctcctgctgccaggtgtgacgagcgcattggcacggtcaggaagcagcagagcctgcctctgctctggggctcacggacaccagctcgt

SEQ ID NO: 14527 - DNA, 120 bp, Homo sapiens
aaacgattccaacttctattacctcccctgaaatcggtcctgatatattcgagaagcatgaggccagcccttcagatgcagttgtttatttatactcaggtttagattgggaagaggccc

SEQ ID NO: 14528 - DNA, 120 bp, Homo sapiens
tctcgcccctgccgtctcctggccaccccagttgagtgtccgtctgttccatcattcagcagatgcttggtgagtgcctgcaacggaccagacactgggctagaggccagggacaccgct

SEQ ID NO: 14529 - DNA, 120 bp, Homo sapiens
aagcgatggtaagggaaactgacaagtaagtgaagtgactgcaggtcataggaaatgctacaaaggagatagatagacagctgaggacctaccctacggggtcagggagggcctctctgg

SEQ ID NO: 14530 - DNA, 120 bp, Homo sapiens
agccgaaagactatctggcagaagaatgaacttcccataacccagccccctttcccaccctccctgatgccctccctgggagggggcctgaaacactggggctgttgtgcagagcaagga

SEQ ID NO: 14531 - DNA, 120 bp, Homo sapiens
cagcggaaatcacgggagaatgttgagcccttccctgggctcagctgcttgctctgttcataagctttaatagcccccggggctctgggccaggtgacccggctttaaatccctgctgtg

SEQ ID NO: 14532 - DNA, 120 bp, Homo sapiens
gagcgtgactcccatgacccacctgtgctcaaaaaaaaaaaaaaaaaaaagcaaaccaggaaaactgactacacaaacattgtagaaagattagaaaatagaagcagaaagaagactcat

SEQ ID NO: 14533 - DNA, 120 bp, Homo sapiens
caccgtggtatcctactatgcacactgttttcttataatctgcttttgcacttaactgtacattgtgaacctctttccatgtcaacaaatacatgtttatctcatcgctgtacgtgcttg

SEQ ID NO: 14534 - DNA, 120 bp, Homo sapiens
gcccgccccagccaagggcagagccaggcatcttggcttggcagaccccctaagattaccctgtgcaatgggtgttgggctgttccctagagaaaaacatgagattcatcaccaaaataa

SEQ ID NO: 14535 - DNA, 120 bp, Homo sapiens
ccccgccaggcccgtgcggctgtctacctctcctctcctgtcctctgctgtattgctgggaggaaattgtaaaaatgaatattttaaaatgtatcctccaggagggcccttgcaggtgga

SEQ ID NO: 14536 - DNA, 120 bp, Homo sapiens
ccacggataaaaataagtacgactcaagacaggccgagaggagagaggaattaagggatgactcatcctcactgaaggtaggagagagctttgcaagccacagaatctgaacacccaaac

SEQ ID NO: 14537 - DNA, 120 bp, Homo sapiens
ctgcgccctcgctgaggatggaagcaccatttgcacctgcttccctcatagaagggtgtgatgtcagctccttcccagaaagcttcatcaacacccagctcctggcactgaggtctgcag

SEQ ID NO: 14538 - DNA, 120 bp, Homo sapiens
ccccgggaagggggacgagcagggcacagtccttttctaggtgcctccctttaaatgactggctatttggtcagaccagccaaatgcattgggaagaaaagcaaaaatggaaaatctgat

SEQ ID NO: 14539 - DNA, 120 bp, Homo sapiens
ttccgttccctctgctttgaggaggtgaccccactgtggtttgagaaagtgctagagatgaatgggccagcttcccccagcgtttcccctgggggcctgtccttggaagtatggtcattg

SEQ ID NO: 14540 - DNA, 120 bp, Homo sapiens
gctcggccctctgtgactaatgcttaattacaccctactggaggaagggggctgattctattttttgtatctgaaaatatcagtttggtttcctatatttggagcactgttttgttcctg

SEQ ID NO: 14541 - DNA, 120 bp, Homo sapiens
aaacgtgcacaggaatcacctgggagcttgttaaaatccaggttcatgttcagcggctctggcatggagcctgagattctgcctttttttttttttttcctgacacagggtcttattctg

SEQ ID NO: 14542 - DNA, 120 bp, Homo sapiens
tgccgccacatccagctaattttttttttgtcgctacatttctcaggttggtctcagaatcctgggctcaggctatccttccgcctcagctttccaaagtgctaggatggcaggcatgag

SEQ ID NO: 14543 - DNA, 120 bp, Homo sapiens
tgccgaggcctgcaagattccgacgtcctgtcccagcctctgtcaccaagcttttctcttcccataactcactctgccttctgtgtgtctcctggacataccaagcttgtttccacccca

SEQ ID NO: 14544 - DNA, 120 bp, Homo sapiens
caccggctctcccctcttctccgtgcctgggacgctccttcctcgattcttctcatagctggctgcttcttcccgttccaggcgcagtgtatgtgtcacctcccagctacggtgctgatg

SEQ ID NO: 14545 - DNA, 120 bp, Homo sapiens
ctccgagtagaatattcagcccccacagaggaagtgccttgcccgtcttctataatactgtgttcccagggctgagaacagtccctggcacacagcaggtatttagtttgcggagaggcc

SEQ ID NO: 14546 - DNA, 120 bp, Homo sapiens
ccacgtggtccgggcatgcttaagcaactcctgcagtggcacctgtttcccccaagtgatcctttgttctcaaatgttggtcctattattggctgccaagatgttagggttgggtttggg

SEQ ID NO: 14547 - DNA, 120 bp, Homo sapiens
tgtcgccggtgaaactggaatggaaaatcctaatttgatttgattccctggagggcagcagcgccccctgcgggaagaaggcctttcctggtgagtttaccccaaagagacaggaagcag

SEQ ID NO: 14548 - DNA, 120 bp, Homo sapiens
attcgaggcagtgaccctgcccctacttaaatgtggctgcaggcaggtcaggctccctcctcttctcatgggtggatggagtggcctggagtgcttacaccaacaccctctgcgcaggga

SEQ ID NO: 14549 - DNA, 120 bp, Homo sapiens
gtgcggagccagggctagaactggggccatctggcttcagggtcctgcaccagctcacaggtttcagtagagaaaagaaatgcacagtgacgaatatgcagtagatttccaatagacagc

SEQ ID NO: 14550 - DNA, 120 bp, Homo sapiens
ccccgccaccccccaccaccaacacacacaatgagggggaaatggcaggctggggagacccatgaagctggcaggaggaacactgggcagggaggggccagccctgtgctgggcatttca

SEQ ID NO: 14551 - DNA, 120 bp, Homo sapiens
ctgcgagggggtctctgcagtttacagatgagggtatgggtgcccaagccccctgaaaagctcttagagccagaaccggaatactattctgtgtgactctaaaaatctctgcccattctt

SEQ ID NO: 14552 - DNA, 120 bp, Homo sapiens
ccacggctgagccgctgagccgctgagggtcccctcccagctggagctgagattcttgagattctaaacaaccgcctccctacactgagtcagaaggaaagcctgctgggcctctaaacc

SEQ ID NO: 14553 - DNA, 120 bp, Homo sapiens
aaacgcccccgggcctctcatctagccttcctggcccgggcacacgggacagcactaccccaggctttgcagtgcctggctggcctcccttcaagggtggtgcccatctgcccagttttc

SEQ ID NO: 14554 - DNA, 120 bp, Homo sapiens
gcccgggtgggagcctgggcctcagccaacaccattctctgggacctaactccactccgtgatttggggaaaaaagccaagcaatggactcaattaggagcctccaaaccatcaaggctt

SEQ ID NO: 14555 - DNA, 120 bp, Homo sapiens
cgaaacaagtcagaaaccctttcctacgcccttaagtacagaataccagcttctgctggcagaggcctcagccacagggacattttggaccttcgtttcacctgggcaaaaagggaggag

SEQ ID NO: 14556 - DNA, 120 bp, Homo sapiens
tctcgaaaaaaaaaaaaaaagaaaagaaaaaatttggcctttatcttctgtattcctaaatgaaccacatttaacagtgattcaaacaaatgaattcgcagtaaggtagccaaactgtca

SEQ ID NO: 14557 - DNA, 120 bp, Homo sapiens
taccgggacagctaaaacatcactgaaaatcagaattctccactgggagaatgatacagagtagacaggagcacctttataaaggtgctgggggtgggggatgagacctcactccaaggc

SEQ ID NO: 14558 - DNA, 120 bp, Homo sapiens
gaacggctgaatagtagggctttcatttgctgagacttgtgagcaggtctgaggcagaggggaattgttccgggcaacgaggggatgctgagctgtcagagcagccccccttcctgtgca

SEQ ID NO: 14559 - DNA, 120 bp, Homo sapiens
gaacgagggctgatggggggctggggccaaggatccctgtcccccatgtcagtcaacaggaggatgctctttcctgtacaacagatgggccctgctcctggaataatgtgataaagggca

SEQ ID NO: 14560 - DNA, 120 bp, Homo sapiens
tgacgttttgtttggggaatgtgtgggcaaatgaaggggactgtgggaagagtgcacattaagaagtagaaggcaggagaggagaggcgaggtcagaaagaatgaagaagtgtagtgcga

SEQ ID NO: 14561 - DNA, 120 bp, Homo sapiens
ctacggagcccagaaggaggccaggctgagggggcttcctgcaaggaaaagagctggtcatcctgctcactcctacctgggagggggaagcattaccctttctgctttctggctccttcc

SEQ ID NO: 14562 - DNA, 120 bp, Homo sapiens
gttcggggatgcctagaggccaaggcagggctgaattcctgctcttaatgttctcttcctggctcccagcattgttatcatcaagtctatcaaatgcctggtaaagggttgccagcctgc

SEQ ID NO: 14563 - DNA, 120 bp, Homo sapiens
tatcgtgccaatctctgcttaaaatttctagggatactgcttagcctgacatagcactggttttgggtacaggggcagggcagagaggttggcagcagatggggtgcagcatgtgtagta

SEQ ID NO: 14564 - DNA, 120 bp, Homo sapiens
aggcggcaatgcctgctgtgagcctaagaaaattatacaaacatggcaggtaaggtggggtcaggggacccagggtgggggcaggagtggtgaggggcagtgggcaaggctggaggggag

SEQ ID NO: 14565 - DNA, 120 bp, Homo sapiens
ccacgcctagaagaggagcagaggctagaacctactttctccaacccccgtccccaggtcccctggatggcttgcctggccctgcaccctgtggggtccaggaactgctctgcatcctgg

SEQ ID NO: 14566 - DNA, 120 bp, Homo sapiens
tggcgggggttagggggttgtctacagggccagactgaagtgtctgctggagttgactgatattgcagagtcttgggactcaccatggcttatagttatgtgcactcaagcgagagctgt

SEQ ID NO: 14567 - DNA, 120 bp, Homo sapiens
ctccgcacttgctaattctgctgtgagacactcaggcagcccagagctggaggaacaaacagccgtagacaagaagcagcagatgggtttccacggtgatcatttcctggagtccaagta

SEQ ID NO: 14568 - DNA, 120 bp, Homo sapiens
tggcgctccttgggcaagtcacctcaactccctgggtctgaggagggacagaaggatgccatttgctaggcgcctgctccacaccaggcgtggtatgctgaatgctgcacactcactacc

SEQ ID NO: 14569 - DNA, 120 bp, Homo sapiens
acacggcttgttaagagcacttgagctgtgctcttaaccacagcattctatagtgctgggtcccttcctctgagggccagggccattccttctgcagatttcaggcccagcctgaagcgg

SEQ ID NO: 14570 - DNA, 120 bp, Homo sapiens
acacggtattgttagcccccattttctgcctgggcatcctagccaatatgacacctggtgcttcaggcaggaagcacccccatgcccaggcagcccccaggcagctgtgacaccaccgca

SEQ ID NO: 14571 - DNA, 120 bp, Homo sapiens
acacgctgcagtgctcagagctctgcgatgcctccagaggcatctgtgtcctcaaattcacacaaaggcctgcttcaatcctgtcctgtaagaaacaagtcctctgcctcctccaggaag

SEQ ID NO: 14572 - DNA, 120 bp, Homo sapiens
tcccgtcgcccaaagtgatcatttctgtcccactgatcagagcccaggtataggatggaggctcctggtggctttgttgagcactgaaaagcccgacggaggcccctggcagatccctga

SEQ ID NO: 14573 - DNA, 120 bp, Homo sapiens
gagcgaaactccatcttaaaaaaagaaaaaattcatcaagctgcacttaaaatgtttacatttttctctaggtatgttatacttcaagaaaaattttatttttaaaaaatgtgcattggg

SEQ ID NO: 14574 - DNA, 120 bp, Homo sapiens
gagcgctgtgaagataaaaggagccaatgcatgtagaaatgcgtggcatgctcaggaaatgtcagtgcttcccgttcacccgggaggactcctaggaaatgactctgagctgcctttact

SEQ ID NO: 14575 - DNA, 120 bp, Homo sapiens
tcgtggtgaagcttcctgcctctgccaccaactgagagcaaaaccacgttggatccatctgcagaccccatggcacagtgcaggtgttctcggtgatttgctgccggcagctgtgagcaa

SEQ ID NO: 14576 - DNA, 120 bp, Homo sapiens
atgcgggccagaagtgcagcaaggagttggtaaagggcgaaagctgaagtcagattcatctaacttgcaccttgcggattgcaggccccacattccagagcaccttgcggttggttgcag

SEQ ID NO: 14577 - DNA, 120 bp, Homo sapiens
tcccgcctgacacagaaggaaactcagagaggttaagttcttgctcaagcccacacagccagcgagaggtagactagggctggaatcaaaggtagggctgaggtgtgggggctgtagcca

SEQ ID NO: 14578 - DNA, 120 bp, Homo sapiens
acacgtttcctccgtgacaatgtgggcatgggatgtgagactggatctgaaggcctccctgacctggctggttattcccgacactgaccagagctgctcccccatccttccaccaccctc

SEQ ID NO: 14579 - DNA, 120 bp, Homo sapiens
agacgttctgactcaggcccattcccgatctccatccccaaggtgatctgggaatgaggcaggaagtaggaaggaaacaccccaagactcgcttcccccttgcctgaggtcctggctcta

SEQ ID NO: 14580 - DNA, 120 bp, Homo sapiens
ggccggaaagagctactttaaggtagtcccaggggacccacaaccagaaacagggacggtccggttcatggcgagggtggctgggagccgaggccagatagatgcagcccacctcatctt

SEQ ID NO: 14581 - DNA, 120 bp, Homo sapiens
atccgcccccacctcccctctcctctgctgactttttcagggcccccttacccagaaagccgatccaatttgacctctcctccctgaccctgcgctgcccacagggtggaaggtctgtgc

SEQ ID NO: 14582 - DNA, 120 bp, Homo sapiens
tcccgagcagaggtgggggcacttccgactgagggctttggcgtggaggactgagtcacccttgtcagaccagagctgccccagggtgtcacctgcgttgcaccctgagtcccctctttc

SEQ ID NO: 14583 - DNA, 120 bp, Homo sapiens
cctcgatccctagaagggagctgtgaaggggcccctaccggtcctaccacccaacctggatgctcctttaagaccaaagggatgggggttgcagagtcagacacaacagccccatcctcc

SEQ ID NO: 14584 - DNA, 120 bp, Homo sapiens
aggcggcgggccaggtttcctgccattgacagcatcccagctggccctgcccacctcccatgcttaaccccttcctgaccagatctcagagccaagctggcaccctcagccttcacctag

SEQ ID NO: 14585 - DNA, 120 bp, Homo sapiens
ccccgtccagaggacggacccccagcgccgtggagaggctggaagccgacaaagccaagtatgtcaagacgcaccaggtgatagctaggcgacaggagccagccctgcgtgggagtcctg

SEQ ID NO: 14586 - DNA, 120 bp, Homo sapiens
ggccgctcacgccgcacccctgcaacgagctggggccccctgcatcgcccaggacgcccaggccggtccgccggggaagcggcaggcggctgccgaggcctgattccctcatcttctacc

SEQ ID NO: 14587 - DNA, 120 bp, Homo sapiens
taccgccagaagcgggactgcaaggcttcggtgaacaaagagaacgccaagggccagggtctggtgcggcgcctctttctgggtgccccgcgggacgctgccccgagcagcccggcctcc

SEQ ID NO: 14588 - DNA, 120 bp, Homo sapiens
gagcgacctgcggcttcagggggttgggctgcgccccaggatgccccggaagcggcgggaaagcgggcgctgtgtcccacgtgctcgctgcccctgtcggagaaggagcgcttcttcaac

SEQ ID NO: 14589 - DNA, 120 bp, Homo sapiens
ctgcggcctggagcgcgcgctggtggaggtgctgggcgcagagcgcttctccccgcagagctggggagccgacgccagcccgcaggccggaacttcgccgccgcccggctccggggacgc

SEQ ID NO: 14590 - DNA, 120 bp, Homo sapiens
cagcgactggacatccagcgacaggggcgtggacagcccgggcggcgcgggcggcggcggcggctcggaggcagcgggctcggcgcgggaccggcgccccccggtgtcggtggtggagcg

SEQ ID NO: 14591 - DNA, 120 bp, Homo sapiens
caacgcgcgcgtcatccagtggctgtacggctgccagcgcgcccgcggaccgccgcgcgagtccgaggtgtgaccgccgcggctccggactggccccgggactggccccgggcacggaaa

SEQ ID NO: 14592 - DNA, 120 bp, Homo sapiens
tggcgcgctgggtgcctttgcgtaagcccttccttctggaactcagtttcgcgtctgaaccttggggaggtggaacaagttgctgccgaaggcccttccctgctcccgcggcgaaggggg

SEQ ID NO: 14593 - DNA, 120 bp, Homo sapiens
ttgcggggaattaaagatacttcagagaactgactggttattccttcattctacagttggcttaaataactgtgattgatggccatgcaggagaaatatccaactgaggggatctctcac

SEQ ID NO: 14594 - DNA, 120 bp, Homo sapiens
tcacgtcacttcaccgagtgagtagtcagaagttttctgggttaaattctgacctttgttctgttttttcatattccttaaggtaaatattgaacaaacaagcattcactgaaatgctgg

SEQ ID NO: 14595 - DNA, 120 bp, Homo sapiens
ccacgtggttgggagaggacgacatataaaggattggaacagaatgactttggaacatagttccatttgaaatcagaaaaacacagcataaattactgtgttctatgttgtctttgtcct

SEQ ID NO: 14596 - DNA, 120 bp, Homo sapiens
gcccgccagccggggctcgagttaccaaggggcgggtcggcaccgccccctccctggcccagctggtcccaggcctttcctacgtgcctggcgagatggcccacccaagagcctggcgga

SEQ ID NO: 14597 - DNA, 120 bp, Homo sapiens
cagcgggttgagggggcgggtgctttattgggggctgggactgggtccaggacagggactggggccgggaccgggaccgggactggggccgggaccgggaccgggactggggccgggacc

SEQ ID NO: 14598 - DNA, 120 bp, Homo sapiens
gaccgggaccgggacagggaccaggactgaatttcaggctggacttcggggctcggcgtgcccgcagcagcagtgctgctttgggcacaaggcctgcagcctgcagcgtgagtgtatcgt

SEQ ID NO: 14599 - DNA, 120 bp, Homo sapiens
gggcgggaatgtgctgaagatctcaaaggcagaggcatccatgaccctggggaccaggcagagcagatcaggctgggcagtgggaccagagcccctctgtggccctggccctgccctgca

SEQ ID NO: 14600 - DNA, 120 bp, Homo sapiens
ctgcgctagcagagctcgcacgtccccaatggtgttgtcaggctgcatcatcagtaggaaggcctgttccccattctcagacttgatgcgcagcatggagagcgggggtgccggcgtgtt

SEQ ID NO: 14601 - DNA, 120 bp, Homo sapiens
ctccgggggctccccacatagtccctgagattcccaggaaaaactcgcctaacagaatgataccaagacacttttcttttaacaactaccttaaggacaaataggcaaacctaaaaacaa

SEQ ID NO: 14602 - DNA, 120 bp, Homo sapiens
agccgtccaaggtgaggaccatggccagcaccctgagcgaggggctgtgggggatcctgtttgcatggctttggaggaggttgagggctccagcctctagcccctttgcccaactcagcc

SEQ ID NO: 14603 - DNA, 120 bp, Homo sapiens
agccgtccttctcagggcccaccgaatccttgtggcaaccctgggcatagaaatcacttgttccaaccttcctattttgtaggtgaggcgactgtggcccagaaagggtcaggagcagaa

SEQ ID NO: 14604 - DNA, 120 bp, Homo sapiens
ctgcgcttgccaagagcctggaagtgagcatctgggcacgtgagctggaaagggggtgctggtggccgctcaaggctaaccaggcccattgcctggcatgtggcactcatggcatttctt

SEQ ID NO: 14605 - DNA, 120 bp, Homo sapiens
atccgggttccagtcctggctccatccccaccatttaaccagaagctcttctcccttctgagtctcagtttcctgagctgtaagttggggaaacagtgtctgtctcacaggagcaatgtg

SEQ ID NO: 14606 - DNA, 120 bp, Homo sapiens
ggacgatgagatagtaactgcctggcacatggcagcttcggtgccagcaccgaaaatgtcctagtatattgctcagctcagcttcctgccagtgaccccaccttccagacctaggttggc

SEQ ID NO: 14607 - DNA, 120 bp, Homo sapiens
tagcgggggcttgggagtggctgtgttgagtgtctaggctactggtgacttcctttctcgtctggccagtacgtgaccgcgtccggaccaagatggagagagacatcctggctgatgtaa

SEQ ID NO: 14608 - DNA, 120 bp, Homo sapiens
attcgtggtgaagctgcactatggtaaagcttctggccctgcctgagctcctaccccacccatccttcgcccttgcctgtggtctgtacactgtcccaccgcctgcctggcaggccaagg

SEQ ID NO: 14609 - DNA, 120 bp, Homo sapiens
ggccggagaagcagatcataaggccgcgccgactctaccattgcctttctccctcttcccagccttccagaccgagggcaagctctatctcattctggacttcctgcgtggtggggacct

SEQ ID NO: 14610 - DNA, 120 bp, Homo sapiens
acccggctctcaaaagaggtgagctgacatctactgccagagggccccgggatggagctgagggacgacaagtcctcccatcccagggccctgtacagaatgtgtttggtatggcttgaa

SEQ ID NO: 14611 - DNA, 120 bp, Homo sapiens
ccacgcaccctggaatggaggccatacgctggcaaggtctctgagagtttctcccaaggaaactccagggagctaagggttcctctcacctctgcacctgccttcttccagggctgctct

SEQ ID NO: 14612 - DNA, 120 bp, Homo sapiens
atccgatatatgttcattcctacccccatttccttatgtaaaaagtactattctgtatacactgttctgtaccttgcttttttcaagatagtatatcttggagctcactccatgtcagaa

SEQ ID NO: 14613 - DNA, 120 bp, Homo sapiens
acacggagaaactccttgttccagttcatggctgcaaagcactccattatgcaggggagagggctgattccagccttctactcttggaccctaggcctgtttcccaccccttctatttct

SEQ ID NO: 14614 - DNA, 120 bp, Homo sapiens
ttgcgtattagtcatttcatacttcaaatcctttgtatgatgagaaggctatatggcctggggtttccaagggtcctcccagggtggctcttcaggaccaggaagctgctgactgcccag

SEQ ID NO: 14615 - DNA, 120 bp, Homo sapiens
tcacggaggaggatgtgaagttttacctggctgagctggctctgggcctggatcacctgcacagcctgggtatcatttacagagacctcaagcctgagaagtgagtgaagcctccagccc

SEQ ID NO: 14616 - DNA, 120 bp, Homo sapiens
aaacgtctccctctcttgggcaatctgagggatgggtgagtggggtgggtggtagtgccagctgcccagtcactaatgctaccattaccaagggccaggtactttgcatgcaggtaatgt

SEQ ID NO: 14617 - DNA, 120 bp, Homo sapiens
gcccgtctttttttgctaatctagtgtgacatttgagatgccacctttagaggtctttccttgataaagccctatagaattttccctaatatctaactaccctcaaatgataactaagga

SEQ ID NO: 14618 - DNA, 120 bp, Homo sapiens
ccccgctacatctcccaccattgtgacctgacctccccacttctctttcagggagccatggctgccacgtactccgcactcaacagctccaagcccaccccccagctgaagcccatcgag

SEQ ID NO: 14619 - DNA, 120 bp, Homo sapiens
cagcggcgagtgaggaagttgccatccaccaccctgtgaggcaccagggcattcgggccacagggcggtgctagcttgacacagtcagcatgcttcccagagggagcaggccggaaccac

SEQ ID NO: 14620 - DNA, 120 bp, Homo sapiens
acccgaggggccggggaagctgccagcccagaacacccctaatgagggtgtgagaagtgccttctccttccccaggatggactcttctcggctcaggctctgctggtggaaagcgattca

SEQ ID NO: 14621 - DNA, 120 bp, Homo sapiens
ttgcggccccaggaggggaactgagtcacgctggggctctctgagactctttagagcagctttgggatcccaccctggggacccccacgattggccacctgtagccatctgcacacacct

SEQ ID NO: 14622 - DNA, 120 bp, Homo sapiens
ctccgagacagtccagtgtcacctctctcagagcatctggctgtttagcagaactcattctatccccaatcagctccttttccgttctgttctgctgggagttctagaaccacttcctgc

SEQ ID NO: 14623 - DNA, 120 bp, Homo sapiens
ctgcggtcaggctgggcagccccagagagaggatgtggaaagcactttttggctgacttcatctggggttggcaacaggacagagttcacaggaggccagtgggcgggccatgagggaca

SEQ ID NO: 14624 - DNA, 120 bp, Homo sapiens
gcacgctctcctgcactcttcatccctgaatttaccctctctctgctatcggatgttgaagacattggcagtgacagaaaatgggccagggccagttagcccagctgcttggaaccaggt

SEQ ID NO: 14625 - DNA, 120 bp, Homo sapiens
tcccgctggcctggcccacgtgttcctgccaggggattccattatggtattgataacagtattattagccaatggtgaccaagtgccaggcactatgcctgggcctcacatgaatatctc

SEQ ID NO: 14626 - DNA, 120 bp, Homo sapiens
aaacggacacttaacaagccatggtcagctactgataagacacatacagaattaaactggggtgagatattgggtaatcagggaaggccattctggggaggtaacccaggagctgagatc

SEQ ID NO: 14627 - DNA, 120 bp, Homo sapiens
tcacgagaaaatctcagaccaacccaaactgagggccttttatagaataactggcctgtactgttcacaaatgtcgaggtcagaaaacagaaagaaaagactgaggaactagtacagatt

SEQ ID NO: 14628 - DNA, 120 bp, Homo sapiens
taacgaaatgtaatatggactatgaattagttgatagtattacatcaatgttaaatgtcctgatttttatatctatactgtggtaacataagacaatgaccttgtttgtttttttttttg

SEQ ID NO: 14629 - DNA, 120 bp, Homo sapiens
tgacgtgacaagagaaaacaatccaggtggaaatgaacagtgagagacgtgtaggttccctattctttgaggagtaacatagggaaatgaaagtgaactgaagagaggaagaaaagtgga

SEQ ID NO: 14630 - DNA, 120 bp, Homo sapiens
tcacgctcctcttgagctccatgtgcatttgcgcttgcttctttctctgcctcttggttgtttcaaggtaccaggcatgagttcccacacagcacaccctcgacctctcctggtcacact

SEQ ID NO: 14631 - DNA, 120 bp, Homo sapiens
taacgggaggagaaaggcttctcgtaggggaacgacggtagtcaggaactccactgggaggagtgggtgagagggtcacattgctgtctggcacccacacatctgttggaagaatgctac

SEQ ID NO: 14632 - DNA, 120 bp, Homo sapiens
aagcgctgcttgaattgctacccatatgaagaggaaatgtgccatgtgcctttttttctctcttttgcatttgggcttccttatggctttgttgcttttatgttcccaagtctgcaaagt

SEQ ID NO: 14633 - DNA, 120 bp, Homo sapiens
gttcgttttcagcttgcttgtttataggcatctctgttaaaaggaacccttcttttccccttaagatctagcaccaggggtgcttgggggttgttgtgatatcagtcaattaaaagccca

SEQ ID NO: 14634 - DNA, 120 bp, Homo sapiens
caacgtgcttgccgggcatgagtgcctttgggcccagctgtttactctcaactgccgtgtactttgactttaagaaaagtgcaaattcagccacgtggtagagggattaaaggccacata

SEQ ID NO: 14635 - DNA, 120 bp, Homo sapiens
tagcgttatgtgaaactcttggtaatttaggtttggataaccggcttttagtctccagatttctaacattgtgcttgtttaggaatttaggcttctaaagagaaccatattacaaagctt

SEQ ID NO: 14636 - DNA, 120 bp, Homo sapiens
aggcgctttcatacatttatttccaaacacttctcagtggttggtattgccccggttgaatactactggctgtactgtcaggattcttggaaggagctttgaacaaaatcctctgggaga

SEQ ID NO: 14637 - DNA, 120 bp, Homo sapiens
aagcgccttcctggaggtttgatcaggctagtgcttcaggggatatcattggaatgggctaagtctgcaaaggggaatgtgtctgatcttctagaatggtttctgtaagcagaatggggt

SEQ ID NO: 14638 - DNA, 120 bp, Homo sapiens
ctccgcttcatcccaaagacccgcatgtgtataaggcagatggaagagggaaaagtgaaggtgctggcagaatattaggagggtataaacaggcacatctttctggagttgtgagaaaaa

SEQ ID NO: 14639 - DNA, 120 bp, Homo sapiens
ggacgctatacccttggctgaaaaaaaggtaatcttaaagactgttgttgaagattggatcatactcatttcctcaggttaggtaggagtgaatgttatcgatatcaggagggaggtgga

SEQ ID NO: 14640 - DNA, 120 bp, Homo sapiens
cttcgtatttttacttctgtaatgctctcagacgctgagatcttggaattacattggtctagaaagaggaaatgcgagggagctatgctgtccctgtagaatccagattttagagggcag

SEQ ID NO: 14641 - DNA, 120 bp, Homo sapiens
gagcgagtggtaggaaagatagccaaacctataggacctgcttggaggaactagccaactagggaatcgcctcaaacagtgaaccgttgactagagtttggttatttggttcctgtgtgg

SEQ ID NO: 14642 - DNA, 120 bp, Homo sapiens
caccgggaagcttgctagaaatgtagattttcaggccccatcctagatttattggatctaactgttaataagatctctaagtgattcatgtgtctaatggtttagaagcacagagaccct

SEQ ID NO: 14643 - DNA, 120 bp, Homo sapiens
gagcgagactgtctcaaaaaaagaaatataaaaaatatcaagctggggctttggaacgtcataaattttacagattgtatccagtaatatttaagtaatctctgagtgtgggagaccacc

SEQ ID NO: 14644 - DNA, 120 bp, Homo sapiens
tttcgtgcgtgttttggggaccctggctcccagtgccttacccagttcagaacccatagtggagccatccacagctcccagcatacctctgcaacttcatctccagccactcatttgtac

SEQ ID NO: 14645 - DNA, 120 bp, Homo sapiens
gatcgtacagaagaatgatccatttgtggtggactgctcagataagcttgggcgtgtgcaggagtttgacagtggcctgctgcactggcggattggtgggggggacaccactgagcatat

SEQ ID NO: 14646 - DNA, 120 bp, Homo sapiens
cttcgagagcaagacagagctgctgccttcccggcctcacgcaccctgcccaccagcccctcggaagcatgtgacaacagcagagggtacaccagggacaacagaccaggaggggccccc

SEQ ID NO: 14647 - DNA, 120 bp, Homo sapiens
aaacggatcacagccactatggatgacatgttgtctactcggtctagcaccttgaccgaggatggagctaagagttcagaggccatcaaggagagcagcaagtttccatttggcattagc

SEQ ID NO: 14648 - DNA, 120 bp, Homo sapiens
caccggaacatcaagatcctagaggacgaaccccacagtaaggatgagaccccactgtgtacccttctggactggcaggattctcttgccaagcgctgcgtctgtgtgtccaataccatt

SEQ ID NO: 14649 - DNA, 120 bp, Homo sapiens
attcgaagcctgtcatttgtgccaggcaatgactttgagatgtccaaacacccagggctgctgctcatcctgggcaagctgatcctgctgcaccacaagcacccagaacggaagcaggca

SEQ ID NO: 14650 - DNA, 120 bp, Homo sapiens
ctccgggaaaacaccttggttacactcgccaacatctcggggcagttggacctatctccataccccgagagcatttgcctgcctgtcctggacggactcctacactgggcagtttgccct

SEQ ID NO: 14651 - DNA, 120 bp, Homo sapiens
tgccgtcctttccccgcagagactggtcttggaaaccctcagcaaactcagcatccaggacaacaatgtggacctgattctggccacaccccccttcagccgcctggagaagttgtatag

SEQ ID NO: 14652 - DNA, 120 bp, Homo sapiens
gtgcgcttcctcagtgaccgaaagaacccggtgtgccgggagatggctgtggtactgctggccaacctggctcagggggacagcctggcagctcgtgccattgcagtgcagaagggcagt

SEQ ID NO: 14653 - DNA, 120 bp, Homo sapiens
tatcggcaacctcctgggcttcctagaggacagccttgccgccacacagttccagcagagccaggccagcctcctccacatgcagaacccaccctttgagccaactagtgtggacatgat

SEQ ID NO: 14654 - DNA, 120 bp, Homo sapiens
atgcggcgggctgcccgcgcgctgcttgccttggccaaggtggacgagaaccactcagagtttactctgtacgaatcacggctgttggacatctcggtatcaccgttgatgaactcattg

SEQ ID NO: 14655 - DNA, 120 bp, Homo sapiens
agccgtgggacacctcccccccccgtgtgtgtgtgcgtgtgtggagaacttagaaactgactgttgccctttatttatgcaaaaccacctcagaatccagtttaccctgtgctgtccagc

SEQ ID NO: 14656 - DNA, 120 bp, Homo sapiens
cctcgcctggccccctcaggctttgtggaccaactcgtggaaggtcttctgggcggcctgtctcactgggatgctgaacacttcttgttcattgctgagcatggctacctgtatgagcac

SEQ ID NO: 14657 - DNA, 120 bp, Homo sapiens
ttacgggggttactgagtctacgcagttgcctgctgatttcggtagcatcactcaatttcttgttcttcatgttggctgcagttgcacttcatgacctgggttgtctggttttgcactgt

SEQ ID NO: 14658 - DNA, 120 bp, Homo sapiens
ggccgagtctggactagtgtactcctctttgcctttgccactggggtacgctccaacgggctggtcagtgttggcttcctcatgcattctcaatgccaaggctttttctcttctctaacg

SEQ ID NO: 14659 - DNA, 120 bp, Homo sapiens
tgtcggtgttcacacttggccttccctttgccctctttcagtattatgcctacacccaattctgtctgccaggctcagcccgccccattcctgagcctttggtacagttagctgtagaca

SEQ ID NO: 14660 - DNA, 120 bp, Homo sapiens
taccggattgcagagggaaatgaaccgccttggtgcttctgggatgttccactaatatacagctatatccaggatgtctactggaatgttggctttttgaaatactatgagctcaagcag

SEQ ID NO: 14661 - DNA, 120 bp, Homo sapiens
atacgtgaccactcacccttggctctgccttacacttgggctgcaaaggagcaagaacaataagaccctagagaagcccgatcttggattcctcagtcctcaggtgtttgtgtacgtggt

SEQ ID NO: 14662 - DNA, 120 bp, Homo sapiens
ccacgctgcagtgctgctgctgtttggaggtctgtgcatgcatgttcaggtgaggtggattcctgactgggataaggatgtgaatacaggcaaaaccccttggccaaggacagggaaggc

SEQ ID NO: 14663 - DNA, 120 bp, Homo sapiens
actcgcaatttagtcagcaaaatgggttatgagaaagccaggctgaccaaagttcaaacttctcatctttctgcttcctcactgtaacacgggcaatggcttattaattctccccatcct

SEQ ID NO: 14664 - DNA, 120 bp, Homo sapiens
ccgaggtgccgaccgaccgactgatcgcggacgccggctggaaggactacggatccgcaggaagaggcagttgggggccaggggcccagtagaggaggctgaggtgcggtcttagcggct

SEQ ID NO: 14665 - DNA, 120 bp, Homo sapiens
gtgcgttcgagggtcggtcatggcgtgtggggggctggtccagggcccgggaactcccttccctggagcttctggcgtctgctgggtccctagtaaagctgccactttctgttgccgcct

SEQ ID NO: 14666 - DNA, 120 bp, Homo sapiens
tcccgaccatctggagagtgagaggtggtagcatcaagtctccattataagagttggactcttgagggggctcagatcccaggaacgggttggcggcaaacttttaccacttggaacctg

SEQ ID NO: 14667 - DNA, 120 bp, Homo sapiens
tgccgcacggatgcagcaccccccatcctcacccccacttgcgtggcctttcccgggcccctcggagctgtgagcagtcttgcccttgaggatgctgcttcctggcgccgcccagctccg

SEQ ID NO: 14668 - DNA, 120 bp, Homo sapiens
cttcgggaggacagaataatgaggccccaggatggggtggaggctggcacagggctgtaccactgaattccccctctaggcctgtttcacctttggggagacggaatcccagagaggttt

SEQ ID NO: 14669 - DNA, 120 bp, Homo sapiens
tgccgtcatgcaggttcgcaaaaattacagcctgactcacataaccaggacaggatgtctggcacctgctcacccagggatccttacatagcagaacctagaggcttaactcccaacctg

SEQ ID NO: 14670 - DNA, 120 bp, Homo sapiens
gctcggccaggttggaaccaggtgataccctttaacaggccccaagggggcaggtgtggtatcagcttccagaaaggggggccttaaagagccagatctgaggtgagatctgcttctctt

SEQ ID NO: 14671 - DNA, 120 bp, Homo sapiens
ctgcgaagtggatctcttaacctcccagaggggctgtggtgacgttaacccagggcagaggtccttcttcttcctcactaaatcatggaaagataatttttttgttgttgttgtttgttt

SEQ ID NO: 14672 - DNA, 120 bp, Homo sapiens
tctcggctaacagcaaggctttcctgaaccctttcttagctggggaagggaggttcaggagggagtctcagagcctctgacaaagttagggaaccccagggaagtaatgaagggggcaat

SEQ ID NO: 14673 - DNA, 120 bp, Homo sapiens
gtccggagaagcttttagctaatggtgtaaagtgctcggtgccatcacagttttggctttctccaggatttatttgtaatcagcttgtcccgatttgggggtggggtgggtgagtagaga

SEQ ID NO: 14674 - DNA, 120 bp, Homo sapiens
agacgacactggctagtgtgtgtgtgtgtgtgaagtagagggtagtaaatggagattggtcctggtgtcacaggcagctctgccccctccctccacttccagatgtcccactgctcctca

SEQ ID NO: 14675 - DNA, 120 bp, Homo sapiens
cctcggacagaaggctgacccaccccttttccccacatgactttcagaacactttcttggtggcccccagctctggggacaggactgagtacagggatcttgggggacctgtgcattgag

SEQ ID NO: 14676 - DNA, 120 bp, Homo sapiens
tgacggccaccaatgaatttatatctcagcaaagggaaatgaggggggaacaggagcctttcttcaggctggtgcttggggctgggagaccagttcaaggttctaatctgggacctgccc

SEQ ID NO: 14677 - DNA, 120 bp, Homo sapiens
gagcgttgccaccagagggcagtgtggggctgctttctcgagacgaaggggtgtggcctggaggaggttcagtcctttattgttcctgcccccaatcatccctttgcccggtagtccccg

SEQ ID NO: 14678 - DNA, 120 bp, Homo sapiens
gaacgagcagggtagtcgcggtcagcgcagccctagagtgggagtgtagttctggggatagcttcctgggtggagtgggactagaggccagagctgtgcccatcaccggctccctagggg

SEQ ID NO: 14679 - DNA, 120 bp, Homo sapiens
ccccgcctctactgaaaaaaaaaggggggagcaaaggaagctcctttggttgggctgagcctggaaccccagggagaagacccattaggaaagacttccagaaaagacaggtagcccttg

SEQ ID NO: 14680 - DNA, 120 bp, Homo sapiens
agccgctcccctgttggtgggttcttcaagaacaactcgggtgcttaggcttctcagagctgaaggagaggcctgctgtcatgagagcggtgcaggaggaggtatttgggaaagcctgga

SEQ ID NO: 14681 - DNA, 120 bp, Homo sapiens
gggcgatgggggaagggaactcttggttctggaataatatcttaaccacctcctctatgccaggcccctgagcactttacacccattaatctgttccggttctcccaaccactctgcaaa

SEQ ID NO: 14682 - DNA, 120 bp, Homo sapiens
ttccgaacccttgggtgaactgaaggcaggtggagatcaggggacttgggggaggcagtgagggtggagggcaggggtcaagcacccagggcctcaggtcatctgtgtccatcccctgag

SEQ ID NO: 14683 - DNA, 120 bp, Homo sapiens
cttcgtaaccctgccctcacacacagcgctcactccaaagcttgctggaatcatctgaggctaccagtgtctacagcacatcgagctacccttatggagcctgggaccagccccaggaag

SEQ ID NO: 14684 - DNA, 120 bp, Homo sapiens
ctgcgcccccttctgtaaaccatggttctcctgagaaacagctcatgcctttggtaagctcctgggccctggggagatggaacacctgacttgcggcacctggggaccatgtgaccagag

SEQ ID NO: 14685 - DNA, 120 bp, Homo sapiens
caacggtttctgtcatcaaggggagaaagtacacgtgggtgagggctgagcgcaggcatgtcctgaagcccagctgagcctctcagcaggcagctccttccccagagtcccttctccagc

SEQ ID NO: 14686 - DNA, 120 bp, Homo sapiens
ctgcgtccgcccataccttgggcacaggtccctaagaccaactgaacactcgagcatgagccaggcagacagcctgggtggatgccagcagaaagattggtgaagactggatctcctggg

SEQ ID NO: 14687 - DNA, 120 bp, Homo sapiens
aagcggtgacaggcacatggcgtccagtgtgaggctggaggcatcagggagcacagggatgcaagcccctctacgttctcccttgtcatggctgggtgtgagaatgaccttaggcaatgg

SEQ ID NO: 14688 - DNA, 120 bp, Homo sapiens
gagcgtgggcctgtacggaggcactgcactcccatctccctcggctcccaactccctccgtgggaagctgagttcaggcactgcccctcctgtatggacagggagccactggtcccagct

SEQ ID NO: 14689 - DNA, 120 bp, Homo sapiens
cttcgaggtcattcctcagacaactctgagctctctccacagcctgggaacagatggttccgcagcagccagccccagcctgaaatgagttgcggaggcactgctgcctgtctccaccag

SEQ ID NO: 14690 - DNA, 120 bp, Homo sapiens
tcccgtgcctgcagcagtccagggtagatgcaagcagaaagactggtgaagactggagctcctgggcagaagcactgacaggcacgtggggtcctgtatgaagagctgcactttgtgtga

SEQ ID NO: 14691 - DNA, 120 bp, Homo sapiens
agccggggcagtggctggtggtcttgccgggtgggccagtcttgggagggggtgatggggaagttggtgaaacagaggcactgggtcagcaactatgtggtgggactctcagaaacggcc

SEQ ID NO: 14692 - DNA, 120 bp, Homo sapiens
acccgagtgactgtttaccaaagccctccccctcaaaagaggcttttaacagtcaggtgacacctgtgggtgtcaccatcttccctttctctattattaggacctggacaaaattcaaga

SEQ ID NO: 14693 - DNA, 120 bp, Homo sapiens
ctgcgctgggcctagaggctgacctctccccaggctccagctctcaccagattccaggaccttccctgctccccggctggtaagagcttcctgctgctgcagacccttcaggcttcacca

SEQ ID NO: 14694 - DNA, 120 bp, Homo sapiens
gtgcgtgaatagcctccttgacatggggtaatggacaatggtcatctatggcacacagtggcatcacagttagttactttatgaccagtggtggcttgatgttgggagatcaagtggcta

SEQ ID NO: 14695 - DNA, 120 bp, Homo sapiens
aggcgactgaggcactggggtgaggcatgtggggcacatgtgagtggaacccatgcacctggggcctggtccccacgtgtgccccggcctgctgcataggtttggaggactgcacgtggc

SEQ ID NO: 14696 - DNA, 120 bp, Homo sapiens
atgcgattcggcacatgctcacgtcacctgtcttgagacagtgcagagagcactcagctcagagtcacagacctgggttctgtgggcctcaggcccctcatcaggacagccacagccaca

SEQ ID NO: 14697 - DNA, 120 bp, Homo sapiens
acccggcccagagaagatgcccttgcagaccctccattagagccaagccgagggaggtggccaaggcagcaccacttaaacactggctggcgcctaaggcatcattctgtgagtgtcgct

SEQ ID NO: 14698 - DNA, 120 bp, Homo sapiens
cagcgagctcagttaaactccttggcttggcagtctggtgccaaggagcctctgcaacctttgctctccctcctctctgagcagtcaaactggtttcttgtctgccccagggctttgcag

SEQ ID NO: 14699 - DNA, 120 bp, Homo sapiens
gtccgcccagccctggcaggctggaagctcctaaagagcagggcctgggtttactcttcttttgttccttgatggccatatgctaaatgcctgctagctgatttcagctgacctgcctct

SEQ ID NO: 14700 - DNA, 120 bp, Homo sapiens
tagcgagctgctcttggtcctggctggctgatgcaaagacacagcctcttccagcttcacttggcatacagcaaatgctatgcaagtgttagctatttattggtttagtgaacttgtggg

SEQ ID NO: 14701 - DNA, 120 bp, Homo sapiens
ctccgccttctgtggcctggtctcaaacaggctcagcactgtggcaaggccagtctgggcttaggggtaagtgcttcccaagggacagggaagggggcctgggaaggaacagagcttttc

SEQ ID NO: 14702 - DNA, 120 bp, Homo sapiens
aatcggctctgtatattagatgagctttagggggaagaaaatgaagtcagcatgatcccagggaaggcgggcagcccactgatccaggcccaacccaaaacttagttcagttaaaattag

SEQ ID NO: 14703 - DNA, 120 bp, Homo sapiens
tcacgggctgctttaaagtatcagttgatgtttatcggcatctaaagagacagtttggcccagtgcagtgtgtgcagacaaccttggggagacatgcctgactcagacatttgcaggggg

SEQ ID NO: 14704 - DNA, 120 bp, Homo sapiens
gagcgagtgctgcaaaatgaggcccacacaggcgatggatgactcaggaataacccaggtcctgggtgtgctgagcgagccttctctccctgcctcaggaggaaagggggcaggtgggag

SEQ ID NO: 14705 - DNA, 120 bp, Homo sapiens
aggcggtgaggaggaaaggaggctgtgtatgggctggcattcccagagacagcctcaggcccccagctctagttccccgtcactcctgtatttttctgcatgctgccacctctgagaaag

SEQ ID NO: 14706 - DNA, 120 bp, Homo sapiens
tcccgggcacagcacttgggtggtgacaaagcaggccaggccaagctgacctcattagcactagagataccaggcctgcagggacaaacttctgactgcctagagtggggtctctgcagt

SEQ ID NO: 14707 - DNA, 120 bp, Homo sapiens
gatcggggacaggaggcaatttatagattgcacttgtgaggtctcctcctggtctcacacagtcaaatgacatcactgtcacttcagcttcttacagcaaatcagacgacatttcatgac

SEQ ID NO: 14708 - DNA, 120 bp, Homo sapiens
tcccgctgcatgtcccagagcctgcctcacaccagcccggcagcaccgctcagctcctgcatgtccttgggagagctggaaggtttcctgccaaattcccaaacccaaatctcaggcaga

SEQ ID NO: 14709 - DNA, 120 bp, Homo sapiens
cagcgacctgggggtgagctggggtcagaccaagcctcaacctcctctactctccctccacttccaaaacagacttcagaaatttccagggccccttgtcccacagattctataaagtat

SEQ ID NO: 14710 - DNA, 120 bp, Homo sapiens
ggccggaaattgactcaggggctcctaactagcctggacaagcaaagctgacagataacattctggagatgaaggaaaggtgggaatatggggatcccctgtgttccaccacacttgtaa

SEQ ID NO: 14711 - DNA, 120 bp, Homo sapiens
acacgctccagtgaagcctgtcataaattgcactggttgctgttgacagagcagaatgtgccactcgccagaagacactcctttctgtctcacacacagcggggtgcctggctcccctgg

SEQ ID NO: 14712 - DNA, 120 bp, Homo sapiens
agtcgtggaagccttactgaagggacctaggatcagaggcatcccattctctaatcctgctctcttctgtgcacagtgctggctccaatcttgggaagcctcagatcacagatcagaagc

SEQ ID NO: 14713 - DNA, 120 bp, Homo sapiens
gtgcgagatgaggcaagaagctcaccagtctggtggcggccgcagcatcggagcaaacgggacttacctatcttcatgaggcaggccagaaggatccagagggagatctcgaagggggtg

SEQ ID NO: 14714 - DNA, 120 bp, Homo sapiens
gtgcgcacgtgtgtgtagtcgatgcccaggactggaaaggccttgcgcggcttcatgccatgatcagtgacggaatgattaacagggcggctctctggggtgacctccggtggagcggtg

SEQ ID NO: 14715 - DNA, 120 bp, Homo sapiens
aatcgagcgttctcgtggtggctctgagcttcgaatggtgctggcagttgggctgagctggaggccatggctcctgagaacaggcagcagccccaccaaagcaaccaccacgagtaagga

SEQ ID NO: 14716 - DNA, 120 bp, Homo sapiens
atccgatgtggagagaggccacagatgccagaccgcagaaccatggtgctgcttccagagccagcctcgaccttacccaaatgagagtaaaaccgggcacataggtagcaaagggtcagc

SEQ ID NO: 14717 - DNA, 120 bp, Homo sapiens
ccacgatggaaccatcagaccccgtgatggaagctagagggctgccaggaagaaatgggtcctcttcctgagttgttgctgtcactttctcactatctcctgccagaagtccagaatggc

SEQ ID NO: 14718 - DNA, 120 bp, Homo sapiens
caacggtgtgtccaacggtgtgtccaatggcctgcaccttcatagcaatggcttccggctgccggagagtaggggacatgtcaggtgaggccagctggcttgtccagccctccaagcccc

SEQ ID NO: 14719 - DNA, 120 bp, Homo sapiens
ctccgcattatattattccccatcctatagcatatccttgcctcttttctctgccagcctctgtgctgggctttggatacagaggcgctcaaattccctagccttgagagaaatagagtt

SEQ ID NO: 14720 - DNA, 120 bp, Homo sapiens
cagcgatccacaggagggactcgggtggtcataaggttcagctcagcatggaggcaggtggtatcagctactaccatgcccaggagttgaagtacagcttcatttctgcccttcttttca

SEQ ID NO: 14721 - DNA, 120 bp, Homo sapiens
gtacgctgtcctcccacatgctgcatatactgcagcatgcccctggctcaggctctttccctggattgaggtgattcttccccagagcccttaaggagacatctacagtcaacaaataac

SEQ ID NO: 14722 - DNA, 120 bp, Homo sapiens
gagcgacagacatgtaaacagctaatgctaatgcaagtacacatgaatattcaataggtggaaacacagccttcgtgctctgggagcaaagagggagcatttgcctgaaaccttgaaagt

SEQ ID NO: 14723 - DNA, 120 bp, Homo sapiens
ccccgatgagggaatggtgtgagccaacacacagggtatgaagtgcaggacttgttctgtgaagggcaaacaggccagtgaggctaactccaggcaagtcccgaaggagactgtgagaaa

SEQ ID NO: 14724 - DNA, 120 bp, Homo sapiens
gagcgagatatcctgaaagaggagatttgtgagtcctggggacttatacatggggccaattgagggggtgcgctgactcccaccaagagaggaaatgccccaagctcacccttcaaacaa

SEQ ID NO: 14725 - DNA, 120 bp, Homo sapiens
ggccgtgggcattaggctatgctggagtggggacacctcaccccgactatgccagctcgcaccgggcactttcacttcccttagtataggctccttgcactctgctacccacagtttgca

SEQ ID NO: 14726 - DNA, 120 bp, Homo sapiens
aagcgagttcctatcagccccgttgtgggcaaggtggggctgctacccgttctagagggcctgctcagtggagctggggccaagctgggcctctccagtcggctgcgggggcgcaccccc

SEQ ID NO: 14727 - DNA, 120 bp, Homo sapiens
ccccgggcgctgggagtccaggcccggttttgcatcaggccctgccgaggtgtttcctcctcctccgtgtggggcagctgctggctgggctgcctgttgagtcagccttcttccctcacg

SEQ ID NO: 14728 - DNA, 120 bp, Homo sapiens
tcccggtccctgaaactcggctgccaggggagctggagccacctgcgaaggtgtcctcccatactggacccctacaggtaacacgtgtcggtgccagggtcccctgccagggtccagaga

SEQ ID NO: 14729 - DNA, 120 bp, Homo sapiens
agacgcaggcactgccacctggtatcctgagcaccctccagcaccttggggttgggggaggtgggcacatgtctggaactggaacagctggacagatggacagaccctcctcttgaccaa

SEQ ID NO: 14730 - DNA, 120 bp, Homo sapiens
caccgtgtcaaaacagcagagaagaccaaactcctacctaactctggtaggagattctgcctctggttggtaggagaggggacttcagggagggggcactgctgaggacgctgggctgat

SEQ ID NO: 14731 - DNA, 120 bp, Homo sapiens
tgccgaacgtccccccggcctccatccacactcagacacacacacctggtggcccccaaggcaccaggggacaccccacagcacacagcccagtcacacatacagcacaggaggaaatgc

SEQ ID NO: 14732 - DNA, 120 bp, Homo sapiens
acacggcgctgtcacctagaaagtcactgaacacaccacacagacaatatagtcaccatgcagcatcacactgcaacaggacacaaagacacacagcaactacacagctcacagactcac

SEQ ID NO: 14733 - DNA, 120 bp, Homo sapiens
tcacgcaacgcagacatgcccaccagactcggacccacacagccacacaacagggcacagagagggacgtgggctcacaccccaatccacaggggaggccgaacgtgggctcacacccca

SEQ ID NO: 14734 - DNA, 120 bp, Homo sapiens
ggccgaacgtgggctcacacgttggccacagaagtccagggaaactgctgttgtggagcacacaggtatccacagagtgaatgcacaccgtgcagccgtgctgaggccttctgctcctga

SEQ ID NO: 14735 - DNA, 120 bp, Homo sapiens
gatcgctggggctcggccactgactcagctgggaggggacagagcatagcaggcggcggacacaagccaggacctgcccgccaagctgcctccgccggtctcagccccacctggagccgt

SEQ ID NO: 14736 - DNA, 120 bp, Homo sapiens
gggcggggaagagaggagaggccgcccagtgggctcaggacacagccctgaccaagtcatgggccccttgccacgtctacatgcccctcagcgctgggcaaatgctttctttccggagtc

SEQ ID NO: 14737 - DNA, 120 bp, Homo sapiens
ctgcgctagcctaggcctccaccgccgggaccccagcctggtctggggagaactgtgtggccagaacagaggggccctgtggctccaggcaacagggcagggctggcggcgggggcatcc

SEQ ID NO: 14738 - DNA, 120 bp, Homo sapiens
ctccgtgggagtgggtgcggcagttacctcaggagaggaagttgggggtgtgggctgaggaggaggttgcctcagacaggaaggccaagtgggccagggcagggtggaggtggtggcagg

SEQ ID NO: 14739 - DNA, 120 bp, Homo sapiens
ccccggtcagcaaattccccgaacagcagtgatcccagacagcaatggctttgcacgcagagacctaggtttcggaaacctttatgtggctatgacctaacccttgctctgccactcacc

SEQ ID NO: 14740 - DNA, 120 bp, Homo sapiens
caccggttgagggcaaaagtgtagtggaagcagacattatgctgctcggccacatcacaggtgggcaaggcctgcagcgtctccaccagctcaatgatggccgagtagtcctgcatcagg

SEQ ID NO: 14741 - DNA, 120 bp, Homo sapiens
gaacggcaagcactggcatcatgggcctccaggccccaaggaaccttgagccagggtcctgtcccactcctgacatcccacccagccaccatcttctgcacgcctccctcaggcccagcg

SEQ ID NO: 14742 - DNA, 120 bp, Homo sapiens
gggcgttcccaaccccacaactgccccaggaggcagcgacatgctcatcctctctaacaaataaggaggccaacactcagagacattggataatttgcccaaagccaccagtgagcaagt

SEQ ID NO: 14743 - DNA, 120 bp, Homo sapiens
ccacgcacctgcacatcgcggtaggagagcagcaagttcatgatgatgtcggggctcagcagctccacgctgtccagtctccgctgcaggcgagccagctcctgccgcagctgtggccca

SEQ ID NO: 14744 - DNA, 120 bp, Homo sapiens
aaccgctcccgcgcctgccggatgtcccgccgaatggtctcccggaaatagccactgatgcccagggtaggggaggcagggagagagaatggtggggcctgtacctcagccccagcccac

SEQ ID NO: 14745 - DNA, 120 bp, Homo sapiens
aggcgggcaagccggcccaccaggggagtgagcagggcctcggtccccactccagcctgtaccagcccatcagccaggccccgcagaaggcctgcatcaccacacagcacccgaccagtg

SEQ ID NO: 14746 - DNA, 120 bp, Homo sapiens
ggccgtcaccacataggggatcagtgtgtagctgccaacgcaatcctggtgggagggaggcaggaatcagtgaggtcagaggtcagcacagggctagacaaggggagtgagagcatcaaa

SEQ ID NO: 14747 - DNA, 120 bp, Homo sapiens
aatcgcaggaaaggggcacccgtcatgagaggaggcaacaggaaacagaggaatacttgggatgtcagtggggggttaggtgactgaggaggccagggggattagtggaggtcagaggtc

SEQ ID NO: 14748 - DNA, 120 bp, Homo sapiens
tagcggaagtcaaagggcacttttgagtgagaggtggattctgctcaccgagttcttctggaaaacatcctcctgcaggaggcagacagtcagatactggtgttctgtgtaggccttacc

SEQ ID NO: 14749 - DNA, 120 bp, Homo sapiens
gtccgggcagaaggaggcatctgactcagggatccagtcttccagcaggggggtctgcccagagacctagagattcaggcggaaagaagggtccagccaggaacagaagtctgggagggt

SEQ ID NO: 14750 - DNA, 120 bp, Homo sapiens
taccgcgggagtgcggggtgatggctggcgggagcttcacgcgcattccctgggggcggagtctaaggctggcagtactgaaaatcgtgaggggtctgggagcctcaggcacgagctagc

SEQ ID NO: 14751 - DNA, 120 bp, Homo sapiens
gagcggagctgctcagtctccctgatggggtagatgtttccctaccccaatcttgagccttcgggggcatcccctggatcctatggccctcttccacttatagtaccccttcttctgtct

SEQ ID NO: 14752 - DNA, 120 bp, Homo sapiens
acacgtgggaaaaagagacctgcaggacctaggacagggatccccaggaagagacccctgtttagaggcctgggggcattggaggggacagcggtatcctgggaagagccccagggcatg

SEQ ID NO: 14753 - DNA, 120 bp, Homo sapiens
ccacgtatcctgagaagcacctcaccccctccagaccccaactcccatcacccagcttggtcagcttctcacaaggcctttctcctgcaggtaccatgatgtggggtgcaggcagccctc

SEQ ID NO: 14754 - DNA, 120 bp, Homo sapiens
caacgtgaatgtaagcagcgtgggcccagcagaggggcccacaggtccagccgcaccactgccctcgcctaaggcctgggatgtggtgctctgcatctcaggcaccctggtgtcctgcga

SEQ ID NO: 14755 - DNA, 120 bp, Homo sapiens
atgcgctagtggtggccatcatcgtgggcactcctgccttccgtgcccccatgttcctgctggtgggcagcctggccgtggcagacctgctggcaggcctgggcctggtcctgcactttg

SEQ ID NO: 14756 - DNA, 120 bp, Homo sapiens
catcggctcagcggagatgagcctggtgctggttggcgtgctggcaatggcctttaccgccagcatcggcagtctactggccatcactgtcgaccgctacctttctctgtacaatgccct

SEQ ID NO: 14757 - DNA, 120 bp, Homo sapiens
acacggacctatgtgatgctggccttagtgtggggaggtgccctgggcctggggctgctgcctgtgctggcctggaactgcctggatggcctgaccacatgtggcgtggtttatccactc

SEQ ID NO: 14758 - DNA, 120 bp, Homo sapiens
ctacgcccaaatctgccgcatcgtctgccgccatgcccagcagattgcccttcagcggcacctgctgcctgcctcccactatgtggccacccgcaagggcattgccacactggccgtggt

SEQ ID NO: 14759 - DNA, 120 bp, Homo sapiens
tgccgcctgctggttgcccttcactgtctactgcctgctgggtgatgcccactctccacctctctacacctatcttaccttgctccctgccacctacaactccatgatcaaccctatcat

SEQ ID NO: 14760 - DNA, 120 bp, Homo sapiens
ctacgccttccgcaaccaggatgtgcagaaagtgctgtgggctgtctgctgctgctgttcctcttccaagatccccttccgatcccgctcccccagtgatgtctagctgagtcttcatga

SEQ ID NO: 14761 - DNA, 120 bp, Homo sapiens
accgaaggctcctgaaggcagatctttctctctcctcagaactaggggctcctgaatacaaagtcatgtctctcccctcaggctgggaacttctgagagcagagctgtctcctcccttag

SEQ ID NO: 14762 - DNA, 120 bp, Homo sapiens
caccgcatgctttgtgtgtgtgtgtgcgcgcgcgcgcccgcgcatttgcttgtgtgtaattggggaggggtagccacacctcccagcctctctgcctctgacagctttccaacccccatg

SEQ ID NO: 14763 - DNA, 120 bp, Homo sapiens
tgacgtggccccctgaattgggggaggcaaggctagggccaagagccccaccttcctgctggggtaggccctgggatggggctggagcccatctctcctccccgcctcccttggtcctat

SEQ ID NO: 14764 - DNA, 120 bp, Homo sapiens
tgccggggccatgtccgcctctccttgcaataagtgaggagacagtagctattaatataagatgagttcacgggctcacagcttccgcaggctggaaaacaggctcccggggctgggggc

SEQ ID NO: 14765 - DNA, 120 bp, Homo sapiens
ctgcggcaaggctcggctgtcagattccctcctggagcctggagaccgccagtcccgcatcccccagctccttccatgctgagacctgcgtgcacagacacacactcatgtcacatgcag

SEQ ID NO: 14766 - DNA, 120 bp, Homo sapiens
aaccgcactgcatataatgtccatagtcatgtatacacatttgcatgcagcaccagattcaaggacttgaatgaatgcatgtgcacgccctttcacacacagcgtacacacacttgcaaa

SEQ ID NO: 14767 - DNA, 120 bp, Homo sapiens
ccccgctgctggcagtgctcagcaatcctgaatttacaggctgaccctcggtttccagaaccaacgggctggctcaacctccgctccttgtcttccctctctccttgcgtcatcacaggc

SEQ ID NO: 14768 - DNA, 120 bp, Homo sapiens
tcccgccccccggggggcctccgatccatgattaaccccctcgctaattggccaccagccccttgactttgctgcaggccttctcaggagctgggagcaagaggctgcaaattggccaag

SEQ ID NO: 14769 - DNA, 120 bp, Homo sapiens
acccgccagatatgcagacatcatttatatatgtacatccaaacacacgaatgcagttgcatgtatatgggctcacaaacacatacacttacacattacacatgcccatgaaggttctaa

SEQ ID NO: 14770 - DNA, 120 bp, Homo sapiens
caccgctcacatgcgtgtatatgccctgatgaacaagctaccaaatggccgcacgctagggagaaccctctttagctagcctctggctttacataaaagcttgaggtttgctcagtctac

SEQ ID NO: 14771 - DNA, 120 bp, Homo sapiens
aggcgttgtatttgtaatccttccaagacacacactctgggagcggcatcagttcccaagatggtgcaacgccagagtggaggggctacatacatcatcacagtcaactctttgttgaat

SEQ ID NO: 14772 - DNA, 120 bp, Homo sapiens
gctcgtgtgtgcataccgtggacatgcacggacagcttcttaggtaaaggcagggaaggcagctaggcaggaccccttgccccaaatattaaccactctccctgtcatcaagggactggc

SEQ ID NO: 14773 - DNA, 120 bp, Homo sapiens
aaccgaatgccaaaaactgtcatttaaagagcctgagtgggttttttcttcttaaaaggtactacaaaaatgcatttgatacaaaagctattagggagaagtaaaataggtatatttccc

SEQ ID NO: 14774 - DNA, 120 bp, Homo sapiens
acacgtgactggcacacagactgattttgaggtcagcaagcctctggagagctcgaaggccaaggaggcactggattgcaaaatcaagctgaggatgaatgcagggtgctatgtggtagt

SEQ ID NO: 14775 - DNA, 120 bp, Homo sapiens
tgacgattaaagtagcgtgctagggcttgtctcatgaaaacctgtccctcagtgcactgggccttgggtgaatttgttctgggtgaacaacaacaaaacttcaaacaagcacaaatacac

SEQ ID NO: 14776 - DNA, 120 bp, Homo sapiens
gcacgtctctttataggttcaccaacaggcatgtccagatagactaaccatgaagccccaactccaaaccgcctggacaacaggaaaatggaaggcaaatcctcatcttcctactccaca

SEQ ID NO: 14777 - DNA, 120 bp, Homo sapiens
gtccgtggaacaaaatgtccccctttactgggaggtgaaggtaatgaaggtaccctcagggctgatttcccagtagagaaaaaggttcattttttcctttcaccatcttcatcactcttt

SEQ ID NO: 14778 - DNA, 120 bp, Homo sapiens
ccacgaagaacaagtgtcagaagtgtcaagatttttaaaagtcaagattttcatggtagagttatttctaaaagcaagaacaactcaactctttccttttatcattcctagacacccagc

SEQ ID NO: 14779 - DNA, 120 bp, Homo sapiens
tgccgggctacagcacttaacagagtgtgctaaaagctatagggagctatttaagattgaggccagagagtgacatgatcagatttgcatttagaaagctctctctggcagcagtatgga

SEQ ID NO: 14780 - DNA, 120 bp, Homo sapiens
aaacggtctcaaaaaaaaaagtactttcatatctttcattaattcaataaatatcatttgattaattagctgatatgaatcttacaattagtctgtgaggttaaaaaaaaacatatatta

SEQ ID NO: 14781 - DNA, 120 bp, Homo sapiens
ttccgaaagcagcaggagaaaaacagcttacttttaaagacgcaaggaaacacattctgactggctgagactgccagatgtctgactttcagatgctgttcctctttacttctcaaatat

SEQ ID NO: 14782 - DNA, 120 bp, Homo sapiens
gaacgctacagccacactttattaatatagactccacacatgaaagttgagatatattcagaactgagctgaagtttacctctgcactctaataaagactaagaaaacagtgtaaataag

SEQ ID NO: 14783 - DNA, 120 bp, Homo sapiens
ctacggttctagggcagattacggtactaaatctgtgctaccttagttaaatcactcaacttctcttgccttcagctgcctcttttacaaaatgagggagctaataatgtggtctctaaa

SEQ ID NO: 14784 - DNA, 120 bp, Homo sapiens
tatcgcaataagaggatccagagcttaggggaaagggcagaaaatgtacaagatgagttgggaacacattatcgtgctagaaagcaaggaacactatcaaagactgctgaaattatgtca

SEQ ID NO: 14785 - DNA, 120 bp, Homo sapiens
tagcgacctacctagtagttcaaactttcatcactgcctagatttctgcagtagcctgttcaacccacctcaatcaagtcctgcccccaaataatccactctctttgtagcaactggatt

SEQ ID NO: 14786 - DNA, 120 bp, Homo sapiens
gtacggaactgacagagtgcagtcagctaaggaattccagggggagcaacaaagcatagggaccaggaagaatcacccctcccctctccctgacccccatctgaggggagaagggtggag

SEQ ID NO: 14787 - DNA, 120 bp, Homo sapiens
tctcgtcaagcaagttcttcactgagcaatcccagggggccacgaacctcggttccagccaagctcgcaggctttccccacctccacatccttaatctgcagcctttgcatttgccattc

SEQ ID NO: 14788 - DNA, 120 bp, Homo sapiens
gagcgcctttgatggggaagagagggttgctgaggggaaggatctggaatgatgctcccccacctcctcactcccctcccctgcatcccccacgctgcatgcctgacctccccgctccca

SEQ ID NO: 14789 - DNA, 120 bp, Homo sapiens
ttacgcctcatttctttgtaaaaggggacaataatccctgtctctcaggctgctgtgaggaccaagtgagatggcagataaaactgcctggcaggaccaaagtgttcagcaataacagtg

SEQ ID NO: 14790 - DNA, 120 bp, Homo sapiens
atacggtagatattattactaaccccagtttgcagatgaggaaactgaggcacaaggagatttctataacttgcacatgctcacacagccagtaaggggtagagcttaatctgtgctctt

SEQ ID NO: 14791 - DNA, 120 bp, Homo sapiens
cttcgggagcaccaggaagagacctaaaccggtctggaggagtcagtagaggagtagttgacatctaggctgagacttaaagaccagagccagatcgtgtcacctagtgccataccaacc

SEQ ID NO: 14792 - DNA, 120 bp, Homo sapiens
caccgcacccagcctatttcagtgatttttaaaaattattgaatgtcaaaccatttgaaaaaaaagtcttgagtatccctgctttgctgggctctgaacacttgtgtgttctgctccttg

SEQ ID NO: 14793 - DNA, 120 bp, Homo sapiens
gtccgcaacagcgaatcctgaatccctacaccctgctctcagtccccagccttgcccttaaatcctgcatttgcttcctgcactccatacctctgtccttgcctaagctctgatgtcctc

SEQ ID NO: 14794 - DNA, 120 bp, Homo sapiens
ctgcgcccacatccccagactcacccaggaacaaaacctcgcggtccagtcggcacttcagttggcactacagggatgtgacggtgaatgtgtcctcggggtgaggttccgccatgggcc

SEQ ID NO: 14795 - DNA, 120 bp, Homo sapiens
agccgctcttggggcccccacccaggccaggatgcgcctggggcataaagcctgggtacctgtaggcggtgtcctgcaggggcagcagcgagtccctcggcacgggggacagggtcaagt

SEQ ID NO: 14796 - DNA, 120 bp, Homo sapiens
cagcggctgcagcagggccacggggtgggccagggggccgggccatttccagtggctccttgtcggccttgggcgtggctggtgggctagccaggtgaggggcactgaggcacgcggcct

SEQ ID NO: 14797 - DNA, 120 bp, Homo sapiens
ctccgtcctgcccaggaagtcagccagcagccctgtacccaccttgccttcatagggcgggctgcgggcagctgagcctggagggtaccaataggctgtgcccttgcagctgggggaatc

SEQ ID NO: 14798 - DNA, 120 bp, Homo sapiens
gatcgtgccattgttctccagcctgggcagcagagtgagatcctttctccaaaacattaaattaaaaaagtttgttgcatgaatgaacgcacacaaatgaggtacgcaaagcaatcaacc

SEQ ID NO: 14799 - DNA, 120 bp, Homo sapiens
catcggaaaaactctgctgctccatcctacctctggccttgtcctggcccctgctacatcctctcagagccctatgtatttcaccttcatagtattcattgcaactataatcaattactt

SEQ ID NO: 14800 - DNA, 120 bp, Homo sapiens
ttgcgtgactggctgtttagtgtgtcccccacaagagtgtgggctcttcaggagcagggatcacatctgtcttgtttatcgctgtatcacctgaccctggggcctgggctatgaatgcta

SEQ ID NO: 14801 - DNA, 120 bp, Homo sapiens
taccgactgactccctgagctggtcagggcagagctgggatttagatccaggcatgtctgactcccaaagaagcctgaggactcagggccatggctgatcccaggagccgggatctcagg

SEQ ID NO: 14802 - DNA, 120 bp, Homo sapiens
actcggggacaggataaagtagaaagagacacttctctactcccctttgggggacagcgatttgcaatctacaaagcacctacacatctgtgacccactgaatcctcacagcagcctggg

SEQ ID NO: 14803 - DNA, 120 bp, Homo sapiens
aaacgagaaaaggggctcagactctggaacctccaagtccaatttccaacagtgtggttgggccgtggctcctggcacccacttggagatgcccaccagaagccccctccctccctccct

SEQ ID NO: 14804 - DNA, 120 bp, Homo sapiens
ctgcgtgtctgccctgaaacctttaacagctccctactgctgacgacaacatcaaggccaaggtctttagcctgacattcaggggccttcagagccagctttggccccaccaacctcctg

SEQ ID NO: 14805 - DNA, 120 bp, Homo sapiens
cagcggggctgacttcttcctctcctctcttcccctcccctgagtctcaacaccacccacacactcactccgttctggacagattctgcccctttgctcaatcacacagtgtctcaggcc

SEQ ID NO: 14806 - DNA, 120 bp, Homo sapiens
ttccgccagaccagcagaagctggccaggcttggctccaggaaacaggcctctgcccctgctctccagcgcagctccatccctggacattgacccacctcggcactgcccacacccctcc

SEQ ID NO: 14807 - DNA, 120 bp, Homo sapiens
cagcgaatcccacagggagttagcaggtatagcactgtcctcaaagtcatgactcttgactcagtcagattgttgtcttcaagccacactgtccttatctataaaattgggatggcaata

SEQ ID NO: 14808 - DNA, 120 bp, Homo sapiens
ctgcgactttctggggcgtcccaattaaatgggagggggagagggcagaggagaggaccggctctctcaatctggggacgttatccttttctgaaaaggtttcttattgagtaaagctca

SEQ ID NO: 14809 - DNA, 120 bp, Homo sapiens
tggcgggagggctgctggggcgggggagcgggggagacccagccagcgctgcttcctcactcagtgacccctcctctcaaactccgacctcggtttcgcccttgcaactcccagctttcc

SEQ ID NO: 14810 - DNA, 120 bp, Homo sapiens
gggcggcgagggctcaaaagtcctggataatccgcagatagaacacacacacccttttccgaattctgctgagcatttgcgttgtgtcaggaagcaggattcagattgaacggtgctgac

SEQ ID NO: 14811 - DNA, 120 bp, Homo sapiens
tgccgcggccgggggctgggctcagcactttcacctacctcctcttcaggtcacatgtgttctccagcccctgcctagcctatcccacagatgggaatgtgcgctgcttgggggccttgt

SEQ ID NO: 14812 - DNA, 120 bp, Homo sapiens
taccgcccccggagatggctgaactgctgcggtaaaatagtgctgttatttccattttagagatgggggcactgaggtccaggttctccagttagcaagtggctgaacccagctggattt

SEQ ID NO: 14813 - DNA, 120 bp, Homo sapiens
aaccgtagccctaaaccaactgtgcaggtacaatgggggagctgaagtgaccacaggtgccatagaagactcagatgatcatgaaactggcctgtggccatcttgggttgaattaaagga

SEQ ID NO: 14814 - DNA, 120 bp, Homo sapiens
cctcgtgttttcaaaccaagggtggtggaagtctcagtggaccctgggaaggtcagtccgcccctgggtactaggcacagttcaggaaacaggggaaggcattggcaagtggtgtgtcca

SEQ ID NO: 14815 - DNA, 120 bp, Homo sapiens
ggacggaggaagtgttgagggactgtatagacaggacacattgtcaagttttttcaaagccctccccgctcccacacgcatgacattagctacctccttaataatcactataataataac

SEQ ID NO: 14816 - DNA, 120 bp, Homo sapiens
tttcgtgttagggtctgccttaatacacgtatgtattcacttaattctcctaacaatgttgtgagatagctactattgttaaaccccattagacagtcagggcagcagttgctagaacag

SEQ ID NO: 14817 - DNA, 120 bp, Homo sapiens
ctccggtgacatggacccacatagagctctcctctataggagaacatagacttatacaatctctcatgttcacacacagatacaatattgccacttccaataatacccacgtatatattg

SEQ ID NO: 14818 - DNA, 120 bp, Homo sapiens
gaccgtgtcgtcagcaggcagaggtaggcagctcttgggtcttatcacttccaaacttgatgcagaccaaagccctggccaggcctggctctctggggaccagtatgctgaggcgtcagg

SEQ ID NO: 14819 - DNA, 120 bp, Homo sapiens
cagcgtggtatgctggtaaactgactctcaaaaaaagaaaagaaaagaaaagaaaaagccctgatttgtcacattttctgatttccatggtgtaaatattcccacaatggctgatttaaa

SEQ ID NO: 14820 - DNA, 120 bp, Homo sapiens
agacggagggagagcagattgggttcactctgctcagacatctgcatgaaaatagccctaggactcttcatcctcctcttgctctgatctctatgtgccaccaattctttggagagtaat

SEQ ID NO: 14821 - DNA, 120 bp, Homo sapiens
ccacgtggctacctgggggaagacatgcctggcagggccaagggcaaatgcagaggcctgaggcaggagcacgcctggcatgctgaaaaacagcaaggcggccagtgcagctggaaggga

SEQ ID NO: 14822 - DNA, 120 bp, Homo sapiens
tcacgcagggccttgtaggtcacagcaaggacattggcttttcctctgacaccaggagccatggggggggcgagggggttgagcagaagagtgacatgttctgacctccgttttaacagg

SEQ ID NO: 14823 - DNA, 120 bp, Homo sapiens
ctgcgtggagtgcagactgcaggggtgagggtagcggcagggagggcaataggatttgggatgggtgaataaattgtaacttggtttccttgtccattttcccccatcaaactgtgagct

SEQ ID NO: 14824 - DNA, 120 bp, Homo sapiens
aggcgcggataaacactgtgtgaggaagaagggtgggaagacagaggaggagacaggaggcaggagaggcagagccccctgggaaatggctctgcaaaggccacagaaagaagaggaagc

SEQ ID NO: 14825 - DNA, 120 bp, Homo sapiens
ccccggatctgtggcccccattaacaatcaggttatgtgcagtttatgctggagttctgccaacaaaaggaccctggccggggggggtggggtggggatctgttcctcaaggtgaaggtg

SEQ ID NO: 14826 - DNA, 120 bp, Homo sapiens
ggtcggggtcccctgcagttttagggagtgactaaatacagaaggaagggatgactcctgttattcagccagctcttagctgctgccaaagcacagctggtgagtcctcactgtgggcgg

SEQ ID NO: 14827 - DNA, 120 bp, Homo sapiens
ttgcgcatctgtaaaatgggaacgacaagtcctgctttatagggctggcatgggggttgaaaggggcaacagaagtccagtgctacctgaaagtgcttccttcttagcttccccgctccc

SEQ ID NO: 14828 - DNA, 120 bp, Homo sapiens
ctgcgatggcggctcaagtcccaggcctacaaatgggtacaggctgtgggggatctggccagtgctgacacctaggggctctttcaggattaggtgagcttgcacatgccctcaggacag

SEQ ID NO: 14829 - DNA, 120 bp, Homo sapiens
ccgccgtcccactgccccccggaaccgcgcgagcctcgcaaaccgctcggcgcccagtctccacctcgccggcttcatgaacgtgccccgggagaccccgacgccctgaagccggcgcgg

SEQ ID NO: 14830 - DNA, 120 bp, Homo sapiens
ggccgccccaccgccccaccgccccaccgccccaccgccgtctgcgcgaacgccgggcctccccctccgcccatcgctgccaccatctctactccgacggctgcggcggtgggtgtggcc

SEQ ID NO: 14831 - DNA, 120 bp, Homo sapiens
caccgcgcttgccaatcaggaagtgagggccggctccggacgcgccccgctgttacgtcactccgacggccccggatgccccgcccagtggccttgcctgggaaaggcgactggggcacc

SEQ ID NO: 14832 - DNA, 120 bp, Homo sapiens
caccggtgggtgcggaccctcaaagggtgaaaataattcccgtgtgaattgcgcgcattataactgctctaagaaatgcagccagggcattttaaaatgtattttttcaatcactcctct

SEQ ID NO: 14833 - DNA, 120 bp, Homo sapiens
accgccctggccgccatgtgctcccagctctggttcctgacggaccggcgcatccgcgaggactacccgcaggtgcagatcctgcgcgccctccggcagcgctgctccgagcaggacgtg

SEQ ID NO: 14834 - DNA, 120 bp, Homo sapiens
gtgcgcttccgggcggtgcttatggaccagatcgccgtcaccatcgtcggcggccacctcggtgagcgaggcgggcccggggagggcagggaggcgcgccggggtccacgagagccggtc

SEQ ID NO: 14835 - DNA, 120 bp, Homo sapiens
ggtcgggtgggcgcgctcgccgggcctcccgcagcagagtctccttcgggcccgcacactagccgcactctagctgcgagacttcttggggttggagaaagccgctaaccttcatagctt

SEQ ID NO: 14836 - DNA, 120 bp, Homo sapiens
ccccgaggccaagattcgagaacgcgatttaatttacttaggggacttcattttgtgagaaacccgaattcacctgaagccacccaggtgtccgaggaaaatcaggctgttaaaccccac

SEQ ID NO: 14837 - DNA, 120 bp, Homo sapiens
tcccgattgcaaaagcccagacatcttttctcatcctctctccaccccaaggcccaaagcccattgggatgtctagggttaagactgtcccattctctgctcctggctaggctgagaagt

SEQ ID NO: 14838 - DNA, 120 bp, Homo sapiens
agccgccttcctggtgtcactccctccccaccattctgcacatcacagccagaaggactgccgctgcctccacccaaatgaggaacaaaatcttcctgtggttgcaaggccctccacgat

SEQ ID NO: 14839 - DNA, 120 bp, Homo sapiens
gcccgggcacggtgccacaccctcacctgcatcctgctggatcctgacaaccatgtgtgaactggtgctcaggttctagctccatttcacagaggaggaaactaggcacagaaagattaa

SEQ ID NO: 14840 - DNA, 120 bp, Homo sapiens
ctgcggccccctccattgacaatttgagggccaaagagagaaagggagccacgggtccacagggccacagagccagcaggaggcctgcatgctcctccatcctgggtgttcccagagcct

SEQ ID NO: 14841 - DNA, 120 bp, Homo sapiens
cttcgtgatccggaacagtgctctcctcttcctctgaagtgcttctgtttatcccttctctttgttatttgaggctttgagtctgttctaccaaaatattctctcctaccctgacggcct

SEQ ID NO: 14842 - DNA, 120 bp, Homo sapiens
gagcggcattccttaacctggcacagcttctccacccaggacacctaccactcctggtgcccccccttgcagtccaatgactcccagacatgcggggagaacaggaaggctcagggtcac

SEQ ID NO: 14843 - DNA, 120 bp, Homo sapiens
aaacgcctgcagaactgtgactaatgaaagctctgttccaaaaagactccccgcacagtctgcccctccagccttcgcactctgggagtgggcagactgcctgtggctgaagacccactg

SEQ ID NO: 14844 - DNA, 120 bp, Homo sapiens
aaacgggagagtggtcagcagtatttttccatcatttctccaaaggtaagaacatacattgtttgcccaaaaatctactccagcctctgagaaattcttggtatatgtgtgaaaatgtag

SEQ ID NO: 14845 - DNA, 120 bp, Homo sapiens
ctgcgttccaaaggttgttctgactagtatgaagtgaaaagccaaaaaagagattgtggcatgattaggaaatgagctcagtttgtttacaacccacgctgatgggaactgcctcctttg

SEQ ID NO: 14846 - DNA, 120 bp, Homo sapiens
ctccgtatgaggacattgagaagcaagatgctaaaatcagcatgatggacacgttgctaagccagtcagtggccctgcctccgtgcactgaacccaacttccagggactgactcactgag

SEQ ID NO: 14847 - DNA, 120 bp, Homo sapiens
ccccggcctttgtgatcccagagcaccagcaataccgtctcggcctcggctcctgggttataccctctgtcacgccaagcccatcagcccgcttgtgctgtctccctctgtctgtcctag

SEQ ID NO: 14848 - DNA, 120 bp, Homo sapiens
tcccggctacttaggagactgaatgctttatatgactgacctctttaaatctctccaaacctcaaagagataaggagtcctgtcatgcacacattttacagatgagggacaatgggctgg

SEQ ID NO: 14849 - DNA, 120 bp, Homo sapiens
gcccgcttctgctcgtttcctctcctctatttcctctttcttttcccctttctctcctgcctaggcttcaggcctactgctgcggcatcatagaaattgctttgcccccgtggacagtgc

SEQ ID NO: 14850 - DNA, 120 bp, Homo sapiens
ctccggagtgaactgagtaagtttcccatgttcttgtaacttccgtaccaacttatctcctgttgccctaatatttgcagtgatagctcattccccttgtttcttctttcatagagttga

SEQ ID NO: 14851 - DNA, 120 bp, Homo sapiens
tggcgtgagactgtgggcatgtgtgatgtgcaacagagcaggctggtgtccataagccaacgatggcacagtactcaccttctggggggcattgatgactccagtgttgtagccaaactg

SEQ ID NO: 14852 - DNA, 120 bp, Homo sapiens
ccacggccagcatgaggcgacccgtcagcttctgcggagaaacaaaccacactgttataggcgtgtctgggagcaggttactacagggcagggcctggactggcaagtttctgtgttcag

SEQ ID NO: 14853 - DNA, 120 bp, Homo sapiens
gtccgtgacgcttaaagtagtttggctaagaacctgctgattttctcctccacttttctgtctccacgtagtattcccttatccactcaacaaataaatacccatgtctggcatagtatg

SEQ ID NO: 14854 - DNA, 120 bp, Homo sapiens
agccggtgtctagctgtgcccgcttgccccgcccagctcccacctggatgccacctggcagtcatatgcacattcatcacggaggagctggctgactcacacattatactggagctgact

SEQ ID NO: 14855 - DNA, 120 bp, Homo sapiens
aatcggttgagagccacaggagcccctgctttccacattgaggcttgaaattcatgcctcaaatccaccgcagttcatttctttaaaaagggaaagcagtgtgagctggctggagctggg

SEQ ID NO: 14856 - DNA, 120 bp, Homo sapiens
cttcgggcaagtcattgtccctcagtctcttcagctttgtaacaaaggggttgcaacagataagcgccaagactcttcaagcgtctgaaaggctgttcttgctctgggttgagaaacctt

SEQ ID NO: 14857 - DNA, 120 bp, Homo sapiens
taacgaattctagatttactgttttttatcctgtttctcaaaggaggaaactgaagcacagtttcagagtgatttgcccagggttgagtaggtcagcaagtggccgagctaataattgaa

SEQ ID NO: 14858 - DNA, 120 bp, Homo sapiens
tagcgtggtggctgggttccaatggggagcgttccaaggggacaatcctcatgtggaaaagcttatcaagcctagttatatcaatgcaaatcattctggatttaagttgctttgtctctt

SEQ ID NO: 14859 - DNA, 120 bp, Homo sapiens
tgtcgctcacagtctggcttaggtacagagtcctgtttggagacaggaaacaggactcggtgacccccctctgtttctttctccctgtgtagggaagacacacacacccccttggatata

SEQ ID NO: 14860 - DNA, 120 bp, Homo sapiens
ggtcgtacttttcttggtgggggaaaaataagcaagcttttcaaggccacacatacagttagttgtaggaccaagtctagaatgcatggctctgactgtcagcttttaaacatgtacatg

SEQ ID NO: 14861 - DNA, 120 bp, Homo sapiens
acacgaggataagaaacatccttcaaaggcgtgttctaaacacttgtttgcagagttctctgggaaacagttcaattccctgtcataaaacagcatgcaacacatcttggaagaagcatg

SEQ ID NO: 14862 - DNA, 120 bp, Homo sapiens
ctacgggaagtttaaaattaagagagcaaagggaagaaaatctacattggaggggcagagaaatctgcagtggcctggaatgtctggagggaggtgggagggagaagggtgtgttgggag

SEQ ID NO: 14863 - DNA, 120 bp, Homo sapiens
tcccgtgtttttcaggcaggcatggctgttcctctatgaatcactaaatgaaccaatttagcgaaacaatcatgtctgttcaaagggggatattaagggaaagcaagtgtgcatatcatt

SEQ ID NO: 14864 - DNA, 120 bp, Homo sapiens
attcggcctggcatagaaacgggtacagataaacagcaacagtttctcattctaatggagagctacggtcatggtgaccgtgttgggggtgatggtgtgttcatggtggtgggggtactg

SEQ ID NO: 14865 - DNA, 120 bp, Homo sapiens
tatcgtggttatagtgatggtggtgttggttgtggttatggtgacactggtgtcggttataactgtggtggtagtgatactgatggtgatgtttagtggtgatgctgactgcagttatgg

SEQ ID NO: 14866 - DNA, 120 bp, Homo sapiens
ttacggtagtggtaatggtgatggtgggggcacaatgatgtcgatatgggtaacagtggtaaagatagggtgacgatgttggtgttgcaaggaatggttatagttttgatggtaaaatga

SEQ ID NO: 14867 - DNA, 120 bp, Homo sapiens
cttcgtgttggtgataatggtggtattggtgttggtgttagttacagtaatgtttttaatggtattggtgacacctgcctgtctcagtaggtgacattgatggaagtgctagtcgcatgg

SEQ ID NO: 14868 - DNA, 120 bp, Homo sapiens
cagcgataatggcagtagtagggagggtggtgggaagtcggtggtggtagcggtggtagaggccgagatgatgaccaggaggttggggattacacggagagcggtacgggttctggcaat

SEQ ID NO: 14869 - DNA, 120 bp, Homo sapiens
taccgtgagtcgactgcaagctctcttctctggagctgacagcatgctggacgtggggaaaaaggctcaccacattctccaaaagcccttctttccacctgctgcaatcctggtgaggtt

SEQ ID NO: 14870 - DNA, 120 bp, Homo sapiens
gaacgaggcacgtgagggtgtgctgatggatggcaggggccgcgctggggctggggctggggcggcagggaggcagtggtggccggcgtgcaggggctcacgtagctggcagagccaggg

SEQ ID NO: 14871 - DNA, 120 bp, Homo sapiens
tttcgactaatgtgtcttctcccaggattagctcataccgctctggctgggaaagggggagaggcagcctctcccatctccccaggcttaggggccctttggaggagagggcaggcagac

SEQ ID NO: 14872 - DNA, 120 bp, Homo sapiens
cctcgatctcattctcaatgggctgccatttggctggcagggagccagctccccaaatatcaagggatctagctaccctacccccacccaaacccaatccaaatggctgcccagttctgc

SEQ ID NO: 14873 - DNA, 120 bp, Homo sapiens
cttcgccaggtctcccatgtgttagctgtgtgactgtctgtatcttggttcatcatttgtgagttagggacaatgactgctgcccagaggctgttgtggggatagatgagttaagcctac

SEQ ID NO: 14874 - DNA, 120 bp, Homo sapiens
tgacgataatttcttaacatgcatacttgatatgagaattaaaatggattaagtggatgaaagcatccagtacaaagtagcacatcagttattactatctttgttgtcgttagcacaggg

SEQ ID NO: 14875 - DNA, 120 bp, Homo sapiens
cagcgtccttcctggagtggaagtggggggtttgagtgtcctattggggtttggatccttaagagtgtgctatcttgtgatcgctgcctctccgcaagagaagtaactcctcgtgagtgg

SEQ ID NO: 14876 - DNA, 120 bp, Homo sapiens
acccggagtggctgcttacacctcggccttatccacaaggcatgtcccaagcccagactctggacacccagagaagaacccagcactgaacaccaggccgaatgggctccaacacccacg

SEQ ID NO: 14877 - DNA, 120 bp, Homo sapiens
agacgcatctacacaggctgagtttccattacaaactcagtactggatcactacaacgccatccagaaactcccgtaaagaaccgaacatccaaatgcgagcacccagagagggtcccag

SEQ ID NO: 14878 - DNA, 120 bp, Homo sapiens
acccgaaccgggtccatttggatctgcttccaacccagacccagaacatcccgattagatgcctacaattgactcagatctggagcccacaccgggaatggactcacccagtcctccctc

SEQ ID NO: 14879 - DNA, 120 bp, Homo sapiens
cctcggtgaggctcatcctgagaggtcttccaagttcgaagactttttctgccgatatgtgtgaccatcgatcgggatgactgcgactggggaagggagcaggaggccaggcctgttccc

SEQ ID NO: 14880 - DNA, 120 bp, Homo sapiens
gagcgggcaggcggggtgtgcgccccggccgcttccagtcggcgcgggagctgggacggaagctgtgcgccctcggagcccctgcagtcccctcaccgggcgctcccaaacagcccgcgg

SEQ ID NO: 14881 - DNA, 120 bp, Homo sapiens
gggcgctgggcgcggggccaggaaatccggcgccggcccttgaagcgcacccgggccgggagggggcggcgggggcggcgggggcgggctgggcgctggcaccacgaccgcccgctgagc

SEQ ID NO: 14882 - DNA, 120 bp, Homo sapiens
caacgtgactgcgcgggctcgggtccccaccaggacaaggcggcctctgtgccgacccagctgattcctctcgggctgcaaatcccttccggctgacagccctgccggctggggccaggc

SEQ ID NO: 14883 - DNA, 120 bp, Homo sapiens
gaacgggaagcggggttgggggcgaggtgggcgctgaggattggagcccattggcgggaggcccccaggaaggccgtctgctccgtacatccagggtagcaaaggctaccgttcccggac

SEQ ID NO: 14884 - DNA, 120 bp, Homo sapiens
agccgaggctaggagaggtccaattactagcccaagtcgcacaacttgtttcttggttaaagccagagttctaaatgacgccccatgataaactctgtatttgttgttgagagttaggtg

SEQ ID NO: 14885 - DNA, 120 bp, Homo sapiens
tggcgttattagtctcagtttataaatgaaggaatgtgaggctcagagttgaagccgccagcccaacgtcctaagacaagaagggagtgaggctgggactggagcccaggactgcctgct

SEQ ID NO: 14886 - DNA, 120 bp, Homo sapiens
agccggaggctctgccatgggcccgtcccagggtccccctgctcatggccttctgtctggttggttcagtgtggtggacccgaggaatgagttccgttaatctcctggaggacagatgtg

SEQ ID NO: 14887 - DNA, 120 bp, Homo sapiens
aggcgccaggtggctggagaggggactggagggcaatgcatctgggaaatgactttccagaggtccctctgccctccccctgcagctggggacggagctggaaccccagaggccatgagg

SEQ ID NO: 14888 - DNA, 120 bp, Homo sapiens
tcccgtgaattctatggaattaaaaaatggcaccttctcagcgggaagggagctcggctggttcccgggactgtctggcttctgtcctgactcctacaactgcggcggcttgggactttt

SEQ ID NO: 14889 - DNA, 120 bp, Homo sapiens
aggcgcatgggggcgactgctgagtggacacgtgacctcccgctatgcatgtgcctgtgtgtctgcacagaatgaatatctctgtgatgttcttatgcacatgtgcctctgagaacggat

SEQ ID NO: 14890 - DNA, 120 bp, Homo sapiens
gatcgtggtggctctggcggggtgggcgtattgtatctgtgggtgctgtttgtgcctgggcaccttgaccctgccaggatctgcgttatctctccgagtctgtgtgtttgtggctgaacc

SEQ ID NO: 14891 - DNA, 120 bp, Homo sapiens
ccccgtcttgctcttttcagcagaacctctgcatcaggccctctaagatgcaaattacatcattccactcctggtctaagccttcagtggctctctgagctttcaggataaaggcaaact

SEQ ID NO: 14892 - DNA, 120 bp, Homo sapiens
ctacgtcttctgccctgtcctgccttggaggggtaacatcgttttcatgtattcaaaaagcacgctttgagcatctatgcaggctctaggccccactggaattctgaaacgaagatgtca

SEQ ID NO: 14893 - DNA, 120 bp, Homo sapiens
agacgaaccattcaggcttcctggcccctcccccagacccctctcctgggctctgcagggctctgggctgactaacccacacccacacttagcacaggcactggcctgcttgcttctgtc

SEQ ID NO: 14894 - DNA, 120 bp, Homo sapiens
taccggtgggaaggactggagctggggttcaaatccagagccctcctttttcctttgctccactttagagaaatcgtggaggaggatggcatgggggaatggcgagtgtggagaagagca

SEQ ID NO: 14895 - DNA, 120 bp, Homo sapiens
aggcgggagccaaggatacgagagcagggaactggctagagaaatgtttagaggtggagccccagggacaggacgtggattagatacagcagagggaggaggagctggctgagagggcag

SEQ ID NO: 14896 - DNA, 120 bp, Homo sapiens
gaacgcagaaggaacaggttggagtaagacaacgagcttgggttgggacctgttgcatcacagggacatcaaggtgacaattgactcaggacggagatgtaggttggagagaggaatttg

SEQ ID NO: 14897 - DNA, 120 bp, Homo sapiens
ggccgggggctgcccccggacatgctggcagagcaggtggagctgtggtggtcccagcagccgcggcgctcggcgctctgcttcgtcgtggccgtgggcctcgtggcaggctgtggcgcg

SEQ ID NO: 14898 - DNA, 120 bp, Homo sapiens
gggcggcgtggcactgctgtcaaccaccagcagccgctcaggtgaatggcggctagcaacgggcactgtgctctgtttgctggctctgctggttctggtgaaacagctgatgagctcggc

SEQ ID NO: 14899 - DNA, 120 bp, Homo sapiens
atccgccaggcccaccatgtggccctgctgcgcagtggtggaggggccgacgccctcgtggtgctgctcagtggcctcgtgctgctggtcaccggcctgaccctggccgggctggccgcc

SEQ ID NO: 14900 - DNA, 120 bp, Homo sapiens
cgccgcccctgcccctgctcggccgctggccgccatgctgtctgtgggcattgctctggctgccttgggctcgcttttgctgctgggcctgctgctgtatcaagtgggtgtgagcggaca

SEQ ID NO: 14901 - DNA, 120 bp, Homo sapiens
tggcggccatggcagcatcttcagcatctcaggacagttgtctgctggccggcgtcacgagaccacatccagcattgccagcctcatctgacggagccagagccgtccttcttctcacag

SEQ ID NO: 14902 - DNA, 120 bp, Homo sapiens
cagcggcctcagcgtccccagagccgagccagggtgtgagtgcatgtgaacgttgagtacacatgagtgcgtgtatgcccccaggctgggtcagctcttctgtggattgcatggcgtgtg

SEQ ID NO: 14903 - DNA, 120 bp, Homo sapiens
aggcgcagaaacgcctcatgatgaagattcttgagccccatttccaagacccctcacatccaatcctgtcctgtaacatccatcaaggatttccataggggtgactggtgcccacccaag

SEQ ID NO: 14904 - DNA, 120 bp, Homo sapiens
aaacgagccctctgagccagttatccctaagaagtcacagttccctgagtcagctcaaaggatctatcctcagtggagcttcccaggagactgagactaaggaatgttttgagacacatc

SEQ ID NO: 14905 - DNA, 120 bp, Homo sapiens
gggcgagagctcaccaatcctcatgggtcaccaaccacaccaccctgaaactccagtgtgattatgtcatggagctgccacatgggatctaacctcaggttcatgggacaatttcttccc

SEQ ID NO: 14906 - DNA, 120 bp, Homo sapiens
taacgatggcagtctatgaatccccttggttattatctctggggtagccaggtctcgcaagaacagagctcagcaggcctgccagggactaccacaccctctcctgaggatgtcgtgtcc

SEQ ID NO: 14907 - DNA, 120 bp, Homo sapiens
ggccgtagacccactggacagagctgccccaccacgctgcccctcccagccctgcctgcctgggccccagcaataccaacggtcatctctgccacattcttgctttctcatgggggccct

SEQ ID NO: 14908 - DNA, 120 bp, Homo sapiens
aaacgggaagggaggaaagctggtgcccacctgagacccccagctctgagactccaggggtgttggagcagttcccatagagaaatcctctgggggcaggcaccacttaagtctgtagga

SEQ ID NO: 14909 - DNA, 120 bp, Homo sapiens
gtgcgggcaagggtggagctggcaaagcaccaatatgccttcagggagaaagggctagggaaagaggagttgagacactgccttcaagcctttcctcatcatccctgtgtcaccacgaaa

SEQ ID NO: 14910 - DNA, 120 bp, Homo sapiens
atgcgtggctgtggcccgagccagctttgtctcataaaatgtgttttgtatgctaagtaggctgctgttgtttgaggcagaagaacaatgagtcacttgtgtcatgtgctattgggtgtg

SEQ ID NO: 14911 - DNA, 120 bp, Homo sapiens
tttcgagtgactgagacttcaagatgtgcattatggcttaagtcgtcttatacatctgcaacagcagatgtatacacaacccactcaaaatttgtgtgtgcagtaatatttcatttggga

SEQ ID NO: 14912 - DNA, 120 bp, Homo sapiens
tttcgtatgtgaactgctctctaggaaacccatgtaactgtctgtgtcctggggcacatacatgaggactcatgtgggccgtattgtgtgtttgtgccggggggaggggagaccccagaa

SEQ ID NO: 14913 - DNA, 120 bp, Homo sapiens
aggcggaagccactggcttcctccctttcctgcctcctgcctcctttgtgccagcaagactgagtactggagagagacaggggatgggaaaaatcagtccagctgtccccaggtctgccc

SEQ ID NO: 14914 - DNA, 120 bp, Homo sapiens
caccgacccacactgaccaacacaggctgagcagtcaggcccacagcatctgaccccaggcccagctcgtcctggctggcctgggtcggcctctggagtatggtctggcgggtgccccct

SEQ ID NO: 14915 - DNA, 120 bp, Homo sapiens
ccccgaggccctgatttctacccaagaaaccctattttatcatagagacagaaagtaggatgatggttgccatgggctgcagggaggaagaaatggggagttttgtttaaaaggtacagc

SEQ ID NO: 14916 - DNA, 120 bp, Homo sapiens
agccgctgactgtgttggatctgaggatctgtggagggccattttcagggggtgttcatagggtaattgtgttggattcactcagttgttcactggacaaacatttattgagcaccaaca

SEQ ID NO: 14917 - DNA, 120 bp, Homo sapiens
agccgattagaacacagaggctgcctttgagtggttcatggtctagtgcagaacacaggacaggggaagagggctaaacagggacagacacaggagctctagaggagcactgaggaggag

SEQ ID NO: 14918 - DNA, 120 bp, Homo sapiens
tagcgtgggagcatcacggggcttaggagcacgaacattatcctgagggcaatagggagccatgggaggtcacaggcaagaaagtcacaaggtcaggtttggtcttagatcaccgtggag

SEQ ID NO: 14919 - DNA, 120 bp, Homo sapiens
aagcgttcaggaaacaatgtgcagaattctatgactgatgaggcaggcagcacagtgctcagagatgtggactttagaatcagacaacctggccctgccactcactaattgtatgacctt

SEQ ID NO: 14920 - DNA, 120 bp, Homo sapiens
tggcgggtgctgtccagtgagtcagggagcactggagaggagcagatttgggaaaagctgatggaaatgcaggtccaagctgaaagaccgttcccgagttactgactcagaggtgatggt

SEQ ID NO: 14921 - DNA, 120 bp, Homo sapiens
gggcgagcttgctcaaagaagccagtagaataattaccatgatcctcctctgtaactggaaagaatatccacttcactggttgtgaggatccagtggaaaatgggggttggtatgtggtg

SEQ ID NO: 14922 - DNA, 120 bp, Homo sapiens
gggcggtcagtaaatgccagcttcgtttgctcatggtagcctttcaaacactgataagctaggtggcatttaaactaatgaactgcttgacagtcagctacaagagacagagaaggaagg

SEQ ID NO: 14923 - DNA, 120 bp, Homo sapiens
actcgggaggctgaggtgggaggattgcctgtgcccaaaagctcgaggtaacaatgagctgagatcgtgccattgcccttccgcctgggcaacagagcgagaccttgtctcaaaacaaac

SEQ ID NO: 14924 - DNA, 120 bp, Homo sapiens
aaacgtgtgtgcacaaatgtgtgtgctccatgtatgagtgcacacgtgcatcccctgtgagtgccacatgtttaaatgcgtgtgtcccagatgcacgtgtccctatgcctgtgcaccttc

SEQ ID NO: 14925 - DNA, 120 bp, Homo sapiens
tcacgtgcatttgctatgtgccgtcagcaccagtgcttcttgcaaatccctgggccccaggtcctcagcccttgcccatcaagctggacttcagtgcacttaggaagccccaccagaagg

SEQ ID NO: 14926 - DNA, 120 bp, Homo sapiens
agccggccctgattgtatctggggattgaggttcctggcccaagtgtgtgggtgggtgcaagcacagcgaggaggcagggccaaggggcaggtctggaggaggtggggacttccagtatg

SEQ ID NO: 14927 - DNA, 120 bp, Homo sapiens
gtgcgggtgttgagtgagcaggtctagatgctagcctggaactcaggagagaggcccaggctggagacagcatctgtgtgtgagctgtcaccccacagatggtgcctaatggcaatgggc

SEQ ID NO: 14928 - DNA, 120 bp, Homo sapiens
gagcgaagcatgtatgtgaaggcatagaagcaagagatgtggcgggtttgggaacgctaagtagtttggtatgactccagttcagagggcatatgggagggcaagaaaggtaggcatgag

SEQ ID NO: 14929 - DNA, 120 bp, Homo sapiens
gaacggaaatagagtaagttcgtcagtggaatgggaggaaattgagggagttttgtctaaaggagtctattttttccttcagtcagatgttaggtagttgctgaacatgggggatgggta

SEQ ID NO: 14930 - DNA, 120 bp, Homo sapiens
gcccgtctccatcctctttctcaagaagagaaaccatggatgttgtttctaaaagttcagcctgaaaaccactgtctgtatgaactcaattcccatgattttttgaggctttatatgttt

SEQ ID NO: 14931 - DNA, 120 bp, Homo sapiens
cagcgactgcttcttcaagaccttcatgacagccacgtgtgtaactctcttctggtggccgagagtgaagaagatctgtggcgcagtgagactcccttccactcccgtcagcgggcacca

SEQ ID NO: 14932 - DNA, 120 bp, Homo sapiens
tgccgccctttcttttaccgaatactctggtgaaagctgagggcagagtcctcattacttggtcatcagtgccaagtactagagagagagcaaggaggataggacaggaaaggatcactg

SEQ ID NO: 14933 - DNA, 120 bp, Homo sapiens
ctgcgagttcatcagtgattttcatggaagtaatttcagtagagagatgggaatagaaagcagatgaaatgaaaagtgaaagagggtgataggtggggcagagaataactactcttacaa

SEQ ID NO: 14934 - DNA, 120 bp, Homo sapiens
atacggcagtaactaaaggaagatgggggcaaggaaggagctttaaaataaagtagagacttgagcttgtttatattctatagggaaagagccaggggagggggagaggttgaagaatac

SEQ ID NO: 14935 - DNA, 120 bp, Homo sapiens
gaccgtctttccctggcagggaaatagtcaggaatgaggagtttgggagagtgagaacaagcgggccagttcccaagtaagagaaatccagaggggaggagcctgaaggccagtagaatt

SEQ ID NO: 14936 - DNA, 120 bp, Homo sapiens
tctcgacacttctcccttctcttactcctgatgacctctcacccagacggatagaggaaaagctgaaccataacattcctttgcagttctcctctggtttaaaagtaaaatcagaccact

SEQ ID NO: 14937 - DNA, 120 bp, Homo sapiens
aaacgtttctgatatctccaggagaatgcatctctcagcacatcctgggatctcctccatatcgaagcagagtccccatagttagtggattcccatggtttcaaaggcatcttctgcaaa

SEQ ID NO: 14938 - DNA, 120 bp, Homo sapiens
ttccggcagcctaagatgtaagaccagtcagaacccagacacagcccttcctcattttagtctctccagaatttttccctgaaacccttagcaaccagcattccattccagagcctctgc

SEQ ID NO: 14939 - DNA, 120 bp, Homo sapiens
ggtcgaaggaggcattgtactgtggccatgggctcctgtgtactgccacactaccctttgggtttattggcgtttctgtcttccaaagcccaggacaaagtttatccctcctctgcagct

SEQ ID NO: 14940 - DNA, 120 bp, Homo sapiens
tgtcgtgttacccagaatgatcatcatttctctgcaatagtcagggatgagtctggaggagtgaggacaagtaggccagttcccaggtgagaagtctgtggagggcagagggtggtgtgt

SEQ ID NO: 14941 - DNA, 120 bp, Homo sapiens
gggcgttccactaggccacagcagcaggggaaatcttgtgcttcttcccacggaaggagggaaatgtgttttgggcagccagtgcagccataccttaaccctgtctcctgctgctgcctc

SEQ ID NO: 14942 - DNA, 120 bp, Homo sapiens
gtgcgggacctgatgcacgtgcactcgttcagctatgacttccatctgcgcctcgtgcatcagcacgtgctaggtgcccatctggtgctgcggcacggctaccacctcaccacctttctg

SEQ ID NO: 14943 - DNA, 120 bp, Homo sapiens
ctgcgacacttcctggcccaccaccctgacggaccccactttggccgcaatcacatttaccaaggtcagtgcccaagggcaagccagtgaacccaaaaaagaacaggccacaggtgcctc

SEQ ID NO: 14944 - DNA, 120 bp, Homo sapiens
ccacgtccccatgtttctgtcctgtgtctgtttcttaccagagtttggaccccatgtcacatgtcccctgccctctgagtcacttctgtcccatctcagtgttccacaggaatgcaggag

SEQ ID NO: 14945 - DNA, 120 bp, Homo sapiens
ctacgtggctgatcacgccagctcttaccacatgaagccattgcgaatggcccggccagggggcccagaacacaacgagtatgccctggtgtcggcatggcacaggtaaggctgagaggg

SEQ ID NO: 14946 - DNA, 120 bp, Homo sapiens
gcacgctgcaggagctggggttgggacatacttgcagtagggagaccaatgttttcttgggcaggggtgaggtttgttttattagaaccccagagttgacatctccccaacccgtcctgc

SEQ ID NO: 14947 - DNA, 120 bp, Homo sapiens
cttcgacaccaggatgactttgatgtgtctctgcttgtctgtcactgtgctgcaccctttgaggagcaaggagaggctgagcggcacgttctgcggtcagcagatcccctaccttgaaca

SEQ ID NO: 14948 - DNA, 120 bp, Homo sapiens
catcgagatgacacctgggttccaatcccagctctgcctttgaagcacttgtggccaccgtcaagtccctttgctctcggaccctgggtttctcatcctttaatgaggtgggttcagaag

SEQ ID NO: 14949 - DNA, 120 bp, Homo sapiens
cctcggcacctcagcccacaaggagaaaacagcccctgtccgggtccctccagagctcccttccccagggccacgcctcacctcgaggctgatactcacagcccacgaagcctttgtagc

SEQ ID NO: 14950 - DNA, 120 bp, Homo sapiens
ctccggggctgctgggctcccctcggcctgggacctgtgccacctgcacatgccctggggacagatgtggacaaatgtggggtccaggctcctgccagggcctgaaggacagatgtgggg

SEQ ID NO: 14951 - DNA, 120 bp, Homo sapiens
aaacgactggagcacctttgagccctgcccattcctggtcacctgccctgtcaccttgcaaattctcttactattgtgggtcagcggggacctgggtctgatcacaactcccctatcaaa

SEQ ID NO: 14952 - DNA, 120 bp, Homo sapiens
aggcggggagaagaaagaagctgtggagcagagatgagctgttttggacttctcctggggggcttagctccaagggttctgagtacaggtagcattacttgtcttggggtcattgatagg

SEQ ID NO: 14953 - DNA, 120 bp, Homo sapiens
taacgtgcactgttcgtgtggtgtgggtgccctgtgtgccatgtttaaggcagtgtttgtgtgaagtgtgtggtgcagtgtgtgcagcaggggtgctgccttgcaagctgtgcgcacaga

SEQ ID NO: 14954 - DNA, 120 bp, Homo sapiens
gaacggggtgtgcagcggtcagcgcacacgttaccatcaggcagtggggaaggggcagtgtgtgcaggaggcactgcatgctgtatgggctgtgtatgcagcgcgcagtgtttgtgtgca

SEQ ID NO: 14955 - DNA, 120 bp, Homo sapiens
gcacgtgtgtgcgtcaggcagtgcgtggtgtggtggtaagcaggtagtgagtaccttatgggctatgtatacagcaaggcatatgcatcaggcagtgtgtgggcagtaggcagtgtgtgt

SEQ ID NO: 14956 - DNA, 120 bp, Homo sapiens
gtgcggtgtgccgtgcggcaggctacctgtgtttatatcgggtagtgtgtgtgtgtttatgtgcagcaagggtgtgcagtaggtgtgcagtagactgtgtgcagcaggcgtgtgtgtgtg

SEQ ID NO: 14957 - DNA, 120 bp, Homo sapiens
aggcggggtgtggtgtgtgtttatgtgcagcatgcggcgagtactttgtgtggtgtacagcaggtggtgtgcggcaggctgtgtgtatgtatcaggctctgtgtgtgtgtgtgtgtgttt

SEQ ID NO: 14958 - DNA, 120 bp, Homo sapiens
cagcgagtagtttgtggggtgtgcagcaggtggtgtgtagcaggctatgtatgtatcaggctgtgtgtgtgtgtgcgcgcgtgtgtacagcaggtggtgtgtagcaagctgtgtgtatgt

SEQ ID NO: 14959 - DNA, 120 bp, Homo sapiens
gtgcgcagcgggtagtttgcaggggtgtacagcaagcagtgtgcatggtatgtacagcagatggtgtgcagcaggcagtgtgtgtgtgtgtgtgtgtacaataggtggcatgcagtgggc

SEQ ID NO: 14960 - DNA, 120 bp, Homo sapiens
ggccgtgtgtgtgtgcagcaggcagtgtgtgtgtgtgtacatgcgcacacgcaacaggcactatatttgtgcagcaggccatgtgtgtggtgcatacagcaggtggtgtgcagcaggctg

SEQ ID NO: 14961 - DNA, 120 bp, Homo sapiens
tggcgtaaatcccaaagaccttcctcgtgtaaggaattcagagtagattccgagacacagggctgcacacatttgtacttcccttcccttccctatctgcgggtggagatgaaggccact

SEQ ID NO: 14962 - DNA, 120 bp, Homo sapiens
ccacgtcttccccatgagctgggcaggtaggaatgaggtcttgaaagagttagactggtgctctggagggcacccaggatggccctagcagccccgagtgtccccaggtgttggggaggt

SEQ ID NO: 14963 - DNA, 120 bp, Homo sapiens
aaccgtgagagcatgacttggaactcttcctctggctcctgtccagtccaggcagggggggcccggcagcttctgtccatgtcctgtgtgggtgtgattgtccatcagcctgggccctgg

SEQ ID NO: 14964 - DNA, 120 bp, Homo sapiens
gaccgtcctgtgtgggtgtaattgtctgttggattgttccagggaggggtgtgctgcctgtgcccgggggtgtgtctgtcacagacagcttgcccagtgtgctttcacaagcagtttttt

SEQ ID NO: 14965 - DNA, 120 bp, Homo sapiens
ggacggccaagtccagtggatccacccccaccttgccgctctgccttggcctcccccgccaggacctgtcagaactggcctcaagcccaagattcctccaccctttctgagggtcctttt

SEQ ID NO: 14966 - DNA, 120 bp, Homo sapiens
ccccgatcctggctcctgtctgtccgtctgcggccagagcagcccctcagggcactggcccgagtgagagctccaacctccattagcctcttgaattatgcaggagccgtggtgggtcga

SEQ ID NO: 14967 - DNA, 120 bp, Homo sapiens
gaccgggctgaggagtggagctggaatgggtggggctggcggggagggggtggagtaggaggggaagatggtgctgggagcagaggctgctgggcaccaggcccccagggcaaacccatt

SEQ ID NO: 14968 - DNA, 120 bp, Homo sapiens
gggcggcaaattctcaagctccagcctgatgagggcatggcgtgcttgtgaatcccaggcccgccagtctgcaggctgctcccacacctggctctgactggcttagtggggctgcggggc

SEQ ID NO: 14969 - DNA, 120 bp, Homo sapiens
ccccgcattgtcctcttgactaggcagcattctctgaagtcactgttacactggccccagccctggaggcagagcagtgggtctctttggagatcgactgagctcagctgctgtagctgg

SEQ ID NO: 14970 - DNA, 120 bp, Homo sapiens
atacgggggttcctttagttccagccccacttgccagggactccaaaacagccaaacctgacttctgttgtctctctcacacacacatacgacgttcctctaggccctgatgtctcagga

SEQ ID NO: 14971 - DNA, 120 bp, Homo sapiens
gaccgtttctaagctctgtccccaggacctgcctcatgtagaccctaattgaatctacaccaccctgctttgccaagagcaacctgccccataggccctactgtcctactgacaggactt

SEQ ID NO: 14972 - DNA, 120 bp, Homo sapiens
gctcgtcatctcatggttggcaaaacccctgccttctgccctcagcagtactaggggcccttcagccccagcgcctggggacagcctgtactgggctgaccaccagctctgcatcctgag

SEQ ID NO: 14973 - DNA, 120 bp, Homo sapiens
ggccgtggaggagtccccagtgccagcctgctttctggcctgcaccccgtcccatctcccagcagagaggcttcgaggtttcctcccacagcaggctcctgagcctcagacggcttgatg

SEQ ID NO: 14974 - DNA, 120 bp, Homo sapiens
agccgcagcactgttgacattttgggctggacgattcttagttgtgaggggccatcctgtgcattggagggtgtttagcagcatctctagctcactagatgccagtggcacccctcagtc

SEQ ID NO: 14975 - DNA, 120 bp, Homo sapiens
aaacgttgcaacgtgtcacctgggggaaattactgatggcttcccactgccattgtctccacccatctgactctcttcacctgtgtccactggccgcaaggcttcgtctcctcatcagac

SEQ ID NO: 14976 - DNA, 120 bp, Homo sapiens
cttcggtgtctacctcacatctcccttctgtcccccaaattctcagggctcccagtgtcgctctctgaggccacgcgactgctacatttaatgggacagtacacgtgaagcaccaggcac

SEQ ID NO: 14977 - DNA, 120 bp, Homo sapiens
actcggctactagtcagtagcctctcggatagcactgtggggggatgtgtcatccagttacatctgactttgttcacagttgcctgcagctccacccacagtctagcaggcccaggcatg

SEQ ID NO: 14978 - DNA, 120 bp, Homo sapiens
ctgcgggccacagctgtctaaaacagggacagtgcctttttccccacaggtgcccagacatgctccttacaccggtggtgtgtgtgggggtggcttctagtggctcctgtaccttggcag

SEQ ID NO: 14979 - DNA, 120 bp, Homo sapiens
gcccggtccacagggtctgtctgagctgtggggtgcgtgtgaggcatgggggcctgcctgtgccccattttcacctgccccggccccaccctcggcctccctggcgcctgctggcgggcc

SEQ ID NO: 14980 - DNA, 120 bp, Homo sapiens
gttcgtgtgcacctgtgtgcatgtgtgtgtgcgagggggcacaggagtctcgtctcgtctccgtgctgtgtgggcagatgaaggttggcctgtttttactctctctgtgtttctccttgt

SEQ ID NO: 14981 - DNA, 120 bp, Homo sapiens
gaccggcactgtgggggtgcttgggctggaggaccccaggtacttccggcttggagacatcctggaccatctccctgtgatgtttcatggggcctcagaatggagacctcacagtccctc

SEQ ID NO: 14982 - DNA, 120 bp, Homo sapiens
gcccgcaacactgccagccccgaaacattccttcctaccttaatcctcagacaccccgaggaaggaacgggtataggtgatttcccgtgcctgtgggctacagcccaggctctgagcttg

SEQ ID NO: 14983 - DNA, 120 bp, Homo sapiens
tggcgggtggaaggagacactgaatagtcaattccatggcaacaagcacaggccaggactgtccgaggcaaaccagggcatatgggcaccccattcacccctcagtgtcttcctttccct

SEQ ID NO: 14984 - DNA, 120 bp, Homo sapiens
cagcgggtcctctccctgcaggctgcctgccctccctgtctccctaccctcctcagccctggcacacccagttggtgctcagtgaggcagggattcaaatctttgaaccgggagttgttc

SEQ ID NO: 14985 - DNA, 120 bp, Homo sapiens
tcccgcggtcagtggcggccagaggagtccgaggactatgtaagtaacaggtgtgcgaacgcggacaagacatgggtcaagctgggctcgtgggacgctcctcctctccctcctttcctg

SEQ ID NO: 14986 - DNA, 120 bp, Homo sapiens
gaccggtttacatctgtgtgtacattaccttcctcaggcttcctcaggcccagtgctcatggaagggacgttgagggactgactacgtattagagccttgaaggccaagattatgccttg

SEQ ID NO: 14987 - DNA, 120 bp, Homo sapiens
ccacgctatagtgagtttgaagagctcgagcggaaatactggaaaaatcttacattcaatcctccaatctatggtgcagatgtgaatggtaccctctatgaaaaggtgaggctcactgga

SEQ ID NO: 14988 - DNA, 120 bp, Homo sapiens
tttcggcccggcacgtagtaggcacctaaaagctgtttggtgaatgggtggatgaacagatgatctacccccagctgatgttgctgtgctggcctaattgtgggccattttgcatgtgac

SEQ ID NO: 14989 - DNA, 120 bp, Homo sapiens
agtcggtgggtggtagctgatgagttcttgaaagggtgggttggctctcagataatgaaatgaggcagtgtggtttctgcagaaaaaagatgactgactaatctaatgaaaggggtatac

SEQ ID NO: 14990 - DNA, 120 bp, Homo sapiens
gaacgatggggcatataggggttgattttaattgtctgcgttggtgtccttagggtacactgaggcggcgcacaatggcagctgccagatgccttcagattaaacatgactatgagggca

SEQ ID NO: 14991 - DNA, 120 bp, Homo sapiens
cagcgtagaatactatctgcactgagctggagttgccagaaatgaagaaacaggcacctaatggaagtacagaccagagctttccttggctgcttggaacaggtttcaggggcctttggg

SEQ ID NO: 14992 - DNA, 120 bp, Homo sapiens
aagcgagatgcatggatcccctgggatgccccgtgtgatggggctggcagagagccagtctcctgtcaggggccgcatacttgggccttgcttggtcacacttgccaaagaaaggcatag

SEQ ID NO: 14993 - DNA, 120 bp, Homo sapiens
ctgcgctcatttacttataccttcagaattatggcgtttcctttacttccctgtttctgtttccttgtttctgctgggagcttgtggactatgcccctgtttcactgatttaggaagaac

SEQ ID NO: 14994 - DNA, 120 bp, Homo sapiens
cagcgcacgttccacagatcagtactcagtcgtgtggtcccacctaactgagaggaggccacgtagccctcacagctacactgtgatgttgctcatacctgtgtggtggctccatttcat

SEQ ID NO: 14995 - DNA, 120 bp, Homo sapiens
gtgcgcgcgcgcgcgcgcgtccgcgcgtccgcgtgcgctttttttttagtggtataggagaagattgagaagcttctgatcctgccatgtagctgtaaaaacaagctcctctttccctca

SEQ ID NO: 14996 - DNA, 120 bp, Homo sapiens
gcccggattcacatgaataccacccaagtagcccttaagtcagaggaagagaggccaagggagagatatcaatgacttcttctgtcagtctatgaggattactgctgactgacagcttgt

SEQ ID NO: 14997 - DNA, 120 bp, Homo sapiens
tggcgatttaaaaaaaaataagtaaataaataagaagtgatgtcaaggaaagctttgaggaagagatgggcactgaagcagggacctggcggttggggtaggacatgtggggacctggga

SEQ ID NO: 14998 - DNA, 120 bp, Homo sapiens
actcgaaatattttgtaagcttcagtgagagctgagagcggcttgtgaggaatggtggggggcggggagtagtgagaccgaggattgcagagcagggcagagtcgatgacagaaggccct

SEQ ID NO: 14999 - DNA, 120 bp, Homo sapiens
aggcggaagcagctgatgaaaaggagagagagaaatgtggtcggatttgcattttagaaggctcactttggcagctgtgtggaggctagattgcgagagaaagaaaagaggtagggatac

SEQ ID NO: 15000 - DNA, 120 bp, Homo sapiens
ggacggacagatgcttggaaaggccttgtggtggaggtaacatctgagctgagtagggagggctaggaggagcagaaaggcagagggaagattatggatagaggcgcaagagtgcaaggc

SEQ ID NO: 15001 - DNA, 120 bp, Homo sapiens
aaccgctttaagttatttatggacttcaggataacccaagctgtgcaggtatgcatctgattctaaacaacataccaaagactttcagaactgacctaagggacagaccactgcccaagt

SEQ ID NO: 15002 - DNA, 120 bp, Homo sapiens
gcccgaacccaacctggtcgattgtctgctaaaacaaaaatatgaacattctccactggatttaaacaagatgtagagtctcataataagattcagaatatcccagatatgaaccaaaat

SEQ ID NO: 15003 - DNA, 120 bp, Homo sapiens
aaacgagggagcaggcatggtaggggctgatctgagtccagtcctctctgagatggttctagaaactagactgatggttacacaatgtccatcactgatctgtagagtcctcaggaatca

SEQ ID NO: 15004 - DNA, 120 bp, Homo sapiens
gaacgtttttgtcactgtgcctagtcaaaaagcttctagtcagttctgtaattgcactgaggtttatatttcatttcaaaaatacagttgtttacataagaaaatattgtttttctcttg

SEQ ID NO: 15005 - DNA, 120 bp, Homo sapiens
agccgccagaatgtggggagcagtgtcctgaagttgcataggggtgaggccctgggcctgacccatgaaaccatttttgtctcctgggcctcaggaactatgatggaaggggctacctca

SEQ ID NO: 15006 - DNA, 120 bp, Homo sapiens
ccacgtggggagttcttgctgcttgtgaagagcaaaagctggtgaaagcacagaacatgatcctggccctcctcctgagctgtgtgaggctcccagccaggagcaagcagccctgtgagt

SEQ ID NO: 15007 - DNA, 120 bp, Homo sapiens
cagcgatgaggcagcagctcagcagagagcaagatgctggcaccttcaggactgtgtcctgctttccctactctgtctgcacctggggagacaggtcactctctgactggtctccccaaa

SEQ ID NO: 15008 - DNA, 120 bp, Homo sapiens
ttacgaaggctctagggccccaaaagggtgtttgggagtgctagcagtgggagctcaggaaggctggctgggatcaggaacgatggctcaagggggaaacttctaggagcatgactaggc

SEQ ID NO: 15009 - DNA, 120 bp, Homo sapiens
ccccggctctgtggtcatcgagggacacctatagtcagaggagagaactcaggtggctctgggtccagaacacagttcacagaggggcgaggtgaagcagctctgggtgggcagcacagg

SEQ ID NO: 15010 - DNA, 120 bp, Homo sapiens
ctccggcagcctggggtgaaggcctctgtaggaccaagtgtgtccagctataactccttccagccacttctggcatctccagacctacaacgcagagcaggaaggttctgggaaaagagg

SEQ ID NO: 15011 - DNA, 120 bp, Homo sapiens
ggccggtcccccacaaaagataactcatctcttaatttgcaagctgcctcaacaggagggtgggggaacagctcaacaatggctgatgggcgctcctggtgttgatagagatggaacttg

SEQ ID NO: 15012 - DNA, 120 bp, Homo sapiens
ccacgctgtcccactgcccctggcctaggcagcaggtgagtggttctcccagtgactcctacctggtactgaggaaaggcggcttgactggtgagggagagcagggcttggcttgggcag

SEQ ID NO: 15013 - DNA, 120 bp, Homo sapiens
aaccgtggaccgcctctccgccaccgcctgcggctgcctgggctgagggctcgctccagggctttgcagactggacccttaccggtggctcttcctgcctgggaccctcccgcagagtcc

SEQ ID NO: 15014 - DNA, 120 bp, Homo sapiens
cagcggcctcagccagggacgaaggcctcaaagctgagaggcccctgccggtgggtgatggatatcatccccgaacaggtgaagggacaactgactagcagccccagagccctcaccctg

SEQ ID NO: 15015 - DNA, 120 bp, Homo sapiens
ctgcggatcccagcctaaaagacaccagagacctcagctatggagcccttcggacccacttctcacagactctggcactggccaggcctcgaacctgggacccctcctctgatgaacact

SEQ ID NO: 15016 - DNA, 120 bp, Homo sapiens
ccccgcccaggccctgtagggacagcatttgaaggacacatattgcagttgcttggttgaaagtgcctgtgctggaactggcctgtactcactcatgggagctggcccctatttattatt

SEQ ID NO: 15017 - DNA, 120 bp, Homo sapiens
gatcgcactcacacacctcaggctgactcagcaatcacagacctggcctggatcttcggcccccacccagcagctccgggatgggaggcatggaacacaggcaggggcagggcgggcagc

SEQ ID NO: 15018 - DNA, 120 bp, Homo sapiens
ccccgctactcaccccacaggtctcagtaaatagctccaccgtctacttagttgtttagccagtgacctgagaggtgtctttattcttctccttcctcatatccagtcagtcatcaagtc

SEQ ID NO: 15019 - DNA, 120 bp, Homo sapiens
gagcggatggcagggattgatgctctcatgagctgttgctgccttccaaagtcttttttttttttttaaatcagggcttatgagcctgtgtttactcttctgtatcccactcttgttcaa

SEQ ID NO: 15020 - DNA, 120 bp, Homo sapiens
ctccgtccttgcctcttcctagctctgtggtttgctggcggtcttcagtgttccctggcttccagctggatcactccactctctactttcatcctcacgtggcattctccctgtatgtct

SEQ ID NO: 15021 - DNA, 120 bp, Homo sapiens
tcccgctggtgctgggtctgcaggaacaactgcggcaggcagtgcagaatggggacatggagacctcccatggcatctgtcgcatcgctgtggccctgggcgagaaccactcccggtaaa

SEQ ID NO: 15022 - DNA, 120 bp, Homo sapiens
actcgtcaacatgattatgttctgcacaggcatccctggccactatcctgtcaatgagaccaccagctccctaaccctcaccttctggtacacactgcaggtgtgtctgtgtgacctcca

SEQ ID NO: 15023 - DNA, 120 bp, Homo sapiens
taccggccagtctacttccagctggtggatgtgcttctgcacaaggcccagttcccttctgatgaggaatatggattctggtcctcagacgagaaggagcagttccgaatttacaggtga

SEQ ID NO: 15024 - DNA, 120 bp, Homo sapiens
acacgctcatgtatgtctatgagatgttgggggccgagctgctcagcaacctctatgacaagctgggtcgtttgctcaccagctcagaggagccctactcctggcaggtacctcccaagc

SEQ ID NO: 15025 - DNA, 120 bp, Homo sapiens
ctacggcttccaatccatcgcagagaccattgacgtcaactattctgatgtggtgcctgggctcattggcctcatcccacggatcagcatcagcaacgtgcagctggcagacactgtcat

SEQ ID NO: 15026 - DNA, 120 bp, Homo sapiens
taccgtcagtgaaacagcagtactgggcctctgttgagtaaccccttcctgcttctcagctgtaaggctcatgtttgagcatgcacatgcatatgtcctctgaatggggcagtactctgt

SEQ ID NO: 15027 - DNA, 120 bp, Homo sapiens
ccccgtcatgatcaacagtgttctgcccttggtactgcatgccctaggcaatcctgagctgtctgtctcttctgtgtccaccctcaagaagatctgccgagagtgcaagtatgacctgcc

SEQ ID NO: 15028 - DNA, 120 bp, Homo sapiens
tcccgggcttaaaaccctttcattgttcccattgccctcagcttattgttccattcccacccacatgacaaggctctggcatgcctctaatgtcctctcctgccaatgtcctcatgactc

SEQ ID NO: 15029 - DNA, 120 bp, Homo sapiens
taccgtgtcccatttgatccctgtgccttgctcctctgactggaatgtcctatgccctttactgggtgaactctcactccttcatgccttagaaaggaggaagactgcatcacttctcag

SEQ ID NO: 15030 - DNA, 120 bp, Homo sapiens
catcggccatcggaactaccatgcaggtgggtggatgggcgtatgaatgcaaaatgctgggacttcatgcctgcttccactctcccccatcccagcttgggccatcattttgatattctc

SEQ ID NO: 15031 - DNA, 120 bp, Homo sapiens
ccacgagtgtgagcagctgagtgggaggtaggtgggcagccttgcctgtcctgccctgacctgctggatctgtttccctcccaccctgctcaggccagcagccggatgcccgggcccact

SEQ ID NO: 15032 - DNA, 120 bp, Homo sapiens
tgacgcagctctccctgcagcgctgcctggaagaggagtatttgaggccttgccacccctctgaggcagccctggagcccaccctggcaggtgaggacacggagcagggcccagaacacc

SEQ ID NO: 15033 - DNA, 120 bp, Homo sapiens
aggcgaccagttttggagctggttgtggtctttaactgagaagagagacttccctgatgtagtctagcactgactccttccttgggtctctgacagactcagctcgtggtagtgctattt

SEQ ID NO: 15034 - DNA, 120 bp, Homo sapiens
ctgcgtatgttggtagtaggattcaggcccagcttctgtagagatgcctgaccttggcaaactctgggggagtggcaagtcccactgtgcccactgggtggcagtagtgcttcagatgag

SEQ ID NO: 15035 - DNA, 120 bp, Homo sapiens
atgcgggcatgcccctactgtgtccctctgtgctagtagactgtgcaggtgcctgtgtactcggagcaggagtaccagctttatctccacgatgatgcttggactaaggcagaaactgac

SEQ ID NO: 15036 - DNA, 120 bp, Homo sapiens
agccgccgctttgacctgcgttttgttgttatccatgaccggtatgaccaccagcagttcaaggtgagccattgtgtatttgcatgggtgcccagcttctgggtctagcaggccctactt

SEQ ID NO: 15037 - DNA, 120 bp, Homo sapiens
cagcgtttaataatagtaacagtgagtgtaagcgtttccatccttcctgtctttgggcagaagaaaggaaagaggagggagaggagggagaggagggagtggagggagccggctgaaggg

SEQ ID NO: 15038 - DNA, 120 bp, Homo sapiens
aaacggcaggatctgggcctaattgtctgacccctgcccctgccttcaatcagctctgcggctccccgcccgccccttgcctaactagcagccatgttctcctcattaggacaagctccc

SEQ ID NO: 15039 - DNA, 120 bp, Homo sapiens
acacgtgtccctggacatgtctccagcactcccagctcccagccctgcctggtgggagggtacagcagggacccagttttggaggggcctctgggacagctataccctcagccaccacag

SEQ ID NO: 15040 - DNA, 120 bp, Homo sapiens
ggccgtgtgctgggacacacttctgcgctggctcagctgctgggtacattctgtcctctgtgtgtccttcttgctacagcccaactgtctcagacacacagctcctgagagcagggccta

SEQ ID NO: 15041 - DNA, 120 bp, Homo sapiens
ctacggtacaaggatggctctcttaaatggatccaggcgtggtgacatgtcgcgtgtctgcagctggtggaatggaaggaaagcagtactcgtggtggtgaagaactccaaccctagact

SEQ ID NO: 15042 - DNA, 120 bp, Homo sapiens
agccggagtcaactttgtagtaccttagatacagacaggcagcaggcccagacaccctcagctttgttctaaacagcttccacactctctaagcaaccaggtggcttcctggacagcttc

SEQ ID NO: 15043 - DNA, 120 bp, Homo sapiens
ccccgggggctcagaaagatgctctggcccttgtggccccactcctgagaggagtataggcttgggctctgagaagagaagtcatggtgtcctccctattctatgctgctattgccaaac

SEQ ID NO: 15044 - DNA, 120 bp, Homo sapiens
aagcgaaatcatttactcttcggtgcgactgctcagcagagctaataaatcttgcatgagcagggccaattctaatttcctaatatgaaaaggcatttggattgagagagagggggagat

SEQ ID NO: 15045 - DNA, 120 bp, Homo sapiens
acccgcccacccgcacacacccatccgttctgcccccctcttggcgtgatacatctcagtctcttctattgacaggacgtggctttaaacacagttacacaagttatcatttctgccttc

SEQ ID NO: 15046 - DNA, 120 bp, Homo sapiens
ccccgcgcctggacggatttctcagcaaggtaatcatgccgccaggctggacggcgcgtgcataggcaatgaagctccgggtggggtctcctccctccttcctgagcccccatatcccag

SEQ ID NO: 15047 - DNA, 120 bp, Homo sapiens
cagcgctgctgccagcatcgaggacaaggacggcaaagtgtgaaggccacttcaaggagtggtggcagtacaaggaagggggggcagccaccagtcagccttccaaatcagctgattatg

SEQ ID NO: 15048 - DNA, 120 bp, Homo sapiens
ccgggattctctgggctggctggctttcttccccaaaccaacatcctcgcaagctttggaagaaacagttttacagaactatcaagtctgagttgtgtcaccctttagccagggacactg

SEQ ID NO: 15049 - DNA, 120 bp, Homo sapiens
acccgaccaaagaaacctaattcagaccaagcagaagcagccaccctattggcatggctggggaataagaagaatatgatggcagggcatctttgcctcttgaatctgccagccccagtt

SEQ ID NO: 15050 - DNA, 120 bp, Homo sapiens
ctccgcatgtgacctgtctttcccagtgcctggatctgcatagcatctgcactaggagaactggtggtttgctttagcacaaagtaatgtctccattaccctggctgggaattagaggac

SEQ ID NO: 15051 - DNA, 120 bp, Homo sapiens
agacgcctgttgacttgcagctccaggatcacatggataagtgtgaagggagccaaggttgggaaccagaagagatgctttggctccacagaaacctgctcctaccctcaggcctgcatc

SEQ ID NO: 15052 - DNA, 120 bp, Homo sapiens
gcccggggacatgtgcaggagggggctttcatgtttgtgagtaggctagccccaggggcatcaggcagaggcggagcacccctagctcctccaagcccaagaactctcagcccaaggagc

SEQ ID NO: 15053 - DNA, 120 bp, Homo sapiens
taacgaggctaccccaccaccactccatctgagcgtggcaggctgcactgcacgactggcttcaggtggctcttctttaattaatggcatcccgggctctgcagggagcttcaccccaca

SEQ ID NO: 15054 - DNA, 120 bp, Homo sapiens
tatcgagtgacttggattagctgcagctgaaacatgaccccatcaactcacgctgccttcttggggctaacccggtgcacctctgctgacagagggctctagggaaactgaaaggagggc

SEQ ID NO: 15055 - DNA, 120 bp, Homo sapiens
aaccgccccattcatgagagagaacattcaagtgacagggccttcaccattgcactgccctgctaacaggagaccttgagttgtggtcaagtcagcagattcttttaaattttgaaatac

SEQ ID NO: 15056 - DNA, 120 bp, Homo sapiens
acacggactttgtctttgaatgacctgaatgtggcctagttcttcctagcacagggctctctaccagagctgaaagcacaactgttgcatttgcatgacatagaagcagccaaaagcttc

SEQ ID NO: 15057 - DNA, 120 bp, Homo sapiens
tgtcgtgttgatgctgaggcatctcctgtgcatggtactgaaatcacagagatgacttatgatgtgttctgtttgtgttggcccaaagcccaaaccagaaatgtatttcaggcttggctt

SEQ ID NO: 15058 - DNA, 120 bp, Homo sapiens
ttacgtggacccactcatcctgtcctgctatagttaaggtctgtcagcatttttcaaaggtttataattcaaccacaaaggagaatgcagtctttaggctgcaatgtgacctataaagct

SEQ ID NO: 15059 - DNA, 120 bp, Homo sapiens
ccccggggtcagaaactttgcttttttgttgttgtttttaagttaggcccttactaagttatagtgaagcaaagtaatagctggtggttttgttattattatttggtttggttttacagg

SEQ ID NO: 15060 - DNA, 120 bp, Homo sapiens
gttcggccagcacccagcccagcacagcacttcttttcttttcacttttaaccatcatatcccctggtttccagcaggttcattcacccagaaaatgtttatcttcattgtgccacctcg

SEQ ID NO: 15061 - DNA, 120 bp, Homo sapiens
gtgcggtttcactctttatcagttatgtgaccttaggcaacacacttaatgtctcagcattggtttcttcttgtaaacaagggattgtagtggagaatactcctgaggatttttgaggaa

SEQ ID NO: 15062 - DNA, 120 bp, Homo sapiens
cctcgaacaattaaattagaatctctaagggtgggacccaggtatcagtatttttttctggaatacttttgatattccagagatggattaaatcctttaacccccacaacatccctaatg

SEQ ID NO: 15063 - DNA, 120 bp, Homo sapiens
tgacggtggaattaacaaagtgccttaggtttactgccagttccctgacagcctgatttcccatgtattgtgtaccagatgagacataagggattgtgaaggcaaatgaaaagcaggata

SEQ ID NO: 15064 - DNA, 120 bp, Homo sapiens
ccacgctagtgtttaatacatgacgtcatcctagtaaaaataatagttcccacaggtctgccagggaatgggagagccggggttatctgtacccacacatgccaggaacctcaggggtgc

SEQ ID NO: 15065 - DNA, 120 bp, Homo sapiens
cttcgtggatagtatcctactctgagttccaaacacacagatcccaacgtctggattccacctctgctagacaccagcttgtagcagagaccttagctgggagcctggtttttcccaaat

SEQ ID NO: 15066 - DNA, 120 bp, Homo sapiens
gtccgaagatccaactactcctctgtgtgccccttcctgctccatgtgctcctttattttacccatttttctccatggtaaatgcaagtgtaaggctttgaaggcacaggggagcctcta

SEQ ID NO: 15067 - DNA, 120 bp, Homo sapiens
attcgcagccagtatgtgaaagcatgacttcaattttatgaagactgggccctaagaactggacatgatgaagcttaccagtttgccaatcttcaccttctgttttcttcccctgagagt

SEQ ID NO: 15068 - DNA, 120 bp, Homo sapiens
catcgcaactccatgcaatgtttcttcagagaaagttagatgcaattagatcatttgaagatggattagcctgccatctgcacaatattaagaaaaatcatgttggcaaatgatggggcc

SEQ ID NO: 15069 - DNA, 120 bp, Homo sapiens
tcccgaagggttaacacaatgtgtgggaaaggaaaaaaaaatcccctgtggcattaaaatgctgtgtcagagatttgtaagctcccctttgtagctctgccctggggcctggctcacttc

SEQ ID NO: 15070 - DNA, 120 bp, Homo sapiens
taacggggttacagtctggtgcctgaccagtgaaggacagttattattaaagtgctgaggaatttaattcaataaggtcagggacatctgctgtgcttgcttgcccaatgtccatttctt

SEQ ID NO: 15071 - DNA, 120 bp, Homo sapiens
ttgcggaaaaccacctcatgcccattctgtctaggtggagctgacccttacctaaatcagggtggccacatgaccaagccagcctagttagtgtatttgggtatccaaccgtgccccaaa

SEQ ID NO: 15072 - DNA, 120 bp, Homo sapiens
caacgttcttttgagggctttcacaccctcacgtatcctttccacctgaacctcagtggctgactttaccccaggccctgaaggcagaggtggagctgagctctgtgtctgggaagagag

SEQ ID NO: 15073 - DNA, 120 bp, Homo sapiens
gcacgtcctctgatccttgcccaagggcctgctttgtgagtggggcatcaatgctgcttttgttccacctttagcgtctggcccacagctgaactcaaagaggctggctgctcggggcaa

SEQ ID NO: 15074 - DNA, 120 bp, Homo sapiens
gcacggtggttctccccactggggaggcagcctcagggaacattctgtctgcctttggcattctaaaccatttcgaatttcatgaagataagtcagaggttttaaatgtgatatcactgc

SEQ ID NO: 15075 - DNA, 120 bp, Homo sapiens
cagcgtagaaccagcatgtccttgctaattacaatacacaatcattgccttgtgttgatgcagtcatttgctcattcatcagctattaattgagttcctactatgtgctcaatgtgatgc

SEQ ID NO: 15076 - DNA, 120 bp, Homo sapiens
cctcgtgtggttgttgctctaagaatgcatttcttatcaagagaataatctgcttttcattctgcttcctacctagctcaacagagcacaaaatgcccaagctagatcccttattcccct

SEQ ID NO: 15077 - DNA, 120 bp, Homo sapiens
catcggtggggcttatgacagacatagatgttttcacagttaccacacagggccaactgttttagtaagggtgaccacttaggacagctttgggctcttgagctgtcctctgttgaagcc

SEQ ID NO: 15078 - DNA, 120 bp, Homo sapiens
agccgggaaaccctaagctgtcatctaagcaacgccgggttgttcatccactttgaaagagacaactttatggtcctgatgacatttcctatattatattaaggatgcatcttgagagga

SEQ ID NO: 15079 - DNA, 120 bp, Homo sapiens
gctcggccttaacaatggaaggcatttagcagagcctcatgttttagagcaagaaagacttgagagagcatctcatctggtatttttcaagatgctttttaattttttaaacagcaaacc

SEQ ID NO: 15080 - DNA, 120 bp, Homo sapiens
ccccggtcctgaacctctttttttttgtttgtcaggaaactgaaaaacagtgagatacggtaacttgcctaagaccccacagctagagatctcagtgccagactgcaacacttctaaatc

SEQ ID NO: 15081 - DNA, 120 bp, Homo sapiens
atccgtgataactttttcacagaacagatcaagttgggaaggaggagggagggttaggcaagcaactgagtgtgatcccatttggtcagtttgtgcttcagagtaaccacaggcattctc

SEQ ID NO: 15082 - DNA, 120 bp, Homo sapiens
ctccgatcaaatttgagttattcaattgtttgttttggttcttactgagtgcctttcctggaaaaagcacaaaggactctgtagaccttaaagaaaattcctaaatgtaaacagaaaatc

SEQ ID NO: 15083 - DNA, 120 bp, Homo sapiens
aggcgaggatgaaaaaggaatgaaggatagaagccagtctgccctagccttattcttttttccccttggccaattcaaaagtcagagactctagggttcttatttatccaaatgaatgtg

SEQ ID NO: 15084 - DNA, 120 bp, Homo sapiens
agccgctaaaattctcctgagtgtttggattgagaagaagaggctcctgtgggagattagaaactgatacccttgagagaggacaatagggagctgccgacagactggctgacgaggccc

SEQ ID NO: 15085 - DNA, 120 bp, Homo sapiens
gcccggcttgggtccccagagaggtaggacagtgcagttggaagtaaaagcttttgatgagccatgagtttccttctgatctgtgggcaaaggaagccagtggaccagagaggcacctta

SEQ ID NO: 15086 - DNA, 120 bp, Homo sapiens
taacgccgaacaatcaggaagatggagatgtcctggctcccatgccaactgctctgtgactctgagaagccatctagctttttgcagttcaattttctcagctgttcaggagaagaagta

SEQ ID NO: 15087 - DNA, 120 bp, Homo sapiens
taacgagtactgtagtgttgcctaaactaagcaggattttctatattgcattacaaattttacaatctgagtgaggttgttttttcttcttttagtacagcagaaattgaaccttctcag

SEQ ID NO: 15088 - DNA, 120 bp, Homo sapiens
gggcgaggaagagtcaaggcaggccaggggtgtgagatgcagccaaagcctggacagcccccatgagtcgaactcctgcagctcctggctgatgtaaggaacatcgcaggggaaagaaag

SEQ ID NO: 15089 - DNA, 120 bp, Homo sapiens
ctccgttttcctttccagccaaagtagttgctgaatatactgaaatttgattacattctctggccctgtcccttttgccagcaacatgcttccatctaaaagccctgctggagtctggct

SEQ ID NO: 15090 - DNA, 120 bp, Homo sapiens
cctcgataatttttccactcactccttaaagctattgtctcccaacacttctgagctcaccattctattaacatgggcctcttgggaagcaccagtgatgttatttaatccagtgacctt

SEQ ID NO: 15091 - DNA, 120 bp, Homo sapiens
tgccgagttgtttacacaattcccactctgaaaaggtccttgatgcccaagttagtccctgctggtttgccagggactgtcccagttttagcactgaaaagttctttgtctcaggcaaac

SEQ ID NO: 15092 - DNA, 120 bp, Homo sapiens
ccccgtaaacacaaatacagatacaaataatgattaagtggcccctgcatgtcaggtgccttacagagagaggcctaattattttgtaattaacacacttctgaaaatgtgggggagtgc

SEQ ID NO: 15093 - DNA, 120 bp, Homo sapiens
ctacgtcaaaatatgatttaaaacacttctcacagctcagttgacatttggcaatccccagccttcttttgctctcgaggatgggggttcaaatccacacgacgttagcactttgtactg

SEQ ID NO: 15094 - DNA, 120 bp, Homo sapiens
tttcggtttaagtaaaatgaaaacatctgtttgagtcctgagggaaagaattatttttacatagaggggagaggatgcctggttgttaaagctggagtcagcctcagtaacattacaaaa

SEQ ID NO: 15095 - DNA, 120 bp, Homo sapiens
cagcgcttgcaggctaccgacattccttgccatgtggccccttccatttccaagctagaaacagacagtctcccttacacggaatccctctcatgctttgagtcactgacttcaggaagg

SEQ ID NO: 15096 - DNA, 120 bp, Homo sapiens
aggcgggaagcttgggaagtggggaagagaccaggcctggggaaatgtagtgggctctgacccctagacttttgccaaggcacttcatcccagtgaaagtctgatcgcaagatgtgcttg

SEQ ID NO: 15097 - DNA, 120 bp, Homo sapiens
ctgcgtctcctccccaatcccttattactcctgcagtatctgtcttttatctgtttcccaaatccccagcactgcattagatggtaatgctctgaaaagtacacattaaaaacttccttc

SEQ ID NO: 15098 - DNA, 120 bp, Homo sapiens
ggccgttgggtgggcaacaactctctgtgtcctggttcctaatctgataagagtagtaaccactaagaagttttatgtgaggattaaatgaattaatagttctaaagcacctagagcaat

SEQ ID NO: 15099 - DNA, 120 bp, Homo sapiens
cagcgtccaaaccagtggttaatgagaggcagccagttgcctgggatagcccatcctgtggtggaaggagataacaatggcaatacttatcagttctcagttgttatttcatttaagttc

SEQ ID NO: 15100 - DNA, 120 bp, Homo sapiens
tgacgttagaacccaagaccctgtaagggtattaacattttattctgctgggaaaaatcagagattttgaaatataatttgggagcccatgaatggccagaatccaaatggcacacccca

SEQ ID NO: 15101 - DNA, 120 bp, Homo sapiens
tcccgcctcccgcctggcttgagtaggggctgcacgatcacatctgctcatctccttctcttccagccctgctgacctggcaggctgccagcctaacagccagggcatttggggaggcct

SEQ ID NO: 15102 - DNA, 120 bp, Homo sapiens
aaccggttttttcagtggctttgtaacccaaccatttttgatcacatcaggactaaacctggcagccagcttggcagcttgtgcacaaattgcatacaaaggcagattgtttagccttta

SEQ ID NO: 15103 - DNA, 120 bp, Homo sapiens
gttcgcattgttctggagagatgtacaggcatcgtattagaaattctagacacctgggcaggtctgttggggagatgttttctgcatgagcactccgtgtgtttgatcatatcatagggt

SEQ ID NO: 15104 - DNA, 120 bp, Homo sapiens
agccggtctctgcaaagcctcagcaggaaggttgtggcagagaagggttgagcagcctctgggcagtgggcgggtgccttggtgcccagccccgagtctgtggaggcttttgttcaatta

SEQ ID NO: 15105 - DNA, 120 bp, Homo sapiens
aagcgagaagagggggaagtgaggagcatcagggctgtctgtgtttatcgacatataacaacatgtctgggagaggtgattaagtgaaaaagcaggttacacaacagctccaaggatgag

SEQ ID NO: 15106 - DNA, 120 bp, Homo sapiens
gagcggtaggattttgaatcatttctattttctttaggtttttcagaatgtctttactaagaagtcattattgcttttagaacctgagacagctacaatatttgtggggatggagagaag

SEQ ID NO: 15107 - DNA, 120 bp, Homo sapiens
tgtcgtatgctgtgtctcggtcaccagagagaagctcattaacatgcccacggaactggccagctcatcatggcaggtgggaggaagaaacactgtttattgaaacaagaaaggccctgg

SEQ ID NO: 15108 - DNA, 120 bp, Homo sapiens
agccggctgaaaactgtccaggcctcagtccagagtcacaggatcacaaaacctcagtgtggaagccacaccagacgtcatccctggtcactcctgctcctcctgaagcttgaatttcct

SEQ ID NO: 15109 - DNA, 120 bp, Homo sapiens
aatcgttctgagggcccctgtcaccttcaaatacagtttaagctcatgctctgggtgtacaaaatccctaggagtttggagcaagtgccacgtatcaatgcgccctaatataagaaggaa

SEQ ID NO: 15110 - DNA, 120 bp, Homo sapiens
catcgtcaatcttccctgctctcccctgcacttatagttctttttctgtcaaggccaggtgtctcaaggccacaggtgggcagaacgtggctcccaccattcctgaatatactcccttta

SEQ ID NO: 15111 - DNA, 120 bp, Homo sapiens
tctcgtgggaacagtagcagcccacctcttgagaggcctaaccgcttggtattcattagcttgatgagctctccaaggcccagattctggtccaagccttgccagcttacttacccgatg

SEQ ID NO: 15112 - DNA, 120 bp, Homo sapiens
aaacgaatctgtgtgggcagccaaatgttaatcagagaagattgcttggtgagcatgaaatcagaagtgaggcattcaatgtccattgacagcaggctaaagcagtgtttctcaactccc

SEQ ID NO: 15113 - DNA, 120 bp, Homo sapiens
catcgtggagtggaaagagccccacattgggtaggtagagacctggattccagctctgccatttgcaagttgggtgattttatctgtaaaattgaggatggtgattcttcctcaagattt

SEQ ID NO: 15114 - DNA, 120 bp, Homo sapiens
ggacgtattccagcacaactccttaaggagtttacattctcgaggaggagataagattgcacaggtaaaccagctaagtaacaatgcctgcttgttagaaggcatatctggctctgggag

SEQ ID NO: 15115 - DNA, 120 bp, Homo sapiens
tttcgccaggcacttataaggcccatttaacattataggacagtacaggcttcctaacagcaagggcctggcacaaggccagtgtgcctgccttaaagttagcccaactctgctgggctg

SEQ ID NO: 15116 - DNA, 120 bp, Homo sapiens
tagcgagagacatagaggcattacactgcagtaggttagtgcagtggtagagagagaaacaggatattatgggagcatagaggagccttgcccaagcccctctggtgaagtcaaggaagt

SEQ ID NO: 15117 - DNA, 120 bp, Homo sapiens
gctcgtgtatcttgaacacctgaacaggactctgactcctgtgccccttcatatggctcccatgtctcatttctttggccattatcctagagcttctgtggttattggacataaatatct

SEQ ID NO: 15118 - DNA, 120 bp, Homo sapiens
ttacgcaatatagaatattttcgaaggaaaaatcacctgtatatgcaaataatgtgatttgattctacgccttgtgtaccatataagccttagtggaaaaactgctgtgttgctttcttt

SEQ ID NO: 15119 - DNA, 120 bp, Homo sapiens
tgacggatgactctgagttgaacttgtcaggaatgagcccaagaaaaagcatgttgaatgacttctgataaactgtctctgttgtgcttagcacttcctggacttccttctcactaatgc

SEQ ID NO: 15120 - DNA, 120 bp, Homo sapiens
caccgtcccttgcccttcctcattgtttcctaccctgtttcttttagtgttcgtcatgccccctaacctctcacaggtaagcactgtattgttcaatgctatattcctgtagaatggtgc

SEQ ID NO: 15121 - DNA, 120 bp, Homo sapiens
tagcgggagcgacaactctaaaagggaatctgaagcagtgatggaaaggaggagccaatcaggggaggggctgggggcctagtagaaggaggaaccaatcaacggagaggttgggagggg

SEQ ID NO: 15122 - DNA, 120 bp, Homo sapiens
gagcggtttagggggtctagcattccaacagaaggaagaggctttgtagaggtcttgagagacaggaccttggtgtagtttaagaactgaaagaaagccaggcggctgacagcatacaag

SEQ ID NO: 15123 - DNA, 120 bp, Homo sapiens
catcgatatattctccatatctatagttttgccttttccagaagaggataaatggaaacattatggtgtgcattttgagtctggcatctttcatttaacacagtgcatttgagattcatc

SEQ ID NO: 15124 - DNA, 120 bp, Homo sapiens
gcacgccttcttaagtgccaggtgcgagcaaggccgaccaggaactgccgatgggcttcacctgtcagactggactgccacctgccacacattcattgaacttttaataagcactgccgc

SEQ ID NO: 15125 - DNA, 120 bp, Homo sapiens
tggcgttttgctgggctccagaaataaaaaattcagagaggccaaagttcttcagggatgcagacaggtgatagaaccatcatttattgagcacttgctaagtgctaaatactcttacct

SEQ ID NO: 15126 - DNA, 120 bp, Homo sapiens
ctgcgttatcttgtgtaatcctcacaaccacactcaacgacggcctattgaatgctctctaggtgtctggcagtgttccaaacagtttatgtgtattactttgtttgatcttcccaacca

SEQ ID NO: 15127 - DNA, 120 bp, Homo sapiens
taacgcactacacaaatgctggtgtgaaggtgggtgagagcttctggtggaagaaatagcactggatttagcaggggctatgagagcatatgatcttttttgtgtgtgtgaccttggatt

SEQ ID NO: 15128 - DNA, 120 bp, Homo sapiens
ttccgcatgcgtaaaatggggataatcatgcctaccttaaatgaaatggacctgccaggcaaagcacatatgagttgggtctgtcctggaaaacttgtttcagtgattgacattaaacac

SEQ ID NO: 15129 - DNA, 120 bp, Homo sapiens
agacgtagtgcatttagagaaccatactcagtcttctgttaagacactaccaggtctgacactggcttactgccgcaggctgtttattactcttaagcccaagacaacttctgcagtctg

SEQ ID NO: 15130 - DNA, 120 bp, Homo sapiens
acccgccccttgtagcaagtgtggagttttcattttttagagatctccagacttgttaataacaagttcactgggcctcagctctgcccaggagggactaattgcaaagtaaatcccagg

SEQ ID NO: 15131 - DNA, 120 bp, Homo sapiens
tgccgtttttccttcatgtgttattgatgttaatcagccatgcccttggttgcagggttatgtgagtctttttctgaagctttttaagcctgtgattctgtaaatctttgtactttttaa

SEQ ID NO: 15132 - DNA, 120 bp, Homo sapiens
aaacgttgtcactggagataatgacaaattagaatccgttcccatggggaccgcacgctacctactgatcatttgacccgtggctggatgttggctagcctaagaattgacccaaaagat

SEQ ID NO: 15133 - DNA, 120 bp, Homo sapiens
atccgtattcaggaaccccttaggggatgaaggggaaaggataaagaaggataaaagatgaaagctgagctgtggaaagaaaaatgtttttaattacactgaggaggattgtgggtccac

SEQ ID NO: 15134 - DNA, 120 bp, Homo sapiens
cttcggtcctcttcagtttattggatacattcaggattaacctctctgtgggctgtctttactctgaggttctgttatgcttgctgagcagcctgggtttggttggcgtgctaacagaga

SEQ ID NO: 15135 - DNA, 120 bp, Homo sapiens
agacgcgatagtggagcacaagatgaggtttccatagtgtgtcaccatcacattcctcgtcagaagcacacagggagctcctctcaggcagtgaggtggagggaggcaagagcaccccca

SEQ ID NO: 15136 - DNA, 120 bp, Homo sapiens
tatcgccatttagtcatattcgtggattttctttgttttttcttcttcttcttcttctttttttttttttttttttttggagacactgtgtcttagttttttaatgaaggagtttaaaaa

SEQ ID NO: 15137 - DNA, 120 bp, Homo sapiens
agccggggtcgatgtgggaaaccatgatgaggacttagacctggataccccccctcagactgctgccctactaagtcacaagttccaccactaccggtcacaccaccctacacttcatca

SEQ ID NO: 15138 - DNA, 120 bp, Homo sapiens
aggcggccgtcacggtacacactgtcgatgcagaatgctaacaatctcctcacctccacgccaagatgagatctgggagctacagaatgttctggaaagaaaaagaaccggcttaaaacc

SEQ ID NO: 15139 - DNA, 120 bp, Homo sapiens
tgtcgacatggttaaaaacgagagaaacaacaacacagtcacatttgtgaagatgtgaggctggttctgaaatggaggggaaataagcctgatgaacagacctgccataacactaatgga

SEQ ID NO: 15140 - DNA, 120 bp, Homo sapiens
aggcgaacctccaaacacagagacggaacctgcaagtgaagctgagccagaggaatgttccaaagagccagaagcattcagctctccttaactggaagagagaaaaatctgctcacccag

SEQ ID NO: 15141 - DNA, 120 bp, Homo sapiens
tttcgctttgtttcttagcggtacctggataccacagttgctgtatggaactcatgttatgctctaaacgatgcatctcagaatttctaagtaaaggattatttttctactatttattga

SEQ ID NO: 15142 - DNA, 120 bp, Homo sapiens
catcgctgtccaatcctcttccagcattgcctactttgctgaatgacacccacttgcccaagccaaaaatgaaggcattccaccgcacccaatctccttatatactccttgaacctactc

SEQ ID NO: 15143 - DNA, 120 bp, Homo sapiens
aatcgactgctcttgtctcattcttcctagtcacgcatgctgtctagcaaccgtctgtctaaacccgcatgaatctttcaggtttcttctgaatactcacgacttccagaaaaccaagcc

SEQ ID NO: 15144 - DNA, 120 bp, Homo sapiens
gcccgaacccttctgtatgtttcctgctccatgccgttggctgcctagcctgttaaactctaaactcggcctacttgttcaccatatctccagtactggcacaaagcaggaccttgatgc

SEQ ID NO: 15145 - DNA, 120 bp, Homo sapiens
tgtcgttatgtggttacgtggcagggtgcggtagagatgtaagcagcctctcccctggacagtgttcccggctgagacatggttgtagccagtgtgtggccttctaacctgggaacctct

SEQ ID NO: 15146 - DNA, 120 bp, Homo sapiens
tcccgtaggttttgctctgctctgtccaggagttccctgaatctgcaatgcccactctgtcctacagcctccctctgcaggaatgtgtttaagaaaggaactagattctctccacctgct

SEQ ID NO: 15147 - DNA, 120 bp, Homo sapiens
cttcggggtcatacctgcagagctcaaccttcccaaagtggccctggagggaaagatgcatgtgctgttatcagggaagccccatcgtaggccacggaacacacagaagtcttgctcctc

SEQ ID NO: 15148 - DNA, 120 bp, Homo sapiens
agccgttcccctgagggccaggggttctcgctgtctggccttgcaggcagaagcctctcacctggactgtacttgctcactacagccccctcgctctcttggcctcacaaactgtcccct

SEQ ID NO: 15149 - DNA, 120 bp, Homo sapiens
tgacgatgaaccaactcatcaatcccaatttctatgaccacaggaaatgaaggttatttctgggcctgcaggacaactgccgttctctaaaagccctgggctcacgttacaggacaggcc

SEQ ID NO: 15150 - DNA, 120 bp, Homo sapiens
agacgtgagatcaggttccagccaagccacctgacagcgacagtggtggccaagtccccaaatcggagctggctcctgatgcactcgctgcatacagaaactggcctcggggacggtggg

SEQ ID NO: 15151 - DNA, 120 bp, Homo sapiens
gagcgagaccctgtctctcgggggcaaaagaaaaagagagaagcttacaggatatatatgcccgggaaagtcagaggcaaggattttcctattccaccatatctatacctactcccccat

SEQ ID NO: 15152 - DNA, 120 bp, Homo sapiens
tcccgtgtgcatacacagtcgtgcatgcaggcagggacgtgcattccgtccgtgccgtgtgtcacatggagaaagacacaatcccttgtgatgaaagtggcccccaaatgcagtaaggtg

SEQ ID NO: 15153 - DNA, 120 bp, Homo sapiens
tttcgctcatggacctggccccagaatgaaaaagaatggagagcagctgtacgtgcagagagtggcgctgtggatggcggagggctctgccatcagcagcaagcagcacgggtgtaactt

SEQ ID NO: 15154 - DNA, 120 bp, Homo sapiens
tcacggatcctctttaggaagcgcttttcaaaatgtgtggggtccacttcagttgctggttttttttctgaaacaatatctggatctaacagaagagaaaagaaaacagagtgaaaggca

SEQ ID NO: 15155 - DNA, 120 bp, Homo sapiens
aatcgctcttcttccaaacttacatgtcaggaactcagaggccaaggccacccctccatctcagtgtgcagcagcagcccaagggcccaccggctcagtggcttgacaaccaagaaaggg

SEQ ID NO: 15156 - DNA, 120 bp, Homo sapiens
attcgaggagccagcgtcttgctgcttgtggggtgcgctcacctcgctcacctgcccagagctccttgggcctgactcttgtggccttgacctcatttcactcacctcagcctcccaggt

SEQ ID NO: 15157 - DNA, 120 bp, Homo sapiens
cagcgttgacaagaaaacattacacaaatgaatgaaaagcaattggttttagttccacctccactattaacttaagcaaatgacctgctcagtccctcaatctcctcaactgcaaaaaga

SEQ ID NO: 15158 - DNA, 120 bp, Homo sapiens
caacgtgagggtgggaagagcctccaccatctccacagcacccaagctccccagccaggccacccacccctttgaaagagaacacacttactctccacgtcgcggacacagacgccatag

SEQ ID NO: 15159 - DNA, 120 bp, Homo sapiens
acacgatgtgtttgtgggagacctgtctcatcatgctggctgcctcgaagaaggcctgtgggcgagcaggacataggaatgtctcaggccagcctccagggggctgctccccaggggctc

SEQ ID NO: 15160 - DNA, 120 bp, Homo sapiens
tgtcgccaccccaggccctgaacatcaatcctctggccttggctgtccagaggcactgccaagccttgttctctgggccaacctggcagggatgtgaggtttatttagaaaacctaacag

SEQ ID NO: 15161 - DNA, 120 bp, Homo sapiens
agccgatctctgctcaagatttgactgtgtcactctaatagtctgtagaatcctgggtgagtccttttactcctctgggctttcgttttccagactgtgtggtgagagccatggactgta

SEQ ID NO: 15162 - DNA, 120 bp, Homo sapiens
aaacgggagaggggaggggaggagttcagaggaagacacttgccagggaaatatccctgtggctggggtctaagactttgaggatcacttttatcttcttctcttcagaagttccttcgt

SEQ ID NO: 15163 - DNA, 120 bp, Homo sapiens
tctcgtgcctctcccaaggtgctcgccctgagggaagaagcagaaggctgggtgacctctctgtgccctgaagtgatggaccgtctgggaatgggtcctcaatgggaacatggactatca

SEQ ID NO: 15164 - DNA, 120 bp, Homo sapiens
gtccgagagtcactggggtgtgcctgacaccatatcgatgactgccactgtggccgaggctcgcctgagggcaacgtggggcttcctgctttgcacttcagctcagcagagaggccgtgc

SEQ ID NO: 15165 - DNA, 120 bp, Homo sapiens
attcgctggttttcttttccttcaaatccactagctttgtgaattaaatattgatgctgaggtgtatttgggagggaagcaaatcctaaggcagattcacatttctgagaccaaagaaag

SEQ ID NO: 15166 - DNA, 120 bp, Homo sapiens
tatcggtgtaactttaaaacactgagaatgccttggtaataggaactttttggcttcaataagaaaatcctgttttctctttaggacaggaactctgaaaatcatgtgctgcagaacgga

SEQ ID NO: 15167 - DNA, 120 bp, Homo sapiens
tcccggatcttgtttttctcctcatccttcttgtgtttattttccagttttttccgcttcagtttatttttttccttttcaacagaaacaacctgataagatacataaaagggacagggt

SEQ ID NO: 15168 - DNA, 120 bp, Homo sapiens
atacgcaatgtgcacggaaactcagaaagggaaatcactgctcactagacatgcatctacattcaggtctcctcacttccagactactacacatgctctgacacaaacagataacatact

SEQ ID NO: 15169 - DNA, 120 bp, Homo sapiens
ctacgtctcaaaaaacaaacaaaaaaaaaccaggaaatctcaagaaaaatctttctctacatggcccccctacacttggccccctcaaccaaaaaactgtaaccagtttttatgttcagc

SEQ ID NO: 15170 - DNA, 120 bp, Homo sapiens
cagcgaaccctatccatataatgagtaatgcacttagtcttcaccaaggcggcagcagcatcagggcagagcaggatcggcaggtcaccacagcgcctctggagccactgtgccacctct

SEQ ID NO: 15171 - DNA, 120 bp, Homo sapiens
gaacgaacgaacgagctaattacaaaaagacagaagaactgagattctactgctactgctatctagcattatgctagctatccgccacatttttatttctccttcctaccaaactatctg

SEQ ID NO: 15172 - DNA, 120 bp, Homo sapiens
caacgtaaggcattccaatcagatgtgatgttttcttttgtctccaaattactgcttggtatttaatggtgtatctcttttcctagttttcgggaagcttgttagcagcagttgctgctc

SEQ ID NO: 15173 - DNA, 120 bp, Homo sapiens
gcacgtgcaccccatctgggccgtggtgaaagaggggctcagaggcaagcacagctgaaagcaggtgggggcgaaatagcgtttagtagaggggagcagatgatgtggaaaggaaactag

SEQ ID NO: 15174 - DNA, 120 bp, Homo sapiens
cacgcactccctgaaaacttccttagttcctcaaggtaggcagaattcctcctttagtttcccagagtactttgcatgtacttttctactttcccttatcacaatccattctattttgct

SEQ ID NO: 15175 - DNA, 120 bp, Homo sapiens
gagcgaggactctgtctcaaaaaaaaaagaaaagaaacgaaaagaaaaagagatttctaatggtgaaaattaaggcacgacccagtaaatacacttctgttatgaacagcaagggcccca

SEQ ID NO: 15176 - DNA, 120 bp, Homo sapiens
actcgcagcaactttggctaagagccaagaggcaatcaggctgcctttttctacttttctccttcctgagaacacagaggtccaatgggccattttagagcgtgggcttccatggcccca

SEQ ID NO: 15177 - DNA, 120 bp, Homo sapiens
ccccgcaaccaatgtgaacttttgatatgtatcttttcatacctacgtatatctgtgtgtgtatatatataaacacacacatacatatgtatacattcggatgtctagagatttttgtca

SEQ ID NO: 15178 - DNA, 120 bp, Homo sapiens
gagcgagactccgtctcacacacacacacacacacacaaaaaaaatcagttttaaggtattagaggatgtcgttctttcttgtcttctgttaaatggtgctttgaatgtcatgtttcaaa

SEQ ID NO: 15179 - DNA, 120 bp, Homo sapiens
atgcgtagaggagcctagccaaaccaaacagcacgtttgaaactttgcttttcctttatggctgagattgtgaaagacagccacagatggtggctgagctctagctggaactgctgttag

SEQ ID NO: 15180 - DNA, 120 bp, Homo sapiens
agtcggcgcgagatgttctaagtgacgggagccaggaactcactgtggtgtttctagaagttaaattatgatgataggatcttcctgtaatactggttctgttccttgcctttagttata

SEQ ID NO: 15181 - DNA, 120 bp, Homo sapiens
ttacgcaaggcaaagcagccctctgttaagggtttcaggctaggtgtctccttgttagggtgtcattcctgttgtaattattggtttgtcttgtcttcttcctttttttttttttttttt

SEQ ID NO: 15182 - DNA, 120 bp, Homo sapiens
tttcgtagtaggacagctgctgcttcttttcaccatctgttaataataactggatgacatggaatatggaggtctttgatacatgtacaaataaacattgtgtaaacagataaggaaagt

SEQ ID NO: 15183 - DNA, 120 bp, Homo sapiens
atacgataggagagagaaaaggcctttatgaagcaggttttggtggtaattaatttgctactaaggcttccagttggtgatgtgagtgatttgaactcctgggctagggaaggctgtgga

SEQ ID NO: 15184 - DNA, 120 bp, Homo sapiens
gggcggtccgaagcaactatgttagctccagatcttaatggaggtaggaagggggctgatgtcgcatagccttttcacaagctgccaaacccaggcggatgttggaagttgcccttctga

SEQ ID NO: 15185 - DNA, 120 bp, Homo sapiens
aggcggagggcttgctttgctgcctgggaacgtggtggtggactctggctctgcacccttcctgcagagtgaatgcgctccaaattagaaaaacagaagtgtcctactttctattcccca

SEQ ID NO: 15186 - DNA, 120 bp, Homo sapiens
tgccgcagcacctcctgcttcagctgcccttccttgggttcttggcatggctgggaggagcaggtgccaaggcccagtggccagcactgctgggaacacaataccagtcaggaatttaat

SEQ ID NO: 15187 - DNA, 120 bp, Homo sapiens
tagcgatagtctggtgtggaagcatgataaagcatgcggtggaacagaccctctgaggagctaaagggaggaaagcaagcagtccatgcttaaacatgatctttattttacgttagctct

SEQ ID NO: 15188 - DNA, 120 bp, Homo sapiens
taacgctagtcagtcatttagaaagcctttcttggagtgttacttttagtaaatgtaaaagcatacttcaacttgtaattctctctaaatggaaaaattataaatgctgccacctgttga

SEQ ID NO: 15189 - DNA, 120 bp, Homo sapiens
tgccgacaggggatcttactggctggataatgaccctcagctaaaaatgctttaaaatgtgctggtctgactgtaccttatctgacattctgttcttggcggctgattggtgtgagaagt

SEQ ID NO: 15190 - DNA, 120 bp, Homo sapiens
gagcgagcagtgattgtgggagtcagaggcttctggtcttttttcagctccagttggaagagtgccataaaatcatgtgatgtttggactaaaagggcaagccaaagaatgtcccttgca

SEQ ID NO: 15191 - DNA, 120 bp, Homo sapiens
agtcgaagcagtgagcaaggaggcctctccaaggagctgtttcaatccactggatgtgccaggactcaccaggaataaaaggttagtctctaagccaggcccaatggggctattaacact

SEQ ID NO: 15192 - DNA, 120 bp, Homo sapiens
ggccggagtgagggtggttggtgattggctattcctttatgccaaagacttcatattcttcttcatatgtaattctcacaataatcctacaaactagttattaatttctgtattttatga

SEQ ID NO: 15193 - DNA, 120 bp, Homo sapiens
gggcggactgcagaaagatggctaagagagggctaaaggctaaaagatgctagggatgcgatgtcactccacagacatatttagtttgtattaatggctagtttaaaattaccataccta

SEQ ID NO: 15194 - DNA, 120 bp, Homo sapiens
aaacgaatttaaataaaaactcaaaaaaggaaagggctaaccgaaaaatgagccaaccaaattttaagttcaacaacaagcattctggaggattctggggttttaaattcggaggctcct

SEQ ID NO: 15195 - DNA, 120 bp, Homo sapiens
tgccgcagttgggggaggagcgatggacccctaggtctccggaggctacacgtgttccccgatcccgtttccagggggagcccttccttcctattgcgctggtcgtgctcctggcccgcg

SEQ ID NO: 15196 - DNA, 120 bp, Homo sapiens
caacgaaggccctagccagggcagtgtcagtgagactgggaaaaagtcagcctggggaagcattgcacaggtgaatgacagactgacaaccaaccaatggtggggtctgagatacaggag

SEQ ID NO: 15197 - DNA, 120 bp, Homo sapiens
gcccgaggccagtacggtgtctgtatcgggtggccccttctcactgggagagccctagactctggttccttgcttgttgatggaggcacagcaagaataatcaaacacctgagaaacttg

SEQ ID NO: 15198 - DNA, 120 bp, Homo sapiens
ttgcggcaaaaatcttagcagataatagtcttcatttttccctgatccttattcttattttagtttcttcctcttctgcagtctttccctctcttctcttcttttgtccttctctttctc

SEQ ID NO: 15199 - DNA, 120 bp, Homo sapiens
gtacgcatgtgacttagttctcagtctgctgcatgtggctcaaaaggtgtgaagactggtgtcactttccaatttaggcaattgcatctggcttacctaaaatttcacttgctgcttcaa

SEQ ID NO: 15200 - DNA, 120 bp, Homo sapiens
gcccgagagtataagataatagctcaccatttcttcccctccatctctcttactttacctctgtaggaaagcagatctttctcttcttcttccctgttgctgaagcctagatatattgct

SEQ ID NO: 15201 - DNA, 120 bp, Homo sapiens
ttccgaggttgtatagatctatggtaagagtgaatcttttatctgtgaaattgtgaagaaggaaaaagggaattcacgctagttgtgccattacatctcagacggcaaatgttatggcca

SEQ ID NO: 15202 - DNA, 120 bp, Homo sapiens
aaacgtgttccaattgatggcagttgggtttggtattatctgtggtttcagacatcgactgcaggtcttggactgtatcctctatggaaaagaggggactactgtactagcacctgcatt

SEQ ID NO: 15203 - DNA, 120 bp, Homo sapiens
ggccgtgtgtttttagtttctctgttcctctactttagacctgcctaacagtagttcggccatgccttcagagtgctttctttatttctcttacaacttttagccagacgatatgatttc

SEQ ID NO: 15204 - DNA, 120 bp, Homo sapiens
ttacgttctattttaattttatgaaactcttatttgaggcattgaatatcagataagcgcaagtcttgttcattcaataaatatctttgcaacaactgctacttgtaaaacaccagaaat

SEQ ID NO: 15205 - DNA, 120 bp, Homo sapiens
agacggttgaagcatgatcagaatgccataggggcaccaagaagagagaaattccgactggcatttgatatgggcctctaaggataaatagcatttgtattgaggtaggatggctgttgt

SEQ ID NO: 15206 - DNA, 120 bp, Homo sapiens
ggtcgttgtccacagtatgtgactcagcacccttggatgatgaagttggctaagatgttggcaggcagagaatcacccatggtgttgccagtggtagttaccgagaagccagctggggtg

SEQ ID NO: 15207 - DNA, 120 bp, Homo sapiens
aagcgtgaatttataactcaaatgtaataaattaataactggcagaactgcccattacacataggatatattccaattctttgccagcacctataatgatttactctctacctatttctt

SEQ ID NO: 15208 - DNA, 120 bp, Homo sapiens
atccgagggccagttttgactgcctttttaaaaacatttgcgagttctctggtattgaccaaataatacttgaattctaaaagtaggtgtataaacccttctgcagtctaatcccaggtt

SEQ ID NO: 15209 - DNA, 120 bp, Homo sapiens
taacgttgtcaacagccaaacttggtggttccaggcactgtagttgacactgaggctatagacatgagaatcggatgcagtgcttgcgctccagtagccccacctcctgttggagacaca

SEQ ID NO: 15210 - DNA, 120 bp, Homo sapiens
tgacgaaggctctctaggagtctaggacagagagggtcagaggcttctttaggctaaggcagagaaggaataggaattaaccagacaccttgagggtagaaatcgaggctaggagactgg

SEQ ID NO: 15211 - DNA, 120 bp, Homo sapiens
ccccgcaaggctaggggaattagaaaagcaggaataaaatcagaacgttcagcaggaaataagaaagccctcagctcaactgtggcttagactcagggcccttactgctctattttaaga

SEQ ID NO: 15212 - DNA, 120 bp, Homo sapiens
ctgcgcgtattcactctggcgctcctttgtgcaacaggagaccagaggactcccacggtcccactggctccttccacgtaatgtgccccgctggctctctcgcctcccccaacccggggg

SEQ ID NO: 15213 - DNA, 120 bp, Homo sapiens
ctgcgtcccctgcgccccagtccctctttgtgcagccagtagctgcagagctcttcgtcttgtattcatggcagatgcacagcgagtgactgacacgttccagggacggcgaatgggaaa

SEQ ID NO: 15214 - DNA, 120 bp, Homo sapiens
gagcgcgggcggccgggggagggtgtgtagtggcagacggccgctgggattatgaatgggggctggggggccggcgagtgtggggttcaaaccaggattttcggtctctggctttggata

SEQ ID NO: 15215 - DNA, 120 bp, Homo sapiens
gcacgcagggctgtgcgtaatccttcagctctggtggtaagggagatgcagtgagctcccggctgggagagagggttattttgcaaaactcccctggtaccgtgcccgcggaatattgca

SEQ ID NO: 15216 - DNA, 120 bp, Homo sapiens
agacgactggggacggcgtgctttgcaccctagaattgacaggtggtggcctcagcagttacaacctactacacagcatctcgtccgtgcgatacggtcacattgttattccccgcaccc

SEQ ID NO: 15217 - DNA, 120 bp, Homo sapiens
acccggctgaggagcgcagcgcggcagaccaagtggcaccggcgagctgtctctcttccggggggcgggggtggacagtagggagagggggtttaaagggccagaggacgagagaagagc

SEQ ID NO: 15218 - DNA, 120 bp, Homo sapiens
ggccgccgggcctggatggtcgtcttgacggcgtcattgtcgccccttgtaggaaatccgccaaccggcccctagcctttcgccctcatcttctctgcttcggcttccgcccttggacct

SEQ ID NO: 15219 - DNA, 120 bp, Homo sapiens
tgacggatgggcgcgcggtgcccagtgattgactgcaggcagcgggcgcggaagggaacctgaactacccaagagtttgctgggctgaggctccaggatgctcctgcgtgccctggtggc

SEQ ID NO: 15220 - DNA, 120 bp, Homo sapiens
ccccgaggtctgaccttttgcctcatttcctctgactcaattttgggttctgttcttggctttcagtttctgctctgagagttccttttctaaatttctgggtcctcttgtaggttagtt

SEQ ID NO: 15221 - DNA, 120 bp, Homo sapiens
ggacgactgtctcagcctcctatatgatattatgtatagaaatgcactggttgagaagctctattctaaagtctccatgaaaacacaaatagatagcactgggcaggggttgggagagag

SEQ ID NO: 15222 - DNA, 120 bp, Homo sapiens
cctcgccccttctgctatatgaggacatggtgaaaaagcactatttgtgaatgaggacgggatccctcagcagacaccggatctaccagtgctttgatcttggacgtgccagccttcaga

SEQ ID NO: 15223 - DNA, 120 bp, Homo sapiens
aggcgaccccctcattgctgacttcagcttttgtcagctttcagtagcactgtacctttccttgccctgcaggcctagggatggtaacaactcctcattgtgactagtccttgggtgctt

SEQ ID NO: 15224 - DNA, 120 bp, Homo sapiens
ctccgcctgccagacctgcttcctgtcctcacttccacagatgcagatcctgagagtactccctaataattttctggaatgcttacctcagtttcataatctacttcccagaaagagcaa

SEQ ID NO: 15225 - DNA, 120 bp, Homo sapiens
gcacgtgtgctggctgattgttataaagattaattgtcttctcttgtctataattgccaatacgacccacaatgggcatagttttgcttttgtgccttctcagttccctttcctgggatc

SEQ ID NO: 15226 - DNA, 120 bp, Homo sapiens
ttacgcaaggcacttacacgtgggagtgccagccagtgtgatgaaagagagactagagctgaatatctcatcctatgtctcattatttgaggaacttactaatcctgtattaagaatttg

SEQ ID NO: 15227 - DNA, 120 bp, Homo sapiens
tgtcggatatgagagattaaaactgctgctgactacaccaccaggtccatgtcaattaactcatttgcagatgggaggtgagagtgcaaaaataatattaacattaatattaagtaccat

SEQ ID NO: 15228 - DNA, 120 bp, Homo sapiens
attcgacgattcagtaaaaaagtaattttgatagttgagttcctttatcccttaccacgtctatttcacatatatgattattattattttggtagagatgaggtctttttatgttgttca

SEQ ID NO: 15229 - DNA, 120 bp, Homo sapiens
ttacgggcatgagccacgtgcctggctcacatatttgatttggtctaggctatcttaacaaaatacaaaatgctttgtaaagtctacattttattattgcatttgctatttttagctctt

SEQ ID NO: 15230 - DNA, 120 bp, Homo sapiens
ctgcgggggagattccagaagttccttttagagttgttgtttcactgtatcagtgcatcggtgactgagaaggaagtatttgcttttgtgtggcagcgcagtaaattcgcagaacacagt

SEQ ID NO: 15231 - DNA, 120 bp, Homo sapiens
tgtcggtggtggatatggaagatagcattctatattaacttttgagaaagagaaagttaggcaagaagagattgctgaaatagattgtctgtgattgctgaggttgaaagttttttattc

SEQ ID NO: 15232 - DNA, 120 bp, Homo sapiens
cttcgtgtcatagatgaaaaatggggctcagaaaagctaagcaactttgcttcaaattacctttctaatgagtagaagaagcagagtcaaagtcagtgactcaaaaaactatcttctaaa

SEQ ID NO: 15233 - DNA, 120 bp, Homo sapiens
ccacggatttcttgcatccttggccagccagtagatggaaatcagatgaggtggcattcactgggtggagacagaaagacttcttggcagtgaaggctggtgggtgggcttgtcatagaa

SEQ ID NO: 15234 - DNA, 120 bp, Homo sapiens
gaccggtctcattactgagctaatggacattatgctctgaggtacttttccctctgccaaatatatcagaattttaaaaacggaagcctgatattgccatgctgcaaatgtttacaagga

SEQ ID NO: 15235 - DNA, 120 bp, Homo sapiens
catcgctgagtgttttaggtgtcaagtttaatttcagttggcctggcctattctcttaaggaaggctccagagcagtcagccaggtcacagggagaattccttctgctcttgctcttcag

SEQ ID NO: 15236 - DNA, 120 bp, Homo sapiens
gcacgcttcccaagaagggattgctcctgtcaccacagcccaaaggagttagttgtgatgaaagttgtcatgcttcgctattccattattttaggtatgtttgggggttttgttggtgat

SEQ ID NO: 15237 - DNA, 120 bp, Homo sapiens
cgcaggttcctacagaccccgaccctgttcccttggccacctggtccccggtagctgcatccctgggcggcgcacgcagtgaagcgtcgcgctctggcgccggtgccgcaccgaggggta

SEQ ID NO: 15238 - DNA, 120 bp, Homo sapiens
ctacgaccccttgcgcgtgcccgcccccacctccgcacctcgcgccagcccgcgcagcgtgaccggcagccgccgcagacccggctcggggaggcgcggagcgcggcgcgctgaaccgga

SEQ ID NO: 15239 - DNA, 120 bp, Homo sapiens
aggcgggccggctgctgccttgcgttcgccacgctgtcctccctcctccgctccctgcgccccacccctggcggccgcgctgcctggcagcccgggaagccgcggcacagctgctcggcg

SEQ ID NO: 15240 - DNA, 120 bp, Homo sapiens
ctccggctcgggggctggaaccgaagcgggggcggcgggagcgcggagaccacagcccccggggagaggcggagggggtccctggcctgggcggagaggctgagctgagtgcgcgtgaga

SEQ ID NO: 15241 - DNA, 120 bp, Homo sapiens
caccgctgctcggcgcggactctgccagccccagcttcagccccggctcaggtcgccgcagcccgggagcctccccgcttgcgccccaaggcacgcgcggcacagccatgaacaccaacg

SEQ ID NO: 15242 - DNA, 120 bp, Homo sapiens
gcccggagggaaatccctcagctttttgaggtagggctagagctggccgacgggcggtagcatccggggactgcatctcaggggttcgggttgaggcagccgcgccccgtcccaccttcc

SEQ ID NO: 15243 - DNA, 120 bp, Homo sapiens
acacggggcatgtaatgaaggggcttgtagaagcgcactcgcccgctcccccgagggtagtcgcctttcccgcgggttgccagggtccttgtcagaaggctgggcttagaagcctgcatc

SEQ ID NO: 15244 - DNA, 120 bp, Homo sapiens
catcgcgcccctcggatgtggacacccagggtgggctgcagaccgcggccgggccgcactctctgggggcgagggccaggtcaggtggctgcactgtcgcccagcagcgagtaaagactc

SEQ ID NO: 15245 - DNA, 120 bp, Homo sapiens
actcgaaactgagggagccagagccctagtcactctgctggtcgagggtcggaacccctgggggaaagaggaaatgtggacgaaggcagcccttcctggagacagcttggaagagaggga

SEQ ID NO: 15246 - DNA, 120 bp, Homo sapiens
ccccggtgacaggcccccagccttgctctgcgctttcgctgaatgaactcctgagcacgtttttcccgttgcctaggaagggttgggccgcaggtttcgccagtgctcgacaacccacct

SEQ ID NO: 15247 - DNA, 120 bp, Homo sapiens
tagcgggtcggggagggagctgcgaggggggcggactcctgttgctcagtcttcagaccgcagcacagcatcatctgcaccgggacccgggaatggggggacacttggagactgagagag

SEQ ID NO: 15248 - DNA, 120 bp, Homo sapiens
tcccgccactgtttttttctctctcaactctctttctgcagaatctcagctgccccacagctcccatatcgcctcctatgaatggcatccaattctctttctctcaccttgacctttctc

SEQ ID NO: 15249 - DNA, 120 bp, Homo sapiens
ctccggggagccaggcagaagtgttcttgccctcacactccacactgatcatcaatccacgggggcaccttgggagtccaaacctttgtctttattcccactgcagtcaccaaacgcttt

SEQ ID NO: 15250 - DNA, 120 bp, Homo sapiens
ccacgagtacccttagcacagaagaaagccccaaatcctttgctttcctgcagtggtcctgttactgccataacatcccctccccaacgtcactggcaccagcttcccccagttctctga

SEQ ID NO: 15251 - DNA, 120 bp, Homo sapiens
cccggtgctcatagcagtatcatcatgtaagcacaggaaaggaatggctgctctattaggagtcactgaaggctgagaccagcagcagcagcagctccagaatgtttacagaagaggggc

SEQ ID NO: 15252 - DNA, 120 bp, Homo sapiens
ccccgtcttggcagacacatcagtgagacacacaggttggtaactggattcagtccctactcagctccttagccaggaatatttgtgaagtgcacaactgtagagctgtacctggcagcc

SEQ ID NO: 15253 - DNA, 120 bp, Homo sapiens
agccgtgcctcagaggcaggcctgtggcttcaggccccaggaaagggctgccttcactcagtggcaagggtccagccctggattttgaatttcccagcttttaagagttaactctcatgc

SEQ ID NO: 15254 - DNA, 120 bp, Homo sapiens
ggccggtttccttggctcttccatctatttgtgtttggtacttggttgaatgtgtgcttttccagatgatgtcaccatgtctttaaatagtcctcaaatactctttgctaaaggcttttc

SEQ ID NO: 15255 - DNA, 120 bp, Homo sapiens
acacgtttccaggaggcacagagctaggctaggtcactctagaaaccaacctggtagctgtcttctgcattgtcttggggaaattatagcagacagccaaaatagaaagggtaaaagtcc

SEQ ID NO: 15256 - DNA, 120 bp, Homo sapiens
tttcgaatattgtttcaaagtaagaagtgctgcatatgcagttaactgttgctgtgtcactgcctagatcttaatggcttaaaacaacatccatttattattcctcttggttactttgga

SEQ ID NO: 15257 - DNA, 120 bp, Homo sapiens
tcccgccacactcccatgtcaatctttggctccagccacacctgcatccttattatcgcttgagcttgtcgcactttgccagccctttcacttgaaatgtcttctcccctattaatcatg

SEQ ID NO: 15258 - DNA, 120 bp, Homo sapiens
ctccgctgtaatcaccatccttcctcctctgcgctcctcctcccttgtgtctacatcattcatttgggtactacttaatgactagaacaacaaatatttgttggaataatgaattcttta

SEQ ID NO: 15259 - DNA, 120 bp, Homo sapiens
ggacggacccagtccaccctttgaataatgtgtgactatatattcttgttcccgaagaaagcagctcagtagctgtttataaagaaatacttttcaaaaaacaaagaagggattcccaca

SEQ ID NO: 15260 - DNA, 120 bp, Homo sapiens
tggcggcagagcgagactccatctcaaaaaaaaaaaaaagaagaaggtggggatgagtaatccttccacaggcatggggagaagcactatggaaggaaagctgggatatttaagaaagta

SEQ ID NO: 15261 - DNA, 120 bp, Homo sapiens
actcgactagttcaaagcaggagtggtcaagagccaaggtcccctaattgactttcttgtcatgtacagggttgcctctgtgaagctcacagatagtccatcattcattcactgatatac

SEQ ID NO: 15262 - DNA, 120 bp, Homo sapiens
acacgggcactgataaataaggcatggtttctgctatcaagacattcccagtcccatttaaagtttttccatataaccttcagctgaccctggcatatttccacatattcaccaaataac

SEQ ID NO: 15263 - DNA, 120 bp, Homo sapiens
tttcggtccaagagtgtcagttcccagcaacagcctgctgaagcttggcacagtgatgcagctcttcccagatggagaaggtttcaactgacccatgggcccagaatggttgaggatcat

SEQ ID NO: 15264 - DNA, 120 bp, Homo sapiens
gcacggtcagttcatgatctgatggcataataatttttctcagaaaagagtcattcggtcacaaaaaccttaacccaacatagggacctattttcatttagggagaaagaaatatttcaa

SEQ ID NO: 15265 - DNA, 120 bp, Homo sapiens
tgtcgtcatatagaccataaaaaggtggtcatataattttcacagatccccttatagttgctgaaaacaactcctttttcccaaaaaagagagagagggagagaggaagggaagaaggca

SEQ ID NO: 15266 - DNA, 120 bp, Homo sapiens
agacgtaggctctgccactgactctggactgtgagattattcactagagctaagattcaatgactttgaatttctataattttacatcgttcacaattggctcttggctcctttgcctca

SEQ ID NO: 15267 - DNA, 120 bp, Homo sapiens
aaacgtgtgatcacacaatgagatcaaagcaagcacagaatgtgtggcaagggccctttcctccagtgtaaggggaaaggaaaggatccaggaaggtggcctgaggaggactcggctgag

SEQ ID NO: 15268 - DNA, 120 bp, Homo sapiens
aagcgggggtgcacgccacaccagagaagccccaagtggagaaggtcaggaaaaccaagtaactccacgaggctgtgacataaagtgccaaggaaaagagggttaagagatggagatgga

SEQ ID NO: 15269 - DNA, 120 bp, Homo sapiens
actcgaactggagaagggagagtgggatctcttgctgttcacaggataagagacatcatcaataaataacaaacttgtctctgaggaagctacattactgattccttgggggaaaaccat

SEQ ID NO: 15270 - DNA, 120 bp, Homo sapiens
taacgcccgctcacaccagccctagccagagggcaattgttcattcagttccagcaaccctggccacctggactaaagtgctctagagcattaaataaacttgaaaagcagcctaggcca

SEQ ID NO: 15271 - DNA, 120 bp, Homo sapiens
gctcgaagccaggagacatggggggcatgtgacctactgagactccagccagagcaattaagggagtgcttgcaccacccttcccctaaccacaggcaacacagctcgtgacccctttct

SEQ ID NO: 15272 - DNA, 120 bp, Homo sapiens
tttcgccatgagcaagtcactttgcctatctgtactttatctataaaatgaaacacataatacctgcctactacctctcagggttattgtgaagttcaaaagagatcacatctgtgaagt

SEQ ID NO: 15273 - DNA, 120 bp, Homo sapiens
caccgagcaagatatgaaacccctctgctttgatttgcttatttatagaatgagggttacagtaaccctctgtataaggttgtagggagtactaatgataatgaatagagtatctagcat

SEQ ID NO: 15274 - DNA, 120 bp, Homo sapiens
gcacgaccagagggacaataagagatttcatcaggatactcaaaagggcacacaatttaaaacatgaattgtttatttcttgaatttcccatttagtatgttcagccgaaggaaagcgaa

SEQ ID NO: 15275 - DNA, 120 bp, Homo sapiens
ctccgagtgcagtgtgaaatttgaatttctagtaaattccctgataggtgccagggaactataaagttacaaggatggttgtcaaactttagcacacaccagaatcctctagtggtttag

SEQ ID NO: 15276 - DNA, 120 bp, Homo sapiens
tgacgtactaaatctgaaactctaagggcagagcccagaaatctattatttaaaacaaacaactttcaggcgattatgatgaatgataaatactgagaaccactgccatatagctacaaa

SEQ ID NO: 15277 - DNA, 120 bp, Homo sapiens
tttcgagattctttctccctcactggcccatgacctctaggagagcagcgactttgcctgattccttgctgaatcactggtgtctaggacaatgccttgcacgtagtaggcaatcaatca

SEQ ID NO: 15278 - DNA, 120 bp, Homo sapiens
ccacgagggcaagaggccaacaggtggatgtgagctttcggcttatgagagcagaggttagctgcggagaggcttccagtaagggagtgacatgatctgacagatgttcagcagattcca

SEQ ID NO: 15279 - DNA, 120 bp, Homo sapiens
ccacgatagtaacaaattcatcagggatgcagcaaacatggtgtaccatggcatagcctttccaaagtctagaattaacatgtgaccattgactggagcattgtgacagaatatttctca

SEQ ID NO: 15280 - DNA, 120 bp, Homo sapiens
taacgacgaaaagaccaagaagcagctgtcagggatgctgtcatagcttcagccatcactgcaggaggagtcatcacaaagcagaatgtggagaatggagtgggacagatgtcttgtaac

SEQ ID NO: 15281 - DNA, 120 bp, Homo sapiens
ttgcggcctgggtggccactctgtaggggatccctggatgattaaacagggagaaggaaatgtggaagagcgagttctgaggttccaacagctctcctggggctctatactgaagactcc

SEQ ID NO: 15282 - DNA, 120 bp, Homo sapiens
ttgcgaggtacagctgggggcttgaggtttctcacctttcccccacagctgcagaaactagaatgccactagtattgtctgagactcttcctgactgtcccccgactcaagaagggtgag

SEQ ID NO: 15283 - DNA, 120 bp, Homo sapiens
agacgcagggactctggtttcctcacagccactggcaaccctaacttcctgtttctctttgtatttctgcctcagatattctcccaggagtacatcaacctcctgctgtccatgtatttc

SEQ ID NO: 15284 - DNA, 120 bp, Homo sapiens
cttcgtgctgggaatcctggccctgtcccacaccatcaggtcagaaggcatctctctgcaacatttgaagcagctttctcgggaaccagtacagggtcttggatgagaacatgacttttg

SEQ ID NO: 15285 - DNA, 120 bp, Homo sapiens
tgccgggtgttgtggcctagctgtgtgctaagtgccatgttgggctcctcacacatgatcgtgtttcgtaaggagccagaggcagcatagtgaaaagttaggagcgtgggctctggcatt

SEQ ID NO: 15286 - DNA, 120 bp, Homo sapiens
ttccgggccctggagcagtgagggaagccagttatatgggaggcaggtgagtcaaaggagggtcaggctgggtgccagagaggagggccactgcttctgtgagggggcctctggggcctt

SEQ ID NO: 15287 - DNA, 120 bp, Homo sapiens
ttccgtccatcacccagtgggcatatggggacaccaccgaggcccagagacctcttgcccagtctccccactctcacctcagaggtccttgcagctaggggcagtggcctctgctgagct

SEQ ID NO: 15288 - DNA, 120 bp, Homo sapiens
ccacgcctccaccctgggcagggcccaggcctgcattcatgggtgcaagaggagagagaggcctgagccctggatgggtgtggttgtgtgtccttggggctgatgcaggatttttttttt

SEQ ID NO: 15289 - DNA, 120 bp, Homo sapiens
tgccgggattacaggcgtgagccaccgcacctggcctttctgcaggattctgaattgtgtatgtgtggagagtaaggggactgtgtgctctagaagggctgtggtgggaggtctctggcc

SEQ ID NO: 15290 - DNA, 120 bp, Homo sapiens
ctgcgggcatgtgtgttggcatcttggagtcccaggtgttttggcgtgagtaatactgtatagatgtaagtgtgtgtagtgtttgcaatgttgtagtgtgggtgcatgtgtctgtgtgtc

SEQ ID NO: 15291 - DNA, 120 bp, Homo sapiens
tttcggtagtgtgcgcggaggtcagtgtgttggttgtatattatggtgtactgttgtgcgttgtgcatttggcaggttgtgtctattggtgtgtggctgttgggtttgtctgttgtgtca

SEQ ID NO: 15292 - DNA, 120 bp, Homo sapiens
agtcgtacatataaatgccacgttgggcgtgtgggtgtgtgcatttgtatattgctctgtgggtgtgcgaagcagtgtgtttgtgtaaccctgcaggtttggcctatgctgagtaaccta

SEQ ID NO: 15293 - DNA, 120 bp, Homo sapiens
catcggcaggggacttgggaggggcccagactggtaggctccagcctcccgtccattgttctggggcctctctggaaaacaggatgggaggtgaaaggtggacacaggcctggaccccca

SEQ ID NO: 15294 - DNA, 120 bp, Homo sapiens
tgccgggtttgggggatggaaaaatgacaccccagaatggaaacaaaacggtctattgtggtttccatttctgaatgcttaccatgtgctaagtgcagaagtgtcataactctgcaggtt

SEQ ID NO: 15295 - DNA, 120 bp, Homo sapiens
gtacgctgtgtgaccttgagcaagttgcttaccttctctgggccaggccctagttcagctctgggacacagcagtgaccaaaggagccgtggttcctgctctcttagagcccatagcctg

SEQ ID NO: 15296 - DNA, 120 bp, Homo sapiens
aggcgacatttgacctgagacttgaagaatgaggagtctggcaaagacctggggctgatcagtgttctaggaacaagtaacagcaagggcaagggccctgaggcaggacagagctattaa

SEQ ID NO: 15297 - DNA, 120 bp, Homo sapiens
ctccgtgagatgtgctggttctggtggtagtgggggggcctgtagtctcctgttacaagggttgggggtgtggggacagccagagccaaaggtctctcccccacagctccggcagtccca

SEQ ID NO: 15298 - DNA, 120 bp, Homo sapiens
aggcgccggcctggcggctggaagattgcactgtgggcacatctggggagcagctgccgagccagggccagagtgggtcacgtggcacagggcaggaccgtcctggagcctacaaggcca

SEQ ID NO: 15299 - DNA, 120 bp, Homo sapiens
ggacgagaacagtgcgtcaacgaggaggaactgtgcactgtagacgtccaggcacacggccccctgcagccccacacagcccctgcctcaggacagagtgcctgggttcaatgccacctc

SEQ ID NO: 15300 - DNA, 120 bp, Homo sapiens
attcgttgagcacttcccacatgccaggtgctgcatgaggctctgcgtgacagcagggaacaggacctccgtggtcccttcccttctaagcacacaattaatgctttagaaccaggcctg

SEQ ID NO: 15301 - DNA, 120 bp, Homo sapiens
aggcgtagggagtttagagagttttggtgtgtgtggtaaggggatgaggagtctggctaattaattgatgatgtctctctcttttgaagctggtctcactgattggtttggttttcctgg

SEQ ID NO: 15302 - DNA, 120 bp, Homo sapiens
ccccgaacttctgtgggaaaacggaacctgctgataactcagtgaattaattgctgcggggtagtgcggtggagcggagcagggagggaccataatatcaccctccactggtgagcacag

SEQ ID NO: 15303 - DNA, 120 bp, Homo sapiens
cttcggtttccccacctgtggcatgtccaggactctgcagtcagactgcctgctctcagcaggaagcggttgcattacaacactgtaccctccttataataacacaactatggttatgac

SEQ ID NO: 15304 - DNA, 120 bp, Homo sapiens
aggcgtcgtgtggagcctcagtttcctttgtataaagaaaccaaagagctcctttctttagagttgtgaaaaagactacagaagttgatcaagccgggtgacagagtaagaccctgtatc

SEQ ID NO: 15305 - DNA, 120 bp, Homo sapiens
taccgaatactttgaactaaaggaggctgaaaggcctcagaaacaagatctctgactttctcctgccttgctgtctcccatttctctttctcccctgaagcaagtaacagaaactagcat

SEQ ID NO: 15306 - DNA, 120 bp, Homo sapiens
ccacgtagctttggtgaagctattagatgagttttctaagatgggacatgacctatttgtaagccaggctgacctatggagttgtaggaaggcccagacaggctgccttccctagctttg

SEQ ID NO: 15307 - DNA, 120 bp, Homo sapiens
aagcgctggggataaagcagtgactaaatagaatgaaaattcgtacctgtatgagtttataatcaaatgggaagagacaggcaataaacatgtcagacggtgatgcattaagaaagaata

SEQ ID NO: 15308 - DNA, 120 bp, Homo sapiens
acacgcttgaggtgctccaggaacaggaaaaatgccagtgtggctgaagtccagtgaatgtgaggagactggtggtgatgagatctggaggtagccaagggcccgattgtgtggggcctg

SEQ ID NO: 15309 - DNA, 120 bp, Homo sapiens
tagcgtccgtctggctgctgggtggagatctccaggggtctggtgagataatcaggaaaatatgacagtggcttagccacaatggtgccagggaagttggtgagaagcagtcagtttcag

SEQ ID NO: 15310 - DNA, 120 bp, Homo sapiens
aggcgagagaagaggcccttggggatttctttccagtttgataactatgaggacctatatgaagaaagagataaagcaactatttctgctgctctcatggaagcaaaatcatttgctcac

SEQ ID NO: 15311 - DNA, 120 bp, Homo sapiens
taccgccaggcatatgccaggccacagagtagacaggctccagtgggagcgggggtcagggtagcttgctttatattaggagagaagaagcatcagagctgccgttgtccagggcctact

SEQ ID NO: 15312 - DNA, 120 bp, Homo sapiens
tatcgactccatggttccttcaccacatggcagccagaggggtcagcaaagtcagtttcctgtctgctcaaaaccctccactgccttcccatctcacccagaggaagaaccaaaatgtct

SEQ ID NO: 15313 - DNA, 120 bp, Homo sapiens
tcccgtgctcttcctcaaacatgccaggcacaccattcccaccctttggcctctgcacttgttccttatgtctggaatgttttttccatagactgttacatggtttcctccctcagacag

SEQ ID NO: 15314 - DNA, 120 bp, Homo sapiens
gaccggaagccagtccagaatggcccacaggtaccccccaacatgccttggaaccacagccctgtcccccagggtgtggacaaagagactgaatctcaggaaaggtatagctaggttgga

SEQ ID NO: 15315 - DNA, 120 bp, Homo sapiens
caccgtgggtgacaggcacgtacaaacctgtaagtgaggtccacagagaccagagagctgagagcagaaatgaaaacaggataggtcccaaagggtggcagcttcaatccgtaaacacca

SEQ ID NO: 15316 - DNA, 120 bp, Homo sapiens
aggcgtggggttcaggtgtaggtctggggacccagctgagcccaggggaaggatgggacctccccagtctcctccgtcagtgatgattactctaaggtgagctgagcagaagcaccacca

SEQ ID NO: 15317 - DNA, 120 bp, Homo sapiens
ttccggatggtctgtctcctcccaaacccactccacccatatgagccctcggggatccaaaccctattaagaagggaccatccatttcccatctttgaggggcttagtgaacacggctac

SEQ ID NO: 15318 - DNA, 120 bp, Homo sapiens
ccacggttggttgcatacaaagaaaaataccagggatttccgttggtgttcaccacatgcagctgccaagggaaggctgggccttctgaaggcctgttgtgaatagggcaagacaagtga

SEQ ID NO: 15319 - DNA, 120 bp, Homo sapiens
aggcgagaaggctggcctctaaatttactggctctggggacctccctagattttagagactctatataatttttacctgctttctaccaaggtcctccattaaagctttttcttcttcta

SEQ ID NO: 15320 - DNA, 120 bp, Homo sapiens
ttccgcacagaaaaaaggcaatttgaaagttccacatggtcaggttcaagaaacgtgagcttactcctgctttgtggtggctctatttggctatggtcctgtcaattaagcaccacgggc

SEQ ID NO: 15321 - DNA, 120 bp, Homo sapiens
ctccgggccctttttttttcccctcaagggagcagtggagtgtaagggaaaagtaagctttcttggcagacaaaagactgagttctaatctcagcaatgccatttattaacttactgtgt

SEQ ID NO: 15322 - DNA, 120 bp, Homo sapiens
acacgttccaagagctatgccataggagcccaaatagcctctgggtccccaacccccttctgatgtcaataaaaagatcactgctatttattcaatgttttgtatatgccaggccctcat

SEQ ID NO: 15323 - DNA, 120 bp, Homo sapiens
catcgtcagaggttcaatgagataatgtgtgaacacaaggaagcactagacaaactttagttaatgatcctatgctattattttatgactccagcctgggtttcaccacatttgcaaaga

SEQ ID NO: 15324 - DNA, 120 bp, Homo sapiens
aaccgcaagataccatctcacacccaccagctccataaaaatttaagtctgaccatatcaagtattaacaaagaggtaaagtaatggaaaacccatatgctgttggtggctgtgtaaatt

SEQ ID NO: 15325 - DNA, 120 bp, Homo sapiens
atacgaaaatgaacaaattatgctatgcaagtaacatggatggatctcaaccttgaatgaaaaaaggaaactgcagatgataaacacagcataatacctaaatgaagtttaaaagaatgc

SEQ ID NO: 15326 - DNA, 120 bp, Homo sapiens
ggccggagtagggaatctgtgtcaccttgttctgcaggagatggaggaagtgactccctcagggaggggtgggaatcccatcttggaaaacatcctcaaaccacctgtattgtttctgcc

SEQ ID NO: 15327 - DNA, 120 bp, Homo sapiens
caacgcacacacccaatcttccgtttacacaggcatagctgtactttgcattcctcctaggatttagttcaaagctagcctacaggaactggtcgataaagagttactgattgattacta

SEQ ID NO: 15328 - DNA, 120 bp, Homo sapiens
actcgctgtgcatctttgaacaactttcttaacttctctataggaataataagagaacctacctgagtggtactattttgagaattcaatgaactatctcatataaaacacttaagtgca

SEQ ID NO: 15329 - DNA, 120 bp, Homo sapiens
cctcgatagttcagaactcccgcactgaagtccagcgtaggcaggtaaggacaacctggagccaggcattaatactcacttctacttcccatctgagtcatattcagagtctggccttgc

SEQ ID NO: 15330 - DNA, 120 bp, Homo sapiens
cctcgtttagtctttctcccaacaaccctctgaaatgagtattacttccactttatagatcttcaggtttacagagggaagtaacttgtccaaattcatgaagccagttaagtgataaga

SEQ ID NO: 15331 - DNA, 120 bp, Homo sapiens
aggcgggtgttatctttcttcaacatatgaggcaacaggcagagcttgggcaagaggcttgaggccacagagcaaacaaggagtgagtggggccatcctggaaaaactccagagttccca

SEQ ID NO: 15332 - DNA, 120 bp, Homo sapiens
aaacgcctagtcaacaacactggccaaacctctactgtgtacaaggtatgacttgggccttgtagaggaggtaggggacaaggttgtgagccaaggccccaagcttcaggtaccttaaaa

SEQ ID NO: 15333 - DNA, 120 bp, Homo sapiens
cttcgtattcatgcctttgtgtgtttccctcccacactgaaccacagttgttctgtgtgactaatgacaaattacagcgatggaatgtttctttccctcccttcttctctctctctctct

SEQ ID NO: 15334 - DNA, 120 bp, Homo sapiens
ttgcgtattgtcttgagtgtttggttgaacctgtatatcctgttggatcaatcttgatattgcttccttttcatttctctcgatgaaggccgtcttactgaatcttgtctgctggggaag

SEQ ID NO: 15335 - DNA, 120 bp, Homo sapiens
ccacgtggctgggctcctatttctgcagaggcaggctgagttacagcttggtggtgtggatccaggtaggaattggtcaacattctgaatcctgagctgccatctgcctcgtagcctgct

SEQ ID NO: 15336 - DNA, 120 bp, Homo sapiens
atacgggacaaacccaggcctatggaaagagcaggaaggttaaagtgtgtggtactttgggcaatgacgaaggcgtaaccagggagctgacatgtttgctccaaagccaagaattccagg

SEQ ID NO: 15337 - DNA, 120 bp, Homo sapiens
cctcgtaaatgaataagagtctgggctcaggccaaaccatggctctatgtgctgaaagtatcagcttcctgaaacagcttcacaaatgctgacatttcactcagaccaggagggtcaggg

SEQ ID NO: 15338 - DNA, 120 bp, Homo sapiens
gaacgcccacagacctctgcttactagcttggctggaaggacagggtctgctgtaaggacagcaaccttacctagggcttttccagaggcctgagaggtcctgccaaggccctgggctca

SEQ ID NO: 15339 - DNA, 120 bp, Homo sapiens
gggcgagagaaaacaacgtgctaatgcagccttgagtggctctcaaacaggagcagagggaaggctgtgaggggagttggctgctctctttggagtcagaaaggttgttgctcaactctt

SEQ ID NO: 15340 - DNA, 120 bp, Homo sapiens
ctccgaacaggtccttttaaagcctcttggctgaactgatttcctctccagagccaaggaagcagtgcctgggtgaagttaaccccttcacccccaacacattcttccagagctaggtga

SEQ ID NO: 15341 - DNA, 120 bp, Homo sapiens
agccgtgaactctggctggagaaaccttccctctggccttgttaaatccaacaggcataattgcatcctgctgaccttaattcccctggcgggtttaattggtcttggcattgccccact

SEQ ID NO: 15342 - DNA, 120 bp, Homo sapiens
gggcggggaagccccttcttgagggtgggcaggggctctggcagcccctaggtgggtggaggaagtttccccgtgccccacccctgtgcctccaagggagtgctgagaagcttggggact

SEQ ID NO: 15343 - DNA, 120 bp, Homo sapiens
tcccgtagattcggaaccaggccagactctcatcccagtgggaggcactgcaggggagctggcgggaacagatgaaccctctacctggggtgtccacgacattatcaggcccccacagtg

SEQ ID NO: 15344 - DNA, 120 bp, Homo sapiens
gctcgcagccatgctgtgagagggaggcaatggggcagagcagttatgagcagagccttgggttagatgggtccaatcccaactctatgactttgccctgtgactcagttttcctgtcac

SEQ ID NO: 15345 - DNA, 120 bp, Homo sapiens
actcgctatgctcacactcactgttgtaatgctttatctacctcctgggaggcagatgctctccttacggatgaggaaacaggtgaagacattgttccaagctcacagttactggtcgca

SEQ ID NO: 15346 - DNA, 120 bp, Homo sapiens
cagcgtcccagatacccctcccttttctcgcttgttccaacatcattctccccccagtcgggccatgggaagaatgccgtgtcctctgaactggggccaagagtgacaggtggcggcagt

SEQ ID NO: 15347 - DNA, 120 bp, Homo sapiens
ctccgtccccgcctccactgcccacacccctgcctccgcctctgcccacccggcccaatcccttacaactgcccaggactgctcctgagcagccgctgggagacagacggcaaccaggtt

SEQ ID NO: 15348 - DNA, 120 bp, Homo sapiens
cctcggcttcctgtctcactgcagccagacgagaggggaaattggacagcctgacacactccactcttgtttctgcagctagaaagacttgagttagacaagcagcagcacacgcctccc

SEQ ID NO: 15349 - DNA, 120 bp, Homo sapiens
tggcgacagaaaatggagcagttgagctgggaattcagaacccatcaacaggtgccaagctggggcaggagatggagggaggagcttgggaaggggggttttgaatccaggactgggcag

SEQ ID NO: 15350 - DNA, 120 bp, Homo sapiens
atgcgctgaggagcacaggtgcctgtgtgtgggagcagtgaccaaggaagctgggcatgtgcaatggggcaggactgtggagtggccttcattgatgattagacaagcagcccgtggctt

SEQ ID NO: 15351 - DNA, 120 bp, Homo sapiens
gtgcggcagggctgggggtggggtgagatggggtcaggagaacccagagtgtcctgacacccccctgcctccaggctgaagtgccctgggagacccgccagcctgcctggtgagcggcac

SEQ ID NO: 15352 - DNA, 120 bp, Homo sapiens
caccgtgccacccagacagggtgggaggacctggcggctgggcggcagccaggagccctgcctccgcccctagcagccgcagagacctccgccccgccccgaaatcgcatcctagagtga

SEQ ID NO: 15353 - DNA, 120 bp, Homo sapiens
ggccgtttgatttatcaccagcccggcttccctgccgcctcttgctatttataaagaggtttccattcctgatgaccgcctgccggcctgccagccttcagggcgagcggttccccacac

SEQ ID NO: 15354 - DNA, 120 bp, Homo sapiens
tgccgctaggtggcgccctctccccaccaaacagcacggtccccggtcccgccccgccatgggtggtctggccagattgcggtgttattaggatggagggtgggcaggtcccaccaccta

SEQ ID NO: 15355 - DNA, 120 bp, Homo sapiens
ttccgctttatagctgctgtgtttgattgtttttggtggaaatgcagatagcttgggatggagtccttgtgtcttataatgcagagggtccaaaaagtccaagctcccatcccgtttgtt

SEQ ID NO: 15356 - DNA, 120 bp, Homo sapiens
gcccgccacctccggcccccttccctcaccgcatggtggagctgaggaccgggaatgtcagcagtgaattcagtatgaactccaaggaggcgctcggagggtgagatctgggaccccagc

SEQ ID NO: 15357 - DNA, 120 bp, Homo sapiens
caccgggctcctgtggcttcacatttcccctgtgcaaggcccagacacacaccccgctgagacatggccacatggacatgttcacctctgtgtgggacacacactgtgtgcagctgtcac

SEQ ID NO: 15358 - DNA, 120 bp, Homo sapiens
agacgcaccgtcagccattcagtgcttccgtaggaaatacacagcatttttctgtctgtctcagctccaggcaccacactgaccccctcatggtgattcctgctttgtaaaaagccctga

SEQ ID NO: 15359 - DNA, 120 bp, Homo sapiens
ggtcgcatcccagggccatcctccctacacgcctgctcttcctgtgcacgtggtctgtgtggttcaaagaacctgcttcagccattgtcctggcagaacagctcacagcttcaggaggga

SEQ ID NO: 15360 - DNA, 120 bp, Homo sapiens
ccccggtgggctctggggtcccctcacttacagcctcttctctttccagtggcaagtttggggcagtctgtacctgcatggagaaagccacaggcctcaagctggcagccaaggtcatca

SEQ ID NO: 15361 - DNA, 120 bp, Homo sapiens
ttgcgggggtggtggctgcccaggatggggaggggatccttggagtgggcacctctcgcctccctccaccagcgctgctgaacctggggcctggtatgggagtttgttgcagtgaaaata

SEQ ID NO: 15362 - DNA, 120 bp, Homo sapiens
ccacggcctgggctgggttcagaggaggccacgagcagtgtttgttgaaggaatgaaaggatgcaggcaggtagagtgagggagtctgctgtgtgaggaggtaatagcaacctcgtgtga

SEQ ID NO: 15363 - DNA, 120 bp, Homo sapiens
ctgcggggtagcattttggggttcaagagagcttctgactcaggccgaggggtcagggaagcttcctggaccagctgccttttgagcgagggctttgaggagacgttccagtggagaagg

SEQ ID NO: 15364 - DNA, 120 bp, Homo sapiens
gtccgtagctgtccggagctgagtgtggagctctgggtgtggagcagggaagggcagcaggagtgcagggggttggcagtcctcatggcaggtgttaatgctgtgcgttaagtggcggga

SEQ ID NO: 15365 - DNA, 120 bp, Homo sapiens
aggcgcgtgagcacccatcagcaaagtggatggtactttcattcattcattccataagcatatgctgggtactttccttaattcattcgataagcacgtgctgggtacctgctcctggaa

SEQ ID NO: 15366 - DNA, 120 bp, Homo sapiens
ccccgtgctaggcatagggactgtgaaggaaatggtccctgtctcatggagcctccaggggaaacagacattcataaaacaattcctaactaaataggtcattttaagccatgaaaagtg

SEQ ID NO: 15367 - DNA, 120 bp, Homo sapiens
acacgagagtaatgcggaatcgcactgggtgaaattgaagtcagcacgggtctgaagcaggcagggagatgctgttgccgcctctaacacctgtcccagttttgctctgtgcccgacact

SEQ ID NO: 15368 - DNA, 120 bp, Homo sapiens
agtcgtgagcctctgtatcctaaaatgtgtttttttcaggataataatacgttttttgtcaaaaaaagtgtttcacggtcaagtaggttgagtgcaccccagcccacaggccatgtcctg

SEQ ID NO: 15369 - DNA, 120 bp, Homo sapiens
aagcgtctccttaggggacttgagtcaaatgcccacagagcccagacaaataacaaatacatgttgaatgggagggatcagggggtggtggcgaccatgggagagttggaggacatttgt

SEQ ID NO: 15370 - DNA, 120 bp, Homo sapiens
tagcggaacatcacaaggccagtgctggagtcagtcatgcgttcatttcctggctccgtcgcttacttgctgggcaactgtggccgagtcacttctgtgtctgagcctcagctttctcag

SEQ ID NO: 15371 - DNA, 120 bp, Homo sapiens
tagcgcatcttccagtgaccctggagtagtgtgaagccccgtgttcccaagaggcttcctgtcaggaactgagctggcatcttctttctctgttctctggagcttcatgtatctggtggt

SEQ ID NO: 15372 - DNA, 120 bp, Homo sapiens
catcggccatggcaaggggtttatcttttacttggagcaaaactggagccatgggagtgtttggagcagagcggtccttggttcaggtctggctgacctatccgttgagtgaggggactc

SEQ ID NO: 15373 - DNA, 120 bp, Homo sapiens
tggcgcctcccgtggccattttgggcactgcaccttctctagcctgtgaccctcctggactgaaggggacttacaggctgctcagacaccctgcagctgcccccctgccctggtgttgac

SEQ ID NO: 15374 - DNA, 120 bp, Homo sapiens
cagcgctgccaaccgcttcaagaagatcagcagctcgggggcactgatggctctgggggtctgagccctgggcgcagctgaagcctggacgcagccacacagtggccggggctgaagcca

SEQ ID NO: 15375 - DNA, 120 bp, Homo sapiens
cctcgttaggacaaggctgtgccaggctgggaggctcggggctccccacgcccccatgcagtgaccgcttccccgatgtgagccgcctcggagtgtggcctggatccatcctgctagcac

SEQ ID NO: 15376 - DNA, 120 bp, Homo sapiens
tgtcggccacaccccagactccaggcccccgttgaagccgctcccggttccctccccagctcctcgtctttgaactgccgccgccgtggtgacccctgctttgccccactgggagagtcc

SEQ ID NO: 15377 - DNA, 120 bp, Homo sapiens
caacgctgattcctaaggcccagctgccagggaagacagagcaggctttgtgagagaggacctccatgcccccgccacctccccactccagcagataaggccgagcccacaccatctggc

SEQ ID NO: 15378 - DNA, 120 bp, Homo sapiens
ttgcgaccaccaacacacaggaactctgtgtgagagagagggcgcccagcccaggcctggtggagggggaggggagaagccaagggacacaggagaccacccccgagcttgcctcagggc

SEQ ID NO: 15379 - DNA, 120 bp, Homo sapiens
agccggcccaacccaaccactcggggcccccatcttgggggtcacccatggcctcagatgatggggtcagcaggcccaggagaattaggaaggccatggggcagcctccagtctgctctc

SEQ ID NO: 15380 - DNA, 120 bp, Homo sapiens
ggtcgctgatgaccacagttcactgagcacctactgtgtaccggacactttagcaatatccgtcagctcacagtttggtggttcatgcaggctcaggtgccagtctgcccagcacatgat

SEQ ID NO: 15381 - DNA, 120 bp, Homo sapiens
gcacgttgtgcctcagtatcctcacctgtgagagggaggtcgcagcaacagcctacaccgggtgtgtgattactgcgtgcccagctttacttaaagcgcctgtgctgtgttaactcattt

SEQ ID NO: 15382 - DNA, 120 bp, Homo sapiens
cagcgctaggatctacctcatagggtggggccatggctgcagcatcagtcagactgaggtaaggcacttagggctgtgctcggcccagggaacgataatgttcttatccttactccacat

SEQ ID NO: 15383 - DNA, 120 bp, Homo sapiens
agacgggatggggtgctcatgcaccatattttacaggtgaaaaaacaggttcagagagggaaagtgacttggccaaggctacacagcaaattaacatgtcctgtgcaagaagcccattca

SEQ ID NO: 15384 - DNA, 120 bp, Homo sapiens
ccacggagcacactcagggcaaagctgcagccactgcccctgtggacagctgggtctgcctctctgcaggcttaggccccagccccattgctttcaagaatgctcccatccctggcagct

SEQ ID NO: 15385 - DNA, 120 bp, Homo sapiens
agccgccgcacccggccaacaaatactgatattgtagctgccatgtgccagaccctgttctaagcactttgccagtattaactcatgtaatcctcacaataacatcatgggggtaggtac

SEQ ID NO: 15386 - DNA, 120 bp, Homo sapiens
ggacgtggcgcctggtccatgggtggatggaagtctgggtgtggaagggatgttttggctgaggcctggattcctggattgcatactctcccagcaggcggcatgccaggctggccgata

SEQ ID NO: 15387 - DNA, 120 bp, Homo sapiens
tcccggctttttctcatcactgtggcagccttgcagggccctgccctccaagggagagggtctccttcccctcggccaaggcactgtttggggtgtgggcaggagtgcctaactctgggc

SEQ ID NO: 15388 - DNA, 120 bp, Homo sapiens
catcggggaggaggggctggctaaggccagccctgtgggtgggtgagggtggccttcccaggggccaggagtcctttcctctcttgggagaacaaaggccgaggcccagcaggtgaagct

SEQ ID NO: 15389 - DNA, 120 bp, Homo sapiens
ggccggccacctggaaaggcagtgggctcccagttcctggaaccccatgtgatgtcgaccattttaatgtagagaggattcagaaatcgggcaggagatgcccttccggctctgatattc

SEQ ID NO: 15390 - DNA, 120 bp, Homo sapiens
attcgtctaactctgtaagggtctcaataaccttttttgctctcacctgctaaagaggaggaatggggactgggattccctcctagagatggacacgctccctatgaggaggtccttggt

SEQ ID NO: 15391 - DNA, 120 bp, Homo sapiens
caacgagatggccccatccctcccctccagagctacattaaggcatcagagggggtgccatggatgggctgagaagcggctctgctcctgccttgccatgtgaccctgggcatgttacct

SEQ ID NO: 15392 - DNA, 120 bp, Homo sapiens
ggtcgacagaggcattcactgtccccgcaacccctgtccagatgagggtggtcaggtgggagccggaggtgaatgttggtcatggaaagaatgtgaaggcaggaggccccgtgggtgggg

SEQ ID NO: 15393 - DNA, 120 bp, Homo sapiens
atccgttcctgggactcagaccgtgagtcaggctgcccttccccacaaccaccgggcaaagggagtgaaacgcagagaggtgggcactggtccaggctcatacagtgagtccaaggcatg

SEQ ID NO: 15394 - DNA, 120 bp, Homo sapiens
tgtcggaggccagagggagatgtgcagagggggctctgagcctgcatgtgggcaaccctttcgcacattcccccagggcaagggatgagcaggagactcagcctccttctccacaagtcc

SEQ ID NO: 15395 - DNA, 120 bp, Homo sapiens
cagcggcagaggcctgggctcccccagcccagccggcttcccatcctcctagtagctcagaacccaggctgggaagggactggggtcaccagggctccacaggaatgtgcaacgggaaca

SEQ ID NO: 15396 - DNA, 120 bp, Homo sapiens
cagcgcccagcagaggcctccttccctgacccaactgagaaagaactctcacccctttgaatctgtctgtctgcctctgcagggtctgtctttctgcatctctctctttctctgtcatat

SEQ ID NO: 15397 - DNA, 120 bp, Homo sapiens
acacgcagcctgagacacactgatccacacaggcacacgccatggtacagactcacacaagagcctccttccccctcctcaccatgccctgcacacagagggcctttcctcttccctctg

SEQ ID NO: 15398 - DNA, 120 bp, Homo sapiens
aggcgttttcccagcccctctcaccctgcaggtcctcctccaccccagctctgagactgtgggaaccagacagttcgggctgtccagccgggctcgcttcctcccaggccccaggggacc

SEQ ID NO: 15399 - DNA, 120 bp, Homo sapiens
tgtcgggggaggagggagcagcaaaggctggagtcctcggggctgcctgggcaagggagggcctctggaggggagagggctgcctgcccaagaaggggtctccagccccctgagtgtaac

SEQ ID NO: 15400 - DNA, 120 bp, Homo sapiens
cctcgtgggacataagacactctagaccacatgccaaaaaccagaatgggggtgccccagcatccctccctcctctccctatgcccatgatccagataggaggactgaggctctggggag

SEQ ID NO: 15401 - DNA, 120 bp, Homo sapiens
attcgcctctgctcctccagtgctggggtctgtgaggacagcgatgtttcagattccttctctgttcctctaacgaggaccaagaatatccccatttctcctgcttcctcgcgaagggat

SEQ ID NO: 15402 - DNA, 120 bp, Homo sapiens
tgccgtcttaaagagtcaccagaggacctcatggagctgggggctcagggaagctcccacattaatgtgggaagtccaaacagggggtaggtgctgccttttgaaccctaggtgccctgt

SEQ ID NO: 15403 - DNA, 120 bp, Homo sapiens
tggcgagcctgtttccaccactgtaaacggggccaactttccaaatcacacaggtgagatgatacatacaagcccgggacaggatcagtgtcacaaattgtcagggttatgatgactgca

SEQ ID NO: 15404 - DNA, 120 bp, Homo sapiens
ctacgggggctaagtcccagcatctgagactggagaatcagtccctcaggccagcccagtcttgcccctgcccagtctctcccttgcctgtatcctcctctccctgctccccattcccta

SEQ ID NO: 15405 - DNA, 120 bp, Homo sapiens
ccccgctgcacaaccccacagccacagccacccccacatacaagcaggcaccctggccctcagcccccagccatcaggcaagctgaccctcatcatcacatggctttattggccctgaga

SEQ ID NO: 15406 - DNA, 120 bp, Homo sapiens
gtccggaggccccaggggcctggctgagcaccgcttcaatcctggctttctgtgtggttgtccttggctcaccagggctgggtccttcgagagttcttcaggtcctagagccaggctcag

SEQ ID NO: 15407 - DNA, 120 bp, Homo sapiens
gcccggagggtgagggacctgcagggactgcccgaggtgaggctgcctttactcaaagaagaacattcctggcgtccggtataggcagggggtcagccccaatgggtagccggagcctcc

SEQ ID NO: 15408 - DNA, 120 bp, Homo sapiens
gcccggagtgagcctggaggggtgggtggtgcaggggagggggctgctgaggccaagaggtgctcaaggcctgggtcagcccccatgcaaaaattcagtgcctgcagccgacactggtag

SEQ ID NO: 15409 - DNA, 120 bp, Homo sapiens
tcccgatgcctgattccggggacaagacgggcgtaggggccttattaaaactctcagcctctgagaagccggcaggaaagccaaacgctgggcatgaggaagatgaggtggccacgggga

SEQ ID NO: 15410 - DNA, 120 bp, Homo sapiens
gggcgtggaaatctctttgggctccatgggtggccgaggcctgccatcagtggttgctgggcacatactggctggcatggcccccaccagacccccaaagcttaggcccttgggatctgg

SEQ ID NO: 15411 - DNA, 120 bp, Homo sapiens
tgccggtcgtggcgttggggactcctgggtcctggctggtcgccctgaggggtccacggcgtgccttggcggggccccgggtgccctcagcacctgtctgccgggtgaagcggcggcggc

SEQ ID NO: 15412 - DNA, 120 bp, Homo sapiens
cggcggcgtaggaagctgccgtgctcaaacatgtcgtggcagtcagggtccagcgtccagtagctgcccttgcctggcttgcggtcatcgcggggcaccttgacaaagcactcgttgagt

SEQ ID NO: 15413 - DNA, 120 bp, Homo sapiens
tggcggatgctgttctgccagccgggccggttgtggcggtagaaggcgaatcggcccatgatgtagcggtagatgccactgagggtggcccgctgccccggtgagctctggatggccata

SEQ ID NO: 15414 - DNA, 120 bp, Homo sapiens
gggcgatgtagctgtagggaggcttggttggctcagttgtgggggcgccaggcccgggcagaggctgctgctgcatgctggccgggctgccaggctgctgggacctgctgggtcaggctc

SEQ ID NO: 15415 - DNA, 120 bp, Homo sapiens
tggcgtccggaatagcctgcccaggctggttaaaaggtccactggcccagcctcccagcctggaaaggcaaaaaggggtgggtctgctgagccatcctcccctcctccctcgccccactc

SEQ ID NO: 15416 - DNA, 120 bp, Homo sapiens
aggcgggcaggagaggccagtagtgggaagccgagcagctgccagggatgaggagttgggaaggaagggactgagaccctcagcccacgtgtgctgggtggtggtggctggggagggaca

SEQ ID NO: 15417 - DNA, 120 bp, Homo sapiens
gagcgggacagagacaaaaacaaaatgagacagaggcagaaacatatgaaacagagacagggaaaaaagagatagagacagagagaggtagagacatcacaagagggagaaagagggaga

SEQ ID NO: 15418 - DNA, 120 bp, Homo sapiens
ttccgagagaaggagggacttgggccttgtcaggcgggacaccgtggctttgggggaggggagatgttagagaaggaggtggggtcccaggaggcaactccgcagactgcagttgcggga

SEQ ID NO: 15419 - DNA, 120 bp, Homo sapiens
cctcgcatccccttttctgcaggctgctggcccctggcagtcctgctggctcctggcagaatcctgctgccccgcctttgttgaatgactgggaggcactcggacaggcagcttcttctg

SEQ ID NO: 15420 - DNA, 120 bp, Homo sapiens
gcccgtcaaaccctccactctccctccctcccctcccgccgcctttaagggtgggccccctcccccagcccaaggactaaggcaccaggtggctgcagcaggccggcccggacacagaga

SEQ ID NO: 15421 - DNA, 120 bp, Homo sapiens
agacgcacaggttggggacgctgactgcagacgcggacgagcagggcgggcgcgggaggcagggttcaggccgccgcggggctcccccagcctctgggcccgtcctggggggcgtggaag

SEQ ID NO: 15422 - DNA, 120 bp, Homo sapiens
aggcgcagacagcccccgaagggagccagtcggaagtggggagccacggctggactgcatcctcacttgccgcccttgcgggacagacaccgggggaggcaagagaaagtctgcttgacg

SEQ ID NO: 15423 - DNA, 120 bp, Homo sapiens
acgcgcgccagcagcggcagcggccggtgggcttcccggggcgtgcgcggcaccaggcgctgcacggttccctcggaggctgctgagtgcggcccggcggaggaggccgaggtcgcggag

SEQ ID NO: 15424 - DNA, 120 bp, Homo sapiens
tgccggcagcgcttgcacagcggcagcagcgcgcgcaactcctcctcgtcgcggaaggggctctcgccgaagcgctcctccagctgccggcgaagctggggtgggcgggtgaggtgggcg

SEQ ID NO: 15425 - DNA, 120 bp, Homo sapiens
ggccggcgcggggcggggtcaaggcagccggccccgcccccaccctcccgaccttcgcccttctccgagcgtcccacacctcgctgagcccctcccttcctgagcgtcttctttgcctcc

SEQ ID NO: 15426 - DNA, 120 bp, Homo sapiens
ctccggggtttccatcccctcactgagtccctcttcccttctaggaggcccctccctctccctgacccctcttccccctttgacacgccagcttccagacctgctaaagtgacccccagg

SEQ ID NO: 15427 - DNA, 120 bp, Homo sapiens
aggcgcccagcggggatcactcctcccgctttgcacttctgggtaactcctcccactttgcacctctgtgctcacaaccccattcccacagatttcttccttgcccgactctttcccaac

SEQ ID NO: 15428 - DNA, 120 bp, Homo sapiens
gtccgagatgacgagatgacggtgctcttgttctgtcaattagcacttctctgttggtgaaccctctgatgaagttgagtgcccgttcttttctttctttcttttttttttaacagacag

SEQ ID NO: 15429 - DNA, 120 bp, Homo sapiens
ctcgagagttaggaatgagccaaatagagtttaagttagggctgcatggaactcactctggaaaaccctgaggatgtgcatcgtaggctctcagctcagtgaatggctgagtgagtgtct

SEQ ID NO: 15430 - DNA, 120 bp, Homo sapiens
gaacgtcctgggagagacgtctcagcagctcacggcagcctcagcacgaactgcctgggattgggggccacatgtacggaaaactcatctcttagccagttgtgcctggcacatgggttg

SEQ ID NO: 15431 - DNA, 120 bp, Homo sapiens
cagcgtggggtagtggttaagagtgtggctctggcaccaggtagtctgggttcaaatgatttaacctctctgagcctgttttcccttctacacatcattcctgcgagggccaaacaaatc

SEQ ID NO: 15432 - DNA, 120 bp, Homo sapiens
gaccgatgctgaaaagggtaactgacctgcttgagggccatggcagtttaggaatggagccaggatataaaccacaggctgtgtgtggttgtctgactcccgctgtcccctcttcccagc

SEQ ID NO: 15433 - DNA, 120 bp, Homo sapiens
ctgcgtcaacgatcggaagaaacaactgaggcagctcttctgctcccttcaagttcagaagaaagcttccagttgatccccagctgccaggaggaaatcagccttagcaggtgccaccca

SEQ ID NO: 15434 - DNA, 120 bp, Homo sapiens
ggccgtagcctgaggcattccgacctgaggctacagggagccttagtaagttcctgagcaaggcagccggagagggaacagttggttgggtagggacaggggccaaagatataggagtct

SEQ ID NO: 15435 - DNA, 120 bp, Homo sapiens
tgccgaaaatcctagccacagcacagtgacagggctgctgagaggcactgggacagacagttcttaccccacagctccagggatggggtaatttccctcacaccccaaggaagtccccac

SEQ ID NO: 15436 - DNA, 120 bp, Homo sapiens
acccgctccggaactaccctcttaccaaagccatgtaaccccttagttcctggggtccaaagggcactgtctggggcaacccaggcactgagtctggagactctggccacacttcctcct

SEQ ID NO: 15437 - DNA, 120 bp, Homo sapiens
ggacggtcttggcccaaacgtgagtggtaaaattgtctccagctgccgtagatggacgcctctcccaaggtggggccctgaaacttcctacccactccccacttccactggcagctccca

SEQ ID NO: 15438 - DNA, 120 bp, Homo sapiens
agccgccaagcatttagagggcacttgctctgtgccaggcattgcacaagacactagagggagatacagcacagtctgcccactgaggggcacactgatggggaaaacagttcccagata

SEQ ID NO: 15439 - DNA, 120 bp, Homo sapiens
gagcgagagcttgaaggacaaggtttttggtgggtgaacaatagaagagagagccctccagatggggacccagcacaagcaaaggcaggggagcttgaaggagcatggcgtgctctagga

SEQ ID NO: 15440 - DNA, 120 bp, Homo sapiens
caacgggaatagagagacgcggtagaattcttgtagttttggagattttggaggtgtgttacacagcatttagggtgatagcccctgtcttttccaggagagggtgtgttctgcccttgc

SEQ ID NO: 15441 - DNA, 120 bp, Homo sapiens
aaacgcaatgaatgttggacaacctcctccctcccttgcctgagatatttcagctgccctccccgaacacccctccacccgcagcgattatttttaattagttgctaacatttaaactca

SEQ ID NO: 15442 - DNA, 120 bp, Homo sapiens
ccacgactccagtgctcttcagacaacctcagtggagctgggggctgccctgggggctacacctgggctgtccagcttgcacagcccttgccaggcccactttcctcatccgcagaaccc

SEQ ID NO: 15443 - DNA, 120 bp, Homo sapiens
aggcgtgggtaatgatgcagaagcagcctgtgcttaagtgtaaatgtgccctggtcttggccccggctgtggtcccacatgctgcatcctctggatggcactgcgctaggacgtgcgctc

SEQ ID NO: 15444 - DNA, 120 bp, Homo sapiens
gggcgggatggaatcttggtttctctcattctcccttgaaataggcaatactttcaaatgtttcaaaatgcaaatgtggggaagcatgcagaagagtgaaaagtcttcttcccaccctgt

SEQ ID NO: 15445 - DNA, 120 bp, Homo sapiens
tctcgtgagtcctcccagatgcttcctccttatataagaaaagacatctcttcccgcttatctcacacaagtggtagataccacacacactgttccatgcctctcgttcagaccttccat

SEQ ID NO: 15446 - DNA, 120 bp, Homo sapiens
tttcgtccggggagtgaatgacaaggaagactcagagaaaaggaaatgacatttgactttagcaaaggaagattctggcttaaataatttggtgttggttttctccaaacagggatatat

SEQ ID NO: 15447 - DNA, 120 bp, Homo sapiens
gaacgctggagcaggagccagcagcctgggcttggtcccagcgctgccactgatgcattgtgtggcctggggcaaattactttggcttcattagtctgttttccacatatgtcatgtgtg

SEQ ID NO: 15448 - DNA, 120 bp, Homo sapiens
catcgggccttggttaaatgtgtttctctgaggggtccctttaaaggaatgcccttaatccccctcaggaagtacagaggaggttgggatcacattaagttgcctcttagtttctgtttt

SEQ ID NO: 15449 - DNA, 120 bp, Homo sapiens
aaacgtctccctttgatcttggcattaaagaagcacgtcagagaatgttggagaaggctgagttttgatctctgggcactggcaaaaaggtgggaaggacccaggatgagaagagccatc

SEQ ID NO: 15450 - DNA, 120 bp, Homo sapiens
ccacggatgaataataggagccactaccaccttcaagcctgctttgatccctgaaccatttgctgacactagagtttcccaaatggggcatggatggggacacccaggacttctcagttc

SEQ ID NO: 15451 - DNA, 120 bp, Homo sapiens
agacggtagcgagctcgcattggaatttactcctctccaccagcctgattgtctgagggcttgcatcatctctctttcatctctatatacctaatatctagaaaaggaaccctaacttta

SEQ ID NO: 15452 - DNA, 120 bp, Homo sapiens
gttcgcagccattcccaagtggggagccgaaatcttaaagtctgattctttctcttgttgaatagaaggggagatgtgcaagaacgacacaactccattccagatactaatccagaggaa

SEQ ID NO: 15453 - DNA, 120 bp, Homo sapiens
ccacgatgcaacctgctacaacagggggattccctttgaagagatggtgccaaaatttgatcatgaggcttttccatgtgaagagagaaaagggggtgtctggggattatccacgagaat

SEQ ID NO: 15454 - DNA, 120 bp, Homo sapiens
aggcgtgagccaccttgccccactggacctatcacttttatattacatatttttcttgatggtttgaatcatttgcaataactgtgttcctgggtaactggtctaattttctgtcgctgg

SEQ ID NO: 15455 - DNA, 120 bp, Homo sapiens
tcacgtttctggtgcctgggtttggatgactagcatgctgggctcagctacagccattgactagaacacctacaaatggcctctcactgtggcctaggcctccttgcagcgtggaagctg

SEQ ID NO: 15456 - DNA, 120 bp, Homo sapiens
cctcgggataaaatgacagtgaggttgaaaagtgaaaaccctagaacttgaataggtgcctgttcttgtagggagaaatgagaaatcgcatttggatccaggccccaggtgggcaccatc

SEQ ID NO: 15457 - DNA, 120 bp, Homo sapiens
gcacgcatactctgaacatccttgtgtgggcccatcctctgcatccagagcatgctctgcagtgggcctgttttgtggaagaaaggaggctgtctctgccttctctgatgggactggagt

SEQ ID NO: 15458 - DNA, 120 bp, Homo sapiens
ccccgttttgttccatattggtatagagagcagaagagtagctaggcagatgcagagatggagacatgagactcagtgcagtgggcagggaagacataacagatggaagcaaaggaatcc

SEQ ID NO: 15459 - DNA, 120 bp, Homo sapiens
caccgaatcctagaactgtggctccctccaggcagagcctaagatgctggtgaagaatagctgtgtgattgaataggctcaaaggagagttcagaattcccatttacatattactagttt

SEQ ID NO: 15460 - DNA, 120 bp, Homo sapiens
gcacgatggtgcctgtgttctgtgaatgtgtccatatgtgtctgtaagagagacagagaccaagaacttgcccaattttagaaatacactaatgtgcagttgttgccttttgtctgtatt

SEQ ID NO: 15461 - DNA, 120 bp, Homo sapiens
gcacggtgcctcaggaaggtggcgactcaggtgggccttgagttatattttaactcagctgctcagttcccagggcacatttctggatcagaacccatgggaaacaggaggtactaagtg

SEQ ID NO: 15462 - DNA, 120 bp, Homo sapiens
ggccggagctacacaggcctccatttggttcctgggttatgccatgtgctttcctgcctggcaccttcacaccttcacacatgccatatgccttctgcctgaaacattttctcctcattc

SEQ ID NO: 15463 - DNA, 120 bp, Homo sapiens
gctcggctaactccttctcatccatcaggaaccagttgaatgtcacctcctcagagaagccttccccagcccttcgttgtggttttccccatctccgcctcccaggttcaagcaattgtc

SEQ ID NO: 15464 - DNA, 120 bp, Homo sapiens
ttacgattgcatcactgcactccagcctgggtgacagaggaaggaaggacaagcatgccagacaaaggggacaacatgaataaatgcaaggagagttcctggtgactgcggaatctgatg

SEQ ID NO: 15465 - DNA, 120 bp, Homo sapiens
gaacggggctgggagggtctcgactccatggctcaagttagagggagagcccttggaggcttttgtgtgttttggagaccaggggagtgaagcgcagcctatttacactcgagtattttc

SEQ ID NO: 15466 - DNA, 120 bp, Homo sapiens
aggcgtcacagatttccataaggggctttgttaatgcagtgatcaccctctgctagattattccagggacagtgaggagccaggactttggcatcagattcatttattcattctttgagc

SEQ ID NO: 15467 - DNA, 120 bp, Homo sapiens
tttcgtagaggaaagaagattcttaagaatttcagtatagtgtaccccaggagattgatttttgcagatgttaattatgctgttgaaaaatagtctttctttcacacattttgtagtatt

SEQ ID NO: 15468 - DNA, 120 bp, Homo sapiens
aatcgaggacgctaaatggattctccctggcttcgagaaactctttgttgtatgctttatcttttactttgattcatgactgaccagttcttacatcaaacatttttttcccctttgaag

SEQ ID NO: 15469 - DNA, 120 bp, Homo sapiens
attcgccagctcagctttcatttaattagtatcaaagaaatgttatctgtggcagtgaacattagtagcttgttccagggtttattgtaggtttgttcaagtcagtactgcccatcttgg

SEQ ID NO: 15470 - DNA, 120 bp, Homo sapiens
agacgcaggaacagaattttactacagtcatgatacgtgttatcatagttgtataaatcataaacagatatcccagttgctgcctcttgtctagtcatagtttctcctttcactctcaac

SEQ ID NO: 15471 - DNA, 120 bp, Homo sapiens
tgacgtacttttgacatcaggcaggtttgggaagaaacaaagccatgcctgctcctgcctctctcccaacatgtttccagcaagtagatgcccctgtgtgtgttttcccttgccttgttt

SEQ ID NO: 15472 - DNA, 120 bp, Homo sapiens
tttcgacttattacagagttgagggttcttgcttaatttagatcaagtataaaatttgtatgacttcaagtctcattttatctgaaaggtttttttctcatttaatctgatgtggcattt

SEQ ID NO: 15473 - DNA, 120 bp, Homo sapiens
tttcgtcatctgaagcatgagtgacaagttgggaatgatgtggtgatttagaatgcagtattggccaagtccaagttgtcaacttaagcgtctgtttaccaaagaccgggaacaggggcc

SEQ ID NO: 15474 - DNA, 120 bp, Homo sapiens
acccgtacaacctgcagttgtggtctcagtcatctgtggctgcctcgctggtgtgggaaggtcagctggagtgctgagctggaagggaaggagtagacgccagctctcctcaccttggct

SEQ ID NO: 15475 - DNA, 120 bp, Homo sapiens
tggcggacttcaccacatagactgcagtcagcgttctactgagagcaatgagaatgtttccccttgggagtgcgagtcacaaactgtgacatccctctgcagcaactcatccaaacagct

SEQ ID NO: 15476 - DNA, 120 bp, Homo sapiens
ttgcgtgagcctgagtagacgacgtgcttcagggattgacttcttgagaagtcctcagacgtctctagagtacgtaaatacattgactttgtgcttatcagaaataattttattagtata

SEQ ID NO: 15477 - DNA, 120 bp, Homo sapiens
ctacgcagcatctggaacaggcaaattcacagagacagaaggtacagtgaggctccacgggctgggaatgggcagttagtacttaaagggtgcagagtttctgttgggggatgaacaagc

SEQ ID NO: 15478 - DNA, 120 bp, Homo sapiens
tgccgcacacacagagcctactcagagggacaacatggatcgcgaaagcctgccttccccagtgacaccaaggtctcgcctacccccagctccgctcaggcagccccggcatgccagccc

SEQ ID NO: 15479 - DNA, 120 bp, Homo sapiens
ccccgcgccacatgctctgggggctgcctgcaacctgaggcccatgttttgccgactggggaggccacaggtttgagccgcggagtggctggaagaggctactccaccttctggagcctc

SEQ ID NO: 15480 - DNA, 120 bp, Homo sapiens
ctccgtttcctttcagagtgggtcccacagccgtaaaacacggttctaaggtgaggatggtgcccgagatggggcaggagctcaaaaggaaaccccaattccctgcaccccacattttct

SEQ ID NO: 15481 - DNA, 120 bp, Homo sapiens
tgccgacgcacgaggctcccagactgcaacgggggcttctggggatcccggagcccagcctgtgacagtctgaggtgggcccagtgagagggccactgtggggatgggggcaactgccac

SEQ ID NO: 15482 - DNA, 120 bp, Homo sapiens
cctcggagctcatgctccagcagcgacaaatcaaacctgagggctccagaggagacggggctctgaaggggtgtcaccagctttctggcccctgagccatggtgtctcccctactctcgg

SEQ ID NO: 15483 - DNA, 120 bp, Homo sapiens
cggcgactcctgctcgcccttctgtgctaacccgagcaccaccacctcagggaagccctccctacctgccccgatctccatcgtggcaccggctgtgggccacggctctgcagaagccat

SEQ ID NO: 15484 - DNA, 120 bp, Homo sapiens
ggacggtggggcgagggctgaagcctcatgaaccaacaggggcagaggtgctgctcggggtggggttggtccagcctgtccctcggccccacaagcagtggatttgatgccggctgcagc

SEQ ID NO: 15485 - DNA, 120 bp, Homo sapiens
agccgcaagggctgagtttactccaactggaagccaggtccctcctttgggcccaccaggcccttccagcgagcccctatggctcacccacccgccccagctgtgacccagccttggtac

SEQ ID NO: 15486 - DNA, 120 bp, Homo sapiens
tcccgggtgtccccttggcgcagtccctcacttccagggctctgcgtaaaggtcaccttctcggtaagcccagctcccaccctgctctggcacactgacccctctacctttcttttcttt

SEQ ID NO: 15487 - DNA, 120 bp, Homo sapiens
aagcggccccagccctagagacccagagttggtgcagctgtattgggtgggcctggatggctcctgctgccccctagatcacacccctccctctggtgggggcaactgagtcttcctggg

SEQ ID NO: 15488 - DNA, 120 bp, Homo sapiens
gctcgccggggtgagtgcatgccccaggcctggccagtcaacccatcacagcaactggtaatagcgtgtgaccaagctgggcccgaggacatcacgcggggactcctgctgcgatggctg

SEQ ID NO: 15489 - DNA, 120 bp, Homo sapiens
taccgacactcctgcagctcaaactactttgcctttgtgcgttggaaacccaacccaagcccattttccccactggaattatttgtgatgatgtgaagtttttggagatgcaaccatccc

SEQ ID NO: 15490 - DNA, 120 bp, Homo sapiens
gcacgctcagatgagaagacgtgggagacacagttctagcaaacagttctaccgctcagagcaaagcctacgtcacacagcctctagggtctgggcacagtgtggggacaggagggctgg

SEQ ID NO: 15491 - DNA, 120 bp, Homo sapiens
ggccgccctgcctcttgaaaggaatacgcagctctgcaggttcaagccacccagctgaagtcctcaaactgggtaacacgggccaagatgccacctgcacgtgtcctgctacatcaccat

SEQ ID NO: 15492 - DNA, 120 bp, Homo sapiens
cctcggagcacgcatgctggggttgtcaaggagaccagtgcacaggacggccgcacccagggctggagaccggcagcgcaggacagctgcatccagggctggaagacagactcgagttct

SEQ ID NO: 15493 - DNA, 120 bp, Homo sapiens
ctacgtgctttgcaaagggttaggaggtggactgtgtgggaaggcaggcgagagggagtttcttttcatagcctgtttccatggtgtctcacggcccttggcaaaccccagctggggagg

SEQ ID NO: 15494 - DNA, 120 bp, Homo sapiens
ggacggccaggaggccccaggtccaccctccaaggactatcccctagtcctctgggccccaagagtgacagaggccacaggcaggcggctactctctcttgcctccctgggggaaggtgg

SEQ ID NO: 15495 - DNA, 120 bp, Homo sapiens
cagcgataaagggcagagcagagaaagaacaactccaggggccagggctgcggctccctcccttccacgtcccctcctccccctcctcccacgagcccacccaaggggaaagttttctcc

SEQ ID NO: 15496 - DNA, 120 bp, Homo sapiens
tcacgagaaacacattcttgcctcccgcctctccgcctggacaacccagataaccagataagggcctctttgatttcccgtgtgtttacacaagctgtggccccaagtcttggaaagaat

SEQ ID NO: 15497 - DNA, 120 bp, Homo sapiens
tcccgcacctctccactaaggggcagcatcacccaagcgttccgctgtcctcgccgcagcccgcagccgggctgggaaagttggccaagggtgaggggctgctctgcgctgcgcttggcc

SEQ ID NO: 15498 - DNA, 120 bp, Homo sapiens
ccccgccttcccacagcaactgcaggggtttgctcctttagaaatgcacgaatgtccttctccatctctgtgatggctggagggtagaggtgggctagggcggggctggggagtggagtt

SEQ ID NO: 15499 - DNA, 120 bp, Homo sapiens
atgcgaagttaattttggtgacacaattgttatttctcagctgatttgatgctctgtggagcaggcaggctccttgatgagttatctcccttccaaattccctgtctgattgccttcctc

SEQ ID NO: 15500 - DNA, 120 bp, Homo sapiens
cagcggatgggagagcaacatcagggatgcagctggtccttgtcaggtgtcaggtccgagggatggggcttttctgccatgcacacagagagcttcatccctagcccaggccaggataaa

SEQ ID NO: 15501 - DNA, 120 bp, Homo sapiens
gcacgttcctctcaggccagctgggtctggagagagatgtctggctgaagggtggcagctgcaggagcaagtgtgcaggagggaagggcgtgtgctaggcagagcagagggctgtggctg

SEQ ID NO: 15502 - DNA, 120 bp, Homo sapiens
ggccgacagatgcccctcggctcccctgagacgtggcaccctaggtcaggcctcaggagagctcagtggagggcccgggggagggttgcacagtcagctgggagaagagggccaggtccc

SEQ ID NO: 15503 - DNA, 120 bp, Homo sapiens
tggcgtgccacagggaggggagtgctgagcacacaccttctggccctgggtcccattgatgggtggaaggggaggatagaaggctgacaggtgagaagtccttggaactgcctgagggcc

SEQ ID NO: 15504 - DNA, 120 bp, Homo sapiens
aagcgcagagtccagcccagctctgcactgccgtagggacctgtatagaggatgacaaaccctccccctgcaaccttcagcaggcatcttctgattcatcttcctggcttgcctgggacc

SEQ ID NO: 15505 - DNA, 120 bp, Homo sapiens
gcacgaatgcccaaggccacaggaccacagaatgagtcgaaaccaggaggacaatcctagcagatgctctagttaataggatggtggttttcagatggttttagatttaagctgcagacc

SEQ ID NO: 15506 - DNA, 120 bp, Homo sapiens
ctccgctgccctgggctgcctgctgccttgctccccgggcctcctgcctggacactgagtcccgtatgtgaatttgcctttcacatttttcctggtggtaaaaaacagggacttcactgg

SEQ ID NO: 15507 - DNA, 120 bp, Homo sapiens
agtcgctgacttgcaaggccccatttcactccccaactcagaggccaacaaagacagatgaggccaattggggggatttgcaccactttacaagatcctccttctgccctgagggtggat

SEQ ID NO: 15508 - DNA, 120 bp, Homo sapiens
gcacgtggtgggcctggagcagctgctgaccacatctggccccaactccaaagtggcctgggcagctagatccggactgtggaacccgatctgacctaccagcaccctgggagggaaaaa

SEQ ID NO: 15509 - DNA, 120 bp, Homo sapiens
ctccgagatcctctgcacctcaggtcacactgagaagctaagtgagacagggacttcctactcgaaatgggaatccctgcattatccattgcacatggccatctaactccagctcgaata

SEQ ID NO: 15510 - DNA, 120 bp, Homo sapiens
ccacgggtggacagcagtagatgccagaaagctcttttccctaccaaataacacgcctcatttagtgcactgaaaaagtctgccaccgccctgccagtcctaactcctatagtaccctcc

SEQ ID NO: 15511 - DNA, 120 bp, Homo sapiens
cagcgttggcaaaacacagagatagatccaaaaagtcctcagccaggagcttgatgcgtaccccgtgatgccaggctgtgcccctctgcagccatcagcaggggtttccttgggggctcc

SEQ ID NO: 15512 - DNA, 120 bp, Homo sapiens
cctcgtgtctgcagagtggggctgaagagctaggtatgggtcgaggaaaatgggagcagatgaagaggggcacaaaggcatccaggcaccaccccctgcccccaaaaaaggaaaagggtg

SEQ ID NO: 15513 - DNA, 120 bp, Homo sapiens
cttcgacttcccctggggaactcccagtcctgacttcacaggatgagctcacacataggaagagctcaggacaggcctggcatgcagtaaatgccatgccatgaaggcatttgctcctct

SEQ ID NO: 15514 - DNA, 120 bp, Homo sapiens
tgtcgggtgggagcaagtgaagcagaaacggggaagaggagggcgcctcctgccctcatccctctccttccctccctctcacccccttcaacctgcttttcctttgtgctcagaccacag

SEQ ID NO: 15515 - DNA, 120 bp, Homo sapiens
cctcgccctgtgagccatctctggctgccgtgcccttgccctgtgcccccctagatccccaaaggccgtttcatcacgcctcagctccctgccccgccccccaagcccaacatgtgcgga

SEQ ID NO: 15516 - DNA, 120 bp, Homo sapiens
ccggggcaccgcagcctaggacagggaatcgggagtcaccgaagggggggtcctaggcggaaggaggtagccctgagccagccaggccccgcgggcgggtccctctcgggccgaggaggc

SEQ ID NO: 15517 - DNA, 120 bp, Homo sapiens
aggcgccctgggcgcgctaacgagcggagagccccaggtgcgggccccacccagggccgggggaagaggtggggctggagggggaggggagtgggccgcgctaatgactgttgacagcgc

SEQ ID NO: 15518 - DNA, 120 bp, Homo sapiens
ctccggggatggcaggggccagggcagcagctcaggtgacttggtgatgatggaggacatcccaacagcaccacactggcagacagacagggtgagtccaatccagatctcacatgagtg

SEQ ID NO: 15519 - DNA, 120 bp, Homo sapiens
acacgcagtcacacccgcagctgccaaggcccacagcccaggtgctcacatagatgccgacaaacacgcagaggagcctctccacctgtgccctgcacacactccacgcacacacacaca

SEQ ID NO: 15520 - DNA, 120 bp, Homo sapiens
gcacgcacatgcgtgttctagcccgtgagcacacacatgttcaggattcagtcgcacaacctctgagctaagatctggcttgaagaagcccaggtatgcctgaggccctccacttggtcc

SEQ ID NO: 15521 - DNA, 120 bp, Homo sapiens
agacgtgcagggacgacaaagcagcctgcaggggccataaagcagagggttttcctaccagctcctacccagggaagaagggtgcacggtgtccccacccctcagcagacagtgacccag

SEQ ID NO: 15522 - DNA, 120 bp, Homo sapiens
caccgaaatgcagccccccagagttacccaggaccatgccacccaaatcacaacgtgtaactgacaaaaacgcacgctctgccactcacaaaaaatgcaaatggagcctgtgccaggcat

SEQ ID NO: 15523 - DNA, 120 bp, Homo sapiens
tcccgcccagaccagcggccgcaggtgccaaaggtttacacaaaagctctggggagaaagacttaggcctcaaaatgctttccactaaatgaacgttgttgcaaactgggaaaagaccac

SEQ ID NO: 15524 - DNA, 120 bp, Homo sapiens
tctcgaagtttcccttggggaatggggctctaacggtgggattcctggcatgtggcaggtccacggagaagctacagcagtgcacagagaaccctgttccagtcctggctctcaacaaat

SEQ ID NO: 15525 - DNA, 120 bp, Homo sapiens
ccacggagacttggggctctctgatcctaggaactgacagacagcccagggccccacctcagccgtaacctgtggccctcgcaggctctggggacggctccacgcgctccactcagagag

SEQ ID NO: 15526 - DNA, 120 bp, Homo sapiens
tgccggaacggaattggagggtcttgtctccaaggggtttgcttcccccgcttggcagcccacaggcctggagcaggccaaacgtaagaaataataaatcctcaccaggcttcacccggc

SEQ ID NO: 15527 - DNA, 120 bp, Homo sapiens
gcccgtggaggactccgccctcctctcctccataccctgcttccaccttctacttcctgtgacaacctgcaaactggaggccaacttgcctctcccccacgcccaggcttctcctcgacc

SEQ ID NO: 15528 - DNA, 120 bp, Homo sapiens
ccccgccctgccccacccccacttgggccccagctgcaggaggccctgtggagtgtaattcccctcgccctctctctgccctgggcccgtccggacagattaagcctttgtcacacacac

SEQ ID NO: 15529 - DNA, 120 bp, Homo sapiens
catcgacccgaggctggccgggactaggagagggccctgaccacagcaccgcatatggctgtgggaggaggaagggaggcccagggtgggggcagccagagagcaatggggaagagaggt

SEQ ID NO: 15530 - DNA, 120 bp, Homo sapiens
ccccgacagctgggtgacctgggagcaggcacacagccccacccacccgagcaccccagtgcccgcacaaggactgtgggtactaaacaaatgcttttgacaaaggtttatggcccaatg

SEQ ID NO: 15531 - DNA, 120 bp, Homo sapiens
caccgaggaccaaactacaggctctctcccaaatgacaccaggggtgagggggtgtgtgtgtgtgtgtgtgtaggccagggagacgtcctttgcacctttcaaaggaggtcccattcagc

SEQ ID NO: 15532 - DNA, 120 bp, Homo sapiens
ctccggctggctgggcgagtggcaggtaactgacgggctctcgggaccagcaggccaggcaggcgggcgtggggagcccgaggggcgggctgtcgagggagggcacgtctgttgtgtttg

SEQ ID NO: 15533 - DNA, 120 bp, Homo sapiens
cctcgtgggtgctggattcctccggggatggcagaaggctatggagggctctgagcaggggcttaacaggctccgaacgaggtttaaagcgaatgaagctgcgccctgtaccatctgtgg

SEQ ID NO: 15534 - DNA, 120 bp, Homo sapiens
tggcgtggggaccgtggcggcctaagctgcacaggctgccttgcaagattctgggagaagaaaatctcagagtgctgaggccagagggactgccccaccctgcaaggatcttgggtgttc

SEQ ID NO: 15535 - DNA, 120 bp, Homo sapiens
aggcgcagagctcaagactgctcctgggacctccgctgtctgccttgtcacagggggacagggtcagggagggagaaggattcctgaaggctggcgatgcttggtgtcccgcagtgcaac

SEQ ID NO: 15536 - DNA, 120 bp, Homo sapiens
gcccgacccgggcagctgaggcccaccaggaggaagcaacggcctggaggccgaggggccaccgccacctccactgcccgtcgctgcagtcctggctctggctccggaggcctggctgtg

SEQ ID NO: 15537 - DNA, 120 bp, Homo sapiens
ctgcgctggccaggcgtgccctgctctagggtgcccatctggacgccaagctgacagcacatccggctcgagcagggcatcttacaaaccatcgttagacctgtcaggcttccagcaatt

SEQ ID NO: 15538 - DNA, 120 bp, Homo sapiens
ccacgcctcataggtgctggaccttctccccagtcccagttcccactggcacctgactcctggtaggggcttgggtgtgggtggggtagagaaaacagcatcctcattccagattctggg

SEQ ID NO: 15539 - DNA, 120 bp, Homo sapiens
tggcggtggggaagagggccggcgggcaggctgtgctgtgagcctggctccctcctccctgtggaggggccatgaccccggctcaggtgacacagcacctgcagcacgagccgccacctg

SEQ ID NO: 15540 - DNA, 120 bp, Homo sapiens
ccccgagcagcgggcaggctagggggcctcggttcaccggcccagcctcgggaagcccagagagagaggtcaagtgtgctgctgccaggcttccagaagcttctccaatttctgcggtcc

SEQ ID NO: 15541 - DNA, 120 bp, Homo sapiens
gtacggatctagggcagtctgacccctgctggacccctcacaaatgccgggtcccgtatgcacacttgaaggtcgctgccaccacgagcaaggccttctgcccttggcctgttaggggcc

SEQ ID NO: 15542 - DNA, 120 bp, Homo sapiens
cagcgccattgtcgccactgtgggttaagaactaccctccctctactgtgggttaagaactaccctccctctcccacttaccttttaaaaaatgcctataattttacaaaggagaaaatg

SEQ ID NO: 15543 - DNA, 120 bp, Homo sapiens
acccggaatgacgtgtcgtcctcccatcccgtgtacagtgagcccacgtgctctgactcctgccgttcctgtctgaatgccctctgctttctctctccatctggcacagttcccccagcc

SEQ ID NO: 15544 - DNA, 120 bp, Homo sapiens
caccgagcacccttgccactgaacaacgggtgtgcatgcccagatacttgcctggatggtgagctgctgggggaaggacctgccttacctctttcttccccaggggctttatagggccca

SEQ ID NO: 15545 - DNA, 120 bp, Homo sapiens
tcccgcctccaatatcttatttcgaaaatgtccaaaccaaagataatggtataatgaacacccttcgcttagatttgccacaatttgctttttctctctctctttgtcttgctgaactag

SEQ ID NO: 15546 - DNA, 120 bp, Homo sapiens
taacgcctgctggaatcaacgaaagggagagcaaggacacggcgctgctcccctctgcctttggccccagtggataaccttgcacagcaaagcgctggcctttctaaaatgctaacacag

SEQ ID NO: 15547 - DNA, 120 bp, Homo sapiens
acacgcaaggcccctgtcatcccttcctgcctcatcgctcactgagccctggaagacagcctcgtcctcacacccacctgcgccccccatgtgctgctggacttgggccatggaacctct

SEQ ID NO: 15548 - DNA, 120 bp, Homo sapiens
ccccgctcacccagggagggcatatatctcttccatgtcccttgcaaacctgacatcctcagagaagtggaggacttccctgatatttcctctgccccttggcaccaagggcagcctctg

SEQ ID NO: 15549 - DNA, 120 bp, Homo sapiens
tgccgggagacagcagcctgagagtcaccaggggcaggggctgggctgctctctacctccccaaccctgccaaggccaggccacagaagaggcccaaggacaggcttgctgacgctggct

SEQ ID NO: 15550 - DNA, 120 bp, Homo sapiens
gaccgggtctgactggggagatggaggccaacttctcagcaaagctgtccttgcttcctcttctctcctgaaaaatggccacagaagccgtggaccacctgtctccaggcctccacatgg

SEQ ID NO: 15551 - DNA, 120 bp, Homo sapiens
gggcgggcagcatcccctgtcccaggcccctcctcctgcgctcccggcaatgtcggcctgactcacctggtgataccaagtgtatattctgtgtcaggagctgcggtgtgcaactcaaga

SEQ ID NO: 15552 - DNA, 120 bp, Homo sapiens
cagcgaggtagctgcccaagccaccagcagagggagggtacaagccccaactatctggctccagagcctgtgcctctagcccctacccaggatgcagagccctggctcccctggctggcc

SEQ ID NO: 15553 - DNA, 120 bp, Homo sapiens
ctccgccacgagcctgtgtagtccctgacagcagacaccacccacagtgttccacagtccagcaaagggctcagcacacagcaggctcagctgaaaacaatccttgctctttgagatatg

SEQ ID NO: 15554 - DNA, 120 bp, Homo sapiens
gtacggtttggtggctggcccaaggccacagagatgggcagtaccagagtgggtgggttctagcacactcctcctgcccctgtcacaacacgctgatggcaccacagggtaacacagcaa

SEQ ID NO: 15555 - DNA, 120 bp, Homo sapiens
ctacgaaacagtggaagggtcacacctcccacagcccagcaggagcacaggcttgggatggagcctgagcctctgcttcttgcttctgcccacagtgactagtggctatcccggccctgc

SEQ ID NO: 15556 - DNA, 120 bp, Homo sapiens
ttccgagggccctcagcctcacccttcttcagggaaacagaagggggctggttcggccccggaccatgggctcccgccagtgctcccaattccccagaccctgccgacacaaagcaggcc

SEQ ID NO: 15557 - DNA, 120 bp, Homo sapiens
gcccgccccgctcccttggcccacagcttggactgggcctctaggatctggctgctgagggccgggtgcagagcatgggcccctgtcctgaggtccagcattctcagaggagctttctgg

SEQ ID NO: 15558 - DNA, 120 bp, Homo sapiens
ttccggatgtggggtgggagtgacacacaggagtactgcagcctcctcccagcactcagggaccaagccagagagatgtgccagcgcctcccaagggagaagccattctccagcagctgg

SEQ ID NO: 15559 - DNA, 120 bp, Homo sapiens
ccccgcatgtccggccggggttctacccagagccagcctggcacagcctcggtccctaatcatgtttgctgaatgccttgaatacaagcgccggtgcccagaatctccttgaggtttcag

SEQ ID NO: 15560 - DNA, 120 bp, Homo sapiens
gggcgtgccgggcccatcccccactctggggagcagaatgattgtggggggtggtaacaggggacaccctgaggtggtggtggccttggtaggacaggcaggcagagctgggggtggggg

SEQ ID NO: 15561 - DNA, 120 bp, Homo sapiens
gggcgccctgggctcggctaattaaacagcgaccgtgatgaattggagagaaactgctgcttgctaattaaaggtgcaggcaacttgcctggcaaggatgggaggcagaagtcctggaaa

SEQ ID NO: 15562 - DNA, 120 bp, Homo sapiens
cagcgaggacagagcttggccaaagtcccccaccgtgcccattctgggcatccctcccattgccctcccccgcccagcaggggcccgcagccccctccccacttccctatctctccgacc

SEQ ID NO: 15563 - DNA, 120 bp, Homo sapiens
ttgcggaggaggaggctggcgctggtggctgggctgggggtggactcgctgagcctttgaggtcctccttcccgccccaccgccaaggtcccagaggtgggcagtgagtccagccaagac

SEQ ID NO: 15564 - DNA, 120 bp, Homo sapiens
tgtcggggacagagatggttgccgccatcctgggacagtgtccaacatagtgcaagagatgggctgggtgaggcataatgccagcgatgacagcaaccacccccagtggtgctggctgtc

SEQ ID NO: 15565 - DNA, 120 bp, Homo sapiens
tgtcgttgactgtggttcactgtgagtgccaaacacacatgctttgctgcatttactcctccagccccggagttgccactgctcccatttcagagatggggaaaccgtggcagggagact

SEQ ID NO: 15566 - DNA, 120 bp, Homo sapiens
ggacgttcaacttgattttcagcatcaccagcaaccttgctgctccttccccctctgggctagtagggtgagagctcttctcagagacaaagaccaggatgcaggagcaggcatggcttg

SEQ ID NO: 15567 - DNA, 120 bp, Homo sapiens
agccgcctgcaaattgcttagaagtgttgataattacagcaggcccaatcccatcaacacctgagggagaggaaactggagggtcctccttctgtaagcttatcccagagcccactgaca

SEQ ID NO: 15568 - DNA, 120 bp, Homo sapiens
caccgataaccagtagcgcttttccttttctgagctgagcaagcctcagagggcgagtgaaagaggagccaccggaaggtgctctggcaggtcagattgcccacgcatgccagtgtccag

SEQ ID NO: 15569 - DNA, 120 bp, Homo sapiens
tttcgtgttatagatggggtcatagaggaacagaggatgaacagagtctgcccaagactgttagcaggttagacccaagcccctgactccccatcccccacttctcttctggtgcctgac

SEQ ID NO: 15570 - DNA, 120 bp, Homo sapiens
gagcgctccaggagctggtgcatgggtggaaaggtggaattcctccccactgctgccacccccaacactgcccaccccaggagcctcctggcttccaggggtggctgcagagacctgcta

SEQ ID NO: 15571 - DNA, 120 bp, Homo sapiens
gagcgaaaagggggaggggagactgggtgagtcgtactcccttccccacggcccaccccgacaagctaagaaaagctctggggggagaaaagctgctaagatgcacagttgccctcccct

SEQ ID NO: 15572 - DNA, 120 bp, Homo sapiens
ctccggaaaagcaggcccacaccagcccatgggaggccgccggctgagtcagctcctctacctggcaggaaatcattcataaaaatgacacctgcccagagcccagcgcccagcctcacc

SEQ ID NO: 15573 - DNA, 120 bp, Homo sapiens
tgccgcctccctcccacctcctcccagccactgtacagggcagacctctttctctttctctttctcctgggaagaagaataatgagactgatgtgaaataaggccagctcggccttcgtc

SEQ ID NO: 15574 - DNA, 120 bp, Homo sapiens
ttacgggtcgcctgccctggggacaatagtagagtcaagaagagcaaccacttcactcaatgatgaacaaacatctgcgacacagcttccagaggttctcactgtcccagccacgtgcgt

SEQ ID NO: 15575 - DNA, 120 bp, Homo sapiens
tggcggacactctttacgttcagtttctgtgtggatgaccagaggctccttagacacacagctagacacagataactgggccaatcctcccacaaagggggtccgtagagcagtggtgac

SEQ ID NO: 15576 - DNA, 120 bp, Homo sapiens
aggcgagctggagagctgctggaaatcagctgatgtgctggcagagctccagcccagagtttctcatgacttggagccgacatattcccagcatctcagctcatttcaggcaaaatcatc

SEQ ID NO: 15577 - DNA, 120 bp, Homo sapiens
catcgagcatattttaggatcagcaaaaacccacaatgcctttggccgagcactttccctcttcttgttgaagcccaggggtattttctaggaaattgagtccatctgtttctgattcat

SEQ ID NO: 15578 - DNA, 120 bp, Homo sapiens
attcgtacttaactcatcaccgggctgttttgtaagagccctttgatgtgaaagccgccttattccataagcctctctaagcctttatttagtcaacagcaggtaaacgggcctctccaa

SEQ ID NO: 15579 - DNA, 120 bp, Homo sapiens
aaacgcctgcctggagacactgagactccccgtctttgggcctagcagggcaaagcagaccactccctagccctgacccagcgctgtggggctcagccacgcagagggacctcctctggc

SEQ ID NO: 15580 - DNA, 120 bp, Homo sapiens
tggcgactcactaactctcctccccaggcactgtaacccagcgtcctcctccataactcacagccttgctacatagatttacgatttcctgtatgttgcctaagagttccttttttttgg

SEQ ID NO: 15581 - DNA, 120 bp, Homo sapiens
tggcgacagagaaagattctgtctcaaaaaaaaaaaaaaaaaaagtattagattcaagggacattgtcaaattgctataaaaggttccaaatgcttattctcaatttctgtccttattat

SEQ ID NO: 15582 - DNA, 120 bp, Homo sapiens
ttacgtgggctccctccagagacagagtcccacccacgtctggctcattaccaaacgctctggcttggcccacggagcatgcttcaatgactccatggactaaaggaatgttcaagttaa

SEQ ID NO: 15583 - DNA, 120 bp, Homo sapiens
tcacgatgcttctgagggagccaagactgatctgattggtggtggcaaattcagagagctgagccagaaatctttccacctgcagagagagaacagtgaaaacccgggccttcactttct

SEQ ID NO: 15584 - DNA, 120 bp, Homo sapiens
gcacggacccactccctaacacagaatgttttatttacctcttttggctcagttaggaagtggaaaagcacctctgtcagggctgagaactgctgtgaagaaaacaacacagaacatcag

SEQ ID NO: 15585 - DNA, 120 bp, Homo sapiens
tgtcgctacatcatctgaaaaacacgtttattgggatacttagcagacatgtattgagagactgtaagcatatgcactcagatgcacacatatatctctaggacacagacacacacagac

SEQ ID NO: 15586 - DNA, 120 bp, Homo sapiens
acacgcacgcacaagggggaaatcatcagaaaattaaaagcggttaccactttggatgatttttattttcttctgttttacctatccatattttctttcttttctttttttttctttccc

SEQ ID NO: 15587 - DNA, 120 bp, Homo sapiens
aaacggtagagcaggctgagtctggacccagaacaaatccaggaagtagaatccaagaagcagagagatgaatcaagaatgacactaaggttttgggcttcattccatgctacactatct

SEQ ID NO: 15588 - DNA, 120 bp, Homo sapiens
agacgcccagagaagggaagacacctgtctgaggtcacacagtgggttaataggagaatgagaacagaacctagaccgctgaacttttccccttaaccatcttaccctcctcagaagtca

SEQ ID NO: 15589 - DNA, 120 bp, Homo sapiens
aaacgaacatttactgattacctaatgtgggggtagatgtggtccctgctctcagaaagctcaaagtgtgaatgaattaaagtcaatgtgaccaggcgcggtggctcatgcctaaaatcc

SEQ ID NO: 15590 - DNA, 120 bp, Homo sapiens
ggccggctaattgcacagagcagtctgagcctgagaccccagccctggcctccccactctgtcctgggtgctggcgtctgagccttcgggacagcctgtccacatggaaccaagtcctga

SEQ ID NO: 15591 - DNA, 120 bp, Homo sapiens
tggcgggggaacactgtccctctcatgtccctgcttccctttcaccccacccattctggcttctcccacaggaaagcatgaagggagacaccaggcatctcaatggagaggaggacgccg

SEQ ID NO: 15592 - DNA, 120 bp, Homo sapiens
cggcgggagggaagactcgatcctcgtcaacggggcctgcagcgaccagtcctccgactcgcccccaatcctggaggctatccgcaccccggagatcagaggtggctgggcagtggggac

SEQ ID NO: 15593 - DNA, 120 bp, Homo sapiens
aggcgctgacatagtgagcggtcactgcagacaactggaggctttggggagagtctctgacaacctccaccacaattccccgggagggaagagagctctagcaaggagggatgcagggtc

SEQ ID NO: 15594 - DNA, 120 bp, Homo sapiens
ggtcgagcccttcacacctgcccgcagcccttggcctcccctttgggactctcatctcagctgggactctgagcgtgacacaagggtgatggttccctgtcctctgccagtcatgacagg

SEQ ID NO: 15595 - DNA, 120 bp, Homo sapiens
tcccgccccagctgggttggaaagccctgcattgtcctctcagctgtgccatcccatggaacttcctgcgagcgtgaaagggttctatttctgcattgttccccacaatagccacactct

SEQ ID NO: 15596 - DNA, 120 bp, Homo sapiens
aagcggctgacacagcaggcagtgaattgttcctggaaatgtagttagtggtccctggatgggcagcaccctgctggaaggaatcggagggctccccttggtaacttcagtgttggtttg

SEQ ID NO: 15597 - DNA, 120 bp, Homo sapiens
tcacgtgcctggcccagggctctgttgtcttaggaataaaatcagtggagaagatgaacgatactgacggactgagagcaaatccctgtggctgacaatagtgtaggggagatcccaggc

SEQ ID NO: 15598 - DNA, 120 bp, Homo sapiens
ccacgccacggagaaaagcccctattagcaaggccgttccccagactggtgcctgcccccacaaaacagactcctggctgtttcctctacaggccgaagatcaagctcgcgactctccaa

SEQ ID NO: 15599 - DNA, 120 bp, Homo sapiens
tcacgtgggctgcctgaggcccataaaaactggcatctgcaaatgtatggagggttgccgagctagatgctttctgcatatatttggcattattttttcaatctggacgatcagttacat

SEQ ID NO: 15600 - DNA, 120 bp, Homo sapiens
ggccgtcttatcccctatgaaccattataccctgtttctcccttcaccttgattttttccccccacctttgttcagcatttaagagccaacctcttctcattgctaaaggcttcattaga

SEQ ID NO: 15601 - DNA, 120 bp, Homo sapiens
tgccgccttatataagatacagaggagatgagatagtgctggctggggcttctatatcttggtggtagagttaattctgatatgtctgccttttgagtgggaggtgaccactgacattcc

SEQ ID NO: 15602 - DNA, 120 bp, Homo sapiens
ttccgaggcctctccctgcacaggcccctccttcctctgtcacataccacagcccaggacagctgtctggctatgaaagggcccagtgtgaaggggaatgtaggccctggctgggggaat

SEQ ID NO: 15603 - DNA, 120 bp, Homo sapiens
tggcgagcacctcctccccacccccccattcatcacagactctgcctttgcagaaagctagggtgcgagctggcaagaccttccccagcagccctggagactcattggaggaccagctga

SEQ ID NO: 15604 - DNA, 120 bp, Homo sapiens
ccacgggggcttcaagcccactgggatcgagggcctcaaacccaacaacacgcaaccaggtgggaatgagtccccatggcagcacccgctgcctctgctggtgggaccacttcttgggag

SEQ ID NO: 15605 - DNA, 120 bp, Homo sapiens
atacgaaggctgtgccagctctatctggcttccccggccactttcttgctgatggtcacgtgcatataatttgtattgaatctgacatctgtcttgaagtcaggatgcagtgttgactag

SEQ ID NO: 15606 - DNA, 120 bp, Homo sapiens
agtcgaaggtgcgtcgtgcaggcagtaggaaattagaatcaaggaaatacggtatttccttcctgtcttttgactgtgccctgttttctatgcactttcttctgatttctttgcatataa

SEQ ID NO: 15607 - DNA, 120 bp, Homo sapiens
tggcgagggcagaaagagtgggacctggctggttgaggctgtcaacatcctggaggcacttctgacttgctgtcttttcactccggtacccccaggatctttggctttcctgtgcactac

SEQ ID NO: 15608 - DNA, 120 bp, Homo sapiens
agacgtgtccaacatgggccgtggtgcccgccagaagctgctgggaaggtcctggagcgtgcctgtcatccgacacctcttcgcccctctgaaggactactttgcatgtgaatagttcca

SEQ ID NO: 15609 - DNA, 120 bp, Homo sapiens
taccgtgtacctcagttccctcttgctcagtgggggcagagccacctgactcttgcaggggtagcctgaggtgccgcctccttgtgcacaaatcagacctggctgcttggagcagcctaa

SEQ ID NO: 15610 - DNA, 120 bp, Homo sapiens
acacggtgctcattttttcttctcctaaaactttaaaacttgaagtaggtagcaacgtggctttttttttttcccttcctgggtctaccactcagagaaacaatggctaagataccaaaa

SEQ ID NO: 15611 - DNA, 120 bp, Homo sapiens
atgcgcaatatttattcattagaagagaaatactaattaaaaccgctgtaagataccatttatcttattagaatggctaaaggagctgaaactctcctgcacggctaatgggaatataaa

SEQ ID NO: 15612 - DNA, 120 bp, Homo sapiens
cctcgggaggaggagccaggatttaactcaggtctccaaagccgcagtcaacaccacccccaagagaagggagaggagaaatccagagcccctagtgtccgcccgaccctgtcatctggg

SEQ ID NO: 15613 - DNA, 120 bp, Homo sapiens
aaccgtccacctggcagccgcacccacatgtgtctccctctgctcaggctgctgcccacaccactctttggggtcgtggaacagatgctcttcaaggtgcttccgggactggtgagtgtg

SEQ ID NO: 15614 - DNA, 120 bp, Homo sapiens
gtgcgggccgtgtgccagcatgccctctcccaggactgggcctctttccccctctggttttgggtgaagtttggcgccaggcaggattaggctgtacttcccttccacacccacctggta

SEQ ID NO: 15615 - DNA, 120 bp, Homo sapiens
atccgggcctgctgaccggccttcctggcgcgcctgctagtctgggggtggatgacacgatcctttcggcctgggtcccctgctcccaaatcgtaggctcctaagaagggtaagaacccc

SEQ ID NO: 15616 - DNA, 120 bp, Homo sapiens
tagcgtgaaatgaaaattggatcacttggtgattttaaactgagccctgtgcttggcaatcatgtctagaaaaacacatgtacctttattcatacatcacaattaaacatattaagatta

SEQ ID NO: 15617 - DNA, 120 bp, Homo sapiens
actcgagagagctggtctggcccaaaccccatatcaccgaggaagaggggagggccacatagacagcaaagggcagtcaggcctcctgaccccacggcctagctggctctccctgtgcat

SEQ ID NO: 15618 - DNA, 120 bp, Homo sapiens
ttgcgaacgctgctgggggcagcagaagaatgggagcctagggttggcaaaactgccctgggcttgaggaagccagtttggaaaagaagcttagcaggaggaggggcccctaagcaagac

SEQ ID NO: 15619 - DNA, 120 bp, Homo sapiens
caacggcagcccctaacttagtctctggggcaattggccagcagctaggttttgtgtgatacaaagaggttttgaaaacgagcattcattgccaacattcagcattgaagatttctcgta

SEQ ID NO: 15620 - DNA, 120 bp, Homo sapiens
acacgtggtgatatgcagaatggacactccagatccaggcctgactctctgggtggaggagaggaggtgcccctctgtggggtcttgatcctaggcttcccagtgcccacgtagaatggc

SEQ ID NO: 15621 - DNA, 120 bp, Homo sapiens
agccgcttttgcctcctcaggtgaaggccttgtccgcatgcccaaaccagcccctgaaatgtgtctcccgtggtcccccagccacctttaggggttttctaatggggctcttgtaaccaa

SEQ ID NO: 15622 - DNA, 120 bp, Homo sapiens
ttccgccttgccttggtccccagcaccacatagcagcagatagcaaagcatttaaagaacatgcagctgtcctcgcagtgagctcttctttgccctgtaacatgtgtctccctgacacag

SEQ ID NO: 15623 - DNA, 120 bp, Homo sapiens
aaccgctccatcattcattggctccattggcccgcaggtgatatgagtgcaaactcacattccatgagtttgagctcattgttgtgttgcttgggcagtaaaatatattctttggtcaga

SEQ ID NO: 15624 - DNA, 120 bp, Homo sapiens
gcacgctgccagcatctgctcagcttctggagaggtcttttgtgtggtgacacaacttggcagagaaggccatagaggaagcaggcacatgctgagaagggccaaactcaaggggtgtcc

SEQ ID NO: 15625 - DNA, 120 bp, Homo sapiens
tcccgtgggtgctaatacatcctcccagaaccaatccagtcttgtgagagcaagaactccatcactaccaggagaatgacactaagtcatcagtgagagatccacccccatgacccaaac

SEQ ID NO: 15626 - DNA, 120 bp, Homo sapiens
tggcgatcaaacaaatgatatccaaaccatagcggtggactttcagttgtcgattgttgctggctgtggggcacaagcttaactggcacaagacttctgtccacattccattttaaaagg

SEQ ID NO: 15627 - DNA, 120 bp, Homo sapiens
gtccggttttattggtgggatttgtaagcaccccagtacaggttacagcatcacaggtggcactcctgccataaaatgctcagtctcctctagtgcccaatagcaagcaaggagttgccc

SEQ ID NO: 15628 - DNA, 120 bp, Homo sapiens
gcacgccagtggcagtttcctgttgccacagattccaatcagcatgcttggcggtcatggacgcacggagtcccattgagctagcaggttccaaaggtcccaaaggcagtacctgagcca

SEQ ID NO: 15629 - DNA, 120 bp, Homo sapiens
tgacgaggaaggccaaaagagcacccagacagggcatatgctgtctcctgtatacaaataggcctatcagctaatgggcctcctgtttattagtggatgtcactagggccaacaattgta

SEQ ID NO: 15630 - DNA, 120 bp, Homo sapiens
cagcgactgtcacacacgaggcaggtgccagcctccctctctctcagtgctgaccataccatctgtgtgtttgcccctgttctactgtttgacatacttgacctgtgctggccttattaa

SEQ ID NO: 15631 - DNA, 120 bp, Homo sapiens
gctcgtctggccctaataacaatccctgtgtcacctctatcctggtactttgcacacttggccaaggctcacggcagtgaaagcaacacatcaccctgcctgggttcccattcctggagc

SEQ ID NO: 15632 - DNA, 120 bp, Homo sapiens
ctacgcacatgctgcccacgtggatgaaaatcccagcactcagccggctgcctgcatccacctctgttgggtcacccaacacaccttcatcaactggactgtgggccccacgagggcaga

SEQ ID NO: 15633 - DNA, 120 bp, Homo sapiens
ttccgggaccggcatgactgggcgtttgttgctgctatcagcaatggcatcacaataattcctcagagtcccaggttggtgggggctgtgggtcgggcattgggaaaggaatgaggtttc

SEQ ID NO: 15634 - DNA, 120 bp, Homo sapiens
ctgcgcccaacctttattgactcatttgcaggccatttagtggggttgtttacatatccaatacatatatttagtgtaaacatttttttaattctgaaaaataccaagaagatggtgaaa

SEQ ID NO: 15635 - DNA, 120 bp, Homo sapiens
aaacgtgtactgttgatgcatttccttccagtatttttttctagattaaaaaaaatttttttttgttaaaaaatagaagaaacagtttcccttttcacttacttctgttggttggtctac

SEQ ID NO: 15636 - DNA, 120 bp, Homo sapiens
ccacggtttatttaataaatcccattgctggatgttaaggcgggtcccactttagggctattccaggtaaggctgcagtgagcatcctcacagttctctatgctcaaatcactggccagt

SEQ ID NO: 15637 - DNA, 120 bp, Homo sapiens
catcgtggagcccaacatctttattctatagctggggagactgaggctcagagagaactgacttatccaaaaccagcccaaaggtagtggcaaactccatgtcatctagggattttctcc

SEQ ID NO: 15638 - DNA, 120 bp, Homo sapiens
gaccgacattgttaatcaatcaccacattctctcctgctgagcccagacccttgaaagcttcaagagccatcaccaggcagctgaaattggtacaagagcaaaatgcttctaccatgctg

SEQ ID NO: 15639 - DNA, 120 bp, Homo sapiens
tttcgagccagtgacagttggcaaggcctctgatttccatctgtccacgtcatcagaaaccctctctggttttccgcatgactgcagtcttcccaggagagcttggccctcgttctggct

SEQ ID NO: 15640 - DNA, 120 bp, Homo sapiens
ttacgagaccctcaaaatagtcccatttcacaatggaggaaacagtctcatagagaagaagcaattttcccaaggctgacagctgtcagtataggagcaggaatctgagccgtgtctgtc

SEQ ID NO: 15641 - DNA, 120 bp, Homo sapiens
tgtcggcctccacaggcttcctcctgcactcctgcgcttcttcccagacagggcacaattaggttttcaggagggtgaaggaggtactccagaaagaggacacggcacaaaaaggcctgg

SEQ ID NO: 15642 - DNA, 120 bp, Homo sapiens
agacgccagcaacctgaggaggggccacgcggtactgagggcaggtgtggagtctggggaccatgggcctgcagagatgcagccagctttgctgtcccagcacgtggcaggaagcaggag

SEQ ID NO: 15643 - DNA, 120 bp, Homo sapiens
atgcggccccaggtcttggcattgggcccgagcaccgcacagagggtcattgtccatgggcagtgggcatggccagctgggaagccaagcaggggcatttgcctctctggagatgtgccc

SEQ ID NO: 15644 - DNA, 120 bp, Homo sapiens
gatcggcagggtcctcccaagagctctctcaaaacacctcacctttaggtattcagggcttttggtgtgtttgcaaacatggcaggacagcaaacgctcttcaccttgttcttcttgtca

SEQ ID NO: 15645 - DNA, 120 bp, Homo sapiens
ccacgtactttgtgacctcagaacacttactgcccctgacttgtctgctgcagatggagacaggattcaacaatggccatcccagctctaaaccacaattccattcttctagacaaaaac

SEQ ID NO: 15646 - DNA, 120 bp, Homo sapiens
tggcggttaagagggtccggtctggactgatgatcgggttcaggtcccaaagctggaatccctggtcatgtgaccttgagcaagtcactcgcctctctgagcctcaggtgccctctgtaa

SEQ ID NO: 15647 - DNA, 120 bp, Homo sapiens
taacgctgctgatgcccacctctgggtgactgtgcaggctgcgtgagccaagacctgggcccaggtggtggatgacagcgtcctgctgggctctgacatttgtcctttaggttcatggtc

SEQ ID NO: 15648 - DNA, 120 bp, Homo sapiens
ctgcggaatgaatgaatgaatgaaatgaaagcccatgctaagcactgtgtaggcatgcacttcaactcatgctcttaacaacctatgaggaggagctactattatccccatgctatagat

SEQ ID NO: 15649 - DNA, 120 bp, Homo sapiens
caacggccactcacatttatggagtgcttattctgctatatgcactgtgcttctctcagcctggaccttcctttctccaaacctcaggaagctggagtcccaaggctgcctccgggcggg

SEQ ID NO: 15650 - DNA, 120 bp, Homo sapiens
cctcggcctggtctgaggcctctgcctaaagacaaagcctgtgctggggtgtgcaggatataaggttggacttccagacccactgcccgggagaggagaggagcgggccgaggactccag

SEQ ID NO: 15651 - DNA, 120 bp, Homo sapiens
cagcgtgcccaggtaaaagtagggaaggggctgaaagccaaggttgccaggaaggttctgagctagagatacctgttggggtcaggtcaggagcacaggggaggctcgccctcagggaag

SEQ ID NO: 15652 - DNA, 120 bp, Homo sapiens
cctcggtgagtcaggatccgctgagggtcagggccaggtgtagagagatgcccagctccctcgcccagaggaccaaagggcagtgacgaagggatggggctggctgagtgttttcctgac

SEQ ID NO: 15653 - DNA, 120 bp, Homo sapiens
ctgcggtggtgctgggacaaaagaagcatgagacgcagactctgtccctcaaagaactcccagtgcaggacaatgtggtgcccaaggaagacccagggacatgggagtggaggacagtca

SEQ ID NO: 15654 - DNA, 120 bp, Homo sapiens
agccgagtagaaggcgattgggcaaaggaggagagaaagatattccacgaaggggaactagcagaagcaaaggctgggagaggaggtgccatatgacaggggcgtgtgtggtgcctggat

SEQ ID NO: 15655 - DNA, 120 bp, Homo sapiens
cctcgtgggtccctgggtttctctgatccaaagaggactgagcagtgtgtacagataatgcaggacagacagagtcaaggtatttgcaaggaaaatatggagtggggccacaggggtgcc

SEQ ID NO: 15656 - DNA, 120 bp, Homo sapiens
tgccggggttcagctctgtcttctggctttggctgcaaggtgtctccttctgactccaatattagtaataatacctgtcataattatcgtggaagctaccatctactgaacgcttggcca

SEQ ID NO: 15657 - DNA, 120 bp, Homo sapiens
tttcggggcttccagaggctatgcaattattcagcagccatttattaagcacctggtctatgccaaccactatactggatgccagggacacagcagggagcaggcagacccagccctccc

SEQ ID NO: 15658 - DNA, 120 bp, Homo sapiens
atccggatgccacatttgtctttggcaaaaagaaatccacatgctgaaccaagcgaggggctcagatctctgcagcgtctcccctccctccaagcaggacagtccacaggggcaggagct

SEQ ID NO: 15659 - DNA, 120 bp, Homo sapiens
aggcggccatccctgcttgggtgaccctgtagtgtccacttctcccctgagttgcatgtctccaaggtcctggtctgtcttgacacaggcctttcagtaagtgccttcccctccctcaag

SEQ ID NO: 15660 - DNA, 120 bp, Homo sapiens
ctccggccacagtgtcacgcgggcttgattgccacaccttccgtggctcgccttgctcgagtgagtgtgacctgccttcacctgtggtctctgtctaccaggccatgtccgccatgtccc

SEQ ID NO: 15661 - DNA, 120 bp, Homo sapiens
tcccggggagggcagtggggctgaggcagaacctaaatgacatgacatcttcattatttggggcctgccctttggcctccactcccggtcccaccgcccacaaggagctgtgggatctga

SEQ ID NO: 15662 - DNA, 120 bp, Homo sapiens
ctccgtcactggcctgaatccccctctgtctcccaagcccctgggcctctgtcgctcactgaatcagggaacggggcttatctttaaagaacagatggggaagttctcattttttattaa

SEQ ID NO: 15663 - DNA, 120 bp, Homo sapiens
ctgcgagaatcgctattttaaatacatttgcatagcgcctcagctgcccagtggggctgggtttgcttttcccgcccccggtctcctatcttggaacaaggccaagtgcggtgtcctgca

SEQ ID NO: 15664 - DNA, 120 bp, Homo sapiens
tgccgttgtcagtgttcccctggcatgaacaccaggacccccagggccagtacgggcacttatagatgctcaatgtcagctggatggaatcttgggagcttggggaaaatcagtgcttcc

SEQ ID NO: 15665 - DNA, 120 bp, Homo sapiens
cctcgtccactgcttatccaaggactgtctgtgttctcattcattcattcacttattcattcattccttatttctacaagccacctttgaacaccaccatttcaggtgctattctggatg

SEQ ID NO: 15666 - DNA, 120 bp, Homo sapiens
tcccgccctgcaggagctcaccttctggtgtggaggaagcaggagaggtggcagacaggagcacgcgcagagagaaggccatctcagagaggcctgagggcagcagggctggacggcggg

SEQ ID NO: 15667 - DNA, 120 bp, Homo sapiens
gggcgaggatcgaagttagagtggtcctcactgatgaaggacacatgcgcctgagatgtgaaggggcttctgcagatcaagggaccccaaggtcctgttgtcttcaaataagaggcctgc

SEQ ID NO: 15668 - DNA, 120 bp, Homo sapiens
cagcggttctcactcagcacatctggagacatttcagttgtcaccacttggaggggagatgctactggcattcagtggggagaagccagggaagctgctaaaacgccctgcagtgcagca

SEQ ID NO: 15669 - DNA, 120 bp, Homo sapiens
acccgggtagtgtttccagggcaaacaaggcacagagctcttacaggaaagaggcttcataaataaaggctcagtcttatttcactgcctaaaaaatccatggaggaaaaaaaaatcacc

SEQ ID NO: 15670 - DNA, 120 bp, Homo sapiens
gaacgtgactgtgtctcttcttcaaagcgttggttcctggagcgctgggccttttcccgaggctctcagaacaacgagggcgattcaggggatacctggacaggtaaccgccttggaaga

SEQ ID NO: 15671 - DNA, 120 bp, Homo sapiens
aaccgtgggctccgaattggcagaattgtctcttttgctgctcaatcccagtgctgagcattggcctgcacctagtaggtcctcagccaatgtttttcaatgaatgcagcaatgatgaca

SEQ ID NO: 15672 - DNA, 120 bp, Homo sapiens
attcgacttggattttacaatgtaaatattcagtagccaaaggtgggatgtttttacagcaacgattagcactccggcaggctgggcaaatataacttgtcagatgggattggaggtctt

SEQ ID NO: 15673 - DNA, 120 bp, Homo sapiens
cttcgagtgttgacttaacacctataaacggcgcagaaacaacccatttctgcctggcccatgcttctcttctcctggcctctcctctcctccacagcagatggtgccctcaggcaagcc

SEQ ID NO: 15674 - DNA, 120 bp, Homo sapiens
gcccgggaggacaccctggctttgggccttggccacctggatgcctatagtgccattttctgagttggagaagaggggctcagggattggcactggaggctggagattcaggatcaagat

SEQ ID NO: 15675 - DNA, 120 bp, Homo sapiens
gggcggccagcgtgagagccaactcccttgtgggtacttccggccaagaccctccacatcctgaaggtgcctcccagttatcttcctctgagagctgtatggggaagctggggtcaggat

SEQ ID NO: 15676 - DNA, 120 bp, Homo sapiens
cttcggggaaggcagaccggttgcatcatgtctcttcacctccatctgtgcatgtgggcatctggggagtgtggtaattagcagaattactctccacacacacaggaacactcacgtgca

SEQ ID NO: 15677 - DNA, 120 bp, Homo sapiens
agtcggctcagacctggcagtagctgacacacttgctgtctagacaaggctaagagctggtgtgccactgttggggagtgggcagctttgagcttcagctggggctgcatgcaaacatga

SEQ ID NO: 15678 - DNA, 120 bp, Homo sapiens
acacgctcacgtgtgcacatacatacacacgcatgcacacttgcacactgggatggtttagtaaagtttaattaacatgcagaatgtgcttgatcacacccggggggaaatcccagcgca

SEQ ID NO: 15679 - DNA, 120 bp, Homo sapiens
ccacgctttggatccctgtcatcaaatcaccatgtatcttggaattaaggaatacgcagcccctggtgatctgccctgtctcctgcaggtgcttccacatgagttttctggaggctgtgc

SEQ ID NO: 15680 - DNA, 120 bp, Homo sapiens
ctccgtggggctgctcggggctcggggttcagggattctagagaggccatctcagacaggcaggaaggaggggctggagtttggctgccagagtcggcggctgctgccttaaaatattcc

SEQ ID NO: 15681 - DNA, 120 bp, Homo sapiens
tggcggcgaagccgtaacccgggtgcattgtaagagagggagaatttcattttgtttttgaaatgctgttattacacactcaggaaacccacaaaggcaccttggcaggacaggatcaaa

SEQ ID NO: 15682 - DNA, 120 bp, Homo sapiens
actcggagtgcagcaacatttacttagcaaatgacattttaatgccgcaagtcgaatttacatactaattaaaatttccctttaaaacattgagacttttggcctccccgcctacccaaa

SEQ ID NO: 15683 - DNA, 120 bp, Homo sapiens
tgacgtcctgtcagacagagctccctggaaaaggtggagacacattctcaccatccccagactgccttcttgggcagaatttagtggctgggccttggtgccgcggccatcacctgccct

SEQ ID NO: 15684 - DNA, 120 bp, Homo sapiens
ccccgcttactgtgagttgggaaccccagcaggaaaggaggttgagggctgcctcgtaacttggtgaggaggcttcaccatcccttcggtgccttcagggaacgttcttcccggtctttg

SEQ ID NO: 15685 - DNA, 120 bp, Homo sapiens
tggcgtaattttaaaaatgtgccaagtctacccaggcaggaagcaactctgaaggttcattttggtcctggagccaagagtcccaggccagctgggaacatatccctctctgcctgatga

SEQ ID NO: 15686 - DNA, 120 bp, Homo sapiens
tctcgcctgttcctgggctggcggggggttggggggattctgcctcaaaggtccccagactctctgctcagccatttgatgaataattattaaacacctgcagtggtcaagcaccgaact

SEQ ID NO: 15687 - DNA, 120 bp, Homo sapiens
tgccgagccccctgctcactcggagtgtacattttagccagagagataacttctgttaacaaggtgatcttagagagtgggaggtgccctgctgactctagaaagctgtgcatgagcctg

SEQ ID NO: 15688 - DNA, 120 bp, Homo sapiens
ctccgtaggtatgatctcaattaccttaacaacaaccccaggagggcaacattgtcatcattaccttcatttcatagatgagaaaactaaggctcagacactttaagtaacttgctttgg

SEQ ID NO: 15689 - DNA, 120 bp, Homo sapiens
ggacgaagacattaaacacataattacaaaatatttaactttcaaaaggcaacaacatggaagcatcaaaccatgaattggggtacatgactcaaaaagaaggatcagaagaggttcctc

SEQ ID NO: 15690 - DNA, 120 bp, Homo sapiens
ccacgaggagttggctgtaattgatgaggtgacaggagctcgctccaagtaggtgctatggaaatggagaacattcaggaagtggaattggctgtccctggtgatgacaaaaacatggtt

SEQ ID NO: 15691 - DNA, 120 bp, Homo sapiens
aaacgaatgaattgattcagcctcagagatgagagagaagcgggtgcttcaaggtggctccaggtgttggggtttgagtcccatagtggattttggagactgtaggtggagcagcttggc

SEQ ID NO: 15692 - DNA, 120 bp, Homo sapiens
tggcgggaagcagagagggtagatgaaagtcagtcccagaccctatgagcttctggttgccacggaacagccacccctccctcccaggatgtggctgtctctggggcctggaagtcactg

SEQ ID NO: 15693 - DNA, 120 bp, Homo sapiens
taccgccattaattgactgagggcggccacacttctcccctccagccgtctttctgacactgagatccgccacacagcgcatctgcctgcacaggcaggaaggaaaagtggcagggtctg

SEQ ID NO: 15694 - DNA, 120 bp, Homo sapiens
ttccgtggagaccccgcagtacctgggccatatattattatactgtgcttcttctcctagaagaagaaacataataatagacaaacaaaatgaaacacacacaaaaataaaaacaagaac

SEQ ID NO: 15695 - DNA, 120 bp, Homo sapiens
acccgtttgcagcactcagtcccaatatcccactcagggaggccattcttctcccgggaaaacagctttccagttcagctctggttagtgggaacaggggtgtggagtcaacagaagcaa

SEQ ID NO: 15696 - DNA, 120 bp, Homo sapiens
gcacgtcaggataaatgccctgtttctagtagtgtaattagactaatcgtagtaattgtactaactgacatttttgaaattgtactctacatgctatgattaacacctccatttcataga

SEQ ID NO: 15697 - DNA, 120 bp, Homo sapiens
cagcgtctaccagccctccacactgcaggaggaaactcggcagtcacacagggcattgttaggagggggcacagtagctattcatttgtttcaatggggattatttttttcttggcatct

SEQ ID NO: 15698 - DNA, 120 bp, Homo sapiens
cagcgtcttcagaagtgaggatatcccagcccctagatgtgactcagcagacccctgggggaaagctggggcactgtagaccatcccagggggccaagccaggccggtgcagcctgaggg

SEQ ID NO: 15699 - DNA, 120 bp, Homo sapiens
tcccggggaagcaccatccctgctccagcctcgcttgaacaagagctgatgccaccctgcccggcatccctccccacttctttgaatgacagtcttcaggctttgtttggggacctcccc

SEQ ID NO: 15700 - DNA, 120 bp, Homo sapiens
agacgatgagatctggatggggctccattgctggccagcacacatctgtcagtcttcatcttcctgggcacggggtgggtgtgtggccaccttaggctggggcagtcagagcgaacttca

SEQ ID NO: 15701 - DNA, 120 bp, Homo sapiens
ccacgcaagtctgcagtagggtctcaaacacaaacctttacatctccattctctgtgaatcccatcaatggcacaatgccctccagagaaggttccagtgttcagcatggtaggtgaggc

SEQ ID NO: 15702 - DNA, 120 bp, Homo sapiens
ccacgtgcacgggaacggagacacccaaggaggagactgtgccctgtgatggagaagagctaggtgtccacattacattctgcacagacagtgatggagcctgctccaaggtacaggctc

SEQ ID NO: 15703 - DNA, 120 bp, Homo sapiens
atccgtggaccctgcacccatggttatccgtgtcagagtcggggccagcccttaaacgcatctggatggaagagccatgaccaaggagccaggcggatctggtctcagtcatgttccaag

SEQ ID NO: 15704 - DNA, 120 bp, Homo sapiens
gtccgtctgtgaaacggggatgcttttggcacctaattcatgcggctgttgtgtgtacatgatactgcggcctacatgcccggcacagcacctgcccctagcaagtgttctgtagacatt

SEQ ID NO: 15705 - DNA, 120 bp, Homo sapiens
acccgattcccccttaagagagtctctttcagccccagctgagacggaaatgaggaaatgaacctgacatccactctatacatccctttgatgagagtcacccttcaggaggagagacct

SEQ ID NO: 15706 - DNA, 120 bp, Homo sapiens
atccgcccagacagctctcagttctccaattctcttaagcaaataacaacgaaaaaagaaatcttttcttcaacctctaagtgcagatttctataataaaaagcatggcattgaagcagt

SEQ ID NO: 15707 - DNA, 120 bp, Homo sapiens
ccccgcaaccccatctctctctctccccttgtcctcgccatcttcctttctttgaggccagatgcacgcatggaagagatagcatcatcgtaggccacgacaggtctccatggagtccaa

SEQ ID NO: 15708 - DNA, 120 bp, Homo sapiens
ccccgggtgcttactccatgaactcctgattcctcagcctcttaaagtggggataataacactaacagctcaggctttctgatggttggggactgccattgttgaatgcatagattcaac

SEQ ID NO: 15709 - DNA, 120 bp, Homo sapiens
tttcggggtggcgtggtggacaggcttgttgaatgcaccctagttgataccccttgagggacattatcaaacacccaacttacagatggagaagatgaagttcagaccagtggagaagca

SEQ ID NO: 15710 - DNA, 120 bp, Homo sapiens
gggcgttggaggggggctggtggccaaggctgctcctggaccctgtatggtcgtgggaaagacactccaccctgggaatatggtcagctggacacgtttggctgggaagcactttgaagc

SEQ ID NO: 15711 - DNA, 120 bp, Homo sapiens
ctccgtgcaggaagcagcacagggactgtaggcacatgaggctcaacctgaatcctggctctgcctgttttcccggcctgttttctagctaggtgagaagggagtttgggaagcctgagt

SEQ ID NO: 15712 - DNA, 120 bp, Homo sapiens
caacgctaccaggcagggatgtatgttatcctcattttacagagagaagagctgaggagcagagcgcagcttgccaaaggctgagaagcagctgagctagggttcaaactgggctccaga

SEQ ID NO: 15713 - DNA, 120 bp, Homo sapiens
ccacgaggagatcctccctcagcagttcctatttcagaagcacacagcccagtcagagcaaccagaagcaggtaaatccccttccacagcaccacaggctccgggaaggacacacggcag

SEQ ID NO: 15714 - DNA, 120 bp, Homo sapiens
aggcggtctgggaggagtggtagagccacagagaacaaaccagtctgggagtctgagctggcccttaaggaggcatcggggccagacgggaggggccgaggagctgggctttctccaggg

SEQ ID NO: 15715 - DNA, 120 bp, Homo sapiens
actcgcccaggctcagcccagctcgtgggcctccttccaggggcaatgaacttccccaggctcccccgccttttccttaaacaagcccgaagccctccaggctgaggactcctaatccca

SEQ ID NO: 15716 - DNA, 120 bp, Homo sapiens
aggcgggtctgcagcctgggggctgaggaaggaggggacatgggcatctgagacagcagcaagggaagcagggcagcgtacagggctgagagcagctgggctgggctgacccccggggaa

SEQ ID NO: 15717 - DNA, 120 bp, Homo sapiens
aaacggatctaaggctcttctccttagacccacatgttagtgcctggctgcgactacacccactgcagagagcaacagtcgtaatgatgacagtggtggtgaccatttatgaagcactta

SEQ ID NO: 15718 - DNA, 120 bp, Homo sapiens
ggtcgcttaaaattttaagtaacaagtagagtgagtggcatccccgttcctggtttatctctgtgccatctcacggtggggcagaccagggggaagaagagaagaaaggagagggagtag

SEQ ID NO: 15719 - DNA, 120 bp, Homo sapiens
ggccgtgctttctgctaggaatggctgggaaggactttaaaaggagcacaggagttgggtttcctccaaaacacccagagtcctcgcccaccccccactcctccctgcactacccccccc

SEQ ID NO: 15720 - DNA, 120 bp, Homo sapiens
tggcggaggtcgggggggatctccagccagttacaccccaaggagatggaaatcaaagccaatagaaactcctgttgttcaccagccccttcaaacatcctgcttggagcagattcaggc

SEQ ID NO: 15721 - DNA, 120 bp, Homo sapiens
cttcgccaactggtggagcaccatttccaaataaaggggctccaaaagcaattctaaagcagaacttgaaagtcaaatcacattctcaaagctcgtgcagttaaaacacgggtcagatgc

SEQ ID NO: 15722 - DNA, 120 bp, Homo sapiens
acccgccctcccactagctgcagaaaagcagctaggcttgagccgttcaattcagtagccattaggattatgtggttcttcagcacccagtgtagccaaggaattgaattttttaagttt

SEQ ID NO: 15723 - DNA, 120 bp, Homo sapiens
tctcggaatatctaccatagccacagctccatctgaccacagccacaaaagattctccacttttaaggaccattatgattatactgggccacctggatcaatgcagggtaatctcctcac

SEQ ID NO: 15724 - DNA, 120 bp, Homo sapiens
gatcggtcacttagcaaccttaattgaatttgcaacccaaattctcccttctgcggtataaagtcacatattcacaagttcccaggattaggtcatggttggaggccattcttctcgcta

SEQ ID NO: 15725 - DNA, 120 bp, Homo sapiens
tgacgcagccctgctggccccgagccacactgggtgcttaccggcaacgtgttgcactctgcaaccaaaggcaaggccgcatggcacccatccttccctcctgccccacatgctagtatg

SEQ ID NO: 15726 - DNA, 120 bp, Homo sapiens
tttcgtggccaatggagatggtcaatgttaggggttaaaggcatattagcactaagccgagactttctctttgagatcactagagggattctgaagaatggaaaaaggggccaggcacgg

SEQ ID NO: 15727 - DNA, 120 bp, Homo sapiens
cctcgctatggcaccattccacgagagaagaatctcaccgccctccaccccattataatcactttagataaaccctgctcacaggcggcaagaaatttaaaaaaaaaaatgtgggaatag

SEQ ID NO: 15728 - DNA, 120 bp, Homo sapiens
tgccgctttctcttcttaattgtgggtctgtccagggaacccacagcagtggataaatcacggtgatggttggcaagccactgttgccacacagctacccgaagagttacaatattatct

SEQ ID NO: 15729 - DNA, 120 bp, Homo sapiens
tcccgctggtaacaacttcctggtcttcttagtggagacccactccccccgacctttggtctacgtggtctgggtggggctggcgtgtgctcctctgtccctccaccccactcagtgggt

SEQ ID NO: 15730 - DNA, 120 bp, Homo sapiens
attcgtgatggttaactggatgggtcaacccaattgcccagggctgcccagatcaaatgttattctcggtgtgtctgtgagagtgtttccagataagctgagcatttgaattggtagact

SEQ ID NO: 15731 - DNA, 120 bp, Homo sapiens
gcacgtgcctggcccaatgagtctcagactcttttaaacaaaagagtttcaccagtgagatttggaaagcaggcatttgtcatcagagtagcaggtgtggttgtgcctagagctccttct

SEQ ID NO: 15732 - DNA, 120 bp, Homo sapiens
actcgtcctggcttgcctgggactgtcccaattttaaaacttaaaattctgcctcctggagtcctcctcagtctcaggaaaaccagaatagctggtcacccttaagaagggatgcttggt

SEQ ID NO: 15733 - DNA, 120 bp, Homo sapiens
tctcgtgaaacctaagatgagcacagctgtgctttcagacaaagcctgtccaacttcccagtttactacagagagttgctgtgagggcctggatccctgaatggctgcgtgaagccgcac

SEQ ID NO: 15734 - DNA, 120 bp, Homo sapiens
gggcggtgattgtgtttggcctctgagatttgggggttttctgtcacagcatttggactcccctgactggcacgctattggacccttaactttttggccagcattgtctagcatgaggct

SEQ ID NO: 15735 - DNA, 120 bp, Homo sapiens
caacgagagaagcctcagaagaaggcaattctgccgactgcaaaaagcaaggaaatgaattctcccctagagcctccagaagaagcacagccctgctgccaccagaaccgtaagacaata

SEQ ID NO: 15736 - DNA, 120 bp, Homo sapiens
cctcgtggacgtgtgaattttcaaaagcaaattgccaaccctctctctgctgcttcgtggtttatttgatggagtgtgtgtttagccaggcaggggtagtggggaaaaacaaggctctgt

SEQ ID NO: 15737 - DNA, 120 bp, Homo sapiens
ttgcgtatcctctggggtgtttctcattttagtctcacaacaggtctcataccctcctccccttaagtgacatggtgggttaggagagtggtgctgcgggagagacgcagtgctgccaac

SEQ ID NO: 15738 - DNA, 120 bp, Homo sapiens
acacggtgctatggctgcagtcacacgcccctcaggctggagaaagcagacagctgcacccacgggctcacatgtgccagctccatctgcgagatcattaaaattgagccttggcagaat

SEQ ID NO: 15739 - DNA, 120 bp, Homo sapiens
cttcgtaaagaggaagagtaaactttcctgtcgtcctcataagtttctgcaattactttaatgtgcaaagcgccttgtacaaaagcaggaagctgttacccggactaaggcaccaggatg

SEQ ID NO: 15740 - DNA, 120 bp, Homo sapiens
ttccgttaaattatacgtgaaattacacgttctctagcgctggtggcttagtcgccgtttaacagtaataagacacacaattccagtgctcacaatggtgttcaggggcttggcaatttg

SEQ ID NO: 15741 - DNA, 120 bp, Homo sapiens
tcacgcatctagccaaaccaggtaggctccaagacaatcattcagacaaaacagactgtcttgaagatgaggagaggtgtggtcctcacaaacctggagtcaccaagaagagaatgagcc

SEQ ID NO: 15742 - DNA, 120 bp, Homo sapiens
gttcgtgaggctgaaggaccccaccctggagccatcaaaccatactcagcccctcctccacgctgcaccctcagctcctgggggaggtcggagtgtattgagccaggacagtcccagtca

SEQ ID NO: 15743 - DNA, 120 bp, Homo sapiens
gggcgtttggtttgtatgttttgtttgaggtctcctccctcaaggaagatttgctggatttagaaacctggaccaggggccccttctcactgtgcccatgagattctgtccaggcactca

SEQ ID NO: 15744 - DNA, 120 bp, Homo sapiens
atccgtgtgtgcccctgaattggtttgctagggctgccctaacacattaacacaaactgaatggctcaaaacaacagagatttcttccctcacattcgtggggctggaagtacaaaatcc

SEQ ID NO: 15745 - DNA, 120 bp, Homo sapiens
ggccgtgctccctccagagcctccaggggaagatccttcccaccctcttccagcttctgggggttgccggcaatccttggcttgtggcagactcactccaatctccgcttccatctgtac

SEQ ID NO: 15746 - DNA, 120 bp, Homo sapiens
gggcgccattcaacccagtccacccccttataagataattgccttttgagagcagagctggtgctgattaatctatgttggctgtcactaagtgtctgataaataattggatacatgcgt

SEQ ID NO: 15747 - DNA, 120 bp, Homo sapiens
ccccgggactgctgtgagtgttgaatataatgtgcaggggttctcaagaggtttgggggagaattttagaaatgctggggtagggagctgtttggggattatcacaatgctagcaccact

SEQ ID NO: 15748 - DNA, 120 bp, Homo sapiens
tcccgtgccactttatttggctttagtttctctgaaataaaactgctggatgcattcagtgaaaaccaagagtcgtttcacaaaatcacatcaccaacagcaatgtcactgtggtagctg

SEQ ID NO: 15749 - DNA, 120 bp, Homo sapiens
tcacgaggtggcacagtctggggggtggcacagtcaggaggatcccacccacaggcctggccacctgcccaccccccttgtctcgtaatgcagcaaagcctggaggattccatccccatc

SEQ ID NO: 15750 - DNA, 120 bp, Homo sapiens
gctcggcagctgggctcccgcgggggcatcctgtttatttgggcatcctgatgagagaccagagccaggagcagtgggacccaagggtcctttgagcccaggtccttcactggggccaaa

SEQ ID NO: 15751 - DNA, 120 bp, Homo sapiens
tcccggagcacacagtcacatagggacaggagtggggctcaggtggggctgcccctcatcccgtcaagcagaggcctcaaggacaacaggggaccctgtgatccccaggaactcaaggtc

SEQ ID NO: 15752 - DNA, 120 bp, Homo sapiens
ggacgtaaaatgggttttgggaagaaccagcaaagggccagaggcaggctgagcctcccacactggatggggagtgggctggacaattgagttgaatggccaggttgtctcagtgccccc

SEQ ID NO: 15753 - DNA, 120 bp, Homo sapiens
acccgctctgtgggaaattcttctgatcttccacaccagatctgcacccacatgtctcctcctcagagagacctgccctgaccgcctgtttaacacagccccacagcccctggcctgtcc

SEQ ID NO: 15754 - DNA, 120 bp, Homo sapiens
gcacgtcatgcctctctccctggcaccaggtcacacgtgcatttgtttcctggcttcattatctgtcttcccactcgatgtgccagctccagggaagcagagaccttgcaggtctgactc

SEQ ID NO: 15755 - DNA, 120 bp, Homo sapiens
acacgtccataggatgaaggaaccctcgatgtctggcactgttaatgaatttagtcttaattaatcatcttaacagaaatgtctcaaaacctcccaaggaggaaagcagaatttgttctt

SEQ ID NO: 15756 - DNA, 120 bp, Homo sapiens
agccgtggacctgggatgttatatattcattaattaatcaattcagctccgatgccagcctctgcttgcccactcactaatccagctgagggacagttgggaccaccctaatactgggcg

SEQ ID NO: 15757 - DNA, 120 bp, Homo sapiens
ccccgaggcaggctctggacacctgctcatctcatggctgctcagccagaaaaatgtcctcctacatcgtgtagatgatccccttgctgttgtctcagagccattttccagctctgggtc

SEQ ID NO: 15758 - DNA, 120 bp, Homo sapiens
cagcgatagagtgattactgcctataggcagggaaaaagagtgtggggtggtggggtctggaggtaacattatccgtgaatttcatttagggattgttacaaagagtggacgccaaccaa

SEQ ID NO: 15759 - DNA, 120 bp, Homo sapiens
gaacgtcatcagcccagaccaaagctgttctcaggcttagaatcagggaaggaacgtaattgcagagggcacacgctcctctaattttttggaaagaatctgaacgcactggtgtgttat

SEQ ID NO: 15760 - DNA, 120 bp, Homo sapiens
cctcggagggagcccaggaaaggctgtgaaaggaccgcacccagagttgccttccagagcccctgctcccctcccaggccagcataccgagccctctgaagggatcccacagcagcagcc

SEQ ID NO: 15761 - DNA, 120 bp, Homo sapiens
ggccggggattatataagctaattaccccattccttcccctcagtgcagaaaaggtcaggtccccacagccagcgggcaggctcagagcacaagtacagcccccacctccatcccccgcc

SEQ ID NO: 15762 - DNA, 120 bp, Homo sapiens
gagcgagaaacggggaacaggaggggatgggagggaagaagattttcctttttccttccttttctttctctgaacttcagcacagggagaatctgcattcccaggacaggagcacctccc

SEQ ID NO: 15763 - DNA, 120 bp, Homo sapiens
gtgcgctgagcaactgggcagaaccagactgcatgggttcaagtccccactggccacccgcagccactgcatcccattatcccaggtgaacggtttcctcttgagtgatcagggcctcgt

SEQ ID NO: 15764 - DNA, 120 bp, Homo sapiens
ctgcgtttatgccccggcaggcacgcaccataggggctgtgccttggagcttggaatagggattcctccaacagcagccatcacttgagaaggggccacagctccatctacccaggagag

SEQ ID NO: 15765 - DNA, 120 bp, Homo sapiens
ctccgccctggctcctggtcacgctcccacctcggcaaccccccggagttcagtggagaccctgcatcctgggtccacaccagccttgttcacaagacaaggtgacagaggccatgcgtt

SEQ ID NO: 15766 - DNA, 120 bp, Homo sapiens
actcgaccttttacctgatggtcccgggacttcgggaggagatctgccctgctgagcctctgcttctacatctgcaaagtgagacttacaggcttggccgcctctttaggctgcgtgaag

SEQ ID NO: 15767 - DNA, 120 bp, Homo sapiens
gcacgctgctgccccgcaagaccagaacacagagcccctccctccccaggagccggacctgagcagcagggggttaaagagcagtacccgggctgtccccgggtcagggtcgtttgcacg

SEQ ID NO: 15768 - DNA, 120 bp, Homo sapiens
agccgcggaagagggaaggaaatgccccgggtcccaggcggggcctcgagcgtgcccacgccgccccctgctggccacgcctggagttgcaggaaccgggcgccgggcgggacctcagct

SEQ ID NO: 15769 - DNA, 120 bp, Homo sapiens
ctgcgggctccgcgctgctcccgcgccgcgtgggtgaagcgccctccccggccacgcactggggtctcacaggggccaggctgaaaaacaatgcacgccttaaaggcgggaggctggcct

SEQ ID NO: 15770 - DNA, 120 bp, Homo sapiens
tggcgcaggctgaggaacactgatgaacgacctcctgcaaaggattgtccccagaggacagggctagggggaagcaggacggcgcagcgtctacacccccgcgcgtgggtggcccccgga

SEQ ID NO: 15771 - DNA, 120 bp, Homo sapiens
tcccgggtcagccggtcactgccagatgcaccacccccaccgccacagccaggagaggggatgacatggggtgggaaattcaagggagagcccaaaaaatcgttcttcaaaataaatcgt

SEQ ID NO: 15772 - DNA, 120 bp, Homo sapiens
gagcgtcggtttgattactttgacaattgctatggttgagttccttgttttgtgagcaggttttggtaccttggggaagggggtggtccacagaccctttcaggatataatgaggttctc

SEQ ID NO: 15773 - DNA, 120 bp, Homo sapiens
tggcgcagactgcggcgtttctgacatttccgatgaacacaaacacgagtgtttgtctaaatgttaatgggtttctgtgccctctgctggaagcatctgcagtcagtgcgccactgcgga

SEQ ID NO: 15774 - DNA, 120 bp, Homo sapiens
cagcgccatttcccattcccaggaaaactgcaatggtcacaagactactgccacacattttgattccaaaagttgcttagaaggtagagctttagagaacataaatggtctgtgggaggt

SEQ ID NO: 15775 - DNA, 120 bp, Homo sapiens
acacgccacccagtaagacccgtggctactccttcactgtggcatcagagtcttggattgctccagagagattttggttgtttctatcacgtttctccatgaaatgaattagagtttgac

SEQ ID NO: 15776 - DNA, 120 bp, Homo sapiens
ccccgactttgctatccggtggaggaggaccatctgcctctcgctcagtgtgtggttcaggcggtgtgcaatggagatgggggtctcccccttggcatctctgtcgtggatggaggcccc

SEQ ID NO: 15777 - DNA, 120 bp, Homo sapiens
ccccgtgctggagcaggaggattatacagtctgaccggcccatagctgcagccacatgcaggggtgtcctgcccaggggggatctgctgaggcagctggctcctgtaaaataagaacatt

SEQ ID NO: 15778 - DNA, 120 bp, Homo sapiens
atgcggagggggaacacaggaggggtccagggctgtgaagggagtgctcctcagggaggtcctgctgcctggcccagctccagtactgccctgcccccagtccactcccctggcagcagc

SEQ ID NO: 15779 - DNA, 120 bp, Homo sapiens
caccggctgtggggtgatgttctaggtctttcccgctcactctcaccctaccttcccattactcttccagcattccctcctgccatactctcctcccccaccccaccaccaaggcaccaa

SEQ ID NO: 15780 - DNA, 120 bp, Homo sapiens
tcccgagcacatagctcagtgcctgcagaagacaggcactcaggaaatgacgcaatgggcagcctgactcatggacagatttcacttcgattaaattccccaccgcctcctgcagatgga

SEQ ID NO: 15781 - DNA, 120 bp, Homo sapiens
ctccggctggttggtgaggtaaagttttaaataggctcttagaacaccagtgtcgaccatgacacctccccccagcagctgtctgcagaggacagaaaactttgcaaagctggctgtaat

SEQ ID NO: 15782 - DNA, 120 bp, Homo sapiens
ctgcgcaaagcccatatttcattttacaacaagcaaagagcagacaggcagtgaaggaaggaaggagaatattgttgaggtaacctttacccatcacagaggtttgtacacccgatgcac

SEQ ID NO: 15783 - DNA, 120 bp, Homo sapiens
gcacggcccaatcatccggcccaggaagtccaagatgttttccactttgcttggtgtaagtgggaaaaatagcaatgactgagctgacagaggctggagccaaggctgtgagtaggaaag

SEQ ID NO: 15784 - DNA, 120 bp, Homo sapiens
ccacgtaacatgttctccctttttccaaggaagctggtggtctgggctgttacagctgttctccattgttcttgagggtctaggctgttaacagctgttctccattgttctccactccgc

SEQ ID NO: 15785 - DNA, 120 bp, Homo sapiens
caacgaaaggaaatgaaaaagagatggggaggaagttagaaccagaagcccggagtgctggtgaatactttcatatcaaaaagcaccgttttcaaaaacatgataccaatatcatgggca

SEQ ID NO: 15786 - DNA, 120 bp, Homo sapiens
caccggagcacagaattcatatcagtcgctgtggcttcaataagccgggagatgggagatagggcgcgtagggggctagataacgtggtcgggcactggggccgcgcaaccacccgggga

SEQ ID NO: 15787 - DNA, 120 bp, Homo sapiens
tcccgaggataccaggagaatactttattaatttaaaacactgcattctaagagttcttcaggaaagttatgtgtctatgggtagggttgtttttatgtggttatttcaaaataagagct

SEQ ID NO: 15788 - DNA, 120 bp, Homo sapiens
attcgatcaagaaaatagatttttaagaaaacttctccagtgtccttattcttgagttcatggttatttaacagctcactctcttcgaatatctgttagtatggtatctttcatttttta

SEQ ID NO: 15789 - DNA, 120 bp, Homo sapiens
atccgggttttgaagtaggtgtctgtttacaggaaatgcagcagaatcagagtacaatgacctctgaggaagtctcgtattcatgcagcatacatttttactatgtttgtggcactgttc

SEQ ID NO: 15790 - DNA, 120 bp, Homo sapiens
ccccgccccccactccatgtggaaacaggaaaggaacaaacaaaatatgtcctatgcagaagatgaaaagggtgtaatgctggaacaggagcagcagtagtctcagtatttattcaccca

SEQ ID NO: 15791 - DNA, 120 bp, Homo sapiens
gaacgcagaaagcaataggatactttttaatgtaaatagactgtcaaagggtaaaatttaaaaatattaataagatatccaacagattttgctttagaatgtccgtgtccctccatttta

SEQ ID NO: 15792 - DNA, 120 bp, Homo sapiens
cagcgatgtccagccttgtgatgggcacccctgtgattgttgtctagtgctcacatcgcaaccccactcagctccctcttgccgcctggagggccatcacccaccttttactttgaactt

SEQ ID NO: 15793 - DNA, 120 bp, Homo sapiens
gagcgctttgtctacatgtgctcatcctgaggccaagggaaagcatttggggctctggggactggcgtcaaatcgccctccctgcccagagctgtaaactgtggagctggggatcctgtc

SEQ ID NO: 15794 - DNA, 120 bp, Homo sapiens
ggacgagtgaatagatgaaaaactgcccaaagccctggggacaaacccttcaatctgacggtatctccctggagagacacgtgaggcctggctttgtctcacagtaacactggaagagaa

SEQ ID NO: 15795 - DNA, 120 bp, Homo sapiens
aatcgattggtctttgggagccggcagtgtttatgcagctcgaggctggagaggggcagaaatggcccgcagaggtgcccgaggcgtccatgggatgtcttcgtggaggtggaaagaaaa

SEQ ID NO: 15796 - DNA, 120 bp, Homo sapiens
cagcgtgggccatggggcaaggcacatcccttgccagtgcctccgtgtgctcagttgctgtggttactgttattggaaggaacacatcttcatctgtaaaatggggcagcgaccccggtg

SEQ ID NO: 15797 - DNA, 120 bp, Homo sapiens
caacgcagggtgctcacagcacctgacatcttgatgctgagagcttagtaggcactttgcgggttttaattattgcactcccttcccccattccctccaaaagttattgactactgtgca

SEQ ID NO: 15798 - DNA, 120 bp, Homo sapiens
acccgtgccaggcagctgctggtcaccgcgttaagctggagcattaaacatgcattaaaaccaaaggcttggaactcaaagcaacttgcactcaaatcccaggtgggtcacttcactgct

SEQ ID NO: 15799 - DNA, 120 bp, Homo sapiens
ttccgtggattagcagttctgccagacattcacaggtgttatctgagaaatgttaaaaagggactgggagcggggggcggtgcttcctgtggaataatttgggaaatgatggtgttcaac

SEQ ID NO: 15800 - DNA, 120 bp, Homo sapiens
attcggtcgttttctccagtatataaactatggggttcatatttcgaggatgggttcggcagatcaggctggtgggaaaactcttcctgggggaggttgttgtgaggaggaaggaaactt

SEQ ID NO: 15801 - DNA, 120 bp, Homo sapiens
gcccgatgggaacagtgcaaagggctgtgctgcccatgcccaggctgctggctcagccccaggctggtcggcagcaggttctgggaaggacagccttgactttgtcctgaagcaggcaat

SEQ ID NO: 15802 - DNA, 120 bp, Homo sapiens
actcggtgtcttgcaggagcgaggagtggtggtgttattgttgttgtcagtcagcaattctctgcttttattcagggagaacaaaacgacaccgccggcttttattttttcagctttcgc

SEQ ID NO: 15803 - DNA, 120 bp, Homo sapiens
catcgttcttccccagaaagtgcttgtcgagggttaatccataaggtcacttgaaaacgaagccattattcccttcttaaaggttaatgtgttttttccgggagtgtgtgagtggaaatt

SEQ ID NO: 15804 - DNA, 120 bp, Homo sapiens
tcacggcctgcagaacgggaatcccagggggtctccgggagtttgccagccacgctggtcctctttgcaacctcctctacctccccactcccatgtctgtgcccttagttcgaaatggat

SEQ ID NO: 15805 - DNA, 120 bp, Homo sapiens
tgacgactagacaaggcctgggaggccctcaggctctgtgagctcagagcacctctgtggaaacttccttctgcccggtccccagagaggatggccacagcagcaccctgcctggctggg

SEQ ID NO: 15806 - DNA, 120 bp, Homo sapiens
ggacgtggctggatggggcacaggcctggagaccatgtggcatgcaccctgccactgagcccccaggtggaggtgccaggggagggaggtggggctgcacagggtttcttggctgtctcc

SEQ ID NO: 15807 - DNA, 120 bp, Homo sapiens
tgacgacttctctgggcctcagtttccccctctctagaggtgatgagtacaggcctgggctcctggccctgaggtcctaggaaatgctctgtgctgcagacagtccatgaggccaggact

SEQ ID NO: 15808 - DNA, 120 bp, Homo sapiens
ccccggccagaacctgcaggcctccctcaggtcccacctggagccacctgcctgccatgccttcctggcctcgttcccccatggtaaaacagtcactgtgccagccttgggccaggctct

SEQ ID NO: 15809 - DNA, 120 bp, Homo sapiens
acccgcaagccaggaactgtcactggctctcgtgtcacaaacgtggtttgaggaacgcctgcaaggtctcatggttagaaagggcagagctggatttcggacccatgctggcttgagagg

SEQ ID NO: 15810 - DNA, 120 bp, Homo sapiens
aagcgtgcctgtgtcccccgccaggttgaggggcagagggtgccactgtggccccccgtgcctggcggaaagcacaccccggctgggttcttaaatccgtaaggtcacaatcaacaagtg

SEQ ID NO: 15811 - DNA, 120 bp, Homo sapiens
aggcggctgcgggaggggctgtctggggccccctcaggcccgcaggggtcagggcctgttgactctggcgtcctgtgaatagactcttgcaaagccgccatgttctctgcttccttgggg

SEQ ID NO: 15812 - DNA, 120 bp, Homo sapiens
ttccgttgtgtcgataatgcctattctttccacggggccatctgccaaggtcaatgtttgtgttgttttaaaaacttacattgtatcactgtgggaacttgagtgtacagaaaccttttt

SEQ ID NO: 15813 - DNA, 120 bp, Homo sapiens
tggcgttggcttcccgaagctccagatatttgaagctgtattcaccgcgtgtggtgcttgcttctccctccccaccctctgaggacacagccactggccattccctagtaaaaaaagaaa

SEQ ID NO: 15814 - DNA, 120 bp, Homo sapiens
gaacgaaattcactccatgtttgtctgagcctgtctgtttctgcagaagggagagaggggtgattttaattgaaaaggacaaaattaaataaggcccggacttcaggtactcaggagcct

SEQ ID NO: 15815 - DNA, 120 bp, Homo sapiens
tgccgctgccacctcatgccaattacgcggccggccaacaccatcagggtccccagattagatgccaggcccctgggcctgctttagtcttgggcaaaccaggaagctggccgccagcag

SEQ ID NO: 15816 - DNA, 120 bp, Homo sapiens
tgccgggaatttgtttctccaaaaatgccctgatgaggccggtgaaaaggagggaaaggcctgacacgggccctggttctcccgggacacagtggcccaaggctgtgtcggccccagccc

SEQ ID NO: 15817 - DNA, 120 bp, Homo sapiens
ccccgggagaggtcaatggcaggagggtttgtgtggggatcagacatgaagctgggcaacagcagcagacaatgggtcctgaggctgggcccagacctcttaggccccatcagccacctc

SEQ ID NO: 15818 - DNA, 120 bp, Homo sapiens
agacgacgaatcaggctctcccagcagccctgagctagggaagaaaggacagagtgtcttgggggcaaagaatggggctaggggtcaacagggcccttctggggctggaggaaagataag

SEQ ID NO: 15819 - DNA, 120 bp, Homo sapiens
aagcgggagtgagctaggcaaaaataggggtgcggtgctttagcacacgcaaagaacagggtgcctgtctccttaggggcatgagaggagggagctgcagcctcacggtggggtgggaga

SEQ ID NO: 15820 - DNA, 120 bp, Homo sapiens
ccccggcccttggttgctgcgcaatttgctctctatggactgtacctggggtgcctaccctggacttcagacaagcttcttcaagagtagcccctgccagagctggagccaacagcaaga

SEQ ID NO: 15821 - DNA, 120 bp, Homo sapiens
gggcgggaagccctgaagggtgtcgagtcccaggacaagggactggggtgtgtcccagcagacccccagggaagcagcagctttggactcgcctgacccaaccccttgctgccagacagg

SEQ ID NO: 15822 - DNA, 120 bp, Homo sapiens
gctcggacaggaggacggaggagcaactgccttctggggtcagagtctgtccccgctcctgcaggccggaagcacgtgcggtcagcggtgggccagagcctctcagcctctcagcaaggg

SEQ ID NO: 15823 - DNA, 120 bp, Homo sapiens
actcgtccgaagtccagtggtataggccggacttgacccgaattctgaccccaaagcctggcccttgactgccccctagcactgcactggccaggattccatggtggccactttctaata

SEQ ID NO: 15824 - DNA, 120 bp, Homo sapiens
cagcgcggggaggggctccaggatcacttacttgctcttaaccctggcgacaaggatgtgcttttgcagatgttggtttgttcatgagaaattcgagtcagatttgagggggaaagagga

SEQ ID NO: 15825 - DNA, 120 bp, Homo sapiens
tgccgcacttccaggcctatgagctttttgagattgtttgcattttgggaaatgccagtcatctctcccaaatctgcagatagcagcatctcaccatccagggttggagtttctaaacag

SEQ ID NO: 15826 - DNA, 120 bp, Homo sapiens
tagcgacaggatttaatgagataaagccttgggcatccatgaaccaatttttacgagccgtgatgaaatggctgttttcttaatagatacccaaacagaacacaattcagggctctgaga

SEQ ID NO: 15827 - DNA, 120 bp, Homo sapiens
tttcgggcaaaatccaaacacgtatcagtcttaccaccaccatgaaaatgatatgtttttgtaaaattatgtgggacctatctatctgccaagggagagatggcccagatgcttttggga

SEQ ID NO: 15828 - DNA, 120 bp, Homo sapiens
tctcgctcttcctccaattccctgaactagctggtttcctgaagactccagtgtgggtagactgtggcaagtgggtgactgaatactgacctagtccttaaaaagaaaaaacggtcaaag

SEQ ID NO: 15829 - DNA, 120 bp, Homo sapiens
aaacggcttcctcctctgagttcctaaaacatttatcatccctatgatttgccaggcaattagtcatgccctgccttgagtatctcttctattgttgtatcaaacggctgtttaaccctt

SEQ ID NO: 15830 - DNA, 120 bp, Homo sapiens
actcgatgtgagcttccagagggctgtgcaaatgtccacccatgtccgtctcctgtgcccatggtccgtacacgtctggtcatcaccgtcagagggtaggactgtgtcctgcctttacag

SEQ ID NO: 15831 - DNA, 120 bp, Homo sapiens
ctgcgacagcttcatggcttactactggtctctgcatcaatgtcacctcctcctgaaagccttccctgatcacccttggtgtgtgtctcctgtctgtcacagggcagggaacttgtgtct

SEQ ID NO: 15832 - DNA, 120 bp, Homo sapiens
cctcgcagctctgtgaggtccccaaggacttggttacaaggtgctctcagctgagtggccttaactaagattatcatgggtgatgctggtaggtttcccccaaatcgacatgactgagtg

SEQ ID NO: 15833 - DNA, 120 bp, Homo sapiens
acccgagctctctgaaacggcttctttgtctgtaaaagagagagctgagtgagacagaccattttcggtgttgagcacagaagaaactgcggcatcctgcctccccactaggggaagccc

SEQ ID NO: 15834 - DNA, 120 bp, Homo sapiens
ggccggttcttgaaaaactggatgcttcgtcagcctgagccaagagcctgggaatgcttctttcctcgtaggtcattggggaccaccaaattcttccaccctccatgtgcctctcatttt

SEQ ID NO: 15835 - DNA, 120 bp, Homo sapiens
aagcggctccctgcgtatgggaaacgcatcccaaagcagccttgtttcgccttcggacatgggtggccccttctgcccaccccttcccaaggctgaagattgcctgttggagcttcctgc

SEQ ID NO: 15836 - DNA, 120 bp, Homo sapiens
ctgcgttgaaaacaaaaatcttcagttccattgccattgccattggcccagccctgctggttgggacctggagggctggactaaggaaagcaaggggacaccagccaggctgaggcccgc

SEQ ID NO: 15837 - DNA, 120 bp, Homo sapiens
tcccggatgttctacgggccttctgcaaccacccctatcccggcagaaatgcctatcggttctccattctgatctgcgccagctcagcctccgcagagtgagggaaattagcatggccag

SEQ ID NO: 15838 - DNA, 120 bp, Homo sapiens
ggacgagggccgctggccaaggctgacaggtctgagaagagcagccctcatttcacactgagctgcaccctgagcctcagccctgccaccagcacgccagcctccctgctctaacttcaa

SEQ ID NO: 15839 - DNA, 120 bp, Homo sapiens
caacgagttctctttcctcccttcagggaacatttagtgcaaatctaggtggcatgtctggtgccagttgcaaaaggcaacggaggccctccctgctgtgcaggcactcaggttgcagca

SEQ ID NO: 15840 - DNA, 120 bp, Homo sapiens
caacgcagggcagcattcaaggcggtcgtgcagctgtcacagttttcactggttgtgggctcacttctcagccagctgctcagggaggtccttggagctgagcctgcctctgcttcctct

SEQ ID NO: 15841 - DNA, 120 bp, Homo sapiens
tcacgagcaggtcattctgaagcaggaaggagcccttccttgcttccacttcaggcctgcctgaggcacttccactggtctccagttacttgcaaggtcaagtacaacctgcaaggtcag

SEQ ID NO: 15842 - DNA, 120 bp, Homo sapiens
ccacggggcctggttccacatgagcttttgacagtgccagaatgaaccatgtcctttactacttcaggcctttgcatgaacaattccttggtcagggatcagactgcctgacacacttta

SEQ ID NO: 15843 - DNA, 120 bp, Homo sapiens
aaccgatccctccaggcccaactcaaaagtctcatcgtagtccaaggggccttccctaactcaatcttctcccagtgactggatctctggattttactgttctacttgcttccccttcct

SEQ ID NO: 15844 - DNA, 120 bp, Homo sapiens
atgcgtgcacatgcacaaacacacacacacacacacacgctattgcgtccccaaagcctcacgggtcctgtagcttttcagaactgatgttcaacaaatgtatgtcaaatgaatgaatga

SEQ ID NO: 15845 - DNA, 120 bp, Homo sapiens
agtcgatctcctcacccactcctattttccaggaaccttctgttctaaccacacaggtttcagagcctgctggacatattctgcgtctgtgtttcctcccaggacttctcccacgtggaa

SEQ ID NO: 15846 - DNA, 120 bp, Homo sapiens
cttcgcctgtggaagtcctattacatctgtcagggcatggccttagtctctcaccctctaggaagatcctccagctgtctcagtcctctggagtgccgtgtgcctgtctgcaacgtattt

SEQ ID NO: 15847 - DNA, 120 bp, Homo sapiens
tagcgttgacttttatgtcgggaaagctgagggtttcaaaggaatgcctttcagtcattcaacagctttttttttttttttttttttttttttttttttttttgagtgcctgctctgtgc

SEQ ID NO: 15848 - DNA, 120 bp, Homo sapiens
agtcgcagcagggctgcctggggccccccaggaagggattgggtctgaggccccacagggaaggggacagtgcccacctctcttcagctagggccgagggtgaggacctggctgcagatc

SEQ ID NO: 15849 - DNA, 120 bp, Homo sapiens
acacgtggccctaggctgtgtcctgagcccctggccaccccaccccaagggtccccagaatccatgtgcccccacagccctggaaatcaaggtgactttctgggcctgatcgcaagcaaa

SEQ ID NO: 15850 - DNA, 120 bp, Homo sapiens
ccccggctgggcctgaaaaggcaagaactggctccaaggtcctggccctgtctgaggaaactgtcacccaacacaatgacagcaattgtgggcagcagccggggagacggagccggagct

SEQ ID NO: 15851 - DNA, 120 bp, Homo sapiens
gggcggctgcagccggggttaggagccttcacgggtcattagcttgcttaatggtgctgcagtaggccccgcttgccggcctcccctgagacacccagaagaggcagaggtcctgaggtg

SEQ ID NO: 15852 - DNA, 120 bp, Homo sapiens
caccgtctgctcctgctaccaggggtgcgcccgcatggacacaggatgcagggtcagggagcaggggaggaactgagtctcccttgtgcaggcacaaaggcggcctcaggaccagggacc

SEQ ID NO: 15853 - DNA, 120 bp, Homo sapiens
tgccggcgtcggggggcccacgggggtgagccagaggcctggctttccctggggccaaagggctctaggaggcaacggctgcttccccaggccccaccagagccctggcaacagggtcat

SEQ ID NO: 15854 - DNA, 120 bp, Homo sapiens
gggcggctggcggtgctggggggcaggtgggtgctctgggtccacttgatcatggtttccggggagcagtgcaggaagacgagcttggtgcagagcccccacaggcaggctagcgcacag

SEQ ID NO: 15855 - DNA, 120 bp, Homo sapiens
ttccgggaagtccgtctccagcaggaactccaggccaagcgcgcatctctgtgatcgtgtgtcaccatggcggtgcgtgcgtgagtgcatgcgtgtgcactggtctgtggcctgtggtgc

SEQ ID NO: 15856 - DNA, 120 bp, Homo sapiens
gtgcgtgagttccactaggacccatgtgaggtggagggtcttccacctcccctcccattcgggccctccctgtgccacacagacacccatctgtgccttccccttctgtgccaccaaaaa

SEQ ID NO: 15857 - DNA, 120 bp, Homo sapiens
aatcgtttctgttggggaatgctcaagacgttcaatcatcttagaaaatcccaccccacctcccgctgcagattaattactgtaagtgcaactccaatcgggctggtgaccccccaggaa

SEQ ID NO: 15858 - DNA, 120 bp, Homo sapiens
acccgaggcccctgacaggctcctcgttcctgcctcgctcaaggctcaggtcccccacctgaaataccccctcccaccagcatctcctgcctcgctcctgctgccaggtccccaaaagct

SEQ ID NO: 15859 - DNA, 120 bp, Homo sapiens
gctcgcctgccatccacagcccccaccagaacccaagtggctgtggaattcgctgccctgattctctgcccagagcctcggtccagactgtgttccctggcgaattagtgttcagcattt

SEQ ID NO: 15860 - DNA, 120 bp, Homo sapiens
cttcgagtccttgcctcaaatgagccttcaacaagataatgcattgaaaagcccttggaaaagtaccaggccccgcgcacatgtacagcccaggccccacgcacatggacggcattgtca

SEQ ID NO: 15861 - DNA, 120 bp, Homo sapiens
tctcggaggcaaggccagcagcacacaaagctcccacctcacccacattaggctcagcttctggggaacattggcccaggcgggggtccttccccacggcctcacaaatagggctcagga

SEQ ID NO: 15862 - DNA, 120 bp, Homo sapiens
aaccgatgggccatctttgctttcagtgcctgctggagtcccgagggctttggggatcagtccaggcagcattctgcagtcaggaaaacaacattgaaaaccaaaacccacaattacaaa

SEQ ID NO: 15863 - DNA, 120 bp, Homo sapiens
ttacgttcaccgatggcacagttagaacccacggcagcctccagctgaaacgatctgttcccattggctgcataagaaactcagtgatgtcatggacccctttgcctcccttaaatcagt

SEQ ID NO: 15864 - DNA, 120 bp, Homo sapiens
aaccgtgagttcttttgagggcctgagacccccctttctcctaatgagttggataagtttctgtggcatccatgacccagcttgttccagtgcatgaaggcccaaagccagcttccttgt

SEQ ID NO: 15865 - DNA, 120 bp, Homo sapiens
gctcggggcgccatggaacggttcactgcgtctctgccctggcctcacgtgctgccggctggccttgccattcatcttctgaaggctattctctgatggctctgctggccaccttgatct

SEQ ID NO: 15866 - DNA, 120 bp, Homo sapiens
ccacggtgaagcacccctgcctagttctgaacagacgcagcacatcaaaggggagccggcagctcactcctgagcaaagcagcaggctagttcctcacagtcaaggaaaaccactgggag

SEQ ID NO: 15867 - DNA, 120 bp, Homo sapiens
tcccgggtcccccagtgctgacaggcctctagcatcaggtccatgtggctgattctggagatctttaggaggatgggactggctgttgagaactgtcagtatgagtctgtctggctactc

SEQ ID NO: 15868 - DNA, 120 bp, Homo sapiens
tgacgccccctgctcattcgccaggcagccttgattggcatgacccctgcccaatggctgacccggcgctggggtcggaggggagtgagttggtgttgggacccagttgggccattcagt

SEQ ID NO: 15869 - DNA, 120 bp, Homo sapiens
agccgtcttgcgtgggtgtagttggccaaagtttgaatcaaagttcagtgttgacatctggaagtgtgtagacccatagagctaaagcgatatatctttgggggatcccaaacgtttccc

SEQ ID NO: 15870 - DNA, 120 bp, Homo sapiens
gttcgcctccttccgtgctgcgtggccacatggatggtggatgcaggggtgcaaggatgcacggtgcctgtggtaccctggctctaagagggatgcattagactaaacgggatcgcaact

SEQ ID NO: 15871 - DNA, 120 bp, Homo sapiens
ttgcggtggttcgcccgcctgcagctcttatacagcagcccgtgccgtgcgccctgcttgctgcagcccgccctgtgtaactcatccagcctcccctcccccagggttctgcaggtcaga

SEQ ID NO: 15872 - DNA, 120 bp, Homo sapiens
agacgtggctcgccaatctgtctcactggtgagaccgacctgatgcgcacctgccgagttttatgtgacccccttacagcagcttttctcccgggttccaatccctctgcagaccccaga

SEQ ID NO: 15873 - DNA, 120 bp, Homo sapiens
caccgcagcatggtagcgggagcgcagctgcgcgggcaaccgccgggtttgtggccggttggcgggctcagtgccgcctcagtgggctctagcagtagaaaagtaaagcgactaccctaa

SEQ ID NO: 15874 - DNA, 120 bp, Homo sapiens
gagcgagaggagaggggctagaagggtgctggaggcaggctgtagtggggctaaaggagctgactgaccagcgctgcggccggtgcccgaagcagcgagcagcgcacctcagctccggtt

SEQ ID NO: 15875 - DNA, 120 bp, Homo sapiens
tgccgcgcggcatggtatttatctgtgggttcagtgcgcacagcgttgtccagtctcgaaaccaccctaaaccggcattaaaccccaaccaaaatcccctttaacccttccctagaacag

SEQ ID NO: 15876 - DNA, 120 bp, Homo sapiens
ttgcgtgcttgcatactcggcatcccctctccctcgcctctctctgcttctttggtgggctcacgaccacctgtcgcatccctacgcgtgcctgcgccccttcccaggcaccaaaagcct

SEQ ID NO: 15877 - DNA, 120 bp, Homo sapiens
ttgcgctccggactaggggcttgagatccggggctgcctggaggctgggggctatgactcagagtttcaggggtatcctggggtgatgaaatccttcttcagtcccccctcccccgagga

SEQ ID NO: 15878 - DNA, 120 bp, Homo sapiens
agtcggttgggttggggagggagggtttcagctcctgtactccagcgttccgaggcccacgtcttgcgtcacgtgtcccgcaacgcaggagcgctttctctggccagcggagaagcgagg

SEQ ID NO: 15879 - DNA, 120 bp, Homo sapiens
atccgggcccatgttcagggtcatctcactctgccctcccaggacaatgatttcacagccacacacccctgcacctgcctcaggcctcatctcctgaccccacgttcaagtcggaactct

SEQ ID NO: 15880 - DNA, 120 bp, Homo sapiens
gtccgctcctccacctggcctcctcccggtcgcccagccaggggccttctggaactgtccctgctctggtgacttcacgcatcactgaaaagtcccaaagcagacctccatcctgccgcc

SEQ ID NO: 15881 - DNA, 120 bp, Homo sapiens
agccggtggctggtttgtcccctcccacctgaccgacccaccctaggttccatcctgtttcctcccaaggacttggctccctccagctttccttctccccgctcccttgtcagctatgcc

SEQ ID NO: 15882 - DNA, 120 bp, Homo sapiens
ccccggcccctcccactcactatcacggttttctgcttcactcaatggtttgagacagtgccccgacccctactgccccgctcctcttcagccctttctctcttgctaaaggtcacttct

SEQ ID NO: 15883 - DNA, 120 bp, Homo sapiens
atccgagctgaccactctccggcagcagtcagcacagcggtcgctccatccttctggaagcacctcctgcctgggcttctggagttccacttggcagtgcagggcgtcccatggcctgcc

SEQ ID NO: 15884 - DNA, 120 bp, Homo sapiens
ccccgagccctatccttctatgcccaacccaacccggcgacagcagtcctggcccagaggcagagctcggatggatgagcagtttcggttctggcctctccgtctactcctgcctgaagc

SEQ ID NO: 15885 - DNA, 120 bp, Homo sapiens
acccggcctaaccagctcactgaggtatgcacaagcttctcccacggccaaactcaatccttcatcccaccagccccatctgggaacgggcttattactcacactgtgggctaacacaag

SEQ ID NO: 15886 - DNA, 120 bp, Homo sapiens
atacgtttaatgcagacaaagccaggccagggtgtgcaggaggctgggtgtgtcaaacacattttccactcatggtgttttcaacttacgagggggttgtcgggacatgaccccacagtt

SEQ ID NO: 15887 - DNA, 120 bp, Homo sapiens
atccgggagataattcaggaagtggggtgtcatatgcatagggtggctgaggaagaccccgctgaggtgacatccataggagggagggagggagccatgggacctcagggagagaggagg

SEQ ID NO: 15888 - DNA, 120 bp, Homo sapiens
ctccgcaggagcaggggagcaagggcggactgggagggagcccgatggtgaaggctcttgaaggccagagggttctgtcttttatctgagtggaatcctgagagggtttcaagccaaaga

SEQ ID NO: 15889 - DNA, 120 bp, Homo sapiens
agtcggcagtggggcggtgtggcttagacctggaggaggcggtgggcggtgcgtgatttctgcatctgcttcgaaggtagaaccgacaagacttgtgggtggattatatgagggacagaa

SEQ ID NO: 15890 - DNA, 120 bp, Homo sapiens
agtcgggtaccagtccaggcttttgcctgcatagccggaaggacagccagggaggactggggaagaaatgggctgtcaggtgacagtagtggaaggagccatccagacctgaaggtctga

SEQ ID NO: 15891 - DNA, 120 bp, Homo sapiens
catcgcttatcactagctgcaacttcgggagacaggaaagatgcaagtgagaaggttcatgtgtccatctcttagatcttcgcgcagttcaggggaagtggtggtggtggtaggtgtgtg

SEQ ID NO: 15892 - DNA, 120 bp, Homo sapiens
gtgcgcgcgtgtgtgtgttatctcctgtaaatcagagttgccacagcctgcatgctgctcaccagtgcacctggagagacagcaagatgtttccaccctctgggcttggaggctggacag

SEQ ID NO: 15893 - DNA, 120 bp, Homo sapiens
cagcgaaaaccagcaatgtcctcctagtctctctcctcttgtagttagttactcatcctcctagaactttcttttccagtaagagaacacacaccgagcagggtacaagaaagtggagct

SEQ ID NO: 15894 - DNA, 120 bp, Homo sapiens
tggcgggctgcctacacccgctgagtcacccataatggcccctcagatgtcattttcttgctaagacatttggaaaaatttcctggttctaaatcacacgcaaacagtataattcaacaa

SEQ ID NO: 15895 - DNA, 120 bp, Homo sapiens
caacgcactcagaagtggaagatcggggcggatgaaatcaatgaattctctgagtgctctgtttttctctgaattctatttcatttgccaaatggagggtgggggcagctccatctgacc

SEQ ID NO: 15896 - DNA, 120 bp, Homo sapiens
agccgattcggggtttctgggtgacactggtttttcttatcttcccggttctatttctgtaatagacgcaagtgtcatgcaggaaaaggcttgctgctgcggagccttctgtggatggct

SEQ ID NO: 15897 - DNA, 120 bp, Homo sapiens
tagcgtcctcaccacacttgctaggaggaagctcctgccctctggggcaatgcttgctgatctcctcacctaaatgcaggcactgctaacctgccttggtcacagccctttgttgggggg

SEQ ID NO: 15898 - DNA, 120 bp, Homo sapiens
aatcgcttgctgcagctcaggacgggggccgtcaccttcagcctggcaaaacagaccttggggtcgtgccggcatctccaggggcagtgttcgcctatgtcctgcacagggcccgcttct

SEQ ID NO: 15899 - DNA, 120 bp, Homo sapiens
gtccgagggcaaggcagactgtattccccacctcactgctggcactaaggtggcaatcagaggagagctgtttcctctggggagcaggtaccttcagaaacaaggacaagagagctgaga

SEQ ID NO: 15900 - DNA, 120 bp, Homo sapiens
atacggaaaggggccctcaagagaaagtgttaggtttagatagggttttagctctcactctggaatcgtatggtctagcgttgagagtcctggctgactcatcatttagagatataagaa

SEQ ID NO: 15901 - DNA, 120 bp, Homo sapiens
agtcgacagaccattcactgctgaagctgtcagaattaaccccaaagaaaaacggagctgaataggctttatgattacataacatgcctagacttgaccagcccaggctgtttgtttata

SEQ ID NO: 15902 - DNA, 120 bp, Homo sapiens
attcgacctggcttaagtggtacctgctttaattaatttaattggttttcttttcttgatggaaaatagaaagatatttaactactccaaaatctcttccctaccccatgaaagcctttg

SEQ ID NO: 15903 - DNA, 120 bp, Homo sapiens
atgcggcactgtcactaagtgcctccttcaagagttcacaatttgctctcagccaagcttcattccaagaatgagagtttgctcaagctggaaggggtctgaacagcatcgagtccctta

SEQ ID NO: 15904 - DNA, 120 bp, Homo sapiens
gctcgcagtcagtctaatgtgccattaggattttagtctagtctagtgggtaagcattcagggcccggagtcagacagacctgagtacaagtcctagtgacaccatttactagctgtgtg

SEQ ID NO: 15905 - DNA, 120 bp, Homo sapiens
cctcgtaaactctttctgtaagatgaggatctcactaatgtcagcctcagagggtggtgagaactcagtgaactaatgcatgagaagcacttacacagtgtctaacctgcaatgagcttg

SEQ ID NO: 15906 - DNA, 120 bp, Homo sapiens
gcacggagatgagagcggtggccctcagcacaatgtcgcacatctgaggagtgttacttcctgaggggggctcctcaggttcagcttcctgttccctcgcacagggctggtgatgatcaa

SEQ ID NO: 15907 - DNA, 120 bp, Homo sapiens
atgcggtggatgttaggggaaccaaaccccaagagggaaccagcttcagtggaaagcggagtgcgtgcctccccgaggcagggcattgctgagccccagagaggagccctgggttccgct

SEQ ID NO: 15908 - DNA, 120 bp, Homo sapiens
gtgcgtaagtctgtggtctctccagcaagttcagggaagtgagggagtcgcagttctctgtcattcagcaggtgtggactgagggctggctctgtgccaggccctgtgctggatgctggg

SEQ ID NO: 15909 - DNA, 120 bp, Homo sapiens
agacgaacattcctacagtcgctcacgacaccaagctccacagaccagagaatggacggatccacaggaacgaaagacaggctgtcaggtgcccagccctggggagactccagaagagga

SEQ ID NO: 15910 - DNA, 120 bp, Homo sapiens
tggcgaggggccgtgcaggagcccagggggcttgtctcatggacgctcttgatcgaattcctctgaggccccagaggtgctccttcatccccagcttgcttgtgaggctgcgttggctcc

SEQ ID NO: 15911 - DNA, 120 bp, Homo sapiens
ggccgagtttcctgctgagacccagccacacacttagccctgagtgtaccaggtggctccactcagagcgctgctccagcccctctccctggggcttcctgccacgtgactgcacatttg

SEQ ID NO: 15912 - DNA, 120 bp, Homo sapiens
acccgtgagtctccctcggacacacaggatttctcatgtctcctcctggttttgctgctttttttttttttttctagctgcatgaggtagttttgtttgaaagaatagtcaatgcagact

SEQ ID NO: 15913 - DNA, 120 bp, Homo sapiens
ttccgaatgaggcttgctcttggcaagtgagtgagatatctttgtgtttgtttgtttccttcagaaaaaagggcctgagaaagcaagttaacaattctttggaaatgatttttctttttc

SEQ ID NO: 15914 - DNA, 120 bp, Homo sapiens
aggcgaactaagtggggctgcttcctggaaaaatggctattttaagctgcaatcactgggcaaccggggcaaatggctcaacttctctggatctcaatttcctcttcctttctcccctct

SEQ ID NO: 15915 - DNA, 120 bp, Homo sapiens
tcccgggataaaatgagaaggctcacaaagctggggctcccaatatgagagcagtgtttcttttttcaagcttttattattcccaaacagattccctggttatcttattttgaaatgttg

SEQ ID NO: 15916 - DNA, 120 bp, Homo sapiens
gttcgtctctctccatctctgggcagctctggtcctgcccagctgttccatgcttgtgttagcgtgactgttttttttttttatatatataactgagtccctaaactcaatctaactggc

SEQ ID NO: 15917 - DNA, 120 bp, Homo sapiens
gagcggccaggtatgggtcctgcacctgtccatgtactgagggttgggttggggccatctttttgctacagccattaagaggaggccaaggagggcagatcacctgtggtcacgagttca

SEQ ID NO: 15918 - DNA, 120 bp, Homo sapiens
gtgcgtttatagcattttaataaggcctagacattaggcagctggaagaagatttggcattaaagatgtctacagttatgttgtaagtttcatcatgttgtttatttatttcattttctt

SEQ ID NO: 15919 - DNA, 120 bp, Homo sapiens
gcacggcacagagagctgtgatgagagatggtctctctaataagagtcccataattgtgtaagagcgatcgaatttctgaagatggcattaagacagtggagtttgtaatttctgaggat

SEQ ID NO: 15920 - DNA, 120 bp, Homo sapiens
gaacgatgaggctaaggaaatgcatatcatcaccattaatttttgataatttttcatgggtgagaatgaaaacatatcttgaatccaccccttttttccctttctatttctggtgcccta

SEQ ID NO: 15921 - DNA, 120 bp, Homo sapiens
tcccgagtttggcttcaaaatttaaacttcttaccacagtcacttgtaccccacaagatctgagtccttgttgacttccccaccatcatcttgcccctgcccctgcattcacgactgtcc

SEQ ID NO: 15922 - DNA, 120 bp, Homo sapiens
tcccgcaagctgctttcccctttaaggtctctgtattgttccttcttttgtctagaatatcctttgtggacttgttctttctcactctgaaggtctcatttctgatgtcgcctttctgag

SEQ ID NO: 15923 - DNA, 120 bp, Homo sapiens
gcccgcttctccccagtgctgccggcagagctgatccagaaacccaccccgggcttcccagggggaagtggaccgctcagactcctaacttcagtcagcacgctgacgaaggagagagcg

SEQ ID NO: 15924 - DNA, 120 bp, Homo sapiens
ctccgccgagggtctggccttgcaaggcgtctcccacagcccgggggaccttggacctgtgtcccctcctacaagatgctgagaagcccagggttaggggtccctgaggcagggtggaaa

SEQ ID NO: 15925 - DNA, 120 bp, Homo sapiens
aaacgctgccaggacaagcccagcccacagtccacagcgcctgccccagaaaaaacagccgtcgctcctggatatctgccacgtgactcaaagaggatttaaggcagtttagagcgattc

SEQ ID NO: 15926 - DNA, 120 bp, Homo sapiens
ctgcgacctcggggacccagagagacggggatgacgcaaggagaaaggaacaagagcagggatgcgggatggagcctgggatgaggggatgcaggccgctcacggagaattcttctgggg

SEQ ID NO: 15927 - DNA, 120 bp, Homo sapiens
ttgcgtcctggggcccccggggtgcagcccaggggctgcttagaggggctgagtgtcttctcctctagggtcagtgcccctggaagatttggagggaaaatttgtgtgtgtggagagaag

SEQ ID NO: 15928 - DNA, 120 bp, Homo sapiens
aaacgtgtcattgatttttattataaaagaaaagactgtactgcactgtactggaatgataatgatgaagaagatgggatcattccagtcactctgagtaacttacagtggcttttttta

SEQ ID NO: 15929 - DNA, 120 bp, Homo sapiens
tcccggcacccaaggaagaaccaggctgtgtgcccacaactctttgggcactgtgatgccagacctcaagaaggtccctttgacttcattccttttggaaccaggaggatctgtccagct

SEQ ID NO: 15930 - DNA, 120 bp, Homo sapiens
taacgtgtgtgaaagaacagtatgaggtagaatgcagggttttaataaggattacaggagtcactgggtttaacccagggatctgttgattctggtggggattcctagccctgagggagc

SEQ ID NO: 15931 - DNA, 120 bp, Homo sapiens
atacgattgacaattggctgtacatttcccaagcagggaccagctgtgtggagaaatttggatgctccttctcgcagcctggctgctttcccagggccggccccaggagggaggctcccc

SEQ ID NO: 15932 - DNA, 120 bp, Homo sapiens
ccccgcgtgcccgcctacgcaagcagcctcggactgactcccaacaaccccagggtgctggctttcccggaaccctcctctgattcgggatttctaccagacttcggtagcggtttattt

SEQ ID NO: 15933 - DNA, 120 bp, Homo sapiens
caacggtacacttcccttgcataggactcctagcctgggccggggctggctgggatgaggggatgggaggaccgggggtctggcccagggtttgcgttgtgggctttgcattgggcaggg

SEQ ID NO: 15934 - DNA, 120 bp, Homo sapiens
tgtcgattttgcgtgattacagtattttcaggaaagctacttaggtgcaccagtcaccagggacggttcacgcgtggacatgtggaaggcctttcctggagggaattcagcagctcttgg

SEQ ID NO: 15935 - DNA, 120 bp, Homo sapiens
ctacgaagtgggccagaccggtgggctcgctatggaaggttcctgcaccaggcattttagtgacaaactgtgggtcaaaggaaacacaagtgagcgcgtgggcaagaaggtgtcgtactg

SEQ ID NO: 15936 - DNA, 120 bp, Homo sapiens
gcccgtgtgtgcaacggggcagccctgactcagtgcctcagtgcctcagtgccttgggtggtgcccttaaggacaagtgtgtgtgaacgtgcatgagagtgtgaggatgtacatgagtgc

SEQ ID NO: 15937 - DNA, 120 bp, Homo sapiens
tgccgtggctgggtcagctgcaggcttccttccaatggaactgaactgtctcaggtgttcactcacccagactcggaaggggcccaaggcatggttgggggcaaggattcagaaaccttc

SEQ ID NO: 15938 - DNA, 120 bp, Homo sapiens
ccacgtgctggcttgtaacctgggcaagagtgctcacctcttgaagttgccttcatctcaaaagtggagaccacagtagctctcacctaccagggcagttgtaggaaggaatgaggtccc

SEQ ID NO: 15939 - DNA, 120 bp, Homo sapiens
aaacgtatctattcctagcagtttcccaccagtttcctctttgtttcctgatcttaattgccaactgtaattaaatgattatttgggcatcttattagtgtgttggtgaccattctcggc

SEQ ID NO: 15940 - DNA, 120 bp, Homo sapiens
tcccggaagactcaaggagttggggcgtctctgtgtttgtgcactgctaggtccctaatgcctggtgtggtgcctggcacacactcgactctgcacacagtctgaatgaatgaatgagtc

SEQ ID NO: 15941 - DNA, 120 bp, Homo sapiens
tgtcgcctcccttgcctggcccctcaggttcctaagggcgtctgaggaaaagcctcattggaaagcgcccgtgccctcctccctctcccccgcccccccgccccccggcagggaggaggg

SEQ ID NO: 15942 - DNA, 120 bp, Homo sapiens
gttcggagcgagggttcggagggtccggggtgccctagcaggcccaggccaggtggttgcggggaggaagcctcaggtcgctcccctccggtgccggggtgggcgcgtcgggacccactg

SEQ ID NO: 15943 - DNA, 120 bp, Homo sapiens
ctccgggaggggaggaaacgggactaggaagctttcctgtttctagagcacggcttggtggggtgggcggctcctaacccggggtccagcccctcctcccccaccccggcgcgcggtcca

SEQ ID NO: 15944 - DNA, 120 bp, Homo sapiens
gtgcgacccctcccagtggccacgcgccttctcacgcccctctcccgtgacgtcatgctcctctcgcgcggcatgatgggagaatcctaatgttttccaacagatgctccaagaacagct

SEQ ID NO: 15945 - DNA, 120 bp, Homo sapiens
aggcgaatgccccatccagctgtggggaggctgccctggagccctgcgggcttgtggaggggttggcatatctggggatctgagggaagggtccaggggagggcacttgagttagagcca

SEQ ID NO: 15946 - DNA, 120 bp, Homo sapiens
cttcgaattaactagcccagcaggaaagggaaaggtatgctaggccgagagattggcagtgcaaaggccaggtggtgggggcagcttcggctggagccagaggcaagagagaagcaggag

SEQ ID NO: 15947 - DNA, 120 bp, Homo sapiens
tggcgggatggggctgcaggggagctgggagccagacggttggggcctcctggactggggaggagcttgtctgccatgagggaaccatgggatgtctgaagagagggatgtgagtgtgtg

SEQ ID NO: 15948 - DNA, 120 bp, Homo sapiens
gtgcgtgagtgtgtgtgacagagaccaagagacagtgtgatcgggcacatttccaagccgtcactctggctggccaccccgggtggaaatgggtcccaggaaggcagcagagtgagacca

SEQ ID NO: 15949 - DNA, 120 bp, Homo sapiens
gcccggaggaagatctgtgcaggagaggaggctcaatctcagcttggaagggaagggcaggagagggaagggaagggtatgtgccatgaggcacctacgtggtgtctgggcaccccatgg

SEQ ID NO: 15950 - DNA, 120 bp, Homo sapiens
ggccgcctttggtttcttctcttgcttagggatttgcccaactcccattgcccatctgagcccagctttccccctctgagcccagttttcctcctctcaccccaatgtcagagtgggcac

SEQ ID NO: 15951 - DNA, 120 bp, Homo sapiens
ctgcggaggcatgcaggcttttcctctgcatgcaccgtctctgtcttgcgtgacagcccggggctgtttctcacccttgttacgctggggttcttggctgagagctcctgggcaggggct

SEQ ID NO: 15952 - DNA, 120 bp, Homo sapiens
gttcgtttctggctggttctagatctgggtggcatttggagggtgcaccgcttgtatctgtgaccgaatacctcagggtttgtggtgagggacgtggagatttctgtgctgcaagagatc

SEQ ID NO: 15953 - DNA, 120 bp, Homo sapiens
ggtcgtcagccattcaacaaatatttactggacacctgttttaagcctgtcaccgttttttgagtatgcatatagctatatatggcaggttgcagtgacgactcatgtctctgccttcat

SEQ ID NO: 15954 - DNA, 120 bp, Homo sapiens
tctcgtgggatgaggggaaacagacagcatagaaatagatgtatgatgggactctaggtggttatagatgcctggagtgatgataaagtgaggctggaggaatgagactggcagggagga

SEQ ID NO: 15955 - DNA, 120 bp, Homo sapiens
cctcgagaagagcactagggcagcaggaacagcaggtgcaatggccctgcagcaggcatgtgcttgggtgtggtaggaacaaggagaccagtgaggctgagtgagtgatggaaaggggca

SEQ ID NO: 15956 - DNA, 120 bp, Homo sapiens
tgccgaggcctgggggaagacttgggctttattttcagagctgcccgttgaagatttgaatggctgcagagtgagatgagattgtgctggaggattcgaaggtcatttagtcagagatgc

SEQ ID NO: 15957 - DNA, 120 bp, Homo sapiens
gagcgctgtattggagcaggtggctacactttcaggaatgctgcaagctggctgcagtgggaagtatttacaccatggcaattggcaaatgtacatatcagctcccttataccacccaaa

SEQ ID NO: 15958 - DNA, 120 bp, Homo sapiens
tgacgaaatgggagtaaacatcccaggcatgcatcctttaggtgggtgcttcttggagctttcagagaatgcaaccttgctgcctacagctgtgaccctggaaatgcacgtgtgtgggtt

SEQ ID NO: 15959 - DNA, 120 bp, Homo sapiens
gcccgcctgcagctctgcttttaggagaatccaattaagatggtggtagagctagatgtggtgtgagagggatcagatggctgggatgagacagaagagtcctggatgactccaagcgtt

SEQ ID NO: 15960 - DNA, 120 bp, Homo sapiens
tggcggcaatggggaggaaccattgagatgagcaggatgggggttgggcaaatcaatgctctgttcagctgtggacaggttctgtttgagagacctatcagatccccaggtggaaattgt

SEQ ID NO: 15961 - DNA, 120 bp, Homo sapiens
aagcgtctgtgtatctatgtatgtatctatcatccatctatttatcatttatctctcttttttatttatctctcaatatatctatcatctataaatatatgtatattctagcatctagtc

SEQ ID NO: 15962 - DNA, 120 bp, Homo sapiens
aatcgatcatctaccattatctatcaatctgtgtatctatcgtctctctctctgtccatccatccatccatctatccaggcagtgcttgcttccttctgccccctccttagcccatccct

SEQ ID NO: 15963 - DNA, 120 bp, Homo sapiens
tctcgtccctgctcaaatgccttcagtgacaggaaactcaccaacctcttaaggcttcggcatggaagtttccaactcatgtggccactccagaatgctgtcctccagggactgtgtttc

SEQ ID NO: 15964 - DNA, 120 bp, Homo sapiens
ctccgagccatgcgtgttccctggcagggtcgcctgtgtgctggggaagaatgggcccagtcatggggtggagacgccccccagctgcagccctggctcccgagcagaggcggctttgtg

SEQ ID NO: 15965 - DNA, 120 bp, Homo sapiens
tctcggggacaagggttgccattgaggcaggccagggatgctgtgcaagctagcgatggctgcaggctgaaatcgggcatttcacagagagcaagcactgcactgtccccgcagcctgca

SEQ ID NO: 15966 - DNA, 120 bp, Homo sapiens
gcacgtgaatggaggctttggccctcggagtgcagccgtgcatggggccacgtgcaggcatttctggctcctggctcccagggagagaggcgagccctgttctctccccgagttctgttt

SEQ ID NO: 15967 - DNA, 120 bp, Homo sapiens
gtgcggctccatgctgggtgagcctcctctctccttgccggggaagggctagagtaagagtcggtttctccaaagtgatgatgcattctttctcttatgggtctggcttggaagccacag

SEQ ID NO: 15968 - DNA, 120 bp, Homo sapiens
gcccgtgggcctaggtcagcctgcagacttggttggtttgaacacagtgtttgtgtgtttcattgaaccaacatttaaatgtagggagatttcacaccaatatctggattttctttctgg

SEQ ID NO: 15969 - DNA, 120 bp, Homo sapiens
gctcgggtactgctggctattgccaggctagagggttcatgaggatggaattgtccagctgtgatattggctgtctccggggcctgcaccatgcctggtagatgaggtccatccacttaa

SEQ ID NO: 15970 - DNA, 120 bp, Homo sapiens
ccacgaatcccttaaagtccccttttaccctgttatgtgcctggcccttggggagatgctgagctgagcagccgttatagtgggtagaagaaggaagcttggggtccagcttgaccctct

SEQ ID NO: 15971 - DNA, 120 bp, Homo sapiens
gaacgcagagaggggcaatggctgtttattctagaacagacttgggggatgagaaccttggaaagaaagggtgggatttttcctgcatggttctaggatgtggccctgcagccagctggg

SEQ ID NO: 15972 - DNA, 120 bp, Homo sapiens
gatcgaccttgttcattgcagaatgaagcagcaaagagctggtgtgtgctcacggtgtgtttcagctggtgggttttgtttcaggttgcccaggcctggaggtggccttggtgctgaggg

SEQ ID NO: 15973 - DNA, 120 bp, Homo sapiens
acccgcaggaatccggaagcgcctgatgccttccctgggctgggagcccctagagaggaggatctgctgagctgttatgacatcgtgcccacaactgtgcaggcatttgggagatgctct

SEQ ID NO: 15974 - DNA, 120 bp, Homo sapiens
gcacggacttgggagaccctaccagcctgggtttgaaccctgtctctaccgcctgcttgctttgtgacctggttcctcattttcctcatctgtaagatggtggtgttgaaaggacccgtc

SEQ ID NO: 15975 - DNA, 120 bp, Homo sapiens
ctgcgccgttgccattttcctgttgatcctggagttccggccactctggcctctgctcacatagctggaactcgtcagaccatctcccacctcaaggtctttgcctctaccgtgctgtct

SEQ ID NO: 15976 - DNA, 120 bp, Homo sapiens
actcgtcccctgccttaccattcggtcagcccattatccttcgggcctcaggttgaatgtcacttgctgagagcagccctctctgaccatccttttagagtggcttccccgcctcacatt

SEQ ID NO: 15977 - DNA, 120 bp, Homo sapiens
caccgcacccagactattttgttttgacctggggagagttaaatgagttaatatccttagcccagttccataacatccactgtaagcttttctatatgttcctttatttaggaagagtga

SEQ ID NO: 15978 - DNA, 120 bp, Homo sapiens
aaacggaggtcaaagcagagagcacttagggattcccaaagcgtccagaacaacagtagatggttataaaggacagcaatagtacaatgacgctgcctccaagacgaagtacagcattaa

SEQ ID NO: 15979 - DNA, 120 bp, Homo sapiens
gcccgtcgggaagatacttttcatgtggttgacccatggcagaaggaaggacctgtgtcatccctgagtgtctgagcatgttggggctgtgcttcgggacatggggtttttctccctggt

SEQ ID NO: 15980 - DNA, 120 bp, Homo sapiens
tctcgttgggatgctcttcacacctaagcagggtttgcacattcaaacatgggccgtttgtattccagccagcattgctgagaaggccggggagcagcttggtgcatactaaggagcagc

SEQ ID NO: 15981 - DNA, 120 bp, Homo sapiens
cctcggctctgcttttgggagaccttgaaggctgatgcatttcctccccagccccactcttactttacctggattgctgctgggactttgagacagtccacgctttcctattgtggaggc

SEQ ID NO: 15982 - DNA, 120 bp, Homo sapiens
ttccggttccctgagaggctaaatcttggttaggaggtttcacaacacctcactgcctctggaagactctctggagctggaccaagctctggcctgctgatttgaggaatctggccatgc

SEQ ID NO: 15983 - DNA, 120 bp, Homo sapiens
aaacgaatccagattttatgcagccgggcctgtcagcacacaaacccgattgtgggcccaggcttttgtcattgtttcctctctttagactcgaagagtgaagtattttgatgatgctat

SEQ ID NO: 15984 - DNA, 120 bp, Homo sapiens
gtgcgaggaaagcttggtgtcaagtcccgtggcactcagatggttaacgccgtcgtgacgctcggatttggcggaatgcggttgctgagctagaaatctggaggattttcactgggatgg

SEQ ID NO: 15985 - DNA, 120 bp, Homo sapiens
ctccggcattttgaatatgttgccaacaagcatacctttggatcttagggaaggagaaaggaagatgaaaacaatgctaaggccttttctcatctattctaaaaaaaacactacttttgt

SEQ ID NO: 15986 - DNA, 120 bp, Homo sapiens
gagcgttggcttttttccactctgaatttttgcaagatgactttgtctgatgaagtcatagcagaggctggagacgaatgcttggccgcggccaggctgacagtgtggctctcaccctgc

SEQ ID NO: 15987 - DNA, 120 bp, Homo sapiens
tgccgtgggagcctggtctctggcttccgtgcctctgacggcgacatcacacacccgcaggcttacagaatcactttagatcagggtcggcaaaccttttctggagagggtcagatagtg

SEQ ID NO: 15988 - DNA, 120 bp, Homo sapiens
ggacgtgcagtctctgttgcaactacttgtctctgcttttgtagcgcaaaggcagccggagacaaaacatgcatgagagggcatggctgtgtcccaagaaaactttatttatggccactg

SEQ ID NO: 15989 - DNA, 120 bp, Homo sapiens
agccggcaactcacgaccacagtgagtgcagtgaaggatgcagcaccctaagatcatgagacaggacctgacctggttctcggggggccgggagatgtttgagtcaggtccaaaggtggg

SEQ ID NO: 15990 - DNA, 120 bp, Homo sapiens
caccgctcaggcagcagttaaattagatgcgctgggcgtgggacccaggcagcagtgcttcctcatcctccacagctgattccgactttgatgcaggaaggttgaaaagccaagagacag

SEQ ID NO: 15991 - DNA, 120 bp, Homo sapiens
aagcggggagtgacttccagcccacaggagcagcaagcacaagtccccgcggtggaagggaccttgagatggtgggttgggttggaggaaaggaggaaggaggaagcaggaaagggagag

SEQ ID NO: 15992 - DNA, 120 bp, Homo sapiens
agacgcctcccgtcttccctgcccacacaccggctggggtggcagaggcatgaccacgctgctgcgggagcctggggcggccacagtgcgagtgggtgggatctgcgaggagcccgagtg

SEQ ID NO: 15993 - DNA, 120 bp, Homo sapiens
gaccgggcagcaggggttgctctgggaggggacttggacttgcttttcgcagtcgactcttctgtgctgcttgaatcctttactgtgtgccacctgtaatcaacctgtaatcaacgtgct

SEQ ID NO: 15994 - DNA, 120 bp, Homo sapiens
taacgggatccacgcagatgcttggccacaggctcccggctaaatccttccctgcaccgcagtttccgtcctgcactagcttcaaaaatgtcttttctcactgggtcgacctgaggtcag

SEQ ID NO: 15995 - DNA, 120 bp, Homo sapiens
caccgggtcctcttgcaggatgactggaattgttggcggtggctgtgcacctgccctctccggctcaggggaggatcaggcttgagggctgttgctctggggtaggcacgcagtgccgcc

SEQ ID NO: 15996 - DNA, 120 bp, Homo sapiens
cgccgcctctgctgtggatgtgaggactctccagggtgaggagcagaggcgctttcctggctttggggttaaggaaccggcttcagggttaaggaaccggcttcagccaccgccttccac

SEQ ID NO: 15997 - DNA, 120 bp, Homo sapiens
ggacgaatctgcagccgggggcgccctcctgtggccggccaggctcatgagcctccctgcaaggtggacgggacttcatgcaggacaggccctgtgaggctgtgggagtggattgtcagg

SEQ ID NO: 15998 - DNA, 120 bp, Homo sapiens
cctcgaaactcacatttgaacttccttggccaggacaaaccccaggattgccctctgccctgcacacgcgcatgtatgcacacacacatgtacatacacattggacaccctggagcttgc

SEQ ID NO: 15999 - DNA, 120 bp, Homo sapiens
atgcgttgacttggcattttcttaaataatttaaggaatttcctaccccgtcattgggtataaaagaagagagtttattactctgtgctgtgttcagtgacttgagattgactaggcatt

SEQ ID NO: 16000 - DNA, 120 bp, Homo sapiens
gaacgccgggggacacatgtctgcacgtgtgcacacacatgcacgtgcacctgtgtgcacccacctgtgcttgcactgtgcacatgtgccacgacacacgtgtgtgcctgcgtgtgcatc

SEQ ID NO: 16001 - DNA, 120 bp, Homo sapiens
acacgttccctctcactgtggctgctcaggtgcactgccccgcgctcccctctgcagccctcagaaggagagtggccgggcggaggctggccttccagcgagaggagcagggcctgggct

SEQ ID NO: 16002 - DNA, 120 bp, Homo sapiens
caccgctcccccaacccctccccaaccagcgtttcttagcaacggccctgccaccagggctattttgggaactgaaacttttcactgaacatgattatgagctggagctctgaccgcagc

SEQ ID NO: 16003 - DNA, 120 bp, Homo sapiens
tgacgatggaggcatccttattattaacagcagtgacagtcatggcagcaaaagacctgtgcattctaaggtttggtgtccataactgcaagtggtgggtggcagccttgcctgtcacat

SEQ ID NO: 16004 - DNA, 120 bp, Homo sapiens
ctacgccagctctcacattccctgtgtgttgccaggggctgggtaagctgtgctgtcacggttgcacgtcaaatgcgagtaagtcggtcacgagaaggggctggtttcagttttcagctt

SEQ ID NO: 16005 - DNA, 120 bp, Homo sapiens
actcggtgagctctcttggcttgtatctgggttggtgggctgttatagccaagggtcaaatgtggctcaggacctgtttttatgtggtctttgagctaagaatgctttttaaatagaaaa

SEQ ID NO: 16006 - DNA, 120 bp, Homo sapiens
gcacgggggatacagcacgtggcccacagagcccgtcacaatggccatctgcgccttatgggaagagcctgccagcctcgcctggacctctgggcaactgacgcggctgcatggatgaga

SEQ ID NO: 16007 - DNA, 120 bp, Homo sapiens
gatcgtccagccctaaatctccagacttctggcatggctgaccttttcattctccccggaggagacgtgtgcggcagagggaatatgatcagcagcgatgacaagctcaaatctcttcca

SEQ ID NO: 16008 - DNA, 120 bp, Homo sapiens
aaacggttctgtcctaagcctgctgttagcagatgggcccaaaggtgcagaccaaggggccagatcactcttgtcaccctcctcttctcgttgtcagaaaccatcaccaacaacaatgac

SEQ ID NO: 16009 - DNA, 120 bp, Homo sapiens
gatcgtcacaaatctccatccctggctccagctctttctgatgctaaaacctcacatgtccatttgtccactgtccctgcagaggccctgatgcaccctgagttcagcagagccaaagct

SEQ ID NO: 16010 - DNA, 120 bp, Homo sapiens
tcccgggaaacccgctcaacttcccagatcctcatactcagctaatgtcatctccatgtttccacatcaaagcccaggcagtcccctcctccaacatcacagccccactcattcagaaaa

SEQ ID NO: 16011 - DNA, 120 bp, Homo sapiens
tgtcggcatctataacagtgtcactgttgtttcagaaaacgtcaggcacttctgcctctggccatgatgaagcgatggtagctgccctcccactaaaatcaaacgagagactggacaaaa

SEQ ID NO: 16012 - DNA, 120 bp, Homo sapiens
tttcgaggcattgaacagaaacagtacatgcctgttatccttgagagagtggagacccctgggttagcccataattgatctccctggtttctgggggaggcatcttcctgcagggtgcag

SEQ ID NO: 16013 - DNA, 120 bp, Homo sapiens
caccgagatgaggaggcagagactggagtctgggctactgaaacagctggagtttgtaggacaggaaggagctatgtaacgggttctgtgcagatccagttggccatagcctgggctatg

SEQ ID NO: 16014 - DNA, 120 bp, Homo sapiens
ccacgaatgtcaggctgggagtgtggtcgctggagtcaggccttggtttacatcctggttctgcttcttaaccactctgtgcttcgacaggagagcaggaggtcctacttagttttggac

SEQ ID NO: 16015 - DNA, 120 bp, Homo sapiens
ggacgtgctaagtttgggatgcctgctagagatctgggggaagcatggtgaagaaagctgaatgtgcaagcctggagttcaggagggaggtggtgtctggagatggaaatctcgagccag

SEQ ID NO: 16016 - DNA, 120 bp, Homo sapiens
gaccgatggtgtccatgcttctgtgtgcttgagtacagagtctgggattctcctgagcatcctttgctccactgggatggaagatgggacctgatgagaccggggctaggggaatgtcct

SEQ ID NO: 16017 - DNA, 120 bp, Homo sapiens
acacgtttgtgtctgtgtgcagggagcgtggaaggcagttcctgcttggtgaggtggagctgagagcggtgccacttagcagctatctgtgccactctggtatccggagagaaggagccg

SEQ ID NO: 16018 - DNA, 120 bp, Homo sapiens
gaacgatgcccccgcccaccacatttgctggagttggactagagctggtaatatcagggttttactttttagtttaatttcttgcacaatgcatggatgtttattgagttttgccaataa

SEQ ID NO: 16019 - DNA, 120 bp, Homo sapiens
cagcggagtagcagcatcccaggaggtcagacatggcttcctggaggcgccatttgttttccctacagcagtggcttaattggtctccctttgtctctgctctgcctcctttcagagatt

SEQ ID NO: 16020 - DNA, 120 bp, Homo sapiens
caccgtctcttgctaagtaattcagcctctggttgccatggcaacgtgccatctactgtatcccaaagaacatttgcgatttcctttttttaatttccagaaccttcatattttatcttc

SEQ ID NO: 16021 - DNA, 120 bp, Homo sapiens
ccacggctaccccagaacacatccgtgtgcttggtctgggacccccaggaaagtcagggtcccatttgaaagagtgaagctctatgctgattttcacccctctctgtgtaggagctcagc

SEQ ID NO: 16022 - DNA, 120 bp, Homo sapiens
gcccgcagctcctgcacggtaggtgtgcactggaaattatgcacagaggcacgggctgttttgcctccatcctgtctacagccaccatctaaggagagcagtgggaagcacctgctgccg

SEQ ID NO: 16023 - DNA, 120 bp, Homo sapiens
tgccggcgatgtgcttgacgtctgccttactttctttcatttatctagtcttcacagtaacccagtaaagcaggtggtactatcatctccattttacagatgagaaaattaagccttggt

SEQ ID NO: 16024 - DNA, 120 bp, Homo sapiens
ccacgtagcttgcagaagctgccgtgcagtgagataggccatttgttagagccctagccctgggcctgggagaagcattctagacacgaaagcactgtggctccttgtttatcttaggca

SEQ ID NO: 16025 - DNA, 120 bp, Homo sapiens
agccgtctttgtctcagctgcgtgagataggccagcaccagtgtctcagaatctctctccttgtttgtgaaatggggatggtggcaatacctgcctcagggccctctggaagattccaca

SEQ ID NO: 16026 - DNA, 120 bp, Homo sapiens
gggcgagctgtcacctgcacggggcagaggccagcagcaggccttgtggcaggatgaaatgaatgctgctgcatgaacagcggtcacgatgctagtgggccagggagtgcaggagcattg

SEQ ID NO: 16027 - DNA, 120 bp, Homo sapiens
attcgtgactgttgtgtaattttgcccgaagagagaggaatagggtaggcacctcctaagtcatgcacaaactgtcattccccttggggcgttctttgctcccaggaacgtgtgtgagaa

SEQ ID NO: 16028 - DNA, 120 bp, Homo sapiens
tagcggatctctgagtggcttctctgcacgttttgtcctgtggcctccagaacacgctgcaccctcaggtgtcctcccgggctgtggcctcccactcctgctctgtctgcaggagcagga

SEQ ID NO: 16029 - DNA, 120 bp, Homo sapiens
cagcgtgcagcgagtttagacgctccctcctctagatgtgctttaggcaaggcaggcctatttttggtcctggagacagaacgcacagaaatgtggagacagacagtgtccccgcagagg

SEQ ID NO: 16030 - DNA, 120 bp, Homo sapiens
aggcggaaaccgtgcctggccagccaggggaccagcctgtctcaatggggccttcgttctgctgtgagcttttacctgaaactgcatggacggaaattttcacttccacagaaatggtgt

SEQ ID NO: 16031 - DNA, 120 bp, Homo sapiens
acacgtggaagcgggggaggaatcagcttccaatgccagccttcataatgacaccactaatagcatctgagagggtctgccgtgacgctgggcaggtgcagtgctgattgcctgtgatgc

SEQ ID NO: 16032 - DNA, 120 bp, Homo sapiens
tgccgagcagggaccatcatccctgctctgcagatgaggagactgggcagagaggctaagcagtgtccctgggtctcacagttcatgaatggccaggctgtgggctccagggccctcgct

SEQ ID NO: 16033 - DNA, 120 bp, Homo sapiens
atccggctcacaccttgtggacagggccgggaagctgatgatacactatagctaaaggccagtttccggtgaatgtttgtgttaatgaggtggttatggtccacgttcactgggctgagt

SEQ ID NO: 16034 - DNA, 120 bp, Homo sapiens
gcccgctgatgtctgcaaccctgaagttctgtgctcggtatggtgtgggtgctgcacacaggctccttcatggatcttactaccttccccaagaccctcactgaggagcgaacacacctg

SEQ ID NO: 16035 - DNA, 120 bp, Homo sapiens
tcccggagcagggctgagctgccgcaagcgctgacggtttctcttgtcacagttatcattgccgccctgaaaaggctgcaaagtttgccttctgcctcagggttaatccatggctgctgg

SEQ ID NO: 16036 - DNA, 120 bp, Homo sapiens
gaacgggcccagttgatcctgtcacatccaatgtcattgcccatctcttggggtgcttaccccccaattacagagatttcgaattcatgtagcgtgcacgtgctaggcgctggggtgcag

SEQ ID NO: 16037 - DNA, 120 bp, Homo sapiens
gctcgaaggtgggaagcagcaccgccttcccaggactaccctgggggctgagaaggttcagggctgggtgagggtggcagggcagagggagaagactggaggggccatgggtccaggtgg

SEQ ID NO: 16038 - DNA, 120 bp, Homo sapiens
gcccgctatgggttcccaatccacacagacctcctcttgtcattctgggctcagctcagatgtcaccttcctgaccatctcccagtggcacagcctcgccattaccctgtgtcacatcgt

SEQ ID NO: 16039 - DNA, 120 bp, Homo sapiens
tgccgtttactcatctgttctgttcgcctcttcagggtgtgcccactggcgtggcggggccctgctctgctcttctgtgagggccttgcccaccaaggaggcgctggctaagctggtggg

SEQ ID NO: 16040 - DNA, 120 bp, Homo sapiens
tcccgagaagcagccagggctccctgggggtcaggagcgagggcatgtctgggaaacgcccctctgctgcagtgcagggctggtttgggagagcaaggctagagctgggtggggagacaa

SEQ ID NO: 16041 - DNA, 120 bp, Homo sapiens
ggacgcggggctgcagagaggacggcagagctggtgaggatgaacggcaggcctgtggctgagggaggagggcctgccagcctaggggtgggtggatctgcaatggtggagagggaatcc

SEQ ID NO: 16042 - DNA, 120 bp, Homo sapiens
tgccgtcaggtgcctggggtttttggcagtgcttccatccacttgtgcaggtgagactgcccaaggagcacagggactggaacgggagactgcccggtccatgctggacttgctgatctc

SEQ ID NO: 16043 - DNA, 120 bp, Homo sapiens
ggtcgagggtattcagagcccgtcgtggtgttttatacggtcctgtacttcctgttatccttggtccattttcttctacactatcttccctccagtttcacacacttggacagaagggag

SEQ ID NO: 16044 - DNA, 120 bp, Homo sapiens
gaccgccaggaaccacaacaggcttctgtgtgttccagtgaaataagccctatctgtctctcgggaatggagcagtgttaagctttttttaaaagcacaatctgaagacactggggtctg

SEQ ID NO: 16045 - DNA, 120 bp, Homo sapiens
ctccgcggttgggccttgctgaataatttggggttttaggttgggtacatcaagggtaaagggcttctgtttggatcaaacaggaggtggggggagggtgagattccctcatattgctga

SEQ ID NO: 16046 - DNA, 120 bp, Homo sapiens
gggcgctggtgcacctcagtgccattgctgatgaaggtctgggtccggtggaaatggtgtggtctgcagatgaggtgcgcctgtcttttcttaaatcaaggacactttcagatggatttg

SEQ ID NO: 16047 - DNA, 120 bp, Homo sapiens
actcggctcgttcagtcagcctgacgggcacctaccgtgtggctcgggccccgtgctgggcaagaccctgcctccagctcccagcctcactaggagtgggggatgggagtcacaggatgt

SEQ ID NO: 16048 - DNA, 120 bp, Homo sapiens
agccgccagggcaggtgaatcctggagagcggcgggctgttcaggtctgggaccctgggaagccacagggaggagtgcatgggagtgaccctggaagcccagagatggagatggggaggg

SEQ ID NO: 16049 - DNA, 120 bp, Homo sapiens
gcccgagcaaaagatcagaggcagacaatgctcagcgtccaaggaggaaagcggaaggagctggagggcaaggcaggccctggtacctggcaggtgctccattggtgcctgtggaatgga

SEQ ID NO: 16050 - DNA, 120 bp, Homo sapiens
ttacgtattctttccattttcaaaatttgaagaagggacttatatacatggtaaaaaataaaacggtacttctcactcccacctcatccatctgtccggagtcagccactgtccacgggg

SEQ ID NO: 16051 - DNA, 120 bp, Homo sapiens
taacgcccagaacagtaatctgcagatattacctcccatgtgctgtgcccagctcggggtgagctggaacctgcggtagatccttcgctcggcatcagtctctggagggaggtaaagacc

SEQ ID NO: 16052 - DNA, 120 bp, Homo sapiens
ggccgtcactttgaggtagaatccaaggacatttctttgaggaaggatctaccaacttaagttatttttgctctaaacaaaggctggatgtgtctcctccaagttccactgacagtttct

SEQ ID NO: 16053 - DNA, 120 bp, Homo sapiens
ccacgcaaactgcacagtggtatttttagcaacttgcctctactgactccaaagcttagttttcatggaatttacattttcattttacacccatatgagatcatttaatcaatgtgcatt

SEQ ID NO: 16054 - DNA, 120 bp, Homo sapiens
ccacgaagtcagcacgggatgcccagcatggctggagccactgaaggatttctgcttcaagaagcctcaaccggtatctaaggccttcccactgatcagatcaggcccacccatttcagc

SEQ ID NO: 16055 - DNA, 120 bp, Homo sapiens
tcacggcccttggtcacatctaccagacgccgtcacagcagcacctagaggagtgtttggttgagtaactggggactgggaccccaccccccataccattcaggttgacacatcaaattg

SEQ ID NO: 16056 - DNA, 120 bp, Homo sapiens
gtcggctttggactcagagtgcctggagtcacatcctccccggcatcccagaagtcaggactgctggctgctgagatggggcttgccccaggcatgtggaccagcagccagcacctctca

SEQ ID NO: 16057 - DNA, 120 bp, Homo sapiens
agtcggcagaacatccctgcttgctgtttcctagtgtggacacactccatcccctctgcctggatgcccatcccaggtctttccctgggcggtttctttcatcatccaggcctcatctta

SEQ ID NO: 16058 - DNA, 120 bp, Homo sapiens
tgacgctctgagacatagggtcaatgtgcctgtcatccgtgcacccagatggtgtgcgcctgggggcaagcagacgagacatctgccccattcaccatcagatgtctgaggatgcatcaa

SEQ ID NO: 16059 - DNA, 120 bp, Homo sapiens
atgcgtcgtgtgaatggtgtgtggagacgctgcctcgctggggaatcccatctccaggcgggggccgccagcttttctcagtgactcaaggcggctgtggggcaggattggcattcccag

SEQ ID NO: 16060 - DNA, 120 bp, Homo sapiens
gcccgggcgtcccctgtgggtgtcgagctgtctgttctctctaggaaggcattctgccttgtatggaaggaattgcttctcaatttctgctccacactgaggtgactttagatgttgatt

SEQ ID NO: 16061 - DNA, 120 bp, Homo sapiens
gtgcgtttagtggggcagcctggctgggtggggcttcattggggaagcaaagcttggggagctggaactatgcttctcctgaccccgtgtccttccacttcctgaaattacctgcagccc

SEQ ID NO: 16062 - DNA, 120 bp, Homo sapiens
ggacgattcagaaactggtacaaacttggcactgagacggcgtctgatgggagaagagggggtgtctgatgaaagaggctatgacagacaggagcatgtgcgtgtctggtggaagagggt

SEQ ID NO: 16063 - DNA, 120 bp, Homo sapiens
gtgcgtgtctgatggaagagggtatgagtgtctgatagaagagggcgtgagtgtctgatggaagagggtatgagtgtctgatagaagagggtatgagtgtctgatggaagcaagtgagtg

SEQ ID NO: 16064 - DNA, 120 bp, Homo sapiens
agacggtgtgaatgtctgatggagagagcatgagtgatgaagagggtgtgagtgtctgatggaggaatgtgtgggcatctgatggaggaagatgtgaacatctgatggaggtgtgaatga

SEQ ID NO: 16065 - DNA, 120 bp, Homo sapiens
atccgtctgatggaggaggctgtgagtgtctgaaggaggagtgattcttggggatccaggcctgcaaggaggcgctgggcaggatggagcctgcagctctgctggctgaaggtggaagag

SEQ ID NO: 16066 - DNA, 120 bp, Homo sapiens
gcacgccaggtgaataatatcagtgctatagtagtaatgatgccacctatttgtgtgtcaacctcctcctgtatttagtgttctcgactctcccagcatccctgtgggttttgttggcag

SEQ ID NO: 16067 - DNA, 120 bp, Homo sapiens
gggcgtgacgccatcacccagctggcaggggtcagagctggaactggaatcctagctctgtgccagtgctggggcaccagtgctgactgtggaatagacagttgacagcctccacagacc

SEQ ID NO: 16068 - DNA, 120 bp, Homo sapiens
aggcgtcctgactgtccaggctgtcggcggtctcatcagctccacctctaggccccttcctccccattgtttgtcccctgctccctgtctcctctgtgctactcacagcacagggccagg

SEQ ID NO: 16069 - DNA, 120 bp, Homo sapiens
tgtcgtaggtgactgctacagatctgtcgtgtgagaggcactcggaaccaggaagtgcctgtggggtcacctgtttggctggtgcccccttggcccccagaaatgactcacatccacact

SEQ ID NO: 16070 - DNA, 120 bp, Homo sapiens
gctcgatacctttaattcctgtctgcattccagggcctgcccagcctcttcctggctccccagcccagcctggtccttccggcctccctgtcatccccacctctcgtgtgtgcacaagca

SEQ ID NO: 16071 - DNA, 120 bp, Homo sapiens
gaccggcagatgctgctctctgtccctggggtttcttttcttagtgttgctcccacacccacgcgatgctttaattaactgccacactcaggctttctcagtggggagagtcagaaatag

SEQ ID NO: 16072 - DNA, 120 bp, Homo sapiens
aggcggcaccaggacgtcaccagcagccccatttctgaatcaggagtctcaagcagctgcagagggtggggaggtttggggaatcccacaggggttctacacccccacctaccccgcccc

SEQ ID NO: 16073 - DNA, 120 bp, Homo sapiens
ctccggccacgtctctagcggctcctcggagagcaacttgatactgaagctcaaagcccaggaagccctggcggcatccctgccccagccaggtccaagcaggctatgtagtgagggaga

SEQ ID NO: 16074 - DNA, 120 bp, Homo sapiens
aaccggcgcccattcctttgctcctcgacacaggctgctccccttgcctgcgccggctctgggggtctgctctcacagagcttcatgactcgttcaacctgactgcccttttcctggcca

SEQ ID NO: 16075 - DNA, 120 bp, Homo sapiens
cgactctgcttctcttcgcttttgcatttctcttttttaactcaaatctcttatttcctgccgttcctgtatctaaacagaatgggggcctcaggcagacaggaaccaaagaaagggtgt

SEQ ID NO: 16076 - DNA, 120 bp, Homo sapiens
cagcgttgggtgagcagcagccgctgccattctgtgcactgtcaccggcgggggtggagggtctccctgtaggaggaggaaactcgctgttttcactggcagatttcaaggtgccggctc

SEQ ID NO: 16077 - DNA, 120 bp, Homo sapiens
taccgcagctgctaggcattgctcttgtgtagatcgcagaaggagttattggtgatgtggggtgtaggggaagacaggaaaacggactcagagctaggaatgtgggcctggcagagaccg

SEQ ID NO: 16078 - DNA, 120 bp, Homo sapiens
gctcgcggcgagcctagggttcaagcctagcgcgccaggggtctccagtgagaccttgctcttccctgccgctgaggctggggctgcacggaggtcctcaggcttcccaccctttctgca

SEQ ID NO: 16079 - DNA, 120 bp, Homo sapiens
tgtcggctgggtggactgcagggcaggtgacctggaggaggccctgctccccagcaagcgttctaggagttacggtgtgctctattgggattggattacagtctctacttgtagactttg

SEQ ID NO: 16080 - DNA, 120 bp, Homo sapiens
tcggagtattgtgaggtctgcaaatgaaagggtcccttgccaaatgctctaatccaggctcctggtgtttgcgggcccagatagctacagtttgttgtcccctggctgcaaaccttctag

SEQ ID NO: 16081 - DNA, 120 bp, Homo sapiens
tctcgcccaggttttcatatctgctccacgggcttcacagaaaagtgctgctggcttggagcagatccgtaactctgatatcaaagtcctttttcttttggggctagggcagttcaggga

SEQ ID NO: 16082 - DNA, 120 bp, Homo sapiens
agacggtaatgactgtaggaatgaacaaatgataaacagcagaacattcttctgttcattgatttgaatcaaaacagactgtaaattgagatgaggaatgaatgtattaatagtaaactg

SEQ ID NO: 16083 - DNA, 120 bp, Homo sapiens
ctgcggccaagccttggggcctgggggacctgggtcactggagtctggttatgatcctgttgttcctgcagaggcagcgtcaggttctgcagccccagggcctgggttggaattgcagcc

SEQ ID NO: 16084 - DNA, 120 bp, Homo sapiens
tcccgggtcccctctgctaatcttcacttttgggcaccacggtttctctctggttgggtaagtcattccacgaccagtaaggcaagcttaaggccgaagttttcaaatgtcagtgttctt

SEQ ID NO: 16085 - DNA, 120 bp, Homo sapiens
tatcgagaacactagcttgaaacatttcagattcagtgttttgtaaagcagaggagaggccatgattggccattaggagcttcatcaagcgtcagcttgcccacagctttggtttccagg

SEQ ID NO: 16086 - DNA, 120 bp, Homo sapiens
atacgtgctttccatttctgtgtctaaggagataccctggttcttctcctctccttccagcagtggaaagggggaaagggactgggcacaaggggtcgatgatactaccaattttttgag

SEQ ID NO: 16087 - DNA, 120 bp, Homo sapiens
cctcgtcacatgaccatggctactgcaagggagactgggaaatgtagtctttggccaggcagccatgttgccagctaaaatttatactacagaagtatagaaaaacaaaaattgggagac

SEQ ID NO: 16088 - DNA, 120 bp, Homo sapiens
tcacgaaaaaaggcaagagtgatagttacctctcaaaagggctctttgctgggttcccttggcagcaagtgcatagtacaaagtctaactccccatgaaccagaagggaattcaggaaat

SEQ ID NO: 16089 - DNA, 120 bp, Homo sapiens
taccgagctattacagcttcaatctcacaaaataaaaatgaatggatgtttcattagaacttggaaaaaaacttgatcaccattgtgggtggccaccatgctgttattattttttttcca

SEQ ID NO: 16090 - DNA, 120 bp, Homo sapiens
ctccggttctctttctggcttcaatttgctgcagtggcaacagcagcagctggccctctagactaacatctccttgctatttataatacactttgcaatgctcattatttcttaactttg

SEQ ID NO: 16091 - DNA, 120 bp, Homo sapiens
gtccgagacaacctgaagacgcccagctcagcagagactggctacggcaatcactcagtaactatttgttgaattggacataatagaagagctgaagaattttaaacaagtcaccatcag

SEQ ID NO: 16092 - DNA, 120 bp, Homo sapiens
tctcggcatgagttggatttaaggcagtacattttcagctcctgaaaatttgaacagtttctcaagagaacaacttgaaacagaaaggcaaggatgtagatgtggttgtagaagatgatg

SEQ ID NO: 16093 - DNA, 120 bp, Homo sapiens
ctgcggccaccaaactgtccactgtgaagacaaaccatgcatgtttagtaggcagtggctcctcttccctgtggggagtcccactgcttccctggcctgggtgttctctgccggtagatg

SEQ ID NO: 16094 - DNA, 120 bp, Homo sapiens
ccccgttttccttttgccttcagaaactagttatttttacaaaggagggaggagtgctcctccctccaattccatttaaaacaaacatggttttggcacaacaagcctgcctcctcgaag

SEQ ID NO: 16095 - DNA, 120 bp, Homo sapiens
ggccgctcccccgtgccagttgctattctgccctcatgagagtggagcgtgtgtttcctcccctagttcctctttgtttctctgcccttcctcctctgagggcacaggggcagacaggac

SEQ ID NO: 16096 - DNA, 120 bp, Homo sapiens
ggccgaagattctgatcatttcaggcctcccttcacattctccagcggcattttaaggtctttgctgtaaggcaaaagctggtttttcatccttcctccttatccaggtcttctgtttct

SEQ ID NO: 16097 - DNA, 120 bp, Homo sapiens
gtgcgtagacagttccacacatactctgtattagggatcctgaaagagagaaagctaaaagggacttcttccatttcaagaagagacttaaacaagatagaattccctttccttcttatg

SEQ ID NO: 16098 - DNA, 120 bp, Homo sapiens
catcggcagagttgaatagctgtgacagtgactgtgtgacctgcaagggcaaacatatctactatctggccttttacagcaaaactttgctgacccctgatttagataactacttcaact

SEQ ID NO: 16099 - DNA, 120 bp, Homo sapiens
atccgtattaataagaaaaacattcctgtgcaaccattttatatcatgcactttgcatatatgtttcactgaatgctcctataatccagtgaggcaggcactgtcatttccattttgcag

SEQ ID NO: 16100 - DNA, 120 bp, Homo sapiens
ggccgtggtaaacggcacagcaggacttgatctcacagtctggctttagactcagttcctcactactctcctgtaatgcatgacaggtccttgatgaatagccgttaagcaaataaacga

SEQ ID NO: 16101 - DNA, 120 bp, Homo sapiens
tgtcgtagaaattactagaacatttcaggatttattcattctctgtctacatttttgtctctcttggggcagtgcccatttccctggggaaactatcatttcaataactggtgataacat

SEQ ID NO: 16102 - DNA, 120 bp, Homo sapiens
ccgtaagaagatactatagattgtgtggctaaaccaacagacatgcatttttcacagttctggaggcaggaaggtgaaggtgccagctgattggcttccaagtaaggcctctcttcctga

SEQ ID NO: 16103 - DNA, 120 bp, Homo sapiens
tctcgagagagataagtgtgtttactctctgcagtatctattcaactgcaaggaagtattgcagggcagaagcaagctcttcaatacaaagcagctcatttcaaagcatccaggcttact

SEQ ID NO: 16104 - DNA, 120 bp, Homo sapiens
cctcgctcaagggagggtagctgaggctcccttctccaaatcctgcaagacacaggcactctgatggggccagctcttcactgcatgggagggcttttgttgaacagtgagtttctgtgc

SEQ ID NO: 16105 - DNA, 120 bp, Homo sapiens
ccccgctccctttttggccccttttgcccaagtggagtgacactttatcaattgggggggcaggcaacgaatagaggatattaatgattgctaacggacccccatctgctgttccgcctg

SEQ ID NO: 16106 - DNA, 120 bp, Homo sapiens
gtgcgtaggagcgtgtgaaaagtacaaattattctctctctgctgtggtctgggctactgccatttgcgttaggaggtctccgcagagagatgacggcacctgtaatggccttgtgatgc

SEQ ID NO: 16107 - DNA, 120 bp, Homo sapiens
aggcgatttgtgggattcttggtcaccttgaaaaaatgcagtagtggaatgatcataggactttgggttggagaactgctcagagaactctccacccaccagccttgaccatgttcagtt

SEQ ID NO: 16108 - DNA, 120 bp, Homo sapiens
tcccggtctaagtgtcctcacatggaaaatgtggccagtgaagcagatggtctcaaagagcctgtcctggtctctaataccctggaccgagttactgcctggtttgctgaagagttattc

SEQ ID NO: 16109 - DNA, 120 bp, Homo sapiens
agtcgcaggaggaaaaccatgtcgaaacgaaaagtccatattggtggtagttttttgagagctacaccacaacccccaaaattgacctctaaagtgacaacagtaagacctggataatcc

SEQ ID NO: 16110 - DNA, 120 bp, Homo sapiens
gtccgctgggctgctgaaggggagcagcactggtgtctgggtgtggcatctgaacctttgcttccagaacaccagcatcgtcacatttctcagagaaagcaatttgccttgagacagttc

SEQ ID NO: 16111 - DNA, 120 bp, Homo sapiens
agacggggtccagaaaggggcaaaaataaccacatgcctttcttggactcctgactcttaccacccaaagggttttcttgtgtagcaaccaacaattccttggatggaaacactggatag

SEQ ID NO: 16112 - DNA, 120 bp, Homo sapiens
gatcgatgttgctggctttggattctttgtgaacaaatgagacaaggtgagtagctgccctgctcaactccctcttcgttttggtgtggggcgggggtgggggtggggagggaaaggttc

SEQ ID NO: 16113 - DNA, 120 bp, Homo sapiens
tgtcggatcttggtctgttggaaaacaacgggctcgccggcccctgtaggaagacctaggcaatgtctgcatgctgcctgtgcagcccatggaggggttagaaatagtaggattgcttgt

SEQ ID NO: 16114 - DNA, 120 bp, Homo sapiens
acacgctgggtggctttgtagcacagtcggagatactgtgttgaggagcctttgctcatggcaatgtttcctctgttcactttctgctgcttctgcattggaaaattccgtcctttaaca

SEQ ID NO: 16115 - DNA, 120 bp, Homo sapiens
caccgttgctgaaatcatagacagagtccacttaatttggtgcgagcatgagaaatagccagagaatgggagaagcatagcattcccttgtataaagagaggattgaataaggtcagtga

SEQ ID NO: 16116 - DNA, 120 bp, Homo sapiens
agacgggcttgtcttctgcctccgagactcctggatcttagccagattctggagtgagttggggagtaaggctggggtggggtaaggctgcctggggctggaagatgaatggtttcatca

SEQ ID NO: 16117 - DNA, 120 bp, Homo sapiens
tcccgctgtctgcaggcgctattttggccacaggcactgccttcagctcctgctctttctggggcgtgtagctctggggatacaactggaaaactcgcctttgcttgggtcagaacaggc

SEQ ID NO: 16118 - DNA, 120 bp, Homo sapiens
gcccgcagccttccagactgagctcaacggccaccttcccccaagcgtttctcacccgggcctcgggtctgaccctcctctaaatggcaccacaccttgttccatcttgcagtgctttct

SEQ ID NO: 16119 - DNA, 120 bp, Homo sapiens
tttcgtgaactcttttggctcttccgttgtgaggatcaaaccaattctcttcaaacagctgcatgcagcctccagcagtctctggtcggtgccttggcccgtctccacatggggccttcc

SEQ ID NO: 16120 - DNA, 120 bp, Homo sapiens
ccacgcagcctcctctgtccgatgagatcacacgtgctccaagcaggcctggactgagcgcttgggtcccgcacatagctagagcactgcaggcacagcaatttctgtcacctggggtgt

SEQ ID NO: 16121 - DNA, 120 bp, Homo sapiens
gcacgctttgccactgattgaaagtgtttcttcagtaggttttgatagaatatattactaatctggtaagaaacagcttagggccactcaagaaaagaaaagcagcccctagaaacatgt

SEQ ID NO: 16122 - DNA, 120 bp, Homo sapiens
cctcgtggacctcattgtggggttagcagggctgggctgggacaatgagatcattttctaggcagagaaaagacaacatggtaagttaaaaacactgaaaagtctgcgctgccagagtac

SEQ ID NO: 16123 - DNA, 120 bp, Homo sapiens
actcgttcgctgtgtagaagggtcaccgagtccctcatcagaatcctgaaagaaggagaaacggtgggcacaggcagcacacctcaatcacttgtgaataatttccttctgtctttcata

SEQ ID NO: 16124 - DNA, 120 bp, Homo sapiens
tcacgaacagcagggaaggattgtggaagaaaatgaggtatgtgagaagcaaatccatctacctgattgccatgtaactttcggtgagtcacggagtgagaatttcagatgtgaattaag

SEQ ID NO: 16125 - DNA, 120 bp, Homo sapiens
ccacgttctactccctgttctactttagaatcaggaggccagagaggcaggagggaagagtacttgttattcatagtggaccttcttcctgaataatttttagggtaattatgtatgcag

SEQ ID NO: 16126 - DNA, 120 bp, Homo sapiens
ctgcgggttctacgggcactgtgaagtgtgacagactttggctgcgcgttcacttttgatcataacacgtccatagagtgcttttaatctcctgcaacttaacatatgagaaaatcgatt

SEQ ID NO: 16127 - DNA, 120 bp, Homo sapiens
attcggctagataagccacatggacacctcacacttggatagctcactccagccacctatgtcagaaacactaactcataattcccacaacgccccactgaggtgtgcaggtggcagccc

SEQ ID NO: 16128 - DNA, 120 bp, Homo sapiens
tcacgtgattgctcaagtcggggaatgagtcaaagggaaggctagaaagacagtccaacccaacaccctgagatcccagcaggcacctttaactatcacagtgtgcctttgccaagcctg

SEQ ID NO: 16129 - DNA, 120 bp, Homo sapiens
acacgtggtggctttttaaaatttgagacaattttttaaaatagtaaacatcaacacaactttctcatttaacatacttgaaagatgagaaaggtggtggccatctttcacaaaaaaaga

SEQ ID NO: 16130 - DNA, 120 bp, Homo sapiens
tggcgatgatgaagatgatgagaaatagcagcgatccgaaattgactgccagtcacctatcaggtatggatgtaagcagtcaacactcactctctcatgtaaccctcaagccactctagg

SEQ ID NO: 16131 - DNA, 120 bp, Homo sapiens
gtccgacctggaatcagaatttgaggtaaagtgacaatgaaattgtacccagcctaacacaaattcttaaaatagtgaagaataatccatcaagcctgtgatgaactatgttgacaagtt

SEQ ID NO: 16132 - DNA, 120 bp, Homo sapiens
gtgcgttactgatagaaaaggataatgcttttcatgctgccgaccattcacaagacatttggctattccataaaagagattctccctctcgaactccgagggagaaggctgtttcaggtt

SEQ ID NO: 16133 - DNA, 120 bp, Homo sapiens
acccggtgcaggagccctgcaccaacactctgacaaagaactccatgagacagtcagagatggaaaggtttgccaggccaggacttcctctaggaaagcaggcctcaggttcagacctgt

SEQ ID NO: 16134 - DNA, 120 bp, Homo sapiens
atacgatcacaaacgttaccatgctacatgcaattctcacagcatcctagtaagccaccatctagacctctttacagacacaaagctgaagatgctcagaatctcaggcacagccccgaa

SEQ ID NO: 16135 - DNA, 120 bp, Homo sapiens
acccgcaccccatttcaccctgtgtctagtttgaaagatacatcttgaatttagctattctagaaagagataccaatacaaatgaaccctgaatcactttccaaacacctgcaggtgttt

SEQ ID NO: 16136 - DNA, 120 bp, Homo sapiens
ttgcggaccagaccacctgagatctacaggttgggatgcatgtgagggaagctgtacaaattccccagaatcgtgactccagcccagaacactgtcactacttgactagagtggtggtaa

SEQ ID NO: 16137 - DNA, 120 bp, Homo sapiens
atccgggtgacctgcctaccagcaaaagcttttccttcttaatctactgagtaacctaatacctgaagccagctcagaaaattcccattatctctgaaataaaatgttttcatctgagtt

SEQ ID NO: 16138 - DNA, 120 bp, Homo sapiens
gcacgttcccctatttgtattctaaacaaagcgggcagcatctcccagcagcagggaataggtccactcaggaagcggctttctcacctgcacagtttctgctggagggagaggggtgtc

SEQ ID NO: 16139 - DNA, 120 bp, Homo sapiens
ccccggcggcgaccgctggtctttgaacagcattggacaggccctcggtgcaaagctctccggcccctccacaagctggagactgcttctccctacctgcggcctggggacagccttccc

SEQ ID NO: 16140 - DNA, 120 bp, Homo sapiens
taccgggttccagctggcttggactcccgaagtcccccggtttgtatgctccgggttcttttggatggcgctgggaaaggggagaacattattcgttggagaattaagtgggcagagtaa

SEQ ID NO: 16141 - DNA, 120 bp, Homo sapiens
tttcgtcacccttctcagcacgaatttctcactgaagagatgaaaggcacagccttggaagaaccttctggtcccaggacttcgagaaccccagagtcggatatccagttaccccgggat

SEQ ID NO: 16142 - DNA, 120 bp, Homo sapiens
atgcgccctgagacgctgtgcaatgtcaggctggggccttctctggggactgcggctgctgaagatttttcttttcaatccactttcttaggtttggcagaagctttcggacaactccat

SEQ ID NO: 16143 - DNA, 120 bp, Homo sapiens
gaacgctttatcatttttgattcaccccaacacagcgtgaaattatgcttcttgctccacactgtcttatccaaacagattcttctcttttccttttaggagccattctgactctagctc

SEQ ID NO: 16144 - DNA, 120 bp, Homo sapiens
ttccggcaggaatgtccagacccttgtatattccctgacaaaggacagacctcttgatgggtgagggtggggtgagtggggatctttctctggtccggctcacagctcagagagggtgag

SEQ ID NO: 16145 - DNA, 120 bp, Homo sapiens
cagcgctgcctggatatccagcggtgcaggatcagcctcgaggccagtgctgtcaccccacagcacagccaagttatcatcacatgacattttcttctcgaaatagacaagcacatatct

SEQ ID NO: 16146 - DNA, 120 bp, Homo sapiens
tatcgcctccttttcgaattccagttttctaaagcctcactttcctttatcccttaacacaggactgaaatatggcagtttcttaagtcactggacttgcctagattggatttagcgtaa

SEQ ID NO: 16147 - DNA, 120 bp, Homo sapiens
gttcgccatatgattcgcagccagttagggacattggtttcctggtcactgagcacaactgccccctttgaaaacaggagcctttgaatatctgctcctcaactgctttatggacaatta

SEQ ID NO: 16148 - DNA, 120 bp, Homo sapiens
ccacggccttcctctcgtgtgggtcaaaccaggccatatagttgtagtcactcacagtggaaaatgggggaaggtaaagtttccagataattccataatgtctgaggtatcctaaagctc

SEQ ID NO: 16149 - DNA, 120 bp, Homo sapiens
tcccgtagatgtgactctcggtgggtgatctcttagtagtgagaatttgtgaacttctggaagggaaaaagctcatggactttggcccaggaaagaatgagcagggaggagctgtgaggc

SEQ ID NO: 16150 - DNA, 120 bp, Homo sapiens
ctacgggggacccggccccaggcgcatgggagccactggattcaggcccccgtcattttgtgagcgtttcctgtgctctaggaacaccctgatgaccgaagatggggggctgttgactcc

SEQ ID NO: 16151 - DNA, 120 bp, Homo sapiens
ctccggaaaccctcatagaaaggggcagagagaccccagctcccccaccttttcctcgtggaagcaatggaagacccaatagggctgaaacctgcccgtgtcccaggaccgtctgcaggg

SEQ ID NO: 16152 - DNA, 120 bp, Homo sapiens
aggcgtgggggcgcaggctgggggcgtggcgagcagccagggctcccgcgtgtctctttcacaagcacccgccattccatatgccagatgctgacagtaatatccctcaggctctcctgg

SEQ ID NO: 16153 - DNA, 120 bp, Homo sapiens
ccacgaggggtgttcatcaaccccgtacgtcaaccccctagcgtcagttgtacatgcagtgaaatttcctgtgcttcagggactgacacccagcctccatgggcagggcaggcgcagcgg

SEQ ID NO: 16154 - DNA, 120 bp, Homo sapiens
ccacgaaatgcatgcttgactgccagtgtccaaagtgtgtgaggccactgggcatccagcaaaaggccgggaagggattcagggaagtgtgtgggtgggactgggaggagggagtcacct

SEQ ID NO: 16155 - DNA, 120 bp, Homo sapiens
tcccgtctgatctgccttaactctttctctctggcttttcatcagtttggttcagctgccaacagagagagccctggctgggtcttctggcccctttgttcccctctgaggacaactctc

SEQ ID NO: 16156 - DNA, 120 bp, Homo sapiens
gcacgctggaatggagcggcccattatcactcactcactctccacatcctgcgatggcaaatcagctgcttgctcccagatccctccaccagacgccatgtctttctcctggttttctgc

SEQ ID NO: 16157 - DNA, 120 bp, Homo sapiens
acacggatgcatttcctgcctcctcggttgaaagccagttatcagaaaatacccaattaaaatattaccgctttgtggcctctttatcttctctccaccacctccaaattgtttttcatt

SEQ ID NO: 16158 - DNA, 120 bp, Homo sapiens
gaacgtgttcaccatgtaagcccacacagaattttctagaaagatggtagaatcaagaaggtggtagggggtggcttgctctggtgagaaggagagtgtggggtgttgaggagcagccag

SEQ ID NO: 16159 - DNA, 120 bp, Homo sapiens
catcgccccgtcaggtctgcgtcgggatgccaggtgtttggtcctttgaaggcagtggtggggcagagagctgtctagtgggaggtggctgtgtgggtggtgccctgtacatgtaactcc

SEQ ID NO: 16160 - DNA, 120 bp, Homo sapiens
agccggcaggagagtctgtaatttagagagggcgtgtggtgaggaggaactggtgacctcgtggtgccatttggacccatacgactcggaccttggtggggagccctgagacagggaggt

SEQ ID NO: 16161 - DNA, 120 bp, Homo sapiens
tcccgtaaccccctcatttacaacagactgagacagaaaggaattttttagagcaatttgcgatgaggcaatactggatatgtaaattctgttttattggcagtcactgctgctggctaa

SEQ ID NO: 16162 - DNA, 120 bp, Homo sapiens
ggtcgggacacagtttggttttaaggccacaaagggggaaatgtataattgcaactttcttccgtgtcttaagctgtggccgaacagatattgtcccatcctgtttctggccagatgttc

SEQ ID NO: 16163 - DNA, 120 bp, Homo sapiens
atccgagaaggagcctgttaagaagtttaagtttttactgagttggctgactaaggcagtttttattttttgaaaaatttattgctcctaccggctttattccccctaaagaagtagctg

SEQ ID NO: 16164 - DNA, 120 bp, Homo sapiens
gaccgagcaggcggagagccccgtgcaatataattattctgcagatgccacggtggaaagaggccactgcaagaagggtccattccagaggcagagctttgtctaggggtgcttgaacaa

SEQ ID NO: 16165 - DNA, 120 bp, Homo sapiens
gaacgggacacacacactcaggagagatttgccacatacacagtgagttataagagggttccaaaagttagagagacgggagaaaaaacgaacacagttgccccacttcgcagaacttat

SEQ ID NO: 16166 - DNA, 120 bp, Homo sapiens
agtcgggactggccaaaacatgcgtccttgcactttcttctccccgctccgcctttgcttggcttgactgctcaaacctgcagtagttaagaaagttccacggtttaagagggttcccag

SEQ ID NO: 16167 - DNA, 120 bp, Homo sapiens
cttcgaaatggccatagggtggtgggaccccaaggtggggaacagcctcaggtggacgaggggatgcttttcagggcccatctgccgggacttgttgtgaccacttggatgtatgtgtca

SEQ ID NO: 16168 - DNA, 120 bp, Homo sapiens
tggcgtggggaggggagagtgggagaggatgtgacgcacaggcccagagcttagggactctgaattcagtaatctgggtctattggtgccccttcatatgcagtaaggtcacctattaac

SEQ ID NO: 16169 - DNA, 120 bp, Homo sapiens
aatcgaaaataaatattgggggcaattacctttccttagttctctgatgtatgaaggggagttttcatctattaatttaagaaccctctcatttcattcggaaggtattagcccatggaa

SEQ ID NO: 16170 - DNA, 120 bp, Homo sapiens
tctcggacaaaaacagctgttttcttcccattgctgaacgcattgtttgtgcgagttcacttacttgctatactcagaatatcctccaggagtcagcaaatcccaacctctggacgtggc

SEQ ID NO: 16171 - DNA, 120 bp, Homo sapiens
ggccgccctgcccattgctgagctgatttggaatttgggcctgagagaggaagtgattattggatgacaggctgcctcctagggggcttctctgggcttgccatgaaagcacttccggag

SEQ ID NO: 16172 - DNA, 120 bp, Homo sapiens
gaacgtgaccagacctattaattacttaactgaggtgctgaactttgaaaatgaaagttccggtggggagttctgtcctttccagcctggggagctctgtcagggctctcctgagcgtct

SEQ ID NO: 16173 - DNA, 120 bp, Homo sapiens
gctcgctcggggaccgtctctggtaagtacaggcaacccctccagccaacccctccaccctgtgggccggggaagtgtctcatcgttgaatccacttgcaggcacttccttgatctcaag

SEQ ID NO: 16174 - DNA, 120 bp, Homo sapiens
ccacgctgcccccagagtcccagcgagtggctcagtcacactggtgcgtgcctctcacccgctctgacctcgtcatggggtccccgaggtgctggttcatgcaaggctctgtgcctaacc

SEQ ID NO: 16175 - DNA, 120 bp, Homo sapiens
ctgcgggtggggtgacggaagcaaagtcaccccagctgagaaccaccactgcagatgtagaagggcaccctggagaagttcaggttccttagaattattcattaaatgaccaggctagga

SEQ ID NO: 16176 - DNA, 120 bp, Homo sapiens
agtcgacagagccaaaagcttgctctgaaaggaaagctaccaaggtggattaatctgtttttggaaggcagcggcagttgatcaacttcctcatatttcaagcctattattccagcaggg

SEQ ID NO: 16177 - DNA, 120 bp, Homo sapiens
tctcgctcgctctctcgtctcttccacaccccatcctccctccctctaatggccttttattgctctaacacatttttaaaaatgaactcctctgtacctttggggtgaatgtgatgaggg

SEQ ID NO: 16178 - DNA, 120 bp, Homo sapiens
aaacgttgtaaacggacagtggttctgaggctgcccttccttggccacactctagtcattctcgagccaggccacacctcattccacagggttcatccctgcccgctctttggggccatc

SEQ ID NO: 16179 - DNA, 120 bp, Homo sapiens
ctacggagaagctgggacaggaggaaaagcattaggcaaatacagtcagtttgttgtcatctgatgcaatactctggacacaaataaatgactctgcccattattcctcttgcttcattt

SEQ ID NO: 16180 - DNA, 120 bp, Homo sapiens
gaacgaaaggtcaccctgttttacagcaatgtctggacatgctctgccagtaggttccaactactacatggtaatgtggtgatggtaccaagttactggaatccagagtgagtccgtgat

SEQ ID NO: 16181 - DNA, 120 bp, Homo sapiens
caacgtcatactacaaaagaccatccatttggtcaaactatcttttttacacacattttgataatacaatatcttaggccttctagatatgctcagattcaaatgctatattcaaatgtt

SEQ ID NO: 16182 - DNA, 120 bp, Homo sapiens
ctgcgcagttcacccatccagctgtagctcttctgtccttttggctggcctggtgtcccctgattcagcagaagtgtggggggagttgggatcccctgatattcacagagagtttttaag

SEQ ID NO: 16183 - DNA, 120 bp, Homo sapiens
cttcgctctccagcttgacatggatgaaagcagcctcgctacagggcccctcctactgcccccagaggattaaacaacctgagcaggtaatggctgccttaaaaggagcttttgcatgac

SEQ ID NO: 16184 - DNA, 120 bp, Homo sapiens
tgtcgcccaggttggcagctaaacattaattttttttgaaaaagaaaaaaaaaagtaaacctctagatgacaactcttttcagacaaggtgtggagtctgtctgcaaaggatagagagag

SEQ ID NO: 16185 - DNA, 120 bp, Homo sapiens
cagcgcagaaggaagcccaggtggggctggggccgggaagaggggcagagcacaaagctgtcgggctggattaaaaggcaaagcagccacagagcagtgtcaggttctcaaagctgtcgg

SEQ ID NO: 16186 - DNA, 120 bp, Homo sapiens
gaccgtagccggtgtgcagaggggtgccctgagaacaatcagtaaaagctgacaagtgcctttgttcttgagggataagcttctagaaaccacaagctaaacaagatgccaagatacctg

SEQ ID NO: 16187 - DNA, 120 bp, Homo sapiens
tcccggctcaggtaagagcctacctgatcacaaacagagctgggagatttgtcgagttactcaagcccccaagacatggccactacatgtgtgagattttcttagctcttctacacaggc

SEQ ID NO: 16188 - DNA, 120 bp, Homo sapiens
tctcgcagtaaagagtggtttttgataactctgggaagctcttttcctgactcctacactatgggcctccacgtcgtgtggtcctgcaatagaaagtcatttcagggtggctttgactaa

SEQ ID NO: 16189 - DNA, 120 bp, Homo sapiens
gagcgatcatcacccttgaggggtgccagcctgtacccagaaggactcctgcccggggccgcctcatgtcagggcctcttgagaactggatttgcaaagtgtctgcagacgtaagtcctg

SEQ ID NO: 16190 - DNA, 120 bp, Homo sapiens
ttgcggtttcatcaatgaataatatggagctggggacaaagtcccctctactttctgcggctgtcactgaaatgtcagcagtggagggaaaaccagaagagaaaacctctcactgacagg

SEQ ID NO: 16191 - DNA, 120 bp, Homo sapiens
aggcgccctcagtgtgcaaagagctcaagtttcagtgctggggtggggtgggggctgcgcccctgcctattcaccccactcctcccctgggctgctccactcccatgatgactgggaatt

SEQ ID NO: 16192 - DNA, 120 bp, Homo sapiens
ccacgagctccttgttctgcagtaggaaattatccttcataagagggcaactgttagtattgtttgtttgttttttaatttccaaaagtaaggagaagtttattaaataagagcggggga

SEQ ID NO: 16193 - DNA, 120 bp, Homo sapiens
gcccgagaggcagctgaccccagcatttcccgtctccccttggcttctcccatcccccttgtcccagacccccctccttctggttctgaatgtgaaaaataagcagcctgcacctcctcg

SEQ ID NO: 16194 - DNA, 120 bp, Homo sapiens
attcggggccaacacctccagtaccggagccagctctgtgagccgaaaacatgcaccagccctccagtaataccactgcagccagccagagactcaacaatttaaggcttaacacacaca

SEQ ID NO: 16195 - DNA, 120 bp, Homo sapiens
agccgaccggcagcttcttgggcagatgcctgcagactgtctgcagatcataccctgcctgtttgggttatttgagactctttttctgtaatataaagatgagaaactgggtggagcagc

SEQ ID NO: 16196 - DNA, 120 bp, Homo sapiens
cagcgtgcagaggcacacgggtgtttgtcctgtcttgttccaacagcccctctttcgcctaagtgctgttttgaagggactgctcaggacggttcacattgctacatccaaatcctagga

SEQ ID NO: 16197 - DNA, 120 bp, Homo sapiens
gagcgctctgatatgggtggtatctgtgtgaccctgggcaagtctcttaacctctctgggctcatccatctaacaaggggtctagttttctgcgattcactcatctctaatgctcagaag

SEQ ID NO: 16198 - DNA, 120 bp, Homo sapiens
gctcgagcccccgggagtgtggtcatgacatggcaagagccacacgctatgggaggggaagatggagatgacaggtctgcactgctagttactgccatgctccagtccctcttcctaatc

SEQ ID NO: 16199 - DNA, 120 bp, Homo sapiens
acccgtcaatgcgggagcccccactctggtgcctctgaaagaagggcatttggtctctgcaaattcctgtgacattccagggtagcttttggccctgccattcgtcaccctgaccctgaa

SEQ ID NO: 16200 - DNA, 120 bp, Homo sapiens
ggacgtggccgtcacagggatgccttcatctggtcccagctctctccctctcatagccgtgtactctgttgggagcaattggcatgaagtttggcagtggcatcctgaaccgggatgaca

SEQ ID NO: 16201 - DNA, 120 bp, Homo sapiens
aaccgtgaaggctgaacaagtttggaggagcaggctagaaaaaagcctgcattgccaagaacggttctgccattaggggcaattctggtgagggctctgaaagaagaccttagaactagg

SEQ ID NO: 16202 - DNA, 120 bp, Homo sapiens
attcgcagcctggccatgtaaagagtgaaagtgtatttggaagagagtactaagggtgtggccaagcaaccatttgccaaagagattagtatgaatgcgaggaagccagattctgttcat

SEQ ID NO: 16203 - DNA, 120 bp, Homo sapiens
ccccgaaaagcatttcagagatcttcaagttgctcctcccatcataggcccagagctctaggagggtagaatgattttaggggacaggcctggggcacccttcatgggctcactgcccag

SEQ ID NO: 16204 - DNA, 120 bp, Homo sapiens
ttccgtaggcatgcagaatacatgctgtggaagcatggcttcctccacctagattacgaaggatgccacagactgcctagaagctcaggccaagacctaccacaggggaataccactgca

SEQ ID NO: 16205 - DNA, 120 bp, Homo sapiens
caacgtgagagaggtgaagtttgggctgagcccagcaaaactgtaggggcagggctgcccaaggccttgggggcctagtcttagccccattgtatccagaaggcagaacatggagtcaaa

SEQ ID NO: 16206 - DNA, 120 bp, Homo sapiens
cctcgtatcctctgtagcagtgcttttccttgtggggatctggttacaatgcagatctgactcggtgggtctggggtgggtggggcccaagactctgcatttccaacagctcccaggtgg

SEQ ID NO: 16207 - DNA, 120 bp, Homo sapiens
gttcgaggcctttctctgagcatcaaggggaaaccccagttggtctgggaaggtgtgtgcacatgggggccagttgtgggtggtggcccaggtgcaggagaggcgggcagtgggctccat

SEQ ID NO: 16208 - DNA, 120 bp, Homo sapiens
gcacgagggttgggcgtgggggctgggtggtgtgggctgaccctcatggctgtgcgccgcagctgctccagttcactgagccgctcggaaaaggacaagctcccgggcttggtctgatca

SEQ ID NO: 16209 - DNA, 120 bp, Homo sapiens
tgccgatgtcctattgtggggagcagggaggggaggggatggggggagggaaggagggagggaagagatcagaaaaagtattgtggatttcctaaaactggggcttttcttgtctttccc

SEQ ID NO: 16210 - DNA, 120 bp, Homo sapiens
actcgctagagatatgccagctgaatttggggccactgtcctctcagcagaatgggccccctttcaccgcctcggccacagagtgctcccccagtctgggccttggcaccctccccaacc

SEQ ID NO: 16211 - DNA, 120 bp, Homo sapiens
tggcggtggtggtgatgccgggagggaaagaggcgcattaattgttggcacatggccacatgccaggggctatgctgtggcagccaggaaaggtggcctcccaggggcatcagaacggct

SEQ ID NO: 16212 - DNA, 120 bp, Homo sapiens
gcacgttttagaggcggcaaagtgggccccgcagcttagtggtagggccccttccaagaggaaatgaggcgtggctgcaaacccacagcctctggggaggtcccatttccaggtacacgc

SEQ ID NO: 16213 - DNA, 120 bp, Homo sapiens
catcgctaatagatgtgtgtgttttctatgtcatcattacgaatcaaaggaatattaaataggacacaatgggttcggtgtaatctagagttcagggatttggccagaatgcaagataat

SEQ ID NO: 16214 - DNA, 120 bp, Homo sapiens
atacgtggccaaaagagaaaaatatgcatggatgttcacttgcagtttatgaaaatgctgagacacaaccttaagaatggcttccagcggaacatccggaagtcctcaagtagtccaagg

SEQ ID NO: 16215 - DNA, 120 bp, Homo sapiens
aggcgagctgccgtggcactgctacaaaaccccttcaacttgggtggaggcagcaatgatcactcaggaagaatgtgatgctgccaggtgccagcctgtgtaacccagcgacaggacaaa

SEQ ID NO: 16216 - DNA, 120 bp, Homo sapiens
atacgattgggaattaaaaggggcacatatgaatcataaatatttgcatgccattaatgtttggacaaaagagttggaaaggctgagttgggagaacttcttttcccatgaaaagcagtg

SEQ ID NO: 16217 - DNA, 120 bp, Homo sapiens
tttcgtttctcctattgctaacaggaatctcagggcctgccgcatataaccctttcacgaccacagaaccgtatggggccctgaaataaggataaggattgtgtttcctccttggaagct

SEQ ID NO: 16218 - DNA, 120 bp, Homo sapiens
gggcgatttgcccccaggggacatgacgcaatggcttcagagatttctggttgtcacaaccaggagggtgggtgctagtagcccctgagtagaggccaggggtgctgttaaatgttcaac

SEQ ID NO: 16219 - DNA, 120 bp, Homo sapiens
tgacgattcttaagtaacttaaactgtccctctacagttcatctttgatacctcctactcatcgctattatcttgagttttactagcaatgaattctagcacacaagaaaaaaaaatcag

SEQ ID NO: 16220 - DNA, 120 bp, Homo sapiens
cttcgtttactaattacaaaatcaacagacctcagaaagacgggacattcacttctatgcactcccctcaattcaggggtggaattgggttgcatttttgtatctgtgagtctcagcgtg

SEQ ID NO: 16221 - DNA, 120 bp, Homo sapiens
aatcgaaatgccccaagctgtatttattctgatcatttctgacattctttacggtaaagtcagtagtgacatttatattactcattccaattacatcatcatttttggttgctgtttttg

SEQ ID NO: 16222 - DNA, 120 bp, Homo sapiens
tatcgaagtcatgtttctcaagattcccattttcatgatctgcttagccatcaccctttccctgtggcctccagatgactatctattgtttttattcattagaactgcttcagtccttgt

SEQ ID NO: 16223 - DNA, 120 bp, Homo sapiens
tcccgaaaaatgggcttgctttattttgctctttttagtctctcacaacaaattttcccctttttttcatgattttcacttcccgttgtaaagttagctcacagtgttgaaatgccctct

SEQ ID NO: 16224 - DNA, 120 bp, Homo sapiens
ccccggaccagatgcacatatcaactgtgaaccctgaagtcaagtcaagctcctaggactgcctccctgtgttgggctgagggcagcgagtacgccttggcagcttttaacccgtgtccc

SEQ ID NO: 16225 - DNA, 120 bp, Homo sapiens
gcacgcggtcaatctctgagcagttgggggatatggaaagcataaaggggaaggatccacagggacaatcaatcatgtcatcaagatcagcttctgaaggaaacaagcacaaatgcttca

SEQ ID NO: 16226 - DNA, 120 bp, Homo sapiens
gttcggggttttatgactgtgtttttcaccctgtgtggaaaaatacaaagaactgcccaggaactgaaaaacagaaaagaatctgtcttgaggaacatttccccctttaacttctttgct

SEQ ID NO: 16227 - DNA, 120 bp, Homo sapiens
acacgcatgcacacttatgcttgcacctatgtgcttgtacacatgcatgtactcattcacacacgcaccctaccacacacaagcacactcacatacgtgcacacaccaatgtaggcaggg

SEQ ID NO: 16228 - DNA, 120 bp, Homo sapiens
acacgcacatacactcctttccatgcactttcacacaagtgcacagtcccccacaacatgcacactctcacatatgcacacatactcatatgctcccgcacgtgcacacacacagcctca

SEQ ID NO: 16229 - DNA, 120 bp, Homo sapiens
tcacgctttttggaaataaggtttgtgtaaatgtgatttgttaagatgaggtcatactagattaggttggctgctaaattcaatgatcagcatccttataagaagaggagaagacacaca

SEQ ID NO: 16230 - DNA, 120 bp, Homo sapiens
gaccgacatgattgacaggccagggaagcctcaccccacaaggctgcatgcccaggtaagtgtgtttcttgcaccgcccttgccatgacaatggcttgttctgacttacggctttgttac

SEQ ID NO: 16231 - DNA, 120 bp, Homo sapiens
gaacgttgttttgactaggctcggggtttctaaactccccactgtgtggtttccaggtcagacagtcaggctttgttctgtgaatcattgctgaaagattcaattaaatctcgcttcgtc

SEQ ID NO: 16232 - DNA, 120 bp, Homo sapiens
gtccgccttgtggccagggtttcagtgacttagcaagaacaggagcatgtagccagttgctgaggaaagccagacatttgaggggagcgggctgctgacacgaggcagggagcacagaga

SEQ ID NO: 16233 - DNA, 120 bp, Homo sapiens
cttcggggctccagacagcggtgaagaatgaagtccccaggcgcccagcttcttggctgagaaggcagctgttgattcctgacatactaatttaggacccgaaagagaaagtgagggggc

SEQ ID NO: 16234 - DNA, 120 bp, Homo sapiens
tcacgcaggcatgagaaagaatcacaaatgtgagtctggttgagatctttatggttaggaggcctcctttgaagtctgacatcgctaaaaaaattctcataaaaccaaagagggggaaaa

SEQ ID NO: 16235 - DNA, 120 bp, Homo sapiens
attcggcagaaccccaagtcactcagaaaagagaaaatgaaagacaagatttcttgaagtgcctggaaaatgctagcttcgtgtgcagacttgctctagaggggacagtcttgtgtgatg

SEQ ID NO: 16236 - DNA, 120 bp, Homo sapiens
tcacggagattcttagaacctcagtttggtttcttatttatagaatgagacaattcatgccacctctcttttctcttgcaggattttgtggggctcagaggagttgctgtttgtgaattc

SEQ ID NO: 16237 - DNA, 120 bp, Homo sapiens
atgcgcccctcctcaaggctgggcttaggatcccaagacatccctattgcctgcaccacatcgggtgccagctaaggtagaggaggggtgccaaggaagatcagagaagcccagctcctg

SEQ ID NO: 16238 - DNA, 120 bp, Homo sapiens
gtacggtccttcttcccttgtatctgcaaaggacttgtggacacagccgggggaaacatggttgctaagagactggcattgctgcactttcgaggacaccaggcgtgtagtctcatcttt

SEQ ID NO: 16239 - DNA, 120 bp, Homo sapiens
gggcggtgcagatcccagggaaggggatggcagggctcagctgcccagcctgctgtcctgctgtggctctgtgctgcagcatcatctagtactttcaaaaactgtgctgtgggcactcgc

SEQ ID NO: 16240 - DNA, 120 bp, Homo sapiens
cctcggctcctgtacaactgtccttcccatctccatctgccaaactcattcttacccctaggacctgctgagatgctgcctctaccatgaagccatccctgagaacagtagcttgttatt

SEQ ID NO: 16241 - DNA, 120 bp, Homo sapiens
atccggacagtgtgtgcaacaacttattatgattattattgggatggtctcctccggcacccataatcctgtcctgagtgagcaccctgcacatgaggttgtttgagaacactggctgaa

SEQ ID NO: 16242 - DNA, 120 bp, Homo sapiens
ccacggcgcccggccccagatctctttatactgatctttgccattctctactctgcttggggtagcttcttagttcgtactacagcttaaatgactgatagttttacctttctaggagag

SEQ ID NO: 16243 - DNA, 120 bp, Homo sapiens
gcacgaagggtaaaccacagggatccagctcttacaatgcttcattcccttctgcaggccctagagactccctgggctttgcctgccacatctgtacactggggagaaggtggattacct

SEQ ID NO: 16244 - DNA, 120 bp, Homo sapiens
ttacgctccaagtagcaagtcatttaacctcactcctcatgggttggggacgggagcatgctcacagggtggaaggaggatgaaacggatgcacagtaaatgtgagctgttttcacaatt

SEQ ID NO: 16245 - DNA, 120 bp, Homo sapiens
tatcgttcatttttctgcacagggactgactcaaggctctaaggttctatctctgtgctgctgcactgagctgctccctcctgaatgtctctgcctgtcagtttcattcagagacccctg

SEQ ID NO: 16246 - DNA, 120 bp, Homo sapiens
atccgacaaaataggaagattctttttaaaaccagaatctctaaaatgagtttgtttgtgatgcaagtagggtctggatcctacaaaccacggaagacttgcagacaaggcagtttcttc

SEQ ID NO: 16247 - DNA, 120 bp, Homo sapiens
gcacgagccaggagcctggggcacattcccggcagccagactttggaaagcaggaggcagccacctggggcttcaatctccctttttagaaaatgaatccctgaagtgaacatgagtcag

SEQ ID NO: 16248 - DNA, 120 bp, Homo sapiens
tgacgtttctttcacaagattaaacattacaaatataaaaaaaaaaaaaagaaaaaaaaaaacaacccaagaaatgggatggcgatgccctttggccatgttcactgctgcatatccaca

SEQ ID NO: 16249 - DNA, 120 bp, Homo sapiens
aaacgccttcgtggcagcccaggcagtgcccagcaagctcagactcagccagtcctcgagctggcctggcagggctttgcaatgcagctaccttgtggccagaggggcccatccaagtcc

SEQ ID NO: 16250 - DNA, 120 bp, Homo sapiens
gcccgcccaggcctcagcagggaggggagcggagactccctccgggtggttctctaggcagagctgccagcagggtggacggttccctgaaaggaccactctcttgccctgccaggaagg

SEQ ID NO: 16251 - DNA, 120 bp, Homo sapiens
actcgtggaaggtgctgggtgcttcacctcgtatctggcggacgccatcacctctgctctacttctagggtgactgctttgaggaagacgtggcaatttcagaagctttttaaacttccc

SEQ ID NO: 16252 - DNA, 120 bp, Homo sapiens
tagcgatgtcactcctggacagggataattttaaatgcaagcatactgatgtagctataggatggggtaaggtaagatgtagggtagaaaccattatcttaaaaaaagagcaacttcaga

SEQ ID NO: 16253 - DNA, 120 bp, Homo sapiens
agccggagcttggaggctggggtgatcaggctgttcttggcagaggttcctgaaatgaaatgactctggtggtgatgggaggccgtggctccaggcctgccccagcataacacgttgtta

SEQ ID NO: 16254 - DNA, 120 bp, Homo sapiens
ctgcgcttcctgattctcaggctgttgctcaacagctgacccctgatctttccaaactccttccagaatggtccttttggcctgcagatctcagggtctggtaggagttaaaaggaacac

SEQ ID NO: 16255 - DNA, 120 bp, Homo sapiens
acacgtgtgttctgaactccctggaagagagtattgaaaacacacacacaatctagtgttcgacatgtggggaccgagatgaaaggggacagctgtttcagtgctgggttttgtgaccac

SEQ ID NO: 16256 - DNA, 120 bp, Homo sapiens
acacgtggttaggccttcagcccacggaaagcacatggaaaatgagtggaagacctggctccctctcttctctcccgttaggcacaagacggtgtaaatcctggtcttcctccttttaaa

SEQ ID NO: 16257 - DNA, 120 bp, Homo sapiens
ttgcgtcagactaagctttctaaggaactcgccactggtatcattcaacagaaaggaacctgctagattaaagctaagtgaaattttccaaatgatttcagctggctctacctagtggtt

SEQ ID NO: 16258 - DNA, 120 bp, Homo sapiens
acccgtttttaattcctgctccttatttcctctctctcctgccaatcccatcagccatgctctgacctgctttctctcctgcttcctccagaccttgttccctcaaccctcttccctctc

SEQ ID NO: 16259 - DNA, 120 bp, Homo sapiens
ttccgttcaacacgcttttcttgacgttctcaatttcattgatttccaattcccccaactccaggcacactctcctagggccacaccctgcatattacctggaattcttccttctctgcc

SEQ ID NO: 16260 - DNA, 120 bp, Homo sapiens
ctccgattgctccatttccttgttgccttcattcctattgcttagtggcctggatctcatggctcttgccttgaagccatgaagctcatggcttcagcctctgtctgtctacatcttctt

SEQ ID NO: 16261 - DNA, 120 bp, Homo sapiens
tttcgttctattgcctcttccctctaagcacatataataactatgtttaaatctccatccacaaaccaaattaaaaataagaacaaagcacaaaattcatccttgatcttatatctttct

SEQ ID NO: 16262 - DNA, 120 bp, Homo sapiens
ctgcgcctcagttccttcctctgtgaaatgggaaagattatatcaccacttcccatcctgggaaaggatgagaagagatacagcctctacatgcacagcactgggcacacagtgcagaaa

SEQ ID NO: 16263 - DNA, 120 bp, Homo sapiens
caacgacactcccctcacctgtgctttctcgtccttctgccaccaggtgccaggggagccaagaagagcaaaaccaaggaggcattgtttcctccagagcctcattcatcaactcgctct

SEQ ID NO: 16264 - DNA, 120 bp, Homo sapiens
gcacgctcagacagtcatcttctgcaccttgcctttccctgtgtcttgactgagggcttatctgagagccttttgttcaggctcataattattcagtgactcaggagcccacaagcatta

SEQ ID NO: 16265 - DNA, 120 bp, Homo sapiens
ccacggagccagacaagaccagcaagctctgaggaccacctgttccaagtcatttcctgtgtgggcggcaacttcacagggctgaaaatacgagttacggtaaaaatgtcttcaaccctg

SEQ ID NO: 16266 - DNA, 120 bp, Homo sapiens
tggcgcgctggattgttgaaactcgatggaatcttgcttgattatgttcaggccagacacatttcattatcattctttgcatatatattaaaaactctaacccctttacaaacaaatgtt

SEQ ID NO: 16267 - DNA, 120 bp, Homo sapiens
ccacgaacacagagtgcagttgggaaggatgtgggcagtaatgaaggtggtgctttttgctcctgtgggtgctatggacaggtgagggttcaaggatattaacaacaaattttaagccat

SEQ ID NO: 16268 - DNA, 120 bp, Homo sapiens
gaacggaaaaaaaaaaaaaaagcaacccacccccaagagttatttatgtcatgtagacaaaacctgggttcgttgactgattatttccactctctagtgatggtcgttgcattttcactc

SEQ ID NO: 16269 - DNA, 120 bp, Homo sapiens
aatcgaggcaaaacatacacacacgtatcactgtcatcttcattatcatcatcatctaattgaaggcattggaaagctcttaatgcagtaaaggccaagatccaagagaaagcagaaaca

SEQ ID NO: 16270 - DNA, 120 bp, Homo sapiens
tctcgagagagaacttgcaaaggtaatcagggcctttgccagcttcgcgtagtgagtgggagaaaaatggaagtccagggcccacccagaagaagcttctggataaccttccatgcttta

SEQ ID NO: 16271 - DNA, 120 bp, Homo sapiens
atccgaagaaggtcattttcagtaagtggatacttgcaggcttaaatgaaatgtgaaaaattttgaaggaaaatgtgatcaggaagtcaaagtaagcttttgacactgcctgccactccc

SEQ ID NO: 16272 - DNA, 120 bp, Homo sapiens
gctcgcaggcaggtgagtgaacacaaacatgtgtgcaccccacacacacacacacgtacaaactcacacatccatcatttacatgcagaagttacattatactttcatgccaccatctga

SEQ ID NO: 16273 - DNA, 120 bp, Homo sapiens
atacgttaaattacttttgcacatgctacaggtcatgagagtatgagttcatgagaaaggagacactgaaactgaattagcaacagagagcagaggttgtgctgaagggaaagcaatgtt

SEQ ID NO: 16274 - DNA, 120 bp, Homo sapiens
gtacgtgggaaatttgggataaactgcatggattttacagccttccagggaggcagagtgctggagtaggttcagaaagcatttctgaaaacctctttcttctagtcaccctgcctaatt

SEQ ID NO: 16275 - DNA, 120 bp, Homo sapiens
tttcggaactaagcagaattacttgtttcagtgaatacatttgtggaccacagcaatggggagaaaggagcctgagaaaagtgttcctccggcccttgaggtcaaagacctgtaggaagt

SEQ ID NO: 16276 - DNA, 120 bp, Homo sapiens
gcccgtgatgtgacttcagcaaagtgggatgggccattttcactcactgagcttgtcagatgaccttttcttgattcaccattacctggagagtttatccaactgctgggacacaggaga

SEQ ID NO: 16277 - DNA, 120 bp, Homo sapiens
ctacgaaataaaaagaaagaatcagagagaaatcgggatcttaaaatgctgcttcatttgtccacagagcatgcatcttctagcaatctgacagcaatgacttgcctaaaactgggcaat

SEQ ID NO: 16278 - DNA, 120 bp, Homo sapiens
ctccgtggtccccagttacttaattgtgtcattagcaggagttttgacatgaagaacaacttgtgtctagagcaccagcctggcctccgttagggaaacccagcggagcggctcccaggg

SEQ ID NO: 16279 - DNA, 120 bp, Homo sapiens
taacgtgtgcctctggtgctcagcggctcgtgggagggattaggtcctggtgattgttacagctgtcctctttgctgccctaccgttgatgacagcatgaaatcgacagtcctgatcaag

SEQ ID NO: 16280 - DNA, 120 bp, Homo sapiens
atgcggtcaagcttcctgatagtcaaatggataaaatgtgcagtgtaccatagaggtgtccaactgggtgggatcataggggttaaacttcagcctgggggccaaagggatgctctgtcc

SEQ ID NO: 16281 - DNA, 120 bp, Homo sapiens
ggccggaattgactgagactgtcaggaggtcaggtggggggttcctggtggtccttcctttctctagcagaaaaagcaaaagaaaaagggtgagcacaagtggttataaatattttccca

SEQ ID NO: 16282 - DNA, 120 bp, Homo sapiens
aagcggtgtagacatagacagtctaactaggttattgaagccttaatccccattgggacttaattttatgactctcattgatcaagcaacccttggggtcaagaacctctgctcagctgt

SEQ ID NO: 16283 - DNA, 120 bp, Homo sapiens
gcacgatgttgaaagatgaagcttgtatttggtgtgagtgaggactctagattctgaagctaaccacattagctggaaagacttcgtgcataccagaaatgtagaaaatactgcatccac

SEQ ID NO: 16284 - DNA, 120 bp, Homo sapiens
agccgtggcttaatctctttgatttgactttttccctccaaactcattttaaggtcttgaaaatacacaatgcagctgcaaagctacactttgggactaagaacaagtttgggaataacg

SEQ ID NO: 16285 - DNA, 120 bp, Homo sapiens
attcgatgatctcttttcattttataagtgttatgaatccactggcttcttgcatgagaaaggagaacactttcagcaaatttcaaccatctcacaaatcacttcatcacaatagcttaa

SEQ ID NO: 16286 - DNA, 120 bp, Homo sapiens
ttccgattgtggactttacacaagatgtgacatcaaacgcaggacaatcttgaaatggcaaatgcctggagggagctgccggccacggagtctgaattacctcataccttgaaattagca

SEQ ID NO: 16287 - DNA, 120 bp, Homo sapiens
tttcggtactccctgcctttcgtaaggagtgtcaccctcacaatgacacaatgttctgcctgtttgcattactaaacacaggaggtgcaatggggaagcaggctgctcataaaaatgagt

SEQ ID NO: 16288 - DNA, 120 bp, Homo sapiens
agacgcttgctacagacgtgacaaataccaagctgatttttatgcagggaatcctgtctcattttatgtgaaaataaggtaataagacaaaaggagctataggactccaattttagcttt

SEQ ID NO: 16289 - DNA, 120 bp, Homo sapiens
ttacggggtgtgtgtgtgtgtgtgcgtgtgtgtgcttgtgtgtgtgtagggagagagagatccctctctacccattagtataaaagttggatttctcaacagcttgacaatactggaaac

SEQ ID NO: 16290 - DNA, 120 bp, Homo sapiens
aaacgtctcgtcagtggttactccatcatgataagtattattgtgtgatattttttttcttaacagaatgaaaacagatgtcatttgatattaatgcctaaccccaagtcaatggtaaca

SEQ ID NO: 16291 - DNA, 120 bp, Homo sapiens
tagcgccatttaactactgtagtcatgagatggtgagggtggtagccaggaatggccctaagtgatcagcaggatcagggagagaaaaaaagcaccctgtgagaatgctgaagggtttgg

SEQ ID NO: 16292 - DNA, 120 bp, Homo sapiens
agtcgtttttacttagcagctttagattttagattaaaacagaggagagatgaggaaggcagacaccaagatggggaataacagggcaggagcaacagaaacaaacagacacattctcaa

SEQ ID NO: 16293 - DNA, 120 bp, Homo sapiens
ccccgatgtcctcttcattttccccagttgtagaatttcagttggcctctgacgccatgagaagaaacgaactcagtccaggccaatgcaaacgttttcctacaactctctcccactttc

SEQ ID NO: 16294 - DNA, 120 bp, Homo sapiens
aatcgccctaaatcccatcctctcttctacttgatcctaatgactaatctgttctgccaagaagagatgacacttcttgtcagcccttgccttcctgtggtcaaaattaattcgttcacc

SEQ ID NO: 16295 - DNA, 120 bp, Homo sapiens
caacgccatcacaatctctgcccttgagaaaccgccacaactacagtgctctatcattctatacgaatgcagacggcacaatcattctcttttgaacctagaatatatattttcaaaggt

SEQ ID NO: 16296 - DNA, 120 bp, Homo sapiens
aatcgtcaaatcagatttttctaccaaataaatgcaatggaaacaagatctctcctatctacggaaaccatgatctcatgctagaattttagggaaataaagcttgaaccctaatgacta

SEQ ID NO: 16297 - DNA, 120 bp, Homo sapiens
tgccgtgactgtgtttcatctcgcctgttcctggcattgcctctgacagctggacttactgagagaccaggccccagatgaaaattctcagcacggccccaccatgctccctggcccaac

SEQ ID NO: 16298 - DNA, 120 bp, Homo sapiens
actcggtttgcctttgagcccaattgcctgctcagttccctgtcccttctgtttatttctacttctcatttttcccattgatcagatgccctggaaatatagcaggaacagtgtgttccc

SEQ ID NO: 16299 - DNA, 120 bp, Homo sapiens
aagcggtaaaaatccaggcctgctctgcttacactggacatcggcttcagcacaggctccgattcatttcggatctattccctccttaaaggggagtcacacccagcctacagcaggaag

SEQ ID NO: 16300 - DNA, 120 bp, Homo sapiens
aggcgaactgccaagcatgtgcacagaaagctgtttcctcaaataagtgcacggctataacacagtaggtgcttgactgaataaagatacggcaccctgtgaaagtgccagatgaatatg

SEQ ID NO: 16301 - DNA, 120 bp, Homo sapiens
tgtcgaatcccacaactcttccgtaaacacagtttttctagatcagcctttgccatcagggctactaatcctaattttccctgatgccactttatgattatgtgactcaaactgagaact

SEQ ID NO: 16302 - DNA, 120 bp, Homo sapiens
tttcgtgccacagtcgtccttacaggcccctttggtgagcggatgaaagctatgcaacttttctccagaactgccttgcctgcctcacagaatattctgaatgttctgggcactaatgtg

SEQ ID NO: 16303 - DNA, 120 bp, Homo sapiens
aaccgcagtctctgaggggacccagtcctcctgggtggctcttctctgtgtttgcttcagtgatagaatcctctttctacatgaaccctgtgttttctttagaatacaatatttagttaa

SEQ ID NO: 16304 - DNA, 120 bp, Homo sapiens
aaacgtctccgtccttagcaatattttcaattcaagatctgattaaaaagcaatgatacagtcagcaagggctgtgaagacctctgaacaaggtaatgccatcagaaataatcggctttt

SEQ ID NO: 16305 - DNA, 120 bp, Homo sapiens
gagcgaggttcccctacacacagactaagtgtgtgtatgagtcacaagccaatcagaaagaaaaagagcagaaacagaagaagttgtttaagaacataatacatactttcaaaaaattaa

SEQ ID NO: 16306 - DNA, 120 bp, Homo sapiens
ccacgatcatttttgtgtgaatggcctctagacatttaaagaagaacttgttcagaaagcagggagataaaactacaggagtgagtagaccacaaccagcagcagaattagggtgaagag

SEQ ID NO: 16307 - DNA, 120 bp, Homo sapiens
cctcggacgcaaaatttaaagaggcaacaaaacaatgcaggaatcaaaatcaatcatgttttaatgtactattttttaaaaaccaagatcaatgctaaaagtcatgatgaacaaaatatc

SEQ ID NO: 16308 - DNA, 120 bp, Homo sapiens
cagcgttcctgagccttaggcatgaacaagctcagctcagcactgttataaatcctgtcattatttagactttgacagtttgttcatcatagatttttatgcattaattttgattttaaa

SEQ ID NO: 16309 - DNA, 120 bp, Homo sapiens
tcccgtcccctgttcctctgtgccagcttcctccccctccctgtctgccccatgtctgacaccgaagccacatcagacgctgggagaagaagcagacacacaccctgtcaacacatcttt

SEQ ID NO: 16310 - DNA, 120 bp, Homo sapiens
gcccgactctcagcacagtagtggcggggggtcaccagcagacaggatgcttcccacatggggatgatttaatccccagcgttttcatccagtgcaagagagaagcccgctgcttgtggg

SEQ ID NO: 16311 - DNA, 120 bp, Homo sapiens
agccgtggtaagaataaaggcgctcctgagtgacaggcatcacccctccttcactggggttttgccactgtaaggctcaaaatacccgacaacaaaaaacttcagaaattaatctgggat

SEQ ID NO: 16312 - DNA, 120 bp, Homo sapiens
agacgttgtactgaaaagatagaagtagagagaggagacccagtggaagagtagaaaagtagagagtcattggcttaaagagttgaaaaatagatccttatctcagccctgctgtgagct

SEQ ID NO: 16313 - DNA, 120 bp, Homo sapiens
acacgaaattgcctgccactctgggtttcagttccctctgatgcataagcaggaggtgaggtttcttacctcaccctgctgtcagttgccttccagatctctcatctgtgtgcctgcatg

SEQ ID NO: 16314 - DNA, 120 bp, Homo sapiens
aggcgaaaggaatgctacaggaagccatcagaccagggtgggaaaaactgggggaagccccacttccacgttagaccaaaatcaaatcagaaccccagacactcccaagctgggtgttgt

SEQ ID NO: 16315 - DNA, 120 bp, Homo sapiens
attcgtcaacttgcttttgtccctgtaatctgttttgcaaataaagacacatggtctcagagagattaagtggtttgtcccaaatcacacagctggcagcagagctggggttaaagtctt

SEQ ID NO: 16316 - DNA, 120 bp, Homo sapiens
caacgaagagctgctctgcttccctcacagaaatagtagctcctacagcaacatgtcttcattcattttttattcattcatttattcatttattttattatttcttgagtcccttattcg

SEQ ID NO: 16317 - DNA, 120 bp, Homo sapiens
catcgccgagtccaattaaagtttctgagcatggatttcctcatcgatagaacagagaaaataccttctgctgcacagggttgttgtgagaatgaatgagataacacaaaagaaactgtg

SEQ ID NO: 16318 - DNA, 120 bp, Homo sapiens
acccgcatgacctatcacccccaaaaccccatctccaaataccatcactttagggattaggacttcaacagagaaattcagggaggggaccacaaacactcagtgcacatcagtaactca

SEQ ID NO: 16319 - DNA, 120 bp, Homo sapiens
tcacgggccaaaaaggaagtcaaaaattagaaaatgtttggaggacctatcatcctttgttacagaaaactaaatgtatttcccatctcatgtatagatatggagggagaacatcagatt

SEQ ID NO: 16320 - DNA, 120 bp, Homo sapiens
gaacgggtaacccatttgaacctagctgcactcgcagctgacaatcttaaatctgcatatgcaatttgccattggttcattttcttctgcagaagatgggaacctcattcacataatttt

SEQ ID NO: 16321 - DNA, 120 bp, Homo sapiens
caccgttgggtaccatggagagattggcaggatgacctactggatgacagcagtgtctctcttggagttgtctgccaatgagctagctggactggaggctcttcttgcccagtaagaaag

SEQ ID NO: 16322 - DNA, 120 bp, Homo sapiens
aggcgtagtcccgacctctcaccttgcctctgctcaacagccaatgtctccaacccaggtttgcaactccccagagcaactggcacttaaacttgatctgcttttcttctgacattttag

SEQ ID NO: 16323 - DNA, 120 bp, Homo sapiens
ctgcgtccttctgcctgaaagtgtgatactcactcgatacctccctagaccttttgctagacaggactgaatgcattaaagtgataacagctagaccattaactggctctcttggatgga

SEQ ID NO: 16324 - DNA, 120 bp, Homo sapiens
ccacgggacgcagctaatgcccttctgagactattgagctatggtttcatggaaatttcaaggaaggttctcactaaggccatgatcttagcttggagcatggtctctagggctgaatga

SEQ ID NO: 16325 - DNA, 120 bp, Homo sapiens
tctcgggcctccacttctctatgggcttcagtactatatgcagaaagccccaactctgtgtcactacaaggagccttgaccttgacctcctataggaaaggcactgagagttatcccaag

SEQ ID NO: 16326 - DNA, 120 bp, Homo sapiens
aaccgcaaagaagggaaggaagagagagatgctgatcttgctctacaatgcccatgagtagtgacacagtaggtgtttcataaataatgtctttttaaagtcacagtccaggataaaaat

SEQ ID NO: 16327 - DNA, 120 bp, Homo sapiens
gttcgttaaataacgatcatatataaaaagagaaagagagagaagagagaggaagggaggaaaaagagattgatattttgcctgcaagttcaccaaaggctaccatgttggtttgtgctt

SEQ ID NO: 16328 - DNA, 120 bp, Homo sapiens
aaacggacctcactggccccaaagtcatcgaatctacaattttgacctttaggctatgtgcccacagaactggacgacactgctgaattcatgtaaccctaagcgctgtgaaacgctcca

SEQ ID NO: 16329 - DNA, 120 bp, Homo sapiens
tggcgccacttctgagataactcatgccgcagagctcaacaacataccccttgttcaaagtagagatgatgggcgttgaaagggccatgacacagaggtcttttgtgtgatcagacttac

SEQ ID NO: 16330 - DNA, 120 bp, Homo sapiens
tgtcgtctgaagagtggtttggctggataagaccacgaaaaaaaaaaagtaccaaacaatcaaaaagcttaatcatggattatcaagaagaccattttcccacccacatttgattctgaa

SEQ ID NO: 16331 - DNA, 120 bp, Homo sapiens
tgccggctgtacaggaatcatagaagcttctgattcttgggaggcctcaggaaacttacaacaatggtggaagccacaggggaaacaaggtactttgcatggccaaaggaggaagaagag

SEQ ID NO: 16332 - DNA, 120 bp, Homo sapiens
ccacgcactcacggtccatatcacagtcagacgcgatactctttacctgctatataaacacagacaactcccaacctcctccctcatggaattcacccttacagtgtaccactgggaggc

SEQ ID NO: 16333 - DNA, 120 bp, Homo sapiens
ttgcgctgaaaggaatagaggcctttgtctctgatataatggtctcacaccatctgccagcatccatggcatgtggcaggccaactcattagcttctaagtatggggaagatctcagatc

SEQ ID NO: 16334 - DNA, 120 bp, Homo sapiens
ggtcgctgcaggtggctgcaattctgatactggaggaatttgttccttagatccctttgcagttctgttgtataacttatgcagcaacactcctacaagagataacaaagaaaaattcac

SEQ ID NO: 16335 - DNA, 120 bp, Homo sapiens
catcggtgggtaatgaaagaaagtgttgtggtgtaatttggtcacccttctgctatcgttacctggtgatcactgacgaacatgttcatcctgacactgcaatacatgtccttcaggacc

SEQ ID NO: 16336 - DNA, 120 bp, Homo sapiens
caacgccactccctggctgcatgaccccaaatgcaacttacatgagggaccagacacaacactgggggaacctctacaagtgcctgacccaaggaaccactccagagagcacgcaccgag

SEQ ID NO: 16337 - DNA, 120 bp, Homo sapiens
cctcgcgtgaaccacagctgggaaaaaaaaacatgatggtggaaatttaaattcatccttgggggacagggcactgattgacatggttggcacagcaaggccacggggggaataaatggg

SEQ ID NO: 16338 - DNA, 120 bp, Homo sapiens
catcgccaacctactgccaagctggctgctcaccagtgcacagctacagaacaaatggaatccggaggactgtcaatcttcagatagtgtcactgcccccaaaataataaacttaggggg

SEQ ID NO: 16339 - DNA, 120 bp, Homo sapiens
tagcgtgtttccagggtcccagaataggcccagctcccacccagatgcccatgaggtaggagacattaaattaaacacacacacacacacacacacacacacacacacacaccccactgg

SEQ ID NO: 16340 - DNA, 120 bp, Homo sapiens
gaacgtcagacaaggccagcagatgctgcaacacacccaaaaccataaggggtctactatgttttgttcagtttacccccagagcctcaagcacgcagagttaagtaaactatactccta

SEQ ID NO: 16341 - DNA, 120 bp, Homo sapiens
tcccgttcccataaccatctctctctcttgccatgggcatgcactccattgtgttttactaatttggatgtattcttgagatttacgtagttttcatttgaataaatggtaatatgctaa

SEQ ID NO: 16342 - DNA, 120 bp, Homo sapiens
aagcgagagagggaggaataaaccaaggcagagaaggagaggattatttctgaggttcattcctcagattgggagtgacccaatctcacccttgggttccatgaggcagcccaacatcca

SEQ ID NO: 16343 - DNA, 120 bp, Homo sapiens
gctcgcttcatatgcaaagtgaaccatgtgccaggtagcagcatactctctctcagagaatgcaagatcatcattcatccatcttactgtaggaagtgcagaccttactacaagagactc

SEQ ID NO: 16344 - DNA, 120 bp, Homo sapiens
ttacgagctcttctaattagaggtggaatattcacgacattttctaggaaaagggtggggactttttagaattgaggtcccaccctttttttgtttgtttgtttgtttggagtgcagtgg

SEQ ID NO: 16345 - DNA, 120 bp, Homo sapiens
gcccgcattccaaacacacacccagttaatgaaaaccacacacacacaaacgagagataggttctacctgcctgtgacaatctggagtaggaaaagcacatgaaaaatagccttgggact

SEQ ID NO: 16346 - DNA, 120 bp, Homo sapiens
cctcgggtttgtggccaaagacgcccaaatgttgcaatcctaaacctttggcagcgacaaaaacatgttggcaagtggaaagttttcagcatggggcttttcatgttgttttgtttgggt

SEQ ID NO: 16347 - DNA, 120 bp, Homo sapiens
tggcgctccacttgggatgttggccccaaaccacctgcactcctattgtacatcctgtatggtttcaggcccccaaaaacagcctttgagctcagggagacacctctttcccacctccaa

SEQ ID NO: 16348 - DNA, 120 bp, Homo sapiens
cctcggacaatgagaggggatgacatgaagcatttggcctccatggctgtggacttcatgagggctgagggcatttctgaatttcagtctctgatcaacccacagttctgttgttccctc

SEQ ID NO: 16349 - DNA, 120 bp, Homo sapiens
tctcgccctagcaggcctcatttctatctctttccatctccccggctgctacctgtgctgcggtagccacttgatacatgaactatggcttcccgcccgttaaaactagacattcaaaga

SEQ ID NO: 16350 - DNA, 120 bp, Homo sapiens
atacgcagagaacttcaaaaaagagcctggaaaaagtaggaggtgataaaggagttagcacattttcagtttgtttctcttacaacctgtgagagaacccagacagctgatgggctcccg

SEQ ID NO: 16351 - DNA, 120 bp, Homo sapiens
cagcggcagccgagttacatggcgccagatcccagaggacgagctctggcaaccgcctgtgcactcccctgcagccttttcttcagaagtgaagatgggggagtctggtcaaccacaggt

SEQ ID NO: 16352 - DNA, 120 bp, Homo sapiens
gggcgggagtgagaagtggagttggctggcctcaaaccaccaccagctgagcagggctcctcagccagggtgtgtcttctgggactcccggggcaaaaggtggcattagagatggaaatt

SEQ ID NO: 16353 - DNA, 120 bp, Homo sapiens
gggcgactgcttggcactttccccaaaacagcacacggaacctgtgaaaaatgtgctctggcccccttcaaccttgaccctgaggattgagggtgggaactgcggtgggtttgctcaaag

SEQ ID NO: 16354 - DNA, 120 bp, Homo sapiens
ctccgtgcctcctcagcaaggtatcctcctgctaaaggcagtgtctacacccgtagggggaatactattacagacactctagagaaccaggccaacagtgacttttcagttacattgacg

SEQ ID NO: 16355 - DNA, 120 bp, Homo sapiens
gtgcgatgagtattcaggcgaacggctaaagttcgtgtctggctaattttaaaatgtgctgactataaaattttcccagtattgccagtatagggaagagcacctctctaattaaaacag

SEQ ID NO: 16356 - DNA, 120 bp, Homo sapiens
catcgccagctttgtcttaggtgtacaacagtctagagtacttgtaactgatgcccagtgaaagggcaaaactgagccgttcaaatgcttcacagcctgagcggttgtgtctgcgtgcat

SEQ ID NO: 16357 - DNA, 120 bp, Homo sapiens
tagcgtggatacagagggacatctagtgaccagctaagtaaaaaacacagtgcagcctgcaaactacatggaggcggccatggatccttcacctaaagttgtgctttatttgatgaataa

SEQ ID NO: 16358 - DNA, 120 bp, Homo sapiens
gagcgtgcacacccaggttcccagacgacaaaccacacacccaagtattattgagcctcatccatggcagcctcatgttacacaatgaatcaggccaccgcccagcgccaagagccttgg

SEQ ID NO: 16359 - DNA, 120 bp, Homo sapiens
ccccggccaaagtttgacgctactggcttgaatcacacagtcagatttggacttttcaacaaaccacagaacagatattaactttcctgtgagcctgggaatacggtcggcagttctggg

SEQ ID NO: 16360 - DNA, 120 bp, Homo sapiens
ggacgccctgggccctgaaagacagctcatggtccaactgaggagcctgcaccttgctgggacagggtggcccaggagatctggggtctgtacctgctcctggaccctctccagcttgtt

SEQ ID NO: 16361 - DNA, 120 bp, Homo sapiens
ctgcggggccagtgggagcagtgtgcagcgtcctgccctgggctctcgctggctctgcgccctcgcctggccagcccgggagggtgcagaggctcactggcagctcttcctgctcccaca

SEQ ID NO: 16362 - DNA, 120 bp, Homo sapiens
ggccggcaagcctcaaggcttaatgcaagactaaatacagctgtcagcgccttcctctgagctcgcttgggagctgtctggggggacggaggagtgaagattaggtgaatcaccacgccc

SEQ ID NO: 16363 - DNA, 120 bp, Homo sapiens
cagcgtcttgcctggtgcctctgctgtcctccgtggactgcagcccagccagcctaggctccaaccccaacccggagcacccccaggagagttacctgtaggctggaggttgagtagcac

SEQ ID NO: 16364 - DNA, 120 bp, Homo sapiens
tgacgagcttgctgttctccagggaagctgcttctgtggagaccgcaggaagcacaacagaaaaaaacccacaaaacgagcctcagagcactcagcagcagggttttctttgcccagaac

SEQ ID NO: 16365 - DNA, 120 bp, Homo sapiens
ccacgtggcagcatgtgtcagcactggattccttgttatggctggggcataacccatgcagtctcatccattcattcaccgagcgcactgggcggctcccgccttctgtctgttataaat

SEQ ID NO: 16366 - DNA, 120 bp, Homo sapiens
gcacggaatctcacattgtagatttcctgagtctgagctcagcacagagagggtttgacattgccacctagtggcctgtcgtggtaataccgtagcagggctgcaaaccccagcgcttcc

SEQ ID NO: 16367 - DNA, 120 bp, Homo sapiens
attcgacagcctttgggaacggcctagctcattccctgctcctggtttgtgcattcaacagttgttgacggtttgattaataatgtgatttcattgataaggttaaatagtagttagaat

SEQ ID NO: 16368 - DNA, 120 bp, Homo sapiens
agccgggaagtgagtccatgacccaggccttgagccatcgcacctgtgaggacaaaccctggaagtacccataggaggtttgcactgaggatgattgaagctcattataagattgtttgc

SEQ ID NO: 16369 - DNA, 120 bp, Homo sapiens
tagcgtgtggtgtgtgactgtgtccaaagagacagagtagaaagcagggcgttcgggggcaggaaccccctgtcctaatggggaagttggaaatgctcacaggaagcagtctggggagag

SEQ ID NO: 16370 - DNA, 120 bp, Homo sapiens
cagcgggaagtggtctccctccccacgaccctgcactcagccccctgccctcggtggctgcaaaccaggagtattaggttctagaagcccttgtgagcccccagcaaattttaagcccca

SEQ ID NO: 16371 - DNA, 120 bp, Homo sapiens
cctcgccccacaggcatctttctgaagccgtttactggtttggggggggaaacaagggctcttctcatatcacagacactcccaggcgtttgtgctgggcttgaaaacacagcagacagg

SEQ ID NO: 16372 - DNA, 120 bp, Homo sapiens
ccacgggccagccctgctgctgggcagactggcaggaggaaccgccttgagacgggcatctgtttcctctcagcgtggggacctcctcacatggcctctttccccgcaggtgcggggctc

SEQ ID NO: 16373 - DNA, 120 bp, Homo sapiens
ggacgctggtggggtcaggatggaagtcgtcagcgtcaccaacggcagcatcgtggtggagtttcacttgctgataatcgcagatgtggatgtccaggaggtgtcagctgcatttctcac

SEQ ID NO: 16374 - DNA, 120 bp, Homo sapiens
caccgccttccagaccgtgcctctgctggaggtgatcagaggcgacaccttcatacagggtacgagaggctgggatggagcctctcccgtgttctggaaccagaggcagccagagggcag

SEQ ID NO: 16375 - DNA, 120 bp, Homo sapiens
cttcgcttttgaaagatgtcgtgttgtgcccatgtggtccttcttcccccagaattagatgaagatgtgaaatagataggaccctgtctgtccctcttattgtgattataattgtgtaaa

SEQ ID NO: 16376 - DNA, 120 bp, Homo sapiens
ctacgactttgtcctaaggaatttgatctgtttggaccgtagtttaaatacaaagatgttcatcttcagtgttactttaaaagccaaagagttggaaatcaccaatcatccagtaacaaa

SEQ ID NO: 16377 - DNA, 120 bp, Homo sapiens
ccccgccccgggctgttatgcaatgatgagaatagcggtttgtggatttgcatggagctagttggtggcagaggcaagctatgctctcagagcatgcctgcattttaaaaggctggaagg

SEQ ID NO: 16378 - DNA, 120 bp, Homo sapiens
atacgtccacatgctaacttgcccctggccacgcttttctggttcttatccatgttctgcagtaaacctgttttgctgtcaacaatcaacccagcatcatggcgaaaggcaaatggcctg

SEQ ID NO: 16379 - DNA, 120 bp, Homo sapiens
gaccgaggtggatctgggggcctgtgcatctcctggttactcccgggaactgaagggatggccctgctctgcccagatccccctcccagccctgggccagaatcctccttccagaacagc

SEQ ID NO: 16380 - DNA, 120 bp, Homo sapiens
ttacgatgagtgtgaaaggaaggaggacgactgtgtgccggggacatcctgtcgaaacaccctcgggtctttcacttgtagctgcgagggaggagcccccgacttccctgtggaatattc

SEQ ID NO: 16381 - DNA, 120 bp, Homo sapiens
tgtcgtcagagtttcttcttctggaatactgtatcataatcggttttttttaaggacattcacgtgcaaagggcttcttgtccctctgaggtcatatttttatgtcctggggaagtttcc

SEQ ID NO: 16382 - DNA, 120 bp, Homo sapiens
ttccgggctgcaaagggccagcaggagcgggtctccttggtctttctactctgcatcctcagggcggcacccccccttgtgctggcaaggtggcccgtcactcgaggcccaggaggaagg

SEQ ID NO: 16383 - DNA, 120 bp, Homo sapiens
catcgtgatttaggagttgtctggggaagtggccggccgggatctgggggcctcggtttcttggggagggtggagtcactttggctggagggtgggaggtgttccctgtccctctctctg

SEQ ID NO: 16384 - DNA, 120 bp, Homo sapiens
atccgacagtgccattgttggatggctttgctgatggtgacgctccatgctgttccctgggggacacacagcagcgtccactctgggcagactgcccggaaatcaatacagggaatgaaa

SEQ ID NO: 16385 - DNA, 120 bp, Homo sapiens
agacgcccttgacaacgaattatacccacacacggtgggcagagggtcacatctccccctgggctcataggggccagccagagagccagcaggcagctggcatctttctcaggcagcaca

SEQ ID NO: 16386 - DNA, 120 bp, Homo sapiens
tcacgtaacctcaagctaactgtgttagagtaaacgactcagtggtgtttagtacattgagagtgttttatagccaccaactccatgtagtttcaaaacattttcctcaccctaaatgca

SEQ ID NO: 16387 - DNA, 120 bp, Homo sapiens
gcccgggctggtctcctgaggccaccactagcttcctagggaggggctttacccaactaggacacagggccgcagacctgggcaccgctcagccaggcttccttcctcgggcctggaccc

SEQ ID NO: 16388 - DNA, 120 bp, Homo sapiens
gagcgagagcgagagagaaacaacagcaacaaaactctaaggaactaacggtgtaaagaaataaattaacatgcagaaaatttcacataaggtccatccgcatggcctccccaggcaaag

SEQ ID NO: 16389 - DNA, 120 bp, Homo sapiens
tggcgagggagaggtggcccccagattctcacacacagggtcacggagcttgtcctccctcccaaaccaccttcacttcggatctgcctggatgctgattagactggagagaggaacaga

SEQ ID NO: 16390 - DNA, 120 bp, Homo sapiens
cctcggtctacactgctggcaacaagtccagtccatagttttttcagactttgaggcccaaatctttgatctggaaggacctgggattgccaacttggcagggactagagggtaaagggt

SEQ ID NO: 16391 - DNA, 120 bp, Homo sapiens
tctcgtaactttagcacaatgcttggcacttggcgggaggtcaacaaatgttgtaccatcacggatttcctgactgtccaagtgactgactgactgaatgaaggaatgatgagcctgcgg

SEQ ID NO: 16392 - DNA, 120 bp, Homo sapiens
acacgcaggttggggcaggctctagcacacgcaaccagataagcacccgcccccttgataacttttatgtgcgcctcctcccctctgtcctcacctctcaatgttcagcttctcatttaa

SEQ ID NO: 16393 - DNA, 120 bp, Homo sapiens
gaacgtggccctgttgggtgcgtcattgtgtctggaggccttgggtgtgtctgtattgtgaacaaatgtgactgtgggtgaggtctggaaacagagagtgggtcactctggatccgtgtt

SEQ ID NO: 16394 - DNA, 120 bp, Homo sapiens
aagcggagcattgagtgcttaataatgtgggtgttaattgtttgggatataaaaatttcatgcctagagctttaaagttgtaccccaaatgctttctaaagcggttgtgtgcctcaggaa

SEQ ID NO: 16395 - DNA, 120 bp, Homo sapiens
gcacgtgccatcatcccaatgcctgaggcaatggagcaaagggaaggaagggacatccctccgctccccacgtctgtgatgctgtggctgggctcacaggtgctgggaatgccccatcat

SEQ ID NO: 16396 - DNA, 120 bp, Homo sapiens
aaacgagttaatgtggctggaggcactgatcacccccaggcagccccacactcaggcctttcccacccgaggcactcgttagaggcgctggcagcctcagctgccccggctggagaagcc

SEQ ID NO: 16397 - DNA, 120 bp, Homo sapiens
aggcgctgcaggagcatgggcggatgacaccgatgatgggcttcatggagatgcctgcagacaatgccagcagctaagggagccgcactgatctcaggctgcaggaaaggtgctgtctca

SEQ ID NO: 16398 - DNA, 120 bp, Homo sapiens
gggcgtgtcctgctggatgtggatgggctgattcaagaaaatgatgaaaacaatttttatgtgtagacctgatttgcccaagacaggttcccaagtcgtttgtggaaaaggaaaggcacc

SEQ ID NO: 16399 - DNA, 120 bp, Homo sapiens
ggccggtgacctcaccactgtttgggtgattgcattgctgttattatagacgggttgcaacattcagctcctggcctggttcctggaaatggcatgctggggaccctaagaaatgatgca

SEQ ID NO: 16400 - DNA, 120 bp, Homo sapiens
acacgtgggaagacaaagctgaccccagcagcaggctgtgggtgagaggcagcgcagctgtgggaggccagcctcacctcctcccctctggaaacagctgtgtgttcaggggccatgctc

SEQ ID NO: 16401 - DNA, 120 bp, Homo sapiens
ctccggttgtttccaggaaagactttttctcacatgatttcccccaaaacatggtgctgcgatacaaacgcaacatacaacgccctagcaaagctgagcattgtgaccagaataacttta

SEQ ID NO: 16402 - DNA, 120 bp, Homo sapiens
ctacgtaattattttaaagaaggagaacttcacaatccttacaagaaaggcgatgcgggaaacagtagcggcatttttaagaagagatgccaggcactgattctgtaaaacttttgagct

SEQ ID NO: 16403 - DNA, 120 bp, Homo sapiens
gaacgaccgtaggcaggtgaaatccccaccttgctgttggaacccgagcttcagagagggctgttgacttggctggagccatccgtggaaggggtgcattgaaaccacaggtgagaactc

SEQ ID NO: 16404 - DNA, 120 bp, Homo sapiens
gaacgaccctcaggaagaggacctccttccccagtcatgtcccagctctgcccccacgcgctccacgagctcaggcctgcagtgggagctgagcgtctggagtgaggagtggtgtttgcc

SEQ ID NO: 16405 - DNA, 120 bp, Homo sapiens
atccgaggacttctgaaaagccacagatggaagaaccaaagaaaacaggatttacttagaaggttgagcctctccactggctcgcatataggtctaacttacaaggaacctgttgggttg

SEQ ID NO: 16406 - DNA, 120 bp, Homo sapiens
gcccggcttaaccccaaacaacatcttaaccccagtgaagtgttcttgaagggtgggtgcggccacacatcctgcaatccagtgcagaccagatggcctccctggccaaccacggggaca

SEQ ID NO: 16407 - DNA, 120 bp, Homo sapiens
agtcgcatcagagacagagaagagagcacagctcaaggctgagataagaccaggagaactggggctgtatttccttatctattcctgagatccatgctttctgaaaatcatctgcacatc

SEQ ID NO: 16408 - DNA, 120 bp, Homo sapiens
ctccgatgaggaggggatggggcaccaggcagcagactctgatgaggaggggagggggcaccaggcagcagactctgatgaggaggagacagggcaccaggcagcagaaagtgctgactc

SEQ ID NO: 16409 - DNA, 120 bp, Homo sapiens
ggccggcttcccttcttcctcggaatggcctggaattcgatcaagaacagcagccccaggagcatcctagagaggtgggggcaggcgggggacatggtgagggagggagtggcaactctg

SEQ ID NO: 16410 - DNA, 120 bp, Homo sapiens
gaacggtgcagtgactgaattcgccatccaaacacttagaagaataaatgcaccagtttctacagaggctgtagatataaagccatttctcaagaggaatgatagttgtcactggatata

SEQ ID NO: 16411 - DNA, 120 bp, Homo sapiens
gcccggtgactgcagcttggggatcaccctcccattgcctggctttccctcctactttccgagcaaccacctcttgggtttggcgttttaaggtttccccacttggattttaacccccat

SEQ ID NO: 16412 - DNA, 120 bp, Homo sapiens
ccccgcccaggtggtgttggggcgagtgaggttctggtgctggggaagctgctgcttgaggatagcagtgggaagaagtttcatggcagcagctgccacctatgtgttctgcagagcacc

SEQ ID NO: 16413 - DNA, 120 bp, Homo sapiens
actcgccttcccagtctcggcacgcctggatgccgcattagcacacagggagggtcatggtcagagcttcaggatgcagtgggcgaggtgtctaagatccagatgctagccttggaggag

SEQ ID NO: 16414 - DNA, 120 bp, Homo sapiens
atccggttgaattttggaaacacccatatctccatccactctatcagcctctccatccatccctccatccatccctccattaatcctcctctagagcattctactagagaacagccgagg

SEQ ID NO: 16415 - DNA, 120 bp, Homo sapiens
gggcgcctgctggcagctgctgtaagactcgggatgagggctgccccctgcaggtggctctgaaagctgcagctctgagtggtgcccccagcagcagctttgttccctaattaggagggc

SEQ ID NO: 16416 - DNA, 120 bp, Homo sapiens
agtcgttcactccagaattctggagaaccgtaggattcggagctccttgagggcatagccagtgctttcccttgttcctggtggtgatccaagcttgcctttctctcagacctgcctcag

SEQ ID NO: 16417 - DNA, 120 bp, Homo sapiens
agacgacattgcgttcccagatgtcgctggtgctgggctcagctccaaagttctggagcagagtcagcaaagcacagcctggagaccagatctgtgctctgcctgagtttgtaagtgaag

SEQ ID NO: 16418 - DNA, 120 bp, Homo sapiens
agccgtgcatgtacaggtggcagctttagcttctgctaaactggagagctcagtgtttgtgacagactgcgtgtcctgcaaaatcgaaaatgtctgtgattcagctcttcagggaaaaag

SEQ ID NO: 16419 - DNA, 120 bp, Homo sapiens
tgccgatgtctggcctacagggctcaagcattgtcatcatgcccccatccaaccgtccactcaaggtgcattgactgaggctggctggctggagtcatcatgtgggccctcaggctatgg

SEQ ID NO: 16420 - DNA, 120 bp, Homo sapiens
aatcgagtggcattgcctctgcggagctggccattaccttgtttcctaactgtcactcatttgataaaaactgacaaggttgctagagccacgtgtttgcaaaccagtgggcattcgcac

SEQ ID NO: 16421 - DNA, 120 bp, Homo sapiens
gcacgtgcatgtaatccacacagttactcggtgatgggagtatacttgagggaaagcagctcacagatttgccacttgccacaggtcatggtttaggaagaggcagaggtggggtgtttt

SEQ ID NO: 16422 - DNA, 120 bp, Homo sapiens
cagcgggagaaagaaggcccccaggcttgagcggccctgaagctcagcagctgtgggttggacggtggtgttggcttgctcttccccttccctcctggtttcttcaggccagtgcggcat

SEQ ID NO: 16423 - DNA, 120 bp, Homo sapiens
gcacgtggtcagtccaagtccagggagggccccatcacctgggggtggtcgctatcagtggcaaagtcttgtcagcagctcatggggcaggaagggcctatggttgggggtttcctggcg

SEQ ID NO: 16424 - DNA, 120 bp, Homo sapiens
tcacgccttgaccaacagatgagttttctaaacacaatgtttttgtttttttaaaatatcatcttctttgttgacagatgcaagttgtattgtatttgctgttagataagaaaatacaat

SEQ ID NO: 16425 - DNA, 120 bp, Homo sapiens
cttcgggagcagataagctctcttagatggatatccacacaattccagtttgttcacaaggagactgcccttggtcactttggctgacagtgaacacagcggctgcttctccagaacttt

SEQ ID NO: 16426 - DNA, 120 bp, Homo sapiens
ccacgttgatgcagagtttcagaagaggcagactcaggaagagtaaggccaggcatgaatccttgccttcatcactaagatgatgctttgtattcacagacatgctccccatcctgattc

SEQ ID NO: 16427 - DNA, 120 bp, Homo sapiens
aaacgggtggcgtttttcaggctagcaaaacacatcctctgtttgttcaatctctcagtgccctaggccagagctgggttaccagccgctcagctcaagatcgcctgttgggatgttaaa

SEQ ID NO: 16428 - DNA, 120 bp, Homo sapiens
aaacgggctcgctgcacatggtcactgacccttcttttttgcttttctatctcctagttcccctggagatgggagtctttcttcgggaacacctgaactactggtacagcctgaaggcct

SEQ ID NO: 16429 - DNA, 120 bp, Homo sapiens
ccccgagctccggccaggcagtgaccctcagagtgaagactttccgggacaccagtggcttagaactgggctttcaaatccagcttccctcccacctctgggacacagagcagagagccg

SEQ ID NO: 16430 - DNA, 120 bp, Homo sapiens
aatcggcccgcagtggcccctgcactcctcctatggcgggcaggcacaatcgaaggctgccccaggcgtgcacacaagctcgcgatgcacagttttcttcccccctcggtaaccccagcc

SEQ ID NO: 16431 - DNA, 120 bp, Homo sapiens
ggacggcccggccgccctgggtcccagtaatgttaaagtcacggtcctttccaagccactgtacttgggctgtcccgtcagggaggttcctccaagataattgccccctgcaaagacagg

SEQ ID NO: 16432 - DNA, 120 bp, Homo sapiens
ccacgtgtcctgggcaggaaggaaatgtggggacaggcacacacgcacatccttctgctatgctgacctaaagttcctaatagctatcctacatcctgcccgtttcttttttccatattt

SEQ ID NO: 16433 - DNA, 120 bp, Homo sapiens
acacgtgtggcctgccccagtgtgcctgaggcccacccaggaaccctgctttgcctggggtttatgtgaatgacacacatgtgagcagaggctggggttaggaccctgaggcttccctgt

SEQ ID NO: 16434 - DNA, 120 bp, Homo sapiens
aaacggtccatgccactggctaccacattccagcctggcaagggtttactgtttatagaggcaccgtttgggggcttttccatgtagaatggccgttgtaaagctgaagagaaaggaaca

SEQ ID NO: 16435 - DNA, 120 bp, Homo sapiens
cttcgcaaacacaggcaggggctgccggctggacgagggcgctgcattttgagggcgtgctggacccgctggcagagcccgccctgagggttttctctgcagctgtgggctaagcttgcc

SEQ ID NO: 16436 - DNA, 120 bp, Homo sapiens
caacgtgtgataggcactgagatctctctctggacatcaggaagctgcgtgttgtcagatgccgaagccgaacccacttgcccattgggctgcaggaaggctgagagtctgtccccagca

SEQ ID NO: 16437 - DNA, 120 bp, Homo sapiens
gggcgctgtggagcatcattagcctgtagggttctttaggggaaaacaccttaatgagccctgtgcgctcggaaggttgaatagagggcccttccttcctctaagccacatttctggttg

SEQ ID NO: 16438 - DNA, 120 bp, Homo sapiens
ttgcgccacattaagtcaaacaattattaagtgctgagcagtctttggatcacagaaaacaaacacagaggctgcagccactgggccctgtggaaaactggcggccgtcctgcgatggtg

SEQ ID NO: 16439 - DNA, 120 bp, Homo sapiens
atccgtgtccgcgctgctggaggcctggcaggagctgagatcagagcccttcagcgggagtggggctactcctccctcccctggtttccctggaagctgagaaagttcccaggaaagtgc

SEQ ID NO: 16440 - DNA, 120 bp, Homo sapiens
actcggggaataggccggtggggcgggacagatgctggagggacagatggggcgtcagaggagacagaggctgtcagggagctgtggtcctgcacatgggaaccagtccttgcccagcct

SEQ ID NO: 16441 - DNA, 120 bp, Homo sapiens
gggcgcagtggccaggctgcacctccctgtggcctggtccctccactagctggaggaaggtggggctgctccctcccagccagtgccgagtggctgcagacccagaagacacacgctgta

SEQ ID NO: 16442 - DNA, 120 bp, Homo sapiens
ccacgctgcttccacaaggaagaaacggctgcttgctccacgcctgggggccccaaggctcaggcatccttgccgtggcccacccagcaaagtgcagcaagagggaaggcaacacgcctg

SEQ ID NO: 16443 - DNA, 120 bp, Homo sapiens
gggcgttgacacttggaagaaaggagggcagcagggagcttctgtcatgaaggctgtggtggtggcggtcgtagccatgacaaatgaccaaaggaaaacagaaaaccgcaggctttctgg

SEQ ID NO: 16444 - DNA, 120 bp, Homo sapiens
agccgcagctgataaaaagcaagtgagcacccaggacagaaaaggccacaaggaggagcctcaaatcctgtgggtaaactctgcccaaattagatcatcagagcttcagcctttggtgac

SEQ ID NO: 16445 - DNA, 120 bp, Homo sapiens
gcacgtcttcccagcaaaatggaaagcgagcattccccatacaaaaaccaagtgcactagacttccagccactgggctgagctcttcccccaactccgactctccaccgctcccagctgt

SEQ ID NO: 16446 - DNA, 120 bp, Homo sapiens
ggacgcagttgagaaaacagcaacagtttgttgttgagccacaaattaagcaaaaccttgcttctgacaaaggacagaaaatgtagaggatttctacaatccaaagaacaaaacagccca

SEQ ID NO: 16447 - DNA, 120 bp, Homo sapiens
cctcgcttataaaattggtcatacaagggaaagaatgaaaggttttattctgtttttctaggaggagctgcatttcatgggaaccaaataaatccatgatttacagcctaataaattcag

SEQ ID NO: 16448 - DNA, 120 bp, Homo sapiens
tctcgcaaaccatacttgtagtgggctgaatcatgaccgcaaagatatcaggccctaatcgttatctggggttaactaacagtggatcaaccagataggctatgccttaggctgtaatga

SEQ ID NO: 16449 - DNA, 120 bp, Homo sapiens
taccgtgaatccaccaaacctttagctccagcttctttggcagtaagaagtgcccagagcttaaagaacaagagagcccagacaagcccagaagatgagatattctgccaggcagcccgc

SEQ ID NO: 16450 - DNA, 120 bp, Homo sapiens
aatcgtgcctctgccactttcccctctaatttcaatcagacatgtgtcccctcaggtggaagggcattgaagtggccacaggcacttttagaatctgtttcaggggcactaattgaattg

SEQ ID NO: 16451 - DNA, 120 bp, Homo sapiens
acacgtaagtgcagggtcaaacttcaaatcccagtatgaacctgtcctccagctccagcaccattgcgtgtgggagtgcagaagaaattaggttcaaagtgcactgagtcagaagctggg

SEQ ID NO: 16452 - DNA, 120 bp, Homo sapiens
ccccgaggagtgggctgggagccccctctgctctgaagccatcctgggggtccactgtgggtgttcggcagtagcttctaggggactggccaggcccctccctggggctgcctaaggaga

SEQ ID NO: 16453 - DNA, 120 bp, Homo sapiens
tgacgtgggagcctgtgtgccagggcactggcccgcaagggtaagaacccggcgggctcccgcagcctaacagggagctgcctctgtcacgtgcctgcgaggtgggacacaagttggctt

SEQ ID NO: 16454 - DNA, 120 bp, Homo sapiens
gttcgacatagccaaatccgcgtgccgcatttccacgctatggagtgctagtcttcatgattgtgccccttgacatgacacaataggaatagaagccgggaggccaagcaaaggccctct

SEQ ID NO: 16455 - DNA, 120 bp, Homo sapiens
gggcgcggcggcatgtgaccctcgccgcctgtggggaagacctgccttgaggacagagcgccaggggtgcagaggccgcctgggactgcccggaggccggtggggagcgcgccagcgaaa

SEQ ID NO: 16456 - DNA, 120 bp, Homo sapiens
agacgtgcagctttgatcaggactgggtactgctactgtacgtgtgtggttacttctgccagtaacgctgaaggtgtgaatgtcacgacactggactctgaatgcctctcctcctccttg

SEQ ID NO: 16457 - DNA, 120 bp, Homo sapiens
ccacgctttccagcctgtgggagcggcaggggcaacagagagaggatctggagccaggattaatgactcatttatgaagcatcttattctgcgaccgaggctcagtggtcagtggcgacg

SEQ ID NO: 16458 - DNA, 120 bp, Homo sapiens
gctcgactccccgctggcattcgcttcatcatctcattctccagggatcagtggtgagtcctggtggggcaggcccttggcatggagctgtgtataggtgagggctactgtgcaggtagt

SEQ ID NO: 16459 - DNA, 120 bp, Homo sapiens
aaccgttgaattgctttttggtggtggaagccgtgacccagaacagtgctgaggtgtcctttgtccttggtactggcattgtcagatagtgtttgggctcccgcgtggtctccagtggtt

SEQ ID NO: 16460 - DNA, 120 bp, Homo sapiens
gtccgtattatgaaatgtgcaggtccctaaaagaattcatcacaggcaaaccagttgactcagaaacatttccaggaggtactttgagtaagaagttaacatgtgcataaggatgtatag

SEQ ID NO: 16461 - DNA, 120 bp, Homo sapiens
ttgcgtgtctgtccctgagtgtgtataatgcatttcacgtggcacctgtgactcatcgcaggaggctggccgtgggcaggtgctgttgtctgtgggggagagcctggctggtcgctccta

SEQ ID NO: 16462 - DNA, 120 bp, Homo sapiens
ccacgtacctgctgcagagaatgtgtcgcgtggctgtagtcttaggcaacttaggtggggctgagaacccagggccacttctgtctgcgaagtggctcaaattcagcatggaaagaacgg

SEQ ID NO: 16463 - DNA, 120 bp, Homo sapiens
aggcgaatacagtgaatgtttgtgcctaaatgactgcgtggggctctgcaggtgtaggatgagggaggagtccagtcttttctagtgtcatgaaattcccaccgcagctgcctgctgctc

SEQ ID NO: 16464 - DNA, 120 bp, Homo sapiens
ccccggacgggatttcctctcgctgccagtgggaggggtggggagggctggatgtggcgagggagtctgtagacagaagacattgccagctcccagccccaccgccttccccgcacactc

SEQ ID NO: 16465 - DNA, 120 bp, Homo sapiens
actcgtcgcgctgtgactcccggccccgccgccttccccgcacactcgtcgcgctgtgactcctggcggttttctgtgttcttccagaagattggcacctttcttctcccacccccaccc

SEQ ID NO: 16466 - DNA, 120 bp, Homo sapiens
acccgcgatggcatctgctgtttatttttgttgctgttctgtgtgttgcatggacgctttagcagccgtgacgcccgcgtcttcacagggcccactcagcctcccgcctcacataagtgt

SEQ ID NO: 16467 - DNA, 120 bp, Homo sapiens
agacgtttcccaaaggacttgaccccctccccaagtatttccgcagggatggtgtggctatgcagaggtgagggtgcttccctgaagtgctttggtgagaatttgctcacctggcgaggg

SEQ ID NO: 16468 - DNA, 120 bp, Homo sapiens
gaacgccacgtttgggggataaaactcatagaaatactgaaatatagcaatgttgttgaaaacctgtggttatgtaaatatcctcagaactctttgtgctggagtaatatgaaatctcga

SEQ ID NO: 16469 - DNA, 120 bp, Homo sapiens
ctgcggggtgcgggtgaaggtgacctttccaacatcaaggagaagggccagagaggcgcccggactcacagtggccctttcctggacccttcccaggggcggagggccagagaggcacac

SEQ ID NO: 16470 - DNA, 120 bp, Homo sapiens
ctccgattatggtccatctttatagtaatgctgggacacaggcattgtcatgccaactccataactgatggccagggagtgtaagtgatgtcaccaaggccagaagccacagagaggcac

SEQ ID NO: 16471 - DNA, 120 bp, Homo sapiens
tgccgaagcctatatccctaaccaggatgtgagacccccactcattacataacaaaactaggaaaacttttctgcttatttatgaaaaaaagggaacatttctaatcggatatgttttcc

SEQ ID NO: 16472 - DNA, 120 bp, Homo sapiens
gtgcgcctatgccgtggggatgtacctcaggtaggtctccttcagttttccagacccttcctggttacctggcccctccgtgcagagaagacatccgctatgctgaagtgcacaggcgcg

SEQ ID NO: 16473 - DNA, 120 bp, Homo sapiens
gcgcgggattgaggcccccgcttgccactggcttccctgctgttcccttcccaaagacgaggccaagcttaggagagagcaagtgcgtgtgctgtgcccacaacacaggacctcgaggca

SEQ ID NO: 16474 - DNA, 120 bp, Homo sapiens
acacggcctggttctgagaagcggcgggcagggtggccattgccatgtgacacatggcctggttctgagaagcggcaggcagggtggccgttgccatgtcatgtgacacacggcctggtt

SEQ ID NO: 16475 - DNA, 120 bp, Homo sapiens
aagcggcaggcagggtggccgttgtcatgcgacacacggcctggttctgagaagtggtgggcagggtggctgttgctcagaaagccacactttggcttttgctgttcaccaaagtgagac

SEQ ID NO: 16476 - DNA, 120 bp, Homo sapiens
cctcgtctctgcccttcatgttggttccttcctttcactggatccagaggggctttgagtgtattgggtggcggcagtagtcacccctctgatcttctgtcttgggcatctcagtaggaa

SEQ ID NO: 16477 - DNA, 120 bp, Homo sapiens
agtcgggggactgcggggctgagctcagttctggttgacgttgtgactgcgtggccttctcttggccttgtgcctcagtggactgcagtctgcaattcggtctgactctgctgtgaaacc

SEQ ID NO: 16478 - DNA, 120 bp, Homo sapiens
tggcgctctactggcaaccccgattgctgttttaaaagcagaggatcagcataaaaaaagagaaggaaatcatgaactaggtgaaaaaacacatttttcttcatattctcaaaatgagag

SEQ ID NO: 16479 - DNA, 120 bp, Homo sapiens
ctgcgtctgtgaacagaggccactgcccaccactgcccccaagcaggtggagggaggcacagttctgaatgcctttggcccctcacaaggaaggtggcacacacaccggaccccctctgg

SEQ ID NO: 16480 - DNA, 120 bp, Homo sapiens
gtccgcggagctgccgcgcccaccttgatggctgctgcgttacaccagaggcaggaccaggacctgactcctccaggctccactgcccatcagtgcctgctgcctgctcagtgaatggtc

SEQ ID NO: 16481 - DNA, 120 bp, Homo sapiens
aaacggcgctcaggcctacccacccccaccaccacgccttggtcattgttccttccatgagtgagtgctgcccagcaagacaaagtacaggctccagtgggaaggccaccatgtcagcca

SEQ ID NO: 16482 - DNA, 120 bp, Homo sapiens
tcccgaaggaggtgcccgcatgcttattcagtgtcactgtccactccttggcagtgactcgggtggaggcgaaacatgactaatcgtaaatcacccctgccttctcccaagtgccacacg

SEQ ID NO: 16483 - DNA, 120 bp, Homo sapiens
gcacgaaccctcactgggcatctgagggcacgaaccctcactgggcatcccctgtagaccatctagatccactccacggcctctcgtcgggcaggaatgctggtcggttgcttgttgaaa

SEQ ID NO: 16484 - DNA, 120 bp, Homo sapiens
gggcggagtccagcggtgggtggatatcagggaggagtctgttgaaaaggctggtttctgtttagccctgaggaaagaaacaagggaagttaacgagggaggaggcataacaagttatgt

SEQ ID NO: 16485 - DNA, 120 bp, Homo sapiens
actcggtttccctggagttcctctgggctgagaggaagacatctgttcagtcagttggtggacttagtagttcatctttctcacccgtgactgtacacccggcacatacccccgaccata

SEQ ID NO: 16486 - DNA, 120 bp, Homo sapiens
tcccggcaggtacccctgacctaacatgtgactggtacatgagctggtaccctggctggcacacattctttgtaggtccagtcttactgacatgctgaaacaattagctgtgcttttatt

SEQ ID NO: 16487 - DNA, 120 bp, Homo sapiens
catcgtaaggccatggtcaatttctcttactccccaagggacacagtcaagagagattgttgtcacataggggccttctttcaatgaatatgtttgcatctgaaagaggtaacccacgat

SEQ ID NO: 16488 - DNA, 120 bp, Homo sapiens
gaccgtgtcctgaactgcttcccacatacaaatcaccgcttgtttcccaggacatctcagtgccaacaactccctcgcagcacatgactcccccggcatcttccgaaggcttgtattttc

SEQ ID NO: 16489 - DNA, 120 bp, Homo sapiens
ccacgagccattacctcttgaaaaactttcacaaagaagacgtaagggcttaagtggcgtggaaagtgggtttcacacaatgagtctatttgaaaagatcttcaggggcttccaaatccc

SEQ ID NO: 16490 - DNA, 120 bp, Homo sapiens
tcacggagaattcttgagcgcgtatacagacaaaaatctcaaactggtgtatgtacttactgagatttctgaaataggaaaaatctactcatacccctatgaggaataagccctcctctt

SEQ ID NO: 16491 - DNA, 120 bp, Homo sapiens
tctcgtgttctcttaggacaatgctcagatttgacgtgttgtcactgtggggtggcctgcagtgcagattcctaacatgaatgtgattcattcaacgcagaaactctagagagctacaat

SEQ ID NO: 16492 - DNA, 120 bp, Homo sapiens
gggcgtgcgtgaagggccagctcacctcacagctctgcttcccaggttagctcccatccaccctccccctacctgtttcctcaccgaaggaaggggcagaaagatgccctccatgcccct

SEQ ID NO: 16493 - DNA, 120 bp, Homo sapiens
caccgcgcacacatcacacacatgcacacacaccacacacgcacagtatgaagatgacagagaagtcagcagagcccctgggggtttcaggagttgagtggggacgaggcaggtggccac

SEQ ID NO: 16494 - DNA, 120 bp, Homo sapiens
gctcggagggagggcagaaggcacccgtcttcgcagagtcacagtggggcttgcctcctatacgtgccggaagggtgaagccccttatctcattgcccgatgtgatgaggtttgaagtgg

SEQ ID NO: 16495 - DNA, 120 bp, Homo sapiens
ccccgtcttcccaccctgcggtcatgcagcccgactcttgggggcggggtgccaccgtgatgtgccgtcacttgcagcagtatgtcctcatgccaggctgagaccagcactgtgtgacca

SEQ ID NO: 16496 - DNA, 120 bp, Homo sapiens
cagcgctgtgtcacactccacactgaggccccactgaagcatgccaggccccatcctatttcttccaggtagtcgtctgcccagcacctcccctcccaggccttgccctaaagcccaggc

SEQ ID NO: 16497 - DNA, 120 bp, Homo sapiens
ggacggcccggggccgagtcgggtccagatgccaaaggggcttctcgaggcatctccagctcccacctgcccctcggagtgccaggcttggcttctggaagagaaagctgggggtttagt

SEQ ID NO: 16498 - DNA, 120 bp, Homo sapiens
tagcgaggccaagagggagtctttgtgttcggctcagtgggcaatggtgcctcacctcgcagcatgacacagggctgatgacacggggcacgttggtcacaaagtgccagtctcagcctg

SEQ ID NO: 16499 - DNA, 120 bp, Homo sapiens
ggacgtgccacctgcaggtgatgacacatcacagtggcagccgctcctgatggtgctgctgcattgagtaggagcccagatccagggagacagttgcagcagatgaggcaggaggccagc

SEQ ID NO: 16500 - DNA, 120 bp, Homo sapiens
cagcgaggggttctacctgctttccgggctggcctctgcatggacacaaagcagaaagggcataaaggtgaccctggccaccaaagcagacctggagcaaactggaccagcgcaaggccc

SEQ ID NO: 16501 - DNA, 120 bp, Homo sapiens
ccccggtgccagcactcagagacatttcttttctggcaggaaatttgtgcttcattttctaatgaaattccaaggcaatcaaaaggcaaggaaagaggagggaaaggaagggagggaggg

SEQ ID NO: 16502 - DNA, 120 bp, Homo sapiens
atccgaatggaagcccccaaggcttctgtagctccccccatcaccaacttcactcaccactcttatctgatgcctcctatttgggtacacacggccgggtcggccttgcgagagactcag

SEQ ID NO: 16503 - DNA, 120 bp, Homo sapiens
tctcgacttccgcccgcctgcactgtcaccacgtcctgccattgacctctgttcatccactcatggtcactgctgtgagttgaattgtgtctcccaaaaaagtggatttctgtgctaacc

SEQ ID NO: 16504 - DNA, 120 bp, Homo sapiens
tcccgttagttggaaatagggtatttgcagacataatcacatcaagatgaggtcatactgcattgggatgggcctcaagcccatatgcccgccatccttctaaggagagggaaaggcaga

SEQ ID NO: 16505 - DNA, 120 bp, Homo sapiens
gaacggaagacgtagagacagaatcaggccatgtaaagacagactcagagaccagagtgatgcatgtacaagccaggctctgcgggcagcccctagaagctggaagaggcaagcctcctc

SEQ ID NO: 16506 - DNA, 120 bp, Homo sapiens
ccccgcccatgcctcgagctcaggcttcaggcctccggagccaagagagataaacctctgtggtttcatgtcacccagtttgtggtctttgttatagcagccccaggacactcagggggt

SEQ ID NO: 16507 - DNA, 120 bp, Homo sapiens
gaccgttcaacctgccctctggtcctcctcccccacccagagacccctggctacaccctgcccaagggagctcaccaaagcccacagggtccctgtgatcttgtcacctgggctcccaca

SEQ ID NO: 16508 - DNA, 120 bp, Homo sapiens
ccccgaccttgctctgctcctacagctcccggccttccctgccctggccggcccttgctgaatgtccccgctcctaggaagccggatgtgtcgcgtgcaggtgcctctctgcactgtaat

SEQ ID NO: 16509 - DNA, 120 bp, Homo sapiens
gcacgagaaccagtaacagttgttgaataatgaacaatggatgcatgcagctcacccgtgagagggcgttgctcggctgggccagggatgaagcttctcccgcgtggctccaccgtctat

SEQ ID NO: 16510 - DNA, 120 bp, Homo sapiens
agccgtgttccatgttgtgggccgaccccagtttagcactcgcccattggagggttggagggcatccgactcatctctagtgtggggcagtgcgtcaccttctcacaattgtcaacggga

SEQ ID NO: 16511 - DNA, 120 bp, Homo sapiens
tgacgtttataattaataagcatcatcatcaagttacaagagtaaataaaaatatgaggcagggtgaaatgtaagatgctcgagaggctgagatcagtagctgtgtgaatacagcagggc

SEQ ID NO: 16512 - DNA, 120 bp, Homo sapiens
gggcgggcaccagcagtgagctccacggggcccagcgtccggcctcattaaccagctgcccttggggaggagcagagcccgctcttccctcctggggaagggtagtgtgatggaaagaca

SEQ ID NO: 16513 - DNA, 120 bp, Homo sapiens
tttcgctccagattcgttactccaagttcagagaagctctgtaaaaattgttgctaaggcaattgaataaagaatgtcagccgatgtaagcgataacagcaagacaatgaacataattgc

SEQ ID NO: 16514 - DNA, 120 bp, Homo sapiens
ctccggtgaaaaagactgcagccagccttgcagagagggcgctgtcttagggaggcacctccaactgtccccgcgacccagcccctaagtgcttcacatcaacactgttcttttgtgacg

SEQ ID NO: 16515 - DNA, 120 bp, Homo sapiens
ctccgaaggtgtctgtgcccatcaggggaaggtgcggggactggaccatctcaactgcatgagcagagagagggccatgtgtccaccccagagagcttgggtccactgctcaggcccgaa

SEQ ID NO: 16516 - DNA, 120 bp, Homo sapiens
aaccggttttggctctgagaattttaagggtcatatttactctctcttttctttttcattcctagagcattcaaaatcaatgaactgaaagctgaagttgcaaatcacttggctgtccta

SEQ ID NO: 16517 - DNA, 120 bp, Homo sapiens
aaacgcgtggaatgtgagtgacgtttctgtttcctttttgcttctctgtcctttaacctctattcaaattaaccacttggaacggggaggagttcagtgccgaaggtaaatacaaataaa

SEQ ID NO: 16518 - DNA, 120 bp, Homo sapiens
acacgaagccttccgcacttagcccctctgagaacctctgctgagtgtcttgtctgtgtctttttgtgtgtaaatgaagacattctctgcacactgatcggcaccctgtgggtcataatt

SEQ ID NO: 16519 - DNA, 120 bp, Homo sapiens
ccacgtgtgaaccagactgagctcctttctgccactgatgttgaattgtccatttgctcacgtcagtgtccacgtggcaaatccacagggcatgggtgggatcctgcagtctagacaaag

SEQ ID NO: 16520 - DNA, 120 bp, Homo sapiens
caccgctggaggccacgttgggcttcccaatccacatgcaaacccaaaatgtgttcttgggtaccttttctgagaagacagcctgtggcatgcatcagcttccttgaggggcccatgatg

SEQ ID NO: 16521 - DNA, 120 bp, Homo sapiens
aaacggagacccggctccaaaggagaatgtggactcttagtggttggacaaagacgtcccgacctcagacctcaggtaccctgtgtttccccagcggcagctcatctggactcggccatc

SEQ ID NO: 16522 - DNA, 120 bp, Homo sapiens
tcacgacagcgaccacactggctccagccacatgcacttccggaccccatgtcctctagctgttgggtagaagaggggtggagaaggtttctgtagcacagaaacacatcagcaggacca

SEQ ID NO: 16523 - DNA, 120 bp, Homo sapiens
cttcgtccttctggcagaaagaagcagtgtcccgggaacatgcccctacttgacccctgaccctggaaacgcctcgaaacccacccgggaggctgattccagctagtctgccctgggcca

SEQ ID NO: 16524 - DNA, 120 bp, Homo sapiens
ttccggagctgcagtacttcctttggggtgggaaggagttgttacaaactagccaaaggctctgagttgcttggtttttcctttagaaaacatttgctttttatttttagcagttattca

SEQ ID NO: 16525 - DNA, 120 bp, Homo sapiens
tatcgtgggagtatccttttgcataaaaactaaggtgtgattacaaagtaacaaagctaatcttttttatttcaattggtttatgaaccaactctaattgaaaagccgtgcaaagctgct

SEQ ID NO: 16526 - DNA, 120 bp, Homo sapiens
aaacgtgcagtcagccaagggtaaatatcttgaagtttaacgctcgctcggaggcataagctccagtttgtttttggttgaaaaatagtatcctaactgttgaggtacacctttgcagtg

SEQ ID NO: 16527 - DNA, 120 bp, Homo sapiens
tgtcgccagaaagaacagaaagttcacaaagggagggccagcctgtgcacagcctagcaccgtcctgggaggccatcatcacctgtgctcctctgagaggacaggaagatgctgttttcc

SEQ ID NO: 16528 - DNA, 120 bp, Homo sapiens
gaccgtttattagcaattgaaggaacaacgcatgtatcaaagactggatttgagaaattccaacaaatctgccccctcgcagttgggagctggcatcgtgcaatcttcggaatgcagcct

SEQ ID NO: 16529 - DNA, 120 bp, Homo sapiens
caacgcagccccctgtgatttcagctttgaccttgtgggtaataaaagaaggaaagaggaatgtctgctactggaatcctggatggggtccccgcggccgaatcccccctcccgtcccct

SEQ ID NO: 16530 - DNA, 120 bp, Homo sapiens
gaccgcctcccgcagcttccttttattcgtaatgtctaaagccaacccaagcgtctttgccggctgacgtcttagccaaatcatgtgggaaacccgtgaagcagaactgaccgctgtgag

SEQ ID NO: 16531 - DNA, 120 bp, Homo sapiens
aaacgtccatcagtggacaccgtcggttcccaggtggcctctggaacaggaaagcagtcaccccctcgtccgatcccacaggaaacctcattccactctagtggcagtggctggggctag

SEQ ID NO: 16532 - DNA, 120 bp, Homo sapiens
tctcgttaaatgcttctttgataatgcaatggcttccttcctcttctgctttgtggagaggttttcttgggttgggaggaggctttgtttctaattctgcttccccagtacagtcttggc

SEQ ID NO: 16533 - DNA, 120 bp, Homo sapiens
cagcgtttcaagtccttttatgtttctgcgtcagtttccttaatatgtggcattgtggaaacaagcaaagaccacctgcctaagaccaagcacgcgccgtgtattccgagctggctctag

SEQ ID NO: 16534 - DNA, 120 bp, Homo sapiens
ggacgacagaccccggggtgcccggatgaggcctttttcaaaaggaagctgggcaggctcgtgggagcggacatcctaggggtgcatatttgactttctctagttagtccaaaattggaa

SEQ ID NO: 16535 - DNA, 120 bp, Homo sapiens
tcccggggctggttacaggggatcacaggttggtttcctgagctggttgcacagattataattcggggttctgtttttatatgaggtctgaccattgttcatttgtatattcagtttctc

SEQ ID NO: 16536 - DNA, 120 bp, Homo sapiens
gaacgctctgggctatcttttcacctagggaatactgtgggcgggacaaatctggggttatagacaagctggggacggctgtgcctcgctgggggactgacacaggcagccagtgtgtga

SEQ ID NO: 16537 - DNA, 120 bp, Homo sapiens
cttcggaagctgcattctggtcacagctgagcgtctttcgtggtgcttgcctcatgggccagctgcttcatcagctcaccctgtgtttcccattttgaataatgccgtaattcataggtt

SEQ ID NO: 16538 - DNA, 120 bp, Homo sapiens
gttcgaccttatcttagaagcacaattattttatcgtcagaggtcaggctgtgtagaagaaatagcagggctttggagctggacagattgaagtcacccaacctctggtacatctgtgtc

SEQ ID NO: 16539 - DNA, 120 bp, Homo sapiens
ctgcgtcttctagagtagtctggtcacagctagtgtgaaccccccggtcacactgttagtggcaaaaaaccattttattatgtggacaaattctgtggaccaggaatatggagaggaagt

SEQ ID NO: 16540 - DNA, 120 bp, Homo sapiens
ggccgtctctcctccaggatgtctgagtcctcagctgggacgactcagcggctgggggtgacgtaatgactgaggaatggtatcttctggaggcgctttctgaaatccgtcagctggaac

SEQ ID NO: 16541 - DNA, 120 bp, Homo sapiens
acacgagctggggatactgaccagagcacacgtgcagactccacaggacctgggcttcttcacagattagaggaggtcttcacagcactgggggttccctcacagcactggggggttccc

SEQ ID NO: 16542 - DNA, 120 bp, Homo sapiens
tcacggtatcgggggctccctaatagcattgggggcttctttgatatcattgcgagcttcctcacagcactggggggcttcctcagcactgggggtctcctttatgtcattagggggctt

SEQ ID NO: 16543 - DNA, 120 bp, Homo sapiens
gggcgttcctcacagcatggggcttcctggtagtcggagtgtcactatgaacaagatggaagcctccttgccttttctaacccagctctggagtcgcacaccatcatttccactgcattc

SEQ ID NO: 16544 - DNA, 120 bp, Homo sapiens
cctcgtgtctcgatgggagaaatgccatagagttgggggatgcactggccttggcatgtagtagacacagctctgtctgccctcactgcccctttcctcccctcacgaagctccattctt

SEQ ID NO: 16545 - DNA, 120 bp, Homo sapiens
gctcggaccaagacagtagttctgagcttagtgaaattcacagcactagggtgaagtgactgggcacggcagtctcttgctgacagcctgtccttttatttgacatcatccttcgcctgg

SEQ ID NO: 16546 - DNA, 120 bp, Homo sapiens
ttgcgtgtaggtttttgtaagcattggcactttcaatgatcccttctggaaaccagccccccgcctgagctttcaggaatgtatctgtttccaccacctttcagcgattcttcctgctcc

SEQ ID NO: 16547 - DNA, 120 bp, Homo sapiens
gatcggagggggtcgtgtgaatcagcccagatgctttcagcagtgaacaagaggccccagcacccggcttccgccccggggcgttggttctctggcgtctctgtggccatgggatgccac

SEQ ID NO: 16548 - DNA, 120 bp, Homo sapiens
ccccgggacccaccctgtgtggactgctgaggtcacatgcccacccagactagtgactggccagggaatggcatgtacccattggcttctgtcaactgaggtcaatccctagtccctgct

SEQ ID NO: 16549 - DNA, 120 bp, Homo sapiens
catcgtggctgtgggaagaggcaaggagacctgaactgtcgggaatgaggaaggggatggatgctgagtagatcgacatccatgaccctgggtttcctccttcccccacctcgagagctt

SEQ ID NO: 16550 - DNA, 120 bp, Homo sapiens
gagcgggactggctcccctgaagctgagcagtcagggcctgaatgatttgaatgggatccaagtaaaccccatggccccacatggcagagtctttgcatggaatccagcctggactcacg

SEQ ID NO: 16551 - DNA, 120 bp, Homo sapiens
acacggaatgcacatgtagaaacctcacatgtccctgcctgcgttttagaagctggtgtgtgctctccgagtccccagaggtctagatcaactgtggtccctacagggcctctgctgcct

SEQ ID NO: 16552 - DNA, 120 bp, Homo sapiens
cagcggccacctggtctgtccacccccaagcaggtgggcagaggggcacggggtaggaggaaggtgagcggggtcgagctggacagcctcaggctccagtcccctccccagctgctccag

SEQ ID NO: 16553 - DNA, 120 bp, Homo sapiens
gctcgcagcacccagtcccggccatgggccccgtcaatgcagagccaccgccccaggggccctggtggacttgattagaaacaataagtgccatgagagcttcagccttgttctagaaac

SEQ ID NO: 16554 - DNA, 120 bp, Homo sapiens
gctcgaagccccgccccatggcctcctgccctcacctgagcaggtgaccacactgggcaggcagacaacacctgaggctcgtggccgccgcagtgacactcctcagaactgctgtcttac

SEQ ID NO: 16555 - DNA, 120 bp, Homo sapiens
ggtcggtggctgactgagggtgcgcccccagccatccccagtgccccctagccatctctgccttccccatacccccgtgcccgccacccactcaccgcacagcagcccctcttgcgcgat

SEQ ID NO: 16556 - DNA, 120 bp, Homo sapiens
atgcgggcaaaggtgaacgcctcctcatcgttgctcttgaaccacttgtccaccacctgagcaggaccccaccacagcccgtcagcgtgggagccgctcccacgtgaccaagagggtgaa

SEQ ID NO: 16557 - DNA, 120 bp, Homo sapiens
ccccgtgtctaggcggtaggaccccagaggtctcaccccagcctctccccctgggatcggcacgtctgcagactttccagttccaacacgttttgcagacagcaaaactgcccgccagcc

SEQ ID NO: 16558 - DNA, 120 bp, Homo sapiens
atccgtgtgacccacaccggcccttcggtctctgctctccctcaggccaaagtcagctttttggctcttaacagacttttccggggccttaattttcacacgttttccctgctccctgcc

SEQ ID NO: 16559 - DNA, 120 bp, Homo sapiens
ccacgtgtgcggacatcgtcccccagtctactttgtctcgaccttcgagaccagcttctcaccatgcgtgcggggcttgcccttctgtttcagtggagaagctggttggggcccagggtc

SEQ ID NO: 16560 - DNA, 120 bp, Homo sapiens
caccggcactgtggccgggctctggactcgacctaccgtcctgtccagcaccgtggggatgaagtcgtagccgatcccttccacctcgtaggttgtctgctccgtctggttcagctcctc

SEQ ID NO: 16561 - DNA, 120 bp, Homo sapiens
ctccggctctgcgaggatggacccttcgggatccaccccaatgatctgcagagggcgcggcttcagggctcaaggccagcaaaagccccgcctggacatgcctcgatattctattatggg

SEQ ID NO: 16562 - DNA, 120 bp, Homo sapiens
taccgccgttaacaactgcctgttaatgatctgcctgtgggtggtggcctgttcccagcctcagaggcaggatgagaaacccaagaacccaggctccaagtattaaagcggtaatgacct

SEQ ID NO: 16563 - DNA, 120 bp, Homo sapiens
agtcgtggcagatgttgttagtgggaagctgggagaagggtacaaaggatctattatttttgccacttattgtgagtagtaaattatttccaaataaaaaagttaaaataagcaaatact

SEQ ID NO: 16564 - DNA, 120 bp, Homo sapiens
aagcgcaggcgggatgtctagccctgcacagaaaatgtcaggcacgtggcagactcagagccccggcagaggcgctgtcggccaggctcgtgatgccctgccctgcagcatctggctgtg

SEQ ID NO: 16565 - DNA, 120 bp, Homo sapiens
acacgcatggcttacagcggtctccagacccgcaacccctccctgggccttgcagctccgatgacaccccgtggctaaccctgggccccctcttcagcacagtcacctgctgaacagcca

SEQ ID NO: 16566 - DNA, 120 bp, Homo sapiens
aggcgacccttagacctggggtgaacccagctcccagaggtcctgtgccatggagggagtgccacatttgcagggagagctaccctgaaggccaaaacaggcgccaacaagagcagctgg

SEQ ID NO: 16567 - DNA, 120 bp, Homo sapiens
aatcgcacccttcccggggagcagaaggcagtcctgccaggtccccaaactgtacaggggccagggaggttccctcagaagcagttctcggcagaagggaaccaggcttggcaggtgtag

SEQ ID NO: 16568 - DNA, 120 bp, Homo sapiens
cagcgccggggattagttcattaattcagttcgggcatctggccagccaggcgggaagagtcccgcctccctgcagcaggtgtgctgactcagcactgggcctcggtggctgtgaagtta

SEQ ID NO: 16569 - DNA, 120 bp, Homo sapiens
gagcgcttagcaagaaaaaggatgtgacttgcagggatagccctggagccccttatctcaaggactcccacttccacagcccaagaggctcctgggaggacacgccactgtcctagaatg

SEQ ID NO: 16570 - DNA, 120 bp, Homo sapiens
ccccgcaacgccactattctcaggggccctccgactggagacaagcggcgtcggctctgcgtctcaggatgggggtgtcttcggaggatgaatgaggccagtatgtgaggtgcaggtgca

SEQ ID NO: 16571 - DNA, 120 bp, Homo sapiens
caacgccatttacaacctggagggcatcgtctccttctcatgccctagagttaggagctcacggagccctcaggaatcgggcctgtcttccctgcccactccaccctccagcagccactc

SEQ ID NO: 16572 - DNA, 120 bp, Homo sapiens
tcccgacctcaccgggcctctcacccactgctctcttgggtttgtcttggcagcaagagcccatcctcctggctgcccacacatctgcttggcctcctgagctcccagcactgagtatgt

SEQ ID NO: 16573 - DNA, 120 bp, Homo sapiens
gcgcggagagggaaaccgggacccagttgagatcctctgtccagagaggggagcgagtctcggtggggccggatctcacctggacggatacatggaaaagaggggcgagcggctgccccg

SEQ ID NO: 16574 - DNA, 120 bp, Homo sapiens
ctgcggcgaggcggagacggcgaccccggggtggcggcctcgcggggacccacggcgaggggagcaggcgggcggtgattggcggagaggcgggggcggaggccggcgccggccaatgtc

SEQ ID NO: 16575 - DNA, 120 bp, Homo sapiens
taacgtccatatcactgtaagcagcttataaagaaacccaccctgaattatgctagagatttacaagctaaagcaatcactcgcatgatttagaaaaataaatgtttagtctcaacaata

SEQ ID NO: 16576 - DNA, 120 bp, Homo sapiens
ccacgtgaagcagttttgtaagtggtggttttataaaaccagccagctccatttctagctctgtttaaaggggagtggttgtatgaagagttcctcagtcaaaggtgtgcagctgggaag

SEQ ID NO: 16577 - DNA, 120 bp, Homo sapiens
ccccgtttcttccataagccgccaagtacagccctgagtcaactgaactcaggcctgggaggcttcccaaagctgacttgactcagctttgaactgaaatgaccgtaccatgacaaccct

SEQ ID NO: 16578 - DNA, 120 bp, Homo sapiens
taacgtaaagaggcaatgcagtctaatgggaaagccaagggtggctaggattgcctaaaaccaaccaaaacaaacccacgcatcaaactaggatgcttaagctgacacatactactgacc

SEQ ID NO: 16579 - DNA, 120 bp, Homo sapiens
catcgagctccaatgggctctccccagcactgacctggaatgcctaaattaacttcacatttcacattctcaggtaatctatgatccagaaaaacataaagaaagtgcctccagccagat

SEQ ID NO: 16580 - DNA, 120 bp, Homo sapiens
attcggttcataaatcaaaacattaaagaaaaaacaattgcaatacacagaaaatgtaaagctagttctccaagattttgaaatttgtaaaaagaaactcatgttcagagctatcaaaag

SEQ ID NO: 16581 - DNA, 120 bp, Homo sapiens
ggtcgtccatgggcttcaaccggaaaaaacccatgtttccttctcccagctcacttacacaaagtggtagattttcttaaatgcttacaggaaaacgtatacagacagatgtgagctcaa

SEQ ID NO: 16582 - DNA, 120 bp, Homo sapiens
ccacgcataatagctactcaacagctcagaggctgcacatttagacttcaagggtgggttggaaggagttccccagccctccatctggaaagacttgggcatcgattttcaaatttcaaa

SEQ ID NO: 16583 - DNA, 120 bp, Homo sapiens
caacgtgggcacaagttttctgctccgattagaggtgccttctccctttaatccgtaagtgatcctttatagtgtaccaacctttgccttttcttcaactaaccaaaaataaaactatca

SEQ ID NO: 16584 - DNA, 120 bp, Homo sapiens
gagcggatctaagcccaagataacaggcactcctcaattaaccaaacagacccgctaagagcaatttacggcccattttctacctttcagcttaatttttcatgtttccatgacgtgatg

SEQ ID NO: 16585 - DNA, 120 bp, Homo sapiens
atgcgactcgctgtttcctcagctagggatgtgaaagtgaggacgcagccagagaagctcgagcagcatgatgggcctggtgacaatcacgctaacttggaaggtggctccatcacctct

SEQ ID NO: 16586 - DNA, 120 bp, Homo sapiens
ctccgtgtccactggtgcctggaggaggctaacccaaggctggcacggccaccccctctggacccatgtctatcagagggggtagggaagatggcagggcagcaaatatcaggcacagcc

SEQ ID NO: 16587 - DNA, 120 bp, Homo sapiens
agtcgatcacctgcctcactattatttaaataaaagaacacacttatgaacacaaatggaaaatacaactacgagagaaaaaatgacttgcttaatatgtagaaattaactgtctttgaa

SEQ ID NO: 16588 - DNA, 120 bp, Homo sapiens
ttccgtggtattaagcacctcctcttccttgctgtattttaggacaacgtaacttcaacttccctttctgcaaacacactacttgttcagcaaagacggttctaactctaacccgcctcc

SEQ ID NO: 16589 - DNA, 120 bp, Homo sapiens
ccacgaccaagttctctcttgaaaacaccggtgtggtgagggttaagatcccaactctgctaccagctgcttgggcttgggcaagtcaccctagctctcagatgtcatctgtaaatgatg

SEQ ID NO: 16590 - DNA, 120 bp, Homo sapiens
gaacgtatgtgtgcttcacatatggtgctcatgaagtgctatcattatctaaggaaaacagaaaacgaagttcagagtctctctaaacgcatgacaccagaccaacagggagtttcaaaa

SEQ ID NO: 16591 - DNA, 120 bp, Homo sapiens
gaccgaacccaccttaggaaccaccttacgtcaccttctgtctctactgcaaaaccctcccttaatactgttcaaatacgctgacaatccagatccatatccaatggaaccagcaatcat

SEQ ID NO: 16592 - DNA, 120 bp, Homo sapiens
agccgatctctgatgaattaggacatcttaccagacagactttgttcaaaattcaatttttttttaaccaagtgccattatgttttaaacagtcaatccagagttaagattgaagggcct

SEQ ID NO: 16593 - DNA, 120 bp, Homo sapiens
aatcgatgactttgcagctcttcatctgaagaggtggcgtctgtttctcctgtttgagtgtggcacatccaggagagtggctttgagcagtggtgtggcagacgtgactgtaggccagcc

SEQ ID NO: 16594 - DNA, 120 bp, Homo sapiens
gcccgctggagcacagagttcagtgcattgggacagctacagcccattgcatcgggacagcccacagcaacaagacccacctgtcgccactgcaggtgcgtgagggtgcccggctgagag

SEQ ID NO: 16595 - DNA, 120 bp, Homo sapiens
aaccgcctagcaggtggcttttcaagcggaatcacagactagctccatcgctgtggtgaacgttctccccagtgccaggattccacttggcccctgactgcttgagcagccgatgtgaca

SEQ ID NO: 16596 - DNA, 120 bp, Homo sapiens
tgccgtgcatgtcggctgggctggagccagtgcatcaggaagtagacgcagaagtggatcaggagcaaaacattcctgagagctggcagaagctggcgtctggagccgctgggatgcggg

SEQ ID NO: 16597 - DNA, 120 bp, Homo sapiens
tggcggaggaacagcctcctggcagaaccaaaggttgctttgtgccttcgatgctgctgctggccagagtggttttctgtctcagaccctgtaccacgtgtctgttctttctcatttttt

SEQ ID NO: 16598 - DNA, 120 bp, Homo sapiens
gcacgtgggggccagcggcagtgactgtagtccccttggcaggcgaaggcctgtgagtagccagtgctatgtctggcattctaggcagctcctggctcccgggcggatcctcctgttgcc

SEQ ID NO: 16599 - DNA, 120 bp, Homo sapiens
ggtcggcccttccagctctgtaaaactcagaaggcctttagggcaggcactgtgccactgaccccctctctgtgtcccagggcccggtacaatgagatgatcatggaattaaacagaaca

SEQ ID NO: 16600 - DNA, 120 bp, Homo sapiens
ggccgatatatccctgggaggcaggtgcagacccctcttgactatgtactgtgtgcagttttggggacagagctctttatgtggccaaggtctggctgggcaaggtgtctcatacctgta

SEQ ID NO: 16601 - DNA, 120 bp, Homo sapiens
tgtcgcaaaaaaaaaaaaaaaaaaaaaaaaaaaaggtcctttcccaggacgtcaggacgaatgtatggagcagcagcaggggtctcaacgagtgccgcgccgtttccagccgtgcgcacg

SEQ ID NO: 16602 - DNA, 120 bp, Homo sapiens
tgccgcaaggaacagaacgacttggtcatcttgcagtggaagtcagaagcctgaagtgggtcccgctgggcgataatcaaagtgccagctggcctgcgttgcttctgaagcctctaggag

SEQ ID NO: 16603 - DNA, 120 bp, Homo sapiens
gcccgtgcccctctgtctgggggcctgcctgtaggatggtggcctcctgaggctgggctgcatggcagcgtgtggggccaggtgtctgagctccatcctcctggccgccaccaccacgct

SEQ ID NO: 16604 - DNA, 120 bp, Homo sapiens
gggcggccagaactcagcaccatggtccgggcgttcagcagcaacttggattcctcattgctctgcggctgggcatcccacagccgggacgggggcttgggcctggcgaggcccctcctg

SEQ ID NO: 16605 - DNA, 120 bp, Homo sapiens
ctgcgggctcaggaccactgcacgattgggtcttaccctagcgcttctccacagctccctctccagacacagctccctggggaggaagggctgccagcagggttctggtgacacagccac

SEQ ID NO: 16606 - DNA, 120 bp, Homo sapiens
aatcgaatcagcttccctccctcccagtagcaaacctcagaatgattcagccccaggaacctccggacgctgctgttgcctgggcccatccatccccgccaacaaccctgccaagcctgc

SEQ ID NO: 16607 - DNA, 120 bp, Homo sapiens
agccgtccccgcctggccttccggaagcttgtgggcctcttggatggagcatcctgcctctcagtgttctttccgataaagccccctcgcctatatgctgatttgtttcatttgacaccc

SEQ ID NO: 16608 - DNA, 120 bp, Homo sapiens
ccccgtgcatttagaagcaaggaggaggggacgggaactgctgtttcctagaatggttctgtgatgctggtctgcctgctgcagtggggaaagaggacgttcttgcggaccttgacctcc

SEQ ID NO: 16609 - DNA, 120 bp, Homo sapiens
tgccggcagccggaccccggaggtgagagtgactctgctgcaccctggacgcacctcccccctcctcatttctcaggcctcctccaccctttgtgctgtggggagggaaataactagaga

SEQ ID NO: 16610 - DNA, 120 bp, Homo sapiens
catcgtcacattgcatgtgacgggaaggtgacattctggtctcagagcctgaggctgatggcctgtggggaaatttcaggggagcacagagaggaagaaaggagaacggaaacccgtcca

SEQ ID NO: 16611 - DNA, 120 bp, Homo sapiens
agccggccctttgcaaacagaggcagggtcaggcgaaaccgagggccaggtcgcagatgaaggctggagtctgaggtctggggcctgggatcagcctgttttagctgctgctcgggtgct

SEQ ID NO: 16612 - DNA, 120 bp, Homo sapiens
ctgcggagggggctcatcacactctccacccatgggtgcattcgcatgtggggcactgctcgtggctgagaccagggtttggctccagtgactatttgtaggtggcctttcctctgtgtc

SEQ ID NO: 16613 - DNA, 120 bp, Homo sapiens
gctcgtggctgctgtgccttagtggtgttccattccttcctcacggcagcagccctctggtctcagcggagagcaggggacatgtccccccaggacgggctcctgcttgctcccgagggg

SEQ ID NO: 16614 - DNA, 120 bp, Homo sapiens
gggcgccttggcagggcggacattggaagctgaatgcggaggaagcatccggaagcggcgctcttggcctcagccctcctgtcctggggtgagtcaggatctctgctggggagggctctg

SEQ ID NO: 16615 - DNA, 120 bp, Homo sapiens
aagcgggtggaacagctgcggacgtggaggcagtggcgacaacggacttgactttaactggaagctcaggaatactgtggtcgtgctgtcaaatctctgttatctccgaaggggcagcgg

SEQ ID NO: 16616 - DNA, 120 bp, Homo sapiens
agacgggaggtgtgcgggggaggccgggggaggcgggtgtctggactggggtctgagcagcgcttcagggaggagggggcctagcagggcaggaaatggccagatgttgttctgcagccc

SEQ ID NO: 16617 - DNA, 120 bp, Homo sapiens
ccccgtggataggggtcctggggacaggagaagcccttgacagtgtcaaatagaaaacaaatctggacgtaagtcacgggggaatgtattagaaaggatattgcgagaaagcgtggggcc

SEQ ID NO: 16618 - DNA, 120 bp, Homo sapiens
gagcggggagtgcctgagggttggggaagagtgaacagagggagagagactgagcggtgggaggtggggaaggaaggggcgggaaggggccatgaggagagaagatctgatctgaggccc

SEQ ID NO: 16619 - DNA, 120 bp, Homo sapiens
ggacgaagccccttcctagctcctggctatctctttaggtgtcttttgagtttcacttgtcactgtgaaatgtctcgttcgtttggtgtttactagttcatttccttttaaacaaaggaa

SEQ ID NO: 16620 - DNA, 120 bp, Homo sapiens
cctcgcaggatgctctacaagtcaccagcaggcatgtggagtcactgttggagtcaggcatccactccagtgaactggaggagaagggctagggtcgaggagtataaaacatggtagcca

SEQ ID NO: 16621 - DNA, 120 bp, Homo sapiens
cagcgtttgtgggcatctttccctagggagggctgtgggcacaggcaaatgtctaacacaattatctttttcttcttctttctttttttttttgagacagagtcttgcttagtcgccaag

SEQ ID NO: 16622 - DNA, 120 bp, Homo sapiens
agacgtgagccatggtgcacggcctgcagctgtctttaggtctaatcaaatgttcctgaaatttgactttacaaagatctgctaattcagaagaaagcgctttactcccagaactgtgaa

SEQ ID NO: 16623 - DNA, 120 bp, Homo sapiens
aaccgcatccatgggaaatcccaacttcatcccactttagggagagccacacatttgtacattctgcattttactttttgtatttttgaaagaaggagcaaatacggtcacataaagtaa

SEQ ID NO: 16624 - DNA, 120 bp, Homo sapiens
caacgattgttagaagggctttgcatgaatcccttattgttctgctctgcaacctgacttggcctctattcctggatggccacacccagatttgttccctcttcgtcaagccaagcccag

SEQ ID NO: 16625 - DNA, 120 bp, Homo sapiens
atccggcactggcaggcgcttagcacgtatctgtcacaggtggtttaattatctgtttggaccttctcaagttacaattctaaggagtcccaaggaagtaaagtgattttaaaaacacag

SEQ ID NO: 16626 - DNA, 120 bp, Homo sapiens
atgcgtaggtggaattccaggaagtgaataaagaacagtgaggtgttaagctgaacaattcctagaactcacaccaggctgcaagaaatttgaactccttctattcagttggagacctca

SEQ ID NO: 16627 - DNA, 120 bp, Homo sapiens
ccccgaggggccaccatccagcccactgtcacagccagtctgctctgtggggacctgaagagtctgcccccgtccctagcaggtccagtcagcagcaggacgaggcttcacccagtggga

SEQ ID NO: 16628 - DNA, 120 bp, Homo sapiens
agccgacgtggggcatccacctgtctgcccgtattcccaggagcacccccaaggcctccccacctgtggctgcagactttgcaacgggagctccgcctcttctctccgcaagggagggag

SEQ ID NO: 16629 - DNA, 120 bp, Homo sapiens
aagcgttccctgtccatgaatgaggagagagtgttatgtaacatatgcaaaaataggcttacgctcaagtgtgttccaagggtaggaggagagctctttatttaagctcctcatgaagtg

SEQ ID NO: 16630 - DNA, 120 bp, Homo sapiens
gggcgacactgagcagaatgtgttctgctcgcggaggacagaggttaattgagtgaattggtgaggaggctgctgggcggtgctgggcggtgctgggcgatgaacattggttctcacagt

SEQ ID NO: 16631 - DNA, 120 bp, Homo sapiens
gtgcgctcgctcccctccagcccctgctacattaagacttgttctttgcttaagtgcggtgtttgatgctgtctgtctatccatctggatatctgcccacgtacccatccatccgcacac

SEQ ID NO: 16632 - DNA, 120 bp, Homo sapiens
atacggagagggggtggggtgggaagtgacccacttcaggccaggcacaaagacggggccagcaggacgggtgtgccaggctccggcctcccctttggtgctctcaggtgactgaagctc

SEQ ID NO: 16633 - DNA, 120 bp, Homo sapiens
gcccgtctcatggccccgcccattttagctcatcaaacgctggccatgagtcaaggcaggctccctaacctctcccacggctaccactgagtccccacagaccccaggaggaaggaactg

SEQ ID NO: 16634 - DNA, 120 bp, Homo sapiens
ctgcgatgatccccatgttacagaaggggaagccgaggcactgagtccccacagaccctaggaggaaggaactgtgatgatccccatgttacagaaggggaagccgaggcacagcagatt

SEQ ID NO: 16635 - DNA, 120 bp, Homo sapiens
ccacgtcacaccaagttgggatttgagccttagcagccggccccagagcctggccctgctcgtgtcggggaatggcgagctcccccacccaggaaagcagcgtgtttgtgggaggcaatt

SEQ ID NO: 16636 - DNA, 120 bp, Homo sapiens
tggcgtgggctcaggaggcgggaggcaactttggtgtgggctcaggaggtccgggctccaggcctggctgagacaccatttcagccacgtgactgaaaaggaacagtccccctaccgtcc

SEQ ID NO: 16637 - DNA, 120 bp, Homo sapiens
acccgcatggcaggcacacggggagagaggggaactggccatctgtgggccctcgcagctggtgtggcagaggcaggcagcgaagacgctctgtgtccgtgcagtgaacccgctgggtcc

SEQ ID NO: 16638 - DNA, 120 bp, Homo sapiens
gtccgttctggcggccatcacacgtgctcataggctgggggctcataagcaacagaaacctgtttctcactgttctggttcactgttgtggagctggacacccgcggtcaaggcgccccc

SEQ ID NO: 16639 - DNA, 120 bp, Homo sapiens
catcgtagaccaaggcacaggatttgtttggagcttggggtggggagggaggtgaaatgatgggagggtttccacatggggtggagagggcagggtgctccactctgcagcttacagata

SEQ ID NO: 16640 - DNA, 120 bp, Homo sapiens
caccgagaggcaggtttgcactcggcacctgtctctaagactctcccaacacacttacctttgtctttgcacactggccctgggcagtgtggcaaggtggttctgcatgaacacaggctt

SEQ ID NO: 16641 - DNA, 120 bp, Homo sapiens
tatcgtggtcatcaaagatggccctaccaattctccctccccagcacaactgcatactgcccctcacaccgagagacagagtgtaaatccctgatcctggattccccattaatggctttg

SEQ ID NO: 16642 - DNA, 120 bp, Homo sapiens
agtcgtttgttattgagcaatgaataactgtatcagaaattgatgtggcagtgttcttttaagaataacttaatttaggatttcagattttgctcatttataaggagcattcacccagtt

SEQ ID NO: 16643 - DNA, 120 bp, Homo sapiens
agacgtgggtcaccttcctcttggtgaagccagtgacacttctcagattgagtctgggccattttcaaagcaatagcatctggcaaaggcccagtggccagggcgtctcctccctggaga

SEQ ID NO: 16644 - DNA, 120 bp, Homo sapiens
acccgcctgatttcagtagctccttcctgacgctgttttggggccggtgtgagaggcccccatggctgccttgggagggtccccacaagctcaggcgggttgaggggggcggcttcctgg

SEQ ID NO: 16645 - DNA, 120 bp, Homo sapiens
tggcgtgcacacaaaacgaccttcatctcctgcttctgcttggcaagctacccgggaggttttattttccactgaagttgcttcccgattatgggcatccctgtccattcaagacccttt

SEQ ID NO: 16646 - DNA, 120 bp, Homo sapiens
acccgcatcccagcagcaagcccaggccagctgttcttttgatctcgaaaggcaaaagaggaagcggagaaaggctgtttgcaggccaactgtgcgcacaggtgtgagggagctgtccag

SEQ ID NO: 16647 - DNA, 120 bp, Homo sapiens
ctccgtcatttccccatgagattggtctttctggcttaatcctcctcctgggccctcccctgtgcccccctctcagagctggatggtggccgccctgacagtcctcatcacacccggggc

SEQ ID NO: 16648 - DNA, 120 bp, Homo sapiens
caccgggcaagtcccaggggggttagctgggcatgcgctggctaagctgaagatgggctgtaccgagccaaaccatgggatggggaagcagcgccagcagtggctgcctgacctccaggt

SEQ ID NO: 16649 - DNA, 120 bp, Homo sapiens
caccgtgcacccgatgctgggtgcctcccctgagcgctctcagcttaggctttctgcacctggcttccccaccagaaggactttccacccacaccctctgcaaggcttcagaactctttc

SEQ ID NO: 16650 - DNA, 120 bp, Homo sapiens
gagcgcgtttccccgcagccagacacgctcagtgacattctagagtcaagttcagcgcttggcaaaggcccattccataaaggacagatgcccggcctcgggaggttacaggaatgggga

SEQ ID NO: 16651 - DNA, 120 bp, Homo sapiens
cagcgtggcttgccatgctccaagctgggctcagaggctctggcttcccgaccctctgagagcatctctctgtacacacagagggggtgggggccagtcacatctgctccgggcgatgtg

SEQ ID NO: 16652 - DNA, 120 bp, Homo sapiens
ggacgatgacgacatgatcctgagcatgacagggtgggaagcttttcctccttctccagggcctgcgaaccctggaaatgcatccacgatgcaaatagcgacagacatcattagcggacg

SEQ ID NO: 16653 - DNA, 120 bp, Homo sapiens
aaacgctcagggctgcaaggcccttttctgagaagagcggttcctgtcgtcatcctcctctgcaccgcagcgtctgattcccaggagggacagcccggcagttataaaaggctctttcat

SEQ ID NO: 16654 - DNA, 120 bp, Homo sapiens
aggcgcttccaaaaaatcaagtaattagagctcatgcacgtaaaagggcccgccatgagatttgtggcttgttttttaaaggaatcaatttatatattaaaacaataaaatacatccggg

SEQ ID NO: 16655 - DNA, 120 bp, Homo sapiens
gctcgtaaaaccagatgcaagtttatgcttgtacatggccatggggaggccaaggctgggagggtggggcccatcctgcaggtgcaaggttaactctccctgcccacaggggcctgcagc

SEQ ID NO: 16656 - DNA, 120 bp, Homo sapiens
tggcgtctttaccaaaaggggcgattctgacacagaggggcatgtccagggaggacaaactgaagatacagggagaagacggccatctccaggaacatctcaggctgccagaagctggca

SEQ ID NO: 16657 - DNA, 120 bp, Homo sapiens
ggccgtgaggtcagggatttctgaggttcaagccccccagtgtggtgctttgttacgtaggctgagctgactcatacaccccggctgatgaaatgcttcaccatcagtttcagttgtgag

SEQ ID NO: 16658 - DNA, 120 bp, Homo sapiens
ccacgccaatggctcctgtgccaccatggccaggtagaggcacttcctccacccagccctgggtcacatgacaattccctgttctcactgtccccgtgaacccctcagggtcagcgcttc

SEQ ID NO: 16659 - DNA, 120 bp, Homo sapiens
tagcgtttctgactctggagacccctctgttgaggatggggtcccctgggtcctggagcttccagcacccagtctcagctgaggccaccgcctgagctccttcctcccagaggctgagcc

SEQ ID NO: 16660 - DNA, 120 bp, Homo sapiens
agccggcctttggcccctgccctggcactgtgctggctgtgctctctgagctcatttttcttggtggaggccaggagttggcttcagggtacccttgtgttttctcctccaaggcctggg

SEQ ID NO: 16661 - DNA, 120 bp, Homo sapiens
ggccgggtgaaacagattgcccagcacctcccctcctccccttcactgccttgagagaggagcgtccttctcagctgtttctccacatagaggatggaggccaccaggcctcaccgtcct

SEQ ID NO: 16662 - DNA, 120 bp, Homo sapiens
attcgggcccatgaggccaggggaacacccagtgggaggcctgtccctccttcccgaccctcccctgaccacatctggcctctctttgggggcccttctgggtctgccctcctcttctgg

SEQ ID NO: 16663 - DNA, 120 bp, Homo sapiens
aggcgcttgctgggcaacgccccttggggtgggagatggagctgggtgggcaaaaagggggtgcctgtgggtggggcctgcacctgcacgcttgcctcagcaggtgtgactcgggcaact

SEQ ID NO: 16664 - DNA, 120 bp, Homo sapiens
agacgttttcaaaacgagtccttggtggcaaccccaggccagctccacagggccccacgatctgtcttcagggtgcttccaaggcaggagctcaggccggtggggcaccctaaccctcgc

SEQ ID NO: 16665 - DNA, 120 bp, Homo sapiens
cttcgaaccatgggctatgagcctatccacataccttgttttccccactaaatggcagcgtttcttattgatgcccatggaaaccaccagggaggtggctctgccccctggctctactca

SEQ ID NO: 16666 - DNA, 120 bp, Homo sapiens
ctccggagaggctcctcactcccagctcaagcagatcctagaagttgtctctgatctggaccccgctccagaccacactctggctgggagccgggtttggggctgaccacgtgagaactc

SEQ ID NO: 16667 - DNA, 120 bp, Homo sapiens
ccacggacgtgggttagcgcctgctccagggctggcggaggaggaagggtgcccggccgcccagaccccaccatctcatctgggcctgaggcatcggcccgcagagccccagttccccgt

SEQ ID NO: 16668 - DNA, 120 bp, Homo sapiens
cgtcgccgagagggtatgagaagcgtgtgcccagccagagctcagtgaggacgacctctgacttccttcattttaatcacgtctttccaggggcctctggagctgatgcaggggctccct

SEQ ID NO: 16669 - DNA, 120 bp, Homo sapiens
gggcggggtggagggtcgtggtcaatcccgtatccaccacgtgatccaatgagaacaggcaaggcccgggaactgtgagtaagaaagcgctcgggctgagtcacgtgcagctgagcgggg

SEQ ID NO: 16670 - DNA, 120 bp, Homo sapiens
ctgcgggttcctctgctctttcctgccccactccttctttcatgaagcagcccctccaccccgagcctgtcctggccccattttaacccacgctgcttcttcctctgcatctctggctgt

SEQ ID NO: 16671 - DNA, 120 bp, Homo sapiens
ccccgctcaagggcctgctgaggctccaccaccccctcctcctgcagaagacatgtttttcacctgccccaaggaccaggcagcctcctgccaggcctccccctgcatcccctcattcca

SEQ ID NO: 16672 - DNA, 120 bp, Homo sapiens
gagcgtctgtggacggcaggcccgcctcaggggaagcacacacaggctctgctgcactcggaggcttccagccagccgtggacggtcaccattccccagctcggggcccactgaacaggg

SEQ ID NO: 16673 - DNA, 120 bp, Homo sapiens
cgggcccagaaggagtcccaaatgtcagaggagagaaagaggccccacccagagggaaacagggtggacagtaggagggggctgggtcgctgaagtccccaaggccggctccttcaagga

SEQ ID NO: 16674 - DNA, 120 bp, Homo sapiens
catcgctttgggacgtggggcgggggctgcaggctctacacagcttcaggtttctcagggctccaccatacatcggttccaaaggcccctctgcacaaggagactgtctcctgcatgtat

SEQ ID NO: 16675 - DNA, 120 bp, Homo sapiens
cttcgatgtctttcgtcactggcacagaggttttctaacatccgtcttcgtggcctcctggtccggtggcaagcatcccaagctccgcttcacagatgaaaaagctgagaggttaattaa

SEQ ID NO: 16676 - DNA, 120 bp, Homo sapiens
aaccgtttgttgtcccacgcagagtcagctttggggctgggagccaccacaggacctggctccccacgacaccggctgagcccggaagcagctgaaggttccaggaccctcggggcagct

SEQ ID NO: 16677 - DNA, 120 bp, Homo sapiens
ggccggcgaggaagaagccagggtgaaatttgcggaatggatttgtttccactcttggaattcgtgatcactttgctcctctgagtctctaggaattagcaattgtgccatcgaccaaat

SEQ ID NO: 16678 - DNA, 120 bp, Homo sapiens
aaacgactccagttattacttggagaaaattttgcacttcaattaacaaaagcacacatggggcagtttctgagcaaagccagattttataacactcagaagaatgaggtccggccccgg

SEQ ID NO: 16679 - DNA, 120 bp, Homo sapiens
cctcgccgccctcctcctggctttcagctcagcctgtcccctggcagtgccagcagcttatccgcaggtccccgaggccacccgttcccttcgcaccagagctctcccctctgttctttg

SEQ ID NO: 16680 - DNA, 120 bp, Homo sapiens
acacggggatgccaggggcctgcttgcccagagggacagccctgagacagggcagcaagagggtggagtctgcgtgtcctggaaggtgggtgggggagtgggggagaaagcagccttggg

SEQ ID NO: 16681 - DNA, 120 bp, Homo sapiens
agacggctaagccaagatgtgggcgggaggggagcagcggcagggtcctggggctaggagcctgagctacatgccaggtgggaccacccgtcccaaagactcacggctgtgagcccctag

SEQ ID NO: 16682 - DNA, 120 bp, Homo sapiens
ttacggttgcagtgggtgatgagtcctggggagagggatgggagtggagaccctaacagcacctgcccctccgcattggacgctcagccagcaagatcaatgcagaactcacggaacagc

SEQ ID NO: 16683 - DNA, 120 bp, Homo sapiens
caccgatcagccaacaccctggcagaattatctcagcatctggatgttggcaccacagggacctcaggctgcagagaacaggctggcctatgaacggagacggtgcctgagctcgtggct

SEQ ID NO: 16684 - DNA, 120 bp, Homo sapiens
ctgcgagtggagacggcacccgagctcgcggcaatgttgcggggaagccaagaccaacccctgcccgtgcccggtttccccgaggccccgtgtcctcagagcgcgtctcgtggttccggg

SEQ ID NO: 16685 - DNA, 120 bp, Homo sapiens
tggcgtttgcaaaagggagagactcttcctgaggaaataaaatagatttcagtcaatgaatatgcaaacttgaggcaggccaacacccaggagtcagggctgggagacattggagcccag

SEQ ID NO: 16686 - DNA, 120 bp, Homo sapiens
gcccgacgcccacacaaagcccatttcagccaaaggtatcaggttgttcactgtgtaaacacacaccacacacacacacacacacacgataagcaaccattttggggggcaagtactgaa

SEQ ID NO: 16687 - DNA, 120 bp, Homo sapiens
tcacgctgggtgcagacccgagagcagaacctggggtctgcagagaacctgagccggcacccagagtggcgggggaggccgtgccaggagagccagccttccatagagcttggagaggct

SEQ ID NO: 16688 - DNA, 120 bp, Homo sapiens
gagcgggcagaagcccctgcaggggattttctggttcctaacctggaacaggcaccggttctgaggcacacagcacgcagcctctgccttcaccatgtgctgtccacacgtcccgagccc

SEQ ID NO: 16689 - DNA, 120 bp, Homo sapiens
gcccggctaaacccacaccccaaccctccctgtcactggctgctgctgggggtccattcacctcaaccccatgcttagcagtgaccaccctgggctcttgtaatggatcctcatgtcagc

SEQ ID NO: 16690 - DNA, 120 bp, Homo sapiens
ccccgcagtgttatcccagtcacatgaatcaggctctgagtgaacgcgtgtattccttgggtgcctacttagagcagaaggaaagcaaagatgctcaccgggtagccaggagcgccgctt

SEQ ID NO: 16691 - DNA, 120 bp, Homo sapiens
atgcgccatggtgtgtgtgtgtgagctcagggcacgcgggcacacacgtgtccgtggttcccacaggaggagcagggccctcctgaaacccaagagccacatccccaggagcctcgggca

SEQ ID NO: 16692 - DNA, 120 bp, Homo sapiens
gagcgggaggtacctgggagctggagacagggccgcccctcgcgaggacgggcttttccgcctcacttctgccttagcggcattgataccacgcgcattcacctctccgtgcctcggttt

SEQ ID NO: 16693 - DNA, 120 bp, Homo sapiens
gctcgctctgcctgcccagttgctgtcagattgggccaggcctgtacaagcccacatggggacccctgggtgactgcgctctcccacctcccctcccacccttcccgctgcgggactcca

SEQ ID NO: 16694 - DNA, 120 bp, Homo sapiens
caccgtcaccccctgctctcagtctccaggcacagccaggtgtgggcggtgcatggcgggcccagcggtcaaccgcggcaaaggtggttcccaggtccctgtgtagcgggggtcccgtag

SEQ ID NO: 16695 - DNA, 120 bp, Homo sapiens
tgccgaccatgtgcacatggggtcaggatctcaggcccgccagctggactacagcaagtacccatggtctcagggaaaaggtcccctgctgcaggctgtgggggacctcggctctcacag

SEQ ID NO: 16696 - DNA, 120 bp, Homo sapiens
actcgccaacctggcccgcgcgtcctgtccggagggcagggtggggctggtgctggttacagatgatcctcaagggcacagcacgcaagccaccaggcgcccctcctgcagctgggtcag

SEQ ID NO: 16697 - DNA, 120 bp, Homo sapiens
gaacgggcctcctgagccaatgcagggccccaggatactgctcggcagggccctggaatcgcttccccagcccgcctgcacttggccagacaaactgtgtgttcgtttgcctgtttgtgt

SEQ ID NO: 16698 - DNA, 120 bp, Homo sapiens
acacgcgccacactgggcactgccctggacacctgcggggtcagaaaggaggaaccagacgcccggacctgccccctagacccatggcctggcccgagggagaggtgcatggctggcaca

SEQ ID NO: 16699 - DNA, 120 bp, Homo sapiens
gcacggacctgccccctggacctatggcctggccagagggagaggtgcacggctggcacggacacacagacttgccccctggacccatggcctggcccgagggagaagtgcacggctcgc

SEQ ID NO: 16700 - DNA, 120 bp, Homo sapiens
actcgaggacactgcagaagctgccggcactccctggggccctataagcagaaaccctgcccagggacctcctatgggctccagctcacattaatttctagacagttccattgcggcttc

SEQ ID NO: 16701 - DNA, 120 bp, Homo sapiens
cttcggtgcttggttggtttgtctccctgtggtgagcactttgcccagcactggagaagttcatgggccactcgcacctgcctctgctcgctgaaggcctttttccccagaggaagagac

SEQ ID NO: 16702 - DNA, 120 bp, Homo sapiens
agacgcctcgctctccacagctttccacttcagaggtccttggagactccacaggaaatcccaccaggaatttgggggtggaggcagctctgttcccctgcaccccagctctgggccagc

SEQ ID NO: 16703 - DNA, 120 bp, Homo sapiens
ccacgtagagggcagggggaccaggagcacccagcgtcccagagcagcccctcctctggagaagccatgactggctgaagttaaggggccttaagaaaacaagctctgtggaccttaaat

SEQ ID NO: 16704 - DNA, 120 bp, Homo sapiens
gtccgagaggagagtggagcaccagaagccatagacgtcggtcgggaggagctgggtgtccctccccagccccaagccaccagggatgccgaggagaacacaggctaggagaagccccct

SEQ ID NO: 16705 - DNA, 120 bp, Homo sapiens
ttccgggagacgcccaccccctcttctctccttctccttccatccttccggaggcttcccggacttccctgctctaccacacacactgttggccaaaatttacttttaagtattgataga

SEQ ID NO: 16706 - DNA, 120 bp, Homo sapiens
tatcgtgtgtatttttgggataattgaattccgcgaggtgctttgttttgtttttacatgagctagtgggtctggaagaaccttccacagaggagcccccggctctgctcccaagccctg

SEQ ID NO: 16707 - DNA, 120 bp, Homo sapiens
aggcgccacaccagctgcacaggcaggacccggagcccagccctcctggtctctgaagagccagacctggacaccttcctcaggacccgcccgcctccgaacagcagactcctcccaaga

SEQ ID NO: 16708 - DNA, 120 bp, Homo sapiens
gggcggctgtgctcacccaagccctcaccagcatgccgcctcaacaccccggtgttattccggaagaaacacgaagaggccaactctgtttcttccaccccaagagagtcggttcctctt

SEQ ID NO: 16709 - DNA, 120 bp, Homo sapiens
ctccgagggaggcgagcacgtgcagaaacaggtggatcttgcctcggctccctccaggctgggcccagggacctccctctggctggggcatcccctctctccccacccccaccccgagag

SEQ ID NO: 16710 - DNA, 120 bp, Homo sapiens
tgccggaaagccttcttcttatcccgcggcccagcgaggagagcgccagccgttcagggtgacagaaaagcacagaggcagggcccaggcgcctccaggcgaaggcctccgctcccaccg

SEQ ID NO: 16711 - DNA, 120 bp, Homo sapiens
ctgcgagaggaggcgcgtccacgacggaataagcaggcggtcaggtcgccaacaatccggtcaaccacggtgcttcttccctggtgggtgtctggccccgttcttgctggggatggcgct

SEQ ID NO: 16712 - DNA, 120 bp, Homo sapiens
gctcggggatgccaccgtgtttccccagggcccactgtgcaccctgcatgtcgcgcccttgtcacgggagcggcctgctgacccggagcacgcgtggccgtcacaaagggctgcaaagct

SEQ ID NO: 16713 - DNA, 120 bp, Homo sapiens
gaacgcaaactcaggcgtgcggcaacggaggccacgttctcagccaccgtgccactctgcatgtcagctggctgggcgtgcctccgtcttgtgttagcaaggacatggcaatcacctgat

SEQ ID NO: 16714 - DNA, 120 bp, Homo sapiens
ccccgtatggctcagaagtgccatcgagtactaggggtgcgccagggcccggctcagcccggccaagccccagcaggaaggaacatgtcctcaacgagaacatcctgcaaaatgcccggg

SEQ ID NO: 16715 - DNA, 120 bp, Homo sapiens
tcacggtgccagacgtgggctaggggccataaaggaccctcaggcaaggggcaaacacacccatgggtgtggccagctccctctacccatcaggacctccccagtggagggactgaaatg

SEQ ID NO: 16716 - DNA, 120 bp, Homo sapiens
catcgccatcgtcttcgccaccatcaggagttctggaagaagcgcccaagcatgggagacacagggatggttttgccagtgctgtgtgttaaggagctgctacctgctggggctgcttca

SEQ ID NO: 16717 - DNA, 120 bp, Homo sapiens
ccacgaggagctgaccactaggtcggggagctgagacatgggcaggtcacaccctgaattcgcatgcacgacacgacaagaggttccgactcgaggttcctggtttctaaggctcccaaa

SEQ ID NO: 16718 - DNA, 120 bp, Homo sapiens
agccgcccggctccttgttcagcagatgccacacagcccaaccttggtgtcctgaggcggccccactctaagcggggtggagcgacgaggctgcctggagacagagcagctccgtgggcc

SEQ ID NO: 16719 - DNA, 120 bp, Homo sapiens
ctccgctcactcaggagtgctcagccctggtttggcctccctgtcagacagcctcaagccactaagccagcggcagccacagccaggacctcggaggctactgctttgttcttagagaca

SEQ ID NO: 16720 - DNA, 120 bp, Homo sapiens
aaccgcagagatgactcagaagacaaagagccccctccccggcctctcccaccatccagctgcctgaggggccgtcgcagtgcaggctctcccgagggccaggacgccctgtctgagcag

SEQ ID NO: 16721 - DNA, 120 bp, Homo sapiens
ccccggccacacttatgcccagccaacctcagcaccgacagtggcctgccctgtgcctgcccctgcccatggctcctgcctgctctcctcatgggaactgctgcgcactcactgagcatc

SEQ ID NO: 16722 - DNA, 120 bp, Homo sapiens
ctgcggcccggcacaggcacagcccccggtgggcaccagcaggccagggatgcagcctcctgcactgggcccgcctccctaccctcaagtaactgggtcaatctttggcttttaaaaata

SEQ ID NO: 16723 - DNA, 120 bp, Homo sapiens
acccgcctttcccctttctcaatgcctctgtttaacactgcagggtttaagaagccgaagtagctgaaggcacctgggctgggtttgggggcggggactggactcagggagcagcattgc

SEQ ID NO: 16724 - DNA, 120 bp, Homo sapiens
cttcgttgccttccagaggcttctggctggtggagccccacggagtccacctgctaaaggtgcgcccagacctgccaggtaagggccgccccttcctgccgcctccaccccagtgctgag

SEQ ID NO: 16725 - DNA, 120 bp, Homo sapiens
tggcgtggaggcagccggcagccaggggccctccctcctccaagtcgggaggtgctgcccagcacagagtcgtctcctgtgctttcagaaccagccatggaggccgcgtgctcagggacc

SEQ ID NO: 16726 - DNA, 120 bp, Homo sapiens
ggccgtgacgccccgagccaccagagcactgagcaccccagcctgcccagagcactgagggtcccacccaggcccggtggagaacagggggtgccatctgccatcacggacaaagtcacg

SEQ ID NO: 16727 - DNA, 120 bp, Homo sapiens
gagcgtggctcaccttgagtcagtgaggtgtccgacgcccgccgtccctcctggaagctgacagggagcagaacagctcctcccaagcccccctgagcctgcagcactggggtggcggac

SEQ ID NO: 16728 - DNA, 120 bp, Homo sapiens
ctgcgggcactttgtgtggccagaatggagaaccctgcagcttcttcatgtggcgtttcctctgcccaccctcccagctccagctggcccggtgcctccaggcaccagccctcagcagca

SEQ ID NO: 16729 - DNA, 120 bp, Homo sapiens
agacgggcctcctgggagactcaggcacagagtgccgccccaccaggcactgtcaccacggcagcccccccggagccgtgccgggagcataaagccaccagggccgctgcgttgccactg

SEQ ID NO: 16730 - DNA, 120 bp, Homo sapiens
ccccgggagctggggaacagacccgcacagccgtgaccacctgaaagccagatgagccaggggaagcagctgcgcctgcagccacccccactccagcatatggagaacgcggcaggacaa

SEQ ID NO: 16731 - DNA, 120 bp, Homo sapiens
ctccgtggggtgcccccgttgtccccacgtctcacatacactcgcctgatgggtggccttccccacatccgggaccctggctagagtctgaaaggcggctgcccacgtcccagctgcccc

SEQ ID NO: 16732 - DNA, 120 bp, Homo sapiens
ggccggcaggggatgcacggcgagttctctcagtggtcggccgggccccagccccctgggtgctgcgaggggaccctgtgagcctgctgatggccagtgagccgcggtcctctggtccta

SEQ ID NO: 16733 - DNA, 120 bp, Homo sapiens
agccggcctcgggtctgtggtcctccgggcaggacgtgtctggcaggccagaggcggctcctgtgtgcgcggaacagccgcttttacaggggcgtcggctcgtggcgctggcagggcttc

SEQ ID NO: 16734 - DNA, 120 bp, Homo sapiens
tgtcgcaccagccctcggcccgcggcaaatgccgaatgccggtgctgggaacggaagtgggaaatgacggggggtgcaggggagcggccctgactgggactgtacggggacgcatggggg

SEQ ID NO: 16735 - DNA, 120 bp, Homo sapiens
gtgcgggcacttgagggaggaagcagcagagggaggtgtgtggatgtgtgtgtgtgcgtgactggggtgtgagcgtgcccactgtgggtgtgcccgtgtgtgtggctgtgaggcgtgagt

SEQ ID NO: 16736 - DNA, 120 bp, Homo sapiens
aggcgtgaagtgtctgggagtgggagcgggcatgagtgtgtgccacgggcctgctgttgggtccttggaggccacggttgcccctgaagggactgcaagctcttttttgatttgtagtta

SEQ ID NO: 16737 - DNA, 120 bp, Homo sapiens
aaccgcatttactaaatacaataaaattacaggaagacagaattgtccccaaattacaaacatgtggcccgagttgctccacgacagctcagccccagaccatgcagtggagatggcagc

SEQ ID NO: 16738 - DNA, 120 bp, Homo sapiens
ccccgagccccgggcccatctcctgctccccactgaggtgacacaggacccctgtaaggcaggaccccagagccccgcacaggagggggggctgtgtggggggagggacccctgcctgct

SEQ ID NO: 16739 - DNA, 120 bp, Homo sapiens
ctgcggtcccgcccccaccaggcagcggaccctggactgctcatgatcacggcctcacctggaaagctgctatgggctggtctgagcctcttccctctttccgggaaatctgaggcccac

SEQ ID NO: 16740 - DNA, 120 bp, Homo sapiens
aatcggccgggcaggtggacttaggagggagagccggaggctgcagagtgtgctccgaggtaccctccgcctgggactgtaagaacaaagaaggctctggggtaaggtgacagggacaac

SEQ ID NO: 16741 - DNA, 120 bp, Homo sapiens
aagcggagggaggggtggagacagcacgagatgaccggagaccacatgttgggtagtgccggcggggggaactatgggaaagggattgggcctggcatgaagacccccagcccagccccg

SEQ ID NO: 16742 - DNA, 120 bp, Homo sapiens
tggcgcctgcctgtgagtgcgctgaaaatcagatgatggcagccacagaggcgctcagcacagcgcccagcgcagggccgggacccagagtggactctaccgtggggctgcctcaaagaa

SEQ ID NO: 16743 - DNA, 120 bp, Homo sapiens
acccgtgcagccatggggccaggaagcccgccctttaccaagtcatttgggcattttttctctgtgctaacagcccagatggagccatagcctcaacctctgtgttctgataacaccaag

SEQ ID NO: 16744 - DNA, 120 bp, Homo sapiens
ggacgccggagccatgcaggggacagtgcccggcctgaggctgcagcctgggtctggatgcctttctaattcagggcctcctcatggcctggttccataaatggtcaaatgcagcctgac

SEQ ID NO: 16745 - DNA, 120 bp, Homo sapiens
cagcgcagcctcctatcagcgctgggctccgtaccgccacacagcccacataccccgttccccaggagacgcccgcaggtgggcagcgtcactcccacccgccgagcacacgctgtcccc

SEQ ID NO: 16746 - DNA, 120 bp, Homo sapiens
ccccgtctcgtgtcccgaggagccggaagcagctgcttcctcccagcctgaaagctgcacctcgggctgcactcggctccccgaacccgccctccgctgccctgcaattcgccaagggag

SEQ ID NO: 16747 - DNA, 120 bp, Homo sapiens
ctgcggcacctccacctccggcttggcctcacactgctcccggggtgttccctttgctctggaggcagggctgtgcaccagccaggcctgagaccctgtctgccctccaggacctgctga

SEQ ID NO: 16748 - DNA, 120 bp, Homo sapiens
cttcggtcctgccttgcccagcggccgactgaacagagcccctgtgggccctgcatggccaccagggggctactccacggtggggtcagggggcgagcgtccccctccccgtctcgggga

SEQ ID NO: 16749 - DNA, 120 bp, Homo sapiens
ggacgcagctcctggcctgcatgcgcccaccatggacggggaaggaaggggcgcccccttcagtgtgtgaacccccagcaatcccctctgcggggaccgcatgttttctatacagaaaga

SEQ ID NO: 16750 - DNA, 120 bp, Homo sapiens
tggcgcctggctggtgcctctgcctgctatggggtgcgggaggcaatgtgggaagctccgtactctctgatcgatgtatcggtaaaatgaaaactgctctaaaaagtagtcttttaactt

SEQ ID NO: 16751 - DNA, 120 bp, Homo sapiens
gggcgacctgccctgagcagtctgtgccccgggctcccagagctgccagtgtgtccaggctctccccagctatccgactcctggggagcctgccaggccggcagtgggtgggtatttgct

SEQ ID NO: 16752 - DNA, 120 bp, Homo sapiens
aatcgccactctgtgtggaggtgccaggagcgtgatttactgggtgtgtgatgactacggctcccgtagccaggcctgcccatcaagcagtgcttttggctttcagtgaggggtggactt

SEQ ID NO: 16753 - DNA, 120 bp, Homo sapiens
tgccgcgggggattgccggctagctgatcaggaccccaagtcctaagaggcaccgtgtccactccacctgcccacgggagctccgtgcccagcggtgggcccagagggacgacgacctcc

SEQ ID NO: 16754 - DNA, 120 bp, Homo sapiens
gctcgaagagtgaaaggacatgccacactgtcctcctaacagcagtgaccagggcaggagagctgctatttctggcctacggcccatttttcagagtcaattcattttctaggcagacac

SEQ ID NO: 16755 - DNA, 120 bp, Homo sapiens
caccgggattccaggaaagaatgaggccttgcaaaatgctctgaatggctgttcccaccaaaggtggtgggagccaagccctttccaggtacagagggaaagaaggtggtttcgtggggt

SEQ ID NO: 16756 - DNA, 120 bp, Homo sapiens
tggcgtcagctccactccctcccagatcactagtgcgaagggacatgccaggcctctcctctaggacaaaaactagtgtttctcttggattcactgaaacaagctgggctgccccttctt

SEQ ID NO: 16757 - DNA, 120 bp, Homo sapiens
gcccgtggaggggaagggcctgcgaggtcctgttggtgataaccaggccagccgagagcccgggaaagggcctgtcctcagtctgtgccttggtgtcctcccacccagccacaaagggac

SEQ ID NO: 16758 - DNA, 120 bp, Homo sapiens
cagcgggctgcgttcaacccagtggcccccacacactccttcaaggaccagcatcccatgcccagcttctgccacttcctctctgggcctgtgcccagcagcaggacaacccttgccaca

SEQ ID NO: 16759 - DNA, 120 bp, Homo sapiens
ccccgcactctagtccattgaaaagcctggtgagatgccaggccaggccatgagcgcggagcctggtggcgcgtgtcaggaggcggcggtggcaaccttgacggtggtggtcctgactca

SEQ ID NO: 16760 - DNA, 120 bp, Homo sapiens
aaacgtgtctcccgacgggagggtggcccagctgtgagggcgtctccaccacctcaccatcatcgtcagagccacaggatttgggggacagaggaacatggtagacgacactacagagac

SEQ ID NO: 16761 - DNA, 120 bp, Homo sapiens
tgccgacaccttgattttgaagtctggccccaggactcagagagtccacttctgctgcatgaggccccccgcatgcagtatcctgtcatggcagcccctgcctcatgcggcctggatctc

SEQ ID NO: 16762 - DNA, 120 bp, Homo sapiens
cctcgtctccccggtggggcgcggcatcttcatgctgccctctaaggacaagcgcatgagaggccagcctcccccaccagcaggacagaatgcacgaggcctttaccaggccacactggc

SEQ ID NO: 16763 - DNA, 120 bp, Homo sapiens
tggcgcctggcgtggctaggacagcagtgctgctgccccgctgtggggccgaaagaagccagggatgagggtgcgggcgcatctgtgggtcccggaggctccagacccccaggccaactg

SEQ ID NO: 16764 - DNA, 120 bp, Homo sapiens
gtccgtacatctaaccactttctctctggggccgccccgcccagagtccctttcctgccggaggctggggctttcctggcagctactcaccactctcccggtgtttgttcatcgaggttt

SEQ ID NO: 16765 - DNA, 120 bp, Homo sapiens
tcccgctgctgacggttgttttgacttgctcagagttgtcatgcacctttgccctggctatgtaaggagaaggagcctttatgcaatccaggaagcccgcgtcaggcccaggaggtgcgc

SEQ ID NO: 16766 - DNA, 120 bp, Homo sapiens
ccccgcacttggccggatccaggcagggagtgacggacctgctggcatcctcctgaccccggtttccagctctcccctccccctgtcgacaacccagggtcagaggacaggcagccacct

SEQ ID NO: 16767 - DNA, 120 bp, Homo sapiens
agacggcctggactttagtgagggtggatggcttgctgggcgggttcctcaggggcagaggctgggacaggattcagggttacatggcatgtgacccctggccaccccaggagaagagag

SEQ ID NO: 16768 - DNA, 120 bp, Homo sapiens
ccccgtggtaggcaatgcattttagctgatggggtgcagtagtgtgtgccgggcaaagcggacagttccagctcccacatccaggctgcagggccttcatccacccagctgggaatgcct

SEQ ID NO: 16769 - DNA, 120 bp, Homo sapiens
ccccgtcttgtgaccaccagcaaatggtttgttggtgttaagctgtggcctcagccacctcaacagggccctgtctggccatggagacgttccccaagttccagtcattgtcagctgctg

SEQ ID NO: 16770 - DNA, 120 bp, Homo sapiens
ctgcggtactgaatcagcccgttggagtcatccaagtgtgaaaaggtacctgaatgagggcagcctggggacaggagagctttctggaacatggggcaggaaggtagcctggacttctga

SEQ ID NO: 16771 - DNA, 120 bp, Homo sapiens
gcccgggagcagcctagcctcctcctcccaacacccctgctcccaggcgccaggacaaggggccagaggagacccagatggcccagatccaatccttccatggtcccctgggtggggcca

SEQ ID NO: 16772 - DNA, 120 bp, Homo sapiens
tcccggaagccactgctgtctccatcgccacccagactcaggccagtctgagaacccaggattaggaagtcatctctgagatgatcgggttaacactttcacgtggtgggttaacatctg

SEQ ID NO: 16773 - DNA, 120 bp, Homo sapiens
caccgtaaacacacactgtgccttaagacgttagctaatgagaatacaacaaacacataattttaaatgtacacacacacacacaaatagctgggtgtgcaaacattttttacactttac

SEQ ID NO: 16774 - DNA, 120 bp, Homo sapiens
actcggtggcttctaggctggaagacgaggccctctgagtcctgttgggagcgtggggtgtgatcctgggacagaagccttcagctgaaggggtgggcaggatggaggcccttccaccaa

SEQ ID NO: 16775 - DNA, 120 bp, Homo sapiens
atcggctgacgcagttgatgagggtcccttacggcaccaacaccgcttgctgaggctctgctgagactcagaaggtgcccttacatggagccagagaacaaatcgaggccacagggggaa

SEQ ID NO: 16776 - DNA, 120 bp, Homo sapiens
ggacggggcccaggatggggctatccatccgggagaggggggtgctttacagacttttccagaaggtccccaggggaaccttcacaattcaagggcagaaaggatgtgaggtctggtgag

SEQ ID NO: 16777 - DNA, 120 bp, Homo sapiens
ttgcgttgggtcagagccttcctccctcagccccaaccccctccctgctacagccccaaaacagacaagtctgaacaggtgtgactagagggagccaacaggcagggtccttggtgggtg

SEQ ID NO: 16778 - DNA, 120 bp, Homo sapiens
tcccgacactgactcagacagcagcagggaagggaaaccccaaaccattcaggctagctgagtcagcaggtacagtgtggcccagagcacgggctcagcccagctgactcctggtacctt

SEQ ID NO: 16779 - DNA, 120 bp, Homo sapiens
ccccgctactcagtcaaactcttactctaggagttgctgggagggcatgtggtagctccgggtgacttcaagtaaaggagcttgtcctcaaacatctgggtggacctcctgtcaatagct

SEQ ID NO: 16780 - DNA, 120 bp, Homo sapiens
acacggaaacttccctgaggaaggagagattcctcccatggactcagtgtcagctccagcctgagagtttccagcctcccgcctgccctggatttcagacttgcctaaccagcaccccca

SEQ ID NO: 16781 - DNA, 120 bp, Homo sapiens
cctcgccatatatgatgcagccacattaagcatgaaacatctgtttagcatccaaatgtgccaaagaaaaagatttacactgatcagaatttgttggcatttgatgctggagctgagtgt

SEQ ID NO: 16782 - DNA, 120 bp, Homo sapiens
cagcgtggttggaggagacctgggagggagctggctcaggcgaaaggaggaggaagcactggtgctgggggcaggggaactttgaccccagtgtatccgagtgtcaggggaggcaggggg

SEQ ID NO: 16783 - DNA, 120 bp, Homo sapiens
atccgaagggcaggagtggactgatgggggatgtgtgctgtcaatgtttcctgagatggagcagctgttcccagccacggtgcagctgcataggacagcccagaagaggcagagctgagt

SEQ ID NO: 16784 - DNA, 120 bp, Homo sapiens
aagcgcaatagtgggcaagcagtgagaacatgaagggtgttcctaacagagtggctctaacacggtgctgccatggaagttttctagggaggaagggggccagccggggtgaggcacagg

SEQ ID NO: 16785 - DNA, 120 bp, Homo sapiens
gtccgggtgtggggccagcttgctgggatgtggtcttagaaccagtgagaagaaaagtagaaacatgcaggcaaggggttcccaaagggacttttcagaggggtggcaaggccaaggggc

SEQ ID NO: 16786 - DNA, 120 bp, Homo sapiens
gggcggcctggaagggccaccaccaggattagttcaggttgcccagaagctagcaccaggtggctgaggccacaaagagaagctgatgaggggcgacaggggcagccagggcatttcctt

SEQ ID NO: 16787 - DNA, 120 bp, Homo sapiens
aggcgagtagccatggagcagctcctccgagagcaggcaaggcacgagaggcacagagaaccccatttcagagaaccccatggtggcacactgggagagaaggctcctgacagaggggct

SEQ ID NO: 16788 - DNA, 120 bp, Homo sapiens
actcgcacacgcgtgcacacattcatacactcatacacgtgcacacacatgcacaaacccccacacactcacaagcctatgtgtgtgcacacacgtgcatacactcatacgtaaacgcag

SEQ ID NO: 16789 - DNA, 120 bp, Homo sapiens
cctcgaactccagaggttcctgggcacaggtcctcgagcctgtccagggccccagctcccagctatgctcatcccaaatcgccctcgagactgcccagagcatgactccggctagggccc

SEQ ID NO: 16790 - DNA, 120 bp, Homo sapiens
aaacgagtgccccaaaatgctgcagtaaccattcgcctccaacttgaatggcctatcatcctaaacgtgaaaacagatgcaggtgtcaagccgatgcttagggagatactcagccctccc

SEQ ID NO: 16791 - DNA, 120 bp, Homo sapiens
gggcgtaagagattaaaaggagtcaaggagtcaagaatcactcgaaggttttttaaaagtctgagacactagaaaaatagaattgtaatcaatagaaattagaatttggtgtgagggaag

SEQ ID NO: 16792 - DNA, 120 bp, Homo sapiens
gctcgggacagaggtctgggctgaaggcacaaatctggagaacctgatcaatgctttgtgttactcagacaagccaaatagatgtaagatggaaataaccgcctatctgcccttttagca

SEQ ID NO: 16793 - DNA, 120 bp, Homo sapiens
ttacgtaacatgtggccaccatctcaatacactctgtcctcgtcggctatttgctcgagttctatgccagttctgtggcttaagaggaatgtgaagaatgtggacaaagcctgggaaaaa

SEQ ID NO: 16794 - DNA, 120 bp, Homo sapiens
gaacgaagggaagacaaatgaaatctagcaaacgttaaaggaaatgagatgatttagtcagggatgattaatagcaactggtctcgtactctgaatcagggaagtctagatacttgaaag

SEQ ID NO: 16795 - DNA, 120 bp, Homo sapiens
gctcgtgtacttattaaaatacatcaaatttcttaacagaaattgataaaagtaggaactgattactgaaagggataatgagatcttttttttcctcgatcttatttttttttttaatga

SEQ ID NO: 16796 - DNA, 120 bp, Homo sapiens
gggcgacagagcaagaccctgtctcgaaggaaaaaataaaaataagttatgggcaatatggcattgtgtcctcaaacactccagcctgcattaccaggtgacattcctctctataactac

SEQ ID NO: 16797 - DNA, 120 bp, Homo sapiens
catcgccatggttacaggaaaccaacttagatcaaggacatcttcacacaagttcacgttcaaatttccccctagttgttctcaaaacattttttcttaccgggaaataaccaaggatgt

SEQ ID NO: 16798 - DNA, 120 bp, Homo sapiens
ccccgcagcccagtgggttgcttctgattgccctggggatgatctagcagggttgtggcctgtccactctgtcacagggacccctgtgtgggaagtcctggacatccaacgcccctgaca

SEQ ID NO: 16799 - DNA, 120 bp, Homo sapiens
tgacggcctggttgctatgacaactccaacctcagctttccagctttctctaggaagggataaccccccttggcccagcatcaggacccaaatccagagctcacaggctggtttccccga

SEQ ID NO: 16800 - DNA, 120 bp, Homo sapiens
gcacgtgggctggcgtcttcctgtgtgtccaggcgggcagcccgaggaggcctgttgtaacccagccagagtgctgagccggcaccgtggggacacagcagactccaagaagacatcatc

SEQ ID NO: 16801 - DNA, 120 bp, Homo sapiens
cagcgcctgagaataaactattattgtaccaacttcccagctacgtaccgcttttctataaatgaaacataagccaagccaaagttttgtttaaaaacataaagctaaatgcagaaacat

SEQ ID NO: 16802 - DNA, 120 bp, Homo sapiens
ttccgttcctgctttgaagttcccagggactccggaaaggaggggctgcctgcaaagttacagaacgccgacccccagtgccccgaccagaacgcacgtgcacactcacatgcaacagct

SEQ ID NO: 16803 - DNA, 120 bp, Homo sapiens
cctcggacgcacccacacactgactcactgaaggtgggtgcagatcaaggagtcccaggcactctctcctttgataaaaatgcttggcacgcccgccgagtatccaggcagtgccaggcg

SEQ ID NO: 16804 - DNA, 120 bp, Homo sapiens
cctcgtttcctgatccacctcatctccatgggcacgttttccttctgagaagagctgggaagcccgtcagcaggcgggcctctgtcctcacctccactaacctggcccttgcaggcgtcc

SEQ ID NO: 16805 - DNA, 120 bp, Homo sapiens
gcacgtgccagaagagacactgcctccgtggctggcacggacgacgacgcccagcaggcagctgtctcaggaggacaggcccagctgcaggaaagggcagccccgggcttctggcagggg

SEQ ID NO: 16806 - DNA, 120 bp, Homo sapiens
tggcgttgagtgggggtgtagggggtccgcagacggcagctgaagccccttctctgcaggttatgctggtgcgattcccttttaggaagtagagtccgtgtggagagaacggtgagccgc

SEQ ID NO: 16807 - DNA, 120 bp, Homo sapiens
ctgcgtcctgttgcgattcagcccctgtgtcttcccggagggccctgcgcccgccttttgttcctaggactcggtgcctttctgaacccagtctaaaaattgccgcagctctttctggcg

SEQ ID NO: 16808 - DNA, 120 bp, Homo sapiens
gtccgtcaatctttaaatcctacaattatttctccacccaggtttttaagaataaaagttgaaaatgtactgaactgacagctaccggatttgattcctatttgattcgtacctttcccg

SEQ ID NO: 16809 - DNA, 120 bp, Homo sapiens
ccccgatcgccaccgcagcgccacgtcctggcaaatcattcacgccgaccttgagaactcagcagaggtgcagactgacactcagccccgccccctatcacgggctttctgcgggtgaaa

SEQ ID NO: 16810 - DNA, 120 bp, Homo sapiens
agacgttgcttttgttccccacaagcaactgcaggcagtgctacttatttttaacacagttgagcgggcaactttatcttaaatgattatgtgctgaaatctgctgatgaaaacgctata

SEQ ID NO: 16811 - DNA, 120 bp, Homo sapiens
ggccgccagatgtgttctgcgtgacagctttttctgaacctgctggacaaagtccccacttgttgcccgctcagccccggtcacagccccacctcgccggggcttgtcttcagttcctca

SEQ ID NO: 16812 - DNA, 120 bp, Homo sapiens
ccacgctcttgacccactcattggcctctttgtggggacccttcagccagaaggcccttcccctttcctgcccagctctggcccagacctgccacatggaggctgttagaggtggaatgt

SEQ ID NO: 16813 - DNA, 120 bp, Homo sapiens
tggcgatggagtttcccagaagtggcttggtttgtgctggctgctatagcaagtacagtcatgggtcgcctagtgagatctgttttgagaaatgcatgctcgggcgatatcactgtcgtg

SEQ ID NO: 16814 - DNA, 120 bp, Homo sapiens
acccggctagcacagcccgtgacacacctcagccctgtgctgtaacctgctgttcccaggctacaaacctgcagagcatgtcactgcaccagatactgtgggcccccttgacagtggtga

SEQ ID NO: 16815 - DNA, 120 bp, Homo sapiens
cttcgggtttgagccagtccatggggaggagccgtccaccaggcagcctcagggagagtgggcgggtgtcaagggaagcccacggccccagctggcccccttgtgtctgagcccccatgg

SEQ ID NO: 16816 - DNA, 120 bp, Homo sapiens
gtacgaaggcctgaggctgaacaacatgaataaatatgactacgtgctcacaggtaggtgccggagcaagctgccgcaggggactacgcaccccactccagccagggtgggctcagggag

SEQ ID NO: 16817 - DNA, 120 bp, Homo sapiens
ccccgccctgggcctgtctcgggtccctgccccttcaaggagggccttggcgtgcccaagccaccatcacacccccggtagcctggggggtcctggccacactatgcctgccgggacaat

SEQ ID NO: 16818 - DNA, 120 bp, Homo sapiens
tgccgtgtttaattggtggtgcagggcagtggaaaagtgccagctggcaccccgaggaggcctcactgccaggccgcccaaggtcacattctgggtttggccagcccagggttgtggagt

SEQ ID NO: 16819 - DNA, 120 bp, Homo sapiens
agtcggggagcgagttccccgtgcttccccagcacctttgactctgaggcatcactgagtgatgattggctgactctgaggcatcactgagtgatgattggctgactctgaggcatcact

SEQ ID NO: 16820 - DNA, 120 bp, Homo sapiens
tttcggcaggagcacttccccttgtagactcgttataaggagttaattctgggaactcctaccaagctcctgctgcctgccaagttctatgcaggtcacgaggctgtcccttctgtgagc

SEQ ID NO: 16821 - DNA, 120 bp, Homo sapiens
gaccgggcatctgctcagccctccgggctctccgtggtgggcagtccgcagcctgtcctccagggttcagcacgtgcattggcggagccggctccccggtggctcggagagcaggacggc

SEQ ID NO: 16822 - DNA, 120 bp, Homo sapiens
gcacgtcgggtgttgtgagtgggccaggggcacagcaagtctgtcctccctgcaggtggcctgtgagaagaccgtgtctaccttgcaccacgttctgcagaggaccatccagtgtgcaaa

SEQ ID NO: 16823 - DNA, 120 bp, Homo sapiens
gtacggcggccgggctgcatgggctgcgtgggctcctggctcccgaagtgggtgggagagaagagctggcacgtgctggttttgaaggtgtgatcggtgtctcctgctgacctcacctct

SEQ ID NO: 16824 - DNA, 120 bp, Homo sapiens
cagcgggagcccctctgagatgggaactcagtgctctctgcctgccccgcagcccaggccggggaaggagtgaggcccagccccatgcagctggagctgcggatggtgcagagcaaaagg

SEQ ID NO: 16825 - DNA, 120 bp, Homo sapiens
catcgaggacccagagatcgtcgtccaggccacggtgctgtgagggccccgccgcttgcccgtgacacgcagcgcgttggtgtctccgtgtttgtccctgtgaaaacatgtaacgtctgc

SEQ ID NO: 16826 - DNA, 120 bp, Homo sapiens
gaccgaaacttgatatttttttctttcatgagtgtccggcatctgctggtcttcattgtgaaacgtgccagtcgtgctttgtgaaaaataacaaagtggtcacagaaatttgtgatctga

SEQ ID NO: 16827 - DNA, 120 bp, Homo sapiens
acccggctcccttccccacaaggctcctgggcctccgggaagacgggcccctgtttgccatctcgggggtgttccctgtgggagggtgagtgggtgaggccgagcctgctgcgtgtggag

SEQ ID NO: 16828 - DNA, 120 bp, Homo sapiens
cctcgagtgggccctggctgccactaccgtacagaggccgtgtcgcgctgggctgggcctgggtggcctctgtctttgcatctctgagaaggagtcgggtggtaacggttggggtcagga

SEQ ID NO: 16829 - DNA, 120 bp, Homo sapiens
tcccgcattcgaacttttggttcttactttgctgctcgtttagtccctggggatttcagatcttaggctgttgtttcaccgtatgggagggttgatgtgagcttgcttggagacacacgg

SEQ ID NO: 16830 - DNA, 120 bp, Homo sapiens
agtcggtctgcagacctctcagctacccgcgggacctcttgtaacccatcggcatcttccaggaatccgccgagtgacttgaggaagatgctaacgcagtaaggtctgtgctgggccaag

SEQ ID NO: 16831 - DNA, 120 bp, Homo sapiens
ccccgtcaggttccttgtggaagctcccctcatccgtggtgcagcaggctgagcactgcgcgtttgccacgtgctgcccgtgacagcacattgagccacagcatttgtagacaggacaga

SEQ ID NO: 16832 - DNA, 120 bp, Homo sapiens
tcacgcccttgttactctcaggagcagcacagcgaccccgaggctggcctgactgtgtggcctctgagggtccagtcttcactttcccttgttggggggatggggcccccatgcacagtc

SEQ ID NO: 16833 - DNA, 120 bp, Homo sapiens
cctcggtgctacccttcctggaggcgggacacggcggctgatccctccctgagtgggagttgcgagtcctttgccttcttcccccgtctccggcttgtagccacaaaatgtgctgccctg

SEQ ID NO: 16834 - DNA, 120 bp, Homo sapiens
ctacggaaacggcacaggccacgctgcctcccctgctggcaccctagtctctgatggagaccgtggcctctccacccagaaagtgggccaggcctcaccatccctgagctctgtctgcct

SEQ ID NO: 16835 - DNA, 120 bp, Homo sapiens
ctacgtctctggctgccactgaccccaccagcatcttggcctctcgacacaccccctccgccctgactctgtgtcatacccaggcctcacgacacactcctgggcaaggctgcgtcggca

SEQ ID NO: 16836 - DNA, 120 bp, Homo sapiens
cagcgccctggccagggctgtggtcgggccatggagggggccccctggctgagaccacaccctgtacccccaaaagaggtcatcctgcccgtgccagaaaccccgtcagggacatgtgca

SEQ ID NO: 16837 - DNA, 120 bp, Homo sapiens
gggcgcagaggccggccacatttagccagttgtacattcattcaggctgcaattctttcttatccctgggctcagggccgcacccagacacacgaggccgggcaggcatgactcagcagc

SEQ ID NO: 16838 - DNA, 120 bp, Homo sapiens
ctgcgtcctgtgattttctcaaggagcacaaaggtgagcgtagccatgggggagaatagggaaggaagaagggccaacagtggccgagtcagctctgcttagtctgaactgcccctccca

SEQ ID NO: 16839 - DNA, 120 bp, Homo sapiens
ggccgggcagcagcctcttgagcagccccgagccccgctcttgtccttccagccggctctcaggggctcaccccctccccacccccacagtcagccttgcggtcagctttctctaaaggc

SEQ ID NO: 16840 - DNA, 120 bp, Homo sapiens
ctccgcacacgtagctctccctgccccacgttgtccacagcgctccctgcccccagatcccagtgtccccaccacagctccgcaccgctccttgatctgggcctgcattagcatccccgg

SEQ ID NO: 16841 - DNA, 120 bp, Homo sapiens
taccgtgaagagaacggcaatggccagcgccgcggtgagctgctcggagattatccccacaagcatcacttacctctacacagggctggttttacttcctgaaccggattcgccggaagg

SEQ ID NO: 16842 - DNA, 120 bp, Homo sapiens
cctcggagtcttcccgcagggaccatctccccagcgtgcggcctctcccctgtgtagcctctcccccatgtgacctctccccctgcggcctctcccccttgtgacctctcccctgcgtgt

SEQ ID NO: 16843 - DNA, 120 bp, Homo sapiens
ctgcgtggcctctcccccgcgtggcctctgccccatgtgacctctcccccctgcggcctctccccattgtgacctctcccctgcatggcctctcccttgtgtggcctctcccccatgtga

SEQ ID NO: 16844 - DNA, 120 bp, Homo sapiens
acccgtgggttctcattgcatggagccctggccccttactgtgggtgaggagtagggggaggattggccgttgggttctgggttccgcagtccaccgagggcagtctggccctctctgtg

SEQ ID NO: 16845 - DNA, 120 bp, Homo sapiens
tgccggccctttgtccccttctgtcacgtcccctgtcacctgccctctaggacctgcatggctgcagtcccaccagctgcctctggggggtgcccatggccctggaatgggcttggggga

SEQ ID NO: 16846 - DNA, 120 bp, Homo sapiens
gaacgcgccgccccggggcctccaaccctttgctccaggccacttgctccaccctctcttgctgccccgtgtgacccaggatctgtttgggcgagtgcctcgttctctccctgagtggag

SEQ ID NO: 16847 - DNA, 120 bp, Homo sapiens
tcacgaaggctggcacccacctctacctgtgtaccacggcctgggatggaccctgcagctgtggccctcctggcactatccctaccctgtgccctggtgggtgtgcagtgggaacaggca

SEQ ID NO: 16848 - DNA, 120 bp, Homo sapiens
ccccgagaccccatcgtggcgcctgtgtccactcagggattatcccaagcctggccagaggtcgggaggggacagagggagccacataggagcctctaccagcccctttcttaccacggg

SEQ ID NO: 16849 - DNA, 120 bp, Homo sapiens
gggcgcttccctcccacagggtctcaggcttgtgggctccccccagctgcccaggccccagagggcacttctgacccttctctttggggtctgccctggggggctccaggccacttgctc

SEQ ID NO: 16850 - DNA, 120 bp, Homo sapiens
ttccgactgtggggaaaacagaaccctaggaagcaacctcacggctgtgggcaggggagggcggccgggagccccagctgccccacagggacattgagtgaaggcagagcctgggaggga

SEQ ID NO: 16851 - DNA, 120 bp, Homo sapiens
atccgtgcatgggtcccttcctgttggtgttggcgtccctgagtgagcagccatccgccgccccctggaaagagacctggagaagcagcttcaagctttggagcccagcccagctgctag

SEQ ID NO: 16852 - DNA, 120 bp, Homo sapiens
gtgcgaagggggaaggcaggggcttgaggaagaaagtgagaggattgtgcctgggggcccctggagggccagtctggaggcgcgttggggtgaggcggtgctggctgtgcccgtctgaga

SEQ ID NO: 16853 - DNA, 120 bp, Homo sapiens
aggcgcccagggctgagcccagggtccccaggccagtccctcactgctctggggttcagtttcctcacctgcacaaagggcgggtcccgtgctctccggaggccacacggggtctccctg

SEQ ID NO: 16854 - DNA, 120 bp, Homo sapiens
ggacgttgataaccggccttcctctgttctctttcccaggggtgcagctcgtccgtcccatggtttcagatttgcccggtgtgttgcaaccaccacctggcactcagcttgcccggtgcc

SEQ ID NO: 16855 - DNA, 120 bp, Homo sapiens
tgccgcctggccccgcagcctttcccaggccttgcaagggtggcacagatggggaaactccatctgcaggggcgtcacccccgagggatgtgtcctccacactcccttgatggtcacgtg

SEQ ID NO: 16856 - DNA, 120 bp, Homo sapiens
tcccgggagggcgcgtgtgactcttcccaggattgcagcgttggggcgttgtgccagcctggccccgtgggtgcggagtgccgtggacccctcggccctcctgaccttgtttccctttga

SEQ ID NO: 16857 - DNA, 120 bp, Homo sapiens
ggccgggccaggctccctgtgcccctggtaccgctgcccagggccggtctctgcagtcaccctccttccttcctggtggctcctccctccctcctttgttcttctttcttttcctgccta

SEQ ID NO: 16858 - DNA, 120 bp, Homo sapiens
tatcgagtccctcctgcattaagtacccgtgctgtgcaacaaattaccttgaacttggtgacttcaccaccactgcatgtcagcgcccagccgtagacgagggtttgggaggcatggctg

SEQ ID NO: 16859 - DNA, 120 bp, Homo sapiens
tctcgcacactccctggctgttgggagggtgcattcttctttcttccttgtcttctagaggatgcactcttggctgtaggcctcccgtttctctcacgggctattcctggggttccctca

SEQ ID NO: 16860 - DNA, 120 bp, Homo sapiens
tgacgccccagagggtgacacctttcgaggctcgaaggcagctcagggcagctcctcccacacaaaggcctcctctgggctgtgagggtcagtgtttctcctggggcccagccctggggc

SEQ ID NO: 16861 - DNA, 120 bp, Homo sapiens
tgccggctcaggagggcactggccccaggcctggctccgccccagaaaccgggtggctgtgtgttagctgggcagtggcttctgaggggctgtaccaggaggctcagtgggcatccccag

SEQ ID NO: 16862 - DNA, 120 bp, Homo sapiens
tggcgccctcctcccacatagtgtcacagacaggcccaccgaccctgtgggcttggggtgggacagccaggatcccagtctcggcaaggcctggtacggtgggcgtctcagctgcagcca

SEQ ID NO: 16863 - DNA, 120 bp, Homo sapiens
gtccgccccctccgcgaggcagtgtgtttgtgatcagagcaggagtgtagcctgctggtttcggtacacgtagaatgcgtgccagtgcacgctagcagcatctgttgtgttccttgtgcg

SEQ ID NO: 16864 - DNA, 120 bp, Homo sapiens
gtccgaggacggctgtgtcctggagaggtgggcaggggctgggttcatctgcctctggagcctgctggcagcctcctcccgggtttcatggctggcaatcatgaaagctgcctcgatggt

SEQ ID NO: 16865 - DNA, 120 bp, Homo sapiens
tggcggggccctgttgatgtcagattggcgtggcctcctgagagttcctcctgtgggtgtgcgcagggcttgcatgtgcaggaaatggactcaccctggagctgggcccccaggggctgc

SEQ ID NO: 16866 - DNA, 120 bp, Homo sapiens
ccccgggcctgggtgggggccgtgcccttgtctgtccgtctctctgtcagtctggcttcttcctctccaactctacctcttttggggtctcctttctgctctgtgtcaccccggatagct

SEQ ID NO: 16867 - DNA, 120 bp, Homo sapiens
aaacgcacacaagcacacatatgcacatagacacacaagcagatgcagacacacacagacacatacatgcatgcaaacacacatacacgtgcacacactcatacacaagtccacacaggc

SEQ ID NO: 16868 - DNA, 120 bp, Homo sapiens
cttcgggaatgtgctgtgtgagctcccttctgtcttagaccccctcttccctctgagctctgcggttggaaggtggaacttctcctcctcctattttcctccccaacattcactgccttg

SEQ ID NO: 16869 - DNA, 120 bp, Homo sapiens
gtccgaacttcctcctgcattttaaatttctgccctcccaggtttcatttccaagagctcatttctgctctctgcttgttctttttttacagcttcctgttcctgtttcatgagtgcaat

SEQ ID NO: 16870 - DNA, 120 bp, Homo sapiens
gttcgtgagtttgctcccctttccccatgggctgtgttggttgaaaagaactctctccctcccccaactcctcgtcaaattcaaatgctcacagggtctccaatattcagcgacctttca

SEQ ID NO: 16871 - DNA, 120 bp, Homo sapiens
tagcgtaaaactgttaggagattgttagaacaaagtcttgcaggcaccttcacttggcagaagaatcgatcaaactccatttagaagggagctcattgaaggggccttggtttcccgttt

SEQ ID NO: 16872 - DNA, 120 bp, Homo sapiens
ccacggggagccactgcatcctggaagagttgagtgtggtagcctgagccctggccttgattctgcgacctcgggtgtgaactcaccaggtagaagacggggacgctggcagggacgcag

SEQ ID NO: 16873 - DNA, 120 bp, Homo sapiens
gaccgtgcctgagccggccttcctgtgtgggcccagataccggctcaggtcccacctcccctggtgctgtccacaccaggacagcagaagcctcatgcctggtccccagggatacggttc

SEQ ID NO: 16874 - DNA, 120 bp, Homo sapiens
tcacggcacatcgaattgagcctgaccaacgcctgggtcctggcagtggaggctgggaggagagtgtctgggattctgtccggggaggcagggctgtcactgtggggagctatgaacatg

SEQ ID NO: 16875 - DNA, 120 bp, Homo sapiens
gctcgggggtcagaacagctccgagaaccacgtcctcctcccactttgggatctgggccaagtctccctgcctgtctgggccttggttccctcctctgtaagtgtgtggaggacaaggtg

SEQ ID NO: 16876 - DNA, 120 bp, Homo sapiens
tcacgtcatgtgggagtggtgaagactctgtttcttccttatatctttcgtatttttccttcctgttttgctgcctgggccaggccctcctgagcagggctgtatggaagtgtgacaggc

SEQ ID NO: 16877 - DNA, 120 bp, Homo sapiens
ttccggtgtgggtacaaacagtggccgtttagttctgaatcgtcccactctgcctccttgaagcagaggaggcctggtgtgagaaatacaaacaaagtgacccaaaagcaaggagctgga

SEQ ID NO: 16878 - DNA, 120 bp, Homo sapiens
caccgggaagacgcagaaacaaaaccacagagagctgcggcctccccctgccgggacggcgaaacttaaaagactgtggggacaagtgctggagaagatgtgggggcagacagagcactg

SEQ ID NO: 16879 - DNA, 120 bp, Homo sapiens
cagcgtggctgctttgggaatggcaggagctgcagggagatggcatcgagtggcgggtgcacctgccgtgtgcttcccgggggacatgctgaggtgctcatagtggcatgggtgttggag

SEQ ID NO: 16880 - DNA, 120 bp, Homo sapiens
ccccgggagctctctcaatgcctgtctccaaataaaatgaaaaataacctcgtgctacattcgccatggaaaggggaaggaaggagctcctccaggccgcaacatgtgtgcgcctccgga

SEQ ID NO: 16881 - DNA, 120 bp, Homo sapiens
taacgctgggtggaaggagtgagccgcagaagtgtatgcagcacctgacttcatcaaggtaaagcacgcgcaccagcaaaacccatgtgccctgaggactccggctctagtacctggaag

SEQ ID NO: 16882 - DNA, 120 bp, Homo sapiens
acacgtctagagacaggcgctggacgtctcctgctcactggcattaagtgggcaggcggcttattgctgagtgatggtccctggacatttccagtcgactgtgtttgacatggtggtgaa

SEQ ID NO: 16883 - DNA, 120 bp, Homo sapiens
acacgtgacaggtggcaatatgttaactgttcgtagcaaggaagatttgttttcaggctggtggtttgattacaagttggtcattcttaatgccagggagggggaagagagagaaaatga

SEQ ID NO: 16884 - DNA, 120 bp, Homo sapiens
tatcggaggtttcattcctggaaaatccagtgtctatgaaaccaacatacatggcgtttgcatcacagttggagtcagatgtgagcccggagggcaggtgtctggtaagacccatgaagg

SEQ ID NO: 16885 - DNA, 120 bp, Homo sapiens
cagcgagcagtcacatcccgtgagactcaactgggtcagagggcccttgcttgggtctcctccagccacgggtgccctggtcttggggggtggtgcccctgggtggggcttaaggaggta

SEQ ID NO: 16886 - DNA, 120 bp, Homo sapiens
agccgctcacttgtcctgtggggccacccatgagatgcaggattcctggtcagccccaacaccaggcccacacctccacgcaggcctggaaggcaggagagagcaagctttcttctcctt

SEQ ID NO: 16887 - DNA, 120 bp, Homo sapiens
gcccgggtcactccactgcgcatgctctgtggctaccgtgagactgacctgcctcagacacccttctccttgagcctcaagggcctcatggcctggacctccgtgatcagccagaggagc

SEQ ID NO: 16888 - DNA, 120 bp, Homo sapiens
ccccggcacagtctgtgacctgtgaccaaaggctgaagtctgggctggagctacctgctctgtgggaaacaacagtgtgctctgggcttccatggggtctcccagctcaggggctgtggc

SEQ ID NO: 16889 - DNA, 120 bp, Homo sapiens
ctccgtcagtgtagggtctcccagcacaggggctgtggctcaggagccacgtgccaggcaggtcactccgtcagcataggggctgccatgaggattggctgcattttttcgctgtgtgat

SEQ ID NO: 16890 - DNA, 120 bp, Homo sapiens
gggcgcctgtccccagcggggcgggctctggggtgcgagcgtctgttctgtgtcaggagtccctgtttctttctccccatgctcacacggggtttttagactttgtgaagggtgtgcttc

SEQ ID NO: 16891 - DNA, 120 bp, Homo sapiens
aggcgtgccatgaggctcgcagcctcggggacctgtgctcaccagcacaccaccagtgcccagggctccttgtgctgcaggaagggacactggcatgaagtagggggtggggggagtcgc

SEQ ID NO: 16892 - DNA, 120 bp, Homo sapiens
actcggggaccgggcaacgcctcgggaagcagcctgcgctgatgtcaggatctatagtttaatactcgttagtttgtcccctgtgaaaaggaaagaaagattttctccctactgcactct

SEQ ID NO: 16893 - DNA, 120 bp, Homo sapiens
tgccgtgagatgcgtggatgtttccccacaagcagtgctccagggcacccacccaggcgccctccaattccattgagttctgacgcgtcagatcccccagggccagggcccagtcccaca

SEQ ID NO: 16894 - DNA, 120 bp, Homo sapiens
cctcgagtttgaacatttgccaggacagctcacagaactcagggaaataccagctgtgtctgctggtttctggtagagggtgttacgaaggatccgatggacagccagggggaaaggggt

SEQ ID NO: 16895 - DNA, 120 bp, Homo sapiens
gcacgggcctcccagcatgtgggtgagttcaccaccctgaagtccattgtacaagagttttgagggagcctggtctccagcccctgtccttcctggaggacggcagggggctggggagtg

SEQ ID NO: 16896 - DNA, 120 bp, Homo sapiens
tgtcgagggccccgcaagtctcctgtcactcaggtgagattgaaaggcttgttaggagtaacagtagatgctcccatcctgtaggaaatgtaaggtgttttttttggttttttttgagac

SEQ ID NO: 16897 - DNA, 120 bp, Homo sapiens
ctgcggctgccccatcacgctctctcctccaccaggttcacaggttcacagaagtaaaggctgagcatgtcaggactgagctgagcggttcccacctctcagtccacagtttcccacaga

SEQ ID NO: 16898 - DNA, 120 bp, Homo sapiens
gcacgcaggggccgcaccagggctgggacggggctgcgaccaggctaggggagcatcctgggcaaaccctgctggggacaggttcgttgtgtctgatgccgtgggagatgcacgagcagt

SEQ ID NO: 16899 - DNA, 120 bp, Homo sapiens
ccccgtgaccctgagcgagaatgcactggccgggcctccagggggcgctcccttaggaacaccccatccccgtccccgtgtgctgtcgagggcctctagcgggcgctcccttgataacac

SEQ ID NO: 16900 - DNA, 120 bp, Homo sapiens
ccccgtcgctgttgttgtcgggggcctcccgcgccccaggaggtttcccagggcgatgctctggtccctgggtcctttgatctcatctccctagtttagcctttgaactccatttcagat

SEQ ID NO: 16901 - DNA, 120 bp, Homo sapiens
ggacgtgcctgacttctggaggataagaggcggcccaccccacagctcttccagcgtgggagctctgaacatgggacccggagcaccaccgtttagcaaaccttgctgcagtttggagag

SEQ ID NO: 16902 - DNA, 120 bp, Homo sapiens
tgtcgcgggcgcctggcctgtccggcaggctgggtggctgttctctgttgagcccacagccatgccccacatgcaggacgtttgcctatcacttggaggcctttcagggatcttgctagc

SEQ ID NO: 16903 - DNA, 120 bp, Homo sapiens
ccacggctgagcacagggtagacctcaccaactcacccacaacctggccccttgacacactggtgctgtgaggaggaagatgtgggcactcttaggtccctggtcctaggggtctgtgct

SEQ ID NO: 16904 - DNA, 120 bp, Homo sapiens
gctcgttgacctgcatcctggctggccctgtgactctgcctgtttacagtgagcagctcctggccaaaagctgcttattggattagccggtgccccgacggcagagcccgcagctgtgcg

SEQ ID NO: 16905 - DNA, 120 bp, Homo sapiens
ggacgaacctgtgtgtatgtcctgcttcagcgcgctcctggggtcccttgagttggtctctgtgactagaaggacagtgctggccacgcaggtggcaccctgggggtgcccagcacccac

SEQ ID NO: 16906 - DNA, 120 bp, Homo sapiens
caacggcccctgccaagcctgggcagctcaggccaggtcctaatccctccgcttgagctcggctcctcaccctttggccaggctgacacctgctccccgcaggtccttctcgccggcttc

SEQ ID NO: 16907 - DNA, 120 bp, Homo sapiens
gaccgagggctgaagatgctgagcagctacccggcctgcctcttctcagggatctgtgtggccctgctggcggtggctttggcctattacttctactggtgagtgaggccggggcccggg

SEQ ID NO: 16908 - DNA, 120 bp, Homo sapiens
gaccgttctctgcatgtcaacaaaccctgcctagccctttgcaggggaactcctgggaggtagggaagcaggggatggcaggaactcattctgatccctcctggggtccttgggcagctc

SEQ ID NO: 16909 - DNA, 120 bp, Homo sapiens
gagcggtttcataccatctgggcggtgtttgtagatgcctggcatgtcctgggacggacaagtgcctgatgtatgggcacagactcccactgccccccaaggcaggtgctgtaggatggc

SEQ ID NO: 16910 - DNA, 120 bp, Homo sapiens
ggccgtggtctcctggggacgccgctggcctcccagcttaggcccaggtgccaggtgtcatggggtctcctgcccatcttcccaaggatgccattgctgtcttcatcgtcttcccccgtg

SEQ ID NO: 16911 - DNA, 120 bp, Homo sapiens
actcggcgacagtgtaccagacgcgcaccctatgtgaggtgctttaaggtccctgtcctcaggaagcgcagtctggtggaagagatgagcgctgaacaaatcactaaataacacaaaaca

SEQ ID NO: 16912 - DNA, 120 bp, Homo sapiens
gcacgtcctgtcgatgaattttgagtctctctgccttgcctgtcccgactccctttcgcgcaccgtggcatgagaatctttcctcacgctgttcgttgcggtattgctgagcattgatgt

SEQ ID NO: 16913 - DNA, 120 bp, Homo sapiens
agccgtggttggacccagctgtgtgtttcactcacgtgcaattgagtagctgttgccaggctgtccatgcctgttgtgactaccggttggggtcagatttggggtgaagaatgagtaagt

SEQ ID NO: 16914 - DNA, 120 bp, Homo sapiens
atgcgtagactcccgctgcaggcctctggcctgtggctcactgcatgcagcccctggcgtgcaatactagtgctccacggcgcgatgtgcttctagcccttgcactgcacctaggctcag

SEQ ID NO: 16915 - DNA, 120 bp, Homo sapiens
aaacggccagcccgaaaagcctgcctgccttctttctggaaacagcacgtccccggccgtgtgcctgcccctttctctactgagctagtccccaaaccaaaggcaagccccctcgggcct

SEQ ID NO: 16916 - DNA, 120 bp, Homo sapiens
cctcgggggatggggccggccacacccctgactccgccctggctctgccccatacccctgccgtggggccgacctgggggatgcagacatccggctccgtattcctgcctatcggggcca

SEQ ID NO: 16917 - DNA, 120 bp, Homo sapiens
ttgcgtaaaagatgtcacactgatctgctggagtggggtggacacatgaattcagttttatcatgaacactcgccactggctgcttgttaattcagggataatggtggcattcttacaaa

SEQ ID NO: 16918 - DNA, 120 bp, Homo sapiens
gctcgggaaatagaatgacgggaacacttttagggagcccaggaagttaccagggacattggtgtcgccggcccaggcaacagcagcgtacgcttttcaaagatcattgagttgtcttag

SEQ ID NO: 16919 - DNA, 120 bp, Homo sapiens
gttcgtctccatttcttaactttttgttgcacaagtatttggacagaagtcgaactgtgaatgagatactgaaatgcactaaattgtattacattaaactggagttacttgatacaatga

SEQ ID NO: 16920 - DNA, 120 bp, Homo sapiens
gtacgttgtgacaatcaaatgttacttgcctaaatgccaggaaattcaactggccttttaatcagcaagatcgccagcaagtactgtaactgtaaaggaaaatctctctctctggagaac

SEQ ID NO: 16921 - DNA, 120 bp, Homo sapiens
gtgcgcatgacagccactggcttctttttctatgattgaaaatctgccatcgctgactgttggccagtttcaaagggacccattgtatacagggtgcaaatgtattatacggatgtttcc

SEQ ID NO: 16922 - DNA, 120 bp, Homo sapiens
tgtcggggtgagggctgctaacttacacttcagaggcctgtgtcccaaaggcctggctgcgtttgccgtgctgtgcgaggacctgtgtacacaggcaggtgtgcgcctgcccgagcgcga

SEQ ID NO: 16923 - DNA, 120 bp, Homo sapiens
aagcgactccgtgcctccttctgtttcttcgtttccagtctgcatagatgtctccaaggggaaaccagggccaccaggcactcctgtcccatggggccacccaccttcagagcccactcc

SEQ ID NO: 16924 - DNA, 120 bp, Homo sapiens
ccacgggctctgtttccttggaggccatcctgccgatggcacttttcaaggccctcccttccctacgagttgctttctgggaggggaaattgaaaaggagagcggtcacctggcaaaaac

SEQ ID NO: 16925 - DNA, 120 bp, Homo sapiens
atacgcaaaatgacctgatgatgtccaaaaaagggttttaaaagcgatcaaggacaaaaggttttcctaagtggcatgtatacatccaaaactactctttttttgtaaaaacattcatct

SEQ ID NO: 16926 - DNA, 120 bp, Homo sapiens
ttccgagttctcgtttcgtgtcttctaaaaataagctaagctgaagagtctgggtgtccacatgctcctgggaatggccctggcaaccttggtgacatgctctctgctccggggctgcct

SEQ ID NO: 16927 - DNA, 120 bp, Homo sapiens
ctgcgtccagatgccatttattttttaaaatatatcctgaagtcagagcacccagaattttgcatgatgttctgttgttttctcgggagatgaaagtgaagtgcctggtgccacttggta

SEQ ID NO: 16928 - DNA, 120 bp, Homo sapiens
cttcgcctgtttgaacacaagtgctcacgggcactggggggcagccatgcagaccccttcggacttcatcacccccagcatcacaggcatctggctcacccaggagaggggccaaggtta

SEQ ID NO: 16929 - DNA, 120 bp, Homo sapiens
ctccgcttcacccagaagctcagtacgtaggagtcagtccctgccacctgacattctgggacatgtgagtgtgtacacatgtgcatgcatgcacacaccatgtgtgtggggaccttcata

SEQ ID NO: 16930 - DNA, 120 bp, Homo sapiens
atacgcatgcacacatgtacacacgtcccagcacacacacgggcacacctgaagaataaggggcagcgttaggaagtgggcttgggaaaccatcctcttcatgtctcttcttgtttgttt

SEQ ID NO: 16931 - DNA, 120 bp, Homo sapiens
aagcgtccaatttcattctgcatgtggatatccaggtttcctggcaccactgattggagacactgtcctttttcggagtagtgaatacactcccatcgttcagacattgcagttatccag

SEQ ID NO: 16932 - DNA, 120 bp, Homo sapiens
ctccgtctccccagccctgtctgcctgtgtcctccacaggctggagcttggctggtgcggtgcccatgatacctactgtgagtggctgtcagtctgtttcaattggtcaattcctgtgct

SEQ ID NO: 16933 - DNA, 120 bp, Homo sapiens
tcccgaagtgctgagactacaggcgtgaacactgcacctggccttattctttcttttcaaaaaatggacatgcttggctgggtggctctctggaagcttccttggcagcttagtgtatgt

SEQ ID NO: 16934 - DNA, 120 bp, Homo sapiens
tgccgcacccccattgctgggtcaggaacgtgtccctcatccaccttattgctgatgctgttggtgtctcagaagggtttactatttctgctcatgctgggttggactaagagagggaaa

SEQ ID NO: 16935 - DNA, 120 bp, Homo sapiens
ccccgccactgtctctggttgaatgtgtctgtgcaaacctctgtagtgatctctgcaaagggaggaggggagtggggccgggactaagcctgggacagaggtgggagctgggccaggggg

SEQ ID NO: 16936 - DNA, 120 bp, Homo sapiens
ccacgtggaaaaaagcaagtccctttgatcagaaaacccactgctgtccctgcaccagcctgggccaggacgggacagatgggccttggcaagcctcccacggacaccacgcagcctcac

SEQ ID NO: 16937 - DNA, 120 bp, Homo sapiens
agccgccttaggtctgcagctcacagcccatcctgccagggacagttggaagactgcctggaggaggcctttggttcccaaaaaagctgggctgaggccacaaggccccctgcagaccct

SEQ ID NO: 16938 - DNA, 120 bp, Homo sapiens
cctcgtcctcagacttgtttccacatttatttaaaggatgcagggaggagctggttttatattaataacaattaagtactcttcatgttcaaaacagaacacttattacttgcaattttc

SEQ ID NO: 16939 - DNA, 120 bp, Homo sapiens
taacgtttaggtaatgagatgaactcttgatttcagtaccaggccgtgggtgcatctctcctagaattccggcagccatcgggcccctctcagggctgggggctggacgacaggggagca

SEQ ID NO: 16940 - DNA, 120 bp, Homo sapiens
atgcgtccatcacagagccatctgccttcgaggcagagtgtgcatggactggggtacaggtggtttatttgaggtgggcccagagagagggggaagggagtggggatggtggggtgtaga

SEQ ID NO: 16941 - DNA, 120 bp, Homo sapiens
gttcgacctggccagggctgtgaacaaagtacctctgagcagagggaggtttgcatgaccacccacctaccccagggcggccatcgtggagacagggcctgctggtgtccattttccaac

SEQ ID NO: 16942 - DNA, 120 bp, Homo sapiens
caacgcttcctggctgagcctgtttctgagcccatggagaaggttctaggcctgcggcagaaaagtggggcccccaactagtctcagaggagggaccctaactgtctggtgccacccagc

SEQ ID NO: 16943 - DNA, 120 bp, Homo sapiens
atgcgtctgttagggtctgagtgcaccagggaggactgttctcttgtcaccactcaggccaccgtgactggacagttttcgcattgtaccatttacgtaggaagagatgtagaaactggg

SEQ ID NO: 16944 - DNA, 120 bp, Homo sapiens
attcgagtgatgttttggaggttggcttactggcagctcagccctcaaccagctcttccctcttgccaccttcttctgtgcaagggggatgttatatcacccgctgttaggtgtgccagg

SEQ ID NO: 16945 - DNA, 120 bp, Homo sapiens
tggcgtgaaaggcattggtgctgctcctatgtctgagccaggccacagccggcttctgccatctgggcagtgggcggctccctggtccctgagaacagcaaggaaaaggtggggcacaga

SEQ ID NO: 16946 - DNA, 120 bp, Homo sapiens
tcccgaaccccaccgcgcagggacacaagcgggggacatgaggccaaggcacagacaggcctcttggggagtgacctctgcttggagagggagcacgagaatccagactgtcaggaagcc

SEQ ID NO: 16947 - DNA, 120 bp, Homo sapiens
ttacgtaggtatttgctaatattctgcttttgatacaatagcctttggggggtgtgaagatggcaggaggctgggctcagctgctgtgcccatcactgctgcttgcttcagtctgctctc

SEQ ID NO: 16948 - DNA, 120 bp, Homo sapiens
tctcggtgatcttactgtgtccgcggcctgctgctgcttactgtcaggaagtgtgacttggggagtcacttacgataatgtctatttacaggtcataagatagtgctacccatgcattcc

SEQ ID NO: 16949 - DNA, 120 bp, Homo sapiens
ctgcgagatctccattttgatccctccaatgccgtggtccacgtgggcggcgttttgtgcgttgagataaccatgtacagccagatgcctgtgcctgttcacgtggagcagattgtggtc

SEQ ID NO: 16950 - DNA, 120 bp, Homo sapiens
acacgactgggattatctgcagaaacgtccacatgctcctgagaaggcaggagagcagctcctctctagagatgccctcaggggtggctctggaggagggtgcccacgtgctgaggtgca

SEQ ID NO: 16951 - DNA, 120 bp, Homo sapiens
ccacgtgaccctggaaccaggggccaaccagataacattcaggactcaggtatgcgttcagggtgggaacttgactttcaagtttgtaaagcagggccgtggagcttacaagaactgtct

SEQ ID NO: 16952 - DNA, 120 bp, Homo sapiens
tttcgtgttttatacaattttctgacatttgataaattctgagtgaagttcttaacgtagatatttgttcttagattaagttagctttttaactcattggattattggattcagttagct

SEQ ID NO: 16953 - DNA, 120 bp, Homo sapiens
caacgtgccaggccctggtccactgtgcatggcacctctgctcaccactgtcagggaaggatgactctgtccccgactcaacgcaagctcagaagcccacaggcactgtgcaacccttgg

SEQ ID NO: 16954 - DNA, 120 bp, Homo sapiens
ctccgctgaggctggggtaacaggttccaatgtatctactctcctgatcccagcccttaaaacaaaacaaaaccacaacaatcagctgggttttgttacttccccaagttcacagatatg

SEQ ID NO: 16955 - DNA, 120 bp, Homo sapiens
gtccgcaaaggtgcagctgaactaggccctaggcccaggtgctggctcttctggactgagctagcaccgtctctgatgcccatagagggctctggaatgaaagcagctctggggctgccc

SEQ ID NO: 16956 - DNA, 120 bp, Homo sapiens
cagcgtgatgggcagctgcttcccatatgaagaggttcacattcctgcaccctcagacggggaaagagctctgagcttattgcctccaactcctgcctcacagctgagggacactgagcc

SEQ ID NO: 16957 - DNA, 120 bp, Homo sapiens
ctccgtcttcctgagtcccatgagcagctcaggtcattgcttgctgactgtctcttctctcatttgatgcctcactccctgtagtgacctcagggtccaaccccatgcttcgttcatggc

SEQ ID NO: 16958 - DNA, 120 bp, Homo sapiens
ggccgggagcctcctcttggatgtacacctgatgttgatctctgttccagcaaggagcccctagaagccttcttggaattgggaggctggatggccacggaaacaaggtgctaaaccgtg

SEQ ID NO: 16959 - DNA, 120 bp, Homo sapiens
gcccggtggtcctgtctgaccttggctatggagcagctaatcaggcttccccagaggcaaagctgggaaaaccttccaagctgccaagaggggccttctgaagacccttctgactatggg

SEQ ID NO: 16960 - DNA, 120 bp, Homo sapiens
gggcgggtgcgggtggcctgtctccgagctgggctttcctccagcatggtcaccccctcacccgctcagttacctctgatatgctgtgcaaacatatttctcgatgaaatgctgggaaga

SEQ ID NO: 16961 - DNA, 120 bp, Homo sapiens
tttcggattaatcaaactctctttgtcctcggccaaaatctattcatttcccttaaacactgggccagtgccaggcattgatttcctctatgataacaccacgcacgcaagcacagccat

SEQ ID NO: 16962 - DNA, 120 bp, Homo sapiens
ccccgtggctgggacacagaggcactggtggggctgcccttgtccccccaacactgcccacctcctccaaggagtctcctggccacactgacacccccatctctgtcgtggctcctggag

SEQ ID NO: 16963 - DNA, 120 bp, Homo sapiens
ccacgctggctgttctggggctctccctcctcccaggatggtgtggaatggatagaggaggtgtggagggtgtggccactgcggtccccagggaccacagggaatgggctgcagccccag

SEQ ID NO: 16964 - DNA, 120 bp, Homo sapiens
tcccgggcctgagggcttagtagtggggcagcatcaggatcggccaagtccaggtgggcgggggctgtgcgtctacccgtgtccacccagggaaggccacgggcctttccagaagacctc

SEQ ID NO: 16965 - DNA, 120 bp, Homo sapiens
ctccgtgagccacgttgaccgattcctcactcagtcactacgagggcctgggattgatttattggcacctgcttggtgctaggtccttgtgggcacatgggatacatcaatgaacaaaca

SEQ ID NO: 16966 - DNA, 120 bp, Homo sapiens
gggcgataaacactctaagtaaattatacagtgtgctagaaagggaccatgcttggggcaaggcagcacacgtggtgtggctgtgtgcgaatatgggggtcattttccatcgtaaatagg

SEQ ID NO: 16967 - DNA, 120 bp, Homo sapiens
gggcgcggaagcgaagtccacttggctttctggacaaagagttttccaggaggaaggaacagccagtgcacaggccctgagttaagagtgagggatggtgctagagaggcagctagaggc

SEQ ID NO: 16968 - DNA, 120 bp, Homo sapiens
gggcgtgggagtcagagaggccaggcattgcacagccctggtgccctggctggactttgactcggggtctgcccatgtcaagcaagcgtcgggagcaaacatgagaaggtttcaagcaca

SEQ ID NO: 16969 - DNA, 120 bp, Homo sapiens
tagcgggagtgagtggtagaattctggacagtcagggcaattaagggttcccctgaggctggctgggtccagccacaacctgtggtgccagcctcagttctcaaggaaagggacgcaggg

SEQ ID NO: 16970 - DNA, 120 bp, Homo sapiens
aggcgtgctgggcatgtagtggacaccactcatgcccctaggtccccaaggtaggggatgggattgtgggatgccacacatggaggcagagggcaggaggttgcagggcctcaaagaccc

SEQ ID NO: 16971 - DNA, 120 bp, Homo sapiens
ctacggctctctccaaggcagcaacctctttgatttggctcttaatgaaggccccacttcttctctgctgtcatggccaccctctcctccataggtggaacctttgcatattgatttatt

SEQ ID NO: 16972 - DNA, 120 bp, Homo sapiens
aggcgacactatcaccctttgtctggtcagccgtggtggctgtgggccaaaagacaggacaggtggctgagggtgtccagagccaggacagcacagggttacagggaagggcctccctgt

SEQ ID NO: 16973 - DNA, 120 bp, Homo sapiens
ccccggtcatctcatctccccttcctttagcagaaggacactgggaggcccagccggggcatagcctggggttgtctgtaggatggggacactgtgttcactaaccgtagtccttcctcc

SEQ ID NO: 16974 - DNA, 120 bp, Homo sapiens
gctcggactatggcttcaggataggcagagagctttgaggaggcaaagaaaggaggacctgtttctaaggtgagacccgttgcggatctgcaggtgcaaggcccatcaggcaggttgtgg

SEQ ID NO: 16975 - DNA, 120 bp, Homo sapiens
acacggagtcacatgtcctcaagccatgaatcagtgatgtctttcatgtgcgtatgctctcatttttcaaacactgcaaaagctattgtgataaatgaaatgcagagtcatttacaagcc

SEQ ID NO: 16976 - DNA, 120 bp, Homo sapiens
tggcgcgcaaaaaccctttttacctctgtcatcagcactcactggattaatgggtgctctcccttctcactgtaaagcatgctggcttgtgtcagtacagggttggccctccagggcagc

SEQ ID NO: 16977 - DNA, 120 bp, Homo sapiens
cagcgggcactctctagaacccccttgcccttccacatgtatccctttgagtccgttgtgattgtcccaaacctatttgtgccagttgtactcattgtaatcacagcctggaatactgtg

SEQ ID NO: 16978 - DNA, 120 bp, Homo sapiens
ggtcgtcagcagggacaagggagcagccacagggtctccatcctccatgcgctcatggttcgtgtgcatattacacatatcatgtacatgtcatctttaagcagatgttctgcccactgt

SEQ ID NO: 16979 - DNA, 120 bp, Homo sapiens
gggcgttccctggtgcacttctcatcggtggctgcctggtgaagcgggaaagttcctcagcctctccattgattccttccctccctccctccttccaccaaccagtgcttactgaacacc

SEQ ID NO: 16980 - DNA, 120 bp, Homo sapiens
gaacgaggccaggacgggccctcctcacccgcactctggctgggggtaggggcgacggcagcacacaaggtcatgtaggtcacacattagctgagggctgctatggaggaggaggacaga

SEQ ID NO: 16981 - DNA, 120 bp, Homo sapiens
tgacgctcacagcgacaagcacagcagggcagtgactgctactggctgtcactctctgaggaccaggcttgtgctggacgctttactcttcacagatacctgtggccagtgagggacagg

SEQ ID NO: 16982 - DNA, 120 bp, Homo sapiens
agtcgccagaggccacacaacctgggagaggcaagcaaggcatgaaggatgagaccaccctgagagtggtgggggtaatatcagggtctgaccaagggaaagaggcggcattagagcctc

SEQ ID NO: 16983 - DNA, 120 bp, Homo sapiens
gatcgccaggactagtggtcaaggtctgtgaggggcaagggacagtgaggggcacggatggctgctgggaggatgaagtgccatttgctgagggtttagcaggttgagtttcagatgctg

SEQ ID NO: 16984 - DNA, 120 bp, Homo sapiens
cctcgggccttcccaccccagggcctgtcacagagttgatgggtggtattaaaggggcgaatgctgcctgtggcaggatggggaggctgcgtgggtctccggacagggacataggtcagg

SEQ ID NO: 16985 - DNA, 120 bp, Homo sapiens
gtgcgtgtgagttgggtggggcctggtgccaccctgggctcacagccggggaagaagcctgagctttgagctgcccctcgtgtggggaggcctggcctaagcacccggcaaagtcacagg

SEQ ID NO: 16986 - DNA, 120 bp, Homo sapiens
actcgcggggttggtgaaagattctgcctgaggcctctaggccaccctgccttgccctggcctcggtgattactactacccttgggagccactgtgacatctggtctcccaggtggattt

SEQ ID NO: 16987 - DNA, 120 bp, Homo sapiens
ccccgcagcaccacgtgcagcccccagctccttggtctcagcccaagcccccctctacctccttctgcaggagtgaggcagcccctgcccactgtgcttaggcacctcacggtgctccca

SEQ ID NO: 16988 - DNA, 120 bp, Homo sapiens
ctgcgggggtaatgagagtcagggaggcgctcagttatcccagggctgggccgaggcctggccacccgtgtaaaacagggcaaggctgagctctatcagtgctgtctgggagaagggccc

SEQ ID NO: 16989 - DNA, 120 bp, Homo sapiens
atgcggtagaagtgagtccagcatgggggctgggtgggcagaggcctcgcacacaccctcctctccctcatgcacctggcttcaggtggactgtccaggcaacagcagacatatgtgtta

SEQ ID NO: 16990 - DNA, 120 bp, Homo sapiens
cagcgccccatggaggagagggggttggatggattgttgccggctcattttccaaggccagtctctgctgctttgctttcagaagagctccctttcactgtccagcctgaggtggggctg

SEQ ID NO: 16991 - DNA, 120 bp, Homo sapiens
ctgcggggaggaggctcacgcttttctctgtgtttggcaggtgaagggctggatgcacagtgggagccggaggcggggggctgcagggagcacaccagcgaccggccctccaaccctcca

SEQ ID NO: 16992 - DNA, 120 bp, Homo sapiens
catcgccacagcaaccagcaaccagacggcagcagccgaggcaaacacaagcggacggcttcccaccgtcgccgaggacagggaatgactacggcaaatcaggccactttgccaactagg

SEQ ID NO: 16993 - DNA, 120 bp, Homo sapiens
gggcggccaccgcccgctgcacagagcgccatgccggctggagaagaggcgctggggcaggggctgcagtgtggctcggcctcacccccctgctggcactgagtgcctccagggcagctg

SEQ ID NO: 16994 - DNA, 120 bp, Homo sapiens
tcccgtgctccttgtctgggcccgctgctgccagaccatgggatgtcggcaaagctcagaggaaaaagaagcagcccggcggtcccggagaattgaccgccacctgcgctcagagagcca

SEQ ID NO: 16995 - DNA, 120 bp, Homo sapiens
cagcggcaacgccgcgaaatcaagctgctcctgctgggcaccagcaactcaggcaagagcaccatcgtcaaacagatgaagatcatccacagcggcggcttcaacctggaggcctgcaag

SEQ ID NO: 16996 - DNA, 120 bp, Homo sapiens
catcgactcgctgacccgcatcatccgggccctggccgccctcaggatcgacttccacaaccccgaccgcgcctacgacgctgtgcagctctttgcgctgacgggccccgctgagagcaa

SEQ ID NO: 16997 - DNA, 120 bp, Homo sapiens
gggcgagatcacacccgagctgctgggtgtcatgcgacggctctgggccgacccaggggcacaggcctgcttcagccgctccagcgagtaccacctggaggacaacgcggcctactacct

SEQ ID NO: 16998 - DNA, 120 bp, Homo sapiens
gaacgacctggagcgcatcgccgcagctgactatatccccactgtcgaggacatcctgcgctcccgggacatgaccacgggcattgtggagaacaagttcaccttcaaggagctcacctt

SEQ ID NO: 16999 - DNA, 120 bp, Homo sapiens
ggacgtgggggggcagaggtcagagcgcaaaaagtggatccactgcttcgagggcgtcacagccatcatcttctgtgtggagctcagcggctacgacctgaaactctacgaggataacca

SEQ ID NO: 17000 - DNA, 120 bp, Homo sapiens
ggccgggggttttcctctgcttgttcctgctgtcgtgggttcctggaagcaagaggactcgtgaggtccaggacagtctgcagccagaaagggaaccaggcgcaggcctggccctgctgc

SEQ ID NO: 17001 - DNA, 120 bp, Homo sapiens
gcacgataactgaggcagctccagcaaggtgggggcagagggaacagggtgtggagtgcaggtgtcatgtcccatgcctgaagtactcagggtgtggaggccacagggcaagagagtgtg

SEQ ID NO: 17002 - DNA, 120 bp, Homo sapiens
ccccgcctccatgccagttgttagacctttaccagtgcaccacagccagtgactcccaagcatggcggggagagtctgccagccaggctcagtcactggtgtatggcaggattgatccgc

SEQ ID NO: 17003 - DNA, 120 bp, Homo sapiens
acccgacagtgtccttgcctgtcagtctcccactgtgcttccccagtgactcccagctctgaccctgtggccgcgtgggttgcatctgttcgtgtttaccccgctggagaaagggaattt

SEQ ID NO: 17004 - DNA, 120 bp, Homo sapiens
gagcggctcttcacttgcctgcctccctcccgctcttcctcggcagatttaagagaatcctactccacagagagcaaccttgcattggctaacacgagaccacaagctgggggccatctg

SEQ ID NO: 17005 - DNA, 120 bp, Homo sapiens
ggccgcatgctctctgtgactggccctgagcctgccctaggaaacagttttctaggtgcagagaagccaggaacaggtgcctcctctgtcccaaagaccaacatttgcaggagagacggg

SEQ ID NO: 17006 - DNA, 120 bp, Homo sapiens
agacgttgggagcaggcctgcacagattgggatgaacgtgggggtggtgatctgatctggaccttgcagaatccagtcaaggctgtgggggagcagtggggacagtcaacaaaggcagga

SEQ ID NO: 17007 - DNA, 120 bp, Homo sapiens
tgtcgggggccatggagagcacagagctatgcacagtgccctgcagcgggatgacggaggaccaggcggtgtaaggtctaagcaggcagggcaaggtcgcaggcacagtgtccagtcccc

SEQ ID NO: 17008 - DNA, 120 bp, Homo sapiens
tgtcgctgcctgagcgccctgtgatgacggagccagggttcagccccaggactgtgtccctcccagtttatacacctcctgctctgcctcgtgatcaggctggatgctcacaatgatacc

SEQ ID NO: 17009 - DNA, 120 bp, Homo sapiens
catcggctaggcttgcccaggccagtgggtaattaatttcctgagcgcattagctctgctcagtacacacacatgagaacagctctgggttttaagacacagattactattgttttaagg

SEQ ID NO: 17010 - DNA, 120 bp, Homo sapiens
gaccggatgcatagccctcttcacctgaggccccactggctcagtctagtttctggagggattggaatgacagtcagctagggtgcatggccctgggcatctcaggggggacacccagtg

SEQ ID NO: 17011 - DNA, 120 bp, Homo sapiens
tcccgtctggatagtggacaagcttaggccagcccaggagcctggctgcagctcaccctaatccctgcttcatcacacctcgtggtggacatgtcctcagctcaggtactttctctaatt

SEQ ID NO: 17012 - DNA, 120 bp, Homo sapiens
ccacggcctccctttctgggtctgggtgtgaagccagggagcaggacacaggagctccaggccctttcggagcaaatgctcccaccatcttggaattttctgtcccaggactgggagtct

SEQ ID NO: 17013 - DNA, 120 bp, Homo sapiens
tcacgtgactcccgccacatatcacacttaccctggggctctgcctcctcagcaactttgaccaacacccttgggaatacagaggctcccatttggacctaagaccctgcaagtcagtga

SEQ ID NO: 17014 - DNA, 120 bp, Homo sapiens
tggcgccttgggcctgtgctggagaacagcagccacccacctgcagggctggacaggggtgccaacatcctggaggctgcacacagacttctgggagagctctgcccagtgggtgaagcc

SEQ ID NO: 17015 - DNA, 120 bp, Homo sapiens
caccgtctccatctcacactgggccctggcactgtgggtggggccctggcctggctgtggcccagggtagtcatgtggacttgtgtccatctggactgcccaggtgaagactggcccagc

SEQ ID NO: 17016 - DNA, 120 bp, Homo sapiens
agacgtgagcggttggcagagcctggcgcagggcatgctggtgcactgcatgcacaacctctaagcctcccagcccgaaggggctccccaccacacagatgaggaaactcgggtttcagg

SEQ ID NO: 17017 - DNA, 120 bp, Homo sapiens
tcccgctgctgcccaggggaatgggcagggctgggaagcagccacccttgccattactacgggtcaccccaccccctccacactgcacacacagggaaaccagggagggcagacaggact

SEQ ID NO: 17018 - DNA, 120 bp, Homo sapiens
agccgaactgctgcggaaggcagggagcagcacgctcagctgtttctggcaggttcagagcaagggcttttcaggccattagggcctgagctagggctttagcggcagcctgttatcttg

SEQ ID NO: 17019 - DNA, 120 bp, Homo sapiens
caccggcaagcagaggctctgacttctggactcggctggaacacacccctgccctggcccccatcccagaggagccccatctgtcgctggcctgggacctacaggcctgagtactctgta

SEQ ID NO: 17020 - DNA, 120 bp, Homo sapiens
gtgcgggtgggcaggagcggtggcctttcttatccccagggaaaagtcgagggcctcatgaaaacccagggcctgagagtgtctgaggacaggagttgtggccaccccaggttgtcaatc

SEQ ID NO: 17021 - DNA, 120 bp, Homo sapiens
actcgagagtctccacttcagccaggcaagtcctgtgaactgggggcctctgtctgcaggtggcagcagctggggtgtagggagcagaagctggggcgggagcaggggtcccaagcacag

SEQ ID NO: 17022 - DNA, 120 bp, Homo sapiens
caccggaacccaccaagggagcgcagcagtggagtcgggtcctgggcctctgcacacagaaccccagggggttggccgcagggtgtgaaaatcaaacccacattttcattcaccagaata

SEQ ID NO: 17023 - DNA, 120 bp, Homo sapiens
atacgggatcagatagttcctgatcgttttaaagccggaagagcacctgcttatcaaatgcctcttcagtctgttctgccagattgacccattgaccgacgaagccacagtgaggaagga

SEQ ID NO: 17024 - DNA, 120 bp, Homo sapiens
ctgcgggggaggaaggcccagcccgagtcccttcaaagcctcctataggtgcccatcacccaccccagccacaccctaggcatccacagaagtggcgggtctgggtgtgaggcctgtgcc

SEQ ID NO: 17025 - DNA, 120 bp, Homo sapiens
ccccgccctgatccagcccatctgtgggccaggagcaggtgcatctgtgcagaagggtggggccaggggcacacaggtggggagcagccaggcaatcccaacccctgcccctgtacacag

SEQ ID NO: 17026 - DNA, 120 bp, Homo sapiens
aaacgcctgcagcatgtgccatctggccttgcctgccatccaccccgtgctgggcagagcaggggagagcggtccccaagcagacagcactgctcataggcaggccatgggcaatgagaa

SEQ ID NO: 17027 - DNA, 120 bp, Homo sapiens
cctcgaggtgacagagacggaagcaggagtcaggagacagccgggagaggcctggattacacagcctgccatggaaggcactggagggtttgcacagggggcaaccccagagcagaagca

SEQ ID NO: 17028 - DNA, 120 bp, Homo sapiens
cttcgaggcaggagacatgctgtgcatgctacaggagcttaggaattgtctgagggtgaccagtgggggtccagaggaaaggtgctaggaagacatggaggcttccaggggaggctgggc

(The sequence listing continues in the following parts.)

1. A method for determining a driver gene of a pathological condition in a subject in need thereof, the method comprising:
a. receiving measurements of DNA methylation within a plurality of non-promoter cis-regulatory sequences from said subject;
b. determining from said received measurements a total regulatory effect of non-promoter cis-regulatory sequences upon at least one potential driver gene of said pathological condition; and
c. selecting said at least one potential driver gene as a driver of said pathological condition in said subject when said total regulatory effect is beyond a predetermined threshold;
thereby determining a driver of a pathological condition in a subject.

2. The method of claim 1, wherein said measurements of DNA methylation are obtained by:
a. obtaining DNA from a biological sample from said subject;
b. isolating a plurality of cis-regulatory sequences from said obtained DNA; and
c. measuring DNA methylation within said plurality of isolated cis-regulatory sequences.

3. The method of claim 2, wherein at least one of:
a. said measuring DNA methylation comprises bisulfite sequencing of said plurality of isolated sequences;
b. said biological sample is selected from: tissue, blood, lymph, cerebral spinal fluid, urine, breast milk, feces, saliva, tumor tissue and tumor fluid;
c. said biological sample is a tumor biopsy; and
d. said isolating comprises binding probes to said cis-regulatory sequences and isolating said hybridized probes.

4. (canceled)

5. (canceled)

6. (canceled)

7. (canceled)

8. The method of claim 73, wherein said isolating comprises binding probes to said cis-regulatory sequences and isolating said hybridized probes and said probes binds histone 3 lysine 4 monomethylated (H3K4me1) chromatin.

9. The method of claim 37, wherein said isolating comprises binding probes to said cis-regulatory sequences and isolating said hybridized probes and said probe is a nucleic acid probe that hybridizes to said cis-regulatory sequence and comprises a non-nucleic acid capture moiety and wherein said isolating comprises capturing said capture moiety to a capturing molecule.

10. (canceled)

11. The method of claim 9 or 10, wherein said nucleic acid probe comprises a sequence selected from SEQ ID NO: 28-38077.

12. The method of claim 1, wherein
a. said plurality of non-promoter cis-regulatory sequences are located within 1 megabase upstream or downstream of a transcriptional start site of said at least one potential driver gene;
b. the regulatory effect of each cis-regulatory sequence is determined independently or is determined in combination with at least one other cis-regulatory sequence;
c. at least one measured cis-regulatory sequence comprises more than one CpG dinucleotide and wherein a measurement from at least one of said more than one CpG dinucleotides within said cis-regulatory sequence is received;
d. a regulatory effect of each non-promoter cis-regulatory sequence is determined separately and summed to produce said total regulatory effect, or wherein total regulatory effect for at least two non-promoter cis-regulatory sequences is determined simultaneously;
e. said non-promoter cis-regulatory sequences are selected from sequences located between genomic positions provided in Table 4; or
f. measurements of DNA methylation within non-promoter cis-regulatory sequences of a panel of potential driver genes are received.

13. The method of claim 1, wherein said plurality of non-promoter cis-regulatory sequences are selected from enhancer and repressor elements, comprise at least one repressor element, comprise at least 4 distinct cis-regulatory sequences or a combination thereof.

14. (canceled)

15. (canceled)

16. (canceled)

17. (canceled)

18. The method of claim 1, wherein said determining comprises at least one of:
a. testing each of said plurality of non-promoter cis-regulatory sequences in an expression assay, wherein said assay measures the regulatory effect of a non-promoter cis-regulatory sequence on expression of a coding sequence and wherein said testing comprises testing methylated and unmethylated copies of each of said plurality of non-promoter cis-regulatory sequences;
b. comparing said received measurements to a database comprising potential driver genes, methylation status of non-promoter cis-regulatory sequences of said database genes, and regulatory effects of said non-promoter cis regulatory sequences on said database genes; and
c. applying a machine learning algorithm to said received measurements, wherein said machine learning algorithm has been trained on non-promoter cis-regulatory sequences with known methylation status and known regulatory effect on a driver gene.

19. (canceled)

20. The method of claim 18 or 19, wherein said determining comprises applying a machine learning model and wherein said machine learning algorithm has been trained on:
a. single non-promoter cis-regulatory sequences;
b. genes and at least one of each gene's non-promoter cis-regulatory sequences;
c. genes and a plurality of each gene's non-promoter cis-regulatory sequences; or
d. genes and all of each gene's non-promoter cis-regulatory sequences.

21. The method of claim 1, wherein said predetermined threshold is derived from a predetermined standard regulatory effect for said non-promoter cis-regulatory sequences of said at least one potential driver gene, and wherein said predetermined standard regulatory effect is determined in any one of:
a. cells grown in culture;
b. cells from a healthy subject; and
c. cells from a subject suffering from a pathological condition.

22. (canceled)

23. The method of claim 1, further comprising confirming aberrant expression of said selected driver gene in a sample from said subject.

24. The method of claim 1, wherein said pathological condition is cancer.

25. The method of claim 24, wherein said cancer is glioblastoma.

26. The method of claim 24, wherein a potential driver gene is any one of the driver genes provided in Table 3 or any of the genes provided in Table 6 or wherein total regulatory effect on a panel of driver genes are determined, and said panel is selected from the genes provided in Table 6.

27. (canceled)

28. (canceled)

29. The method of claim 1, for diagnosing a pathological condition or increased risk of developing a pathological condition.

30. The method of claim 1, further comprising administering a medicament that targets said driver, DNA methylation, or DNA methylation machinery.

31. A kit, comprising nucleotide probes that hybridize to non-promoter cis-regulatory sequences of a plurality of genes selected from genes provided in Table 3, Table 4 or Table 6.

32. The kit of claim 31, wherein at least one of:
a. said plurality of genes is selected from the genes provided in Table 6;
b. said non-promoter cis-regulatory sequences are located between genomic positions provided in Table 4; and
c, wherein said probes are selected from SEQ ID NO: 28-38077.

33. (canceled)

34. (canceled)

35. (canceled)

36. A computer program product for determining a driver gene for a pathological condition, comprising a non-transitory computer-readable storage medium having program code embodied thereon, the program code executable by at least one hardware processor to:
a. receive measurements of DNA methylation within a plurality of non-promoter cis-regulatory sequences;
b. determine from said received measurements a total regulatory effect of non-promoter cis-regulatory sequences upon at least one potential driver gene of said pathological condition; and
c. select said at least one potential driver gene as a driver of said pathological condition when said total regulatory effect is beyond a predetermined threshold.
